United States Patent Application Publication US 2007/0042381 A1 - sequence listing, part 62

SEQ ID NO: 2816604 - RNA, 14 nt, Human
uccuaacuuuucaa

SEQ ID NO: 2816605 - RNA, 13 nt, Human
uccuaagaaauau

SEQ ID NO: 2816606 - RNA, 15 nt, Human
uccuaagaaauaugu

SEQ ID NO: 2816607 - RNA, 18 nt, Human
uccuaagaaauaugugag

SEQ ID NO: 2816608 - RNA, 19 nt, Human
uccuaagaaauaugugaga

SEQ ID NO: 2816609 - RNA, 20 nt, Human
uccuaagaaauaugugagau

SEQ ID NO: 2816610 - RNA, 23 nt, Human
uccuaagaaauaugugagauuuu

SEQ ID NO: 2816611 - RNA, 13 nt, Human
uccuaagaagcuu

SEQ ID NO: 2816612 - RNA, 15 nt, Human
uccuaagaagcuucu

SEQ ID NO: 2816613 - RNA, 16 nt, Human
uccuaagaagcuucua

SEQ ID NO: 2816614 - RNA, 19 nt, Human
uccuaagaagcuucuaaua

SEQ ID NO: 2816615 - RNA, 22 nt, Human
uccuaagaagcuucuaauaaau

SEQ ID NO: 2816616 - RNA, 13 nt, Human
uccuaagacacaa

SEQ ID NO: 2816617 - RNA, 16 nt, Human
uccuaagacacaaaug

SEQ ID NO: 2816618 - RNA, 19 nt, Human
uccuaagacacaaaugcau

SEQ ID NO: 2816619 - RNA, 15 nt, Human
uccuaagaccugggg

SEQ ID NO: 2816620 - RNA, 16 nt, Human
uccuaagaccuggggu

SEQ ID NO: 2816621 - RNA, 18 nt, Human
uccuaagaccugggguug

SEQ ID NO: 2816622 - RNA, 18 nt, Human
uccuaaagagaguauuuu

SEQ ID NO: 2816623 - RNA, 17 nt, Human
uccgguagggaggcagc

SEQ ID NO: 2816624 - RNA, 18 nt, Human
uccgguagggaggcagcc

SEQ ID NO: 2816625 - RNA, 19 nt, Human
uccgguagggaggcagccu

SEQ ID NO: 2816626 - RNA, 19 nt, Human
ucccuuucugcuuguguua

SEQ ID NO: 2816627 - RNA, 20 nt, Human
ucccuuuuuauaucccauuu

SEQ ID NO: 2816628 - RNA, 21 nt, Human
uccggcuugaccuguuucucu

SEQ ID NO: 2816629 - RNA, 20 nt, Human
accuaccacucacaugacac

SEQ ID NO: 2816630 - RNA, 15 nt, Human
accuacccauacacc

SEQ ID NO: 2816631 - RNA, 14 nt, Human
accuaccaucaggg

SEQ ID NO: 2816632 - RNA, 12 nt, Human
accuaccacaug

SEQ ID NO: 2816633 - RNA, 16 nt, Human
accuaccaccacgccc

SEQ ID NO: 2816634 - RNA, 20 nt, Human
accuaccaccacgcccggcu

SEQ ID NO: 2816635 - RNA, 15 nt, Human
accuaccacaugcca

SEQ ID NO: 2816636 - RNA, 14 nt, Human
accuaguacugccc

SEQ ID NO: 2816637 - RNA, 19 nt, Human
accucaaaaugucuaagau

SEQ ID NO: 2816638 - RNA, 16 nt, Human
accucaaacuaucugg

SEQ ID NO: 2816639 - RNA, 20 nt, Human
accucaaacuaucuggccau

SEQ ID NO: 2816640 - RNA, 14 nt, Human
accuaccaaaaugg

SEQ ID NO: 2816641 - RNA, 20 nt, Human
accuacauauuccauguuug

SEQ ID NO: 2816642 - RNA, 21 nt, Human
accuaauucgaugaaggcugc

SEQ ID NO: 2816643 - RNA, 22 nt, Human
accuaauucgaugaaggcugcc

SEQ ID NO: 2816644 - RNA, 16 nt, Human
accuacacacugucau

SEQ ID NO: 2816645 - RNA, 23 nt, Human
accuacacacugucaugcuucau

SEQ ID NO: 2816646 - RNA, 13 nt, Human
accuaaugaaagu

SEQ ID NO: 2816647 - RNA, 21 nt, Human
accuaaugaaagugaugacau

SEQ ID NO: 2816648 - RNA, 22 nt, Human
accuaaugaaagugaugacaua

SEQ ID NO: 2816649 - RNA, 13 nt, Human
ucaggaacagaag

SEQ ID NO: 2816650 - RNA, 16 nt, Human
ucaggaacagaaggau

SEQ ID NO: 2816651 - RNA, 14 nt, Human
ucaggaacagaagg

SEQ ID NO: 2816652 - RNA, 20 nt, Human
accgcgacuaauuucaaaau

SEQ ID NO: 2816653 - RNA, 15 nt, Human
accgcgucuggugac

SEQ ID NO: 2816654 - RNA, 18 nt, Human
ucaggaacagcuauggga

SEQ ID NO: 2816655 - RNA, 17 nt, Human
accgcgacuaauuucaa

SEQ ID NO: 2816656 - RNA, 16 nt, Human
accgcgacuaauuuca

SEQ ID NO: 2816657 - RNA, 15 nt, Human
accgcucaccuagag

SEQ ID NO: 2816658 - RNA, 17 nt, Human
accgcucaccuagagcc

SEQ ID NO: 2816659 - RNA, 18 nt, Human
accgcucaccuagagcca

SEQ ID NO: 2816660 - RNA, 19 nt, Human
accgcucaccuagagccag

SEQ ID NO: 2816661 - RNA, 12 nt, Human
accgcuccaggu

SEQ ID NO: 2816662 - RNA, 18 nt, Human
ucagcuuuuugucuuuuc

SEQ ID NO: 2816663 - RNA, 16 nt, Human
accuaaagguguauuu

SEQ ID NO: 2816664 - RNA, 20 nt, Human
accuaaagguguauuuaaac

SEQ ID NO: 2816665 - RNA, 18 nt, Human
accuaacauuauuuauuc

SEQ ID NO: 2816666 - RNA, 22 nt, Human
accuaaaaggaaaucucacccc

SEQ ID NO: 2816667 - RNA, 21 nt, Human
accuaaaaggaaaucucaccc

SEQ ID NO: 2816668 - RNA, 19 nt, Human
accuaaacgguucaguuuc

SEQ ID NO: 2816669 - RNA, 13 nt, Human
ucaugaagcccaa

SEQ ID NO: 2816670 - RNA, 11 nt, Human
ucaugaagccu

SEQ ID NO: 2816671 - RNA, 12 nt, Human
ucaugaagccug

SEQ ID NO: 2816672 - RNA, 13 nt, Human
ucaugaagccugu

SEQ ID NO: 2816673 - RNA, 15 nt, Human
ucaugaagccugugg

SEQ ID NO: 2816674 - RNA, 16 nt, Human
ucaugaagccugugga

SEQ ID NO: 2816675 - RNA, 16 nt, Human
ucaugaaucugcaaug

SEQ ID NO: 2816676 - RNA, 13 nt, Human
ucaucuauaaaga

SEQ ID NO: 2816677 - RNA, 23 nt, Human
ucaucuauaaagaagaacuugca

SEQ ID NO: 2816678 - RNA, 22 nt, Human
ucaucuauaguugauauguuuu

SEQ ID NO: 2816679 - RNA, 17 nt, Human
ucaucuaugaggaaagg

SEQ ID NO: 2816680 - RNA, 15 nt, Human
ucaucuauucaagca

SEQ ID NO: 2816681 - RNA, 21 nt, Human
ucaucuauucaagcacuuaca

SEQ ID NO: 2816682 - RNA, 12 nt, Human
ucaucuauuuug

SEQ ID NO: 2816683 - RNA, 13 nt, Human
ucaucuauuuuga

SEQ ID NO: 2816684 - RNA, 14 nt, Human
ucaucuauuuugau

SEQ ID NO: 2816685 - RNA, 17 nt, Human
ucaucuauuuugaugca

SEQ ID NO: 2816686 - RNA, 18 nt, Human
ucaucuauuuugaugcag

SEQ ID NO: 2816687 - RNA, 19 nt, Human
ucaucuauuuugaugcagc

SEQ ID NO: 2816688 - RNA, 20 nt, Human
ucaucuauuuugaugcagca

SEQ ID NO: 2816689 - RNA, 23 nt, Human
ucaucuauuuugaugcagcauuu

SEQ ID NO: 2816690 - RNA, 12 nt, Human
ucaugaagccca

SEQ ID NO: 2816691 - RNA, 17 nt, Human
ucauccuuggucuuugu

SEQ ID NO: 2816692 - RNA, 20 nt, Human
ucauccuuggucuuuguauc

SEQ ID NO: 2816693 - RNA, 21 nt, Human
ucauccuuggucuuuguaucu

SEQ ID NO: 2816694 - RNA, 13 nt, Human
ucauccuccagua

SEQ ID NO: 2816695 - RNA, 21 nt, Human
ucauccuccaguaccuugcuu

SEQ ID NO: 2816696 - RNA, 11 nt, Human
ucauccuccug

SEQ ID NO: 2816697 - RNA, 12 nt, Human
ucauccuccugg

SEQ ID NO: 2816698 - RNA, 13 nt, Human
ucauccuccugga

SEQ ID NO: 2816699 - RNA, 14 nt, Human
ucauccuccuggaa

SEQ ID NO: 2816700 - RNA, 15 nt, Human
ucauccuccuggaac

SEQ ID NO: 2816701 - RNA, 16 nt, Human
ucauccuccuggaacc

SEQ ID NO: 2816702 - RNA, 22 nt, Human
ucauccuccuggaaccuugcug

SEQ ID NO: 2816703 - RNA, 23 nt, Human
ucauccuccuggaaccuugcugu

SEQ ID NO: 2816704 - RNA, 16 nt, Human
ucauccugacucugcc

SEQ ID NO: 2816705 - RNA, 17 nt, Human
ucauccugacucugccc

SEQ ID NO: 2816706 - RNA, 19 nt, Human
ucauccugacucugccccc

SEQ ID NO: 2816707 - RNA, 20 nt, Human
ucauccugacucugcccccu

SEQ ID NO: 2816708 - RNA, 12 nt, Human
ucauccugcagg

SEQ ID NO: 2816709 - RNA, 13 nt, Human
ucauccugcaggc

SEQ ID NO: 2816710 - RNA, 15 nt, Human
ucauccugccuucau

SEQ ID NO: 2816711 - RNA, 17 nt, Human
ucauccugccuucaugg

SEQ ID NO: 2816712 - RNA, 23 nt, Human
ucauccugccuucauggaacuca

SEQ ID NO: 2816713 - RNA, 11 nt, Human
ucauccuggcu

SEQ ID NO: 2816714 - RNA, 15 nt, Human
ucauccugugcucgg

SEQ ID NO: 2816715 - RNA, 22 nt, Human
accucccuguucaaggccccug

SEQ ID NO: 2816716 - RNA, 13 nt, Human
accucccuuccga

SEQ ID NO: 2816717 - RNA, 18 nt, Human
accucccuuccgacccuc

SEQ ID NO: 2816718 - RNA, 22 nt, Human
accucccuuccgacccucuggg

SEQ ID NO: 2816719 - RNA, 13 nt, Human
accucccugaccc

SEQ ID NO: 2816720 - RNA, 17 nt, Human
accucccugacccgucu

SEQ ID NO: 2816721 - RNA, 12 nt, Human
accucccugccc

SEQ ID NO: 2816722 - RNA, 13 nt, Human
accucccugccca

SEQ ID NO: 2816723 - RNA, 14 nt, Human
accucccugcccag

SEQ ID NO: 2816724 - RNA, 15 nt, Human
accucccugcccagg

SEQ ID NO: 2816725 - RNA, 18 nt, Human
accucccugcccaggccg

SEQ ID NO: 2816726 - RNA, 21 nt, Human
accucccugcccaggccggcc

SEQ ID NO: 2816727 - RNA, 12 nt, Human
accuccugccuc

SEQ ID NO: 2816728 - RNA, 13 nt, Human
accuccugccucg

SEQ ID NO: 2816729 - RNA, 16 nt, Human
accucaaccaaugcca

SEQ ID NO: 2816730 - RNA, 17 nt, Human
accucaaccauccuggc

SEQ ID NO: 2816731 - RNA, 21 nt, Human
accucaaccauccuggcugcg

SEQ ID NO: 2816732 - RNA, 14 nt, Human
accucccucuuguu

SEQ ID NO: 2816733 - RNA, 18 nt, Human
accucccucuuguuuugu

SEQ ID NO: 2816734 - RNA, 22 nt, Human
accucccucuuguuuuguuugu

SEQ ID NO: 2816735 - RNA, 23 nt, Human
accucccucuuguuuuguuuguc

SEQ ID NO: 2816736 - RNA, 11 nt, Human
accucccuccc

SEQ ID NO: 2816737 - RNA, 12 nt, Human
ucaucccuuucc

SEQ ID NO: 2816738 - RNA, 13 nt, Human
ucaucccuuucca

SEQ ID NO: 2816739 - RNA, 14 nt, Human
ucaucccuuuccag

SEQ ID NO: 2816740 - RNA, 17 nt, Human
ucaucccuaaugcugca

SEQ ID NO: 2816741 - RNA, 18 nt, Human
ucaucccuaaugcugcag

SEQ ID NO: 2816742 - RNA, 15 nt, Human
ucauccuauuguuga

SEQ ID NO: 2816743 - RNA, 11 nt, Human
ucauccccuua

SEQ ID NO: 2816744 - RNA, 23 nt, Human
accuccugccucgaacuggcugc

SEQ ID NO: 2816745 - RNA, 20 nt, Human
ucaucccauuaaucauuucc

SEQ ID NO: 2816746 - RNA, 21 nt, Human
ucaucccauuaaucauuuccc

SEQ ID NO: 2816747 - RNA, 22 nt, Human
ucaucccauuaaucauuucccc

SEQ ID NO: 2816748 - RNA, 22 nt, Human
ucaucccaucuaagcugcagcu

SEQ ID NO: 2816749 - RNA, 17 nt, Human
ucaucccaugagacccu

SEQ ID NO: 2816750 - RNA, 12 nt, Human
ucauccccaggg

SEQ ID NO: 2816751 - RNA, 17 nt, Human
ucauccccucacuugcc

SEQ ID NO: 2816752 - RNA, 21 nt, Human
ucauccccaggggucccagcc

SEQ ID NO: 2816753 - RNA, 14 nt, Human
ucauccccaguccc

SEQ ID NO: 2816754 - RNA, 15 nt, Human
ucauccccaguccca

SEQ ID NO: 2816755 - RNA, 20 nt, Human
ucauccccaggggucccagc

SEQ ID NO: 2816756 - RNA, 14 nt, Human
accugaccucuugc

SEQ ID NO: 2816757 - RNA, 15 nt, Human
accugaccucuugcu

SEQ ID NO: 2816758 - RNA, 16 nt, Human
accugaccucuugcug

SEQ ID NO: 2816759 - RNA, 17 nt, Human
accugaccucuugcugu

SEQ ID NO: 2816760 - RNA, 18 nt, Human
accugaccucuugcuguc

SEQ ID NO: 2816761 - RNA, 19 nt, Human
accugaccucuugcugucu

SEQ ID NO: 2816762 - RNA, 20 nt, Human
accugaccucuugcugucuc

SEQ ID NO: 2816763 - RNA, 21 nt, Human
accugaccucuugcugucucu

SEQ ID NO: 2816764 - RNA, 22 nt, Human
accugaccucuugcugucucug

SEQ ID NO: 2816765 - RNA, 12 nt, Human
accugaaaagua

SEQ ID NO: 2816766 - RNA, 21 nt, Human
accugaaaaaaaguuuacaag

SEQ ID NO: 2816767 - RNA, 14 nt, Human
accugaaauuccaa

SEQ ID NO: 2816768 - RNA, 15 nt, Human
accugaaauuccaaa

SEQ ID NO: 2816769 - RNA, 20 nt, Human
accugacugguuaacagcag

SEQ ID NO: 2816770 - RNA, 12 nt, Human
accucucacucc

SEQ ID NO: 2816771 - RNA, 13 nt, Human
accucucacuccc

SEQ ID NO: 2816772 - RNA, 16 nt, Human
accucucacuccccau

SEQ ID NO: 2816773 - RNA, 16 nt, Human
accucuccauccugcu

SEQ ID NO: 2816774 - RNA, 13 nt, Human
accucucccaggg

SEQ ID NO: 2816775 - RNA, 11 nt, Human
accucucccac

SEQ ID NO: 2816776 - RNA, 12 nt, Human
accucucccacg

SEQ ID NO: 2816777 - RNA, 15 nt, Human
accucucccacggga

SEQ ID NO: 2816778 - RNA, 17 nt, Human
accucuuuaaguauuga

SEQ ID NO: 2816779 - RNA, 22 nt, Human
accucuuuaaguauugauucug

SEQ ID NO: 2816780 - RNA, 12 nt, Human
accucuugcugu

SEQ ID NO: 2816781 - RNA, 13 nt, Human
accucuugcuguc

SEQ ID NO: 2816782 - RNA, 14 nt, Human
accucuugcugucu

SEQ ID NO: 2816783 - RNA, 15 nt, Human
accucuugcugucuc

SEQ ID NO: 2816784 - RNA, 16 nt, Human
accucuugcugucucu

SEQ ID NO: 2816785 - RNA, 17 nt, Human
accucuugcugucucug

SEQ ID NO: 2816786 - RNA, 18 nt, Human
accucuugcugucucugc

SEQ ID NO: 2816787 - RNA, 20 nt, Human
accucuugcugucucugcuc

SEQ ID NO: 2816788 - RNA, 24 nt, Human
accucuugcugucucugcucgccc

SEQ ID NO: 2816789 - RNA, 15 nt, Human
accugaaaaaaaguu

SEQ ID NO: 2816790 - RNA, 18 nt, Human
accugaaaaaaaguuuac

SEQ ID NO: 2816791 - RNA, 19 nt, Human
accugaaaaaaaguuuaca

SEQ ID NO: 2816792 - RNA, 22 nt, Human
accugaggucgggaguuggaga

SEQ ID NO: 2816793 - RNA, 23 nt, Human
accugaggucgggaguuggagac

SEQ ID NO: 2816794 - RNA, 23 nt, Human
accugagucacccuaccugugcc

SEQ ID NO: 2816795 - RNA, 22 nt, Human
accugagucacccuaccugugc

SEQ ID NO: 2816796 - RNA, 18 nt, Human
accugaucacuagccugu

SEQ ID NO: 2816797 - RNA, 23 nt, Human
accugcacuggggagcccgucuc

SEQ ID NO: 2816798 - RNA, 18 nt, Human
accugcaucuaagcccau

SEQ ID NO: 2816799 - RNA, 17 nt, Human
accugcaucuuuagugc

SEQ ID NO: 2816800 - RNA, 19 nt, Human
accugcaggccaagagcag

SEQ ID NO: 2816801 - RNA, 17 nt, Human
accugcaggcugagcca

SEQ ID NO: 2816802 - RNA, 23 nt, Human
accugcaggcugagccacucucu

SEQ ID NO: 2816803 - RNA, 15 nt, Human
accugcaggccaaga

SEQ ID NO: 2816804 - RNA, 18 nt, Human
accuccuugucacuuuau

SEQ ID NO: 2816805 - RNA, 19 nt, Human
accuccuugucacuuuauu

SEQ ID NO: 2816806 - RNA, 13 nt, Human
accuccugggcua

SEQ ID NO: 2816807 - RNA, 23 nt, Human
ucauugcugagccucugcucccc

SEQ ID NO: 2816808 - RNA, 14 nt, Human
ucauugcuguagga

SEQ ID NO: 2816809 - RNA, 17 nt, Human
ucauugcugagccucug

SEQ ID NO: 2816810 - RNA, 22 nt, Human
ucauugcugagccucugcuccc

SEQ ID NO: 2816811 - RNA, 17 nt, Human
accuccugucucuggcc

SEQ ID NO: 2816812 - RNA, 13 nt, Human
accuccuguggaa

SEQ ID NO: 2816813 - RNA, 14 nt, Human
accuccuguggaac

SEQ ID NO: 2816814 - RNA, 15 nt, Human
accuccuguggaacc

SEQ ID NO: 2816815 - RNA, 20 nt, Human
accuccuguggaacccagca

SEQ ID NO: 2816816 - RNA, 21 nt, Human
accuccuguggaacccagcag

SEQ ID NO: 2816817 - RNA, 15 nt, Human
accuccugucucugg

SEQ ID NO: 2816818 - RNA, 16 nt, Human
accuccugucucuggc

SEQ ID NO: 2816819 - RNA, 15 nt, Human
ucauugcugagccuc

SEQ ID NO: 2816820 - RNA, 16 nt, Human
ucauugcugagccucu

SEQ ID NO: 2816821 - RNA, 15 nt, Human
ucauugauuuccugu

SEQ ID NO: 2816822 - RNA, 17 nt, Human
ucauugauuuccugugu

SEQ ID NO: 2816823 - RNA, 18 nt, Human
ucauugauuuccuguguc

SEQ ID NO: 2816824 - RNA, 19 nt, Human
ucauugauuuccuguguca

SEQ ID NO: 2816825 - RNA, 14 nt, Human
ucauugccugugua

SEQ ID NO: 2816826 - RNA, 16 nt, Human
ucauugccuguguaug

SEQ ID NO: 2816827 - RNA, 22 nt, Human
ucauugccuguguauggaaaaa

SEQ ID NO: 2816828 - RNA, 23 nt, Human
ucauugccuguguauggaaaaac

SEQ ID NO: 2816829 - RNA, 11 nt, Human
ucauugaaaug

SEQ ID NO: 2816830 - RNA, 12 nt, Human
ucauugaaaugu

SEQ ID NO: 2816831 - RNA, 14 nt, Human
ucauugaaauguca

SEQ ID NO: 2816832 - RNA, 17 nt, Human
ucauugaaaugucacgu

SEQ ID NO: 2816833 - RNA, 12 nt, Human
ucauucuucugu

SEQ ID NO: 2816834 - RNA, 15 nt, Human
ucauucuuguuuucu

SEQ ID NO: 2816835 - RNA, 21 nt, Human
ucauucuuccaagcugagagu

SEQ ID NO: 2816836 - RNA, 13 nt, Human
ucauucugcauug

SEQ ID NO: 2816837 - RNA, 16 nt, Human
ucauucugcauugcua

SEQ ID NO: 2816838 - RNA, 19 nt, Human
ucauucugcauugcuagau

SEQ ID NO: 2816839 - RNA, 22 nt, Human
ucauucugcauugcuagauaaa

SEQ ID NO: 2816840 - RNA, 16 nt, Human
ucauucugugaucauu

SEQ ID NO: 2816841 - RNA, 17 nt, Human
ucauuacucuuaaggaa

SEQ ID NO: 2816842 - RNA, 14 nt, Human
ucauuacugggccu

SEQ ID NO: 2816843 - RNA, 15 nt, Human
ucauuacugggccuu

SEQ ID NO: 2816844 - RNA, 13 nt, Human
ucauuacuugauu

SEQ ID NO: 2816845 - RNA, 15 nt, Human
ucauuacuugauuaa

SEQ ID NO: 2816846 - RNA, 21 nt, Human
ucauuacuugauuaagauuuu

SEQ ID NO: 2816847 - RNA, 16 nt, Human
ucauucucgugaguca

SEQ ID NO: 2816848 - RNA, 13 nt, Human
ucaugaugcaguc

SEQ ID NO: 2816849 - RNA, 15 nt, Human
ucaugaugcagucuc

SEQ ID NO: 2816850 - RNA, 16 nt, Human
ucaugaugcagucucc

SEQ ID NO: 2816851 - RNA, 17 nt, Human
ucaugaugcagucuccu

SEQ ID NO: 2816852 - RNA, 19 nt, Human
ucaugaugcagucuccucu

SEQ ID NO: 2816853 - RNA, 20 nt, Human
ucaugaugcagucuccucuu

SEQ ID NO: 2816854 - RNA, 21 nt, Human
ucaugaugcagucuccucuuu

SEQ ID NO: 2816855 - RNA, 22 nt, Human
ucaugaugcagucuccucuuua

SEQ ID NO: 2816856 - RNA, 23 nt, Human
ucaugaugcagucuccucuuuaa

SEQ ID NO: 2816857 - RNA, 15 nt, Human
ucaugaugcuagcca

SEQ ID NO: 2816858 - RNA, 15 nt, Human
ucauuacccuucccu

SEQ ID NO: 2816859 - RNA, 19 nt, Human
ucauuacccuucccugcac

SEQ ID NO: 2816860 - RNA, 21 nt, Human
ucauuacccuucccugcacua

SEQ ID NO: 2816861 - RNA, 22 nt, Human
ucauuaccuuuuaccagcuuuu

SEQ ID NO: 2816862 - RNA, 23 nt, Human
ucauuaccuuuuaccagcuuuua

SEQ ID NO: 2816863 - RNA, 20 nt, Human
ucauuaccuuuuuugauaaa

SEQ ID NO: 2816864 - RNA, 14 nt, Human
ucauuaauucuaua

SEQ ID NO: 2816865 - RNA, 14 nt, Human
ucauuacaaauggu

SEQ ID NO: 2816866 - RNA, 13 nt, Human
ucauuaauucuau

SEQ ID NO: 2816867 - RNA, 14 nt, Human
ucauuaauguguug

SEQ ID NO: 2816868 - RNA, 16 nt, Human
uccagggaagcuggcc

SEQ ID NO: 2816869 - RNA, 14 nt, Human
uccagggaagcugg

SEQ ID NO: 2816870 - RNA, 21 nt, Human
uccaggcuguaucccaugagc

SEQ ID NO: 2816871 - RNA, 12 nt, Human
uccagggaagcu

SEQ ID NO: 2816872 - RNA, 20 nt, Human
uccaggcuuuguacagagug

SEQ ID NO: 2816873 - RNA, 14 nt, Human
acgagaccccggcu

SEQ ID NO: 2816874 - RNA, 17 nt, Human
uccagggaagcuggccg

SEQ ID NO: 2816875 - RNA, 20 nt, Human
acgagaugggaaggcacagg

SEQ ID NO: 2816876 - RNA, 14 nt, Human
uccaggcuguaucc

SEQ ID NO: 2816877 - RNA, 21 nt, Human
uccaggccgcgcccuuucccc

SEQ ID NO: 2816878 - RNA, 20 nt, Human
uccaggccgcgcccuuuccc

SEQ ID NO: 2816879 - RNA, 18 nt, Human
uccaggccgcgcccuuuc

SEQ ID NO: 2816880 - RNA, 14 nt, Human
uccaggccugcagc

SEQ ID NO: 2816881 - RNA, 20 nt, Human
uccaggccugcagcaggagu

SEQ ID NO: 2816882 - RNA, 15 nt, Human
uccaggcccgucugu

SEQ ID NO: 2816883 - RNA, 16 nt, Human
uccaggcccgucuguc

SEQ ID NO: 2816884 - RNA, 17 nt, Human
uccaggcccgucugucc

SEQ ID NO: 2816885 - RNA, 18 nt, Human
uccaggcccgucugucca

SEQ ID NO: 2816886 - RNA, 19 nt, Human
uccaggcccgucuguccau

SEQ ID NO: 2816887 - RNA, 20 nt, Human
uccaggcccgucuguccauc

SEQ ID NO: 2816888 - RNA, 22 nt, Human
uccaggcccgucuguccaucug

SEQ ID NO: 2816889 - RNA, 23 nt, Human
uccaggcccgucuguccaucugc

SEQ ID NO: 2816890 - RNA, 17 nt, Human
uccaggcccaacuguga

SEQ ID NO: 2816891 - RNA, 14 nt, Human
uccaggcaggcuaa

SEQ ID NO: 2816892 - RNA, 16 nt, Human
uccagagaguggcucc

SEQ ID NO: 2816893 - RNA, 17 nt, Human
uccagagaguggcuccu

SEQ ID NO: 2816894 - RNA, 15 nt, Human
uccagagaguggcuc

SEQ ID NO: 2816895 - RNA, 18 nt, Human
uccaggcacaggaugcug

SEQ ID NO: 2816896 - RNA, 22 nt, Human
uccaggcacaggaugcuguguu

SEQ ID NO: 2816897 - RNA, 15 nt, Human
uccaggcaccaucuc

SEQ ID NO: 2816898 - RNA, 16 nt, Human
accuucaauuccuggg

SEQ ID NO: 2816899 - RNA, 22 nt, Human
accuuauuugcuaaucaaagcc

SEQ ID NO: 2816900 - RNA, 19 nt, Human
accuggguauguguaggca

SEQ ID NO: 2816901 - RNA, 18 nt, Human
accuuaugagaaacugca

SEQ ID NO: 2816902 - RNA, 14 nt, Human
uccacucccaggca

SEQ ID NO: 2816903 - RNA, 19 nt, Human
uccacucccaggcagcccu

SEQ ID NO: 2816904 - RNA, 15 nt, Human
uccaccuucccaugc

SEQ ID NO: 2816905 - RNA, 16 nt, Human
uccaccuucccaugcc

SEQ ID NO: 2816906 - RNA, 18 nt, Human
uccaccuucccaugcccu

SEQ ID NO: 2816907 - RNA, 19 nt, Human
uccaccuucccaugcccug

SEQ ID NO: 2816908 - RNA, 17 nt, Human
uccaccuuucagcccac

SEQ ID NO: 2816909 - RNA, 18 nt, Human
uccaccuuucagcccacg

SEQ ID NO: 2816910 - RNA, 20 nt, Human
uccaccuuucagcccacguc

SEQ ID NO: 2816911 - RNA, 16 nt, Human
uccacuggacuugagc

SEQ ID NO: 2816912 - RNA, 12 nt, Human
uccacuggacuu

SEQ ID NO: 2816913 - RNA, 10 nt, Human
uccacuggac

SEQ ID NO: 2816914 - RNA, 13 nt, Human
uccacugccucug

SEQ ID NO: 2816915 - RNA, 16 nt, Human
uccacugccucugccu

SEQ ID NO: 2816916 - RNA, 17 nt, Human
uccacugccucugccuu

SEQ ID NO: 2816917 - RNA, 18 nt, Human
uccacugccucugccuua

SEQ ID NO: 2816918 - RNA, 19 nt, Human
uccacugccucugccuuag

SEQ ID NO: 2816919 - RNA, 13 nt, Human
uccacugccuucg

SEQ ID NO: 2816920 - RNA, 15 nt, Human
uccacugccuucgau

SEQ ID NO: 2816921 - RNA, 22 nt, Human
uccacugccuucgauacaccgg

SEQ ID NO: 2816922 - RNA, 14 nt, Human
uccagacccggcug

SEQ ID NO: 2816923 - RNA, 17 nt, Human
uccacuggacuugagcu

SEQ ID NO: 2816924 - RNA, 16 nt, Human
uccacugggcacaacu

SEQ ID NO: 2816925 - RNA, 18 nt, Human
uccagaauuuggaaaucc

SEQ ID NO: 2816926 - RNA, 22 nt, Human
uccagaauuuggaaauccuagu

SEQ ID NO: 2816927 - RNA, 18 nt, Human
uccagacccggcugcgug

SEQ ID NO: 2816928 - RNA, 15 nt, Human
uccagacccggcugc

SEQ ID NO: 2816929 - RNA, 19 nt, Human
uccagacccggcugcgugg

SEQ ID NO: 2816930 - RNA, 22 nt, Human
uccagacugcuuccaauuuucu

SEQ ID NO: 2816931 - RNA, 14 nt, Human
uccagacuuccuug

SEQ ID NO: 2816932 - RNA, 23 nt, Human
uccagacugcuuccaauuuucug

SEQ ID NO: 2816933 - RNA, 19 nt, Human
uccagacuuccuugagaca

SEQ ID NO: 2816934 - RNA, 20 nt, Human
uccagacuuccuugagacac

SEQ ID NO: 2816935 - RNA, 14 nt, Human
uccaaccuaaccug

SEQ ID NO: 2816936 - RNA, 16 nt, Human
uccaaccuaaccugug

SEQ ID NO: 2816937 - RNA, 17 nt, Human
uccaaccuaaccugugu

SEQ ID NO: 2816938 - RNA, 18 nt, Human
uccaaccuaaccuguguc

SEQ ID NO: 2816939 - RNA, 19 nt, Human
uccaaccuaaccugugucu

SEQ ID NO: 2816940 - RNA, 21 nt, Human
uccaaccuaaccugugucugc

SEQ ID NO: 2816941 - RNA, 14 nt, Human
uccaacugcaacuc

SEQ ID NO: 2816942 - RNA, 13 nt, Human
uccaacuccagca

SEQ ID NO: 2816943 - RNA, 12 nt, Human
uccaacuccagc

SEQ ID NO: 2816944 - RNA, 14 nt, Human
uccaacuccagcaa

SEQ ID NO: 2816945 - RNA, 13 nt, Human
uccaacuccagga

SEQ ID NO: 2816946 - RNA, 20 nt, Human
uccaagcuggucccacucag

SEQ ID NO: 2816947 - RNA, 16 nt, Human
uccaagcuggucccac

SEQ ID NO: 2816948 - RNA, 18 nt, Human
uccaacuguguucauuag

SEQ ID NO: 2816949 - RNA, 16 nt, Human
uccaagaaagaugaau

SEQ ID NO: 2816950 - RNA, 20 nt, Human
uccaacuguauauauuccca

SEQ ID NO: 2816951 - RNA, 19 nt, Human
uccaacuguguucauuaga

SEQ ID NO: 2816952 - RNA, 18 nt, Human
uccaacuuauguuuuuaa

SEQ ID NO: 2816953 - RNA, 20 nt, Human
uccaacuuauguuuuuaaau

SEQ ID NO: 2816954 - RNA, 19 nt, Human
uccaaggaaaccacagcug

SEQ ID NO: 2816955 - RNA, 21 nt, Human
uccaagcuggucccacucagu

SEQ ID NO: 2816956 - RNA, 17 nt, Human
uccaagucucaguggcu

SEQ ID NO: 2816957 - RNA, 15 nt, Human
uccaagguuuaaaga

SEQ ID NO: 2816958 - RNA, 16 nt, Human
uccaagguuuaaagag

SEQ ID NO: 2816959 - RNA, 19 nt, Human
uccaagguuuaaagagucu

SEQ ID NO: 2816960 - RNA, 20 nt, Human
uccaagguuuaaagagucua

SEQ ID NO: 2816961 - RNA, 20 nt, Human
uccaaggaaaccacagcugc

SEQ ID NO: 2816962 - RNA, 15 nt, Human
uccaagguucccuug

SEQ ID NO: 2816963 - RNA, 16 nt, Human
uccaagguucccuugu

SEQ ID NO: 2816964 - RNA, 13 nt, Human
uccaagguuuaaa

SEQ ID NO: 2816965 - RNA, 14 nt, Human
uccaagguuuaaag

SEQ ID NO: 2816966 - RNA, 18 nt, Human
uccaaucccaccaacccu

SEQ ID NO: 2816967 - RNA, 22 nt, Human
uccaagguuuaaagagucuaga

SEQ ID NO: 2816968 - RNA, 22 nt, Human
uccaauccuggcucuguggcuu

SEQ ID NO: 2816969 - RNA, 15 nt, Human
uccaaucucaaggaa

SEQ ID NO: 2816970 - RNA, 17 nt, Human
uccaaucucaaggaauc

SEQ ID NO: 2816971 - RNA, 19 nt, Human
uccaaucucaaggaaucuu

SEQ ID NO: 2816972 - RNA, 15 nt, Human
uccaacccaugauga

SEQ ID NO: 2816973 - RNA, 21 nt, Human
accugccagccuggcuucugg

SEQ ID NO: 2816974 - RNA, 18 nt, Human
accugccagccuggcuuc

SEQ ID NO: 2816975 - RNA, 16 nt, Human
accugccagccuggcu

SEQ ID NO: 2816976 - RNA, 22 nt, Human
uccaacccaugaugagcuccuc

SEQ ID NO: 2816977 - RNA, 17 nt, Human
uccaaccccccaccugc

SEQ ID NO: 2816978 - RNA, 21 nt, Human
accugcauuuguauguguccc

SEQ ID NO: 2816979 - RNA, 15 nt, Human
accugccagccuggc

SEQ ID NO: 2816980 - RNA, 14 nt, Human
accugccagccugg

SEQ ID NO: 2816981 - RNA, 16 nt, Human
accuuaaacaccccuc

SEQ ID NO: 2816982 - RNA, 22 nt, Human
accuuaaacaccccucaguugu

SEQ ID NO: 2816983 - RNA, 21 nt, Human
accuggucacaggacucugcc

SEQ ID NO: 2816984 - RNA, 17 nt, Human
accuguuuuuuuuucau

SEQ ID NO: 2816985 - RNA, 18 nt, Human
accuguuuuuuuuucauu

SEQ ID NO: 2816986 - RNA, 18 nt, Human
accuguuuucgcaccuac

SEQ ID NO: 2816987 - RNA, 21 nt, Human
accuguuuaugagaugcuggu

SEQ ID NO: 2816988 - RNA, 15 nt, Human
accuguuucucugcc

SEQ ID NO: 2816989 - RNA, 22 nt, Human
accuggguucccuuuccuucca

SEQ ID NO: 2816990 - RNA, 17 nt, Human
accuggguucccuuucc

SEQ ID NO: 2816991 - RNA, 16 nt, Human
accugguacccuccug

SEQ ID NO: 2816992 - RNA, 18 nt, Human
accugguacccuccuggc

SEQ ID NO: 2816993 - RNA, 19 nt, Human
accugguacccuccuggcu

SEQ ID NO: 2816994 - RNA, 17 nt, Human
accugguacucccucuc

SEQ ID NO: 2816995 - RNA, 21 nt, Human
accugguacucccucucagga

SEQ ID NO: 2816996 - RNA, 15 nt, Human
uccacccaggagccc

SEQ ID NO: 2816997 - RNA, 14 nt, Human
uccacccaggagcc

SEQ ID NO: 2816998 - RNA, 12 nt, Human
uccacccaggag

SEQ ID NO: 2816999 - RNA, 19 nt, Human
uccacccaccucagccucc

SEQ ID NO: 2817000 - RNA, 18 nt, Human
uccacccaccucagccuc

SEQ ID NO: 2817001 - RNA, 17 nt, Human
uccacccaccucagccu

SEQ ID NO: 2817002 - RNA, 17 nt, Human
uccaaguccaauaagac

SEQ ID NO: 2817003 - RNA, 21 nt, Human
acugcauguaccauuugcaug

SEQ ID NO: 2817004 - RNA, 21 nt, Human
acugcauggagacgcauuucg

SEQ ID NO: 2817005 - RNA, 15 nt, Human
acugcauuauucucu

SEQ ID NO: 2817006 - RNA, 20 nt, Human
acugcauuauucucuuuuau

SEQ ID NO: 2817007 - RNA, 19 nt, Human
acugccucgaaacacagaa

SEQ ID NO: 2817008 - RNA, 17 nt, Human
acugccucgaaacacag

SEQ ID NO: 2817009 - RNA, 21 nt, Human
acugcauugacuuucaguaaa

SEQ ID NO: 2817010 - RNA, 12 nt, Human
acugccugggcu

SEQ ID NO: 2817011 - RNA, 11 nt, Human
acugccugggc

SEQ ID NO: 2817012 - RNA, 13 nt, Human
acugccuguauac

SEQ ID NO: 2817013 - RNA, 14 nt, Human
acugccuguauacu

SEQ ID NO: 2817014 - RNA, 15 nt, Human
acugccuguauacuu

SEQ ID NO: 2817015 - RNA, 16 nt, Human
acugccuguauacuuu

SEQ ID NO: 2817016 - RNA, 17 nt, Human
acugccuguauacuuua

SEQ ID NO: 2817017 - RNA, 18 nt, Human
acugccuguauacuuuag

SEQ ID NO: 2817018 - RNA, 19 nt, Human
acugccuguauacuuuagu

SEQ ID NO: 2817019 - RNA, 20 nt, Human
acugccuguauacuuuagua

SEQ ID NO: 2817020 - RNA, 17 nt, Human
acugccugauggaccug

SEQ ID NO: 2817021 - RNA, 20 nt, Human
acugccugauggaccuguca

SEQ ID NO: 2817022 - RNA, 10 nt, Human
acugccucug

SEQ ID NO: 2817023 - RNA, 11 nt, Human
acugccucugc

SEQ ID NO: 2817024 - RNA, 12 nt, Human
acugccucugcc

SEQ ID NO: 2817025 - RNA, 13 nt, Human
acugccucugcca

SEQ ID NO: 2817026 - RNA, 14 nt, Human
acugccucugccac

SEQ ID NO: 2817027 - RNA, 15 nt, Human
acugccucugccaca

SEQ ID NO: 2817028 - RNA, 13 nt, Human
acugccucugccu

SEQ ID NO: 2817029 - RNA, 15 nt, Human
acugccucugccuua

SEQ ID NO: 2817030 - RNA, 18 nt, Human
acugccucugccuuagag

SEQ ID NO: 2817031 - RNA, 22 nt, Human
acugccucugccuuagaggagc

SEQ ID NO: 2817032 - RNA, 14 nt, Human
acugccucuuccuc

SEQ ID NO: 2817033 - RNA, 15 nt, Human
acugccucuuccucc

SEQ ID NO: 2817034 - RNA, 22 nt, Human
acugcauaccaaccugggcaau

SEQ ID NO: 2817035 - RNA, 20 nt, Human
acugcauaccaaccugggca

SEQ ID NO: 2817036 - RNA, 17 nt, Human
uccuagagaacgcagcc

SEQ ID NO: 2817037 - RNA, 18 nt, Human
uccuagagaacgcagccc

SEQ ID NO: 2817038 - RNA, 19 nt, Human
uccuagagaacgcagcccu

SEQ ID NO: 2817039 - RNA, 23 nt, Human
uccuagagaacgcagcccuagag

SEQ ID NO: 2817040 - RNA, 23 nt, Human
acugcauccuccgccucccgggu

SEQ ID NO: 2817041 - RNA, 20 nt, Human
acugcauccuccgccucccg

SEQ ID NO: 2817042 - RNA, 17 nt, Human
acugcauccuccgccuc

SEQ ID NO: 2817043 - RNA, 14 nt, Human
acugcguucugcaa

SEQ ID NO: 2817044 - RNA, 20 nt, Human
acugcguucugcaagcauca

SEQ ID NO: 2817045 - RNA, 18 nt, Human
acugcuccccagcccugg

SEQ ID NO: 2817046 - RNA, 19 nt, Human
acugcuccccagcccuggc

SEQ ID NO: 2817047 - RNA, 20 nt, Human
acugcuccccagcccuggcu

SEQ ID NO: 2817048 - RNA, 21 nt, Human
acugcuccccagcccuggcuc

SEQ ID NO: 2817049 - RNA, 20 nt, Human
acugcucccuaagccagccu

SEQ ID NO: 2817050 - RNA, 21 nt, Human
acugcucccuaagccagccug

SEQ ID NO: 2817051 - RNA, 23 nt, Human
acugcucccuaagccagccuggu

SEQ ID NO: 2817052 - RNA, 14 nt, Human
acugcuggcugccu

SEQ ID NO: 2817053 - RNA, 15 nt, Human
acugcuggcugccuu

SEQ ID NO: 2817054 - RNA, 23 nt, Human
acugcucccugaagccagccuuc

SEQ ID NO: 2817055 - RNA, 15 nt, Human
acugcucccugaagc

SEQ ID NO: 2817056 - RNA, 16 nt, Human
acugcucccugaagcc

SEQ ID NO: 2817057 - RNA, 17 nt, Human
acugcucccugaagcca

SEQ ID NO: 2817058 - RNA, 18 nt, Human
acugcucccugaagccag

SEQ ID NO: 2817059 - RNA, 19 nt, Human
acugcucccugaagccagc

SEQ ID NO: 2817060 - RNA, 20 nt, Human
acugcucccugaagccagcc

SEQ ID NO: 2817061 - RNA, 21 nt, Human
acugcucccugaagccagccu

SEQ ID NO: 2817062 - RNA, 22 nt, Human
acugcucccugaagccagccuu

SEQ ID NO: 2817063 - RNA, 19 nt, Human
acugcugggacuggccagg

SEQ ID NO: 2817064 - RNA, 18 nt, Human
acugcugggacuggccag

SEQ ID NO: 2817065 - RNA, 13 nt, Human
acugcugggacug

SEQ ID NO: 2817066 - RNA, 17 nt, Human
acugcuuacuuaugcca

SEQ ID NO: 2817067 - RNA, 19 nt, Human
acuggcaauugucuauuua

SEQ ID NO: 2817068 - RNA, 13 nt, Human
acuggcauuuuau

SEQ ID NO: 2817069 - RNA, 14 nt, Human
acuggcauuuuaua

SEQ ID NO: 2817070 - RNA, 18 nt, Human
acuggcauuuuauagaca

SEQ ID NO: 2817071 - RNA, 23 nt, Human
acuggcauuuuauagacacccug

SEQ ID NO: 2817072 - RNA, 19 nt, Human
acuggaguucuaugcucuc

SEQ ID NO: 2817073 - RNA, 13 nt, Human
acuggaguucuau

SEQ ID NO: 2817074 - RNA, 15 nt, Human
acuggaguucuaugc

SEQ ID NO: 2817075 - RNA, 14 nt, Human
acugcuuuuggccu

SEQ ID NO: 2817076 - RNA, 15 nt, Human
acugcuuuuggccug

SEQ ID NO: 2817077 - RNA, 17 nt, Human
acugcuuuuggccugga

SEQ ID NO: 2817078 - RNA, 22 nt, Human
acugcuuugggauuuaauuucc

SEQ ID NO: 2817079 - RNA, 23 nt, Human
acugcuuugggauuuaauuucca

SEQ ID NO: 2817080 - RNA, 13 nt, Human
ucgcuaugugcac

SEQ ID NO: 2817081 - RNA, 21 nt, Human
ucgcucccacauucugaugag

SEQ ID NO: 2817082 - RNA, 16 nt, Human
acuggcugugugaccu

SEQ ID NO: 2817083 - RNA, 21 nt, Human
acuggcugugugaccuuaggc

SEQ ID NO: 2817084 - RNA, 14 nt, Human
ucgcgcucugcuca

SEQ ID NO: 2817085 - RNA, 15 nt, Human
ucgcgcucugcucag

SEQ ID NO: 2817086 - RNA, 16 nt, Human
ucgcggcggagcuggc

SEQ ID NO: 2817087 - RNA, 18 nt, Human
ucgcggcggagcuggccc

SEQ ID NO: 2817088 - RNA, 19 nt, Human
ucgcggcggagcuggcccc

SEQ ID NO: 2817089 - RNA, 20 nt, Human
ucgcggcggagcuggccccg

SEQ ID NO: 2817090 - RNA, 18 nt, Human
ucgcucaaucaagaaaau

SEQ ID NO: 2817091 - RNA, 18 nt, Human
ucgcuauugucaccaggg

SEQ ID NO: 2817092 - RNA, 20 nt, Human
ucgcgugcccucgcugcuuc

SEQ ID NO: 2817093 - RNA, 16 nt, Human
ucgcgugcccucgcug

SEQ ID NO: 2817094 - RNA, 18 nt, Human
ucgcgugcccucgcugcu

SEQ ID NO: 2817095 - RNA, 14 nt, Human
ucgagcuuggggca

SEQ ID NO: 2817096 - RNA, 21 nt, Human
ucgcuacuggcauaguuucau

SEQ ID NO: 2817097 - RNA, 22 nt, Human
ucgcgaugggaaccgauggugg

SEQ ID NO: 2817098 - RNA, 17 nt, Human
ucgcgcccgccccugca

SEQ ID NO: 2817099 - RNA, 19 nt, Human
ucgcgcccgccccugcagc

SEQ ID NO: 2817100 - RNA, 14 nt, Human
ucgagacugcaaug

SEQ ID NO: 2817101 - RNA, 23 nt, Human
uccuuuagcgcccaguugggugg

SEQ ID NO: 2817102 - RNA, 22 nt, Human
uccuuuagcgcccaguugggug

SEQ ID NO: 2817103 - RNA, 23 nt, Human
uccuuucucagccgcuucugacu

SEQ ID NO: 2817104 - RNA, 14 nt, Human
uccuuucucagccg

SEQ ID NO: 2817105 - RNA, 11 nt, Human
uccuuucuauc

SEQ ID NO: 2817106 - RNA, 16 nt, Human
uccuuucugccgaccc

SEQ ID NO: 2817107 - RNA, 13 nt, Human
uccuuucugugcc

SEQ ID NO: 2817108 - RNA, 16 nt, Human
uccuuucugugcccua

SEQ ID NO: 2817109 - RNA, 17 nt, Human
uccuuucugugcccuac

SEQ ID NO: 2817110 - RNA, 13 nt, Human
uccuuucuccagg

SEQ ID NO: 2817111 - RNA, 15 nt, Human
uccuuucuccaggac

SEQ ID NO: 2817112 - RNA, 17 nt, Human
uccuuucuccaggacca

SEQ ID NO: 2817113 - RNA, 13 nt, Human
uccuuucucuuuc

SEQ ID NO: 2817114 - RNA, 15 nt, Human
uccuuucucuuucuc

SEQ ID NO: 2817115 - RNA, 23 nt, Human
uccuuucucuuucucucuucccu

SEQ ID NO: 2817116 - RNA, 15 nt, Human
uccuuucuuucuaac

SEQ ID NO: 2817117 - RNA, 13 nt, Human
ucgagaccagccu

SEQ ID NO: 2817118 - RNA, 17 nt, Human
ucgagaccagccuggcc

SEQ ID NO: 2817119 - RNA, 16 nt, Human
ucgagaccagccuggc

SEQ ID NO: 2817120 - RNA, 14 nt, Human
ucgagaccagccug

SEQ ID NO: 2817121 - RNA, 15 nt, Human
ucgagaccagccugg

SEQ ID NO: 2817122 - RNA, 18 nt, Human
ucgagaccagccuggcca

SEQ ID NO: 2817123 - RNA, 19 nt, Human
ucgagaccagccuggccaa

SEQ ID NO: 2817124 - RNA, 18 nt, Human
ucgagaccagccugggca

SEQ ID NO: 2817125 - RNA, 15 nt, Human
ucgaaugaaaagaca

SEQ ID NO: 2817126 - RNA, 15 nt, Human
ucgaauuaauagcuu

SEQ ID NO: 2817127 - RNA, 15 nt, Human
ucgaauuaagaauau

SEQ ID NO: 2817128 - RNA, 20 nt, Human
ucgaaucuacuaauuccaca

SEQ ID NO: 2817129 - RNA, 12 nt, Human
ucgacuuuucuu

SEQ ID NO: 2817130 - RNA, 14 nt, Human
ucgacuuuucuuaa

SEQ ID NO: 2817131 - RNA, 16 nt, Human
ucgaauuaauagcuuu

SEQ ID NO: 2817132 - RNA, 21 nt, Human
ucgaauuaauagcuuuuauug

SEQ ID NO: 2817133 - RNA, 13 nt, Human
uccuugucacugg

SEQ ID NO: 2817134 - RNA, 15 nt, Human
uccuuguccacccac

SEQ ID NO: 2817135 - RNA, 16 nt, Human
uccuuguccacccacc

SEQ ID NO: 2817136 - RNA, 13 nt, Human
uccuuguggcaga

SEQ ID NO: 2817137 - RNA, 14 nt, Human
uccuuguggcagag

SEQ ID NO: 2817138 - RNA, 15 nt, Human
uccuuguggcagagg

SEQ ID NO: 2817139 - RNA, 12 nt, Human
uccuugugcaaa

SEQ ID NO: 2817140 - RNA, 23 nt, Human
uccuugugcaaaauauuugacua

SEQ ID NO: 2817141 - RNA, 18 nt, Human
uccuuguggccugggccu

SEQ ID NO: 2817142 - RNA, 19 nt, Human
uccuuguggccugggccuc

SEQ ID NO: 2817143 - RNA, 15 nt, Human
uccuucucugaacac

SEQ ID NO: 2817144 - RNA, 18 nt, Human
uccuucucugaacacagg

SEQ ID NO: 2817145 - RNA, 20 nt, Human
uccuucucugaacacaggca

SEQ ID NO: 2817146 - RNA, 21 nt, Human
uccuucucugaacacaggcag

SEQ ID NO: 2817147 - RNA, 22 nt, Human
uccuucucugaacacaggcagc

SEQ ID NO: 2817148 - RNA, 23 nt, Human
uccuucucugaacacaggcagcu

SEQ ID NO: 2817149 - RNA, 12 nt, Human
uccuucucccuu

SEQ ID NO: 2817150 - RNA, 14 nt, Human
uccuucuccacccc

SEQ ID NO: 2817151 - RNA, 19 nt, Human
uccuuccuugcuguccuag

SEQ ID NO: 2817152 - RNA, 23 nt, Human
uccuuccuuguuacccaugaaaa

SEQ ID NO: 2817153 - RNA, 17 nt, Human
uccuucguaucccgagu

SEQ ID NO: 2817154 - RNA, 23 nt, Human
uccuucguaucccgagucuggga

SEQ ID NO: 2817155 - RNA, 21 nt, Human
uccuucgugaacauccccucc

SEQ ID NO: 2817156 - RNA, 23 nt, Human
uccuucgugaacauccccuccca

SEQ ID NO: 2817157 - RNA, 17 nt, Human
uccuuuaaauccuucca

SEQ ID NO: 2817158 - RNA, 22 nt, Human
uccuuguuucaaacacaaaugc

SEQ ID NO: 2817159 - RNA, 16 nt, Human
uccuuuaaaaaaauuu

SEQ ID NO: 2817160 - RNA, 22 nt, Human
uccuuuaaaaaaauuuaagugc

SEQ ID NO: 2817161 - RNA, 15 nt, Human
uccuuuaaaaaagaa

SEQ ID NO: 2817162 - RNA, 18 nt, Human
uccuuuaaaaaagaaaag

SEQ ID NO: 2817163 - RNA, 16 nt, Human
uccuuuaaagaugaac

SEQ ID NO: 2817164 - RNA, 14 nt, Human
uccuuguuguuggu

SEQ ID NO: 2817165 - RNA, 13 nt, Human
uccuuguuucaaa

SEQ ID NO: 2817166 - RNA, 14 nt, Human
uccuuguuucaaac

SEQ ID NO: 2817167 - RNA, 13 nt, Human
uccuuguuuauca

SEQ ID NO: 2817168 - RNA, 20 nt, Human
uccuuguuuaucagauacau

SEQ ID NO: 2817169 - RNA, 21 nt, Human
uccuuguuuaucagauacauc

SEQ ID NO: 2817170 - RNA, 23 nt, Human
uccuuguuuaucagauacaucac

SEQ ID NO: 2817171 - RNA, 19 nt, Human
uccuuuagcgcccaguugg

SEQ ID NO: 2817172 - RNA, 15 nt, Human
uccuuuagcgcccag

SEQ ID NO: 2817173 - RNA, 14 nt, Human
uccuuuacguguuu

SEQ ID NO: 2817174 - RNA, 16 nt, Human
uccuuuacguguuuaa

SEQ ID NO: 2817175 - RNA, 13 nt, Human
uccuuuacuuucc

SEQ ID NO: 2817176 - RNA, 15 nt, Human
uccuuuacuuucccu

SEQ ID NO: 2817177 - RNA, 17 nt, Human
uccuuuacuuucccuug

SEQ ID NO: 2817178 - RNA, 18 nt, Human
uccuuuacuuucccuugc

SEQ ID NO: 2817179 - RNA, 20 nt, Human
uccuuuacuuucccuugcuu

SEQ ID NO: 2817180 - RNA, 21 nt, Human
uccuuuaauuuuuuacuauuu

SEQ ID NO: 2817181 - RNA, 12 nt, Human
uccuuuacaaaa

SEQ ID NO: 2817182 - RNA, 15 nt, Human
uccuuuacaaaagaa

SEQ ID NO: 2817183 - RNA, 21 nt, Human
uccuuuacaaaagaaauaccu

SEQ ID NO: 2817184 - RNA, 22 nt, Human
uccuuuacaaaagaaauaccuu

SEQ ID NO: 2817185 - RNA, 21 nt, Human
uccuuuaaaaaaauuuaagug

SEQ ID NO: 2817186 - RNA, 19 nt, Human
uccuuguuacccaugaaaa

SEQ ID NO: 2817187 - RNA, 21 nt, Human
uccuuuaauuaagacugaaaa

SEQ ID NO: 2817188 - RNA, 13 nt, Human
uccuuccaggccc

SEQ ID NO: 2817189 - RNA, 12 nt, Human
uccuuccaccuc

SEQ ID NO: 2817190 - RNA, 21 nt, Human
uccuuccaggcccccaccacu

SEQ ID NO: 2817191 - RNA, 16 nt, Human
uccuuccaggccccca

SEQ ID NO: 2817192 - RNA, 13 nt, Human
uccuuccaugaaa

SEQ ID NO: 2817193 - RNA, 17 nt, Human
uccuuccaucccuaccc

SEQ ID NO: 2817194 - RNA, 16 nt, Human
uccuuccaucccuacc

SEQ ID NO: 2817195 - RNA, 22 nt, Human
uccuucccaaguaagaggcugg

SEQ ID NO: 2817196 - RNA, 17 nt, Human
acuggccccugggucag

SEQ ID NO: 2817197 - RNA, 14 nt, Human
acuggccucugcug

SEQ ID NO: 2817198 - RNA, 22 nt, Human
acuggccauuugccaauuuucc

SEQ ID NO: 2817199 - RNA, 19 nt, Human
acuggccccggaucagagc

SEQ ID NO: 2817200 - RNA, 20 nt, Human
acuggccccggaucagagca

SEQ ID NO: 2817201 - RNA, 21 nt, Human
acuggccccggaucagagcag

SEQ ID NO: 2817202 - RNA, 14 nt, Human
acuggccccugggu

SEQ ID NO: 2817203 - RNA, 15 nt, Human
acuggccccuggguc

SEQ ID NO: 2817204 - RNA, 12 nt, Human
acuggccccugg

SEQ ID NO: 2817205 - RNA, 13 nt, Human
acuggccccuggg

SEQ ID NO: 2817206 - RNA, 12 nt, Human
ucuaaagcucug

SEQ ID NO: 2817207 - RNA, 14 nt, Human
ucuaaagcucugac

SEQ ID NO: 2817208 - RNA, 12 nt, Human
ucuaagcugcag

SEQ ID NO: 2817209 - RNA, 14 nt, Human
ucuaagcugcagcu

SEQ ID NO: 2817210 - RNA, 15 nt, Human
ucuaagcugcagcuu

SEQ ID NO: 2817211 - RNA, 17 nt, Human
ucuaagcugcagcuucc

SEQ ID NO: 2817212 - RNA, 18 nt, Human
ucuaagcugcagcuuccu

SEQ ID NO: 2817213 - RNA, 19 nt, Human
ucuaagcugcagcuuccug

SEQ ID NO: 2817214 - RNA, 17 nt, Human
ucuaaggaccugaaauu

SEQ ID NO: 2817215 - RNA, 21 nt, Human
ucuaaggaccugaaauuccaa

SEQ ID NO: 2817216 - RNA, 19 nt, Human
ucuaaggaugucacagggc

SEQ ID NO: 2817217 - RNA, 23 nt, Human
ucuaaggaccugaaauuccaaag

SEQ ID NO: 2817218 - RNA, 23 nt, Human
ucuaaggaugucacagggccaac

SEQ ID NO: 2817219 - RNA, 20 nt, Human
ucuaaggaugucacagggcc

SEQ ID NO: 2817220 - RNA, 18 nt, Human
ucuaaggccuaggauucu

SEQ ID NO: 2817221 - RNA, 19 nt, Human
ucuaaggccuaggauucua

SEQ ID NO: 2817222 - RNA, 20 nt, Human
ucuaaggccuaggauucuaa

SEQ ID NO: 2817223 - RNA, 23 nt, Human
ucuaaggcucugagagucuagau

SEQ ID NO: 2817224 - RNA, 16 nt, Human
ucuaaggcuguuugcu

SEQ ID NO: 2817225 - RNA, 14 nt, Human
ucuaagggggaggg

SEQ ID NO: 2817226 - RNA, 22 nt, Human
ucuaaggcucugagagucuaga

SEQ ID NO: 2817227 - RNA, 20 nt, Human
ucuaagguccgguguucuaa

SEQ ID NO: 2817228 - RNA, 21 nt, Human
ucuaaggccuaggauucuaaa

SEQ ID NO: 2817229 - RNA, 22 nt, Human
ucuaaggccuaggauucuaaaa

SEQ ID NO: 2817230 - RNA, 13 nt, Human
ucuaaggcucuga

SEQ ID NO: 2817231 - RNA, 14 nt, Human
ucuaaggcucugag

SEQ ID NO: 2817232 - RNA, 15 nt, Human
ucuaaggcucugaga

SEQ ID NO: 2817233 - RNA, 16 nt, Human
ucuaaggcucugagag

SEQ ID NO: 2817234 - RNA, 17 nt, Human
ucuaaggcucugagagu

SEQ ID NO: 2817235 - RNA, 20 nt, Human
ucuaaggcucugagagucua

SEQ ID NO: 2817236 - RNA, 20 nt, Human
ucuacauaaguaauucaaga

SEQ ID NO: 2817237 - RNA, 17 nt, Human
ucuacauaaguaauuca

SEQ ID NO: 2817238 - RNA, 22 nt, Human
ucuaagguccgguguucuaaga

SEQ ID NO: 2817239 - RNA, 23 nt, Human
ucuaagguccgguguucuaagau

SEQ ID NO: 2817240 - RNA, 22 nt, Human
ucuacauaaguaauucaagaaa

SEQ ID NO: 2817241 - RNA, 20 nt, Human
ucuaccaagcuauccuggcu

SEQ ID NO: 2817242 - RNA, 18 nt, Human
ucuaccauuucagagagg

SEQ ID NO: 2817243 - RNA, 15 nt, Human
ucuaccauuucagag

SEQ ID NO: 2817244 - RNA, 14 nt, Human
ucuaccauuucaga

SEQ ID NO: 2817245 - RNA, 19 nt, Human
ucuaccaugaacagaaaac

SEQ ID NO: 2817246 - RNA, 20 nt, Human
ucuaccagugcaggcuggcc

SEQ ID NO: 2817247 - RNA, 21 nt, Human
ucuaccagugcaggcuggcca

SEQ ID NO: 2817248 - RNA, 22 nt, Human
ucuaccagugcaggcuggccag

SEQ ID NO: 2817249 - RNA, 23 nt, Human
ucuaccagugcaggcuggccagc

SEQ ID NO: 2817250 - RNA, 20 nt, Human
acuguuaccuaaaguauuuu

SEQ ID NO: 2817251 - RNA, 20 nt, Human
ucuacccaagggcagaaagu

SEQ ID NO: 2817252 - RNA, 14 nt, Human
ucuacccaaacccu

SEQ ID NO: 2817253 - RNA, 16 nt, Human
ucuacccaaacccuag

SEQ ID NO: 2817254 - RNA, 22 nt, Human
ucuacccaaacccuagguuccc

SEQ ID NO: 2817255 - RNA, 19 nt, Human
acuguuaugaaauaaagaa

SEQ ID NO: 2817256 - RNA, 23 nt, Human
acuguuaugaaauaaagaaauug

SEQ ID NO: 2817257 - RNA, 20 nt, Human
acuguuagaaaauggacacu

SEQ ID NO: 2817258 - RNA, 13 nt, Human
acuguuagcacug

SEQ ID NO: 2817259 - RNA, 14 nt, Human
acuguuagcacugu

SEQ ID NO: 2817260 - RNA, 15 nt, Human
acuguuagcacuguu

SEQ ID NO: 2817261 - RNA, 16 nt, Human
acuguuagcacuguug

SEQ ID NO: 2817262 - RNA, 17 nt, Human
acuguuagcacuguuga

SEQ ID NO: 2817263 - RNA, 18 nt, Human
acuguuagcacuguugau

SEQ ID NO: 2817264 - RNA, 21 nt, Human
acuguuagcacuguugaugua

SEQ ID NO: 2817265 - RNA, 13 nt, Human
acuguuagcuuuu

SEQ ID NO: 2817266 - RNA, 20 nt, Human
acuguuagcuuuuuaaaaca

SEQ ID NO: 2817267 - RNA, 21 nt, Human
acuguuagcuuuuuaaaacau

SEQ ID NO: 2817268 - RNA, 13 nt, Human
acuguucuaaagc

SEQ ID NO: 2817269 - RNA, 14 nt, Human
acuguucuaaagcu

SEQ ID NO: 2817270 - RNA, 16 nt, Human
acuguucuaaagcucu

SEQ ID NO: 2817271 - RNA, 17 nt, Human
acuguucuaaagcucug

SEQ ID NO: 2817272 - RNA, 18 nt, Human
acuguucuaaagcucuga

SEQ ID NO: 2817273 - RNA, 21 nt, Human
acuguucuaaagcucugacau

SEQ ID NO: 2817274 - RNA, 18 nt, Human
acuguucucccuucggug

SEQ ID NO: 2817275 - RNA, 20 nt, Human
acuguuguaacuaggcucag

SEQ ID NO: 2817276 - RNA, 21 nt, Human
acuuaauacuaccuugaaaau

SEQ ID NO: 2817277 - RNA, 19 nt, Human
acuuaauacuaccuugaaa

SEQ ID NO: 2817278 - RNA, 18 nt, Human
acuuaauacuaccuugaa

SEQ ID NO: 2817279 - RNA, 17 nt, Human
acuuaauacuaccuuga

SEQ ID NO: 2817280 - RNA, 14 nt, Human
acuguugcccaggc

SEQ ID NO: 2817281 - RNA, 13 nt, Human
acuguugcccagg

SEQ ID NO: 2817282 - RNA, 12 nt, Human
acuguugcccag

SEQ ID NO: 2817283 - RNA, 13 nt, Human
acuguucuguguc

SEQ ID NO: 2817284 - RNA, 15 nt, Human
acuguucugugucuu

SEQ ID NO: 2817285 - RNA, 16 nt, Human
acuguucugugucuuu

SEQ ID NO: 2817286 - RNA, 17 nt, Human
acuguucugugucuuuc

SEQ ID NO: 2817287 - RNA, 18 nt, Human
acuguugcccaggcuggc

SEQ ID NO: 2817288 - RNA, 17 nt, Human
acuguugcccaggcugg

SEQ ID NO: 2817289 - RNA, 15 nt, Human
acuuaauagaaacau

SEQ ID NO: 2817290 - RNA, 14 nt, Human
acuuaauagaaaca

SEQ ID NO: 2817291 - RNA, 21 nt, Human
acuuaccuaagugacauuugu

SEQ ID NO: 2817292 - RNA, 12 nt, Human
acuuacuauuuu

SEQ ID NO: 2817293 - RNA, 22 nt, Human
acuuacuaaaauauauauagaa

SEQ ID NO: 2817294 - RNA, 17 nt, Human
acuuacuaaaauauaua

SEQ ID NO: 2817295 - RNA, 14 nt, Human
acuuaccauuugcu

SEQ ID NO: 2817296 - RNA, 21 nt, Human
acuuacauucucuaauaagaa

SEQ ID NO: 2817297 - RNA, 18 nt, Human
acuuagugacaaaauaga

SEQ ID NO: 2817298 - RNA, 22 nt, Human
acuuagaaggauugaacuucuu

SEQ ID NO: 2817299 - RNA, 15 nt, Human
acuuacuuuuguaaa

SEQ ID NO: 2817300 - RNA, 15 nt, Human
acuuagaaagcaggg

SEQ ID NO: 2817301 - RNA, 16 nt, Human
acuuagaaauugcauu

SEQ ID NO: 2817302 - RNA, 16 nt, Human
acuuagaaagcagggg

SEQ ID NO: 2817303 - RNA, 19 nt, Human
acuuagaaagcaggggcua

SEQ ID NO: 2817304 - RNA, 23 nt, Human
acuuauaagugaagugauacuau

SEQ ID NO: 2817305 - RNA, 19 nt, Human
acuuauaaaucauauugau

SEQ ID NO: 2817306 - RNA, 20 nt, Human
acuuauaaaucauauugaug

SEQ ID NO: 2817307 - RNA, 13 nt, Human
acuuauaaggugu

SEQ ID NO: 2817308 - RNA, 22 nt, Human
acuuauaagguguuuucugugu

SEQ ID NO: 2817309 - RNA, 23 nt, Human
acuuauaagguguuuucugugua

SEQ ID NO: 2817310 - RNA, 11 nt, Human
acuuauaccug

SEQ ID NO: 2817311 - RNA, 14 nt, Human
acuucagcucuguu

SEQ ID NO: 2817312 - RNA, 12 nt, Human
acuuauauugaa

SEQ ID NO: 2817313 - RNA, 13 nt, Human
acuuauauugaag

SEQ ID NO: 2817314 - RNA, 16 nt, Human
acuuauauugaagaca

SEQ ID NO: 2817315 - RNA, 18 nt, Human
acuuauaguacaugauaa

SEQ ID NO: 2817316 - RNA, 17 nt, Human
acuuauaguacaugaua

SEQ ID NO: 2817317 - RNA, 15 nt, Human
acuuauaguacauga

SEQ ID NO: 2817318 - RNA, 14 nt, Human
acuuauaguacaug

SEQ ID NO: 2817319 - RNA, 15 nt, Human
acugucacucauugc

SEQ ID NO: 2817320 - RNA, 24 nt, Human
acugucacucauugcugagccucu

SEQ ID NO: 2817321 - RNA, 15 nt, Human
acugucacuguuccu

SEQ ID NO: 2817322 - RNA, 23 nt, Human
acugucacucauugcugagccuc

SEQ ID NO: 2817323 - RNA, 17 nt, Human
acuguccuacccacccu

SEQ ID NO: 2817324 - RNA, 23 nt, Human
acuguccuacccacccuccuuuc

SEQ ID NO: 2817325 - RNA, 18 nt, Human
acuguccuacccacccuc

SEQ ID NO: 2817326 - RNA, 12 nt, Human
acugucccuccu

SEQ ID NO: 2817327 - RNA, 13 nt, Human
acugucccuccug

SEQ ID NO: 2817328 - RNA, 14 nt, Human
acugucccuccugg

SEQ ID NO: 2817329 - RNA, 15 nt, Human
acugucccuccuggu

SEQ ID NO: 2817330 - RNA, 16 nt, Human
acugucccuccuggug

SEQ ID NO: 2817331 - RNA, 17 nt, Human
acugucccuccuggugu

SEQ ID NO: 2817332 - RNA, 21 nt, Human
acugucccuccuggugucacc

SEQ ID NO: 2817333 - RNA, 12 nt, Human
acuguggaggaa

SEQ ID NO: 2817334 - RNA, 15 nt, Human
acuguggaggaagga

SEQ ID NO: 2817335 - RNA, 16 nt, Human
acuguggaggaaggau

SEQ ID NO: 2817336 - RNA, 17 nt, Human
acuguggaggaaggauu

SEQ ID NO: 2817337 - RNA, 17 nt, Human
acugugguaaaugccac

SEQ ID NO: 2817338 - RNA, 18 nt, Human
acugugguaaaugccaca

SEQ ID NO: 2817339 - RNA, 15 nt, Human
acuguggguguguga

SEQ ID NO: 2817340 - RNA, 20 nt, Human
acugugggugugugacucuu

SEQ ID NO: 2817341 - RNA, 15 nt, Human
acuguguaauauaaa

SEQ ID NO: 2817342 - RNA, 21 nt, Human
acuguguaauauaaaagaucu

SEQ ID NO: 2817343 - RNA, 22 nt, Human
acuguguaauauaaaagaucuu

SEQ ID NO: 2817344 - RNA, 14 nt, Human
acuguguacauaau

SEQ ID NO: 2817345 - RNA, 23 nt, Human
acuguguacauaaugcuuaauuu

SEQ ID NO: 2817346 - RNA, 22 nt, Human
acuguguacuguauagacaguu

SEQ ID NO: 2817347 - RNA, 19 nt, Human
acuguguaaaauguaaugc

SEQ ID NO: 2817348 - RNA, 23 nt, Human
acuguguacaguaaauggcuuau

SEQ ID NO: 2817349 - RNA, 12 nt, Human
acuguguauaga

SEQ ID NO: 2817350 - RNA, 18 nt, Human
acugugucauaaacagau

SEQ ID NO: 2817351 - RNA, 21 nt, Human
ucgguaaguugaauggccugc

SEQ ID NO: 2817352 - RNA, 19 nt, Human
ucgggcaggggcuggaggg

SEQ ID NO: 2817353 - RNA, 15 nt, Human
ucgggcaccagccag

SEQ ID NO: 2817354 - RNA, 16 nt, Human
ucgggcaccagccagc

SEQ ID NO: 2817355 - RNA, 17 nt, Human
ucgggcaccagccagcg

SEQ ID NO: 2817356 - RNA, 17 nt, Human
ucggcuuuucucagcug

SEQ ID NO: 2817357 - RNA, 18 nt, Human
ucggcucacugcauccuc

SEQ ID NO: 2817358 - RNA, 16 nt, Human
acuguguguaauuguu

SEQ ID NO: 2817359 - RNA, 17 nt, Human
acuguguguaauuguuc

SEQ ID NO: 2817360 - RNA, 13 nt, Human
acuguguggaacu

SEQ ID NO: 2817361 - RNA, 13 nt, Human
ucggcucugggug

SEQ ID NO: 2817362 - RNA, 14 nt, Human
ucggcucugggugg

SEQ ID NO: 2817363 - RNA, 19 nt, Human
ucggcuccccauguguccu

SEQ ID NO: 2817364 - RNA, 12 nt, Human
ucggucaccuug

SEQ ID NO: 2817365 - RNA, 13 nt, Human
ucggucaccuugu

SEQ ID NO: 2817366 - RNA, 22 nt, Human
ucgguggagacuaucagcccaa

SEQ ID NO: 2817367 - RNA, 19 nt, Human
ucgguuuuuuuccuguuuc

SEQ ID NO: 2817368 - RNA, 17 nt, Human
ucguuugaaucacagua

SEQ ID NO: 2817369 - RNA, 12 nt, Human
ucguuucuguau

SEQ ID NO: 2817370 - RNA, 13 nt, Human
ucguuucuguaua

SEQ ID NO: 2817371 - RNA, 18 nt, Human
ucuaaaaaacagaggcca

SEQ ID NO: 2817372 - RNA, 18 nt, Human
ucuaaaaagauuagcaag

SEQ ID NO: 2817373 - RNA, 14 nt, Human
ucuaaaaacaccaa

SEQ ID NO: 2817374 - RNA, 13 nt, Human
ucguuuuccaaac

SEQ ID NO: 2817375 - RNA, 20 nt, Human
ucguuuuccaaacugacuca

SEQ ID NO: 2817376 - RNA, 18 nt, Human
ucguuuuuauauuaaugu

SEQ ID NO: 2817377 - RNA, 11 nt, Human
ucuaaaacucc

SEQ ID NO: 2817378 - RNA, 12 nt, Human
ucuaaaagcacc

SEQ ID NO: 2817379 - RNA, 16 nt, Human
ucuaaaagcagaaaau

SEQ ID NO: 2817380 - RNA, 17 nt, Human
ucuaaaagcagaaaaua

SEQ ID NO: 2817381 - RNA, 22 nt, Human
ucuaaaagaauauucagagaau

SEQ ID NO: 2817382 - RNA, 12 nt, Human
ucuaaaagacuu

SEQ ID NO: 2817383 - RNA, 13 nt, Human
ucuaaaagacuuc

SEQ ID NO: 2817384 - RNA, 22 nt, Human
ucuaaaaauaaaccaaaggaca

SEQ ID NO: 2817385 - RNA, 13 nt, Human
ucuaaaaguguca

SEQ ID NO: 2817386 - RNA, 21 nt, Human
ucuaaaagugucaccuuuucu

SEQ ID NO: 2817387 - RNA, 15 nt, Human
ucuaaaaucuuauag

SEQ ID NO: 2817388 - RNA, 18 nt, Human
ucuaaaaucuuauaguuc

SEQ ID NO: 2817389 - RNA, 19 nt, Human
ucuaaaaucuuauaguucu

SEQ ID NO: 2817390 - RNA, 22 nt, Human
ucuaaaaucuuauaguucuagg

SEQ ID NO: 2817391 - RNA, 18 nt, Human
ucuaaagauggaguuucu

SEQ ID NO: 2817392 - RNA, 23 nt, Human
ucuaaaaucuuauaguucuaggc

SEQ ID NO: 2817393 - RNA, 19 nt, Human
ucuaaagauggaguuucua

SEQ ID NO: 2817394 - RNA, 20 nt, Human
ucuaaagauggaguuucuaa

SEQ ID NO: 2817395 - RNA, 21 nt, Human
ucuaaagauggaguuucuaag

SEQ ID NO: 2817396 - RNA, 22 nt, Human
ucuaaagauggaguuucuaagg

SEQ ID NO: 2817397 - RNA, 23 nt, Human
ucuaaagauggaguuucuaaggu

SEQ ID NO: 2817398 - RNA, 13 nt, Human
ucuaaagauucua

SEQ ID NO: 2817399 - RNA, 15 nt, Human
ucuaaagauucuaua

SEQ ID NO: 2817400 - RNA, 16 nt, Human
ucuaaagauucuauag

SEQ ID NO: 2817401 - RNA, 20 nt, Human
ucuaaagauucuauaguucu

SEQ ID NO: 2817402 - RNA, 22 nt, Human
ucuaaagauucuauaguucuag

SEQ ID NO: 2817403 - RNA, 23 nt, Human
ucuaaagauucuauaguucuaga

SEQ ID NO: 2817404 - RNA, 14 nt, Human
agaaaggaacauuu

SEQ ID NO: 2817405 - RNA, 23 nt, Human
ucugaagucacaucacaggacac

SEQ ID NO: 2817406 - RNA, 22 nt, Human
ucugaagucacaucacaggaca

SEQ ID NO: 2817407 - RNA, 20 nt, Human
ucugaagucacaucacagga

SEQ ID NO: 2817408 - RNA, 17 nt, Human
ucugaagucacaucaca

SEQ ID NO: 2817409 - RNA, 12 nt, Human
ucugaagcaugu

SEQ ID NO: 2817410 - RNA, 13 nt, Human
ucugaagcauguu

SEQ ID NO: 2817411 - RNA, 14 nt, Human
ucugaagcauguuu

SEQ ID NO: 2817412 - RNA, 21 nt, Human
ucugaagcauguuucauguuu

SEQ ID NO: 2817413 - RNA, 16 nt, Human
ucugaagcccucccag

SEQ ID NO: 2817414 - RNA, 15 nt, Human
ucugaagcauguuuc

SEQ ID NO: 2817415 - RNA, 20 nt, Human
ucugaagcauguuucauguu

SEQ ID NO: 2817416 - RNA, 22 nt, Human
agaaaucccuguuuaauauuua

SEQ ID NO: 2817417 - RNA, 18 nt, Human
agaaauccugcaaugaaa

SEQ ID NO: 2817418 - RNA, 12 nt, Human
ucugaacuuugg

SEQ ID NO: 2817419 - RNA, 13 nt, Human
ucugaacuuugga

SEQ ID NO: 2817420 - RNA, 15 nt, Human
ucugaacuuuggaga

SEQ ID NO: 2817421 - RNA, 17 nt, Human
ucugaacuuuggagagu

SEQ ID NO: 2817422 - RNA, 14 nt, Human
ucugaacuuuggga

SEQ ID NO: 2817423 - RNA, 15 nt, Human
ucugaacuuugggaa

SEQ ID NO: 2817424 - RNA, 16 nt, Human
ucugaacuuugggaag

SEQ ID NO: 2817425 - RNA, 21 nt, Human
ucugaacuuugggaagccuuu

SEQ ID NO: 2817426 - RNA, 18 nt, Human
ucugaagucacugcacag

SEQ ID NO: 2817427 - RNA, 15 nt, Human
ucugaagucacugca

SEQ ID NO: 2817428 - RNA, 16 nt, Human
ucugaagucacugcac

SEQ ID NO: 2817429 - RNA, 17 nt, Human
ucugaauuugcccuggg

SEQ ID NO: 2817430 - RNA, 18 nt, Human
ucugaauuugcccuggga

SEQ ID NO: 2817431 - RNA, 19 nt, Human
ucugaauuugcccugggaa

SEQ ID NO: 2817432 - RNA, 20 nt, Human
ucugaauuugcccugggaaa

SEQ ID NO: 2817433 - RNA, 13 nt, Human
ucugaagcaaggc

SEQ ID NO: 2817434 - RNA, 21 nt, Human
ucugaccugcaggccaagagc

SEQ ID NO: 2817435 - RNA, 15 nt, Human
ucugaccuucagcuc

SEQ ID NO: 2817436 - RNA, 21 nt, Human
ucugaccuucagcucacgcuu

SEQ ID NO: 2817437 - RNA, 22 nt, Human
ucugacgcaaaaccacuuuccu

SEQ ID NO: 2817438 - RNA, 13 nt, Human
ucugacggcccug

SEQ ID NO: 2817439 - RNA, 14 nt, Human
ucugacggcccugc

SEQ ID NO: 2817440 - RNA, 15 nt, Human
ucugacggcccugca

SEQ ID NO: 2817441 - RNA, 16 nt, Human
ucugacggcccugcaa

SEQ ID NO: 2817442 - RNA, 17 nt, Human
ucugacggcccugcaau

SEQ ID NO: 2817443 - RNA, 19 nt, Human
ucugaccugcaggccaaga

SEQ ID NO: 2817444 - RNA, 17 nt, Human
ucugaccugcaggccaa

SEQ ID NO: 2817445 - RNA, 16 nt, Human
ucugaccugcaggcca

SEQ ID NO: 2817446 - RNA, 12 nt, Human
ucugacaagggc

SEQ ID NO: 2817447 - RNA, 13 nt, Human
ucugacaagggcu

SEQ ID NO: 2817448 - RNA, 16 nt, Human
ucugacaagggcugac

SEQ ID NO: 2817449 - RNA, 20 nt, Human
ucugacaagggcugaccugc

SEQ ID NO: 2817450 - RNA, 23 nt, Human
ucugacaagggcugaccugccuc

SEQ ID NO: 2817451 - RNA, 15 nt, Human
ucugaccugcaggcc

SEQ ID NO: 2817452 - RNA, 16 nt, Human
ucugacaacagacuuc

SEQ ID NO: 2817453 - RNA, 15 nt, Human
ucugacaacagacuu

SEQ ID NO: 2817454 - RNA, 14 nt, Human
ucugacaaacugug

SEQ ID NO: 2817455 - RNA, 17 nt, Human
agaaaucaaagagagaa

SEQ ID NO: 2817456 - RNA, 13 nt, Human
agaaauauauaua

SEQ ID NO: 2817457 - RNA, 15 nt, Human
agaaauauauauaca

SEQ ID NO: 2817458 - RNA, 16 nt, Human
agaaauauauauacau

SEQ ID NO: 2817459 - RNA, 17 nt, Human
agaaauauauauacaua

SEQ ID NO: 2817460 - RNA, 18 nt, Human
agaaauauauauacauau

SEQ ID NO: 2817461 - RNA, 19 nt, Human
agaaauauauauacauaug

SEQ ID NO: 2817462 - RNA, 20 nt, Human
agaaauauauauacauaugu

SEQ ID NO: 2817463 - RNA, 18 nt, Human
agaaaucaguaauauuua

SEQ ID NO: 2817464 - RNA, 19 nt, Human
agaaaucccuguuuaauau

SEQ ID NO: 2817465 - RNA, 16 nt, Human
agaaauccauaucuua

SEQ ID NO: 2817466 - RNA, 21 nt, Human
agaaauccauaucuuaaagaa

SEQ ID NO: 2817467 - RNA, 18 nt, Human
agaaauauaauaaaaugu

SEQ ID NO: 2817468 - RNA, 20 nt, Human
agaaauauaauaaaaugugu

SEQ ID NO: 2817469 - RNA, 20 nt, Human
agaaagcugguaaacuauuu

SEQ ID NO: 2817470 - RNA, 16 nt, Human
agaaagcugugaacag

SEQ ID NO: 2817471 - RNA, 22 nt, Human
agaaagcugugaacaggcuggg

SEQ ID NO: 2817472 - RNA, 16 nt, Human
agaaagcugguaaacu

SEQ ID NO: 2817473 - RNA, 19 nt, Human
agaaagcugguaaacuauu

SEQ ID NO: 2817474 - RNA, 16 nt, Human
agaaaggaaaaccuga

SEQ ID NO: 2817475 - RNA, 20 nt, Human
agaaaggaaaaccugaagac

SEQ ID NO: 2817476 - RNA, 14 nt, Human
agaaagcugacauu

SEQ ID NO: 2817477 - RNA, 22 nt, Human
agaaacuuuuaucuauucugag

SEQ ID NO: 2817478 - RNA, 23 nt, Human
agaaacuuuuaucuauucugaga

SEQ ID NO: 2817479 - RNA, 12 nt, Human
agaaacuuuugu

SEQ ID NO: 2817480 - RNA, 13 nt, Human
agaaacuuuugua

SEQ ID NO: 2817481 - RNA, 15 nt, Human
agaaacuuuuguaaa

SEQ ID NO: 2817482 - RNA, 16 nt, Human
agaaacuuuuguaaag

SEQ ID NO: 2817483 - RNA, 17 nt, Human
agaaacuuuuguaaaga

SEQ ID NO: 2817484 - RNA, 23 nt, Human
agaaacuuuuguaaagaaauuua

SEQ ID NO: 2817485 - RNA, 15 nt, Human
agaaacuuuauacau

SEQ ID NO: 2817486 - RNA, 16 nt, Human
agaaacuuuauacauu

SEQ ID NO: 2817487 - RNA, 18 nt, Human
agaaacuuuauacauuag

SEQ ID NO: 2817488 - RNA, 22 nt, Human
agaaacuuuauacauuaguaaa

SEQ ID NO: 2817489 - RNA, 15 nt, Human
ucugcagcccugaga

SEQ ID NO: 2817490 - RNA, 13 nt, Human
ucugcagccuuga

SEQ ID NO: 2817491 - RNA, 12 nt, Human
ucugcagcugcc

SEQ ID NO: 2817492 - RNA, 13 nt, Human
ucugcagcugccg

SEQ ID NO: 2817493 - RNA, 14 nt, Human
ucugcagcugccgg

SEQ ID NO: 2817494 - RNA, 14 nt, Human
agaaauuauuuaau

SEQ ID NO: 2817495 - RNA, 16 nt, Human
agaaauuauuuaauaa

SEQ ID NO: 2817496 - RNA, 17 nt, Human
agaaauuauuuaauaaa

SEQ ID NO: 2817497 - RNA, 14 nt, Human
ucugacuacuuugc

SEQ ID NO: 2817498 - RNA, 13 nt, Human
ucugacuaauuag

SEQ ID NO: 2817499 - RNA, 15 nt, Human
ucugacuaauuaggc

SEQ ID NO: 2817500 - RNA, 12 nt, Human
ucugaguuaugu

SEQ ID NO: 2817501 - RNA, 19 nt, Human
ucugagagcaaagugaccu

SEQ ID NO: 2817502 - RNA, 19 nt, Human
ucugaguugccaagacaaa

SEQ ID NO: 2817503 - RNA, 21 nt, Human
ucugaguugccaagacaaauc

SEQ ID NO: 2817504 - RNA, 15 nt, Human
ucugaguuucauucu

SEQ ID NO: 2817505 - RNA, 20 nt, Human
ucugaguuucauucuccugc

SEQ ID NO: 2817506 - RNA, 22 nt, Human
ucugaguuucauucuccugccu

SEQ ID NO: 2817507 - RNA, 15 nt, Human
ucugauuagcuuugu

SEQ ID NO: 2817508 - RNA, 16 nt, Human
ucugauuagcuuugug

SEQ ID NO: 2817509 - RNA, 17 nt, Human
ucugauuagcuuugugu

SEQ ID NO: 2817510 - RNA, 18 nt, Human
ucugauuagcuuuguguu

SEQ ID NO: 2817511 - RNA, 21 nt, Human
ucugauuagcuuuguguuugg

SEQ ID NO: 2817512 - RNA, 14 nt, Human
ucugaugucucuaa

SEQ ID NO: 2817513 - RNA, 20 nt, Human
ucugaugucucuaaagcacu

SEQ ID NO: 2817514 - RNA, 24 nt, Human
ucugaguuucauucuccugccugu

SEQ ID NO: 2817515 - RNA, 13 nt, Human
ucugauggcuucu

SEQ ID NO: 2817516 - RNA, 15 nt, Human
ucugauggcuucucc

SEQ ID NO: 2817517 - RNA, 18 nt, Human
ucugauggcuucuccagg

SEQ ID NO: 2817518 - RNA, 23 nt, Human
ucugaugcaagcaagaaacacug

SEQ ID NO: 2817519 - RNA, 18 nt, Human
ucugauggaccuucuaga

SEQ ID NO: 2817520 - RNA, 19 nt, Human
ucugauggaccuucuagaa

SEQ ID NO: 2817521 - RNA, 17 nt, Human
agaaacuaauugacuuu

SEQ ID NO: 2817522 - RNA, 19 nt, Human
agaaacucaaugcacaaca

SEQ ID NO: 2817523 - RNA, 15 nt, Human
agaaacgucuucuaa

SEQ ID NO: 2817524 - RNA, 21 nt, Human
agaaacgaguuggugucuuuc

SEQ ID NO: 2817525 - RNA, 18 nt, Human
agaaaccuuuuuaaaaau

SEQ ID NO: 2817526 - RNA, 21 nt, Human
agaaacgucuucuaaacuucc

SEQ ID NO: 2817527 - RNA, 19 nt, Human
agaaacgcaacaagaaacu

SEQ ID NO: 2817528 - RNA, 15 nt, Human
agaaacgcauccagc

SEQ ID NO: 2817529 - RNA, 18 nt, Human
agaaacgcauccagcaag

SEQ ID NO: 2817530 - RNA, 18 nt, Human
agaaacgucuucuaaacu

SEQ ID NO: 2817531 - RNA, 16 nt, Human
agaaacgucuucuaaa

SEQ ID NO: 2817532 - RNA, 17 nt, Human
agaaaccuuaauaugug

SEQ ID NO: 2817533 - RNA, 12 nt, Human
agaaacacugcc

SEQ ID NO: 2817534 - RNA, 11 nt, Human
agaaacacugc

SEQ ID NO: 2817535 - RNA, 15 nt, Human
agaaacacugccuuu

SEQ ID NO: 2817536 - RNA, 14 nt, Human
agaaacacuugaac

SEQ ID NO: 2817537 - RNA, 15 nt, Human
agaaacacuuucucu

SEQ ID NO: 2817538 - RNA, 12 nt, Human
agaaacagaaga

SEQ ID NO: 2817539 - RNA, 13 nt, Human
agaaacacugccu

SEQ ID NO: 2817540 - RNA, 14 nt, Human
agaaacagauacca

SEQ ID NO: 2817541 - RNA, 15 nt, Human
agaaacagauaccau

SEQ ID NO: 2817542 - RNA, 16 nt, Human
agaaacagauaccaua

SEQ ID NO: 2817543 - RNA, 21 nt, Human
agaaacagauaccauacucau

SEQ ID NO: 2817544 - RNA, 11 nt, Human
agaaacagcuu

SEQ ID NO: 2817545 - RNA, 15 nt, Human
agaaacagcuuucaa

SEQ ID NO: 2817546 - RNA, 16 nt, Human
agaaacagcuuucaag

SEQ ID NO: 2817547 - RNA, 17 nt, Human
agaaacagcuuucaagu

SEQ ID NO: 2817548 - RNA, 19 nt, Human
agaaacagcuuucaagugc

SEQ ID NO: 2817549 - RNA, 20 nt, Human
agaaacagcuuucaagugcc

SEQ ID NO: 2817550 - RNA, 20 nt, Human
agaaaaagcuccuguccucc

SEQ ID NO: 2817551 - RNA, 19 nt, Human
agaaaacuuuaaaaaauau

SEQ ID NO: 2817552 - RNA, 20 nt, Human
agaaaacuuuaaaaaauauu

SEQ ID NO: 2817553 - RNA, 22 nt, Human
agaaaacuuuaaaaaauauuua

SEQ ID NO: 2817554 - RNA, 20 nt, Human
agaaaagaacguauuuuaaa

SEQ ID NO: 2817555 - RNA, 9 nt, Human
agaaaagag

SEQ ID NO: 2817556 - RNA, 13 nt, Human
agaaaagagaaga

SEQ ID NO: 2817557 - RNA, 14 nt, Human
agaaaagagaagaa

SEQ ID NO: 2817558 - RNA, 15 nt, Human
agaaaagagaagaag

SEQ ID NO: 2817559 - RNA, 15 nt, Human
ucucuugagcuggcc

SEQ ID NO: 2817560 - RNA, 14 nt, Human
ucucuugagcuggc

SEQ ID NO: 2817561 - RNA, 17 nt, Human
ucucuugagcuggccuc

SEQ ID NO: 2817562 - RNA, 16 nt, Human
ucucuugagcuggccu

SEQ ID NO: 2817563 - RNA, 18 nt, Human
ucucuugaggccaggagu

SEQ ID NO: 2817564 - RNA, 21 nt, Human
ucucuuuaaugucacaggcag

SEQ ID NO: 2817565 - RNA, 20 nt, Human
ucucuuuaaugucacaggca

SEQ ID NO: 2817566 - RNA, 13 nt, Human
ucucuugcuuucu

SEQ ID NO: 2817567 - RNA, 21 nt, Human
ucucuuuaagggcaugccuug

SEQ ID NO: 2817568 - RNA, 22 nt, Human
ucucuuuaagggcaugccuugu

SEQ ID NO: 2817569 - RNA, 14 nt, Human
ucucuuuaaaaugc

SEQ ID NO: 2817570 - RNA, 23 nt, Human
ucucuugggaacugaacucacuu

SEQ ID NO: 2817571 - RNA, 16 nt, Human
ucucuugggaacugaa

SEQ ID NO: 2817572 - RNA, 22 nt, Human
ucucuugccgaggagccaggca

SEQ ID NO: 2817573 - RNA, 14 nt, Human
ucucuggaugccug

SEQ ID NO: 2817574 - RNA, 15 nt, Human
ucucuggaugccuga

SEQ ID NO: 2817575 - RNA, 11 nt, Human
ucucugcugua

SEQ ID NO: 2817576 - RNA, 19 nt, Human
ucucugcuggcccagccaa

SEQ ID NO: 2817577 - RNA, 16 nt, Human
ucucugcuggcccagc

SEQ ID NO: 2817578 - RNA, 15 nt, Human
ucucugcuggcccag

SEQ ID NO: 2817579 - RNA, 14 nt, Human
ucucugcuggccca

SEQ ID NO: 2817580 - RNA, 12 nt, Human
ucucugcuggcc

SEQ ID NO: 2817581 - RNA, 12 nt, Human
ucucugcugccg

SEQ ID NO: 2817582 - RNA, 13 nt, Human
ucucugcugccgc

SEQ ID NO: 2817583 - RNA, 11 nt, Human
ucucugcugcc

SEQ ID NO: 2817584 - RNA, 18 nt, Human
ucucucccucucccuguc

SEQ ID NO: 2817585 - RNA, 11 nt, Human
ucucucccugc

SEQ ID NO: 2817586 - RNA, 15 nt, Human
ucucucccugccaga

SEQ ID NO: 2817587 - RNA, 22 nt, Human
ucucucccugccagaggggaag

SEQ ID NO: 2817588 - RNA, 21 nt, Human
ucucucccuccccugccauuu

SEQ ID NO: 2817589 - RNA, 20 nt, Human
ucucuccuguaagccaaaga

SEQ ID NO: 2817590 - RNA, 14 nt, Human
ucucuccugcggga

SEQ ID NO: 2817591 - RNA, 23 nt, Human
ucucucauccuccaguaccuugc

SEQ ID NO: 2817592 - RNA, 16 nt, Human
ucucucaauaugcuua

SEQ ID NO: 2817593 - RNA, 19 nt, Human
acuuucucuucauacuuuu

SEQ ID NO: 2817594 - RNA, 20 nt, Human
ucucucaauaugcuuacaaa

SEQ ID NO: 2817595 - RNA, 13 nt, Human
acuugaacaaaag

SEQ ID NO: 2817596 - RNA, 15 nt, Human
acuugaacaaaaggg

SEQ ID NO: 2817597 - RNA, 16 nt, Human
acuugaacaaaagggu

SEQ ID NO: 2817598 - RNA, 17 nt, Human
acuugaacaaaaggguc

SEQ ID NO: 2817599 - RNA, 18 nt, Human
acuugaacaaaaggguca

SEQ ID NO: 2817600 - RNA, 20 nt, Human
acuugaacaaaagggucaga

SEQ ID NO: 2817601 - RNA, 21 nt, Human
acuugaacaaaagggucagag

SEQ ID NO: 2817602 - RNA, 17 nt, Human
acuugaacaaaaucugu

SEQ ID NO: 2817603 - RNA, 19 nt, Human
acuugaacaaaaucuguug

SEQ ID NO: 2817604 - RNA, 16 nt, Human
acuucuccacccugcu

SEQ ID NO: 2817605 - RNA, 15 nt, Human
acuucuccacccugc

SEQ ID NO: 2817606 - RNA, 21 nt, Human
acuugagcgugaaucuguauc

SEQ ID NO: 2817607 - RNA, 19 nt, Human
acuugagauguaugaaggc

SEQ ID NO: 2817608 - RNA, 21 nt, Human
acuugagauguaugaaggcuu

SEQ ID NO: 2817609 - RNA, 22 nt, Human
acuugagauguaugaaggcuuu

SEQ ID NO: 2817610 - RNA, 22 nt, Human
acuugaagucuaaaagcagaaa

SEQ ID NO: 2817611 - RNA, 19 nt, Human
acuugaauaauaguaugag

SEQ ID NO: 2817612 - RNA, 17 nt, Human
acuuggcuacacaggga

SEQ ID NO: 2817613 - RNA, 18 nt, Human
acuugucacugacacaaa

SEQ ID NO: 2817614 - RNA, 20 nt, Human
acuugucacugacacaaagg

SEQ ID NO: 2817615 - RNA, 21 nt, Human
acuugucacugacacaaagga

SEQ ID NO: 2817616 - RNA, 22 nt, Human
acuugucacugacacaaaggaa

SEQ ID NO: 2817617 - RNA, 14 nt, Human
acuugucacuugca

SEQ ID NO: 2817618 - RNA, 15 nt, Human
acuugucacuugcau

SEQ ID NO: 2817619 - RNA, 16 nt, Human
acuugucacuugcaug

SEQ ID NO: 2817620 - RNA, 17 nt, Human
acuugucacuugcaugu

SEQ ID NO: 2817621 - RNA, 18 nt, Human
acuugucacuugcauguc

SEQ ID NO: 2817622 - RNA, 13 nt, Human
acuugucauguga

SEQ ID NO: 2817623 - RNA, 18 nt, Human
acuuguggacacagcucu

SEQ ID NO: 2817624 - RNA, 17 nt, Human
acuuguggacacagcuc

SEQ ID NO: 2817625 - RNA, 16 nt, Human
acuuguggacacagcu

SEQ ID NO: 2817626 - RNA, 12 nt, Human
acuugccugggu

SEQ ID NO: 2817627 - RNA, 14 nt, Human
acuugccuggguca

SEQ ID NO: 2817628 - RNA, 21 nt, Human
acuugccuuccuaagccugug

SEQ ID NO: 2817629 - RNA, 24 nt, Human
acuugccuuccuaagccuguggcu

SEQ ID NO: 2817630 - RNA, 13 nt, Human
acuugccuggguc

SEQ ID NO: 2817631 - RNA, 14 nt, Human
acuugcgcagaaaa

SEQ ID NO: 2817632 - RNA, 14 nt, Human
acuugcuacccuga

SEQ ID NO: 2817633 - RNA, 18 nt, Human
acuuggcaucagcuggcg

SEQ ID NO: 2817634 - RNA, 15 nt, Human
acuuggcaacagaag

SEQ ID NO: 2817635 - RNA, 16 nt, Human
acuuggcaacagaagc

SEQ ID NO: 2817636 - RNA, 16 nt, Human
acuucuaaaugaagug

SEQ ID NO: 2817637 - RNA, 15 nt, Human
acuucuaaaugaagu

SEQ ID NO: 2817638 - RNA, 18 nt, Human
acuucgucuucuaauuuc

SEQ ID NO: 2817639 - RNA, 15 nt, Human
acuucgucuucuaau

SEQ ID NO: 2817640 - RNA, 19 nt, Human
acuucgucuucuaauuuca

SEQ ID NO: 2817641 - RNA, 20 nt, Human
acuucgucuucuaauuucaa

SEQ ID NO: 2817642 - RNA, 14 nt, Human
acuucuccacccug

SEQ ID NO: 2817643 - RNA, 15 nt, Human
acuucucaucacaca

SEQ ID NO: 2817644 - RNA, 16 nt, Human
acuucucaucacacac

SEQ ID NO: 2817645 - RNA, 17 nt, Human
acuucucaucacacaca

SEQ ID NO: 2817646 - RNA, 18 nt, Human
acuucucaucacacacau

SEQ ID NO: 2817647 - RNA, 19 nt, Human
acuucucaucacacacaug

SEQ ID NO: 2817648 - RNA, 11 nt, Human
acuucuaauau

SEQ ID NO: 2817649 - RNA, 15 nt, Human
acuucuaauauauuu

SEQ ID NO: 2817650 - RNA, 22 nt, Human
acuucuaauauauuuuuauauu

SEQ ID NO: 2817651 - RNA, 15 nt, Human
acuucuaauaucauu

SEQ ID NO: 2817652 - RNA, 16 nt, Human
acuucuaauaucauuc

SEQ ID NO: 2817653 - RNA, 12 nt, Human
ucucacucuguc

SEQ ID NO: 2817654 - RNA, 23 nt, Human
ucucacucugcccccccccccca

SEQ ID NO: 2817655 - RNA, 20 nt, Human
ucucacuccuuuuggugugu

SEQ ID NO: 2817656 - RNA, 23 nt, Human
ucucacuccuuuugguguguugg

SEQ ID NO: 2817657 - RNA, 20 nt, Human
ucucacucuaggaguucagu

SEQ ID NO: 2817658 - RNA, 18 nt, Human
ucucacuccuaccuggua

SEQ ID NO: 2817659 - RNA, 16 nt, Human
acuucgggcuguguaa

SEQ ID NO: 2817660 - RNA, 17 nt, Human
acuucgggcuguguaaa

SEQ ID NO: 2817661 - RNA, 20 nt, Human
acuuccuuuaaagaugaacu

SEQ ID NO: 2817662 - RNA, 14 nt, Human
acuuccuugagaca

SEQ ID NO: 2817663 - RNA, 22 nt, Human
acuuccuugagacacggagccc

SEQ ID NO: 2817664 - RNA, 22 nt, Human
acuuccuuacuaagcauagcaa

SEQ ID NO: 2817665 - RNA, 15 nt, Human
acuuccugugacuuc

SEQ ID NO: 2817666 - RNA, 15 nt, Human
ucucacuaaacuuua

SEQ ID NO: 2817667 - RNA, 17 nt, Human
ucucacuaaacuuuacc

SEQ ID NO: 2817668 - RNA, 21 nt, Human
ucucacgggcaugggcacucc

SEQ ID NO: 2817669 - RNA, 22 nt, Human
ucucacgggcaugggcacuccc

SEQ ID NO: 2817670 - RNA, 23 nt, Human
ucucacgggcaugggcacucccu

SEQ ID NO: 2817671 - RNA, 13 nt, Human
ucucacuaaacuu

SEQ ID NO: 2817672 - RNA, 14 nt, Human
ucucaccucugugc

SEQ ID NO: 2817673 - RNA, 19 nt, Human
ucucaccucugugccucug

SEQ ID NO: 2817674 - RNA, 16 nt, Human
ucucacagcacaugcu

SEQ ID NO: 2817675 - RNA, 17 nt, Human
ucucacagcacaugcug

SEQ ID NO: 2817676 - RNA, 20 nt, Human
ucucacagcacaugcuggcc

SEQ ID NO: 2817677 - RNA, 23 nt, Human
ucucacagcacaugcuggccagc

SEQ ID NO: 2817678 - RNA, 16 nt, Human
ucucacagaugugacu

SEQ ID NO: 2817679 - RNA, 11 nt, Human
ucucacagcac

SEQ ID NO: 2817680 - RNA, 23 nt, Human
ucucacacugguucucaaugaaa

SEQ ID NO: 2817681 - RNA, 22 nt, Human
ucucacacugguucucaaugaa

SEQ ID NO: 2817682 - RNA, 21 nt, Human
ucucacacugguucucaauga

SEQ ID NO: 2817683 - RNA, 20 nt, Human
ucucacacugguucucaaug

SEQ ID NO: 2817684 - RNA, 19 nt, Human
ucucacacugguucucaau

SEQ ID NO: 2817685 - RNA, 14 nt, Human
acuucaggcucuuc

SEQ ID NO: 2817686 - RNA, 13 nt, Human
acuucagcucugu

SEQ ID NO: 2817687 - RNA, 13 nt, Human
ucuauuucacuua

SEQ ID NO: 2817688 - RNA, 13 nt, Human
acuuguuauugug

SEQ ID NO: 2817689 - RNA, 15 nt, Human
acuuguuauugugaa

SEQ ID NO: 2817690 - RNA, 16 nt, Human
acuuguuauugugaau

SEQ ID NO: 2817691 - RNA, 17 nt, Human
acuuguuauugugaaug

SEQ ID NO: 2817692 - RNA, 19 nt, Human
acuuguuauugugaaugau

SEQ ID NO: 2817693 - RNA, 20 nt, Human
acuuguuauugugaaugauu

SEQ ID NO: 2817694 - RNA, 16 nt, Human
acuuguuccagcucuu

SEQ ID NO: 2817695 - RNA, 15 nt, Human
acuuguuccagcucu

SEQ ID NO: 2817696 - RNA, 16 nt, Human
ucuccucucagccccu

SEQ ID NO: 2817697 - RNA, 14 nt, Human
ucuccuccccuucc

SEQ ID NO: 2817698 - RNA, 16 nt, Human
ucuccuccccuugaau

SEQ ID NO: 2817699 - RNA, 18 nt, Human
ucuccuccccacccgccc

SEQ ID NO: 2817700 - RNA, 12 nt, Human
ucuccucccagg

SEQ ID NO: 2817701 - RNA, 12 nt, Human
ucuccuccccaa

SEQ ID NO: 2817702 - RNA, 15 nt, Human
ucuccuccccacccg

SEQ ID NO: 2817703 - RNA, 16 nt, Human
acuuucucugccauca

SEQ ID NO: 2817704 - RNA, 12 nt, Human
acuuuaaaagug

SEQ ID NO: 2817705 - RNA, 12 nt, Human
acuuuaagagag

SEQ ID NO: 2817706 - RNA, 14 nt, Human
acuuuaagagagaa

SEQ ID NO: 2817707 - RNA, 15 nt, Human
acuuuaagagagaaa

SEQ ID NO: 2817708 - RNA, 16 nt, Human
acuuuaagagagaaau

SEQ ID NO: 2817709 - RNA, 17 nt, Human
acuuuaagagagaaauc

SEQ ID NO: 2817710 - RNA, 23 nt, Human
acuuuaagagagaaaucugaaaa

SEQ ID NO: 2817711 - RNA, 13 nt, Human
ucuccaucuguca

SEQ ID NO: 2817712 - RNA, 17 nt, Human
ucuccauggcaucuucg

SEQ ID NO: 2817713 - RNA, 19 nt, Human
ucucccacuagacaagucc

SEQ ID NO: 2817714 - RNA, 18 nt, Human
ucucccacuccagcgcug

SEQ ID NO: 2817715 - RNA, 15 nt, Human
ucucccagaauccca

SEQ ID NO: 2817716 - RNA, 17 nt, Human
ucucccagaaucccagc

SEQ ID NO: 2817717 - RNA, 18 nt, Human
ucucccagaaucccagcc

SEQ ID NO: 2817718 - RNA, 19 nt, Human
ucucccagaaucccagccg

SEQ ID NO: 2817719 - RNA, 12 nt, Human
ucucccacccug

SEQ ID NO: 2817720 - RNA, 14 nt, Human
ucucccacccugua

SEQ ID NO: 2817721 - RNA, 14 nt, Human
ucucccacguggga

SEQ ID NO: 2817722 - RNA, 15 nt, Human
ucucccacgugggag

SEQ ID NO: 2817723 - RNA, 16 nt, Human
ucucccacgugggaga

SEQ ID NO: 2817724 - RNA, 16 nt, Human
ucuccuagggcuaugg

SEQ ID NO: 2817725 - RNA, 16 nt, Human
ucuccuauaaucuguc

SEQ ID NO: 2817726 - RNA, 17 nt, Human
ucuccuauaaucuguca

SEQ ID NO: 2817727 - RNA, 18 nt, Human
ucuccuauaaucugucaa

SEQ ID NO: 2817728 - RNA, 19 nt, Human
ucuccuauaaucugucaaa

SEQ ID NO: 2817729 - RNA, 14 nt, Human
ucuccuacuccuga

SEQ ID NO: 2817730 - RNA, 16 nt, Human
ucuccuacuccugacu

SEQ ID NO: 2817731 - RNA, 20 nt, Human
ucuccguuuauuauaaacug

SEQ ID NO: 2817732 - RNA, 13 nt, Human
ucuccccacacua

SEQ ID NO: 2817733 - RNA, 11 nt, Human
ucuccccacac

SEQ ID NO: 2817734 - RNA, 10 nt, Human
ucuccccaca

SEQ ID NO: 2817735 - RNA, 20 nt, Human
ucuccccaacccccauucuc

SEQ ID NO: 2817736 - RNA, 22 nt, Human
ucuccccaacccccauucucau

SEQ ID NO: 2817737 - RNA, 23 nt, Human
ucuccccaacccccauucucauc

SEQ ID NO: 2817738 - RNA, 22 nt, Human
ucuccccaacccuagguucccu

SEQ ID NO: 2817739 - RNA, 19 nt, Human
ucuccccaaugagacuugc

SEQ ID NO: 2817740 - RNA, 23 nt, Human
ucuccccaaugagacuugccuuc

SEQ ID NO: 2817741 - RNA, 16 nt, Human
ucuccaggcuguaucc

SEQ ID NO: 2817742 - RNA, 19 nt, Human
ucuccaggucucacgggca

SEQ ID NO: 2817743 - RNA, 19 nt, Human
ucuccaguauccacuuugc

SEQ ID NO: 2817744 - RNA, 21 nt, Human
ucuccaucacccucuuccugu

SEQ ID NO: 2817745 - RNA, 20 nt, Human
ucuccaucacccucuuccug

SEQ ID NO: 2817746 - RNA, 21 nt, Human
ucuccagugcuguccaugcuu

SEQ ID NO: 2817747 - RNA, 11 nt, Human
ucuccaggcug

SEQ ID NO: 2817748 - RNA, 19 nt, Human
ucucaggcuggugggaggg

SEQ ID NO: 2817749 - RNA, 19 nt, Human
ucucauuccaacagugagu

SEQ ID NO: 2817750 - RNA, 17 nt, Human
ucucauuccaacaguga

SEQ ID NO: 2817751 - RNA, 14 nt, Human
ucucauuccguugu

SEQ ID NO: 2817752 - RNA, 18 nt, Human
ucucauuccguugucugu

SEQ ID NO: 2817753 - RNA, 20 nt, Human
ucucauuccguugucugugg

SEQ ID NO: 2817754 - RNA, 21 nt, Human
ucucauuccguugucugugga

SEQ ID NO: 2817755 - RNA, 12 nt, Human
ucucauucuugu

SEQ ID NO: 2817756 - RNA, 13 nt, Human
ucucauucuuguu

SEQ ID NO: 2817757 - RNA, 15 nt, Human
acuuguggacacagc

SEQ ID NO: 2817758 - RNA, 13 nt, Human
ucucagccuccca

SEQ ID NO: 2817759 - RNA, 15 nt, Human
ucucagccuuacauu

SEQ ID NO: 2817760 - RNA, 20 nt, Human
ucucagccuuacauuuguga

SEQ ID NO: 2817761 - RNA, 12 nt, Human
ucucagccuccc

SEQ ID NO: 2817762 - RNA, 13 nt, Human
ucucagcuuugag

SEQ ID NO: 2817763 - RNA, 16 nt, Human
ucucagcuccaggugg

SEQ ID NO: 2817764 - RNA, 21 nt, Human
ucucagcuccagguggcucug

SEQ ID NO: 2817765 - RNA, 19 nt, Human
ucucagcuuugagaagccu

SEQ ID NO: 2817766 - RNA, 18 nt, Human
ucucaggcuggugggagg

SEQ ID NO: 2817767 - RNA, 20 nt, Human
agacacacuaucauaguuaa

SEQ ID NO: 2817768 - RNA, 11 nt, Human
agacacacaca

SEQ ID NO: 2817769 - RNA, 10 nt, Human
agacacacac

SEQ ID NO: 2817770 - RNA, 17 nt, Human
agacacaggcccggcuc

SEQ ID NO: 2817771 - RNA, 22 nt, Human
agacacaggcccggcuccaggc

SEQ ID NO: 2817772 - RNA, 21 nt, Human
agacacaggcccggcuccagg

SEQ ID NO: 2817773 - RNA, 20 nt, Human
agacacaggcccggcuccag

SEQ ID NO: 2817774 - RNA, 19 nt, Human
agacacaggcccggcucca

SEQ ID NO: 2817775 - RNA, 20 nt, Human
agacacaacuauuuuuccaa

SEQ ID NO: 2817776 - RNA, 19 nt, Human
agacacaacuauuuuucca

SEQ ID NO: 2817777 - RNA, 12 nt, Human
ucuguuucaagg

SEQ ID NO: 2817778 - RNA, 23 nt, Human
ucuguuucaaggcacucuagauu

SEQ ID NO: 2817779 - RNA, 12 nt, Human
agacaccaaagu

SEQ ID NO: 2817780 - RNA, 18 nt, Human
agacacgccuuccccuca

SEQ ID NO: 2817781 - RNA, 22 nt, Human
agacacgccuuccccucagcca

SEQ ID NO: 2817782 - RNA, 14 nt, Human
agacagaacuugaa

SEQ ID NO: 2817783 - RNA, 17 nt, Human
agacagaaccccuacau

SEQ ID NO: 2817784 - RNA, 17 nt, Human
agacagaacuugaaugu

SEQ ID NO: 2817785 - RNA, 23 nt, Human
agacacaggcccggcuccaggcu

SEQ ID NO: 2817786 - RNA, 19 nt, Human
agacaccuugacagggcac

SEQ ID NO: 2817787 - RNA, 22 nt, Human
agacaccuugacagggcacacc

SEQ ID NO: 2817788 - RNA, 13 nt, Human
agacacauuuaag

SEQ ID NO: 2817789 - RNA, 14 nt, Human
agacacauuuaagg

SEQ ID NO: 2817790 - RNA, 22 nt, Human
ucuuacuuuccuuuccccagcc

SEQ ID NO: 2817791 - RNA, 23 nt, Human
ucuuacuuuccuuuccccagccc

SEQ ID NO: 2817792 - RNA, 13 nt, Human
ucuuagaaaugaa

SEQ ID NO: 2817793 - RNA, 15 nt, Human
ucuuauuauauauau

SEQ ID NO: 2817794 - RNA, 23 nt, Human
ucuuauuauauauauaauauaua

SEQ ID NO: 2817795 - RNA, 14 nt, Human
ucuuacuaauguaa

SEQ ID NO: 2817796 - RNA, 15 nt, Human
ucuuacuaauguaaa

SEQ ID NO: 2817797 - RNA, 16 nt, Human
ucuuacuaauguaaaa

SEQ ID NO: 2817798 - RNA, 20 nt, Human
ucuuacuaauguaaaaugau

SEQ ID NO: 2817799 - RNA, 21 nt, Human
ucuuacuaauguaaaaugauu

SEQ ID NO: 2817800 - RNA, 21 nt, Human
ucuuaccuguaugucuccagu

SEQ ID NO: 2817801 - RNA, 23 nt, Human
ucuuaccuguaugucuccaguau

SEQ ID NO: 2817802 - RNA, 10 nt, Human
ucuuaauuuu

SEQ ID NO: 2817803 - RNA, 15 nt, Human
ucuuacgaauauuuu

SEQ ID NO: 2817804 - RNA, 15 nt, Human
ucuuacccaauuucc

SEQ ID NO: 2817805 - RNA, 16 nt, Human
ucuuacccaauuuccc

SEQ ID NO: 2817806 - RNA, 22 nt, Human
ucuuacccuguacauauguaaa

SEQ ID NO: 2817807 - RNA, 14 nt, Human
ucuuacugauaauu

SEQ ID NO: 2817808 - RNA, 16 nt, Human
ucuuacugauaauuuu

SEQ ID NO: 2817809 - RNA, 15 nt, Human
ucuuacuccuccucu

SEQ ID NO: 2817810 - RNA, 16 nt, Human
ucuuacuccuccucuu

SEQ ID NO: 2817811 - RNA, 17 nt, Human
ucuuacuccuccucuuu

SEQ ID NO: 2817812 - RNA, 18 nt, Human
ucuuacuccuccucuuuc

SEQ ID NO: 2817813 - RNA, 19 nt, Human
ucuuacuccuccucuuucu

SEQ ID NO: 2817814 - RNA, 20 nt, Human
ucuuacuccuccucuuucuc

SEQ ID NO: 2817815 - RNA, 21 nt, Human
ucuuacuccuccucuuucucu

SEQ ID NO: 2817816 - RNA, 18 nt, Human
ucuuacuguaccuguucc

SEQ ID NO: 2817817 - RNA, 23 nt, Human
ucuuacuuacuaaaauauauaua

SEQ ID NO: 2817818 - RNA, 16 nt, Human
ucuuacuugagccuuu

SEQ ID NO: 2817819 - RNA, 17 nt, Human
ucuuacuugagccuuua

SEQ ID NO: 2817820 - RNA, 17 nt, Human
agacagucaccccagga

SEQ ID NO: 2817821 - RNA, 15 nt, Human
agacaguccagccug

SEQ ID NO: 2817822 - RNA, 17 nt, Human
agacaguccagccugga

SEQ ID NO: 2817823 - RNA, 15 nt, Human
agacagugcacauga

SEQ ID NO: 2817824 - RNA, 16 nt, Human
agacagugcacaugaa

SEQ ID NO: 2817825 - RNA, 17 nt, Human
agacagugcacaugaac

SEQ ID NO: 2817826 - RNA, 14 nt, Human
agacaguucaagaa

SEQ ID NO: 2817827 - RNA, 15 nt, Human
agacaguucaagaaa

SEQ ID NO: 2817828 - RNA, 13 nt, Human
agacaguuucuua

SEQ ID NO: 2817829 - RNA, 14 nt, Human
agacaguuucuuag

SEQ ID NO: 2817830 - RNA, 20 nt, Human
ucuuaauuauuauuuguguu

SEQ ID NO: 2817831 - RNA, 14 nt, Human
ucuuacacauacag

SEQ ID NO: 2817832 - RNA, 16 nt, Human
ucuuacacauacaguu

SEQ ID NO: 2817833 - RNA, 23 nt, Human
ucuuacacauacaguuuuaugcu

SEQ ID NO: 2817834 - RNA, 17 nt, Human
ucuuacacugccuguau

SEQ ID NO: 2817835 - RNA, 22 nt, Human
ucuuacacugccuguauacuuu

SEQ ID NO: 2817836 - RNA, 23 nt, Human
ucuuacacugccuguauacuuua

SEQ ID NO: 2817837 - RNA, 17 nt, Human
ucuuaauuucuaucuug

SEQ ID NO: 2817838 - RNA, 17 nt, Human
ucuguauugugcugauu

SEQ ID NO: 2817839 - RNA, 20 nt, Human
ucugugaaguaguucuguuu

SEQ ID NO: 2817840 - RNA, 23 nt, Human
ucuguauuuaugugugaggagcu

SEQ ID NO: 2817841 - RNA, 13 nt, Human
ucuguauuucaug

SEQ ID NO: 2817842 - RNA, 15 nt, Human
ucuguauuucaugug

SEQ ID NO: 2817843 - RNA, 18 nt, Human
ucuguauuucauguggcu

SEQ ID NO: 2817844 - RNA, 13 nt, Human
ucugucccagguu

SEQ ID NO: 2817845 - RNA, 17 nt, Human
ucugucccacuuggcau

SEQ ID NO: 2817846 - RNA, 21 nt, Human
ucugucccacuuggcaucagc

SEQ ID NO: 2817847 - RNA, 13 nt, Human
ucuguccaucugc

SEQ ID NO: 2817848 - RNA, 14 nt, Human
ucuguccaucugcc

SEQ ID NO: 2817849 - RNA, 15 nt, Human
ucuguccaucugccc

SEQ ID NO: 2817850 - RNA, 16 nt, Human
ucuguccaucugcccg

SEQ ID NO: 2817851 - RNA, 17 nt, Human
ucuguccaucugcccgc

SEQ ID NO: 2817852 - RNA, 18 nt, Human
ucuguccaucugcccgcc

SEQ ID NO: 2817853 - RNA, 19 nt, Human
ucuguccauuuauccacag

SEQ ID NO: 2817854 - RNA, 18 nt, Human
ucuguacgucugacaggc

SEQ ID NO: 2817855 - RNA, 13 nt, Human
ucuguauguauua

SEQ ID NO: 2817856 - RNA, 14 nt, Human
ucuguauguauuag

SEQ ID NO: 2817857 - RNA, 17 nt, Human
ucuguauguauuaguga

SEQ ID NO: 2817858 - RNA, 22 nt, Human
ucuguauguauuagugauauuu

SEQ ID NO: 2817859 - RNA, 14 nt, Human
ucuguacuuccuga

SEQ ID NO: 2817860 - RNA, 12 nt, Human
ucuguacuuggu

SEQ ID NO: 2817861 - RNA, 15 nt, Human
ucuguauauacuuuu

SEQ ID NO: 2817862 - RNA, 16 nt, Human
ucuguauauauauaua

SEQ ID NO: 2817863 - RNA, 15 nt, Human
ucuguauauacaaua

SEQ ID NO: 2817864 - RNA, 14 nt, Human
ucuguucuugcuac

SEQ ID NO: 2817865 - RNA, 20 nt, Human
ucuguuuauggccacauuua

SEQ ID NO: 2817866 - RNA, 23 nt, Human
ucuguuuauggccacauuuaaua

SEQ ID NO: 2817867 - RNA, 19 nt, Human
ucuguucugcacacagcac

SEQ ID NO: 2817868 - RNA, 16 nt, Human
ucuguucuguuucaag

SEQ ID NO: 2817869 - RNA, 18 nt, Human
ucuguucugcacacagca

SEQ ID NO: 2817870 - RNA, 17 nt, Human
ucuguucugcacacagc

SEQ ID NO: 2817871 - RNA, 22 nt, Human
ucuguggguccgauaauaucuu

SEQ ID NO: 2817872 - RNA, 19 nt, Human
ucugugggcgggcccagca

SEQ ID NO: 2817873 - RNA, 20 nt, Human
ucugugggcgggcccagcac

SEQ ID NO: 2817874 - RNA, 19 nt, Human
ucuguggaugccagggccg

SEQ ID NO: 2817875 - RNA, 18 nt, Human
ucuguggauggucauugc

SEQ ID NO: 2817876 - RNA, 22 nt, Human
ucuguggaccacugcaugagcu

SEQ ID NO: 2817877 - RNA, 21 nt, Human
ucuguggcuucccaugucuuu

SEQ ID NO: 2817878 - RNA, 15 nt, Human
ucugugccccaugcc

SEQ ID NO: 2817879 - RNA, 14 nt, Human
ucugugccccaugc

SEQ ID NO: 2817880 - RNA, 17 nt, Human
ucugugaugagcugauc

SEQ ID NO: 2817881 - RNA, 14 nt, Human
ucugugaugagcug

SEQ ID NO: 2817882 - RNA, 13 nt, Human
ucugugacccacu

SEQ ID NO: 2817883 - RNA, 16 nt, Human
ucugugacccacuucu

SEQ ID NO: 2817884 - RNA, 23 nt, Human
ucugugacccacuucucaucaca

SEQ ID NO: 2817885 - RNA, 13 nt, Human
ucugugaccucag

SEQ ID NO: 2817886 - RNA, 14 nt, Human
ucugugaccucagg

SEQ ID NO: 2817887 - RNA, 15 nt, Human
ucugugaccucaggc

SEQ ID NO: 2817888 - RNA, 16 nt, Human
ucugugaccucaggca

SEQ ID NO: 2817889 - RNA, 12 nt, Human
ucugugcauucu

SEQ ID NO: 2817890 - RNA, 19 nt, Human
ucugugcacgcaguggccu

SEQ ID NO: 2817891 - RNA, 21 nt, Human
ucugugcacgcaguggccuuc

SEQ ID NO: 2817892 - RNA, 18 nt, Human
agaauguuuuacugugaa

SEQ ID NO: 2817893 - RNA, 16 nt, Human
agaauguugguuuacu

SEQ ID NO: 2817894 - RNA, 17 nt, Human
agaauguugguuuacuu

SEQ ID NO: 2817895 - RNA, 19 nt, Human
agaauguugguuuacuuuc

SEQ ID NO: 2817896 - RNA, 20 nt, Human
agaauguugguuuacuuuca

SEQ ID NO: 2817897 - RNA, 21 nt, Human
agaauguugguuuacuuucaa

SEQ ID NO: 2817898 - RNA, 23 nt, Human
agaauguugguuuacuuucaaau

SEQ ID NO: 2817899 - RNA, 19 nt, Human
agaauguuuuacugugaaa

SEQ ID NO: 2817900 - RNA, 14 nt, Human
agaauuagauuaua

SEQ ID NO: 2817901 - RNA, 11 nt, Human
agaauuagcuu

SEQ ID NO: 2817902 - RNA, 15 nt, Human
agaauuagcuuuuuc

SEQ ID NO: 2817903 - RNA, 16 nt, Human
agaauuagcuuuuuca

SEQ ID NO: 2817904 - RNA, 22 nt, Human
agaauuagcuuuuucauccccu

SEQ ID NO: 2817905 - RNA, 17 nt, Human
agaauuagugccagaau

SEQ ID NO: 2817906 - RNA, 19 nt, Human
agaauuagugccagaauuu

SEQ ID NO: 2817907 - RNA, 21 nt, Human
agaauuagugccagaauuuua

SEQ ID NO: 2817908 - RNA, 22 nt, Human
agaauuagugccagaauuuuag

SEQ ID NO: 2817909 - RNA, 15 nt, Human
agaauguuagagcac

SEQ ID NO: 2817910 - RNA, 16 nt, Human
agaauguuagagcaca

SEQ ID NO: 2817911 - RNA, 18 nt, Human
agaauguuagagcacagu

SEQ ID NO: 2817912 - RNA, 16 nt, Human
agaauguguuucaaac

SEQ ID NO: 2817913 - RNA, 18 nt, Human
agaauguguuucaaacug

SEQ ID NO: 2817914 - RNA, 22 nt, Human
agaauguguuucaaacuguaaa

SEQ ID NO: 2817915 - RNA, 15 nt, Human
agaaauuugauuucu

SEQ ID NO: 2817916 - RNA, 19 nt, Human
agaaauuucagguuguugg

SEQ ID NO: 2817917 - RNA, 17 nt, Human
agaaauuucugugaaac

SEQ ID NO: 2817918 - RNA, 21 nt, Human
agaaauuucugugaaaccugu

SEQ ID NO: 2817919 - RNA, 13 nt, Human
agaacccagggcu

SEQ ID NO: 2817920 - RNA, 14 nt, Human
agaacccagggcuc

SEQ ID NO: 2817921 - RNA, 18 nt, Human
agaacccagggcucugcc

SEQ ID NO: 2817922 - RNA, 19 nt, Human
agaacccagggcucugccc

SEQ ID NO: 2817923 - RNA, 20 nt, Human
agaacccagggcucugcccc

SEQ ID NO: 2817924 - RNA, 21 nt, Human
agaacccagggcucugcccca

SEQ ID NO: 2817925 - RNA, 22 nt, Human
agaacccagggcucugccccag

SEQ ID NO: 2817926 - RNA, 14 nt, Human
agaaccgagcaaag

SEQ ID NO: 2817927 - RNA, 15 nt, Human
agaaccgagcaaaga

SEQ ID NO: 2817928 - RNA, 16 nt, Human
agaaccgagcaaagau

SEQ ID NO: 2817929 - RNA, 20 nt, Human
agaacccuuggcuugcccac

SEQ ID NO: 2817930 - RNA, 19 nt, Human
agaaccccuacaugaaaca

SEQ ID NO: 2817931 - RNA, 17 nt, Human
agaaccccuacaugaaa

SEQ ID NO: 2817932 - RNA, 16 nt, Human
agaaauuugauuucua

SEQ ID NO: 2817933 - RNA, 22 nt, Human
ucuggggucuuuuuaugcauuu

SEQ ID NO: 2817934 - RNA, 19 nt, Human
ucuggggugcugccugaau

SEQ ID NO: 2817935 - RNA, 15 nt, Human
ucugggguccccagg

SEQ ID NO: 2817936 - RNA, 19 nt, Human
ucugggguccccagggcug

SEQ ID NO: 2817937 - RNA, 22 nt, Human
ucuggggaaagacacugccugg

SEQ ID NO: 2817938 - RNA, 21 nt, Human
ucuggggaaagacacugccug

SEQ ID NO: 2817939 - RNA, 23 nt, Human
ucuggggaaagacacugccuggg

SEQ ID NO: 2817940 - RNA, 20 nt, Human
ucuggggaaagacacugccu

SEQ ID NO: 2817941 - RNA, 15 nt, Human
ucugggucagugguc

SEQ ID NO: 2817942 - RNA, 22 nt, Human
ucuggguuccuuccucugagcc

SEQ ID NO: 2817943 - RNA, 23 nt, Human
ucuggguuccuuccucugagccu

SEQ ID NO: 2817944 - RNA, 13 nt, Human
ucugggcuccaga

SEQ ID NO: 2817945 - RNA, 14 nt, Human
ucugggcucuuucc

SEQ ID NO: 2817946 - RNA, 19 nt, Human
ucugggcuagguagaaaaa

SEQ ID NO: 2817947 - RNA, 20 nt, Human
ucugggcuagguagaaaaag

SEQ ID NO: 2817948 - RNA, 15 nt, Human
ucugggcuauggaca

SEQ ID NO: 2817949 - RNA, 16 nt, Human
ucugggcuauggacac

SEQ ID NO: 2817950 - RNA, 17 nt, Human
ucugggcuauggacaca

SEQ ID NO: 2817951 - RNA, 18 nt, Human
ucugggcuauggacacag

SEQ ID NO: 2817952 - RNA, 21 nt, Human
ucugggcuauggacacagggu

SEQ ID NO: 2817953 - RNA, 22 nt, Human
ucugggcugcuacccagaaauc

SEQ ID NO: 2817954 - RNA, 17 nt, Human
ucugggcugcuacccag

SEQ ID NO: 2817955 - RNA, 17 nt, Human
agaauuaacagagauug

SEQ ID NO: 2817956 - RNA, 12 nt, Human
agagacagaaug

SEQ ID NO: 2817957 - RNA, 20 nt, Human
agagacaaacaccucccagg

SEQ ID NO: 2817958 - RNA, 13 nt, Human
agagacaaaauau

SEQ ID NO: 2817959 - RNA, 19 nt, Human
agagacaaacaccucccag

SEQ ID NO: 2817960 - RNA, 23 nt, Human
agagaauuucuaccauuucagag

SEQ ID NO: 2817961 - RNA, 22 nt, Human
agagaauuucuaccauuucaga

SEQ ID NO: 2817962 - RNA, 21 nt, Human
agagacaaacaccucccagga

SEQ ID NO: 2817963 - RNA, 18 nt, Human
agagacaaacuguaaaaa

SEQ ID NO: 2817964 - RNA, 20 nt, Human
agagacaaacuguaaaaaau

SEQ ID NO: 2817965 - RNA, 22 nt, Human
agagacaaacuguaaaaaaugu

SEQ ID NO: 2817966 - RNA, 15 nt, Human
agagaaaaacaaauu

SEQ ID NO: 2817967 - RNA, 13 nt, Human
agagaaaaacaaa

SEQ ID NO: 2817968 - RNA, 16 nt, Human
agagaauuagauuaua

SEQ ID NO: 2817969 - RNA, 12 nt, Human
agagaauuggcu

SEQ ID NO: 2817970 - RNA, 14 nt, Human
agagaauuggcuca

SEQ ID NO: 2817971 - RNA, 15 nt, Human
agagaauuggcucaa

SEQ ID NO: 2817972 - RNA, 13 nt, Human
agacuuuuguaca

SEQ ID NO: 2817973 - RNA, 14 nt, Human
agacuuuuguacau

SEQ ID NO: 2817974 - RNA, 22 nt, Human
agacuuuuguacaucuggcuua

SEQ ID NO: 2817975 - RNA, 12 nt, Human
agacuuucuguu

SEQ ID NO: 2817976 - RNA, 14 nt, Human
agacuuucuuuaaa

SEQ ID NO: 2817977 - RNA, 21 nt, Human
agacuuucuuuaaauuauguu

SEQ ID NO: 2817978 - RNA, 16 nt, Human
agacuuuaggcuuuca

SEQ ID NO: 2817979 - RNA, 17 nt, Human
agacuuuaggcuuucag

SEQ ID NO: 2817980 - RNA, 20 nt, Human
agacuuuaggcuuucagcuu

SEQ ID NO: 2817981 - RNA, 22 nt, Human
agacuuuaggcuuucagcuuac

SEQ ID NO: 2817982 - RNA, 16 nt, Human
agagaaaaaaaaaaua

SEQ ID NO: 2817983 - RNA, 18 nt, Human
agagaaaaaaaaaauagu

SEQ ID NO: 2817984 - RNA, 15 nt, Human
agacuuuuuucuagu

SEQ ID NO: 2817985 - RNA, 19 nt, Human
agacuuuuuuuaaauagua

SEQ ID NO: 2817986 - RNA, 18 nt, Human
agacuuguaugaaagaug

SEQ ID NO: 2817987 - RNA, 15 nt, Human
agacugguccugugu

SEQ ID NO: 2817988 - RNA, 17 nt, Human
agacugguccugugugc

SEQ ID NO: 2817989 - RNA, 18 nt, Human
agacugguccugugugca

SEQ ID NO: 2817990 - RNA, 23 nt, Human
agacucgauucauauugaauaua

SEQ ID NO: 2817991 - RNA, 19 nt, Human
agacucgccaacaugguga

SEQ ID NO: 2817992 - RNA, 14 nt, Human
agacuuccuugaga

SEQ ID NO: 2817993 - RNA, 16 nt, Human
agacuuccuugagaca

SEQ ID NO: 2817994 - RNA, 19 nt, Human
agacuucccugaauguauu

SEQ ID NO: 2817995 - RNA, 15 nt, Human
agacuucccugaaug

SEQ ID NO: 2817996 - RNA, 13 nt, Human
agacuuccaaaga

SEQ ID NO: 2817997 - RNA, 15 nt, Human
agacuuccaaagaau

SEQ ID NO: 2817998 - RNA, 17 nt, Human
agacuuccaaagaaugu

SEQ ID NO: 2817999 - RNA, 16 nt, Human
agacuucccuaacacu

SEQ ID NO: 2818000 - RNA, 21 nt, Human
agacuuacuuuacucauuuuu

SEQ ID NO: 2818001 - RNA, 21 nt, Human
agacuucauugucccucuuca

SEQ ID NO: 2818002 - RNA, 19 nt, Human
agacuuacuuuacucauuu

SEQ ID NO: 2818003 - RNA, 20 nt, Human
agacuuacuuuacucauuuu

SEQ ID NO: 2818004 - RNA, 14 nt, Human
agacuuacucuaag

SEQ ID NO: 2818005 - RNA, 15 nt, Human
agacuuacucuaaga

SEQ ID NO: 2818006 - RNA, 16 nt, Human
agacuuacucuaagau

SEQ ID NO: 2818007 - RNA, 18 nt, Human
agacuuacucuaagaucu

SEQ ID NO: 2818008 - RNA, 15 nt, Human
agacuuacuauuaca

SEQ ID NO: 2818009 - RNA, 23 nt, Human
agacuuaauagaaacauugaaga

SEQ ID NO: 2818010 - RNA, 18 nt, Human
agacuguagccuggauau

SEQ ID NO: 2818011 - RNA, 17 nt, Human
agacuuaauagaaacau

SEQ ID NO: 2818012 - RNA, 16 nt, Human
ucuuuauacuguaauu

SEQ ID NO: 2818013 - RNA, 15 nt, Human
ucuuuauagugcaca

SEQ ID NO: 2818014 - RNA, 17 nt, Human
ucuuuauagugcacaaa

SEQ ID NO: 2818015 - RNA, 21 nt, Human
ucuuuauagugcacaaaauga

SEQ ID NO: 2818016 - RNA, 16 nt, Human
ucuuuauauacaauaa

SEQ ID NO: 2818017 - RNA, 17 nt, Human
ucuuuauauacaauaau

SEQ ID NO: 2818018 - RNA, 18 nt, Human
ucuuuauauacaauaaug

SEQ ID NO: 2818019 - RNA, 21 nt, Human
ucuuuauauacaauaauggaa

SEQ ID NO: 2818020 - RNA, 14 nt, Human
ucuuucuuccucug

SEQ ID NO: 2818021 - RNA, 22 nt, Human
ucuuucugcagaaacagaaagg

SEQ ID NO: 2818022 - RNA, 21 nt, Human
ucuuucugcagaaacagaaag

SEQ ID NO: 2818023 - RNA, 13 nt, Human
ucuuucuggaguc

SEQ ID NO: 2818024 - RNA, 20 nt, Human
agacucgauucauauugaau

SEQ ID NO: 2818025 - RNA, 20 nt, Human
agacuccuugagagaccagg

SEQ ID NO: 2818026 - RNA, 17 nt, Human
ucuuucuuccucugcug

SEQ ID NO: 2818027 - RNA, 15 nt, Human
ucuuucuuccucugc

SEQ ID NO: 2818028 - RNA, 16 nt, Human
ucuuucuuccucugcu

SEQ ID NO: 2818029 - RNA, 20 nt, Human
ucuuuaaugucacaggcagg

SEQ ID NO: 2818030 - RNA, 14 nt, Human
ucuuguaaaugugu

SEQ ID NO: 2818031 - RNA, 17 nt, Human
ucuuguaaauguguugg

SEQ ID NO: 2818032 - RNA, 18 nt, Human
ucuuguaaauguguugga

SEQ ID NO: 2818033 - RNA, 22 nt, Human
ucuuguaaauguguuggacaaa

SEQ ID NO: 2818034 - RNA, 17 nt, Human
ucuuguaaggcuuugau

SEQ ID NO: 2818035 - RNA, 18 nt, Human
ucuuguaaggcuuugauu

SEQ ID NO: 2818036 - RNA, 17 nt, Human
ucuuguaauauuuugua

SEQ ID NO: 2818037 - RNA, 19 nt, Human
ucuuguaauauuuuguauu

SEQ ID NO: 2818038 - RNA, 22 nt, Human
ucuugguuucucucuacagugc

SEQ ID NO: 2818039 - RNA, 22 nt, Human
ucuuuaaugucacaggcagguc

SEQ ID NO: 2818040 - RNA, 16 nt, Human
ucuuuaggucuuugua

SEQ ID NO: 2818041 - RNA, 17 nt, Human
ucuuuaggucuuuguaa

SEQ ID NO: 2818042 - RNA, 21 nt, Human
ucuuuaggucuuuguaagaac

SEQ ID NO: 2818043 - RNA, 22 nt, Human
ucuuuaauuucugucagaaugc

SEQ ID NO: 2818044 - RNA, 17 nt, Human
ucuugguuggcuggccu

SEQ ID NO: 2818045 - RNA, 17 nt, Human
ucuugauaccccccucu

SEQ ID NO: 2818046 - RNA, 20 nt, Human
ucuugauaccccccucuguc

SEQ ID NO: 2818047 - RNA, 21 nt, Human
ucuugauaccccccucugucu

SEQ ID NO: 2818048 - RNA, 22 nt, Human
ucuugauaccccccucugucuu

SEQ ID NO: 2818049 - RNA, 13 nt, Human
ucuugguguuaaa

SEQ ID NO: 2818050 - RNA, 17 nt, Human
ucuugguguuaaaacac

SEQ ID NO: 2818051 - RNA, 22 nt, Human
ucuuauugcaaaauagcauuug

SEQ ID NO: 2818052 - RNA, 14 nt, Human
ucuuauuuugugga

SEQ ID NO: 2818053 - RNA, 12 nt, Human
ucuuauuuuucu

SEQ ID NO: 2818054 - RNA, 16 nt, Human
ucuucugaauauuuua

SEQ ID NO: 2818055 - RNA, 14 nt, Human
ucuucugacaaacu

SEQ ID NO: 2818056 - RNA, 16 nt, Human
ucuucugacaaacugu

SEQ ID NO: 2818057 - RNA, 17 nt, Human
ucuucugacaaacugug

SEQ ID NO: 2818058 - RNA, 22 nt, Human
ucuucugacaaacuguguacau

SEQ ID NO: 2818059 - RNA, 22 nt, Human
ucuucuguacgucugacaggca

SEQ ID NO: 2818060 - RNA, 21 nt, Human
ucuucuguacgucugacaggc

SEQ ID NO: 2818061 - RNA, 18 nt, Human
ucuucuggcucaaaaaga

SEQ ID NO: 2818062 - RNA, 21 nt, Human
ucuucuggcucaaaaagagaa

SEQ ID NO: 2818063 - RNA, 12 nt, Human
ucuucuggcuca

SEQ ID NO: 2818064 - RNA, 13 nt, Human
ucuucuggcucaa

SEQ ID NO: 2818065 - RNA, 22 nt, Human
ucuucugcuucagccucccgag

SEQ ID NO: 2818066 - RNA, 20 nt, Human
ucuucugcccaauuggagga

SEQ ID NO: 2818067 - RNA, 13 nt, Human
ucuucugccaaga

SEQ ID NO: 2818068 - RNA, 12 nt, Human
ucuucugcucca

SEQ ID NO: 2818069 - RNA, 11 nt, Human
ucuucugcucc

SEQ ID NO: 2818070 - RNA, 17 nt, Human
ucuucugcgccucaggc

SEQ ID NO: 2818071 - RNA, 23 nt, Human
ucuucuguacgucugacaggcaa

SEQ ID NO: 2818072 - RNA, 20 nt, Human
ucuucuguacgucugacagg

SEQ ID NO: 2818073 - RNA, 12 nt, Human
ucuucuuaugca

SEQ ID NO: 2818074 - RNA, 15 nt, Human
agacauuuuaacaag

SEQ ID NO: 2818075 - RNA, 16 nt, Human
agacauuuuaacaaga

SEQ ID NO: 2818076 - RNA, 17 nt, Human
agacauuuuaacaagaa

SEQ ID NO: 2818077 - RNA, 20 nt, Human
agacauuuuaacaagaagau

SEQ ID NO: 2818078 - RNA, 21 nt, Human
agacauuuuaacaagaagaug

SEQ ID NO: 2818079 - RNA, 22 nt, Human
agacauuuuaacaagaagauga

SEQ ID NO: 2818080 - RNA, 23 nt, Human
agacauuuuaacaagaagaugaa

SEQ ID NO: 2818081 - RNA, 22 nt, Human
agacauuuuuccguuugcuuuu

SEQ ID NO: 2818082 - RNA, 20 nt, Human
agacauuuguuauuuuggaa

SEQ ID NO: 2818083 - RNA, 14 nt, Human
agacauuucuuuuc

SEQ ID NO: 2818084 - RNA, 16 nt, Human
agacauuucuuuucuu

SEQ ID NO: 2818085 - RNA, 19 nt, Human
agacauuucuuuucuuuuu

SEQ ID NO: 2818086 - RNA, 20 nt, Human
agacauuucuuuucuuuuua

SEQ ID NO: 2818087 - RNA, 21 nt, Human
agacauuucuuuucuuuuuac

SEQ ID NO: 2818088 - RNA, 22 nt, Human
agacauuucuuuucuuuuuaca

SEQ ID NO: 2818089 - RNA, 23 nt, Human
agacauuucuuuucuuuuuacau

SEQ ID NO: 2818090 - RNA, 20 nt, Human
agacauggcuuucagaaaac

SEQ ID NO: 2818091 - RNA, 21 nt, Human
agacauggcuuucagaaaacg

SEQ ID NO: 2818092 - RNA, 21 nt, Human
agacauggagguucuaaggcc

SEQ ID NO: 2818093 - RNA, 19 nt, Human
agacauggagguucuaagg

SEQ ID NO: 2818094 - RNA, 20 nt, Human
agacauggagguucuaaggc

SEQ ID NO: 2818095 - RNA, 15 nt, Human
agacauggagguucu

SEQ ID NO: 2818096 - RNA, 16 nt, Human
agacauggagguucua

SEQ ID NO: 2818097 - RNA, 17 nt, Human
agacauggagguucuaa

SEQ ID NO: 2818098 - RNA, 15 nt, Human
agacaugauuuccuu

SEQ ID NO: 2818099 - RNA, 22 nt, Human
agacaugauuuccuugaaugug

SEQ ID NO: 2818100 - RNA, 20 nt, Human
agacaugagugcgugcucag

SEQ ID NO: 2818101 - RNA, 13 nt, Human
agacaucuuucuc

SEQ ID NO: 2818102 - RNA, 19 nt, Human
agaccugcuuuuugaaaug

SEQ ID NO: 2818103 - RNA, 20 nt, Human
agaccugcuuuuugaaauga

SEQ ID NO: 2818104 - RNA, 22 nt, Human
agaccugcuuuuugaaaugaaa

SEQ ID NO: 2818105 - RNA, 23 nt, Human
agaccugcuuuuugaaaugaaau

SEQ ID NO: 2818106 - RNA, 13 nt, Human
agaccugccccuc

SEQ ID NO: 2818107 - RNA, 16 nt, Human
agaccugccccuccuc

SEQ ID NO: 2818108 - RNA, 23 nt, Human
agaccugccccuccucucugccc

SEQ ID NO: 2818109 - RNA, 22 nt, Human
agaccugccccuccucucugcc

SEQ ID NO: 2818110 - RNA, 14 nt, Human
agacucacaggaag

SEQ ID NO: 2818111 - RNA, 15 nt, Human
agacucacaggaagg

SEQ ID NO: 2818112 - RNA, 16 nt, Human
agacucacaggaagga

SEQ ID NO: 2818113 - RNA, 22 nt, Human
agacucacaggaaggaggagcc

SEQ ID NO: 2818114 - RNA, 17 nt, Human
agacucaaauguucuaa

SEQ ID NO: 2818115 - RNA, 20 nt, Human
agacucaaauguucuaaguu

SEQ ID NO: 2818116 - RNA, 23 nt, Human
agacucaaauguucuaaguuucu

SEQ ID NO: 2818117 - RNA, 22 nt, Human
agacucaagguggucaguaaau

SEQ ID NO: 2818118 - RNA, 14 nt, Human
agacuauuugcuua

SEQ ID NO: 2818119 - RNA, 13 nt, Human
agacucaaaugcu

SEQ ID NO: 2818120 - RNA, 15 nt, Human
agacucaaauguucu

SEQ ID NO: 2818121 - RNA, 16 nt, Human
agacucaaauguucua

SEQ ID NO: 2818122 - RNA, 17 nt, Human
agacuauuuaaacuuau

SEQ ID NO: 2818123 - RNA, 19 nt, Human
agacuauuuaaacuuauaa

SEQ ID NO: 2818124 - RNA, 22 nt, Human
agacuauuuaaacuuauaaauc

SEQ ID NO: 2818125 - RNA, 15 nt, Human
agacucauucuucug

SEQ ID NO: 2818126 - RNA, 19 nt, Human
agacucauccugaacagca

SEQ ID NO: 2818127 - RNA, 20 nt, Human
agacucauccugaacagcau

SEQ ID NO: 2818128 - RNA, 21 nt, Human
agacucauccugaacagcaug

SEQ ID NO: 2818129 - RNA, 22 nt, Human
agacucauccugaacagcaugg

SEQ ID NO: 2818130 - RNA, 21 nt, Human
agacucaguggggaggggcug

SEQ ID NO: 2818131 - RNA, 16 nt, Human
agacucaucuuacugu

SEQ ID NO: 2818132 - RNA, 17 nt, Human
agacucaucuuacugua

SEQ ID NO: 2818133 - RNA, 14 nt, Human
ucuugauaagacca

SEQ ID NO: 2818134 - RNA, 18 nt, Human
agacucaucuuacuguac

SEQ ID NO: 2818135 - RNA, 22 nt, Human
ucuugauaagaccaccaccuca

SEQ ID NO: 2818136 - RNA, 15 nt, Human
agaccucuccuuccu

SEQ ID NO: 2818137 - RNA, 11 nt, Human
agaccucugga

SEQ ID NO: 2818138 - RNA, 12 nt, Human
agaccucuggau

SEQ ID NO: 2818139 - RNA, 23 nt, Human
agaccucuggauuaggucucugu

SEQ ID NO: 2818140 - RNA, 23 nt, Human
agaccucugugaggaaagcacac

SEQ ID NO: 2818141 - RNA, 14 nt, Human
agaccuccccagcc

SEQ ID NO: 2818142 - RNA, 15 nt, Human
agaccuccccagccc

SEQ ID NO: 2818143 - RNA, 17 nt, Human
agaccuccccagccccu

SEQ ID NO: 2818144 - RNA, 20 nt, Human
agaccuccccagccccuagc

SEQ ID NO: 2818145 - RNA, 23 nt, Human
agaccuccccagccccuagccca

SEQ ID NO: 2818146 - RNA, 16 nt, Human
agaccuauguaagaau

SEQ ID NO: 2818147 - RNA, 20 nt, Human
agaccguccucaccccuguc

SEQ ID NO: 2818148 - RNA, 20 nt, Human
agaccuacuguucuaaagcu

SEQ ID NO: 2818149 - RNA, 21 nt, Human
agaccuacuguucuaaagcuc

SEQ ID NO: 2818150 - RNA, 22 nt, Human
agaccuacuguucuaaagcucu

SEQ ID NO: 2818151 - RNA, 14 nt, Human
agaccgcucucuuu

SEQ ID NO: 2818152 - RNA, 17 nt, Human
agaccgcucucuuuucu

SEQ ID NO: 2818153 - RNA, 22 nt, Human
agaccgcucucuuuucuguacu

SEQ ID NO: 2818154 - RNA, 18 nt, Human
agaccguccucaccccug

SEQ ID NO: 2818155 - RNA, 19 nt, Human
agaccguccucaccccugu

SEQ ID NO: 2818156 - RNA, 13 nt, Human
agaccguccucac

SEQ ID NO: 2818157 - RNA, 14 nt, Human
agaccguccucacc

SEQ ID NO: 2818158 - RNA, 15 nt, Human
agaccguccucaccc

SEQ ID NO: 2818159 - RNA, 16 nt, Human
agaccguccucacccc

SEQ ID NO: 2818160 - RNA, 14 nt, Human
agacccggcugcgu

SEQ ID NO: 2818161 - RNA, 21 nt, Human
agaccccuggcuuuucacugc

SEQ ID NO: 2818162 - RNA, 13 nt, Human
agaccaaaauaaa

SEQ ID NO: 2818163 - RNA, 13 nt, Human
agaccaaacuuca

SEQ ID NO: 2818164 - RNA, 24 nt, Human
agaccaaacuucacucugggcaca

SEQ ID NO: 2818165 - RNA, 15 nt, Human
agaccccuggcuuuu

SEQ ID NO: 2818166 - RNA, 14 nt, Human
agaccccuggcuuu

SEQ ID NO: 2818167 - RNA, 14 nt, Human
agaguuuaacacaa

SEQ ID NO: 2818168 - RNA, 16 nt, Human
agaguugugcacgcag

SEQ ID NO: 2818169 - RNA, 18 nt, Human
agaguugccccgucucug

SEQ ID NO: 2818170 - RNA, 23 nt, Human
agaguugccccgucucuguucca

SEQ ID NO: 2818171 - RNA, 12 nt, Human
agagucugucuc

SEQ ID NO: 2818172 - RNA, 21 nt, Human
agagucuuccacuucaaugca

SEQ ID NO: 2818173 - RNA, 13 nt, Human
agaguccucacuc

SEQ ID NO: 2818174 - RNA, 12 nt, Human
agaguccuauuu

SEQ ID NO: 2818175 - RNA, 14 nt, Human
agagucagaucuuu

SEQ ID NO: 2818176 - RNA, 12 nt, Human
ugaaugugucag

SEQ ID NO: 2818177 - RNA, 18 nt, Human
ugaauguggcuugagaaa

SEQ ID NO: 2818178 - RNA, 15 nt, Human
ugaaugugggcacug

SEQ ID NO: 2818179 - RNA, 16 nt, Human
ugaaugugggcacugg

SEQ ID NO: 2818180 - RNA, 21 nt, Human
ugaaugugggcacuggcccag

SEQ ID NO: 2818181 - RNA, 15 nt, Human
ugaauguggucucag

SEQ ID NO: 2818182 - RNA, 16 nt, Human
ugaauguggucucagg

SEQ ID NO: 2818183 - RNA, 18 nt, Human
agagucagccuucccccu

SEQ ID NO: 2818184 - RNA, 21 nt, Human
agaguccaagguuuaaagagu

SEQ ID NO: 2818185 - RNA, 19 nt, Human
agaguccaagguuuaaaga

SEQ ID NO: 2818186 - RNA, 16 nt, Human
ugaaugucuaaaauug

SEQ ID NO: 2818187 - RNA, 18 nt, Human
ugaaugucuaaaauuguu

SEQ ID NO: 2818188 - RNA, 23 nt, Human
ugaaugucuuuugaauauuccca

SEQ ID NO: 2818189 - RNA, 15 nt, Human
ugaaugucuuuugaa

SEQ ID NO: 2818190 - RNA, 20 nt, Human
ugaaugugcugaucauuuga

SEQ ID NO: 2818191 - RNA, 20 nt, Human
ugaaugguauggaacucucu

SEQ ID NO: 2818192 - RNA, 13 nt, Human
ugaaugguaugga

SEQ ID NO: 2818193 - RNA, 17 nt, Human
ugaagcaccaagcucaa

SEQ ID NO: 2818194 - RNA, 22 nt, Human
agaucacgccacugcacuccag

SEQ ID NO: 2818195 - RNA, 18 nt, Human
agaucacgccacugcacu

SEQ ID NO: 2818196 - RNA, 17 nt, Human
agaucacgccacugcac

SEQ ID NO: 2818197 - RNA, 20 nt, Human
ugaauuucuucacuguugaa

SEQ ID NO: 2818198 - RNA, 13 nt, Human
ugaauuucuaaaa

SEQ ID NO: 2818199 - RNA, 21 nt, Human
ugaauuucuucacuguugaaa

SEQ ID NO: 2818200 - RNA, 23 nt, Human
ugaauuucuucacuguugaaaau

SEQ ID NO: 2818201 - RNA, 20 nt, Human
ugacacacagcucuguccug

SEQ ID NO: 2818202 - RNA, 19 nt, Human
ugacaaaaaguuuccauau

SEQ ID NO: 2818203 - RNA, 16 nt, Human
ugacaaaaccuaacuu

SEQ ID NO: 2818204 - RNA, 17 nt, Human
ugacaaaaccuaacuug

SEQ ID NO: 2818205 - RNA, 20 nt, Human
ugaauuuuuuuuuccuagcc

SEQ ID NO: 2818206 - RNA, 19 nt, Human
ugaauuuuuuuuuccuagc

SEQ ID NO: 2818207 - RNA, 16 nt, Human
ugaauuuuuuuuuccu

SEQ ID NO: 2818208 - RNA, 15 nt, Human
agaguuuaacacaag

SEQ ID NO: 2818209 - RNA, 22 nt, Human
agaguccccccucccaccucca

SEQ ID NO: 2818210 - RNA, 13 nt, Human
agauaaagugguu

SEQ ID NO: 2818211 - RNA, 20 nt, Human
agauaaauauuugacuugca

SEQ ID NO: 2818212 - RNA, 22 nt, Human
agaguuuaacacaaguccugug

SEQ ID NO: 2818213 - RNA, 14 nt, Human
agauacugcugugu

SEQ ID NO: 2818214 - RNA, 16 nt, Human
agauacugcuguguaa

SEQ ID NO: 2818215 - RNA, 22 nt, Human
agauacugcuguguaaugguua

SEQ ID NO: 2818216 - RNA, 21 nt, Human
agauaacaaugcagcaaggcc

SEQ ID NO: 2818217 - RNA, 16 nt, Human
agaucacgccacugca

SEQ ID NO: 2818218 - RNA, 15 nt, Human
agaucacgccacugc

SEQ ID NO: 2818219 - RNA, 14 nt, Human
agaucacgccacug

SEQ ID NO: 2818220 - RNA, 16 nt, Human
agaucaaggagaggag

SEQ ID NO: 2818221 - RNA, 14 nt, Human
agauauuguacaua

SEQ ID NO: 2818222 - RNA, 15 nt, Human
agauauuguacauaa

SEQ ID NO: 2818223 - RNA, 16 nt, Human
agauauuguacauaaa

SEQ ID NO: 2818224 - RNA, 18 nt, Human
agauauuguacauaaaag

SEQ ID NO: 2818225 - RNA, 19 nt, Human
agauauuguacauaaaaga

SEQ ID NO: 2818226 - RNA, 13 nt, Human
agauauuguucaa

SEQ ID NO: 2818227 - RNA, 19 nt, Human
agauauuguucaaacaaua

SEQ ID NO: 2818228 - RNA, 23 nt, Human
agauauuguucaaacaauaucau

SEQ ID NO: 2818229 - RNA, 23 nt, Human
agauauuuaaguauaaaauacaa

SEQ ID NO: 2818230 - RNA, 20 nt, Human
agauauggagaauugcugaa

SEQ ID NO: 2818231 - RNA, 16 nt, Human
agauaugggaacacug

SEQ ID NO: 2818232 - RNA, 21 nt, Human
agauauuacuacuuaccauuu

SEQ ID NO: 2818233 - RNA, 13 nt, Human
agauauuacuuua

SEQ ID NO: 2818234 - RNA, 14 nt, Human
agauauuacuuuau

SEQ ID NO: 2818235 - RNA, 15 nt, Human
agauauuacuuuauc

SEQ ID NO: 2818236 - RNA, 16 nt, Human
agauauuacuuuauca

SEQ ID NO: 2818237 - RNA, 17 nt, Human
agauauuacuuuaucac

SEQ ID NO: 2818238 - RNA, 22 nt, Human
agauauuacuuuaucacuuuuu

SEQ ID NO: 2818239 - RNA, 14 nt, Human
agauauuauugcuu

SEQ ID NO: 2818240 - RNA, 23 nt, Human
agaugcgucccaagauguugauu

SEQ ID NO: 2818241 - RNA, 20 nt, Human
agaugcuaaaaucccuggau

SEQ ID NO: 2818242 - RNA, 15 nt, Human
agaugcgucccaaga

SEQ ID NO: 2818243 - RNA, 20 nt, Human
agaugcgucccaagauguug

SEQ ID NO: 2818244 - RNA, 22 nt, Human
agaugccuuuuuuguaguuuuu

SEQ ID NO: 2818245 - RNA, 22 nt, Human
agaugcgagcgcuaucuucaca

SEQ ID NO: 2818246 - RNA, 18 nt, Human
agaugcgcagccccaucu

SEQ ID NO: 2818247 - RNA, 19 nt, Human
agaugcgcagccccaucug

SEQ ID NO: 2818248 - RNA, 20 nt, Human
agaugcgcagccccaucugu

SEQ ID NO: 2818249 - RNA, 23 nt, Human
agaugcgcagccccaucugugca

SEQ ID NO: 2818250 - RNA, 17 nt, Human
agaugcagagagccauu

SEQ ID NO: 2818251 - RNA, 19 nt, Human
ugacauuguauguaucuau

SEQ ID NO: 2818252 - RNA, 12 nt, Human
agaugcagagag

SEQ ID NO: 2818253 - RNA, 13 nt, Human
agaugcagagagc

SEQ ID NO: 2818254 - RNA, 14 nt, Human
agaugcagagagcc

SEQ ID NO: 2818255 - RNA, 15 nt, Human
agaugcagagagcca

SEQ ID NO: 2818256 - RNA, 15 nt, Human
agaugcaccagcccu

SEQ ID NO: 2818257 - RNA, 14 nt, Human
agaugcaccagccc

SEQ ID NO: 2818258 - RNA, 16 nt, Human
agaucauucaguguuu

SEQ ID NO: 2818259 - RNA, 14 nt, Human
agauguucccccau

SEQ ID NO: 2818260 - RNA, 14 nt, Human
agauguucgguuuu

SEQ ID NO: 2818261 - RNA, 13 nt, Human
ugacccacugcuu

SEQ ID NO: 2818262 - RNA, 12 nt, Human
ugacccacugcu

SEQ ID NO: 2818263 - RNA, 21 nt, Human
ugacccaaaucucuuccacaa

SEQ ID NO: 2818264 - RNA, 15 nt, Human
agaugcugguuuucu

SEQ ID NO: 2818265 - RNA, 20 nt, Human
agaugcuguaacuuaaaaua

SEQ ID NO: 2818266 - RNA, 22 nt, Human
agaugcuguaacuuaaaauagg

SEQ ID NO: 2818267 - RNA, 16 nt, Human
agaugcugugagucuu

SEQ ID NO: 2818268 - RNA, 20 nt, Human
agaugcugugagucuuuggu

SEQ ID NO: 2818269 - RNA, 15 nt, Human
agaugugauauucua

SEQ ID NO: 2818270 - RNA, 16 nt, Human
agaugugauauucuaa

SEQ ID NO: 2818271 - RNA, 17 nt, Human
agaugugauauucuaag

SEQ ID NO: 2818272 - RNA, 18 nt, Human
agaugugauauucuaaga

SEQ ID NO: 2818273 - RNA, 19 nt, Human
agaugugauauucuaagac

SEQ ID NO: 2818274 - RNA, 20 nt, Human
agaugugauauucuaagacu

SEQ ID NO: 2818275 - RNA, 23 nt, Human
agaugugaugcuugauauuuucu

SEQ ID NO: 2818276 - RNA, 21 nt, Human
agaugugcacccaugggcucu

SEQ ID NO: 2818277 - RNA, 14 nt, Human
agaugugcagcaga

SEQ ID NO: 2818278 - RNA, 15 nt, Human
agaugugcagcagau

SEQ ID NO: 2818279 - RNA, 17 nt, Human
agaugugcagcagauug

SEQ ID NO: 2818280 - RNA, 18 nt, Human
agaugugcagcagauugg

SEQ ID NO: 2818281 - RNA, 22 nt, Human
agaugugcagcagauuggaagg

SEQ ID NO: 2818282 - RNA, 23 nt, Human
agaugugcagcagauuggaagga

SEQ ID NO: 2818283 - RNA, 12 nt, Human
agauguggagcc

SEQ ID NO: 2818284 - RNA, 13 nt, Human
agauguggagcca

SEQ ID NO: 2818285 - RNA, 14 nt, Human
agauguggagccag

SEQ ID NO: 2818286 - RNA, 15 nt, Human
agauguggagccagg

SEQ ID NO: 2818287 - RNA, 16 nt, Human
agauguggagccaggc

SEQ ID NO: 2818288 - RNA, 13 nt, Human
agaugugcaccca

SEQ ID NO: 2818289 - RNA, 15 nt, Human
agaugugcacccaug

SEQ ID NO: 2818290 - RNA, 15 nt, Human
agauguuagacucau

SEQ ID NO: 2818291 - RNA, 19 nt, Human
agauguguugcuauccuga

SEQ ID NO: 2818292 - RNA, 21 nt, Human
agauguggccuuccauuuaua

SEQ ID NO: 2818293 - RNA, 12 nt, Human
agauguuaaaaa

SEQ ID NO: 2818294 - RNA, 21 nt, Human
ugacacacagcucuguccugg

SEQ ID NO: 2818295 - RNA, 19 nt, Human
ugacagccucccaccccca

SEQ ID NO: 2818296 - RNA, 17 nt, Human
ugacagccucccacccc

SEQ ID NO: 2818297 - RNA, 22 nt, Human
ugacagccucccacccccaucu

SEQ ID NO: 2818298 - RNA, 19 nt, Human
ugacacagaaaauguugag

SEQ ID NO: 2818299 - RNA, 18 nt, Human
ugacacagaaaauguuga

SEQ ID NO: 2818300 - RNA, 13 nt, Human
ugacacacuacac

SEQ ID NO: 2818301 - RNA, 15 nt, Human
ugacacacuacacca

SEQ ID NO: 2818302 - RNA, 16 nt, Human
ugacacacuacaccac

SEQ ID NO: 2818303 - RNA, 17 nt, Human
ugacacacuacaccaca

SEQ ID NO: 2818304 - RNA, 18 nt, Human
ugacacacuacaccacac

SEQ ID NO: 2818305 - RNA, 19 nt, Human
ugacacacuacaccacaca

SEQ ID NO: 2818306 - RNA, 20 nt, Human
ugacacacuacaccacacac

SEQ ID NO: 2818307 - RNA, 21 nt, Human
ugacacacuacaccacacaca

SEQ ID NO: 2818308 - RNA, 22 nt, Human
ugacacacuacaccacacacaa

SEQ ID NO: 2818309 - RNA, 20 nt, Human
ugacaggcaaugcuggcugu

SEQ ID NO: 2818310 - RNA, 15 nt, Human
ugacagcugucccug

SEQ ID NO: 2818311 - RNA, 13 nt, Human
ugacagcuguccc

SEQ ID NO: 2818312 - RNA, 19 nt, Human
ugacagcucuuuuugugaa

SEQ ID NO: 2818313 - RNA, 20 nt, Human
ugacagcucuuuuugugaag

SEQ ID NO: 2818314 - RNA, 16 nt, Human
ugacagggcacaccgg

SEQ ID NO: 2818315 - RNA, 11 nt, Human
ugacagggcac

SEQ ID NO: 2818316 - RNA, 18 nt, Human
ugacaggccugaagauau

SEQ ID NO: 2818317 - RNA, 20 nt, Human
ugacagggcacaccgggcac

SEQ ID NO: 2818318 - RNA, 21 nt, Human
ugacaguggccgcccaaggcc

SEQ ID NO: 2818319 - RNA, 16 nt, Human
ugacaguucugaagaa

SEQ ID NO: 2818320 - RNA, 16 nt, Human
ugacaguuuuucuguu

SEQ ID NO: 2818321 - RNA, 17 nt, Human
ugacaguuuuucuguuu

SEQ ID NO: 2818322 - RNA, 13 nt, Human
ugacaguuauuuu

SEQ ID NO: 2818323 - RNA, 19 nt, Human
ugacaguguugaaaauguu

SEQ ID NO: 2818324 - RNA, 16 nt, Human
ugacaguguugaaaau

SEQ ID NO: 2818325 - RNA, 16 nt, Human
ugacauuuaauuuagu

SEQ ID NO: 2818326 - RNA, 18 nt, Human
ugacauuuaauuuaguga

SEQ ID NO: 2818327 - RNA, 23 nt, Human
ugacauuuaauuuagugaucuua

SEQ ID NO: 2818328 - RNA, 21 nt, Human
ugacauuguuggccaaagcca

SEQ ID NO: 2818329 - RNA, 20 nt, Human
ugacauuguuggccaaagcc

SEQ ID NO: 2818330 - RNA, 17 nt, Human
ugacaguucugaagaau

SEQ ID NO: 2818331 - RNA, 22 nt, Human
ugacauuguagagcuucuggca

SEQ ID NO: 2818332 - RNA, 15 nt, Human
agaucaguguaccau

SEQ ID NO: 2818333 - RNA, 21 nt, Human
agaucauccagaaguuccuca

SEQ ID NO: 2818334 - RNA, 17 nt, Human
agaucauggaacacaaa

SEQ ID NO: 2818335 - RNA, 19 nt, Human
agaucauggaacacaaaca

SEQ ID NO: 2818336 - RNA, 16 nt, Human
agaucauaaggcuuca

SEQ ID NO: 2818337 - RNA, 21 nt, Human
agaucaguguaccauuugccu

SEQ ID NO: 2818338 - RNA, 18 nt, Human
agaucaguguaccauuug

SEQ ID NO: 2818339 - RNA, 13 nt, Human
agaucauaaggcu

SEQ ID NO: 2818340 - RNA, 19 nt, Human
agagguuguagugagccca

SEQ ID NO: 2818341 - RNA, 20 nt, Human
agagguuguagugagcccag

SEQ ID NO: 2818342 - RNA, 17 nt, Human
agagguccucuggagcc

SEQ ID NO: 2818343 - RNA, 12 nt, Human
agagguccagcc

SEQ ID NO: 2818344 - RNA, 13 nt, Human
agagguccagccc

SEQ ID NO: 2818345 - RNA, 14 nt, Human
agagguccagccca

SEQ ID NO: 2818346 - RNA, 15 nt, Human
agagguccagcccau

SEQ ID NO: 2818347 - RNA, 16 nt, Human
agagguccagcccauc

SEQ ID NO: 2818348 - RNA, 17 nt, Human
agagguccagcccaucu

SEQ ID NO: 2818349 - RNA, 18 nt, Human
agagguccagcccaucuc

SEQ ID NO: 2818350 - RNA, 19 nt, Human
agagguccacaacacacag

SEQ ID NO: 2818351 - RNA, 18 nt, Human
agagguccucuggagccc

SEQ ID NO: 2818352 - RNA, 17 nt, Human
agagguauuuaucuuua

SEQ ID NO: 2818353 - RNA, 14 nt, Human
agaggucagacuaa

SEQ ID NO: 2818354 - RNA, 18 nt, Human
agagguacuagaaugcuu

SEQ ID NO: 2818355 - RNA, 16 nt, Human
agagguagggcugcca

SEQ ID NO: 2818356 - RNA, 17 nt, Human
agagguacaggguuuuu

SEQ ID NO: 2818357 - RNA, 19 nt, Human
agagguacaggguuuuuac

SEQ ID NO: 2818358 - RNA, 21 nt, Human
agagguacaggguuuuuaccu

SEQ ID NO: 2818359 - RNA, 13 nt, Human
agaggcugaggac

SEQ ID NO: 2818360 - RNA, 12 nt, Human
agaggcugagac

SEQ ID NO: 2818361 - RNA, 16 nt, Human
agaggcugagacagga

SEQ ID NO: 2818362 - RNA, 13 nt, Human
ugaagcaaggaag

SEQ ID NO: 2818363 - RNA, 14 nt, Human
ugaagcaaggaaga

SEQ ID NO: 2818364 - RNA, 20 nt, Human
ugaagcaaggaagauauaca

SEQ ID NO: 2818365 - RNA, 21 nt, Human
ugaagcaaggaagauauacau

SEQ ID NO: 2818366 - RNA, 20 nt, Human
ugaagcaaggcgguggacuu

SEQ ID NO: 2818367 - RNA, 18 nt, Human
ugaagcaauggauauuug

SEQ ID NO: 2818368 - RNA, 21 nt, Human
agaguagauggugaaauuuau

SEQ ID NO: 2818369 - RNA, 22 nt, Human
agaguagauggugaaauuuauu

SEQ ID NO: 2818370 - RNA, 18 nt, Human
agaguagaauugcauuga

SEQ ID NO: 2818371 - RNA, 17 nt, Human
agaguagaauugcauug

SEQ ID NO: 2818372 - RNA, 22 nt, Human
agagguuugacuagaugaugga

SEQ ID NO: 2818373 - RNA, 16 nt, Human
agaguagaauugcauu

SEQ ID NO: 2818374 - RNA, 15 nt, Human
agaguagaauugcau

SEQ ID NO: 2818375 - RNA, 13 nt, Human
agaguagaaauaa

SEQ ID NO: 2818376 - RNA, 14 nt, Human
agaguagaaauaaa

SEQ ID NO: 2818377 - RNA, 15 nt, Human
agaguagaaauaaaa

SEQ ID NO: 2818378 - RNA, 13 nt, Human
agaggcagggucu

SEQ ID NO: 2818379 - RNA, 10 nt, Human
agaggcaggg

SEQ ID NO: 2818380 - RNA, 23 nt, Human
agaggccauggcagaauaaucuu

SEQ ID NO: 2818381 - RNA, 20 nt, Human
agaggccauggcagaauaau

SEQ ID NO: 2818382 - RNA, 16 nt, Human
agaggccauggcagaa

SEQ ID NO: 2818383 - RNA, 15 nt, Human
agaggccauggcaga

SEQ ID NO: 2818384 - RNA, 14 nt, Human
agaggccauggcag

SEQ ID NO: 2818385 - RNA, 19 nt, Human
agaggcuauuauuuucacu

SEQ ID NO: 2818386 - RNA, 19 nt, Human
agaggccaugggccuccug

SEQ ID NO: 2818387 - RNA, 19 nt, Human
agaggcagccccauucugc

SEQ ID NO: 2818388 - RNA, 13 nt, Human
agaggcagcccca

SEQ ID NO: 2818389 - RNA, 24 nt, Human
agaggcagccccauucugccugcc

SEQ ID NO: 2818390 - RNA, 15 nt, Human
agaggcagagagcgg

SEQ ID NO: 2818391 - RNA, 15 nt, Human
agagcuuuuaaaaau

SEQ ID NO: 2818392 - RNA, 16 nt, Human
agagcuuuuaaaaaug

SEQ ID NO: 2818393 - RNA, 23 nt, Human
agagcuuggacuggaugcauguu

SEQ ID NO: 2818394 - RNA, 13 nt, Human
agagcuuggacug

SEQ ID NO: 2818395 - RNA, 14 nt, Human
agagcuuggacugg

SEQ ID NO: 2818396 - RNA, 23 nt, Human
agagcuucuuccaggugcccagc

SEQ ID NO: 2818397 - RNA, 22 nt, Human
agagcuucuuccaggugcccag

SEQ ID NO: 2818398 - RNA, 12 nt, Human
agaggaaaaccc

SEQ ID NO: 2818399 - RNA, 18 nt, Human
agaggaaaacccucaagg

SEQ ID NO: 2818400 - RNA, 12 nt, Human
agaggcagagag

SEQ ID NO: 2818401 - RNA, 13 nt, Human
agaggcagagagc

SEQ ID NO: 2818402 - RNA, 14 nt, Human
agaggcagagagcg

SEQ ID NO: 2818403 - RNA, 23 nt, Human
agaggcagagagcggucucaggc

SEQ ID NO: 2818404 - RNA, 13 nt, Human
agaggcagagccu

SEQ ID NO: 2818405 - RNA, 21 nt, Human
agagcuguuuauggccucagc

SEQ ID NO: 2818406 - RNA, 20 nt, Human
agagcuguuuauggccucag

SEQ ID NO: 2818407 - RNA, 19 nt, Human
agagcuguuuauggccuca

SEQ ID NO: 2818408 - RNA, 21 nt, Human
agagcuuaaugauaauauugu

SEQ ID NO: 2818409 - RNA, 15 nt, Human
agagcuuaacagugu

SEQ ID NO: 2818410 - RNA, 22 nt, Human
agagcuucuguugcugccucau

SEQ ID NO: 2818411 - RNA, 15 nt, Human
agagcuucuuccagg

SEQ ID NO: 2818412 - RNA, 15 nt, Human
agagcuuagccugga

SEQ ID NO: 2818413 - RNA, 18 nt, Human
agagcuuagccuggagca

SEQ ID NO: 2818414 - RNA, 18 nt, Human
agagcuggagccuggugc

SEQ ID NO: 2818415 - RNA, 19 nt, Human
agagcuggagccuggugcc

SEQ ID NO: 2818416 - RNA, 15 nt, Human
agagcuggagccugg

SEQ ID NO: 2818417 - RNA, 17 nt, Human
agagcuggagccuggug

SEQ ID NO: 2818418 - RNA, 12 nt, Human
agagcuggagcc

SEQ ID NO: 2818419 - RNA, 17 nt, Human
agagcuggaccaguggu

SEQ ID NO: 2818420 - RNA, 18 nt, Human
ugaagaaauacugcacuu

SEQ ID NO: 2818421 - RNA, 18 nt, Human
ugaagaaacagauaccau

SEQ ID NO: 2818422 - RNA, 14 nt, Human
ugaacuuuggagag

SEQ ID NO: 2818423 - RNA, 17 nt, Human
ugaacuuugggaagccu

SEQ ID NO: 2818424 - RNA, 18 nt, Human
ugaacuuugggaagccuu

SEQ ID NO: 2818425 - RNA, 21 nt, Human
ugaacuauggacggugcucca

SEQ ID NO: 2818426 - RNA, 17 nt, Human
ugaacuauuucuacaca

SEQ ID NO: 2818427 - RNA, 20 nt, Human
ugaacuauuucuacacagug

SEQ ID NO: 2818428 - RNA, 12 nt, Human
ugaacuccuggc

SEQ ID NO: 2818429 - RNA, 11 nt, Human
ugaacuccugg

SEQ ID NO: 2818430 - RNA, 15 nt, Human
ugaacuccuggccuc

SEQ ID NO: 2818431 - RNA, 14 nt, Human
ugaacuccuggccu

SEQ ID NO: 2818432 - RNA, 14 nt, Human
ugaaccgcacagcu

SEQ ID NO: 2818433 - RNA, 20 nt, Human
ugaaauuuucuagacuuucu

SEQ ID NO: 2818434 - RNA, 18 nt, Human
ugaaauuuucuagacuuu

SEQ ID NO: 2818435 - RNA, 19 nt, Human
ugaaauuuucuagacuuuc

SEQ ID NO: 2818436 - RNA, 17 nt, Human
ugaaccuaugaagcaau

SEQ ID NO: 2818437 - RNA, 20 nt, Human
ugaaccucaccccgaggccc

SEQ ID NO: 2818438 - RNA, 22 nt, Human
ugaaccucaccccgaggcccug

SEQ ID NO: 2818439 - RNA, 23 nt, Human
ugaaccucaccccgaggcccugc

SEQ ID NO: 2818440 - RNA, 14 nt, Human
ugaaccugggaggu

SEQ ID NO: 2818441 - RNA, 13 nt, Human
ugaaccugugagu

SEQ ID NO: 2818442 - RNA, 19 nt, Human
ugaaccugugaguaaauau

SEQ ID NO: 2818443 - RNA, 20 nt, Human
ugaaccugugaguaaauauu

SEQ ID NO: 2818444 - RNA, 23 nt, Human
ugaaccugugaguaaauauugag

SEQ ID NO: 2818445 - RNA, 15 nt, Human
ugaaauaugugaagu

SEQ ID NO: 2818446 - RNA, 12 nt, Human
ugaaauaugcau

SEQ ID NO: 2818447 - RNA, 15 nt, Human
ugaaauaugcucuuu

SEQ ID NO: 2818448 - RNA, 18 nt, Human
ugaaauaugcucuuuugu

SEQ ID NO: 2818449 - RNA, 21 nt, Human
ugaaauaugcucuuuuguuug

SEQ ID NO: 2818450 - RNA, 12 nt, Human
ugaaauaauaga

SEQ ID NO: 2818451 - RNA, 14 nt, Human
ugaaauuguacaua

SEQ ID NO: 2818452 - RNA, 17 nt, Human
ugaaauuguacauauuu

SEQ ID NO: 2818453 - RNA, 23 nt, Human
ugaaauuguacauauuuguggaa

SEQ ID NO: 2818454 - RNA, 22 nt, Human
ugaaauugucuagcagagcagg

SEQ ID NO: 2818455 - RNA, 18 nt, Human
ugaaauugugaacucauu

SEQ ID NO: 2818456 - RNA, 22 nt, Human
ugaaauugugaacucauugcuc

SEQ ID NO: 2818457 - RNA, 14 nt, Human
ugaaauuuaaacau

SEQ ID NO: 2818458 - RNA, 16 nt, Human
ugaaauuuaaacauua

SEQ ID NO: 2818459 - RNA, 18 nt, Human
ugaaauuuaaacauuaaa

SEQ ID NO: 2818460 - RNA, 22 nt, Human
ugaaauuuaaacauuaaaaaug

SEQ ID NO: 2818461 - RNA, 14 nt, Human
ugaaauuucuagcc

SEQ ID NO: 2818462 - RNA, 15 nt, Human
ugaaauuucuagccu

SEQ ID NO: 2818463 - RNA, 16 nt, Human
ugaaauuucuagccug

SEQ ID NO: 2818464 - RNA, 21 nt, Human
ugaaauuucuagccugcacuu

SEQ ID NO: 2818465 - RNA, 17 nt, Human
ugaaauuuuaaacuaua

SEQ ID NO: 2818466 - RNA, 17 nt, Human
ugaaauuuucuagacuu

SEQ ID NO: 2818467 - RNA, 21 nt, Human
ugaaauuuucuagacuuucug

SEQ ID NO: 2818468 - RNA, 20 nt, Human
ugaaauuuucuugauuugag

SEQ ID NO: 2818469 - RNA, 12 nt, Human
ugaaauuuugca

SEQ ID NO: 2818470 - RNA, 16 nt, Human
ugaaauuuugcaaaua

SEQ ID NO: 2818471 - RNA, 18 nt, Human
ugaaauuuugcaaauaua

SEQ ID NO: 2818472 - RNA, 19 nt, Human
ugaaauuuugcaaauauaa

SEQ ID NO: 2818473 - RNA, 20 nt, Human
ugaaauuuugcaaauauaaa

SEQ ID NO: 2818474 - RNA, 22 nt, Human
ugaaauuuugcaaauauaaaca

SEQ ID NO: 2818475 - RNA, 22 nt, Human
ugaaauuuuuaaaaauacacuu

SEQ ID NO: 2818476 - RNA, 17 nt, Human
ugaaaguuugcacugua

SEQ ID NO: 2818477 - RNA, 15 nt, Human
ugaaaguuacccacu

SEQ ID NO: 2818478 - RNA, 22 nt, Human
ugaaaguuacccacugaagccc

SEQ ID NO: 2818479 - RNA, 14 nt, Human
ugaaaguucuugcu

SEQ ID NO: 2818480 - RNA, 14 nt, Human
ugaaaguuguacau

SEQ ID NO: 2818481 - RNA, 15 nt, Human
ugaaaguuguacaug

SEQ ID NO: 2818482 - RNA, 18 nt, Human
ugaaaguuguacaugaaa

SEQ ID NO: 2818483 - RNA, 19 nt, Human
ugaaaguuguacaugaaau

SEQ ID NO: 2818484 - RNA, 20 nt, Human
ugaaaguuuucagaaccucu

SEQ ID NO: 2818485 - RNA, 22 nt, Human
ugaaaguuuugaguagauauua

SEQ ID NO: 2818486 - RNA, 18 nt, Human
ugaaaguuuucagaaccu

SEQ ID NO: 2818487 - RNA, 19 nt, Human
ugaaagugaggaaauaaag

SEQ ID NO: 2818488 - RNA, 15 nt, Human
ugaaagugaugacau

SEQ ID NO: 2818489 - RNA, 16 nt, Human
ugaaagugaugacaua

SEQ ID NO: 2818490 - RNA, 20 nt, Human
ugaaagugaugacauauuuu

SEQ ID NO: 2818491 - RNA, 18 nt, Human
ugaaagugaauaaacuuc

SEQ ID NO: 2818492 - RNA, 21 nt, Human
ugaaagugaauaaacuucagc

SEQ ID NO: 2818493 - RNA, 20 nt, Human
agagcugcccuccuugucca

SEQ ID NO: 2818494 - RNA, 21 nt, Human
agagcugcccuccuuguccac

SEQ ID NO: 2818495 - RNA, 16 nt, Human
agagcugccaucgcug

SEQ ID NO: 2818496 - RNA, 13 nt, Human
agagcugcccucc

SEQ ID NO: 2818497 - RNA, 19 nt, Human
agagcggaggcugugugcc

SEQ ID NO: 2818498 - RNA, 14 nt, Human
agagcggucucagg

SEQ ID NO: 2818499 - RNA, 23 nt, Human
agagcggucucaggcugguggga

SEQ ID NO: 2818500 - RNA, 20 nt, Human
agagcguggcugugcucuca

SEQ ID NO: 2818501 - RNA, 17 nt, Human
agagcgagagucugucu

SEQ ID NO: 2818502 - RNA, 18 nt, Human
agagcaaaauaauuuuaa

SEQ ID NO: 2818503 - RNA, 14 nt, Human
agagauuugucuaa

SEQ ID NO: 2818504 - RNA, 17 nt, Human
agagauuugucuaauug

SEQ ID NO: 2818505 - RNA, 18 nt, Human
agagauuuauauaaaugu

SEQ ID NO: 2818506 - RNA, 21 nt, Human
agagauuuauauaaauguaaa

SEQ ID NO: 2818507 - RNA, 23 nt, Human
agagauuuauauaaauguaaaaa

SEQ ID NO: 2818508 - RNA, 22 nt, Human
agacuugucaagccugugcaaa

SEQ ID NO: 2818509 - RNA, 22 nt, Human
ucuuuggcuccccuguaccuuu

SEQ ID NO: 2818510 - RNA, 14 nt, Human
ucuuuggcuccccu

SEQ ID NO: 2818511 - RNA, 20 nt, Human
agagcacacuuggcccaagu

SEQ ID NO: 2818512 - RNA, 21 nt, Human
agagcaaugcccguaaugcuu

SEQ ID NO: 2818513 - RNA, 17 nt, Human
agagcaaugguuguauu

SEQ ID NO: 2818514 - RNA, 13 nt, Human
agagcacaaacau

SEQ ID NO: 2818515 - RNA, 15 nt, Human
agagcacaaacauuu

SEQ ID NO: 2818516 - RNA, 16 nt, Human
agagcacaaacauuuu

SEQ ID NO: 2818517 - RNA, 17 nt, Human
agagcacaaacauuuuu

SEQ ID NO: 2818518 - RNA, 14 nt, Human
agagcaaaauugau

SEQ ID NO: 2818519 - RNA, 23 nt, Human
agagcaagauccugucuuuaagg

SEQ ID NO: 2818520 - RNA, 18 nt, Human
agagcaccuaguccagug

SEQ ID NO: 2818521 - RNA, 19 nt, Human
agagcaccuaguccaguga

SEQ ID NO: 2818522 - RNA, 21 nt, Human
agagccuucugaugucucuaa

SEQ ID NO: 2818523 - RNA, 22 nt, Human
agagccuucugaugucucuaaa

SEQ ID NO: 2818524 - RNA, 13 nt, Human
agagccagaccaa

SEQ ID NO: 2818525 - RNA, 20 nt, Human
agagcauuuccaacaccaca

SEQ ID NO: 2818526 - RNA, 21 nt, Human
agagccacaaaagaaaagacu

SEQ ID NO: 2818527 - RNA, 11 nt, Human
agagccacaca

SEQ ID NO: 2818528 - RNA, 12 nt, Human
agagccacacau

SEQ ID NO: 2818529 - RNA, 13 nt, Human
agagccacacaug

SEQ ID NO: 2818530 - RNA, 14 nt, Human
agagccacacaugg

SEQ ID NO: 2818531 - RNA, 19 nt, Human
agagcauugaauuggagag

SEQ ID NO: 2818532 - RNA, 20 nt, Human
agagcagaacagaucuuuua

SEQ ID NO: 2818533 - RNA, 20 nt, Human
agagcagaacggagccccag

SEQ ID NO: 2818534 - RNA, 23 nt, Human
agagcagaacggagccccaggcc

SEQ ID NO: 2818535 - RNA, 14 nt, Human
agagcagaggcagc

SEQ ID NO: 2818536 - RNA, 12 nt, Human
agagcagaugca

SEQ ID NO: 2818537 - RNA, 19 nt, Human
agagcaguaccagcgcucu

SEQ ID NO: 2818538 - RNA, 18 nt, Human
agagcaguccauuucuac

SEQ ID NO: 2818539 - RNA, 19 nt, Human
agagcaggcguucagcuca

SEQ ID NO: 2818540 - RNA, 19 nt, Human
agagcagaugcagagagcc

SEQ ID NO: 2818541 - RNA, 14 nt, Human
agagcagaugcaga

SEQ ID NO: 2818542 - RNA, 14 nt, Human
agagcagagaauau

SEQ ID NO: 2818543 - RNA, 15 nt, Human
agagcagaugcagag

SEQ ID NO: 2818544 - RNA, 18 nt, Human
agagcagaugcagagagc

SEQ ID NO: 2818545 - RNA, 14 nt, Human
ugaucacggcucac

SEQ ID NO: 2818546 - RNA, 13 nt, Human
ugaucacggcuca

SEQ ID NO: 2818547 - RNA, 15 nt, Human
ugaucacggcucacu

SEQ ID NO: 2818548 - RNA, 14 nt, Human
ugaucaccugcccu

SEQ ID NO: 2818549 - RNA, 14 nt, Human
ugauacagaacucu

SEQ ID NO: 2818550 - RNA, 15 nt, Human
ugauacagaacucuu

SEQ ID NO: 2818551 - RNA, 20 nt, Human
ugauacagucaacaagccug

SEQ ID NO: 2818552 - RNA, 14 nt, Human
ugauacauaacuaa

SEQ ID NO: 2818553 - RNA, 15 nt, Human
ugauacauaacuaaa

SEQ ID NO: 2818554 - RNA, 16 nt, Human
ugauacauaacuaaau

SEQ ID NO: 2818555 - RNA, 17 nt, Human
ugauacauaacuaaauu

SEQ ID NO: 2818556 - RNA, 19 nt, Human
ugauacauaacuaaauuug

SEQ ID NO: 2818557 - RNA, 22 nt, Human
ugauacauaacuaaauuugaua

SEQ ID NO: 2818558 - RNA, 13 nt, Human
ugauacauaauaa

SEQ ID NO: 2818559 - RNA, 20 nt, Human
ugauacaaauugcagacugu

SEQ ID NO: 2818560 - RNA, 16 nt, Human
ugauacaagauuagaa

SEQ ID NO: 2818561 - RNA, 17 nt, Human
ugauacaagauuagaag

SEQ ID NO: 2818562 - RNA, 17 nt, Human
ugauaccagaagggaaa

SEQ ID NO: 2818563 - RNA, 18 nt, Human
ugauaccagaagggaaag

SEQ ID NO: 2818564 - RNA, 21 nt, Human
ugauaccagaagggaaagcuu

SEQ ID NO: 2818565 - RNA, 16 nt, Human
ugauacaaugaacacu

SEQ ID NO: 2818566 - RNA, 15 nt, Human
ugauaccccccucug

SEQ ID NO: 2818567 - RNA, 21 nt, Human
ugaucaauuauaguuucugag

SEQ ID NO: 2818568 - RNA, 18 nt, Human
ugaucaauuauaguuucu

SEQ ID NO: 2818569 - RNA, 20 nt, Human
ugaucaauuauaguuucuga

SEQ ID NO: 2818570 - RNA, 22 nt, Human
ugaucaauuauaguuucugagg

SEQ ID NO: 2818571 - RNA, 16 nt, Human
ugaucaauuuugacuu

SEQ ID NO: 2818572 - RNA, 16 nt, Human
ugaucacacuauuuua

SEQ ID NO: 2818573 - RNA, 17 nt, Human
ugauaccccccucuguc

SEQ ID NO: 2818574 - RNA, 18 nt, Human
ugauaccccccucugucu

SEQ ID NO: 2818575 - RNA, 19 nt, Human
ugauaccccccucugucuu

SEQ ID NO: 2818576 - RNA, 15 nt, Human
ugauaccccugggga

SEQ ID NO: 2818577 - RNA, 16 nt, Human
ugauaccccuggggaa

SEQ ID NO: 2818578 - RNA, 22 nt, Human
ugauaccccuggggaacauuuc

SEQ ID NO: 2818579 - RNA, 13 nt, Human
agcaucccggagg

SEQ ID NO: 2818580 - RNA, 14 nt, Human
agcaucccggagga

SEQ ID NO: 2818581 - RNA, 19 nt, Human
agcaucccggaggaaaucu

SEQ ID NO: 2818582 - RNA, 20 nt, Human
agcaucccggaggaaaucug

SEQ ID NO: 2818583 - RNA, 20 nt, Human
agcaucccugaggagccagg

SEQ ID NO: 2818584 - RNA, 16 nt, Human
agcauccaaguggcau

SEQ ID NO: 2818585 - RNA, 22 nt, Human
agcaucccaggaucgcaagagc

SEQ ID NO: 2818586 - RNA, 19 nt, Human
agcauccccaaaacaaagu

SEQ ID NO: 2818587 - RNA, 12 nt, Human
agcaucccccaa

SEQ ID NO: 2818588 - RNA, 16 nt, Human
agcaucccccaaaguu

SEQ ID NO: 2818589 - RNA, 20 nt, Human
agcaucccccaaaguucaca

SEQ ID NO: 2818590 - RNA, 13 nt, Human
agcauccugagcc

SEQ ID NO: 2818591 - RNA, 16 nt, Human
agcauccugagccccg

SEQ ID NO: 2818592 - RNA, 17 nt, Human
agcauccugagccccgc

SEQ ID NO: 2818593 - RNA, 19 nt, Human
agcauccugagccccgccc

SEQ ID NO: 2818594 - RNA, 23 nt, Human
agcauccugagccccgcccucuu

SEQ ID NO: 2818595 - RNA, 21 nt, Human
agcaucccuugaccaggccug

SEQ ID NO: 2818596 - RNA, 22 nt, Human
agcaucccuugaccaggccugg

SEQ ID NO: 2818597 - RNA, 23 nt, Human
agcaucccuugaccaggccuggg

SEQ ID NO: 2818598 - RNA, 15 nt, Human
agcauccuaagaaau

SEQ ID NO: 2818599 - RNA, 16 nt, Human
agcauccuaagaaaua

SEQ ID NO: 2818600 - RNA, 17 nt, Human
agcauccuaagaaauau

SEQ ID NO: 2818601 - RNA, 19 nt, Human
agcauccuaagaaauaugu

SEQ ID NO: 2818602 - RNA, 21 nt, Human
agcauccuaagaaauauguga

SEQ ID NO: 2818603 - RNA, 22 nt, Human
agcauccuaagaaauaugugag

SEQ ID NO: 2818604 - RNA, 23 nt, Human
agcauccuaagaaauaugugaga

SEQ ID NO: 2818605 - RNA, 13 nt, Human
agcaucaccucag

SEQ ID NO: 2818606 - RNA, 14 nt, Human
ugaucacagcagcu

SEQ ID NO: 2818607 - RNA, 14 nt, Human
ugaucacgccuggc

SEQ ID NO: 2818608 - RNA, 15 nt, Human
ugaucacgccuggcu

SEQ ID NO: 2818609 - RNA, 16 nt, Human
ugaucacgccuggcua

SEQ ID NO: 2818610 - RNA, 19 nt, Human
agcaucaccucaggccagg

SEQ ID NO: 2818611 - RNA, 16 nt, Human
agcaucaccucaggcc

SEQ ID NO: 2818612 - RNA, 15 nt, Human
agcaucaccucaggc

SEQ ID NO: 2818613 - RNA, 14 nt, Human
agcaucaccucagg

SEQ ID NO: 2818614 - RNA, 13 nt, Human
agcaucaccugcc

SEQ ID NO: 2818615 - RNA, 15 nt, Human
agcaucaccugccug

SEQ ID NO: 2818616 - RNA, 12 nt, Human
agcaucacuccc

SEQ ID NO: 2818617 - RNA, 20 nt, Human
agcaucacuccccaaggaag

SEQ ID NO: 2818618 - RNA, 22 nt, Human
agcaucacuccccaaggaagag

SEQ ID NO: 2818619 - RNA, 20 nt, Human
agcaucaccucaggccaggu

SEQ ID NO: 2818620 - RNA, 17 nt, Human
agcaucagggggaagaa

SEQ ID NO: 2818621 - RNA, 18 nt, Human
agcaucagggggaagaag

SEQ ID NO: 2818622 - RNA, 20 nt, Human
agcaucagggggaagaagca

SEQ ID NO: 2818623 - RNA, 13 nt, Human
ugauaauuuugcu

SEQ ID NO: 2818624 - RNA, 14 nt, Human
agcaucauccugca

SEQ ID NO: 2818625 - RNA, 15 nt, Human
agcauugaaauuaua

SEQ ID NO: 2818626 - RNA, 16 nt, Human
agcauugaaauuauag

SEQ ID NO: 2818627 - RNA, 22 nt, Human
agcauucucacuccuaccuggu

SEQ ID NO: 2818628 - RNA, 19 nt, Human
agcauucucaggcaccagu

SEQ ID NO: 2818629 - RNA, 13 nt, Human
agcauucucccca

SEQ ID NO: 2818630 - RNA, 17 nt, Human
agcauucuccccagugu

SEQ ID NO: 2818631 - RNA, 14 nt, Human
agcauucuggcagu

SEQ ID NO: 2818632 - RNA, 17 nt, Human
agcauucuggcaguuuu

SEQ ID NO: 2818633 - RNA, 15 nt, Human
agcauuccuucuuug

SEQ ID NO: 2818634 - RNA, 16 nt, Human
agcauuccuucuuuga

SEQ ID NO: 2818635 - RNA, 17 nt, Human
agcauuccuucuuugau

SEQ ID NO: 2818636 - RNA, 18 nt, Human
agcauuccuucuuugaua

SEQ ID NO: 2818637 - RNA, 14 nt, Human
agcauucccuccca

SEQ ID NO: 2818638 - RNA, 18 nt, Human
agcauucucacuccuacc

SEQ ID NO: 2818639 - RNA, 20 nt, Human
agcauucucacuccuaccug

SEQ ID NO: 2818640 - RNA, 24 nt, Human
agcauuccuucuuugauaauguua

SEQ ID NO: 2818641 - RNA, 19 nt, Human
agcauuccuucuuugauaa

SEQ ID NO: 2818642 - RNA, 21 nt, Human
agcauuccuucuuugauaaug

SEQ ID NO: 2818643 - RNA, 22 nt, Human
agcauuccuucuuugauaaugu

SEQ ID NO: 2818644 - RNA, 23 nt, Human
agcauuccuucuuugauaauguu

SEQ ID NO: 2818645 - RNA, 14 nt, Human
agcaugggccuggc

SEQ ID NO: 2818646 - RNA, 21 nt, Human
agcauguaauguuaauguuau

SEQ ID NO: 2818647 - RNA, 19 nt, Human
agcaugggccuggccaccu

SEQ ID NO: 2818648 - RNA, 16 nt, Human
agcauggucccugccu

SEQ ID NO: 2818649 - RNA, 17 nt, Human
agcauggucccugccuu

SEQ ID NO: 2818650 - RNA, 15 nt, Human
agcauuaugcaauua

SEQ ID NO: 2818651 - RNA, 16 nt, Human
agcauuaugcaauuag

SEQ ID NO: 2818652 - RNA, 17 nt, Human
agcauuagauuucucau

SEQ ID NO: 2818653 - RNA, 14 nt, Human
agcauucagagagc

SEQ ID NO: 2818654 - RNA, 15 nt, Human
agcauucagagagca

SEQ ID NO: 2818655 - RNA, 16 nt, Human
agcauucagagagcag

SEQ ID NO: 2818656 - RNA, 17 nt, Human
agcauucagagagcagc

SEQ ID NO: 2818657 - RNA, 16 nt, Human
agcauuuuuauuucag

SEQ ID NO: 2818658 - RNA, 17 nt, Human
agcauuuuuauuucaga

SEQ ID NO: 2818659 - RNA, 18 nt, Human
agccaaacauccuacaag

SEQ ID NO: 2818660 - RNA, 15 nt, Human
agccaaacccugucu

SEQ ID NO: 2818661 - RNA, 14 nt, Human
agccaaacccuguc

SEQ ID NO: 2818662 - RNA, 19 nt, Human
agccaaacccaugaggcaa

SEQ ID NO: 2818663 - RNA, 18 nt, Human
agccaaacccaugaggca

SEQ ID NO: 2818664 - RNA, 16 nt, Human
agcauuuuugauuuau

SEQ ID NO: 2818665 - RNA, 18 nt, Human
agcauuuuugauuuaugc

SEQ ID NO: 2818666 - RNA, 20 nt, Human
agcauuuuccagcacuuugc

SEQ ID NO: 2818667 - RNA, 23 nt, Human
agcauuuuagcaauuuauacaau

SEQ ID NO: 2818668 - RNA, 12 nt, Human
agcauuuaucau

SEQ ID NO: 2818669 - RNA, 15 nt, Human
agcauuuaucauucu

SEQ ID NO: 2818670 - RNA, 16 nt, Human
agcauuuaucauucuu

SEQ ID NO: 2818671 - RNA, 13 nt, Human
agcauuuguauuu

SEQ ID NO: 2818672 - RNA, 14 nt, Human
agcauuuguauuuu

SEQ ID NO: 2818673 - RNA, 23 nt, Human
agcauuuggaccaauagcccaca

SEQ ID NO: 2818674 - RNA, 14 nt, Human
agcauuugauaaug

SEQ ID NO: 2818675 - RNA, 15 nt, Human
agcauuugauaauga

SEQ ID NO: 2818676 - RNA, 16 nt, Human
agcauuugauaaugau

SEQ ID NO: 2818677 - RNA, 17 nt, Human
agcauuugauaaugaua

SEQ ID NO: 2818678 - RNA, 19 nt, Human
agcauuugauaaugauaaa

SEQ ID NO: 2818679 - RNA, 22 nt, Human
agcauuugauaaugauaaaaca

SEQ ID NO: 2818680 - RNA, 16 nt, Human
agccacggccaggcca

SEQ ID NO: 2818681 - RNA, 13 nt, Human
ugauuaagauuuu

SEQ ID NO: 2818682 - RNA, 17 nt, Human
ugauuaagauuuuacaa

SEQ ID NO: 2818683 - RNA, 12 nt, Human
ugauuaaggcag

SEQ ID NO: 2818684 - RNA, 13 nt, Human
ugauuaaggcagu

SEQ ID NO: 2818685 - RNA, 17 nt, Human
ugauuaaggcaguacaa

SEQ ID NO: 2818686 - RNA, 18 nt, Human
ugauuaaauaagauucua

SEQ ID NO: 2818687 - RNA, 19 nt, Human
ugauuaaauaagauucuaa

SEQ ID NO: 2818688 - RNA, 20 nt, Human
ugauuaaauaagauucuaac

SEQ ID NO: 2818689 - RNA, 22 nt, Human
ugauuaaauaagauucuaacgg

SEQ ID NO: 2818690 - RNA, 16 nt, Human
ugaugggcacuugaga

SEQ ID NO: 2818691 - RNA, 17 nt, Human
ugauuaaauaagauucu

SEQ ID NO: 2818692 - RNA, 24 nt, Human
ugauggggcaagggcacaaguccu

SEQ ID NO: 2818693 - RNA, 22 nt, Human
ugauggggcccuaauucagcca

SEQ ID NO: 2818694 - RNA, 15 nt, Human
ugauggucuggucua

SEQ ID NO: 2818695 - RNA, 16 nt, Human
ugauggucacuuaaaa

SEQ ID NO: 2818696 - RNA, 20 nt, Human
ugauggucacuuaaaaugug

SEQ ID NO: 2818697 - RNA, 23 nt, Human
ugauggucacuuaaaaugugcag

SEQ ID NO: 2818698 - RNA, 23 nt, Human
ugauggguuaguggauggaaggg

SEQ ID NO: 2818699 - RNA, 19 nt, Human
ugauggguuaguggaugga

SEQ ID NO: 2818700 - RNA, 20 nt, Human
ugaugaucuuugcagacagg

SEQ ID NO: 2818701 - RNA, 19 nt, Human
ugaugaucuuugcagacag

SEQ ID NO: 2818702 - RNA, 23 nt, Human
ugaugaaaugaggucagagccug

SEQ ID NO: 2818703 - RNA, 22 nt, Human
ugaugaaaugaggucagagccu

SEQ ID NO: 2818704 - RNA, 21 nt, Human
ugaugaucuuugcagacaggc

SEQ ID NO: 2818705 - RNA, 22 nt, Human
ugauggcacuuagcuaucagaa

SEQ ID NO: 2818706 - RNA, 20 nt, Human
ugauggcaggauggccuggc

SEQ ID NO: 2818707 - RNA, 22 nt, Human
ugauggcaccacugcacuccag

SEQ ID NO: 2818708 - RNA, 17 nt, Human
ugauggcaauuuuguaa

SEQ ID NO: 2818709 - RNA, 15 nt, Human
ugauggcaauuuugu

SEQ ID NO: 2818710 - RNA, 22 nt, Human
ugaugggcaacccccagccugc

SEQ ID NO: 2818711 - RNA, 21 nt, Human
ugaugggcaacccccagccug

SEQ ID NO: 2818712 - RNA, 15 nt, Human
ugauggcuucuccag

SEQ ID NO: 2818713 - RNA, 13 nt, Human
ugauggcuucucc

SEQ ID NO: 2818714 - RNA, 19 nt, Human
ugaucccaagugccagucu

SEQ ID NO: 2818715 - RNA, 23 nt, Human
agccaccccgggcucucugcugu

SEQ ID NO: 2818716 - RNA, 21 nt, Human
agccaccccgggcucucugcu

SEQ ID NO: 2818717 - RNA, 20 nt, Human
agccaccccgggcucucugc

SEQ ID NO: 2818718 - RNA, 19 nt, Human
agccaccccgggcucucug

SEQ ID NO: 2818719 - RNA, 20 nt, Human
agccaccccagaaaugguga

SEQ ID NO: 2818720 - RNA, 14 nt, Human
agccaccccgggcu

SEQ ID NO: 2818721 - RNA, 18 nt, Human
agccaccccagaaauggu

SEQ ID NO: 2818722 - RNA, 14 nt, Human
ugauccacucgccu

SEQ ID NO: 2818723 - RNA, 18 nt, Human
ugauccacucgccuucau

SEQ ID NO: 2818724 - RNA, 18 nt, Human
ugauccucccaccucagc

SEQ ID NO: 2818725 - RNA, 20 nt, Human
ugauccuaacugaagagaca

SEQ ID NO: 2818726 - RNA, 20 nt, Human
ugauccccaaguggugaaug

SEQ ID NO: 2818727 - RNA, 18 nt, Human
ugauccccaagugugaac

SEQ ID NO: 2818728 - RNA, 13 nt, Human
ugaucccagcacu

SEQ ID NO: 2818729 - RNA, 12 nt, Human
ugaucccagcac

SEQ ID NO: 2818730 - RNA, 20 nt, Human
ugauccucccaccucagccu

SEQ ID NO: 2818731 - RNA, 19 nt, Human
ugauccucccaccucagcc

SEQ ID NO: 2818732 - RNA, 15 nt, Human
ugaucuacaugagga

SEQ ID NO: 2818733 - RNA, 17 nt, Human
agccaccacguccagcu

SEQ ID NO: 2818734 - RNA, 13 nt, Human
agccaccacgccc

SEQ ID NO: 2818735 - RNA, 20 nt, Human
agccacagugagggagaucc

SEQ ID NO: 2818736 - RNA, 22 nt, Human
agccacagugagggagauccca

SEQ ID NO: 2818737 - RNA, 17 nt, Human
agccaccacaccuggcu

SEQ ID NO: 2818738 - RNA, 21 nt, Human
agccacacucugggcuccaga

SEQ ID NO: 2818739 - RNA, 21 nt, Human
agccacacugugggacucuuc

SEQ ID NO: 2818740 - RNA, 15 nt, Human
agccacacccaggca

SEQ ID NO: 2818741 - RNA, 16 nt, Human
agccacagcagcauuu

SEQ ID NO: 2818742 - RNA, 18 nt, Human
agccacagcagcauuuuu

SEQ ID NO: 2818743 - RNA, 20 nt, Human
agccacagcagcauuuuuau

SEQ ID NO: 2818744 - RNA, 20 nt, Human
agccaaugucuccuccccuu

SEQ ID NO: 2818745 - RNA, 14 nt, Human
agccaauguuuucc

SEQ ID NO: 2818746 - RNA, 23 nt, Human
agccaaucccucaccuucugagu

SEQ ID NO: 2818747 - RNA, 16 nt, Human
agccaaugucuccucc

SEQ ID NO: 2818748 - RNA, 16 nt, Human
agccaaacccugucug

SEQ ID NO: 2818749 - RNA, 19 nt, Human
agccacaagaaauuugauu

SEQ ID NO: 2818750 - RNA, 15 nt, Human
agccacaagucuucc

SEQ ID NO: 2818751 - RNA, 16 nt, Human
agccacaagucuucca

SEQ ID NO: 2818752 - RNA, 18 nt, Human
agccacaagucuuccaga

SEQ ID NO: 2818753 - RNA, 19 nt, Human
agccacaaaauaaauguug

SEQ ID NO: 2818754 - RNA, 21 nt, Human
agcaggcguucagcucacugu

SEQ ID NO: 2818755 - RNA, 17 nt, Human
agcaggcgcugugcuau

SEQ ID NO: 2818756 - RNA, 21 nt, Human
agcaggcgcugugcuaucaug

SEQ ID NO: 2818757 - RNA, 21 nt, Human
agcaggcgguggggagagaug

SEQ ID NO: 2818758 - RNA, 14 nt, Human
agcaggcagcgcca

SEQ ID NO: 2818759 - RNA, 16 nt, Human
agcaggcagcgccaag

SEQ ID NO: 2818760 - RNA, 16 nt, Human
agcaggccaaggucug

SEQ ID NO: 2818761 - RNA, 17 nt, Human
agcaggccaaggucuga

SEQ ID NO: 2818762 - RNA, 18 nt, Human
agcaggccaaggucugag

SEQ ID NO: 2818763 - RNA, 22 nt, Human
agcaggccaaggucugagccac

SEQ ID NO: 2818764 - RNA, 20 nt, Human
agcaggcacuugauuccuug

SEQ ID NO: 2818765 - RNA, 21 nt, Human
agcaggauuuuuuuguagaga

SEQ ID NO: 2818766 - RNA, 13 nt, Human
agcaggaguggug

SEQ ID NO: 2818767 - RNA, 18 nt, Human
agcaggaguggugcagac

SEQ ID NO: 2818768 - RNA, 20 nt, Human
agcaggaguggugcagacag

SEQ ID NO: 2818769 - RNA, 21 nt, Human
agcaggaguggugcagacaga

SEQ ID NO: 2818770 - RNA, 15 nt, Human
agcaggaggccaggc

SEQ ID NO: 2818771 - RNA, 14 nt, Human
agcaggaggccagg

SEQ ID NO: 2818772 - RNA, 20 nt, Human
agcaggagauugagaaggag

SEQ ID NO: 2818773 - RNA, 21 nt, Human
agcaggagauugagaaggaga

SEQ ID NO: 2818774 - RNA, 23 nt, Human
agcaggagauugagaaggagaga

SEQ ID NO: 2818775 - RNA, 14 nt, Human
agcaggaaggccug

SEQ ID NO: 2818776 - RNA, 16 nt, Human
agcaggaaggccuggg

SEQ ID NO: 2818777 - RNA, 17 nt, Human
agcaggaaggccugggu

SEQ ID NO: 2818778 - RNA, 13 nt, Human
agcaggaccucug

SEQ ID NO: 2818779 - RNA, 14 nt, Human
agcaggaccucccu

SEQ ID NO: 2818780 - RNA, 16 nt, Human
agcaggaccucccuuc

SEQ ID NO: 2818781 - RNA, 17 nt, Human
agcaggaccucccuucc

SEQ ID NO: 2818782 - RNA, 18 nt, Human
agcaggaccucccuuccg

SEQ ID NO: 2818783 - RNA, 22 nt, Human
agcaggaccucccuuccgaccc

SEQ ID NO: 2818784 - RNA, 22 nt, Human
agcaggaccucugaaacccugg

SEQ ID NO: 2818785 - RNA, 12 nt, Human
agcaggagacga

SEQ ID NO: 2818786 - RNA, 22 nt, Human
agcaggagacgacaggcgagag

SEQ ID NO: 2818787 - RNA, 15 nt, Human
agcaggagagaaauu

SEQ ID NO: 2818788 - RNA, 15 nt, Human
agcaggagauugaga

SEQ ID NO: 2818789 - RNA, 18 nt, Human
agcaggagauugagaagg

SEQ ID NO: 2818790 - RNA, 19 nt, Human
agcaggagauugagaagga

SEQ ID NO: 2818791 - RNA, 22 nt, Human
agcaggaagcauucagagagca

SEQ ID NO: 2818792 - RNA, 20 nt, Human
agcagccaagggaugaaaga

SEQ ID NO: 2818793 - RNA, 16 nt, Human
agcagcagcaggugau

SEQ ID NO: 2818794 - RNA, 13 nt, Human
agcagcagcaggu

SEQ ID NO: 2818795 - RNA, 12 nt, Human
agcagcagcagg

SEQ ID NO: 2818796 - RNA, 13 nt, Human
agcagcaggugau

SEQ ID NO: 2818797 - RNA, 12 nt, Human
agcagcagguga

SEQ ID NO: 2818798 - RNA, 14 nt, Human
agcagcaucuucug

SEQ ID NO: 2818799 - RNA, 15 nt, Human
agcagcaucuucugg

SEQ ID NO: 2818800 - RNA, 13 nt, Human
agcagcauuuuua

SEQ ID NO: 2818801 - RNA, 14 nt, Human
agcagcauuuuuau

SEQ ID NO: 2818802 - RNA, 20 nt, Human
agcagcauuuuuauuucaga

SEQ ID NO: 2818803 - RNA, 17 nt, Human
ugacccacugguuccuu

SEQ ID NO: 2818804 - RNA, 22 nt, Human
ugacccacugguuccuucuucc

SEQ ID NO: 2818805 - RNA, 17 nt, Human
ugacccacuucucauca

SEQ ID NO: 2818806 - RNA, 18 nt, Human
ugacccacuucucaucac

SEQ ID NO: 2818807 - RNA, 19 nt, Human
ugacccacuucucaucaca

SEQ ID NO: 2818808 - RNA, 22 nt, Human
ugacccacuucucaucacacac

SEQ ID NO: 2818809 - RNA, 23 nt, Human
ugacccacuucucaucacacaca

SEQ ID NO: 2818810 - RNA, 17 nt, Human
agcagggaaggccugac

SEQ ID NO: 2818811 - RNA, 16 nt, Human
agcagggaauuucuau

SEQ ID NO: 2818812 - RNA, 16 nt, Human
agcagggaaggccuga

SEQ ID NO: 2818813 - RNA, 12 nt, Human
agcagggaaggc

SEQ ID NO: 2818814 - RNA, 15 nt, Human
agcagggaaggccug

SEQ ID NO: 2818815 - RNA, 14 nt, Human
agcagggaaggccu

SEQ ID NO: 2818816 - RNA, 15 nt, Human
agcagggcucagcgg

SEQ ID NO: 2818817 - RNA, 14 nt, Human
agcagggcucagcg

SEQ ID NO: 2818818 - RNA, 13 nt, Human
agcagggcucagc

SEQ ID NO: 2818819 - RNA, 22 nt, Human
agcagggcucagcggggacagc

SEQ ID NO: 2818820 - RNA, 18 nt, Human
agcagggucgggaaaggc

SEQ ID NO: 2818821 - RNA, 16 nt, Human
agcaggggcuacaaga

SEQ ID NO: 2818822 - RNA, 19 nt, Human
agcaggggcuacaagaggg

SEQ ID NO: 2818823 - RNA, 20 nt, Human
agcaggggcuacaagaggga

SEQ ID NO: 2818824 - RNA, 21 nt, Human
agcaggggcuacaagagggaa

SEQ ID NO: 2818825 - RNA, 16 nt, Human
agcagggucugggcag

SEQ ID NO: 2818826 - RNA, 17 nt, Human
agcagggucugggcagg

SEQ ID NO: 2818827 - RNA, 22 nt, Human
agcaggugauuggaccaggcca

SEQ ID NO: 2818828 - RNA, 20 nt, Human
agcaggugauuggaccaggc

SEQ ID NO: 2818829 - RNA, 19 nt, Human
agcaggugauuggaccagg

SEQ ID NO: 2818830 - RNA, 17 nt, Human
agcaggguguugggaua

SEQ ID NO: 2818831 - RNA, 23 nt, Human
agcaggugauuggaccaggccau

SEQ ID NO: 2818832 - RNA, 16 nt, Human
agcaggcuacacugac

SEQ ID NO: 2818833 - RNA, 22 nt, Human
agcaggcuacacugacacuggu

SEQ ID NO: 2818834 - RNA, 15 nt, Human
agcagggaaacagcu

SEQ ID NO: 2818835 - RNA, 14 nt, Human
agcagggaaacagc

SEQ ID NO: 2818836 - RNA, 13 nt, Human
agcagggaaacag

SEQ ID NO: 2818837 - RNA, 15 nt, Human
agcaggcugugaguu

SEQ ID NO: 2818838 - RNA, 14 nt, Human
agcauagauguuuu

SEQ ID NO: 2818839 - RNA, 16 nt, Human
agcauagcuuauuauu

SEQ ID NO: 2818840 - RNA, 18 nt, Human
agcauagcuuauuauuga

SEQ ID NO: 2818841 - RNA, 20 nt, Human
agcauagcuuauuauugaag

SEQ ID NO: 2818842 - RNA, 22 nt, Human
agcauacaugcaaaaagaaaug

SEQ ID NO: 2818843 - RNA, 13 nt, Human
agcauaaaaacau

SEQ ID NO: 2818844 - RNA, 21 nt, Human
agcauaaaaacauuuuaaaaa

SEQ ID NO: 2818845 - RNA, 14 nt, Human
agcauauagagaug

SEQ ID NO: 2818846 - RNA, 17 nt, Human
ugaguacaaaugccuua

SEQ ID NO: 2818847 - RNA, 21 nt, Human
ugaguacaaaugccuuaaaau

SEQ ID NO: 2818848 - RNA, 23 nt, Human
ugaguacagaguguggacucugg

SEQ ID NO: 2818849 - RNA, 22 nt, Human
agcaguccugccucagccuccg

SEQ ID NO: 2818850 - RNA, 19 nt, Human
agcaguccugccucagccu

SEQ ID NO: 2818851 - RNA, 13 nt, Human
agcaguccaugca

SEQ ID NO: 2818852 - RNA, 15 nt, Human
agcaguccaugcaug

SEQ ID NO: 2818853 - RNA, 15 nt, Human
agcagucccugagac

SEQ ID NO: 2818854 - RNA, 14 nt, Human
agcaguuugcuuug

SEQ ID NO: 2818855 - RNA, 19 nt, Human
agcaguuucuguccugcug

SEQ ID NO: 2818856 - RNA, 20 nt, Human
agcaguuucuguccugcugg

SEQ ID NO: 2818857 - RNA, 18 nt, Human
agcaguuucuguccugcu

SEQ ID NO: 2818858 - RNA, 21 nt, Human
agcaguagaaauaauaugcau

SEQ ID NO: 2818859 - RNA, 14 nt, Human
agcaguacaauaaa

SEQ ID NO: 2818860 - RNA, 15 nt, Human
agcaguacaauaaaa

SEQ ID NO: 2818861 - RNA, 11 nt, Human
agcaguacaug

SEQ ID NO: 2818862 - RNA, 15 nt, Human
agcaguacaugggaa

SEQ ID NO: 2818863 - RNA, 17 nt, Human
agcaguaccagcgcucu

SEQ ID NO: 2818864 - RNA, 22 nt, Human
agcaguagaaauaauaugcauu

SEQ ID NO: 2818865 - RNA, 13 nt, Human
agcaguagacauu

SEQ ID NO: 2818866 - RNA, 14 nt, Human
agcaguagacauuu

SEQ ID NO: 2818867 - RNA, 17 nt, Human
agcaguagacauuuuaa

SEQ ID NO: 2818868 - RNA, 18 nt, Human
agcaguagacauuuuaac

SEQ ID NO: 2818869 - RNA, 20 nt, Human
agcaguagacauuuuaacaa

SEQ ID NO: 2818870 - RNA, 22 nt, Human
agcaguagacauuuuaacaaga

SEQ ID NO: 2818871 - RNA, 23 nt, Human
agcaguagacauuuuaacaagaa

SEQ ID NO: 2818872 - RNA, 17 nt, Human
agcaguaaauuugcuag

SEQ ID NO: 2818873 - RNA, 19 nt, Human
agcaguaaauuugcuagca

SEQ ID NO: 2818874 - RNA, 20 nt, Human
agcaguaaauuugcuagcag

SEQ ID NO: 2818875 - RNA, 17 nt, Human
agcagguuuuucuccuc

SEQ ID NO: 2818876 - RNA, 21 nt, Human
agcaguaaaagaugaaguuuu

SEQ ID NO: 2818877 - RNA, 22 nt, Human
agcagguugaggggcuccugga

SEQ ID NO: 2818878 - RNA, 21 nt, Human
agcagguugaggggcuccugg

SEQ ID NO: 2818879 - RNA, 20 nt, Human
agcagguugaggggcuccug

SEQ ID NO: 2818880 - RNA, 13 nt, Human
agcagguuagaga

SEQ ID NO: 2818881 - RNA, 14 nt, Human
agcagguuagagaa

SEQ ID NO: 2818882 - RNA, 15 nt, Human
ugagugugugugugc

SEQ ID NO: 2818883 - RNA, 16 nt, Human
ugagugugugugugca

SEQ ID NO: 2818884 - RNA, 18 nt, Human
ugagugugugugugcaug

SEQ ID NO: 2818885 - RNA, 18 nt, Human
ugaguguuuaauaaaguu

SEQ ID NO: 2818886 - RNA, 14 nt, Human
ugaguguuucuaug

SEQ ID NO: 2818887 - RNA, 15 nt, Human
ugaguguuucuauga

SEQ ID NO: 2818888 - RNA, 14 nt, Human
ugaguguuuggggg

SEQ ID NO: 2818889 - RNA, 15 nt, Human
ugagugugcugcugu

SEQ ID NO: 2818890 - RNA, 23 nt, Human
ugagugugcugcuguaagaaauc

SEQ ID NO: 2818891 - RNA, 12 nt, Human
ugagugugacag

SEQ ID NO: 2818892 - RNA, 13 nt, Human
ugagugugacagg

SEQ ID NO: 2818893 - RNA, 15 nt, Human
ugagugugacagggc

SEQ ID NO: 2818894 - RNA, 16 nt, Human
ugagugugacagggcc

SEQ ID NO: 2818895 - RNA, 17 nt, Human
ugagugugacagggcca

SEQ ID NO: 2818896 - RNA, 18 nt, Human
ugaguucauacccuguua

SEQ ID NO: 2818897 - RNA, 15 nt, Human
ugaguuacugugcau

SEQ ID NO: 2818898 - RNA, 16 nt, Human
ugaguuacugugcauu

SEQ ID NO: 2818899 - RNA, 17 nt, Human
ugaguuacugugcauug

SEQ ID NO: 2818900 - RNA, 16 nt, Human
ugagugugcauggagg

SEQ ID NO: 2818901 - RNA, 21 nt, Human
ugaguucgaggacuacaacca

SEQ ID NO: 2818902 - RNA, 16 nt, Human
ugauaaguaaaugcua

SEQ ID NO: 2818903 - RNA, 20 nt, Human
ugaguucuacauaaguaauu

SEQ ID NO: 2818904 - RNA, 15 nt, Human
ugaguucuacauaag

SEQ ID NO: 2818905 - RNA, 14 nt, Human
ugauaauagauucu

SEQ ID NO: 2818906 - RNA, 15 nt, Human
ugauaauagauucuc

SEQ ID NO: 2818907 - RNA, 19 nt, Human
ugauaaguuccuuuccuuu

SEQ ID NO: 2818908 - RNA, 23 nt, Human
ugauaaguuccuuuccuuuucuu

SEQ ID NO: 2818909 - RNA, 13 nt, Human
ugauaauaaauug

SEQ ID NO: 2818910 - RNA, 14 nt, Human
ugauaauaaauuga

SEQ ID NO: 2818911 - RNA, 15 nt, Human
ugauaauaaauugaa

SEQ ID NO: 2818912 - RNA, 18 nt, Human
ugauaauaaauugaaauu

SEQ ID NO: 2818913 - RNA, 23 nt, Human
ugauaauaaauugaaauugugaa

SEQ ID NO: 2818914 - RNA, 16 nt, Human
ugauaauaauauuguu

SEQ ID NO: 2818915 - RNA, 17 nt, Human
ugauaauaauauuguuu

SEQ ID NO: 2818916 - RNA, 18 nt, Human
ugauaauaauauuguuuu

SEQ ID NO: 2818917 - RNA, 12 nt, Human
ugagugccuggc

SEQ ID NO: 2818918 - RNA, 14 nt, Human
ugagugccuggcca

SEQ ID NO: 2818919 - RNA, 12 nt, Human
ugagugggagaa

SEQ ID NO: 2818920 - RNA, 15 nt, Human
ugagugggagaaggc

SEQ ID NO: 2818921 - RNA, 17 nt, Human
ugagugggagaaggcag

SEQ ID NO: 2818922 - RNA, 14 nt, Human
ugaguggccaggga

SEQ ID NO: 2818923 - RNA, 15 nt, Human
ugaguggccagggaa

SEQ ID NO: 2818924 - RNA, 17 nt, Human
ugaguggccagggaauc

SEQ ID NO: 2818925 - RNA, 18 nt, Human
ugagucaccaagcccagu

SEQ ID NO: 2818926 - RNA, 22 nt, Human
ugagucacccuaccugugccug

SEQ ID NO: 2818927 - RNA, 16 nt, Human
ugagucacccaugaag

SEQ ID NO: 2818928 - RNA, 20 nt, Human
ugagucacccuaccugugcc

SEQ ID NO: 2818929 - RNA, 15 nt, Human
ugagucagggcccag

SEQ ID NO: 2818930 - RNA, 16 nt, Human
ugagucagggcccaga

SEQ ID NO: 2818931 - RNA, 17 nt, Human
ugagucagggcccagag

SEQ ID NO: 2818932 - RNA, 18 nt, Human
ugagucagggcccagagg

SEQ ID NO: 2818933 - RNA, 22 nt, Human
ugagucagggcccagaggcuga

SEQ ID NO: 2818934 - RNA, 13 nt, Human
ugagucauuuaaa

SEQ ID NO: 2818935 - RNA, 16 nt, Human
ugagucauuuaaaugu

SEQ ID NO: 2818936 - RNA, 23 nt, Human
ugagucauuuaaauguguacaau

SEQ ID NO: 2818937 - RNA, 14 nt, Human
ugagugagccuggc

SEQ ID NO: 2818938 - RNA, 16 nt, Human
ugagugagccuggcuc

SEQ ID NO: 2818939 - RNA, 20 nt, Human
ugagugaugcggcagauuga

SEQ ID NO: 2818940 - RNA, 17 nt, Human
ugagugagccuggcucu

SEQ ID NO: 2818941 - RNA, 19 nt, Human
ugagugagccuggcucuug

SEQ ID NO: 2818942 - RNA, 13 nt, Human
ugccagugugcug

SEQ ID NO: 2818943 - RNA, 19 nt, Human
ugccagugugcugaugggc

SEQ ID NO: 2818944 - RNA, 19 nt, Human
ugccagcuacuuccuccuc

SEQ ID NO: 2818945 - RNA, 17 nt, Human
ugccagcucagucccau

SEQ ID NO: 2818946 - RNA, 23 nt, Human
ugccagccuggcuucuggagccc

SEQ ID NO: 2818947 - RNA, 22 nt, Human
ugccagccuggcuucuggagcc

SEQ ID NO: 2818948 - RNA, 21 nt, Human
ugccagccuggcuucuggagc

SEQ ID NO: 2818949 - RNA, 20 nt, Human
ugccagccuggcuucuggag

SEQ ID NO: 2818950 - RNA, 18 nt, Human
ugccagccuggcuucugg

SEQ ID NO: 2818951 - RNA, 17 nt, Human
ugccagccuggcuucug

SEQ ID NO: 2818952 - RNA, 16 nt, Human
ugccagccuggcuucu

SEQ ID NO: 2818953 - RNA, 22 nt, Human
ugccacagcuggagcucucaaa

SEQ ID NO: 2818954 - RNA, 17 nt, Human
ugccagccccacacagc

SEQ ID NO: 2818955 - RNA, 18 nt, Human
ugccagccccacacagcu

SEQ ID NO: 2818956 - RNA, 15 nt, Human
ugccagccuggcuuc

SEQ ID NO: 2818957 - RNA, 12 nt, Human
ugccagccuggc

SEQ ID NO: 2818958 - RNA, 22 nt, Human
ugccagccugaggcagccacuu

SEQ ID NO: 2818959 - RNA, 14 nt, Human
ugccaagcacugug

SEQ ID NO: 2818960 - RNA, 15 nt, Human
ugccaagcacugugc

SEQ ID NO: 2818961 - RNA, 17 nt, Human
ugccaagcacugugcuc

SEQ ID NO: 2818962 - RNA, 19 nt, Human
ugcauuguuagcacuaggc

SEQ ID NO: 2818963 - RNA, 13 nt, Human
ugcauuguuucug

SEQ ID NO: 2818964 - RNA, 14 nt, Human
ugcauuguuucugu

SEQ ID NO: 2818965 - RNA, 18 nt, Human
ugcauuguuucugugggc

SEQ ID NO: 2818966 - RNA, 18 nt, Human
ugcauugggauuuuagaa

SEQ ID NO: 2818967 - RNA, 15 nt, Human
ugccacagagcgggg

SEQ ID NO: 2818968 - RNA, 14 nt, Human
ugccacagagcggg

SEQ ID NO: 2818969 - RNA, 16 nt, Human
ugccacagagcgggga

SEQ ID NO: 2818970 - RNA, 17 nt, Human
ugccacagaguguagcc

SEQ ID NO: 2818971 - RNA, 18 nt, Human
ugccacagaguguagcca

SEQ ID NO: 2818972 - RNA, 22 nt, Human
ugccacagaguguagccagguc

SEQ ID NO: 2818973 - RNA, 18 nt, Human
ugccaagcucaggaccag

SEQ ID NO: 2818974 - RNA, 22 nt, Human
ugccaagcucaggaccaggcaa

SEQ ID NO: 2818975 - RNA, 14 nt, Human
ugccaagcucagga

SEQ ID NO: 2818976 - RNA, 15 nt, Human
ugccaagcucaggac

SEQ ID NO: 2818977 - RNA, 21 nt, Human
ugccaaggccagaguggccug

SEQ ID NO: 2818978 - RNA, 20 nt, Human
ugccaaggccagaguggccu

SEQ ID NO: 2818979 - RNA, 16 nt, Human
ugccaaggccagagug

SEQ ID NO: 2818980 - RNA, 19 nt, Human
ugccaauauuaaaucugcu

SEQ ID NO: 2818981 - RNA, 16 nt, Human
ugccaaucucaacacc

SEQ ID NO: 2818982 - RNA, 22 nt, Human
ugccaaggccagaguggccugg

SEQ ID NO: 2818983 - RNA, 17 nt, Human
ugccaaggcugaugcag

SEQ ID NO: 2818984 - RNA, 21 nt, Human
ugccaauauuaaaucugcugg

SEQ ID NO: 2818985 - RNA, 16 nt, Human
ugcauggcuccagaaa

SEQ ID NO: 2818986 - RNA, 13 nt, Human
ugcauggagcagg

SEQ ID NO: 2818987 - RNA, 13 nt, Human
ugcauggaggccc

SEQ ID NO: 2818988 - RNA, 16 nt, Human
ugcauggaggcccucc

SEQ ID NO: 2818989 - RNA, 18 nt, Human
ugcauggaggcccuccug

SEQ ID NO: 2818990 - RNA, 11 nt, Human
agccugaggcu

SEQ ID NO: 2818991 - RNA, 18 nt, Human
ugcauggcuccagaaaug

SEQ ID NO: 2818992 - RNA, 19 nt, Human
ugcauggcuccagaaaugu

SEQ ID NO: 2818993 - RNA, 17 nt, Human
agccugaggcugagacu

SEQ ID NO: 2818994 - RNA, 16 nt, Human
agccugaggcagccac

SEQ ID NO: 2818995 - RNA, 21 nt, Human
agccugaggcagccacuucgg

SEQ ID NO: 2818996 - RNA, 17 nt, Human
agccugagucagggccc

SEQ ID NO: 2818997 - RNA, 18 nt, Human
agccugagucagggccca

SEQ ID NO: 2818998 - RNA, 19 nt, Human
agccugagucagggcccag

SEQ ID NO: 2818999 - RNA, 20 nt, Human
agccugagucagggcccaga

SEQ ID NO: 2819000 - RNA, 21 nt, Human
agccugagucagggcccagag

SEQ ID NO: 2819001 - RNA, 23 nt, Human
agccugaguccacgaccuaggca

SEQ ID NO: 2819002 - RNA, 22 nt, Human
ugcauagcagaugguuuccaca

SEQ ID NO: 2819003 - RNA, 21 nt, Human
agccugugcauguaugucuug

SEQ ID NO: 2819004 - RNA, 16 nt, Human
agccugugcaaaaaaa

SEQ ID NO: 2819005 - RNA, 20 nt, Human
agccugugcaaaaaaauuaa

SEQ ID NO: 2819006 - RNA, 21 nt, Human
agccugugcaaaaaaauuaaa

SEQ ID NO: 2819007 - RNA, 16 nt, Human
agccuguaagccugca

SEQ ID NO: 2819008 - RNA, 17 nt, Human
agccuguaagccugcaa

SEQ ID NO: 2819009 - RNA, 18 nt, Human
agccuguaagccugcaag

SEQ ID NO: 2819010 - RNA, 19 nt, Human
agccugucccauggacacu

SEQ ID NO: 2819011 - RNA, 16 nt, Human
agccugucauccuugg

SEQ ID NO: 2819012 - RNA, 21 nt, Human
agccugucauccuuggucuuu

SEQ ID NO: 2819013 - RNA, 22 nt, Human
agccugucauccuuggucuuug

SEQ ID NO: 2819014 - RNA, 21 nt, Human
agccuugccuaaauuuaaugc

SEQ ID NO: 2819015 - RNA, 22 nt, Human
agccuugccuaaauuuaaugcu

SEQ ID NO: 2819016 - RNA, 23 nt, Human
agccuugccuaaauuuaaugcug

SEQ ID NO: 2819017 - RNA, 23 nt, Human
agccuugggaacaugcgugugac

SEQ ID NO: 2819018 - RNA, 16 nt, Human
agccuugggaccccug

SEQ ID NO: 2819019 - RNA, 14 nt, Human
agccuugaacucug

SEQ ID NO: 2819020 - RNA, 18 nt, Human
agccuugaacucugggcu

SEQ ID NO: 2819021 - RNA, 18 nt, Human
agccuucuuccaucccag

SEQ ID NO: 2819022 - RNA, 20 nt, Human
agccuucuuccaucccagga

SEQ ID NO: 2819023 - RNA, 22 nt, Human
agccuucuuccaucccaggaca

SEQ ID NO: 2819024 - RNA, 15 nt, Human
agccuucugaugucu

SEQ ID NO: 2819025 - RNA, 20 nt, Human
agccuuagaagucacacagu

SEQ ID NO: 2819026 - RNA, 18 nt, Human
agccuuaaucagguccuc

SEQ ID NO: 2819027 - RNA, 12 nt, Human
agccuuaauuuu

SEQ ID NO: 2819028 - RNA, 20 nt, Human
agccuuaauuuuuuuuucau

SEQ ID NO: 2819029 - RNA, 14 nt, Human
agccuuacauuugu

SEQ ID NO: 2819030 - RNA, 15 nt, Human
agccuuacauuugug

SEQ ID NO: 2819031 - RNA, 12 nt, Human
agccugugccuc

SEQ ID NO: 2819032 - RNA, 14 nt, Human
agccuguuucuucc

SEQ ID NO: 2819033 - RNA, 18 nt, Human
agccuguuucuuccuguu

SEQ ID NO: 2819034 - RNA, 23 nt, Human
agccuguuucuuccuguuaaugu

SEQ ID NO: 2819035 - RNA, 17 nt, Human
ugcauacugagccaagu

SEQ ID NO: 2819036 - RNA, 14 nt, Human
ugcauacuggacuc

SEQ ID NO: 2819037 - RNA, 19 nt, Human
ugcauacuggacucuucaa

SEQ ID NO: 2819038 - RNA, 20 nt, Human
ugcauacuggacucuucaaa

SEQ ID NO: 2819039 - RNA, 16 nt, Human
ugcauagaacugggua

SEQ ID NO: 2819040 - RNA, 17 nt, Human
ugcauagaacuggguaa

SEQ ID NO: 2819041 - RNA, 22 nt, Human
ugcauagaacuggguaaaugca

SEQ ID NO: 2819042 - RNA, 21 nt, Human
ugcagucagucaugauggcac

SEQ ID NO: 2819043 - RNA, 15 nt, Human
ugcagucaucagaag

SEQ ID NO: 2819044 - RNA, 16 nt, Human
ugcagucaucagaagu

SEQ ID NO: 2819045 - RNA, 21 nt, Human
ugcagucacguggaggagcag

SEQ ID NO: 2819046 - RNA, 19 nt, Human
ugcagucacguggaggagc

SEQ ID NO: 2819047 - RNA, 16 nt, Human
ugcaguaggggaggag

SEQ ID NO: 2819048 - RNA, 18 nt, Human
ugcaguaggggaggagca

SEQ ID NO: 2819049 - RNA, 16 nt, Human
ugcagguuggacccca

SEQ ID NO: 2819050 - RNA, 20 nt, Human
ugcagguuggaccccagaga

SEQ ID NO: 2819051 - RNA, 13 nt, Human
ugcaguauauuuc

SEQ ID NO: 2819052 - RNA, 14 nt, Human
ugcaguauauuucu

SEQ ID NO: 2819053 - RNA, 12 nt, Human
ugcaucuaagcc

SEQ ID NO: 2819054 - RNA, 15 nt, Human
ugcaucuaagcccau

SEQ ID NO: 2819055 - RNA, 16 nt, Human
ugcaucuaagcccaug

SEQ ID NO: 2819056 - RNA, 17 nt, Human
ugcaucuaagcccaugg

SEQ ID NO: 2819057 - RNA, 19 nt, Human
ugcauagagguaccagcaa

SEQ ID NO: 2819058 - RNA, 21 nt, Human
ugcaucucacuggaugcaaag

SEQ ID NO: 2819059 - RNA, 14 nt, Human
ugcaucucaaaauu

SEQ ID NO: 2819060 - RNA, 19 nt, Human
ugcaucucaaaauuauucu

SEQ ID NO: 2819061 - RNA, 13 nt, Human
ugcaucucagccc

SEQ ID NO: 2819062 - RNA, 14 nt, Human
ugcaucucagccca

SEQ ID NO: 2819063 - RNA, 18 nt, Human
ugcaucuuauagcacuuu

SEQ ID NO: 2819064 - RNA, 21 nt, Human
ugcaucuuauagcacuuugaa

SEQ ID NO: 2819065 - RNA, 16 nt, Human
ugcaugaagagaagca

SEQ ID NO: 2819066 - RNA, 18 nt, Human
ugcaugaagagaagcaau

SEQ ID NO: 2819067 - RNA, 20 nt, Human
ugcaugaagagaagcaauuu

SEQ ID NO: 2819068 - RNA, 21 nt, Human
ugcaugaagagaagcaauuuu

SEQ ID NO: 2819069 - RNA, 22 nt, Human
ugcaugaagagaagcaauuuug

SEQ ID NO: 2819070 - RNA, 23 nt, Human
ugcaugaagagaagcaauuuugg

SEQ ID NO: 2819071 - RNA, 15 nt, Human
ugcauggaaaccuga

SEQ ID NO: 2819072 - RNA, 19 nt, Human
ugcauggaaaccugaaaaa

SEQ ID NO: 2819073 - RNA, 14 nt, Human
ugcaugccuggucu

SEQ ID NO: 2819074 - RNA, 18 nt, Human
agccucuuucugucccuu

SEQ ID NO: 2819075 - RNA, 15 nt, Human
agccucuuucugucc

SEQ ID NO: 2819076 - RNA, 13 nt, Human
agccucuggguca

SEQ ID NO: 2819077 - RNA, 23 nt, Human
agccucugggucagugguccaca

SEQ ID NO: 2819078 - RNA, 22 nt, Human
agccucugggucagugguccac

SEQ ID NO: 2819079 - RNA, 23 nt, Human
agccucuuaaagcugccuguagu

SEQ ID NO: 2819080 - RNA, 14 nt, Human
agccucuucugcca

SEQ ID NO: 2819081 - RNA, 20 nt, Human
agccucuucugccaagagag

SEQ ID NO: 2819082 - RNA, 22 nt, Human
agccucuuaaagcugccuguag

SEQ ID NO: 2819083 - RNA, 20 nt, Human
agccucuuaaagcugccugu

SEQ ID NO: 2819084 - RNA, 15 nt, Human
ugcaggucuuuaaau

SEQ ID NO: 2819085 - RNA, 21 nt, Human
ugcaggucuuuaaaucauuuu

SEQ ID NO: 2819086 - RNA, 22 nt, Human
ugcaggucuuuaaaucauuuua

SEQ ID NO: 2819087 - RNA, 19 nt, Human
ugcaggugagcccauggcc

SEQ ID NO: 2819088 - RNA, 21 nt, Human
ugcaggugcuauuguuacucu

SEQ ID NO: 2819089 - RNA, 22 nt, Human
ugcaggugcuauuguuacucuu

SEQ ID NO: 2819090 - RNA, 23 nt, Human
ugcaggugagcccauggcccucc

SEQ ID NO: 2819091 - RNA, 23 nt, Human
ugcaggguucucccucccaccuu

SEQ ID NO: 2819092 - RNA, 13 nt, Human
ugcaggggcucug

SEQ ID NO: 2819093 - RNA, 22 nt, Human
ugcagggggugugucugcucag

SEQ ID NO: 2819094 - RNA, 13 nt, Human
ugcaggggugacg

SEQ ID NO: 2819095 - RNA, 14 nt, Human
ugcaggggugacgg

SEQ ID NO: 2819096 - RNA, 22 nt, Human
ugcaggggugacggcccucauc

SEQ ID NO: 2819097 - RNA, 19 nt, Human
ugcagggggugugucugcu

SEQ ID NO: 2819098 - RNA, 21 nt, Human
ugcaggggcucuggagagaaa

SEQ ID NO: 2819099 - RNA, 16 nt, Human
ugcagggggcuccugg

SEQ ID NO: 2819100 - RNA, 14 nt, Human
ugcaggggcucugg

SEQ ID NO: 2819101 - RNA, 18 nt, Human
ugcaggggcucuggagag

SEQ ID NO: 2819102 - RNA, 19 nt, Human
ugcaggggcucuggagaga

SEQ ID NO: 2819103 - RNA, 21 nt, Human
ugcagacaggcaagcaccucc

SEQ ID NO: 2819104 - RNA, 13 nt, Human
ugcagacaggcaa

SEQ ID NO: 2819105 - RNA, 12 nt, Human
ugcagacaggca

SEQ ID NO: 2819106 - RNA, 21 nt, Human
ugcagacacgccuuccccuca

SEQ ID NO: 2819107 - RNA, 19 nt, Human
ugcagacagaagucuccuc

SEQ ID NO: 2819108 - RNA, 21 nt, Human
ugcagacagaagucuccucaa

SEQ ID NO: 2819109 - RNA, 19 nt, Human
agccuccugaguagcugga

SEQ ID NO: 2819110 - RNA, 23 nt, Human
agccucuccaggcaccaucuccc

SEQ ID NO: 2819111 - RNA, 21 nt, Human
agccucguuggaagaggaaca

SEQ ID NO: 2819112 - RNA, 17 nt, Human
agccucguuuugaugcc

SEQ ID NO: 2819113 - RNA, 16 nt, Human
agccucguuggaagag

SEQ ID NO: 2819114 - RNA, 22 nt, Human
agccucuauccuacaaggccua

SEQ ID NO: 2819115 - RNA, 20 nt, Human
agccucgccgucugugaauu

SEQ ID NO: 2819116 - RNA, 13 nt, Human
agccucgcucugu

SEQ ID NO: 2819117 - RNA, 23 nt, Human
agccucgcucuguuacccagggu

SEQ ID NO: 2819118 - RNA, 16 nt, Human
agccucgaggugccuu

SEQ ID NO: 2819119 - RNA, 18 nt, Human
agccucgaggugccuucu

SEQ ID NO: 2819120 - RNA, 22 nt, Human
agccucgaggugccuucuucag

SEQ ID NO: 2819121 - RNA, 24 nt, Human
ugcaauaaaaaugauacugauggu

SEQ ID NO: 2819122 - RNA, 20 nt, Human
ugcaauaaaauuauuugcag

SEQ ID NO: 2819123 - RNA, 22 nt, Human
ugcaauaaaauuauuugcaggu

SEQ ID NO: 2819124 - RNA, 14 nt, Human
ugcaauauuugaau

SEQ ID NO: 2819125 - RNA, 13 nt, Human
ugcaauauuugua

SEQ ID NO: 2819126 - RNA, 14 nt, Human
ugcaauauuuguaa

SEQ ID NO: 2819127 - RNA, 20 nt, Human
ugcaauauuuguaaggcuug

SEQ ID NO: 2819128 - RNA, 13 nt, Human
ugcaaucauaugu

SEQ ID NO: 2819129 - RNA, 15 nt, Human
ugcaaucauauguga

SEQ ID NO: 2819130 - RNA, 16 nt, Human
ugcaaucauaugugau

SEQ ID NO: 2819131 - RNA, 17 nt, Human
ugcaaucauaugugauc

SEQ ID NO: 2819132 - RNA, 20 nt, Human
ugcaaucauaugugaucugu

SEQ ID NO: 2819133 - RNA, 22 nt, Human
ugcaaucauaugugaucugucu

SEQ ID NO: 2819134 - RNA, 23 nt, Human
ugcaaucauaugugaucugucuu

SEQ ID NO: 2819135 - RNA, 19 nt, Human
ugcaauccugucuuucuga

SEQ ID NO: 2819136 - RNA, 14 nt, Human
ugcaauaucugaag

SEQ ID NO: 2819137 - RNA, 15 nt, Human
ugcaauaucugaagc

SEQ ID NO: 2819138 - RNA, 14 nt, Human
ugcaauauuccuuu

SEQ ID NO: 2819139 - RNA, 16 nt, Human
ugcaaggucuuugguu

SEQ ID NO: 2819140 - RNA, 12 nt, Human
ugcaagguucca

SEQ ID NO: 2819141 - RNA, 13 nt, Human
ugcaagguuccac

SEQ ID NO: 2819142 - RNA, 14 nt, Human
ugcaagguuccaca

SEQ ID NO: 2819143 - RNA, 15 nt, Human
ugcaagguuccacag

SEQ ID NO: 2819144 - RNA, 17 nt, Human
ugcaagguuccacagag

SEQ ID NO: 2819145 - RNA, 18 nt, Human
ugcaagguuccacagagu

SEQ ID NO: 2819146 - RNA, 19 nt, Human
ugcaagguuccacagagua

SEQ ID NO: 2819147 - RNA, 13 nt, Human
ugcaaggcaaaga

SEQ ID NO: 2819148 - RNA, 17 nt, Human
ugcaaggaccaggacuc

SEQ ID NO: 2819149 - RNA, 11 nt, Human
ugcaaggcacu

SEQ ID NO: 2819150 - RNA, 12 nt, Human
ugcaaggcccac

SEQ ID NO: 2819151 - RNA, 13 nt, Human
ugcaaggcccaca

SEQ ID NO: 2819152 - RNA, 14 nt, Human
ugcaaggcccacag

SEQ ID NO: 2819153 - RNA, 16 nt, Human
ugcaaggcccacagga

SEQ ID NO: 2819154 - RNA, 17 nt, Human
ugcaaggcccacaggag

SEQ ID NO: 2819155 - RNA, 17 nt, Human
ugcaaggcacuguacua

SEQ ID NO: 2819156 - RNA, 19 nt, Human
ugcaagcaggacuuugagg

SEQ ID NO: 2819157 - RNA, 15 nt, Human
ugcaagagugauugc

SEQ ID NO: 2819158 - RNA, 17 nt, Human
ugcaagagugauugcag

SEQ ID NO: 2819159 - RNA, 19 nt, Human
ugcaagagugauugcagcu

SEQ ID NO: 2819160 - RNA, 20 nt, Human
ugcaagagugauugcagcuu

SEQ ID NO: 2819161 - RNA, 23 nt, Human
ugcaagccccugcuccagaagau

SEQ ID NO: 2819162 - RNA, 18 nt, Human
ugcaagccugucugagac

SEQ ID NO: 2819163 - RNA, 19 nt, Human
ugcaagccugucugagacu

SEQ ID NO: 2819164 - RNA, 20 nt, Human
ugcaagcuguccagagaaaa

SEQ ID NO: 2819165 - RNA, 12 nt, Human
ugcaaggaagga

SEQ ID NO: 2819166 - RNA, 16 nt, Human
ugcaaggaaggaaaga

SEQ ID NO: 2819167 - RNA, 15 nt, Human
ugcaaggaaggaaag

SEQ ID NO: 2819168 - RNA, 15 nt, Human
ugcaaggaccaggac

SEQ ID NO: 2819169 - RNA, 14 nt, Human
ugcaaggaccagga

SEQ ID NO: 2819170 - RNA, 13 nt, Human
ugcaaggaccagg

SEQ ID NO: 2819171 - RNA, 19 nt, Human
ugcaaggaaggaaagaaag

SEQ ID NO: 2819172 - RNA, 18 nt, Human
ugcaaggacauucuugua

SEQ ID NO: 2819173 - RNA, 13 nt, Human
ugcaacaggcugg

SEQ ID NO: 2819174 - RNA, 13 nt, Human
ugcaacagacaag

SEQ ID NO: 2819175 - RNA, 21 nt, Human
ugcaaagcucuguggccacau

SEQ ID NO: 2819176 - RNA, 14 nt, Human
ugcaaaucuugaaa

SEQ ID NO: 2819177 - RNA, 22 nt, Human
ugcaaaugucagauacaaugua

SEQ ID NO: 2819178 - RNA, 14 nt, Human
ugcaaauuaacagu

SEQ ID NO: 2819179 - RNA, 21 nt, Human
ugcaaaugcuaugagaugcau

SEQ ID NO: 2819180 - RNA, 13 nt, Human
ugcaaauauaaac

SEQ ID NO: 2819181 - RNA, 15 nt, Human
ugcaaauauaaacau

SEQ ID NO: 2819182 - RNA, 16 nt, Human
ugcaaauauaaacauc

SEQ ID NO: 2819183 - RNA, 17 nt, Human
ugcaaauauaaacaucu

SEQ ID NO: 2819184 - RNA, 16 nt, Human
ugcaaagaaaaucaga

SEQ ID NO: 2819185 - RNA, 12 nt, Human
ugcaaagaaaau

SEQ ID NO: 2819186 - RNA, 14 nt, Human
ugcaaaggcuggga

SEQ ID NO: 2819187 - RNA, 12 nt, Human
ugcaaaguauug

SEQ ID NO: 2819188 - RNA, 16 nt, Human
ugcaaaguauuguaaa

SEQ ID NO: 2819189 - RNA, 17 nt, Human
ugcaaaguauuguaaau

SEQ ID NO: 2819190 - RNA, 18 nt, Human
ugcaaaguauuguaaauu

SEQ ID NO: 2819191 - RNA, 20 nt, Human
ugcaaaguauuguaaauuau

SEQ ID NO: 2819192 - RNA, 23 nt, Human
ugcaaaguucccuacuuccugug

SEQ ID NO: 2819193 - RNA, 13 nt, Human
ugcaaaguucugu

SEQ ID NO: 2819194 - RNA, 14 nt, Human
ugcaaaguucugug

SEQ ID NO: 2819195 - RNA, 17 nt, Human
ugcaaaguucuguguuu

SEQ ID NO: 2819196 - RNA, 19 nt, Human
ugcaaaguucuguguuuaa

SEQ ID NO: 2819197 - RNA, 20 nt, Human
ugcaaaguucuguguuuaau

SEQ ID NO: 2819198 - RNA, 22 nt, Human
ugcaaagucaugcaaaggcugg

SEQ ID NO: 2819199 - RNA, 23 nt, Human
ugcaaagucaugcaaaggcuggg

SEQ ID NO: 2819200 - RNA, 21 nt, Human
ugcaaagucaugcaaaggcug

SEQ ID NO: 2819201 - RNA, 20 nt, Human
ugcaaagucaugcaaaggcu

SEQ ID NO: 2819202 - RNA, 21 nt, Human
ugcaaaggguaucaggugcug

SEQ ID NO: 2819203 - RNA, 12 nt, Human
ugcaaaggcugg

SEQ ID NO: 2819204 - RNA, 13 nt, Human
ugcaaaggcuggg

SEQ ID NO: 2819205 - RNA, 22 nt, Human
ugcaaaggucuuuuuaaaccag

SEQ ID NO: 2819206 - RNA, 15 nt, Human
ugcaaaguacaaugu

SEQ ID NO: 2819207 - RNA, 18 nt, Human
ugcaaaguacaauguguu

SEQ ID NO: 2819208 - RNA, 19 nt, Human
ugcaaaguacaauguguuu

SEQ ID NO: 2819209 - RNA, 23 nt, Human
ugcaaaguacaauguguuuuucu

SEQ ID NO: 2819210 - RNA, 17 nt, Human
ugcaaagcccagcuuga

SEQ ID NO: 2819211 - RNA, 15 nt, Human
ugcaaagcccagcuu

SEQ ID NO: 2819212 - RNA, 14 nt, Human
ugcaaagcccagcu

SEQ ID NO: 2819213 - RNA, 18 nt, Human
agccacggccaggccaga

SEQ ID NO: 2819214 - RNA, 17 nt, Human
agccacggccaggccag

SEQ ID NO: 2819215 - RNA, 22 nt, Human
ugauuuaugcauggaaaccuga

SEQ ID NO: 2819216 - RNA, 13 nt, Human
ugauuuaugcaug

SEQ ID NO: 2819217 - RNA, 20 nt, Human
ugauuuauaaaugccauuua

SEQ ID NO: 2819218 - RNA, 16 nt, Human
ugauuuauaguuugua

SEQ ID NO: 2819219 - RNA, 22 nt, Human
ugauuuauaguuuguacaugca

SEQ ID NO: 2819220 - RNA, 17 nt, Human
ugauuugcaauaaaaau

SEQ ID NO: 2819221 - RNA, 23 nt, Human
ugauuugcaaugggauguaugaa

SEQ ID NO: 2819222 - RNA, 15 nt, Human
ugauuugcauauuca

SEQ ID NO: 2819223 - RNA, 12 nt, Human
ugauuugcauug

SEQ ID NO: 2819224 - RNA, 14 nt, Human
ugauuugaguugau

SEQ ID NO: 2819225 - RNA, 22 nt, Human
ugauuugaguugauugagaaga

SEQ ID NO: 2819226 - RNA, 11 nt, Human
ugauuugcaau

SEQ ID NO: 2819227 - RNA, 16 nt, Human
ugauuuccaaguaaua

SEQ ID NO: 2819228 - RNA, 13 nt, Human
ugauuuccccucu

SEQ ID NO: 2819229 - RNA, 19 nt, Human
ugauuugaagaacauguga

SEQ ID NO: 2819230 - RNA, 14 nt, Human
ugauuucacuagaa

SEQ ID NO: 2819231 - RNA, 15 nt, Human
ugauuugcauugaac

SEQ ID NO: 2819232 - RNA, 12 nt, Human
ugauuuggaaaa

SEQ ID NO: 2819233 - RNA, 18 nt, Human
ugauuugcauugaacaca

SEQ ID NO: 2819234 - RNA, 14 nt, Human
ugauuugccacuga

SEQ ID NO: 2819235 - RNA, 21 nt, Human
ugauuugccacugauauucag

SEQ ID NO: 2819236 - RNA, 22 nt, Human
ugauuugccacugauauucaga

SEQ ID NO: 2819237 - RNA, 14 nt, Human
ugauuugcauugaa

SEQ ID NO: 2819238 - RNA, 13 nt, Human
ugauuugcauuga

SEQ ID NO: 2819239 - RNA, 18 nt, Human
ugcacuccagccugggcg

SEQ ID NO: 2819240 - RNA, 20 nt, Human
ugcacuccagccugggcaac

SEQ ID NO: 2819241 - RNA, 15 nt, Human
ugcagaagagggugu

SEQ ID NO: 2819242 - RNA, 20 nt, Human
ugcagaagaggguguguuug

SEQ ID NO: 2819243 - RNA, 20 nt, Human
ugcagaaguucuuaguguug

SEQ ID NO: 2819244 - RNA, 15 nt, Human
ugcacuccagccugg

SEQ ID NO: 2819245 - RNA, 16 nt, Human
ugcacuccagccuggg

SEQ ID NO: 2819246 - RNA, 13 nt, Human
ugcacuccagccu

SEQ ID NO: 2819247 - RNA, 12 nt, Human
ugcacuccagcc

SEQ ID NO: 2819248 - RNA, 17 nt, Human
ugcacuccagccugggc

SEQ ID NO: 2819249 - RNA, 14 nt, Human
ugcacuccagccug

SEQ ID NO: 2819250 - RNA, 14 nt, Human
ugcacucagcucuu

SEQ ID NO: 2819251 - RNA, 22 nt, Human
ugcacccuggggccuggaccug

SEQ ID NO: 2819252 - RNA, 13 nt, Human
ugcacccuucuuu

SEQ ID NO: 2819253 - RNA, 14 nt, Human
ugcacccuucuuuu

SEQ ID NO: 2819254 - RNA, 16 nt, Human
ugcacccuucuuuucu

SEQ ID NO: 2819255 - RNA, 17 nt, Human
ugcacccuucuuuucuc

SEQ ID NO: 2819256 - RNA, 18 nt, Human
ugcacccuucuuuucuca

SEQ ID NO: 2819257 - RNA, 23 nt, Human
ugcacccuucuuuucucaugugu

SEQ ID NO: 2819258 - RNA, 15 nt, Human
ugcacccuggggccu

SEQ ID NO: 2819259 - RNA, 14 nt, Human
ugcacauuuugauu

SEQ ID NO: 2819260 - RNA, 15 nt, Human
ugcacauuuugauuu

SEQ ID NO: 2819261 - RNA, 15 nt, Human
ugcacauucacuuag

SEQ ID NO: 2819262 - RNA, 23 nt, Human
ugcacauucacuuagcagaaccu

SEQ ID NO: 2819263 - RNA, 11 nt, Human
ugcacauuguu

SEQ ID NO: 2819264 - RNA, 12 nt, Human
ugcacauuguuc

SEQ ID NO: 2819265 - RNA, 17 nt, Human
ugcacauuguuguuuuu

SEQ ID NO: 2819266 - RNA, 13 nt, Human
ugcaccagcccuu

SEQ ID NO: 2819267 - RNA, 16 nt, Human
ugcacccaugguacca

SEQ ID NO: 2819268 - RNA, 22 nt, Human
ugcacccaugggcucugacaga

SEQ ID NO: 2819269 - RNA, 12 nt, Human
ugcaccagagca

SEQ ID NO: 2819270 - RNA, 21 nt, Human
ugcaccagagcaaccucucac

SEQ ID NO: 2819271 - RNA, 23 nt, Human
ugcaccagagcaaccucucacuc

SEQ ID NO: 2819272 - RNA, 23 nt, Human
ugcacaugucuuguacaugugua

SEQ ID NO: 2819273 - RNA, 12 nt, Human
agcccuggggcu

SEQ ID NO: 2819274 - RNA, 13 nt, Human
agcccuggggcug

SEQ ID NO: 2819275 - RNA, 14 nt, Human
agcccuggggcugg

SEQ ID NO: 2819276 - RNA, 15 nt, Human
agcccuggggcuggg

SEQ ID NO: 2819277 - RNA, 18 nt, Human
agcccuggggcugggccc

SEQ ID NO: 2819278 - RNA, 22 nt, Human
ugcacaugucuuguacaugugu

SEQ ID NO: 2819279 - RNA, 18 nt, Human
agccccuguggagacugg

SEQ ID NO: 2819280 - RNA, 23 nt, Human
agcccugauguguccucagggag

SEQ ID NO: 2819281 - RNA, 15 nt, Human
agcccccuggccucu

SEQ ID NO: 2819282 - RNA, 16 nt, Human
agcccccuggccucug

SEQ ID NO: 2819283 - RNA, 22 nt, Human
agcccaggccgggguggagcau

SEQ ID NO: 2819284 - RNA, 21 nt, Human
ugcaaugaaagguacuauauu

SEQ ID NO: 2819285 - RNA, 22 nt, Human
ugcaaugaaagguacuauauuu

SEQ ID NO: 2819286 - RNA, 17 nt, Human
agcccccuggccucugu

SEQ ID NO: 2819287 - RNA, 19 nt, Human
agcccccuggccucugugc

SEQ ID NO: 2819288 - RNA, 14 nt, Human
agccccgaggccuu

SEQ ID NO: 2819289 - RNA, 16 nt, Human
agccccgagcuguccc

SEQ ID NO: 2819290 - RNA, 16 nt, Human
agcccccuugacaccg

SEQ ID NO: 2819291 - RNA, 19 nt, Human
agccccgcagaccucccca

SEQ ID NO: 2819292 - RNA, 23 nt, Human
agccccgcagaccuccccagccc

SEQ ID NO: 2819293 - RNA, 14 nt, Human
agccccgcccucuu

SEQ ID NO: 2819294 - RNA, 15 nt, Human
agccccgcccucuuc

SEQ ID NO: 2819295 - RNA, 16 nt, Human
agccccgcccucuucc

SEQ ID NO: 2819296 - RNA, 17 nt, Human
agccccgcccucuuccu

SEQ ID NO: 2819297 - RNA, 18 nt, Human
agccccgcccucuuccug

SEQ ID NO: 2819298 - RNA, 19 nt, Human
agccccgcccucuuccuga

SEQ ID NO: 2819299 - RNA, 20 nt, Human
agccccgcccucuuccugac

SEQ ID NO: 2819300 - RNA, 22 nt, Human
agccccgcccucuuccugacga

SEQ ID NO: 2819301 - RNA, 18 nt, Human
agccccgcgccuccuucc

SEQ ID NO: 2819302 - RNA, 15 nt, Human
agccccgcgccuccu

SEQ ID NO: 2819303 - RNA, 14 nt, Human
agccccuguggaga

SEQ ID NO: 2819304 - RNA, 15 nt, Human
agccccuguggagac

SEQ ID NO: 2819305 - RNA, 14 nt, Human
agccccugguccug

SEQ ID NO: 2819306 - RNA, 13 nt, Human
agccccuggggcc

SEQ ID NO: 2819307 - RNA, 17 nt, Human
agccccuggggccuaga

SEQ ID NO: 2819308 - RNA, 22 nt, Human
agccccuggggccuagacucug

SEQ ID NO: 2819309 - RNA, 21 nt, Human
agccccggcccugggcucgga

SEQ ID NO: 2819310 - RNA, 22 nt, Human
agccccgcagaccuccccagcc

SEQ ID NO: 2819311 - RNA, 14 nt, Human
agccccggcccugg

SEQ ID NO: 2819312 - RNA, 16 nt, Human
agccccggcccugggc

SEQ ID NO: 2819313 - RNA, 18 nt, Human
agccccggcccugggcuc

SEQ ID NO: 2819314 - RNA, 13 nt, Human
agccccuccccca

SEQ ID NO: 2819315 - RNA, 18 nt, Human
agccccucccccaucucc

SEQ ID NO: 2819316 - RNA, 20 nt, Human
agccccucccccaucuccca

SEQ ID NO: 2819317 - RNA, 21 nt, Human
agccccucccccaucucccac

SEQ ID NO: 2819318 - RNA, 14 nt, Human
aggacgccacccag

SEQ ID NO: 2819319 - RNA, 20 nt, Human
aggacgaacauccaaccuuc

SEQ ID NO: 2819320 - RNA, 14 nt, Human
aggaccuugggcca

SEQ ID NO: 2819321 - RNA, 15 nt, Human
aggaccuugggccaa

SEQ ID NO: 2819322 - RNA, 23 nt, Human
aggacacagaugaaacacaaaca

SEQ ID NO: 2819323 - RNA, 15 nt, Human
aggacgccacccagc

SEQ ID NO: 2819324 - RNA, 16 nt, Human
aggacggugcaaccca

SEQ ID NO: 2819325 - RNA, 15 nt, Human
aggacuaggguccug

SEQ ID NO: 2819326 - RNA, 18 nt, Human
aggacuaggguccugggg

SEQ ID NO: 2819327 - RNA, 16 nt, Human
aggacuaggguccugg

SEQ ID NO: 2819328 - RNA, 19 nt, Human
aggacuaggguccugggga

SEQ ID NO: 2819329 - RNA, 22 nt, Human
aggacucacagguuggaagaga

SEQ ID NO: 2819330 - RNA, 18 nt, Human
aggacucagaagccucug

SEQ ID NO: 2819331 - RNA, 13 nt, Human
aggacucagcucc

SEQ ID NO: 2819332 - RNA, 14 nt, Human
aggacucagcuccc

SEQ ID NO: 2819333 - RNA, 17 nt, Human
aggacucagcuccccag

SEQ ID NO: 2819334 - RNA, 18 nt, Human
aggacucagcuccccaga

SEQ ID NO: 2819335 - RNA, 19 nt, Human
aggacucagcuccccagag

SEQ ID NO: 2819336 - RNA, 20 nt, Human
aggacucagcuccccagagu

SEQ ID NO: 2819337 - RNA, 17 nt, Human
aggacucccuccucacc

SEQ ID NO: 2819338 - RNA, 16 nt, Human
aggacucccuccucac

SEQ ID NO: 2819339 - RNA, 15 nt, Human
aggacucccuccuca

SEQ ID NO: 2819340 - RNA, 14 nt, Human
aggacucccuccuc

SEQ ID NO: 2819341 - RNA, 13 nt, Human
aggacucccuccu

SEQ ID NO: 2819342 - RNA, 12 nt, Human
aggacucccucc

SEQ ID NO: 2819343 - RNA, 17 nt, Human
aggacucugaggcucuu

SEQ ID NO: 2819344 - RNA, 14 nt, Human
aggacucugaggcu

SEQ ID NO: 2819345 - RNA, 13 nt, Human
aggacucugaggc

SEQ ID NO: 2819346 - RNA, 19 nt, Human
aggacucccuccucaccuc

SEQ ID NO: 2819347 - RNA, 18 nt, Human
aggacucccuccucaccu

SEQ ID NO: 2819348 - RNA, 23 nt, Human
aggacucccuccucaccucugga

SEQ ID NO: 2819349 - RNA, 15 nt, Human
aggacuccuccccac

SEQ ID NO: 2819350 - RNA, 22 nt, Human
aggacuccuccccacccuccug

SEQ ID NO: 2819351 - RNA, 23 nt, Human
aggacuccuccccacccuccugg

SEQ ID NO: 2819352 - RNA, 14 nt, Human
aggacucgcuugua

SEQ ID NO: 2819353 - RNA, 15 nt, Human
aggacucgcuuguaa

SEQ ID NO: 2819354 - RNA, 16 nt, Human
aggacucgcuuguaaa

SEQ ID NO: 2819355 - RNA, 17 nt, Human
aggacucgcuuguaaau

SEQ ID NO: 2819356 - RNA, 20 nt, Human
aggacucgcuuguaaauacc

SEQ ID NO: 2819357 - RNA, 21 nt, Human
aggacucgcuuguaaauacca

SEQ ID NO: 2819358 - RNA, 22 nt, Human
aggacuuuucuuuguggcuucc

SEQ ID NO: 2819359 - RNA, 19 nt, Human
aggacuuuucuuuguggcu

SEQ ID NO: 2819360 - RNA, 17 nt, Human
aggacuuuucuuugugg

SEQ ID NO: 2819361 - RNA, 17 nt, Human
aggacucugccuccucu

SEQ ID NO: 2819362 - RNA, 18 nt, Human
aggacucugccuccucuu

SEQ ID NO: 2819363 - RNA, 12 nt, Human
aggacucugccu

SEQ ID NO: 2819364 - RNA, 13 nt, Human
aggacucugccuc

SEQ ID NO: 2819365 - RNA, 14 nt, Human
aggacucugccucc

SEQ ID NO: 2819366 - RNA, 16 nt, Human
aggacucugccuccuc

SEQ ID NO: 2819367 - RNA, 17 nt, Human
aggagccccgaggccuu

SEQ ID NO: 2819368 - RNA, 21 nt, Human
aggagcccuuaucugugcuca

SEQ ID NO: 2819369 - RNA, 16 nt, Human
aggagcacaagccaca

SEQ ID NO: 2819370 - RNA, 24 nt, Human
aggagcccacggcuaagaggcugc

SEQ ID NO: 2819371 - RNA, 13 nt, Human
aggagcagcauug

SEQ ID NO: 2819372 - RNA, 14 nt, Human
aggagccccagcua

SEQ ID NO: 2819373 - RNA, 17 nt, Human
aggagccccaucugucu

SEQ ID NO: 2819374 - RNA, 20 nt, Human
aggagcccauacucagccug

SEQ ID NO: 2819375 - RNA, 15 nt, Human
aggagcacagguccc

SEQ ID NO: 2819376 - RNA, 16 nt, Human
aggagcacagguccca

SEQ ID NO: 2819377 - RNA, 17 nt, Human
aggagcacaggucccac

SEQ ID NO: 2819378 - RNA, 22 nt, Human
aggagcaaaggcugagaacacu

SEQ ID NO: 2819379 - RNA, 17 nt, Human
aggagaguagaacagau

SEQ ID NO: 2819380 - RNA, 15 nt, Human
aggagaucagaaaaa

SEQ ID NO: 2819381 - RNA, 16 nt, Human
aggagaucagaaaaau

SEQ ID NO: 2819382 - RNA, 14 nt, Human
aggagaguggccau

SEQ ID NO: 2819383 - RNA, 18 nt, Human
ugcuuuuggucuguguga

SEQ ID NO: 2819384 - RNA, 20 nt, Human
ugcuuuugucuaugggacuc

SEQ ID NO: 2819385 - RNA, 16 nt, Human
ugcuuugggcugcccu

SEQ ID NO: 2819386 - RNA, 22 nt, Human
ugcuuuguuaaaaaaaaaaaga

SEQ ID NO: 2819387 - RNA, 18 nt, Human
ugcuugagcucaggaguu

SEQ ID NO: 2819388 - RNA, 13 nt, Human
ugcuuuguugcac

SEQ ID NO: 2819389 - RNA, 23 nt, Human
aggagcccuuaucugugcucagg

SEQ ID NO: 2819390 - RNA, 17 nt, Human
aggagcacuuccaaaau

SEQ ID NO: 2819391 - RNA, 12 nt, Human
ugcuugaauagc

SEQ ID NO: 2819392 - RNA, 19 nt, Human
ugcuugagaauauugaagu

SEQ ID NO: 2819393 - RNA, 14 nt, Human
ugcuuugggcugcc

SEQ ID NO: 2819394 - RNA, 15 nt, Human
ugcuuugggcugccc

SEQ ID NO: 2819395 - RNA, 13 nt, Human
ugcuuuggaaauc

SEQ ID NO: 2819396 - RNA, 14 nt, Human
ugcuugagcccagg

SEQ ID NO: 2819397 - RNA, 13 nt, Human
ugcuugagcccag

SEQ ID NO: 2819398 - RNA, 16 nt, Human
ugcuugagcccaggag

SEQ ID NO: 2819399 - RNA, 23 nt, Human
ugcuuuuguuccaaugucaaugu

SEQ ID NO: 2819400 - RNA, 15 nt, Human
uggaaaguuuuugua

SEQ ID NO: 2819401 - RNA, 13 nt, Human
uggaaauaaaugu

SEQ ID NO: 2819402 - RNA, 23 nt, Human
uggaaauaaauguaucauagaaa

SEQ ID NO: 2819403 - RNA, 17 nt, Human
uggaaauaauaaaagau

SEQ ID NO: 2819404 - RNA, 15 nt, Human
uggaaauaaauguau

SEQ ID NO: 2819405 - RNA, 13 nt, Human
ugcuuuuugaaau

SEQ ID NO: 2819406 - RNA, 14 nt, Human
ugcuuuuugaaaug

SEQ ID NO: 2819407 - RNA, 15 nt, Human
ugcuuuuugaaauga

SEQ ID NO: 2819408 - RNA, 17 nt, Human
ugcuuuuugaaaugaaa

SEQ ID NO: 2819409 - RNA, 20 nt, Human
ugcuuuuugaaaugaaauuu

SEQ ID NO: 2819410 - RNA, 15 nt, Human
ugcuuuuucaccaga

SEQ ID NO: 2819411 - RNA, 19 nt, Human
ugcuuuuuauuucugcaua

SEQ ID NO: 2819412 - RNA, 18 nt, Human
ugcuuuuuauuucugcau

SEQ ID NO: 2819413 - RNA, 17 nt, Human
ugcuuuuuaaguguuaa

SEQ ID NO: 2819414 - RNA, 15 nt, Human
ugcuuuuuauuucug

SEQ ID NO: 2819415 - RNA, 16 nt, Human
uggaacaaagugaagg

SEQ ID NO: 2819416 - RNA, 20 nt, Human
uggaacaaagugaaggacau

SEQ ID NO: 2819417 - RNA, 13 nt, Human
uggaagagaaauc

SEQ ID NO: 2819418 - RNA, 14 nt, Human
uggaagagaaaucu

SEQ ID NO: 2819419 - RNA, 16 nt, Human
uggaagagaaaucuca

SEQ ID NO: 2819420 - RNA, 12 nt, Human
uggaagagaauc

SEQ ID NO: 2819421 - RNA, 14 nt, Human
uggaagagaaucac

SEQ ID NO: 2819422 - RNA, 13 nt, Human
aggaucagucuga

SEQ ID NO: 2819423 - RNA, 17 nt, Human
aggauauccuuaucaga

SEQ ID NO: 2819424 - RNA, 19 nt, Human
aggauauccuuaucagagc

SEQ ID NO: 2819425 - RNA, 20 nt, Human
aggauauccuuaucagagcu

SEQ ID NO: 2819426 - RNA, 21 nt, Human
aggauauccuuaucagagcua

SEQ ID NO: 2819427 - RNA, 22 nt, Human
aggauauccuuaucagagcuaa

SEQ ID NO: 2819428 - RNA, 23 nt, Human
aggauauccuuaucagagcuaag

SEQ ID NO: 2819429 - RNA, 15 nt, Human
aggaucaugguguaa

SEQ ID NO: 2819430 - RNA, 17 nt, Human
aggaucaguuaacuauu

SEQ ID NO: 2819431 - RNA, 20 nt, Human
aggaucauuuguuggaauga

SEQ ID NO: 2819432 - RNA, 17 nt, Human
aggaucaugguguaaua

SEQ ID NO: 2819433 - RNA, 18 nt, Human
aggaucaugguguaauaa

SEQ ID NO: 2819434 - RNA, 15 nt, Human
aggaucaguuaacua

SEQ ID NO: 2819435 - RNA, 23 nt, Human
aggaucaguuaacuauugcauuu

SEQ ID NO: 2819436 - RNA, 13 nt, Human
aggaucaguuuuu

SEQ ID NO: 2819437 - RNA, 22 nt, Human
aggaucaguuuuuuguuuuaca

SEQ ID NO: 2819438 - RNA, 13 nt, Human
aggaucaucugaa

SEQ ID NO: 2819439 - RNA, 18 nt, Human
aggaucuuuugaacccag

SEQ ID NO: 2819440 - RNA, 13 nt, Human
aggaucuuuugaa

SEQ ID NO: 2819441 - RNA, 21 nt, Human
aggaucauuuguuggaaugaa

SEQ ID NO: 2819442 - RNA, 15 nt, Human
aggauccagccucac

SEQ ID NO: 2819443 - RNA, 22 nt, Human
aggaugaaugaggucccaggca

SEQ ID NO: 2819444 - RNA, 21 nt, Human
aggaugaaugaggucccaggc

SEQ ID NO: 2819445 - RNA, 20 nt, Human
aggaugaaugaggucccagg

SEQ ID NO: 2819446 - RNA, 19 nt, Human
aggaugaaugaggucccag

SEQ ID NO: 2819447 - RNA, 20 nt, Human
aggaugaccuggauaacuua

SEQ ID NO: 2819448 - RNA, 22 nt, Human
aggaucaugguguaauaagaca

SEQ ID NO: 2819449 - RNA, 13 nt, Human
aggaugagagccc

SEQ ID NO: 2819450 - RNA, 14 nt, Human
aggaugagagccca

SEQ ID NO: 2819451 - RNA, 15 nt, Human
aggaugagagcccag

SEQ ID NO: 2819452 - RNA, 16 nt, Human
aggaugagagcccaga

SEQ ID NO: 2819453 - RNA, 17 nt, Human
aggaugagagcccagag

SEQ ID NO: 2819454 - RNA, 18 nt, Human
aggaugagagcccagagg

SEQ ID NO: 2819455 - RNA, 19 nt, Human
aggaugagagcccagaggu

SEQ ID NO: 2819456 - RNA, 20 nt, Human
aggaugagagcccagaggua

SEQ ID NO: 2819457 - RNA, 19 nt, Human
aggauugaacuucuuugaa

SEQ ID NO: 2819458 - RNA, 23 nt, Human
aggaugagagcccagagguaaca

SEQ ID NO: 2819459 - RNA, 20 nt, Human
aggaggcgcccuuggcuucu

SEQ ID NO: 2819460 - RNA, 21 nt, Human
aggaggcgucucgggagagga

SEQ ID NO: 2819461 - RNA, 20 nt, Human
aggaggcucaacaauaaaac

SEQ ID NO: 2819462 - RNA, 13 nt, Human
aggaggcugaggg

SEQ ID NO: 2819463 - RNA, 19 nt, Human
aggaggcugaggcaggagg

SEQ ID NO: 2819464 - RNA, 17 nt, Human
aggaggcugaggcagga

SEQ ID NO: 2819465 - RNA, 14 nt, Human
aggauagcauuuuu

SEQ ID NO: 2819466 - RNA, 14 nt, Human
aggauaguauuuuu

SEQ ID NO: 2819467 - RNA, 16 nt, Human
aggauaguauuuuuau

SEQ ID NO: 2819468 - RNA, 16 nt, Human
aggaggcuggcaggua

SEQ ID NO: 2819469 - RNA, 13 nt, Human
aggaggcuggcag

SEQ ID NO: 2819470 - RNA, 21 nt, Human
uggaagacaggaaaguucaga

SEQ ID NO: 2819471 - RNA, 23 nt, Human
uggaagaggaacagcacugggga

SEQ ID NO: 2819472 - RNA, 16 nt, Human
uggaagcccuggagac

SEQ ID NO: 2819473 - RNA, 22 nt, Human
aggaggaaucaugucaggccug

SEQ ID NO: 2819474 - RNA, 23 nt, Human
aggaggaaucaugucaggccugu

SEQ ID NO: 2819475 - RNA, 17 nt, Human
aggcaagcaccuccugc

SEQ ID NO: 2819476 - RNA, 17 nt, Human
uggagccaauggagacu

SEQ ID NO: 2819477 - RNA, 13 nt, Human
uggagccagcucc

SEQ ID NO: 2819478 - RNA, 11 nt, Human
uggagccaggc

SEQ ID NO: 2819479 - RNA, 12 nt, Human
uggagccaggcg

SEQ ID NO: 2819480 - RNA, 13 nt, Human
uggagccaggcgu

SEQ ID NO: 2819481 - RNA, 15 nt, Human
uggagccaggcgugu

SEQ ID NO: 2819482 - RNA, 22 nt, Human
uggagcaguacaugggaaagga

SEQ ID NO: 2819483 - RNA, 19 nt, Human
uggagcagccuggagaccc

SEQ ID NO: 2819484 - RNA, 18 nt, Human
uggagcaggacucuauuu

SEQ ID NO: 2819485 - RNA, 18 nt, Human
uggagcaggcggugggga

SEQ ID NO: 2819486 - RNA, 22 nt, Human
uggagcaggcgguggggagaga

SEQ ID NO: 2819487 - RNA, 17 nt, Human
uggagcaugggccuggc

SEQ ID NO: 2819488 - RNA, 18 nt, Human
uggagcaugggccuggcc

SEQ ID NO: 2819489 - RNA, 20 nt, Human
aggcaagcaccuccugccuc

SEQ ID NO: 2819490 - RNA, 19 nt, Human
aggcaagcaccuccugccu

SEQ ID NO: 2819491 - RNA, 18 nt, Human
aggcaagcaccuccugcc

SEQ ID NO: 2819492 - RNA, 14 nt, Human
aggcacaauauggg

SEQ ID NO: 2819493 - RNA, 18 nt, Human
aggcaaggcuaugugauu

SEQ ID NO: 2819494 - RNA, 20 nt, Human
aggcaaggcuaugugauuac

SEQ ID NO: 2819495 - RNA, 22 nt, Human
uggacuguuuucucucggcucc

SEQ ID NO: 2819496 - RNA, 15 nt, Human
uggacuuagaaagca

SEQ ID NO: 2819497 - RNA, 16 nt, Human
uggacuuagaaagcag

SEQ ID NO: 2819498 - RNA, 18 nt, Human
uggacuuagaaagcaggg

SEQ ID NO: 2819499 - RNA, 17 nt, Human
uggacuguuuucucucg

SEQ ID NO: 2819500 - RNA, 20 nt, Human
uggacuguuuucucucggcu

SEQ ID NO: 2819501 - RNA, 20 nt, Human
uggacuuagaaagcaggggc

SEQ ID NO: 2819502 - RNA, 21 nt, Human
uggacuuagaaagcaggggcu

SEQ ID NO: 2819503 - RNA, 17 nt, Human
uggacuuauuucuucaa

SEQ ID NO: 2819504 - RNA, 18 nt, Human
uggacuuauuucuucaaa

SEQ ID NO: 2819505 - RNA, 17 nt, Human
aggauugcuacuguccu

SEQ ID NO: 2819506 - RNA, 15 nt, Human
aggauugcuacuguc

SEQ ID NO: 2819507 - RNA, 18 nt, Human
aggauugcuacuguccua

SEQ ID NO: 2819508 - RNA, 17 nt, Human
uggagcaaagugguagg

SEQ ID NO: 2819509 - RNA, 18 nt, Human
uggagcaaagugguaggu

SEQ ID NO: 2819510 - RNA, 18 nt, Human
uggagcaaucacagauga

SEQ ID NO: 2819511 - RNA, 13 nt, Human
uggagcagaccac

SEQ ID NO: 2819512 - RNA, 17 nt, Human
uggagcagaccaccccg

SEQ ID NO: 2819513 - RNA, 11 nt, Human
uggagaaauua

SEQ ID NO: 2819514 - RNA, 15 nt, Human
uggagaaauuauuua

SEQ ID NO: 2819515 - RNA, 17 nt, Human
uggagaaauuauuuaau

SEQ ID NO: 2819516 - RNA, 15 nt, Human
uggagcaaagcugau

SEQ ID NO: 2819517 - RNA, 18 nt, Human
uggacuugaacuuuccug

SEQ ID NO: 2819518 - RNA, 14 nt, Human
aggcauuguuugag

SEQ ID NO: 2819519 - RNA, 12 nt, Human
aggcauuuccua

SEQ ID NO: 2819520 - RNA, 15 nt, Human
aggcaggugccugga

SEQ ID NO: 2819521 - RNA, 13 nt, Human
aggcaggugccug

SEQ ID NO: 2819522 - RNA, 12 nt, Human
aggcagggucuc

SEQ ID NO: 2819523 - RNA, 22 nt, Human
aggcaggucuugaacuccuggc

SEQ ID NO: 2819524 - RNA, 17 nt, Human
aggcagcugccugcucu

SEQ ID NO: 2819525 - RNA, 13 nt, Human
aggcacagcugag

SEQ ID NO: 2819526 - RNA, 14 nt, Human
aggcacagcugagu

SEQ ID NO: 2819527 - RNA, 15 nt, Human
aggcacaggaugcug

SEQ ID NO: 2819528 - RNA, 14 nt, Human
aggcacagcaaacu

SEQ ID NO: 2819529 - RNA, 16 nt, Human
aggcacagcaaacugu

SEQ ID NO: 2819530 - RNA, 20 nt, Human
aggcagcuuuuucucuccca

SEQ ID NO: 2819531 - RNA, 19 nt, Human
aggcaggacaugcugaagc

SEQ ID NO: 2819532 - RNA, 17 nt, Human
aggcaggaagggcagga

SEQ ID NO: 2819533 - RNA, 16 nt, Human
aggcaggaagggcagg

SEQ ID NO: 2819534 - RNA, 20 nt, Human
aggcaggaagggcaggaagg

SEQ ID NO: 2819535 - RNA, 14 nt, Human
aggcaggacaugcu

SEQ ID NO: 2819536 - RNA, 23 nt, Human
aggcagggggaaggugggguccu

SEQ ID NO: 2819537 - RNA, 21 nt, Human
aggcaggccaaggccuucucc

SEQ ID NO: 2819538 - RNA, 22 nt, Human
aggcaggccaaggccuucuccu

SEQ ID NO: 2819539 - RNA, 14 nt, Human
aggcaggccgacug

SEQ ID NO: 2819540 - RNA, 13 nt, Human
aggcaggcauuga

SEQ ID NO: 2819541 - RNA, 14 nt, Human
aggcaggcauugag

SEQ ID NO: 2819542 - RNA, 23 nt, Human
aggcaggcauugaggaagagucu

SEQ ID NO: 2819543 - RNA, 21 nt, Human
aggcaggcaccuagcaauucc

SEQ ID NO: 2819544 - RNA, 23 nt, Human
aggcaggcuaaggcguggagcug

SEQ ID NO: 2819545 - RNA, 18 nt, Human
aggcaggcuaaggcgugg

SEQ ID NO: 2819546 - RNA, 22 nt, Human
aggcaggcuaaggcguggagcu

SEQ ID NO: 2819547 - RNA, 18 nt, Human
uggaguguuauguauuuc

SEQ ID NO: 2819548 - RNA, 17 nt, Human
uggaguguggcugagga

SEQ ID NO: 2819549 - RNA, 16 nt, Human
uggaguggcucgccag

SEQ ID NO: 2819550 - RNA, 19 nt, Human
uggaguggcucgccaggcc

SEQ ID NO: 2819551 - RNA, 14 nt, Human
uggagugggcagag

SEQ ID NO: 2819552 - RNA, 18 nt, Human
uggagugcccacccuggg

SEQ ID NO: 2819553 - RNA, 16 nt, Human
uggaguggagugagag

SEQ ID NO: 2819554 - RNA, 14 nt, Human
uggagugcagugag

SEQ ID NO: 2819555 - RNA, 17 nt, Human
uggagugcaaugacaca

SEQ ID NO: 2819556 - RNA, 16 nt, Human
uggagucuggaguggg

SEQ ID NO: 2819557 - RNA, 17 nt, Human
uggagucuggagugggc

SEQ ID NO: 2819558 - RNA, 18 nt, Human
uggagucuggagugggca

SEQ ID NO: 2819559 - RNA, 19 nt, Human
uggagucuggagugggcag

SEQ ID NO: 2819560 - RNA, 18 nt, Human
uggaggugggagcaggag

SEQ ID NO: 2819561 - RNA, 20 nt, Human
uggaggugggagcaggagau

SEQ ID NO: 2819562 - RNA, 21 nt, Human
uggagguggggcgaggcaggc

SEQ ID NO: 2819563 - RNA, 22 nt, Human
uggagguggggcgaggcaggcc

SEQ ID NO: 2819564 - RNA, 12 nt, Human
uggaggugggag

SEQ ID NO: 2819565 - RNA, 13 nt, Human
uggaggugggagc

SEQ ID NO: 2819566 - RNA, 17 nt, Human
uggaggugggagcagga

SEQ ID NO: 2819567 - RNA, 23 nt, Human
uggaugccugguggcagcugcgg

SEQ ID NO: 2819568 - RNA, 21 nt, Human
uggaugccugguggcagcugc

SEQ ID NO: 2819569 - RNA, 16 nt, Human
uggaguucuugugcca

SEQ ID NO: 2819570 - RNA, 14 nt, Human
uggaguucuugugc

SEQ ID NO: 2819571 - RNA, 15 nt, Human
uggaguucuugugcc

SEQ ID NO: 2819572 - RNA, 12 nt, Human
uggaugccuuga

SEQ ID NO: 2819573 - RNA, 18 nt, Human
uggaugcggccauucaag

SEQ ID NO: 2819574 - RNA, 16 nt, Human
uggaugcuuagaggga

SEQ ID NO: 2819575 - RNA, 21 nt, Human
uggaugcuuagagggauuucu

SEQ ID NO: 2819576 - RNA, 17 nt, Human
uggauuauuuaauaaca

SEQ ID NO: 2819577 - RNA, 18 nt, Human
uggauuauuuaauaacau

SEQ ID NO: 2819578 - RNA, 20 nt, Human
uggauuauuuaauaacauua

SEQ ID NO: 2819579 - RNA, 23 nt, Human
uggauuauuuaauaacauuaccu

SEQ ID NO: 2819580 - RNA, 16 nt, Human
uggauuauuuaauaac

SEQ ID NO: 2819581 - RNA, 17 nt, Human
uggauucauucucauaa

SEQ ID NO: 2819582 - RNA, 23 nt, Human
uggauucauucucauaauuccua

SEQ ID NO: 2819583 - RNA, 14 nt, Human
uggauucauugucu

SEQ ID NO: 2819584 - RNA, 16 nt, Human
uggauucauugucucu

SEQ ID NO: 2819585 - RNA, 17 nt, Human
uggauucauuuauaaga

SEQ ID NO: 2819586 - RNA, 13 nt, Human
uggauucaucagc

SEQ ID NO: 2819587 - RNA, 21 nt, Human
uggcaccacugcacuccagcc

SEQ ID NO: 2819588 - RNA, 19 nt, Human
uggcaccacugcacuccag

SEQ ID NO: 2819589 - RNA, 18 nt, Human
uggcaccacugcacucca

SEQ ID NO: 2819590 - RNA, 11 nt, Human
uggcaccaaag

SEQ ID NO: 2819591 - RNA, 17 nt, Human
uggcaccaaagaugcag

SEQ ID NO: 2819592 - RNA, 19 nt, Human
uggcaccaaagaugcagcc

SEQ ID NO: 2819593 - RNA, 20 nt, Human
uggcaccaaagaugcagccg

SEQ ID NO: 2819594 - RNA, 18 nt, Human
uggcacauuuaagagaca

SEQ ID NO: 2819595 - RNA, 13 nt, Human
uggauuccaugcu

SEQ ID NO: 2819596 - RNA, 15 nt, Human
uggauuccaugcuaa

SEQ ID NO: 2819597 - RNA, 18 nt, Human
uggauucccuuaaacaaa

SEQ ID NO: 2819598 - RNA, 17 nt, Human
uggauucuuauguagca

SEQ ID NO: 2819599 - RNA, 20 nt, Human
uggauucugaggcccugccc

SEQ ID NO: 2819600 - RNA, 19 nt, Human
uggauugcaauaucugaag

SEQ ID NO: 2819601 - RNA, 21 nt, Human
aggcccccucucaggagccau

SEQ ID NO: 2819602 - RNA, 17 nt, Human
aggcccggcuccaggcu

SEQ ID NO: 2819603 - RNA, 15 nt, Human
aggcccggccucuca

SEQ ID NO: 2819604 - RNA, 13 nt, Human
aggcccggcucca

SEQ ID NO: 2819605 - RNA, 14 nt, Human
aggcccggccucuc

SEQ ID NO: 2819606 - RNA, 13 nt, Human
aggcccggccucu

SEQ ID NO: 2819607 - RNA, 13 nt, Human
aggcccacucagg

SEQ ID NO: 2819608 - RNA, 15 nt, Human
aggcccacucagggg

SEQ ID NO: 2819609 - RNA, 14 nt, Human
aggcccaacuguga

SEQ ID NO: 2819610 - RNA, 11 nt, Human
aggcccacaca

SEQ ID NO: 2819611 - RNA, 12 nt, Human
aggcccacacac

SEQ ID NO: 2819612 - RNA, 13 nt, Human
aggcccacacaca

SEQ ID NO: 2819613 - RNA, 14 nt, Human
aggcccacacacag

SEQ ID NO: 2819614 - RNA, 15 nt, Human
aggcccacacacagg

SEQ ID NO: 2819615 - RNA, 16 nt, Human
aggcccacacacaggu

SEQ ID NO: 2819616 - RNA, 12 nt, Human
aggcccacagga

SEQ ID NO: 2819617 - RNA, 13 nt, Human
aggcccacaggag

SEQ ID NO: 2819618 - RNA, 19 nt, Human
aggcccacaggaggcaagc

SEQ ID NO: 2819619 - RNA, 13 nt, Human
aggcccccaccac

SEQ ID NO: 2819620 - RNA, 14 nt, Human
aggcccccaccaca

SEQ ID NO: 2819621 - RNA, 15 nt, Human
aggcccccaccacac

SEQ ID NO: 2819622 - RNA, 16 nt, Human
aggcccccaccacaca

SEQ ID NO: 2819623 - RNA, 17 nt, Human
aggcccccaccacacau

SEQ ID NO: 2819624 - RNA, 18 nt, Human
aggcccccaccacacauc

SEQ ID NO: 2819625 - RNA, 21 nt, Human
aggcccccaccacacauccca

SEQ ID NO: 2819626 - RNA, 22 nt, Human
aggcccccaccacacaucccag

SEQ ID NO: 2819627 - RNA, 23 nt, Human
aggcccccaccacacaucccagc

SEQ ID NO: 2819628 - RNA, 13 nt, Human
aggccagcugccu

SEQ ID NO: 2819629 - RNA, 20 nt, Human
uggcacccggccccugcugg

SEQ ID NO: 2819630 - RNA, 19 nt, Human
uggcacccggccccugcug

SEQ ID NO: 2819631 - RNA, 18 nt, Human
uggcacccggccccugcu

SEQ ID NO: 2819632 - RNA, 15 nt, Human
aggaagagucuuggu

SEQ ID NO: 2819633 - RNA, 22 nt, Human
aggaagauauacaugaaaauuu

SEQ ID NO: 2819634 - RNA, 16 nt, Human
aggaaauaaaaccuuu

SEQ ID NO: 2819635 - RNA, 14 nt, Human
aggaaauaaaaccu

SEQ ID NO: 2819636 - RNA, 20 nt, Human
ugcucuugaccuuguagaga

SEQ ID NO: 2819637 - RNA, 17 nt, Human
aggaaaguguuauuuuu

SEQ ID NO: 2819638 - RNA, 17 nt, Human
aggaaaguucagaguuu

SEQ ID NO: 2819639 - RNA, 21 nt, Human
aggaaaguucagaguuuucug

SEQ ID NO: 2819640 - RNA, 22 nt, Human
aggaaaguucagaguuuucugg

SEQ ID NO: 2819641 - RNA, 21 nt, Human
aggaaaguuuacccaugaaga

SEQ ID NO: 2819642 - RNA, 17 nt, Human
ugcugaggccuccagcu

SEQ ID NO: 2819643 - RNA, 16 nt, Human
ugcugaggcucugacc

SEQ ID NO: 2819644 - RNA, 18 nt, Human
aggaaaggggagaaggga

SEQ ID NO: 2819645 - RNA, 15 nt, Human
ugcugagcuguuuau

SEQ ID NO: 2819646 - RNA, 20 nt, Human
ugcugagccucugcucccca

SEQ ID NO: 2819647 - RNA, 16 nt, Human
ugcugagccucugcuc

SEQ ID NO: 2819648 - RNA, 17 nt, Human
ugcugagccucugcucc

SEQ ID NO: 2819649 - RNA, 12 nt, Human
ugcugagccucu

SEQ ID NO: 2819650 - RNA, 14 nt, Human
ugcugagccucugc

SEQ ID NO: 2819651 - RNA, 16 nt, Human
ugcugagauucuucag

SEQ ID NO: 2819652 - RNA, 15 nt, Human
aggaagccaaauuua

SEQ ID NO: 2819653 - RNA, 16 nt, Human
aggaagccaaauuuau

SEQ ID NO: 2819654 - RNA, 18 nt, Human
aggaagcauucagagagc

SEQ ID NO: 2819655 - RNA, 19 nt, Human
aggaagcauucagagagca

SEQ ID NO: 2819656 - RNA, 18 nt, Human
aggaagcagcuuucccca

SEQ ID NO: 2819657 - RNA, 18 nt, Human
aggaaggauuguaaaaaa

SEQ ID NO: 2819658 - RNA, 16 nt, Human
aggaaggauuguaaaa

SEQ ID NO: 2819659 - RNA, 17 nt, Human
aggaaggauuguaaaaa

SEQ ID NO: 2819660 - RNA, 21 nt, Human
aggaaggaggggaagcugcag

SEQ ID NO: 2819661 - RNA, 14 nt, Human
aggaaggauuguaa

SEQ ID NO: 2819662 - RNA, 15 nt, Human
aggaaggauuguaaa

SEQ ID NO: 2819663 - RNA, 16 nt, Human
aggaauguguggccug

SEQ ID NO: 2819664 - RNA, 16 nt, Human
aggaagcaugagugcu

SEQ ID NO: 2819665 - RNA, 17 nt, Human
aggaauuaaguuaucuu

SEQ ID NO: 2819666 - RNA, 22 nt, Human
aggaauguuuuguagcucuagg

SEQ ID NO: 2819667 - RNA, 20 nt, Human
aggaaggcucuucuccccag

SEQ ID NO: 2819668 - RNA, 21 nt, Human
aggaaggcucuucuccccaga

SEQ ID NO: 2819669 - RNA, 13 nt, Human
aggaaggccuggg

SEQ ID NO: 2819670 - RNA, 14 nt, Human
aggaaggccugggu

SEQ ID NO: 2819671 - RNA, 13 nt, Human
ugcuaugaaugau

SEQ ID NO: 2819672 - RNA, 20 nt, Human
aggaaaccacagcugcugga

SEQ ID NO: 2819673 - RNA, 19 nt, Human
ugcuauuuuuguuuuuaga

SEQ ID NO: 2819674 - RNA, 20 nt, Human
ugcuaucggggaagccagac

SEQ ID NO: 2819675 - RNA, 16 nt, Human
aggaaaccacagcugc

SEQ ID NO: 2819676 - RNA, 17 nt, Human
aggaaaccacagcugcu

SEQ ID NO: 2819677 - RNA, 20 nt, Human
ugcuauccugccaaaaucau

SEQ ID NO: 2819678 - RNA, 16 nt, Human
aggaaaagcugcugac

SEQ ID NO: 2819679 - RNA, 13 nt, Human
aggaaaauuucac

SEQ ID NO: 2819680 - RNA, 14 nt, Human
aggaaacaagugaa

SEQ ID NO: 2819681 - RNA, 17 nt, Human
aggaaacaauauuuaua

SEQ ID NO: 2819682 - RNA, 12 nt, Human
aggaaacaguua

SEQ ID NO: 2819683 - RNA, 13 nt, Human
aggaaaccaacac

SEQ ID NO: 2819684 - RNA, 13 nt, Human
aggaaacaaguga

SEQ ID NO: 2819685 - RNA, 15 nt, Human
aggaaacaacagcuu

SEQ ID NO: 2819686 - RNA, 14 nt, Human
aggaaacaacagcu

SEQ ID NO: 2819687 - RNA, 22 nt, Human
ugcuccaggcaggcuaaggcgu

SEQ ID NO: 2819688 - RNA, 13 nt, Human
ugcuccaggccug

SEQ ID NO: 2819689 - RNA, 14 nt, Human
ugcuccaggccugc

SEQ ID NO: 2819690 - RNA, 16 nt, Human
ugcuccaggccugcag

SEQ ID NO: 2819691 - RNA, 18 nt, Human
ugcuccaggccugcagca

SEQ ID NO: 2819692 - RNA, 20 nt, Human
ugcuccaggccugcagcagg

SEQ ID NO: 2819693 - RNA, 16 nt, Human
ugcuccagggagauuu

SEQ ID NO: 2819694 - RNA, 12 nt, Human
ugcuccaggcag

SEQ ID NO: 2819695 - RNA, 14 nt, Human
ugcuccaggcaggc

SEQ ID NO: 2819696 - RNA, 12 nt, Human
ugcucuccuuuc

SEQ ID NO: 2819697 - RNA, 19 nt, Human
ugcucucgcaccuuuccaa

SEQ ID NO: 2819698 - RNA, 22 nt, Human
ugcucucgcaccuuuccaaagu

SEQ ID NO: 2819699 - RNA, 17 nt, Human
ugcucucucaaauuguc

SEQ ID NO: 2819700 - RNA, 20 nt, Human
ugcucucucaaauugucagc

SEQ ID NO: 2819701 - RNA, 13 nt, Human
ugcucucuguguc

SEQ ID NO: 2819702 - RNA, 17 nt, Human
ugcucugaaaucuccuu

SEQ ID NO: 2819703 - RNA, 18 nt, Human
ugcucugagaagaggagc

SEQ ID NO: 2819704 - RNA, 20 nt, Human
ugcucugagaagaggagccc

SEQ ID NO: 2819705 - RNA, 22 nt, Human
ugcucugagaagaggagcccuc

SEQ ID NO: 2819706 - RNA, 23 nt, Human
ugcucugagaagaggagcccuca

SEQ ID NO: 2819707 - RNA, 15 nt, Human
ugcucugcugacaga

SEQ ID NO: 2819708 - RNA, 14 nt, Human
ugcucugcugacag

SEQ ID NO: 2819709 - RNA, 18 nt, Human
ugcucuuagcugucugcu

SEQ ID NO: 2819710 - RNA, 15 nt, Human
ugcucuuagcugucu

SEQ ID NO: 2819711 - RNA, 23 nt, Human
ugcucuucuguggaccacugcau

SEQ ID NO: 2819712 - RNA, 13 nt, Human
ugcucuucugugg

SEQ ID NO: 2819713 - RNA, 15 nt, Human
ugcucuugaacuccu

SEQ ID NO: 2819714 - RNA, 22 nt, Human
ugcucuugaacuccugaccuca

SEQ ID NO: 2819715 - RNA, 20 nt, Human
ugcucuugaacuccugaccu

SEQ ID NO: 2819716 - RNA, 15 nt, Human
ugcgguccacccagg

SEQ ID NO: 2819717 - RNA, 14 nt, Human
ugcgguccacccag

SEQ ID NO: 2819718 - RNA, 23 nt, Human
ugccuuggggaggacaaaacuuc

SEQ ID NO: 2819719 - RNA, 15 nt, Human
ugccuuuugcagaag

SEQ ID NO: 2819720 - RNA, 16 nt, Human
ugccuuuugcagaaga

SEQ ID NO: 2819721 - RNA, 17 nt, Human
ugccuuuugcagaagag

SEQ ID NO: 2819722 - RNA, 19 nt, Human
ugccuuuugcagaagaggg

SEQ ID NO: 2819723 - RNA, 22 nt, Human
ugccuuuugcagaagagggugu

SEQ ID NO: 2819724 - RNA, 15 nt, Human
ugcuaauuuucucaa

SEQ ID NO: 2819725 - RNA, 17 nt, Human
ugcuaauuuucucaaaa

SEQ ID NO: 2819726 - RNA, 22 nt, Human
ugcuaauuuucucaaaagcauu

SEQ ID NO: 2819727 - RNA, 18 nt, Human
ugcuaauuuauccugaaa

SEQ ID NO: 2819728 - RNA, 15 nt, Human
ugcuaauugcuguug

SEQ ID NO: 2819729 - RNA, 16 nt, Human
ugcuaauugcuguuga

SEQ ID NO: 2819730 - RNA, 17 nt, Human
ugcuaauugcuguugaa

SEQ ID NO: 2819731 - RNA, 18 nt, Human
ugcuaauugcuguugaaa

SEQ ID NO: 2819732 - RNA, 20 nt, Human
ugcuaauugcuguugaaagc

SEQ ID NO: 2819733 - RNA, 21 nt, Human
ugcuaauugcuguugaaagca

SEQ ID NO: 2819734 - RNA, 22 nt, Human
ugcuaauugcuguugaaagcaa

SEQ ID NO: 2819735 - RNA, 23 nt, Human
ugcuaauugcuguugaaagcaaa

SEQ ID NO: 2819736 - RNA, 16 nt, Human
ugcuaauuuaaagaga

SEQ ID NO: 2819737 - RNA, 17 nt, Human
ugcuaauuuaaagagac

SEQ ID NO: 2819738 - RNA, 15 nt, Human
ugcuaauuaaaaagu

SEQ ID NO: 2819739 - RNA, 17 nt, Human
ugcuaauuaaaaaguua

SEQ ID NO: 2819740 - RNA, 13 nt, Human
ugcuaaucuucuu

SEQ ID NO: 2819741 - RNA, 22 nt, Human
ugcuaaucuucuuaugcaauuu

SEQ ID NO: 2819742 - RNA, 20 nt, Human
ugcuaaucuucuuaugcaau

SEQ ID NO: 2819743 - RNA, 13 nt, Human
ugcuaauauuaaa

SEQ ID NO: 2819744 - RNA, 15 nt, Human
ugcuaauauuaaaag

SEQ ID NO: 2819745 - RNA, 16 nt, Human
ugcuaauauuaaaagu

SEQ ID NO: 2819746 - RNA, 16 nt, Human
ugcuaaucaaagccag

SEQ ID NO: 2819747 - RNA, 17 nt, Human
ugcuaaucaaagccagg

SEQ ID NO: 2819748 - RNA, 20 nt, Human
ugcuaaucaaagccaggguc

SEQ ID NO: 2819749 - RNA, 21 nt, Human
ugcuaaucaaagccagggucu

SEQ ID NO: 2819750 - RNA, 15 nt, Human
ugcuaaguguaggau

SEQ ID NO: 2819751 - RNA, 19 nt, Human
ugcuacagaggaaacaaua

SEQ ID NO: 2819752 - RNA, 20 nt, Human
ugcuacagaugauagaggau

SEQ ID NO: 2819753 - RNA, 13 nt, Human
ugcuaccaaagca

SEQ ID NO: 2819754 - RNA, 23 nt, Human
ugcuacccaugacuuuauaugga

SEQ ID NO: 2819755 - RNA, 14 nt, Human
ugcuacauaaauug

SEQ ID NO: 2819756 - RNA, 13 nt, Human
ugcuacccagcca

SEQ ID NO: 2819757 - RNA, 22 nt, Human
agcuguuguacauuuaugauuu

SEQ ID NO: 2819758 - RNA, 23 nt, Human
agcuguuguacauuuaugauuua

SEQ ID NO: 2819759 - RNA, 16 nt, Human
agcuguuguacauuua

SEQ ID NO: 2819760 - RNA, 18 nt, Human
agcuguuguacauuuaug

SEQ ID NO: 2819761 - RNA, 20 nt, Human
agcuguuguacauuuaugau

SEQ ID NO: 2819762 - RNA, 12 nt, Human
agcuguuuaaga

SEQ ID NO: 2819763 - RNA, 18 nt, Human
agcuguuuauagagaaug

SEQ ID NO: 2819764 - RNA, 13 nt, Human
agcuuaacagugu

SEQ ID NO: 2819765 - RNA, 16 nt, Human
agcuguuuaagauggg

SEQ ID NO: 2819766 - RNA, 18 nt, Human
agcuguuuauggccucag

SEQ ID NO: 2819767 - RNA, 17 nt, Human
agcuguuuauggccuca

SEQ ID NO: 2819768 - RNA, 21 nt, Human
agcuguuuauggccucagcug

SEQ ID NO: 2819769 - RNA, 12 nt, Human
agcuguuuaugu

SEQ ID NO: 2819770 - RNA, 13 nt, Human
agcuguuuauguu

SEQ ID NO: 2819771 - RNA, 17 nt, Human
agcuguuuauguuuuua

SEQ ID NO: 2819772 - RNA, 18 nt, Human
agcuguuuauguuuuuau

SEQ ID NO: 2819773 - RNA, 20 nt, Human
agcuguuuauggccucagcu

SEQ ID NO: 2819774 - RNA, 19 nt, Human
agcuguuuauggccucagc

SEQ ID NO: 2819775 - RNA, 15 nt, Human
agcuugcucacaucu

SEQ ID NO: 2819776 - RNA, 17 nt, Human
agcuugcucacaucuug

SEQ ID NO: 2819777 - RNA, 15 nt, Human
agcuugcucccugug

SEQ ID NO: 2819778 - RNA, 16 nt, Human
agcuugcucccugugu

SEQ ID NO: 2819779 - RNA, 17 nt, Human
agcuugcucccuguguc

SEQ ID NO: 2819780 - RNA, 20 nt, Human
agcuugugugcaaaagcagu

SEQ ID NO: 2819781 - RNA, 17 nt, Human
agcuuguucccugucuu

SEQ ID NO: 2819782 - RNA, 19 nt, Human
agcuugugcacaauucugu

SEQ ID NO: 2819783 - RNA, 20 nt, Human
agcuuguauaguguaaaaua

SEQ ID NO: 2819784 - RNA, 18 nt, Human
agcuuguauaguguaaaa

SEQ ID NO: 2819785 - RNA, 17 nt, Human
agcuuguaggagcugag

SEQ ID NO: 2819786 - RNA, 21 nt, Human
agcuuguauaguguaaaauaa

SEQ ID NO: 2819787 - RNA, 17 nt, Human
agcuuguaugcaaugga

SEQ ID NO: 2819788 - RNA, 18 nt, Human
agcuuguaugcaauggau

SEQ ID NO: 2819789 - RNA, 15 nt, Human
agcuugccagaugcu

SEQ ID NO: 2819790 - RNA, 16 nt, Human
agcuugccagaugcug

SEQ ID NO: 2819791 - RNA, 19 nt, Human
agcuugccagaugcugcag

SEQ ID NO: 2819792 - RNA, 22 nt, Human
agcuugaggguugggcuggugu

SEQ ID NO: 2819793 - RNA, 15 nt, Human
agcuuacaagccagc

SEQ ID NO: 2819794 - RNA, 17 nt, Human
agcuuacaagccagcug

SEQ ID NO: 2819795 - RNA, 14 nt, Human
aggaaaagcugcug

SEQ ID NO: 2819796 - RNA, 20 nt, Human
aggaaaagcggacaucagcu

SEQ ID NO: 2819797 - RNA, 23 nt, Human
agcuuuggggugucuuuuuuugg

SEQ ID NO: 2819798 - RNA, 20 nt, Human
aggaaaacugcauggagacg

SEQ ID NO: 2819799 - RNA, 24 nt, Human
aggaaaacugcauggagacgcauu

SEQ ID NO: 2819800 - RNA, 10 nt, Human
aggaaaagaa

SEQ ID NO: 2819801 - RNA, 13 nt, Human
aggaaaagaaaaa

SEQ ID NO: 2819802 - RNA, 14 nt, Human
aggaaaagaaaaaa

SEQ ID NO: 2819803 - RNA, 15 nt, Human
aggaaaagaaaaaaa

SEQ ID NO: 2819804 - RNA, 23 nt, Human
agcuuugcucuuugguagaaaag

SEQ ID NO: 2819805 - RNA, 21 nt, Human
agcuuugcucuuugguagaaa

SEQ ID NO: 2819806 - RNA, 18 nt, Human
agcuuugcucuuugguag

SEQ ID NO: 2819807 - RNA, 19 nt, Human
agcuuuggacccaaggaaa

SEQ ID NO: 2819808 - RNA, 13 nt, Human
agcuuuggcagug

SEQ ID NO: 2819809 - RNA, 19 nt, Human
agcuuugagaagccuucag

SEQ ID NO: 2819810 - RNA, 17 nt, Human
agcuuugagaagccuuc

SEQ ID NO: 2819811 - RNA, 21 nt, Human
agcuuugacuggaggguccau

SEQ ID NO: 2819812 - RNA, 10 nt, Human
agcuuugcuc

SEQ ID NO: 2819813 - RNA, 21 nt, Human
agcuuugcuaccaaagcaccu

SEQ ID NO: 2819814 - RNA, 16 nt, Human
agcuuugcuaccaaag

SEQ ID NO: 2819815 - RNA, 10 nt, Human
agcuuugcua

SEQ ID NO: 2819816 - RNA, 22 nt, Human
agcuuuccccaugucucgacuc

SEQ ID NO: 2819817 - RNA, 21 nt, Human
agcuuucccaaauaaacucua

SEQ ID NO: 2819818 - RNA, 22 nt, Human
agcugcccuccuuguccaccca

SEQ ID NO: 2819819 - RNA, 17 nt, Human
ugcccuguucucuacca

SEQ ID NO: 2819820 - RNA, 19 nt, Human
ugcccuguucucuaccaag

SEQ ID NO: 2819821 - RNA, 15 nt, Human
ugcccuuaaaucaua

SEQ ID NO: 2819822 - RNA, 19 nt, Human
ugccgaccccuaguucccu

SEQ ID NO: 2819823 - RNA, 15 nt, Human
ugccgacagaaggaa

SEQ ID NO: 2819824 - RNA, 13 nt, Human
ugccgacacuguu

SEQ ID NO: 2819825 - RNA, 13 nt, Human
ugccucagccucc

SEQ ID NO: 2819826 - RNA, 12 nt, Human
ugccucagccuc

SEQ ID NO: 2819827 - RNA, 15 nt, Human
ugccgcaaauuguac

SEQ ID NO: 2819828 - RNA, 21 nt, Human
ugccgauauacucuagaugaa

SEQ ID NO: 2819829 - RNA, 14 nt, Human
ugccgaggagccag

SEQ ID NO: 2819830 - RNA, 17 nt, Human
ugccgaggagccaggca

SEQ ID NO: 2819831 - RNA, 21 nt, Human
agcugcaagugacaucucuuu

SEQ ID NO: 2819832 - RNA, 18 nt, Human
agcugcaagugacaucuc

SEQ ID NO: 2819833 - RNA, 15 nt, Human
agcugcaagugacau

SEQ ID NO: 2819834 - RNA, 14 nt, Human
agcugcaccagagc

SEQ ID NO: 2819835 - RNA, 15 nt, Human
agcugcaccagagca

SEQ ID NO: 2819836 - RNA, 16 nt, Human
agcugcaccagagcaa

SEQ ID NO: 2819837 - RNA, 23 nt, Human
agcugcaccagagcaaccucuca

SEQ ID NO: 2819838 - RNA, 23 nt, Human
agcucuguccugggagugagcug

SEQ ID NO: 2819839 - RNA, 21 nt, Human
agcucuguccugggagugagc

SEQ ID NO: 2819840 - RNA, 16 nt, Human
agcucuguccugggag

SEQ ID NO: 2819841 - RNA, 11 nt, Human
agcugcagcuu

SEQ ID NO: 2819842 - RNA, 13 nt, Human
agcugcagcuucc

SEQ ID NO: 2819843 - RNA, 14 nt, Human
agcugcagcuuccu

SEQ ID NO: 2819844 - RNA, 15 nt, Human
agcugcagcuuccug

SEQ ID NO: 2819845 - RNA, 16 nt, Human
agcugcagcuuccugu

SEQ ID NO: 2819846 - RNA, 17 nt, Human
agcugcagcuuccuguc

SEQ ID NO: 2819847 - RNA, 13 nt, Human
agcugcagcuugg

SEQ ID NO: 2819848 - RNA, 14 nt, Human
agcugcagcuuggg

SEQ ID NO: 2819849 - RNA, 16 nt, Human
agcugcaggaaucaaa

SEQ ID NO: 2819850 - RNA, 17 nt, Human
agcugcaggaaucaaaa

SEQ ID NO: 2819851 - RNA, 20 nt, Human
agcugcaggaaucaaaaauu

SEQ ID NO: 2819852 - RNA, 22 nt, Human
agcugcaggaaucaaaaauuga

SEQ ID NO: 2819853 - RNA, 23 nt, Human
agcugcaggaaucaaaaauugaa

SEQ ID NO: 2819854 - RNA, 24 nt, Human
agcugcccacuguuucucuugagc

SEQ ID NO: 2819855 - RNA, 22 nt, Human
agcugcccauuucgugagcccc

SEQ ID NO: 2819856 - RNA, 19 nt, Human
agcugccaucgcugugaug

SEQ ID NO: 2819857 - RNA, 14 nt, Human
agcugccccucucu

SEQ ID NO: 2819858 - RNA, 15 nt, Human
agcugccccucucug

SEQ ID NO: 2819859 - RNA, 16 nt, Human
agcugccccucucugg

SEQ ID NO: 2819860 - RNA, 18 nt, Human
agcugccccucucugggc

SEQ ID NO: 2819861 - RNA, 16 nt, Human
agcugcccuaaauaac

SEQ ID NO: 2819862 - RNA, 22 nt, Human
agcugcccuaaauaacccuuca

SEQ ID NO: 2819863 - RNA, 11 nt, Human
agcugcccucc

SEQ ID NO: 2819864 - RNA, 21 nt, Human
ugccaucaacuacuauucaaa

SEQ ID NO: 2819865 - RNA, 20 nt, Human
ugccauagaguuuaacacaa

SEQ ID NO: 2819866 - RNA, 22 nt, Human
ugccauacuuugucugaaaaau

SEQ ID NO: 2819867 - RNA, 17 nt, Human
ugccauacuuugucuga

SEQ ID NO: 2819868 - RNA, 18 nt, Human
ugccauacuuugucugaa

SEQ ID NO: 2819869 - RNA, 13 nt, Human
ugccauagaguuu

SEQ ID NO: 2819870 - RNA, 18 nt, Human
ugccauagaguuuaacac

SEQ ID NO: 2819871 - RNA, 15 nt, Human
ugccauacuuugucu

SEQ ID NO: 2819872 - RNA, 22 nt, Human
ugccauacaucaguuauucauu

SEQ ID NO: 2819873 - RNA, 23 nt, Human
ugccauacaucaguuauucauuc

SEQ ID NO: 2819874 - RNA, 14 nt, Human
ugccauaauacaaa

SEQ ID NO: 2819875 - RNA, 16 nt, Human
ugccauaauacaaaag

SEQ ID NO: 2819876 - RNA, 16 nt, Human
ugccauagucacaugg

SEQ ID NO: 2819877 - RNA, 21 nt, Human
ugccauagaguuuaacacaag

SEQ ID NO: 2819878 - RNA, 17 nt, Human
ugccauagucaaagaga

SEQ ID NO: 2819879 - RNA, 18 nt, Human
ugccauagucaaagagag

SEQ ID NO: 2819880 - RNA, 24 nt, Human
ugccauagucaaagagaguuuuua

SEQ ID NO: 2819881 - RNA, 15 nt, Human
ugccaucaaacugua

SEQ ID NO: 2819882 - RNA, 17 nt, Human
ugccaucaaacuguaaa

SEQ ID NO: 2819883 - RNA, 18 nt, Human
ugccaucaaacuguaaaa

SEQ ID NO: 2819884 - RNA, 15 nt, Human
agcuccuucuguccu

SEQ ID NO: 2819885 - RNA, 13 nt, Human
agcucccauucua

SEQ ID NO: 2819886 - RNA, 20 nt, Human
agcucccauucuauguguca

SEQ ID NO: 2819887 - RNA, 16 nt, Human
agcuccaucuccacuc

SEQ ID NO: 2819888 - RNA, 13 nt, Human
agcuccaucucca

SEQ ID NO: 2819889 - RNA, 15 nt, Human
agcuccaucuccacu

SEQ ID NO: 2819890 - RNA, 20 nt, Human
agcucuggcuuccagaaaac

SEQ ID NO: 2819891 - RNA, 12 nt, Human
agcucuggcuuc

SEQ ID NO: 2819892 - RNA, 23 nt, Human
agcucugaagucacaucacagga

SEQ ID NO: 2819893 - RNA, 21 nt, Human
agcucugaagucacaucacag

SEQ ID NO: 2819894 - RNA, 14 nt, Human
agcucuguccuggg

SEQ ID NO: 2819895 - RNA, 12 nt, Human
agcucucuguau

SEQ ID NO: 2819896 - RNA, 17 nt, Human
agcucucuguauaaaca

SEQ ID NO: 2819897 - RNA, 18 nt, Human
agcucucuguauaaacau

SEQ ID NO: 2819898 - RNA, 19 nt, Human
agcucucuguauaaacauu

SEQ ID NO: 2819899 - RNA, 21 nt, Human
agcucucuguauaaacauuaa

SEQ ID NO: 2819900 - RNA, 19 nt, Human
agcucucuucaaugacaua

SEQ ID NO: 2819901 - RNA, 16 nt, Human
agcucucuugccgagg

SEQ ID NO: 2819902 - RNA, 21 nt, Human
agcucucuugccgaggagcca

SEQ ID NO: 2819903 - RNA, 16 nt, Human
agcucggggagccuua

SEQ ID NO: 2819904 - RNA, 21 nt, Human
agcuccuucuguccuacucug

SEQ ID NO: 2819905 - RNA, 16 nt, Human
agcuccuucuguccua

SEQ ID NO: 2819906 - RNA, 15 nt, Human
agcucggggagccuu

SEQ ID NO: 2819907 - RNA, 14 nt, Human
agcucgcacccccc

SEQ ID NO: 2819908 - RNA, 19 nt, Human
agcucgcaccccccuguuc

SEQ ID NO: 2819909 - RNA, 20 nt, Human
agcucgcaccccccuguucu

SEQ ID NO: 2819910 - RNA, 21 nt, Human
agcucgcaccccccuguucua

SEQ ID NO: 2819911 - RNA, 22 nt, Human
agcucgcaccccccuguucuaa

SEQ ID NO: 2819912 - RNA, 17 nt, Human
agcucgaauuaagaaua

SEQ ID NO: 2819913 - RNA, 19 nt, Human
agcucgaauuaagaauaug

SEQ ID NO: 2819914 - RNA, 13 nt, Human
agcucgauccaaa

SEQ ID NO: 2819915 - RNA, 16 nt, Human
agcucgauccaaauug

SEQ ID NO: 2819916 - RNA, 22 nt, Human
ugccuguggaagagugugugug

SEQ ID NO: 2819917 - RNA, 11 nt, Human
ugccuguggcu

SEQ ID NO: 2819918 - RNA, 13 nt, Human
ugccuguggcugc

SEQ ID NO: 2819919 - RNA, 14 nt, Human
ugccuguggcugcg

SEQ ID NO: 2819920 - RNA, 15 nt, Human
ugccuguguauggaa

SEQ ID NO: 2819921 - RNA, 14 nt, Human
ugccuguucccauu

SEQ ID NO: 2819922 - RNA, 15 nt, Human
ugccuuaaagaaagu

SEQ ID NO: 2819923 - RNA, 19 nt, Human
ugccuugggcugcuccuca

SEQ ID NO: 2819924 - RNA, 17 nt, Human
ugccuugggcugcuccu

SEQ ID NO: 2819925 - RNA, 16 nt, Human
ugccuugggcugcucc

SEQ ID NO: 2819926 - RNA, 23 nt, Human
ugccuuaauaagaaugguugccu

SEQ ID NO: 2819927 - RNA, 14 nt, Human
ugccuuacacaaag

SEQ ID NO: 2819928 - RNA, 22 nt, Human
agcuguggaggauugcuaucug

SEQ ID NO: 2819929 - RNA, 23 nt, Human
agcugugcucuggacaggcaugu

SEQ ID NO: 2819930 - RNA, 18 nt, Human
agcugugcucuggacagg

SEQ ID NO: 2819931 - RNA, 17 nt, Human
agcugugcucuggacag

SEQ ID NO: 2819932 - RNA, 16 nt, Human
agcugggacuacaggu

SEQ ID NO: 2819933 - RNA, 23 nt, Human
agcugggacuacaggcacccacc

SEQ ID NO: 2819934 - RNA, 20 nt, Human
agcugggacuacaggcaccc

SEQ ID NO: 2819935 - RNA, 17 nt, Human
ugccucugccucugaca

SEQ ID NO: 2819936 - RNA, 20 nt, Human
ugccucugccucugacacac

SEQ ID NO: 2819937 - RNA, 18 nt, Human
ugccucugccucugacac

SEQ ID NO: 2819938 - RNA, 14 nt, Human
ugccucagccuccc

SEQ ID NO: 2819939 - RNA, 17 nt, Human
ugccuccagaagcacug

SEQ ID NO: 2819940 - RNA, 23 nt, Human
ugccugcccaggccccugccacc

SEQ ID NO: 2819941 - RNA, 22 nt, Human
ugccugcccaggccccugccac

SEQ ID NO: 2819942 - RNA, 20 nt, Human
ugccugcccaggccccugcc

SEQ ID NO: 2819943 - RNA, 16 nt, Human
agcugccuguucagcu

SEQ ID NO: 2819944 - RNA, 14 nt, Human
agcugccuguucag

SEQ ID NO: 2819945 - RNA, 18 nt, Human
agcugccuguucagcucc

SEQ ID NO: 2819946 - RNA, 23 nt, Human
ugccuggaagcuuuguccccugc

SEQ ID NO: 2819947 - RNA, 17 nt, Human
agcugcuggcuugcagu

SEQ ID NO: 2819948 - RNA, 12 nt, Human
agcugcugucuu

SEQ ID NO: 2819949 - RNA, 18 nt, Human
agcugcugucuucuggac

SEQ ID NO: 2819950 - RNA, 14 nt, Human
agcugcuggcuugc

SEQ ID NO: 2819951 - RNA, 14 nt, Human
agcugcuggagacu

SEQ ID NO: 2819952 - RNA, 23 nt, Human
agcugcuggagacuccuaggcag

SEQ ID NO: 2819953 - RNA, 13 nt, Human
agcugcugcucug

SEQ ID NO: 2819954 - RNA, 21 nt, Human
ugccuggacauuugccuugcu

SEQ ID NO: 2819955 - RNA, 16 nt, Human
agcuggccucucuagc

SEQ ID NO: 2819956 - RNA, 12 nt, Human
agcuggccugag

SEQ ID NO: 2819957 - RNA, 15 nt, Human
agcuggccuggacag

SEQ ID NO: 2819958 - RNA, 21 nt, Human
agcuggccugagaggggaagc

SEQ ID NO: 2819959 - RNA, 19 nt, Human
agcuggccgugggccuggg

SEQ ID NO: 2819960 - RNA, 14 nt, Human
agcuggccucuacc

SEQ ID NO: 2819961 - RNA, 14 nt, Human
agcuggcucaccuu

SEQ ID NO: 2819962 - RNA, 21 nt, Human
agcuggcgucaugcaaaguca

SEQ ID NO: 2819963 - RNA, 23 nt, Human
agcuggccgaggguccuggcucc

SEQ ID NO: 2819964 - RNA, 18 nt, Human
agcuggccgggagccuga

SEQ ID NO: 2819965 - RNA, 19 nt, Human
agcuggccgggagccugau

SEQ ID NO: 2819966 - RNA, 16 nt, Human
agcuggccgugggccu

SEQ ID NO: 2819967 - RNA, 17 nt, Human
agcuggccgugggccug

SEQ ID NO: 2819968 - RNA, 16 nt, Human
uguaaaggagucaaaa

SEQ ID NO: 2819969 - RNA, 18 nt, Human
uguaaaguauguaaacag

SEQ ID NO: 2819970 - RNA, 13 nt, Human
uguaaagugaaga

SEQ ID NO: 2819971 - RNA, 15 nt, Human
uguaaagugaagaau

SEQ ID NO: 2819972 - RNA, 19 nt, Human
uguaaagugaagaauccuu

SEQ ID NO: 2819973 - RNA, 20 nt, Human
uguaaagugaagaauccuuu

SEQ ID NO: 2819974 - RNA, 21 nt, Human
uguaaagugaagaauccuuuu

SEQ ID NO: 2819975 - RNA, 21 nt, Human
uguaaaggagucaaaacuaca

SEQ ID NO: 2819976 - RNA, 19 nt, Human
uguaaaggagucaaaacua

SEQ ID NO: 2819977 - RNA, 14 nt, Human
uguaaauaaaaaga

SEQ ID NO: 2819978 - RNA, 19 nt, Human
uguaaauaaagaacuagca

SEQ ID NO: 2819979 - RNA, 16 nt, Human
uguaaauagcucaggu

SEQ ID NO: 2819980 - RNA, 15 nt, Human
uguaaauagcucagg

SEQ ID NO: 2819981 - RNA, 16 nt, Human
uguaaauaguauuuga

SEQ ID NO: 2819982 - RNA, 17 nt, Human
aggugauagcauugcuu

SEQ ID NO: 2819983 - RNA, 18 nt, Human
aggugauagcauugcuuu

SEQ ID NO: 2819984 - RNA, 21 nt, Human
uguaaauacuguuuuuaacaa

SEQ ID NO: 2819985 - RNA, 17 nt, Human
ugguuugguuccucucu

SEQ ID NO: 2819986 - RNA, 23 nt, Human
ugguuuggucccugguuuucagu

SEQ ID NO: 2819987 - RNA, 19 nt, Human
ugguuuggccaucucugga

SEQ ID NO: 2819988 - RNA, 20 nt, Human
ugguuuggccaucucuggau

SEQ ID NO: 2819989 - RNA, 20 nt, Human
ugguuugggaauauccaugu

SEQ ID NO: 2819990 - RNA, 14 nt, Human
ugguuaucacacca

SEQ ID NO: 2819991 - RNA, 13 nt, Human
ugguuaugaaaga

SEQ ID NO: 2819992 - RNA, 15 nt, Human
ugguuaugaaagaau

SEQ ID NO: 2819993 - RNA, 18 nt, Human
ugguuaugaaagaauaua

SEQ ID NO: 2819994 - RNA, 19 nt, Human
ugguuaugaaagaauauau

SEQ ID NO: 2819995 - RNA, 20 nt, Human
ugguuaugaaagaauauauu

SEQ ID NO: 2819996 - RNA, 18 nt, Human
ugguuauacaaguucuug

SEQ ID NO: 2819997 - RNA, 17 nt, Human
ugguuucccccuucuac

SEQ ID NO: 2819998 - RNA, 13 nt, Human
ugguuuccugccc

SEQ ID NO: 2819999 - RNA, 12 nt, Human
ugguuuccugcc

SEQ ID NO: 2820000 - RNA, 20 nt, Human
ugguuuccugcccugggagg

SEQ ID NO: 2820001 - RNA, 20 nt, Human
ugguuucccccuucuacauu

SEQ ID NO: 2820002 - RNA, 15 nt, Human
ugguuuccugcccug

SEQ ID NO: 2820003 - RNA, 14 nt, Human
ugguuuccugcccu

SEQ ID NO: 2820004 - RNA, 20 nt, Human
aggugugcucugaucaucca

SEQ ID NO: 2820005 - RNA, 15 nt, Human
aggugugcucugauc

SEQ ID NO: 2820006 - RNA, 17 nt, Human
aggugugaaccaccaca

SEQ ID NO: 2820007 - RNA, 17 nt, Human
agguggggcgaggcagg

SEQ ID NO: 2820008 - RNA, 18 nt, Human
agguggggcgaggcaggc

SEQ ID NO: 2820009 - RNA, 22 nt, Human
agguucuguuuauggccacauu

SEQ ID NO: 2820010 - RNA, 15 nt, Human
agguucuuaaaagug

SEQ ID NO: 2820011 - RNA, 14 nt, Human
agguucucuccucc

SEQ ID NO: 2820012 - RNA, 17 nt, Human
agguucucuccucccca

SEQ ID NO: 2820013 - RNA, 22 nt, Human
agguucucuccuccccaaggag

SEQ ID NO: 2820014 - RNA, 18 nt, Human
agguucucucucacugcc

SEQ ID NO: 2820015 - RNA, 14 nt, Human
agguucugccugcu

SEQ ID NO: 2820016 - RNA, 17 nt, Human
agguucugccugcuuug

SEQ ID NO: 2820017 - RNA, 12 nt, Human
aggugugcucug

SEQ ID NO: 2820018 - RNA, 21 nt, Human
aggugugguguaauuuauaaa

SEQ ID NO: 2820019 - RNA, 16 nt, Human
aggugugugagacuac

SEQ ID NO: 2820020 - RNA, 13 nt, Human
aggugccuggagu

SEQ ID NO: 2820021 - RNA, 17 nt, Human
agguucuagguuucaaa

SEQ ID NO: 2820022 - RNA, 19 nt, Human
agguucuagguuucaaaga

SEQ ID NO: 2820023 - RNA, 23 nt, Human
agguggggcagcuugaggguugg

SEQ ID NO: 2820024 - RNA, 16 nt, Human
agguggggcagcuuga

SEQ ID NO: 2820025 - RNA, 17 nt, Human
aggugccugucccaccc

SEQ ID NO: 2820026 - RNA, 18 nt, Human
aggugccugucccacccc

SEQ ID NO: 2820027 - RNA, 20 nt, Human
aggugauccacccaccucag

SEQ ID NO: 2820028 - RNA, 14 nt, Human
aggugauccaccca

SEQ ID NO: 2820029 - RNA, 23 nt, Human
aggugccacuuuacccaccuaga

SEQ ID NO: 2820030 - RNA, 21 nt, Human
aggugccagccugaggcagcc

SEQ ID NO: 2820031 - RNA, 20 nt, Human
uggugcccuguucucuacca

SEQ ID NO: 2820032 - RNA, 16 nt, Human
aggugauagcauugcu

SEQ ID NO: 2820033 - RNA, 12 nt, Human
uggugccuggcc

SEQ ID NO: 2820034 - RNA, 13 nt, Human
uggugccuccaga

SEQ ID NO: 2820035 - RNA, 13 nt, Human
uggugccuggccu

SEQ ID NO: 2820036 - RNA, 14 nt, Human
uggugccuggccug

SEQ ID NO: 2820037 - RNA, 17 nt, Human
uggugccuggccuggca

SEQ ID NO: 2820038 - RNA, 18 nt, Human
uggugccuggccuggcac

SEQ ID NO: 2820039 - RNA, 19 nt, Human
uggugccuggccuggcaca

SEQ ID NO: 2820040 - RNA, 22 nt, Human
uggugccuggccuggcacacau

SEQ ID NO: 2820041 - RNA, 23 nt, Human
uggugccuggccuggcacacauc

SEQ ID NO: 2820042 - RNA, 24 nt, Human
uggugccuggccuggcacacauca

SEQ ID NO: 2820043 - RNA, 17 nt, Human
uggugcgaucuggguuc

SEQ ID NO: 2820044 - RNA, 16 nt, Human
uggugcuacgccugca

SEQ ID NO: 2820045 - RNA, 16 nt, Human
uggugcgaucuggguu

SEQ ID NO: 2820046 - RNA, 23 nt, Human
uggugcugaguagaugcgcagcc

SEQ ID NO: 2820047 - RNA, 18 nt, Human
uggugcugccacacuuca

SEQ ID NO: 2820048 - RNA, 11 nt, Human
uggugcuggga

SEQ ID NO: 2820049 - RNA, 13 nt, Human
uggugcugggaac

SEQ ID NO: 2820050 - RNA, 18 nt, Human
uggugcucauuuaaauau

SEQ ID NO: 2820051 - RNA, 21 nt, Human
uggugcucaccaugcuuccag

SEQ ID NO: 2820052 - RNA, 13 nt, Human
uggugcugccaca

SEQ ID NO: 2820053 - RNA, 15 nt, Human
ugguggcagcugcgg

SEQ ID NO: 2820054 - RNA, 13 nt, Human
ugguggcagcugc

SEQ ID NO: 2820055 - RNA, 14 nt, Human
ugguggcagcugcg

SEQ ID NO: 2820056 - RNA, 16 nt, Human
ugguggcaagagcccc

SEQ ID NO: 2820057 - RNA, 18 nt, Human
ugguggacaguccuggga

SEQ ID NO: 2820058 - RNA, 17 nt, Human
ugguggacaguccuggg

SEQ ID NO: 2820059 - RNA, 16 nt, Human
ugguggacaguccugg

SEQ ID NO: 2820060 - RNA, 21 nt, Human
ugguggagaggcccggccucu

SEQ ID NO: 2820061 - RNA, 19 nt, Human
uggugcuuccaaauauugu

SEQ ID NO: 2820062 - RNA, 16 nt, Human
uggugcuuaaguucca

SEQ ID NO: 2820063 - RNA, 17 nt, Human
uggugcuuaaguuccag

SEQ ID NO: 2820064 - RNA, 19 nt, Human
uggugcuuaaguuccagca

SEQ ID NO: 2820065 - RNA, 14 nt, Human
ugguuagaaaugca

SEQ ID NO: 2820066 - RNA, 13 nt, Human
ugguuagaaaugc

SEQ ID NO: 2820067 - RNA, 19 nt, Human
uggugucuggauucccagg

SEQ ID NO: 2820068 - RNA, 15 nt, Human
uggugugaaagucag

SEQ ID NO: 2820069 - RNA, 13 nt, Human
uggugucugccug

SEQ ID NO: 2820070 - RNA, 14 nt, Human
uggugucugccugu

SEQ ID NO: 2820071 - RNA, 15 nt, Human
ugguggcacaggccc

SEQ ID NO: 2820072 - RNA, 13 nt, Human
aggugagaaaaaa

SEQ ID NO: 2820073 - RNA, 14 nt, Human
aggugagaaaaaaa

SEQ ID NO: 2820074 - RNA, 15 nt, Human
aggugagaaaaaaac

SEQ ID NO: 2820075 - RNA, 18 nt, Human
aggugacccugaugaaaa

SEQ ID NO: 2820076 - RNA, 20 nt, Human
aggugagcccauggcccucc

SEQ ID NO: 2820077 - RNA, 18 nt, Human
aggugaggagcagagcag

SEQ ID NO: 2820078 - RNA, 13 nt, Human
aggugaggccugu

SEQ ID NO: 2820079 - RNA, 14 nt, Human
aggugaggccuguc

SEQ ID NO: 2820080 - RNA, 17 nt, Human
aggugaggccugucugu

SEQ ID NO: 2820081 - RNA, 20 nt, Human
aggugaggccugucugugac

SEQ ID NO: 2820082 - RNA, 15 nt, Human
aggugacagagugag

SEQ ID NO: 2820083 - RNA, 13 nt, Human
aggugacagagug

SEQ ID NO: 2820084 - RNA, 17 nt, Human
aggucuugaacuccugg

SEQ ID NO: 2820085 - RNA, 21 nt, Human
aggucuucaucgaaucuacua

SEQ ID NO: 2820086 - RNA, 20 nt, Human
aggucuucaucgaaucuacu

SEQ ID NO: 2820087 - RNA, 13 nt, Human
aggugaccccagg

SEQ ID NO: 2820088 - RNA, 14 nt, Human
aggugacaugugaa

SEQ ID NO: 2820089 - RNA, 15 nt, Human
aggugacaugugaaa

SEQ ID NO: 2820090 - RNA, 16 nt, Human
aggugacaugugaaac

SEQ ID NO: 2820091 - RNA, 20 nt, Human
aggugacaugugaaaccuuu

SEQ ID NO: 2820092 - RNA, 22 nt, Human
aggugacagagugagacucugu

SEQ ID NO: 2820093 - RNA, 15 nt, Human
aggugacagcagucg

SEQ ID NO: 2820094 - RNA, 23 nt, Human
aggugaauuaauuaaacauugug

SEQ ID NO: 2820095 - RNA, 15 nt, Human
aggugacacuauagu

SEQ ID NO: 2820096 - RNA, 19 nt, Human
aggugacacuauaguuuaa

SEQ ID NO: 2820097 - RNA, 18 nt, Human
aggugacagaaggaccag

SEQ ID NO: 2820098 - RNA, 19 nt, Human
aggugacagaaggaccagc

SEQ ID NO: 2820099 - RNA, 18 nt, Human
aggucagagccugcaguu

SEQ ID NO: 2820100 - RNA, 17 nt, Human
aggucagagccugcagu

SEQ ID NO: 2820101 - RNA, 15 nt, Human
aggucagagccugca

SEQ ID NO: 2820102 - RNA, 14 nt, Human
aggucagagccugc

SEQ ID NO: 2820103 - RNA, 13 nt, Human
aggucagagccug

SEQ ID NO: 2820104 - RNA, 16 nt, Human
aggucuugaacuccug

SEQ ID NO: 2820105 - RNA, 11 nt, Human
agguccagccc

SEQ ID NO: 2820106 - RNA, 12 nt, Human
agguccagccca

SEQ ID NO: 2820107 - RNA, 14 nt, Human
agguccagcccauc

SEQ ID NO: 2820108 - RNA, 15 nt, Human
agguccagcccaucu

SEQ ID NO: 2820109 - RNA, 16 nt, Human
agguccagcccaucuc

SEQ ID NO: 2820110 - RNA, 23 nt, Human
agguccagcccaucucggagcau

SEQ ID NO: 2820111 - RNA, 14 nt, Human
agguccacaggucu

SEQ ID NO: 2820112 - RNA, 15 nt, Human
agguccacaggucua

SEQ ID NO: 2820113 - RNA, 18 nt, Human
agguccacaggucuagac

SEQ ID NO: 2820114 - RNA, 19 nt, Human
agguccacaggucuagacu

SEQ ID NO: 2820115 - RNA, 20 nt, Human
agguccacaggucuagacua

SEQ ID NO: 2820116 - RNA, 19 nt, Human
agguccacaacacacagau

SEQ ID NO: 2820117 - RNA, 12 nt, Human
aggucaggaaac

SEQ ID NO: 2820118 - RNA, 22 nt, Human
uggucacuuaaaaugugcagua

SEQ ID NO: 2820119 - RNA, 20 nt, Human
uguaguguccauuuugugaa

SEQ ID NO: 2820120 - RNA, 21 nt, Human
uguaguguccauuuugugaag

SEQ ID NO: 2820121 - RNA, 17 nt, Human
uguaucaaacccacgau

SEQ ID NO: 2820122 - RNA, 16 nt, Human
uguaugugccauuuau

SEQ ID NO: 2820123 - RNA, 11 nt, Human
uguaugucugu

SEQ ID NO: 2820124 - RNA, 13 nt, Human
uguaugucuguca

SEQ ID NO: 2820125 - RNA, 14 nt, Human
uguaugucuuggac

SEQ ID NO: 2820126 - RNA, 19 nt, Human
uguaugucuuggacacugu

SEQ ID NO: 2820127 - RNA, 14 nt, Human
uguaugugagagau

SEQ ID NO: 2820128 - RNA, 18 nt, Human
uguaugugagagauucug

SEQ ID NO: 2820129 - RNA, 21 nt, Human
uguaugucagacauccauguu

SEQ ID NO: 2820130 - RNA, 17 nt, Human
uguauguauuagugaua

SEQ ID NO: 2820131 - RNA, 22 nt, Human
uguauccaacaagccagaauca

SEQ ID NO: 2820132 - RNA, 21 nt, Human
uguaucaucuggauaggagcc

SEQ ID NO: 2820133 - RNA, 22 nt, Human
uguaucaugugcuagauuggag

SEQ ID NO: 2820134 - RNA, 17 nt, Human
uguaucauagaaaugua

SEQ ID NO: 2820135 - RNA, 16 nt, Human
uguaucauagaaaugu

SEQ ID NO: 2820136 - RNA, 15 nt, Human
uguaucauagaaaug

SEQ ID NO: 2820137 - RNA, 19 nt, Human
uguaucagaagagagggga

SEQ ID NO: 2820138 - RNA, 20 nt, Human
uguauucuagcuaauguaau

SEQ ID NO: 2820139 - RNA, 17 nt, Human
uguauucccaguuacuu

SEQ ID NO: 2820140 - RNA, 17 nt, Human
uguauuaauaaauagag

SEQ ID NO: 2820141 - RNA, 20 nt, Human
uguauuaauaaauagagcaa

SEQ ID NO: 2820142 - RNA, 22 nt, Human
uguauuaauaaauagagcaauu

SEQ ID NO: 2820143 - RNA, 21 nt, Human
uguauguuauuauauuccgua

SEQ ID NO: 2820144 - RNA, 14 nt, Human
ugucaaaaaaaaaa

SEQ ID NO: 2820145 - RNA, 22 nt, Human
uguauucuagcuaauguaauaa

SEQ ID NO: 2820146 - RNA, 13 nt, Human
ugucaaaacacug

SEQ ID NO: 2820147 - RNA, 14 nt, Human
ugucaaaacacugu

SEQ ID NO: 2820148 - RNA, 15 nt, Human
ugucaaaacacugug

SEQ ID NO: 2820149 - RNA, 16 nt, Human
ugucaaaacacugugg

SEQ ID NO: 2820150 - RNA, 17 nt, Human
ugucaaaacacugugga

SEQ ID NO: 2820151 - RNA, 18 nt, Human
ugucaaaacacuguggaa

SEQ ID NO: 2820152 - RNA, 16 nt, Human
ugucaaaaguuggacu

SEQ ID NO: 2820153 - RNA, 17 nt, Human
ugucaaaaguuggacua

SEQ ID NO: 2820154 - RNA, 20 nt, Human
ugucaaaaguuggacuaaau

SEQ ID NO: 2820155 - RNA, 21 nt, Human
ugucaaaaguuggacuaaaug

SEQ ID NO: 2820156 - RNA, 22 nt, Human
ugucaaaaguuggacuaaaugc

SEQ ID NO: 2820157 - RNA, 16 nt, Human
ugucaagucucugcug

SEQ ID NO: 2820158 - RNA, 16 nt, Human
ugucaagccugugcaa

SEQ ID NO: 2820159 - RNA, 17 nt, Human
ugucaagccugugcaaa

SEQ ID NO: 2820160 - RNA, 18 nt, Human
ugucaagccugugcaaaa

SEQ ID NO: 2820161 - RNA, 20 nt, Human
ugucaagccugugcaaaaaa

SEQ ID NO: 2820162 - RNA, 18 nt, Human
aguauuacuucugcuaca

SEQ ID NO: 2820163 - RNA, 17 nt, Human
aguaugguggcuggguu

SEQ ID NO: 2820164 - RNA, 15 nt, Human
aguauuacuucugcu

SEQ ID NO: 2820165 - RNA, 16 nt, Human
aguaugguggcugggu

SEQ ID NO: 2820166 - RNA, 15 nt, Human
aguaugguggcuggg

SEQ ID NO: 2820167 - RNA, 18 nt, Human
ugucaagucucugcuggc

SEQ ID NO: 2820168 - RNA, 17 nt, Human
ugucaagucucugcugg

SEQ ID NO: 2820169 - RNA, 19 nt, Human
ugucaagucucugcuggcc

SEQ ID NO: 2820170 - RNA, 18 nt, Human
ugucaaguuccuuugggu

SEQ ID NO: 2820171 - RNA, 19 nt, Human
ugucaagugggaucuguca

SEQ ID NO: 2820172 - RNA, 16 nt, Human
aguaguaauagagcaa

SEQ ID NO: 2820173 - RNA, 13 nt, Human
agucaccucuguc

SEQ ID NO: 2820174 - RNA, 13 nt, Human
agucaccuuccag

SEQ ID NO: 2820175 - RNA, 14 nt, Human
agucaccuuccagg

SEQ ID NO: 2820176 - RNA, 20 nt, Human
agucaccuuccaggaccccu

SEQ ID NO: 2820177 - RNA, 13 nt, Human
agucaccuucccu

SEQ ID NO: 2820178 - RNA, 14 nt, Human
agucaccuucccuu

SEQ ID NO: 2820179 - RNA, 15 nt, Human
agucaccuucccuug

SEQ ID NO: 2820180 - RNA, 16 nt, Human
agucaccuucccuugc

SEQ ID NO: 2820181 - RNA, 17 nt, Human
agucaccuucccuugcc

SEQ ID NO: 2820182 - RNA, 18 nt, Human
agucaccuucccuugcca

SEQ ID NO: 2820183 - RNA, 21 nt, Human
agucaccuucccuugccacuu

SEQ ID NO: 2820184 - RNA, 23 nt, Human
agucaccuucccuugccacuuug

SEQ ID NO: 2820185 - RNA, 20 nt, Human
agucacccuaccugugccug

SEQ ID NO: 2820186 - RNA, 15 nt, Human
agucacccuagcccu

SEQ ID NO: 2820187 - RNA, 23 nt, Human
agucacccuagcccucucccucu

SEQ ID NO: 2820188 - RNA, 23 nt, Human
agucacacagugagucgaggaca

SEQ ID NO: 2820189 - RNA, 15 nt, Human
agucacacagugagu

SEQ ID NO: 2820190 - RNA, 16 nt, Human
agucacacgggggcag

SEQ ID NO: 2820191 - RNA, 19 nt, Human
agucacccuaccugugccu

SEQ ID NO: 2820192 - RNA, 19 nt, Human
agucacacgggggcagcug

SEQ ID NO: 2820193 - RNA, 16 nt, Human
agucacacugcuagca

SEQ ID NO: 2820194 - RNA, 19 nt, Human
agucacacugcuagcaaau

SEQ ID NO: 2820195 - RNA, 23 nt, Human
agucacacaguauuacuucugcu

SEQ ID NO: 2820196 - RNA, 14 nt, Human
aguaugguggcugg

SEQ ID NO: 2820197 - RNA, 18 nt, Human
aguauucuugucaaaaaa

SEQ ID NO: 2820198 - RNA, 15 nt, Human
aguauucuugucaaa

SEQ ID NO: 2820199 - RNA, 14 nt, Human
aguaauagagcaaa

SEQ ID NO: 2820200 - RNA, 19 nt, Human
aguaauaggagcuuccagc

SEQ ID NO: 2820201 - RNA, 11 nt, Human
aguaauauaau

SEQ ID NO: 2820202 - RNA, 14 nt, Human
aguaaaacuugcug

SEQ ID NO: 2820203 - RNA, 11 nt, Human
aguaaaagaaa

SEQ ID NO: 2820204 - RNA, 13 nt, Human
aguaaaagaaacc

SEQ ID NO: 2820205 - RNA, 20 nt, Human
aguaaaagaaaccacuucug

SEQ ID NO: 2820206 - RNA, 20 nt, Human
agguuuuuccuuauuugcuu

SEQ ID NO: 2820207 - RNA, 19 nt, Human
agguuuucacauaaaugca

SEQ ID NO: 2820208 - RNA, 23 nt, Human
agguuuuagguucuaaaguucua

SEQ ID NO: 2820209 - RNA, 16 nt, Human
agguuuuagguucuaa

SEQ ID NO: 2820210 - RNA, 17 nt, Human
agguuuuagguucuaaa

SEQ ID NO: 2820211 - RNA, 18 nt, Human
agguuuuagguucuaaag

SEQ ID NO: 2820212 - RNA, 19 nt, Human
agguuuuagguucuaaagu

SEQ ID NO: 2820213 - RNA, 18 nt, Human
uguagagccagggucuca

SEQ ID NO: 2820214 - RNA, 16 nt, Human
uguagagccagggucu

SEQ ID NO: 2820215 - RNA, 17 nt, Human
agguuugucaucagaug

SEQ ID NO: 2820216 - RNA, 23 nt, Human
agguuugucgggcaccagccagc

SEQ ID NO: 2820217 - RNA, 14 nt, Human
uguagagcuucugg

SEQ ID NO: 2820218 - RNA, 19 nt, Human
agguuuuaagugguuugau

SEQ ID NO: 2820219 - RNA, 14 nt, Human
agguuuuaaguugu

SEQ ID NO: 2820220 - RNA, 15 nt, Human
agguuuguguuuucu

SEQ ID NO: 2820221 - RNA, 19 nt, Human
agguuuuaaguuguuugca

SEQ ID NO: 2820222 - RNA, 14 nt, Human
agguuuuagguucu

SEQ ID NO: 2820223 - RNA, 15 nt, Human
agguuuuagguucua

SEQ ID NO: 2820224 - RNA, 15 nt, Human
uguacuuugcuugcu

SEQ ID NO: 2820225 - RNA, 18 nt, Human
uguacuuugcuugcucau

SEQ ID NO: 2820226 - RNA, 22 nt, Human
uguacuuggaguauuggggucu

SEQ ID NO: 2820227 - RNA, 17 nt, Human
uguacuugguccaacug

SEQ ID NO: 2820228 - RNA, 20 nt, Human
uguacuugguccaacugcaa

SEQ ID NO: 2820229 - RNA, 14 nt, Human
uguacuuguuugca

SEQ ID NO: 2820230 - RNA, 19 nt, Human
agguuuacuagcaccugcc

SEQ ID NO: 2820231 - RNA, 15 nt, Human
uguaguauaaagaaa

SEQ ID NO: 2820232 - RNA, 23 nt, Human
uguaguagcguuuuuuaaaugua

SEQ ID NO: 2820233 - RNA, 18 nt, Human
uguaguagcccuuucugu

SEQ ID NO: 2820234 - RNA, 16 nt, Human
uguaguagcguuuuuu

SEQ ID NO: 2820235 - RNA, 22 nt, Human
uguaguagcguuuuuuaaaugu

SEQ ID NO: 2820236 - RNA, 21 nt, Human
uguaguagcguuuuuuaaaug

SEQ ID NO: 2820237 - RNA, 18 nt, Human
uguaggcaucaugcaugu

SEQ ID NO: 2820238 - RNA, 17 nt, Human
uguaggcaucaugcaug

SEQ ID NO: 2820239 - RNA, 18 nt, Human
uguaguaauugacaugug

SEQ ID NO: 2820240 - RNA, 19 nt, Human
uguaguaauugacaugugc

SEQ ID NO: 2820241 - RNA, 11 nt, Human
aguagagacag

SEQ ID NO: 2820242 - RNA, 14 nt, Human
aguagaauugcauu

SEQ ID NO: 2820243 - RNA, 15 nt, Human
aguagaauugcauug

SEQ ID NO: 2820244 - RNA, 19 nt, Human
aguagacaaucauuguuuu

SEQ ID NO: 2820245 - RNA, 15 nt, Human
aguagacacauuuaa

SEQ ID NO: 2820246 - RNA, 18 nt, Human
aguagacacauuuaagga

SEQ ID NO: 2820247 - RNA, 14 nt, Human
aguagacauuuuaa

SEQ ID NO: 2820248 - RNA, 16 nt, Human
aguagacauuuuaaca

SEQ ID NO: 2820249 - RNA, 17 nt, Human
aguagacauuuuaacaa

SEQ ID NO: 2820250 - RNA, 19 nt, Human
aguagacauuuuaacaaga

SEQ ID NO: 2820251 - RNA, 20 nt, Human
aguagacauuuuaacaagaa

SEQ ID NO: 2820252 - RNA, 22 nt, Human
aguagacauuuuaacaagaaga

SEQ ID NO: 2820253 - RNA, 23 nt, Human
aguagacauuuuaacaagaagau

SEQ ID NO: 2820254 - RNA, 15 nt, Human
aguagcccuuucugu

SEQ ID NO: 2820255 - RNA, 21 nt, Human
aguagccauguuaacaugaca

SEQ ID NO: 2820256 - RNA, 22 nt, Human
aguagccauguuaacaugacau

SEQ ID NO: 2820257 - RNA, 20 nt, Human
aguagcccuuucugugugca

SEQ ID NO: 2820258 - RNA, 21 nt, Human
aguagcccuuucugugugcac

SEQ ID NO: 2820259 - RNA, 16 nt, Human
aguagcccuuucugug

SEQ ID NO: 2820260 - RNA, 17 nt, Human
aguagcccuuucugugu

SEQ ID NO: 2820261 - RNA, 19 nt, Human
aguagcccuuucugugugc

SEQ ID NO: 2820262 - RNA, 18 nt, Human
aguagcguuuuuuaaaug

SEQ ID NO: 2820263 - RNA, 19 nt, Human
aguagcguuuuuuaaaugu

SEQ ID NO: 2820264 - RNA, 15 nt, Human
aguaauucaagaaaa

SEQ ID NO: 2820265 - RNA, 18 nt, Human
aguaauguggaagaaaau

SEQ ID NO: 2820266 - RNA, 21 nt, Human
aguaauguggaagaaaauggu

SEQ ID NO: 2820267 - RNA, 23 nt, Human
aguaauguggaagaaaaugguuu

SEQ ID NO: 2820268 - RNA, 17 nt, Human
aguaauguuauuuucuu

SEQ ID NO: 2820269 - RNA, 21 nt, Human
aguaauguuauuuucuucuaa

SEQ ID NO: 2820270 - RNA, 15 nt, Human
aguaaugaucucaaa

SEQ ID NO: 2820271 - RNA, 17 nt, Human
aguaaugcauacagaaa

SEQ ID NO: 2820272 - RNA, 18 nt, Human
aguaaugcauacagaaau

SEQ ID NO: 2820273 - RNA, 20 nt, Human
aguaaugcauacagaaauau

SEQ ID NO: 2820274 - RNA, 13 nt, Human
aguaaugccucug

SEQ ID NO: 2820275 - RNA, 20 nt, Human
aguaaugccucugucuagca

SEQ ID NO: 2820276 - RNA, 20 nt, Human
aguaauauaauggaagagaa

SEQ ID NO: 2820277 - RNA, 13 nt, Human
aguaauauauucu

SEQ ID NO: 2820278 - RNA, 15 nt, Human
aguaauauauucuga

SEQ ID NO: 2820279 - RNA, 22 nt, Human
aguaauauauucugaagcaaca

SEQ ID NO: 2820280 - RNA, 13 nt, Human
aguaaaagacauu

SEQ ID NO: 2820281 - RNA, 13 nt, Human
aguacaguggugc

SEQ ID NO: 2820282 - RNA, 17 nt, Human
aguacauauuuauuuuc

SEQ ID NO: 2820283 - RNA, 19 nt, Human
aguacauauuuauuuucuu

SEQ ID NO: 2820284 - RNA, 21 nt, Human
aguacauauuuauuuucuuuu

SEQ ID NO: 2820285 - RNA, 22 nt, Human
aguacauauuuauuuucuuuug

SEQ ID NO: 2820286 - RNA, 22 nt, Human
aguacaugauaaaugauagaca

SEQ ID NO: 2820287 - RNA, 15 nt, Human
aguaauuaugcacua

SEQ ID NO: 2820288 - RNA, 19 nt, Human
aguaauuaugcacuaaaua

SEQ ID NO: 2820289 - RNA, 21 nt, Human
aguaauuaugcacuaaauaug

SEQ ID NO: 2820290 - RNA, 12 nt, Human
aguaccuccugu

SEQ ID NO: 2820291 - RNA, 22 nt, Human
aguaccuccugucucuggccug

SEQ ID NO: 2820292 - RNA, 16 nt, Human
aguacauuuggagaca

SEQ ID NO: 2820293 - RNA, 18 nt, Human
aguacccaucuaguacuu

SEQ ID NO: 2820294 - RNA, 16 nt, Human
aguacccucucagcuc

SEQ ID NO: 2820295 - RNA, 18 nt, Human
aguacccucucagcucca

SEQ ID NO: 2820296 - RNA, 19 nt, Human
aguacccucucagcuccag

SEQ ID NO: 2820297 - RNA, 15 nt, Human
aggcccuccugugcu

SEQ ID NO: 2820298 - RNA, 17 nt, Human
aggcccuccugugcugg

SEQ ID NO: 2820299 - RNA, 21 nt, Human
aggcccuccugugcuggggga

SEQ ID NO: 2820300 - RNA, 20 nt, Human
aggcccggcuccaggcuccu

SEQ ID NO: 2820301 - RNA, 18 nt, Human
aggcccggcuccaggcuc

SEQ ID NO: 2820302 - RNA, 21 nt, Human
aggcccggcuccaggcuccuu

SEQ ID NO: 2820303 - RNA, 14 nt, Human
aggcccgucugucc

SEQ ID NO: 2820304 - RNA, 15 nt, Human
aggcccgucugucca

SEQ ID NO: 2820305 - RNA, 16 nt, Human
aggcccgucuguccau

SEQ ID NO: 2820306 - RNA, 20 nt, Human
aggcccgucuguccaucugc

SEQ ID NO: 2820307 - RNA, 21 nt, Human
aggcccgucuguccaucugcc

SEQ ID NO: 2820308 - RNA, 23 nt, Human
aggcccgucuguccaucugcccg

SEQ ID NO: 2820309 - RNA, 20 nt, Human
aggcccgcucuacaucuucu

SEQ ID NO: 2820310 - RNA, 19 nt, Human
agggaacgggguccuucaa

SEQ ID NO: 2820311 - RNA, 12 nt, Human
agggaagagcag

SEQ ID NO: 2820312 - RNA, 13 nt, Human
agggaagcuggcc

SEQ ID NO: 2820313 - RNA, 19 nt, Human
agggaagcacugccucccu

SEQ ID NO: 2820314 - RNA, 16 nt, Human
agggaagcuggccgag

SEQ ID NO: 2820315 - RNA, 16 nt, Human
agggaagcuggccuga

SEQ ID NO: 2820316 - RNA, 13 nt, Human
agggaaggacaga

SEQ ID NO: 2820317 - RNA, 14 nt, Human
agggaaggacagaa

SEQ ID NO: 2820318 - RNA, 15 nt, Human
agggaaggacagaaa

SEQ ID NO: 2820319 - RNA, 18 nt, Human
agggaaggacagaaagga

SEQ ID NO: 2820320 - RNA, 23 nt, Human
agggaagcuggccugagagggga

SEQ ID NO: 2820321 - RNA, 17 nt, Human
agggaagcuggccugag

SEQ ID NO: 2820322 - RNA, 12 nt, Human
agggaaggccug

SEQ ID NO: 2820323 - RNA, 16 nt, Human
agggaagacauuucuu

SEQ ID NO: 2820324 - RNA, 16 nt, Human
agggaaggauuuagga

SEQ ID NO: 2820325 - RNA, 12 nt, Human
agggaagggugg

SEQ ID NO: 2820326 - RNA, 16 nt, Human
agggaaguaacaguaa

SEQ ID NO: 2820327 - RNA, 22 nt, Human
agggaaggggacaaggacuagg

SEQ ID NO: 2820328 - RNA, 13 nt, Human
agggaaggggaca

SEQ ID NO: 2820329 - RNA, 14 nt, Human
agggaaggccugac

SEQ ID NO: 2820330 - RNA, 13 nt, Human
agggaaggccuga

SEQ ID NO: 2820331 - RNA, 16 nt, Human
agggaaggccugacuu

SEQ ID NO: 2820332 - RNA, 22 nt, Human
agggaauccaagccuccacagc

SEQ ID NO: 2820333 - RNA, 16 nt, Human
agggaauccccgaagg

SEQ ID NO: 2820334 - RNA, 18 nt, Human
agggaauccccgaaggug

SEQ ID NO: 2820335 - RNA, 20 nt, Human
agggaauccccgaaggugcu

SEQ ID NO: 2820336 - RNA, 23 nt, Human
agggaauccccgaaggugcugga

SEQ ID NO: 2820337 - RNA, 15 nt, Human
agggaauccuccucc

SEQ ID NO: 2820338 - RNA, 16 nt, Human
agggaauccuccucca

SEQ ID NO: 2820339 - RNA, 18 nt, Human
agggaauccuccuccagg

SEQ ID NO: 2820340 - RNA, 15 nt, Human
agggaauccugaccu

SEQ ID NO: 2820341 - RNA, 22 nt, Human
agggaaucuaauauccccaaau

SEQ ID NO: 2820342 - RNA, 13 nt, Human
agggaaugccuga

SEQ ID NO: 2820343 - RNA, 14 nt, Human
agggaaugccugag

SEQ ID NO: 2820344 - RNA, 18 nt, Human
agggaaugccugagugcc

SEQ ID NO: 2820345 - RNA, 21 nt, Human
agggaaugccugagugccugg

SEQ ID NO: 2820346 - RNA, 22 nt, Human
agggaaugccugagugccuggc

SEQ ID NO: 2820347 - RNA, 19 nt, Human
agggaauccaagccuccac

SEQ ID NO: 2820348 - RNA, 16 nt, Human
agggaauccaagccuc

SEQ ID NO: 2820349 - RNA, 15 nt, Human
agggaauccaagccu

SEQ ID NO: 2820350 - RNA, 15 nt, Human
agggaaucacaucuu

SEQ ID NO: 2820351 - RNA, 23 nt, Human
agggaauaaaauccuaagacaca

SEQ ID NO: 2820352 - RNA, 22 nt, Human
agggaaguaacaguaacgcagg

SEQ ID NO: 2820353 - RNA, 15 nt, Human
agggaaguaguccuu

SEQ ID NO: 2820354 - RNA, 15 nt, Human
agggaauuucaggaa

SEQ ID NO: 2820355 - RNA, 16 nt, Human
agggaauuucuaucua

SEQ ID NO: 2820356 - RNA, 22 nt, Human
agggaauuucuaucuaaaugau

SEQ ID NO: 2820357 - RNA, 21 nt, Human
agggaauuucuucaacucccu

SEQ ID NO: 2820358 - RNA, 16 nt, Human
agggaauugcagagua

SEQ ID NO: 2820359 - RNA, 18 nt, Human
agggaggaccacaggugu

SEQ ID NO: 2820360 - RNA, 13 nt, Human
agggaggaccugg

SEQ ID NO: 2820361 - RNA, 14 nt, Human
agggaggaccuggg

SEQ ID NO: 2820362 - RNA, 17 nt, Human
agggaggaccuggggca

SEQ ID NO: 2820363 - RNA, 20 nt, Human
agggaggaccuggggcacag

SEQ ID NO: 2820364 - RNA, 16 nt, Human
ugggacuacaggcacc

SEQ ID NO: 2820365 - RNA, 15 nt, Human
ugggacuacaggcac

SEQ ID NO: 2820366 - RNA, 14 nt, Human
ugggacuacaggca

SEQ ID NO: 2820367 - RNA, 19 nt, Human
agggaggacgggagcuggg

SEQ ID NO: 2820368 - RNA, 12 nt, Human
agggaggaggag

SEQ ID NO: 2820369 - RNA, 14 nt, Human
agggacagagccau

SEQ ID NO: 2820370 - RNA, 14 nt, Human
agggagcagacagg

SEQ ID NO: 2820371 - RNA, 13 nt, Human
agggagcacuggg

SEQ ID NO: 2820372 - RNA, 22 nt, Human
agggagauauuuaaguauaaaa

SEQ ID NO: 2820373 - RNA, 14 nt, Human
agggagauuuugag

SEQ ID NO: 2820374 - RNA, 21 nt, Human
ugggagacaagaaaucccugu

SEQ ID NO: 2820375 - RNA, 12 nt, Human
ugggagacagac

SEQ ID NO: 2820376 - RNA, 13 nt, Human
ugggagacagacc

SEQ ID NO: 2820377 - RNA, 22 nt, Human
ugggagacaagaaaucccuguu

SEQ ID NO: 2820378 - RNA, 14 nt, Human
ugggagagcccagc

SEQ ID NO: 2820379 - RNA, 18 nt, Human
ugggagagcccagccauu

SEQ ID NO: 2820380 - RNA, 14 nt, Human
ugggagagccccug

SEQ ID NO: 2820381 - RNA, 15 nt, Human
ugggagagccccugg

SEQ ID NO: 2820382 - RNA, 16 nt, Human
ugggagagccccuggg

SEQ ID NO: 2820383 - RNA, 18 nt, Human
ugggagagccccuggggc

SEQ ID NO: 2820384 - RNA, 19 nt, Human
ugggagagccccuggggcc

SEQ ID NO: 2820385 - RNA, 23 nt, Human
ugggagagccccuggggccuaga

SEQ ID NO: 2820386 - RNA, 18 nt, Human
ugggagacugcugaguca

SEQ ID NO: 2820387 - RNA, 15 nt, Human
ugggagaaccucagg

SEQ ID NO: 2820388 - RNA, 14 nt, Human
ugggagaaccucag

SEQ ID NO: 2820389 - RNA, 23 nt, Human
ugggagaaccucaggcuuccuug

SEQ ID NO: 2820390 - RNA, 22 nt, Human
ugggagaaccucaggcuuccuu

SEQ ID NO: 2820391 - RNA, 20 nt, Human
ugggacucaaugcacugaca

SEQ ID NO: 2820392 - RNA, 23 nt, Human
ugggacuggccagguuucugccc

SEQ ID NO: 2820393 - RNA, 20 nt, Human
ugggacugagccuggcccau

SEQ ID NO: 2820394 - RNA, 13 nt, Human
agggcccuaccug

SEQ ID NO: 2820395 - RNA, 13 nt, Human
agggcccugcaga

SEQ ID NO: 2820396 - RNA, 12 nt, Human
agggcccugcag

SEQ ID NO: 2820397 - RNA, 22 nt, Human
agggccgaccagaggagccuuu

SEQ ID NO: 2820398 - RNA, 23 nt, Human
agggcucagcggggacagcuccu

SEQ ID NO: 2820399 - RNA, 22 nt, Human
agggcucagcggggacagcucc

SEQ ID NO: 2820400 - RNA, 20 nt, Human
agggcucagcggggacagcu

SEQ ID NO: 2820401 - RNA, 19 nt, Human
agggcucagcggggacagc

SEQ ID NO: 2820402 - RNA, 17 nt, Human
agggccaugccugcccc

SEQ ID NO: 2820403 - RNA, 23 nt, Human
agggcccacuuguauccucuggu

SEQ ID NO: 2820404 - RNA, 15 nt, Human
agggcccacuuguau

SEQ ID NO: 2820405 - RNA, 14 nt, Human
agggccacugaaga

SEQ ID NO: 2820406 - RNA, 23 nt, Human
agggccaguccugccuggccagg

SEQ ID NO: 2820407 - RNA, 22 nt, Human
agggccaguccugccuggccag

SEQ ID NO: 2820408 - RNA, 15 nt, Human
agggccaguggggcc

SEQ ID NO: 2820409 - RNA, 17 nt, Human
agggccaguggggccug

SEQ ID NO: 2820410 - RNA, 19 nt, Human
agggccaguggggccugug

SEQ ID NO: 2820411 - RNA, 20 nt, Human
agggccaguggggccugugg

SEQ ID NO: 2820412 - RNA, 21 nt, Human
agggccaguggggccugugga

SEQ ID NO: 2820413 - RNA, 23 nt, Human
agggccaguggggccuguggaau

SEQ ID NO: 2820414 - RNA, 21 nt, Human
agggccaguccugccuggcca

SEQ ID NO: 2820415 - RNA, 19 nt, Human
agggccaguccugccuggc

SEQ ID NO: 2820416 - RNA, 19 nt, Human
agggcacauuccuugccug

SEQ ID NO: 2820417 - RNA, 20 nt, Human
agggcacauuccuugccugc

SEQ ID NO: 2820418 - RNA, 13 nt, Human
agggcagcugcua

SEQ ID NO: 2820419 - RNA, 12 nt, Human
agggcagcugcu

SEQ ID NO: 2820420 - RNA, 16 nt, Human
agggcacugguggccc

SEQ ID NO: 2820421 - RNA, 21 nt, Human
agggcaccaucacaauacaga

SEQ ID NO: 2820422 - RNA, 21 nt, Human
agggcacccuaguucuaccuc

SEQ ID NO: 2820423 - RNA, 21 nt, Human
agggcacccuguggcccuggc

SEQ ID NO: 2820424 - RNA, 21 nt, Human
agggcacauuccuugccugca

SEQ ID NO: 2820425 - RNA, 14 nt, Human
agggcacugguggc

SEQ ID NO: 2820426 - RNA, 11 nt, Human
agggcaggcau

SEQ ID NO: 2820427 - RNA, 18 nt, Human
agggcaggaaggagagcc

SEQ ID NO: 2820428 - RNA, 16 nt, Human
agggcaggaaggagag

SEQ ID NO: 2820429 - RNA, 21 nt, Human
agggcaggaaggagagccugc

SEQ ID NO: 2820430 - RNA, 19 nt, Human
agggcaggaaggagagccu

SEQ ID NO: 2820431 - RNA, 23 nt, Human
agggcaggaaggagagccugcug

SEQ ID NO: 2820432 - RNA, 23 nt, Human
agggcaugccccggccaccucug

SEQ ID NO: 2820433 - RNA, 13 nt, Human
agggcaugccuug

SEQ ID NO: 2820434 - RNA, 15 nt, Human
agggcaugccuugug

SEQ ID NO: 2820435 - RNA, 16 nt, Human
agggcaugccuugugc

SEQ ID NO: 2820436 - RNA, 22 nt, Human
agggccaccuacaauacaucug

SEQ ID NO: 2820437 - RNA, 23 nt, Human
agggccaccuacaauacaucuga

SEQ ID NO: 2820438 - RNA, 22 nt, Human
agggcaugccacgugggcucau

SEQ ID NO: 2820439 - RNA, 15 nt, Human
agggcaugccccggc

SEQ ID NO: 2820440 - RNA, 20 nt, Human
agggcaugccccggccaccu

SEQ ID NO: 2820441 - RNA, 21 nt, Human
agggcaugccccggccaccuc

SEQ ID NO: 2820442 - RNA, 22 nt, Human
agggcaugccccggccaccucu

SEQ ID NO: 2820443 - RNA, 12 nt, Human
ugggccagggcu

SEQ ID NO: 2820444 - RNA, 13 nt, Human
ugggccagggcug

SEQ ID NO: 2820445 - RNA, 20 nt, Human
ugggccagggcugcccugag

SEQ ID NO: 2820446 - RNA, 21 nt, Human
ugggccagggcugcccugaga

SEQ ID NO: 2820447 - RNA, 22 nt, Human
ugggccagggcugcccugagaa

SEQ ID NO: 2820448 - RNA, 13 nt, Human
ugggccagggucu

SEQ ID NO: 2820449 - RNA, 14 nt, Human
ugggccagggucug

SEQ ID NO: 2820450 - RNA, 19 nt, Human
ugggccagggucuguguga

SEQ ID NO: 2820451 - RNA, 22 nt, Human
ugggccagggucugugugaaug

SEQ ID NO: 2820452 - RNA, 15 nt, Human
ugggcacuggcccag

SEQ ID NO: 2820453 - RNA, 16 nt, Human
ugggcacuggcccagg

SEQ ID NO: 2820454 - RNA, 22 nt, Human
ugggcacugggaugagccgcug

SEQ ID NO: 2820455 - RNA, 15 nt, Human
ugggcacuucccugc

SEQ ID NO: 2820456 - RNA, 16 nt, Human
ugggcacuucccugcu

SEQ ID NO: 2820457 - RNA, 17 nt, Human
ugggcacuucccugcug

SEQ ID NO: 2820458 - RNA, 20 nt, Human
ugggcacuucccugcugccu

SEQ ID NO: 2820459 - RNA, 13 nt, Human
ugggcacuugaga

SEQ ID NO: 2820460 - RNA, 15 nt, Human
ugggcacugggauga

SEQ ID NO: 2820461 - RNA, 16 nt, Human
ugggcacugggaugag

SEQ ID NO: 2820462 - RNA, 14 nt, Human
ugggaggcacagca

SEQ ID NO: 2820463 - RNA, 18 nt, Human
ugggaggcauggcccugg

SEQ ID NO: 2820464 - RNA, 16 nt, Human
ugggaggcauggcccu

SEQ ID NO: 2820465 - RNA, 20 nt, Human
ugggaggccccuucucuccc

SEQ ID NO: 2820466 - RNA, 18 nt, Human
ugggccccccagcucagg

SEQ ID NO: 2820467 - RNA, 19 nt, Human
ugggccccccagcucaggg

SEQ ID NO: 2820468 - RNA, 12 nt, Human
ugggccccagcu

SEQ ID NO: 2820469 - RNA, 22 nt, Human
ugggccccaguuguauuuauuu

SEQ ID NO: 2820470 - RNA, 23 nt, Human
ugggccauguccaaagaggcugc

SEQ ID NO: 2820471 - RNA, 19 nt, Human
ugggccauguccaaagagg

SEQ ID NO: 2820472 - RNA, 18 nt, Human
ugggccauguccaaagag

SEQ ID NO: 2820473 - RNA, 17 nt, Human
ugggccauguccaaaga

SEQ ID NO: 2820474 - RNA, 18 nt, Human
ugggccccaguuguauuu

SEQ ID NO: 2820475 - RNA, 14 nt, Human
ugggccauguccaa

SEQ ID NO: 2820476 - RNA, 20 nt, Human
agggaggcgggggcugcccu

SEQ ID NO: 2820477 - RNA, 18 nt, Human
agggaggcgggggcugcc

SEQ ID NO: 2820478 - RNA, 17 nt, Human
agggaggccaucugggg

SEQ ID NO: 2820479 - RNA, 12 nt, Human
agggaggcagcc

SEQ ID NO: 2820480 - RNA, 13 nt, Human
agggaggcagccu

SEQ ID NO: 2820481 - RNA, 15 nt, Human
agggaggcagccucc

SEQ ID NO: 2820482 - RNA, 16 nt, Human
agggaggcagccucca

SEQ ID NO: 2820483 - RNA, 17 nt, Human
agggaggcagccuccag

SEQ ID NO: 2820484 - RNA, 20 nt, Human
aggggaauguuugccucugc

SEQ ID NO: 2820485 - RNA, 19 nt, Human
aggggaauguuugccucug

SEQ ID NO: 2820486 - RNA, 21 nt, Human
aggggaauguuugccucugcc

SEQ ID NO: 2820487 - RNA, 13 nt, Human
aggggcugacacu

SEQ ID NO: 2820488 - RNA, 23 nt, Human
aggggcuccuggaaaggcucagu

SEQ ID NO: 2820489 - RNA, 14 nt, Human
aggggcuccuggaa

SEQ ID NO: 2820490 - RNA, 13 nt, Human
aggggcuccugga

SEQ ID NO: 2820491 - RNA, 15 nt, Human
aggggcucuggagag

SEQ ID NO: 2820492 - RNA, 17 nt, Human
aggggcucuggagagaa

SEQ ID NO: 2820493 - RNA, 21 nt, Human
aggggcucuggagagaaacaa

SEQ ID NO: 2820494 - RNA, 17 nt, Human
aggggcucucagcucag

SEQ ID NO: 2820495 - RNA, 22 nt, Human
aggggcucucagcucagcgcca

SEQ ID NO: 2820496 - RNA, 13 nt, Human
agggggcuccugg

SEQ ID NO: 2820497 - RNA, 16 nt, Human
agggucucacucuguc

SEQ ID NO: 2820498 - RNA, 15 nt, Human
agggucucacucugu

SEQ ID NO: 2820499 - RNA, 14 nt, Human
agggucucacucug

SEQ ID NO: 2820500 - RNA, 19 nt, Human
agggguuugccauuugaua

SEQ ID NO: 2820501 - RNA, 21 nt, Human
agggguuugccauuugauacc

SEQ ID NO: 2820502 - RNA, 18 nt, Human
agggguuggggugacagu

SEQ ID NO: 2820503 - RNA, 21 nt, Human
agggguuggggugacagucau

SEQ ID NO: 2820504 - RNA, 14 nt, Human
aggggucaaagaaa

SEQ ID NO: 2820505 - RNA, 16 nt, Human
aggggucaaagaaaug

SEQ ID NO: 2820506 - RNA, 23 nt, Human
aggggugacacagacucauccug

SEQ ID NO: 2820507 - RNA, 16 nt, Human
aggggugacggcccuc

SEQ ID NO: 2820508 - RNA, 22 nt, Human
ugguaagaagccgggaacagac

SEQ ID NO: 2820509 - RNA, 17 nt, Human
ugguacaugucuuccau

SEQ ID NO: 2820510 - RNA, 17 nt, Human
ugguaaaguccuuuucu

SEQ ID NO: 2820511 - RNA, 13 nt, Human
ugguaaaugccac

SEQ ID NO: 2820512 - RNA, 19 nt, Human
ugguaaaugccacacaccu

SEQ ID NO: 2820513 - RNA, 18 nt, Human
ugguaacaguucauguuu

SEQ ID NO: 2820514 - RNA, 21 nt, Human
ugguaacaguucauguuugcu

SEQ ID NO: 2820515 - RNA, 17 nt, Human
ugguaacaguucauguu

SEQ ID NO: 2820516 - RNA, 17 nt, Human
ugguacuuuugagugug

SEQ ID NO: 2820517 - RNA, 18 nt, Human
ugguacuuuugagugugu

SEQ ID NO: 2820518 - RNA, 20 nt, Human
ugguacuuuugagugugugu

SEQ ID NO: 2820519 - RNA, 17 nt, Human
ugguagaccaaaauaaa

SEQ ID NO: 2820520 - RNA, 13 nt, Human
ugguagagaugga

SEQ ID NO: 2820521 - RNA, 15 nt, Human
ugguagauuaaauau

SEQ ID NO: 2820522 - RNA, 17 nt, Human
ugguagauuaaauauag

SEQ ID NO: 2820523 - RNA, 18 nt, Human
ugguagauuaaauauaga

SEQ ID NO: 2820524 - RNA, 19 nt, Human
ugguagauuaaauauagau

SEQ ID NO: 2820525 - RNA, 20 nt, Human
ugguagauuaaauauagauu

SEQ ID NO: 2820526 - RNA, 21 nt, Human
ugguaccaaucaugaaucuuu

SEQ ID NO: 2820527 - RNA, 13 nt, Human
ugguaccagcccu

SEQ ID NO: 2820528 - RNA, 14 nt, Human
ugguaccagcccug

SEQ ID NO: 2820529 - RNA, 15 nt, Human
ugguaccagcccugg

SEQ ID NO: 2820530 - RNA, 16 nt, Human
ugguaccagcccuggg

SEQ ID NO: 2820531 - RNA, 18 nt, Human
ugguaccagcccuggggc

SEQ ID NO: 2820532 - RNA, 19 nt, Human
ugguaccagcccuggggcu

SEQ ID NO: 2820533 - RNA, 20 nt, Human
ugguaccagcccuggggcug

SEQ ID NO: 2820534 - RNA, 21 nt, Human
ugguaccagcccuggggcugg

SEQ ID NO: 2820535 - RNA, 15 nt, Human
ugguacccuccuggc

SEQ ID NO: 2820536 - RNA, 16 nt, Human
ugguacccuccuggcu

SEQ ID NO: 2820537 - RNA, 21 nt, Human
ugguacccuccuggcucuuga

SEQ ID NO: 2820538 - RNA, 14 nt, Human
ugguacccucugga

SEQ ID NO: 2820539 - RNA, 15 nt, Human
ugguaccuauuugac

SEQ ID NO: 2820540 - RNA, 21 nt, Human
ugggugagaugcuggagaaga

SEQ ID NO: 2820541 - RNA, 20 nt, Human
ugggugauuccuaagccacu

SEQ ID NO: 2820542 - RNA, 18 nt, Human
ugggugacaagagccuga

SEQ ID NO: 2820543 - RNA, 18 nt, Human
ugggugagaugcuggaga

SEQ ID NO: 2820544 - RNA, 19 nt, Human
ugggugagaugcuggagaa

SEQ ID NO: 2820545 - RNA, 18 nt, Human
ugggucccccucagcaag

SEQ ID NO: 2820546 - RNA, 22 nt, Human
ugggucccccucagcaagcccu

SEQ ID NO: 2820547 - RNA, 16 nt, Human
uggguccgauaauauc

SEQ ID NO: 2820548 - RNA, 18 nt, Human
uggguccgauaauaucuu

SEQ ID NO: 2820549 - RNA, 21 nt, Human
uggguccgauaauaucuuugu

SEQ ID NO: 2820550 - RNA, 14 nt, Human
uggguccugaagaa

SEQ ID NO: 2820551 - RNA, 17 nt, Human
agggugggggccaccug

SEQ ID NO: 2820552 - RNA, 18 nt, Human
agggugggggccaccugc

SEQ ID NO: 2820553 - RNA, 19 nt, Human
agggugggggccaccugcc

SEQ ID NO: 2820554 - RNA, 20 nt, Human
agggugggggccaccugccu

SEQ ID NO: 2820555 - RNA, 21 nt, Human
agggugggggccaccugccug

SEQ ID NO: 2820556 - RNA, 22 nt, Human
agggugggggccaccugccugc

SEQ ID NO: 2820557 - RNA, 23 nt, Human
agggugggggccaccugccugcg

SEQ ID NO: 2820558 - RNA, 16 nt, Human
aggguggugaccucug

SEQ ID NO: 2820559 - RNA, 23 nt, Human
agggguuucagaauuuugcauug

SEQ ID NO: 2820560 - RNA, 15 nt, Human
agggugggugcucag

SEQ ID NO: 2820561 - RNA, 16 nt, Human
agggugggugcucaga

SEQ ID NO: 2820562 - RNA, 17 nt, Human
agggugggugcucagaa

SEQ ID NO: 2820563 - RNA, 18 nt, Human
agggugggugcucagaau

SEQ ID NO: 2820564 - RNA, 20 nt, Human
agggugggugcucagaauaa

SEQ ID NO: 2820565 - RNA, 17 nt, Human
agggucuucccuaccuc

SEQ ID NO: 2820566 - RNA, 15 nt, Human
agggucuucccuacc

SEQ ID NO: 2820567 - RNA, 13 nt, Human
agggucuguguga

SEQ ID NO: 2820568 - RNA, 15 nt, Human
agggucugugugaau

SEQ ID NO: 2820569 - RNA, 18 nt, Human
agggucugugugaaugug

SEQ ID NO: 2820570 - RNA, 17 nt, Human
agggucuguuuggacug

SEQ ID NO: 2820571 - RNA, 19 nt, Human
agggucuguuuggacugca

SEQ ID NO: 2820572 - RNA, 17 nt, Human
agggucugggcaggacu

SEQ ID NO: 2820573 - RNA, 21 nt, Human
agggucugggaaaugagcagg

SEQ ID NO: 2820574 - RNA, 22 nt, Human
agggucugggaaaugagcaggg

SEQ ID NO: 2820575 - RNA, 15 nt, Human
agggcucuaaaaaaa

SEQ ID NO: 2820576 - RNA, 23 nt, Human
agggcucuaaaaaaagccccaaa

SEQ ID NO: 2820577 - RNA, 12 nt, Human
agggcucugccc

SEQ ID NO: 2820578 - RNA, 14 nt, Human
agggcucugcccca

SEQ ID NO: 2820579 - RNA, 15 nt, Human
agggcucugccccag

SEQ ID NO: 2820580 - RNA, 16 nt, Human
agggcucugccccagu

SEQ ID NO: 2820581 - RNA, 18 nt, Human
agggcucugugcugacau

SEQ ID NO: 2820582 - RNA, 14 nt, Human
agggcucugaccag

SEQ ID NO: 2820583 - RNA, 15 nt, Human
agggcucugaccagu

SEQ ID NO: 2820584 - RNA, 16 nt, Human
agggcucucuuaggca

SEQ ID NO: 2820585 - RNA, 15 nt, Human
uggggagaggaaaga

SEQ ID NO: 2820586 - RNA, 15 nt, Human
uggggagaggaacuc

SEQ ID NO: 2820587 - RNA, 20 nt, Human
uggggagaggaacuccuugg

SEQ ID NO: 2820588 - RNA, 22 nt, Human
uggggagaggaacuccuuggcc

SEQ ID NO: 2820589 - RNA, 15 nt, Human
uggggaggacaaaac

SEQ ID NO: 2820590 - RNA, 18 nt, Human
uggggaggacaaaacuuc

SEQ ID NO: 2820591 - RNA, 13 nt, Human
uggggaggaccug

SEQ ID NO: 2820592 - RNA, 23 nt, Human
uggggagcuuggcugagggucug

SEQ ID NO: 2820593 - RNA, 14 nt, Human
uggggagauuugcc

SEQ ID NO: 2820594 - RNA, 18 nt, Human
uggggagcccgucucagu

SEQ ID NO: 2820595 - RNA, 19 nt, Human
uggggagcccgucucagug

SEQ ID NO: 2820596 - RNA, 21 nt, Human
uggggagcccgucucaguguu

SEQ ID NO: 2820597 - RNA, 12 nt, Human
uggggcccuaau

SEQ ID NO: 2820598 - RNA, 19 nt, Human
uggggcccuaauucagcca

SEQ ID NO: 2820599 - RNA, 20 nt, Human
uggggcccuaauucagccau

SEQ ID NO: 2820600 - RNA, 21 nt, Human
uggggcccuaauucagccaug

SEQ ID NO: 2820601 - RNA, 13 nt, Human
uggggccucagac

SEQ ID NO: 2820602 - RNA, 14 nt, Human
uggggccucagacg

SEQ ID NO: 2820603 - RNA, 14 nt, Human
uggggccuccagaa

SEQ ID NO: 2820604 - RNA, 20 nt, Human
uggggccuccagaacucacu

SEQ ID NO: 2820605 - RNA, 11 nt, Human
uggggccugag

SEQ ID NO: 2820606 - RNA, 12 nt, Human
uggggccugaga

SEQ ID NO: 2820607 - RNA, 13 nt, Human
uggggccugagag

SEQ ID NO: 2820608 - RNA, 14 nt, Human
uggggccugagaga

SEQ ID NO: 2820609 - RNA, 16 nt, Human
uggggccugagagaau

SEQ ID NO: 2820610 - RNA, 18 nt, Human
uggggccugagagaauug

SEQ ID NO: 2820611 - RNA, 22 nt, Human
uggggcuccuucuccaccccag

SEQ ID NO: 2820612 - RNA, 12 nt, Human
uggggccugugg

SEQ ID NO: 2820613 - RNA, 15 nt, Human
uggggccuggaccug

SEQ ID NO: 2820614 - RNA, 16 nt, Human
uggggccuggaccugc

SEQ ID NO: 2820615 - RNA, 17 nt, Human
uggggccuggaccugcc

SEQ ID NO: 2820616 - RNA, 19 nt, Human
uggggccuggaccugccuc

SEQ ID NO: 2820617 - RNA, 20 nt, Human
uggggccuggaccugccucc

SEQ ID NO: 2820618 - RNA, 11 nt, Human
uggggccuggc

SEQ ID NO: 2820619 - RNA, 12 nt, Human
uggggccuggca

SEQ ID NO: 2820620 - RNA, 22 nt, Human
ugggguauuggacauagauauu

SEQ ID NO: 2820621 - RNA, 19 nt, Human
uggggucuacacugcaauc

SEQ ID NO: 2820622 - RNA, 23 nt, Human
uggggucucacaguguugcccag

SEQ ID NO: 2820623 - RNA, 21 nt, Human
uggggucucacaguguugccc

SEQ ID NO: 2820624 - RNA, 14 nt, Human
ugggguccagggag

SEQ ID NO: 2820625 - RNA, 20 nt, Human
ugggguccuggagcagacca

SEQ ID NO: 2820626 - RNA, 12 nt, Human
ugggguccccag

SEQ ID NO: 2820627 - RNA, 12 nt, Human
ugggguauuuuu

SEQ ID NO: 2820628 - RNA, 19 nt, Human
ugggguacccacugcucug

SEQ ID NO: 2820629 - RNA, 18 nt, Human
ugggguacccacugcucu

SEQ ID NO: 2820630 - RNA, 17 nt, Human
ugggguacccacugcuc

SEQ ID NO: 2820631 - RNA, 12 nt, Human
uggggcugcugg

SEQ ID NO: 2820632 - RNA, 13 nt, Human
uggggcugcuggc

SEQ ID NO: 2820633 - RNA, 13 nt, Human
uggggcuggcuuu

SEQ ID NO: 2820634 - RNA, 18 nt, Human
uggggcuggcuuuucugu

SEQ ID NO: 2820635 - RNA, 13 nt, Human
aggggaauguuug

SEQ ID NO: 2820636 - RNA, 10 nt, Human
uggggucucu

SEQ ID NO: 2820637 - RNA, 14 nt, Human
aggggaagucccug

SEQ ID NO: 2820638 - RNA, 15 nt, Human
aggggaaccugccau

SEQ ID NO: 2820639 - RNA, 22 nt, Human
aggggaagaaacacuuucucuu

SEQ ID NO: 2820640 - RNA, 14 nt, Human
aggggaaccugcca

SEQ ID NO: 2820641 - RNA, 17 nt, Human
aggggaagcacucgugu

SEQ ID NO: 2820642 - RNA, 12 nt, Human
aggggaagcugc

SEQ ID NO: 2820643 - RNA, 13 nt, Human
aggggaagcugca

SEQ ID NO: 2820644 - RNA, 14 nt, Human
aggggaagcugcag

SEQ ID NO: 2820645 - RNA, 15 nt, Human
aggggaagcugcagc

SEQ ID NO: 2820646 - RNA, 20 nt, Human
aggggaagcugcagcuuggg

SEQ ID NO: 2820647 - RNA, 21 nt, Human
aggggaauaaacuguugaguc

SEQ ID NO: 2820648 - RNA, 14 nt, Human
aggggaacagacug

SEQ ID NO: 2820649 - RNA, 21 nt, Human
aggggaaaccaguguagccuu

SEQ ID NO: 2820650 - RNA, 20 nt, Human
aggggaaaccaguguagccu

SEQ ID NO: 2820651 - RNA, 23 nt, Human
aggggaaaccaguguagccuugc

SEQ ID NO: 2820652 - RNA, 17 nt, Human
aggggaacacugcccuc

SEQ ID NO: 2820653 - RNA, 18 nt, Human
aggggaacacugcccucg

SEQ ID NO: 2820654 - RNA, 13 nt, Human
aggggaaccugcc

SEQ ID NO: 2820655 - RNA, 15 nt, Human
aggggaaaaaaaugu

SEQ ID NO: 2820656 - RNA, 16 nt, Human
aggggaaaaaaauguu

SEQ ID NO: 2820657 - RNA, 17 nt, Human
aggggaaaaaaauguug

SEQ ID NO: 2820658 - RNA, 15 nt, Human
aggggaaaacuguua

SEQ ID NO: 2820659 - RNA, 17 nt, Human
ugggguggccugugugg

SEQ ID NO: 2820660 - RNA, 20 nt, Human
ugggguggccuguguggcca

SEQ ID NO: 2820661 - RNA, 20 nt, Human
uggggugggaggucuugcua

SEQ ID NO: 2820662 - RNA, 19 nt, Human
uggggugagaauugggcgg

SEQ ID NO: 2820663 - RNA, 11 nt, Human
uggggugacag

SEQ ID NO: 2820664 - RNA, 12 nt, Human
uggggugacagu

SEQ ID NO: 2820665 - RNA, 14 nt, Human
uggggugacaguca

SEQ ID NO: 2820666 - RNA, 15 nt, Human
uggggugacagucau

SEQ ID NO: 2820667 - RNA, 16 nt, Human
uggggugacagucauc

SEQ ID NO: 2820668 - RNA, 17 nt, Human
uggggugacagucauca

SEQ ID NO: 2820669 - RNA, 23 nt, Human
uggggugacagucaucaucaggg

SEQ ID NO: 2820670 - RNA, 14 nt, Human
uggggucugacccc

SEQ ID NO: 2820671 - RNA, 13 nt, Human
aguucugaagaau

SEQ ID NO: 2820672 - RNA, 14 nt, Human
uguuuugcacuuuu

SEQ ID NO: 2820673 - RNA, 17 nt, Human
uguuuggacuuuguaua

SEQ ID NO: 2820674 - RNA, 12 nt, Human
uguuuugcacuu

SEQ ID NO: 2820675 - RNA, 13 nt, Human
uguuuugcacuuu

SEQ ID NO: 2820676 - RNA, 20 nt, Human
uguuuugauguuuguggccu

SEQ ID NO: 2820677 - RNA, 14 nt, Human
aguucuguaaaaua

SEQ ID NO: 2820678 - RNA, 16 nt, Human
aguucuggucaaagaa

SEQ ID NO: 2820679 - RNA, 22 nt, Human
aguucuguguuuaauuucuuca

SEQ ID NO: 2820680 - RNA, 20 nt, Human
aguucuguuauauccccugc

SEQ ID NO: 2820681 - RNA, 21 nt, Human
aguucuguuauauccccugcu

SEQ ID NO: 2820682 - RNA, 22 nt, Human
aguucuguuauauccccugcua

SEQ ID NO: 2820683 - RNA, 21 nt, Human
aguucuguuugguguguccca

SEQ ID NO: 2820684 - RNA, 19 nt, Human
aguucuggaaaagaacugu

SEQ ID NO: 2820685 - RNA, 20 nt, Human
uguuuucauggugaaaaugu

SEQ ID NO: 2820686 - RNA, 14 nt, Human
uguuuuauuccugu

SEQ ID NO: 2820687 - RNA, 15 nt, Human
uguuuuauuccugua

SEQ ID NO: 2820688 - RNA, 16 nt, Human
uguuuuauuucauugg

SEQ ID NO: 2820689 - RNA, 18 nt, Human
uguuuuauuucauugguu

SEQ ID NO: 2820690 - RNA, 15 nt, Human
uguuuuccagcuccu

SEQ ID NO: 2820691 - RNA, 17 nt, Human
uguuuuccagcuccuca

SEQ ID NO: 2820692 - RNA, 17 nt, Human
uguuuugaaggcaaaau

SEQ ID NO: 2820693 - RNA, 15 nt, Human
uguuuugaauauuac

SEQ ID NO: 2820694 - RNA, 21 nt, Human
uguuuugaauauuacuccuau

SEQ ID NO: 2820695 - RNA, 12 nt, Human
uguuuugagaac

SEQ ID NO: 2820696 - RNA, 16 nt, Human
uguuuugagaguaaug

SEQ ID NO: 2820697 - RNA, 17 nt, Human
uguuuugaaacucagua

SEQ ID NO: 2820698 - RNA, 17 nt, Human
uguuuugaaaucaaugc

SEQ ID NO: 2820699 - RNA, 22 nt, Human
uguuuugaaaucaaugcaagag

SEQ ID NO: 2820700 - RNA, 11 nt, Human
uguuuucuucu

SEQ ID NO: 2820701 - RNA, 21 nt, Human
uguuuucuuuaaagauguaau

SEQ ID NO: 2820702 - RNA, 16 nt, Human
uguuuucuuucuuuaa

SEQ ID NO: 2820703 - RNA, 20 nt, Human
uguuuucuuucuuuaaaugu

SEQ ID NO: 2820704 - RNA, 21 nt, Human
uguuuucuuucuuuaaauguu

SEQ ID NO: 2820705 - RNA, 22 nt, Human
uguuuucuuucuuuaaauguuu

SEQ ID NO: 2820706 - RNA, 16 nt, Human
uguuuucugacuaauu

SEQ ID NO: 2820707 - RNA, 17 nt, Human
uguuuucugacuaauua

SEQ ID NO: 2820708 - RNA, 12 nt, Human
uguuuucugugu

SEQ ID NO: 2820709 - RNA, 13 nt, Human
uguuuucugugua

SEQ ID NO: 2820710 - RNA, 14 nt, Human
uguuuucuguguaa

SEQ ID NO: 2820711 - RNA, 15 nt, Human
uguuuucuguguaac

SEQ ID NO: 2820712 - RNA, 23 nt, Human
uguuuuaucaugacauguuauau

SEQ ID NO: 2820713 - RNA, 12 nt, Human
uguuuuaucaug

SEQ ID NO: 2820714 - RNA, 23 nt, Human
uguuuuauuauuucuauuaaaua

SEQ ID NO: 2820715 - RNA, 13 nt, Human
uguuugcugcuau

SEQ ID NO: 2820716 - RNA, 14 nt, Human
uguuugcugugaac

SEQ ID NO: 2820717 - RNA, 12 nt, Human
uguuugaugcag

SEQ ID NO: 2820718 - RNA, 14 nt, Human
uguuugcaagcagg

SEQ ID NO: 2820719 - RNA, 18 nt, Human
uguuugcuucauaaauga

SEQ ID NO: 2820720 - RNA, 16 nt, Human
uguuugcuucaccgug

SEQ ID NO: 2820721 - RNA, 14 nt, Human
uguuuggaaacauu

SEQ ID NO: 2820722 - RNA, 20 nt, Human
uguuuggaauguuagaauga

SEQ ID NO: 2820723 - RNA, 20 nt, Human
uguuuauuguugcugguuau

SEQ ID NO: 2820724 - RNA, 14 nt, Human
uguuuauguuuuua

SEQ ID NO: 2820725 - RNA, 14 nt, Human
uguuuauauguguu

SEQ ID NO: 2820726 - RNA, 15 nt, Human
uguuuauauguguug

SEQ ID NO: 2820727 - RNA, 23 nt, Human
uguuuauaaaauauaaacaaaga

SEQ ID NO: 2820728 - RNA, 20 nt, Human
uguuuauaacuauucaguug

SEQ ID NO: 2820729 - RNA, 22 nt, Human
uguuuauaacuauucaguugug

SEQ ID NO: 2820730 - RNA, 15 nt, Human
uguuuauacagcuca

SEQ ID NO: 2820731 - RNA, 16 nt, Human
uguuuauaccuuugcc

SEQ ID NO: 2820732 - RNA, 13 nt, Human
uguuuauagcauu

SEQ ID NO: 2820733 - RNA, 15 nt, Human
uguuuaucagauaca

SEQ ID NO: 2820734 - RNA, 16 nt, Human
uguuuaucagauacau

SEQ ID NO: 2820735 - RNA, 17 nt, Human
uguuuaucagauacauc

SEQ ID NO: 2820736 - RNA, 18 nt, Human
uguuuaucagauacauca

SEQ ID NO: 2820737 - RNA, 19 nt, Human
uguuuaucagauacaucac

SEQ ID NO: 2820738 - RNA, 22 nt, Human
uguuuaucagauacaucacugc

SEQ ID NO: 2820739 - RNA, 23 nt, Human
uguuuaucagauacaucacugcu

SEQ ID NO: 2820740 - RNA, 22 nt, Human
uguuuauaaaauauaaacaaag

SEQ ID NO: 2820741 - RNA, 14 nt, Human
uguugcucccugug

SEQ ID NO: 2820742 - RNA, 15 nt, Human
uguugcucuaggaag

SEQ ID NO: 2820743 - RNA, 17 nt, Human
uguugcucuaggaagac

SEQ ID NO: 2820744 - RNA, 20 nt, Human
uguugcucuaggaagacauu

SEQ ID NO: 2820745 - RNA, 17 nt, Human
uguugcucucugugucu

SEQ ID NO: 2820746 - RNA, 21 nt, Human
uguugcucucugugucugaga

SEQ ID NO: 2820747 - RNA, 19 nt, Human
uguugcccaggcaggucuu

SEQ ID NO: 2820748 - RNA, 15 nt, Human
uguugcaauuaggau

SEQ ID NO: 2820749 - RNA, 20 nt, Human
uguugcaauuaggauuuuga

SEQ ID NO: 2820750 - RNA, 22 nt, Human
uguugcacacccacucagcucc

SEQ ID NO: 2820751 - RNA, 21 nt, Human
uguugcacacccacucagcuc

SEQ ID NO: 2820752 - RNA, 20 nt, Human
uguugcacacccacucagcu

SEQ ID NO: 2820753 - RNA, 18 nt, Human
uguugccuuuaugguuuc

SEQ ID NO: 2820754 - RNA, 22 nt, Human
uguugccuuuuucauuuuccaa

SEQ ID NO: 2820755 - RNA, 21 nt, Human
uguugcgugacacucuccuug

SEQ ID NO: 2820756 - RNA, 24 nt, Human
uguuuauuuauagaguguacuuaa

SEQ ID NO: 2820757 - RNA, 14 nt, Human
uguuuauuuauaga

SEQ ID NO: 2820758 - RNA, 16 nt, Human
uguuuauuucauuuua

SEQ ID NO: 2820759 - RNA, 13 nt, Human
uguuucugugggc

SEQ ID NO: 2820760 - RNA, 14 nt, Human
uguuucugugggcg

SEQ ID NO: 2820761 - RNA, 12 nt, Human
uguuucuguuau

SEQ ID NO: 2820762 - RNA, 13 nt, Human
uguuucuguuauu

SEQ ID NO: 2820763 - RNA, 13 nt, Human
uguuucuuccugc

SEQ ID NO: 2820764 - RNA, 17 nt, Human
uguuucuuccuguuaau

SEQ ID NO: 2820765 - RNA, 18 nt, Human
uguuucuuccuguuaaug

SEQ ID NO: 2820766 - RNA, 21 nt, Human
uguuucuuccuguuaauguau

SEQ ID NO: 2820767 - RNA, 13 nt, Human
uguuucuugcuug

SEQ ID NO: 2820768 - RNA, 14 nt, Human
uguuucuugcuugu

SEQ ID NO: 2820769 - RNA, 15 nt, Human
uguuucuugcuugua

SEQ ID NO: 2820770 - RNA, 16 nt, Human
uguuucuugcuuguac

SEQ ID NO: 2820771 - RNA, 17 nt, Human
uguuucuugcuuguacc

SEQ ID NO: 2820772 - RNA, 19 nt, Human
uguuucuugcuuguaccuc

SEQ ID NO: 2820773 - RNA, 14 nt, Human
uguuucuuguuuau

SEQ ID NO: 2820774 - RNA, 17 nt, Human
uguuucuuguuuauuga

SEQ ID NO: 2820775 - RNA, 17 nt, Human
uguuucuguucaccuuc

SEQ ID NO: 2820776 - RNA, 14 nt, Human
uguuucuguuauua

SEQ ID NO: 2820777 - RNA, 15 nt, Human
uguuucuguuauuaa

SEQ ID NO: 2820778 - RNA, 19 nt, Human
uguuucuguuauuaacaaa

SEQ ID NO: 2820779 - RNA, 22 nt, Human
uguuucuuaacuauaaauaugu

SEQ ID NO: 2820780 - RNA, 13 nt, Human
uguuucuuucuag

SEQ ID NO: 2820781 - RNA, 18 nt, Human
uguuugaggagcauguuu

SEQ ID NO: 2820782 - RNA, 20 nt, Human
uguuugaggagcauguuuug

SEQ ID NO: 2820783 - RNA, 15 nt, Human
uguuucuuuucacau

SEQ ID NO: 2820784 - RNA, 12 nt, Human
uguuucuuugug

SEQ ID NO: 2820785 - RNA, 14 nt, Human
uguuucuuuguguu

SEQ ID NO: 2820786 - RNA, 13 nt, Human
uguuugaaaguag

SEQ ID NO: 2820787 - RNA, 16 nt, Human
uguuugaaaucaucgg

SEQ ID NO: 2820788 - RNA, 13 nt, Human
uguuugaaaucuu

SEQ ID NO: 2820789 - RNA, 21 nt, Human
uguuugaaaugaggucuguuu

SEQ ID NO: 2820790 - RNA, 22 nt, Human
uguuugaaaugaggucuguuua

SEQ ID NO: 2820791 - RNA, 22 nt, Human
uguuugacaaaguuacugauuc

SEQ ID NO: 2820792 - RNA, 15 nt, Human
uguuugaauauggac

SEQ ID NO: 2820793 - RNA, 19 nt, Human
uguuugaauauggacaaga

SEQ ID NO: 2820794 - RNA, 14 nt, Human
aguuuaaccauaug

SEQ ID NO: 2820795 - RNA, 22 nt, Human
aguuuaacacaaguccugugaa

SEQ ID NO: 2820796 - RNA, 13 nt, Human
aguuguuugcaug

SEQ ID NO: 2820797 - RNA, 16 nt, Human
aguuguuuguuuuugc

SEQ ID NO: 2820798 - RNA, 17 nt, Human
aguuguuuguuuuugcu

SEQ ID NO: 2820799 - RNA, 18 nt, Human
aguuguuuguuuuugcuu

SEQ ID NO: 2820800 - RNA, 16 nt, Human
aguugguugugucuuu

SEQ ID NO: 2820801 - RNA, 14 nt, Human
aguuggugagaaac

SEQ ID NO: 2820802 - RNA, 20 nt, Human
aguuggugagaaaccuguau

SEQ ID NO: 2820803 - RNA, 22 nt, Human
aguuggugagaaaccuguaucu

SEQ ID NO: 2820804 - RNA, 23 nt, Human
aguuggugagaaaccuguaucuu

SEQ ID NO: 2820805 - RNA, 24 nt, Human
aguuggugagaaaccuguaucuuu

SEQ ID NO: 2820806 - RNA, 13 nt, Human
aguuggugucuuu

SEQ ID NO: 2820807 - RNA, 14 nt, Human
aguuggugucuuuc

SEQ ID NO: 2820808 - RNA, 21 nt, Human
aguugccuaagcauugccugg

SEQ ID NO: 2820809 - RNA, 16 nt, Human
aguuguaacuuauauu

SEQ ID NO: 2820810 - RNA, 17 nt, Human
aguuguaacuuauauug

SEQ ID NO: 2820811 - RNA, 18 nt, Human
aguuguaacuuauauuga

SEQ ID NO: 2820812 - RNA, 19 nt, Human
aguuguaacuuauauugaa

SEQ ID NO: 2820813 - RNA, 11 nt, Human
aguuguacaug

SEQ ID NO: 2820814 - RNA, 13 nt, Human
aguuguacaugaa

SEQ ID NO: 2820815 - RNA, 15 nt, Human
aguuguacaugaaau

SEQ ID NO: 2820816 - RNA, 22 nt, Human
aguuguacaugaaauuuuugua

SEQ ID NO: 2820817 - RNA, 20 nt, Human
aguugcguggacucugcaca

SEQ ID NO: 2820818 - RNA, 13 nt, Human
aguugcuaaacac

SEQ ID NO: 2820819 - RNA, 15 nt, Human
aguugcuaaacacug

SEQ ID NO: 2820820 - RNA, 16 nt, Human
aguugcuaaacacugc

SEQ ID NO: 2820821 - RNA, 15 nt, Human
aguugcacugauauu

SEQ ID NO: 2820822 - RNA, 20 nt, Human
aguugcacggcugcugaggc

SEQ ID NO: 2820823 - RNA, 15 nt, Human
aguugcacggcugcu

SEQ ID NO: 2820824 - RNA, 16 nt, Human
aguugcacggcugcug

SEQ ID NO: 2820825 - RNA, 17 nt, Human
aguugcacggcugcuga

SEQ ID NO: 2820826 - RNA, 16 nt, Human
aguucuuagcccucua

SEQ ID NO: 2820827 - RNA, 21 nt, Human
aguuggguggaugccuggugg

SEQ ID NO: 2820828 - RNA, 17 nt, Human
aguuggguggaugccug

SEQ ID NO: 2820829 - RNA, 23 nt, Human
aguugggaacuucagauggaccu

SEQ ID NO: 2820830 - RNA, 13 nt, Human
aguuggcuucuaa

SEQ ID NO: 2820831 - RNA, 16 nt, Human
aguuggcuaggacccc

SEQ ID NO: 2820832 - RNA, 18 nt, Human
aguuggcuggaugaaauu

SEQ ID NO: 2820833 - RNA, 16 nt, Human
aguugcguggacucug

SEQ ID NO: 2820834 - RNA, 22 nt, Human
uuaacaacaauaacacugucuc

SEQ ID NO: 2820835 - RNA, 18 nt, Human
uuaacagcaguccuuugu

SEQ ID NO: 2820836 - RNA, 16 nt, Human
uuaacaagaagaugaa

SEQ ID NO: 2820837 - RNA, 17 nt, Human
uuaacaagaagaugaau

SEQ ID NO: 2820838 - RNA, 20 nt, Human
uuaacaagaagaugaauggc

SEQ ID NO: 2820839 - RNA, 13 nt, Human
uuaacagggaggg

SEQ ID NO: 2820840 - RNA, 16 nt, Human
aguuucaauucagugc

SEQ ID NO: 2820841 - RNA, 17 nt, Human
uuaacauaguaaguuca

SEQ ID NO: 2820842 - RNA, 20 nt, Human
uuaacauaguaaguucagca

SEQ ID NO: 2820843 - RNA, 22 nt, Human
uuaacauaguaaguucagcacu

SEQ ID NO: 2820844 - RNA, 17 nt, Human
aguuucaauucagugcu

SEQ ID NO: 2820845 - RNA, 14 nt, Human
aguuucagauauau

SEQ ID NO: 2820846 - RNA, 15 nt, Human
aguuucagauauaua

SEQ ID NO: 2820847 - RNA, 17 nt, Human
aguuucagauauauauc

SEQ ID NO: 2820848 - RNA, 23 nt, Human
aguuucagauauauaucauauug

SEQ ID NO: 2820849 - RNA, 15 nt, Human
aguuucagcuuaaaa

SEQ ID NO: 2820850 - RNA, 17 nt, Human
aguuucagcuuaaaaua

SEQ ID NO: 2820851 - RNA, 21 nt, Human
aguuucagcuuaaaauaaaca

SEQ ID NO: 2820852 - RNA, 22 nt, Human
aguuucagcuuaaaauaaacag

SEQ ID NO: 2820853 - RNA, 18 nt, Human
uuaaauaagauucuaacg

SEQ ID NO: 2820854 - RNA, 15 nt, Human
uuaaauuucuaccgc

SEQ ID NO: 2820855 - RNA, 14 nt, Human
uuaaauuggguuca

SEQ ID NO: 2820856 - RNA, 22 nt, Human
uuaaauuggguucaugaugcag

SEQ ID NO: 2820857 - RNA, 15 nt, Human
uuaaauaauauggcu

SEQ ID NO: 2820858 - RNA, 24 nt, Human
uuaaauaauauggcuaugcuuaaa

SEQ ID NO: 2820859 - RNA, 18 nt, Human
uuaaauaaugcuucagau

SEQ ID NO: 2820860 - RNA, 20 nt, Human
uuaaauaaugcuucagauau

SEQ ID NO: 2820861 - RNA, 13 nt, Human
uuaaauaagauuc

SEQ ID NO: 2820862 - RNA, 14 nt, Human
uuaaauaagauucu

SEQ ID NO: 2820863 - RNA, 15 nt, Human
uuaaauaagauucua

SEQ ID NO: 2820864 - RNA, 16 nt, Human
uuaaauaagauucuaa

SEQ ID NO: 2820865 - RNA, 17 nt, Human
uuaaauaagauucuaac

SEQ ID NO: 2820866 - RNA, 15 nt, Human
uuaaauuuaaagaua

SEQ ID NO: 2820867 - RNA, 18 nt, Human
uuaaauuuaaagauauug

SEQ ID NO: 2820868 - RNA, 13 nt, Human
uuaaauuuguaag

SEQ ID NO: 2820869 - RNA, 14 nt, Human
uuaaauuuguaagu

SEQ ID NO: 2820870 - RNA, 15 nt, Human
uuaaauuuguaaguu

SEQ ID NO: 2820871 - RNA, 17 nt, Human
uuaaauuuguaaguuuc

SEQ ID NO: 2820872 - RNA, 15 nt, Human
uuaaauuuuaauuua

SEQ ID NO: 2820873 - RNA, 21 nt, Human
uuaaauuuguaaguuucaggu

SEQ ID NO: 2820874 - RNA, 19 nt, Human
uuaaauuuguugacaaaau

SEQ ID NO: 2820875 - RNA, 16 nt, Human
uuaaauuuuaagguag

SEQ ID NO: 2820876 - RNA, 17 nt, Human
uuaaauuuuaagguaga

SEQ ID NO: 2820877 - RNA, 16 nt, Human
uuaaauuuuaauuuau

SEQ ID NO: 2820878 - RNA, 17 nt, Human
uuaaauuuuuuuuacau

SEQ ID NO: 2820879 - RNA, 22 nt, Human
uuaacaaacaucacucugcugc

SEQ ID NO: 2820880 - RNA, 23 nt, Human
uuaacaaacaucacucugcugcu

SEQ ID NO: 2820881 - RNA, 21 nt, Human
uuaacaacaauaacacugucu

SEQ ID NO: 2820882 - RNA, 12 nt, Human
uuaacaaauaug

SEQ ID NO: 2820883 - RNA, 18 nt, Human
uuaacaaauaugcuaauu

SEQ ID NO: 2820884 - RNA, 21 nt, Human
uuaacaaauaugcuaauuugg

SEQ ID NO: 2820885 - RNA, 13 nt, Human
uuaacaaaugcua

SEQ ID NO: 2820886 - RNA, 20 nt, Human
uuaacaaaugcuauuaaagu

SEQ ID NO: 2820887 - RNA, 11 nt, Human
uuaacaaaagu

SEQ ID NO: 2820888 - RNA, 16 nt, Human
uuaacaaaaguucccu

SEQ ID NO: 2820889 - RNA, 20 nt, Human
uuaaauuuuuuuuacauuuu

SEQ ID NO: 2820890 - RNA, 19 nt, Human
uuaaauuuuuuuuacauuu

SEQ ID NO: 2820891 - RNA, 18 nt, Human
uuaaauuuuuuuuacauu

SEQ ID NO: 2820892 - RNA, 17 nt, Human
uuaaaggauguuggugu

SEQ ID NO: 2820893 - RNA, 18 nt, Human
uuaaaggcaccaucuaau

SEQ ID NO: 2820894 - RNA, 16 nt, Human
uuaaaggcccagcccc

SEQ ID NO: 2820895 - RNA, 18 nt, Human
uuaaaggcccagccccua

SEQ ID NO: 2820896 - RNA, 20 nt, Human
uuaaaggcccagccccuaga

SEQ ID NO: 2820897 - RNA, 15 nt, Human
uuaaaggaagucagu

SEQ ID NO: 2820898 - RNA, 16 nt, Human
uuaaaaacauagaaaa

SEQ ID NO: 2820899 - RNA, 13 nt, Human
uuaaaaacuagua

SEQ ID NO: 2820900 - RNA, 18 nt, Human
uuaaaaacuaguaguucu

SEQ ID NO: 2820901 - RNA, 22 nt, Human
uuaaaaacuaguaguucucuug

SEQ ID NO: 2820902 - RNA, 13 nt, Human
uuaaaaacuggaa

SEQ ID NO: 2820903 - RNA, 17 nt, Human
uuaaaaagaaacaagau

SEQ ID NO: 2820904 - RNA, 20 nt, Human
uuaaaaagaaacaagaugcu

SEQ ID NO: 2820905 - RNA, 14 nt, Human
uuaaaaagaaaucu

SEQ ID NO: 2820906 - RNA, 13 nt, Human
uuaaaaagauucu

SEQ ID NO: 2820907 - RNA, 18 nt, Human
uuaaaaagauucuuuuuc

SEQ ID NO: 2820908 - RNA, 14 nt, Human
aguuuagugcaucu

SEQ ID NO: 2820909 - RNA, 17 nt, Human
aguuuagugcaucuuug

SEQ ID NO: 2820910 - RNA, 15 nt, Human
uuaaaaaggaacugc

SEQ ID NO: 2820911 - RNA, 19 nt, Human
uuaaaaaggaacugcagca

SEQ ID NO: 2820912 - RNA, 17 nt, Human
uuaaaaugugcaguaau

SEQ ID NO: 2820913 - RNA, 23 nt, Human
uuaaaauuaucaauaucuaauau

SEQ ID NO: 2820914 - RNA, 16 nt, Human
uuaaaauuaugaaucu

SEQ ID NO: 2820915 - RNA, 20 nt, Human
uuaaaauuaugaaucugauu

SEQ ID NO: 2820916 - RNA, 22 nt, Human
uuaaaauuaugaaucugauuuu

SEQ ID NO: 2820917 - RNA, 15 nt, Human
uuaaaauugcuaugu

SEQ ID NO: 2820918 - RNA, 22 nt, Human
uuaccuguuuucgcaccuacca

SEQ ID NO: 2820919 - RNA, 17 nt, Human
uuacaguaugcuugcuc

SEQ ID NO: 2820920 - RNA, 11 nt, Human
uuaccugucac

SEQ ID NO: 2820921 - RNA, 13 nt, Human
uuaccugucacau

SEQ ID NO: 2820922 - RNA, 17 nt, Human
uuaccugucacauugca

SEQ ID NO: 2820923 - RNA, 18 nt, Human
uuaccugucacauugcau

SEQ ID NO: 2820924 - RNA, 19 nt, Human
uuaccugucacauugcauu

SEQ ID NO: 2820925 - RNA, 22 nt, Human
uuaccugucacauugcauucua

SEQ ID NO: 2820926 - RNA, 22 nt, Human
uuaccuguacacugacuugaga

SEQ ID NO: 2820927 - RNA, 16 nt, Human
uuacaguccuucaaaa

SEQ ID NO: 2820928 - RNA, 17 nt, Human
uuacaguccuucaaaau

SEQ ID NO: 2820929 - RNA, 22 nt, Human
uuacauaguuuuaaacucauuu

SEQ ID NO: 2820930 - RNA, 13 nt, Human
uuacaucauuuuu

SEQ ID NO: 2820931 - RNA, 14 nt, Human
uuacaucauuuuug

SEQ ID NO: 2820932 - RNA, 18 nt, Human
uuacaucauuuuuguauc

SEQ ID NO: 2820933 - RNA, 20 nt, Human
uuacaucauuuuuguaucua

SEQ ID NO: 2820934 - RNA, 13 nt, Human
uuacauccuuaaa

SEQ ID NO: 2820935 - RNA, 23 nt, Human
uuaccuguuuucgcaccuaccau

SEQ ID NO: 2820936 - RNA, 19 nt, Human
uuacuauucauuaaauguu

SEQ ID NO: 2820937 - RNA, 21 nt, Human
uuacuauucauuaaauguuug

SEQ ID NO: 2820938 - RNA, 17 nt, Human
uuacuauuuucuacaau

SEQ ID NO: 2820939 - RNA, 21 nt, Human
uuacuauuuucuacaauuaau

SEQ ID NO: 2820940 - RNA, 21 nt, Human
uuacuauuuugacaguuauuu

SEQ ID NO: 2820941 - RNA, 19 nt, Human
uuacugacccuggggcugg

SEQ ID NO: 2820942 - RNA, 13 nt, Human
uuacugauuauuu

SEQ ID NO: 2820943 - RNA, 14 nt, Human
uuacugauaauuuu

SEQ ID NO: 2820944 - RNA, 18 nt, Human
uuagaagauagaugcacu

SEQ ID NO: 2820945 - RNA, 13 nt, Human
uuagaaccuuucu

SEQ ID NO: 2820946 - RNA, 11 nt, Human
uuagacagagu

SEQ ID NO: 2820947 - RNA, 17 nt, Human
uuagacaccuucauuuu

SEQ ID NO: 2820948 - RNA, 14 nt, Human
auaacuuauugcug

SEQ ID NO: 2820949 - RNA, 15 nt, Human
auaacuuauugcuga

SEQ ID NO: 2820950 - RNA, 18 nt, Human
auaacuuauugcugauuu

SEQ ID NO: 2820951 - RNA, 13 nt, Human
auaacuucaaauu

SEQ ID NO: 2820952 - RNA, 16 nt, Human
auaacuucaaauuuuu

SEQ ID NO: 2820953 - RNA, 23 nt, Human
uuacugggccuuagugggccagg

SEQ ID NO: 2820954 - RNA, 15 nt, Human
uuacuggcguggauu

SEQ ID NO: 2820955 - RNA, 16 nt, Human
uuacuggcguggauua

SEQ ID NO: 2820956 - RNA, 22 nt, Human
uuacuggcguggauuaaacuua

SEQ ID NO: 2820957 - RNA, 23 nt, Human
uuacuggcguggauuaaacuuau

SEQ ID NO: 2820958 - RNA, 16 nt, Human
uuacuggcuucucuug

SEQ ID NO: 2820959 - RNA, 15 nt, Human
uuacuguaagacauu

SEQ ID NO: 2820960 - RNA, 17 nt, Human
uuacuguaagacauuag

SEQ ID NO: 2820961 - RNA, 21 nt, Human
auaaauauauauaaagaauau

SEQ ID NO: 2820962 - RNA, 11 nt, Human
auaaaugaagc

SEQ ID NO: 2820963 - RNA, 17 nt, Human
auaaaugaagcagcuuu

SEQ ID NO: 2820964 - RNA, 22 nt, Human
auaaaucuguucugggcucuuu

SEQ ID NO: 2820965 - RNA, 15 nt, Human
auaaaucuuuggaaa

SEQ ID NO: 2820966 - RNA, 13 nt, Human
auaaaucuuaaaa

SEQ ID NO: 2820967 - RNA, 14 nt, Human
auaaaucuuaaaaa

SEQ ID NO: 2820968 - RNA, 13 nt, Human
auaaauaugcagu

SEQ ID NO: 2820969 - RNA, 14 nt, Human
auaaauaugcagug

SEQ ID NO: 2820970 - RNA, 12 nt, Human
auaaaguuagaa

SEQ ID NO: 2820971 - RNA, 16 nt, Human
auaaaguuagaaucua

SEQ ID NO: 2820972 - RNA, 17 nt, Human
auaaaguuagaaucuau

SEQ ID NO: 2820973 - RNA, 22 nt, Human
auaaaguuagaaucuauuuucu

SEQ ID NO: 2820974 - RNA, 17 nt, Human
auaaagugcuuguguaa

SEQ ID NO: 2820975 - RNA, 18 nt, Human
auaaagugcuuguguaau

SEQ ID NO: 2820976 - RNA, 13 nt, Human
auaaaguuucuca

SEQ ID NO: 2820977 - RNA, 12 nt, Human
auaaaguuugcu

SEQ ID NO: 2820978 - RNA, 19 nt, Human
auaaaguuugcuuagaaaa

SEQ ID NO: 2820979 - RNA, 13 nt, Human
auaaauagagcaa

SEQ ID NO: 2820980 - RNA, 14 nt, Human
auaaauagagcaau

SEQ ID NO: 2820981 - RNA, 15 nt, Human
auaaauagaaaagua

SEQ ID NO: 2820982 - RNA, 18 nt, Human
auaaauagaaaaguagac

SEQ ID NO: 2820983 - RNA, 12 nt, Human
auaaauacauac

SEQ ID NO: 2820984 - RNA, 19 nt, Human
auaaauacauacggucagg

SEQ ID NO: 2820985 - RNA, 22 nt, Human
auaaauacauacggucagguuu

SEQ ID NO: 2820986 - RNA, 18 nt, Human
auaaauaauugaaacaau

SEQ ID NO: 2820987 - RNA, 15 nt, Human
uuacagcuuuacaca

SEQ ID NO: 2820988 - RNA, 22 nt, Human
uuacagcuuuacacacacagau

SEQ ID NO: 2820989 - RNA, 17 nt, Human
uuacagcucugacuuua

SEQ ID NO: 2820990 - RNA, 21 nt, Human
uuacagcucugacuuuacacu

SEQ ID NO: 2820991 - RNA, 20 nt, Human
uuacagcuggguggcacugc

SEQ ID NO: 2820992 - RNA, 21 nt, Human
uuacagcuggguggcacugcc

SEQ ID NO: 2820993 - RNA, 14 nt, Human
uuacagcugccugc

SEQ ID NO: 2820994 - RNA, 23 nt, Human
uuacagccaagugccaaaugcuc

SEQ ID NO: 2820995 - RNA, 13 nt, Human
uuacagcugccug

SEQ ID NO: 2820996 - RNA, 14 nt, Human
auaacuaaauuuga

SEQ ID NO: 2820997 - RNA, 15 nt, Human
auaacuaaauuugau

SEQ ID NO: 2820998 - RNA, 16 nt, Human
auaacuaaauuugaua

SEQ ID NO: 2820999 - RNA, 18 nt, Human
auaacuaaauuugauacu

SEQ ID NO: 2821000 - RNA, 19 nt, Human
auaacuaaauuugauacuu

SEQ ID NO: 2821001 - RNA, 20 nt, Human
auaacuaaauuugauacuua

SEQ ID NO: 2821002 - RNA, 21 nt, Human
auaacuaaauuugauacuuau

SEQ ID NO: 2821003 - RNA, 19 nt, Human
auaaaugggaacauuuauu

SEQ ID NO: 2821004 - RNA, 19 nt, Human
auaaauguaaaaauaauaa

SEQ ID NO: 2821005 - RNA, 18 nt, Human
auaaaugaagcagcuuua

SEQ ID NO: 2821006 - RNA, 20 nt, Human
auaaaugaagcagcuuuaaa

SEQ ID NO: 2821007 - RNA, 12 nt, Human
auaaaugagcaa

SEQ ID NO: 2821008 - RNA, 13 nt, Human
auaaauguauaua

SEQ ID NO: 2821009 - RNA, 14 nt, Human
auaaauguauauac

SEQ ID NO: 2821010 - RNA, 15 nt, Human
auaaauguauauaca

SEQ ID NO: 2821011 - RNA, 16 nt, Human
auaaauguauauacac

SEQ ID NO: 2821012 - RNA, 17 nt, Human
auaaauguauauacaca

SEQ ID NO: 2821013 - RNA, 18 nt, Human
auaaauguauauacacau

SEQ ID NO: 2821014 - RNA, 19 nt, Human
auaaauguauauacacaua

SEQ ID NO: 2821015 - RNA, 20 nt, Human
auaaauguauauacacauau

SEQ ID NO: 2821016 - RNA, 21 nt, Human
auaaauguauauacacauaua

SEQ ID NO: 2821017 - RNA, 13 nt, Human
auaaauguaucau

SEQ ID NO: 2821018 - RNA, 21 nt, Human
auaaauguaucauagaaaugu

SEQ ID NO: 2821019 - RNA, 17 nt, Human
auaaauguaucauagaa

SEQ ID NO: 2821020 - RNA, 11 nt, Human
uuaagaagcug

SEQ ID NO: 2821021 - RNA, 13 nt, Human
uuaagaagcuguu

SEQ ID NO: 2821022 - RNA, 14 nt, Human
uuaagaagcuguug

SEQ ID NO: 2821023 - RNA, 16 nt, Human
uuaagaagcuguugua

SEQ ID NO: 2821024 - RNA, 13 nt, Human
uuaagaggcaggg

SEQ ID NO: 2821025 - RNA, 22 nt, Human
uuaagagccauauaaguuugaa

SEQ ID NO: 2821026 - RNA, 12 nt, Human
uuaagaaggcaa

SEQ ID NO: 2821027 - RNA, 18 nt, Human
uuaagaagcuguuguaca

SEQ ID NO: 2821028 - RNA, 20 nt, Human
uuaagaagcuguuguacauu

SEQ ID NO: 2821029 - RNA, 21 nt, Human
uuaagaagcuguuguacauuu

SEQ ID NO: 2821030 - RNA, 22 nt, Human
uuaagaagcuguuguacauuua

SEQ ID NO: 2821031 - RNA, 16 nt, Human
uuaagaggcagggucu

SEQ ID NO: 2821032 - RNA, 15 nt, Human
uuaagaggcaggguc

SEQ ID NO: 2821033 - RNA, 23 nt, Human
uuaagagccauauaaguuugaag

SEQ ID NO: 2821034 - RNA, 17 nt, Human
uuaagagcuaaccaguu

SEQ ID NO: 2821035 - RNA, 23 nt, Human
uuaagaagcuguuguacauuuau

SEQ ID NO: 2821036 - RNA, 20 nt, Human
uuaagaggcagaaaauugca

SEQ ID NO: 2821037 - RNA, 14 nt, Human
uuaaguauaucaug

SEQ ID NO: 2821038 - RNA, 17 nt, Human
uuaaguauaucauguaa

SEQ ID NO: 2821039 - RNA, 15 nt, Human
uuaaguaauguggaa

SEQ ID NO: 2821040 - RNA, 21 nt, Human
uuaaguaauguggaagaaaau

SEQ ID NO: 2821041 - RNA, 16 nt, Human
uuaagugguuugauca

SEQ ID NO: 2821042 - RNA, 17 nt, Human
uuaagugcguguguaga

SEQ ID NO: 2821043 - RNA, 18 nt, Human
uuaagugcguguguagag

SEQ ID NO: 2821044 - RNA, 19 nt, Human
uuaagugcguguguagagu

SEQ ID NO: 2821045 - RNA, 21 nt, Human
uuaagugcguguguagaguua

SEQ ID NO: 2821046 - RNA, 14 nt, Human
auaaaauaaaguau

SEQ ID NO: 2821047 - RNA, 13 nt, Human
auaaaauaaagua

SEQ ID NO: 2821048 - RNA, 19 nt, Human
auaaaagugaaugaaagau

SEQ ID NO: 2821049 - RNA, 21 nt, Human
auaaaagugaaugaaagauua

SEQ ID NO: 2821050 - RNA, 16 nt, Human
auaaaagugcacaccu

SEQ ID NO: 2821051 - RNA, 17 nt, Human
auaaaagggcaaaucug

SEQ ID NO: 2821052 - RNA, 18 nt, Human
auaaaagggcaaaucugc

SEQ ID NO: 2821053 - RNA, 20 nt, Human
auaaaaggggguccguggaa

SEQ ID NO: 2821054 - RNA, 21 nt, Human
aguuucaggugacaugugaaa

SEQ ID NO: 2821055 - RNA, 22 nt, Human
aguuucaggugacaugugaaac

SEQ ID NO: 2821056 - RNA, 11 nt, Human
aguuucaggug

SEQ ID NO: 2821057 - RNA, 14 nt, Human
aguuucaggugaca

SEQ ID NO: 2821058 - RNA, 15 nt, Human
aguuucaggugacau

SEQ ID NO: 2821059 - RNA, 16 nt, Human
aguuucaggugacaug

SEQ ID NO: 2821060 - RNA, 17 nt, Human
aguuucaggugacaugu

SEQ ID NO: 2821061 - RNA, 18 nt, Human
aguuucaggugacaugug

SEQ ID NO: 2821062 - RNA, 20 nt, Human
aguuucaggugacaugugaa

SEQ ID NO: 2821063 - RNA, 16 nt, Human
auaaaauaaaguauau

SEQ ID NO: 2821064 - RNA, 19 nt, Human
auaaaaguuuuacaaaggg

SEQ ID NO: 2821065 - RNA, 11 nt, Human
auaaaaugugc

SEQ ID NO: 2821066 - RNA, 15 nt, Human
auaaaauguguugaa

SEQ ID NO: 2821067 - RNA, 15 nt, Human
auaaaaugucuucaa

SEQ ID NO: 2821068 - RNA, 20 nt, Human
auaaaaugucuucaaggcuu

SEQ ID NO: 2821069 - RNA, 20 nt, Human
auaaaauccuaagacacaaa

SEQ ID NO: 2821070 - RNA, 21 nt, Human
auaaaauccuaagacacaaau

SEQ ID NO: 2821071 - RNA, 12 nt, Human
auaaaaugacua

SEQ ID NO: 2821072 - RNA, 15 nt, Human
auaaaaugacuacuu

SEQ ID NO: 2821073 - RNA, 16 nt, Human
auaaaaugacuacuua

SEQ ID NO: 2821074 - RNA, 19 nt, Human
auaaaaugaggacauguuu

SEQ ID NO: 2821075 - RNA, 18 nt, Human
auaaaaugaggacauguu

SEQ ID NO: 2821076 - RNA, 13 nt, Human
auaaacaaugaaa

SEQ ID NO: 2821077 - RNA, 14 nt, Human
auaaacaaugaugc

SEQ ID NO: 2821078 - RNA, 18 nt, Human
auaaacaaugaugcccug

SEQ ID NO: 2821079 - RNA, 14 nt, Human
auaaaauuuugcuu

SEQ ID NO: 2821080 - RNA, 16 nt, Human
auaaaauuuugcuuuu

SEQ ID NO: 2821081 - RNA, 16 nt, Human
auaaacaaagauucau

SEQ ID NO: 2821082 - RNA, 19 nt, Human
uuaauuuuuuugagacaga

SEQ ID NO: 2821083 - RNA, 14 nt, Human
uuaauuuauaugua

SEQ ID NO: 2821084 - RNA, 20 nt, Human
uuaauuuuuugguacaaaaa

SEQ ID NO: 2821085 - RNA, 16 nt, Human
uuaauuuaggacacau

SEQ ID NO: 2821086 - RNA, 17 nt, Human
uuaauuuaguaaauguu

SEQ ID NO: 2821087 - RNA, 18 nt, Human
uuaauuuaguaaauguua

SEQ ID NO: 2821088 - RNA, 19 nt, Human
uuaauuuaguaaauguuau

SEQ ID NO: 2821089 - RNA, 16 nt, Human
auaaaauuaaagcuga

SEQ ID NO: 2821090 - RNA, 20 nt, Human
uuacaaaacuacaugagaac

SEQ ID NO: 2821091 - RNA, 20 nt, Human
uuacaaaagaaauaccuuga

SEQ ID NO: 2821092 - RNA, 18 nt, Human
uuacaaaacuacaugaga

SEQ ID NO: 2821093 - RNA, 17 nt, Human
uuacaaaacuacaugag

SEQ ID NO: 2821094 - RNA, 13 nt, Human
auaaaauuaugcc

SEQ ID NO: 2821095 - RNA, 15 nt, Human
auaaaauuauuugca

SEQ ID NO: 2821096 - RNA, 16 nt, Human
auaaaauuauuugcag

SEQ ID NO: 2821097 - RNA, 13 nt, Human
auaaaauuagaaa

SEQ ID NO: 2821098 - RNA, 16 nt, Human
auaaaauuagaaagca

SEQ ID NO: 2821099 - RNA, 17 nt, Human
uuaauuccaauuauaug

SEQ ID NO: 2821100 - RNA, 19 nt, Human
uuaauuccaauaugaugac

SEQ ID NO: 2821101 - RNA, 17 nt, Human
uuaauucucuuucaaag

SEQ ID NO: 2821102 - RNA, 13 nt, Human
uuaauuguuguuu

SEQ ID NO: 2821103 - RNA, 18 nt, Human
uuaauuguuuugcacuuu

SEQ ID NO: 2821104 - RNA, 18 nt, Human
uuaauuuaaacaccuccu

SEQ ID NO: 2821105 - RNA, 16 nt, Human
uuaauuguuguuucuu

SEQ ID NO: 2821106 - RNA, 19 nt, Human
uuaauuguuguuucuuucu

SEQ ID NO: 2821107 - RNA, 20 nt, Human
uuaauuguuguuucuuucua

SEQ ID NO: 2821108 - RNA, 22 nt, Human
uuaauuguuguuucuuucuagu

SEQ ID NO: 2821109 - RNA, 19 nt, Human
uuaauuguuuugcacuuuu

SEQ ID NO: 2821110 - RNA, 16 nt, Human
uuaauuuaaagcuuac

SEQ ID NO: 2821111 - RNA, 21 nt, Human
uuaauuuaaagcuuacucugu

SEQ ID NO: 2821112 - RNA, 13 nt, Human
uuaauaaagacag

SEQ ID NO: 2821113 - RNA, 14 nt, Human
uuaauaaagacagg

SEQ ID NO: 2821114 - RNA, 12 nt, Human
uuaauaacaauu

SEQ ID NO: 2821115 - RNA, 22 nt, Human
uuaauaaagacgauuugucagu

SEQ ID NO: 2821116 - RNA, 15 nt, Human
uuaauaaauagagca

SEQ ID NO: 2821117 - RNA, 16 nt, Human
uuaauaaauagagcaa

SEQ ID NO: 2821118 - RNA, 13 nt, Human
uuaaguuccagca

SEQ ID NO: 2821119 - RNA, 19 nt, Human
uuaaguucucaaugugaaa

SEQ ID NO: 2821120 - RNA, 21 nt, Human
uuaauaaagaauuaacagaga

SEQ ID NO: 2821121 - RNA, 14 nt, Human
uuaauaaacuacuc

SEQ ID NO: 2821122 - RNA, 19 nt, Human
uuaauaaacuacucuuuga

SEQ ID NO: 2821123 - RNA, 20 nt, Human
uuaauaaaauaauucuaaag

SEQ ID NO: 2821124 - RNA, 15 nt, Human
agucuuucaugugug

SEQ ID NO: 2821125 - RNA, 17 nt, Human
agucuuucaugugugcc

SEQ ID NO: 2821126 - RNA, 20 nt, Human
agucuuucaugugugccaag

SEQ ID NO: 2821127 - RNA, 20 nt, Human
agucuuucuuagugccugug

SEQ ID NO: 2821128 - RNA, 15 nt, Human
agucuuggcucacug

SEQ ID NO: 2821129 - RNA, 17 nt, Human
agucuugguuucucucu

SEQ ID NO: 2821130 - RNA, 23 nt, Human
agucuugguuucucucuacagug

SEQ ID NO: 2821131 - RNA, 10 nt, Human
agucuuguau

SEQ ID NO: 2821132 - RNA, 11 nt, Human
agucuuguaua

SEQ ID NO: 2821133 - RNA, 15 nt, Human
agucuuguauaacua

SEQ ID NO: 2821134 - RNA, 17 nt, Human
agucuuugguucuaagg

SEQ ID NO: 2821135 - RNA, 18 nt, Human
agucuuugguucuaagga

SEQ ID NO: 2821136 - RNA, 14 nt, Human
agucuuugaagcug

SEQ ID NO: 2821137 - RNA, 17 nt, Human
agucuuugaagcugaaa

SEQ ID NO: 2821138 - RNA, 21 nt, Human
agucuuugaagcugaaaauau

SEQ ID NO: 2821139 - RNA, 12 nt, Human
agucuuuggggu

SEQ ID NO: 2821140 - RNA, 15 nt, Human
agucuuugguucuaa

SEQ ID NO: 2821141 - RNA, 16 nt, Human
agucuuugguucuaag

SEQ ID NO: 2821142 - RNA, 16 nt, Human
agucuugcagcaggau

SEQ ID NO: 2821143 - RNA, 17 nt, Human
agucuucugacaaacug

SEQ ID NO: 2821144 - RNA, 19 nt, Human
agucuucugacaaacugug

SEQ ID NO: 2821145 - RNA, 15 nt, Human
agucuuccaauuaau

SEQ ID NO: 2821146 - RNA, 22 nt, Human
agucuuccaauuaaugcuuuuu

SEQ ID NO: 2821147 - RNA, 15 nt, Human
agucucuucuccacu

SEQ ID NO: 2821148 - RNA, 16 nt, Human
agucucuucuccacug

SEQ ID NO: 2821149 - RNA, 15 nt, Human
agucuuaucaagcag

SEQ ID NO: 2821150 - RNA, 16 nt, Human
agucuuaucaagcagc

SEQ ID NO: 2821151 - RNA, 21 nt, Human
agucuuaucugagcugagcca

SEQ ID NO: 2821152 - RNA, 22 nt, Human
agucuuaucugagcugagccag

SEQ ID NO: 2821153 - RNA, 23 nt, Human
agucuuaucugagcugagccagg

SEQ ID NO: 2821154 - RNA, 17 nt, Human
agucucuucuccacugg

SEQ ID NO: 2821155 - RNA, 22 nt, Human
agucuuagggauuuauuuucaa

SEQ ID NO: 2821156 - RNA, 22 nt, Human
agucuucaacauaacccacuug

SEQ ID NO: 2821157 - RNA, 20 nt, Human
ugugacuauauagagauguu

SEQ ID NO: 2821158 - RNA, 23 nt, Human
ugugacucuuuuuagggccaggc

SEQ ID NO: 2821159 - RNA, 16 nt, Human
ugugagagguuugacu

SEQ ID NO: 2821160 - RNA, 15 nt, Human
ugugagagguuugac

SEQ ID NO: 2821161 - RNA, 13 nt, Human
agucucuucucca

SEQ ID NO: 2821162 - RNA, 14 nt, Human
agucucuucuccac

SEQ ID NO: 2821163 - RNA, 17 nt, Human
agucucucuuaaaguug

SEQ ID NO: 2821164 - RNA, 23 nt, Human
agucucucuuaaaguuggaauuu

SEQ ID NO: 2821165 - RNA, 11 nt, Human
agucucuccug

SEQ ID NO: 2821166 - RNA, 13 nt, Human
agucucuccugua

SEQ ID NO: 2821167 - RNA, 22 nt, Human
agucucuccuguaagccaaaga

SEQ ID NO: 2821168 - RNA, 17 nt, Human
agucucaggagcauggg

SEQ ID NO: 2821169 - RNA, 13 nt, Human
agucucaggagca

SEQ ID NO: 2821170 - RNA, 19 nt, Human
agucucaguggcuucaucu

SEQ ID NO: 2821171 - RNA, 10 nt, Human
agucucaguu

SEQ ID NO: 2821172 - RNA, 18 nt, Human
agucucaguuuguguguc

SEQ ID NO: 2821173 - RNA, 20 nt, Human
agucucaguuugugugucuu

SEQ ID NO: 2821174 - RNA, 21 nt, Human
agucucaguuugugugucuua

SEQ ID NO: 2821175 - RNA, 12 nt, Human
ugugaacuugua

SEQ ID NO: 2821176 - RNA, 15 nt, Human
ugugaacuuguagcu

SEQ ID NO: 2821177 - RNA, 20 nt, Human
ugugaacuuguagcuguaaa

SEQ ID NO: 2821178 - RNA, 21 nt, Human
ugugaacuuguagcuguaaaa

SEQ ID NO: 2821179 - RNA, 17 nt, Human
ugugaaccaccacaccc

SEQ ID NO: 2821180 - RNA, 20 nt, Human
ugugaacaaaagaugcucuu

SEQ ID NO: 2821181 - RNA, 21 nt, Human
ugugaaccaccacacccagcc

SEQ ID NO: 2821182 - RNA, 20 nt, Human
ugugaaccaccacacccagc

SEQ ID NO: 2821183 - RNA, 19 nt, Human
ugugaaccaccacacccag

SEQ ID NO: 2821184 - RNA, 12 nt, Human
ugugaccuagca

SEQ ID NO: 2821185 - RNA, 13 nt, Human
ugugaccucaggc

SEQ ID NO: 2821186 - RNA, 14 nt, Human
ugugaccucaggca

SEQ ID NO: 2821187 - RNA, 17 nt, Human
ugugaccccuccugggg

SEQ ID NO: 2821188 - RNA, 18 nt, Human
ugugaccccuccuggggc

SEQ ID NO: 2821189 - RNA, 19 nt, Human
ugugaccccuccuggggcc

SEQ ID NO: 2821190 - RNA, 21 nt, Human
ugugaccccuccuggggccag

SEQ ID NO: 2821191 - RNA, 23 nt, Human
ugugaccccuccuggggccaggc

SEQ ID NO: 2821192 - RNA, 14 nt, Human
ugugaccugagggc

SEQ ID NO: 2821193 - RNA, 13 nt, Human
ugugaccugaggg

SEQ ID NO: 2821194 - RNA, 20 nt, Human
ugugaccucaggcacuagcc

SEQ ID NO: 2821195 - RNA, 21 nt, Human
ugugaccucaggcacuagccu

SEQ ID NO: 2821196 - RNA, 17 nt, Human
ugugaccuuaggcccgg

SEQ ID NO: 2821197 - RNA, 16 nt, Human
ugugacgcgcaagucu

SEQ ID NO: 2821198 - RNA, 13 nt, Human
ugugaccuucucu

SEQ ID NO: 2821199 - RNA, 14 nt, Human
ugugaccuucucua

SEQ ID NO: 2821200 - RNA, 18 nt, Human
ugugacuauauagagaug

SEQ ID NO: 2821201 - RNA, 22 nt, Human
ugugacuauauagagauguuuu

SEQ ID NO: 2821202 - RNA, 16 nt, Human
ugugacucuaaauucu

SEQ ID NO: 2821203 - RNA, 15 nt, Human
ugugacucuggcuug

SEQ ID NO: 2821204 - RNA, 16 nt, Human
ugugacucuggcuugg

SEQ ID NO: 2821205 - RNA, 17 nt, Human
ugugacucuggcuuggc

SEQ ID NO: 2821206 - RNA, 20 nt, Human
ugugacucuggcuuggccua

SEQ ID NO: 2821207 - RNA, 18 nt, Human
agucacguggaggagcag

SEQ ID NO: 2821208 - RNA, 21 nt, Human
agucacguggaggagcagugc

SEQ ID NO: 2821209 - RNA, 22 nt, Human
ugucagaaugcuauugaaaaug

SEQ ID NO: 2821210 - RNA, 21 nt, Human
ugucagacagaacuugaaugu

SEQ ID NO: 2821211 - RNA, 19 nt, Human
ugucuuggacacuguacaa

SEQ ID NO: 2821212 - RNA, 13 nt, Human
ugucuuguacaug

SEQ ID NO: 2821213 - RNA, 18 nt, Human
ugucuuguaauauuuugu

SEQ ID NO: 2821214 - RNA, 19 nt, Human
ugucuuguaauauuuugua

SEQ ID NO: 2821215 - RNA, 23 nt, Human
ugucagacagaacuugaaugugu

SEQ ID NO: 2821216 - RNA, 14 nt, Human
ugucagacauaaag

SEQ ID NO: 2821217 - RNA, 15 nt, Human
ugucagacauaaagc

SEQ ID NO: 2821218 - RNA, 16 nt, Human
ugucagacauaaagcc

SEQ ID NO: 2821219 - RNA, 17 nt, Human
ugucagacauaaagcca

SEQ ID NO: 2821220 - RNA, 20 nt, Human
ugucagacauaaagccaugu

SEQ ID NO: 2821221 - RNA, 23 nt, Human
ugucagacauccauguuuguaaa

SEQ ID NO: 2821222 - RNA, 15 nt, Human
ugucuuggacacugu

SEQ ID NO: 2821223 - RNA, 13 nt, Human
ugucagacuggcu

SEQ ID NO: 2821224 - RNA, 16 nt, Human
ugucuuguacaugugu

SEQ ID NO: 2821225 - RNA, 17 nt, Human
ugucuuguacaugugua

SEQ ID NO: 2821226 - RNA, 20 nt, Human
ugucuuguacauguguagcc

SEQ ID NO: 2821227 - RNA, 22 nt, Human
ugucuuguacauguguagccug

SEQ ID NO: 2821228 - RNA, 14 nt, Human
ugugaaaugcuggc

SEQ ID NO: 2821229 - RNA, 21 nt, Human
ugugaaagucagaugcccaga

SEQ ID NO: 2821230 - RNA, 22 nt, Human
ugugaaagucagaugcccagag

SEQ ID NO: 2821231 - RNA, 17 nt, Human
ugugaaaguuuugagua

SEQ ID NO: 2821232 - RNA, 20 nt, Human
ugugaaaggaagcuccacug

SEQ ID NO: 2821233 - RNA, 23 nt, Human
ugugaucccaagugccagucuug

SEQ ID NO: 2821234 - RNA, 18 nt, Human
ugugaucccaagugccag

SEQ ID NO: 2821235 - RNA, 13 nt, Human
ugugaucugucuu

SEQ ID NO: 2821236 - RNA, 14 nt, Human
ugugaucugucuug

SEQ ID NO: 2821237 - RNA, 15 nt, Human
ugugaucugucuugu

SEQ ID NO: 2821238 - RNA, 16 nt, Human
ugugaucugucuugua

SEQ ID NO: 2821239 - RNA, 17 nt, Human
ugugaucugucuuguaa

SEQ ID NO: 2821240 - RNA, 18 nt, Human
ugugaucugucuuguaau

SEQ ID NO: 2821241 - RNA, 19 nt, Human
ugugaucugucuuguaaua

SEQ ID NO: 2821242 - RNA, 20 nt, Human
ugugaucugucuuguaauau

SEQ ID NO: 2821243 - RNA, 21 nt, Human
ugugaucuuaauauauuugaa

SEQ ID NO: 2821244 - RNA, 17 nt, Human
ugugaucuuauuuuucu

SEQ ID NO: 2821245 - RNA, 22 nt, Human
ugugaucuuauuuuucuaaacg

SEQ ID NO: 2821246 - RNA, 15 nt, Human
agugaaauggauacu

SEQ ID NO: 2821247 - RNA, 14 nt, Human
agugaaauuucuag

SEQ ID NO: 2821248 - RNA, 17 nt, Human
agugaaauuucuagccu

SEQ ID NO: 2821249 - RNA, 20 nt, Human
agugaaauuucuagccugca

SEQ ID NO: 2821250 - RNA, 19 nt, Human
agugaaagugaggaaauaa

SEQ ID NO: 2821251 - RNA, 21 nt, Human
agugaaagugaggaaauaaag

SEQ ID NO: 2821252 - RNA, 12 nt, Human
agugaaauaaca

SEQ ID NO: 2821253 - RNA, 14 nt, Human
agugaaauaacaaa

SEQ ID NO: 2821254 - RNA, 19 nt, Human
agugaaauaacaaaaugga

SEQ ID NO: 2821255 - RNA, 20 nt, Human
agugaaauaacaaaauggac

SEQ ID NO: 2821256 - RNA, 14 nt, Human
agugaaauaauaga

SEQ ID NO: 2821257 - RNA, 15 nt, Human
ugugaugaacuuucu

SEQ ID NO: 2821258 - RNA, 16 nt, Human
ugugaucuuuuaaagu

SEQ ID NO: 2821259 - RNA, 14 nt, Human
ugugauguauucua

SEQ ID NO: 2821260 - RNA, 14 nt, Human
ugugauugugccua

SEQ ID NO: 2821261 - RNA, 14 nt, Human
ugugauuguggaau

SEQ ID NO: 2821262 - RNA, 17 nt, Human
ugugauuguggaaugga

SEQ ID NO: 2821263 - RNA, 17 nt, Human
ugugauuuagaacugua

SEQ ID NO: 2821264 - RNA, 18 nt, Human
ugugauuuagaacuguau

SEQ ID NO: 2821265 - RNA, 23 nt, Human
ugugauuuagaacuguaugucag

SEQ ID NO: 2821266 - RNA, 16 nt, Human
ugugccaugugccagg

SEQ ID NO: 2821267 - RNA, 12 nt, Human
ugugccaugugc

SEQ ID NO: 2821268 - RNA, 20 nt, Human
ugugccagguuuuuggucug

SEQ ID NO: 2821269 - RNA, 22 nt, Human
ugugccauagaguuuaacacaa

SEQ ID NO: 2821270 - RNA, 21 nt, Human
ugugccauagucacauggccu

SEQ ID NO: 2821271 - RNA, 16 nt, Human
ugugccauagucacau

SEQ ID NO: 2821272 - RNA, 18 nt, Human
ugugccauagucacaugg

SEQ ID NO: 2821273 - RNA, 18 nt, Human
ugugccauagaguuuaac

SEQ ID NO: 2821274 - RNA, 20 nt, Human
ugugccauagaguuuaacac

SEQ ID NO: 2821275 - RNA, 21 nt, Human
ugugccauagaguuuaacaca

SEQ ID NO: 2821276 - RNA, 21 nt, Human
ugugccagggcaaugaugaau

SEQ ID NO: 2821277 - RNA, 18 nt, Human
ugugccagggcaaugaug

SEQ ID NO: 2821278 - RNA, 18 nt, Human
ugugccaauauguauugu

SEQ ID NO: 2821279 - RNA, 20 nt, Human
ugugccacaacgccuggcua

SEQ ID NO: 2821280 - RNA, 22 nt, Human
ugugccacagaguguagccagg

SEQ ID NO: 2821281 - RNA, 16 nt, Human
ugugccaauauguauu

SEQ ID NO: 2821282 - RNA, 17 nt, Human
ugugccaauauguauug

SEQ ID NO: 2821283 - RNA, 23 nt, Human
ugugccagaggaauccuggcagc

SEQ ID NO: 2821284 - RNA, 22 nt, Human
ugugccagaggaauccuggcag

SEQ ID NO: 2821285 - RNA, 21 nt, Human
ugugccagaggaauccuggca

SEQ ID NO: 2821286 - RNA, 20 nt, Human
ugugccagaggaauccuggc

SEQ ID NO: 2821287 - RNA, 11 nt, Human
ugugcuggggg

SEQ ID NO: 2821288 - RNA, 16 nt, Human
ugugcugggggaauga

SEQ ID NO: 2821289 - RNA, 23 nt, Human
ugugcugggggaaugagcccaga

SEQ ID NO: 2821290 - RNA, 24 nt, Human
ugugcugggggaaugagcccagag

SEQ ID NO: 2821291 - RNA, 21 nt, Human
uguggagguacacucuuauag

SEQ ID NO: 2821292 - RNA, 21 nt, Human
uguggaggaaggauuguaaaa

SEQ ID NO: 2821293 - RNA, 13 nt, Human
uguggagggcaca

SEQ ID NO: 2821294 - RNA, 20 nt, Human
uguggaggaaggauuguaaa

SEQ ID NO: 2821295 - RNA, 14 nt, Human
ugugcauuuguaaa

SEQ ID NO: 2821296 - RNA, 18 nt, Human
uguggaggcagugucauu

SEQ ID NO: 2821297 - RNA, 19 nt, Human
uguggaggcagugucauuu

SEQ ID NO: 2821298 - RNA, 19 nt, Human
uguggagggcacauuccuu

SEQ ID NO: 2821299 - RNA, 14 nt, Human
uguggauaacaaag

SEQ ID NO: 2821300 - RNA, 16 nt, Human
uguggauaacaaagau

SEQ ID NO: 2821301 - RNA, 19 nt, Human
uguggcagucccuuauaau

SEQ ID NO: 2821302 - RNA, 16 nt, Human
uguggcagcaggcagc

SEQ ID NO: 2821303 - RNA, 17 nt, Human
ugugcugcuguaagaaa

SEQ ID NO: 2821304 - RNA, 18 nt, Human
ugugcugcuguaagaaau

SEQ ID NO: 2821305 - RNA, 21 nt, Human
ugugcuggauggagcccaggc

SEQ ID NO: 2821306 - RNA, 19 nt, Human
ugugcuggauggagcccag

SEQ ID NO: 2821307 - RNA, 20 nt, Human
ugugcuggauggagcccagg

SEQ ID NO: 2821308 - RNA, 19 nt, Human
ugugcccagcccggaccuu

SEQ ID NO: 2821309 - RNA, 14 nt, Human
ugugccccaugccu

SEQ ID NO: 2821310 - RNA, 19 nt, Human
ugugccccaugccugucca

SEQ ID NO: 2821311 - RNA, 15 nt, Human
ugugccccaugccug

SEQ ID NO: 2821312 - RNA, 23 nt, Human
ugugccccaugccuguccagccu

SEQ ID NO: 2821313 - RNA, 14 nt, Human
agugagggauuauc

SEQ ID NO: 2821314 - RNA, 15 nt, Human
agugagucgaggaca

SEQ ID NO: 2821315 - RNA, 16 nt, Human
agugagggagauccca

SEQ ID NO: 2821316 - RNA, 16 nt, Human
uguggccacuucuguc

SEQ ID NO: 2821317 - RNA, 21 nt, Human
uguggcaucuuugccuugggc

SEQ ID NO: 2821318 - RNA, 17 nt, Human
uguggcaucuuugccuu

SEQ ID NO: 2821319 - RNA, 15 nt, Human
uguggcauugaaaug

SEQ ID NO: 2821320 - RNA, 12 nt, Human
uguggguguagc

SEQ ID NO: 2821321 - RNA, 15 nt, Human
uguggguguagccag

SEQ ID NO: 2821322 - RNA, 20 nt, Human
agugcuguggccugggcaag

SEQ ID NO: 2821323 - RNA, 18 nt, Human
agugcuguggccugggca

SEQ ID NO: 2821324 - RNA, 14 nt, Human
agugcuguggccug

SEQ ID NO: 2821325 - RNA, 17 nt, Human
agugcuguggccugggc

SEQ ID NO: 2821326 - RNA, 16 nt, Human
agugcuguggccuggg

SEQ ID NO: 2821327 - RNA, 15 nt, Human
uguguaaccauuuua

SEQ ID NO: 2821328 - RNA, 23 nt, Human
uguguaaccauuuuauaaagugc

SEQ ID NO: 2821329 - RNA, 19 nt, Human
uguguaaccucuucaccuu

SEQ ID NO: 2821330 - RNA, 21 nt, Human
ugugguguuuccugcaggcca

SEQ ID NO: 2821331 - RNA, 17 nt, Human
ugugguguuagggugca

SEQ ID NO: 2821332 - RNA, 18 nt, Human
ugugguguuagggugcag

SEQ ID NO: 2821333 - RNA, 15 nt, Human
ugugggucuuccagg

SEQ ID NO: 2821334 - RNA, 16 nt, Human
uguggugugagcuuca

SEQ ID NO: 2821335 - RNA, 13 nt, Human
ugugguguaauuu

SEQ ID NO: 2821336 - RNA, 14 nt, Human
ugugguguaauuua

SEQ ID NO: 2821337 - RNA, 20 nt, Human
ugugguguaauuuauaaaau

SEQ ID NO: 2821338 - RNA, 15 nt, Human
uguggugucugccug

SEQ ID NO: 2821339 - RNA, 15 nt, Human
agugcugagauuaca

SEQ ID NO: 2821340 - RNA, 21 nt, Human
agugcugggauuacaggugug

SEQ ID NO: 2821341 - RNA, 16 nt, Human
agugcugcaucuuaua

SEQ ID NO: 2821342 - RNA, 22 nt, Human
agugcugcaucuuauagcacuu

SEQ ID NO: 2821343 - RNA, 20 nt, Human
agugcugagauuacaggcau

SEQ ID NO: 2821344 - RNA, 21 nt, Human
agugcugagauuacaggcaug

SEQ ID NO: 2821345 - RNA, 19 nt, Human
agugcuguccaugcuucuc

SEQ ID NO: 2821346 - RNA, 20 nt, Human
agugcuguccaugcuucuca

SEQ ID NO: 2821347 - RNA, 22 nt, Human
agugcuguccaugcuucucauc

SEQ ID NO: 2821348 - RNA, 20 nt, Human
agugcugggauuacaggugu

SEQ ID NO: 2821349 - RNA, 16 nt, Human
uguguaauagaaaacu

SEQ ID NO: 2821350 - RNA, 20 nt, Human
ugugucuugcaauggcagcc

SEQ ID NO: 2821351 - RNA, 21 nt, Human
ugugucuugcaauggcagccu

SEQ ID NO: 2821352 - RNA, 18 nt, Human
uguguaauagaaaacuga

SEQ ID NO: 2821353 - RNA, 15 nt, Human
uguguguguauguga

SEQ ID NO: 2821354 - RNA, 9 nt, Human
ugugugugu

SEQ ID NO: 2821355 - RNA, 11 nt, Human
uguguguguau

SEQ ID NO: 2821356 - RNA, 11 nt, Human
uguguguguga

SEQ ID NO: 2821357 - RNA, 13 nt, Human
ugugugugugaau

SEQ ID NO: 2821358 - RNA, 13 nt, Human
ugugugugugaga

SEQ ID NO: 2821359 - RNA, 10 nt, Human
ugugucuuuu

SEQ ID NO: 2821360 - RNA, 22 nt, Human
ugugugaaaggaagcuccacug

SEQ ID NO: 2821361 - RNA, 18 nt, Human
ugugucuuucacagcucc

SEQ ID NO: 2821362 - RNA, 22 nt, Human
ugugucuuucacagcuccuccc

SEQ ID NO: 2821363 - RNA, 20 nt, Human
ugugugugcuuauguaugag

SEQ ID NO: 2821364 - RNA, 14 nt, Human
uguguguguaugug

SEQ ID NO: 2821365 - RNA, 23 nt, Human
uguuaaauaauauggcuaugcuu

SEQ ID NO: 2821366 - RNA, 19 nt, Human
uguguuaaguauguguaaa

SEQ ID NO: 2821367 - RNA, 15 nt, Human
uguguguuugugcug

SEQ ID NO: 2821368 - RNA, 16 nt, Human
uguguguuugugcuga

SEQ ID NO: 2821369 - RNA, 18 nt, Human
uguguucucggagugugu

SEQ ID NO: 2821370 - RNA, 13 nt, Human
uguguugaaaacc

SEQ ID NO: 2821371 - RNA, 14 nt, Human
uguguugaaaacca

SEQ ID NO: 2821372 - RNA, 16 nt, Human
uguguugaaaaccaaa

SEQ ID NO: 2821373 - RNA, 13 nt, Human
uguguugaaacug

SEQ ID NO: 2821374 - RNA, 13 nt, Human
uguguucuaucca

SEQ ID NO: 2821375 - RNA, 20 nt, Human
uguguucuauccaaacaugu

SEQ ID NO: 2821376 - RNA, 18 nt, Human
uguguucccuuugucuuu

SEQ ID NO: 2821377 - RNA, 21 nt, Human
uguguucccuuugucuuucaa

SEQ ID NO: 2821378 - RNA, 16 nt, Human
uguuaaguauguguaa

SEQ ID NO: 2821379 - RNA, 15 nt, Human
uguuaaguaugugua

SEQ ID NO: 2821380 - RNA, 15 nt, Human
uguuaauuacaccau

SEQ ID NO: 2821381 - RNA, 18 nt, Human
uguuaauuauaggagccu

SEQ ID NO: 2821382 - RNA, 13 nt, Human
uguuaauuuaugc

SEQ ID NO: 2821383 - RNA, 13 nt, Human
uguuaauuucagu

SEQ ID NO: 2821384 - RNA, 19 nt, Human
uguuaauuuuuugguacaa

SEQ ID NO: 2821385 - RNA, 21 nt, Human
uguuaauuuuuugguacaaaa

SEQ ID NO: 2821386 - RNA, 22 nt, Human
uguuaauuuuuugguacaaaaa

SEQ ID NO: 2821387 - RNA, 18 nt, Human
uguuaaaugaaauuguaa

SEQ ID NO: 2821388 - RNA, 19 nt, Human
uguuaaaugaaauuguaaa

SEQ ID NO: 2821389 - RNA, 14 nt, Human
uguuaaauuuguaa

SEQ ID NO: 2821390 - RNA, 15 nt, Human
uguuaaauuuguaag

SEQ ID NO: 2821391 - RNA, 16 nt, Human
uguuaaauuuguaagu

SEQ ID NO: 2821392 - RNA, 17 nt, Human
uguuaaauuuguaaguu

SEQ ID NO: 2821393 - RNA, 18 nt, Human
uguuaaauuuguaaguuu

SEQ ID NO: 2821394 - RNA, 19 nt, Human
uguuaaauuuguaaguuuc

SEQ ID NO: 2821395 - RNA, 21 nt, Human
uguuaaauuuguaaguuucag

SEQ ID NO: 2821396 - RNA, 23 nt, Human
uguuaaggaaacucuuaucucag

SEQ ID NO: 2821397 - RNA, 22 nt, Human
uguuaagguccugaaaguaacu

SEQ ID NO: 2821398 - RNA, 24 nt, Human
uguuaagguccugaaaguaacuca

SEQ ID NO: 2821399 - RNA, 21 nt, Human
uguuaaggaaacucuuaucuc

SEQ ID NO: 2821400 - RNA, 22 nt, Human
uguuaaggaaacucuuaucuca

SEQ ID NO: 2821401 - RNA, 20 nt, Human
uguuaagcgugucuguauuu

SEQ ID NO: 2821402 - RNA, 14 nt, Human
uguuaaggaaacuc

SEQ ID NO: 2821403 - RNA, 15 nt, Human
uguuaaggaaacucu

SEQ ID NO: 2821404 - RNA, 16 nt, Human
uguuaaggaaacucuu

SEQ ID NO: 2821405 - RNA, 17 nt, Human
uguuaaggaaacucuua

SEQ ID NO: 2821406 - RNA, 20 nt, Human
uguuaaggaaacucuuaucu

SEQ ID NO: 2821407 - RNA, 14 nt, Human
agugugucuaaauu

SEQ ID NO: 2821408 - RNA, 15 nt, Human
uguuauaucauaugu

SEQ ID NO: 2821409 - RNA, 17 nt, Human
uguuauaucauauguau

SEQ ID NO: 2821410 - RNA, 16 nt, Human
uguuauauccccugcu

SEQ ID NO: 2821411 - RNA, 19 nt, Human
uguuauauccccugcuacc

SEQ ID NO: 2821412 - RNA, 16 nt, Human
uguucugggacacagu

SEQ ID NO: 2821413 - RNA, 14 nt, Human
agugugugacauuc

SEQ ID NO: 2821414 - RNA, 15 nt, Human
uguucugggcucuuu

SEQ ID NO: 2821415 - RNA, 18 nt, Human
uguucccuuugucuuuca

SEQ ID NO: 2821416 - RNA, 19 nt, Human
uguucccuuugucuuucaa

SEQ ID NO: 2821417 - RNA, 20 nt, Human
uguucccuuugucuuucaaa

SEQ ID NO: 2821418 - RNA, 14 nt, Human
uguuccagcucuuu

SEQ ID NO: 2821419 - RNA, 18 nt, Human
uguuccaguaaucuaaua

SEQ ID NO: 2821420 - RNA, 17 nt, Human
uguucccaccugcugga

SEQ ID NO: 2821421 - RNA, 18 nt, Human
uguugcccaggcaggucu

SEQ ID NO: 2821422 - RNA, 17 nt, Human
uguugcccaggcagguc

SEQ ID NO: 2821423 - RNA, 16 nt, Human
uguugcccaggcaggu

SEQ ID NO: 2821424 - RNA, 15 nt, Human
uguugcccaggcagg

SEQ ID NO: 2821425 - RNA, 12 nt, Human
uguugcccaggc

SEQ ID NO: 2821426 - RNA, 13 nt, Human
uguugcccaggca

SEQ ID NO: 2821427 - RNA, 20 nt, Human
uguugauuuuuacuguguuu

SEQ ID NO: 2821428 - RNA, 18 nt, Human
uguugauuuuuacugugu

SEQ ID NO: 2821429 - RNA, 22 nt, Human
uguugauuuuuacuguguuuua

SEQ ID NO: 2821430 - RNA, 14 nt, Human
uguucugugucuuu

SEQ ID NO: 2821431 - RNA, 13 nt, Human
uguucugugucuu

SEQ ID NO: 2821432 - RNA, 22 nt, Human
uguucugugauacagaacucuu

SEQ ID NO: 2821433 - RNA, 19 nt, Human
uguucuguuuguuauuguu

SEQ ID NO: 2821434 - RNA, 14 nt, Human
uguucuguuucaag

SEQ ID NO: 2821435 - RNA, 14 nt, Human
uguucuguuuguua

SEQ ID NO: 2821436 - RNA, 15 nt, Human
aguggacagucugcu

SEQ ID NO: 2821437 - RNA, 22 nt, Human
aguggaauccuauauagaaugc

SEQ ID NO: 2821438 - RNA, 14 nt, Human
aguggaauuucuug

SEQ ID NO: 2821439 - RNA, 17 nt, Human
aguggaauuucuuguuu

SEQ ID NO: 2821440 - RNA, 18 nt, Human
uguuacaaaguuguaugu

SEQ ID NO: 2821441 - RNA, 17 nt, Human
aguggugcgaucugggu

SEQ ID NO: 2821442 - RNA, 16 nt, Human
aguggugcgaucuggg

SEQ ID NO: 2821443 - RNA, 15 nt, Human
uguuaagguucaaga

SEQ ID NO: 2821444 - RNA, 18 nt, Human
agugugcauggaggcccu

SEQ ID NO: 2821445 - RNA, 19 nt, Human
agugugcauggaggcccuc

SEQ ID NO: 2821446 - RNA, 15 nt, Human
agugugccacaugga

SEQ ID NO: 2821447 - RNA, 21 nt, Human
agugugcaguucuaguuugca

SEQ ID NO: 2821448 - RNA, 23 nt, Human
agugugguguuuccugcaggcca

SEQ ID NO: 2821449 - RNA, 17 nt, Human
aguguacuuaacuauuc

SEQ ID NO: 2821450 - RNA, 14 nt, Human
aguguaccuccucu

SEQ ID NO: 2821451 - RNA, 15 nt, Human
aguguaccuccucuc

SEQ ID NO: 2821452 - RNA, 17 nt, Human
aguguaccuccucucag

SEQ ID NO: 2821453 - RNA, 21 nt, Human
aguguaccuccucucaguguu

SEQ ID NO: 2821454 - RNA, 22 nt, Human
aguguaccuccucucaguguuu

SEQ ID NO: 2821455 - RNA, 13 nt, Human
aguguaccugugu

SEQ ID NO: 2821456 - RNA, 17 nt, Human
aguguaccuguguacau

SEQ ID NO: 2821457 - RNA, 20 nt, Human
aguguaccuguguacauaac

SEQ ID NO: 2821458 - RNA, 16 nt, Human
aguguacgauucuuaa

SEQ ID NO: 2821459 - RNA, 12 nt, Human
aguguagaagca

SEQ ID NO: 2821460 - RNA, 13 nt, Human
aguguagaagcau

SEQ ID NO: 2821461 - RNA, 14 nt, Human
aguguagaagcauu

SEQ ID NO: 2821462 - RNA, 15 nt, Human
aguguagaagcauuc

SEQ ID NO: 2821463 - RNA, 16 nt, Human
aguguagaagcauucc

SEQ ID NO: 2821464 - RNA, 17 nt, Human
aguguagaagcauuccu

SEQ ID NO: 2821465 - RNA, 18 nt, Human
aguguagaagcauuccuu

SEQ ID NO: 2821466 - RNA, 19 nt, Human
aguguagaagcauuccuuc

SEQ ID NO: 2821467 - RNA, 20 nt, Human
aguguagaagcauuccuucu

SEQ ID NO: 2821468 - RNA, 15 nt, Human
aguggugugaucuca

SEQ ID NO: 2821469 - RNA, 16 nt, Human
aguguaccauuugccu

SEQ ID NO: 2821470 - RNA, 15 nt, Human
aguguaaauguuagu

SEQ ID NO: 2821471 - RNA, 19 nt, Human
aucaaucaaauaaguauuu

SEQ ID NO: 2821472 - RNA, 19 nt, Human
aucaaucaucugugugaaa

SEQ ID NO: 2821473 - RNA, 19 nt, Human
aucacaaauccaaaggaaa

SEQ ID NO: 2821474 - RNA, 20 nt, Human
aucaaucaucugugugaaaa

SEQ ID NO: 2821475 - RNA, 13 nt, Human
aucacaaaaauuu

SEQ ID NO: 2821476 - RNA, 19 nt, Human
aucacaaauuucacuuaua

SEQ ID NO: 2821477 - RNA, 21 nt, Human
aucacaaccaccguuacaagu

SEQ ID NO: 2821478 - RNA, 22 nt, Human
aucacggcucacugcagccuca

SEQ ID NO: 2821479 - RNA, 13 nt, Human
aucacaauacaga

SEQ ID NO: 2821480 - RNA, 14 nt, Human
aucacaauacagau

SEQ ID NO: 2821481 - RNA, 16 nt, Human
aucacaauacagauaa

SEQ ID NO: 2821482 - RNA, 15 nt, Human
aucacaauuuuuaau

SEQ ID NO: 2821483 - RNA, 16 nt, Human
aucacaauuuuuaaug

SEQ ID NO: 2821484 - RNA, 17 nt, Human
aucacaauuuuuaaugg

SEQ ID NO: 2821485 - RNA, 13 nt, Human
aucacguguacug

SEQ ID NO: 2821486 - RNA, 16 nt, Human
aucacguguacuggcu

SEQ ID NO: 2821487 - RNA, 19 nt, Human
aucacguguacuggcuccu

SEQ ID NO: 2821488 - RNA, 20 nt, Human
aucacuaauacuaauucauu

SEQ ID NO: 2821489 - RNA, 18 nt, Human
uuccuuuguguuucuauu

SEQ ID NO: 2821490 - RNA, 20 nt, Human
uuccuuugugguuuuaugga

SEQ ID NO: 2821491 - RNA, 13 nt, Human
uuccuuugugugu

SEQ ID NO: 2821492 - RNA, 20 nt, Human
uuccuuuuaaaacacuucca

SEQ ID NO: 2821493 - RNA, 21 nt, Human
uuccuuuuaaaacacuuccau

SEQ ID NO: 2821494 - RNA, 22 nt, Human
uuccuuuuaaaacacuuccaua

SEQ ID NO: 2821495 - RNA, 21 nt, Human
uuccuuuuaaguaagguccaa

SEQ ID NO: 2821496 - RNA, 15 nt, Human
aucacuguccuccac

SEQ ID NO: 2821497 - RNA, 14 nt, Human
aucacuagccuguc

SEQ ID NO: 2821498 - RNA, 14 nt, Human
aucacuguggcugu

SEQ ID NO: 2821499 - RNA, 15 nt, Human
aucacuguggcuguc

SEQ ID NO: 2821500 - RNA, 16 nt, Human
aucacuguggcugucu

SEQ ID NO: 2821501 - RNA, 17 nt, Human
aucacuguggcugucug

SEQ ID NO: 2821502 - RNA, 16 nt, Human
aucacuguucaugcug

SEQ ID NO: 2821503 - RNA, 17 nt, Human
uuccuuugggccucugc

SEQ ID NO: 2821504 - RNA, 16 nt, Human
uuccuuugucuucaaa

SEQ ID NO: 2821505 - RNA, 17 nt, Human
uuccuuugucuucaaac

SEQ ID NO: 2821506 - RNA, 18 nt, Human
aucaagaugucagacugg

SEQ ID NO: 2821507 - RNA, 13 nt, Human
aucaaucaaauaa

SEQ ID NO: 2821508 - RNA, 15 nt, Human
aucaaucaaauaagu

SEQ ID NO: 2821509 - RNA, 22 nt, Human
aucaauaguguccuaugcaaua

SEQ ID NO: 2821510 - RNA, 23 nt, Human
aucaauaguguccuaugcaauaa

SEQ ID NO: 2821511 - RNA, 15 nt, Human
aucaauaucuaauau

SEQ ID NO: 2821512 - RNA, 18 nt, Human
aucaauaucuaauauaua

SEQ ID NO: 2821513 - RNA, 13 nt, Human
aucaagacauagc

SEQ ID NO: 2821514 - RNA, 21 nt, Human
auauuuuguauauaucugcuu

SEQ ID NO: 2821515 - RNA, 13 nt, Human
auauuuuguauau

SEQ ID NO: 2821516 - RNA, 14 nt, Human
auauuuuguauaua

SEQ ID NO: 2821517 - RNA, 12 nt, Human
uuccucuuccaa

SEQ ID NO: 2821518 - RNA, 15 nt, Human
aucaagacuggaagg

SEQ ID NO: 2821519 - RNA, 15 nt, Human
aucaagagcugcccu

SEQ ID NO: 2821520 - RNA, 16 nt, Human
aucaagagcugcccuc

SEQ ID NO: 2821521 - RNA, 17 nt, Human
aucaagagcugcccucc

SEQ ID NO: 2821522 - RNA, 19 nt, Human
aucaagagcugcccuccuu

SEQ ID NO: 2821523 - RNA, 20 nt, Human
aucaagagcugcccuccuug

SEQ ID NO: 2821524 - RNA, 16 nt, Human
aucaagaggcugagac

SEQ ID NO: 2821525 - RNA, 17 nt, Human
aucaagaggcugagaca

SEQ ID NO: 2821526 - RNA, 22 nt, Human
aucaagaugagagaacuggagg

SEQ ID NO: 2821527 - RNA, 21 nt, Human
auauuuugcacaguuagcaaa

SEQ ID NO: 2821528 - RNA, 14 nt, Human
auauuuugauaaua

SEQ ID NO: 2821529 - RNA, 23 nt, Human
auauuuugauaauaaauugaaau

SEQ ID NO: 2821530 - RNA, 17 nt, Human
auauuuugauaauaaua

SEQ ID NO: 2821531 - RNA, 18 nt, Human
auauuuugauaauaauau

SEQ ID NO: 2821532 - RNA, 21 nt, Human
auauuuucuuuaaaagacaaa

SEQ ID NO: 2821533 - RNA, 16 nt, Human
uuccuaauaucaaaug

SEQ ID NO: 2821534 - RNA, 19 nt, Human
uuccuaauaucaaaugcag

SEQ ID NO: 2821535 - RNA, 17 nt, Human
uuccuaaucagaaauuu

SEQ ID NO: 2821536 - RNA, 20 nt, Human
uuccuaaucagaaauuuuua

SEQ ID NO: 2821537 - RNA, 23 nt, Human
uuccuaaucagaaauuuuuauca

SEQ ID NO: 2821538 - RNA, 19 nt, Human
uuccucuagugcccuccac

SEQ ID NO: 2821539 - RNA, 15 nt, Human
uuccucgccucuccc

SEQ ID NO: 2821540 - RNA, 17 nt, Human
uuccucgccucucccac

SEQ ID NO: 2821541 - RNA, 14 nt, Human
uuccuccuuuauca

SEQ ID NO: 2821542 - RNA, 17 nt, Human
uuccucuauacaucucu

SEQ ID NO: 2821543 - RNA, 20 nt, Human
uuccucuauacaucucuccc

SEQ ID NO: 2821544 - RNA, 22 nt, Human
uuccucuauacaucucucccca

SEQ ID NO: 2821545 - RNA, 23 nt, Human
uuccucuagugcccuccacagcc

SEQ ID NO: 2821546 - RNA, 13 nt, Human
uuccucuucccca

SEQ ID NO: 2821547 - RNA, 20 nt, Human
uuccucuucuauuuuguaaa

SEQ ID NO: 2821548 - RNA, 21 nt, Human
uuccucuguauugugcugauu

SEQ ID NO: 2821549 - RNA, 21 nt, Human
uuccucuguuucuccuucuga

SEQ ID NO: 2821550 - RNA, 14 nt, Human
uuccuguuaaugua

SEQ ID NO: 2821551 - RNA, 22 nt, Human
uuccuucagugcaucugggaag

SEQ ID NO: 2821552 - RNA, 13 nt, Human
auauuuucacaau

SEQ ID NO: 2821553 - RNA, 17 nt, Human
auauuuucacaauguca

SEQ ID NO: 2821554 - RNA, 14 nt, Human
auauuuucaguaau

SEQ ID NO: 2821555 - RNA, 19 nt, Human
auauuuucaacgcagcccu

SEQ ID NO: 2821556 - RNA, 20 nt, Human
auauuuucaacgcagcccug

SEQ ID NO: 2821557 - RNA, 15 nt, Human
uuccuucagcuucca

SEQ ID NO: 2821558 - RNA, 19 nt, Human
uuccuguuggauuuguuua

SEQ ID NO: 2821559 - RNA, 20 nt, Human
uuccuguuggauuuguuuaa

SEQ ID NO: 2821560 - RNA, 20 nt, Human
auauuucugcuuucuuugau

SEQ ID NO: 2821561 - RNA, 13 nt, Human
auauuucucuagu

SEQ ID NO: 2821562 - RNA, 15 nt, Human
auauuucgaaagcug

SEQ ID NO: 2821563 - RNA, 12 nt, Human
auauuuaaacuc

SEQ ID NO: 2821564 - RNA, 15 nt, Human
auauuuaaacucaag

SEQ ID NO: 2821565 - RNA, 23 nt, Human
auauuuaaacucaagacaaugca

SEQ ID NO: 2821566 - RNA, 14 nt, Human
auauuuaaagacag

SEQ ID NO: 2821567 - RNA, 14 nt, Human
auauuuaaaaaugu

SEQ ID NO: 2821568 - RNA, 15 nt, Human
auauuuaaaaauguc

SEQ ID NO: 2821569 - RNA, 16 nt, Human
auauuuaaaaaugucu

SEQ ID NO: 2821570 - RNA, 17 nt, Human
auauuuaaaaaugucuu

SEQ ID NO: 2821571 - RNA, 18 nt, Human
auauuuaaaaaugucuug

SEQ ID NO: 2821572 - RNA, 12 nt, Human
auauuuaaacag

SEQ ID NO: 2821573 - RNA, 14 nt, Human
auauuuaaacagca

SEQ ID NO: 2821574 - RNA, 18 nt, Human
auauuuaaacagcagugu

SEQ ID NO: 2821575 - RNA, 15 nt, Human
auauuguugacaacu

SEQ ID NO: 2821576 - RNA, 21 nt, Human
auauuguugacaacugugacu

SEQ ID NO: 2821577 - RNA, 13 nt, Human
auauuguuuuucu

SEQ ID NO: 2821578 - RNA, 17 nt, Human
auauuguuuuucuuucu

SEQ ID NO: 2821579 - RNA, 13 nt, Human
auauuguugacaa

SEQ ID NO: 2821580 - RNA, 14 nt, Human
auauuguuaaucuc

SEQ ID NO: 2821581 - RNA, 17 nt, Human
auauuguuaaucucugu

SEQ ID NO: 2821582 - RNA, 15 nt, Human
auauuguucaaacaa

SEQ ID NO: 2821583 - RNA, 18 nt, Human
auauuguucaaacaauau

SEQ ID NO: 2821584 - RNA, 20 nt, Human
auauuguucaaacaauauca

SEQ ID NO: 2821585 - RNA, 21 nt, Human
auauuguucaaacaauaucau

SEQ ID NO: 2821586 - RNA, 22 nt, Human
auauuguucaaacaauaucaua

SEQ ID NO: 2821587 - RNA, 21 nt, Human
auauuguguuuguguauuuac

SEQ ID NO: 2821588 - RNA, 17 nt, Human
auauuguguuuguguau

SEQ ID NO: 2821589 - RNA, 18 nt, Human
auauuguguugugaaugu

SEQ ID NO: 2821590 - RNA, 13 nt, Human
auauuguguuugu

SEQ ID NO: 2821591 - RNA, 17 nt, Human
auauuguguugugaaug

SEQ ID NO: 2821592 - RNA, 13 nt, Human
auauugaugaaaa

SEQ ID NO: 2821593 - RNA, 14 nt, Human
auauugaugaaaag

SEQ ID NO: 2821594 - RNA, 16 nt, Human
auauugcccaggcugg

SEQ ID NO: 2821595 - RNA, 17 nt, Human
auauugcccaggcuggu

SEQ ID NO: 2821596 - RNA, 13 nt, Human
auauuuguaggag

SEQ ID NO: 2821597 - RNA, 12 nt, Human
auauuuguaucg

SEQ ID NO: 2821598 - RNA, 14 nt, Human
auauuuguggaaua

SEQ ID NO: 2821599 - RNA, 17 nt, Human
auauuuguguauuuaac

SEQ ID NO: 2821600 - RNA, 17 nt, Human
auauuugugcuauagua

SEQ ID NO: 2821601 - RNA, 22 nt, Human
auauuugugcuauaguauuuga

SEQ ID NO: 2821602 - RNA, 19 nt, Human
auauuucuucguucuuuuu

SEQ ID NO: 2821603 - RNA, 15 nt, Human
auauuugaaaaaaac

SEQ ID NO: 2821604 - RNA, 23 nt, Human
auauuugaaaaaaacuucauucu

SEQ ID NO: 2821605 - RNA, 12 nt, Human
auauuuguacau

SEQ ID NO: 2821606 - RNA, 13 nt, Human
auauuuguacaua

SEQ ID NO: 2821607 - RNA, 18 nt, Human
auauuuguacuguuuaau

SEQ ID NO: 2821608 - RNA, 22 nt, Human
auauuuguacuguuuaauguuc

SEQ ID NO: 2821609 - RNA, 15 nt, Human
auauuuguaaggcuu

SEQ ID NO: 2821610 - RNA, 21 nt, Human
auauuuguaaggcuuguucca

SEQ ID NO: 2821611 - RNA, 13 nt, Human
auauuaaaucugc

SEQ ID NO: 2821612 - RNA, 12 nt, Human
auauuaaaucug

SEQ ID NO: 2821613 - RNA, 14 nt, Human
auauuaacaugcuu

SEQ ID NO: 2821614 - RNA, 14 nt, Human
uucauguggcugua

SEQ ID NO: 2821615 - RNA, 22 nt, Human
uucauguugcacacccacucag

SEQ ID NO: 2821616 - RNA, 21 nt, Human
uucaugugugccaaggcugau

SEQ ID NO: 2821617 - RNA, 16 nt, Human
uucauguuuugugacu

SEQ ID NO: 2821618 - RNA, 17 nt, Human
uucauguuuugugacua

SEQ ID NO: 2821619 - RNA, 18 nt, Human
uucauguuuugugacuau

SEQ ID NO: 2821620 - RNA, 14 nt, Human
uucauguuugcuuc

SEQ ID NO: 2821621 - RNA, 14 nt, Human
uucauguuuggugc

SEQ ID NO: 2821622 - RNA, 15 nt, Human
uucauguuuggugca

SEQ ID NO: 2821623 - RNA, 19 nt, Human
uucauguuuggugcauaga

SEQ ID NO: 2821624 - RNA, 22 nt, Human
uucauguuuggugcauagaacu

SEQ ID NO: 2821625 - RNA, 18 nt, Human
auauguuuuaagaggcag

SEQ ID NO: 2821626 - RNA, 20 nt, Human
auauguuuuaagaggcaggg

SEQ ID NO: 2821627 - RNA, 17 nt, Human
auauguuuuuaaaggug

SEQ ID NO: 2821628 - RNA, 15 nt, Human
auauguuuuauuuca

SEQ ID NO: 2821629 - RNA, 13 nt, Human
auauguuuccuug

SEQ ID NO: 2821630 - RNA, 18 nt, Human
auauguuuccuuguuuau

SEQ ID NO: 2821631 - RNA, 20 nt, Human
auauguuuccuuguuuauca

SEQ ID NO: 2821632 - RNA, 16 nt, Human
auauucuguuggccag

SEQ ID NO: 2821633 - RNA, 13 nt, Human
auauucuuauaaa

SEQ ID NO: 2821634 - RNA, 21 nt, Human
auauucuggccagacucgaug

SEQ ID NO: 2821635 - RNA, 24 nt, Human
auauucugaagcaacauuuuagcu

SEQ ID NO: 2821636 - RNA, 16 nt, Human
auauugauuguccuuu

SEQ ID NO: 2821637 - RNA, 18 nt, Human
auauugaauauaauauau

SEQ ID NO: 2821638 - RNA, 14 nt, Human
auauugaagacaau

SEQ ID NO: 2821639 - RNA, 15 nt, Human
auauugaagacaauu

SEQ ID NO: 2821640 - RNA, 16 nt, Human
auauugaagacaauuu

SEQ ID NO: 2821641 - RNA, 17 nt, Human
auauugaagacaauuug

SEQ ID NO: 2821642 - RNA, 20 nt, Human
auauugaagacaauuugaua

SEQ ID NO: 2821643 - RNA, 21 nt, Human
auauugaagacaauuugauac

SEQ ID NO: 2821644 - RNA, 12 nt, Human
auauucuuguca

SEQ ID NO: 2821645 - RNA, 13 nt, Human
auauucuugucaa

SEQ ID NO: 2821646 - RNA, 15 nt, Human
auauucuugugcuuu

SEQ ID NO: 2821647 - RNA, 21 nt, Human
auauucuuuucugcaaaauag

SEQ ID NO: 2821648 - RNA, 13 nt, Human
auauugaaaaaaa

SEQ ID NO: 2821649 - RNA, 16 nt, Human
auauugaaaaaaauaa

SEQ ID NO: 2821650 - RNA, 13 nt, Human
uucugcauugcua

SEQ ID NO: 2821651 - RNA, 16 nt, Human
uucugcauugcuagau

SEQ ID NO: 2821652 - RNA, 20 nt, Human
uucugcauugcuagauaaaa

SEQ ID NO: 2821653 - RNA, 22 nt, Human
uucugcauugcuagauaaaagc

SEQ ID NO: 2821654 - RNA, 19 nt, Human
uucugaaaguuacccacug

SEQ ID NO: 2821655 - RNA, 18 nt, Human
uucucuuaaacuugugaa

SEQ ID NO: 2821656 - RNA, 22 nt, Human
uucucuuuucuaguuugcucau

SEQ ID NO: 2821657 - RNA, 13 nt, Human
uucugaaaagaaa

SEQ ID NO: 2821658 - RNA, 15 nt, Human
uucugaaaagaaaua

SEQ ID NO: 2821659 - RNA, 17 nt, Human
uucugaaaagaaauaau

SEQ ID NO: 2821660 - RNA, 19 nt, Human
uucucugugacccacuucu

SEQ ID NO: 2821661 - RNA, 16 nt, Human
uucucugugucuaaga

SEQ ID NO: 2821662 - RNA, 17 nt, Human
uucucugugucuaagau

SEQ ID NO: 2821663 - RNA, 18 nt, Human
uucucugugucuaagauu

SEQ ID NO: 2821664 - RNA, 23 nt, Human
uucucuguucuacccguuccaaa

SEQ ID NO: 2821665 - RNA, 20 nt, Human
uucucugugucuaagauucu

SEQ ID NO: 2821666 - RNA, 21 nt, Human
uucucugugucuaagauucua

SEQ ID NO: 2821667 - RNA, 22 nt, Human
uucucugugucuaagauucuag

SEQ ID NO: 2821668 - RNA, 23 nt, Human
uucucugugucuaagauucuaga

SEQ ID NO: 2821669 - RNA, 14 nt, Human
uucuguaaauacca

SEQ ID NO: 2821670 - RNA, 23 nt, Human
uucuguaaauaccauugacacau

SEQ ID NO: 2821671 - RNA, 21 nt, Human
uucuggucucuaggcugggga

SEQ ID NO: 2821672 - RNA, 18 nt, Human
uucuggguggccucggga

SEQ ID NO: 2821673 - RNA, 14 nt, Human
uucuggguggccuc

SEQ ID NO: 2821674 - RNA, 16 nt, Human
uucugggucuuuugcu

SEQ ID NO: 2821675 - RNA, 17 nt, Human
uucugggucuuuugcua

SEQ ID NO: 2821676 - RNA, 15 nt, Human
uucugggguccccag

SEQ ID NO: 2821677 - RNA, 22 nt, Human
uucugggacacaguucaauucu

SEQ ID NO: 2821678 - RNA, 11 nt, Human
uucugggacac

SEQ ID NO: 2821679 - RNA, 10 nt, Human
uucugggaca

SEQ ID NO: 2821680 - RNA, 17 nt, Human
uucugccucucuaggac

SEQ ID NO: 2821681 - RNA, 18 nt, Human
uucugccucucuaggacc

SEQ ID NO: 2821682 - RNA, 22 nt, Human
uucugccgcccccuccugaacc

SEQ ID NO: 2821683 - RNA, 21 nt, Human
uucugccgcccccuccugaac

SEQ ID NO: 2821684 - RNA, 15 nt, Human
uucugccgcccccuc

SEQ ID NO: 2821685 - RNA, 17 nt, Human
aucccucgauauuuuua

SEQ ID NO: 2821686 - RNA, 20 nt, Human
aucccucgauauuuuuaaag

SEQ ID NO: 2821687 - RNA, 24 nt, Human
aucccucgauauuuuuaaagaucu

SEQ ID NO: 2821688 - RNA, 15 nt, Human
aucccuccccaguuc

SEQ ID NO: 2821689 - RNA, 16 nt, Human
aucccuccccaguuca

SEQ ID NO: 2821690 - RNA, 17 nt, Human
aucccaggggcccaagg

SEQ ID NO: 2821691 - RNA, 19 nt, Human
aucccaggggcccaaggcg

SEQ ID NO: 2821692 - RNA, 16 nt, Human
aucccugucuuuccua

SEQ ID NO: 2821693 - RNA, 12 nt, Human
aucccugugagg

SEQ ID NO: 2821694 - RNA, 13 nt, Human
aucccuguuuaau

SEQ ID NO: 2821695 - RNA, 14 nt, Human
aucccuguuuaaua

SEQ ID NO: 2821696 - RNA, 15 nt, Human
aucccuguuuaauau

SEQ ID NO: 2821697 - RNA, 16 nt, Human
aucccuguuuaauauu

SEQ ID NO: 2821698 - RNA, 22 nt, Human
aucccuguuuaauauuuaaaca

SEQ ID NO: 2821699 - RNA, 23 nt, Human
aucccuguuuaauauuuaaacag

SEQ ID NO: 2821700 - RNA, 17 nt, Human
aucccuguuuaauauuu

SEQ ID NO: 2821701 - RNA, 18 nt, Human
aucccuguuuaauauuua

SEQ ID NO: 2821702 - RNA, 20 nt, Human
aucccuguuuaauauuuaaa

SEQ ID NO: 2821703 - RNA, 21 nt, Human
aucccuguuuaauauuuaaac

SEQ ID NO: 2821704 - RNA, 23 nt, Human
aucccucuaaugagacugaccau

SEQ ID NO: 2821705 - RNA, 14 nt, Human
aucccucucuggau

SEQ ID NO: 2821706 - RNA, 16 nt, Human
aucccucucuggauug

SEQ ID NO: 2821707 - RNA, 15 nt, Human
aucccugccugguca

SEQ ID NO: 2821708 - RNA, 13 nt, Human
uucuguacuuccu

SEQ ID NO: 2821709 - RNA, 15 nt, Human
uucuguacuuccuga

SEQ ID NO: 2821710 - RNA, 17 nt, Human
uucuguacuuccugagu

SEQ ID NO: 2821711 - RNA, 14 nt, Human
aucauuugaggaau

SEQ ID NO: 2821712 - RNA, 18 nt, Human
aucauuuguuggaaugaa

SEQ ID NO: 2821713 - RNA, 13 nt, Human
aucauuugcuuuu

SEQ ID NO: 2821714 - RNA, 16 nt, Human
auccagguucagcuug

SEQ ID NO: 2821715 - RNA, 15 nt, Human
auccagguucagcuu

SEQ ID NO: 2821716 - RNA, 17 nt, Human
auccaggguggugguga

SEQ ID NO: 2821717 - RNA, 15 nt, Human
auccagguacgcaca

SEQ ID NO: 2821718 - RNA, 16 nt, Human
auccagguacgcacag

SEQ ID NO: 2821719 - RNA, 17 nt, Human
auccagguacgcacaga

SEQ ID NO: 2821720 - RNA, 19 nt, Human
auccagguacgcacagaca

SEQ ID NO: 2821721 - RNA, 20 nt, Human
auccagguacgcacagacag

SEQ ID NO: 2821722 - RNA, 21 nt, Human
auccagguacgcacagacagg

SEQ ID NO: 2821723 - RNA, 22 nt, Human
auccagguacgcacagacaggu

SEQ ID NO: 2821724 - RNA, 14 nt, Human
auccaggucaacag

SEQ ID NO: 2821725 - RNA, 15 nt, Human
auccaggucaacaga

SEQ ID NO: 2821726 - RNA, 16 nt, Human
auccaggucaacagaa

SEQ ID NO: 2821727 - RNA, 17 nt, Human
auccaggucaacagaau

SEQ ID NO: 2821728 - RNA, 19 nt, Human
auccaggucaacagaauga

SEQ ID NO: 2821729 - RNA, 20 nt, Human
auccaggucaacagaaugaa

SEQ ID NO: 2821730 - RNA, 21 nt, Human
auccaggucaacagaaugaaa

SEQ ID NO: 2821731 - RNA, 23 nt, Human
auccaggucaacagaaugaaaaa

SEQ ID NO: 2821732 - RNA, 15 nt, Human
aucccaaccagugcc

SEQ ID NO: 2821733 - RNA, 16 nt, Human
aucccaaccagugcca

SEQ ID NO: 2821734 - RNA, 17 nt, Human
aucccaaccagugccaa

SEQ ID NO: 2821735 - RNA, 19 nt, Human
aucccaaccagugccaagg

SEQ ID NO: 2821736 - RNA, 20 nt, Human
aucccaaccagugccaagga

SEQ ID NO: 2821737 - RNA, 21 nt, Human
aucccaaccagugccaaggac

SEQ ID NO: 2821738 - RNA, 19 nt, Human
aucauuuguucugggagua

SEQ ID NO: 2821739 - RNA, 15 nt, Human
aucccaacagccaug

SEQ ID NO: 2821740 - RNA, 22 nt, Human
aucccaggacaccacacccagc

SEQ ID NO: 2821741 - RNA, 23 nt, Human
aucccaggaucgcaagagccaug

SEQ ID NO: 2821742 - RNA, 19 nt, Human
aucccaggaugcugggugg

SEQ ID NO: 2821743 - RNA, 17 nt, Human
aucccaggauguacaag

SEQ ID NO: 2821744 - RNA, 16 nt, Human
auccauguuuguaaaa

SEQ ID NO: 2821745 - RNA, 17 nt, Human
auccauucccaagaaau

SEQ ID NO: 2821746 - RNA, 19 nt, Human
auccauucccaagaaaugc

SEQ ID NO: 2821747 - RNA, 18 nt, Human
auccauguccuaugugug

SEQ ID NO: 2821748 - RNA, 19 nt, Human
auccauguccuauguguga

SEQ ID NO: 2821749 - RNA, 14 nt, Human
uucuaguuugcauu

SEQ ID NO: 2821750 - RNA, 15 nt, Human
uucuaguuugcauuc

SEQ ID NO: 2821751 - RNA, 15 nt, Human
uucuaguuugcucau

SEQ ID NO: 2821752 - RNA, 14 nt, Human
uucuauaacagaua

SEQ ID NO: 2821753 - RNA, 15 nt, Human
uucuauaacagauau

SEQ ID NO: 2821754 - RNA, 13 nt, Human
uucuauaaggcca

SEQ ID NO: 2821755 - RNA, 21 nt, Human
uucuauaaggccauaaaacag

SEQ ID NO: 2821756 - RNA, 14 nt, Human
uucuauaaggccau

SEQ ID NO: 2821757 - RNA, 18 nt, Human
uucucaaugaaaaauagu

SEQ ID NO: 2821758 - RNA, 14 nt, Human
uucucaaugaaaaa

SEQ ID NO: 2821759 - RNA, 13 nt, Human
uucucaaugaaaa

SEQ ID NO: 2821760 - RNA, 12 nt, Human
uucucaaugaaa

SEQ ID NO: 2821761 - RNA, 11 nt, Human
uucucaaugaa

SEQ ID NO: 2821762 - RNA, 23 nt, Human
uucucaaguucuaagauucuaau

SEQ ID NO: 2821763 - RNA, 13 nt, Human
uucucaaguucua

SEQ ID NO: 2821764 - RNA, 14 nt, Human
uucucaaguucuaa

SEQ ID NO: 2821765 - RNA, 16 nt, Human
uucucaaguucuaaga

SEQ ID NO: 2821766 - RNA, 17 nt, Human
uucucaaguucuaagau

SEQ ID NO: 2821767 - RNA, 18 nt, Human
uucucaaguucuaagauu

SEQ ID NO: 2821768 - RNA, 20 nt, Human
uucucaaguucuaagauucu

SEQ ID NO: 2821769 - RNA, 22 nt, Human
uucucaaguucuaagauucuaa

SEQ ID NO: 2821770 - RNA, 22 nt, Human
uucucaacaaagcacaguguua

SEQ ID NO: 2821771 - RNA, 23 nt, Human
uucuauaaggccauaaaacaggu

SEQ ID NO: 2821772 - RNA, 21 nt, Human
uucucaacaaagcacaguguu

SEQ ID NO: 2821773 - RNA, 21 nt, Human
uucuaggcacuguaguucuaa

SEQ ID NO: 2821774 - RNA, 23 nt, Human
uucuaggcacuguaguucuaaga

SEQ ID NO: 2821775 - RNA, 16 nt, Human
uucuaggcaucucugu

SEQ ID NO: 2821776 - RNA, 19 nt, Human
uucuaggcaucucuguacu

SEQ ID NO: 2821777 - RNA, 20 nt, Human
uucuaggcaucucuguacuu

SEQ ID NO: 2821778 - RNA, 14 nt, Human
uucuagggcuggga

SEQ ID NO: 2821779 - RNA, 16 nt, Human
uucuagggcugggaaa

SEQ ID NO: 2821780 - RNA, 19 nt, Human
uucuagggcugggaaacac

SEQ ID NO: 2821781 - RNA, 20 nt, Human
uucuagggcugggaaacacu

SEQ ID NO: 2821782 - RNA, 23 nt, Human
uucuagggcugggaaacacuccu

SEQ ID NO: 2821783 - RNA, 18 nt, Human
uucuagguggcaaggcug

SEQ ID NO: 2821784 - RNA, 17 nt, Human
uucuagguuucaaagau

SEQ ID NO: 2821785 - RNA, 23 nt, Human
uucuagguggcaaggcugugcuc

SEQ ID NO: 2821786 - RNA, 13 nt, Human
uucuagguuucaa

SEQ ID NO: 2821787 - RNA, 20 nt, Human
uucuagguuucaaagaugcu

SEQ ID NO: 2821788 - RNA, 16 nt, Human
uuccuuuuuucaaaau

SEQ ID NO: 2821789 - RNA, 18 nt, Human
uuccuuuuuaugaggcaa

SEQ ID NO: 2821790 - RNA, 15 nt, Human
uuccuuuuucugauu

SEQ ID NO: 2821791 - RNA, 21 nt, Human
uuccuuuuucugauuagcuuu

SEQ ID NO: 2821792 - RNA, 22 nt, Human
uuccuuuuucugauuagcuuug

SEQ ID NO: 2821793 - RNA, 20 nt, Human
uuccuuuucuauuccuucug

SEQ ID NO: 2821794 - RNA, 21 nt, Human
uuccuuuucuauuccuucugg

SEQ ID NO: 2821795 - RNA, 13 nt, Human
uuccuuuucuuua

SEQ ID NO: 2821796 - RNA, 19 nt, Human
uucucagugccaacugugg

SEQ ID NO: 2821797 - RNA, 21 nt, Human
uucucagugccaacuguggcu

SEQ ID NO: 2821798 - RNA, 22 nt, Human
uucucagugccaacuguggcug

SEQ ID NO: 2821799 - RNA, 23 nt, Human
uucucagugccaacuguggcugg

SEQ ID NO: 2821800 - RNA, 15 nt, Human
uucucaguuuguaua

SEQ ID NO: 2821801 - RNA, 12 nt, Human
uucucacagcac

SEQ ID NO: 2821802 - RNA, 21 nt, Human
uucucacagcacaugcuggcc

SEQ ID NO: 2821803 - RNA, 22 nt, Human
uucucacagcacaugcuggcca

SEQ ID NO: 2821804 - RNA, 16 nt, Human
uucucauaauuccuac

SEQ ID NO: 2821805 - RNA, 17 nt, Human
uucucauaauuccuaca

SEQ ID NO: 2821806 - RNA, 18 nt, Human
uucucauaauuccuacag

SEQ ID NO: 2821807 - RNA, 19 nt, Human
uucucauaauuccuacagc

SEQ ID NO: 2821808 - RNA, 20 nt, Human
uucucauaauuccuacagca

SEQ ID NO: 2821809 - RNA, 23 nt, Human
uucucauaauuccuacagcacua

SEQ ID NO: 2821810 - RNA, 22 nt, Human
aucagagacaaaauauuuccca

SEQ ID NO: 2821811 - RNA, 13 nt, Human
aucagagaccagg

SEQ ID NO: 2821812 - RNA, 19 nt, Human
aucagagaccaggcccugg

SEQ ID NO: 2821813 - RNA, 15 nt, Human
aucagaguagaaaua

SEQ ID NO: 2821814 - RNA, 18 nt, Human
aucagaguagaaauaaaa

SEQ ID NO: 2821815 - RNA, 20 nt, Human
aucagaguagaaauaaaagu

SEQ ID NO: 2821816 - RNA, 21 nt, Human
aucagaguagaaauaaaagug

SEQ ID NO: 2821817 - RNA, 23 nt, Human
aucagaguagaaauaaaagugaa

SEQ ID NO: 2821818 - RNA, 14 nt, Human
aucagagcaggacc

SEQ ID NO: 2821819 - RNA, 15 nt, Human
aucagagcaggaccu

SEQ ID NO: 2821820 - RNA, 16 nt, Human
aucagagcaggaccuc

SEQ ID NO: 2821821 - RNA, 13 nt, Human
aucagagcuccuc

SEQ ID NO: 2821822 - RNA, 20 nt, Human
aucagagcuccucuguccug

SEQ ID NO: 2821823 - RNA, 21 nt, Human
aucagagcuccucuguccugc

SEQ ID NO: 2821824 - RNA, 14 nt, Human
aucagaaauuuuua

SEQ ID NO: 2821825 - RNA, 15 nt, Human
aucagaaauuuuuau

SEQ ID NO: 2821826 - RNA, 23 nt, Human
aucagaagaccacaaaaauugac

SEQ ID NO: 2821827 - RNA, 12 nt, Human
aucagaagagag

SEQ ID NO: 2821828 - RNA, 22 nt, Human
aucagaagaccacaaaaauuga

SEQ ID NO: 2821829 - RNA, 15 nt, Human
uucucaucacacaca

SEQ ID NO: 2821830 - RNA, 16 nt, Human
uucucaucacacacau

SEQ ID NO: 2821831 - RNA, 20 nt, Human
aucagaugcuccaagauucu

SEQ ID NO: 2821832 - RNA, 15 nt, Human
aucaguauuaauacu

SEQ ID NO: 2821833 - RNA, 17 nt, Human
aucaguauuaauacuaa

SEQ ID NO: 2821834 - RNA, 22 nt, Human
aucaguauuaauacuaaaauau

SEQ ID NO: 2821835 - RNA, 23 nt, Human
aucaguauuaauacuaaaauaug

SEQ ID NO: 2821836 - RNA, 13 nt, Human
aucagucaauauu

SEQ ID NO: 2821837 - RNA, 15 nt, Human
aucagauaagacaua

SEQ ID NO: 2821838 - RNA, 19 nt, Human
aucagauaagacauaucuc

SEQ ID NO: 2821839 - RNA, 22 nt, Human
aucagauaagacauaucucuaa

SEQ ID NO: 2821840 - RNA, 12 nt, Human
aucagauacauc

SEQ ID NO: 2821841 - RNA, 13 nt, Human
aucagauacauca

SEQ ID NO: 2821842 - RNA, 14 nt, Human
aucagauacaucac

SEQ ID NO: 2821843 - RNA, 15 nt, Human
aucagauacaucacu

SEQ ID NO: 2821844 - RNA, 16 nt, Human
aucagauacaucacug

SEQ ID NO: 2821845 - RNA, 17 nt, Human
aucagauacaucacugc

SEQ ID NO: 2821846 - RNA, 23 nt, Human
aucagaugaacucuuagaaauga

SEQ ID NO: 2821847 - RNA, 22 nt, Human
aucagaugaacucuuagaaaug

SEQ ID NO: 2821848 - RNA, 19 nt, Human
aucagugugucuaaauuug

SEQ ID NO: 2821849 - RNA, 20 nt, Human
aucagugugucuaaauuuga

SEQ ID NO: 2821850 - RNA, 13 nt, Human
aucauaaggcuuc

SEQ ID NO: 2821851 - RNA, 15 nt, Human
aucauagaaauguaa

SEQ ID NO: 2821852 - RNA, 12 nt, Human
aucauagaaaug

SEQ ID NO: 2821853 - RNA, 15 nt, Human
aucauaagugaauuu

SEQ ID NO: 2821854 - RNA, 16 nt, Human
aucauaagugaauuua

SEQ ID NO: 2821855 - RNA, 17 nt, Human
aucauaagugaauuuau

SEQ ID NO: 2821856 - RNA, 18 nt, Human
aucauaagugaauuuaua

SEQ ID NO: 2821857 - RNA, 19 nt, Human
aucauaagugaauuuauac

SEQ ID NO: 2821858 - RNA, 19 nt, Human
aucaguguaccauuugccu

SEQ ID NO: 2821859 - RNA, 17 nt, Human
aucagugggauuuggua

SEQ ID NO: 2821860 - RNA, 18 nt, Human
aucagugggcaggauaaa

SEQ ID NO: 2821861 - RNA, 20 nt, Human
aucagugggcaggauaaacu

SEQ ID NO: 2821862 - RNA, 21 nt, Human
aucagugggcaggauaaacug

SEQ ID NO: 2821863 - RNA, 22 nt, Human
aucagugggcaggauaaacuga

SEQ ID NO: 2821864 - RNA, 13 nt, Human
aucaguggagcca

SEQ ID NO: 2821865 - RNA, 21 nt, Human
aucagucccuauguauuugca

SEQ ID NO: 2821866 - RNA, 16 nt, Human
aucagucccuauguau

SEQ ID NO: 2821867 - RNA, 13 nt, Human
aucauucccucuc

SEQ ID NO: 2821868 - RNA, 15 nt, Human
aucauucccucucau

SEQ ID NO: 2821869 - RNA, 22 nt, Human
aucauucccucucaucucaggu

SEQ ID NO: 2821870 - RNA, 12 nt, Human
aucauucaucuu

SEQ ID NO: 2821871 - RNA, 21 nt, Human
aucauucaucuucuucuuuaa

SEQ ID NO: 2821872 - RNA, 23 nt, Human
aucauucacggagauaugaagag

SEQ ID NO: 2821873 - RNA, 14 nt, Human
aucauguuuuggug

SEQ ID NO: 2821874 - RNA, 17 nt, Human
aucauguuuuggugaaa

SEQ ID NO: 2821875 - RNA, 19 nt, Human
aucauguuuuggugaaaau

SEQ ID NO: 2821876 - RNA, 21 nt, Human
aucauuaaaagaacauaaguu

SEQ ID NO: 2821877 - RNA, 18 nt, Human
aucauagguauuucaaaa

SEQ ID NO: 2821878 - RNA, 16 nt, Human
aucauagguauuucaa

SEQ ID NO: 2821879 - RNA, 17 nt, Human
aucauagguauuucaaa

SEQ ID NO: 2821880 - RNA, 13 nt, Human
aucauaugugauc

SEQ ID NO: 2821881 - RNA, 18 nt, Human
aucauaugugaucugucu

SEQ ID NO: 2821882 - RNA, 22 nt, Human
aucauaugugaucugucuugua

SEQ ID NO: 2821883 - RNA, 21 nt, Human
aucauauugguauucacuaau

SEQ ID NO: 2821884 - RNA, 20 nt, Human
aucaucaacaagauuuccuu

SEQ ID NO: 2821885 - RNA, 13 nt, Human
aucauauugauga

SEQ ID NO: 2821886 - RNA, 14 nt, Human
aucauauugaugaa

SEQ ID NO: 2821887 - RNA, 17 nt, Human
aucauauugaugaaaag

SEQ ID NO: 2821888 - RNA, 18 nt, Human
aucauauugaugaaaaga

SEQ ID NO: 2821889 - RNA, 18 nt, Human
aucaucaaggcacugccu

SEQ ID NO: 2821890 - RNA, 13 nt, Human
aucaucaaggcac

SEQ ID NO: 2821891 - RNA, 11 nt, Human
aucauguuguu

SEQ ID NO: 2821892 - RNA, 21 nt, Human
aucauguuguuaaaauuauga

SEQ ID NO: 2821893 - RNA, 13 nt, Human
aucaucagggccu

SEQ ID NO: 2821894 - RNA, 14 nt, Human
aucaucagggccug

SEQ ID NO: 2821895 - RNA, 15 nt, Human
aucaucagggccugg

SEQ ID NO: 2821896 - RNA, 19 nt, Human
aucaucaaggcacugccug

SEQ ID NO: 2821897 - RNA, 17 nt, Human
auagcugggacuacagg

SEQ ID NO: 2821898 - RNA, 18 nt, Human
auagcugcauguggcuuu

SEQ ID NO: 2821899 - RNA, 19 nt, Human
auagcugcccauuucguga

SEQ ID NO: 2821900 - RNA, 21 nt, Human
auagcugcccauuucgugagc

SEQ ID NO: 2821901 - RNA, 16 nt, Human
auagcuggcaagaaug

SEQ ID NO: 2821902 - RNA, 17 nt, Human
auagcuggcaagaaugg

SEQ ID NO: 2821903 - RNA, 10 nt, Human
uuauuuaaua

SEQ ID NO: 2821904 - RNA, 12 nt, Human
uuauuuaauaac

SEQ ID NO: 2821905 - RNA, 13 nt, Human
uuauuuaauaaca

SEQ ID NO: 2821906 - RNA, 14 nt, Human
uuauuuaauaacaa

SEQ ID NO: 2821907 - RNA, 14 nt, Human
uuauuuaauaacau

SEQ ID NO: 2821908 - RNA, 15 nt, Human
uuauuuaauaacauu

SEQ ID NO: 2821909 - RNA, 14 nt, Human
uuauuuaaagcauu

SEQ ID NO: 2821910 - RNA, 13 nt, Human
uuauuuaaaagau

SEQ ID NO: 2821911 - RNA, 17 nt, Human
uuauuuaaaagauucau

SEQ ID NO: 2821912 - RNA, 18 nt, Human
uuauuuaaaagauucauu

SEQ ID NO: 2821913 - RNA, 14 nt, Human
uuauuuaaaagauu

SEQ ID NO: 2821914 - RNA, 15 nt, Human
uuauuuaaaagauuc

SEQ ID NO: 2821915 - RNA, 16 nt, Human
uuauuuaaaagauuca

SEQ ID NO: 2821916 - RNA, 18 nt, Human
uuauuuagacucaucuua

SEQ ID NO: 2821917 - RNA, 15 nt, Human
uuauuuaaugugagu

SEQ ID NO: 2821918 - RNA, 18 nt, Human
uuauuuauauguacuguu

SEQ ID NO: 2821919 - RNA, 17 nt, Human
uuauuuauauguacugu

SEQ ID NO: 2821920 - RNA, 21 nt, Human
uuauuuauauguacuguuuua

SEQ ID NO: 2821921 - RNA, 15 nt, Human
uuauuuauauguacu

SEQ ID NO: 2821922 - RNA, 14 nt, Human
uuauuuauauguac

SEQ ID NO: 2821923 - RNA, 21 nt, Human
uuauuuauauggggaauauau

SEQ ID NO: 2821924 - RNA, 15 nt, Human
uuauuuaguauuuau

SEQ ID NO: 2821925 - RNA, 14 nt, Human
uuauuuauagucau

SEQ ID NO: 2821926 - RNA, 17 nt, Human
uuauuuagacucaucuu

SEQ ID NO: 2821927 - RNA, 23 nt, Human
uuauuuagacucaucuuacugua

SEQ ID NO: 2821928 - RNA, 12 nt, Human
uuauuuagagau

SEQ ID NO: 2821929 - RNA, 17 nt, Human
uuauuuagcaccaggga

SEQ ID NO: 2821930 - RNA, 15 nt, Human
uuauuuacagaugaa

SEQ ID NO: 2821931 - RNA, 20 nt, Human
uuauuuacagaugaauguau

SEQ ID NO: 2821932 - RNA, 19 nt, Human
uuauuuaauaacauuaccu

SEQ ID NO: 2821933 - RNA, 17 nt, Human
uuauuuacuaauuuucu

SEQ ID NO: 2821934 - RNA, 13 nt, Human
uuauuuauguacu

SEQ ID NO: 2821935 - RNA, 16 nt, Human
uuauuuauguacuuuu

SEQ ID NO: 2821936 - RNA, 15 nt, Human
uuauuuaugaaguuu

SEQ ID NO: 2821937 - RNA, 17 nt, Human
uuauuuauucagcuuca

SEQ ID NO: 2821938 - RNA, 22 nt, Human
uuauuuauucagcuucauuugu

SEQ ID NO: 2821939 - RNA, 15 nt, Human
uuauuuauuggagau

SEQ ID NO: 2821940 - RNA, 13 nt, Human
uuauuuauuuaau

SEQ ID NO: 2821941 - RNA, 18 nt, Human
uuauuuccaguguucuau

SEQ ID NO: 2821942 - RNA, 20 nt, Human
uuauuuccaguguucuauga

SEQ ID NO: 2821943 - RNA, 21 nt, Human
uuauuuccaucaugucagagc

SEQ ID NO: 2821944 - RNA, 17 nt, Human
uuauuuccaaauaaaau

SEQ ID NO: 2821945 - RNA, 19 nt, Human
uuauuuccaaauaaaauga

SEQ ID NO: 2821946 - RNA, 14 nt, Human
uuauuuauuuaaua

SEQ ID NO: 2821947 - RNA, 14 nt, Human
uuauuucacuugau

SEQ ID NO: 2821948 - RNA, 18 nt, Human
uuauuucacaaauaauag

SEQ ID NO: 2821949 - RNA, 23 nt, Human
uuauuucacacgcuguucuaaug

SEQ ID NO: 2821950 - RNA, 17 nt, Human
uuauuucagauuuugau

SEQ ID NO: 2821951 - RNA, 18 nt, Human
uuauuucagauuuugaua

SEQ ID NO: 2821952 - RNA, 19 nt, Human
uuauuucagauuuugauaa

SEQ ID NO: 2821953 - RNA, 23 nt, Human
uuauuucagauuuugauaacugu

SEQ ID NO: 2821954 - RNA, 16 nt, Human
auagcuacaggaagca

SEQ ID NO: 2821955 - RNA, 14 nt, Human
auagcuacccaaaa

SEQ ID NO: 2821956 - RNA, 16 nt, Human
auagcuacccaaaaga

SEQ ID NO: 2821957 - RNA, 19 nt, Human
auagcuacccaaaagagaa

SEQ ID NO: 2821958 - RNA, 21 nt, Human
auagcuacccaaaagagaaaa

SEQ ID NO: 2821959 - RNA, 15 nt, Human
auagcuacaggaagc

SEQ ID NO: 2821960 - RNA, 19 nt, Human
auagcucaggugucccugc

SEQ ID NO: 2821961 - RNA, 14 nt, Human
auagcuauuacugu

SEQ ID NO: 2821962 - RNA, 14 nt, Human
auagcuccuuuuga

SEQ ID NO: 2821963 - RNA, 12 nt, Human
auagcugggacu

SEQ ID NO: 2821964 - RNA, 21 nt, Human
auagcucaggugucccugcac

SEQ ID NO: 2821965 - RNA, 20 nt, Human
auagcucaggugucccugca

SEQ ID NO: 2821966 - RNA, 22 nt, Human
auagcucaggugucccugcacu

SEQ ID NO: 2821967 - RNA, 18 nt, Human
auagcuauuacugucugg

SEQ ID NO: 2821968 - RNA, 22 nt, Human
auagcuauuacugucugguuuu

SEQ ID NO: 2821969 - RNA, 22 nt, Human
auagcuaacauuuuaaauaaaa

SEQ ID NO: 2821970 - RNA, 23 nt, Human
auagcuaacauuuuaaauaaaag

SEQ ID NO: 2821971 - RNA, 15 nt, Human
auagcuaacauuuua

SEQ ID NO: 2821972 - RNA, 18 nt, Human
auagcuaaguacacaaua

SEQ ID NO: 2821973 - RNA, 17 nt, Human
auagcuaauaauguuaa

SEQ ID NO: 2821974 - RNA, 15 nt, Human
auagcuaaguacaca

SEQ ID NO: 2821975 - RNA, 14 nt, Human
auagcuaaguacac

SEQ ID NO: 2821976 - RNA, 13 nt, Human
auagcuaaguaca

SEQ ID NO: 2821977 - RNA, 11 nt, Human
auagccugugg

SEQ ID NO: 2821978 - RNA, 12 nt, Human
auagccuguggc

SEQ ID NO: 2821979 - RNA, 13 nt, Human
auagccuguggcc

SEQ ID NO: 2821980 - RNA, 20 nt, Human
auagcggguuacuuucacau

SEQ ID NO: 2821981 - RNA, 21 nt, Human
auagcgcuguuuuuguugugu

SEQ ID NO: 2821982 - RNA, 18 nt, Human
uuacuguaaccuguugcu

SEQ ID NO: 2821983 - RNA, 17 nt, Human
auaacuuugacuuucuu

SEQ ID NO: 2821984 - RNA, 14 nt, Human
auaagagcaugaaa

SEQ ID NO: 2821985 - RNA, 22 nt, Human
auaagagcaugaaauuuuuaaa

SEQ ID NO: 2821986 - RNA, 17 nt, Human
auaagagggcacacacu

SEQ ID NO: 2821987 - RNA, 19 nt, Human
auaagagggcacacacugu

SEQ ID NO: 2821988 - RNA, 16 nt, Human
auaacuucaagcaaac

SEQ ID NO: 2821989 - RNA, 12 nt, Human
auaacuucaguc

SEQ ID NO: 2821990 - RNA, 13 nt, Human
auaacuucagucc

SEQ ID NO: 2821991 - RNA, 14 nt, Human
auaacuucaguccu

SEQ ID NO: 2821992 - RNA, 20 nt, Human
auaacuucaguccugcucca

SEQ ID NO: 2821993 - RNA, 22 nt, Human
auaacuucaguccugcuccaga

SEQ ID NO: 2821994 - RNA, 12 nt, Human
auaacuuccugu

SEQ ID NO: 2821995 - RNA, 11 nt, Human
auaacuucuga

SEQ ID NO: 2821996 - RNA, 14 nt, Human
auaacuucugaccu

SEQ ID NO: 2821997 - RNA, 19 nt, Human
auaacuucuuaaaaguugu

SEQ ID NO: 2821998 - RNA, 16 nt, Human
auaacuucuuaaaagu

SEQ ID NO: 2821999 - RNA, 17 nt, Human
auaacuucuuaaaaguu

SEQ ID NO: 2822000 - RNA, 11 nt, Human
auaacuugaug

SEQ ID NO: 2822001 - RNA, 16 nt, Human
auaacuugaugcaugu

SEQ ID NO: 2822002 - RNA, 17 nt, Human
auaacuugaugcaugug

SEQ ID NO: 2822003 - RNA, 20 nt, Human
auaacuugaugcaugugguu

SEQ ID NO: 2822004 - RNA, 23 nt, Human
auagcuuuauuuuuuaaguauuu

SEQ ID NO: 2822005 - RNA, 22 nt, Human
auagcuuuauuuuuuaaguauu

SEQ ID NO: 2822006 - RNA, 21 nt, Human
auagcuuuauuuuuuaaguau

SEQ ID NO: 2822007 - RNA, 19 nt, Human
auagcuuuauuuuuuaagu

SEQ ID NO: 2822008 - RNA, 18 nt, Human
auagcuuuauuuuuuaag

SEQ ID NO: 2822009 - RNA, 10 nt, Human
auagcuuuau

SEQ ID NO: 2822010 - RNA, 21 nt, Human
uucaccaugauggccaggcug

SEQ ID NO: 2822011 - RNA, 22 nt, Human
uucaccauguuggccaggcugg

SEQ ID NO: 2822012 - RNA, 22 nt, Human
uucaccauguuggccaggcugc

SEQ ID NO: 2822013 - RNA, 22 nt, Human
auagcuucaccccaaucccagc

SEQ ID NO: 2822014 - RNA, 14 nt, Human
auagcuuguauagu

SEQ ID NO: 2822015 - RNA, 17 nt, Human
auagcuuguauagugua

SEQ ID NO: 2822016 - RNA, 20 nt, Human
auagcuuguauaguguaaaa

SEQ ID NO: 2822017 - RNA, 21 nt, Human
auagcuucaccccaaucccag

SEQ ID NO: 2822018 - RNA, 16 nt, Human
auagcuuauuauugaa

SEQ ID NO: 2822019 - RNA, 22 nt, Human
auagcuuacaagccagcuggag

SEQ ID NO: 2822020 - RNA, 22 nt, Human
auaggcaccuaccaccacgccc

SEQ ID NO: 2822021 - RNA, 23 nt, Human
auaggaucauuuguuggaaugaa

SEQ ID NO: 2822022 - RNA, 18 nt, Human
auaggaaugugaaagcac

SEQ ID NO: 2822023 - RNA, 13 nt, Human
auaggaauucauc

SEQ ID NO: 2822024 - RNA, 16 nt, Human
auaggagccugcuggu

SEQ ID NO: 2822025 - RNA, 15 nt, Human
auagggagaaaccaa

SEQ ID NO: 2822026 - RNA, 20 nt, Human
auagggcugggcaaggaaaa

SEQ ID NO: 2822027 - RNA, 21 nt, Human
auagggcugggcaaggaaaaa

SEQ ID NO: 2822028 - RNA, 17 nt, Human
auaggggauauuuaagg

SEQ ID NO: 2822029 - RNA, 18 nt, Human
auaggggauauuuaaggu

SEQ ID NO: 2822030 - RNA, 16 nt, Human
auagggguguuuauuu

SEQ ID NO: 2822031 - RNA, 14 nt, Human
auaggcccacacac

SEQ ID NO: 2822032 - RNA, 15 nt, Human
auaggcccacacaca

SEQ ID NO: 2822033 - RNA, 16 nt, Human
auaggcccacacacag

SEQ ID NO: 2822034 - RNA, 17 nt, Human
auaggcccacacacagg

SEQ ID NO: 2822035 - RNA, 18 nt, Human
auaggcccacacacaggu

SEQ ID NO: 2822036 - RNA, 20 nt, Human
uucacaguagagccagcuug

SEQ ID NO: 2822037 - RNA, 16 nt, Human
uucacagucacugaug

SEQ ID NO: 2822038 - RNA, 21 nt, Human
uucacagugaucgaugauuca

SEQ ID NO: 2822039 - RNA, 22 nt, Human
uucacagugaucgaugauucag

SEQ ID NO: 2822040 - RNA, 18 nt, Human
uucacaguagagccagcu

SEQ ID NO: 2822041 - RNA, 17 nt, Human
uucacaguagagccagc

SEQ ID NO: 2822042 - RNA, 15 nt, Human
uucacaguagagcca

SEQ ID NO: 2822043 - RNA, 23 nt, Human
uucacagggguucccuucucuca

SEQ ID NO: 2822044 - RNA, 18 nt, Human
uucacaggugugguguaa

SEQ ID NO: 2822045 - RNA, 20 nt, Human
uucacaggugugguguaauu

SEQ ID NO: 2822046 - RNA, 19 nt, Human
uucacaguagagccagcuu

SEQ ID NO: 2822047 - RNA, 14 nt, Human
uucacauaaaugca

SEQ ID NO: 2822048 - RNA, 19 nt, Human
uucacauaaaugcagccca

SEQ ID NO: 2822049 - RNA, 20 nt, Human
uucacauaaaugcagcccau

SEQ ID NO: 2822050 - RNA, 23 nt, Human
uucacagcucuguguugccaugu

SEQ ID NO: 2822051 - RNA, 13 nt, Human
uucacagcuuuua

SEQ ID NO: 2822052 - RNA, 16 nt, Human
uucacagcuuuuauca

SEQ ID NO: 2822053 - RNA, 15 nt, Human
uucacagcucugugu

SEQ ID NO: 2822054 - RNA, 17 nt, Human
uucacagcuccucccac

SEQ ID NO: 2822055 - RNA, 13 nt, Human
uucacagcuccuc

SEQ ID NO: 2822056 - RNA, 15 nt, Human
uucacagcuccuccc

SEQ ID NO: 2822057 - RNA, 15 nt, Human
uucacauagcugucu

SEQ ID NO: 2822058 - RNA, 22 nt, Human
uucaccacaugugcacaugcac

SEQ ID NO: 2822059 - RNA, 19 nt, Human
uucacauuguuugcugcua

SEQ ID NO: 2822060 - RNA, 20 nt, Human
uucacauuguuugcugcuau

SEQ ID NO: 2822061 - RNA, 18 nt, Human
uucaccagauuugcuaau

SEQ ID NO: 2822062 - RNA, 22 nt, Human
uucaccaccaaaugccaagaaa

SEQ ID NO: 2822063 - RNA, 16 nt, Human
uucaccacuucacuga

SEQ ID NO: 2822064 - RNA, 13 nt, Human
uucaccaaaauua

SEQ ID NO: 2822065 - RNA, 15 nt, Human
uucaccaaaauuauc

SEQ ID NO: 2822066 - RNA, 16 nt, Human
uucaccaaaauuaucc

SEQ ID NO: 2822067 - RNA, 18 nt, Human
uucacauagcugucuaga

SEQ ID NO: 2822068 - RNA, 12 nt, Human
uucaccagagca

SEQ ID NO: 2822069 - RNA, 22 nt, Human
uucaaacuccaagguucccuug

SEQ ID NO: 2822070 - RNA, 15 nt, Human
uucaaacuggggccu

SEQ ID NO: 2822071 - RNA, 16 nt, Human
uucaaacuggggccuc

SEQ ID NO: 2822072 - RNA, 21 nt, Human
uucaaacuggggccuccagaa

SEQ ID NO: 2822073 - RNA, 21 nt, Human
uucaaacuguaaaccaauuuu

SEQ ID NO: 2822074 - RNA, 12 nt, Human
uucaaacuguga

SEQ ID NO: 2822075 - RNA, 13 nt, Human
uucaaacugugaa

SEQ ID NO: 2822076 - RNA, 19 nt, Human
uucaaacugugaagcauuu

SEQ ID NO: 2822077 - RNA, 17 nt, Human
uucaaacuuacuauuuu

SEQ ID NO: 2822078 - RNA, 19 nt, Human
uucaaacuuacuauuuuga

SEQ ID NO: 2822079 - RNA, 15 nt, Human
uucaaaauccaaaaa

SEQ ID NO: 2822080 - RNA, 13 nt, Human
uucaaaauccuuc

SEQ ID NO: 2822081 - RNA, 16 nt, Human
uucaaaauccuuccaa

SEQ ID NO: 2822082 - RNA, 17 nt, Human
uucaaaauccuuccaaa

SEQ ID NO: 2822083 - RNA, 19 nt, Human
uucaaaauccuuccaaaga

SEQ ID NO: 2822084 - RNA, 20 nt, Human
uucaaaaugcuuuuuauuau

SEQ ID NO: 2822085 - RNA, 17 nt, Human
uucaaaaugcuuuuuau

SEQ ID NO: 2822086 - RNA, 13 nt, Human
uucaaaauauuua

SEQ ID NO: 2822087 - RNA, 15 nt, Human
uucaaaauauuuaaa

SEQ ID NO: 2822088 - RNA, 20 nt, Human
uucaaaauauuuaaaaaugu

SEQ ID NO: 2822089 - RNA, 22 nt, Human
uucaaaauauuuaaaaaugucu

SEQ ID NO: 2822090 - RNA, 15 nt, Human
uucaaaauguuaucu

SEQ ID NO: 2822091 - RNA, 23 nt, Human
uucaaaauguuaucuucucaagu

SEQ ID NO: 2822092 - RNA, 16 nt, Human
uucaaaauuaaaucug

SEQ ID NO: 2822093 - RNA, 17 nt, Human
uucaaaauuaaaucugu

SEQ ID NO: 2822094 - RNA, 14 nt, Human
uucaaaauguauau

SEQ ID NO: 2822095 - RNA, 15 nt, Human
uucaaaaauauaacu

SEQ ID NO: 2822096 - RNA, 13 nt, Human
uucaaaaaguguu

SEQ ID NO: 2822097 - RNA, 14 nt, Human
uucaaaaaguguuu

SEQ ID NO: 2822098 - RNA, 17 nt, Human
uucaaaaaguguuuauu

SEQ ID NO: 2822099 - RNA, 18 nt, Human
uuauuuuuuuuuuuugaa

SEQ ID NO: 2822100 - RNA, 20 nt, Human
uuauuuuuuuuuuuugaaaa

SEQ ID NO: 2822101 - RNA, 21 nt, Human
uucaaaaagucuacgcucucc

SEQ ID NO: 2822102 - RNA, 13 nt, Human
uucaaaaacuguu

SEQ ID NO: 2822103 - RNA, 14 nt, Human
uucaaaaacuguuu

SEQ ID NO: 2822104 - RNA, 20 nt, Human
uucaaaaacuguuuugggua

SEQ ID NO: 2822105 - RNA, 21 nt, Human
uucaaaaacuguuuuggguag

SEQ ID NO: 2822106 - RNA, 12 nt, Human
uucaaaaacugu

SEQ ID NO: 2822107 - RNA, 20 nt, Human
uuauuucugcauauguugaa

SEQ ID NO: 2822108 - RNA, 15 nt, Human
uuauuucugcauaug

SEQ ID NO: 2822109 - RNA, 13 nt, Human
uuauuucugcaua

SEQ ID NO: 2822110 - RNA, 12 nt, Human
uuauuucugcau

SEQ ID NO: 2822111 - RNA, 11 nt, Human
uuauuucugca

SEQ ID NO: 2822112 - RNA, 17 nt, Human
uuauuucugcaaacaaa

SEQ ID NO: 2822113 - RNA, 18 nt, Human
uuauuucuaguccaaaau

SEQ ID NO: 2822114 - RNA, 22 nt, Human
uuauuucuaguccaaaauuaca

SEQ ID NO: 2822115 - RNA, 14 nt, Human
uucaaggcacucua

SEQ ID NO: 2822116 - RNA, 21 nt, Human
uucaaggcacucuagauucca

SEQ ID NO: 2822117 - RNA, 22 nt, Human
uucaaggcacucuagauuccau

SEQ ID NO: 2822118 - RNA, 16 nt, Human
uucaaggcacucuaga

SEQ ID NO: 2822119 - RNA, 17 nt, Human
uucaaggcacucuagau

SEQ ID NO: 2822120 - RNA, 18 nt, Human
uucaaggcacucuagauu

SEQ ID NO: 2822121 - RNA, 19 nt, Human
uucaaggcacucuagauuc

SEQ ID NO: 2822122 - RNA, 24 nt, Human
uucaaggggagccaaaaucucaag

SEQ ID NO: 2822123 - RNA, 12 nt, Human
uucaaggcuuca

SEQ ID NO: 2822124 - RNA, 15 nt, Human
uucaaggcuuccacu

SEQ ID NO: 2822125 - RNA, 16 nt, Human
uucaaggcuuccacug

SEQ ID NO: 2822126 - RNA, 20 nt, Human
uucaaggcaucaugcagagu

SEQ ID NO: 2822127 - RNA, 18 nt, Human
uucaacuugugccuggga

SEQ ID NO: 2822128 - RNA, 22 nt, Human
uucaagugauucucaugccuca

SEQ ID NO: 2822129 - RNA, 20 nt, Human
uucaagugauucucaugccu

SEQ ID NO: 2822130 - RNA, 16 nt, Human
uucaaguuagcucagg

SEQ ID NO: 2822131 - RNA, 20 nt, Human
uucaagugauucuccugccu

SEQ ID NO: 2822132 - RNA, 13 nt, Human
uucaagugccuuu

SEQ ID NO: 2822133 - RNA, 21 nt, Human
uucaagugccuuucugcaguu

SEQ ID NO: 2822134 - RNA, 23 nt, Human
uucaagugccuuucugcaguuuu

SEQ ID NO: 2822135 - RNA, 17 nt, Human
uucaaguuagcucagga

SEQ ID NO: 2822136 - RNA, 14 nt, Human
uucaaguuauugua

SEQ ID NO: 2822137 - RNA, 17 nt, Human
uucaaguuauuguacag

SEQ ID NO: 2822138 - RNA, 20 nt, Human
uucaaguuauuguacagcug

SEQ ID NO: 2822139 - RNA, 20 nt, Human
uucaaguuuuggguauguuu

SEQ ID NO: 2822140 - RNA, 22 nt, Human
uucaaguuuuggguauguuuaa

SEQ ID NO: 2822141 - RNA, 22 nt, Human
uucaagaaaacaacuucaauau

SEQ ID NO: 2822142 - RNA, 17 nt, Human
uucaagaaaaaauaaau

SEQ ID NO: 2822143 - RNA, 21 nt, Human
uucaagaaaaaauaaauggaa

SEQ ID NO: 2822144 - RNA, 23 nt, Human
uucaagaaaaaauaaauggaaau

SEQ ID NO: 2822145 - RNA, 12 nt, Human
uucaagaaacug

SEQ ID NO: 2822146 - RNA, 20 nt, Human
uucaagaaacugaggaauuu

SEQ ID NO: 2822147 - RNA, 13 nt, Human
uucaagaaacuga

SEQ ID NO: 2822148 - RNA, 23 nt, Human
uucaagaaacugaggaauuuucu

SEQ ID NO: 2822149 - RNA, 22 nt, Human
uucaagaaagcuucaaacugca

SEQ ID NO: 2822150 - RNA, 12 nt, Human
uucaagaaauaa

SEQ ID NO: 2822151 - RNA, 14 nt, Human
auagguaaucaaug

SEQ ID NO: 2822152 - RNA, 16 nt, Human
auagguaaucaaugaa

SEQ ID NO: 2822153 - RNA, 20 nt, Human
auagguaaucaaugaauauu

SEQ ID NO: 2822154 - RNA, 23 nt, Human
auagguaaucaaugaauauugaa

SEQ ID NO: 2822155 - RNA, 16 nt, Human
auagucauuccaaaua

SEQ ID NO: 2822156 - RNA, 18 nt, Human
auagucauuuauuuuaaa

SEQ ID NO: 2822157 - RNA, 19 nt, Human
auagucaauguuucuuuua

SEQ ID NO: 2822158 - RNA, 14 nt, Human
auaguuuauugaca

SEQ ID NO: 2822159 - RNA, 14 nt, Human
auaguuucagauau

SEQ ID NO: 2822160 - RNA, 21 nt, Human
auaguuucagauauauaucau

SEQ ID NO: 2822161 - RNA, 13 nt, Human
auaguuucugagg

SEQ ID NO: 2822162 - RNA, 14 nt, Human
auaguuucugaggc

SEQ ID NO: 2822163 - RNA, 19 nt, Human
auaguuucugaggcuuuau

SEQ ID NO: 2822164 - RNA, 13 nt, Human
auaguuuguacau

SEQ ID NO: 2822165 - RNA, 20 nt, Human
auaguuugggcuucagccua

SEQ ID NO: 2822166 - RNA, 22 nt, Human
auaguuugggcuucagccuagu

SEQ ID NO: 2822167 - RNA, 15 nt, Human
auaguuuguacaugc

SEQ ID NO: 2822168 - RNA, 13 nt, Human
auaguuugucuau

SEQ ID NO: 2822169 - RNA, 15 nt, Human
auaguuugucuauuu

SEQ ID NO: 2822170 - RNA, 16 nt, Human
auaguuugucuauuuu

SEQ ID NO: 2822171 - RNA, 17 nt, Human
auaguuugucuauuuua

SEQ ID NO: 2822172 - RNA, 12 nt, Human
auaguuuguuau

SEQ ID NO: 2822173 - RNA, 17 nt, Human
auaguuuuaaacucauu

SEQ ID NO: 2822174 - RNA, 20 nt, Human
auaguuuuaaacucauuuuu

SEQ ID NO: 2822175 - RNA, 12 nt, Human
auauaaauggga

SEQ ID NO: 2822176 - RNA, 13 nt, Human
auauaaaugggaa

SEQ ID NO: 2822177 - RNA, 14 nt, Human
auauaaaugggaac

SEQ ID NO: 2822178 - RNA, 18 nt, Human
auauaaaugggaacauuu

SEQ ID NO: 2822179 - RNA, 19 nt, Human
auauaaaugggaacauuua

SEQ ID NO: 2822180 - RNA, 21 nt, Human
auauaaaugggaacauuuauu

SEQ ID NO: 2822181 - RNA, 13 nt, Human
auauaaagaauau

SEQ ID NO: 2822182 - RNA, 14 nt, Human
auauaaagaauaua

SEQ ID NO: 2822183 - RNA, 15 nt, Human
auauaaagaauauau

SEQ ID NO: 2822184 - RNA, 18 nt, Human
auauaaagaauauauaua

SEQ ID NO: 2822185 - RNA, 13 nt, Human
auauaaauauuug

SEQ ID NO: 2822186 - RNA, 13 nt, Human
auauaaaaugugc

SEQ ID NO: 2822187 - RNA, 12 nt, Human
auauaaacaucu

SEQ ID NO: 2822188 - RNA, 21 nt, Human
auauaaaaggcaaauguguac

SEQ ID NO: 2822189 - RNA, 23 nt, Human
auauaaaaggcaaauguguacau

SEQ ID NO: 2822190 - RNA, 13 nt, Human
auauaaaauaaug

SEQ ID NO: 2822191 - RNA, 14 nt, Human
auauaaaauaaugc

SEQ ID NO: 2822192 - RNA, 14 nt, Human
auauaaaauaguug

SEQ ID NO: 2822193 - RNA, 21 nt, Human
auauaaaauaguuguccauau

SEQ ID NO: 2822194 - RNA, 16 nt, Human
auauauacaguaacuu

SEQ ID NO: 2822195 - RNA, 18 nt, Human
auauauacaguaacuuua

SEQ ID NO: 2822196 - RNA, 13 nt, Human
auauauacacaca

SEQ ID NO: 2822197 - RNA, 14 nt, Human
auauauacacacac

SEQ ID NO: 2822198 - RNA, 15 nt, Human
auauauacacacaca

SEQ ID NO: 2822199 - RNA, 19 nt, Human
auauaggucucuucuccca

SEQ ID NO: 2822200 - RNA, 21 nt, Human
auauaggucucuucucccaga

SEQ ID NO: 2822201 - RNA, 22 nt, Human
auauaggucucuucucccagaa

SEQ ID NO: 2822202 - RNA, 18 nt, Human
auauaggugauguuugcu

SEQ ID NO: 2822203 - RNA, 16 nt, Human
auauaagccuuuuaua

SEQ ID NO: 2822204 - RNA, 22 nt, Human
auauagguugugcaaauuaaca

SEQ ID NO: 2822205 - RNA, 15 nt, Human
auauagguugugcaa

SEQ ID NO: 2822206 - RNA, 16 nt, Human
auauagguugugcaaa

SEQ ID NO: 2822207 - RNA, 18 nt, Human
auauagugcuauauauau

SEQ ID NO: 2822208 - RNA, 16 nt, Human
auauaguuccuaagaa

SEQ ID NO: 2822209 - RNA, 21 nt, Human
auauaguuccuaagaagcuuc

SEQ ID NO: 2822210 - RNA, 22 nt, Human
auauaguuccuaagaagcuucu

SEQ ID NO: 2822211 - RNA, 17 nt, Human
auauaguuuuuaccuuu

SEQ ID NO: 2822212 - RNA, 21 nt, Human
auauaguuuuuaccuuuuaug

SEQ ID NO: 2822213 - RNA, 15 nt, Human
auauaagaaagacau

SEQ ID NO: 2822214 - RNA, 16 nt, Human
auauaagaaagacauc

SEQ ID NO: 2822215 - RNA, 18 nt, Human
auauaagaaagacaucuu

SEQ ID NO: 2822216 - RNA, 12 nt, Human
auauaagauuuu

SEQ ID NO: 2822217 - RNA, 14 nt, Human
auauaagauuuucu

SEQ ID NO: 2822218 - RNA, 12 nt, Human
auauaaauucug

SEQ ID NO: 2822219 - RNA, 13 nt, Human
auauaaauucugu

SEQ ID NO: 2822220 - RNA, 14 nt, Human
auauaaauucugug

SEQ ID NO: 2822221 - RNA, 15 nt, Human
auauaaauucugugg

SEQ ID NO: 2822222 - RNA, 16 nt, Human
uucagauguggagcca

SEQ ID NO: 2822223 - RNA, 17 nt, Human
uucagauguggagccag

SEQ ID NO: 2822224 - RNA, 18 nt, Human
uucagauguggagccagg

SEQ ID NO: 2822225 - RNA, 19 nt, Human
uucagauguggagccaggc

SEQ ID NO: 2822226 - RNA, 14 nt, Human
uucagcaagagaga

SEQ ID NO: 2822227 - RNA, 17 nt, Human
uucagcaagagagaacc

SEQ ID NO: 2822228 - RNA, 18 nt, Human
uucagcaagagagaaccu

SEQ ID NO: 2822229 - RNA, 21 nt, Human
uucagaugggaggaaagagag

SEQ ID NO: 2822230 - RNA, 13 nt, Human
uucagauguaaug

SEQ ID NO: 2822231 - RNA, 14 nt, Human
uucagauguaaugu

SEQ ID NO: 2822232 - RNA, 15 nt, Human
uucagauguaauguu

SEQ ID NO: 2822233 - RNA, 16 nt, Human
uucagauguaauguuu

SEQ ID NO: 2822234 - RNA, 17 nt, Human
uucagauguaauguuuu

SEQ ID NO: 2822235 - RNA, 18 nt, Human
uucagauguaauguuuuc

SEQ ID NO: 2822236 - RNA, 15 nt, Human
uucagaucacugaau

SEQ ID NO: 2822237 - RNA, 16 nt, Human
uucagaucacugaauu

SEQ ID NO: 2822238 - RNA, 18 nt, Human
uucagaucacugaauuua

SEQ ID NO: 2822239 - RNA, 21 nt, Human
uucagaucacugaauuuauaa

SEQ ID NO: 2822240 - RNA, 19 nt, Human
uucagaaucacuucugaga

SEQ ID NO: 2822241 - RNA, 21 nt, Human
uucagaaucacuucugagaac

SEQ ID NO: 2822242 - RNA, 16 nt, Human
uucagaaucuuuguua

SEQ ID NO: 2822243 - RNA, 17 nt, Human
uucagaaucuuuguuaa

SEQ ID NO: 2822244 - RNA, 13 nt, Human
uucagcccccagc

SEQ ID NO: 2822245 - RNA, 15 nt, Human
uucagcccccagccc

SEQ ID NO: 2822246 - RNA, 16 nt, Human
uucagccauguacaga

SEQ ID NO: 2822247 - RNA, 16 nt, Human
uucagcaccacccuag

SEQ ID NO: 2822248 - RNA, 10 nt, Human
uucagcacca

SEQ ID NO: 2822249 - RNA, 21 nt, Human
uucagaaaauauuauguguuu

SEQ ID NO: 2822250 - RNA, 18 nt, Human
uucacuguauaaauagga

SEQ ID NO: 2822251 - RNA, 19 nt, Human
uucacuguauaaauaggag

SEQ ID NO: 2822252 - RNA, 15 nt, Human
uucagaaagaagugg

SEQ ID NO: 2822253 - RNA, 23 nt, Human
uucagaaguuuggcaauaguuug

SEQ ID NO: 2822254 - RNA, 15 nt, Human
uucagaaucacuucu

SEQ ID NO: 2822255 - RNA, 13 nt, Human
uucagaauauuca

SEQ ID NO: 2822256 - RNA, 20 nt, Human
uucagaaguuuggcaauagu

SEQ ID NO: 2822257 - RNA, 20 nt, Human
uucagaaaauauuauguguu

SEQ ID NO: 2822258 - RNA, 14 nt, Human
uucagaaaauauua

SEQ ID NO: 2822259 - RNA, 13 nt, Human
uucagaaaauauu

SEQ ID NO: 2822260 - RNA, 13 nt, Human
uucacuguauaaa

SEQ ID NO: 2822261 - RNA, 15 nt, Human
uucacuguauaaaua

SEQ ID NO: 2822262 - RNA, 16 nt, Human
uucacuguauaaauag

SEQ ID NO: 2822263 - RNA, 13 nt, Human
uucacugggccaa

SEQ ID NO: 2822264 - RNA, 13 nt, Human
uucacuggcccaa

SEQ ID NO: 2822265 - RNA, 20 nt, Human
uucacuguaagacucauucc

SEQ ID NO: 2822266 - RNA, 12 nt, Human
uucacuguacgu

SEQ ID NO: 2822267 - RNA, 22 nt, Human
uucacuguagaaugauuucaug

SEQ ID NO: 2822268 - RNA, 15 nt, Human
uucacuguagaauga

SEQ ID NO: 2822269 - RNA, 14 nt, Human
auauauagugcuau

SEQ ID NO: 2822270 - RNA, 15 nt, Human
auauauagugcuaua

SEQ ID NO: 2822271 - RNA, 16 nt, Human
auauauagugcuauau

SEQ ID NO: 2822272 - RNA, 20 nt, Human
auauauagcuggcaagaaug

SEQ ID NO: 2822273 - RNA, 11 nt, Human
auauauauaaa

SEQ ID NO: 2822274 - RNA, 13 nt, Human
auauauagaaucu

SEQ ID NO: 2822275 - RNA, 19 nt, Human
auauauagacagcuuugac

SEQ ID NO: 2822276 - RNA, 12 nt, Human
auauauauaaag

SEQ ID NO: 2822277 - RNA, 13 nt, Human
auauauauaaaga

SEQ ID NO: 2822278 - RNA, 13 nt, Human
auauauauaaagu

SEQ ID NO: 2822279 - RNA, 20 nt, Human
uucacugcauggcucccaca

SEQ ID NO: 2822280 - RNA, 13 nt, Human
auauauacauaug

SEQ ID NO: 2822281 - RNA, 14 nt, Human
auauauacauaugu

SEQ ID NO: 2822282 - RNA, 15 nt, Human
auauauaccccccca

SEQ ID NO: 2822283 - RNA, 19 nt, Human
auauauacccccccaugca

SEQ ID NO: 2822284 - RNA, 22 nt, Human
auauauacgaacaaaacacacg

SEQ ID NO: 2822285 - RNA, 20 nt, Human
auauauacaguaacuuuaug

SEQ ID NO: 2822286 - RNA, 21 nt, Human
auauauacaguaacuuuaugu

SEQ ID NO: 2822287 - RNA, 23 nt, Human
auauauacaguaacuuuaugugu

SEQ ID NO: 2822288 - RNA, 10 nt, Human
auauauacau

SEQ ID NO: 2822289 - RNA, 11 nt, Human
auauauacaua

SEQ ID NO: 2822290 - RNA, 14 nt, Human
auauauacauacac

SEQ ID NO: 2822291 - RNA, 16 nt, Human
auauauacauacacuu

SEQ ID NO: 2822292 - RNA, 18 nt, Human
auauauacauacacuugu

SEQ ID NO: 2822293 - RNA, 18 nt, Human
auauauacuuaagaauau

SEQ ID NO: 2822294 - RNA, 12 nt, Human
auauauacuugu

SEQ ID NO: 2822295 - RNA, 15 nt, Human
auauauacuuguggu

SEQ ID NO: 2822296 - RNA, 18 nt, Human
auauauagaaauauauac

SEQ ID NO: 2822297 - RNA, 13 nt, Human
uucacugcuggcu

SEQ ID NO: 2822298 - RNA, 15 nt, Human
uucacugcuggcugc

SEQ ID NO: 2822299 - RNA, 16 nt, Human
uucacugcuggcugcc

SEQ ID NO: 2822300 - RNA, 17 nt, Human
uucacugcuggcugccu

SEQ ID NO: 2822301 - RNA, 18 nt, Human
uucacugcuggcugccuu

SEQ ID NO: 2822302 - RNA, 19 nt, Human
uucacugcuggcugccuua

SEQ ID NO: 2822303 - RNA, 13 nt, Human
auaugauuuaaaa

SEQ ID NO: 2822304 - RNA, 15 nt, Human
auaugauuggcaaua

SEQ ID NO: 2822305 - RNA, 13 nt, Human
auaugauuguuuc

SEQ ID NO: 2822306 - RNA, 14 nt, Human
auaugauuguuucu

SEQ ID NO: 2822307 - RNA, 22 nt, Human
auaugauuguuucucaaaucuu

SEQ ID NO: 2822308 - RNA, 20 nt, Human
auaugauuuaaaacauguaa

SEQ ID NO: 2822309 - RNA, 15 nt, Human
auaugauuuaaaaca

SEQ ID NO: 2822310 - RNA, 16 nt, Human
auaugauuuaaaacau

SEQ ID NO: 2822311 - RNA, 21 nt, Human
auauguauauauauauaugca

SEQ ID NO: 2822312 - RNA, 18 nt, Human
auauguauauuuuuuuaa

SEQ ID NO: 2822313 - RNA, 23 nt, Human
auauguauauuuuuuuaauuuaa

SEQ ID NO: 2822314 - RNA, 16 nt, Human
auauguauuauuuaua

SEQ ID NO: 2822315 - RNA, 17 nt, Human
auauguauuauuuauaa

SEQ ID NO: 2822316 - RNA, 14 nt, Human
auauguauuaauaa

SEQ ID NO: 2822317 - RNA, 23 nt, Human
auauguauuaauaaauagagcaa

SEQ ID NO: 2822318 - RNA, 18 nt, Human
auauguauuauuuauaau

SEQ ID NO: 2822319 - RNA, 22 nt, Human
auauguauuauuuauaauuccu

SEQ ID NO: 2822320 - RNA, 20 nt, Human
auaugucucgcuagugaugu

SEQ ID NO: 2822321 - RNA, 21 nt, Human
auaugucucgcuagugauguu

SEQ ID NO: 2822322 - RNA, 16 nt, Human
auaugucugcuccuuu

SEQ ID NO: 2822323 - RNA, 16 nt, Human
uucauggaccacuguu

SEQ ID NO: 2822324 - RNA, 17 nt, Human
uucauggaccacuguuu

SEQ ID NO: 2822325 - RNA, 20 nt, Human
uucauggaccacuguuucuu

SEQ ID NO: 2822326 - RNA, 17 nt, Human
auauguauuuuuauaua

SEQ ID NO: 2822327 - RNA, 15 nt, Human
auaugucacuagaau

SEQ ID NO: 2822328 - RNA, 17 nt, Human
auaugucacuagaaugg

SEQ ID NO: 2822329 - RNA, 23 nt, Human
auauguauuauuuauaauuccua

SEQ ID NO: 2822330 - RNA, 14 nt, Human
auauguauuguaaa

SEQ ID NO: 2822331 - RNA, 21 nt, Human
auauguauuguaaacaugugu

SEQ ID NO: 2822332 - RNA, 11 nt, Human
auauguauuuu

SEQ ID NO: 2822333 - RNA, 21 nt, Human
uucauguacaagaugaaggag

SEQ ID NO: 2822334 - RNA, 13 nt, Human
uucauguacauuu

SEQ ID NO: 2822335 - RNA, 20 nt, Human
uucauguagagaaaagcaca

SEQ ID NO: 2822336 - RNA, 21 nt, Human
uucauguagagaaaagcacac

SEQ ID NO: 2822337 - RNA, 17 nt, Human
uucauguacaagaugaa

SEQ ID NO: 2822338 - RNA, 19 nt, Human
uucauggugaaaauguacu

SEQ ID NO: 2822339 - RNA, 15 nt, Human
auaucugaaauguga

SEQ ID NO: 2822340 - RNA, 18 nt, Human
auaucugaacauuuacua

SEQ ID NO: 2822341 - RNA, 17 nt, Human
auaucuugcgaauccaa

SEQ ID NO: 2822342 - RNA, 18 nt, Human
auaucuugcgaauccaag

SEQ ID NO: 2822343 - RNA, 19 nt, Human
uucaucaugaggaaagcag

SEQ ID NO: 2822344 - RNA, 20 nt, Human
auaucuucagcucuuuuugu

SEQ ID NO: 2822345 - RNA, 14 nt, Human
auaucuuaaagaaa

SEQ ID NO: 2822346 - RNA, 16 nt, Human
auaucuuaaagaaaca

SEQ ID NO: 2822347 - RNA, 19 nt, Human
auaucuuaaagaaacagcu

SEQ ID NO: 2822348 - RNA, 18 nt, Human
auaucuguggucuucaaa

SEQ ID NO: 2822349 - RNA, 12 nt, Human
auaucuguaugu

SEQ ID NO: 2822350 - RNA, 13 nt, Human
auaucuguaugua

SEQ ID NO: 2822351 - RNA, 15 nt, Human
auaucuguauguauu

SEQ ID NO: 2822352 - RNA, 21 nt, Human
auaucuguauguauuagugau

SEQ ID NO: 2822353 - RNA, 13 nt, Human
auaucugcuucag

SEQ ID NO: 2822354 - RNA, 16 nt, Human
auaucugcuucagugg

SEQ ID NO: 2822355 - RNA, 20 nt, Human
auaucuggccuaaaaucuug

SEQ ID NO: 2822356 - RNA, 21 nt, Human
auaucuggccuaaaaucuugg

SEQ ID NO: 2822357 - RNA, 15 nt, Human
auaucugaagcccuc

SEQ ID NO: 2822358 - RNA, 13 nt, Human
uucagcaaaccau

SEQ ID NO: 2822359 - RNA, 23 nt, Human
uucagccuaguggcuuguccuca

SEQ ID NO: 2822360 - RNA, 15 nt, Human
uucagccucuuucug

SEQ ID NO: 2822361 - RNA, 20 nt, Human
uucaggggacucagcccuga

SEQ ID NO: 2822362 - RNA, 19 nt, Human
uucaggggacucagcccug

SEQ ID NO: 2822363 - RNA, 17 nt, Human
uucaggggacucagccc

SEQ ID NO: 2822364 - RNA, 16 nt, Human
uucaggggacucagcc

SEQ ID NO: 2822365 - RNA, 13 nt, Human
uucagggccuggu

SEQ ID NO: 2822366 - RNA, 19 nt, Human
uucagggccugguugaaga

SEQ ID NO: 2822367 - RNA, 22 nt, Human
uucagggaauuucaggaacuag

SEQ ID NO: 2822368 - RNA, 16 nt, Human
uucaguaauguuauuu

SEQ ID NO: 2822369 - RNA, 20 nt, Human
uucaguaauaaacuguguuu

SEQ ID NO: 2822370 - RNA, 21 nt, Human
uucaguacccucucagcucca

SEQ ID NO: 2822371 - RNA, 22 nt, Human
uucaguacccucucagcuccag

SEQ ID NO: 2822372 - RNA, 13 nt, Human
uucagggucauag

SEQ ID NO: 2822373 - RNA, 23 nt, Human
uucaggggacucagcccugaggu

SEQ ID NO: 2822374 - RNA, 18 nt, Human
uucauagagauuugucua

SEQ ID NO: 2822375 - RNA, 19 nt, Human
uucauagagauuugucuaa

SEQ ID NO: 2822376 - RNA, 20 nt, Human
uucauagagauuugucuaau

SEQ ID NO: 2822377 - RNA, 15 nt, Human
uucaguacuucagca

SEQ ID NO: 2822378 - RNA, 20 nt, Human
uucaguacuucagcaagaga

SEQ ID NO: 2822379 - RNA, 22 nt, Human
uucaguacuucagcaagagaga

SEQ ID NO: 2822380 - RNA, 16 nt, Human
uucaguauguuuuaca

SEQ ID NO: 2822381 - RNA, 17 nt, Human
uucaguauguuuuacac

SEQ ID NO: 2822382 - RNA, 19 nt, Human
uucaguauguuuuacacug

SEQ ID NO: 2822383 - RNA, 20 nt, Human
uucaguauguuuuacacugu

SEQ ID NO: 2822384 - RNA, 22 nt, Human
uucaguauguuuuacacuguac

SEQ ID NO: 2822385 - RNA, 17 nt, Human
uucaguauuuuggagaa

SEQ ID NO: 2822386 - RNA, 14 nt, Human
uucauaccuaagua

SEQ ID NO: 2822387 - RNA, 16 nt, Human
uucauaccuaaguacu

SEQ ID NO: 2822388 - RNA, 18 nt, Human
uucauaccuaaguacugu

SEQ ID NO: 2822389 - RNA, 19 nt, Human
uucauaccuaaguacugua

SEQ ID NO: 2822390 - RNA, 20 nt, Human
uucauaccuaaguacuguaa

SEQ ID NO: 2822391 - RNA, 21 nt, Human
uucauaccuaaguacuguaau

SEQ ID NO: 2822392 - RNA, 22 nt, Human
uucauaccuaaguacuguaaua

SEQ ID NO: 2822393 - RNA, 20 nt, Human
uucaguauuauguaguuguu

SEQ ID NO: 2822394 - RNA, 15 nt, Human
uucauaccucagaau

SEQ ID NO: 2822395 - RNA, 23 nt, Human
uucauacuccuuuuaagcaguga

SEQ ID NO: 2822396 - RNA, 20 nt, Human
auaucuaauuauuuugcagu

SEQ ID NO: 2822397 - RNA, 14 nt, Human
auaucuacagauag

SEQ ID NO: 2822398 - RNA, 23 nt, Human
auaucuacagauagagaguuguu

SEQ ID NO: 2822399 - RNA, 19 nt, Human
auaucuaauauauaugaau

SEQ ID NO: 2822400 - RNA, 13 nt, Human
auaucuaauauau

SEQ ID NO: 2822401 - RNA, 14 nt, Human
auaucuaauauaua

SEQ ID NO: 2822402 - RNA, 17 nt, Human
auaucuaauauauauga

SEQ ID NO: 2822403 - RNA, 18 nt, Human
auaucuaauauauaugaa

SEQ ID NO: 2822404 - RNA, 15 nt, Human
auaucgcugacuuca

SEQ ID NO: 2822405 - RNA, 18 nt, Human
auaucggcucacaaagag

SEQ ID NO: 2822406 - RNA, 19 nt, Human
auaucggcucacaaagaga

SEQ ID NO: 2822407 - RNA, 14 nt, Human
auauccuuuucuuc

SEQ ID NO: 2822408 - RNA, 21 nt, Human
auauccuuuucuucuauguag

SEQ ID NO: 2822409 - RNA, 14 nt, Human
auaucuaaaguuau

SEQ ID NO: 2822410 - RNA, 15 nt, Human
auaucuaaaguuaua

SEQ ID NO: 2822411 - RNA, 16 nt, Human
auaucuaaaguuauau

SEQ ID NO: 2822412 - RNA, 19 nt, Human
auaucuaaaguuauauuuc

SEQ ID NO: 2822413 - RNA, 20 nt, Human
auaucuaaaguuauauuuca

SEQ ID NO: 2822414 - RNA, 21 nt, Human
auaucuaaaguuauauuucag

SEQ ID NO: 2822415 - RNA, 17 nt, Human
uucaucauucccucuca

SEQ ID NO: 2822416 - RNA, 19 nt, Human
uucaucauucccucucauc

SEQ ID NO: 2822417 - RNA, 20 nt, Human
uucaucauucccucucaucu

SEQ ID NO: 2822418 - RNA, 15 nt, Human
uucaucauuguuucu

SEQ ID NO: 2822419 - RNA, 22 nt, Human
uucaucauuguuucugcaugaa

SEQ ID NO: 2822420 - RNA, 23 nt, Human
uucaucauuguuucugcaugaau

SEQ ID NO: 2822421 - RNA, 17 nt, Human
auauauuacaagggaua

SEQ ID NO: 2822422 - RNA, 17 nt, Human
auauauuauaaauauau

SEQ ID NO: 2822423 - RNA, 20 nt, Human
uucauccaacuuauguuuuu

SEQ ID NO: 2822424 - RNA, 17 nt, Human
augaacuuucucuucau

SEQ ID NO: 2822425 - RNA, 13 nt, Human
augaacacuuaua

SEQ ID NO: 2822426 - RNA, 13 nt, Human
augaacccuuccu

SEQ ID NO: 2822427 - RNA, 18 nt, Human
augaacccuuccugagcu

SEQ ID NO: 2822428 - RNA, 21 nt, Human
augaacccuuccugagcuuua

SEQ ID NO: 2822429 - RNA, 22 nt, Human
augaacccuuccugagcuuuau

SEQ ID NO: 2822430 - RNA, 17 nt, Human
augaacccuuuguuucu

SEQ ID NO: 2822431 - RNA, 14 nt, Human
augaaccuucuggc

SEQ ID NO: 2822432 - RNA, 23 nt, Human
augaaucuuuguuucagguucag

SEQ ID NO: 2822433 - RNA, 20 nt, Human
augaaucucccacuccagcg

SEQ ID NO: 2822434 - RNA, 15 nt, Human
augaaucugauuuuu

SEQ ID NO: 2822435 - RNA, 17 nt, Human
augaaucugauuuuuau

SEQ ID NO: 2822436 - RNA, 22 nt, Human
augaaucugauuuuuaugauga

SEQ ID NO: 2822437 - RNA, 14 nt, Human
augaaucugcucac

SEQ ID NO: 2822438 - RNA, 16 nt, Human
augaaucugcucacuu

SEQ ID NO: 2822439 - RNA, 17 nt, Human
augaaucugcucacuuu

SEQ ID NO: 2822440 - RNA, 18 nt, Human
augaaucugcucacuuua

SEQ ID NO: 2822441 - RNA, 23 nt, Human
augaaucugucucccaguuauga

SEQ ID NO: 2822442 - RNA, 24 nt, Human
augaaucugucucccaguuaugaa

SEQ ID NO: 2822443 - RNA, 15 nt, Human
augaauguauuuauu

SEQ ID NO: 2822444 - RNA, 17 nt, Human
augaauguauuuauuug

SEQ ID NO: 2822445 - RNA, 20 nt, Human
augaauguauuuauuuggga

SEQ ID NO: 2822446 - RNA, 14 nt, Human
augaaugaaugaau

SEQ ID NO: 2822447 - RNA, 21 nt, Human
augaagauuggugggauuuuu

SEQ ID NO: 2822448 - RNA, 13 nt, Human
augaagcagcuuu

SEQ ID NO: 2822449 - RNA, 15 nt, Human
augaagcagcuuuaa

SEQ ID NO: 2822450 - RNA, 13 nt, Human
augaagcaaggaa

SEQ ID NO: 2822451 - RNA, 14 nt, Human
augaagcaaggaag

SEQ ID NO: 2822452 - RNA, 15 nt, Human
augaagcaaggaaga

SEQ ID NO: 2822453 - RNA, 16 nt, Human
augaagcaaggaagau

SEQ ID NO: 2822454 - RNA, 21 nt, Human
augaaucccacccacauguga

SEQ ID NO: 2822455 - RNA, 18 nt, Human
augaaucccacccacaug

SEQ ID NO: 2822456 - RNA, 22 nt, Human
augaagcagcuuuaaacaaauu

SEQ ID NO: 2822457 - RNA, 16 nt, Human
uuggccaucucuggau

SEQ ID NO: 2822458 - RNA, 20 nt, Human
uuggagcgagcaucccccaa

SEQ ID NO: 2822459 - RNA, 15 nt, Human
uuggagcuuacauag

SEQ ID NO: 2822460 - RNA, 20 nt, Human
uuggagcuuacauaguuuua

SEQ ID NO: 2822461 - RNA, 20 nt, Human
augaaagucuagaaauaaaa

SEQ ID NO: 2822462 - RNA, 14 nt, Human
augaaauaaagaaa

SEQ ID NO: 2822463 - RNA, 22 nt, Human
augaaauaaagacccaggggga

SEQ ID NO: 2822464 - RNA, 20 nt, Human
augaaagugaugacauauuu

SEQ ID NO: 2822465 - RNA, 22 nt, Human
augaaccacaucuugcucugcu

SEQ ID NO: 2822466 - RNA, 23 nt, Human
augaaccacaucuugcucugcug

SEQ ID NO: 2822467 - RNA, 20 nt, Human
augaacaccauaccuuugcu

SEQ ID NO: 2822468 - RNA, 17 nt, Human
augaacacccuuagaaa

SEQ ID NO: 2822469 - RNA, 13 nt, Human
augaacaaguuuu

SEQ ID NO: 2822470 - RNA, 14 nt, Human
augaacaaguuuua

SEQ ID NO: 2822471 - RNA, 15 nt, Human
augaacaaguuuuaa

SEQ ID NO: 2822472 - RNA, 21 nt, Human
augaacaaguuuuaauguaua

SEQ ID NO: 2822473 - RNA, 13 nt, Human
augaaauaugcau

SEQ ID NO: 2822474 - RNA, 15 nt, Human
augaaauaugcaucu

SEQ ID NO: 2822475 - RNA, 17 nt, Human
augaaauacuauuuaaa

SEQ ID NO: 2822476 - RNA, 22 nt, Human
augaaauuuucuagacuuucug

SEQ ID NO: 2822477 - RNA, 19 nt, Human
augaaauuuucuagacuuu

SEQ ID NO: 2822478 - RNA, 21 nt, Human
augaaauuuucuagacuuucu

SEQ ID NO: 2822479 - RNA, 23 nt, Human
augaaauuuucuagacuuucugu

SEQ ID NO: 2822480 - RNA, 14 nt, Human
augaaauuuuugua

SEQ ID NO: 2822481 - RNA, 16 nt, Human
augaaauuuuuguaaa

SEQ ID NO: 2822482 - RNA, 17 nt, Human
augaaauuuuuguaaau

SEQ ID NO: 2822483 - RNA, 19 nt, Human
uugggucaccccuccagga

SEQ ID NO: 2822484 - RNA, 20 nt, Human
uuggguagcugccacuugaa

SEQ ID NO: 2822485 - RNA, 15 nt, Human
uugggguuguguugu

SEQ ID NO: 2822486 - RNA, 16 nt, Human
uugggguuguguuguc

SEQ ID NO: 2822487 - RNA, 22 nt, Human
uuggggugccccucuccuucuu

SEQ ID NO: 2822488 - RNA, 21 nt, Human
uuggggugucuuuuuuuggug

SEQ ID NO: 2822489 - RNA, 16 nt, Human
uugggguuuuuuaaua

SEQ ID NO: 2822490 - RNA, 15 nt, Human
uugggucuauuccag

SEQ ID NO: 2822491 - RNA, 17 nt, Human
uugggucuauuccagcu

SEQ ID NO: 2822492 - RNA, 18 nt, Human
uugggucuauuccagcuc

SEQ ID NO: 2822493 - RNA, 20 nt, Human
uugguuuggccaucucugga

SEQ ID NO: 2822494 - RNA, 14 nt, Human
uuggugugcugagg

SEQ ID NO: 2822495 - RNA, 19 nt, Human
uugguguguuggacagaga

SEQ ID NO: 2822496 - RNA, 14 nt, Human
uugguguuaaaaca

SEQ ID NO: 2822497 - RNA, 15 nt, Human
uugguuaaaacugua

SEQ ID NO: 2822498 - RNA, 22 nt, Human
uugguuaaaacuguacauuuaa

SEQ ID NO: 2822499 - RNA, 14 nt, Human
uugguguacagacu

SEQ ID NO: 2822500 - RNA, 23 nt, Human
uugguguauagaaguuuguccau

SEQ ID NO: 2822501 - RNA, 21 nt, Human
uuggugucaacaugaaacacc

SEQ ID NO: 2822502 - RNA, 13 nt, Human
uugguguguccca

SEQ ID NO: 2822503 - RNA, 15 nt, Human
uugguguugucauug

SEQ ID NO: 2822504 - RNA, 18 nt, Human
uugguguugucauuguaa

SEQ ID NO: 2822505 - RNA, 20 nt, Human
uugguguaaagccaacaccc

SEQ ID NO: 2822506 - RNA, 23 nt, Human
uugguguaacaucuucaacaugu

SEQ ID NO: 2822507 - RNA, 15 nt, Human
uugguggcuuauggg

SEQ ID NO: 2822508 - RNA, 14 nt, Human
uugguggcuuuccu

SEQ ID NO: 2822509 - RNA, 13 nt, Human
uuguaaauuguca

SEQ ID NO: 2822510 - RNA, 21 nt, Human
uuguaagacaaagguuuuccu

SEQ ID NO: 2822511 - RNA, 18 nt, Human
uuguaagacaaagguuuu

SEQ ID NO: 2822512 - RNA, 15 nt, Human
uuguaagaguguaga

SEQ ID NO: 2822513 - RNA, 22 nt, Human
uuguaagacaaagguuuuccuc

SEQ ID NO: 2822514 - RNA, 19 nt, Human
uuguaaguuucaggugaca

SEQ ID NO: 2822515 - RNA, 22 nt, Human
uuguaaguuucaggugacaugu

SEQ ID NO: 2822516 - RNA, 13 nt, Human
uuguaauauuuug

SEQ ID NO: 2822517 - RNA, 14 nt, Human
uuguaauauuuugu

SEQ ID NO: 2822518 - RNA, 15 nt, Human
uuguaauauuuugua

SEQ ID NO: 2822519 - RNA, 18 nt, Human
uuguaauauuuuguauua

SEQ ID NO: 2822520 - RNA, 14 nt, Human
uuguaauauuuuua

SEQ ID NO: 2822521 - RNA, 17 nt, Human
uuguaagaguguagaag

SEQ ID NO: 2822522 - RNA, 19 nt, Human
uuguaagaguguagaagca

SEQ ID NO: 2822523 - RNA, 21 nt, Human
uuguaagaguguagaagcauu

SEQ ID NO: 2822524 - RNA, 22 nt, Human
uuguaagaguguagaagcauuc

SEQ ID NO: 2822525 - RNA, 13 nt, Human
uuguaaguuucag

SEQ ID NO: 2822526 - RNA, 16 nt, Human
uuguaaguuucaggug

SEQ ID NO: 2822527 - RNA, 17 nt, Human
uuguaaguuucagguga

SEQ ID NO: 2822528 - RNA, 18 nt, Human
uuguaaguuucaggugac

SEQ ID NO: 2822529 - RNA, 22 nt, Human
uuguaauugcuuuuuuaaauau

SEQ ID NO: 2822530 - RNA, 16 nt, Human
uuguaauucuucaguu

SEQ ID NO: 2822531 - RNA, 17 nt, Human
uuguaauucuucaguug

SEQ ID NO: 2822532 - RNA, 12 nt, Human
uuguaauugcuu

SEQ ID NO: 2822533 - RNA, 13 nt, Human
uuguaauuuugaa

SEQ ID NO: 2822534 - RNA, 12 nt, Human
aucuuaaaaagu

SEQ ID NO: 2822535 - RNA, 17 nt, Human
aucuuaaaaaguuguuc

SEQ ID NO: 2822536 - RNA, 19 nt, Human
aucuuaaaaaguuguucaa

SEQ ID NO: 2822537 - RNA, 14 nt, Human
aucuugcucugcug

SEQ ID NO: 2822538 - RNA, 21 nt, Human
aucuuaaugaaugagucuguu

SEQ ID NO: 2822539 - RNA, 16 nt, Human
aucuuaauauauuuga

SEQ ID NO: 2822540 - RNA, 17 nt, Human
aucuuggagacccugca

SEQ ID NO: 2822541 - RNA, 21 nt, Human
aucuuggacucaugaggaggg

SEQ ID NO: 2822542 - RNA, 16 nt, Human
aucuugcucugcugac

SEQ ID NO: 2822543 - RNA, 15 nt, Human
aucuugcucugcuga

SEQ ID NO: 2822544 - RNA, 23 nt, Human
aucuuggcacauuuaagagacag

SEQ ID NO: 2822545 - RNA, 21 nt, Human
aucuuggauagcuaauaauga

SEQ ID NO: 2822546 - RNA, 13 nt, Human
aucuuggcuaugu

SEQ ID NO: 2822547 - RNA, 21 nt, Human
aucuuggcuauguaauucuug

SEQ ID NO: 2822548 - RNA, 22 nt, Human
aucuuggcuauguaauucuugu

SEQ ID NO: 2822549 - RNA, 18 nt, Human
aucuugugugauuaacuu

SEQ ID NO: 2822550 - RNA, 22 nt, Human
aucuugugugauuaacuuauuu

SEQ ID NO: 2822551 - RNA, 23 nt, Human
aucuugugugauuaacuuauuua

SEQ ID NO: 2822552 - RNA, 16 nt, Human
aucuuguguuguccuu

SEQ ID NO: 2822553 - RNA, 17 nt, Human
aucuuguguuguccuuu

SEQ ID NO: 2822554 - RNA, 22 nt, Human
aucuuguguuguccuuuugucu

SEQ ID NO: 2822555 - RNA, 22 nt, Human
aucugucauuugagcagggcuc

SEQ ID NO: 2822556 - RNA, 17 nt, Human
aucugucauuugagcag

SEQ ID NO: 2822557 - RNA, 12 nt, Human
aucugucauuug

SEQ ID NO: 2822558 - RNA, 19 nt, Human
uugcccggauucugggagg

SEQ ID NO: 2822559 - RNA, 15 nt, Human
uugcccuagaugagc

SEQ ID NO: 2822560 - RNA, 16 nt, Human
uugcccuagauaguuu

SEQ ID NO: 2822561 - RNA, 21 nt, Human
aucugucaagaguaguuauau

SEQ ID NO: 2822562 - RNA, 22 nt, Human
aucugucaagaguaguuauaua

SEQ ID NO: 2822563 - RNA, 23 nt, Human
aucugucaagugggaucugucac

SEQ ID NO: 2822564 - RNA, 17 nt, Human
aucugucacaccagcca

SEQ ID NO: 2822565 - RNA, 23 nt, Human
uugccccuggggcuuccauccca

SEQ ID NO: 2822566 - RNA, 17 nt, Human
uugcccggauucuggga

SEQ ID NO: 2822567 - RNA, 17 nt, Human
uugccccgucucuguuc

SEQ ID NO: 2822568 - RNA, 21 nt, Human
uugcccccgugagccaauccc

SEQ ID NO: 2822569 - RNA, 22 nt, Human
uugcccccugcccguguacaua

SEQ ID NO: 2822570 - RNA, 16 nt, Human
aucuguggucuucaaa

SEQ ID NO: 2822571 - RNA, 20 nt, Human
aucuguguauauuauuuggc

SEQ ID NO: 2822572 - RNA, 21 nt, Human
aucuguguauauuauuuggca

SEQ ID NO: 2822573 - RNA, 18 nt, Human
aucuuaaagaaacagcuu

SEQ ID NO: 2822574 - RNA, 19 nt, Human
aucuuaaagaaacagcuuu

SEQ ID NO: 2822575 - RNA, 20 nt, Human
aucuuaaagaaacagcuuuc

SEQ ID NO: 2822576 - RNA, 21 nt, Human
aucuuaaagaaacagcuuuca

SEQ ID NO: 2822577 - RNA, 22 nt, Human
aucuuaaagaaacagcuuucaa

SEQ ID NO: 2822578 - RNA, 23 nt, Human
aucuuaaagaaacagcuuucaag

SEQ ID NO: 2822579 - RNA, 22 nt, Human
aucuguuuuuguuuauuucauu

SEQ ID NO: 2822580 - RNA, 13 nt, Human
aucuguguccugg

SEQ ID NO: 2822581 - RNA, 14 nt, Human
aucugugaugggag

SEQ ID NO: 2822582 - RNA, 22 nt, Human
aucugugcaaauccuugauacu

SEQ ID NO: 2822583 - RNA, 16 nt, Human
aucugugcauucuccu

SEQ ID NO: 2822584 - RNA, 18 nt, Human
aucugucacaccagccau

SEQ ID NO: 2822585 - RNA, 23 nt, Human
aucugugccccaugccuguccag

SEQ ID NO: 2822586 - RNA, 15 nt, Human
aucugugccccaugc

SEQ ID NO: 2822587 - RNA, 13 nt, Human
aucugugccccau

SEQ ID NO: 2822588 - RNA, 12 nt, Human
aucugugcccca

SEQ ID NO: 2822589 - RNA, 19 nt, Human
aucugugcucaggacucag

SEQ ID NO: 2822590 - RNA, 14 nt, Human
aucuuuaagaaaaa

SEQ ID NO: 2822591 - RNA, 13 nt, Human
aucuuuaagcaga

SEQ ID NO: 2822592 - RNA, 17 nt, Human
aucuuuaagcagagaag

SEQ ID NO: 2822593 - RNA, 14 nt, Human
uugcuuaguaaaau

SEQ ID NO: 2822594 - RNA, 15 nt, Human
uugcuuaguaaaauu

SEQ ID NO: 2822595 - RNA, 15 nt, Human
uugcucuuguagccc

SEQ ID NO: 2822596 - RNA, 19 nt, Human
uugcucuugucccacgugu

SEQ ID NO: 2822597 - RNA, 13 nt, Human
uugcuuuguaugc

SEQ ID NO: 2822598 - RNA, 14 nt, Human
uugcuuugcccagc

SEQ ID NO: 2822599 - RNA, 14 nt, Human
uugcuuugaagcag

SEQ ID NO: 2822600 - RNA, 15 nt, Human
uugcuuugaagcagu

SEQ ID NO: 2822601 - RNA, 19 nt, Human
uugcuuugauuuacagcaa

SEQ ID NO: 2822602 - RNA, 16 nt, Human
uugcuuugaagcaguu

SEQ ID NO: 2822603 - RNA, 22 nt, Human
uugcuuugaagcaguuguguca

SEQ ID NO: 2822604 - RNA, 20 nt, Human
uugcuuuaugccuucuuauu

SEQ ID NO: 2822605 - RNA, 15 nt, Human
uugcuuucuuuucuc

SEQ ID NO: 2822606 - RNA, 14 nt, Human
uugcuuugaaaaag

SEQ ID NO: 2822607 - RNA, 14 nt, Human
uugcuucauaaaug

SEQ ID NO: 2822608 - RNA, 16 nt, Human
uugcuuauuuaauaaa

SEQ ID NO: 2822609 - RNA, 13 nt, Human
uugcuuauuuaau

SEQ ID NO: 2822610 - RNA, 13 nt, Human
uugcuuaugacau

SEQ ID NO: 2822611 - RNA, 20 nt, Human
uugcuucauaaaugaagcag

SEQ ID NO: 2822612 - RNA, 19 nt, Human
aucuuguuccaaggccagg

SEQ ID NO: 2822613 - RNA, 15 nt, Human
uugcuucauaaauga

SEQ ID NO: 2822614 - RNA, 17 nt, Human
uugcuucauaaaugaag

SEQ ID NO: 2822615 - RNA, 16 nt, Human
uugcuuccccuuuugc

SEQ ID NO: 2822616 - RNA, 17 nt, Human
uugcuuccccuuuugcc

SEQ ID NO: 2822617 - RNA, 20 nt, Human
uugcuuccccuuuugccaau

SEQ ID NO: 2822618 - RNA, 15 nt, Human
uugcuuuauuccaga

SEQ ID NO: 2822619 - RNA, 11 nt, Human
uugcuuucacu

SEQ ID NO: 2822620 - RNA, 13 nt, Human
uugcuuucacucu

SEQ ID NO: 2822621 - RNA, 14 nt, Human
uugcuuccuccucc

SEQ ID NO: 2822622 - RNA, 15 nt, Human
uugcuuccuccuccc

SEQ ID NO: 2822623 - RNA, 17 nt, Human
uugcuuccuccucccca

SEQ ID NO: 2822624 - RNA, 14 nt, Human
uuggacuuucaaaa

SEQ ID NO: 2822625 - RNA, 23 nt, Human
uuggacuuucaaaauuaaaucug

SEQ ID NO: 2822626 - RNA, 18 nt, Human
uuggagacacaacuauuu

SEQ ID NO: 2822627 - RNA, 14 nt, Human
uuggagaaauuauu

SEQ ID NO: 2822628 - RNA, 15 nt, Human
uuggagaaauuauuu

SEQ ID NO: 2822629 - RNA, 20 nt, Human
uuggagauaaucuagaacac

SEQ ID NO: 2822630 - RNA, 14 nt, Human
uuggagaucaagga

SEQ ID NO: 2822631 - RNA, 22 nt, Human
uuggagaugcugaggguguuuc

SEQ ID NO: 2822632 - RNA, 12 nt, Human
uuggaaaauaaa

SEQ ID NO: 2822633 - RNA, 15 nt, Human
uuggaaaauaaauca

SEQ ID NO: 2822634 - RNA, 15 nt, Human
uuggacuggaugcau

SEQ ID NO: 2822635 - RNA, 13 nt, Human
uuggacuauuaua

SEQ ID NO: 2822636 - RNA, 14 nt, Human
uuggacuccaucuc

SEQ ID NO: 2822637 - RNA, 16 nt, Human
uugcuuuguaugcacu

SEQ ID NO: 2822638 - RNA, 14 nt, Human
uuggaaaaauguuu

SEQ ID NO: 2822639 - RNA, 23 nt, Human
uugcuuuguuaaaaaaaaaaaga

SEQ ID NO: 2822640 - RNA, 14 nt, Human
uugcuuuguugcac

SEQ ID NO: 2822641 - RNA, 22 nt, Human
aucuauuuuggauuguauauug

SEQ ID NO: 2822642 - RNA, 17 nt, Human
aucuagcgcaauugaag

SEQ ID NO: 2822643 - RNA, 15 nt, Human
aucuagcuaguaaua

SEQ ID NO: 2822644 - RNA, 21 nt, Human
aucuacccaagggcagaaagu

SEQ ID NO: 2822645 - RNA, 19 nt, Human
aucuacuaauuccacaccu

SEQ ID NO: 2822646 - RNA, 15 nt, Human
aucuacuaauuccac

SEQ ID NO: 2822647 - RNA, 23 nt, Human
aucuaauauguaacaagccaccc

SEQ ID NO: 2822648 - RNA, 20 nt, Human
aucuaauauguaacaagcca

SEQ ID NO: 2822649 - RNA, 14 nt, Human
aucuaauauuaaaa

SEQ ID NO: 2822650 - RNA, 16 nt, Human
aucuaauuauuuugca

SEQ ID NO: 2822651 - RNA, 12 nt, Human
uugagugugugu

SEQ ID NO: 2822652 - RNA, 15 nt, Human
uugagugugugugug

SEQ ID NO: 2822653 - RNA, 18 nt, Human
uugagugugugugugcau

SEQ ID NO: 2822654 - RNA, 15 nt, Human
uugauacucuuucua

SEQ ID NO: 2822655 - RNA, 20 nt, Human
uugauacucuuucuaaugcu

SEQ ID NO: 2822656 - RNA, 16 nt, Human
uugauacuuauauuuu

SEQ ID NO: 2822657 - RNA, 20 nt, Human
uugauacuuauauuuucgua

SEQ ID NO: 2822658 - RNA, 23 nt, Human
uugagugggguuaucucuguguu

SEQ ID NO: 2822659 - RNA, 23 nt, Human
uugacaugagauuuauaagguuu

SEQ ID NO: 2822660 - RNA, 16 nt, Human
uugacaucagccagcu

SEQ ID NO: 2822661 - RNA, 18 nt, Human
uugacaucagccagcugc

SEQ ID NO: 2822662 - RNA, 18 nt, Human
uugacaucaguuccuuug

SEQ ID NO: 2822663 - RNA, 22 nt, Human
uugacaucaguuccuuugugug

SEQ ID NO: 2822664 - RNA, 12 nt, Human
uugacagggcac

SEQ ID NO: 2822665 - RNA, 10 nt, Human
uugacagggc

SEQ ID NO: 2822666 - RNA, 14 nt, Human
uugacacucugcag

SEQ ID NO: 2822667 - RNA, 17 nt, Human
uugacacucugcagacu

SEQ ID NO: 2822668 - RNA, 22 nt, Human
aucccuuuauuacccccuccuu

SEQ ID NO: 2822669 - RNA, 22 nt, Human
aucccuugaccaggccugggcc

SEQ ID NO: 2822670 - RNA, 18 nt, Human
uugacaauaauuucaggu

SEQ ID NO: 2822671 - RNA, 14 nt, Human
uugacacaagugga

SEQ ID NO: 2822672 - RNA, 17 nt, Human
uugacacaaguggaccu

SEQ ID NO: 2822673 - RNA, 18 nt, Human
uugacacaaguggaccuu

SEQ ID NO: 2822674 - RNA, 15 nt, Human
uugacacaauuggaa

SEQ ID NO: 2822675 - RNA, 16 nt, Human
uugacacaauuggaau

SEQ ID NO: 2822676 - RNA, 16 nt, Human
uugacacagaaaaugu

SEQ ID NO: 2822677 - RNA, 18 nt, Human
uugacacauccgccuuuu

SEQ ID NO: 2822678 - RNA, 20 nt, Human
uugacacauccgccuuuugu

SEQ ID NO: 2822679 - RNA, 21 nt, Human
uugacacauccgccuuuugua

SEQ ID NO: 2822680 - RNA, 23 nt, Human
uugacacauccgccuuuuguaua

SEQ ID NO: 2822681 - RNA, 13 nt, Human
aucccuuuauuac

SEQ ID NO: 2822682 - RNA, 14 nt, Human
aucccuuuauuacc

SEQ ID NO: 2822683 - RNA, 14 nt, Human
aucccuugaccagg

SEQ ID NO: 2822684 - RNA, 18 nt, Human
aucccuugaccaggccug

SEQ ID NO: 2822685 - RNA, 13 nt, Human
aucccuucucaca

SEQ ID NO: 2822686 - RNA, 14 nt, Human
aucccuucucacag

SEQ ID NO: 2822687 - RNA, 16 nt, Human
aucccuucucacagca

SEQ ID NO: 2822688 - RNA, 17 nt, Human
aucccuucucacagcac

SEQ ID NO: 2822689 - RNA, 11 nt, Human
uugagaaaaau

SEQ ID NO: 2822690 - RNA, 17 nt, Human
uugaccaucugcuuuua

SEQ ID NO: 2822691 - RNA, 19 nt, Human
uugagaaaaauauauacua

SEQ ID NO: 2822692 - RNA, 11 nt, Human
uugaccaggcc

SEQ ID NO: 2822693 - RNA, 18 nt, Human
uugacauugcguuugacc

SEQ ID NO: 2822694 - RNA, 21 nt, Human
uugacauuguauguaucuauu

SEQ ID NO: 2822695 - RNA, 22 nt, Human
uugacauuguauguaucuauuu

SEQ ID NO: 2822696 - RNA, 11 nt, Human
uugacauuuaa

SEQ ID NO: 2822697 - RNA, 13 nt, Human
uugacauuuaauu

SEQ ID NO: 2822698 - RNA, 15 nt, Human
uugacauuuguaguu

SEQ ID NO: 2822699 - RNA, 22 nt, Human
uugacauuaagaauguugguuu

SEQ ID NO: 2822700 - RNA, 15 nt, Human
uugacauuauagaca

SEQ ID NO: 2822701 - RNA, 14 nt, Human
uugacauugcguuu

SEQ ID NO: 2822702 - RNA, 16 nt, Human
uugagcagggcucagc

SEQ ID NO: 2822703 - RNA, 12 nt, Human
uugagcagggcu

SEQ ID NO: 2822704 - RNA, 21 nt, Human
uugagcacaaaaccuguccua

SEQ ID NO: 2822705 - RNA, 11 nt, Human
uugagacagag

SEQ ID NO: 2822706 - RNA, 22 nt, Human
uugagacacggagcccagcccu

SEQ ID NO: 2822707 - RNA, 10 nt, Human
uugagacaga

SEQ ID NO: 2822708 - RNA, 23 nt, Human
uugagaaucccaaauuugauuga

SEQ ID NO: 2822709 - RNA, 16 nt, Human
uugagaauggaaacca

SEQ ID NO: 2822710 - RNA, 17 nt, Human
uugagaauggaaaccac

SEQ ID NO: 2822711 - RNA, 17 nt, Human
uugagaaggagagaaag

SEQ ID NO: 2822712 - RNA, 16 nt, Human
uugagaaguucauugu

SEQ ID NO: 2822713 - RNA, 16 nt, Human
uugagaauauugaagu

SEQ ID NO: 2822714 - RNA, 15 nt, Human
aucugaagcccuccc

SEQ ID NO: 2822715 - RNA, 18 nt, Human
aucugaagcccucccagg

SEQ ID NO: 2822716 - RNA, 20 nt, Human
aucugaagcuucacucacug

SEQ ID NO: 2822717 - RNA, 23 nt, Human
aucugaagcuucacucacuguca

SEQ ID NO: 2822718 - RNA, 18 nt, Human
aucugaaggggcaaauuc

SEQ ID NO: 2822719 - RNA, 21 nt, Human
aucugaaggggcaaauucuuu

SEQ ID NO: 2822720 - RNA, 23 nt, Human
aucugaaggggcaaauucuuuug

SEQ ID NO: 2822721 - RNA, 13 nt, Human
aucugaaauucua

SEQ ID NO: 2822722 - RNA, 20 nt, Human
aucucuuuguacaggaacug

SEQ ID NO: 2822723 - RNA, 13 nt, Human
aucugaaaacugg

SEQ ID NO: 2822724 - RNA, 14 nt, Human
aucugaaaacugga

SEQ ID NO: 2822725 - RNA, 15 nt, Human
aucugaaaacuggaa

SEQ ID NO: 2822726 - RNA, 22 nt, Human
aucucuuuguucuaaagaugga

SEQ ID NO: 2822727 - RNA, 11 nt, Human
aucucuuuuau

SEQ ID NO: 2822728 - RNA, 12 nt, Human
aucucuuuuaua

SEQ ID NO: 2822729 - RNA, 19 nt, Human
aucucuuuuauauuuguag

SEQ ID NO: 2822730 - RNA, 20 nt, Human
aucucuuuuauauuuguagg

SEQ ID NO: 2822731 - RNA, 15 nt, Human
aucucuugaggccag

SEQ ID NO: 2822732 - RNA, 13 nt, Human
aucucuuucacau

SEQ ID NO: 2822733 - RNA, 17 nt, Human
aucucuuucacauuguu

SEQ ID NO: 2822734 - RNA, 19 nt, Human
aucucuuucacauuguuug

SEQ ID NO: 2822735 - RNA, 18 nt, Human
aucucaaggaaucuuuaa

SEQ ID NO: 2822736 - RNA, 13 nt, Human
aucucaccccauc

SEQ ID NO: 2822737 - RNA, 23 nt, Human
aucucaccccaucccacacccug

SEQ ID NO: 2822738 - RNA, 22 nt, Human
aucucaccccaucccacacccu

SEQ ID NO: 2822739 - RNA, 16 nt, Human
aucucaccccauccca

SEQ ID NO: 2822740 - RNA, 14 nt, Human
aucucaccccaucc

SEQ ID NO: 2822741 - RNA, 14 nt, Human
uugauguuacagau

SEQ ID NO: 2822742 - RNA, 15 nt, Human
uugauguuacagauu

SEQ ID NO: 2822743 - RNA, 19 nt, Human
uugauguuuguggccucag

SEQ ID NO: 2822744 - RNA, 18 nt, Human
uugauguuuguggccuca

SEQ ID NO: 2822745 - RNA, 17 nt, Human
uugauguuuguggccuc

SEQ ID NO: 2822746 - RNA, 16 nt, Human
uugauguuuguggccu

SEQ ID NO: 2822747 - RNA, 15 nt, Human
uugauguuuguggcc

SEQ ID NO: 2822748 - RNA, 13 nt, Human
uugauguuugugg

SEQ ID NO: 2822749 - RNA, 16 nt, Human
uugauguuggcuggga

SEQ ID NO: 2822750 - RNA, 13 nt, Human
uugauguuggcug

SEQ ID NO: 2822751 - RNA, 20 nt, Human
uugauguguuuauuuauaga

SEQ ID NO: 2822752 - RNA, 19 nt, Human
uugcaagcaugcuugugaa

SEQ ID NO: 2822753 - RNA, 18 nt, Human
uugcccaggcuggucuca

SEQ ID NO: 2822754 - RNA, 12 nt, Human
uugccaccccac

SEQ ID NO: 2822755 - RNA, 17 nt, Human
uugccaccccacccucc

SEQ ID NO: 2822756 - RNA, 18 nt, Human
uugccaccccacccuccc

SEQ ID NO: 2822757 - RNA, 23 nt, Human
uugcccaggcuggcgugcagugg

SEQ ID NO: 2822758 - RNA, 14 nt, Human
uugcccaggcuggc

SEQ ID NO: 2822759 - RNA, 12 nt, Human
uugcccaggcug

SEQ ID NO: 2822760 - RNA, 11 nt, Human
uugcccaggcu

SEQ ID NO: 2822761 - RNA, 18 nt, Human
uugcccaggcaggucuug

SEQ ID NO: 2822762 - RNA, 16 nt, Human
uugcccaggcaggucu

SEQ ID NO: 2822763 - RNA, 14 nt, Human
uugcccaggcaggu

SEQ ID NO: 2822764 - RNA, 13 nt, Human
uugcccaggcagg

SEQ ID NO: 2822765 - RNA, 14 nt, Human
uugccaauuuuccu

SEQ ID NO: 2822766 - RNA, 22 nt, Human
uugccacagcuggagcucucaa

SEQ ID NO: 2822767 - RNA, 17 nt, Human
uugccaccaccucugug

SEQ ID NO: 2822768 - RNA, 18 nt, Human
uugccaccaccucugugg

SEQ ID NO: 2822769 - RNA, 16 nt, Human
uugccaccaggagaac

SEQ ID NO: 2822770 - RNA, 15 nt, Human
uugccaccaggagaa

SEQ ID NO: 2822771 - RNA, 14 nt, Human
uugccaccaggaga

SEQ ID NO: 2822772 - RNA, 13 nt, Human
uugccaccaggag

SEQ ID NO: 2822773 - RNA, 17 nt, Human
uugcaccuaccucacag

SEQ ID NO: 2822774 - RNA, 19 nt, Human
uugcauggcaucaccucca

SEQ ID NO: 2822775 - RNA, 19 nt, Human
uugcauggcuccagaaaug

SEQ ID NO: 2822776 - RNA, 20 nt, Human
uugcauggcuccagaaaugu

SEQ ID NO: 2822777 - RNA, 15 nt, Human
uugccaagcucagga

SEQ ID NO: 2822778 - RNA, 12 nt, Human
uugccaagacaa

SEQ ID NO: 2822779 - RNA, 13 nt, Human
uugccaagacaaa

SEQ ID NO: 2822780 - RNA, 15 nt, Human
uugccaagacaaauc

SEQ ID NO: 2822781 - RNA, 16 nt, Human
uugccaagacaaauca

SEQ ID NO: 2822782 - RNA, 17 nt, Human
uugccaagacaaaucaa

SEQ ID NO: 2822783 - RNA, 22 nt, Human
uugccaagacaaaucaacagaa

SEQ ID NO: 2822784 - RNA, 24 nt, Human
uugccaagacaaaucaacagaagc

SEQ ID NO: 2822785 - RNA, 15 nt, Human
uugccaaaucuggcu

SEQ ID NO: 2822786 - RNA, 14 nt, Human
uugcaauggcagcc

SEQ ID NO: 2822787 - RNA, 15 nt, Human
uugcaauaucugaag

SEQ ID NO: 2822788 - RNA, 15 nt, Human
uugcaauaccaagua

SEQ ID NO: 2822789 - RNA, 15 nt, Human
uugcacccagcccag

SEQ ID NO: 2822790 - RNA, 22 nt, Human
uugcaauaucugaagcccuccc

SEQ ID NO: 2822791 - RNA, 13 nt, Human
uugcaccccucac

SEQ ID NO: 2822792 - RNA, 22 nt, Human
uugcaccccucacucuggccuc

SEQ ID NO: 2822793 - RNA, 24 nt, Human
uugcaccccucacucuggccucag

SEQ ID NO: 2822794 - RNA, 23 nt, Human
uuuauauggaugauucagaaauu

SEQ ID NO: 2822795 - RNA, 14 nt, Human
uuuauauguacaug

SEQ ID NO: 2822796 - RNA, 13 nt, Human
uuuauauguacau

SEQ ID NO: 2822797 - RNA, 13 nt, Human
uuuaucacuuuuu

SEQ ID NO: 2822798 - RNA, 19 nt, Human
uuuaucacuuuuugaacua

SEQ ID NO: 2822799 - RNA, 20 nt, Human
uuuaucacuuuuugaacuaa

SEQ ID NO: 2822800 - RNA, 22 nt, Human
uuuaucacuuuuugaacuaaga

SEQ ID NO: 2822801 - RNA, 14 nt, Human
uuuauauguacugu

SEQ ID NO: 2822802 - RNA, 12 nt, Human
uuuauauguacu

SEQ ID NO: 2822803 - RNA, 18 nt, Human
uuuauauggggaauauau

SEQ ID NO: 2822804 - RNA, 17 nt, Human
uuuauauguacaugaga

SEQ ID NO: 2822805 - RNA, 21 nt, Human
uuuauauguaccguaggcuuu

SEQ ID NO: 2822806 - RNA, 13 nt, Human
uuuaguggcuuca

SEQ ID NO: 2822807 - RNA, 16 nt, Human
uuuaguguaauaagac

SEQ ID NO: 2822808 - RNA, 16 nt, Human
uuuagggccaggcagg

SEQ ID NO: 2822809 - RNA, 19 nt, Human
uuuagugaucacagcagcu

SEQ ID NO: 2822810 - RNA, 13 nt, Human
uuuagugcugcau

SEQ ID NO: 2822811 - RNA, 14 nt, Human
uuuagggccaggca

SEQ ID NO: 2822812 - RNA, 23 nt, Human
uuuaggagcuaaggcucuaugag

SEQ ID NO: 2822813 - RNA, 20 nt, Human
uuuaggcacucuuaaaugau

SEQ ID NO: 2822814 - RNA, 22 nt, Human
uuuaggcacucuuaaaugaucu

SEQ ID NO: 2822815 - RNA, 23 nt, Human
uuuacuuaaagauuuaucaaauc

SEQ ID NO: 2822816 - RNA, 20 nt, Human
uuuacuuaaagauuuaucaa

SEQ ID NO: 2822817 - RNA, 22 nt, Human
uuuacuuaaagauuuaucaaau

SEQ ID NO: 2822818 - RNA, 23 nt, Human
uuuacuucaaugggcucuuccaa

SEQ ID NO: 2822819 - RNA, 16 nt, Human
uuuacuucacuucaaa

SEQ ID NO: 2822820 - RNA, 21 nt, Human
uuuacccuugagcccucccca

SEQ ID NO: 2822821 - RNA, 19 nt, Human
uuuacucauugaaauguca

SEQ ID NO: 2822822 - RNA, 22 nt, Human
uuuacucauugaaaugucacgu

SEQ ID NO: 2822823 - RNA, 18 nt, Human
uuuacugacccuggggcu

SEQ ID NO: 2822824 - RNA, 16 nt, Human
uuuacuccucacacuu

SEQ ID NO: 2822825 - RNA, 17 nt, Human
uuuacuccucacacuua

SEQ ID NO: 2822826 - RNA, 21 nt, Human
uuuacuccucacacuuacugu

SEQ ID NO: 2822827 - RNA, 21 nt, Human
uuuacucuaugccccaaauau

SEQ ID NO: 2822828 - RNA, 22 nt, Human
uuuacucuaugccccaaauaua

SEQ ID NO: 2822829 - RNA, 14 nt, Human
uuuacuuaaagauu

SEQ ID NO: 2822830 - RNA, 20 nt, Human
uuuacuguuuugaaaucaau

SEQ ID NO: 2822831 - RNA, 22 nt, Human
uuuacuguuuugaaaucaaugc

SEQ ID NO: 2822832 - RNA, 15 nt, Human
uuuacuuaaagauuu

SEQ ID NO: 2822833 - RNA, 16 nt, Human
uuuacuuaaagauuua

SEQ ID NO: 2822834 - RNA, 22 nt, Human
uuuacugccaaagggaaauauc

SEQ ID NO: 2822835 - RNA, 12 nt, Human
uuuacuguguuu

SEQ ID NO: 2822836 - RNA, 17 nt, Human
uuuacugugaaacuggc

SEQ ID NO: 2822837 - RNA, 13 nt, Human
uuuaccuagaaga

SEQ ID NO: 2822838 - RNA, 14 nt, Human
uuuaccuagagaac

SEQ ID NO: 2822839 - RNA, 13 nt, Human
uuuacccuuggcu

SEQ ID NO: 2822840 - RNA, 14 nt, Human
augcuacugucuca

SEQ ID NO: 2822841 - RNA, 20 nt, Human
augcuacugucucacugaaa

SEQ ID NO: 2822842 - RNA, 16 nt, Human
augcuacccagccauu

SEQ ID NO: 2822843 - RNA, 14 nt, Human
augcguucacucca

SEQ ID NO: 2822844 - RNA, 15 nt, Human
augcguucacuccaa

SEQ ID NO: 2822845 - RNA, 16 nt, Human
augcgugugugugugu

SEQ ID NO: 2822846 - RNA, 17 nt, Human
augcccggcuaauuuuu

SEQ ID NO: 2822847 - RNA, 12 nt, Human
augcgugugugu

SEQ ID NO: 2822848 - RNA, 16 nt, Human
augccuuuuuuguagu

SEQ ID NO: 2822849 - RNA, 13 nt, Human
augcgcaggcugg

SEQ ID NO: 2822850 - RNA, 18 nt, Human
augcgauuuuauuacugg

SEQ ID NO: 2822851 - RNA, 19 nt, Human
augcgauuuuauuacuggc

SEQ ID NO: 2822852 - RNA, 20 nt, Human
augcgauuuuauuacuggcg

SEQ ID NO: 2822853 - RNA, 12 nt, Human
augcgcagcccc

SEQ ID NO: 2822854 - RNA, 23 nt, Human
augcgcagccccaucugugcauu

SEQ ID NO: 2822855 - RNA, 22 nt, Human
augcgcaggcuggcccugcccu

SEQ ID NO: 2822856 - RNA, 20 nt, Human
augcgcaggcuggcccugcc

SEQ ID NO: 2822857 - RNA, 18 nt, Human
augcgcaggcuggcccug

SEQ ID NO: 2822858 - RNA, 14 nt, Human
augcgcaggcuggc

SEQ ID NO: 2822859 - RNA, 14 nt, Human
augccagugugcug

SEQ ID NO: 2822860 - RNA, 20 nt, Human
augccagugugcugaugggc

SEQ ID NO: 2822861 - RNA, 11 nt, Human
augccauaaua

SEQ ID NO: 2822862 - RNA, 12 nt, Human
augccauaauac

SEQ ID NO: 2822863 - RNA, 13 nt, Human
augccauaauaca

SEQ ID NO: 2822864 - RNA, 17 nt, Human
augccauaauacaaaag

SEQ ID NO: 2822865 - RNA, 18 nt, Human
augccagggccgaccaga

SEQ ID NO: 2822866 - RNA, 21 nt, Human
augccagggccgaccagagga

SEQ ID NO: 2822867 - RNA, 12 nt, Human
augccaggacac

SEQ ID NO: 2822868 - RNA, 19 nt, Human
augccagcucagucccauc

SEQ ID NO: 2822869 - RNA, 18 nt, Human
augccagcucagucccau

SEQ ID NO: 2822870 - RNA, 16 nt, Human
augccagcuacuuccu

SEQ ID NO: 2822871 - RNA, 19 nt, Human
uuuaagguagcuucagcua

SEQ ID NO: 2822872 - RNA, 12 nt, Human
augccauccuca

SEQ ID NO: 2822873 - RNA, 21 nt, Human
augccauccucaaacacugca

SEQ ID NO: 2822874 - RNA, 19 nt, Human
augccaucuguguccuggu

SEQ ID NO: 2822875 - RNA, 23 nt, Human
augccauccucaaacacugcagg

SEQ ID NO: 2822876 - RNA, 13 nt, Human
augccauccucuu

SEQ ID NO: 2822877 - RNA, 15 nt, Human
augccauccucuuuc

SEQ ID NO: 2822878 - RNA, 21 nt, Human
augccauccucuuucucuuuu

SEQ ID NO: 2822879 - RNA, 23 nt, Human
augccauccucuuucucuuuucu

SEQ ID NO: 2822880 - RNA, 18 nt, Human
augccccgucccccucug

SEQ ID NO: 2822881 - RNA, 21 nt, Human
augccccgucccccucuggcu

SEQ ID NO: 2822882 - RNA, 18 nt, Human
augcuguucucuucuuca

SEQ ID NO: 2822883 - RNA, 19 nt, Human
augcuguucucuucuucau

SEQ ID NO: 2822884 - RNA, 11 nt, Human
augcuguuugu

SEQ ID NO: 2822885 - RNA, 22 nt, Human
augcuguuuguagugaaauaau

SEQ ID NO: 2822886 - RNA, 15 nt, Human
augcuuaaaagguug

SEQ ID NO: 2822887 - RNA, 20 nt, Human
augcuggcuguuggcugggg

SEQ ID NO: 2822888 - RNA, 19 nt, Human
augcuggcuguuggcuggg

SEQ ID NO: 2822889 - RNA, 23 nt, Human
augcuggaaccugcaaaaaauac

SEQ ID NO: 2822890 - RNA, 16 nt, Human
augcuucucaucuugu

SEQ ID NO: 2822891 - RNA, 19 nt, Human
augcuucucaucuugugaa

SEQ ID NO: 2822892 - RNA, 20 nt, Human
augcuucucaucuugugaaa

SEQ ID NO: 2822893 - RNA, 21 nt, Human
augcuucucaucuugugaaau

SEQ ID NO: 2822894 - RNA, 22 nt, Human
augcuucucaucuugugaaaug

SEQ ID NO: 2822895 - RNA, 13 nt, Human
augcuuaauuucu

SEQ ID NO: 2822896 - RNA, 14 nt, Human
augcuuaauuucua

SEQ ID NO: 2822897 - RNA, 15 nt, Human
auggaagacaggaaa

SEQ ID NO: 2822898 - RNA, 16 nt, Human
auggaagacaggaaag

SEQ ID NO: 2822899 - RNA, 12 nt, Human
auggaagagaaa

SEQ ID NO: 2822900 - RNA, 13 nt, Human
auggaagagaaau

SEQ ID NO: 2822901 - RNA, 14 nt, Human
auggaagagaaauc

SEQ ID NO: 2822902 - RNA, 15 nt, Human
auggaagagaaaucu

SEQ ID NO: 2822903 - RNA, 17 nt, Human
auggaagagaaaucuca

SEQ ID NO: 2822904 - RNA, 14 nt, Human
auggaagccaacac

SEQ ID NO: 2822905 - RNA, 14 nt, Human
auggaaggggcuga

SEQ ID NO: 2822906 - RNA, 18 nt, Human
augcuggcuguuggcugg

SEQ ID NO: 2822907 - RNA, 14 nt, Human
augcuggagaagag

SEQ ID NO: 2822908 - RNA, 15 nt, Human
augcuggagaagaga

SEQ ID NO: 2822909 - RNA, 16 nt, Human
augcuggagaagagag

SEQ ID NO: 2822910 - RNA, 17 nt, Human
augcuggagaagagagg

SEQ ID NO: 2822911 - RNA, 18 nt, Human
augcuggagaagagagga

SEQ ID NO: 2822912 - RNA, 19 nt, Human
augcuggagaagagaggag

SEQ ID NO: 2822913 - RNA, 23 nt, Human
augcuggagaagagaggagagga

SEQ ID NO: 2822914 - RNA, 12 nt, Human
augcuggagaag

SEQ ID NO: 2822915 - RNA, 22 nt, Human
augcuggacggcauuccugcuu

SEQ ID NO: 2822916 - RNA, 21 nt, Human
augcuggacggcauuccugcu

SEQ ID NO: 2822917 - RNA, 14 nt, Human
uuuaucagcaaaaa

SEQ ID NO: 2822918 - RNA, 15 nt, Human
uuuaucagcaaaaaa

SEQ ID NO: 2822919 - RNA, 13 nt, Human
uuuaucagauaca

SEQ ID NO: 2822920 - RNA, 14 nt, Human
uuuaucagauacau

SEQ ID NO: 2822921 - RNA, 16 nt, Human
uuuaucagauacauca

SEQ ID NO: 2822922 - RNA, 20 nt, Human
uuuaucagauacaucacugc

SEQ ID NO: 2822923 - RNA, 21 nt, Human
uuuaucagauacaucacugcu

SEQ ID NO: 2822924 - RNA, 22 nt, Human
uuuaucagauacaucacugcuu

SEQ ID NO: 2822925 - RNA, 22 nt, Human
uuuaucaguuuccagucucaaa

SEQ ID NO: 2822926 - RNA, 15 nt, Human
uuuaucaugaagccu

SEQ ID NO: 2822927 - RNA, 16 nt, Human
uuuaucaugaagccug

SEQ ID NO: 2822928 - RNA, 14 nt, Human
augcucagaccagc

SEQ ID NO: 2822929 - RNA, 12 nt, Human
augcucagacca

SEQ ID NO: 2822930 - RNA, 17 nt, Human
augcucccuccccugcc

SEQ ID NO: 2822931 - RNA, 16 nt, Human
augcucccuccccugc

SEQ ID NO: 2822932 - RNA, 22 nt, Human
augcucccuccccugcccuggu

SEQ ID NO: 2822933 - RNA, 13 nt, Human
augcuccuaguuu

SEQ ID NO: 2822934 - RNA, 22 nt, Human
augcuccuaguuugaccucaca

SEQ ID NO: 2822935 - RNA, 16 nt, Human
augcuccucacugccc

SEQ ID NO: 2822936 - RNA, 20 nt, Human
augcucccuccccugcccug

SEQ ID NO: 2822937 - RNA, 19 nt, Human
augcucccuccccugcccu

SEQ ID NO: 2822938 - RNA, 18 nt, Human
augcucccuccccugccc

SEQ ID NO: 2822939 - RNA, 14 nt, Human
augcucaguugcua

SEQ ID NO: 2822940 - RNA, 21 nt, Human
augcucaguugcuaaacacug

SEQ ID NO: 2822941 - RNA, 17 nt, Human
augcucagaccagcucu

SEQ ID NO: 2822942 - RNA, 15 nt, Human
uuucacauuaauauu

SEQ ID NO: 2822943 - RNA, 20 nt, Human
uuucacauuaauggucuaaa

SEQ ID NO: 2822944 - RNA, 14 nt, Human
uuucaaacuguaaa

SEQ ID NO: 2822945 - RNA, 16 nt, Human
uuucaaacuuacuauu

SEQ ID NO: 2822946 - RNA, 19 nt, Human
uuucaaacuuacuauuuug

SEQ ID NO: 2822947 - RNA, 22 nt, Human
uuucaaacuuacuauuuugaca

SEQ ID NO: 2822948 - RNA, 22 nt, Human
uuucaaacuccaagguucccuu

SEQ ID NO: 2822949 - RNA, 16 nt, Human
auggaauugauuugca

SEQ ID NO: 2822950 - RNA, 15 nt, Human
auggaauugauuugc

SEQ ID NO: 2822951 - RNA, 14 nt, Human
auggaauugauuug

SEQ ID NO: 2822952 - RNA, 13 nt, Human
auggaauugauuu

SEQ ID NO: 2822953 - RNA, 17 nt, Human
auggaaugcuguguuaa

SEQ ID NO: 2822954 - RNA, 21 nt, Human
auggaaugcuguguuaaauaa

SEQ ID NO: 2822955 - RNA, 18 nt, Human
auggaauggacauccugu

SEQ ID NO: 2822956 - RNA, 14 nt, Human
uuucaccuuuacuu

SEQ ID NO: 2822957 - RNA, 16 nt, Human
uuucaccuuuacuuua

SEQ ID NO: 2822958 - RNA, 19 nt, Human
uuucaccuuuacuuuagaa

SEQ ID NO: 2822959 - RNA, 15 nt, Human
uuucacuagaaaagc

SEQ ID NO: 2822960 - RNA, 21 nt, Human
uuucagaaagaaguggggaca

SEQ ID NO: 2822961 - RNA, 16 nt, Human
uuucaucauuguuucu

SEQ ID NO: 2822962 - RNA, 19 nt, Human
uuucauccccuuacccuua

SEQ ID NO: 2822963 - RNA, 22 nt, Human
uuucauccccuuacccuuagaa

SEQ ID NO: 2822964 - RNA, 16 nt, Human
uuucaucucuuguaua

SEQ ID NO: 2822965 - RNA, 13 nt, Human
uuucccuaaaaua

SEQ ID NO: 2822966 - RNA, 19 nt, Human
uuucccuaaaauacauuua

SEQ ID NO: 2822967 - RNA, 10 nt, Human
uuucccaagc

SEQ ID NO: 2822968 - RNA, 20 nt, Human
uuucccaaugguguuuuucu

SEQ ID NO: 2822969 - RNA, 21 nt, Human
uuucaccuccuucaauuccau

SEQ ID NO: 2822970 - RNA, 22 nt, Human
uuucauggugaaaauguacuga

SEQ ID NO: 2822971 - RNA, 20 nt, Human
uuucauggugaaaauguacu

SEQ ID NO: 2822972 - RNA, 21 nt, Human
uuucauggugaaaauguacug

SEQ ID NO: 2822973 - RNA, 18 nt, Human
uuucauguacaagaugaa

SEQ ID NO: 2822974 - RNA, 12 nt, Human
uuucauguacaa

SEQ ID NO: 2822975 - RNA, 19 nt, Human
uuuaaaucaaguauuuugu

SEQ ID NO: 2822976 - RNA, 23 nt, Human
uuuaaauaucugaacauuuacua

SEQ ID NO: 2822977 - RNA, 17 nt, Human
uuuaaaaauacacuugu

SEQ ID NO: 2822978 - RNA, 23 nt, Human
uuuaaaaaguuguagcagauugu

SEQ ID NO: 2822979 - RNA, 19 nt, Human
uuuaaaucuaaaucuauuu

SEQ ID NO: 2822980 - RNA, 22 nt, Human
uuuaaaucuaaaucuauuuauu

SEQ ID NO: 2822981 - RNA, 18 nt, Human
uuuaaaugcauaaaugca

SEQ ID NO: 2822982 - RNA, 16 nt, Human
uuuaaauguaaaacau

SEQ ID NO: 2822983 - RNA, 11 nt, Human
uuuaaauguac

SEQ ID NO: 2822984 - RNA, 20 nt, Human
uuuaaauguacagacauauu

SEQ ID NO: 2822985 - RNA, 20 nt, Human
uuuaaauguacaguuugggg

SEQ ID NO: 2822986 - RNA, 12 nt, Human
uuuaaauguaua

SEQ ID NO: 2822987 - RNA, 15 nt, Human
augcaaagaaaauca

SEQ ID NO: 2822988 - RNA, 13 nt, Human
uuuaaaaacugga

SEQ ID NO: 2822989 - RNA, 21 nt, Human
uuuaaaaagaaacaagaugcu

SEQ ID NO: 2822990 - RNA, 17 nt, Human
uuuaaaaagaaaucugg

SEQ ID NO: 2822991 - RNA, 20 nt, Human
uuuaaaaaggaacugcagca

SEQ ID NO: 2822992 - RNA, 17 nt, Human
uuuaaaaaaaucacaaa

SEQ ID NO: 2822993 - RNA, 16 nt, Human
uuuaaaaaaauuuaag

SEQ ID NO: 2822994 - RNA, 17 nt, Human
uuuaaaaaaauuuaagu

SEQ ID NO: 2822995 - RNA, 18 nt, Human
uuuaaaaaaauuuaagug

SEQ ID NO: 2822996 - RNA, 16 nt, Human
augcagaguugacaug

SEQ ID NO: 2822997 - RNA, 19 nt, Human
augcagaguugacaugaga

SEQ ID NO: 2822998 - RNA, 17 nt, Human
augcagauagaaucaau

SEQ ID NO: 2822999 - RNA, 21 nt, Human
uuuaaaaaauuaaucugggcc

SEQ ID NO: 2823000 - RNA, 18 nt, Human
uuuaaaaacauagaaaaa

SEQ ID NO: 2823001 - RNA, 19 nt, Human
uuuaaaaacauagaaaaau

SEQ ID NO: 2823002 - RNA, 13 nt, Human
uuuaagagagaaa

SEQ ID NO: 2823003 - RNA, 14 nt, Human
uuuaagagagaaau

SEQ ID NO: 2823004 - RNA, 21 nt, Human
uuuaagagagaaaucugaaaa

SEQ ID NO: 2823005 - RNA, 17 nt, Human
uuuaagacguguuugug

SEQ ID NO: 2823006 - RNA, 19 nt, Human
uuuaagacguguuuguguu

SEQ ID NO: 2823007 - RNA, 23 nt, Human
uuuaagacucucgcaucuuccca

SEQ ID NO: 2823008 - RNA, 12 nt, Human
uuuaaggaaaca

SEQ ID NO: 2823009 - RNA, 11 nt, Human
uuuaaggaaaa

SEQ ID NO: 2823010 - RNA, 22 nt, Human
uuuaaggguuuguggaaaauga

SEQ ID NO: 2823011 - RNA, 17 nt, Human
uuuaaggguuuguggaa

SEQ ID NO: 2823012 - RNA, 20 nt, Human
uuuaaggguuuguggaaaau

SEQ ID NO: 2823013 - RNA, 18 nt, Human
uuuaagggcaugccuugu

SEQ ID NO: 2823014 - RNA, 19 nt, Human
uuuaagggcaugccuugug

SEQ ID NO: 2823015 - RNA, 20 nt, Human
uuuaagggcaugccuugugc

SEQ ID NO: 2823016 - RNA, 20 nt, Human
uuuaaggaugggguuaugaa

SEQ ID NO: 2823017 - RNA, 19 nt, Human
augcaccuugugucuguac

SEQ ID NO: 2823018 - RNA, 21 nt, Human
augcaccuugugucuguacac

SEQ ID NO: 2823019 - RNA, 14 nt, Human
augcacucagcucu

SEQ ID NO: 2823020 - RNA, 17 nt, Human
augcacugacccuucca

SEQ ID NO: 2823021 - RNA, 22 nt, Human
augcacugacccuuccagacau

SEQ ID NO: 2823022 - RNA, 23 nt, Human
augcacugacccuuccagacaua

SEQ ID NO: 2823023 - RNA, 13 nt, Human
augcacggccucg

SEQ ID NO: 2823024 - RNA, 15 nt, Human
augcacggccucgcg

SEQ ID NO: 2823025 - RNA, 18 nt, Human
augcacggccucgcgucu

SEQ ID NO: 2823026 - RNA, 13 nt, Human
augcacuaugagg

SEQ ID NO: 2823027 - RNA, 16 nt, Human
augcacuaugaggaau

SEQ ID NO: 2823028 - RNA, 14 nt, Human
augcacuauguaua

SEQ ID NO: 2823029 - RNA, 18 nt, Human
augcagagguccacaaca

SEQ ID NO: 2823030 - RNA, 17 nt, Human
augcagagguccacaac

SEQ ID NO: 2823031 - RNA, 16 nt, Human
augcagagagccauuu

SEQ ID NO: 2823032 - RNA, 19 nt, Human
augcagagagccauuuugu

SEQ ID NO: 2823033 - RNA, 20 nt, Human
augcagagagccauuuugug

SEQ ID NO: 2823034 - RNA, 21 nt, Human
augcagagagccauuuuguga

SEQ ID NO: 2823035 - RNA, 22 nt, Human
augcagagagccauuuugugaa

SEQ ID NO: 2823036 - RNA, 23 nt, Human
augcagagagccauuuugugaau

SEQ ID NO: 2823037 - RNA, 20 nt, Human
augcagaauguuuuuaaaau

SEQ ID NO: 2823038 - RNA, 22 nt, Human
augcagacaugagugcgugcuc

SEQ ID NO: 2823039 - RNA, 13 nt, Human
augcagagagcca

SEQ ID NO: 2823040 - RNA, 14 nt, Human
augcagagagccau

SEQ ID NO: 2823041 - RNA, 20 nt, Human
augauuuauaguuuguacau

SEQ ID NO: 2823042 - RNA, 14 nt, Human
augauuuauaguuu

SEQ ID NO: 2823043 - RNA, 15 nt, Human
augauuuauaguuug

SEQ ID NO: 2823044 - RNA, 13 nt, Human
augauuuccuuga

SEQ ID NO: 2823045 - RNA, 16 nt, Human
augauuuccuugaaug

SEQ ID NO: 2823046 - RNA, 15 nt, Human
augauuuccuugaau

SEQ ID NO: 2823047 - RNA, 19 nt, Human
augauuuccuugaaugugg

SEQ ID NO: 2823048 - RNA, 13 nt, Human
augauuuuuagau

SEQ ID NO: 2823049 - RNA, 18 nt, Human
augauuuccuugaaugug

SEQ ID NO: 2823050 - RNA, 17 nt, Human
augauuuccuugaaugu

SEQ ID NO: 2823051 - RNA, 11 nt, Human
augcaaaaugg

SEQ ID NO: 2823052 - RNA, 12 nt, Human
augcaaaaugga

SEQ ID NO: 2823053 - RNA, 13 nt, Human
augcaaaauggaa

SEQ ID NO: 2823054 - RNA, 18 nt, Human
augcaaaauuuuuuuaau

SEQ ID NO: 2823055 - RNA, 23 nt, Human
augcaaaaagaaaugacuaauua

SEQ ID NO: 2823056 - RNA, 23 nt, Human
augcaaaagguucacuaaagcag

SEQ ID NO: 2823057 - RNA, 22 nt, Human
augauuuuuagaugagauuguu

SEQ ID NO: 2823058 - RNA, 15 nt, Human
augauuuuugucauc

SEQ ID NO: 2823059 - RNA, 17 nt, Human
augauuuuuuaaaagaa

SEQ ID NO: 2823060 - RNA, 19 nt, Human
augauuuuuuaaaagaaau

SEQ ID NO: 2823061 - RNA, 20 nt, Human
augauuuuuuaaaagaaauu

SEQ ID NO: 2823062 - RNA, 22 nt, Human
augauuuuuuaaaagaaauuua

SEQ ID NO: 2823063 - RNA, 22 nt, Human
uuguucuucagagaucauggaa

SEQ ID NO: 2823064 - RNA, 14 nt, Human
uuguucuuacacau

SEQ ID NO: 2823065 - RNA, 15 nt, Human
uuguucuuacacaua

SEQ ID NO: 2823066 - RNA, 14 nt, Human
augauuguaaaaua

SEQ ID NO: 2823067 - RNA, 15 nt, Human
augauuguaaaauag

SEQ ID NO: 2823068 - RNA, 12 nt, Human
augauuguuucu

SEQ ID NO: 2823069 - RNA, 20 nt, Human
augauuguuucucaaaucuu

SEQ ID NO: 2823070 - RNA, 18 nt, Human
augauuguaaaauagcuu

SEQ ID NO: 2823071 - RNA, 13 nt, Human
augauuuaaaaca

SEQ ID NO: 2823072 - RNA, 14 nt, Human
augauuuaaaacau

SEQ ID NO: 2823073 - RNA, 18 nt, Human
augauuuaaaacauguaa

SEQ ID NO: 2823074 - RNA, 22 nt, Human
augauuuaauaaaauaauucua

SEQ ID NO: 2823075 - RNA, 13 nt, Human
augauuuauaguu

SEQ ID NO: 2823076 - RNA, 20 nt, Human
augauuuauaaacagacaau

SEQ ID NO: 2823077 - RNA, 18 nt, Human
augauuuaauaaaauaau

SEQ ID NO: 2823078 - RNA, 19 nt, Human
augauuuaauaaaauaauu

SEQ ID NO: 2823079 - RNA, 13 nt, Human
augauuuaauaaa

SEQ ID NO: 2823080 - RNA, 14 nt, Human
augauuuaauaaaa

SEQ ID NO: 2823081 - RNA, 16 nt, Human
augauuuaauaaaaua

SEQ ID NO: 2823082 - RNA, 12 nt, Human
uuguacaaaaua

SEQ ID NO: 2823083 - RNA, 17 nt, Human
uuguagcccaggcugga

SEQ ID NO: 2823084 - RNA, 21 nt, Human
uuguagcggaugauucuucaa

SEQ ID NO: 2823085 - RNA, 13 nt, Human
uuguagcuguaaa

SEQ ID NO: 2823086 - RNA, 18 nt, Human
augaggucagagccugca

SEQ ID NO: 2823087 - RNA, 16 nt, Human
augaggucagagccug

SEQ ID NO: 2823088 - RNA, 15 nt, Human
augaggucagagccu

SEQ ID NO: 2823089 - RNA, 21 nt, Human
augagguacaaccuguucugc

SEQ ID NO: 2823090 - RNA, 15 nt, Human
augaggucagacuag

SEQ ID NO: 2823091 - RNA, 21 nt, Human
uuguaggaaggucucauucuu

SEQ ID NO: 2823092 - RNA, 20 nt, Human
augaggucagagccugcagu

SEQ ID NO: 2823093 - RNA, 19 nt, Human
augaggucagagccugcag

SEQ ID NO: 2823094 - RNA, 22 nt, Human
augaggucagagccugcaguua

SEQ ID NO: 2823095 - RNA, 18 nt, Human
augaguaacuauuauuau

SEQ ID NO: 2823096 - RNA, 14 nt, Human
augaguacaaaugc

SEQ ID NO: 2823097 - RNA, 16 nt, Human
augaguacaaaugccu

SEQ ID NO: 2823098 - RNA, 17 nt, Human
augaguacaaaugccuu

SEQ ID NO: 2823099 - RNA, 21 nt, Human
augaguaaaaaaaaaaacaau

SEQ ID NO: 2823100 - RNA, 22 nt, Human
augaguuugcccugguuucacu

SEQ ID NO: 2823101 - RNA, 15 nt, Human
augaguuugcccugg

SEQ ID NO: 2823102 - RNA, 14 nt, Human
augaguuugcuuau

SEQ ID NO: 2823103 - RNA, 16 nt, Human
augaguuaucuaagaa

SEQ ID NO: 2823104 - RNA, 17 nt, Human
augaguuaugaguuauu

SEQ ID NO: 2823105 - RNA, 15 nt, Human
augaguugugaaagu

SEQ ID NO: 2823106 - RNA, 20 nt, Human
augaguugugaaaguuuuga

SEQ ID NO: 2823107 - RNA, 12 nt, Human
augagugugcau

SEQ ID NO: 2823108 - RNA, 13 nt, Human
augagugugcaug

SEQ ID NO: 2823109 - RNA, 16 nt, Human
augaguuacugugcau

SEQ ID NO: 2823110 - RNA, 17 nt, Human
augaguuacugugcauu

SEQ ID NO: 2823111 - RNA, 14 nt, Human
augaguauacaaua

SEQ ID NO: 2823112 - RNA, 17 nt, Human
augaguauacaauauau

SEQ ID NO: 2823113 - RNA, 18 nt, Human
augaguauacaauauaua

SEQ ID NO: 2823114 - RNA, 21 nt, Human
augaguauacaauauauaaaa

SEQ ID NO: 2823115 - RNA, 23 nt, Human
augaguauacaauauauaaaaau

SEQ ID NO: 2823116 - RNA, 19 nt, Human
augaguauuaguucccugu

SEQ ID NO: 2823117 - RNA, 13 nt, Human
uugucagacauaa

SEQ ID NO: 2823118 - RNA, 14 nt, Human
uugucagacauaaa

SEQ ID NO: 2823119 - RNA, 15 nt, Human
uugucagacauaaag

SEQ ID NO: 2823120 - RNA, 16 nt, Human
uugucagacauaaagc

SEQ ID NO: 2823121 - RNA, 18 nt, Human
uugucagacauaaagcca

SEQ ID NO: 2823122 - RNA, 19 nt, Human
uugucagacauaaagccau

SEQ ID NO: 2823123 - RNA, 17 nt, Human
uugucacacacuuuggc

SEQ ID NO: 2823124 - RNA, 20 nt, Human
uugucaagucucugcuggcc

SEQ ID NO: 2823125 - RNA, 21 nt, Human
uugucauaucagcacauauuu

SEQ ID NO: 2823126 - RNA, 23 nt, Human
uugucauaucagcacauauuuuc

SEQ ID NO: 2823127 - RNA, 19 nt, Human
uuguccaauuguugacagu

SEQ ID NO: 2823128 - RNA, 22 nt, Human
uuguccaauuguugacaguucu

SEQ ID NO: 2823129 - RNA, 14 nt, Human
uuguccacccaccu

SEQ ID NO: 2823130 - RNA, 13 nt, Human
uugugaauggauu

SEQ ID NO: 2823131 - RNA, 14 nt, Human
uugugaauggauug

SEQ ID NO: 2823132 - RNA, 21 nt, Human
uugugaauggauuggauuauu

SEQ ID NO: 2823133 - RNA, 21 nt, Human
uugugaauguauuuuucuguu

SEQ ID NO: 2823134 - RNA, 15 nt, Human
uugugaauggauugg

SEQ ID NO: 2823135 - RNA, 18 nt, Human
uugugacagcucuuuuug

SEQ ID NO: 2823136 - RNA, 23 nt, Human
uugugacagcucuuuuugugaag

SEQ ID NO: 2823137 - RNA, 18 nt, Human
uugugagccaccacgucc

SEQ ID NO: 2823138 - RNA, 16 nt, Human
uuguccauauuuucac

SEQ ID NO: 2823139 - RNA, 14 nt, Human
uuguccauuuguaa

SEQ ID NO: 2823140 - RNA, 15 nt, Human
uuguccauuuguaaa

SEQ ID NO: 2823141 - RNA, 14 nt, Human
uugucccccaacuu

SEQ ID NO: 2823142 - RNA, 16 nt, Human
uugucccccaacuuga

SEQ ID NO: 2823143 - RNA, 18 nt, Human
uugucccccaacuugaga

SEQ ID NO: 2823144 - RNA, 15 nt, Human
uugugaaugcuucuc

SEQ ID NO: 2823145 - RNA, 16 nt, Human
uugugaaugcuucuca

SEQ ID NO: 2823146 - RNA, 22 nt, Human
uugugaaugauucauguuauau

SEQ ID NO: 2823147 - RNA, 15 nt, Human
uuguucaccuuugua

SEQ ID NO: 2823148 - RNA, 15 nt, Human
uuguucacugaaggu

SEQ ID NO: 2823149 - RNA, 21 nt, Human
uuguucacugaaggugauuca

SEQ ID NO: 2823150 - RNA, 22 nt, Human
uuguucaauaauaaauauuuuu

SEQ ID NO: 2823151 - RNA, 20 nt, Human
uuguucaauaauaaauauuu

SEQ ID NO: 2823152 - RNA, 14 nt, Human
uugugucuguacac

SEQ ID NO: 2823153 - RNA, 15 nt, Human
uugugucuguacacg

SEQ ID NO: 2823154 - RNA, 13 nt, Human
uugugucuguaca

SEQ ID NO: 2823155 - RNA, 21 nt, Human
uugugucaaugggcaaugaca

SEQ ID NO: 2823156 - RNA, 23 nt, Human
uuguguauuuacgcuuugauuca

SEQ ID NO: 2823157 - RNA, 22 nt, Human
uuguguauuuacgcuuugauuc

SEQ ID NO: 2823158 - RNA, 20 nt, Human
uuguguauuuacgcuuugau

SEQ ID NO: 2823159 - RNA, 21 nt, Human
uuguguaucguaaccagccag

SEQ ID NO: 2823160 - RNA, 21 nt, Human
uuguguauuuaacagggaggg

SEQ ID NO: 2823161 - RNA, 19 nt, Human
uuguguauuuacgcuuuga

SEQ ID NO: 2823162 - RNA, 13 nt, Human
uuguguauuuaac

SEQ ID NO: 2823163 - RNA, 14 nt, Human
uuguguauuuaaca

SEQ ID NO: 2823164 - RNA, 14 nt, Human
uuguguauauuugu

SEQ ID NO: 2823165 - RNA, 15 nt, Human
uuguguauauuugua

SEQ ID NO: 2823166 - RNA, 16 nt, Human
uuguguauauuuguau

SEQ ID NO: 2823167 - RNA, 20 nt, Human
uuguguaucguaaccagcca

SEQ ID NO: 2823168 - RNA, 23 nt, Human
uuguguaaugaaaaugaauaucu

SEQ ID NO: 2823169 - RNA, 24 nt, Human
uuguguaaugaaaaugaauaucua

SEQ ID NO: 2823170 - RNA, 13 nt, Human
uuguguaauuuau

SEQ ID NO: 2823171 - RNA, 23 nt, Human
uuguguacagacuuguugugacu

SEQ ID NO: 2823172 - RNA, 19 nt, Human
uuguguaauagaaaacuga

SEQ ID NO: 2823173 - RNA, 21 nt, Human
uuguguaauagaaaacugaaa

SEQ ID NO: 2823174 - RNA, 23 nt, Human
uuguguacucggaaauuaaaguu

SEQ ID NO: 2823175 - RNA, 21 nt, Human
uugugauucuuccagauguga

SEQ ID NO: 2823176 - RNA, 19 nt, Human
uugugauguauauuccuuu

SEQ ID NO: 2823177 - RNA, 20 nt, Human
uugugauguauauuccuuug

SEQ ID NO: 2823178 - RNA, 20 nt, Human
uugugauagcuaacauuuua

SEQ ID NO: 2823179 - RNA, 16 nt, Human
uugugauauauguauu

SEQ ID NO: 2823180 - RNA, 18 nt, Human
uugugaugucccaacuug

SEQ ID NO: 2823181 - RNA, 22 nt, Human
uugugaugucccaacuuguaaa

SEQ ID NO: 2823182 - RNA, 16 nt, Human
auuacuguuuauuucu

SEQ ID NO: 2823183 - RNA, 17 nt, Human
auuacuguuuauuucug

SEQ ID NO: 2823184 - RNA, 18 nt, Human
auuacuguuuauuucugu

SEQ ID NO: 2823185 - RNA, 18 nt, Human
auuacugucugguuuuaa

SEQ ID NO: 2823186 - RNA, 19 nt, Human
auuacuguugauaauucuu

SEQ ID NO: 2823187 - RNA, 20 nt, Human
auuacuguugauaauucuua

SEQ ID NO: 2823188 - RNA, 14 nt, Human
auuaaucaucuaua

SEQ ID NO: 2823189 - RNA, 19 nt, Human
auuaaucaucuauaaagaa

SEQ ID NO: 2823190 - RNA, 23 nt, Human
auuacugggccuuagugggccag

SEQ ID NO: 2823191 - RNA, 23 nt, Human
auuaaucaaucaucugugugaaa

SEQ ID NO: 2823192 - RNA, 23 nt, Human
auuaauauuuaacauuauuuaua

SEQ ID NO: 2823193 - RNA, 12 nt, Human
auuaauauuuaa

SEQ ID NO: 2823194 - RNA, 13 nt, Human
auuaaguuaucuu

SEQ ID NO: 2823195 - RNA, 19 nt, Human
auuaaguucucaaugugaa

SEQ ID NO: 2823196 - RNA, 20 nt, Human
auuaaguucucaaugugaaa

SEQ ID NO: 2823197 - RNA, 13 nt, Human
auuagacuccucc

SEQ ID NO: 2823198 - RNA, 16 nt, Human
auuagacuccuccucc

SEQ ID NO: 2823199 - RNA, 15 nt, Human
auuagacuccuccuc

SEQ ID NO: 2823200 - RNA, 13 nt, Human
auuacuucugcua

SEQ ID NO: 2823201 - RNA, 12 nt, Human
auuacuucugcu

SEQ ID NO: 2823202 - RNA, 14 nt, Human
auuacuucugcuac

SEQ ID NO: 2823203 - RNA, 20 nt, Human
auuacuuguugcaaaggucu

SEQ ID NO: 2823204 - RNA, 16 nt, Human
uuuuggaguguuaugu

SEQ ID NO: 2823205 - RNA, 17 nt, Human
uuuuggaguguuaugua

SEQ ID NO: 2823206 - RNA, 20 nt, Human
uuuuggaguguuauguauuu

SEQ ID NO: 2823207 - RNA, 17 nt, Human
uuuuggaucuugaaugu

SEQ ID NO: 2823208 - RNA, 23 nt, Human
uuuugugaauggauuggauuauu

SEQ ID NO: 2823209 - RNA, 23 nt, Human
uuuugugacuauauagagauguu

SEQ ID NO: 2823210 - RNA, 19 nt, Human
uuuugugaauggauuggau

SEQ ID NO: 2823211 - RNA, 16 nt, Human
uuuugugaagcccugu

SEQ ID NO: 2823212 - RNA, 17 nt, Human
uuuugugaagcccuguu

SEQ ID NO: 2823213 - RNA, 12 nt, Human
uuuugugcauuu

SEQ ID NO: 2823214 - RNA, 13 nt, Human
uuuugugcauuug

SEQ ID NO: 2823215 - RNA, 22 nt, Human
uuuugugcauuuguaaaugcug

SEQ ID NO: 2823216 - RNA, 16 nt, Human
uuuuguggaggcagug

SEQ ID NO: 2823217 - RNA, 15 nt, Human
uuuuguuaacugauu

SEQ ID NO: 2823218 - RNA, 16 nt, Human
uuuuguuaacugauuu

SEQ ID NO: 2823219 - RNA, 12 nt, Human
uuuuguuacugu

SEQ ID NO: 2823220 - RNA, 13 nt, Human
uuuuguuacuguu

SEQ ID NO: 2823221 - RNA, 14 nt, Human
uuuuguuacuguuc

SEQ ID NO: 2823222 - RNA, 15 nt, Human
uuuuguuacuguucu

SEQ ID NO: 2823223 - RNA, 16 nt, Human
uuuuguuacuguucuu

SEQ ID NO: 2823224 - RNA, 18 nt, Human
uuuuguuacuguucuugc

SEQ ID NO: 2823225 - RNA, 19 nt, Human
uuuuguuacuguucuugcu

SEQ ID NO: 2823226 - RNA, 20 nt, Human
uuuuguuacuguucuugcug

SEQ ID NO: 2823227 - RNA, 21 nt, Human
uuuuguuacuguucuugcugc

SEQ ID NO: 2823228 - RNA, 22 nt, Human
uuuuguuacuguucuugcugcu

SEQ ID NO: 2823229 - RNA, 23 nt, Human
uuuuguuacuguucuugcugcua

SEQ ID NO: 2823230 - RNA, 18 nt, Human
uuuugugugaccaacugu

SEQ ID NO: 2823231 - RNA, 20 nt, Human
uuuugugugaccaacugugu

SEQ ID NO: 2823232 - RNA, 17 nt, Human
uuuuguguaaugaaaau

SEQ ID NO: 2823233 - RNA, 17 nt, Human
uuuuggacuccaucucu

SEQ ID NO: 2823234 - RNA, 23 nt, Human
uuuugcuuguuauauuaagcaga

SEQ ID NO: 2823235 - RNA, 20 nt, Human
uuuuggaagauuuucagucu

SEQ ID NO: 2823236 - RNA, 19 nt, Human
uuuugcuuuuaauuaaaua

SEQ ID NO: 2823237 - RNA, 18 nt, Human
uuuugcuguuuccuuuua

SEQ ID NO: 2823238 - RNA, 18 nt, Human
auuaaaaugauuguaaaa

SEQ ID NO: 2823239 - RNA, 19 nt, Human
auuaaaaugauuguaaaau

SEQ ID NO: 2823240 - RNA, 15 nt, Human
auuaaacauaaaaca

SEQ ID NO: 2823241 - RNA, 16 nt, Human
auuaaacauaaaacaa

SEQ ID NO: 2823242 - RNA, 12 nt, Human
auuaaacagaug

SEQ ID NO: 2823243 - RNA, 14 nt, Human
auuaaacagaugau

SEQ ID NO: 2823244 - RNA, 19 nt, Human
auuaaacagaugaugagaa

SEQ ID NO: 2823245 - RNA, 21 nt, Human
auuaaacagaugaugagaauu

SEQ ID NO: 2823246 - RNA, 20 nt, Human
auuaaaaugauuguaaaaua

SEQ ID NO: 2823247 - RNA, 12 nt, Human
auuaaaauggau

SEQ ID NO: 2823248 - RNA, 13 nt, Human
auuaaaauggaug

SEQ ID NO: 2823249 - RNA, 21 nt, Human
auuaaaauggugacuuaaucc

SEQ ID NO: 2823250 - RNA, 15 nt, Human
uuuuguuguaaaaag

SEQ ID NO: 2823251 - RNA, 16 nt, Human
uuuuguuguaaaaaga

SEQ ID NO: 2823252 - RNA, 19 nt, Human
uuuuguuguaaaaagaaaa

SEQ ID NO: 2823253 - RNA, 13 nt, Human
uuuuguugugugu

SEQ ID NO: 2823254 - RNA, 16 nt, Human
uuuuguuguuucagug

SEQ ID NO: 2823255 - RNA, 13 nt, Human
uuuuguuuuacaa

SEQ ID NO: 2823256 - RNA, 16 nt, Human
uuuuguuuuacaaugu

SEQ ID NO: 2823257 - RNA, 23 nt, Human
uuuuguucgcauggucacacacu

SEQ ID NO: 2823258 - RNA, 14 nt, Human
uuuuguugauuaaa

SEQ ID NO: 2823259 - RNA, 15 nt, Human
uuuuguugauuaaaa

SEQ ID NO: 2823260 - RNA, 19 nt, Human
uuuuguugauuaaaacauu

SEQ ID NO: 2823261 - RNA, 10 nt, Human
uuuuguuacu

SEQ ID NO: 2823262 - RNA, 22 nt, Human
uuuuguucuuacacauacaguu

SEQ ID NO: 2823263 - RNA, 12 nt, Human
uuuuguucuuca

SEQ ID NO: 2823264 - RNA, 14 nt, Human
uuuuguucuucaga

SEQ ID NO: 2823265 - RNA, 19 nt, Human
uuuuguucuucagagauca

SEQ ID NO: 2823266 - RNA, 15 nt, Human
uuuuuauauuuaguu

SEQ ID NO: 2823267 - RNA, 23 nt, Human
uuuuuauaucuggaaugagccug

SEQ ID NO: 2823268 - RNA, 15 nt, Human
uuuuuauauuaaugu

SEQ ID NO: 2823269 - RNA, 17 nt, Human
uuuuuauauuaguugcu

SEQ ID NO: 2823270 - RNA, 18 nt, Human
uuuuuauauuaguugcuu

SEQ ID NO: 2823271 - RNA, 19 nt, Human
uuuuuacaaguuuuaaaua

SEQ ID NO: 2823272 - RNA, 13 nt, Human
uuuuuacagcugu

SEQ ID NO: 2823273 - RNA, 19 nt, Human
uuuuuacagcuguguuauu

SEQ ID NO: 2823274 - RNA, 16 nt, Human
uuuuuacauggagaaa

SEQ ID NO: 2823275 - RNA, 12 nt, Human
uuuuuauauaca

SEQ ID NO: 2823276 - RNA, 14 nt, Human
uuuuuauauauaca

SEQ ID NO: 2823277 - RNA, 15 nt, Human
uuuuuauaccauuca

SEQ ID NO: 2823278 - RNA, 17 nt, Human
uuuuuauaccauucaga

SEQ ID NO: 2823279 - RNA, 11 nt, Human
uuuuuacauuu

SEQ ID NO: 2823280 - RNA, 18 nt, Human
uuuuguuuuuucaaaaua

SEQ ID NO: 2823281 - RNA, 19 nt, Human
uuuuguuuuuucaaaauag

SEQ ID NO: 2823282 - RNA, 14 nt, Human
uuuuuaaaaaaaga

SEQ ID NO: 2823283 - RNA, 15 nt, Human
uuuuuaaaaaaagaa

SEQ ID NO: 2823284 - RNA, 17 nt, Human
uuuuuaaaaaaagaaaa

SEQ ID NO: 2823285 - RNA, 13 nt, Human
uuuuuaauuaaaa

SEQ ID NO: 2823286 - RNA, 16 nt, Human
uuuuuaauuaaaaacu

SEQ ID NO: 2823287 - RNA, 20 nt, Human
uuuuuaauuaaaaacuagua

SEQ ID NO: 2823288 - RNA, 11 nt, Human
uuuuuaauuua

SEQ ID NO: 2823289 - RNA, 20 nt, Human
uuuuuaauuguuguuucuuu

SEQ ID NO: 2823290 - RNA, 18 nt, Human
uuuuuaauuguuguuucu

SEQ ID NO: 2823291 - RNA, 21 nt, Human
uuuuuaauuuauuauugaaau

SEQ ID NO: 2823292 - RNA, 18 nt, Human
uuuuuacaaguuuuaaau

SEQ ID NO: 2823293 - RNA, 13 nt, Human
uuuuuacaagaag

SEQ ID NO: 2823294 - RNA, 21 nt, Human
uuuuucaaaauccaaaaagaa

SEQ ID NO: 2823295 - RNA, 9 nt, Human
uuuuucaac

SEQ ID NO: 2823296 - RNA, 18 nt, Human
uuuuucaacaaauaucuu

SEQ ID NO: 2823297 - RNA, 22 nt, Human
uuuuucaaccccacccuguuug

SEQ ID NO: 2823298 - RNA, 23 nt, Human
uuuuucaaccccacccuguuugg

SEQ ID NO: 2823299 - RNA, 15 nt, Human
uuuuugaagucuugu

SEQ ID NO: 2823300 - RNA, 19 nt, Human
uuuuugaagucuuguauaa

SEQ ID NO: 2823301 - RNA, 11 nt, Human
uuuuucaaugu

SEQ ID NO: 2823302 - RNA, 12 nt, Human
uuuuucaaugug

SEQ ID NO: 2823303 - RNA, 19 nt, Human
uuuuucaaagauguguugc

SEQ ID NO: 2823304 - RNA, 13 nt, Human
uuuuucaaggaag

SEQ ID NO: 2823305 - RNA, 18 nt, Human
uuuuuauuuauauguacu

SEQ ID NO: 2823306 - RNA, 13 nt, Human
uuuuuauuuauau

SEQ ID NO: 2823307 - RNA, 12 nt, Human
uuuuuauuucug

SEQ ID NO: 2823308 - RNA, 15 nt, Human
uuuuucaaaauagaa

SEQ ID NO: 2823309 - RNA, 20 nt, Human
uuuuucaaaauagaaaaguu

SEQ ID NO: 2823310 - RNA, 15 nt, Human
uuuuugauaaagccu

SEQ ID NO: 2823311 - RNA, 14 nt, Human
uuuuuauuuaugaa

SEQ ID NO: 2823312 - RNA, 16 nt, Human
uuuuugacucccagau

SEQ ID NO: 2823313 - RNA, 21 nt, Human
uuuuugauaaaguuucucaga

SEQ ID NO: 2823314 - RNA, 14 nt, Human
uuuuugauagcuuu

SEQ ID NO: 2823315 - RNA, 14 nt, Human
uuuuugccuucauu

SEQ ID NO: 2823316 - RNA, 14 nt, Human
uuuuuggaguguua

SEQ ID NO: 2823317 - RNA, 19 nt, Human
uuuuuggaguguuauguau

SEQ ID NO: 2823318 - RNA, 20 nt, Human
uuuuuggaguguuauguauu

SEQ ID NO: 2823319 - RNA, 22 nt, Human
uuuuugggaaaagaaaagucaa

SEQ ID NO: 2823320 - RNA, 12 nt, Human
uuuuugguacaa

SEQ ID NO: 2823321 - RNA, 13 nt, Human
uuuuugguacaaa

SEQ ID NO: 2823322 - RNA, 14 nt, Human
uuuuugguacaaaa

SEQ ID NO: 2823323 - RNA, 22 nt, Human
uuuuugguguauagaaguuugu

SEQ ID NO: 2823324 - RNA, 23 nt, Human
uuuuugggcagcaauuuaaaugu

SEQ ID NO: 2823325 - RNA, 21 nt, Human
uuuuugggcagcaauuuaaau

SEQ ID NO: 2823326 - RNA, 20 nt, Human
uuuuugggcagcaauuuaaa

SEQ ID NO: 2823327 - RNA, 11 nt, Human
uuuuuguagua

SEQ ID NO: 2823328 - RNA, 20 nt, Human
uuuuuguagugaccuguuua

SEQ ID NO: 2823329 - RNA, 19 nt, Human
uuuuuggugauucaaaugg

SEQ ID NO: 2823330 - RNA, 15 nt, Human
uuuuuguaaacugga

SEQ ID NO: 2823331 - RNA, 23 nt, Human
uuuuuguaaacuggaauuaaaag

SEQ ID NO: 2823332 - RNA, 14 nt, Human
auuaaggauguagc

SEQ ID NO: 2823333 - RNA, 18 nt, Human
auuaaggauguagcuuuu

SEQ ID NO: 2823334 - RNA, 21 nt, Human
auuaaggauguagcuuuucac

SEQ ID NO: 2823335 - RNA, 23 nt, Human
auuaaggauguagcuuuucaccu

SEQ ID NO: 2823336 - RNA, 16 nt, Human
uuuuugucaacauugu

SEQ ID NO: 2823337 - RNA, 12 nt, Human
uuuuuguauguu

SEQ ID NO: 2823338 - RNA, 11 nt, Human
uuuuuguauuu

SEQ ID NO: 2823339 - RNA, 16 nt, Human
auuaagucaagaauau

SEQ ID NO: 2823340 - RNA, 15 nt, Human
auuaaggugauguga

SEQ ID NO: 2823341 - RNA, 16 nt, Human
auuaaggugaugugau

SEQ ID NO: 2823342 - RNA, 17 nt, Human
auuaaggugaugugauu

SEQ ID NO: 2823343 - RNA, 12 nt, Human
auuccacagcug

SEQ ID NO: 2823344 - RNA, 18 nt, Human
auuccaauaugaugacuc

SEQ ID NO: 2823345 - RNA, 15 nt, Human
auuccaauauuucug

SEQ ID NO: 2823346 - RNA, 13 nt, Human
auuccaaucuaca

SEQ ID NO: 2823347 - RNA, 17 nt, Human
auuccaauaugaugacu

SEQ ID NO: 2823348 - RNA, 17 nt, Human
auucccaagcucugcuc

SEQ ID NO: 2823349 - RNA, 18 nt, Human
auuccagagaguggcucc

SEQ ID NO: 2823350 - RNA, 23 nt, Human
auuccagacugcuuccaauuuuc

SEQ ID NO: 2823351 - RNA, 23 nt, Human
auuccagaaugcuguacaucuau

SEQ ID NO: 2823352 - RNA, 20 nt, Human
auuccagaaugcuguacauc

SEQ ID NO: 2823353 - RNA, 14 nt, Human
auuccagaaugcug

SEQ ID NO: 2823354 - RNA, 19 nt, Human
auuccagaaugcuguacau

SEQ ID NO: 2823355 - RNA, 15 nt, Human
auuccagaaugcugu

SEQ ID NO: 2823356 - RNA, 19 nt, Human
auucccaagcucugcuccu

SEQ ID NO: 2823357 - RNA, 18 nt, Human
auucccaagcucugcucc

SEQ ID NO: 2823358 - RNA, 18 nt, Human
auuccagagacaucagca

SEQ ID NO: 2823359 - RNA, 14 nt, Human
auuccccauucuuc

SEQ ID NO: 2823360 - RNA, 18 nt, Human
auuccuaacuuuucaaug

SEQ ID NO: 2823361 - RNA, 14 nt, Human
auuccuaagaauca

SEQ ID NO: 2823362 - RNA, 15 nt, Human
auuccuaagccacuu

SEQ ID NO: 2823363 - RNA, 15 nt, Human
auuccccauucuucc

SEQ ID NO: 2823364 - RNA, 20 nt, Human
auucacugaaguucuccuga

SEQ ID NO: 2823365 - RNA, 14 nt, Human
auucacugggccaa

SEQ ID NO: 2823366 - RNA, 18 nt, Human
auucacuuagcagaaccu

SEQ ID NO: 2823367 - RNA, 14 nt, Human
auucacuugcauuu

SEQ ID NO: 2823368 - RNA, 16 nt, Human
auucagaucacugaau

SEQ ID NO: 2823369 - RNA, 19 nt, Human
auucagaucacugaauuua

SEQ ID NO: 2823370 - RNA, 23 nt, Human
auucagaucacugaauuuauaaa

SEQ ID NO: 2823371 - RNA, 17 nt, Human
auucagauuguuaucua

SEQ ID NO: 2823372 - RNA, 14 nt, Human
auucagcaaaccau

SEQ ID NO: 2823373 - RNA, 15 nt, Human
auucagcaaaccauu

SEQ ID NO: 2823374 - RNA, 18 nt, Human
auuauaucuguggucuuc

SEQ ID NO: 2823375 - RNA, 17 nt, Human
auucagccauguacaga

SEQ ID NO: 2823376 - RNA, 22 nt, Human
auucaggagaguagaacagaua

SEQ ID NO: 2823377 - RNA, 21 nt, Human
auucaggagaguagaacagau

SEQ ID NO: 2823378 - RNA, 11 nt, Human
auucaggcugc

SEQ ID NO: 2823379 - RNA, 16 nt, Human
auucaggcugcuuggg

SEQ ID NO: 2823380 - RNA, 13 nt, Human
auucaggcugcuu

SEQ ID NO: 2823381 - RNA, 12 nt, Human
auucaggggcug

SEQ ID NO: 2823382 - RNA, 19 nt, Human
auucaggggcugacacuuc

SEQ ID NO: 2823383 - RNA, 20 nt, Human
auucaggggcugacacuuca

SEQ ID NO: 2823384 - RNA, 17 nt, Human
auucagguauguugccu

SEQ ID NO: 2823385 - RNA, 13 nt, Human
auucagguauguu

SEQ ID NO: 2823386 - RNA, 19 nt, Human
auucaguggcgagaaauaa

SEQ ID NO: 2823387 - RNA, 18 nt, Human
auucaguguauuucaguu

SEQ ID NO: 2823388 - RNA, 22 nt, Human
auucagugcuguggccugggca

SEQ ID NO: 2823389 - RNA, 21 nt, Human
auucagugcuguggccugggc

SEQ ID NO: 2823390 - RNA, 20 nt, Human
auucagugcuguggccuggg

SEQ ID NO: 2823391 - RNA, 17 nt, Human
auucagugcuguggccu

SEQ ID NO: 2823392 - RNA, 16 nt, Human
auuccaagacucuaga

SEQ ID NO: 2823393 - RNA, 17 nt, Human
auuccaagacucuagag

SEQ ID NO: 2823394 - RNA, 18 nt, Human
auuccaagacucuagagu

SEQ ID NO: 2823395 - RNA, 16 nt, Human
auuauaucuaauuauu

SEQ ID NO: 2823396 - RNA, 23 nt, Human
auuauauggagacgcuaagaaau

SEQ ID NO: 2823397 - RNA, 23 nt, Human
auuauaucauuggaacaacugau

SEQ ID NO: 2823398 - RNA, 16 nt, Human
auuauaucaagguaaa

SEQ ID NO: 2823399 - RNA, 23 nt, Human
auuauaaaaagccacuagacucu

SEQ ID NO: 2823400 - RNA, 19 nt, Human
auuacuugauuaagauuuu

SEQ ID NO: 2823401 - RNA, 18 nt, Human
auuauaaaauuaaucaca

SEQ ID NO: 2823402 - RNA, 13 nt, Human
auuauaaacgcuu

SEQ ID NO: 2823403 - RNA, 14 nt, Human
auuauaaacgcuua

SEQ ID NO: 2823404 - RNA, 17 nt, Human
auuauaaauauauauaa

SEQ ID NO: 2823405 - RNA, 19 nt, Human
auuauaaauauauauaaag

SEQ ID NO: 2823406 - RNA, 20 nt, Human
auuauaaauauauauaaaga

SEQ ID NO: 2823407 - RNA, 17 nt, Human
auuauaacaaguguguc

SEQ ID NO: 2823408 - RNA, 17 nt, Human
auucaaacuggggccuc

SEQ ID NO: 2823409 - RNA, 19 nt, Human
auucaaacuggggccucca

SEQ ID NO: 2823410 - RNA, 22 nt, Human
auucaaacuggggccuccagaa

SEQ ID NO: 2823411 - RNA, 13 nt, Human
auucaaagguucu

SEQ ID NO: 2823412 - RNA, 14 nt, Human
auucaaagguucua

SEQ ID NO: 2823413 - RNA, 15 nt, Human
auucaaagguucuag

SEQ ID NO: 2823414 - RNA, 16 nt, Human
auucaaagguucuagg

SEQ ID NO: 2823415 - RNA, 17 nt, Human
auucaaagguucuaggu

SEQ ID NO: 2823416 - RNA, 18 nt, Human
auucaaagguucuagguu

SEQ ID NO: 2823417 - RNA, 16 nt, Human
auucacucaagcacug

SEQ ID NO: 2823418 - RNA, 17 nt, Human
auucacucaagcacuga

SEQ ID NO: 2823419 - RNA, 18 nt, Human
auucacucaagcacugau

SEQ ID NO: 2823420 - RNA, 21 nt, Human
auucacucaagcacugauauc

SEQ ID NO: 2823421 - RNA, 21 nt, Human
auucacucauacaucuggccg

SEQ ID NO: 2823422 - RNA, 20 nt, Human
auucacggagauaugaagag

SEQ ID NO: 2823423 - RNA, 21 nt, Human
auucaaagguucuagguuuca

SEQ ID NO: 2823424 - RNA, 22 nt, Human
auucacccccuuuccuggacac

SEQ ID NO: 2823425 - RNA, 16 nt, Human
auucaccuaagagauu

SEQ ID NO: 2823426 - RNA, 17 nt, Human
auucaccuaagagauuc

SEQ ID NO: 2823427 - RNA, 18 nt, Human
auucaccuaagagauucu

SEQ ID NO: 2823428 - RNA, 21 nt, Human
auucaccuaagagauucugau

SEQ ID NO: 2823429 - RNA, 22 nt, Human
auucaccuaagagauucugauu

SEQ ID NO: 2823430 - RNA, 23 nt, Human
auucaccuaagagauucugauuu

SEQ ID NO: 2823431 - RNA, 13 nt, Human
auucaccugagca

SEQ ID NO: 2823432 - RNA, 16 nt, Human
auucacccccuuuccu

SEQ ID NO: 2823433 - RNA, 16 nt, Human
auucacccccaaacag

SEQ ID NO: 2823434 - RNA, 18 nt, Human
auuauugugguaggccuu

SEQ ID NO: 2823435 - RNA, 23 nt, Human
auuauugugguaggccuuuuaac

SEQ ID NO: 2823436 - RNA, 12 nt, Human
auuauuuaaaca

SEQ ID NO: 2823437 - RNA, 11 nt, Human
auuauuuaaac

SEQ ID NO: 2823438 - RNA, 12 nt, Human
auuauugcauua

SEQ ID NO: 2823439 - RNA, 15 nt, Human
auuauugcuguugcu

SEQ ID NO: 2823440 - RNA, 16 nt, Human
auuauugcuguugcuu

SEQ ID NO: 2823441 - RNA, 18 nt, Human
auuauugcuguugcuuga

SEQ ID NO: 2823442 - RNA, 19 nt, Human
auuauugcuguugcuugaa

SEQ ID NO: 2823443 - RNA, 11 nt, Human
auuauugcuua

SEQ ID NO: 2823444 - RNA, 15 nt, Human
auuauugcuuauugc

SEQ ID NO: 2823445 - RNA, 19 nt, Human
auuauugcuuauugcuuag

SEQ ID NO: 2823446 - RNA, 12 nt, Human
auuauuuaauaa

SEQ ID NO: 2823447 - RNA, 13 nt, Human
auuauuuaauaaa

SEQ ID NO: 2823448 - RNA, 21 nt, Human
auuauuuuuuuuuuuugaaaa

SEQ ID NO: 2823449 - RNA, 17 nt, Human
auucaaaaaguguuuau

SEQ ID NO: 2823450 - RNA, 14 nt, Human
auucaaaaaguguu

SEQ ID NO: 2823451 - RNA, 16 nt, Human
auucaaaaaguguuua

SEQ ID NO: 2823452 - RNA, 23 nt, Human
auucaaaaauuaucuauagcuaa

SEQ ID NO: 2823453 - RNA, 16 nt, Human
auucaaaaauuaucua

SEQ ID NO: 2823454 - RNA, 13 nt, Human
auucaaaaguucc

SEQ ID NO: 2823455 - RNA, 14 nt, Human
auucaaaaguucca

SEQ ID NO: 2823456 - RNA, 16 nt, Human
auucaaaaguuccaag

SEQ ID NO: 2823457 - RNA, 16 nt, Human
uuuggauuugacauug

SEQ ID NO: 2823458 - RNA, 14 nt, Human
uuuggauuuuuaau

SEQ ID NO: 2823459 - RNA, 18 nt, Human
uuuggauuuuuaauuaaa

SEQ ID NO: 2823460 - RNA, 14 nt, Human
uuuggauuguauau

SEQ ID NO: 2823461 - RNA, 18 nt, Human
uuuggauucuuauguagc

SEQ ID NO: 2823462 - RNA, 20 nt, Human
uuuggauucuuauguagcag

SEQ ID NO: 2823463 - RNA, 12 nt, Human
uuugcuguaaga

SEQ ID NO: 2823464 - RNA, 19 nt, Human
uuugcuguaagaugucugu

SEQ ID NO: 2823465 - RNA, 18 nt, Human
uuugaccuucauuucaug

SEQ ID NO: 2823466 - RNA, 15 nt, Human
uuugauugauuugaa

SEQ ID NO: 2823467 - RNA, 13 nt, Human
uuugauuucuauu

SEQ ID NO: 2823468 - RNA, 18 nt, Human
uuugauuuccaaguaaua

SEQ ID NO: 2823469 - RNA, 20 nt, Human
uuugauuuccaaguaauaua

SEQ ID NO: 2823470 - RNA, 12 nt, Human
uuugauuuaugc

SEQ ID NO: 2823471 - RNA, 15 nt, Human
uuugauuuacagcaa

SEQ ID NO: 2823472 - RNA, 17 nt, Human
uuugauuuacagcaagu

SEQ ID NO: 2823473 - RNA, 18 nt, Human
uuugauuuacagcaagua

SEQ ID NO: 2823474 - RNA, 13 nt, Human
uuugauuuacaua

SEQ ID NO: 2823475 - RNA, 22 nt, Human
uuugcggccaguauuagacugg

SEQ ID NO: 2823476 - RNA, 21 nt, Human
uuugccuugggcugcuccuca

SEQ ID NO: 2823477 - RNA, 12 nt, Human
uuugccuuuaaa

SEQ ID NO: 2823478 - RNA, 17 nt, Human
uuugccuuccuuucucc

SEQ ID NO: 2823479 - RNA, 22 nt, Human
uuugccuuccuuucuccaggac

SEQ ID NO: 2823480 - RNA, 14 nt, Human
uuugccuugcagaa

SEQ ID NO: 2823481 - RNA, 16 nt, Human
uuugccuugcagaacu

SEQ ID NO: 2823482 - RNA, 17 nt, Human
uuugccuugcagaacug

SEQ ID NO: 2823483 - RNA, 19 nt, Human
uuugccuugcagaacugcc

SEQ ID NO: 2823484 - RNA, 22 nt, Human
uuugccuugcagaacugccauu

SEQ ID NO: 2823485 - RNA, 19 nt, Human
uuugcaaaguauuguaaau

SEQ ID NO: 2823486 - RNA, 19 nt, Human
uuugcaaacccgaaaauaa

SEQ ID NO: 2823487 - RNA, 14 nt, Human
uuuggauuugacau

SEQ ID NO: 2823488 - RNA, 21 nt, Human
uuugggcagcaauuuaaaugu

SEQ ID NO: 2823489 - RNA, 11 nt, Human
uuugggcaugu

SEQ ID NO: 2823490 - RNA, 14 nt, Human
uuugggcugcccug

SEQ ID NO: 2823491 - RNA, 12 nt, Human
uuugggcccugc

SEQ ID NO: 2823492 - RNA, 13 nt, Human
uuugggcccugca

SEQ ID NO: 2823493 - RNA, 14 nt, Human
uuugggcccugcau

SEQ ID NO: 2823494 - RNA, 14 nt, Human
uuugggccucugcu

SEQ ID NO: 2823495 - RNA, 16 nt, Human
uuuggcuuaaauauag

SEQ ID NO: 2823496 - RNA, 14 nt, Human
uuuggcuuccauga

SEQ ID NO: 2823497 - RNA, 16 nt, Human
uuugggagggaaaagg

SEQ ID NO: 2823498 - RNA, 17 nt, Human
uuugggaucccugucuu

SEQ ID NO: 2823499 - RNA, 18 nt, Human
uuugggauuuaauuucca

SEQ ID NO: 2823500 - RNA, 21 nt, Human
uuugggguacccacugcucug

SEQ ID NO: 2823501 - RNA, 17 nt, Human
uuugggggaaacuuccu

SEQ ID NO: 2823502 - RNA, 18 nt, Human
uuugggggacguuucuca

SEQ ID NO: 2823503 - RNA, 12 nt, Human
uuugcugggaga

SEQ ID NO: 2823504 - RNA, 15 nt, Human
uuugggcuucagccu

SEQ ID NO: 2823505 - RNA, 22 nt, Human
uuugggguacccacugcucugg

SEQ ID NO: 2823506 - RNA, 15 nt, Human
uuugggggucaggca

SEQ ID NO: 2823507 - RNA, 20 nt, Human
uuugggggucaggcagccag

SEQ ID NO: 2823508 - RNA, 20 nt, Human
uuugggggugggucuggccg

SEQ ID NO: 2823509 - RNA, 17 nt, Human
uuuggggaaaccuagag

SEQ ID NO: 2823510 - RNA, 18 nt, Human
uuuggggaaaccuagaga

SEQ ID NO: 2823511 - RNA, 22 nt, Human
uuuggguauguuuaaucuguua

SEQ ID NO: 2823512 - RNA, 10 nt, Human
uuuggggucu

SEQ ID NO: 2823513 - RNA, 18 nt, Human
uuuggggugccccucucc

SEQ ID NO: 2823514 - RNA, 19 nt, Human
auguauacuauaguaccag

SEQ ID NO: 2823515 - RNA, 15 nt, Human
auguauaguugcuuu

SEQ ID NO: 2823516 - RNA, 16 nt, Human
auguauaguuuucccu

SEQ ID NO: 2823517 - RNA, 16 nt, Human
auguauaguuuugaau

SEQ ID NO: 2823518 - RNA, 12 nt, Human
auguauauacac

SEQ ID NO: 2823519 - RNA, 13 nt, Human
auguauauacaca

SEQ ID NO: 2823520 - RNA, 15 nt, Human
auguauauacacaua

SEQ ID NO: 2823521 - RNA, 16 nt, Human
auguauauacacauau

SEQ ID NO: 2823522 - RNA, 17 nt, Human
auguauauacacauaua

SEQ ID NO: 2823523 - RNA, 18 nt, Human
auguauauacacauauac

SEQ ID NO: 2823524 - RNA, 14 nt, Human
uuugaauuguuaca

SEQ ID NO: 2823525 - RNA, 15 nt, Human
uuugaauuguuacau

SEQ ID NO: 2823526 - RNA, 16 nt, Human
uuugaauuguuuucuu

SEQ ID NO: 2823527 - RNA, 18 nt, Human
uuugaauuguuuucuuua

SEQ ID NO: 2823528 - RNA, 14 nt, Human
uuugaauuuacugg

SEQ ID NO: 2823529 - RNA, 17 nt, Human
uuugaauuuuaaaucua

SEQ ID NO: 2823530 - RNA, 20 nt, Human
uuugaauguuauuuguuauu

SEQ ID NO: 2823531 - RNA, 13 nt, Human
uuugaauuaaaac

SEQ ID NO: 2823532 - RNA, 15 nt, Human
uuugaauuaaaacuu

SEQ ID NO: 2823533 - RNA, 19 nt, Human
uuugaauuaaaacuucuua

SEQ ID NO: 2823534 - RNA, 15 nt, Human
uuucccuugaggaaa

SEQ ID NO: 2823535 - RNA, 19 nt, Human
uuucccuucaguacccucu

SEQ ID NO: 2823536 - RNA, 20 nt, Human
uuucccuucaguacccucuc

SEQ ID NO: 2823537 - RNA, 16 nt, Human
uuucccuucuugcauc

SEQ ID NO: 2823538 - RNA, 16 nt, Human
uuucccuucccuucca

SEQ ID NO: 2823539 - RNA, 12 nt, Human
uuucccuuccuc

SEQ ID NO: 2823540 - RNA, 13 nt, Human
uuucccuuccucu

SEQ ID NO: 2823541 - RNA, 15 nt, Human
uuucccuuccucuuc

SEQ ID NO: 2823542 - RNA, 19 nt, Human
uuucccuuccucuucggcc

SEQ ID NO: 2823543 - RNA, 16 nt, Human
uuucccuucaguaccc

SEQ ID NO: 2823544 - RNA, 12 nt, Human
uuucccucuuuu

SEQ ID NO: 2823545 - RNA, 22 nt, Human
uuucccucuuuucuuacuccuc

SEQ ID NO: 2823546 - RNA, 18 nt, Human
uuugacacucugcagacu

SEQ ID NO: 2823547 - RNA, 14 nt, Human
uuugacuuaaugug

SEQ ID NO: 2823548 - RNA, 16 nt, Human
uuugacuuaaugugau

SEQ ID NO: 2823549 - RNA, 23 nt, Human
uuugacuuaaugugauuacugcu

SEQ ID NO: 2823550 - RNA, 17 nt, Human
uuugacuugcaugaaga

SEQ ID NO: 2823551 - RNA, 13 nt, Human
uuugacuuuaauu

SEQ ID NO: 2823552 - RNA, 14 nt, Human
uuugacuuuaauuu

SEQ ID NO: 2823553 - RNA, 15 nt, Human
uuugacuuuaauuua

SEQ ID NO: 2823554 - RNA, 15 nt, Human
uuugacuuucuucug

SEQ ID NO: 2823555 - RNA, 17 nt, Human
uuugacuuucuucugaa

SEQ ID NO: 2823556 - RNA, 18 nt, Human
uuugacuuucuucugaau

SEQ ID NO: 2823557 - RNA, 22 nt, Human
uuugacuuucuucugaauauuu

SEQ ID NO: 2823558 - RNA, 13 nt, Human
uuugagacagagu

SEQ ID NO: 2823559 - RNA, 16 nt, Human
uuugagaccagccugg

SEQ ID NO: 2823560 - RNA, 20 nt, Human
uuugagacaguuucuuagcu

SEQ ID NO: 2823561 - RNA, 22 nt, Human
uuugagacaguuucuuagcuuu

SEQ ID NO: 2823562 - RNA, 19 nt, Human
uuugagaccagccugggca

SEQ ID NO: 2823563 - RNA, 15 nt, Human
uuugagacaguuucu

SEQ ID NO: 2823564 - RNA, 18 nt, Human
uuugagaacaaagaugac

SEQ ID NO: 2823565 - RNA, 18 nt, Human
uuugagaacguaaagaac

SEQ ID NO: 2823566 - RNA, 16 nt, Human
uuugagacaguuucuu

SEQ ID NO: 2823567 - RNA, 17 nt, Human
uuugagacaguuucuua

SEQ ID NO: 2823568 - RNA, 18 nt, Human
uuugagacaguuucuuag

SEQ ID NO: 2823569 - RNA, 19 nt, Human
uuugagacaguuucuuagc

SEQ ID NO: 2823570 - RNA, 15 nt, Human
uuugauccaagcugg

SEQ ID NO: 2823571 - RNA, 13 nt, Human
uuugagaguucua

SEQ ID NO: 2823572 - RNA, 14 nt, Human
uuugauccaagcug

SEQ ID NO: 2823573 - RNA, 19 nt, Human
uuugaugacuggcauuuua

SEQ ID NO: 2823574 - RNA, 23 nt, Human
uuugaugacuggcauuuuauaga

SEQ ID NO: 2823575 - RNA, 16 nt, Human
uuugaugcagcauuug

SEQ ID NO: 2823576 - RNA, 20 nt, Human
uuugaugcagcauuugauaa

SEQ ID NO: 2823577 - RNA, 21 nt, Human
uuugaugcagcauuugauaau

SEQ ID NO: 2823578 - RNA, 16 nt, Human
uuugaugccaagaaag

SEQ ID NO: 2823579 - RNA, 15 nt, Human
uuugauucaaaauau

SEQ ID NO: 2823580 - RNA, 22 nt, Human
uuugauucaaaauauuuaaaaa

SEQ ID NO: 2823581 - RNA, 22 nt, Human
uuugauuaguuuucuuguugcu

SEQ ID NO: 2823582 - RNA, 14 nt, Human
uuugauuaacaaau

SEQ ID NO: 2823583 - RNA, 15 nt, Human
uuugauuaacaaaua

SEQ ID NO: 2823584 - RNA, 16 nt, Human
uuugauuaacaaauau

SEQ ID NO: 2823585 - RNA, 22 nt, Human
auguccuccagaagccucuggc

SEQ ID NO: 2823586 - RNA, 20 nt, Human
auguccuccagaagccucug

SEQ ID NO: 2823587 - RNA, 23 nt, Human
auguccuccagaagccucuggcu

SEQ ID NO: 2823588 - RNA, 15 nt, Human
augucgccucugcau

SEQ ID NO: 2823589 - RNA, 15 nt, Human
augugacaauaauau

SEQ ID NO: 2823590 - RNA, 16 nt, Human
augugacaauaauauu

SEQ ID NO: 2823591 - RNA, 12 nt, Human
augucuaaaauu

SEQ ID NO: 2823592 - RNA, 13 nt, Human
augucuaaaauug

SEQ ID NO: 2823593 - RNA, 14 nt, Human
augucuaaaauugu

SEQ ID NO: 2823594 - RNA, 17 nt, Human
augucuaaaugcugaaa

SEQ ID NO: 2823595 - RNA, 11 nt, Human
augugacacau

SEQ ID NO: 2823596 - RNA, 15 nt, Human
augugacaccaaagc

SEQ ID NO: 2823597 - RNA, 16 nt, Human
augugacagguaaacu

SEQ ID NO: 2823598 - RNA, 18 nt, Human
augugacuuugcaucagc

SEQ ID NO: 2823599 - RNA, 16 nt, Human
augugagagguuugac

SEQ ID NO: 2823600 - RNA, 22 nt, Human
augugaguguguguuugugcug

SEQ ID NO: 2823601 - RNA, 17 nt, Human
augugaguuuggucugg

SEQ ID NO: 2823602 - RNA, 20 nt, Human
augugaguuuggucuggacu

SEQ ID NO: 2823603 - RNA, 21 nt, Human
augugaguuuggucuggacug

SEQ ID NO: 2823604 - RNA, 22 nt, Human
augugaguuuggucuggacuga

SEQ ID NO: 2823605 - RNA, 23 nt, Human
augugaguuuggucuggacugac

SEQ ID NO: 2823606 - RNA, 21 nt, Human
augugauaaguucuuaugcca

SEQ ID NO: 2823607 - RNA, 18 nt, Human
augugagugccuuuugca

SEQ ID NO: 2823608 - RNA, 20 nt, Human
augugagugccuuuugcaga

SEQ ID NO: 2823609 - RNA, 22 nt, Human
augugagugccuuuugcagaag

SEQ ID NO: 2823610 - RNA, 23 nt, Human
augugagugccuuuugcagaaga

SEQ ID NO: 2823611 - RNA, 21 nt, Human
augugaggaagaacuacagcu

SEQ ID NO: 2823612 - RNA, 12 nt, Human
augugaggaugu

SEQ ID NO: 2823613 - RNA, 17 nt, Human
augugagagguuugacu

SEQ ID NO: 2823614 - RNA, 21 nt, Human
augugagauuuuuuauugcua

SEQ ID NO: 2823615 - RNA, 15 nt, Human
auguauauuccuuug

SEQ ID NO: 2823616 - RNA, 16 nt, Human
auguauauguguucau

SEQ ID NO: 2823617 - RNA, 19 nt, Human
auguauauauauauaugca

SEQ ID NO: 2823618 - RNA, 12 nt, Human
auguauauauuu

SEQ ID NO: 2823619 - RNA, 14 nt, Human
auguauauauuuag

SEQ ID NO: 2823620 - RNA, 17 nt, Human
auguauauauuuagugc

SEQ ID NO: 2823621 - RNA, 18 nt, Human
auguauauuuuuuuaauu

SEQ ID NO: 2823622 - RNA, 20 nt, Human
auguauauuuuuuuaauuua

SEQ ID NO: 2823623 - RNA, 21 nt, Human
auguauauuuuuuuaauuuaa

SEQ ID NO: 2823624 - RNA, 18 nt, Human
augucauugaguaauaua

SEQ ID NO: 2823625 - RNA, 13 nt, Human
augucauuaaaug

SEQ ID NO: 2823626 - RNA, 15 nt, Human
augucauuaaugugu

SEQ ID NO: 2823627 - RNA, 16 nt, Human
augucauuaauguguu

SEQ ID NO: 2823628 - RNA, 17 nt, Human
augucauuaauguguug

SEQ ID NO: 2823629 - RNA, 13 nt, Human
augucauguguuc

SEQ ID NO: 2823630 - RNA, 21 nt, Human
augucaucagagcuccucugu

SEQ ID NO: 2823631 - RNA, 22 nt, Human
augucauauacugccauguacu

SEQ ID NO: 2823632 - RNA, 14 nt, Human
augucccuugcugu

SEQ ID NO: 2823633 - RNA, 13 nt, Human
augucauuuccuu

SEQ ID NO: 2823634 - RNA, 20 nt, Human
augucccuuuuccuaaguca

SEQ ID NO: 2823635 - RNA, 19 nt, Human
auguccuaauucuucuguc

SEQ ID NO: 2823636 - RNA, 20 nt, Human
auguccuacuaucacugaac

SEQ ID NO: 2823637 - RNA, 15 nt, Human
auguccucaccacau

SEQ ID NO: 2823638 - RNA, 13 nt, Human
auguccuaugugu

SEQ ID NO: 2823639 - RNA, 15 nt, Human
auguccuauguguga

SEQ ID NO: 2823640 - RNA, 19 nt, Human
auguccuccagaagccucu

SEQ ID NO: 2823641 - RNA, 18 nt, Human
auguccuccagaagccuc

SEQ ID NO: 2823642 - RNA, 16 nt, Human
auguccuccagaagcc

SEQ ID NO: 2823643 - RNA, 17 nt, Human
auguccucaccacaugc

SEQ ID NO: 2823644 - RNA, 21 nt, Human
auguccucagcauuucuuuuc

SEQ ID NO: 2823645 - RNA, 22 nt, Human
auguccaaagaggcugccccuc

SEQ ID NO: 2823646 - RNA, 21 nt, Human
auguccaaagaggcugccccu

SEQ ID NO: 2823647 - RNA, 20 nt, Human
auguccaaagaggcugcccc

SEQ ID NO: 2823648 - RNA, 19 nt, Human
auguccaaagaggcugccc

SEQ ID NO: 2823649 - RNA, 18 nt, Human
auguccaaagaggcugcc

SEQ ID NO: 2823650 - RNA, 16 nt, Human
auguccaaagaggcug

SEQ ID NO: 2823651 - RNA, 15 nt, Human
auguccaaagaggcu

SEQ ID NO: 2823652 - RNA, 12 nt, Human
auguccaaagag

SEQ ID NO: 2823653 - RNA, 18 nt, Human
uuugucuguuuguuucaa

SEQ ID NO: 2823654 - RNA, 21 nt, Human
uuugucuguuuguuucaagaa

SEQ ID NO: 2823655 - RNA, 23 nt, Human
uuuguacaaggggccauuuggca

SEQ ID NO: 2823656 - RNA, 23 nt, Human
uuuguaguggaaacauuuauauu

SEQ ID NO: 2823657 - RNA, 17 nt, Human
uuuguaguagcguuuuu

SEQ ID NO: 2823658 - RNA, 16 nt, Human
uuuguacauagauuua

SEQ ID NO: 2823659 - RNA, 14 nt, Human
uuuguagguaaaau

SEQ ID NO: 2823660 - RNA, 15 nt, Human
uuuguagguaaaaug

SEQ ID NO: 2823661 - RNA, 17 nt, Human
uuuguagguaaaaugua

SEQ ID NO: 2823662 - RNA, 20 nt, Human
uuuguagguaaaauguauuu

SEQ ID NO: 2823663 - RNA, 15 nt, Human
uuuguaguagcguuu

SEQ ID NO: 2823664 - RNA, 19 nt, Human
uuuguaguagcguuuuuua

SEQ ID NO: 2823665 - RNA, 16 nt, Human
uuuguagugaaauaau

SEQ ID NO: 2823666 - RNA, 18 nt, Human
uuuguagugaaauaauag

SEQ ID NO: 2823667 - RNA, 12 nt, Human
uuuguacagaau

SEQ ID NO: 2823668 - RNA, 14 nt, Human
uuuguacagagugc

SEQ ID NO: 2823669 - RNA, 21 nt, Human
uuuguaaguuucaggugacau

SEQ ID NO: 2823670 - RNA, 14 nt, Human
uuuguaaguuucag

SEQ ID NO: 2823671 - RNA, 21 nt, Human
augugaucuauguuucaucuu

SEQ ID NO: 2823672 - RNA, 16 nt, Human
augugaucugucuugu

SEQ ID NO: 2823673 - RNA, 17 nt, Human
augugaucugucuugua

SEQ ID NO: 2823674 - RNA, 18 nt, Human
augugaucugucuuguaa

SEQ ID NO: 2823675 - RNA, 19 nt, Human
augugaucugucuuguaau

SEQ ID NO: 2823676 - RNA, 20 nt, Human
augugaucugucuuguaaua

SEQ ID NO: 2823677 - RNA, 18 nt, Human
augugauccuuuuggagu

SEQ ID NO: 2823678 - RNA, 16 nt, Human
augugauauucuaaga

SEQ ID NO: 2823679 - RNA, 14 nt, Human
augugauauucuaa

SEQ ID NO: 2823680 - RNA, 15 nt, Human
augugauauucuaag

SEQ ID NO: 2823681 - RNA, 18 nt, Human
augugauauucuaagacu

SEQ ID NO: 2823682 - RNA, 18 nt, Human
augugaucacgccuggcu

SEQ ID NO: 2823683 - RNA, 23 nt, Human
augugaucagcuuucaaagcauu

SEQ ID NO: 2823684 - RNA, 17 nt, Human
uuuguaaggcuuguucc

SEQ ID NO: 2823685 - RNA, 21 nt, Human
uuuguaagucaguguugagau

SEQ ID NO: 2823686 - RNA, 22 nt, Human
uuuguaagucaguguugagaug

SEQ ID NO: 2823687 - RNA, 21 nt, Human
uuuguaagugcuacauaaauu

SEQ ID NO: 2823688 - RNA, 23 nt, Human
uuuguaagaguguagaagcauuc

SEQ ID NO: 2823689 - RNA, 22 nt, Human
uuuguaagaguguagaagcauu

SEQ ID NO: 2823690 - RNA, 12 nt, Human
uuuguaagagug

SEQ ID NO: 2823691 - RNA, 16 nt, Human
uuuguaagaguguaga

SEQ ID NO: 2823692 - RNA, 18 nt, Human
uuuguaagaacuaaagaa

SEQ ID NO: 2823693 - RNA, 19 nt, Human
uuuguaagaacuaaagaag

SEQ ID NO: 2823694 - RNA, 17 nt, Human
uuuguaagaguguagaa

SEQ ID NO: 2823695 - RNA, 18 nt, Human
uuuguaagaguguagaag

SEQ ID NO: 2823696 - RNA, 19 nt, Human
uuuguaagaguguagaagc

SEQ ID NO: 2823697 - RNA, 21 nt, Human
uuuguaagaguguagaagcau

SEQ ID NO: 2823698 - RNA, 17 nt, Human
uuuguuucugagaaaag

SEQ ID NO: 2823699 - RNA, 18 nt, Human
uuuguuuuacaaugucau

SEQ ID NO: 2823700 - RNA, 18 nt, Human
uuuguuucucccccuggg

SEQ ID NO: 2823701 - RNA, 15 nt, Human
uuuguuuccuuuguu

SEQ ID NO: 2823702 - RNA, 14 nt, Human
uuuguuuccuuugu

SEQ ID NO: 2823703 - RNA, 13 nt, Human
uuugugccagagg

SEQ ID NO: 2823704 - RNA, 14 nt, Human
uuugugauucuucc

SEQ ID NO: 2823705 - RNA, 21 nt, Human
uuugugauucuuccagaugug

SEQ ID NO: 2823706 - RNA, 17 nt, Human
uuugugauuuagaacug

SEQ ID NO: 2823707 - RNA, 21 nt, Human
uuugugcaaaagcuucaaauu

SEQ ID NO: 2823708 - RNA, 20 nt, Human
uuugugcuauaguauuugau

SEQ ID NO: 2823709 - RNA, 18 nt, Human
uuuguuuauuagaugaau

SEQ ID NO: 2823710 - RNA, 21 nt, Human
uuuguuucaagaaccuggaaa

SEQ ID NO: 2823711 - RNA, 14 nt, Human
uuugugcucauuua

SEQ ID NO: 2823712 - RNA, 21 nt, Human
uuugugcucauuuaaguuuca

SEQ ID NO: 2823713 - RNA, 20 nt, Human
uuugugccuggcuucuuucu

SEQ ID NO: 2823714 - RNA, 20 nt, Human
uuugucuuauauauauuucu

SEQ ID NO: 2823715 - RNA, 14 nt, Human
uuugucuuauauau

SEQ ID NO: 2823716 - RNA, 19 nt, Human
uuugucuuauauauauuuc

SEQ ID NO: 2823717 - RNA, 12 nt, Human
augugcugauca

SEQ ID NO: 2823718 - RNA, 21 nt, Human
augugccagguuuuuggucug

SEQ ID NO: 2823719 - RNA, 23 nt, Human
augugccaggaaacucuugcuau

SEQ ID NO: 2823720 - RNA, 21 nt, Human
augugccagggcaaugaugaa

SEQ ID NO: 2823721 - RNA, 20 nt, Human
augugccagggcaaugauga

SEQ ID NO: 2823722 - RNA, 16 nt, Human
uuuguuuuuuuccaac

SEQ ID NO: 2823723 - RNA, 22 nt, Human
uuuguuuuuuuccaacuguguu

SEQ ID NO: 2823724 - RNA, 15 nt, Human
uuuguuuuuuugcca

SEQ ID NO: 2823725 - RNA, 13 nt, Human
uuuuaaaaaaaga

SEQ ID NO: 2823726 - RNA, 15 nt, Human
uuuuaaaaaaagaaa

SEQ ID NO: 2823727 - RNA, 18 nt, Human
uuuuaaaaaaagaaaaug

SEQ ID NO: 2823728 - RNA, 22 nt, Human
augugcacccaugggcucugac

SEQ ID NO: 2823729 - RNA, 13 nt, Human
augugcagcagau

SEQ ID NO: 2823730 - RNA, 18 nt, Human
augugcagcagauuggaa

SEQ ID NO: 2823731 - RNA, 20 nt, Human
augugcagcagauuggaagg

SEQ ID NO: 2823732 - RNA, 21 nt, Human
augugcagcagauuggaagga

SEQ ID NO: 2823733 - RNA, 22 nt, Human
augugcagcagauuggaaggag

SEQ ID NO: 2823734 - RNA, 13 nt, Human
uuuguuuuugcuu

SEQ ID NO: 2823735 - RNA, 16 nt, Human
uuuguuuuugcuuguu

SEQ ID NO: 2823736 - RNA, 13 nt, Human
uuuguuuuucuca

SEQ ID NO: 2823737 - RNA, 14 nt, Human
uuuguuuuucucac

SEQ ID NO: 2823738 - RNA, 13 nt, Human
uuuguuuuuaauu

SEQ ID NO: 2823739 - RNA, 14 nt, Human
uuuguuuuucauuc

SEQ ID NO: 2823740 - RNA, 14 nt, Human
uuuguuuucauggu

SEQ ID NO: 2823741 - RNA, 13 nt, Human
uuuguuuucuuug

SEQ ID NO: 2823742 - RNA, 12 nt, Human
auguguuuccau

SEQ ID NO: 2823743 - RNA, 14 nt, Human
auguguuuuagagu

SEQ ID NO: 2823744 - RNA, 15 nt, Human
auguguuuuagaugg

SEQ ID NO: 2823745 - RNA, 16 nt, Human
auguguuuuauaaaau

SEQ ID NO: 2823746 - RNA, 13 nt, Human
auguguuuuucuc

SEQ ID NO: 2823747 - RNA, 15 nt, Human
auguguuuuucucca

SEQ ID NO: 2823748 - RNA, 16 nt, Human
auguguuuuucuccag

SEQ ID NO: 2823749 - RNA, 17 nt, Human
auguguuuuucuccagu

SEQ ID NO: 2823750 - RNA, 14 nt, Human
auguguuucaaacu

SEQ ID NO: 2823751 - RNA, 14 nt, Human
auguguggccugca

SEQ ID NO: 2823752 - RNA, 16 nt, Human
augugugguggccuca

SEQ ID NO: 2823753 - RNA, 17 nt, Human
augugugguggccucag

SEQ ID NO: 2823754 - RNA, 19 nt, Human
augugugguggccucagcu

SEQ ID NO: 2823755 - RNA, 13 nt, Human
auguguguauaag

SEQ ID NO: 2823756 - RNA, 21 nt, Human
auguguguauaagugcacaca

SEQ ID NO: 2823757 - RNA, 23 nt, Human
auguguguauaagugcacacaga

SEQ ID NO: 2823758 - RNA, 19 nt, Human
auguguguagacaaauauu

SEQ ID NO: 2823759 - RNA, 13 nt, Human
auguggaaaacag

SEQ ID NO: 2823760 - RNA, 14 nt, Human
auguguguaugugu

SEQ ID NO: 2823761 - RNA, 16 nt, Human
auguguguauguguau

SEQ ID NO: 2823762 - RNA, 12 nt, Human
auguguguauau

SEQ ID NO: 2823763 - RNA, 14 nt, Human
auguguguauauau

SEQ ID NO: 2823764 - RNA, 15 nt, Human
auguguguauauaug

SEQ ID NO: 2823765 - RNA, 18 nt, Human
auguguguauauaugugu

SEQ ID NO: 2823766 - RNA, 20 nt, Human
auguguguauauauguguau

SEQ ID NO: 2823767 - RNA, 20 nt, Human
auguguguagacaaauauuu

SEQ ID NO: 2823768 - RNA, 18 nt, Human
auguugaagaauacaguu

SEQ ID NO: 2823769 - RNA, 23 nt, Human
auguuggccaccaggugccuuuc

SEQ ID NO: 2823770 - RNA, 23 nt, Human
auguuggacaccuuuagguucuu

SEQ ID NO: 2823771 - RNA, 19 nt, Human
auguugcuggacugucaua

SEQ ID NO: 2823772 - RNA, 17 nt, Human
auguuggaagagaaagc

SEQ ID NO: 2823773 - RNA, 17 nt, Human
auguuggacaccuuuag

SEQ ID NO: 2823774 - RNA, 19 nt, Human
auguuggacaccuuuaggu

SEQ ID NO: 2823775 - RNA, 22 nt, Human
auguuggacaccuuuagguucu

SEQ ID NO: 2823776 - RNA, 15 nt, Human
auguugcuggacugu

SEQ ID NO: 2823777 - RNA, 15 nt, Human
auguugcccaggcag

SEQ ID NO: 2823778 - RNA, 14 nt, Human
auguugcccaggca

SEQ ID NO: 2823779 - RNA, 13 nt, Human
auguugcccaggc

SEQ ID NO: 2823780 - RNA, 17 nt, Human
auguucacgcaacuuga

SEQ ID NO: 2823781 - RNA, 19 nt, Human
auguucacgcaacuugaaa

SEQ ID NO: 2823782 - RNA, 22 nt, Human
auguucaacuggagacacuauu

SEQ ID NO: 2823783 - RNA, 14 nt, Human
auguucaacuggag

SEQ ID NO: 2823784 - RNA, 22 nt, Human
auguuauuuguuauuuucagua

SEQ ID NO: 2823785 - RNA, 17 nt, Human
auguucaaagccacauu

SEQ ID NO: 2823786 - RNA, 18 nt, Human
auguucaaagccacauua

SEQ ID NO: 2823787 - RNA, 13 nt, Human
auguuaagcagau

SEQ ID NO: 2823788 - RNA, 17 nt, Human
auguuaauuuuuuggua

SEQ ID NO: 2823789 - RNA, 19 nt, Human
auguuaauuuuuugguaca

SEQ ID NO: 2823790 - RNA, 20 nt, Human
auguuaauuuuuugguacaa

SEQ ID NO: 2823791 - RNA, 22 nt, Human
auguuaauuuuuugguacaaaa

SEQ ID NO: 2823792 - RNA, 23 nt, Human
auguuaauuuuuugguacaaaaa

SEQ ID NO: 2823793 - RNA, 12 nt, Human
auguuaagcaga

SEQ ID NO: 2823794 - RNA, 18 nt, Human
auguuaaccaaggaaaua

SEQ ID NO: 2823795 - RNA, 12 nt, Human
auguuaaauuug

SEQ ID NO: 2823796 - RNA, 14 nt, Human
auguuaaauuugua

SEQ ID NO: 2823797 - RNA, 15 nt, Human
auguuaaauuuguaa

SEQ ID NO: 2823798 - RNA, 16 nt, Human
auguuaaauuuguaag

SEQ ID NO: 2823799 - RNA, 17 nt, Human
auguuaaauuuguaagu

SEQ ID NO: 2823800 - RNA, 18 nt, Human
auguuaaauuuguaaguu

SEQ ID NO: 2823801 - RNA, 20 nt, Human
auguuaaauuuguaaguuuc

SEQ ID NO: 2823802 - RNA, 23 nt, Human
auguuaaauuuguaaguuucagg

SEQ ID NO: 2823803 - RNA, 22 nt, Human
auguuaaauuuguaaguuucag

SEQ ID NO: 2823804 - RNA, 24 nt, Human
auguuaugacuauguaaacuacuu

SEQ ID NO: 2823805 - RNA, 18 nt, Human
auguuaugacuauguaaa

SEQ ID NO: 2823806 - RNA, 16 nt, Human
auguuaccaucuuacu

SEQ ID NO: 2823807 - RNA, 21 nt, Human
auguuaccaucuuacuugagc

SEQ ID NO: 2823808 - RNA, 17 nt, Human
auguuaucuucucaagu

SEQ ID NO: 2823809 - RNA, 15 nt, Human
augugcuguaauuua

SEQ ID NO: 2823810 - RNA, 22 nt, Human
auguuaucuucucaaguucuaa

SEQ ID NO: 2823811 - RNA, 20 nt, Human
auguuaucuucucaaguucu

SEQ ID NO: 2823812 - RNA, 21 nt, Human
auguuaucuucucaaguucua

SEQ ID NO: 2823813 - RNA, 19 nt, Human
auguuauuuucuucuaagu

SEQ ID NO: 2823814 - RNA, 15 nt, Human
auguuauuucugcaa

SEQ ID NO: 2823815 - RNA, 17 nt, Human
auguuauuucugcaaac

SEQ ID NO: 2823816 - RNA, 18 nt, Human
auguuauuucugcaaaca

SEQ ID NO: 2823817 - RNA, 20 nt, Human
auguuauuuguuauuuucag

SEQ ID NO: 2823818 - RNA, 15 nt, Human
uuuuaguagagacag

SEQ ID NO: 2823819 - RNA, 21 nt, Human
uuuuagacagucucacuuugu

SEQ ID NO: 2823820 - RNA, 23 nt, Human
uuuuaguauuuauuuauguacuu

SEQ ID NO: 2823821 - RNA, 20 nt, Human
uuuuaguauuuauuuaugua

SEQ ID NO: 2823822 - RNA, 14 nt, Human
uuuuagugcuuuug

SEQ ID NO: 2823823 - RNA, 13 nt, Human
uuuuaguccaaau

SEQ ID NO: 2823824 - RNA, 19 nt, Human
uuuuaguauuuauuuaugu

SEQ ID NO: 2823825 - RNA, 17 nt, Human
uuuuagagacuauggag

SEQ ID NO: 2823826 - RNA, 15 nt, Human
uuuuagaguaagaaa

SEQ ID NO: 2823827 - RNA, 17 nt, Human
uuuuagaguaagaaauu

SEQ ID NO: 2823828 - RNA, 14 nt, Human
uuuuaguaaucugu

SEQ ID NO: 2823829 - RNA, 15 nt, Human
uuuuaguaaucugua

SEQ ID NO: 2823830 - RNA, 16 nt, Human
uuuuaguaaucuguac

SEQ ID NO: 2823831 - RNA, 18 nt, Human
uuuuaguaaucuguacau

SEQ ID NO: 2823832 - RNA, 19 nt, Human
uuuuaguaaucuguacauu

SEQ ID NO: 2823833 - RNA, 12 nt, Human
uuuuauuaaauu

SEQ ID NO: 2823834 - RNA, 12 nt, Human
uuuuauuaagaa

SEQ ID NO: 2823835 - RNA, 15 nt, Human
uuuuauguuuagaua

SEQ ID NO: 2823836 - RNA, 12 nt, Human
uuuuauguuuga

SEQ ID NO: 2823837 - RNA, 14 nt, Human
uuuuauguuugaau

SEQ ID NO: 2823838 - RNA, 15 nt, Human
uuuuauguuugaaua

SEQ ID NO: 2823839 - RNA, 16 nt, Human
uuuuauguuugaauau

SEQ ID NO: 2823840 - RNA, 15 nt, Human
uuuuauuccuguaug

SEQ ID NO: 2823841 - RNA, 18 nt, Human
uuuuauuccuguauguug

SEQ ID NO: 2823842 - RNA, 19 nt, Human
uuuuauugaaucuauuuaa

SEQ ID NO: 2823843 - RNA, 16 nt, Human
uuuuauugacacagaa

SEQ ID NO: 2823844 - RNA, 18 nt, Human
uuuuauugacacagaaaa

SEQ ID NO: 2823845 - RNA, 12 nt, Human
uuuuauugcuag

SEQ ID NO: 2823846 - RNA, 17 nt, Human
uuuuauugcuaguauuu

SEQ ID NO: 2823847 - RNA, 19 nt, Human
uuuuauugcuaguauuuga

SEQ ID NO: 2823848 - RNA, 20 nt, Human
uuuuauugcuaguauuugaa

SEQ ID NO: 2823849 - RNA, 21 nt, Human
uuuuauugcuaguauuugaau

SEQ ID NO: 2823850 - RNA, 23 nt, Human
uuuuauugcuaguauuugaauua

SEQ ID NO: 2823851 - RNA, 15 nt, Human
uuuuaguauucauuc

SEQ ID NO: 2823852 - RNA, 20 nt, Human
uuuuauuguauaaacuauca

SEQ ID NO: 2823853 - RNA, 17 nt, Human
uuuucagcucucuguau

SEQ ID NO: 2823854 - RNA, 17 nt, Human
uuuucaggagcgcaaga

SEQ ID NO: 2823855 - RNA, 22 nt, Human
uuuucaggagcgcaagauagau

SEQ ID NO: 2823856 - RNA, 23 nt, Human
uuuucaguauuuuggagaaauua

SEQ ID NO: 2823857 - RNA, 16 nt, Human
uuuucaguauuuugga

SEQ ID NO: 2823858 - RNA, 13 nt, Human
uuuuccaaacuga

SEQ ID NO: 2823859 - RNA, 15 nt, Human
uuuuccacccuggaa

SEQ ID NO: 2823860 - RNA, 21 nt, Human
uuuucucuuagaacauuguau

SEQ ID NO: 2823861 - RNA, 18 nt, Human
uuuucuagacuuucuguu

SEQ ID NO: 2823862 - RNA, 22 nt, Human
uuuucuagccuauuuaccugca

SEQ ID NO: 2823863 - RNA, 14 nt, Human
uuuucuaguacacu

SEQ ID NO: 2823864 - RNA, 16 nt, Human
uuuucuaguuugcuca

SEQ ID NO: 2823865 - RNA, 17 nt, Human
uuuucuaguuugcucau

SEQ ID NO: 2823866 - RNA, 23 nt, Human
uuuucuaguuugcucauacuaca

SEQ ID NO: 2823867 - RNA, 13 nt, Human
uuuucuagacuuu

SEQ ID NO: 2823868 - RNA, 14 nt, Human
uuuucuagacuuuc

SEQ ID NO: 2823869 - RNA, 13 nt, Human
uuuuccagcuccu

SEQ ID NO: 2823870 - RNA, 12 nt, Human
uuuuccagcaag

SEQ ID NO: 2823871 - RNA, 13 nt, Human
uuuuccagcaagu

SEQ ID NO: 2823872 - RNA, 9 nt, Human
uuuucugaa

SEQ ID NO: 2823873 - RNA, 11 nt, Human
uuuucugauua

SEQ ID NO: 2823874 - RNA, 17 nt, Human
uuuucugauuagcuuug

SEQ ID NO: 2823875 - RNA, 18 nt, Human
uuuucugauuagcuuugu

SEQ ID NO: 2823876 - RNA, 17 nt, Human
uuuucuggaauacauga

SEQ ID NO: 2823877 - RNA, 21 nt, Human
uuuucuggaauacaugaaaua

SEQ ID NO: 2823878 - RNA, 13 nt, Human
uuuucuguuguaa

SEQ ID NO: 2823879 - RNA, 15 nt, Human
uuuucuguuguaacu

SEQ ID NO: 2823880 - RNA, 14 nt, Human
auguuuaaucuguu

SEQ ID NO: 2823881 - RNA, 17 nt, Human
auguuuaaucuguuaug

SEQ ID NO: 2823882 - RNA, 17 nt, Human
auguuggccaggcuggu

SEQ ID NO: 2823883 - RNA, 19 nt, Human
auguuggccaggcuggucu

SEQ ID NO: 2823884 - RNA, 12 nt, Human
auguuggcuggg

SEQ ID NO: 2823885 - RNA, 21 nt, Human
auguuggccaggcuggucuaa

SEQ ID NO: 2823886 - RNA, 13 nt, Human
auguuggcuggga

SEQ ID NO: 2823887 - RNA, 14 nt, Human
auguuuaaacauuu

SEQ ID NO: 2823888 - RNA, 16 nt, Human
auguuggucaggcugg

SEQ ID NO: 2823889 - RNA, 17 nt, Human
auguuggucaggcuggu

SEQ ID NO: 2823890 - RNA, 14 nt, Human
auguugguguucca

SEQ ID NO: 2823891 - RNA, 15 nt, Human
auguugguugcacuu

SEQ ID NO: 2823892 - RNA, 16 nt, Human
auguugguugcacuuu

SEQ ID NO: 2823893 - RNA, 18 nt, Human
auguugguugcacuuugu

SEQ ID NO: 2823894 - RNA, 19 nt, Human
auguugguugcacuuugua

SEQ ID NO: 2823895 - RNA, 20 nt, Human
auguugguugcacuuuguag

SEQ ID NO: 2823896 - RNA, 14 nt, Human
auguugguuuacuu

SEQ ID NO: 2823897 - RNA, 16 nt, Human
auguugguuuacuuuc

SEQ ID NO: 2823898 - RNA, 17 nt, Human
auguugguuuacuuuca

SEQ ID NO: 2823899 - RNA, 23 nt, Human
auguuuuuaaaaguuucaaugug

SEQ ID NO: 2823900 - RNA, 22 nt, Human
auguuuuuaaaaguuucaaugu

SEQ ID NO: 2823901 - RNA, 20 nt, Human
auguuuuuaaaaguuucaau

SEQ ID NO: 2823902 - RNA, 12 nt, Human
auguuuuuauac

SEQ ID NO: 2823903 - RNA, 20 nt, Human
auguuuuuauaaaaauaaau

SEQ ID NO: 2823904 - RNA, 21 nt, Human
auguuuuuauaaaaauaaaua

SEQ ID NO: 2823905 - RNA, 18 nt, Human
auguuuuuauacaaaaua

SEQ ID NO: 2823906 - RNA, 16 nt, Human
auguuuuuaugauauc

SEQ ID NO: 2823907 - RNA, 20 nt, Human
auguuuuuaugauaucccug

SEQ ID NO: 2823908 - RNA, 20 nt, Human
auguuuuuauuaagauuauu

SEQ ID NO: 2823909 - RNA, 15 nt, Human
auguuuuuauacaaa

SEQ ID NO: 2823910 - RNA, 14 nt, Human
auguuuuuauacaa

SEQ ID NO: 2823911 - RNA, 21 nt, Human
auguuuuuguuuucuuugaau

SEQ ID NO: 2823912 - RNA, 22 nt, Human
auguuuuucugccagggagcuu

SEQ ID NO: 2823913 - RNA, 21 nt, Human
auguuuuucugccagggagcu

SEQ ID NO: 2823914 - RNA, 20 nt, Human
auuaaaaaaaaagaucuguu

SEQ ID NO: 2823915 - RNA, 14 nt, Human
auuaaaaaaaaaga

SEQ ID NO: 2823916 - RNA, 22 nt, Human
auguuuuuuaaaauauuuaucu

SEQ ID NO: 2823917 - RNA, 15 nt, Human
auguuuuuucaugug

SEQ ID NO: 2823918 - RNA, 21 nt, Human
auuggagcggugggcacuguu

SEQ ID NO: 2823919 - RNA, 22 nt, Human
auuggagaaguaauccuaggga

SEQ ID NO: 2823920 - RNA, 21 nt, Human
auuggagagggcucugugcug

SEQ ID NO: 2823921 - RNA, 17 nt, Human
auuggagauagggaaag

SEQ ID NO: 2823922 - RNA, 16 nt, Human
auuggagaugcaaaua

SEQ ID NO: 2823923 - RNA, 20 nt, Human
auuggagaugccauccucuu

SEQ ID NO: 2823924 - RNA, 18 nt, Human
auuggcauggauuucugu

SEQ ID NO: 2823925 - RNA, 21 nt, Human
auuggcauggauuucugucuu

SEQ ID NO: 2823926 - RNA, 14 nt, Human
auuggcauggcuuu

SEQ ID NO: 2823927 - RNA, 23 nt, Human
auuggcauggcuuuauuuguuuu

SEQ ID NO: 2823928 - RNA, 19 nt, Human
auuggggaauuaaaaguca

SEQ ID NO: 2823929 - RNA, 18 nt, Human
auuguacuaccuguguau

SEQ ID NO: 2823930 - RNA, 16 nt, Human
auugccuuugaauguu

SEQ ID NO: 2823931 - RNA, 17 nt, Human
auugccuuugaauguua

SEQ ID NO: 2823932 - RNA, 18 nt, Human
auugccuuugaauguuaa

SEQ ID NO: 2823933 - RNA, 22 nt, Human
auugccuuugaauguuaauuuu

SEQ ID NO: 2823934 - RNA, 23 nt, Human
auugccuuuagugaucacagcag

SEQ ID NO: 2823935 - RNA, 15 nt, Human
auugccuucuuugaa

SEQ ID NO: 2823936 - RNA, 16 nt, Human
auugccuucuuugaag

SEQ ID NO: 2823937 - RNA, 17 nt, Human
auugccuucuuugaaga

SEQ ID NO: 2823938 - RNA, 18 nt, Human
auugccuucuuugaagaa

SEQ ID NO: 2823939 - RNA, 19 nt, Human
auugccuucuuugaagaag

SEQ ID NO: 2823940 - RNA, 20 nt, Human
auugccuucuuugaagaagg

SEQ ID NO: 2823941 - RNA, 21 nt, Human
auugccuucuuugaagaaggu

SEQ ID NO: 2823942 - RNA, 16 nt, Human
auuggaacagaauguu

SEQ ID NO: 2823943 - RNA, 12 nt, Human
auuggaaaugga

SEQ ID NO: 2823944 - RNA, 23 nt, Human
auuggaaauggaugcaaaguaca

SEQ ID NO: 2823945 - RNA, 14 nt, Human
auuggaaggagaca

SEQ ID NO: 2823946 - RNA, 16 nt, Human
auuggaaggagacaca

SEQ ID NO: 2823947 - RNA, 17 nt, Human
auuggaaggagacacag

SEQ ID NO: 2823948 - RNA, 18 nt, Human
auuggaaggagacacaga

SEQ ID NO: 2823949 - RNA, 19 nt, Human
auuggaaggagacacagau

SEQ ID NO: 2823950 - RNA, 20 nt, Human
auuggaaggagacacagaug

SEQ ID NO: 2823951 - RNA, 21 nt, Human
auuggaaggagacacagaugu

SEQ ID NO: 2823952 - RNA, 22 nt, Human
auuggaaggagacacagauguu

SEQ ID NO: 2823953 - RNA, 14 nt, Human
auuggaaucugaua

SEQ ID NO: 2823954 - RNA, 18 nt, Human
auuggaaucugauauacu

SEQ ID NO: 2823955 - RNA, 18 nt, Human
auugcaucaccucuguaa

SEQ ID NO: 2823956 - RNA, 22 nt, Human
auugcaucaccucuguaauuuu

SEQ ID NO: 2823957 - RNA, 21 nt, Human
auugcaucuagguaauuuuua

SEQ ID NO: 2823958 - RNA, 19 nt, Human
auugcaucucaaaauuauu

SEQ ID NO: 2823959 - RNA, 22 nt, Human
auugccuguguauggaaaaacc

SEQ ID NO: 2823960 - RNA, 11 nt, Human
auugcauugac

SEQ ID NO: 2823961 - RNA, 13 nt, Human
auugcauucuauu

SEQ ID NO: 2823962 - RNA, 14 nt, Human
auugcauucuauug

SEQ ID NO: 2823963 - RNA, 16 nt, Human
auugcauucuauugcc

SEQ ID NO: 2823964 - RNA, 17 nt, Human
auugcauucuauugccu

SEQ ID NO: 2823965 - RNA, 18 nt, Human
auugcauucuauugccuu

SEQ ID NO: 2823966 - RNA, 22 nt, Human
auugcauucuauugccuucuuu

SEQ ID NO: 2823967 - RNA, 23 nt, Human
auugcauucuauugccuucuuug

SEQ ID NO: 2823968 - RNA, 12 nt, Human
auugaaggccug

SEQ ID NO: 2823969 - RNA, 13 nt, Human
auugaaggccugg

SEQ ID NO: 2823970 - RNA, 19 nt, Human
auugaaggaagccaaauuu

SEQ ID NO: 2823971 - RNA, 20 nt, Human
auugaaggaagccaaauuua

SEQ ID NO: 2823972 - RNA, 21 nt, Human
auugaaggaagccaaauuuau

SEQ ID NO: 2823973 - RNA, 18 nt, Human
auugaaggaucaucugaa

SEQ ID NO: 2823974 - RNA, 20 nt, Human
auugaacacaaacuguaaau

SEQ ID NO: 2823975 - RNA, 19 nt, Human
auugaacacaaacuguaaa

SEQ ID NO: 2823976 - RNA, 18 nt, Human
auugaacacaaacuguaa

SEQ ID NO: 2823977 - RNA, 17 nt, Human
auugaacacaaacugua

SEQ ID NO: 2823978 - RNA, 16 nt, Human
auugaacacaaacugu

SEQ ID NO: 2823979 - RNA, 15 nt, Human
auugaacacaaacug

SEQ ID NO: 2823980 - RNA, 14 nt, Human
auugaacacaaacu

SEQ ID NO: 2823981 - RNA, 21 nt, Human
auugaaauuguacauauuugu

SEQ ID NO: 2823982 - RNA, 19 nt, Human
auugaaauugugaacucau

SEQ ID NO: 2823983 - RNA, 17 nt, Human
auugaaauuguacauau

SEQ ID NO: 2823984 - RNA, 19 nt, Human
auuccuauauccugugacu

SEQ ID NO: 2823985 - RNA, 20 nt, Human
auuccuauauccugugacug

SEQ ID NO: 2823986 - RNA, 12 nt, Human
auugaaauuaua

SEQ ID NO: 2823987 - RNA, 19 nt, Human
auugaaauuauaguuucaa

SEQ ID NO: 2823988 - RNA, 16 nt, Human
auugaaauuguacaua

SEQ ID NO: 2823989 - RNA, 13 nt, Human
auuccuacagcac

SEQ ID NO: 2823990 - RNA, 15 nt, Human
auuccuacagcacua

SEQ ID NO: 2823991 - RNA, 16 nt, Human
auuccuacagcacuac

SEQ ID NO: 2823992 - RNA, 17 nt, Human
auuccuacagcacuacu

SEQ ID NO: 2823993 - RNA, 23 nt, Human
auuccuacagcacuacugggugu

SEQ ID NO: 2823994 - RNA, 16 nt, Human
auuccuagaauuaaac

SEQ ID NO: 2823995 - RNA, 21 nt, Human
auuccuagaauuaaaccagau

SEQ ID NO: 2823996 - RNA, 14 nt, Human
auuccuaguuggug

SEQ ID NO: 2823997 - RNA, 16 nt, Human
auuccuaguuggugag

SEQ ID NO: 2823998 - RNA, 17 nt, Human
auuccuauauaguuuau

SEQ ID NO: 2823999 - RNA, 23 nt, Human
auugaauauaauauauuugugua

SEQ ID NO: 2824000 - RNA, 13 nt, Human
auugaauauugug

SEQ ID NO: 2824001 - RNA, 14 nt, Human
auugaauauugugu

SEQ ID NO: 2824002 - RNA, 15 nt, Human
auugaauauuguguu

SEQ ID NO: 2824003 - RNA, 23 nt, Human
auugaauauuguguuccuuuuua

SEQ ID NO: 2824004 - RNA, 15 nt, Human
auugaauacuuacau

SEQ ID NO: 2824005 - RNA, 16 nt, Human
auugaauacuuacauu

SEQ ID NO: 2824006 - RNA, 10 nt, Human
auugaaucua

SEQ ID NO: 2824007 - RNA, 14 nt, Human
auugaaucuauuua

SEQ ID NO: 2824008 - RNA, 16 nt, Human
auugaaucuauuuaag

SEQ ID NO: 2824009 - RNA, 16 nt, Human
auugaauguuuccaac

SEQ ID NO: 2824010 - RNA, 16 nt, Human
auugcaacaggcuggg

SEQ ID NO: 2824011 - RNA, 13 nt, Human
auugcacauuguu

SEQ ID NO: 2824012 - RNA, 14 nt, Human
auugcacauuguuc

SEQ ID NO: 2824013 - RNA, 21 nt, Human
auugcacauuguuguuuuuuu

SEQ ID NO: 2824014 - RNA, 17 nt, Human
auugcacccagcccaga

SEQ ID NO: 2824015 - RNA, 17 nt, Human
auugcacuccagccugg

SEQ ID NO: 2824016 - RNA, 13 nt, Human
auugcauaaagca

SEQ ID NO: 2824017 - RNA, 14 nt, Human
auugcauaaagcau

SEQ ID NO: 2824018 - RNA, 15 nt, Human
auugcauaaagcaua

SEQ ID NO: 2824019 - RNA, 20 nt, Human
auugcacuccagccugggug

SEQ ID NO: 2824020 - RNA, 18 nt, Human
auugcaacaggcugggcu

SEQ ID NO: 2824021 - RNA, 17 nt, Human
auugcaacaggcugggc

SEQ ID NO: 2824022 - RNA, 19 nt, Human
auugcaacaggcugggcuu

SEQ ID NO: 2824023 - RNA, 19 nt, Human
auugauguguuuauuuaua

SEQ ID NO: 2824024 - RNA, 12 nt, Human
auugauguguuu

SEQ ID NO: 2824025 - RNA, 15 nt, Human
auugcaaaauagcau

SEQ ID NO: 2824026 - RNA, 20 nt, Human
auugauuugcauugaacaca

SEQ ID NO: 2824027 - RNA, 16 nt, Human
auugauuugcauugaa

SEQ ID NO: 2824028 - RNA, 12 nt, Human
auugauuucuuu

SEQ ID NO: 2824029 - RNA, 15 nt, Human
auugauuucuuuucu

SEQ ID NO: 2824030 - RNA, 16 nt, Human
auugauuugaagaaca

SEQ ID NO: 2824031 - RNA, 14 nt, Human
auugauuugaagaa

SEQ ID NO: 2824032 - RNA, 12 nt, Human
auugauuugcau

SEQ ID NO: 2824033 - RNA, 15 nt, Human
auugauuugcauuga

SEQ ID NO: 2824034 - RNA, 13 nt, Human
auugauuugcauu

SEQ ID NO: 2824035 - RNA, 18 nt, Human
auugaaucuauuuaagua

SEQ ID NO: 2824036 - RNA, 15 nt, Human
auuucuucagggcug

SEQ ID NO: 2824037 - RNA, 17 nt, Human
auuucuucagucagaaa

SEQ ID NO: 2824038 - RNA, 18 nt, Human
auuucuucagucagaaaa

SEQ ID NO: 2824039 - RNA, 20 nt, Human
auuucuucagucagaaaacu

SEQ ID NO: 2824040 - RNA, 21 nt, Human
auuucuucagucagaaaacuu

SEQ ID NO: 2824041 - RNA, 23 nt, Human
auuucuucagucagaaaacuuua

SEQ ID NO: 2824042 - RNA, 15 nt, Human
auuucuucaaaaugu

SEQ ID NO: 2824043 - RNA, 16 nt, Human
auuucuucaaaaugua

SEQ ID NO: 2824044 - RNA, 17 nt, Human
auuucuucaaaauguau

SEQ ID NO: 2824045 - RNA, 19 nt, Human
auuucuucaaaauguauau

SEQ ID NO: 2824046 - RNA, 20 nt, Human
auuucuucaaaauguauaua

SEQ ID NO: 2824047 - RNA, 22 nt, Human
auuucuucaaaauguauauauu

SEQ ID NO: 2824048 - RNA, 21 nt, Human
auuucuucaaauccuuccaaa

SEQ ID NO: 2824049 - RNA, 13 nt, Human
auuucuucacugu

SEQ ID NO: 2824050 - RNA, 11 nt, Human
auuucuuauag

SEQ ID NO: 2824051 - RNA, 18 nt, Human
auuugaauguuaagcaga

SEQ ID NO: 2824052 - RNA, 13 nt, Human
auuugaauguuaa

SEQ ID NO: 2824053 - RNA, 16 nt, Human
auuucuuuauauuuau

SEQ ID NO: 2824054 - RNA, 19 nt, Human
auuucuuuauauuuaucca

SEQ ID NO: 2824055 - RNA, 21 nt, Human
auuucuuuauauuuauccacu

SEQ ID NO: 2824056 - RNA, 22 nt, Human
auuucuuuauauuuauccacua

SEQ ID NO: 2824057 - RNA, 20 nt, Human
auuucuugguaagaagccgg

SEQ ID NO: 2824058 - RNA, 14 nt, Human
auuucuugcgagcc

SEQ ID NO: 2824059 - RNA, 21 nt, Human
auuucuugcucuaucucucaa

SEQ ID NO: 2824060 - RNA, 19 nt, Human
auuucuugguaagaagccg

SEQ ID NO: 2824061 - RNA, 18 nt, Human
auuugaauuuuaaaucua

SEQ ID NO: 2824062 - RNA, 20 nt, Human
auuugaauuuuaaaucuaaa

SEQ ID NO: 2824063 - RNA, 14 nt, Human
auuucgugagcccc

SEQ ID NO: 2824064 - RNA, 19 nt, Human
auuugaauguuaagcagau

SEQ ID NO: 2824065 - RNA, 15 nt, Human
auuugaauuaaaacu

SEQ ID NO: 2824066 - RNA, 17 nt, Human
auuugaauuaaaacuuc

SEQ ID NO: 2824067 - RNA, 19 nt, Human
auuugaauuaaaacuucuu

SEQ ID NO: 2824068 - RNA, 20 nt, Human
auuugaauuaaaacuucuua

SEQ ID NO: 2824069 - RNA, 21 nt, Human
auuugaauuaaaacuucuuaa

SEQ ID NO: 2824070 - RNA, 15 nt, Human
auuugagcagggcuc

SEQ ID NO: 2824071 - RNA, 14 nt, Human
auuugagacuauuu

SEQ ID NO: 2824072 - RNA, 15 nt, Human
auuugaugccaggac

SEQ ID NO: 2824073 - RNA, 16 nt, Human
auuugaugcuguuuga

SEQ ID NO: 2824074 - RNA, 23 nt, Human
auuugaugcuguuugacaaaguu

SEQ ID NO: 2824075 - RNA, 11 nt, Human
auuuggagacu

SEQ ID NO: 2824076 - RNA, 21 nt, Human
auuuggagacacaacuauuuu

SEQ ID NO: 2824077 - RNA, 17 nt, Human
auuuggagacucugugg

SEQ ID NO: 2824078 - RNA, 21 nt, Human
auuuggaggaaaaaaagcaug

SEQ ID NO: 2824079 - RNA, 21 nt, Human
auuuguaaguuucaggugaca

SEQ ID NO: 2824080 - RNA, 19 nt, Human
auuuguacagaauuuugga

SEQ ID NO: 2824081 - RNA, 21 nt, Human
auuuguacauaguuauuuauu

SEQ ID NO: 2824082 - RNA, 16 nt, Human
auuuguaauuaaauua

SEQ ID NO: 2824083 - RNA, 20 nt, Human
auuugguuuggccaucucug

SEQ ID NO: 2824084 - RNA, 22 nt, Human
auuugguuuggccaucucugga

SEQ ID NO: 2824085 - RNA, 21 nt, Human
auuugguucauuaauucuaua

SEQ ID NO: 2824086 - RNA, 16 nt, Human
auuugguucauuaauu

SEQ ID NO: 2824087 - RNA, 15 nt, Human
auuuggcaguuuggu

SEQ ID NO: 2824088 - RNA, 16 nt, Human
auuuggcaguuuggua

SEQ ID NO: 2824089 - RNA, 17 nt, Human
auuuauuuuccuaaaga

SEQ ID NO: 2824090 - RNA, 16 nt, Human
auuuauuuuccuaaag

SEQ ID NO: 2824091 - RNA, 15 nt, Human
auuuauuuuccuaaa

SEQ ID NO: 2824092 - RNA, 13 nt, Human
auuuauuuuauga

SEQ ID NO: 2824093 - RNA, 16 nt, Human
auuuauuuuaugagaa

SEQ ID NO: 2824094 - RNA, 17 nt, Human
auuuauuuuaugagaaa

SEQ ID NO: 2824095 - RNA, 18 nt, Human
auuuauuuuaugagaaau

SEQ ID NO: 2824096 - RNA, 20 nt, Human
auuuauuuuaugagaaaugu

SEQ ID NO: 2824097 - RNA, 16 nt, Human
auuuauuguuuaugua

SEQ ID NO: 2824098 - RNA, 17 nt, Human
auuuauuguuuauguaa

SEQ ID NO: 2824099 - RNA, 19 nt, Human
auuuauuguuuauguaaau

SEQ ID NO: 2824100 - RNA, 21 nt, Human
auuuauuguuuauguaaaugu

SEQ ID NO: 2824101 - RNA, 19 nt, Human
auuuauuuuccuaaagaga

SEQ ID NO: 2824102 - RNA, 16 nt, Human
auuuauuuucuuuuga

SEQ ID NO: 2824103 - RNA, 23 nt, Human
auuuauuuucuuuugaauuguuu

SEQ ID NO: 2824104 - RNA, 13 nt, Human
auuuauuuuguaa

SEQ ID NO: 2824105 - RNA, 14 nt, Human
auuuauuuuguaau

SEQ ID NO: 2824106 - RNA, 15 nt, Human
auuuauuuuguaauu

SEQ ID NO: 2824107 - RNA, 16 nt, Human
auuuauuuuguaauua

SEQ ID NO: 2824108 - RNA, 19 nt, Human
auuuauuuuguaauuauga

SEQ ID NO: 2824109 - RNA, 14 nt, Human
auuuauuuuuacaa

SEQ ID NO: 2824110 - RNA, 18 nt, Human
auuuauuuuuacaagaag

SEQ ID NO: 2824111 - RNA, 15 nt, Human
auuuauuuuucaguu

SEQ ID NO: 2824112 - RNA, 16 nt, Human
auuuauuuuucaguuc

SEQ ID NO: 2824113 - RNA, 18 nt, Human
auuuauuuuucaguucca

SEQ ID NO: 2824114 - RNA, 19 nt, Human
auuuauuuuucaguuccaa

SEQ ID NO: 2824115 - RNA, 20 nt, Human
auuuauuuuucaguuccaag

SEQ ID NO: 2824116 - RNA, 22 nt, Human
auuuauuuuucaguuccaagaa

SEQ ID NO: 2824117 - RNA, 23 nt, Human
auuuauuuuucaguuccaagaaa

SEQ ID NO: 2824118 - RNA, 19 nt, Human
auuuauuuuuuacauuauu

SEQ ID NO: 2824119 - RNA, 14 nt, Human
auuuauuuuuuaca

SEQ ID NO: 2824120 - RNA, 18 nt, Human
auuuauuuuuuacauuau

SEQ ID NO: 2824121 - RNA, 21 nt, Human
auuuauuuuucucaugaaucu

SEQ ID NO: 2824122 - RNA, 23 nt, Human
auuuccauguccccucccagagc

SEQ ID NO: 2824123 - RNA, 20 nt, Human
auuuccauguccccucccag

SEQ ID NO: 2824124 - RNA, 14 nt, Human
auuucaugugucaa

SEQ ID NO: 2824125 - RNA, 22 nt, Human
auuucaugugucaacuucaaca

SEQ ID NO: 2824126 - RNA, 11 nt, Human
auuucauucca

SEQ ID NO: 2824127 - RNA, 12 nt, Human
auuucauuccau

SEQ ID NO: 2824128 - RNA, 13 nt, Human
auuucauuccauu

SEQ ID NO: 2824129 - RNA, 16 nt, Human
auuucauuccauugcc

SEQ ID NO: 2824130 - RNA, 17 nt, Human
auuucauuccauugccu

SEQ ID NO: 2824131 - RNA, 18 nt, Human
auuucauuccauugccua

SEQ ID NO: 2824132 - RNA, 14 nt, Human
auuucauguggcug

SEQ ID NO: 2824133 - RNA, 16 nt, Human
auuucauguggcugua

SEQ ID NO: 2824134 - RNA, 14 nt, Human
auuucaaaaauaua

SEQ ID NO: 2824135 - RNA, 15 nt, Human
auuucaaaaauauaa

SEQ ID NO: 2824136 - RNA, 17 nt, Human
auuucaaaaauauaacu

SEQ ID NO: 2824137 - RNA, 18 nt, Human
auuucaaaaauauaacuu

SEQ ID NO: 2824138 - RNA, 19 nt, Human
auuucaaaaauauaacuua

SEQ ID NO: 2824139 - RNA, 18 nt, Human
auuucaugcuaucucugu

SEQ ID NO: 2824140 - RNA, 17 nt, Human
auuucaugcucugcaaa

SEQ ID NO: 2824141 - RNA, 20 nt, Human
auuucaugcucugcaaaagg

SEQ ID NO: 2824142 - RNA, 11 nt, Human
auuucuuaggg

SEQ ID NO: 2824143 - RNA, 22 nt, Human
auuucuuauacgcuuuucuuug

SEQ ID NO: 2824144 - RNA, 14 nt, Human
auuucuaaaaucuu

SEQ ID NO: 2824145 - RNA, 21 nt, Human
auuucuaaagauaauauuacu

SEQ ID NO: 2824146 - RNA, 21 nt, Human
auuucuaaaaaacagaggcca

SEQ ID NO: 2824147 - RNA, 14 nt, Human
auuucuaaaaagau

SEQ ID NO: 2824148 - RNA, 20 nt, Human
auuucuaaaaagauuagcaa

SEQ ID NO: 2824149 - RNA, 12 nt, Human
auuucuaaaaga

SEQ ID NO: 2824150 - RNA, 20 nt, Human
auuucgguugagaauggaaa

SEQ ID NO: 2824151 - RNA, 21 nt, Human
auuucgccguugaagaggaag

SEQ ID NO: 2824152 - RNA, 19 nt, Human
auuuccuuuuuuguuauua

SEQ ID NO: 2824153 - RNA, 20 nt, Human
auuucuaaaaaacagaggcc

SEQ ID NO: 2824154 - RNA, 14 nt, Human
auuucuaaaaaaca

SEQ ID NO: 2824155 - RNA, 23 nt, Human
auuuccuugaauguggcuugaga

SEQ ID NO: 2824156 - RNA, 15 nt, Human
auuuccuugugcaaa

SEQ ID NO: 2824157 - RNA, 14 nt, Human
auuuccuugaaugu

SEQ ID NO: 2824158 - RNA, 14 nt, Human
auuuccuggauguu

SEQ ID NO: 2824159 - RNA, 15 nt, Human
auuuccuggauguuu

SEQ ID NO: 2824160 - RNA, 13 nt, Human
auuuccuccuggc

SEQ ID NO: 2824161 - RNA, 19 nt, Human
auuuccucagcuuaucucu

SEQ ID NO: 2824162 - RNA, 21 nt, Human
auuuccucagcuuaucucuuu

SEQ ID NO: 2824163 - RNA, 24 nt, Human
auuuccauuuggggauauugucau

SEQ ID NO: 2824164 - RNA, 18 nt, Human
auuuccuaucaccuauuu

SEQ ID NO: 2824165 - RNA, 23 nt, Human
auuuauugauuccuuuuuucaaa

SEQ ID NO: 2824166 - RNA, 18 nt, Human
auuuauugaagaaacaga

SEQ ID NO: 2824167 - RNA, 16 nt, Human
auuuauugcacauugu

SEQ ID NO: 2824168 - RNA, 17 nt, Human
auuuauugcacauuguu

SEQ ID NO: 2824169 - RNA, 19 nt, Human
auuuauugcacauuguuca

SEQ ID NO: 2824170 - RNA, 20 nt, Human
auuuauugcacauuguucaa

SEQ ID NO: 2824171 - RNA, 22 nt, Human
auuuauugcagaggauguucau

SEQ ID NO: 2824172 - RNA, 24 nt, Human
auuuauugcagaggauguucauaa

SEQ ID NO: 2824173 - RNA, 18 nt, Human
auuguuuuaucaugacau

SEQ ID NO: 2824174 - RNA, 15 nt, Human
auuguuuugcacuuu

SEQ ID NO: 2824175 - RNA, 14 nt, Human
auuguuuugaauau

SEQ ID NO: 2824176 - RNA, 15 nt, Human
auuguuuugaauauu

SEQ ID NO: 2824177 - RNA, 17 nt, Human
auuguuuugaauauuac

SEQ ID NO: 2824178 - RNA, 22 nt, Human
auuguuuugaauauuacuccua

SEQ ID NO: 2824179 - RNA, 15 nt, Human
auuguuuucuauuua

SEQ ID NO: 2824180 - RNA, 18 nt, Human
auuguuuucuauuuaugc

SEQ ID NO: 2824181 - RNA, 21 nt, Human
auuguuuucuauuuaugccuu

SEQ ID NO: 2824182 - RNA, 22 nt, Human
auuguuuucuauuuaugccuug

SEQ ID NO: 2824183 - RNA, 19 nt, Human
auuguuuucuuuaaagaug

SEQ ID NO: 2824184 - RNA, 11 nt, Human
auuguuuuucu

SEQ ID NO: 2824185 - RNA, 16 nt, Human
auuuaaaagauucauu

SEQ ID NO: 2824186 - RNA, 14 nt, Human
auuguuuuucuuuc

SEQ ID NO: 2824187 - RNA, 15 nt, Human
auuguuuuucuuucu

SEQ ID NO: 2824188 - RNA, 19 nt, Human
auuguuuuucuuucuacaa

SEQ ID NO: 2824189 - RNA, 18 nt, Human
auuuaaaagauucauuuu

SEQ ID NO: 2824190 - RNA, 19 nt, Human
auuuaaaagauucauuuuu

SEQ ID NO: 2824191 - RNA, 18 nt, Human
auuguacucaauggauuu

SEQ ID NO: 2824192 - RNA, 22 nt, Human
auuguacucaauggauuugaug

SEQ ID NO: 2824193 - RNA, 15 nt, Human
auuguaggugcaaga

SEQ ID NO: 2824194 - RNA, 15 nt, Human
auuguaggugcaagc

SEQ ID NO: 2824195 - RNA, 15 nt, Human
auuguuuuagagacu

SEQ ID NO: 2824196 - RNA, 19 nt, Human
auuguuuuagagacuaugg

SEQ ID NO: 2824197 - RNA, 13 nt, Human
auuguuuuaucau

SEQ ID NO: 2824198 - RNA, 10 nt, Human
auuguuuuca

SEQ ID NO: 2824199 - RNA, 16 nt, Human
auuuacauguauuauu

SEQ ID NO: 2824200 - RNA, 19 nt, Human
auuuacauguauuauuuca

SEQ ID NO: 2824201 - RNA, 22 nt, Human
auuuacauguauuauuucauua

SEQ ID NO: 2824202 - RNA, 15 nt, Human
auuuacuaagccaca

SEQ ID NO: 2824203 - RNA, 13 nt, Human
auuuacuaaacau

SEQ ID NO: 2824204 - RNA, 14 nt, Human
auuuacuaaacaua

SEQ ID NO: 2824205 - RNA, 15 nt, Human
auuuacuaaacauau

SEQ ID NO: 2824206 - RNA, 16 nt, Human
auuuacuaaacauaug

SEQ ID NO: 2824207 - RNA, 19 nt, Human
auuuacuaaacauaugauu

SEQ ID NO: 2824208 - RNA, 22 nt, Human
auuuacuaaacauaugauuuca

SEQ ID NO: 2824209 - RNA, 15 nt, Human
auuuacuacaguagu

SEQ ID NO: 2824210 - RNA, 14 nt, Human
auuuacuacaguuu

SEQ ID NO: 2824211 - RNA, 18 nt, Human
auuuacuaccuuaucacu

SEQ ID NO: 2824212 - RNA, 12 nt, Human
auuuacuauaua

SEQ ID NO: 2824213 - RNA, 14 nt, Human
auuuacuauauaua

SEQ ID NO: 2824214 - RNA, 23 nt, Human
auuuacuaagccacaagaaauuu

SEQ ID NO: 2824215 - RNA, 21 nt, Human
auuuacuaagccacaagaaau

SEQ ID NO: 2824216 - RNA, 22 nt, Human
auuuacuaagccacaagaaauu

SEQ ID NO: 2824217 - RNA, 23 nt, Human
auuuaaauauaauucuguaaaug

SEQ ID NO: 2824218 - RNA, 20 nt, Human
auuuaaauaucugaacauuu

SEQ ID NO: 2824219 - RNA, 23 nt, Human
auuuaaauaucugaacauuuacu

SEQ ID NO: 2824220 - RNA, 18 nt, Human
auuuaaauauaauucugu

SEQ ID NO: 2824221 - RNA, 19 nt, Human
auuuaaauauaauucugua

SEQ ID NO: 2824222 - RNA, 20 nt, Human
auuuaaauauaauucuguaa

SEQ ID NO: 2824223 - RNA, 22 nt, Human
auuuaaauauaauucuguaaau

SEQ ID NO: 2824224 - RNA, 13 nt, Human
auuuaaauauaau

SEQ ID NO: 2824225 - RNA, 15 nt, Human
auuuaaauauaauuc

SEQ ID NO: 2824226 - RNA, 17 nt, Human
auuuaaaauugcuaugu

SEQ ID NO: 2824227 - RNA, 21 nt, Human
auuuaaaauugcuauguuacu

SEQ ID NO: 2824228 - RNA, 15 nt, Human
auuuaaauguguaca

SEQ ID NO: 2824229 - RNA, 16 nt, Human
auuuaaauguguacaa

SEQ ID NO: 2824230 - RNA, 24 nt, Human
auuuaaauguguacaauguacaca

SEQ ID NO: 2824231 - RNA, 14 nt, Human
auuuacacugccau

SEQ ID NO: 2824232 - RNA, 19 nt, Human
auuuacagaugaauguauu

SEQ ID NO: 2824233 - RNA, 23 nt, Human
auuuacagccagugggagauguu

SEQ ID NO: 2824234 - RNA, 14 nt, Human
auuuacagaacaaa

SEQ ID NO: 2824235 - RNA, 18 nt, Human
auuuacaguccuucaaaa

SEQ ID NO: 2824236 - RNA, 13 nt, Human
auuuagaaaaaag

SEQ ID NO: 2824237 - RNA, 18 nt, Human
auuuagaaaaaaguuuac

SEQ ID NO: 2824238 - RNA, 13 nt, Human
auuuaguuauagu

SEQ ID NO: 2824239 - RNA, 14 nt, Human
auuuaguuauaguu

SEQ ID NO: 2824240 - RNA, 16 nt, Human
auuuaguuauaguuuc

SEQ ID NO: 2824241 - RNA, 13 nt, Human
auuuaguuauuga

SEQ ID NO: 2824242 - RNA, 22 nt, Human
auuuaugucuauuuaagccuca

SEQ ID NO: 2824243 - RNA, 22 nt, Human
auuuaugugugaggagcugcug

SEQ ID NO: 2824244 - RNA, 14 nt, Human
auuuauguuaaaag

SEQ ID NO: 2824245 - RNA, 16 nt, Human
auuuauguuaaaagau

SEQ ID NO: 2824246 - RNA, 19 nt, Human
auuuaugugugaggagcug

SEQ ID NO: 2824247 - RNA, 18 nt, Human
auuuaugugugaggagcu

SEQ ID NO: 2824248 - RNA, 13 nt, Human
auuuaugugugag

SEQ ID NO: 2824249 - RNA, 16 nt, Human
auuuauguaacuugaa

SEQ ID NO: 2824250 - RNA, 18 nt, Human
auuuauguaaugaaguaa

SEQ ID NO: 2824251 - RNA, 19 nt, Human
auuuauguaaugaaguaaa

SEQ ID NO: 2824252 - RNA, 21 nt, Human
auuuauguaaugaaguaaagc

SEQ ID NO: 2824253 - RNA, 13 nt, Human
auuuauaacucau

SEQ ID NO: 2824254 - RNA, 17 nt, Human
auuuauaaaugagcaaa

SEQ ID NO: 2824255 - RNA, 15 nt, Human
auuuauaaaauuaga

SEQ ID NO: 2824256 - RNA, 19 nt, Human
auuuauaaaauuagaaagc

SEQ ID NO: 2824257 - RNA, 21 nt, Human
auuuauaaaauuagaaagcaa

SEQ ID NO: 2824258 - RNA, 15 nt, Human
auuuauaaacagaca

SEQ ID NO: 2824259 - RNA, 17 nt, Human
auuuauaaacagacaau

SEQ ID NO: 2824260 - RNA, 21 nt, Human
auuuauaaacagacaauaugu

SEQ ID NO: 2824261 - RNA, 23 nt, Human
auuuauaaacagacaauauguga

SEQ ID NO: 2824262 - RNA, 15 nt, Human
aaaagaaaauuuuug

SEQ ID NO: 2824263 - RNA, 11 nt, Human
aaaagaaaaug

SEQ ID NO: 2824264 - RNA, 19 nt, Human
aaaagaaaaugaaaaacaa

SEQ ID NO: 2824265 - RNA, 22 nt, Human
aaaagaaaaugaaaaacaacca

SEQ ID NO: 2824266 - RNA, 13 nt, Human
aaaagaaaaacca

SEQ ID NO: 2824267 - RNA, 14 nt, Human
aaaagaaaaaccac

SEQ ID NO: 2824268 - RNA, 21 nt, Human
aaaagaaaaaccacucccagu

SEQ ID NO: 2824269 - RNA, 15 nt, Human
aaaagaaaaauaaua

SEQ ID NO: 2824270 - RNA, 10 nt, Human
aaaagaaaau

SEQ ID NO: 2824271 - RNA, 12 nt, Human
aaaagaaaauaa

SEQ ID NO: 2824272 - RNA, 16 nt, Human
aaaagaaaagucaagg

SEQ ID NO: 2824273 - RNA, 17 nt, Human
aaaagaacacuagaguc

SEQ ID NO: 2824274 - RNA, 11 nt, Human
aaaagaagaag

SEQ ID NO: 2824275 - RNA, 13 nt, Human
aaaagaaauaaua

SEQ ID NO: 2824276 - RNA, 14 nt, Human
aaaagaaauaauaa

SEQ ID NO: 2824277 - RNA, 15 nt, Human
aaaagaaauaauaau

SEQ ID NO: 2824278 - RNA, 14 nt, Human
aaaagaaaugacua

SEQ ID NO: 2824279 - RNA, 15 nt, Human
aaaagaaaugacuaa

SEQ ID NO: 2824280 - RNA, 13 nt, Human
aaaagaaaugaug

SEQ ID NO: 2824281 - RNA, 14 nt, Human
aaaagaauauucag

SEQ ID NO: 2824282 - RNA, 21 nt, Human
aaaagaauauucagagaauau

SEQ ID NO: 2824283 - RNA, 12 nt, Human
aaaagacauguu

SEQ ID NO: 2824284 - RNA, 18 nt, Human
aaaagacauguuguaaau

SEQ ID NO: 2824285 - RNA, 13 nt, Human
aaaagacagggcu

SEQ ID NO: 2824286 - RNA, 15 nt, Human
aaaacaccuagcuuu

SEQ ID NO: 2824287 - RNA, 21 nt, Human
aaaacaccgcuucugccuuuu

SEQ ID NO: 2824288 - RNA, 22 nt, Human
aaaacaccgcuucugccuuuuc

SEQ ID NO: 2824289 - RNA, 22 nt, Human
aaaacaccuagcuuuauucuuc

SEQ ID NO: 2824290 - RNA, 21 nt, Human
aaaacacuaaaaauaaaaaug

SEQ ID NO: 2824291 - RNA, 13 nt, Human
aaaacacugugga

SEQ ID NO: 2824292 - RNA, 14 nt, Human
aaaacacuguggaa

SEQ ID NO: 2824293 - RNA, 23 nt, Human
aaaacacuguggaacuaauaaau

SEQ ID NO: 2824294 - RNA, 20 nt, Human
aaaacacugaaaaauuauac

SEQ ID NO: 2824295 - RNA, 18 nt, Human
aaaacacugccaucuuag

SEQ ID NO: 2824296 - RNA, 17 nt, Human
aaaacacuucuguccug

SEQ ID NO: 2824297 - RNA, 19 nt, Human
aaaacacuucuguccugug

SEQ ID NO: 2824298 - RNA, 18 nt, Human
aaaacagaacaucauuag

SEQ ID NO: 2824299 - RNA, 21 nt, Human
aaaacagaacaucauuagaac

SEQ ID NO: 2824300 - RNA, 22 nt, Human
aaaacagaacaucauuagaaca

SEQ ID NO: 2824301 - RNA, 15 nt, Human
aaaacuuuucucaga

SEQ ID NO: 2824302 - RNA, 15 nt, Human
aaaacuuuucugcug

SEQ ID NO: 2824303 - RNA, 12 nt, Human
aaaagaaaaaaa

SEQ ID NO: 2824304 - RNA, 13 nt, Human
aaaacuuuuaaac

SEQ ID NO: 2824305 - RNA, 14 nt, Human
aaaacuuuuaaacu

SEQ ID NO: 2824306 - RNA, 17 nt, Human
aaaagaaaaaaaaaaga

SEQ ID NO: 2824307 - RNA, 21 nt, Human
aaaagaaaaaaaaaagaagaa

SEQ ID NO: 2824308 - RNA, 11 nt, Human
aaaagaaaaaa

SEQ ID NO: 2824309 - RNA, 18 nt, Human
aaaacagcucugcaggcu

SEQ ID NO: 2824310 - RNA, 19 nt, Human
aaaacagcugcauuagaaa

SEQ ID NO: 2824311 - RNA, 23 nt, Human
aaaacagcugucucuaacuuauu

SEQ ID NO: 2824312 - RNA, 24 nt, Human
aaaacuuugacgagucaccuucca

SEQ ID NO: 2824313 - RNA, 11 nt, Human
aaaacuuugga

SEQ ID NO: 2824314 - RNA, 13 nt, Human
aaaacuuuucuca

SEQ ID NO: 2824315 - RNA, 13 nt, Human
aaaagacucuuuu

SEQ ID NO: 2824316 - RNA, 12 nt, Human
aaaagagaagaa

SEQ ID NO: 2824317 - RNA, 13 nt, Human
aaaagagaagaag

SEQ ID NO: 2824318 - RNA, 15 nt, Human
aaaagagaagaagaa

SEQ ID NO: 2824319 - RNA, 17 nt, Human
aaaagagaagaagaaaa

SEQ ID NO: 2824320 - RNA, 18 nt, Human
aaaagagaagaagaaaaa

SEQ ID NO: 2824321 - RNA, 14 nt, Human
aaaagacuucccua

SEQ ID NO: 2824322 - RNA, 20 nt, Human
aaaagacuucccuaacacuu

SEQ ID NO: 2824323 - RNA, 14 nt, Human
aaaagagaauuaga

SEQ ID NO: 2824324 - RNA, 18 nt, Human
aaaagagaauuagauuau

SEQ ID NO: 2824325 - RNA, 23 nt, Human
aaaagagaauuagauuauauugg

SEQ ID NO: 2824326 - RNA, 21 nt, Human
aaaagagagcagagaauauaa

SEQ ID NO: 2824327 - RNA, 22 nt, Human
aaaagagagcagagaauauaac

SEQ ID NO: 2824328 - RNA, 12 nt, Human
aaaagaggaaaa

SEQ ID NO: 2824329 - RNA, 15 nt, Human
aaaagagauugagau

SEQ ID NO: 2824330 - RNA, 15 nt, Human
aaaagaggagcacuu

SEQ ID NO: 2824331 - RNA, 15 nt, Human
aaaagagucuuccaa

SEQ ID NO: 2824332 - RNA, 17 nt, Human
aaaagagucuuccaauu

SEQ ID NO: 2824333 - RNA, 23 nt, Human
aaaagaucuguuuugaaggcaaa

SEQ ID NO: 2824334 - RNA, 15 nt, Human
aaaagucacuuacua

SEQ ID NO: 2824335 - RNA, 15 nt, Human
aaaaucagccagaca

SEQ ID NO: 2824336 - RNA, 12 nt, Human
aaaaguuguuca

SEQ ID NO: 2824337 - RNA, 13 nt, Human
aaaaguuguucaa

SEQ ID NO: 2824338 - RNA, 15 nt, Human
aaaaguuguucaacu

SEQ ID NO: 2824339 - RNA, 18 nt, Human
aaaaguuguucaacuauu

SEQ ID NO: 2824340 - RNA, 13 nt, Human
aaaagugacacag

SEQ ID NO: 2824341 - RNA, 14 nt, Human
aaaagugacacagc

SEQ ID NO: 2824342 - RNA, 15 nt, Human
aaaagugacacagca

SEQ ID NO: 2824343 - RNA, 17 nt, Human
aaaagugacacagcagc

SEQ ID NO: 2824344 - RNA, 16 nt, Human
aaaaguuggacuaaau

SEQ ID NO: 2824345 - RNA, 20 nt, Human
aaaaguuggacuaaaugccu

SEQ ID NO: 2824346 - RNA, 23 nt, Human
aaaaguuggacuaaaugccuagu

SEQ ID NO: 2824347 - RNA, 13 nt, Human
aaaauaaaaaugg

SEQ ID NO: 2824348 - RNA, 13 nt, Human
aaaauaaaacaaa

SEQ ID NO: 2824349 - RNA, 14 nt, Human
aaaauaaaacaaag

SEQ ID NO: 2824350 - RNA, 15 nt, Human
aaaagucguuuucca

SEQ ID NO: 2824351 - RNA, 16 nt, Human
aaaagucguuuuccaa

SEQ ID NO: 2824352 - RNA, 19 nt, Human
aaaagucguuuuccaaacu

SEQ ID NO: 2824353 - RNA, 22 nt, Human
aaaagucguuuuccaaacugac

SEQ ID NO: 2824354 - RNA, 23 nt, Human
aaaagucguuuuccaaacugacu

SEQ ID NO: 2824355 - RNA, 17 nt, Human
aaaagugaaugaaagau

SEQ ID NO: 2824356 - RNA, 20 nt, Human
aaaagugaaugaaagauuaa

SEQ ID NO: 2824357 - RNA, 14 nt, Human
aaaagucacaaugu

SEQ ID NO: 2824358 - RNA, 15 nt, Human
aaaagucacaauguu

SEQ ID NO: 2824359 - RNA, 16 nt, Human
aaaagucacaauguuc

SEQ ID NO: 2824360 - RNA, 19 nt, Human
aaaagucacaauguucuuu

SEQ ID NO: 2824361 - RNA, 19 nt, Human
aaaagucagacugcuggga

SEQ ID NO: 2824362 - RNA, 13 nt, Human
aaaaguccaauuu

SEQ ID NO: 2824363 - RNA, 18 nt, Human
aaaaguccaauuuuaauu

SEQ ID NO: 2824364 - RNA, 22 nt, Human
aaaaguccaauuuuaauuuagu

SEQ ID NO: 2824365 - RNA, 19 nt, Human
aaaaguauuuugaaguuua

SEQ ID NO: 2824366 - RNA, 20 nt, Human
aaaaguauuuugaaguuuac

SEQ ID NO: 2824367 - RNA, 22 nt, Human
aaaaguauuuugaaguuuacau

SEQ ID NO: 2824368 - RNA, 23 nt, Human
aaaaguauuuugaaguuuacauu

SEQ ID NO: 2824369 - RNA, 14 nt, Human
aaagcauugcuguu

SEQ ID NO: 2824370 - RNA, 18 nt, Human
aaagcauugcuguuaugu

SEQ ID NO: 2824371 - RNA, 17 nt, Human
aaagcauugcuuuuauu

SEQ ID NO: 2824372 - RNA, 21 nt, Human
aaagcauugcuuuuauuuuga

SEQ ID NO: 2824373 - RNA, 22 nt, Human
aaagcauugcuuuuauuuugaa

SEQ ID NO: 2824374 - RNA, 13 nt, Human
aaagccugcaauu

SEQ ID NO: 2824375 - RNA, 18 nt, Human
aaagccugcaauuucaua

SEQ ID NO: 2824376 - RNA, 16 nt, Human
aaagccucugcugcca

SEQ ID NO: 2824377 - RNA, 13 nt, Human
aaagaaaaaaaau

SEQ ID NO: 2824378 - RNA, 19 nt, Human
aaagaaaaaaaaaagaaga

SEQ ID NO: 2824379 - RNA, 20 nt, Human
aaagaaaaaaaaaagaagaa

SEQ ID NO: 2824380 - RNA, 21 nt, Human
aaagaaaaaaaaaagaagaag

SEQ ID NO: 2824381 - RNA, 22 nt, Human
aaagaaaaaaaaaagaagaaga

SEQ ID NO: 2824382 - RNA, 10 nt, Human
aaagaaaaaa

SEQ ID NO: 2824383 - RNA, 13 nt, Human
aaagaucuguuuu

SEQ ID NO: 2824384 - RNA, 16 nt, Human
aaagaucuguuuugaa

SEQ ID NO: 2824385 - RNA, 15 nt, Human
aaagaucuacaugaa

SEQ ID NO: 2824386 - RNA, 16 nt, Human
aaagaucuacaugaau

SEQ ID NO: 2824387 - RNA, 20 nt, Human
aaagaucaaaauaaaaagug

SEQ ID NO: 2824388 - RNA, 14 nt, Human
aaagaucaaaauaa

SEQ ID NO: 2824389 - RNA, 15 nt, Human
aaagaucaaaauaaa

SEQ ID NO: 2824390 - RNA, 16 nt, Human
aaagaucaaaauaaaa

SEQ ID NO: 2824391 - RNA, 17 nt, Human
aaagaucaaaauaaaaa

SEQ ID NO: 2824392 - RNA, 13 nt, Human
aaaaucuauucug

SEQ ID NO: 2824393 - RNA, 14 nt, Human
aaaaucuauucugu

SEQ ID NO: 2824394 - RNA, 16 nt, Human
aaacucuuaucucagu

SEQ ID NO: 2824395 - RNA, 13 nt, Human
aaacucuuaucuc

SEQ ID NO: 2824396 - RNA, 15 nt, Human
aaacucuuaucucag

SEQ ID NO: 2824397 - RNA, 13 nt, Human
aaacugcaguccu

SEQ ID NO: 2824398 - RNA, 23 nt, Human
aaacugcauaagugaaaaucuua

SEQ ID NO: 2824399 - RNA, 9 nt, Human
aaagaaaaa

SEQ ID NO: 2824400 - RNA, 11 nt, Human
aaagaaaaaaa

SEQ ID NO: 2824401 - RNA, 19 nt, Human
aaaccaguguagccuugcc

SEQ ID NO: 2824402 - RNA, 20 nt, Human
aaaccaguuuagauuucaag

SEQ ID NO: 2824403 - RNA, 23 nt, Human
aaaccaguuuagauuucaagaaa

SEQ ID NO: 2824404 - RNA, 15 nt, Human
aaacccaauccaaau

SEQ ID NO: 2824405 - RNA, 13 nt, Human
aaacccacaaaaa

SEQ ID NO: 2824406 - RNA, 17 nt, Human
aaaccauuuuuaaagua

SEQ ID NO: 2824407 - RNA, 16 nt, Human
aaauauuuauuaaaua

SEQ ID NO: 2824408 - RNA, 18 nt, Human
aaauauuuauuaaauaaa

SEQ ID NO: 2824409 - RNA, 22 nt, Human
aaauauuuauuaaauaaaauca

SEQ ID NO: 2824410 - RNA, 23 nt, Human
aaauauuuauuaaauaaaaucaa

SEQ ID NO: 2824411 - RNA, 15 nt, Human
aaauauuuauuuauu

SEQ ID NO: 2824412 - RNA, 12 nt, Human
aaauauuuaucu

SEQ ID NO: 2824413 - RNA, 10 nt, Human
aaauauuuau

SEQ ID NO: 2824414 - RNA, 19 nt, Human
aaauauuuugauaauaaau

SEQ ID NO: 2824415 - RNA, 20 nt, Human
aaauauuuugauaauaaauu

SEQ ID NO: 2824416 - RNA, 21 nt, Human
aaauauuuugauaauaaauug

SEQ ID NO: 2824417 - RNA, 22 nt, Human
aaauauuuguacauaguuauuu

SEQ ID NO: 2824418 - RNA, 17 nt, Human
aaauauuugacuauucu

SEQ ID NO: 2824419 - RNA, 18 nt, Human
aaauauuugacuugcaug

SEQ ID NO: 2824420 - RNA, 20 nt, Human
aaauauuugacuugcaugaa

SEQ ID NO: 2824421 - RNA, 12 nt, Human
aaauauuuggag

SEQ ID NO: 2824422 - RNA, 17 nt, Human
aaauauuuggucucuau

SEQ ID NO: 2824423 - RNA, 21 nt, Human
aaauauuuggucucuauuuca

SEQ ID NO: 2824424 - RNA, 15 nt, Human
aaauauuuguacaua

SEQ ID NO: 2824425 - RNA, 14 nt, Human
aaauauuuguacau

SEQ ID NO: 2824426 - RNA, 17 nt, Human
aaauauuuuuaaaagau

SEQ ID NO: 2824427 - RNA, 14 nt, Human
aaauauuuuuagua

SEQ ID NO: 2824428 - RNA, 18 nt, Human
aaauagaguguaguuuac

SEQ ID NO: 2824429 - RNA, 14 nt, Human
aaauagaguguagu

SEQ ID NO: 2824430 - RNA, 19 nt, Human
aaauagaguauaugcacuu

SEQ ID NO: 2824431 - RNA, 17 nt, Human
aaauagaguauaugcac

SEQ ID NO: 2824432 - RNA, 20 nt, Human
aaauagagcuuuuaaaaaug

SEQ ID NO: 2824433 - RNA, 15 nt, Human
aaauagauaauuaaa

SEQ ID NO: 2824434 - RNA, 14 nt, Human
aaauagauacaaau

SEQ ID NO: 2824435 - RNA, 19 nt, Human
aaauagaguuugcuauuag

SEQ ID NO: 2824436 - RNA, 16 nt, Human
aaauagaugucuuuua

SEQ ID NO: 2824437 - RNA, 18 nt, Human
aaauagaugucuuuuaua

SEQ ID NO: 2824438 - RNA, 21 nt, Human
aaauagaugucuuuuauagug

SEQ ID NO: 2824439 - RNA, 13 nt, Human
aaauagcaaaacu

SEQ ID NO: 2824440 - RNA, 14 nt, Human
aaauauuuaaaaau

SEQ ID NO: 2824441 - RNA, 17 nt, Human
aaauauuguugacaacu

SEQ ID NO: 2824442 - RNA, 21 nt, Human
aaauauuguugacaacuguga

SEQ ID NO: 2824443 - RNA, 23 nt, Human
aaaucucaaauuuggauugcuaa

SEQ ID NO: 2824444 - RNA, 16 nt, Human
aaaucaaaacaaguga

SEQ ID NO: 2824445 - RNA, 21 nt, Human
aaaucaaaacucacaagugcu

SEQ ID NO: 2824446 - RNA, 15 nt, Human
aaauauuuuuuacag

SEQ ID NO: 2824447 - RNA, 22 nt, Human
aaauauuuuuuauauauacagu

SEQ ID NO: 2824448 - RNA, 17 nt, Human
aaaucucaccccauccc

SEQ ID NO: 2824449 - RNA, 11 nt, Human
aaaucucauac

SEQ ID NO: 2824450 - RNA, 23 nt, Human
aaaucucauacucccccacaguu

SEQ ID NO: 2824451 - RNA, 22 nt, Human
aaaucuuuuaaaaauucaaaug

SEQ ID NO: 2824452 - RNA, 13 nt, Human
aaaugcuuugcuu

SEQ ID NO: 2824453 - RNA, 18 nt, Human
aaaugcuucacuguacgu

SEQ ID NO: 2824454 - RNA, 19 nt, Human
aaaugcuucacuguacgua

SEQ ID NO: 2824455 - RNA, 19 nt, Human
aaauggauauuauuagaaa

SEQ ID NO: 2824456 - RNA, 17 nt, Human
aaauggaugcaaaguac

SEQ ID NO: 2824457 - RNA, 17 nt, Human
aaauggaugccuugaau

SEQ ID NO: 2824458 - RNA, 21 nt, Human
aaauggaugccuugaauaaua

SEQ ID NO: 2824459 - RNA, 22 nt, Human
aaauggaugccuugaauaauaa

SEQ ID NO: 2824460 - RNA, 23 nt, Human
aaauggaugccuugaauaauaag

SEQ ID NO: 2824461 - RNA, 11 nt, Human
aaaucuuuuac

SEQ ID NO: 2824462 - RNA, 16 nt, Human
aaaugcuguguugggu

SEQ ID NO: 2824463 - RNA, 17 nt, Human
aaagccuguaagccugc

SEQ ID NO: 2824464 - RNA, 22 nt, Human
aaagccuguaagccugcaagcc

SEQ ID NO: 2824465 - RNA, 16 nt, Human
aaaggauguugguguu

SEQ ID NO: 2824466 - RNA, 22 nt, Human
aaagcauuaauuuuuuuucauu

SEQ ID NO: 2824467 - RNA, 18 nt, Human
aaaggauucauguggaau

SEQ ID NO: 2824468 - RNA, 13 nt, Human
aaaggaugugauu

SEQ ID NO: 2824469 - RNA, 21 nt, Human
aaauguucagaagguugcucu

SEQ ID NO: 2824470 - RNA, 15 nt, Human
aaauguucagaaggu

SEQ ID NO: 2824471 - RNA, 23 nt, Human
aaauguugaauaaaaauauguac

SEQ ID NO: 2824472 - RNA, 20 nt, Human
aaauguugacauaccuuuua

SEQ ID NO: 2824473 - RNA, 22 nt, Human
aaauguugacauaccuuuuauu

SEQ ID NO: 2824474 - RNA, 19 nt, Human
aaauguugagaaucccaaa

SEQ ID NO: 2824475 - RNA, 14 nt, Human
aaauguuugacaca

SEQ ID NO: 2824476 - RNA, 21 nt, Human
aaauguuugucucaguuggaa

SEQ ID NO: 2824477 - RNA, 20 nt, Human
aaauguuuguuaaaaauaaa

SEQ ID NO: 2824478 - RNA, 18 nt, Human
aaauguuuuagcaauuua

SEQ ID NO: 2824479 - RNA, 14 nt, Human
aaauguuuuauaag

SEQ ID NO: 2824480 - RNA, 22 nt, Human
aaauguuuuauaaguucacaaa

SEQ ID NO: 2824481 - RNA, 16 nt, Human
aaauguuuuucugcca

SEQ ID NO: 2824482 - RNA, 23 nt, Human
aaauguuuuucugccagggagcu

SEQ ID NO: 2824483 - RNA, 21 nt, Human
aaauguuuuucugccagggag

SEQ ID NO: 2824484 - RNA, 13 nt, Human
aaauggccauuug

SEQ ID NO: 2824485 - RNA, 15 nt, Human
aaauggauacuacau

SEQ ID NO: 2824486 - RNA, 21 nt, Human
aaauggauacuacaucuuuaa

SEQ ID NO: 2824487 - RNA, 17 nt, Human
aaauggcaaguuuugau

SEQ ID NO: 2824488 - RNA, 16 nt, Human
aaauggcagugaugaa

SEQ ID NO: 2824489 - RNA, 11 nt, Human
aacagccaugc

SEQ ID NO: 2824490 - RNA, 16 nt, Human
aacagccaugcccgca

SEQ ID NO: 2824491 - RNA, 18 nt, Human
aacagccacuccccucca

SEQ ID NO: 2824492 - RNA, 15 nt, Human
aacagccacuccccu

SEQ ID NO: 2824493 - RNA, 12 nt, Human
aacagccaacag

SEQ ID NO: 2824494 - RNA, 15 nt, Human
aacagccaacagcua

SEQ ID NO: 2824495 - RNA, 17 nt, Human
aacagccuauuccugaa

SEQ ID NO: 2824496 - RNA, 13 nt, Human
aacagccucacuu

SEQ ID NO: 2824497 - RNA, 11 nt, Human
aacaggcagau

SEQ ID NO: 2824498 - RNA, 15 nt, Human
aacaucuucaacaug

SEQ ID NO: 2824499 - RNA, 16 nt, Human
aacaucuucaacaugu

SEQ ID NO: 2824500 - RNA, 20 nt, Human
aacaucuuugacacucugca

SEQ ID NO: 2824501 - RNA, 22 nt, Human
aacaucuuugacacucugcaga

SEQ ID NO: 2824502 - RNA, 21 nt, Human
aacaucuuuuuaaccugcaaa

SEQ ID NO: 2824503 - RNA, 13 nt, Human
aacaugaaacacc

SEQ ID NO: 2824504 - RNA, 20 nt, Human
aacaugaaagucuagaaaua

SEQ ID NO: 2824505 - RNA, 12 nt, Human
aacaugaaauga

SEQ ID NO: 2824506 - RNA, 14 nt, Human
aacaugaaaugaua

SEQ ID NO: 2824507 - RNA, 18 nt, Human
aacaugaaaugauagauu

SEQ ID NO: 2824508 - RNA, 13 nt, Human
aacaugacacuga

SEQ ID NO: 2824509 - RNA, 14 nt, Human
aacaugacacugac

SEQ ID NO: 2824510 - RNA, 19 nt, Human
aacaugacauuuaccagca

SEQ ID NO: 2824511 - RNA, 22 nt, Human
aacaugacauuuaccagcaacu

SEQ ID NO: 2824512 - RNA, 20 nt, Human
aacaugaacacccuuagaaa

SEQ ID NO: 2824513 - RNA, 22 nt, Human
aacaugaacacccuuagaaaau

SEQ ID NO: 2824514 - RNA, 12 nt, Human
aaccuuuuuaaa

SEQ ID NO: 2824515 - RNA, 16 nt, Human
aaccuuuuuccuagua

SEQ ID NO: 2824516 - RNA, 22 nt, Human
aacaugguaaacgcugucccua

SEQ ID NO: 2824517 - RNA, 18 nt, Human
aacauggugucuggauuc

SEQ ID NO: 2824518 - RNA, 21 nt, Human
aacaugggcucuucacuagug

SEQ ID NO: 2824519 - RNA, 17 nt, Human
aacccucaggggaaaac

SEQ ID NO: 2824520 - RNA, 22 nt, Human
aacccucaggggaaaacuguua

SEQ ID NO: 2824521 - RNA, 23 nt, Human
aacccucaggggaaaacuguuac

SEQ ID NO: 2824522 - RNA, 19 nt, Human
aacccucagagccaccccu

SEQ ID NO: 2824523 - RNA, 12 nt, Human
aacccucagagc

SEQ ID NO: 2824524 - RNA, 23 nt, Human
aaccgugagcaggaaggccuggg

SEQ ID NO: 2824525 - RNA, 18 nt, Human
aaccguuuugaagcuacu

SEQ ID NO: 2824526 - RNA, 17 nt, Human
aaccguuuugaagcuac

SEQ ID NO: 2824527 - RNA, 17 nt, Human
aaugaugcccugcucca

SEQ ID NO: 2824528 - RNA, 18 nt, Human
aaugaugcccugcuccag

SEQ ID NO: 2824529 - RNA, 17 nt, Human
aaugauggcaauuuugu

SEQ ID NO: 2824530 - RNA, 14 nt, Human
aaugauggcaauuu

SEQ ID NO: 2824531 - RNA, 19 nt, Human
aaugauggcaauuuuguaa

SEQ ID NO: 2824532 - RNA, 21 nt, Human
aaugauggcagugguuugaaa

SEQ ID NO: 2824533 - RNA, 18 nt, Human
aaugauggcaauuuugua

SEQ ID NO: 2824534 - RNA, 22 nt, Human
aaugaugguaggaagaagcucu

SEQ ID NO: 2824535 - RNA, 13 nt, Human
aaugaaagaugau

SEQ ID NO: 2824536 - RNA, 12 nt, Human
aaugaaagauua

SEQ ID NO: 2824537 - RNA, 13 nt, Human
aaugaaagauuaa

SEQ ID NO: 2824538 - RNA, 15 nt, Human
aaugaaagauuaaac

SEQ ID NO: 2824539 - RNA, 16 nt, Human
aaugaaagauuaaaca

SEQ ID NO: 2824540 - RNA, 20 nt, Human
aaugaaagauuaaacagaug

SEQ ID NO: 2824541 - RNA, 15 nt, Human
aaugaagcagcuuua

SEQ ID NO: 2824542 - RNA, 17 nt, Human
aaugaagcagcuuuaaa

SEQ ID NO: 2824543 - RNA, 13 nt, Human
aaugaagccagcu

SEQ ID NO: 2824544 - RNA, 19 nt, Human
aaugaagcagcuuuaaaca

SEQ ID NO: 2824545 - RNA, 22 nt, Human
aaugaagcagcuuuaaacaaau

SEQ ID NO: 2824546 - RNA, 13 nt, Human
aaucucaccccau

SEQ ID NO: 2824547 - RNA, 16 nt, Human
aaucucaauccugcag

SEQ ID NO: 2824548 - RNA, 19 nt, Human
aaucucaaugaagccagcu

SEQ ID NO: 2824549 - RNA, 16 nt, Human
aaucucaaggaaucuu

SEQ ID NO: 2824550 - RNA, 21 nt, Human
aaucucaaggaaucuuuaagc

SEQ ID NO: 2824551 - RNA, 23 nt, Human
aaucucagagguagggcugccac

SEQ ID NO: 2824552 - RNA, 22 nt, Human
aaucucagagguagggcugcca

SEQ ID NO: 2824553 - RNA, 22 nt, Human
aaucucaccccaucccacaccc

SEQ ID NO: 2824554 - RNA, 15 nt, Human
aaucugaucugagug

SEQ ID NO: 2824555 - RNA, 17 nt, Human
aaucugauggcuucucc

SEQ ID NO: 2824556 - RNA, 18 nt, Human
aaucugaagcuucacuca

SEQ ID NO: 2824557 - RNA, 14 nt, Human
aauauguguuuacu

SEQ ID NO: 2824558 - RNA, 21 nt, Human
aauauuaaaucugcuggaguu

SEQ ID NO: 2824559 - RNA, 13 nt, Human
aauauuaaaucug

SEQ ID NO: 2824560 - RNA, 22 nt, Human
aauaugucucgcuagugauguu

SEQ ID NO: 2824561 - RNA, 11 nt, Human
aauaugucugc

SEQ ID NO: 2824562 - RNA, 14 nt, Human
aauaugugagauuu

SEQ ID NO: 2824563 - RNA, 16 nt, Human
aauaugugagauuuuu

SEQ ID NO: 2824564 - RNA, 18 nt, Human
aauaugugagauuuuuua

SEQ ID NO: 2824565 - RNA, 19 nt, Human
aauaugugagauuuuuuau

SEQ ID NO: 2824566 - RNA, 21 nt, Human
aauaugugagauuuuuuauug

SEQ ID NO: 2824567 - RNA, 22 nt, Human
aauaugugagauuuuuuauugc

SEQ ID NO: 2824568 - RNA, 21 nt, Human
aauaugugagugccuuuugca

SEQ ID NO: 2824569 - RNA, 19 nt, Human
aauauauauauauaucagu

SEQ ID NO: 2824570 - RNA, 21 nt, Human
aauauauauauauaucaguuu

SEQ ID NO: 2824571 - RNA, 23 nt, Human
aauauauauauauaucaguuuga

SEQ ID NO: 2824572 - RNA, 20 nt, Human
aauauguauuguaaacaugu

SEQ ID NO: 2824573 - RNA, 19 nt, Human
aauauauacgaacaaaaca

SEQ ID NO: 2824574 - RNA, 12 nt, Human
aauauauauaaa

SEQ ID NO: 2824575 - RNA, 20 nt, Human
aauauauagcuggcaagaau

SEQ ID NO: 2824576 - RNA, 10 nt, Human
aauauauaua

SEQ ID NO: 2824577 - RNA, 13 nt, Human
aauauauauaaag

SEQ ID NO: 2824578 - RNA, 16 nt, Human
aauauauauaaagaau

SEQ ID NO: 2824579 - RNA, 19 nt, Human
aauauauauaaagaauaua

SEQ ID NO: 2824580 - RNA, 22 nt, Human
aauauauauaaagaauauauau

SEQ ID NO: 2824581 - RNA, 12 nt, Human
aauauauauaca

SEQ ID NO: 2824582 - RNA, 13 nt, Human
aauauauauacau

SEQ ID NO: 2824583 - RNA, 14 nt, Human
aauauauauacaua

SEQ ID NO: 2824584 - RNA, 15 nt, Human
aauauauauacauau

SEQ ID NO: 2824585 - RNA, 16 nt, Human
aauauauauacauaug

SEQ ID NO: 2824586 - RNA, 17 nt, Human
aauauauauacauaugu

SEQ ID NO: 2824587 - RNA, 19 nt, Human
aauauauauacauauguag

SEQ ID NO: 2824588 - RNA, 22 nt, Human
aauauauauagugcuauauaua

SEQ ID NO: 2824589 - RNA, 11 nt, Human
aauauauauau

SEQ ID NO: 2824590 - RNA, 13 nt, Human
aauauauauauau

SEQ ID NO: 2824591 - RNA, 16 nt, Human
aauauauaaaaauaua

SEQ ID NO: 2824592 - RNA, 17 nt, Human
aauauauaaaaauauau

SEQ ID NO: 2824593 - RNA, 19 nt, Human
aauauauaaaaauauauau

SEQ ID NO: 2824594 - RNA, 20 nt, Human
aauauauaaaaauauauaua

SEQ ID NO: 2824595 - RNA, 14 nt, Human
aauauauaauuuau

SEQ ID NO: 2824596 - RNA, 18 nt, Human
aauauauacgaacaaaac

SEQ ID NO: 2824597 - RNA, 23 nt, Human
aaucaauguucacgcaacuugaa

SEQ ID NO: 2824598 - RNA, 22 nt, Human
aaucaaugcuauaacuauguug

SEQ ID NO: 2824599 - RNA, 22 nt, Human
aauauuuuuugaggcuaaagaa

SEQ ID NO: 2824600 - RNA, 14 nt, Human
aaucaaaaauugaa

SEQ ID NO: 2824601 - RNA, 17 nt, Human
aaucaaaaauugaagag

SEQ ID NO: 2824602 - RNA, 14 nt, Human
aaucaaaacaagug

SEQ ID NO: 2824603 - RNA, 14 nt, Human
aauauuaccuaaug

SEQ ID NO: 2824604 - RNA, 18 nt, Human
aauauuaccuaaugaaag

SEQ ID NO: 2824605 - RNA, 19 nt, Human
aauauuaccuaaugaaagu

SEQ ID NO: 2824606 - RNA, 22 nt, Human
aauauuacucaguuuauguugu

SEQ ID NO: 2824607 - RNA, 17 nt, Human
aauauuacuccuauuuu

SEQ ID NO: 2824608 - RNA, 20 nt, Human
aauauuacuccuauuuuugu

SEQ ID NO: 2824609 - RNA, 20 nt, Human
aauauuacuguuuauuucug

SEQ ID NO: 2824610 - RNA, 13 nt, Human
aaucaaugaauau

SEQ ID NO: 2824611 - RNA, 14 nt, Human
aaucaaugaauauu

SEQ ID NO: 2824612 - RNA, 16 nt, Human
aaucaaugaauauuga

SEQ ID NO: 2824613 - RNA, 19 nt, Human
aaucaaugaauauugaagu

SEQ ID NO: 2824614 - RNA, 22 nt, Human
aaucaaugaauauugaaguuuc

SEQ ID NO: 2824615 - RNA, 22 nt, Human
aaucaaugcaagagugauugca

SEQ ID NO: 2824616 - RNA, 15 nt, Human
aaucaauaaagaaaa

SEQ ID NO: 2824617 - RNA, 15 nt, Human
aaucaaguuguaacu

SEQ ID NO: 2824618 - RNA, 22 nt, Human
aaucaaguuguaacuuauauug

SEQ ID NO: 2824619 - RNA, 23 nt, Human
aaucaaguuuuaagugaaaguga

SEQ ID NO: 2824620 - RNA, 23 nt, Human
aaucaaguuggcuucuaaucaaa

SEQ ID NO: 2824621 - RNA, 17 nt, Human
aaucaaagccagggucu

SEQ ID NO: 2824622 - RNA, 14 nt, Human
aaucaaauaaguau

SEQ ID NO: 2824623 - RNA, 15 nt, Human
aaucaaauaaguauu

SEQ ID NO: 2824624 - RNA, 16 nt, Human
aaucaaauaaguauuu

SEQ ID NO: 2824625 - RNA, 18 nt, Human
aaucaaauaaguauuuau

SEQ ID NO: 2824626 - RNA, 21 nt, Human
aaguugaauggccugccuuga

SEQ ID NO: 2824627 - RNA, 20 nt, Human
aaguugaaagaguccuauuu

SEQ ID NO: 2824628 - RNA, 16 nt, Human
aaguggcuauuucuuu

SEQ ID NO: 2824629 - RNA, 12 nt, Human
aagugcugggau

SEQ ID NO: 2824630 - RNA, 22 nt, Human
aaguggaccuuaggccuuccuc

SEQ ID NO: 2824631 - RNA, 18 nt, Human
aaguggacuggccccugg

SEQ ID NO: 2824632 - RNA, 20 nt, Human
aaguggacuggccccugggu

SEQ ID NO: 2824633 - RNA, 14 nt, Human
aaguggcauguuuu

SEQ ID NO: 2824634 - RNA, 16 nt, Human
aaguggcauguuuugu

SEQ ID NO: 2824635 - RNA, 22 nt, Human
aaguggcauguuuugugcauuu

SEQ ID NO: 2824636 - RNA, 23 nt, Human
aagugcuggcaaccacuaagaau

SEQ ID NO: 2824637 - RNA, 22 nt, Human
aagugcuggcaaccacuaagaa

SEQ ID NO: 2824638 - RNA, 22 nt, Human
aaguggcaaucucagaugcagu

SEQ ID NO: 2824639 - RNA, 14 nt, Human
aaguuggacuaaau

SEQ ID NO: 2824640 - RNA, 18 nt, Human
aaguuggacuaaaugccu

SEQ ID NO: 2824641 - RNA, 22 nt, Human
aaguuggacuaaaugccuaguu

SEQ ID NO: 2824642 - RNA, 18 nt, Human
aaguuguaacuuauauug

SEQ ID NO: 2824643 - RNA, 19 nt, Human
aaguuguaacuuauauuga

SEQ ID NO: 2824644 - RNA, 12 nt, Human
aaguuguacaug

SEQ ID NO: 2824645 - RNA, 15 nt, Human
aaguuguacaugaaa

SEQ ID NO: 2824646 - RNA, 16 nt, Human
aaguuguacaugaaau

SEQ ID NO: 2824647 - RNA, 13 nt, Human
aaguuguuugcau

SEQ ID NO: 2824648 - RNA, 16 nt, Human
aaguuguagcagauug

SEQ ID NO: 2824649 - RNA, 17 nt, Human
aaguuguuugucaucuu

SEQ ID NO: 2824650 - RNA, 12 nt, Human
aaguuuaaaaca

SEQ ID NO: 2824651 - RNA, 18 nt, Human
aaguuuaaaacaguauuu

SEQ ID NO: 2824652 - RNA, 19 nt, Human
aaguuuaaaacaguauuua

SEQ ID NO: 2824653 - RNA, 16 nt, Human
aauaaaccaaaggaca

SEQ ID NO: 2824654 - RNA, 17 nt, Human
aauaaaccaaaggacau

SEQ ID NO: 2824655 - RNA, 21 nt, Human
aauaaaccaaaggacauuaug

SEQ ID NO: 2824656 - RNA, 14 nt, Human
aauaaacuucagca

SEQ ID NO: 2824657 - RNA, 13 nt, Human
aauaaacuuuuuu

SEQ ID NO: 2824658 - RNA, 15 nt, Human
aauaaacuuuuuuuc

SEQ ID NO: 2824659 - RNA, 16 nt, Human
aauaaacuuuuuuuca

SEQ ID NO: 2824660 - RNA, 17 nt, Human
aauaaacuuuuuuucaa

SEQ ID NO: 2824661 - RNA, 18 nt, Human
aauaaacuuuuuuucaau

SEQ ID NO: 2824662 - RNA, 19 nt, Human
aauaaacuuuuuuucaaug

SEQ ID NO: 2824663 - RNA, 20 nt, Human
aauaaacuuuuuuucaaugu

SEQ ID NO: 2824664 - RNA, 21 nt, Human
aauaaacuuuuuuucaaugug

SEQ ID NO: 2824665 - RNA, 23 nt, Human
aauaaacauccuucaagaacucu

SEQ ID NO: 2824666 - RNA, 13 nt, Human
aauaaacauccuu

SEQ ID NO: 2824667 - RNA, 11 nt, Human
aauaaagacag

SEQ ID NO: 2824668 - RNA, 12 nt, Human
aauaaagacagg

SEQ ID NO: 2824669 - RNA, 13 nt, Human
aauaaagaaauug

SEQ ID NO: 2824670 - RNA, 15 nt, Human
aauaaagaguuagaa

SEQ ID NO: 2824671 - RNA, 18 nt, Human
aauaaagaguuagaauga

SEQ ID NO: 2824672 - RNA, 17 nt, Human
aauaaagacaaccauau

SEQ ID NO: 2824673 - RNA, 20 nt, Human
aauaaagacaaccauauuua

SEQ ID NO: 2824674 - RNA, 13 nt, Human
aagaagaaugugu

SEQ ID NO: 2824675 - RNA, 13 nt, Human
aagaagaaaagag

SEQ ID NO: 2824676 - RNA, 14 nt, Human
aagaagaaaagaga

SEQ ID NO: 2824677 - RNA, 15 nt, Human
aagaagaaaagagaa

SEQ ID NO: 2824678 - RNA, 21 nt, Human
aagaagaaaagagaagaagaa

SEQ ID NO: 2824679 - RNA, 18 nt, Human
aagaacuuuuucuuuucc

SEQ ID NO: 2824680 - RNA, 19 nt, Human
aagaacuuuuucuuuuccc

SEQ ID NO: 2824681 - RNA, 9 nt, Human
aagaagaaa

SEQ ID NO: 2824682 - RNA, 12 nt, Human
aagaagaaaaaa

SEQ ID NO: 2824683 - RNA, 13 nt, Human
aagaagaaaaaaa

SEQ ID NO: 2824684 - RNA, 14 nt, Human
aagaagaaaaaaac

SEQ ID NO: 2824685 - RNA, 12 nt, Human
aagaagaaaaag

SEQ ID NO: 2824686 - RNA, 14 nt, Human
aagaagaaaaaggu

SEQ ID NO: 2824687 - RNA, 15 nt, Human
aagaagaaagacucu

SEQ ID NO: 2824688 - RNA, 13 nt, Human
aagaagaagggca

SEQ ID NO: 2824689 - RNA, 15 nt, Human
aagaagaacuugcau

SEQ ID NO: 2824690 - RNA, 9 nt, Human
aagaagaag

SEQ ID NO: 2824691 - RNA, 15 nt, Human
aagaagaagaaaaga

SEQ ID NO: 2824692 - RNA, 16 nt, Human
aagacaauuugauaca

SEQ ID NO: 2824693 - RNA, 17 nt, Human
aagacaauuugauacau

SEQ ID NO: 2824694 - RNA, 19 nt, Human
aagacaauuugauacauaa

SEQ ID NO: 2824695 - RNA, 20 nt, Human
aagacaauuugauacauaau

SEQ ID NO: 2824696 - RNA, 17 nt, Human
aagacacucaaauauga

SEQ ID NO: 2824697 - RNA, 13 nt, Human
aagacaccagagc

SEQ ID NO: 2824698 - RNA, 14 nt, Human
aagacaccagagca

SEQ ID NO: 2824699 - RNA, 15 nt, Human
aagacaccagagcag

SEQ ID NO: 2824700 - RNA, 16 nt, Human
aagacaccagagcaga

SEQ ID NO: 2824701 - RNA, 20 nt, Human
aagacaccagagcagaugca

SEQ ID NO: 2824702 - RNA, 21 nt, Human
aagacaccagagcagaugcag

SEQ ID NO: 2824703 - RNA, 22 nt, Human
aagacaccagagcagaugcaga

SEQ ID NO: 2824704 - RNA, 17 nt, Human
aagacaaccauauuuag

SEQ ID NO: 2824705 - RNA, 13 nt, Human
aagacaagaaaau

SEQ ID NO: 2824706 - RNA, 14 nt, Human
aagacaagaaaauc

SEQ ID NO: 2824707 - RNA, 12 nt, Human
aacgcagcccug

SEQ ID NO: 2824708 - RNA, 16 nt, Human
aacgcagcccugcuuu

SEQ ID NO: 2824709 - RNA, 17 nt, Human
aacgccuccccugcccc

SEQ ID NO: 2824710 - RNA, 14 nt, Human
aagaacuagcauaa

SEQ ID NO: 2824711 - RNA, 11 nt, Human
aagaacaugug

SEQ ID NO: 2824712 - RNA, 22 nt, Human
aagaaccaaaaguuuuccugag

SEQ ID NO: 2824713 - RNA, 20 nt, Human
aagaacucaaacuucuggcu

SEQ ID NO: 2824714 - RNA, 16 nt, Human
aagaacucaucacugu

SEQ ID NO: 2824715 - RNA, 19 nt, Human
aagaacucaucacuguggc

SEQ ID NO: 2824716 - RNA, 20 nt, Human
aagaacucaucacuguggcu

SEQ ID NO: 2824717 - RNA, 23 nt, Human
aagaacuauaugugaauccucuu

SEQ ID NO: 2824718 - RNA, 13 nt, Human
aagaaccuggaaa

SEQ ID NO: 2824719 - RNA, 17 nt, Human
aagaacugcacaugaag

SEQ ID NO: 2824720 - RNA, 19 nt, Human
aagaacugcacaugaagaa

SEQ ID NO: 2824721 - RNA, 19 nt, Human
aagaacugucauguaaaca

SEQ ID NO: 2824722 - RNA, 20 nt, Human
aagaacugucauguaaacau

SEQ ID NO: 2824723 - RNA, 22 nt, Human
aagaacugucauguaaacauac

SEQ ID NO: 2824724 - RNA, 15 nt, Human
aagaacuugcaugga

SEQ ID NO: 2824725 - RNA, 21 nt, Human
aagaacuguuuacugcuugau

SEQ ID NO: 2824726 - RNA, 15 nt, Human
aagaacuuacugauu

SEQ ID NO: 2824727 - RNA, 20 nt, Human
aagaacuuacugauuauuuu

SEQ ID NO: 2824728 - RNA, 17 nt, Human
aagacacugccugggcu

SEQ ID NO: 2824729 - RNA, 16 nt, Human
aagacacugccugggc

SEQ ID NO: 2824730 - RNA, 15 nt, Human
aagacacugccuggg

SEQ ID NO: 2824731 - RNA, 14 nt, Human
aagacacugccugg

SEQ ID NO: 2824732 - RNA, 13 nt, Human
aagacacugccug

SEQ ID NO: 2824733 - RNA, 12 nt, Human
aagacacugccu

SEQ ID NO: 2824734 - RNA, 11 nt, Human
aagacacugcc

SEQ ID NO: 2824735 - RNA, 23 nt, Human
aagacaccagagcagaugcagag

SEQ ID NO: 2824736 - RNA, 12 nt, Human
aagacagagucu

SEQ ID NO: 2824737 - RNA, 18 nt, Human
aagacauagcauccaagu

SEQ ID NO: 2824738 - RNA, 15 nt, Human
aagacauaucucuaa

SEQ ID NO: 2824739 - RNA, 16 nt, Human
aagacauaucucuaau

SEQ ID NO: 2824740 - RNA, 20 nt, Human
aagacaugauuuccuugaau

SEQ ID NO: 2824741 - RNA, 16 nt, Human
aagacaugauuuccuu

SEQ ID NO: 2824742 - RNA, 15 nt, Human
aagacaugauuuccu

SEQ ID NO: 2824743 - RNA, 14 nt, Human
aagacaugauuucc

SEQ ID NO: 2824744 - RNA, 14 nt, Human
aagacauaacguuu

SEQ ID NO: 2824745 - RNA, 18 nt, Human
aagacauaacguuuuucc

SEQ ID NO: 2824746 - RNA, 19 nt, Human
aagacauaacguuuuuccu

SEQ ID NO: 2824747 - RNA, 20 nt, Human
aagacauaacguuuuuccuu

SEQ ID NO: 2824748 - RNA, 21 nt, Human
aagacauaacguuuuuccuuu

SEQ ID NO: 2824749 - RNA, 22 nt, Human
aagacauaacguuuuuccuuua

SEQ ID NO: 2824750 - RNA, 22 nt, Human
aagacagaugccccagagcugu

SEQ ID NO: 2824751 - RNA, 20 nt, Human
aagacagaugccccagagcu

SEQ ID NO: 2824752 - RNA, 17 nt, Human
aagacagaugccccaga

SEQ ID NO: 2824753 - RNA, 16 nt, Human
aagacagaugccccag

SEQ ID NO: 2824754 - RNA, 18 nt, Human
aagaccaccacuucgaaa

SEQ ID NO: 2824755 - RNA, 19 nt, Human
aagaccaccaccucagagu

SEQ ID NO: 2824756 - RNA, 13 nt, Human
aagaccaaacuuc

SEQ ID NO: 2824757 - RNA, 17 nt, Human
aagaccacaaaaauuga

SEQ ID NO: 2824758 - RNA, 16 nt, Human
aagaccaccaccucag

SEQ ID NO: 2824759 - RNA, 21 nt, Human
aagacaugauuuccuugaaug

SEQ ID NO: 2824760 - RNA, 19 nt, Human
aagacaugcacuaugagga

SEQ ID NO: 2824761 - RNA, 12 nt, Human
aagacauuucuu

SEQ ID NO: 2824762 - RNA, 14 nt, Human
aagacauuucuuuu

SEQ ID NO: 2824763 - RNA, 15 nt, Human
aagacauuucuuuuc

SEQ ID NO: 2824764 - RNA, 21 nt, Human
aagacauuucuuuucuuuuua

SEQ ID NO: 2824765 - RNA, 22 nt, Human
aagacauuucuuuucuuuuuac

SEQ ID NO: 2824766 - RNA, 23 nt, Human
aagacauuucuuuucuuuuuaca

SEQ ID NO: 2824767 - RNA, 17 nt, Human
aagagaaaggccugcac

SEQ ID NO: 2824768 - RNA, 19 nt, Human
aagagaaaggccugcacac

SEQ ID NO: 2824769 - RNA, 12 nt, Human
aagagaaacuuu

SEQ ID NO: 2824770 - RNA, 18 nt, Human
aagagaaacuuuauacau

SEQ ID NO: 2824771 - RNA, 19 nt, Human
aagagaaacuuuauacauu

SEQ ID NO: 2824772 - RNA, 20 nt, Human
aagagaaacuuuauacauua

SEQ ID NO: 2824773 - RNA, 22 nt, Human
aagagaaacuuuauacauuagu

SEQ ID NO: 2824774 - RNA, 14 nt, Human
aagagagaaaauaa

SEQ ID NO: 2824775 - RNA, 16 nt, Human
aagagagaaaaacaaa

SEQ ID NO: 2824776 - RNA, 22 nt, Human
aagagacagucaccccaggacu

SEQ ID NO: 2824777 - RNA, 17 nt, Human
aagagacaguuauuuau

SEQ ID NO: 2824778 - RNA, 11 nt, Human
aagagaaaucu

SEQ ID NO: 2824779 - RNA, 14 nt, Human
aagagaaaucucau

SEQ ID NO: 2824780 - RNA, 19 nt, Human
aagagaccuguuuuaaaaa

SEQ ID NO: 2824781 - RNA, 12 nt, Human
aagagacucagc

SEQ ID NO: 2824782 - RNA, 14 nt, Human
aagagacucagccu

SEQ ID NO: 2824783 - RNA, 15 nt, Human
aagagacucagccug

SEQ ID NO: 2824784 - RNA, 16 nt, Human
aagagacucagccugc

SEQ ID NO: 2824785 - RNA, 17 nt, Human
aagagacucagccugca

SEQ ID NO: 2824786 - RNA, 19 nt, Human
aagagacucagccugcagu

SEQ ID NO: 2824787 - RNA, 18 nt, Human
aagagacugcguucugca

SEQ ID NO: 2824788 - RNA, 12 nt, Human
aagagagaaaaa

SEQ ID NO: 2824789 - RNA, 21 nt, Human
aagagauauguagaaggcaca

SEQ ID NO: 2824790 - RNA, 14 nt, Human
aagagauaugggaa

SEQ ID NO: 2824791 - RNA, 13 nt, Human
aagagauauuuug

SEQ ID NO: 2824792 - RNA, 22 nt, Human
aagagauauuuugggcaugugg

SEQ ID NO: 2824793 - RNA, 22 nt, Human
aagagaguauuuuuauacaaac

SEQ ID NO: 2824794 - RNA, 19 nt, Human
aagagaggaugugcaagcg

SEQ ID NO: 2824795 - RNA, 20 nt, Human
aagagaggaugugcaagcga

SEQ ID NO: 2824796 - RNA, 21 nt, Human
aagagagggccaugcaauuca

SEQ ID NO: 2824797 - RNA, 22 nt, Human
aagagagggccaugcaauucau

SEQ ID NO: 2824798 - RNA, 11 nt, Human
aagagaguuuu

SEQ ID NO: 2824799 - RNA, 19 nt, Human
aagagaguuuuuaauagaa

SEQ ID NO: 2824800 - RNA, 19 nt, Human
aagagaggagaggagagag

SEQ ID NO: 2824801 - RNA, 16 nt, Human
aagaguaguaauagag

SEQ ID NO: 2824802 - RNA, 19 nt, Human
aagaguaguugauguugca

SEQ ID NO: 2824803 - RNA, 22 nt, Human
aagaguaguugauguugcauuu

SEQ ID NO: 2824804 - RNA, 23 nt, Human
aagaguaguugauguugcauuuu

SEQ ID NO: 2824805 - RNA, 15 nt, Human
aagaguccucugaau

SEQ ID NO: 2824806 - RNA, 12 nt, Human
aagagugugugu

SEQ ID NO: 2824807 - RNA, 13 nt, Human
aagagugugugug

SEQ ID NO: 2824808 - RNA, 21 nt, Human
aagaguugccccgucucuguu

SEQ ID NO: 2824809 - RNA, 22 nt, Human
aagaguugccccgucucuguuc

SEQ ID NO: 2824810 - RNA, 22 nt, Human
aagaguguagaagcauuccuuc

SEQ ID NO: 2824811 - RNA, 14 nt, Human
aagaguguagaagc

SEQ ID NO: 2824812 - RNA, 15 nt, Human
aagaguguagaagca

SEQ ID NO: 2824813 - RNA, 16 nt, Human
aagaguguagaagcau

SEQ ID NO: 2824814 - RNA, 18 nt, Human
aagaguguagaagcauuc

SEQ ID NO: 2824815 - RNA, 24 nt, Human
aagagucuaaagauggaguuucua

SEQ ID NO: 2824816 - RNA, 13 nt, Human
aagagucuaaaga

SEQ ID NO: 2824817 - RNA, 14 nt, Human
aagagucuaaagau

SEQ ID NO: 2824818 - RNA, 12 nt, Human
aagaguguagaa

SEQ ID NO: 2824819 - RNA, 13 nt, Human
aagaguguagaag

SEQ ID NO: 2824820 - RNA, 22 nt, Human
aagcugaucauaagugaauuua

SEQ ID NO: 2824821 - RNA, 13 nt, Human
aagcugauccugc

SEQ ID NO: 2824822 - RNA, 15 nt, Human
aagcuagacagaucc

SEQ ID NO: 2824823 - RNA, 21 nt, Human
aagcuagacagauccccguuc

SEQ ID NO: 2824824 - RNA, 18 nt, Human
aaggcaaauguguacaug

SEQ ID NO: 2824825 - RNA, 12 nt, Human
aaggagaacaaa

SEQ ID NO: 2824826 - RNA, 13 nt, Human
aaggagaacaaau

SEQ ID NO: 2824827 - RNA, 14 nt, Human
aaggagaacaaaua

SEQ ID NO: 2824828 - RNA, 15 nt, Human
aaggagaacaaauau

SEQ ID NO: 2824829 - RNA, 22 nt, Human
aaggcagggagggccugggccc

SEQ ID NO: 2824830 - RNA, 19 nt, Human
aaggcagggagggccuggg

SEQ ID NO: 2824831 - RNA, 19 nt, Human
aagcuacugugugugugaa

SEQ ID NO: 2824832 - RNA, 22 nt, Human
aagcuacugugugugugaauga

SEQ ID NO: 2824833 - RNA, 23 nt, Human
aagcuacugugugugugaaugaa

SEQ ID NO: 2824834 - RNA, 15 nt, Human
aagcgugagccacug

SEQ ID NO: 2824835 - RNA, 23 nt, Human
aagcgaggcaugccugagagaca

SEQ ID NO: 2824836 - RNA, 21 nt, Human
aagcggcccuaagggaguguc

SEQ ID NO: 2824837 - RNA, 20 nt, Human
aagcggcccuaagggagugu

SEQ ID NO: 2824838 - RNA, 21 nt, Human
aagcgaugaauuuggagacuc

SEQ ID NO: 2824839 - RNA, 20 nt, Human
aagcgaugaauuuggagacu

SEQ ID NO: 2824840 - RNA, 14 nt, Human
aagcgauucuccug

SEQ ID NO: 2824841 - RNA, 15 nt, Human
aagcgauucuccugc

SEQ ID NO: 2824842 - RNA, 20 nt, Human
aagcgauucuccugccucag

SEQ ID NO: 2824843 - RNA, 16 nt, Human
aagcgauauacagaug

SEQ ID NO: 2824844 - RNA, 21 nt, Human
aagcgauauacagaugaaaau

SEQ ID NO: 2824845 - RNA, 22 nt, Human
aagcgauauacagaugaaaauu

SEQ ID NO: 2824846 - RNA, 10 nt, Human
aagccuuugu

SEQ ID NO: 2824847 - RNA, 11 nt, Human
aagccuugugu

SEQ ID NO: 2824848 - RNA, 13 nt, Human
aagccuuguguau

SEQ ID NO: 2824849 - RNA, 19 nt, Human
aagccuuguguauauuugu

SEQ ID NO: 2824850 - RNA, 21 nt, Human
aagccuuguguauauuuguau

SEQ ID NO: 2824851 - RNA, 22 nt, Human
aagccuuguguauauuuguaua

SEQ ID NO: 2824852 - RNA, 17 nt, Human
aagccuuuacugacccu

SEQ ID NO: 2824853 - RNA, 23 nt, Human
aagccuuuacugacccuggggcu

SEQ ID NO: 2824854 - RNA, 19 nt, Human
aagccuuuaguaucagugu

SEQ ID NO: 2824855 - RNA, 20 nt, Human
aagccuuuaguaucaguguu

SEQ ID NO: 2824856 - RNA, 21 nt, Human
aagccuuuaguaucaguguuu

SEQ ID NO: 2824857 - RNA, 13 nt, Human
aagauaauugcua

SEQ ID NO: 2824858 - RNA, 17 nt, Human
aagauaauugcuauuua

SEQ ID NO: 2824859 - RNA, 21 nt, Human
aagauaauugcuauuuauuuu

SEQ ID NO: 2824860 - RNA, 19 nt, Human
aagauaauuguugaaauuu

SEQ ID NO: 2824861 - RNA, 18 nt, Human
aagauacaaauuaauuuu

SEQ ID NO: 2824862 - RNA, 20 nt, Human
aagauacaaauuaauuuuac

SEQ ID NO: 2824863 - RNA, 17 nt, Human
aagaguugugcacgcag

SEQ ID NO: 2824864 - RNA, 21 nt, Human
aagccaggcagguagccaggg

SEQ ID NO: 2824865 - RNA, 12 nt, Human
aagccagggucu

SEQ ID NO: 2824866 - RNA, 19 nt, Human
aagccagggucucucccuc

SEQ ID NO: 2824867 - RNA, 20 nt, Human
aagccagggucucucccuca

SEQ ID NO: 2824868 - RNA, 21 nt, Human
aagccagggucucucccucag

SEQ ID NO: 2824869 - RNA, 23 nt, Human
aagccagggucucucccucaggu

SEQ ID NO: 2824870 - RNA, 18 nt, Human
aagccaguguugccuaag

SEQ ID NO: 2824871 - RNA, 23 nt, Human
aagccaguguugccuaaguauua

SEQ ID NO: 2824872 - RNA, 16 nt, Human
aauuggaggaaagcaa

SEQ ID NO: 2824873 - RNA, 21 nt, Human
aauugggagcuugggaaugga

SEQ ID NO: 2824874 - RNA, 14 nt, Human
aauugggaguccag

SEQ ID NO: 2824875 - RNA, 15 nt, Human
aauugggaguccagg

SEQ ID NO: 2824876 - RNA, 18 nt, Human
aauugggaguccaggcac

SEQ ID NO: 2824877 - RNA, 19 nt, Human
aauugggaguccaggcaca

SEQ ID NO: 2824878 - RNA, 21 nt, Human
aauugggaguccaggcacagg

SEQ ID NO: 2824879 - RNA, 12 nt, Human
aauucuguaaau

SEQ ID NO: 2824880 - RNA, 19 nt, Human
aauucugagacauguguca

SEQ ID NO: 2824881 - RNA, 12 nt, Human
aauucuguuuua

SEQ ID NO: 2824882 - RNA, 21 nt, Human
aauucuguuuuagguuaaaaa

SEQ ID NO: 2824883 - RNA, 23 nt, Human
aauucuguggguccgauaauauc

SEQ ID NO: 2824884 - RNA, 15 nt, Human
aauucuguuaaaauc

SEQ ID NO: 2824885 - RNA, 16 nt, Human
aauucuauaaggccau

SEQ ID NO: 2824886 - RNA, 22 nt, Human
aauucuauaaggccauaaaaca

SEQ ID NO: 2824887 - RNA, 15 nt, Human
aauucuauuaaagug

SEQ ID NO: 2824888 - RNA, 23 nt, Human
aauucuauuaaagugcuaagguu

SEQ ID NO: 2824889 - RNA, 15 nt, Human
aauucuacauuguca

SEQ ID NO: 2824890 - RNA, 22 nt, Human
aauucuagcuuugagcuuaaga

SEQ ID NO: 2824891 - RNA, 20 nt, Human
aauucucuguggaaugaaua

SEQ ID NO: 2824892 - RNA, 14 nt, Human
aauucucuuucaaa

SEQ ID NO: 2824893 - RNA, 21 nt, Human
aauucucauuugucacacacu

SEQ ID NO: 2824894 - RNA, 16 nt, Human
aauucuccugauaaaa

SEQ ID NO: 2824895 - RNA, 14 nt, Human
aauucuccugccuc

SEQ ID NO: 2824896 - RNA, 15 nt, Human
aauucuccugccuuu

SEQ ID NO: 2824897 - RNA, 16 nt, Human
aauucuccugccuuug

SEQ ID NO: 2824898 - RNA, 18 nt, Human
aauucuccugccuuugcc

SEQ ID NO: 2824899 - RNA, 16 nt, Human
aauucuccugccucag

SEQ ID NO: 2824900 - RNA, 15 nt, Human
aauucuccugccuca

SEQ ID NO: 2824901 - RNA, 13 nt, Human
aauuauauuugug

SEQ ID NO: 2824902 - RNA, 20 nt, Human
aauuauauuugugcuauagu

SEQ ID NO: 2824903 - RNA, 22 nt, Human
aauuauauuugugcuauaguau

SEQ ID NO: 2824904 - RNA, 23 nt, Human
aauuauauuugugcuauaguauu

SEQ ID NO: 2824905 - RNA, 12 nt, Human
aauuauaucugu

SEQ ID NO: 2824906 - RNA, 21 nt, Human
aauuauaucuguggucuucaa

SEQ ID NO: 2824907 - RNA, 20 nt, Human
aauuauauagguugugcaaa

SEQ ID NO: 2824908 - RNA, 21 nt, Human
aauuauauagguugugcaaau

SEQ ID NO: 2824909 - RNA, 15 nt, Human
aauuauaguuucuga

SEQ ID NO: 2824910 - RNA, 16 nt, Human
aauuauaguuucugag

SEQ ID NO: 2824911 - RNA, 17 nt, Human
aauuauaguuucugagg

SEQ ID NO: 2824912 - RNA, 21 nt, Human
aauuauaguuucugaggcuuu

SEQ ID NO: 2824913 - RNA, 21 nt, Human
aauuauaggagccuuaauuuu

SEQ ID NO: 2824914 - RNA, 13 nt, Human
aauuauaguuuca

SEQ ID NO: 2824915 - RNA, 13 nt, Human
aauuauaguuucu

SEQ ID NO: 2824916 - RNA, 14 nt, Human
aauuauaguuucug

SEQ ID NO: 2824917 - RNA, 12 nt, Human
aauuauacuaac

SEQ ID NO: 2824918 - RNA, 13 nt, Human
aauuauacaaauu

SEQ ID NO: 2824919 - RNA, 20 nt, Human
aauuauacaaauuaaaaaga

SEQ ID NO: 2824920 - RNA, 19 nt, Human
aauuauacccccugcaaag

SEQ ID NO: 2824921 - RNA, 15 nt, Human
aauucgcccgagcug

SEQ ID NO: 2824922 - RNA, 21 nt, Human
aauucgcccgagcuguuuaug

SEQ ID NO: 2824923 - RNA, 23 nt, Human
aauucgcccgagcuguuuauguu

SEQ ID NO: 2824924 - RNA, 11 nt, Human
aauuccugggc

SEQ ID NO: 2824925 - RNA, 17 nt, Human
aauuaugauggaagaca

SEQ ID NO: 2824926 - RNA, 22 nt, Human
aauuaugauggaagacaggaaa

SEQ ID NO: 2824927 - RNA, 13 nt, Human
aauuaugauuugg

SEQ ID NO: 2824928 - RNA, 15 nt, Human
aauuaugauuugggu

SEQ ID NO: 2824929 - RNA, 18 nt, Human
aauuaugcacuaaauaug

SEQ ID NO: 2824930 - RNA, 19 nt, Human
aauuaugcacuaaauauga

SEQ ID NO: 2824931 - RNA, 21 nt, Human
aauuaugggaauaauugcuuu

SEQ ID NO: 2824932 - RNA, 22 nt, Human
aauuaugggaauaauugcuuuu

SEQ ID NO: 2824933 - RNA, 15 nt, Human
aauuauguaaugcaa

SEQ ID NO: 2824934 - RNA, 18 nt, Human
aauuauguaaugcaaaau

SEQ ID NO: 2824935 - RNA, 23 nt, Human
aauuaucuauagcuaaguacaca

SEQ ID NO: 2824936 - RNA, 17 nt, Human
aauuaugaaucugauuu

SEQ ID NO: 2824937 - RNA, 21 nt, Human
aauuaugaaucugauuuuuau

SEQ ID NO: 2824938 - RNA, 12 nt, Human
aauuaugacaau

SEQ ID NO: 2824939 - RNA, 20 nt, Human
aauuaucaauaucuaauaua

SEQ ID NO: 2824940 - RNA, 14 nt, Human
aauuauccuauuuc

SEQ ID NO: 2824941 - RNA, 16 nt, Human
aauuauccuauuucag

SEQ ID NO: 2824942 - RNA, 17 nt, Human
aauuauccuauuucagu

SEQ ID NO: 2824943 - RNA, 21 nt, Human
aauuauccugaacucuucugc

SEQ ID NO: 2824944 - RNA, 22 nt, Human
aauuaucuauagcuaaguacac

SEQ ID NO: 2824945 - RNA, 15 nt, Human
aauuaucuauagcua

SEQ ID NO: 2824946 - RNA, 14 nt, Human
aauuguacauauuu

SEQ ID NO: 2824947 - RNA, 15 nt, Human
aauuguacauauuug

SEQ ID NO: 2824948 - RNA, 21 nt, Human
aauuguacauauuuguggaau

SEQ ID NO: 2824949 - RNA, 22 nt, Human
aauuguaccuuuuuuguuuuuu

SEQ ID NO: 2824950 - RNA, 18 nt, Human
aauuucauaugcuguaua

SEQ ID NO: 2824951 - RNA, 16 nt, Human
aauuucauaugcugua

SEQ ID NO: 2824952 - RNA, 15 nt, Human
aauuucauaucuaca

SEQ ID NO: 2824953 - RNA, 21 nt, Human
aauuuccacaaaaucugucca

SEQ ID NO: 2824954 - RNA, 13 nt, Human
aauuucccacccc

SEQ ID NO: 2824955 - RNA, 18 nt, Human
aauuucccacccccaccc

SEQ ID NO: 2824956 - RNA, 17 nt, Human
aauuucccuucuugcau

SEQ ID NO: 2824957 - RNA, 13 nt, Human
acaccagagccca

SEQ ID NO: 2824958 - RNA, 23 nt, Human
acaccagagcccaccuuggcuca

SEQ ID NO: 2824959 - RNA, 18 nt, Human
acaccagagcccaccuug

SEQ ID NO: 2824960 - RNA, 18 nt, Human
acacagcucuucuccagg

SEQ ID NO: 2824961 - RNA, 12 nt, Human
acacguguccug

SEQ ID NO: 2824962 - RNA, 23 nt, Human
acacguucacccaucuuaucaag

SEQ ID NO: 2824963 - RNA, 15 nt, Human
acacgugaugugaua

SEQ ID NO: 2824964 - RNA, 20 nt, Human
acacgcacgcacacacacaa

SEQ ID NO: 2824965 - RNA, 22 nt, Human
acacgccugcaaacgcugccug

SEQ ID NO: 2824966 - RNA, 16 nt, Human
acacgccuuccccuca

SEQ ID NO: 2824967 - RNA, 13 nt, Human
acacgcacgcaca

SEQ ID NO: 2824968 - RNA, 14 nt, Human
acacgcacgcacac

SEQ ID NO: 2824969 - RNA, 15 nt, Human
acacgcacgcacaca

SEQ ID NO: 2824970 - RNA, 16 nt, Human
acacgcacgcacacac

SEQ ID NO: 2824971 - RNA, 17 nt, Human
acacgcacgcacacaca

SEQ ID NO: 2824972 - RNA, 18 nt, Human
acacgcacgcacacacac

SEQ ID NO: 2824973 - RNA, 20 nt, Human
acacgcgccccccucccaga

SEQ ID NO: 2824974 - RNA, 22 nt, Human
acacgcgccccccucccagagg

SEQ ID NO: 2824975 - RNA, 23 nt, Human
acacgcgccccccucccagaggc

SEQ ID NO: 2824976 - RNA, 13 nt, Human
acacgcgcgcaca

SEQ ID NO: 2824977 - RNA, 20 nt, Human
acacgcauggucaacccuca

SEQ ID NO: 2824978 - RNA, 20 nt, Human
acacgccccaauuuucaggu

SEQ ID NO: 2824979 - RNA, 21 nt, Human
acacgccccaauuuucaggua

SEQ ID NO: 2824980 - RNA, 16 nt, Human
acacagcucuucucca

SEQ ID NO: 2824981 - RNA, 14 nt, Human
acacagcucuucuc

SEQ ID NO: 2824982 - RNA, 13 nt, Human
acacagccugggc

SEQ ID NO: 2824983 - RNA, 23 nt, Human
acacagccgauucaccugagcag

SEQ ID NO: 2824984 - RNA, 19 nt, Human
acacagccgauucaccuga

SEQ ID NO: 2824985 - RNA, 14 nt, Human
acacagcagcaguu

SEQ ID NO: 2824986 - RNA, 19 nt, Human
acacagaaaauguugagaa

SEQ ID NO: 2824987 - RNA, 22 nt, Human
acacagcagcuucaccagagca

SEQ ID NO: 2824988 - RNA, 18 nt, Human
acacagaaaauguugaga

SEQ ID NO: 2824989 - RNA, 14 nt, Human
acacacuuuuuaag

SEQ ID NO: 2824990 - RNA, 19 nt, Human
acacacuuuuuaagaaaua

SEQ ID NO: 2824991 - RNA, 17 nt, Human
acacacuuuuuauuaga

SEQ ID NO: 2824992 - RNA, 20 nt, Human
acaacuccuagggccacuga

SEQ ID NO: 2824993 - RNA, 12 nt, Human
acaacugacaca

SEQ ID NO: 2824994 - RNA, 14 nt, Human
acaacugacacagg

SEQ ID NO: 2824995 - RNA, 15 nt, Human
acaacugacacagga

SEQ ID NO: 2824996 - RNA, 16 nt, Human
acaacugacacaggaa

SEQ ID NO: 2824997 - RNA, 21 nt, Human
acaacugccucgaaacacaga

SEQ ID NO: 2824998 - RNA, 15 nt, Human
acaacugcaaagaaa

SEQ ID NO: 2824999 - RNA, 18 nt, Human
acaacugcaauaacuucu

SEQ ID NO: 2825000 - RNA, 20 nt, Human
acaacugcaauaacuucuga

SEQ ID NO: 2825001 - RNA, 21 nt, Human
acaacugcaauaacuucugac

SEQ ID NO: 2825002 - RNA, 14 nt, Human
acaacugugacugu

SEQ ID NO: 2825003 - RNA, 11 nt, Human
acaacugugac

SEQ ID NO: 2825004 - RNA, 13 nt, Human
acaacugugacug

SEQ ID NO: 2825005 - RNA, 22 nt, Human
acaacugccucgaaacacagaa

SEQ ID NO: 2825006 - RNA, 17 nt, Human
acaacugucuaacuuua

SEQ ID NO: 2825007 - RNA, 19 nt, Human
acaacugucuaacuuuaga

SEQ ID NO: 2825008 - RNA, 18 nt, Human
acaaguguauaucagaaa

SEQ ID NO: 2825009 - RNA, 19 nt, Human
acaaguguauaucagaaaa

SEQ ID NO: 2825010 - RNA, 20 nt, Human
acaaguguauaucagaaaag

SEQ ID NO: 2825011 - RNA, 17 nt, Human
acaagugccgcaaauug

SEQ ID NO: 2825012 - RNA, 18 nt, Human
acaagugccgcaaauugu

SEQ ID NO: 2825013 - RNA, 20 nt, Human
acaagugccgcaaauuguac

SEQ ID NO: 2825014 - RNA, 23 nt, Human
acaagugccgcaaauuguaccuu

SEQ ID NO: 2825015 - RNA, 15 nt, Human
acaaggucauggcca

SEQ ID NO: 2825016 - RNA, 17 nt, Human
acaaggucauggccaca

SEQ ID NO: 2825017 - RNA, 19 nt, Human
acaaggucauggccacacu

SEQ ID NO: 2825018 - RNA, 20 nt, Human
acaaggucauggccacacug

SEQ ID NO: 2825019 - RNA, 21 nt, Human
acaaggucauggccacacugu

SEQ ID NO: 2825020 - RNA, 23 nt, Human
acaaggucauggccacacuguga

SEQ ID NO: 2825021 - RNA, 24 nt, Human
acaaggucauggccacacugugac

SEQ ID NO: 2825022 - RNA, 21 nt, Human
acaagguaccccuuucuggcu

SEQ ID NO: 2825023 - RNA, 18 nt, Human
acaaggggcuguuacaua

SEQ ID NO: 2825024 - RNA, 21 nt, Human
acaaggggcuguuacauaaca

SEQ ID NO: 2825025 - RNA, 13 nt, Human
acaacuuagugua

SEQ ID NO: 2825026 - RNA, 14 nt, Human
acaacuuaguguaa

SEQ ID NO: 2825027 - RNA, 21 nt, Human
acaagggcugaccugccucuc

SEQ ID NO: 2825028 - RNA, 16 nt, Human
acaaacuguguacaua

SEQ ID NO: 2825029 - RNA, 21 nt, Human
acaaacuuuaggguaaaaauu

SEQ ID NO: 2825030 - RNA, 15 nt, Human
acaacauuuugagaa

SEQ ID NO: 2825031 - RNA, 18 nt, Human
acaacauuuugagaacaa

SEQ ID NO: 2825032 - RNA, 21 nt, Human
acaaccaagcgcauccaaucu

SEQ ID NO: 2825033 - RNA, 14 nt, Human
acaaccauuccaga

SEQ ID NO: 2825034 - RNA, 16 nt, Human
acaaccauauuuagca

SEQ ID NO: 2825035 - RNA, 21 nt, Human
acaaccaauuuacacugccau

SEQ ID NO: 2825036 - RNA, 14 nt, Human
acaaacuggagucu

SEQ ID NO: 2825037 - RNA, 18 nt, Human
acaaacuguaaaaaaugu

SEQ ID NO: 2825038 - RNA, 13 nt, Human
acaaacuguaaau

SEQ ID NO: 2825039 - RNA, 15 nt, Human
acaaacucucugaac

SEQ ID NO: 2825040 - RNA, 23 nt, Human
acaaacuacuugauuuuauugua

SEQ ID NO: 2825041 - RNA, 22 nt, Human
acaaacucucugaaccccuccc

SEQ ID NO: 2825042 - RNA, 13 nt, Human
acaaacucuugaa

SEQ ID NO: 2825043 - RNA, 20 nt, Human
acaaacucaccaucugugca

SEQ ID NO: 2825044 - RNA, 14 nt, Human
acaaacaucacucu

SEQ ID NO: 2825045 - RNA, 12 nt, Human
acaaacauugug

SEQ ID NO: 2825046 - RNA, 13 nt, Human
acaaacauugugu

SEQ ID NO: 2825047 - RNA, 16 nt, Human
acaaacauuguguuga

SEQ ID NO: 2825048 - RNA, 19 nt, Human
acaaacauuguguugacau

SEQ ID NO: 2825049 - RNA, 20 nt, Human
acaaacauuguguugacauu

SEQ ID NO: 2825050 - RNA, 11 nt, Human
acaaacauuuu

SEQ ID NO: 2825051 - RNA, 12 nt, Human
acaaacauuuuu

SEQ ID NO: 2825052 - RNA, 14 nt, Human
acaaacauuuuuca

SEQ ID NO: 2825053 - RNA, 15 nt, Human
acaaacauuuuucaa

SEQ ID NO: 2825054 - RNA, 16 nt, Human
acaaacauuuuucaac

SEQ ID NO: 2825055 - RNA, 17 nt, Human
acaaacauuuuucaaca

SEQ ID NO: 2825056 - RNA, 12 nt, Human
acaaaccaaguc

SEQ ID NO: 2825057 - RNA, 15 nt, Human
acaaaccacaacuga

SEQ ID NO: 2825058 - RNA, 16 nt, Human
acaaaccacaacugac

SEQ ID NO: 2825059 - RNA, 15 nt, Human
acaaacacauuguua

SEQ ID NO: 2825060 - RNA, 17 nt, Human
acaaacacauuguuauu

SEQ ID NO: 2825061 - RNA, 19 nt, Human
acaaacacauuguuauuuu

SEQ ID NO: 2825062 - RNA, 15 nt, Human
acaaacaccucccag

SEQ ID NO: 2825063 - RNA, 21 nt, Human
acaaacaccuucuuauuauau

SEQ ID NO: 2825064 - RNA, 23 nt, Human
acaaacacuacagacaauaaaua

SEQ ID NO: 2825065 - RNA, 14 nt, Human
acaaacaaucucuu

SEQ ID NO: 2825066 - RNA, 16 nt, Human
acaaacaaucucuuaa

SEQ ID NO: 2825067 - RNA, 22 nt, Human
acagcugagagacuuuuaauca

SEQ ID NO: 2825068 - RNA, 19 nt, Human
acagcucuuuuugugaagu

SEQ ID NO: 2825069 - RNA, 17 nt, Human
acaggcaaugcuggcug

SEQ ID NO: 2825070 - RNA, 14 nt, Human
acaggcacccacca

SEQ ID NO: 2825071 - RNA, 16 nt, Human
acaggcaaugcuggcu

SEQ ID NO: 2825072 - RNA, 15 nt, Human
acaggcaaugcuggc

SEQ ID NO: 2825073 - RNA, 18 nt, Human
acagcucuucuccaggcu

SEQ ID NO: 2825074 - RNA, 15 nt, Human
acagcugagagacuu

SEQ ID NO: 2825075 - RNA, 16 nt, Human
acagcugagagacuuu

SEQ ID NO: 2825076 - RNA, 19 nt, Human
acagcugagagacuuuuaa

SEQ ID NO: 2825077 - RNA, 20 nt, Human
acagcucuucuccaggcugu

SEQ ID NO: 2825078 - RNA, 19 nt, Human
acagcucuucuccaggcug

SEQ ID NO: 2825079 - RNA, 13 nt, Human
acagugcaucuca

SEQ ID NO: 2825080 - RNA, 15 nt, Human
acagugcaucucagc

SEQ ID NO: 2825081 - RNA, 17 nt, Human
acagugcaucucagccc

SEQ ID NO: 2825082 - RNA, 18 nt, Human
acagugcaucucagccca

SEQ ID NO: 2825083 - RNA, 23 nt, Human
acaggcacccaccaucaugucug

SEQ ID NO: 2825084 - RNA, 13 nt, Human
acagugcugugug

SEQ ID NO: 2825085 - RNA, 18 nt, Human
acagugccaacuccucac

SEQ ID NO: 2825086 - RNA, 19 nt, Human
acaguggauuguuuauacu

SEQ ID NO: 2825087 - RNA, 17 nt, Human
acaguggauugcauuuc

SEQ ID NO: 2825088 - RNA, 22 nt, Human
acagugcuucagccugaggcug

SEQ ID NO: 2825089 - RNA, 20 nt, Human
acagugcuugccacagagcg

SEQ ID NO: 2825090 - RNA, 21 nt, Human
acagugcuugccacagagcgg

SEQ ID NO: 2825091 - RNA, 21 nt, Human
acagugcuucagccugaggcu

SEQ ID NO: 2825092 - RNA, 20 nt, Human
acagugcuucagccugaggc

SEQ ID NO: 2825093 - RNA, 18 nt, Human
acagugcuucagccugag

SEQ ID NO: 2825094 - RNA, 17 nt, Human
acagugcuucagccuga

SEQ ID NO: 2825095 - RNA, 15 nt, Human
acagugcuucagccu

SEQ ID NO: 2825096 - RNA, 14 nt, Human
acagugcuucagcc

SEQ ID NO: 2825097 - RNA, 16 nt, Human
acagugggaacucuga

SEQ ID NO: 2825098 - RNA, 18 nt, Human
acagugggaacucugaca

SEQ ID NO: 2825099 - RNA, 19 nt, Human
acagugggaacucugacaa

SEQ ID NO: 2825100 - RNA, 21 nt, Human
acagugggaacucugacaagg

SEQ ID NO: 2825101 - RNA, 14 nt, Human
acauuugccuugcu

SEQ ID NO: 2825102 - RNA, 15 nt, Human
acauuugccuugcug

SEQ ID NO: 2825103 - RNA, 23 nt, Human
acauuucuuagacuacauuuaga

SEQ ID NO: 2825104 - RNA, 13 nt, Human
acauuugccuugc

SEQ ID NO: 2825105 - RNA, 14 nt, Human
acauuugccuugca

SEQ ID NO: 2825106 - RNA, 16 nt, Human
acauuugccuugcaga

SEQ ID NO: 2825107 - RNA, 17 nt, Human
acauuugccuugcagaa

SEQ ID NO: 2825108 - RNA, 20 nt, Human
acauuugccuugcagaacug

SEQ ID NO: 2825109 - RNA, 21 nt, Human
acauuugccuugcagaacugc

SEQ ID NO: 2825110 - RNA, 23 nt, Human
acauuugccuugcagaacugcca

SEQ ID NO: 2825111 - RNA, 14 nt, Human
acauuucuuuucuu

SEQ ID NO: 2825112 - RNA, 15 nt, Human
acauuucuuuucuuu

SEQ ID NO: 2825113 - RNA, 18 nt, Human
acauuucuuuucuuuuua

SEQ ID NO: 2825114 - RNA, 20 nt, Human
acauuucuuuucuuuuuaca

SEQ ID NO: 2825115 - RNA, 21 nt, Human
acauuucuuuucuuuuuacau

SEQ ID NO: 2825116 - RNA, 22 nt, Human
acauuucuuuucuuuuuacaua

SEQ ID NO: 2825117 - RNA, 19 nt, Human
acauuucuguaaauaccau

SEQ ID NO: 2825118 - RNA, 21 nt, Human
accaacgcgaaaccaauuccu

SEQ ID NO: 2825119 - RNA, 23 nt, Human
accaacgcgaaaccaauuccuca

SEQ ID NO: 2825120 - RNA, 14 nt, Human
accaagccguggcu

SEQ ID NO: 2825121 - RNA, 15 nt, Human
accaagccguggcuu

SEQ ID NO: 2825122 - RNA, 16 nt, Human
accaagccguggcuuc

SEQ ID NO: 2825123 - RNA, 17 nt, Human
accaagccguggcuucc

SEQ ID NO: 2825124 - RNA, 18 nt, Human
accaagccguggcuuccc

SEQ ID NO: 2825125 - RNA, 18 nt, Human
accaccccaacaaaccau

SEQ ID NO: 2825126 - RNA, 17 nt, Human
accaccauccaccgcug

SEQ ID NO: 2825127 - RNA, 19 nt, Human
accaccauccaccgcugcu

SEQ ID NO: 2825128 - RNA, 20 nt, Human
accaccauccaccgcugcuc

SEQ ID NO: 2825129 - RNA, 21 nt, Human
accaccauccaccgcugcucc

SEQ ID NO: 2825130 - RNA, 16 nt, Human
accacgcuggaccuug

SEQ ID NO: 2825131 - RNA, 14 nt, Human
accacgcuggaccu

SEQ ID NO: 2825132 - RNA, 18 nt, Human
accacgcuggaccuugaa

SEQ ID NO: 2825133 - RNA, 16 nt, Human
accacgcuggggucug

SEQ ID NO: 2825134 - RNA, 18 nt, Human
accaccccgccugcccuc

SEQ ID NO: 2825135 - RNA, 17 nt, Human
accacgucugucuucac

SEQ ID NO: 2825136 - RNA, 14 nt, Human
accacguccagcug

SEQ ID NO: 2825137 - RNA, 18 nt, Human
accacggaaaagagcgca

SEQ ID NO: 2825138 - RNA, 14 nt, Human
accacggaaaagag

SEQ ID NO: 2825139 - RNA, 18 nt, Human
accacgucugucuucaca

SEQ ID NO: 2825140 - RNA, 17 nt, Human
acauguguuggcagccu

SEQ ID NO: 2825141 - RNA, 20 nt, Human
acauguguagccugugcaug

SEQ ID NO: 2825142 - RNA, 23 nt, Human
acaugugucaacaccccugugug

SEQ ID NO: 2825143 - RNA, 17 nt, Human
acauguguagccugugc

SEQ ID NO: 2825144 - RNA, 18 nt, Human
acauguguagccugugca

SEQ ID NO: 2825145 - RNA, 12 nt, Human
acauguguuuua

SEQ ID NO: 2825146 - RNA, 21 nt, Human
acauguguuuuaauuccaaua

SEQ ID NO: 2825147 - RNA, 19 nt, Human
acauguuuuuauacaaaau

SEQ ID NO: 2825148 - RNA, 17 nt, Human
acauguuuuuauacaaa

SEQ ID NO: 2825149 - RNA, 13 nt, Human
acaugugguuuau

SEQ ID NO: 2825150 - RNA, 16 nt, Human
acaugugguuuauaga

SEQ ID NO: 2825151 - RNA, 20 nt, Human
acauguguagccuauguugu

SEQ ID NO: 2825152 - RNA, 21 nt, Human
acauguguagccuauguugug

SEQ ID NO: 2825153 - RNA, 12 nt, Human
acauguguguau

SEQ ID NO: 2825154 - RNA, 13 nt, Human
acauguguguaua

SEQ ID NO: 2825155 - RNA, 14 nt, Human
acauguguguauau

SEQ ID NO: 2825156 - RNA, 15 nt, Human
acauguguguauaua

SEQ ID NO: 2825157 - RNA, 17 nt, Human
acauguguguauauaug

SEQ ID NO: 2825158 - RNA, 18 nt, Human
acauguguguauauaugu

SEQ ID NO: 2825159 - RNA, 22 nt, Human
acauguguguauauauguguau

SEQ ID NO: 2825160 - RNA, 23 nt, Human
acauguguguauauauguguaua

SEQ ID NO: 2825161 - RNA, 22 nt, Human
acaugugccagggcaaugauga

SEQ ID NO: 2825162 - RNA, 23 nt, Human
acaugcggagaacaaaugugaag

SEQ ID NO: 2825163 - RNA, 15 nt, Human
acaugccugccccaa

SEQ ID NO: 2825164 - RNA, 21 nt, Human
acaugccugccccaaacaaau

SEQ ID NO: 2825165 - RNA, 17 nt, Human
acaugcagcccaugccc

SEQ ID NO: 2825166 - RNA, 15 nt, Human
acaugcagcccaugc

SEQ ID NO: 2825167 - RNA, 18 nt, Human
acaugcagcccaugccca

SEQ ID NO: 2825168 - RNA, 17 nt, Human
acaucccugagcaggaa

SEQ ID NO: 2825169 - RNA, 22 nt, Human
acaugccugccccaaacaaaua

SEQ ID NO: 2825170 - RNA, 17 nt, Human
acaugcggagaacaaau

SEQ ID NO: 2825171 - RNA, 13 nt, Human
acaugcacgugug

SEQ ID NO: 2825172 - RNA, 17 nt, Human
acaugcacucagcucuu

SEQ ID NO: 2825173 - RNA, 16 nt, Human
acaugcacuaugagga

SEQ ID NO: 2825174 - RNA, 17 nt, Human
acaugcacuaugaggaa

SEQ ID NO: 2825175 - RNA, 18 nt, Human
acaugcacucagcucuug

SEQ ID NO: 2825176 - RNA, 12 nt, Human
acaugcacugac

SEQ ID NO: 2825177 - RNA, 13 nt, Human
acaugcacugacc

SEQ ID NO: 2825178 - RNA, 14 nt, Human
acaugcacugaccc

SEQ ID NO: 2825179 - RNA, 18 nt, Human
acaugcacugacccuucc

SEQ ID NO: 2825180 - RNA, 19 nt, Human
acaugcacugacccuucca

SEQ ID NO: 2825181 - RNA, 18 nt, Human
acauccaacuccagcaac

SEQ ID NO: 2825182 - RNA, 16 nt, Human
acauccaacuccagca

SEQ ID NO: 2825183 - RNA, 19 nt, Human
acauccaacuccagcaacu

SEQ ID NO: 2825184 - RNA, 18 nt, Human
acauccccccgccaaaag

SEQ ID NO: 2825185 - RNA, 23 nt, Human
acaucccuacaaaaaauuagaaa

SEQ ID NO: 2825186 - RNA, 18 nt, Human
acaucccgggacgcagca

SEQ ID NO: 2825187 - RNA, 21 nt, Human
acauaaguaauucaagaaaac

SEQ ID NO: 2825188 - RNA, 17 nt, Human
acauaauaaaaaauuau

SEQ ID NO: 2825189 - RNA, 23 nt, Human
acauaauaaaaaauuaugacaau

SEQ ID NO: 2825190 - RNA, 14 nt, Human
acauaauaaauuaa

SEQ ID NO: 2825191 - RNA, 21 nt, Human
acauaauacacuugcccugcu

SEQ ID NO: 2825192 - RNA, 22 nt, Human
acauaauacacuugcccugcuc

SEQ ID NO: 2825193 - RNA, 20 nt, Human
acauaaguaauucaagaaaa

SEQ ID NO: 2825194 - RNA, 23 nt, Human
acauaacguuuuuccuuuaaaaa

SEQ ID NO: 2825195 - RNA, 12 nt, Human
acauaacuaaau

SEQ ID NO: 2825196 - RNA, 13 nt, Human
acauaacuaaauu

SEQ ID NO: 2825197 - RNA, 15 nt, Human
acauaacuaaauuug

SEQ ID NO: 2825198 - RNA, 18 nt, Human
acauaacuaaauuugaua

SEQ ID NO: 2825199 - RNA, 22 nt, Human
acauaacuaaauuugauacuua

SEQ ID NO: 2825200 - RNA, 23 nt, Human
acauaacuaaauuugauacuuau

SEQ ID NO: 2825201 - RNA, 12 nt, Human
acauaacaagaa

SEQ ID NO: 2825202 - RNA, 13 nt, Human
acauaacaagaaa

SEQ ID NO: 2825203 - RNA, 14 nt, Human
acauaacaagaaaa

SEQ ID NO: 2825204 - RNA, 15 nt, Human
acauaacaagaaaau

SEQ ID NO: 2825205 - RNA, 14 nt, Human
acauaacguuuuuc

SEQ ID NO: 2825206 - RNA, 15 nt, Human
acauaacguuuuucc

SEQ ID NO: 2825207 - RNA, 16 nt, Human
acauaacguuuuuccu

SEQ ID NO: 2825208 - RNA, 18 nt, Human
acauaacguuuuuccuuu

SEQ ID NO: 2825209 - RNA, 20 nt, Human
acauaacguuuuuccuuuaa

SEQ ID NO: 2825210 - RNA, 21 nt, Human
acauaacguuuuuccuuuaaa

SEQ ID NO: 2825211 - RNA, 19 nt, Human
acauaaucuaguuuacaga

SEQ ID NO: 2825212 - RNA, 22 nt, Human
acauaaucuaguuuacagaaaa

SEQ ID NO: 2825213 - RNA, 13 nt, Human
acauaaugaaaau

SEQ ID NO: 2825214 - RNA, 19 nt, Human
acauaaugaaaauauuuuu

SEQ ID NO: 2825215 - RNA, 22 nt, Human
acauaacguuuuuccuuuaaaa

SEQ ID NO: 2825216 - RNA, 21 nt, Human
acauccaaaauaguuaagaca

SEQ ID NO: 2825217 - RNA, 12 nt, Human
acaucauuuugu

SEQ ID NO: 2825218 - RNA, 17 nt, Human
acaucauuuuguuuucc

SEQ ID NO: 2825219 - RNA, 18 nt, Human
acauacacgaaagagaga

SEQ ID NO: 2825220 - RNA, 16 nt, Human
acauacacuuguauaa

SEQ ID NO: 2825221 - RNA, 19 nt, Human
acauacacuuguauaaaug

SEQ ID NO: 2825222 - RNA, 20 nt, Human
acauacacuuguauaaaugu

SEQ ID NO: 2825223 - RNA, 21 nt, Human
acauacacuuguauaaaugua

SEQ ID NO: 2825224 - RNA, 15 nt, Human
acauaacugccuuga

SEQ ID NO: 2825225 - RNA, 15 nt, Human
acauacaguuuuaug

SEQ ID NO: 2825226 - RNA, 12 nt, Human
accucugccuga

SEQ ID NO: 2825227 - RNA, 23 nt, Human
accucugccugaagucacacagu

SEQ ID NO: 2825228 - RNA, 20 nt, Human
accucugccugaagucacac

SEQ ID NO: 2825229 - RNA, 15 nt, Human
accucugugugcucc

SEQ ID NO: 2825230 - RNA, 11 nt, Human
accucugugug

SEQ ID NO: 2825231 - RNA, 12 nt, Human
accucugugugc

SEQ ID NO: 2825232 - RNA, 15 nt, Human
accucugucauuugu

SEQ ID NO: 2825233 - RNA, 12 nt, Human
accucugucuca

SEQ ID NO: 2825234 - RNA, 13 nt, Human
accucugucucau

SEQ ID NO: 2825235 - RNA, 15 nt, Human
accucugucucaucc

SEQ ID NO: 2825236 - RNA, 16 nt, Human
accucugucucauccu

SEQ ID NO: 2825237 - RNA, 20 nt, Human
accucugucucauccuccug

SEQ ID NO: 2825238 - RNA, 21 nt, Human
accucugucucauccuccugg

SEQ ID NO: 2825239 - RNA, 23 nt, Human
accucugucucauccuccuggaa

SEQ ID NO: 2825240 - RNA, 14 nt, Human
accucugugaccuc

SEQ ID NO: 2825241 - RNA, 15 nt, Human
accucugugaccuca

SEQ ID NO: 2825242 - RNA, 16 nt, Human
accucugugaccucag

SEQ ID NO: 2825243 - RNA, 17 nt, Human
accucugugaccucagg

SEQ ID NO: 2825244 - RNA, 18 nt, Human
accucugugaccucaggc

SEQ ID NO: 2825245 - RNA, 19 nt, Human
accucugugaccucaggca

SEQ ID NO: 2825246 - RNA, 21 nt, Human
accucugugaggaaagcacac

SEQ ID NO: 2825247 - RNA, 16 nt, Human
accucugugccucugu

SEQ ID NO: 2825248 - RNA, 11 nt, Human
accuugcuguc

SEQ ID NO: 2825249 - RNA, 12 nt, Human
accuugcugucc

SEQ ID NO: 2825250 - RNA, 14 nt, Human
accuugcuguccug

SEQ ID NO: 2825251 - RNA, 17 nt, Human
accuugcuguccugauc

SEQ ID NO: 2825252 - RNA, 19 nt, Human
accuugcuguccugaucug

SEQ ID NO: 2825253 - RNA, 23 nt, Human
accuugcuguccugaucugugau

SEQ ID NO: 2825254 - RNA, 12 nt, Human
accuugcuucuu

SEQ ID NO: 2825255 - RNA, 22 nt, Human
accuugcuucuuacugauaauu

SEQ ID NO: 2825256 - RNA, 13 nt, Human
accuugcuaauuu

SEQ ID NO: 2825257 - RNA, 20 nt, Human
accuugcuaauuuucucaaa

SEQ ID NO: 2825258 - RNA, 23 nt, Human
accuguggaacauaaaaaggaca

SEQ ID NO: 2825259 - RNA, 20 nt, Human
accuguggaacauaaaaagg

SEQ ID NO: 2825260 - RNA, 16 nt, Human
accugugccucggcuu

SEQ ID NO: 2825261 - RNA, 15 nt, Human
accugugccucggcu

SEQ ID NO: 2825262 - RNA, 14 nt, Human
accuguaaucccag

SEQ ID NO: 2825263 - RNA, 15 nt, Human
accuguaaucccagc

SEQ ID NO: 2825264 - RNA, 19 nt, Human
accuguaaucccagcacuu

SEQ ID NO: 2825265 - RNA, 16 nt, Human
accuguaaucccagca

SEQ ID NO: 2825266 - RNA, 17 nt, Human
accuguaaucccagcac

SEQ ID NO: 2825267 - RNA, 19 nt, Human
accugugaguuuaaagcaa

SEQ ID NO: 2825268 - RNA, 14 nt, Human
accugugccucggc

SEQ ID NO: 2825269 - RNA, 18 nt, Human
accugugaguuuaaagca

SEQ ID NO: 2825270 - RNA, 16 nt, Human
accugugaguaaauau

SEQ ID NO: 2825271 - RNA, 17 nt, Human
accugugaguaaauauu

SEQ ID NO: 2825272 - RNA, 23 nt, Human
accugccccgcccagcugcaccu

SEQ ID NO: 2825273 - RNA, 17 nt, Human
accugccccgcccagcu

SEQ ID NO: 2825274 - RNA, 16 nt, Human
accugccccgcccagc

SEQ ID NO: 2825275 - RNA, 17 nt, Human
accuuggagagacacag

SEQ ID NO: 2825276 - RNA, 14 nt, Human
acgcacacacacaa

SEQ ID NO: 2825277 - RNA, 13 nt, Human
acgcacagacagg

SEQ ID NO: 2825278 - RNA, 14 nt, Human
acgcacagacaggu

SEQ ID NO: 2825279 - RNA, 21 nt, Human
acgcacagacagguuuucaca

SEQ ID NO: 2825280 - RNA, 19 nt, Human
acgcacauauacacacaca

SEQ ID NO: 2825281 - RNA, 18 nt, Human
acgcaaaaccacuuuccu

SEQ ID NO: 2825282 - RNA, 13 nt, Human
acgcacacacaca

SEQ ID NO: 2825283 - RNA, 23 nt, Human
acgcaaugaaaagucguuuucca

SEQ ID NO: 2825284 - RNA, 18 nt, Human
acgauuuucuccagcuca

SEQ ID NO: 2825285 - RNA, 22 nt, Human
acgcuguucuaauggcacuuau

SEQ ID NO: 2825286 - RNA, 16 nt, Human
acgcaggcaucugauu

SEQ ID NO: 2825287 - RNA, 13 nt, Human
acgcuucacagug

SEQ ID NO: 2825288 - RNA, 16 nt, Human
acgcuucacagugauc

SEQ ID NO: 2825289 - RNA, 18 nt, Human
acgcagcccuagagccug

SEQ ID NO: 2825290 - RNA, 19 nt, Human
acgcagcccuagagccugc

SEQ ID NO: 2825291 - RNA, 20 nt, Human
acgcagcccuagagccugcc

SEQ ID NO: 2825292 - RNA, 14 nt, Human
acgcagcccuagag

SEQ ID NO: 2825293 - RNA, 12 nt, Human
acgcagcccugc

SEQ ID NO: 2825294 - RNA, 21 nt, Human
acgcagcccuagagccugccu

SEQ ID NO: 2825295 - RNA, 22 nt, Human
acgcagcccuagagccugccug

SEQ ID NO: 2825296 - RNA, 23 nt, Human
acgcagcccuagagccugccugg

SEQ ID NO: 2825297 - RNA, 24 nt, Human
acgcagcccuagagccugccugga

SEQ ID NO: 2825298 - RNA, 22 nt, Human
acgcagcccugcuuugggcugc

SEQ ID NO: 2825299 - RNA, 23 nt, Human
acgcagcccugcuuugggcugcc

SEQ ID NO: 2825300 - RNA, 12 nt, Human
acgucuucuaaa

SEQ ID NO: 2825301 - RNA, 15 nt, Human
acgucuuucuuuuuu

SEQ ID NO: 2825302 - RNA, 15 nt, Human
acgcuugcucauuuu

SEQ ID NO: 2825303 - RNA, 19 nt, Human
acggaauaguuggcuagga

SEQ ID NO: 2825304 - RNA, 14 nt, Human
acggacaauaaacc

SEQ ID NO: 2825305 - RNA, 15 nt, Human
acggacaauaaaccu

SEQ ID NO: 2825306 - RNA, 18 nt, Human
acggacaauaaaccuccg

SEQ ID NO: 2825307 - RNA, 19 nt, Human
acggacaauaaaccuccgc

SEQ ID NO: 2825308 - RNA, 15 nt, Human
acggacacccccucg

SEQ ID NO: 2825309 - RNA, 16 nt, Human
acggacacccccucgc

SEQ ID NO: 2825310 - RNA, 18 nt, Human
acuaauggggcggugaga

SEQ ID NO: 2825311 - RNA, 20 nt, Human
acuaauuaggguacauuuau

SEQ ID NO: 2825312 - RNA, 23 nt, Human
acuaauuaggguacauuuauaau

SEQ ID NO: 2825313 - RNA, 12 nt, Human
acuaauguaaaa

SEQ ID NO: 2825314 - RNA, 15 nt, Human
acuaauguaaaauga

SEQ ID NO: 2825315 - RNA, 16 nt, Human
acuaauguaaaaugau

SEQ ID NO: 2825316 - RNA, 14 nt, Human
acguggaaccucug

SEQ ID NO: 2825317 - RNA, 16 nt, Human
acguggaaccucuguc

SEQ ID NO: 2825318 - RNA, 17 nt, Human
acguggaaccucugucu

SEQ ID NO: 2825319 - RNA, 18 nt, Human
acguggaaccucugucuc

SEQ ID NO: 2825320 - RNA, 20 nt, Human
acguggaaccucugucucau

SEQ ID NO: 2825321 - RNA, 20 nt, Human
acgugcgcugggcacuuccc

SEQ ID NO: 2825322 - RNA, 22 nt, Human
acgugcgcugggcacuucccug

SEQ ID NO: 2825323 - RNA, 23 nt, Human
acgugcgcugggcacuucccugc

SEQ ID NO: 2825324 - RNA, 19 nt, Human
acguggagagcuggugccc

SEQ ID NO: 2825325 - RNA, 18 nt, Human
acguggagagcuggugcc

SEQ ID NO: 2825326 - RNA, 16 nt, Human
acguggagagcuggug

SEQ ID NO: 2825327 - RNA, 15 nt, Human
acguggagagcuggu

SEQ ID NO: 2825328 - RNA, 17 nt, Human
acguggacguuuuuaau

SEQ ID NO: 2825329 - RNA, 14 nt, Human
acguggagagcugg

SEQ ID NO: 2825330 - RNA, 21 nt, Human
acccugucucuuaaagaaaaa

SEQ ID NO: 2825331 - RNA, 22 nt, Human
acccuggggccuggaccugccu

SEQ ID NO: 2825332 - RNA, 21 nt, Human
acccuggggcuggcuuuucug

SEQ ID NO: 2825333 - RNA, 22 nt, Human
acccuggggcuggcuuuucugu

SEQ ID NO: 2825334 - RNA, 16 nt, Human
acccuggugccuggcu

SEQ ID NO: 2825335 - RNA, 23 nt, Human
acccuguaaaauggagguggaaa

SEQ ID NO: 2825336 - RNA, 19 nt, Human
acccuguacauauguaaac

SEQ ID NO: 2825337 - RNA, 15 nt, Human
acccuguaccucauc

SEQ ID NO: 2825338 - RNA, 16 nt, Human
acccuguaccucaucc

SEQ ID NO: 2825339 - RNA, 17 nt, Human
acccuguaccucauccc

SEQ ID NO: 2825340 - RNA, 20 nt, Human
acccuguacuguucuguguc

SEQ ID NO: 2825341 - RNA, 22 nt, Human
acccuguacuguucugugucuu

SEQ ID NO: 2825342 - RNA, 16 nt, Human
acccuggggagaaagu

SEQ ID NO: 2825343 - RNA, 17 nt, Human
acccuggggccuggacc

SEQ ID NO: 2825344 - RNA, 18 nt, Human
acccuggggccuggaccu

SEQ ID NO: 2825345 - RNA, 19 nt, Human
acccuggggccuggaccug

SEQ ID NO: 2825346 - RNA, 13 nt, Human
acccuggggccug

SEQ ID NO: 2825347 - RNA, 12 nt, Human
acccugggaagg

SEQ ID NO: 2825348 - RNA, 12 nt, Human
acccugggaccu

SEQ ID NO: 2825349 - RNA, 22 nt, Human
acccuggccgcccccugccccc

SEQ ID NO: 2825350 - RNA, 23 nt, Human
acccugggaccuaggggcgccgc

SEQ ID NO: 2825351 - RNA, 14 nt, Human
acccugggagacag

SEQ ID NO: 2825352 - RNA, 16 nt, Human
acccugggagacagac

SEQ ID NO: 2825353 - RNA, 17 nt, Human
acccugggagacagacc

SEQ ID NO: 2825354 - RNA, 16 nt, Human
acccuggccgcccccu

SEQ ID NO: 2825355 - RNA, 17 nt, Human
acccuggccgcccccug

SEQ ID NO: 2825356 - RNA, 19 nt, Human
acccuggccgcccccugcc

SEQ ID NO: 2825357 - RNA, 18 nt, Human
acccucagagccaccccu

SEQ ID NO: 2825358 - RNA, 21 nt, Human
acccucaggggaaaacuguua

SEQ ID NO: 2825359 - RNA, 15 nt, Human
acccuggcauuaugu

SEQ ID NO: 2825360 - RNA, 18 nt, Human
acccuggcacccagggug

SEQ ID NO: 2825361 - RNA, 21 nt, Human
acccucaaccucuucuggcuc

SEQ ID NO: 2825362 - RNA, 14 nt, Human
acccucacucugcc

SEQ ID NO: 2825363 - RNA, 15 nt, Human
acccucacucugcca

SEQ ID NO: 2825364 - RNA, 16 nt, Human
acccucacucugccag

SEQ ID NO: 2825365 - RNA, 17 nt, Human
acccucacucugccagg

SEQ ID NO: 2825366 - RNA, 18 nt, Human
acccucacucugccaggg

SEQ ID NO: 2825367 - RNA, 21 nt, Human
acccucacucugccagggcag

SEQ ID NO: 2825368 - RNA, 11 nt, Human
acccucagagc

SEQ ID NO: 2825369 - RNA, 18 nt, Human
acccuaucuccugacaga

SEQ ID NO: 2825370 - RNA, 15 nt, Human
acccuaucuccugac

SEQ ID NO: 2825371 - RNA, 17 nt, Human
acccuauauguaguaua

SEQ ID NO: 2825372 - RNA, 14 nt, Human
acccuaucuccuga

SEQ ID NO: 2825373 - RNA, 16 nt, Human
acccuaguuucccuga

SEQ ID NO: 2825374 - RNA, 21 nt, Human
acccuaguucuaccucaggca

SEQ ID NO: 2825375 - RNA, 22 nt, Human
acccuagucccuuccccucccu

SEQ ID NO: 2825376 - RNA, 15 nt, Human
acccuaguucuaccu

SEQ ID NO: 2825377 - RNA, 21 nt, Human
acccuaggccucucaccucug

SEQ ID NO: 2825378 - RNA, 19 nt, Human
acccuagguucccgguccc

SEQ ID NO: 2825379 - RNA, 22 nt, Human
acccuagguucccggucccgag

SEQ ID NO: 2825380 - RNA, 16 nt, Human
acccuagguucccugu

SEQ ID NO: 2825381 - RNA, 18 nt, Human
acccuagguucccuguuc

SEQ ID NO: 2825382 - RNA, 19 nt, Human
acccuagguucccuguucu

SEQ ID NO: 2825383 - RNA, 22 nt, Human
acccuagguucccuguucuucc

SEQ ID NO: 2825384 - RNA, 23 nt, Human
acccuagguucccuguucuuccu

SEQ ID NO: 2825385 - RNA, 19 nt, Human
acccuagccaaugucuccu

SEQ ID NO: 2825386 - RNA, 17 nt, Human
acccuagcccucucccu

SEQ ID NO: 2825387 - RNA, 18 nt, Human
acccuagcccucucccuc

SEQ ID NO: 2825388 - RNA, 16 nt, Human
acccuagccaaugucu

SEQ ID NO: 2825389 - RNA, 18 nt, Human
acccuacuucuuuugcuc

SEQ ID NO: 2825390 - RNA, 14 nt, Human
acccuacuucuuuu

SEQ ID NO: 2825391 - RNA, 13 nt, Human
acccuaaugucuu

SEQ ID NO: 2825392 - RNA, 19 nt, Human
acccuaaugucuucauaaa

SEQ ID NO: 2825393 - RNA, 23 nt, Human
acccuaaugucuucauaaaguac

SEQ ID NO: 2825394 - RNA, 13 nt, Human
acccuaccugugc

SEQ ID NO: 2825395 - RNA, 17 nt, Human
acccuaccugugccuga

SEQ ID NO: 2825396 - RNA, 16 nt, Human
acccuaccugugccug

SEQ ID NO: 2825397 - RNA, 12 nt, Human
acccguuccaaa

SEQ ID NO: 2825398 - RNA, 13 nt, Human
acccguuccaaaa

SEQ ID NO: 2825399 - RNA, 16 nt, Human
acccgugagcgccugu

SEQ ID NO: 2825400 - RNA, 17 nt, Human
acccgugagcgccugug

SEQ ID NO: 2825401 - RNA, 19 nt, Human
acccgugagcgccugugca

SEQ ID NO: 2825402 - RNA, 12 nt, Human
accucaggcagc

SEQ ID NO: 2825403 - RNA, 15 nt, Human
accucaggcagcuca

SEQ ID NO: 2825404 - RNA, 17 nt, Human
accucaggcacuagccu

SEQ ID NO: 2825405 - RNA, 18 nt, Human
accucaggcacuagccuu

SEQ ID NO: 2825406 - RNA, 19 nt, Human
accucaggcacuagccuuu

SEQ ID NO: 2825407 - RNA, 12 nt, Human
accucaggaaag

SEQ ID NO: 2825408 - RNA, 16 nt, Human
accucaggaaagaaua

SEQ ID NO: 2825409 - RNA, 17 nt, Human
accucaggaaagaauag

SEQ ID NO: 2825410 - RNA, 23 nt, Human
accucaggaaagaauagaaagaa

SEQ ID NO: 2825411 - RNA, 15 nt, Human
accguggcccugccc

SEQ ID NO: 2825412 - RNA, 19 nt, Human
accguggcccugcccucuc

SEQ ID NO: 2825413 - RNA, 20 nt, Human
accguggcccugcccucucc

SEQ ID NO: 2825414 - RNA, 21 nt, Human
accguggcccugcccucuccu

SEQ ID NO: 2825415 - RNA, 23 nt, Human
accucagccugcacagugucccc

SEQ ID NO: 2825416 - RNA, 20 nt, Human
accucagccugcacaguguc

SEQ ID NO: 2825417 - RNA, 12 nt, Human
accucagccugc

SEQ ID NO: 2825418 - RNA, 21 nt, Human
accucaggugauccacccacc

SEQ ID NO: 2825419 - RNA, 20 nt, Human
accucaggugauccacccac

SEQ ID NO: 2825420 - RNA, 15 nt, Human
accucaggcaggaag

SEQ ID NO: 2825421 - RNA, 12 nt, Human
accucaggcagg

SEQ ID NO: 2825422 - RNA, 16 nt, Human
accucaggcagcucaa

SEQ ID NO: 2825423 - RNA, 17 nt, Human
accucaggcagcucaag

SEQ ID NO: 2825424 - RNA, 11 nt, Human
accucauguuu

SEQ ID NO: 2825425 - RNA, 15 nt, Human
accucauguuuauga

SEQ ID NO: 2825426 - RNA, 18 nt, Human
accucauguuuaugaaaa

SEQ ID NO: 2825427 - RNA, 19 nt, Human
accucauguuuaugaaaau

SEQ ID NO: 2825428 - RNA, 20 nt, Human
accucauguuuaugaaaaua

SEQ ID NO: 2825429 - RNA, 21 nt, Human
accucauuaaccgaugcuuua

SEQ ID NO: 2825430 - RNA, 21 nt, Human
accucaggccaggugcagugg

SEQ ID NO: 2825431 - RNA, 23 nt, Human
accucaggcacuagccuuuggcu

SEQ ID NO: 2825432 - RNA, 20 nt, Human
accucaggccaggugcagug

SEQ ID NO: 2825433 - RNA, 13 nt, Human
accucaggccagg

SEQ ID NO: 2825434 - RNA, 16 nt, Human
accgggcacucagaag

SEQ ID NO: 2825435 - RNA, 20 nt, Human
accgggccacagagaaagua

SEQ ID NO: 2825436 - RNA, 14 nt, Human
accgggcacucaga

SEQ ID NO: 2825437 - RNA, 12 nt, Human
accgggcacuca

SEQ ID NO: 2825438 - RNA, 11 nt, Human
accucagccuc

SEQ ID NO: 2825439 - RNA, 12 nt, Human
accucagccucc

SEQ ID NO: 2825440 - RNA, 19 nt, Human
accgugccuggccacgccc

SEQ ID NO: 2825441 - RNA, 23 nt, Human
accgggcugggagcucugcagag

SEQ ID NO: 2825442 - RNA, 18 nt, Human
accgggaauaaccuucca

SEQ ID NO: 2825443 - RNA, 22 nt, Human
accgggccaguaucuauauaug

SEQ ID NO: 2825444 - RNA, 21 nt, Human
accgggcugggagcucugcag

SEQ ID NO: 2825445 - RNA, 17 nt, Human
accucauugacaagaac

SEQ ID NO: 2825446 - RNA, 19 nt, Human
accuccaacagaacuaaau

SEQ ID NO: 2825447 - RNA, 23 nt, Human
accuccaacagaacuaaauguuc

SEQ ID NO: 2825448 - RNA, 12 nt, Human
acugguggcccg

SEQ ID NO: 2825449 - RNA, 13 nt, Human
acuggugcacuuu

SEQ ID NO: 2825450 - RNA, 16 nt, Human
acuggugcacuuugua

SEQ ID NO: 2825451 - RNA, 18 nt, Human
acuggugcacuuuguaaa

SEQ ID NO: 2825452 - RNA, 20 nt, Human
acuggugcacuuuguaaauu

SEQ ID NO: 2825453 - RNA, 21 nt, Human
acuggugcacuuuguaaauuc

SEQ ID NO: 2825454 - RNA, 22 nt, Human
acuggugcacuuuguaaauucc

SEQ ID NO: 2825455 - RNA, 21 nt, Human
acuggaguggcucgccaggcc

SEQ ID NO: 2825456 - RNA, 13 nt, Human
acuggagucugga

SEQ ID NO: 2825457 - RNA, 15 nt, Human
acuggagucuggagu

SEQ ID NO: 2825458 - RNA, 18 nt, Human
acugcuuuuuuuuuucca

SEQ ID NO: 2825459 - RNA, 19 nt, Human
acugcuuuuuuuuuuccag

SEQ ID NO: 2825460 - RNA, 21 nt, Human
acugcuuuuuuuuuuccagca

SEQ ID NO: 2825461 - RNA, 18 nt, Human
acuggaacggugaaggug

SEQ ID NO: 2825462 - RNA, 21 nt, Human
acuggaacggugaaggugaca

SEQ ID NO: 2825463 - RNA, 16 nt, Human
acuggagcccaggagu

SEQ ID NO: 2825464 - RNA, 21 nt, Human
acugccauguacuaguuuuag

SEQ ID NO: 2825465 - RNA, 17 nt, Human
acugccauuauuuucug

SEQ ID NO: 2825466 - RNA, 18 nt, Human
acugccauuauuuucugu

SEQ ID NO: 2825467 - RNA, 20 nt, Human
acugccauuauuuucuguca

SEQ ID NO: 2825468 - RNA, 21 nt, Human
acugccauuauuuucugucag

SEQ ID NO: 2825469 - RNA, 22 nt, Human
acugccauuauuuucugucaga

SEQ ID NO: 2825470 - RNA, 23 nt, Human
acugccauuauuuucugucagau

SEQ ID NO: 2825471 - RNA, 20 nt, Human
acugccgugcauuagcacag

SEQ ID NO: 2825472 - RNA, 19 nt, Human
acugcccaggccugccugu

SEQ ID NO: 2825473 - RNA, 16 nt, Human
acugugccaugugcca

SEQ ID NO: 2825474 - RNA, 22 nt, Human
acuguaacugugucaugauuca

SEQ ID NO: 2825475 - RNA, 21 nt, Human
acugucuuuggaaaaauguuu

SEQ ID NO: 2825476 - RNA, 22 nt, Human
acugucuuuggaaaaauguuug

SEQ ID NO: 2825477 - RNA, 23 nt, Human
acugucuuuggaaaaauguuugu

SEQ ID NO: 2825478 - RNA, 18 nt, Human
acugugccaugugccagg

SEQ ID NO: 2825479 - RNA, 17 nt, Human
acugugccaugugccag

SEQ ID NO: 2825480 - RNA, 17 nt, Human
acuguaaaccaauuuuu

SEQ ID NO: 2825481 - RNA, 18 nt, Human
acuguaaaaaaugugugu

SEQ ID NO: 2825482 - RNA, 17 nt, Human
acuguaacauauucugu

SEQ ID NO: 2825483 - RNA, 18 nt, Human
acuguaaauaaaaagaaa

SEQ ID NO: 2825484 - RNA, 16 nt, Human
acuguaaauaugaauc

SEQ ID NO: 2825485 - RNA, 17 nt, Human
acuguaaauaugaaucu

SEQ ID NO: 2825486 - RNA, 19 nt, Human
acuuaaaaaaaaaaaaaag

SEQ ID NO: 2825487 - RNA, 20 nt, Human
acuuaaaaaaaaaaaaaagc

SEQ ID NO: 2825488 - RNA, 21 nt, Human
acuuaaaaaaaaaaaaaagcu

SEQ ID NO: 2825489 - RNA, 22 nt, Human
acuuaaaaaaaaaaaaaagcuu

SEQ ID NO: 2825490 - RNA, 19 nt, Human
acuuaaaaauguaaauauu

SEQ ID NO: 2825491 - RNA, 23 nt, Human
acuuaaaaauguaaauauucuau

SEQ ID NO: 2825492 - RNA, 14 nt, Human
acuuaaaaauguaa

SEQ ID NO: 2825493 - RNA, 16 nt, Human
acuuaaaaauguaaau

SEQ ID NO: 2825494 - RNA, 17 nt, Human
acuuaaaaauguaaaua

SEQ ID NO: 2825495 - RNA, 18 nt, Human
acuuaaaaauguaaauau

SEQ ID NO: 2825496 - RNA, 22 nt, Human
acuuaaaauaggggauauuuaa

SEQ ID NO: 2825497 - RNA, 23 nt, Human
acuuaaaauaggggauauuuaag

SEQ ID NO: 2825498 - RNA, 12 nt, Human
acuguuuuucca

SEQ ID NO: 2825499 - RNA, 19 nt, Human
acuguuuuuccauaguuuu

SEQ ID NO: 2825500 - RNA, 21 nt, Human
acuguuuuuccauaguuuuga

SEQ ID NO: 2825501 - RNA, 22 nt, Human
acuguuuuuccauaguuuugau

SEQ ID NO: 2825502 - RNA, 19 nt, Human
acuguuuuuagacaccuuc

SEQ ID NO: 2825503 - RNA, 18 nt, Human
acuucagaugggaggaaa

SEQ ID NO: 2825504 - RNA, 12 nt, Human
acuucagcaaga

SEQ ID NO: 2825505 - RNA, 14 nt, Human
acuucagcaagaga

SEQ ID NO: 2825506 - RNA, 15 nt, Human
acuucagcaagagag

SEQ ID NO: 2825507 - RNA, 16 nt, Human
acuucagcaagagaga

SEQ ID NO: 2825508 - RNA, 17 nt, Human
acuucagcaagagagaa

SEQ ID NO: 2825509 - RNA, 18 nt, Human
acuucagcaagagagaac

SEQ ID NO: 2825510 - RNA, 19 nt, Human
acuucagcaagagagaacc

SEQ ID NO: 2825511 - RNA, 21 nt, Human
acuucagcaagagagaaccua

SEQ ID NO: 2825512 - RNA, 10 nt, Human
acuucagcac

SEQ ID NO: 2825513 - RNA, 11 nt, Human
acuucagcacc

SEQ ID NO: 2825514 - RNA, 16 nt, Human
acuucuugcccugggg

SEQ ID NO: 2825515 - RNA, 18 nt, Human
acuucuugcccuggggau

SEQ ID NO: 2825516 - RNA, 22 nt, Human
acuucuuggcuuggugaggaaa

SEQ ID NO: 2825517 - RNA, 12 nt, Human
acuucuugucag

SEQ ID NO: 2825518 - RNA, 13 nt, Human
acuucuugucaga

SEQ ID NO: 2825519 - RNA, 15 nt, Human
acuucuugucagaca

SEQ ID NO: 2825520 - RNA, 16 nt, Human
acuucuugucagacau

SEQ ID NO: 2825521 - RNA, 17 nt, Human
acuucuugucagacaua

SEQ ID NO: 2825522 - RNA, 19 nt, Human
acuucuugucagacauaaa

SEQ ID NO: 2825523 - RNA, 20 nt, Human
acuucuugucagacauaaag

SEQ ID NO: 2825524 - RNA, 21 nt, Human
acuucuugucagacauaaagc

SEQ ID NO: 2825525 - RNA, 22 nt, Human
acuucuugucagacauaaagcc

SEQ ID NO: 2825526 - RNA, 23 nt, Human
acuucuugucagacauaaagcca

SEQ ID NO: 2825527 - RNA, 24 nt, Human
acuucuugucagacauaaagccau

SEQ ID NO: 2825528 - RNA, 16 nt, Human
acuugggugacggcag

SEQ ID NO: 2825529 - RNA, 20 nt, Human
acuucuuuugcucuuagcug

SEQ ID NO: 2825530 - RNA, 20 nt, Human
acuuguacaaaauaaacaaa

SEQ ID NO: 2825531 - RNA, 18 nt, Human
acuuguacaaaauaaaca

SEQ ID NO: 2825532 - RNA, 14 nt, Human
acuuguacaaaaua

SEQ ID NO: 2825533 - RNA, 19 nt, Human
acuugguccaacugcaacu

SEQ ID NO: 2825534 - RNA, 20 nt, Human
acuugguccaacugcaacuc

SEQ ID NO: 2825535 - RNA, 19 nt, Human
acuuggucugccaggcccc

SEQ ID NO: 2825536 - RNA, 11 nt, Human
acuuguagcug

SEQ ID NO: 2825537 - RNA, 14 nt, Human
acuuguagcuguaa

SEQ ID NO: 2825538 - RNA, 16 nt, Human
acuuguagcuguaaaa

SEQ ID NO: 2825539 - RNA, 17 nt, Human
acuuguagcuguaaaac

SEQ ID NO: 2825540 - RNA, 21 nt, Human
acuuguagcuguaaaacgcug

SEQ ID NO: 2825541 - RNA, 14 nt, Human
acuuguaggauaag

SEQ ID NO: 2825542 - RNA, 23 nt, Human
acuuguaggauaagugaaaugga

SEQ ID NO: 2825543 - RNA, 14 nt, Human
acuuguauaaaugu

SEQ ID NO: 2825544 - RNA, 15 nt, Human
acuuguauaaaugua

SEQ ID NO: 2825545 - RNA, 19 nt, Human
acuuguauaaauguauaua

SEQ ID NO: 2825546 - RNA, 20 nt, Human
acuuguauaaauguauauac

SEQ ID NO: 2825547 - RNA, 21 nt, Human
acuuguauaaauguauauaca

SEQ ID NO: 2825548 - RNA, 22 nt, Human
acuugggggaacgaugugucug

SEQ ID NO: 2825549 - RNA, 13 nt, Human
acuccggcccucc

SEQ ID NO: 2825550 - RNA, 20 nt, Human
acuccggauugcguuccucc

SEQ ID NO: 2825551 - RNA, 23 nt, Human
acuccggauugcguuccuccccg

SEQ ID NO: 2825552 - RNA, 12 nt, Human
acuccgccccca

SEQ ID NO: 2825553 - RNA, 13 nt, Human
acuccgcccccag

SEQ ID NO: 2825554 - RNA, 15 nt, Human
acuccgcccccagcc

SEQ ID NO: 2825555 - RNA, 16 nt, Human
acuccgcccccagccu

SEQ ID NO: 2825556 - RNA, 17 nt, Human
acuccgcccccagccua

SEQ ID NO: 2825557 - RNA, 18 nt, Human
acuccgcccccagccuau

SEQ ID NO: 2825558 - RNA, 21 nt, Human
acuccgcccccagccuaugag

SEQ ID NO: 2825559 - RNA, 14 nt, Human
acucccugcagaug

SEQ ID NO: 2825560 - RNA, 21 nt, Human
acucccucucaggauccaagc

SEQ ID NO: 2825561 - RNA, 13 nt, Human
acucccucucagg

SEQ ID NO: 2825562 - RNA, 18 nt, Human
acucccugccccccagcc

SEQ ID NO: 2825563 - RNA, 17 nt, Human
acucccugcagaugcca

SEQ ID NO: 2825564 - RNA, 13 nt, Human
acucccuucccau

SEQ ID NO: 2825565 - RNA, 21 nt, Human
acucccuucccaugacccagg

SEQ ID NO: 2825566 - RNA, 23 nt, Human
acucccuucccaugacccaggcu

SEQ ID NO: 2825567 - RNA, 22 nt, Human
acucccuccucaccucuggacu

SEQ ID NO: 2825568 - RNA, 20 nt, Human
acucccuccucaccucugga

SEQ ID NO: 2825569 - RNA, 19 nt, Human
acucccuccucaccucugg

SEQ ID NO: 2825570 - RNA, 16 nt, Human
acucccuccucaccuc

SEQ ID NO: 2825571 - RNA, 13 nt, Human
acucccuccucac

SEQ ID NO: 2825572 - RNA, 15 nt, Human
acucccuccucaccu

SEQ ID NO: 2825573 - RNA, 14 nt, Human
acuccccaaggaag

SEQ ID NO: 2825574 - RNA, 19 nt, Human
acuccccaaggaagagcca

SEQ ID NO: 2825575 - RNA, 19 nt, Human
acucccacccagucucugc

SEQ ID NO: 2825576 - RNA, 20 nt, Human
acucccacccagucucugcu

SEQ ID NO: 2825577 - RNA, 22 nt, Human
acucccacccagucucugcucc

SEQ ID NO: 2825578 - RNA, 15 nt, Human
acucccaagcuggac

SEQ ID NO: 2825579 - RNA, 12 nt, Human
acuccauuccca

SEQ ID NO: 2825580 - RNA, 14 nt, Human
acuccauucccaac

SEQ ID NO: 2825581 - RNA, 18 nt, Human
acuccauucccaacuaga

SEQ ID NO: 2825582 - RNA, 22 nt, Human
acuccauucccaacuagacauu

SEQ ID NO: 2825583 - RNA, 22 nt, Human
acucccaguccaaauguccucc

SEQ ID NO: 2825584 - RNA, 15 nt, Human
acucccaguccccag

SEQ ID NO: 2825585 - RNA, 16 nt, Human
acucccaucaccucua

SEQ ID NO: 2825586 - RNA, 13 nt, Human
acucccaggcagc

SEQ ID NO: 2825587 - RNA, 13 nt, Human
acucccaugaagc

SEQ ID NO: 2825588 - RNA, 14 nt, Human
acucccaugaagcc

SEQ ID NO: 2825589 - RNA, 15 nt, Human
acucccaugaagccu

SEQ ID NO: 2825590 - RNA, 16 nt, Human
acucccaugaagccuu

SEQ ID NO: 2825591 - RNA, 17 nt, Human
acucccaugaagccuuu

SEQ ID NO: 2825592 - RNA, 18 nt, Human
acucccaugaagccuuuu

SEQ ID NO: 2825593 - RNA, 20 nt, Human
acucccaugaagccuuuuga

SEQ ID NO: 2825594 - RNA, 22 nt, Human
acucccaugaagccuuuugaaa

SEQ ID NO: 2825595 - RNA, 21 nt, Human
acuccggugugccugcagccc

SEQ ID NO: 2825596 - RNA, 20 nt, Human
acuccggugugccugcagcc

SEQ ID NO: 2825597 - RNA, 19 nt, Human
acuccggugugccugcagc

SEQ ID NO: 2825598 - RNA, 14 nt, Human
acuccggcccuccu

SEQ ID NO: 2825599 - RNA, 15 nt, Human
acuccggcccuccua

SEQ ID NO: 2825600 - RNA, 16 nt, Human
acuccggugugccugc

SEQ ID NO: 2825601 - RNA, 15 nt, Human
acuccggugugccug

SEQ ID NO: 2825602 - RNA, 17 nt, Human
acuccuaaaccuuugcc

SEQ ID NO: 2825603 - RNA, 15 nt, Human
acucuacagaggcca

SEQ ID NO: 2825604 - RNA, 14 nt, Human
acugauauauuuuc

SEQ ID NO: 2825605 - RNA, 13 nt, Human
acugauauucaga

SEQ ID NO: 2825606 - RNA, 15 nt, Human
acugauauucagaau

SEQ ID NO: 2825607 - RNA, 16 nt, Human
acugauauucagaauu

SEQ ID NO: 2825608 - RNA, 23 nt, Human
acugaugggcaacccccagccug

SEQ ID NO: 2825609 - RNA, 22 nt, Human
acugauuugcaauaaaaaugau

SEQ ID NO: 2825610 - RNA, 13 nt, Human
acugacacaggaa

SEQ ID NO: 2825611 - RNA, 20 nt, Human
acugacacaggaaaccaaca

SEQ ID NO: 2825612 - RNA, 21 nt, Human
acugacacaggaaaccaacac

SEQ ID NO: 2825613 - RNA, 13 nt, Human
acugacacaaagg

SEQ ID NO: 2825614 - RNA, 14 nt, Human
acugacacaaagga

SEQ ID NO: 2825615 - RNA, 16 nt, Human
acugacacaaaggaag

SEQ ID NO: 2825616 - RNA, 17 nt, Human
acugacacaaaggaagu

SEQ ID NO: 2825617 - RNA, 15 nt, Human
acugaauuuguacuu

SEQ ID NO: 2825618 - RNA, 18 nt, Human
acugacauuguuggccaa

SEQ ID NO: 2825619 - RNA, 17 nt, Human
acugacauuguuggcca

SEQ ID NO: 2825620 - RNA, 20 nt, Human
acugacacucccacccaguc

SEQ ID NO: 2825621 - RNA, 12 nt, Human
acugacagcaug

SEQ ID NO: 2825622 - RNA, 13 nt, Human
acugacagcaugu

SEQ ID NO: 2825623 - RNA, 20 nt, Human
acugacagcaugugcccucc

SEQ ID NO: 2825624 - RNA, 18 nt, Human
acugacagccucccaccc

SEQ ID NO: 2825625 - RNA, 23 nt, Human
acugacaugauuagcagaagaaa

SEQ ID NO: 2825626 - RNA, 21 nt, Human
acugaauuaaucaucuauaaa

SEQ ID NO: 2825627 - RNA, 13 nt, Human
acugaauuaauca

SEQ ID NO: 2825628 - RNA, 20 nt, Human
acugaaugggaucaugaaag

SEQ ID NO: 2825629 - RNA, 21 nt, Human
acugaaugggaucaugaaagu

SEQ ID NO: 2825630 - RNA, 19 nt, Human
acugaauguuuauuccuug

SEQ ID NO: 2825631 - RNA, 19 nt, Human
acucuacccucccaccccc

SEQ ID NO: 2825632 - RNA, 18 nt, Human
acucuacccucccacccc

SEQ ID NO: 2825633 - RNA, 16 nt, Human
acucuacccucccacc

SEQ ID NO: 2825634 - RNA, 15 nt, Human
acucuacccucccac

SEQ ID NO: 2825635 - RNA, 13 nt, Human
acucuacccuccc

SEQ ID NO: 2825636 - RNA, 17 nt, Human
acucuaccagugcaggc

SEQ ID NO: 2825637 - RNA, 18 nt, Human
acucuaccagugcaggcu

SEQ ID NO: 2825638 - RNA, 22 nt, Human
acucuaccagugcaggcuggcc

SEQ ID NO: 2825639 - RNA, 15 nt, Human
acugauuuuugugau

SEQ ID NO: 2825640 - RNA, 14 nt, Human
acugauuuuuguga

SEQ ID NO: 2825641 - RNA, 18 nt, Human
acugauguacaauuaaaa

SEQ ID NO: 2825642 - RNA, 23 nt, Human
auaaaaauauuguguugugaaug

SEQ ID NO: 2825643 - RNA, 22 nt, Human
auaaaaauauuguguugugaau

SEQ ID NO: 2825644 - RNA, 23 nt, Human
auaaaaacauugccuuugaaugu

SEQ ID NO: 2825645 - RNA, 19 nt, Human
auaaaaaucauggcaacau

SEQ ID NO: 2825646 - RNA, 12 nt, Human
auaaaaaugaca

SEQ ID NO: 2825647 - RNA, 13 nt, Human
auaaaaaugacag

SEQ ID NO: 2825648 - RNA, 13 nt, Human
auaaaacaaaggg

SEQ ID NO: 2825649 - RNA, 12 nt, Human
auaaaacaggua

SEQ ID NO: 2825650 - RNA, 14 nt, Human
auaaaacagcuuug

SEQ ID NO: 2825651 - RNA, 12 nt, Human
auaaaaaaugga

SEQ ID NO: 2825652 - RNA, 15 nt, Human
auaaaaaauuaugac

SEQ ID NO: 2825653 - RNA, 20 nt, Human
auaaaaagacauucuuccaa

SEQ ID NO: 2825654 - RNA, 13 nt, Human
auaaaaacuugaa

SEQ ID NO: 2825655 - RNA, 20 nt, Human
auaaaaacuugaaaauauau

SEQ ID NO: 2825656 - RNA, 16 nt, Human
auaaaaacccacaaaa

SEQ ID NO: 2825657 - RNA, 18 nt, Human
auaaaaacccacaaaaau

SEQ ID NO: 2825658 - RNA, 14 nt, Human
auaaaaaaauaaaa

SEQ ID NO: 2825659 - RNA, 14 nt, Human
auaaaaaagaaauc

SEQ ID NO: 2825660 - RNA, 11 nt, Human
auaaaaaauaa

SEQ ID NO: 2825661 - RNA, 19 nt, Human
auaaaaaauauucuuguca

SEQ ID NO: 2825662 - RNA, 17 nt, Human
auaaaaaaacaaucauu

SEQ ID NO: 2825663 - RNA, 19 nt, Human
auaaaaaaacaaucauuug

SEQ ID NO: 2825664 - RNA, 20 nt, Human
aguuugaugucauuaaugug

SEQ ID NO: 2825665 - RNA, 15 nt, Human
aguuugcauuccuga

SEQ ID NO: 2825666 - RNA, 20 nt, Human
aguuugcauuccugauauga

SEQ ID NO: 2825667 - RNA, 21 nt, Human
aguuugcccugguuucacugg

SEQ ID NO: 2825668 - RNA, 12 nt, Human
aguuugcccugg

SEQ ID NO: 2825669 - RNA, 20 nt, Human
aguuugaucacacuauuuua

SEQ ID NO: 2825670 - RNA, 17 nt, Human
aguuugaggcugcagcg

SEQ ID NO: 2825671 - RNA, 14 nt, Human
aguuugaggcugca

SEQ ID NO: 2825672 - RNA, 14 nt, Human
aguuucuuagcuuu

SEQ ID NO: 2825673 - RNA, 14 nt, Human
aguuucuguuugau

SEQ ID NO: 2825674 - RNA, 17 nt, Human
aguuucuguuugauucu

SEQ ID NO: 2825675 - RNA, 18 nt, Human
aguuucuguuugauucuu

SEQ ID NO: 2825676 - RNA, 19 nt, Human
aguuucuguuugauucuuu

SEQ ID NO: 2825677 - RNA, 17 nt, Human
aguuucuguccugcugg

SEQ ID NO: 2825678 - RNA, 13 nt, Human
aguuaauuuaucu

SEQ ID NO: 2825679 - RNA, 15 nt, Human
aguuaauuuaucuaa

SEQ ID NO: 2825680 - RNA, 18 nt, Human
aguuaauuuaucuaaauu

SEQ ID NO: 2825681 - RNA, 14 nt, Human
aguuaauuagcauu

SEQ ID NO: 2825682 - RNA, 19 nt, Human
aguuaauuagcauucuggc

SEQ ID NO: 2825683 - RNA, 20 nt, Human
aguuaacuauugcauuuaua

SEQ ID NO: 2825684 - RNA, 24 nt, Human
aguuaacuauugcauuuauaugua

SEQ ID NO: 2825685 - RNA, 15 nt, Human
aguuaacaucaugaa

SEQ ID NO: 2825686 - RNA, 21 nt, Human
aguuaacaucaugaauuuauu

SEQ ID NO: 2825687 - RNA, 15 nt, Human
aguuaacuauugcau

SEQ ID NO: 2825688 - RNA, 19 nt, Human
aguuaacuauugcauuuau

SEQ ID NO: 2825689 - RNA, 17 nt, Human
aguuaacuauugcauuu

SEQ ID NO: 2825690 - RNA, 21 nt, Human
aguuaaauagaguauaugcac

SEQ ID NO: 2825691 - RNA, 23 nt, Human
aguuaaauagaguauaugcacuu

SEQ ID NO: 2825692 - RNA, 14 nt, Human
aguguuuuggacuc

SEQ ID NO: 2825693 - RNA, 15 nt, Human
aguguuuuggacucc

SEQ ID NO: 2825694 - RNA, 18 nt, Human
aguguuuuggacuccauc

SEQ ID NO: 2825695 - RNA, 19 nt, Human
aguguuuuggacuccaucu

SEQ ID NO: 2825696 - RNA, 20 nt, Human
aguguuuuggacuccaucuc

SEQ ID NO: 2825697 - RNA, 21 nt, Human
aguguuuuggacuccaucucu

SEQ ID NO: 2825698 - RNA, 22 nt, Human
aguguuuuggacuccaucucuc

SEQ ID NO: 2825699 - RNA, 23 nt, Human
aguguuuuggacuccaucucuca

SEQ ID NO: 2825700 - RNA, 12 nt, Human
aguguuuggggg

SEQ ID NO: 2825701 - RNA, 22 nt, Human
aguguuugggggacguuucuca

SEQ ID NO: 2825702 - RNA, 23 nt, Human
aguguuugggggacguuucucau

SEQ ID NO: 2825703 - RNA, 21 nt, Human
aguguuucuguuauuaacaaa

SEQ ID NO: 2825704 - RNA, 20 nt, Human
aguguuuggugcucauuuaa

SEQ ID NO: 2825705 - RNA, 14 nt, Human
aguguuuuaaauuc

SEQ ID NO: 2825706 - RNA, 15 nt, Human
aguguuuuaaauucu

SEQ ID NO: 2825707 - RNA, 17 nt, Human
aguguuuuaaauucuga

SEQ ID NO: 2825708 - RNA, 18 nt, Human
aguguuuuaaauucugag

SEQ ID NO: 2825709 - RNA, 19 nt, Human
aguguuuuaaauucugaga

SEQ ID NO: 2825710 - RNA, 17 nt, Human
aguguuuuaagaaaugu

SEQ ID NO: 2825711 - RNA, 19 nt, Human
aguguuuuaagaaauguag

SEQ ID NO: 2825712 - RNA, 21 nt, Human
aguguuuuaagaaauguaguu

SEQ ID NO: 2825713 - RNA, 19 nt, Human
aguggccccuuaggccagu

SEQ ID NO: 2825714 - RNA, 15 nt, Human
aguguuucuguuauu

SEQ ID NO: 2825715 - RNA, 14 nt, Human
agugcucaucuguu

SEQ ID NO: 2825716 - RNA, 14 nt, Human
aguguuucuguuau

SEQ ID NO: 2825717 - RNA, 14 nt, Human
aguggccacucagc

SEQ ID NO: 2825718 - RNA, 14 nt, Human
agugcuccccucug

SEQ ID NO: 2825719 - RNA, 18 nt, Human
agugcuccccucugaaag

SEQ ID NO: 2825720 - RNA, 22 nt, Human
aguggcauguuuugugcauuug

SEQ ID NO: 2825721 - RNA, 14 nt, Human
aguucauacccugu

SEQ ID NO: 2825722 - RNA, 18 nt, Human
aguucauaccuaaguacu

SEQ ID NO: 2825723 - RNA, 20 nt, Human
aguucauaccuaaguacugu

SEQ ID NO: 2825724 - RNA, 21 nt, Human
aguucauaccuaaguacugua

SEQ ID NO: 2825725 - RNA, 22 nt, Human
aguucauaccuaaguacuguaa

SEQ ID NO: 2825726 - RNA, 20 nt, Human
aguucauauuccauauuuau

SEQ ID NO: 2825727 - RNA, 19 nt, Human
aguucauauuccauauuua

SEQ ID NO: 2825728 - RNA, 18 nt, Human
aguucaucccagccccaa

SEQ ID NO: 2825729 - RNA, 19 nt, Human
aguucaucccagccccaau

SEQ ID NO: 2825730 - RNA, 20 nt, Human
aguucaucccagccccaauu

SEQ ID NO: 2825731 - RNA, 20 nt, Human
aguuccaagagucuaaagau

SEQ ID NO: 2825732 - RNA, 20 nt, Human
aguuccaaguccaauaagac

SEQ ID NO: 2825733 - RNA, 14 nt, Human
aguuccacagauug

SEQ ID NO: 2825734 - RNA, 18 nt, Human
aguuccacagauuguuuc

SEQ ID NO: 2825735 - RNA, 21 nt, Human
aguuccacagauuguuucuau

SEQ ID NO: 2825736 - RNA, 20 nt, Human
aguuguucaauaauaaauau

SEQ ID NO: 2825737 - RNA, 15 nt, Human
aguuguucaacuauu

SEQ ID NO: 2825738 - RNA, 17 nt, Human
aguuguucaacuauuuu

SEQ ID NO: 2825739 - RNA, 20 nt, Human
aguuguucaacuauuuuauu

SEQ ID NO: 2825740 - RNA, 19 nt, Human
aguugaaugacaacagaag

SEQ ID NO: 2825741 - RNA, 17 nt, Human
aguugaagacuuuguuu

SEQ ID NO: 2825742 - RNA, 15 nt, Human
aguugaaguuuagga

SEQ ID NO: 2825743 - RNA, 15 nt, Human
auacaauucuacauu

SEQ ID NO: 2825744 - RNA, 20 nt, Human
auacaauguauuuauuuaaa

SEQ ID NO: 2825745 - RNA, 21 nt, Human
auacaauguauuuauuuaaaa

SEQ ID NO: 2825746 - RNA, 18 nt, Human
auacaauguauuuauuua

SEQ ID NO: 2825747 - RNA, 23 nt, Human
auaauguuaaauuuguaaguuuc

SEQ ID NO: 2825748 - RNA, 18 nt, Human
auaauguuaaccaaggaa

SEQ ID NO: 2825749 - RNA, 19 nt, Human
auaauguuaaccaaggaaa

SEQ ID NO: 2825750 - RNA, 20 nt, Human
auaauguuaaccaaggaaau

SEQ ID NO: 2825751 - RNA, 16 nt, Human
auaauguuaaauuugu

SEQ ID NO: 2825752 - RNA, 18 nt, Human
auaauguuaaauuuguaa

SEQ ID NO: 2825753 - RNA, 19 nt, Human
auaauguuaaauuuguaag

SEQ ID NO: 2825754 - RNA, 22 nt, Human
auaauguuaaauuuguaaguuu

SEQ ID NO: 2825755 - RNA, 14 nt, Human
auaagugaaaaucu

SEQ ID NO: 2825756 - RNA, 16 nt, Human
auaagugaaaaucuua

SEQ ID NO: 2825757 - RNA, 21 nt, Human
auaagugaaauggauacuaca

SEQ ID NO: 2825758 - RNA, 22 nt, Human
auaagugaaauggauacuacau

SEQ ID NO: 2825759 - RNA, 17 nt, Human
auaaguaauucaagaaa

SEQ ID NO: 2825760 - RNA, 15 nt, Human
auaagugaagugaua

SEQ ID NO: 2825761 - RNA, 15 nt, Human
auaagugaauaauaa

SEQ ID NO: 2825762 - RNA, 14 nt, Human
auaagugaauuuau

SEQ ID NO: 2825763 - RNA, 15 nt, Human
auaagugaauuuaua

SEQ ID NO: 2825764 - RNA, 19 nt, Human
auaagugcacacagaaaua

SEQ ID NO: 2825765 - RNA, 20 nt, Human
auaagugcacacagaaauau

SEQ ID NO: 2825766 - RNA, 21 nt, Human
auaagugcacacagaaauaua

SEQ ID NO: 2825767 - RNA, 23 nt, Human
auaagugcacacagaaauauaua

SEQ ID NO: 2825768 - RNA, 10 nt, Human
auaauguuaa

SEQ ID NO: 2825769 - RNA, 11 nt, Human
auaauguuaaa

SEQ ID NO: 2825770 - RNA, 12 nt, Human
auaauguuaaau

SEQ ID NO: 2825771 - RNA, 12 nt, Human
auaaugugugua

SEQ ID NO: 2825772 - RNA, 13 nt, Human
auaauguguguau

SEQ ID NO: 2825773 - RNA, 14 nt, Human
auaauguguguaug

SEQ ID NO: 2825774 - RNA, 15 nt, Human
auaauguguguaugu

SEQ ID NO: 2825775 - RNA, 16 nt, Human
auaauguguguaugug

SEQ ID NO: 2825776 - RNA, 18 nt, Human
auaauguguguaugugua

SEQ ID NO: 2825777 - RNA, 19 nt, Human
auaauguguguauguguau

SEQ ID NO: 2825778 - RNA, 15 nt, Human
auaaguaaaugcuag

SEQ ID NO: 2825779 - RNA, 23 nt, Human
auaagguuucguuucuguauaca

SEQ ID NO: 2825780 - RNA, 14 nt, Human
auaagcucuaguuc

SEQ ID NO: 2825781 - RNA, 19 nt, Human
auaagguuucguuucugua

SEQ ID NO: 2825782 - RNA, 20 nt, Human
auaagguuucguuucuguau

SEQ ID NO: 2825783 - RNA, 20 nt, Human
auaagguguuuucuguguaa

SEQ ID NO: 2825784 - RNA, 21 nt, Human
auaagguguuuucuguguaac

SEQ ID NO: 2825785 - RNA, 22 nt, Human
auaagguguuuucuguguaacc

SEQ ID NO: 2825786 - RNA, 21 nt, Human
auaagcuaacaccagacagac

SEQ ID NO: 2825787 - RNA, 18 nt, Human
auaagcggcguaaguuua

SEQ ID NO: 2825788 - RNA, 15 nt, Human
auaaagagagaaaaa

SEQ ID NO: 2825789 - RNA, 11 nt, Human
auaaagacagg

SEQ ID NO: 2825790 - RNA, 16 nt, Human
auaaagacccaggggg

SEQ ID NO: 2825791 - RNA, 19 nt, Human
auaaagaggcguugcuuuc

SEQ ID NO: 2825792 - RNA, 21 nt, Human
auaaagagagaaaaacaaauu

SEQ ID NO: 2825793 - RNA, 13 nt, Human
auaaagaguuaga

SEQ ID NO: 2825794 - RNA, 14 nt, Human
auacacauauaccu

SEQ ID NO: 2825795 - RNA, 21 nt, Human
auacacauauaccuauaaugu

SEQ ID NO: 2825796 - RNA, 23 nt, Human
auacacauauaccuauaaugugu

SEQ ID NO: 2825797 - RNA, 14 nt, Human
auacaccgggccug

SEQ ID NO: 2825798 - RNA, 18 nt, Human
auacaccgggccuggaga

SEQ ID NO: 2825799 - RNA, 23 nt, Human
auacacccccucuucugagcaca

SEQ ID NO: 2825800 - RNA, 22 nt, Human
auacacccccucuucugagcac

SEQ ID NO: 2825801 - RNA, 15 nt, Human
auacacgaaagagag

SEQ ID NO: 2825802 - RNA, 19 nt, Human
auacacuaaccaaaucucu

SEQ ID NO: 2825803 - RNA, 22 nt, Human
auacacuauuugugagcaaagg

SEQ ID NO: 2825804 - RNA, 19 nt, Human
auacacuaauuccuuucua

SEQ ID NO: 2825805 - RNA, 22 nt, Human
auaaguaacuuuauucuugaaa

SEQ ID NO: 2825806 - RNA, 12 nt, Human
auacuugaacaa

SEQ ID NO: 2825807 - RNA, 13 nt, Human
auacuugaacaaa

SEQ ID NO: 2825808 - RNA, 14 nt, Human
auacuugaacaaaa

SEQ ID NO: 2825809 - RNA, 15 nt, Human
auacuugaacaaaag

SEQ ID NO: 2825810 - RNA, 17 nt, Human
auacuugaacaaaaggg

SEQ ID NO: 2825811 - RNA, 18 nt, Human
auacuugaacaaaagggu

SEQ ID NO: 2825812 - RNA, 22 nt, Human
auacuugaacaaaagggucaga

SEQ ID NO: 2825813 - RNA, 16 nt, Human
auagcaacacucuaua

SEQ ID NO: 2825814 - RNA, 15 nt, Human
auagcaacaggaaaa

SEQ ID NO: 2825815 - RNA, 17 nt, Human
auagaaaacugaaaauc

SEQ ID NO: 2825816 - RNA, 21 nt, Human
auagaaaaguagacaaucauu

SEQ ID NO: 2825817 - RNA, 10 nt, Human
auagaaaaau

SEQ ID NO: 2825818 - RNA, 23 nt, Human
auagaaaaauucagcaaaccauu

SEQ ID NO: 2825819 - RNA, 21 nt, Human
auacuuuuuuuucuuuaaaaa

SEQ ID NO: 2825820 - RNA, 14 nt, Human
auacuuuuuuucac

SEQ ID NO: 2825821 - RNA, 15 nt, Human
auacuuuuuuucaca

SEQ ID NO: 2825822 - RNA, 20 nt, Human
auacuuuuuacaauuaaaaa

SEQ ID NO: 2825823 - RNA, 13 nt, Human
auacuuuuucuaa

SEQ ID NO: 2825824 - RNA, 17 nt, Human
auacuuuuucuaaugag

SEQ ID NO: 2825825 - RNA, 15 nt, Human
auacuuuuucuuuug

SEQ ID NO: 2825826 - RNA, 17 nt, Human
auacuuuuucuuuugua

SEQ ID NO: 2825827 - RNA, 18 nt, Human
auacuuuuucuuuuguaa

SEQ ID NO: 2825828 - RNA, 21 nt, Human
auacuuuuucuuuuguaagug

SEQ ID NO: 2825829 - RNA, 13 nt, Human
auacuuuuuacaa

SEQ ID NO: 2825830 - RNA, 12 nt, Human
auacuuuuccuu

SEQ ID NO: 2825831 - RNA, 13 nt, Human
auacuuuuccuua

SEQ ID NO: 2825832 - RNA, 19 nt, Human
auacuuuuccuuaccuuua

SEQ ID NO: 2825833 - RNA, 21 nt, Human
auacuuaaauggaaaaaauga

SEQ ID NO: 2825834 - RNA, 22 nt, Human
auacugugugcuuguuuuauaa

SEQ ID NO: 2825835 - RNA, 14 nt, Human
auacuguguggaac

SEQ ID NO: 2825836 - RNA, 12 nt, Human
aguaccuugcuu

SEQ ID NO: 2825837 - RNA, 13 nt, Human
aguaccuugcuuc

SEQ ID NO: 2825838 - RNA, 14 nt, Human
aguaccuugcuucu

SEQ ID NO: 2825839 - RNA, 15 nt, Human
aguacuggcauggua

SEQ ID NO: 2825840 - RNA, 21 nt, Human
aguacuucuccacccugcucu

SEQ ID NO: 2825841 - RNA, 17 nt, Human
aguacugcucuuguuuc

SEQ ID NO: 2825842 - RNA, 17 nt, Human
aguauaucauguaaaga

SEQ ID NO: 2825843 - RNA, 21 nt, Human
aguauaucauguaaagaaaug

SEQ ID NO: 2825844 - RNA, 20 nt, Human
aguauaucccaagugcacuu

SEQ ID NO: 2825845 - RNA, 17 nt, Human
aguauagccuauggcag

SEQ ID NO: 2825846 - RNA, 19 nt, Human
aguacuucuccacccugcu

SEQ ID NO: 2825847 - RNA, 20 nt, Human
aguacuucuccacccugcuc

SEQ ID NO: 2825848 - RNA, 14 nt, Human
aguaacugacauga

SEQ ID NO: 2825849 - RNA, 15 nt, Human
aguauauuuaaacuc

SEQ ID NO: 2825850 - RNA, 22 nt, Human
aguauauuucuucguucuuuuu

SEQ ID NO: 2825851 - RNA, 12 nt, Human
aguauaugugag

SEQ ID NO: 2825852 - RNA, 15 nt, Human
aguauauguucccuc

SEQ ID NO: 2825853 - RNA, 19 nt, Human
aguaacuucuuauggaauu

SEQ ID NO: 2825854 - RNA, 17 nt, Human
aguaacuucuuauggaa

SEQ ID NO: 2825855 - RNA, 14 nt, Human
aguaacuuggcuuu

SEQ ID NO: 2825856 - RNA, 15 nt, Human
aguaacuuggcuuuc

SEQ ID NO: 2825857 - RNA, 18 nt, Human
aguaacuuggcuuucauu

SEQ ID NO: 2825858 - RNA, 14 nt, Human
aguaacuuuaugug

SEQ ID NO: 2825859 - RNA, 16 nt, Human
aguaacuuuaugugua

SEQ ID NO: 2825860 - RNA, 17 nt, Human
aguaacuuuauguguaa

SEQ ID NO: 2825861 - RNA, 15 nt, Human
aguaccugaaaagua

SEQ ID NO: 2825862 - RNA, 14 nt, Human
aguaccugaaaagu

SEQ ID NO: 2825863 - RNA, 20 nt, Human
aguaacuuuauguguaaaua

SEQ ID NO: 2825864 - RNA, 15 nt, Human
aguaacuuuauucuu

SEQ ID NO: 2825865 - RNA, 19 nt, Human
aguaacuuuauguguaaau

SEQ ID NO: 2825866 - RNA, 13 nt, Human
aguaagaaaagug

SEQ ID NO: 2825867 - RNA, 19 nt, Human
aguaacugccaucaagaug

SEQ ID NO: 2825868 - RNA, 22 nt, Human
aguaacucauuuguuaaaauua

SEQ ID NO: 2825869 - RNA, 11 nt, Human
aguaacuccca

SEQ ID NO: 2825870 - RNA, 12 nt, Human
aguaacucauuu

SEQ ID NO: 2825871 - RNA, 21 nt, Human
aguaacgggucguaaugacuu

SEQ ID NO: 2825872 - RNA, 22 nt, Human
aguaacgggucguaaugacuua

SEQ ID NO: 2825873 - RNA, 15 nt, Human
aguaacuauuauuau

SEQ ID NO: 2825874 - RNA, 22 nt, Human
aguaacucauaaucuauaaaca

SEQ ID NO: 2825875 - RNA, 12 nt, Human
aguaaccugggu

SEQ ID NO: 2825876 - RNA, 18 nt, Human
aguaaaguguucugccag

SEQ ID NO: 2825877 - RNA, 19 nt, Human
aguaaagugauaauuucug

SEQ ID NO: 2825878 - RNA, 18 nt, Human
aguaaagugauaauuucu

SEQ ID NO: 2825879 - RNA, 12 nt, Human
aguaaagaacug

SEQ ID NO: 2825880 - RNA, 23 nt, Human
aguaaagaacugcacaugaagaa

SEQ ID NO: 2825881 - RNA, 13 nt, Human
aguaaagccauua

SEQ ID NO: 2825882 - RNA, 20 nt, Human
aguaaagccauuaaaugaau

SEQ ID NO: 2825883 - RNA, 21 nt, Human
aguaaagccauuaaaugaaua

SEQ ID NO: 2825884 - RNA, 23 nt, Human
aguaaagccauuaaaugaauauu

SEQ ID NO: 2825885 - RNA, 17 nt, Human
aguaaagccguuguuua

SEQ ID NO: 2825886 - RNA, 18 nt, Human
aguaaagccguuguuuac

SEQ ID NO: 2825887 - RNA, 22 nt, Human
aguaaauaucccaaacugugau

SEQ ID NO: 2825888 - RNA, 13 nt, Human
aguaaauauugag

SEQ ID NO: 2825889 - RNA, 18 nt, Human
aguaaauauugaggcuuu

SEQ ID NO: 2825890 - RNA, 21 nt, Human
aguaaauauugaggcuuugug

SEQ ID NO: 2825891 - RNA, 24 nt, Human
aguaaacuccccuuucccucgcua

SEQ ID NO: 2825892 - RNA, 15 nt, Human
aguaaacugcagucc

SEQ ID NO: 2825893 - RNA, 13 nt, Human
aguaaaauuuauu

SEQ ID NO: 2825894 - RNA, 15 nt, Human
aguaaaauuuauuuc

SEQ ID NO: 2825895 - RNA, 16 nt, Human
aguaaaauuuauuuca

SEQ ID NO: 2825896 - RNA, 17 nt, Human
aguaaaauuuauuucau

SEQ ID NO: 2825897 - RNA, 16 nt, Human
aggggccauuuggcau

SEQ ID NO: 2825898 - RNA, 22 nt, Human
aggggccagaggaacuguccag

SEQ ID NO: 2825899 - RNA, 16 nt, Human
agugauguaccaugaa

SEQ ID NO: 2825900 - RNA, 14 nt, Human
agugauguuuuuau

SEQ ID NO: 2825901 - RNA, 17 nt, Human
agugauguuuuuaugau

SEQ ID NO: 2825902 - RNA, 23 nt, Human
agugauguuuuuaugauaucccu

SEQ ID NO: 2825903 - RNA, 20 nt, Human
agugauggguuaguggaugg

SEQ ID NO: 2825904 - RNA, 22 nt, Human
agugauccucccaccucagccu

SEQ ID NO: 2825905 - RNA, 20 nt, Human
agugauccucccaccucagc

SEQ ID NO: 2825906 - RNA, 19 nt, Human
agugauccucccaccucag

SEQ ID NO: 2825907 - RNA, 20 nt, Human
agugauucuccugccucagc

SEQ ID NO: 2825908 - RNA, 18 nt, Human
agugauucuccugccuca

SEQ ID NO: 2825909 - RNA, 19 nt, Human
agugauucuccugccucag

SEQ ID NO: 2825910 - RNA, 22 nt, Human
agugccuuucugcaguuuuuca

SEQ ID NO: 2825911 - RNA, 19 nt, Human
agugccuuuugcagaagag

SEQ ID NO: 2825912 - RNA, 20 nt, Human
agugccuuuugcagaagagg

SEQ ID NO: 2825913 - RNA, 22 nt, Human
agugccuuuugcagaagagggu

SEQ ID NO: 2825914 - RNA, 14 nt, Human
agugcgugcucagu

SEQ ID NO: 2825915 - RNA, 13 nt, Human
agugcgugaaugu

SEQ ID NO: 2825916 - RNA, 14 nt, Human
agugcgugaaugua

SEQ ID NO: 2825917 - RNA, 17 nt, Human
agugcgugaauguaugu

SEQ ID NO: 2825918 - RNA, 16 nt, Human
agugcgugccguguga

SEQ ID NO: 2825919 - RNA, 13 nt, Human
agugcguguguag

SEQ ID NO: 2825920 - RNA, 16 nt, Human
agugcguguguagagu

SEQ ID NO: 2825921 - RNA, 18 nt, Human
agugcguguguagaguua

SEQ ID NO: 2825922 - RNA, 22 nt, Human
agugcguguguagaguuaagaa

SEQ ID NO: 2825923 - RNA, 13 nt, Human
agugcuaagguuc

SEQ ID NO: 2825924 - RNA, 14 nt, Human
agugcuaagguucu

SEQ ID NO: 2825925 - RNA, 15 nt, Human
agugcuaagguucua

SEQ ID NO: 2825926 - RNA, 16 nt, Human
agugcuaagguucuaa

SEQ ID NO: 2825927 - RNA, 17 nt, Human
agugcuaagguucuaag

SEQ ID NO: 2825928 - RNA, 18 nt, Human
agugcuaagguucuaagg

SEQ ID NO: 2825929 - RNA, 21 nt, Human
agugcuaagguucuaaggccu

SEQ ID NO: 2825930 - RNA, 14 nt, Human
agugcuacauaaau

SEQ ID NO: 2825931 - RNA, 17 nt, Human
agugcuacauaaauugg

SEQ ID NO: 2825932 - RNA, 21 nt, Human
agugcuagugagcugggcaug

SEQ ID NO: 2825933 - RNA, 23 nt, Human
agugcuagugagcugggcauggu

SEQ ID NO: 2825934 - RNA, 13 nt, Human
agugcuauauaua

SEQ ID NO: 2825935 - RNA, 14 nt, Human
agugcuauauauau

SEQ ID NO: 2825936 - RNA, 15 nt, Human
agugcuauauauaua

SEQ ID NO: 2825937 - RNA, 16 nt, Human
agugcuauauauauaa

SEQ ID NO: 2825938 - RNA, 17 nt, Human
agugcuauauauauaaa

SEQ ID NO: 2825939 - RNA, 19 nt, Human
agugcuauauauauaaaua

SEQ ID NO: 2825940 - RNA, 22 nt, Human
agugcuauauauauaaauauuu

SEQ ID NO: 2825941 - RNA, 23 nt, Human
agugcuauauauauaaauauuug

SEQ ID NO: 2825942 - RNA, 15 nt, Human
agugcuaugaagaca

SEQ ID NO: 2825943 - RNA, 14 nt, Human
agugacagaggcag

SEQ ID NO: 2825944 - RNA, 17 nt, Human
agugaaugccagugugc

SEQ ID NO: 2825945 - RNA, 13 nt, Human
agugaaugaaaga

SEQ ID NO: 2825946 - RNA, 14 nt, Human
agugaaugaaagau

SEQ ID NO: 2825947 - RNA, 15 nt, Human
agugaaugaaagauu

SEQ ID NO: 2825948 - RNA, 13 nt, Human
agugaaugaaaca

SEQ ID NO: 2825949 - RNA, 15 nt, Human
agugaauaugccugu

SEQ ID NO: 2825950 - RNA, 19 nt, Human
agugacagaggcagcccca

SEQ ID NO: 2825951 - RNA, 16 nt, Human
agugacagaggcagcc

SEQ ID NO: 2825952 - RNA, 13 nt, Human
agucauuuacuaa

SEQ ID NO: 2825953 - RNA, 14 nt, Human
agucauuuacuaaa

SEQ ID NO: 2825954 - RNA, 15 nt, Human
agucauuuacuaaac

SEQ ID NO: 2825955 - RNA, 17 nt, Human
agucauuuacuaaacau

SEQ ID NO: 2825956 - RNA, 18 nt, Human
agucauuuacuaaacaua

SEQ ID NO: 2825957 - RNA, 19 nt, Human
agucauuuacuaaacauau

SEQ ID NO: 2825958 - RNA, 23 nt, Human
agucauuuacuaaacauaugauu

SEQ ID NO: 2825959 - RNA, 15 nt, Human
agucauuuauuuuaa

SEQ ID NO: 2825960 - RNA, 16 nt, Human
agucauuuauuuuaaa

SEQ ID NO: 2825961 - RNA, 20 nt, Human
agucauuuauuuuaaaaaau

SEQ ID NO: 2825962 - RNA, 22 nt, Human
agucauuuauuuuaaaaaauga

SEQ ID NO: 2825963 - RNA, 13 nt, Human
agucauuguaugu

SEQ ID NO: 2825964 - RNA, 18 nt, Human
agucauuguauguuauua

SEQ ID NO: 2825965 - RNA, 17 nt, Human
agucauuuaacugaaga

SEQ ID NO: 2825966 - RNA, 22 nt, Human
agucauuuaacugaagauguug

SEQ ID NO: 2825967 - RNA, 14 nt, Human
aguccucuuuucug

SEQ ID NO: 2825968 - RNA, 20 nt, Human
aguccucuggguaggaauca

SEQ ID NO: 2825969 - RNA, 13 nt, Human
aguccugugaauu

SEQ ID NO: 2825970 - RNA, 14 nt, Human
aguccugugaauuu

SEQ ID NO: 2825971 - RNA, 23 nt, Human
aguccugugaauuucuucacugu

SEQ ID NO: 2825972 - RNA, 15 nt, Human
aguccugugcugaau

SEQ ID NO: 2825973 - RNA, 14 nt, Human
aguccuuaaaaauc

SEQ ID NO: 2825974 - RNA, 21 nt, Human
aguccuuaaaaaucacacugu

SEQ ID NO: 2825975 - RNA, 14 nt, Human
aguccucugaauga

SEQ ID NO: 2825976 - RNA, 20 nt, Human
aguccucucccaaguccaca

SEQ ID NO: 2825977 - RNA, 12 nt, Human
aguccucugaau

SEQ ID NO: 2825978 - RNA, 21 nt, Human
aguccucguagccaucucucu

SEQ ID NO: 2825979 - RNA, 23 nt, Human
aguccuccccucacagccucuga

SEQ ID NO: 2825980 - RNA, 17 nt, Human
aguccucguagccaucu

SEQ ID NO: 2825981 - RNA, 15 nt, Human
aguccucguagccau

SEQ ID NO: 2825982 - RNA, 20 nt, Human
aguccuccccucacagccuc

SEQ ID NO: 2825983 - RNA, 21 nt, Human
aguccuccccucacagccucu

SEQ ID NO: 2825984 - RNA, 22 nt, Human
aguccuccccucacagccucug

SEQ ID NO: 2825985 - RNA, 19 nt, Human
aguccuccgguugcauacu

SEQ ID NO: 2825986 - RNA, 23 nt, Human
aguccuccgguugcauacuggac

SEQ ID NO: 2825987 - RNA, 13 nt, Human
agucuggaguggg

SEQ ID NO: 2825988 - RNA, 16 nt, Human
agucuggagugggcag

SEQ ID NO: 2825989 - RNA, 18 nt, Human
agucuggagugggcagag

SEQ ID NO: 2825990 - RNA, 19 nt, Human
agucuggagugggcagagc

SEQ ID NO: 2825991 - RNA, 21 nt, Human
agucugcagauagaaagcauu

SEQ ID NO: 2825992 - RNA, 21 nt, Human
agucuguaucaaacccacgau

SEQ ID NO: 2825993 - RNA, 21 nt, Human
agucuguauuuuuaaagcaug

SEQ ID NO: 2825994 - RNA, 13 nt, Human
agucuguccugug

SEQ ID NO: 2825995 - RNA, 15 nt, Human
agucuguccugugac

SEQ ID NO: 2825996 - RNA, 16 nt, Human
agucuguccugugacg

SEQ ID NO: 2825997 - RNA, 17 nt, Human
agucuggugggaggacg

SEQ ID NO: 2825998 - RNA, 14 nt, Human
agucugggacacaa

SEQ ID NO: 2825999 - RNA, 21 nt, Human
agucugggacacaaaacuccg

SEQ ID NO: 2826000 - RNA, 22 nt, Human
agucugggacacaaaacuccgc

SEQ ID NO: 2826001 - RNA, 17 nt, Human
agucugucucaaaagaa

SEQ ID NO: 2826002 - RNA, 14 nt, Human
agucugucuucugu

SEQ ID NO: 2826003 - RNA, 15 nt, Human
agucugucuucugua

SEQ ID NO: 2826004 - RNA, 16 nt, Human
agucugucuucuguau

SEQ ID NO: 2826005 - RNA, 17 nt, Human
agucugucuucuguaua

SEQ ID NO: 2826006 - RNA, 18 nt, Human
agucugucuucuguauau

SEQ ID NO: 2826007 - RNA, 20 nt, Human
agucugucuucuguauauaa

SEQ ID NO: 2826008 - RNA, 22 nt, Human
agucugucuucuguauauaaau

SEQ ID NO: 2826009 - RNA, 14 nt, Human
agugaauaaacuuc

SEQ ID NO: 2826010 - RNA, 15 nt, Human
agugaauaaacuuca

SEQ ID NO: 2826011 - RNA, 16 nt, Human
agugaauaaacuucag

SEQ ID NO: 2826012 - RNA, 17 nt, Human
agugaauaaacuucagc

SEQ ID NO: 2826013 - RNA, 18 nt, Human
agugaauaaacuucagca

SEQ ID NO: 2826014 - RNA, 19 nt, Human
agugaauaaacuucagcac

SEQ ID NO: 2826015 - RNA, 20 nt, Human
agugaauaaacuucagcacc

SEQ ID NO: 2826016 - RNA, 21 nt, Human
agugaauaaacuucagcacca

SEQ ID NO: 2826017 - RNA, 16 nt, Human
agucgaggacagggag

SEQ ID NO: 2826018 - RNA, 17 nt, Human
aguccuuuauguggaaa

SEQ ID NO: 2826019 - RNA, 16 nt, Human
aguccuuuuuuuccau

SEQ ID NO: 2826020 - RNA, 21 nt, Human
aguccuuuuuuuccaucuuua

SEQ ID NO: 2826021 - RNA, 18 nt, Human
agucgaauuaauagcuuu

SEQ ID NO: 2826022 - RNA, 21 nt, Human
agucgaauuaauagcuuuuau

SEQ ID NO: 2826023 - RNA, 16 nt, Human
aguccugugaauuucu

SEQ ID NO: 2826024 - RNA, 24 nt, Human
aguccuuaaaauguaagauuauag

SEQ ID NO: 2826025 - RNA, 14 nt, Human
aguccuuuaugugg

SEQ ID NO: 2826026 - RNA, 18 nt, Human
aguccuuuaauuaagacu

SEQ ID NO: 2826027 - RNA, 20 nt, Human
aguccuuuuacuacagcuau

SEQ ID NO: 2826028 - RNA, 23 nt, Human
aguccuuuuacuacagcuaugaa

SEQ ID NO: 2826029 - RNA, 12 nt, Human
aguccuuuucuu

SEQ ID NO: 2826030 - RNA, 12 nt, Human
aguccuuuugua

SEQ ID NO: 2826031 - RNA, 14 nt, Human
aguccuuuuguaaa

SEQ ID NO: 2826032 - RNA, 15 nt, Human
aguccuuuuguaaag

SEQ ID NO: 2826033 - RNA, 16 nt, Human
aguccuuuuguaaagu

SEQ ID NO: 2826034 - RNA, 22 nt, Human
aguccuuuuguaaagugaagaa

SEQ ID NO: 2826035 - RNA, 23 nt, Human
aguccuuuuguaaagugaagaau

SEQ ID NO: 2826036 - RNA, 18 nt, Human
agucuggaaugcaguggu

SEQ ID NO: 2826037 - RNA, 20 nt, Human
agucugauucccaagcucug

SEQ ID NO: 2826038 - RNA, 22 nt, Human
agucugauucccaagcucugcu

SEQ ID NO: 2826039 - RNA, 21 nt, Human
agucugauucccaagcucugc

SEQ ID NO: 2826040 - RNA, 13 nt, Human
aguaucagaauug

SEQ ID NO: 2826041 - RNA, 14 nt, Human
aguaucagaauuga

SEQ ID NO: 2826042 - RNA, 18 nt, Human
aguaucagaauugaaaca

SEQ ID NO: 2826043 - RNA, 15 nt, Human
aguaucaggucuccc

SEQ ID NO: 2826044 - RNA, 18 nt, Human
aguaucaggucucccacg

SEQ ID NO: 2826045 - RNA, 13 nt, Human
aguaucaguguuu

SEQ ID NO: 2826046 - RNA, 16 nt, Human
aguaucaguguuuuaa

SEQ ID NO: 2826047 - RNA, 17 nt, Human
aguaucaguguuuuaaa

SEQ ID NO: 2826048 - RNA, 18 nt, Human
aguaucaguguuuuaaau

SEQ ID NO: 2826049 - RNA, 20 nt, Human
aguaucaguguuuuaaauuc

SEQ ID NO: 2826050 - RNA, 21 nt, Human
aguaucaguguuuuaaauucu

SEQ ID NO: 2826051 - RNA, 22 nt, Human
aguaucaguguuuuaaauucug

SEQ ID NO: 2826052 - RNA, 21 nt, Human
aucaucccaucuaagcugcag

SEQ ID NO: 2826053 - RNA, 23 nt, Human
aucaucccaucuaagcugcagcu

SEQ ID NO: 2826054 - RNA, 17 nt, Human
aucauccugcagacaga

SEQ ID NO: 2826055 - RNA, 15 nt, Human
aucaucgaaaauuca

SEQ ID NO: 2826056 - RNA, 20 nt, Human
aucaucgaaaauucauuuca

SEQ ID NO: 2826057 - RNA, 13 nt, Human
aucaucgccagag

SEQ ID NO: 2826058 - RNA, 15 nt, Human
aucaucgccagaggu

SEQ ID NO: 2826059 - RNA, 16 nt, Human
aucaucgccagaggug

SEQ ID NO: 2826060 - RNA, 20 nt, Human
aucaucgccagaggugcuuc

SEQ ID NO: 2826061 - RNA, 22 nt, Human
aucaucgccagaggugcuucac

SEQ ID NO: 2826062 - RNA, 24 nt, Human
aucaucggagucagccaggagcug

SEQ ID NO: 2826063 - RNA, 14 nt, Human
aucauccagaaguu

SEQ ID NO: 2826064 - RNA, 15 nt, Human
aucaaaguucugcuu

SEQ ID NO: 2826065 - RNA, 16 nt, Human
aucaaaguucugcuuu

SEQ ID NO: 2826066 - RNA, 20 nt, Human
aucaaaguucugcuuucucc

SEQ ID NO: 2826067 - RNA, 23 nt, Human
aucaaaguucugcuuucucccca

SEQ ID NO: 2826068 - RNA, 13 nt, Human
aucaaaguauuug

SEQ ID NO: 2826069 - RNA, 20 nt, Human
aucaaagucaaaaauagcaa

SEQ ID NO: 2826070 - RNA, 19 nt, Human
aucaaauaaguauuuauaa

SEQ ID NO: 2826071 - RNA, 20 nt, Human
aucaaauaaguauuuauaau

SEQ ID NO: 2826072 - RNA, 17 nt, Human
aucaaauaaguauuuau

SEQ ID NO: 2826073 - RNA, 18 nt, Human
aucaaauaaguauuuaua

SEQ ID NO: 2826074 - RNA, 19 nt, Human
aucaugcuggaaccugcaa

SEQ ID NO: 2826075 - RNA, 22 nt, Human
aucaugcuggaaccugcaaaaa

SEQ ID NO: 2826076 - RNA, 14 nt, Human
aucaugcuuuaaag

SEQ ID NO: 2826077 - RNA, 17 nt, Human
aucaugcuuuaaagugu

SEQ ID NO: 2826078 - RNA, 20 nt, Human
aucaugcuuuaaaguguaau

SEQ ID NO: 2826079 - RNA, 22 nt, Human
aucaugcuuuaaaguguaauaa

SEQ ID NO: 2826080 - RNA, 18 nt, Human
aucaugcuuugaaaaauc

SEQ ID NO: 2826081 - RNA, 19 nt, Human
aucaugcccggucccaccc

SEQ ID NO: 2826082 - RNA, 21 nt, Human
aucaugcccggucccaccccu

SEQ ID NO: 2826083 - RNA, 23 nt, Human
aucaugcccggucccaccccucc

SEQ ID NO: 2826084 - RNA, 19 nt, Human
aucaucuaauucucugugg

SEQ ID NO: 2826085 - RNA, 13 nt, Human
aucaugacauguu

SEQ ID NO: 2826086 - RNA, 19 nt, Human
aucaugaauuuauugcaca

SEQ ID NO: 2826087 - RNA, 13 nt, Human
aucaugaauuuua

SEQ ID NO: 2826088 - RNA, 16 nt, Human
aucaugacauguuaua

SEQ ID NO: 2826089 - RNA, 18 nt, Human
aucaugacauguuauaua

SEQ ID NO: 2826090 - RNA, 22 nt, Human
aucaugcagcucaacuuucugu

SEQ ID NO: 2826091 - RNA, 14 nt, Human
auccagaugguggg

SEQ ID NO: 2826092 - RNA, 15 nt, Human
auccagaugguggga

SEQ ID NO: 2826093 - RNA, 20 nt, Human
auccagauggugggaugugg

SEQ ID NO: 2826094 - RNA, 18 nt, Human
auccagcaguacaauaaa

SEQ ID NO: 2826095 - RNA, 16 nt, Human
auccagcagucucugc

SEQ ID NO: 2826096 - RNA, 18 nt, Human
auccagcagucucugccu

SEQ ID NO: 2826097 - RNA, 19 nt, Human
auccagcagucucugccuu

SEQ ID NO: 2826098 - RNA, 12 nt, Human
auccacuuugca

SEQ ID NO: 2826099 - RNA, 21 nt, Human
auccacugugccaugugccag

SEQ ID NO: 2826100 - RNA, 23 nt, Human
auccacucuacccucccaccccc

SEQ ID NO: 2826101 - RNA, 22 nt, Human
auccacucuacccucccacccc

SEQ ID NO: 2826102 - RNA, 21 nt, Human
auccuucuggcagauucaaau

SEQ ID NO: 2826103 - RNA, 17 nt, Human
auccuuccucacaccag

SEQ ID NO: 2826104 - RNA, 14 nt, Human
aucccccuugccac

SEQ ID NO: 2826105 - RNA, 18 nt, Human
aucccccuugccacccca

SEQ ID NO: 2826106 - RNA, 15 nt, Human
auccuuccucuccuu

SEQ ID NO: 2826107 - RNA, 12 nt, Human
auccuuccuaua

SEQ ID NO: 2826108 - RNA, 14 nt, Human
auccuuccuauaac

SEQ ID NO: 2826109 - RNA, 15 nt, Human
auccuuccuauaacu

SEQ ID NO: 2826110 - RNA, 17 nt, Human
auccuuccuauaacuug

SEQ ID NO: 2826111 - RNA, 20 nt, Human
auccuuccuauaacuugaug

SEQ ID NO: 2826112 - RNA, 22 nt, Human
auccuuccuauaacuugaugca

SEQ ID NO: 2826113 - RNA, 19 nt, Human
auccuucgugaacaucccc

SEQ ID NO: 2826114 - RNA, 20 nt, Human
auccuucgugaacauccccu

SEQ ID NO: 2826115 - RNA, 23 nt, Human
auccuucgugaacauccccuccc

SEQ ID NO: 2826116 - RNA, 18 nt, Human
auccccaugccuguggcu

SEQ ID NO: 2826117 - RNA, 20 nt, Human
auccccaugccuguggcugc

SEQ ID NO: 2826118 - RNA, 13 nt, Human
aucccccaaaguu

SEQ ID NO: 2826119 - RNA, 19 nt, Human
auccagggcucugaccagu

SEQ ID NO: 2826120 - RNA, 14 nt, Human
auccccagucccaa

SEQ ID NO: 2826121 - RNA, 22 nt, Human
auccccaguucgccuggagccc

SEQ ID NO: 2826122 - RNA, 14 nt, Human
aucccccaggagaa

SEQ ID NO: 2826123 - RNA, 12 nt, Human
aucgaaaauuca

SEQ ID NO: 2826124 - RNA, 16 nt, Human
aucgaaaauucauuuc

SEQ ID NO: 2826125 - RNA, 17 nt, Human
aucgaaaauucauuuca

SEQ ID NO: 2826126 - RNA, 15 nt, Human
aucgaaccguuuuga

SEQ ID NO: 2826127 - RNA, 20 nt, Human
aucgaaauaacaauguuaag

SEQ ID NO: 2826128 - RNA, 22 nt, Human
aucgaaauaacaauguuaagga

SEQ ID NO: 2826129 - RNA, 13 nt, Human
aucgaaauaacaa

SEQ ID NO: 2826130 - RNA, 17 nt, Human
aucgaaauaacaauguu

SEQ ID NO: 2826131 - RNA, 18 nt, Human
aucgaaauaacaauguua

SEQ ID NO: 2826132 - RNA, 19 nt, Human
aucgaaauaacaauguuaa

SEQ ID NO: 2826133 - RNA, 23 nt, Human
aucgaaauaacaauguuaaggaa

SEQ ID NO: 2826134 - RNA, 14 nt, Human
aucgaccugccucg

SEQ ID NO: 2826135 - RNA, 20 nt, Human
aucgaaucuacuaauuccac

SEQ ID NO: 2826136 - RNA, 18 nt, Human
aucgaaucuacuaauucc

SEQ ID NO: 2826137 - RNA, 12 nt, Human
aucaaaaauaau

SEQ ID NO: 2826138 - RNA, 13 nt, Human
aucaaaaauaaug

SEQ ID NO: 2826139 - RNA, 19 nt, Human
aucaaaaauugaagagaga

SEQ ID NO: 2826140 - RNA, 16 nt, Human
aucaaaacaagugaaa

SEQ ID NO: 2826141 - RNA, 16 nt, Human
auauuuuuuuaauuua

SEQ ID NO: 2826142 - RNA, 17 nt, Human
auauuuuuuuaauuuaa

SEQ ID NO: 2826143 - RNA, 17 nt, Human
aucaaagaauaagaaaa

SEQ ID NO: 2826144 - RNA, 18 nt, Human
aucaaagagagaaaauaa

SEQ ID NO: 2826145 - RNA, 12 nt, Human
aucaaaggacac

SEQ ID NO: 2826146 - RNA, 19 nt, Human
aucaaaacucacaagugcu

SEQ ID NO: 2826147 - RNA, 17 nt, Human
auagcaauagcauggau

SEQ ID NO: 2826148 - RNA, 22 nt, Human
auagcaacuuuuguguaaugaa

SEQ ID NO: 2826149 - RNA, 17 nt, Human
auagcaagauugcuuaa

SEQ ID NO: 2826150 - RNA, 19 nt, Human
auagcaagacacaucccua

SEQ ID NO: 2826151 - RNA, 14 nt, Human
auagcaaauucaaa

SEQ ID NO: 2826152 - RNA, 20 nt, Human
auggcuuuauuuguuuuuuu

SEQ ID NO: 2826153 - RNA, 23 nt, Human
auggcuuuauuuguuuuuuuugu

SEQ ID NO: 2826154 - RNA, 15 nt, Human
auggcuuucagaaaa

SEQ ID NO: 2826155 - RNA, 16 nt, Human
auggcuuucagaaaac

SEQ ID NO: 2826156 - RNA, 21 nt, Human
auggcuuucagaaaacgggaa

SEQ ID NO: 2826157 - RNA, 23 nt, Human
auggcuuucagaaaacgggaagc

SEQ ID NO: 2826158 - RNA, 19 nt, Human
auggaguuaacaucaugaa

SEQ ID NO: 2826159 - RNA, 15 nt, Human
auggaguucuugugc

SEQ ID NO: 2826160 - RNA, 15 nt, Human
auggaguuucuaagg

SEQ ID NO: 2826161 - RNA, 16 nt, Human
auggaguuucuaaggu

SEQ ID NO: 2826162 - RNA, 20 nt, Human
auggauaaaauaaugcugca

SEQ ID NO: 2826163 - RNA, 21 nt, Human
auggauaaaauaaugcugcaa

SEQ ID NO: 2826164 - RNA, 13 nt, Human
auggaguuucuaa

SEQ ID NO: 2826165 - RNA, 14 nt, Human
auggaguuucuaag

SEQ ID NO: 2826166 - RNA, 23 nt, Human
augggaaaggaggcaugccucug

SEQ ID NO: 2826167 - RNA, 21 nt, Human
augggaacacuggcagacugu

SEQ ID NO: 2826168 - RNA, 11 nt, Human
augggaacauu

SEQ ID NO: 2826169 - RNA, 13 nt, Human
augggaacauuua

SEQ ID NO: 2826170 - RNA, 14 nt, Human
augggaacauuuau

SEQ ID NO: 2826171 - RNA, 15 nt, Human
augggaacauuuauu

SEQ ID NO: 2826172 - RNA, 21 nt, Human
augggaacauuuauuuuauga

SEQ ID NO: 2826173 - RNA, 23 nt, Human
augggaacauuuauuuuaugaga

SEQ ID NO: 2826174 - RNA, 19 nt, Human
augggacaaauugcacaga

SEQ ID NO: 2826175 - RNA, 21 nt, Human
augcuuuaggauguacaguua

SEQ ID NO: 2826176 - RNA, 13 nt, Human
augcucuucugug

SEQ ID NO: 2826177 - RNA, 14 nt, Human
augcuuugcuuugu

SEQ ID NO: 2826178 - RNA, 15 nt, Human
augcuuugcuuuguc

SEQ ID NO: 2826179 - RNA, 16 nt, Human
augcuuugcuuugucu

SEQ ID NO: 2826180 - RNA, 18 nt, Human
augcuuugcuuugucugg

SEQ ID NO: 2826181 - RNA, 22 nt, Human
augcuuugucuucagccucucc

SEQ ID NO: 2826182 - RNA, 22 nt, Human
augcuuugaaaaaucacuugau

SEQ ID NO: 2826183 - RNA, 11 nt, Human
auggagccagc

SEQ ID NO: 2826184 - RNA, 13 nt, Human
auggagcaagaga

SEQ ID NO: 2826185 - RNA, 19 nt, Human
auggagcaguacaugggaa

SEQ ID NO: 2826186 - RNA, 20 nt, Human
auggagauucaguuuucauu

SEQ ID NO: 2826187 - RNA, 23 nt, Human
auggagagcuggagccuggugcc

SEQ ID NO: 2826188 - RNA, 15 nt, Human
auggagccagcuccc

SEQ ID NO: 2826189 - RNA, 18 nt, Human
auggagccagcucccucu

SEQ ID NO: 2826190 - RNA, 19 nt, Human
auggagauucaguuuucau

SEQ ID NO: 2826191 - RNA, 13 nt, Human
auggagagcugga

SEQ ID NO: 2826192 - RNA, 18 nt, Human
augccugguggcagcugc

SEQ ID NO: 2826193 - RNA, 19 nt, Human
augccugguggcagcugcg

SEQ ID NO: 2826194 - RNA, 14 nt, Human
augccugguggcag

SEQ ID NO: 2826195 - RNA, 13 nt, Human
augccugguggca

SEQ ID NO: 2826196 - RNA, 12 nt, Human
augccugguggc

SEQ ID NO: 2826197 - RNA, 11 nt, Human
augccuggugg

SEQ ID NO: 2826198 - RNA, 16 nt, Human
augcaugucaaacaug

SEQ ID NO: 2826199 - RNA, 21 nt, Human
augccugguggcagcugcggu

SEQ ID NO: 2826200 - RNA, 22 nt, Human
augcaugucaaacaugagaugu

SEQ ID NO: 2826201 - RNA, 16 nt, Human
augccuguaauucagu

SEQ ID NO: 2826202 - RNA, 18 nt, Human
augccuguaauucagugu

SEQ ID NO: 2826203 - RNA, 16 nt, Human
augccuguccagccug

SEQ ID NO: 2826204 - RNA, 15 nt, Human
augcauaauucacau

SEQ ID NO: 2826205 - RNA, 23 nt, Human
augcauggagggcugcccuguac

SEQ ID NO: 2826206 - RNA, 14 nt, Human
augcauaaaugcau

SEQ ID NO: 2826207 - RNA, 23 nt, Human
augaagcauuuacuuuguguuca

SEQ ID NO: 2826208 - RNA, 16 nt, Human
augaaacucacaaaug

SEQ ID NO: 2826209 - RNA, 12 nt, Human
augaagccagcu

SEQ ID NO: 2826210 - RNA, 14 nt, Human
augaaagaauauau

SEQ ID NO: 2826211 - RNA, 15 nt, Human
augaaagaauauauu

SEQ ID NO: 2826212 - RNA, 18 nt, Human
augaaagaauauauuuau

SEQ ID NO: 2826213 - RNA, 22 nt, Human
augaagccuguggaugaucaau

SEQ ID NO: 2826214 - RNA, 11 nt, Human
augaagccuuu

SEQ ID NO: 2826215 - RNA, 14 nt, Human
augaagccuuuuga

SEQ ID NO: 2826216 - RNA, 16 nt, Human
augaagccuuuugaaa

SEQ ID NO: 2826217 - RNA, 17 nt, Human
augaagccuuuugaaag

SEQ ID NO: 2826218 - RNA, 20 nt, Human
augaagccuuuugaaaggga

SEQ ID NO: 2826219 - RNA, 19 nt, Human
augaagcgaaacacagaga

SEQ ID NO: 2826220 - RNA, 18 nt, Human
augaagccgaccuuagau

SEQ ID NO: 2826221 - RNA, 19 nt, Human
augaagccgaccuuagauu

SEQ ID NO: 2826222 - RNA, 23 nt, Human
augaagccgaccuuagauuuagu

SEQ ID NO: 2826223 - RNA, 17 nt, Human
augaagcccaagugaaa

SEQ ID NO: 2826224 - RNA, 15 nt, Human
augaagcccaaguga

SEQ ID NO: 2826225 - RNA, 12 nt, Human
augaagcccaag

SEQ ID NO: 2826226 - RNA, 13 nt, Human
augaauacaaauu

SEQ ID NO: 2826227 - RNA, 14 nt, Human
augaauacaaauuu

SEQ ID NO: 2826228 - RNA, 15 nt, Human
augaauacaaauuuu

SEQ ID NO: 2826229 - RNA, 13 nt, Human
augaauacagcag

SEQ ID NO: 2826230 - RNA, 15 nt, Human
augaauacagcagca

SEQ ID NO: 2826231 - RNA, 16 nt, Human
augaauacagcagcaa

SEQ ID NO: 2826232 - RNA, 17 nt, Human
augaauacagcagcaag

SEQ ID NO: 2826233 - RNA, 17 nt, Human
augaauaaagacaccua

SEQ ID NO: 2826234 - RNA, 17 nt, Human
augaccuuauccuuccu

SEQ ID NO: 2826235 - RNA, 21 nt, Human
augaccuuauccuuccucucc

SEQ ID NO: 2826236 - RNA, 13 nt, Human
augaauauauggc

SEQ ID NO: 2826237 - RNA, 20 nt, Human
augaauauauggcauuugca

SEQ ID NO: 2826238 - RNA, 22 nt, Human
augaauauauggcauuugcaga

SEQ ID NO: 2826239 - RNA, 23 nt, Human
augaauauauuuaagcaacaucu

SEQ ID NO: 2826240 - RNA, 19 nt, Human
augagccucagcauccugg

SEQ ID NO: 2826241 - RNA, 21 nt, Human
augagccucagcauccuggca

SEQ ID NO: 2826242 - RNA, 21 nt, Human
augaggaaaauaauguaauug

SEQ ID NO: 2826243 - RNA, 17 nt, Human
augagcugaucugcgga

SEQ ID NO: 2826244 - RNA, 15 nt, Human
agggaugggccuggc

SEQ ID NO: 2826245 - RNA, 16 nt, Human
agggaugggccuggca

SEQ ID NO: 2826246 - RNA, 17 nt, Human
agggaugggccuggcau

SEQ ID NO: 2826247 - RNA, 22 nt, Human
agggaugggccuggcauucuug

SEQ ID NO: 2826248 - RNA, 15 nt, Human
agggauucaggcugc

SEQ ID NO: 2826249 - RNA, 14 nt, Human
agggauucaggcug

SEQ ID NO: 2826250 - RNA, 13 nt, Human
agggauggugccc

SEQ ID NO: 2826251 - RNA, 18 nt, Human
agggauucacaucugcau

SEQ ID NO: 2826252 - RNA, 18 nt, Human
agggauucaggcugcuug

SEQ ID NO: 2826253 - RNA, 16 nt, Human
agggauucaggcugcu

SEQ ID NO: 2826254 - RNA, 19 nt, Human
agggauucaggcugcuugg

SEQ ID NO: 2826255 - RNA, 19 nt, Human
agggaugcugccugaguca

SEQ ID NO: 2826256 - RNA, 18 nt, Human
agggaugcugccugaguc

SEQ ID NO: 2826257 - RNA, 17 nt, Human
agggaugcugccugagu

SEQ ID NO: 2826258 - RNA, 16 nt, Human
agggaugcugccugag

SEQ ID NO: 2826259 - RNA, 15 nt, Human
agggaugacuaaaau

SEQ ID NO: 2826260 - RNA, 17 nt, Human
agggaugaaagagaagg

SEQ ID NO: 2826261 - RNA, 20 nt, Human
agggaugagcauggagcugg

SEQ ID NO: 2826262 - RNA, 21 nt, Human
agggaugagcauggagcuggc

SEQ ID NO: 2826263 - RNA, 22 nt, Human
agggaugacuaaaauauuuauu

SEQ ID NO: 2826264 - RNA, 19 nt, Human
agggaugagcauggagcug

SEQ ID NO: 2826265 - RNA, 16 nt, Human
agggauugcugccacu

SEQ ID NO: 2826266 - RNA, 20 nt, Human
agggcguucuuaggcugcug

SEQ ID NO: 2826267 - RNA, 21 nt, Human
agggcguucuuaggcugcugg

SEQ ID NO: 2826268 - RNA, 19 nt, Human
agggcuacccucccccagg

SEQ ID NO: 2826269 - RNA, 14 nt, Human
agggauuucuuagg

SEQ ID NO: 2826270 - RNA, 15 nt, Human
agggauuucuuaggg

SEQ ID NO: 2826271 - RNA, 13 nt, Human
agggauuucuuug

SEQ ID NO: 2826272 - RNA, 22 nt, Human
aggggcaucugccccuccccca

SEQ ID NO: 2826273 - RNA, 21 nt, Human
aggggcaucugccccuccccc

SEQ ID NO: 2826274 - RNA, 20 nt, Human
aggggcaucugccccucccc

SEQ ID NO: 2826275 - RNA, 19 nt, Human
aggggcaucugccccuccc

SEQ ID NO: 2826276 - RNA, 17 nt, Human
aggggcaucugccccuc

SEQ ID NO: 2826277 - RNA, 16 nt, Human
aggggcaucugccccu

SEQ ID NO: 2826278 - RNA, 16 nt, Human
agggcuagcaucccug

SEQ ID NO: 2826279 - RNA, 15 nt, Human
agggcuauggugugg

SEQ ID NO: 2826280 - RNA, 19 nt, Human
agggcuaugguguggacug

SEQ ID NO: 2826281 - RNA, 21 nt, Human
agggcuacugcagcuuuacau

SEQ ID NO: 2826282 - RNA, 22 nt, Human
agggacucugaagccucuggga

SEQ ID NO: 2826283 - RNA, 21 nt, Human
agggacucugaagccucuggg

SEQ ID NO: 2826284 - RNA, 20 nt, Human
agggacucugaagccucugg

SEQ ID NO: 2826285 - RNA, 19 nt, Human
agggaccaacugggcccaa

SEQ ID NO: 2826286 - RNA, 17 nt, Human
agggaccaacugggccc

SEQ ID NO: 2826287 - RNA, 16 nt, Human
agggaccaacugggcc

SEQ ID NO: 2826288 - RNA, 14 nt, Human
aggcuuacacccac

SEQ ID NO: 2826289 - RNA, 17 nt, Human
aggcuuaccaaaguauu

SEQ ID NO: 2826290 - RNA, 12 nt, Human
aggcuguuugcu

SEQ ID NO: 2826291 - RNA, 14 nt, Human
aggcuguuugcuuc

SEQ ID NO: 2826292 - RNA, 19 nt, Human
aggcuguuugcuucaccgu

SEQ ID NO: 2826293 - RNA, 17 nt, Human
aggcuuaauaaaaauga

SEQ ID NO: 2826294 - RNA, 19 nt, Human
aggcuuaauaaaaaugaca

SEQ ID NO: 2826295 - RNA, 20 nt, Human
aggcuuaauaaaaaugacag

SEQ ID NO: 2826296 - RNA, 21 nt, Human
aggcuuaauaaaaaugacaga

SEQ ID NO: 2826297 - RNA, 24 nt, Human
aggcuguaucccaugagccucagc

SEQ ID NO: 2826298 - RNA, 17 nt, Human
aggcugccaaggccaga

SEQ ID NO: 2826299 - RNA, 20 nt, Human
aggcuguucccauguagccc

SEQ ID NO: 2826300 - RNA, 16 nt, Human
aggcuguucugcacug

SEQ ID NO: 2826301 - RNA, 18 nt, Human
aggcuguucugcacugaa

SEQ ID NO: 2826302 - RNA, 19 nt, Human
aggcuguucugcacugaaa

SEQ ID NO: 2826303 - RNA, 20 nt, Human
aggcuguucugcacugaaaa

SEQ ID NO: 2826304 - RNA, 21 nt, Human
aggcuguucugcacugaaaag

SEQ ID NO: 2826305 - RNA, 23 nt, Human
aggcuguaucccaugagccucag

SEQ ID NO: 2826306 - RNA, 21 nt, Human
aggcugcagucagucaugaug

SEQ ID NO: 2826307 - RNA, 15 nt, Human
aggcugcagcgagcu

SEQ ID NO: 2826308 - RNA, 14 nt, Human
aggcugcagcugga

SEQ ID NO: 2826309 - RNA, 15 nt, Human
aggcugcagcuggac

SEQ ID NO: 2826310 - RNA, 16 nt, Human
aggcugcagcuggaca

SEQ ID NO: 2826311 - RNA, 17 nt, Human
aggcugcagcuggacag

SEQ ID NO: 2826312 - RNA, 18 nt, Human
aggcugcagcuggacaga

SEQ ID NO: 2826313 - RNA, 19 nt, Human
aggcugcagcuggacagag

SEQ ID NO: 2826314 - RNA, 20 nt, Human
aggcugcagcuggacagagg

SEQ ID NO: 2826315 - RNA, 21 nt, Human
aggcugcagcuggacagaggg

SEQ ID NO: 2826316 - RNA, 22 nt, Human
aggcugcagcuggacagagggg

SEQ ID NO: 2826317 - RNA, 18 nt, Human
aggcuaguccggacccac

SEQ ID NO: 2826318 - RNA, 22 nt, Human
aggcuaguccggacccaccuca

SEQ ID NO: 2826319 - RNA, 16 nt, Human
aggcucuucuccccag

SEQ ID NO: 2826320 - RNA, 17 nt, Human
aggcucuucuccccaga

SEQ ID NO: 2826321 - RNA, 18 nt, Human
aggcucuucuccccagag

SEQ ID NO: 2826322 - RNA, 13 nt, Human
aggcugaggcaca

SEQ ID NO: 2826323 - RNA, 14 nt, Human
aggcugaggcacaa

SEQ ID NO: 2826324 - RNA, 13 nt, Human
aggcugaggacuu

SEQ ID NO: 2826325 - RNA, 11 nt, Human
aggcugaggac

SEQ ID NO: 2826326 - RNA, 13 nt, Human
aggcucuucuccu

SEQ ID NO: 2826327 - RNA, 11 nt, Human
aggcugagccu

SEQ ID NO: 2826328 - RNA, 19 nt, Human
aggcucuucuccccagagu

SEQ ID NO: 2826329 - RNA, 13 nt, Human
aggcugagccuca

SEQ ID NO: 2826330 - RNA, 16 nt, Human
aggcuagcuggagccu

SEQ ID NO: 2826331 - RNA, 17 nt, Human
aggcuagcuggagccug

SEQ ID NO: 2826332 - RNA, 18 nt, Human
aggcuagcuggagccugg

SEQ ID NO: 2826333 - RNA, 19 nt, Human
aggccagggacaguaauaa

SEQ ID NO: 2826334 - RNA, 12 nt, Human
aggccaggccgg

SEQ ID NO: 2826335 - RNA, 17 nt, Human
aggccaugggccuccug

SEQ ID NO: 2826336 - RNA, 16 nt, Human
aggccaugggccuccu

SEQ ID NO: 2826337 - RNA, 14 nt, Human
aggccaugggccuc

SEQ ID NO: 2826338 - RNA, 22 nt, Human
aggcauguucucugaggacacu

SEQ ID NO: 2826339 - RNA, 20 nt, Human
aggcauguucucugaggaca

SEQ ID NO: 2826340 - RNA, 13 nt, Human
aggcauuaacaca

SEQ ID NO: 2826341 - RNA, 19 nt, Human
aggcauuaacacaaaggag

SEQ ID NO: 2826342 - RNA, 13 nt, Human
aggcauuaauguu

SEQ ID NO: 2826343 - RNA, 16 nt, Human
aggcauuaauguuucu

SEQ ID NO: 2826344 - RNA, 19 nt, Human
aggcauuaauguuucuauc

SEQ ID NO: 2826345 - RNA, 20 nt, Human
aggcauuaauguuucuaucu

SEQ ID NO: 2826346 - RNA, 21 nt, Human
aggcauuaauguuucuaucug

SEQ ID NO: 2826347 - RNA, 14 nt, Human
aggcauugaggaag

SEQ ID NO: 2826348 - RNA, 19 nt, Human
aggcauugaggaagagucu

SEQ ID NO: 2826349 - RNA, 17 nt, Human
aggcaugugugaaacau

SEQ ID NO: 2826350 - RNA, 18 nt, Human
aggcaugugugaaacaua

SEQ ID NO: 2826351 - RNA, 22 nt, Human
aggcaugugccacccacccaac

SEQ ID NO: 2826352 - RNA, 21 nt, Human
aggcaucucuguacuuugcuu

SEQ ID NO: 2826353 - RNA, 22 nt, Human
aggcaucucuguacuuugcuug

SEQ ID NO: 2826354 - RNA, 16 nt, Human
aggcaucugauuugca

SEQ ID NO: 2826355 - RNA, 21 nt, Human
aggcaugaagagcaaaaauau

SEQ ID NO: 2826356 - RNA, 20 nt, Human
aggcaugaguuacugugcau

SEQ ID NO: 2826357 - RNA, 13 nt, Human
aggcaugccucug

SEQ ID NO: 2826358 - RNA, 14 nt, Human
aggcaugccucuga

SEQ ID NO: 2826359 - RNA, 15 nt, Human
aggcaugccucugau

SEQ ID NO: 2826360 - RNA, 17 nt, Human
aggcaugccucugauau

SEQ ID NO: 2826361 - RNA, 18 nt, Human
aggcaugccucugauaug

SEQ ID NO: 2826362 - RNA, 21 nt, Human
aggcaugccucugauauggga

SEQ ID NO: 2826363 - RNA, 23 nt, Human
aggcaugccucugauaugggacu

SEQ ID NO: 2826364 - RNA, 19 nt, Human
aggcagccaaccuaagcaa

SEQ ID NO: 2826365 - RNA, 17 nt, Human
aggcaucgcaauguaag

SEQ ID NO: 2826366 - RNA, 13 nt, Human
aggcagauacagg

SEQ ID NO: 2826367 - RNA, 18 nt, Human
aggcagagggccuuugcu

SEQ ID NO: 2826368 - RNA, 19 nt, Human
aggcagaguuugccuuccu

SEQ ID NO: 2826369 - RNA, 14 nt, Human
aggcacuuuggggg

SEQ ID NO: 2826370 - RNA, 22 nt, Human
aggcacuuuggggguuugaggg

SEQ ID NO: 2826371 - RNA, 23 nt, Human
aggcacuuuggggguuugagggu

SEQ ID NO: 2826372 - RNA, 16 nt, Human
aggcagaaaauugcac

SEQ ID NO: 2826373 - RNA, 21 nt, Human
aggcacuguaguucuaagacu

SEQ ID NO: 2826374 - RNA, 16 nt, Human
aggcacuuaagcacaa

SEQ ID NO: 2826375 - RNA, 14 nt, Human
aggcacuuauugua

SEQ ID NO: 2826376 - RNA, 16 nt, Human
aggcacuuauuguaaa

SEQ ID NO: 2826377 - RNA, 17 nt, Human
aggcacuuauuguaaau

SEQ ID NO: 2826378 - RNA, 18 nt, Human
aggcacuuauuguaaauu

SEQ ID NO: 2826379 - RNA, 21 nt, Human
aggcacuuauuguaaauuuua

SEQ ID NO: 2826380 - RNA, 16 nt, Human
aggagggcguucuuag

SEQ ID NO: 2826381 - RNA, 17 nt, Human
aggagggcguucuuagg

SEQ ID NO: 2826382 - RNA, 21 nt, Human
aggagggcguucuuaggcugc

SEQ ID NO: 2826383 - RNA, 17 nt, Human
aggaggggaaaaaaaug

SEQ ID NO: 2826384 - RNA, 19 nt, Human
aggaggggaaaaaaauguu

SEQ ID NO: 2826385 - RNA, 14 nt, Human
aggagggcauccau

SEQ ID NO: 2826386 - RNA, 22 nt, Human
aggagggcauccauaccagcuc

SEQ ID NO: 2826387 - RNA, 20 nt, Human
aggagggcccuaccugauug

SEQ ID NO: 2826388 - RNA, 18 nt, Human
aggagagccugcugcaug

SEQ ID NO: 2826389 - RNA, 14 nt, Human
aggagggaggggga

SEQ ID NO: 2826390 - RNA, 16 nt, Human
aggagagccugcugca

SEQ ID NO: 2826391 - RNA, 15 nt, Human
aggagagccugcugc

SEQ ID NO: 2826392 - RNA, 14 nt, Human
aggagagccugcug

SEQ ID NO: 2826393 - RNA, 13 nt, Human
aggagagccugcu

SEQ ID NO: 2826394 - RNA, 12 nt, Human
aggagagccugc

SEQ ID NO: 2826395 - RNA, 15 nt, Human
aggagggagggggcu

SEQ ID NO: 2826396 - RNA, 19 nt, Human
aggagggaugcugccugag

SEQ ID NO: 2826397 - RNA, 22 nt, Human
aggagacacugugcuauaaauc

SEQ ID NO: 2826398 - RNA, 14 nt, Human
aggagaccaaggcg

SEQ ID NO: 2826399 - RNA, 18 nt, Human
aggagacaguucaagaaa

SEQ ID NO: 2826400 - RNA, 17 nt, Human
aggagagauagccugug

SEQ ID NO: 2826401 - RNA, 18 nt, Human
aggagagauagccugugg

SEQ ID NO: 2826402 - RNA, 19 nt, Human
aggagagauagccuguggc

SEQ ID NO: 2826403 - RNA, 20 nt, Human
aggagagauagccuguggcc

SEQ ID NO: 2826404 - RNA, 16 nt, Human
aggagagcccuucauu

SEQ ID NO: 2826405 - RNA, 17 nt, Human
aggagaccaaggcggga

SEQ ID NO: 2826406 - RNA, 14 nt, Human
aggagugagcacua

SEQ ID NO: 2826407 - RNA, 23 nt, Human
aggaguucagggucauagcaugc

SEQ ID NO: 2826408 - RNA, 19 nt, Human
aggaguuccacagauuguu

SEQ ID NO: 2826409 - RNA, 21 nt, Human
aggaguucgagaccagccugg

SEQ ID NO: 2826410 - RNA, 16 nt, Human
aggaguucgagaccag

SEQ ID NO: 2826411 - RNA, 20 nt, Human
aggaguuccuugaucuguau

SEQ ID NO: 2826412 - RNA, 17 nt, Human
aggaguucgaggcugca

SEQ ID NO: 2826413 - RNA, 16 nt, Human
aggaguucgaggcugc

SEQ ID NO: 2826414 - RNA, 22 nt, Human
aggaguucgagaccagccuggc

SEQ ID NO: 2826415 - RNA, 12 nt, Human
aggagugagcac

SEQ ID NO: 2826416 - RNA, 18 nt, Human
aggaguacaggugaagca

SEQ ID NO: 2826417 - RNA, 13 nt, Human
aggaggugugagg

SEQ ID NO: 2826418 - RNA, 20 nt, Human
aggaggugugaggaggaggc

SEQ ID NO: 2826419 - RNA, 14 nt, Human
aggaggugccugga

SEQ ID NO: 2826420 - RNA, 20 nt, Human
aggagguggaggcugcagug

SEQ ID NO: 2826421 - RNA, 17 nt, Human
aggagguggcagcccug

SEQ ID NO: 2826422 - RNA, 14 nt, Human
aggagguggcagcc

SEQ ID NO: 2826423 - RNA, 23 nt, Human
aggagguggcagcccuguaggga

SEQ ID NO: 2826424 - RNA, 21 nt, Human
aggagguggcagcccuguagg

SEQ ID NO: 2826425 - RNA, 20 nt, Human
aggagguggcagcccuguag

SEQ ID NO: 2826426 - RNA, 18 nt, Human
aggagguggcagcccugu

SEQ ID NO: 2826427 - RNA, 19 nt, Human
aggaugggggcuggccucu

SEQ ID NO: 2826428 - RNA, 22 nt, Human
aggauggccuggccagggccug

SEQ ID NO: 2826429 - RNA, 23 nt, Human
aggauggccuggccagggccugg

SEQ ID NO: 2826430 - RNA, 13 nt, Human
aggauggccuggc

SEQ ID NO: 2826431 - RNA, 16 nt, Human
aggauggccuggccag

SEQ ID NO: 2826432 - RNA, 17 nt, Human
aggauggccuggccagg

SEQ ID NO: 2826433 - RNA, 17 nt, Human
aggaugucccugggcca

SEQ ID NO: 2826434 - RNA, 20 nt, Human
aggaugucccugggccaggg

SEQ ID NO: 2826435 - RNA, 21 nt, Human
aggaugucccugggccagggu

SEQ ID NO: 2826436 - RNA, 22 nt, Human
aggaugucccugggccaggguc

SEQ ID NO: 2826437 - RNA, 23 nt, Human
aggaugucccugggccagggucu

SEQ ID NO: 2826438 - RNA, 17 nt, Human
aggaugucucaaacuuc

SEQ ID NO: 2826439 - RNA, 15 nt, Human
aggaugguguuacug

SEQ ID NO: 2826440 - RNA, 18 nt, Human
aggaugucacagggccaa

SEQ ID NO: 2826441 - RNA, 21 nt, Human
aggaugugggggaagaccugg

SEQ ID NO: 2826442 - RNA, 20 nt, Human
aggaugugauuguggaaugg

SEQ ID NO: 2826443 - RNA, 15 nt, Human
agcuacaacagccuc

SEQ ID NO: 2826444 - RNA, 16 nt, Human
agcuacaacagccuca

SEQ ID NO: 2826445 - RNA, 19 nt, Human
agcuacaacagccucacuu

SEQ ID NO: 2826446 - RNA, 20 nt, Human
agcuacaacagccucacuug

SEQ ID NO: 2826447 - RNA, 18 nt, Human
agcucacagugcugugug

SEQ ID NO: 2826448 - RNA, 21 nt, Human
agcucaccagccccagugccc

SEQ ID NO: 2826449 - RNA, 14 nt, Human
agcucaccagcccc

SEQ ID NO: 2826450 - RNA, 13 nt, Human
agcucaccagccc

SEQ ID NO: 2826451 - RNA, 15 nt, Human
agcuaaugggacacu

SEQ ID NO: 2826452 - RNA, 14 nt, Human
agcuaaugggacac

SEQ ID NO: 2826453 - RNA, 13 nt, Human
agcuaaugggaca

SEQ ID NO: 2826454 - RNA, 23 nt, Human
agcuaaggaggggaaaaaaaugu

SEQ ID NO: 2826455 - RNA, 10 nt, Human
agcuaaggcu

SEQ ID NO: 2826456 - RNA, 13 nt, Human
agcuaaggcucua

SEQ ID NO: 2826457 - RNA, 18 nt, Human
agcuaagcuaggaaugaa

SEQ ID NO: 2826458 - RNA, 17 nt, Human
agcuaagcuaggaauga

SEQ ID NO: 2826459 - RNA, 16 nt, Human
agcuaagggugggugc

SEQ ID NO: 2826460 - RNA, 20 nt, Human
agcuaagggugggugcucag

SEQ ID NO: 2826461 - RNA, 21 nt, Human
agcuaagggugggugcucaga

SEQ ID NO: 2826462 - RNA, 22 nt, Human
agcuaagggugggugcucagaa

SEQ ID NO: 2826463 - RNA, 23 nt, Human
agcuaagggugggugcucagaau

SEQ ID NO: 2826464 - RNA, 15 nt, Human
agcuaaggcucuaug

SEQ ID NO: 2826465 - RNA, 18 nt, Human
agcuaaggcucuaugagu

SEQ ID NO: 2826466 - RNA, 20 nt, Human
agcuaaggcucuaugagucu

SEQ ID NO: 2826467 - RNA, 17 nt, Human
agcuaagggaagacauu

SEQ ID NO: 2826468 - RNA, 18 nt, Human
agcuaagggaagacauuu

SEQ ID NO: 2826469 - RNA, 19 nt, Human
agcuaagggaagacauuuc

SEQ ID NO: 2826470 - RNA, 20 nt, Human
agcuaagggaagacauuucu

SEQ ID NO: 2826471 - RNA, 13 nt, Human
agcgaaguagcuu

SEQ ID NO: 2826472 - RNA, 17 nt, Human
agcgaaguagcuugcuc

SEQ ID NO: 2826473 - RNA, 20 nt, Human
agcgaaugcuaggucucgga

SEQ ID NO: 2826474 - RNA, 15 nt, Human
agcgauucuucugcu

SEQ ID NO: 2826475 - RNA, 19 nt, Human
agcgauucuucugcuucag

SEQ ID NO: 2826476 - RNA, 17 nt, Human
agcgauucuucugcuuc

SEQ ID NO: 2826477 - RNA, 16 nt, Human
agcuaacacacagcuc

SEQ ID NO: 2826478 - RNA, 17 nt, Human
agcuaacacacagcucc

SEQ ID NO: 2826479 - RNA, 18 nt, Human
agcuaacacacagcuccc

SEQ ID NO: 2826480 - RNA, 19 nt, Human
agcuaacacacagcuccca

SEQ ID NO: 2826481 - RNA, 17 nt, Human
agcuaaacggauuccaa

SEQ ID NO: 2826482 - RNA, 14 nt, Human
agcgauucuccugc

SEQ ID NO: 2826483 - RNA, 18 nt, Human
agcuaaacggauuccaaa

SEQ ID NO: 2826484 - RNA, 17 nt, Human
agcuaacauuuuaaaua

SEQ ID NO: 2826485 - RNA, 22 nt, Human
agcuaacauuuuaaauaaaaga

SEQ ID NO: 2826486 - RNA, 23 nt, Human
agcuaacccccuucuacugagcc

SEQ ID NO: 2826487 - RNA, 15 nt, Human
agcuaaccuuauccu

SEQ ID NO: 2826488 - RNA, 22 nt, Human
agcuaaccuuauccugcauugu

SEQ ID NO: 2826489 - RNA, 18 nt, Human
agcuaacauuuuaaauaa

SEQ ID NO: 2826490 - RNA, 20 nt, Human
agcuaacauuuuaaauaaaa

SEQ ID NO: 2826491 - RNA, 23 nt, Human
agcuaacauuuuaaauaaaagaa

SEQ ID NO: 2826492 - RNA, 23 nt, Human
agcuaaccaguuaccacacaucu

SEQ ID NO: 2826493 - RNA, 19 nt, Human
agcuaacccagguccccuc

SEQ ID NO: 2826494 - RNA, 15 nt, Human
agccugggcagccag

SEQ ID NO: 2826495 - RNA, 20 nt, Human
agccugggcagcauagcaag

SEQ ID NO: 2826496 - RNA, 17 nt, Human
agccugggcagcauagc

SEQ ID NO: 2826497 - RNA, 20 nt, Human
agccugggcaacagagcaag

SEQ ID NO: 2826498 - RNA, 18 nt, Human
agccugggcaacagagca

SEQ ID NO: 2826499 - RNA, 17 nt, Human
agccugggcaacagagc

SEQ ID NO: 2826500 - RNA, 15 nt, Human
agccugggcaacaga

SEQ ID NO: 2826501 - RNA, 17 nt, Human
agccuggccagccuaca

SEQ ID NO: 2826502 - RNA, 16 nt, Human
agccuggcccauagaa

SEQ ID NO: 2826503 - RNA, 17 nt, Human
agccuggcccauagaaa

SEQ ID NO: 2826504 - RNA, 19 nt, Human
agccuggcccauagaaaca

SEQ ID NO: 2826505 - RNA, 20 nt, Human
agccuuuuuaaaacacaugu

SEQ ID NO: 2826506 - RNA, 19 nt, Human
agccuuuuuaaaacacaug

SEQ ID NO: 2826507 - RNA, 18 nt, Human
agccuuuuuaaaacacau

SEQ ID NO: 2826508 - RNA, 17 nt, Human
agccuuuuuaaaacaca

SEQ ID NO: 2826509 - RNA, 22 nt, Human
agccuuuuuaaaacacauguuu

SEQ ID NO: 2826510 - RNA, 21 nt, Human
agccuuuuuaaaacacauguu

SEQ ID NO: 2826511 - RNA, 16 nt, Human
agccuuuuuaaaacac

SEQ ID NO: 2826512 - RNA, 16 nt, Human
agccuuugccuccccg

SEQ ID NO: 2826513 - RNA, 15 nt, Human
agccuuugccucccc

SEQ ID NO: 2826514 - RNA, 15 nt, Human
agcgaacaaccacag

SEQ ID NO: 2826515 - RNA, 14 nt, Human
agcgaaacacagag

SEQ ID NO: 2826516 - RNA, 22 nt, Human
agccuuuacugacccuggggcu

SEQ ID NO: 2826517 - RNA, 23 nt, Human
agccuuuaauggacuuauuucuu

SEQ ID NO: 2826518 - RNA, 18 nt, Human
agccuuuaguaucagugu

SEQ ID NO: 2826519 - RNA, 19 nt, Human
agccuuuaguaucaguguu

SEQ ID NO: 2826520 - RNA, 20 nt, Human
agccuuuaguaucaguguuu

SEQ ID NO: 2826521 - RNA, 17 nt, Human
agccugggcagccaggc

SEQ ID NO: 2826522 - RNA, 14 nt, Human
agccugcuuuuuaa

SEQ ID NO: 2826523 - RNA, 19 nt, Human
agccuggaacaucaucaag

SEQ ID NO: 2826524 - RNA, 20 nt, Human
agccuggaacaucaucaagg

SEQ ID NO: 2826525 - RNA, 21 nt, Human
agccuggaacaucaucaaggc

SEQ ID NO: 2826526 - RNA, 19 nt, Human
agccuggagacccacccca

SEQ ID NO: 2826527 - RNA, 24 nt, Human
agccuggagacccaccccaccugc

SEQ ID NO: 2826528 - RNA, 14 nt, Human
agccuggccaacau

SEQ ID NO: 2826529 - RNA, 20 nt, Human
agccuggccaacauggcgaa

SEQ ID NO: 2826530 - RNA, 13 nt, Human
agccuggcacagg

SEQ ID NO: 2826531 - RNA, 16 nt, Human
agccuggcacaggacu

SEQ ID NO: 2826532 - RNA, 19 nt, Human
agccuggcacaggacugau

SEQ ID NO: 2826533 - RNA, 20 nt, Human
agccuggcacagggcagugg

SEQ ID NO: 2826534 - RNA, 17 nt, Human
agccuggcacagggcag

SEQ ID NO: 2826535 - RNA, 18 nt, Human
agccuggcacagggcagu

SEQ ID NO: 2826536 - RNA, 20 nt, Human
agccugcuggucacagccuc

SEQ ID NO: 2826537 - RNA, 21 nt, Human
agccugcuggucacagccucc

SEQ ID NO: 2826538 - RNA, 22 nt, Human
agccugcuggucacagccuccu

SEQ ID NO: 2826539 - RNA, 23 nt, Human
agccugcuggucacagccuccuc

SEQ ID NO: 2826540 - RNA, 14 nt, Human
agccugcuucccac

SEQ ID NO: 2826541 - RNA, 15 nt, Human
agccugcuucccacc

SEQ ID NO: 2826542 - RNA, 19 nt, Human
agccugcuucccaccuccc

SEQ ID NO: 2826543 - RNA, 22 nt, Human
agccugcuucccaccucccugc

SEQ ID NO: 2826544 - RNA, 23 nt, Human
agccugcuucccaccucccugcc

SEQ ID NO: 2826545 - RNA, 12 nt, Human
agccugcugcau

SEQ ID NO: 2826546 - RNA, 13 nt, Human
agccugcugccca

SEQ ID NO: 2826547 - RNA, 17 nt, Human
agccugcugcccaggcu

SEQ ID NO: 2826548 - RNA, 20 nt, Human
agccugcugcccaggcugug

SEQ ID NO: 2826549 - RNA, 11 nt, Human
agccugcugca

SEQ ID NO: 2826550 - RNA, 14 nt, Human
agcugccuuggcuc

SEQ ID NO: 2826551 - RNA, 16 nt, Human
agcugccuuggcucag

SEQ ID NO: 2826552 - RNA, 17 nt, Human
agcugccuuggcucaga

SEQ ID NO: 2826553 - RNA, 19 nt, Human
agcugccuuggcucagaca

SEQ ID NO: 2826554 - RNA, 20 nt, Human
agcugccuuggcucagacau

SEQ ID NO: 2826555 - RNA, 15 nt, Human
agcugguuagaaaug

SEQ ID NO: 2826556 - RNA, 15 nt, Human
agcugguggacccag

SEQ ID NO: 2826557 - RNA, 15 nt, Human
agcuggucccacuca

SEQ ID NO: 2826558 - RNA, 20 nt, Human
agcuggguuggaaaacagua

SEQ ID NO: 2826559 - RNA, 16 nt, Human
agcuggguuggaaaac

SEQ ID NO: 2826560 - RNA, 14 nt, Human
agcuggguuggaaa

SEQ ID NO: 2826561 - RNA, 16 nt, Human
agcucuuggcuccacu

SEQ ID NO: 2826562 - RNA, 23 nt, Human
agcucuuguccucaguccauuua

SEQ ID NO: 2826563 - RNA, 13 nt, Human
agcuccucuccug

SEQ ID NO: 2826564 - RNA, 14 nt, Human
agcuccucuccugg

SEQ ID NO: 2826565 - RNA, 15 nt, Human
agcuccucuccugga

SEQ ID NO: 2826566 - RNA, 16 nt, Human
agcuccucuccuggag

SEQ ID NO: 2826567 - RNA, 17 nt, Human
agcuccucuccuggagg

SEQ ID NO: 2826568 - RNA, 18 nt, Human
agcuccucuccuggagga

SEQ ID NO: 2826569 - RNA, 23 nt, Human
agcucaccagccccagugcccac

SEQ ID NO: 2826570 - RNA, 22 nt, Human
agcucaccagccccagugccca

SEQ ID NO: 2826571 - RNA, 19 nt, Human
agccugggauuucuaugca

SEQ ID NO: 2826572 - RNA, 17 nt, Human
agcugguuagaaaugca

SEQ ID NO: 2826573 - RNA, 19 nt, Human
aggaaaaccaagccguggc

SEQ ID NO: 2826574 - RNA, 13 nt, Human
aggaaaaacaggu

SEQ ID NO: 2826575 - RNA, 17 nt, Human
agcuuuuugucuuuucu

SEQ ID NO: 2826576 - RNA, 10 nt, Human
aggaaaaaaa

SEQ ID NO: 2826577 - RNA, 24 nt, Human
aggaaaaaaacuauuaaggaugua

SEQ ID NO: 2826578 - RNA, 13 nt, Human
aggaaaaaaagac

SEQ ID NO: 2826579 - RNA, 14 nt, Human
aggaaaaaaagacu

SEQ ID NO: 2826580 - RNA, 15 nt, Human
aggaaaaaaagcaug

SEQ ID NO: 2826581 - RNA, 13 nt, Human
aggaaaaaaauag

SEQ ID NO: 2826582 - RNA, 13 nt, Human
agcuuuuugucuu

SEQ ID NO: 2826583 - RNA, 19 nt, Human
agcuuuguuucaaccaagu

SEQ ID NO: 2826584 - RNA, 16 nt, Human
agcuuuguccccugcu

SEQ ID NO: 2826585 - RNA, 17 nt, Human
agcuuuguccccugcuu

SEQ ID NO: 2826586 - RNA, 18 nt, Human
agcuuuguccccugcuuc

SEQ ID NO: 2826587 - RNA, 20 nt, Human
agcuuuguccccugcuucag

SEQ ID NO: 2826588 - RNA, 21 nt, Human
agcuuuguccccugcuucaga

SEQ ID NO: 2826589 - RNA, 12 nt, Human
agcuuuguguuu

SEQ ID NO: 2826590 - RNA, 17 nt, Human
agcuuuguguuugguuu

SEQ ID NO: 2826591 - RNA, 21 nt, Human
agcuuuguguuugguuuacau

SEQ ID NO: 2826592 - RNA, 22 nt, Human
agcuuuguguuugguuuacauu

SEQ ID NO: 2826593 - RNA, 23 nt, Human
agcuuuguguuugguuuacauuu

SEQ ID NO: 2826594 - RNA, 21 nt, Human
aggaacagcuaugggagcccc

SEQ ID NO: 2826595 - RNA, 21 nt, Human
aggaacagaaggaugaaugag

SEQ ID NO: 2826596 - RNA, 14 nt, Human
aggaacagaaggau

SEQ ID NO: 2826597 - RNA, 13 nt, Human
aggaacagaagga

SEQ ID NO: 2826598 - RNA, 14 nt, Human
aggaacuuccaggu

SEQ ID NO: 2826599 - RNA, 18 nt, Human
aggaacuugaaaaauacu

SEQ ID NO: 2826600 - RNA, 17 nt, Human
aggaagaaacagaagag

SEQ ID NO: 2826601 - RNA, 19 nt, Human
aggaagaaacagaagagag

SEQ ID NO: 2826602 - RNA, 23 nt, Human
aggaacacaggcgcugaguaugg

SEQ ID NO: 2826603 - RNA, 14 nt, Human
aggaaaacugcaug

SEQ ID NO: 2826604 - RNA, 16 nt, Human
aggaaaaccugaagac

SEQ ID NO: 2826605 - RNA, 20 nt, Human
aggaaaaccaagccguggcu

SEQ ID NO: 2826606 - RNA, 21 nt, Human
aggaaaaccaagccguggcuu

SEQ ID NO: 2826607 - RNA, 22 nt, Human
aggaaaaccaagccguggcuuc

SEQ ID NO: 2826608 - RNA, 23 nt, Human
aggaaaaccaagccguggcuucc

SEQ ID NO: 2826609 - RNA, 13 nt, Human
aggaacuucagag

SEQ ID NO: 2826610 - RNA, 14 nt, Human
aggaaggugguggg

SEQ ID NO: 2826611 - RNA, 16 nt, Human
aggaaggucucauucu

SEQ ID NO: 2826612 - RNA, 17 nt, Human
aggaaggucucauucuu

SEQ ID NO: 2826613 - RNA, 24 nt, Human
agacaaaaucucuauacugcccug

SEQ ID NO: 2826614 - RNA, 20 nt, Human
agacaagauauuguacauaa

SEQ ID NO: 2826615 - RNA, 21 nt, Human
agacaagauauuguacauaaa

SEQ ID NO: 2826616 - RNA, 22 nt, Human
agacaagauauuguacauaaaa

SEQ ID NO: 2826617 - RNA, 14 nt, Human
agacaaaaagacaa

SEQ ID NO: 2826618 - RNA, 15 nt, Human
agacaaaaagacaaa

SEQ ID NO: 2826619 - RNA, 18 nt, Human
agacaaaaagacaaacau

SEQ ID NO: 2826620 - RNA, 22 nt, Human
agacaagugacuguaucugugu

SEQ ID NO: 2826621 - RNA, 20 nt, Human
agacaagugacuguaucugu

SEQ ID NO: 2826622 - RNA, 23 nt, Human
agacaagugacuguaucugugua

SEQ ID NO: 2826623 - RNA, 15 nt, Human
agacaaguuccaugg

SEQ ID NO: 2826624 - RNA, 22 nt, Human
agacaaguuccaugggauacaa

SEQ ID NO: 2826625 - RNA, 13 nt, Human
agacaaugucugc

SEQ ID NO: 2826626 - RNA, 20 nt, Human
agacaaugucugcagcccug

SEQ ID NO: 2826627 - RNA, 21 nt, Human
agacaaugucugcagcccuga

SEQ ID NO: 2826628 - RNA, 13 nt, Human
agacaaggaaaua

SEQ ID NO: 2826629 - RNA, 20 nt, Human
agacaaugcaccuagcugug

SEQ ID NO: 2826630 - RNA, 22 nt, Human
agaauuuuccugagacaaauuu

SEQ ID NO: 2826631 - RNA, 23 nt, Human
agaauuuuccugagacaaauuuu

SEQ ID NO: 2826632 - RNA, 15 nt, Human
agaauuuugagcagg

SEQ ID NO: 2826633 - RNA, 15 nt, Human
agaauuuuuuugucu

SEQ ID NO: 2826634 - RNA, 16 nt, Human
agaauuuuuuugucuu

SEQ ID NO: 2826635 - RNA, 14 nt, Human
agaauuuuuuuugu

SEQ ID NO: 2826636 - RNA, 15 nt, Human
agaauuuuuuuuguu

SEQ ID NO: 2826637 - RNA, 20 nt, Human
agaauuuuuuuuguuguuuc

SEQ ID NO: 2826638 - RNA, 12 nt, Human
agaauuuuggaa

SEQ ID NO: 2826639 - RNA, 13 nt, Human
agaauuuuaggaa

SEQ ID NO: 2826640 - RNA, 14 nt, Human
agaauuuuaggaac

SEQ ID NO: 2826641 - RNA, 20 nt, Human
agaauuuuaggaacuucaga

SEQ ID NO: 2826642 - RNA, 22 nt, Human
agaauuuuaggaacuucagaga

SEQ ID NO: 2826643 - RNA, 16 nt, Human
agacuagauugccuuu

SEQ ID NO: 2826644 - RNA, 22 nt, Human
agacuaggauaauguccaacua

SEQ ID NO: 2826645 - RNA, 19 nt, Human
agacuagauugccuuuguu

SEQ ID NO: 2826646 - RNA, 22 nt, Human
agacuaguuuuuauuccuugug

SEQ ID NO: 2826647 - RNA, 12 nt, Human
agacuauauaca

SEQ ID NO: 2826648 - RNA, 13 nt, Human
agacuauauacau

SEQ ID NO: 2826649 - RNA, 14 nt, Human
agacuauauacaug

SEQ ID NO: 2826650 - RNA, 15 nt, Human
agacuauauacaugu

SEQ ID NO: 2826651 - RNA, 17 nt, Human
agacuauauacaugugu

SEQ ID NO: 2826652 - RNA, 18 nt, Human
agacuauauacaugugug

SEQ ID NO: 2826653 - RNA, 19 nt, Human
agacuauauacaugugugu

SEQ ID NO: 2826654 - RNA, 20 nt, Human
agacuauauacaugugugua

SEQ ID NO: 2826655 - RNA, 21 nt, Human
agacuauauacauguguguau

SEQ ID NO: 2826656 - RNA, 21 nt, Human
agacgacaaggaaaggcaaau

SEQ ID NO: 2826657 - RNA, 20 nt, Human
agacgauaguuaucuguucu

SEQ ID NO: 2826658 - RNA, 15 nt, Human
agacuaucagcccaa

SEQ ID NO: 2826659 - RNA, 13 nt, Human
agacgacaggcga

SEQ ID NO: 2826660 - RNA, 22 nt, Human
agaccuuuuggcccaaucucug

SEQ ID NO: 2826661 - RNA, 15 nt, Human
agaccauuuaacaug

SEQ ID NO: 2826662 - RNA, 16 nt, Human
agaccauuuaacaugc

SEQ ID NO: 2826663 - RNA, 18 nt, Human
agaccauuuaacaugcaa

SEQ ID NO: 2826664 - RNA, 16 nt, Human
agaccaccccgccugc

SEQ ID NO: 2826665 - RNA, 13 nt, Human
agacagcccucca

SEQ ID NO: 2826666 - RNA, 23 nt, Human
agacaauugagguaaguuuuuug

SEQ ID NO: 2826667 - RNA, 14 nt, Human
agaccaccccgccu

SEQ ID NO: 2826668 - RNA, 17 nt, Human
agaccaccauccaccgc

SEQ ID NO: 2826669 - RNA, 18 nt, Human
agagaaacaauaaagaga

SEQ ID NO: 2826670 - RNA, 14 nt, Human
agagaaacaaacuu

SEQ ID NO: 2826671 - RNA, 15 nt, Human
agagaaacaaacuuu

SEQ ID NO: 2826672 - RNA, 15 nt, Human
agagaaagaaaauga

SEQ ID NO: 2826673 - RNA, 16 nt, Human
agagaaagaaaaugaa

SEQ ID NO: 2826674 - RNA, 12 nt, Human
agagaaacuuua

SEQ ID NO: 2826675 - RNA, 13 nt, Human
agagaaacuuuau

SEQ ID NO: 2826676 - RNA, 21 nt, Human
agagaaacuuuauacauuagu

SEQ ID NO: 2826677 - RNA, 24 nt, Human
agagaaagugggugagaugcugga

SEQ ID NO: 2826678 - RNA, 18 nt, Human
agagaaaguacuucucca

SEQ ID NO: 2826679 - RNA, 23 nt, Human
agacugaaaauauauaagcucag

SEQ ID NO: 2826680 - RNA, 15 nt, Human
agacucuuugcauau

SEQ ID NO: 2826681 - RNA, 19 nt, Human
agacugacaaccucaucca

SEQ ID NO: 2826682 - RNA, 12 nt, Human
agagaaaauaua

SEQ ID NO: 2826683 - RNA, 14 nt, Human
agagaaaauauaug

SEQ ID NO: 2826684 - RNA, 15 nt, Human
agagaaaauauaugu

SEQ ID NO: 2826685 - RNA, 16 nt, Human
agagaaaauauaugua

SEQ ID NO: 2826686 - RNA, 19 nt, Human
agagaaaauauauguauuu

SEQ ID NO: 2826687 - RNA, 23 nt, Human
agagaaaauauauguauuuuuau

SEQ ID NO: 2826688 - RNA, 13 nt, Human
agagaaacaaacu

SEQ ID NO: 2826689 - RNA, 13 nt, Human
agagaauauaaca

SEQ ID NO: 2826690 - RNA, 16 nt, Human
agagaauauaacauga

SEQ ID NO: 2826691 - RNA, 17 nt, Human
agagaauauaacaugaa

SEQ ID NO: 2826692 - RNA, 18 nt, Human
agagaauauaacaugaaa

SEQ ID NO: 2826693 - RNA, 22 nt, Human
agagaauauaacaugaaaugau

SEQ ID NO: 2826694 - RNA, 23 nt, Human
agagaauauaacaugaaaugaua

SEQ ID NO: 2826695 - RNA, 15 nt, Human
agagaauaugucugc

SEQ ID NO: 2826696 - RNA, 22 nt, Human
agagaauaugucugcuccuuuc

SEQ ID NO: 2826697 - RNA, 22 nt, Human
agagagauauaucugaaaacug

SEQ ID NO: 2826698 - RNA, 17 nt, Human
agagagaugggagcucc

SEQ ID NO: 2826699 - RNA, 18 nt, Human
agagagaugggagcuccu

SEQ ID NO: 2826700 - RNA, 19 nt, Human
agagagaugggagcuccuc

SEQ ID NO: 2826701 - RNA, 11 nt, Human
agagaaaucuc

SEQ ID NO: 2826702 - RNA, 14 nt, Human
agagaaaucugaaa

SEQ ID NO: 2826703 - RNA, 13 nt, Human
agagaaauggcaa

SEQ ID NO: 2826704 - RNA, 14 nt, Human
agagaaaugucuuu

SEQ ID NO: 2826705 - RNA, 12 nt, Human
agagaaauucug

SEQ ID NO: 2826706 - RNA, 13 nt, Human
agagaaauucugu

SEQ ID NO: 2826707 - RNA, 17 nt, Human
agagaaauucuguuaaa

SEQ ID NO: 2826708 - RNA, 18 nt, Human
agagaaauucuguuaaaa

SEQ ID NO: 2826709 - RNA, 20 nt, Human
agagaaccgagcaaagauca

SEQ ID NO: 2826710 - RNA, 21 nt, Human
agagaaccgagcaaagaucaa

SEQ ID NO: 2826711 - RNA, 19 nt, Human
agagaaccuaacuguaucu

SEQ ID NO: 2826712 - RNA, 21 nt, Human
agagaaccuaacuguaucuug

SEQ ID NO: 2826713 - RNA, 23 nt, Human
agagaaccuaacuguaucuugag

SEQ ID NO: 2826714 - RNA, 15 nt, Human
agagaaccgagcaaa

SEQ ID NO: 2826715 - RNA, 17 nt, Human
agagaaccgagcaaaga

SEQ ID NO: 2826716 - RNA, 17 nt, Human
agagaggagaggagaga

SEQ ID NO: 2826717 - RNA, 14 nt, Human
agagaggagccaga

SEQ ID NO: 2826718 - RNA, 14 nt, Human
agagaggcagagag

SEQ ID NO: 2826719 - RNA, 15 nt, Human
agagaggcagagagc

SEQ ID NO: 2826720 - RNA, 16 nt, Human
agagaggcagagagcg

SEQ ID NO: 2826721 - RNA, 13 nt, Human
agagaggcagaga

SEQ ID NO: 2826722 - RNA, 19 nt, Human
agagaggaugugcaagcga

SEQ ID NO: 2826723 - RNA, 14 nt, Human
agagcccagaggua

SEQ ID NO: 2826724 - RNA, 16 nt, Human
agagcccagagguaac

SEQ ID NO: 2826725 - RNA, 20 nt, Human
agagcccagagguaacagaa

SEQ ID NO: 2826726 - RNA, 14 nt, Human
agagcccagccauu

SEQ ID NO: 2826727 - RNA, 22 nt, Human
agagcccagagguaacagaaca

SEQ ID NO: 2826728 - RNA, 24 nt, Human
agagcccagagguaacagaacagc

SEQ ID NO: 2826729 - RNA, 13 nt, Human
agagccugaucuc

SEQ ID NO: 2826730 - RNA, 14 nt, Human
agagccugaucucu

SEQ ID NO: 2826731 - RNA, 16 nt, Human
agagccugaucucuuc

SEQ ID NO: 2826732 - RNA, 18 nt, Human
agagccugaucucuuccu

SEQ ID NO: 2826733 - RNA, 19 nt, Human
agagccugaucucuuccug

SEQ ID NO: 2826734 - RNA, 20 nt, Human
agagccugaucucuuccugu

SEQ ID NO: 2826735 - RNA, 12 nt, Human
agagccugcugc

SEQ ID NO: 2826736 - RNA, 15 nt, Human
agagccugccuggag

SEQ ID NO: 2826737 - RNA, 16 nt, Human
agagccugccuggagc

SEQ ID NO: 2826738 - RNA, 17 nt, Human
agagccugccuggagcg

SEQ ID NO: 2826739 - RNA, 11 nt, Human
agaacaggguc

SEQ ID NO: 2826740 - RNA, 21 nt, Human
agaacagggucauguuugcag

SEQ ID NO: 2826741 - RNA, 23 nt, Human
agaacagguguuggugacaauug

SEQ ID NO: 2826742 - RNA, 14 nt, Human
agaacaucauuaga

SEQ ID NO: 2826743 - RNA, 17 nt, Human
agaacauaaagguaaaa

SEQ ID NO: 2826744 - RNA, 20 nt, Human
agaacauaaagguaaaacaa

SEQ ID NO: 2826745 - RNA, 21 nt, Human
agaacagugcuugccacagag

SEQ ID NO: 2826746 - RNA, 17 nt, Human
agaacaguaucuuugca

SEQ ID NO: 2826747 - RNA, 22 nt, Human
agaacaguaucuuugcacucca

SEQ ID NO: 2826748 - RNA, 12 nt, Human
agaacagcuuca

SEQ ID NO: 2826749 - RNA, 22 nt, Human
agaacagcuucagguuaucgaa

SEQ ID NO: 2826750 - RNA, 13 nt, Human
agaacagcuucag

SEQ ID NO: 2826751 - RNA, 14 nt, Human
agaacagcuucagg

SEQ ID NO: 2826752 - RNA, 16 nt, Human
agaacagcuucagguu

SEQ ID NO: 2826753 - RNA, 18 nt, Human
agaacagcuucagguuau

SEQ ID NO: 2826754 - RNA, 17 nt, Human
agaacacugugaaaaca

SEQ ID NO: 2826755 - RNA, 16 nt, Human
agaacagaucuuuuac

SEQ ID NO: 2826756 - RNA, 22 nt, Human
agaacaucuuugacacucugca

SEQ ID NO: 2826757 - RNA, 23 nt, Human
agaacaucuuugacacucugcag

SEQ ID NO: 2826758 - RNA, 13 nt, Human
agaacaugugaga

SEQ ID NO: 2826759 - RNA, 22 nt, Human
agaacaugugagagguuugacu

SEQ ID NO: 2826760 - RNA, 15 nt, Human
agaacaucauuagaa

SEQ ID NO: 2826761 - RNA, 16 nt, Human
agaacaucauuagaac

SEQ ID NO: 2826762 - RNA, 18 nt, Human
agaacaucauuagaacaa

SEQ ID NO: 2826763 - RNA, 20 nt, Human
agaacaucauuagaacaaag

SEQ ID NO: 2826764 - RNA, 19 nt, Human
agaacagauaaucagugug

SEQ ID NO: 2826765 - RNA, 14 nt, Human
agaacacugugaaa

SEQ ID NO: 2826766 - RNA, 20 nt, Human
agaacacuaacucaccagcc

SEQ ID NO: 2826767 - RNA, 18 nt, Human
agaacacuaacucaccag

SEQ ID NO: 2826768 - RNA, 18 nt, Human
agaacacggcucacgcuu

SEQ ID NO: 2826769 - RNA, 14 nt, Human
agaacacgcguauu

SEQ ID NO: 2826770 - RNA, 21 nt, Human
agaacacagccgauucaccug

SEQ ID NO: 2826771 - RNA, 13 nt, Human
agaacaauugucc

SEQ ID NO: 2826772 - RNA, 15 nt, Human
agaacaauuuucuug

SEQ ID NO: 2826773 - RNA, 19 nt, Human
agaacaauagguaaagcua

SEQ ID NO: 2826774 - RNA, 20 nt, Human
agaacaaagugagacagucc

SEQ ID NO: 2826775 - RNA, 12 nt, Human
agaacaaauauu

SEQ ID NO: 2826776 - RNA, 14 nt, Human
agaacaaauauuca

SEQ ID NO: 2826777 - RNA, 18 nt, Human
agaacaaauauucagaau

SEQ ID NO: 2826778 - RNA, 24 nt, Human
agaacaaauauucagaauauucau

SEQ ID NO: 2826779 - RNA, 11 nt, Human
agaagagccac

SEQ ID NO: 2826780 - RNA, 13 nt, Human
agaagagccacag

SEQ ID NO: 2826781 - RNA, 14 nt, Human
agaagagccacagu

SEQ ID NO: 2826782 - RNA, 22 nt, Human
agaagagccacagugagggaga

SEQ ID NO: 2826783 - RNA, 13 nt, Human
agaagauccccuc

SEQ ID NO: 2826784 - RNA, 14 nt, Human
agaagauccccuca

SEQ ID NO: 2826785 - RNA, 17 nt, Human
agaagauccuaaaacaa

SEQ ID NO: 2826786 - RNA, 18 nt, Human
agaagauccuaaaacaaa

SEQ ID NO: 2826787 - RNA, 13 nt, Human
agaagagaagcug

SEQ ID NO: 2826788 - RNA, 15 nt, Human
agaagagaagcugcu

SEQ ID NO: 2826789 - RNA, 16 nt, Human
agaagagaagcugcug

SEQ ID NO: 2826790 - RNA, 17 nt, Human
agaagagaagcugcuga

SEQ ID NO: 2826791 - RNA, 22 nt, Human
agaaccaucccuauuuuguauu

SEQ ID NO: 2826792 - RNA, 14 nt, Human
agaaccagccauau

SEQ ID NO: 2826793 - RNA, 20 nt, Human
agaaccagccauauacacuu

SEQ ID NO: 2826794 - RNA, 20 nt, Human
agaaccaggcaacuugggaa

SEQ ID NO: 2826795 - RNA, 11 nt, Human
agaacauugua

SEQ ID NO: 2826796 - RNA, 18 nt, Human
agaaccaaaaguuuuccu

SEQ ID NO: 2826797 - RNA, 20 nt, Human
agaaccaaaaguuuuccuga

SEQ ID NO: 2826798 - RNA, 17 nt, Human
agaaccaaagcucaaau

SEQ ID NO: 2826799 - RNA, 22 nt, Human
agaaccaccccggcccccugcc

SEQ ID NO: 2826800 - RNA, 23 nt, Human
agaaccaccccggcccccugccc

SEQ ID NO: 2826801 - RNA, 17 nt, Human
agaaccaggcaacuugg

SEQ ID NO: 2826802 - RNA, 17 nt, Human
agaagucaaaguaaaac

SEQ ID NO: 2826803 - RNA, 13 nt, Human
agaagaugaaugg

SEQ ID NO: 2826804 - RNA, 16 nt, Human
agaaggggaagcacuc

SEQ ID NO: 2826805 - RNA, 20 nt, Human
agaagggccaguccugccug

SEQ ID NO: 2826806 - RNA, 19 nt, Human
agaagggccaguccugccu

SEQ ID NO: 2826807 - RNA, 19 nt, Human
agaagggcauaaaacagcu

SEQ ID NO: 2826808 - RNA, 21 nt, Human
agaagggauaacccuacaccc

SEQ ID NO: 2826809 - RNA, 17 nt, Human
agaagggcuccugcagg

SEQ ID NO: 2826810 - RNA, 15 nt, Human
agaaggggaagcacu

SEQ ID NO: 2826811 - RNA, 16 nt, Human
agaagaugaucagacc

SEQ ID NO: 2826812 - RNA, 23 nt, Human
agaagaugcuccagcaacacagc

SEQ ID NO: 2826813 - RNA, 14 nt, Human
agaagaugcuccag

SEQ ID NO: 2826814 - RNA, 17 nt, Human
agaagaugaucagaccu

SEQ ID NO: 2826815 - RNA, 14 nt, Human
agaagucacacagu

SEQ ID NO: 2826816 - RNA, 20 nt, Human
agaagucaugaagcccaagu

SEQ ID NO: 2826817 - RNA, 17 nt, Human
agaagucaugaagccca

SEQ ID NO: 2826818 - RNA, 19 nt, Human
agaaguccuguaugucugu

SEQ ID NO: 2826819 - RNA, 21 nt, Human
agaaguccuguaugucuguca

SEQ ID NO: 2826820 - RNA, 22 nt, Human
agaaguccuguaugucugucau

SEQ ID NO: 2826821 - RNA, 16 nt, Human
agaauccuuuuguaga

SEQ ID NO: 2826822 - RNA, 17 nt, Human
agaauccuuuuguagaa

SEQ ID NO: 2826823 - RNA, 22 nt, Human
agaauccuuuuguagaaugaac

SEQ ID NO: 2826824 - RNA, 21 nt, Human
agaauccuaggcuccacccca

SEQ ID NO: 2826825 - RNA, 15 nt, Human
agaaucuaaagccag

SEQ ID NO: 2826826 - RNA, 16 nt, Human
agaaucuaaagccagu

SEQ ID NO: 2826827 - RNA, 18 nt, Human
agaaucuauauuuaacaa

SEQ ID NO: 2826828 - RNA, 12 nt, Human
agaaucuauuuu

SEQ ID NO: 2826829 - RNA, 13 nt, Human
agaaucuauuuuc

SEQ ID NO: 2826830 - RNA, 14 nt, Human
agaaucuauuuucu

SEQ ID NO: 2826831 - RNA, 15 nt, Human
agaaucuauuuucua

SEQ ID NO: 2826832 - RNA, 16 nt, Human
agaaucuauuuucuau

SEQ ID NO: 2826833 - RNA, 21 nt, Human
agaaucuauuuucuauguacu

SEQ ID NO: 2826834 - RNA, 22 nt, Human
agaaucuauuuucuauguacua

SEQ ID NO: 2826835 - RNA, 17 nt, Human
agaaucugcaauucaaa

SEQ ID NO: 2826836 - RNA, 19 nt, Human
agaaucuguuucccagcag

SEQ ID NO: 2826837 - RNA, 16 nt, Human
agaaugaaagggccca

SEQ ID NO: 2826838 - RNA, 12 nt, Human
agaaugagccuc

SEQ ID NO: 2826839 - RNA, 14 nt, Human
agaaugaaaaauga

SEQ ID NO: 2826840 - RNA, 15 nt, Human
agaaugaaaaaugaa

SEQ ID NO: 2826841 - RNA, 18 nt, Human
agaaugaaaaaugaaaga

SEQ ID NO: 2826842 - RNA, 22 nt, Human
agaaugaaaaaugaaagaugau

SEQ ID NO: 2826843 - RNA, 16 nt, Human
agaaugaaaacucauu

SEQ ID NO: 2826844 - RNA, 12 nt, Human
agaaugcauuga

SEQ ID NO: 2826845 - RNA, 13 nt, Human
agaaugcauugau

SEQ ID NO: 2826846 - RNA, 20 nt, Human
agaaugcauugauauuguga

SEQ ID NO: 2826847 - RNA, 21 nt, Human
agaaugcauugauauugugaa

SEQ ID NO: 2826848 - RNA, 22 nt, Human
agaaugcauugauauugugaac

SEQ ID NO: 2826849 - RNA, 16 nt, Human
agaaugcacagauaua

SEQ ID NO: 2826850 - RNA, 17 nt, Human
agaaugcacagauauac

SEQ ID NO: 2826851 - RNA, 18 nt, Human
agaaugcacagauauacu

SEQ ID NO: 2826852 - RNA, 22 nt, Human
agaaugcacagauauacuuugu

SEQ ID NO: 2826853 - RNA, 20 nt, Human
agaaugaugauaacagaacu

SEQ ID NO: 2826854 - RNA, 21 nt, Human
agaucugcagggggugugucu

SEQ ID NO: 2826855 - RNA, 18 nt, Human
agaucucugcuuuggaaa

SEQ ID NO: 2826856 - RNA, 23 nt, Human
agaucucugcuuuggaaaucaca

SEQ ID NO: 2826857 - RNA, 19 nt, Human
agauucuauaguucuagac

SEQ ID NO: 2826858 - RNA, 20 nt, Human
agauucuauaguucuagaca

SEQ ID NO: 2826859 - RNA, 21 nt, Human
agauucuauaguucuagacau

SEQ ID NO: 2826860 - RNA, 19 nt, Human
agauucuacauauucuuua

SEQ ID NO: 2826861 - RNA, 13 nt, Human
agauucuaaugau

SEQ ID NO: 2826862 - RNA, 14 nt, Human
agauucuaaugaug

SEQ ID NO: 2826863 - RNA, 13 nt, Human
agauucuaaaggu

SEQ ID NO: 2826864 - RNA, 23 nt, Human
agauucuaaagguccacaggucu

SEQ ID NO: 2826865 - RNA, 10 nt, Human
agauucuaac

SEQ ID NO: 2826866 - RNA, 12 nt, Human
agauucuaacgg

SEQ ID NO: 2826867 - RNA, 15 nt, Human
agauucuauaguucu

SEQ ID NO: 2826868 - RNA, 16 nt, Human
agauucuauaguucua

SEQ ID NO: 2826869 - RNA, 18 nt, Human
agauucuauaguucuaga

SEQ ID NO: 2826870 - RNA, 11 nt, Human
agauucuagau

SEQ ID NO: 2826871 - RNA, 12 nt, Human
agauucuagauc

SEQ ID NO: 2826872 - RNA, 14 nt, Human
agauucuagaucag

SEQ ID NO: 2826873 - RNA, 14 nt, Human
agauucuagaugau

SEQ ID NO: 2826874 - RNA, 14 nt, Human
agauucuaaagauu

SEQ ID NO: 2826875 - RNA, 15 nt, Human
agauucuaaagauuc

SEQ ID NO: 2826876 - RNA, 16 nt, Human
agauucuaaagauucu

SEQ ID NO: 2826877 - RNA, 17 nt, Human
agauucuaaagauucua

SEQ ID NO: 2826878 - RNA, 18 nt, Human
agauucuaaagauucuau

SEQ ID NO: 2826879 - RNA, 21 nt, Human
agauucuaaagauucuauagu

SEQ ID NO: 2826880 - RNA, 12 nt, Human
agauucuaaagg

SEQ ID NO: 2826881 - RNA, 21 nt, Human
agaugaauuauccuauuucag

SEQ ID NO: 2826882 - RNA, 12 nt, Human
agaugacaaccu

SEQ ID NO: 2826883 - RNA, 17 nt, Human
agaugacaaccuccauu

SEQ ID NO: 2826884 - RNA, 16 nt, Human
agaugaccauaaccac

SEQ ID NO: 2826885 - RNA, 20 nt, Human
agaugaccauaaccacugaa

SEQ ID NO: 2826886 - RNA, 21 nt, Human
agauggcugugccucugccug

SEQ ID NO: 2826887 - RNA, 22 nt, Human
agauggcugugccucugccugu

SEQ ID NO: 2826888 - RNA, 17 nt, Human
agauggcugugccucug

SEQ ID NO: 2826889 - RNA, 18 nt, Human
agauggcugugccucugc

SEQ ID NO: 2826890 - RNA, 19 nt, Human
agauggcugugccucugcc

SEQ ID NO: 2826891 - RNA, 20 nt, Human
agauggcugugccucugccu

SEQ ID NO: 2826892 - RNA, 23 nt, Human
agcaaaauugauguguuuauuua

SEQ ID NO: 2826893 - RNA, 18 nt, Human
agcaaagaggacucgcuu

SEQ ID NO: 2826894 - RNA, 22 nt, Human
agcaaagaggacucgcuuguaa

SEQ ID NO: 2826895 - RNA, 23 nt, Human
agcaaagaggacucgcuuguaaa

SEQ ID NO: 2826896 - RNA, 19 nt, Human
agcaaauaaacuaggaaau

SEQ ID NO: 2826897 - RNA, 22 nt, Human
agcaaagugguagguacuuuuu

SEQ ID NO: 2826898 - RNA, 12 nt, Human
agcaaauacuua

SEQ ID NO: 2826899 - RNA, 14 nt, Human
agcaaauacuuagc

SEQ ID NO: 2826900 - RNA, 15 nt, Human
agcaaauacuuagca

SEQ ID NO: 2826901 - RNA, 21 nt, Human
agcaaauacuuagcaaaaagu

SEQ ID NO: 2826902 - RNA, 22 nt, Human
agcaaauacuuagcaaaaagug

SEQ ID NO: 2826903 - RNA, 21 nt, Human
agcaaauaucauacuguucaa

SEQ ID NO: 2826904 - RNA, 19 nt, Human
agcaaaggcugagaacacu

SEQ ID NO: 2826905 - RNA, 12 nt, Human
agcaaagaucaa

SEQ ID NO: 2826906 - RNA, 13 nt, Human
agcaaagaucaaa

SEQ ID NO: 2826907 - RNA, 14 nt, Human
agcaaagaucaaaa

SEQ ID NO: 2826908 - RNA, 15 nt, Human
agcaaagaucaaaau

SEQ ID NO: 2826909 - RNA, 17 nt, Human
agcaaagaucaaaauaa

SEQ ID NO: 2826910 - RNA, 14 nt, Human
agcaaauuucaaaa

SEQ ID NO: 2826911 - RNA, 18 nt, Human
agcaaauuucaaaagaca

SEQ ID NO: 2826912 - RNA, 19 nt, Human
agcaaauuucaaaagacau

SEQ ID NO: 2826913 - RNA, 24 nt, Human
agcaaauuucaaaagacauguugu

SEQ ID NO: 2826914 - RNA, 16 nt, Human
agauugcaacaggcug

SEQ ID NO: 2826915 - RNA, 22 nt, Human
agauugaguauaaaaacuugaa

SEQ ID NO: 2826916 - RNA, 23 nt, Human
agauugaguauaaaaacuugaaa

SEQ ID NO: 2826917 - RNA, 19 nt, Human
agauugagagaagagacaa

SEQ ID NO: 2826918 - RNA, 18 nt, Human
agauugagagaagagaca

SEQ ID NO: 2826919 - RNA, 15 nt, Human
agauugagaaggaga

SEQ ID NO: 2826920 - RNA, 16 nt, Human
agauugagaaggagag

SEQ ID NO: 2826921 - RNA, 17 nt, Human
agauugagaaggagaga

SEQ ID NO: 2826922 - RNA, 18 nt, Human
agauugagaaggagagaa

SEQ ID NO: 2826923 - RNA, 19 nt, Human
agauugagaaggagagaaa

SEQ ID NO: 2826924 - RNA, 19 nt, Human
agauugcaacaggcugggc

SEQ ID NO: 2826925 - RNA, 17 nt, Human
agauugcaacaggcugg

SEQ ID NO: 2826926 - RNA, 19 nt, Human
agcaaaauugauguguuua

SEQ ID NO: 2826927 - RNA, 13 nt, Human
agcaaaauugaug

SEQ ID NO: 2826928 - RNA, 19 nt, Human
agauugcugaaaaaguaga

SEQ ID NO: 2826929 - RNA, 13 nt, Human
agauugcuaauug

SEQ ID NO: 2826930 - RNA, 16 nt, Human
agauugcuaauugcug

SEQ ID NO: 2826931 - RNA, 18 nt, Human
agauugcuaauugcuguu

SEQ ID NO: 2826932 - RNA, 19 nt, Human
agauugcuaauugcuguug

SEQ ID NO: 2826933 - RNA, 16 nt, Human
agauugccccaggucu

SEQ ID NO: 2826934 - RNA, 18 nt, Human
agauagagaguuguugug

SEQ ID NO: 2826935 - RNA, 22 nt, Human
agauagagaguuguuguguaca

SEQ ID NO: 2826936 - RNA, 20 nt, Human
agauauaacuauugcccagg

SEQ ID NO: 2826937 - RNA, 15 nt, Human
agauagggcugggca

SEQ ID NO: 2826938 - RNA, 18 nt, Human
agauagggcugggcaagg

SEQ ID NO: 2826939 - RNA, 12 nt, Human
agauaggaccuu

SEQ ID NO: 2826940 - RNA, 14 nt, Human
agauaggaccuugg

SEQ ID NO: 2826941 - RNA, 16 nt, Human
agauaggaccuugggc

SEQ ID NO: 2826942 - RNA, 17 nt, Human
agauaggaccuugggcc

SEQ ID NO: 2826943 - RNA, 18 nt, Human
agauaggaccuugggcca

SEQ ID NO: 2826944 - RNA, 14 nt, Human
agauagccuguggc

SEQ ID NO: 2826945 - RNA, 15 nt, Human
agauagccuguggcc

SEQ ID NO: 2826946 - RNA, 17 nt, Human
agauagccuguggcccu

SEQ ID NO: 2826947 - RNA, 18 nt, Human
agauagccuguggcccug

SEQ ID NO: 2826948 - RNA, 13 nt, Human
agauagcugcaug

SEQ ID NO: 2826949 - RNA, 14 nt, Human
agauagcugcaugu

SEQ ID NO: 2826950 - RNA, 21 nt, Human
agauagcugcauguggcuuuu

SEQ ID NO: 2826951 - RNA, 22 nt, Human
agaguguagaagcauuccuucu

SEQ ID NO: 2826952 - RNA, 20 nt, Human
agaguguaguuuacagaaaa

SEQ ID NO: 2826953 - RNA, 15 nt, Human
agagugucaaccaga

SEQ ID NO: 2826954 - RNA, 17 nt, Human
agagugucaaccagaca

SEQ ID NO: 2826955 - RNA, 18 nt, Human
agagugucaaccagacag

SEQ ID NO: 2826956 - RNA, 19 nt, Human
agagugucaaccagacaga

SEQ ID NO: 2826957 - RNA, 20 nt, Human
agagugucaaccagacagag

SEQ ID NO: 2826958 - RNA, 21 nt, Human
agagugucaaccagacagagg

SEQ ID NO: 2826959 - RNA, 22 nt, Human
agagugucaaccagacagaggg

SEQ ID NO: 2826960 - RNA, 21 nt, Human
agagugucucagggugcagag

SEQ ID NO: 2826961 - RNA, 15 nt, Human
agaguguagaagcau

SEQ ID NO: 2826962 - RNA, 16 nt, Human
agaguguagaagcauu

SEQ ID NO: 2826963 - RNA, 17 nt, Human
agaguguagaagcauuc

SEQ ID NO: 2826964 - RNA, 18 nt, Human
agaguguagaagcauucc

SEQ ID NO: 2826965 - RNA, 12 nt, Human
agaguguagaag

SEQ ID NO: 2826966 - RNA, 13 nt, Human
agaguguagaagc

SEQ ID NO: 2826967 - RNA, 14 nt, Human
agaguguagaagca

SEQ ID NO: 2826968 - RNA, 16 nt, Human
agauagaauuuccaau

SEQ ID NO: 2826969 - RNA, 13 nt, Human
agauagaauuucc

SEQ ID NO: 2826970 - RNA, 19 nt, Human
agaguugaggaacuguaca

SEQ ID NO: 2826971 - RNA, 20 nt, Human
agagggucugaggaauccag

SEQ ID NO: 2826972 - RNA, 15 nt, Human
agagggucacagugu

SEQ ID NO: 2826973 - RNA, 16 nt, Human
agaguggccuggccag

SEQ ID NO: 2826974 - RNA, 15 nt, Human
agaguggccuggcca

SEQ ID NO: 2826975 - RNA, 14 nt, Human
agaguggccuggcc

SEQ ID NO: 2826976 - RNA, 13 nt, Human
agaguggccuggc

SEQ ID NO: 2826977 - RNA, 12 nt, Human
agaguggccugg

SEQ ID NO: 2826978 - RNA, 22 nt, Human
agaguggccuggccaggagcuc

SEQ ID NO: 2826979 - RNA, 19 nt, Human
agaguggccuggccaggag

SEQ ID NO: 2826980 - RNA, 17 nt, Human
agaguggccuggccagg

SEQ ID NO: 2826981 - RNA, 12 nt, Human
agaguggcuccu

SEQ ID NO: 2826982 - RNA, 13 nt, Human
agaguggcuccuc

SEQ ID NO: 2826983 - RNA, 14 nt, Human
agaguggcuccucc

SEQ ID NO: 2826984 - RNA, 14 nt, Human
agauagauuuggaa

SEQ ID NO: 2826985 - RNA, 14 nt, Human
agauaugaauauau

SEQ ID NO: 2826986 - RNA, 13 nt, Human
agauaucuuuucu

SEQ ID NO: 2826987 - RNA, 14 nt, Human
agauaucuuuucuu

SEQ ID NO: 2826988 - RNA, 17 nt, Human
agauaucuuuucuuuag

SEQ ID NO: 2826989 - RNA, 18 nt, Human
agauaucuuuucuuuaga

SEQ ID NO: 2826990 - RNA, 23 nt, Human
agauaucuuuucuuuagagaacu

SEQ ID NO: 2826991 - RNA, 13 nt, Human
agauauauaucau

SEQ ID NO: 2826992 - RNA, 15 nt, Human
agauauacuuugugg

SEQ ID NO: 2826993 - RNA, 17 nt, Human
agauauacuuuguggac

SEQ ID NO: 2826994 - RNA, 23 nt, Human
agauauacuuuguggaccaauua

SEQ ID NO: 2826995 - RNA, 15 nt, Human
agcacuaggcaccca

SEQ ID NO: 2826996 - RNA, 23 nt, Human
agcacuagguucaauucccugaa

SEQ ID NO: 2826997 - RNA, 18 nt, Human
agcacucacgcccuaagc

SEQ ID NO: 2826998 - RNA, 15 nt, Human
agcacucaggcucuc

SEQ ID NO: 2826999 - RNA, 17 nt, Human
agcacucaggcucucca

SEQ ID NO: 2827000 - RNA, 18 nt, Human
agcacucaggcucuccau

SEQ ID NO: 2827001 - RNA, 19 nt, Human
agcacucaggcucuccauu

SEQ ID NO: 2827002 - RNA, 18 nt, Human
agcacucauuuucuauaa

SEQ ID NO: 2827003 - RNA, 17 nt, Human
agcagcuaaauuuucug

SEQ ID NO: 2827004 - RNA, 18 nt, Human
agcagcuaaauuuucuga

SEQ ID NO: 2827005 - RNA, 20 nt, Human
agcagcuagaaaacauuuuu

SEQ ID NO: 2827006 - RNA, 14 nt, Human
agcagccuguggca

SEQ ID NO: 2827007 - RNA, 13 nt, Human
agcagccuguggc

SEQ ID NO: 2827008 - RNA, 23 nt, Human
agcagccugagcaacucuugauu

SEQ ID NO: 2827009 - RNA, 16 nt, Human
agcagccugcuuccca

SEQ ID NO: 2827010 - RNA, 22 nt, Human
agcagccugcuucccaccuccc

SEQ ID NO: 2827011 - RNA, 13 nt, Human
agcagugcaggca

SEQ ID NO: 2827012 - RNA, 15 nt, Human
agcagugcaggcaca

SEQ ID NO: 2827013 - RNA, 14 nt, Human
agcaauuuucgaac

SEQ ID NO: 2827014 - RNA, 12 nt, Human
agcacaaacaca

SEQ ID NO: 2827015 - RNA, 13 nt, Human
agcacaaacacaa

SEQ ID NO: 2827016 - RNA, 14 nt, Human
agcacaaacacaag

SEQ ID NO: 2827017 - RNA, 22 nt, Human
agcaauuucgccguugaagagg

SEQ ID NO: 2827018 - RNA, 21 nt, Human
agcaauuucgccguugaagag

SEQ ID NO: 2827019 - RNA, 24 nt, Human
agcaauuuaauauuuugcacaguu

SEQ ID NO: 2827020 - RNA, 21 nt, Human
agcaauuucuugcucuaucuc

SEQ ID NO: 2827021 - RNA, 20 nt, Human
agcacuaaggugugcucuga

SEQ ID NO: 2827022 - RNA, 15 nt, Human
agcacagauuuuaau

SEQ ID NO: 2827023 - RNA, 16 nt, Human
agcacagauuuuaauu

SEQ ID NO: 2827024 - RNA, 17 nt, Human
agcacagauuuuaauug

SEQ ID NO: 2827025 - RNA, 21 nt, Human
agcacagauuuuaauugucau

SEQ ID NO: 2827026 - RNA, 14 nt, Human
agcacuacugggug

SEQ ID NO: 2827027 - RNA, 15 nt, Human
agcacuacugggugu

SEQ ID NO: 2827028 - RNA, 16 nt, Human
agcacuacuggguguc

SEQ ID NO: 2827029 - RNA, 17 nt, Human
agcacuacuggguguca

SEQ ID NO: 2827030 - RNA, 18 nt, Human
agcacuacugggugucau

SEQ ID NO: 2827031 - RNA, 19 nt, Human
agcacuacugggugucauu

SEQ ID NO: 2827032 - RNA, 20 nt, Human
agcacuacugggugucauuu

SEQ ID NO: 2827033 - RNA, 22 nt, Human
agcacuacugggugucauuuca

SEQ ID NO: 2827034 - RNA, 23 nt, Human
agcacuacugggugucauuucau

SEQ ID NO: 2827035 - RNA, 13 nt, Human
agcacuagagaau

SEQ ID NO: 2827036 - RNA, 15 nt, Human
agcacuagagaaugc

SEQ ID NO: 2827037 - RNA, 16 nt, Human
agcacuagagaaugca

SEQ ID NO: 2827038 - RNA, 17 nt, Human
agcacuagagaaugcac

SEQ ID NO: 2827039 - RNA, 20 nt, Human
agcacuagagaaugcacaga

SEQ ID NO: 2827040 - RNA, 17 nt, Human
agcacagauaaaaagug

SEQ ID NO: 2827041 - RNA, 19 nt, Human
agcacagauaaaaagugga

SEQ ID NO: 2827042 - RNA, 20 nt, Human
agcacagauaaaaaguggaa

SEQ ID NO: 2827043 - RNA, 21 nt, Human
agcacagauaaaaaguggaau

SEQ ID NO: 2827044 - RNA, 23 nt, Human
agcaauuuaauauuuugcacagu

SEQ ID NO: 2827045 - RNA, 20 nt, Human
agcaauuuauacaauaucau

SEQ ID NO: 2827046 - RNA, 19 nt, Human
agcaauuuaaauguuauga

SEQ ID NO: 2827047 - RNA, 17 nt, Human
agcaauuuaacuagaca

SEQ ID NO: 2827048 - RNA, 19 nt, Human
agcaauuuaacuagacaca

SEQ ID NO: 2827049 - RNA, 22 nt, Human
agcaauuuaacuagacacagau

SEQ ID NO: 2827050 - RNA, 13 nt, Human
agcaauuuaaaug

SEQ ID NO: 2827051 - RNA, 17 nt, Human
agcaauuuaaauguuau

SEQ ID NO: 2827052 - RNA, 16 nt, Human
agcaauuuaaauguua

SEQ ID NO: 2827053 - RNA, 20 nt, Human
agcaauucuccugccucagc

SEQ ID NO: 2827054 - RNA, 19 nt, Human
agcaauucuccugccucag

SEQ ID NO: 2827055 - RNA, 18 nt, Human
agcaauucuccugccuca

SEQ ID NO: 2827056 - RNA, 17 nt, Human
agcaauucuccugccuc

SEQ ID NO: 2827057 - RNA, 15 nt, Human
agcaauucuccugcc

SEQ ID NO: 2827058 - RNA, 23 nt, Human
agccaaggugggcugagcccugg

SEQ ID NO: 2827059 - RNA, 18 nt, Human
agccaaggugucauuuau

SEQ ID NO: 2827060 - RNA, 22 nt, Human
agccaaggugggcugagcccug

SEQ ID NO: 2827061 - RNA, 17 nt, Human
agccauuuugugaaugg

SEQ ID NO: 2827062 - RNA, 19 nt, Human
agccauuuugugaauggau

SEQ ID NO: 2827063 - RNA, 14 nt, Human
agccauuuugugaa

SEQ ID NO: 2827064 - RNA, 15 nt, Human
agccauuuugugaau

SEQ ID NO: 2827065 - RNA, 16 nt, Human
agccauuuugugaaug

SEQ ID NO: 2827066 - RNA, 13 nt, Human
agcccaccuuggc

SEQ ID NO: 2827067 - RNA, 14 nt, Human
agcccacccugcug

SEQ ID NO: 2827068 - RNA, 16 nt, Human
agcccacccugcugcc

SEQ ID NO: 2827069 - RNA, 13 nt, Human
agcccacccugcu

SEQ ID NO: 2827070 - RNA, 22 nt, Human
agcaucucuugaggccaggagu

SEQ ID NO: 2827071 - RNA, 17 nt, Human
agcaucugcauugccca

SEQ ID NO: 2827072 - RNA, 19 nt, Human
agcaucugcauugcccagu

SEQ ID NO: 2827073 - RNA, 24 nt, Human
agcaucugcauugcccagucuuuc

SEQ ID NO: 2827074 - RNA, 19 nt, Human
agcaucucuugaggccagg

SEQ ID NO: 2827075 - RNA, 17 nt, Human
agcaucucuugaggcca

SEQ ID NO: 2827076 - RNA, 21 nt, Human
agccaacgacaaagccaaacu

SEQ ID NO: 2827077 - RNA, 12 nt, Human
agcaucuguaca

SEQ ID NO: 2827078 - RNA, 13 nt, Human
agcaucuguacaa

SEQ ID NO: 2827079 - RNA, 17 nt, Human
agcaucuguacaaaggg

SEQ ID NO: 2827080 - RNA, 15 nt, Human
agccaacuuuugcau

SEQ ID NO: 2827081 - RNA, 16 nt, Human
agccaagaaagaugua

SEQ ID NO: 2827082 - RNA, 17 nt, Human
agccaagaaagauguau

SEQ ID NO: 2827083 - RNA, 20 nt, Human
agccaaggugggcugagccc

SEQ ID NO: 2827084 - RNA, 19 nt, Human
agccaaggugggcugagcc

SEQ ID NO: 2827085 - RNA, 14 nt, Human
agcaucucaugagu

SEQ ID NO: 2827086 - RNA, 20 nt, Human
agcaucucagccuaccauga

SEQ ID NO: 2827087 - RNA, 12 nt, Human
agcaucuaaguu

SEQ ID NO: 2827088 - RNA, 20 nt, Human
agcaucuaaguuauaagacu

SEQ ID NO: 2827089 - RNA, 22 nt, Human
agcaucuaaguuauaagacucu

SEQ ID NO: 2827090 - RNA, 23 nt, Human
agcaucuaaguuauaagacucuc

SEQ ID NO: 2827091 - RNA, 21 nt, Human
auuuuaagacguguuuguguu

SEQ ID NO: 2827092 - RNA, 20 nt, Human
auuuuaagacguguuugugu

SEQ ID NO: 2827093 - RNA, 14 nt, Human
auuuuaagcauugu

SEQ ID NO: 2827094 - RNA, 15 nt, Human
auuuuaagcauugug

SEQ ID NO: 2827095 - RNA, 17 nt, Human
auuuuaagcauugugag

SEQ ID NO: 2827096 - RNA, 19 nt, Human
auuuuaagcauugugagua

SEQ ID NO: 2827097 - RNA, 14 nt, Human
auuuuaagcacucu

SEQ ID NO: 2827098 - RNA, 21 nt, Human
auuuuaagcacucuuaaagca

SEQ ID NO: 2827099 - RNA, 22 nt, Human
auuuuaagcacucuuaaagcaa

SEQ ID NO: 2827100 - RNA, 21 nt, Human
auuuguacauauguaaaauaa

SEQ ID NO: 2827101 - RNA, 19 nt, Human
auuuguacauauguaaaau

SEQ ID NO: 2827102 - RNA, 18 nt, Human
auuuguacauauguaaaa

SEQ ID NO: 2827103 - RNA, 16 nt, Human
auuuguacauauguaa

SEQ ID NO: 2827104 - RNA, 19 nt, Human
auuuuaaaucuaaaucuau

SEQ ID NO: 2827105 - RNA, 21 nt, Human
auuuuaaaucuaaaucuauuu

SEQ ID NO: 2827106 - RNA, 16 nt, Human
auuuuaaauaaaagaa

SEQ ID NO: 2827107 - RNA, 15 nt, Human
auuuuaaauaaaaga

SEQ ID NO: 2827108 - RNA, 14 nt, Human
auuuuaaauaaaag

SEQ ID NO: 2827109 - RNA, 13 nt, Human
caaagaaaugaac

SEQ ID NO: 2827110 - RNA, 14 nt, Human
caaagaaaugaaca

SEQ ID NO: 2827111 - RNA, 15 nt, Human
caaagaaaugaacau

SEQ ID NO: 2827112 - RNA, 16 nt, Human
caaagaaaugaacauu

SEQ ID NO: 2827113 - RNA, 17 nt, Human
caaagaaaugaacauuc

SEQ ID NO: 2827114 - RNA, 18 nt, Human
caaagaaaugaacauucc

SEQ ID NO: 2827115 - RNA, 19 nt, Human
caaagaaaugaacauucca

SEQ ID NO: 2827116 - RNA, 20 nt, Human
caaagaaaugaacauuccaa

SEQ ID NO: 2827117 - RNA, 22 nt, Human
caaacugcuggacgucuuucuu

SEQ ID NO: 2827118 - RNA, 12 nt, Human
caaacuggaguc

SEQ ID NO: 2827119 - RNA, 16 nt, Human
caaacuggagucugga

SEQ ID NO: 2827120 - RNA, 17 nt, Human
caaacuggagucuggag

SEQ ID NO: 2827121 - RNA, 20 nt, Human
caaacuggagucuggagugg

SEQ ID NO: 2827122 - RNA, 23 nt, Human
caaacuggagucuggagugggca

SEQ ID NO: 2827123 - RNA, 15 nt, Human
caaagaauaagaaaa

SEQ ID NO: 2827124 - RNA, 20 nt, Human
caaagaauguuagagcacag

SEQ ID NO: 2827125 - RNA, 22 nt, Human
caaagaauguuagagcacagua

SEQ ID NO: 2827126 - RNA, 19 nt, Human
caaagaaucccuagacuuu

SEQ ID NO: 2827127 - RNA, 20 nt, Human
caaagaaucccuagacuuua

SEQ ID NO: 2827128 - RNA, 23 nt, Human
caaagaaucccuagacuuuaggc

SEQ ID NO: 2827129 - RNA, 16 nt, Human
caaagagguauuuauc

SEQ ID NO: 2827130 - RNA, 14 nt, Human
caaagaguagaauu

SEQ ID NO: 2827131 - RNA, 13 nt, Human
caaagcccagcuu

SEQ ID NO: 2827132 - RNA, 21 nt, Human
caaaguucuaauaauuucuaa

SEQ ID NO: 2827133 - RNA, 22 nt, Human
caaaguucuaauaauuucuaau

SEQ ID NO: 2827134 - RNA, 15 nt, Human
caaaguucuguguuu

SEQ ID NO: 2827135 - RNA, 17 nt, Human
caaaguucuguguuuaa

SEQ ID NO: 2827136 - RNA, 20 nt, Human
caaaguucuguguuuaauuu

SEQ ID NO: 2827137 - RNA, 22 nt, Human
caaaguucuguguuuaauuucu

SEQ ID NO: 2827138 - RNA, 21 nt, Human
caaaguucccuacuuccugug

SEQ ID NO: 2827139 - RNA, 22 nt, Human
caaaguucccuacuuccuguga

SEQ ID NO: 2827140 - RNA, 22 nt, Human
caaagugguagguacuuuuugu

SEQ ID NO: 2827141 - RNA, 20 nt, Human
caaaguucuaauaauuucua

SEQ ID NO: 2827142 - RNA, 18 nt, Human
caaauauuguugacaacu

SEQ ID NO: 2827143 - RNA, 23 nt, Human
caaaguucuaauaauuucuaaug

SEQ ID NO: 2827144 - RNA, 13 nt, Human
caaauauucagaa

SEQ ID NO: 2827145 - RNA, 15 nt, Human
caaauauucagaaua

SEQ ID NO: 2827146 - RNA, 22 nt, Human
caaauauuguugacaacuguga

SEQ ID NO: 2827147 - RNA, 23 nt, Human
caaauauuguugacaacugugac

SEQ ID NO: 2827148 - RNA, 14 nt, Human
caaauauuuauuuu

SEQ ID NO: 2827149 - RNA, 12 nt, Human
caaauauuuauu

SEQ ID NO: 2827150 - RNA, 16 nt, Human
caaauauuuauuuucu

SEQ ID NO: 2827151 - RNA, 15 nt, Human
caaauauuuauuuuc

SEQ ID NO: 2827152 - RNA, 14 nt, Human
caaauuaaaaagau

SEQ ID NO: 2827153 - RNA, 15 nt, Human
caaauuaaaaagauu

SEQ ID NO: 2827154 - RNA, 18 nt, Human
caaauuaaaaagauucuu

SEQ ID NO: 2827155 - RNA, 19 nt, Human
caaauuaaaaagauucuuu

SEQ ID NO: 2827156 - RNA, 21 nt, Human
caaauuaaaaagauucuuuuu

SEQ ID NO: 2827157 - RNA, 22 nt, Human
caaauuaaaaagauucuuuuuc

SEQ ID NO: 2827158 - RNA, 23 nt, Human
caaauuaaaaagauucuuuuucu

SEQ ID NO: 2827159 - RNA, 22 nt, Human
caaauugcacagaaguccugua

SEQ ID NO: 2827160 - RNA, 14 nt, Human
caaauugagacagu

SEQ ID NO: 2827161 - RNA, 23 nt, Human
caaauugagacagugcacaugaa

SEQ ID NO: 2827162 - RNA, 14 nt, Human
caaauucuuuugaa

SEQ ID NO: 2827163 - RNA, 16 nt, Human
caaauucuuuugaauu

SEQ ID NO: 2827164 - RNA, 17 nt, Human
caaauucuuuugaauug

SEQ ID NO: 2827165 - RNA, 18 nt, Human
caaauucuuuugaauugu

SEQ ID NO: 2827166 - RNA, 21 nt, Human
caaauucuuuugaauuguuac

SEQ ID NO: 2827167 - RNA, 23 nt, Human
caaauucuuuugaauuguuacau

SEQ ID NO: 2827168 - RNA, 19 nt, Human
caaauuggacuuucaaaau

SEQ ID NO: 2827169 - RNA, 21 nt, Human
caaauuggacuuucaaaauua

SEQ ID NO: 2827170 - RNA, 22 nt, Human
caaauugcuccuaagcuucaaa

SEQ ID NO: 2827171 - RNA, 23 nt, Human
caaagccccuugcucuccccugc

SEQ ID NO: 2827172 - RNA, 17 nt, Human
caaaggacauuaugugu

SEQ ID NO: 2827173 - RNA, 18 nt, Human
caaaggacauuaugugug

SEQ ID NO: 2827174 - RNA, 19 nt, Human
caaaggacauuaugugugc

SEQ ID NO: 2827175 - RNA, 20 nt, Human
caaaggacauuaugugugca

SEQ ID NO: 2827176 - RNA, 22 nt, Human
caaagggagcacuggguugacu

SEQ ID NO: 2827177 - RNA, 18 nt, Human
caaagggaaauaucauuu

SEQ ID NO: 2827178 - RNA, 15 nt, Human
caaagggaaauauca

SEQ ID NO: 2827179 - RNA, 17 nt, Human
caaagggaaauaucauu

SEQ ID NO: 2827180 - RNA, 13 nt, Human
caaaggcugggac

SEQ ID NO: 2827181 - RNA, 15 nt, Human
caaaggcugguggca

SEQ ID NO: 2827182 - RNA, 23 nt, Human
caaaggguaucaggugcugccau

SEQ ID NO: 2827183 - RNA, 21 nt, Human
caaaggguaucaggugcugcc

SEQ ID NO: 2827184 - RNA, 20 nt, Human
caaaggguaucaggugcugc

SEQ ID NO: 2827185 - RNA, 12 nt, Human
caaagggcccag

SEQ ID NO: 2827186 - RNA, 14 nt, Human
caaagggcccagau

SEQ ID NO: 2827187 - RNA, 20 nt, Human
caaagggcacagcaucugua

SEQ ID NO: 2827188 - RNA, 21 nt, Human
caaagggcacagcaucuguag

SEQ ID NO: 2827189 - RNA, 23 nt, Human
caaagggcacagcaucuguaguc

SEQ ID NO: 2827190 - RNA, 17 nt, Human
caaaggggaaagaacau

SEQ ID NO: 2827191 - RNA, 21 nt, Human
caaaggggaaagaacauaaag

SEQ ID NO: 2827192 - RNA, 15 nt, Human
caaaggggacaggcc

SEQ ID NO: 2827193 - RNA, 18 nt, Human
caaaggggacaggccuca

SEQ ID NO: 2827194 - RNA, 19 nt, Human
caaaggggacaggccucac

SEQ ID NO: 2827195 - RNA, 21 nt, Human
caaaggggacaggccucaccu

SEQ ID NO: 2827196 - RNA, 19 nt, Human
caaaggggaucauaaaguu

SEQ ID NO: 2827197 - RNA, 20 nt, Human
caaaggggaucauaaaguua

SEQ ID NO: 2827198 - RNA, 20 nt, Human
caacaggcugggcuucagug

SEQ ID NO: 2827199 - RNA, 15 nt, Human
caagaccuaggcuca

SEQ ID NO: 2827200 - RNA, 15 nt, Human
caagaaaucccuguu

SEQ ID NO: 2827201 - RNA, 14 nt, Human
caagaaaucccugu

SEQ ID NO: 2827202 - RNA, 14 nt, Human
caacuucuucagag

SEQ ID NO: 2827203 - RNA, 12 nt, Human
caacugugacug

SEQ ID NO: 2827204 - RNA, 13 nt, Human
caacuguggcugg

SEQ ID NO: 2827205 - RNA, 14 nt, Human
caacuguguagcau

SEQ ID NO: 2827206 - RNA, 15 nt, Human
caacuucucuugcuu

SEQ ID NO: 2827207 - RNA, 19 nt, Human
caacuucucuugcuuucua

SEQ ID NO: 2827208 - RNA, 20 nt, Human
caacuucuuuuuauuuucuu

SEQ ID NO: 2827209 - RNA, 23 nt, Human
caacuugaaauuauaucuguggu

SEQ ID NO: 2827210 - RNA, 24 nt, Human
caacuugaaauuauaucugugguc

SEQ ID NO: 2827211 - RNA, 19 nt, Human
caacuugaacuucaccugc

SEQ ID NO: 2827212 - RNA, 20 nt, Human
caacuugaacuucaccugca

SEQ ID NO: 2827213 - RNA, 9 nt, Human
caacuugag

SEQ ID NO: 2827214 - RNA, 16 nt, Human
caacuugagauguaug

SEQ ID NO: 2827215 - RNA, 21 nt, Human
caacuugagauguaugaaggc

SEQ ID NO: 2827216 - RNA, 22 nt, Human
caacuugagauguaugaaggcu

SEQ ID NO: 2827217 - RNA, 13 nt, Human
caacuugagggcc

SEQ ID NO: 2827218 - RNA, 18 nt, Human
caacuucuucagagcuga

SEQ ID NO: 2827219 - RNA, 16 nt, Human
caacuugagggcccag

SEQ ID NO: 2827220 - RNA, 19 nt, Human
caacuugagggcccagagc

SEQ ID NO: 2827221 - RNA, 20 nt, Human
caacuugagggcccagagca

SEQ ID NO: 2827222 - RNA, 21 nt, Human
caacuugagggcccagagcag

SEQ ID NO: 2827223 - RNA, 22 nt, Human
caacuugagggcccagagcagg

SEQ ID NO: 2827224 - RNA, 22 nt, Human
caacuugcauccaacuccagga

SEQ ID NO: 2827225 - RNA, 17 nt, Human
caagagggucugaggaa

SEQ ID NO: 2827226 - RNA, 16 nt, Human
caagagggucugagga

SEQ ID NO: 2827227 - RNA, 12 nt, Human
caagagggucug

SEQ ID NO: 2827228 - RNA, 20 nt, Human
caagcagagguggccagagc

SEQ ID NO: 2827229 - RNA, 18 nt, Human
caagcagagugcacagcu

SEQ ID NO: 2827230 - RNA, 19 nt, Human
caagcagagugcacagcug

SEQ ID NO: 2827231 - RNA, 20 nt, Human
caagcagagugcacagcugu

SEQ ID NO: 2827232 - RNA, 21 nt, Human
caagcagagugcacagcuguc

SEQ ID NO: 2827233 - RNA, 16 nt, Human
caagcagauacugcug

SEQ ID NO: 2827234 - RNA, 17 nt, Human
caagcagauacugcugu

SEQ ID NO: 2827235 - RNA, 19 nt, Human
caagcagauacugcugugu

SEQ ID NO: 2827236 - RNA, 23 nt, Human
caagcagauacugcuguguaaug

SEQ ID NO: 2827237 - RNA, 15 nt, Human
caagagguacagggu

SEQ ID NO: 2827238 - RNA, 21 nt, Human
caagagguacaggguuuuuac

SEQ ID NO: 2827239 - RNA, 15 nt, Human
caagaggugggaggg

SEQ ID NO: 2827240 - RNA, 16 nt, Human
caagaggugggagggc

SEQ ID NO: 2827241 - RNA, 22 nt, Human
caagaggguccuuuaguaccug

SEQ ID NO: 2827242 - RNA, 21 nt, Human
caagcagccugagcaacucuu

SEQ ID NO: 2827243 - RNA, 22 nt, Human
caagcagcgaccgcccccuccu

SEQ ID NO: 2827244 - RNA, 17 nt, Human
caagcagcaucuucugg

SEQ ID NO: 2827245 - RNA, 17 nt, Human
caagcagagguggccag

SEQ ID NO: 2827246 - RNA, 18 nt, Human
caagcagagguggccaga

SEQ ID NO: 2827247 - RNA, 12 nt, Human
caagcagccaag

SEQ ID NO: 2827248 - RNA, 18 nt, Human
caagagaaaggccugcac

SEQ ID NO: 2827249 - RNA, 20 nt, Human
caagagaaaggccugcacac

SEQ ID NO: 2827250 - RNA, 21 nt, Human
caagagaaaggccugcacaca

SEQ ID NO: 2827251 - RNA, 22 nt, Human
caagagaaaggccugcacacaa

SEQ ID NO: 2827252 - RNA, 22 nt, Human
caagacuggaagguggggacag

SEQ ID NO: 2827253 - RNA, 20 nt, Human
caagacuuggcaacagaagc

SEQ ID NO: 2827254 - RNA, 15 nt, Human
caagacuuggcaaca

SEQ ID NO: 2827255 - RNA, 17 nt, Human
caagagcccccuugaca

SEQ ID NO: 2827256 - RNA, 22 nt, Human
caagagcccccuugacaccggg

SEQ ID NO: 2827257 - RNA, 12 nt, Human
caagagccugau

SEQ ID NO: 2827258 - RNA, 14 nt, Human
caagagccugaucu

SEQ ID NO: 2827259 - RNA, 16 nt, Human
caagagccugaucucu

SEQ ID NO: 2827260 - RNA, 19 nt, Human
caagagccugaucucuucc

SEQ ID NO: 2827261 - RNA, 20 nt, Human
caagagccugaucucuuccu

SEQ ID NO: 2827262 - RNA, 21 nt, Human
caagagccugaucucuuccug

SEQ ID NO: 2827263 - RNA, 22 nt, Human
caagagccugaucucuuccugu

SEQ ID NO: 2827264 - RNA, 23 nt, Human
caagagccugaucucuuccuguu

SEQ ID NO: 2827265 - RNA, 17 nt, Human
caagagggcacuggugg

SEQ ID NO: 2827266 - RNA, 18 nt, Human
caagagggcacugguggc

SEQ ID NO: 2827267 - RNA, 19 nt, Human
caagagggcacugguggcc

SEQ ID NO: 2827268 - RNA, 20 nt, Human
caagagggcacugguggccc

SEQ ID NO: 2827269 - RNA, 20 nt, Human
caagcaugcuugugaaaaug

SEQ ID NO: 2827270 - RNA, 15 nt, Human
caagcaucaggggga

SEQ ID NO: 2827271 - RNA, 22 nt, Human
caagcaucagggggaagaagca

SEQ ID NO: 2827272 - RNA, 17 nt, Human
caagccaagaaagaugu

SEQ ID NO: 2827273 - RNA, 19 nt, Human
caagccaacgacaaagcca

SEQ ID NO: 2827274 - RNA, 18 nt, Human
caagccaacgacaaagcc

SEQ ID NO: 2827275 - RNA, 23 nt, Human
caagcauugcuucagaaugaauu

SEQ ID NO: 2827276 - RNA, 14 nt, Human
caagccagcuggag

SEQ ID NO: 2827277 - RNA, 23 nt, Human
caagccaaaguggcauguuuugu

SEQ ID NO: 2827278 - RNA, 17 nt, Human
caagccauguauaaaug

SEQ ID NO: 2827279 - RNA, 19 nt, Human
caagccauguauaaaugug

SEQ ID NO: 2827280 - RNA, 21 nt, Human
caagccauguauaaaugugau

SEQ ID NO: 2827281 - RNA, 22 nt, Human
caagcccacagcacagcucccu

SEQ ID NO: 2827282 - RNA, 14 nt, Human
caagcccccccuuc

SEQ ID NO: 2827283 - RNA, 16 nt, Human
caagcccccccuucca

SEQ ID NO: 2827284 - RNA, 15 nt, Human
caagcccaggccacc

SEQ ID NO: 2827285 - RNA, 14 nt, Human
caagcccaggugcc

SEQ ID NO: 2827286 - RNA, 21 nt, Human
caagcccaggugccagccuga

SEQ ID NO: 2827287 - RNA, 22 nt, Human
caagcccaggugccagccugag

SEQ ID NO: 2827288 - RNA, 21 nt, Human
caaggacuaggguccugggga

SEQ ID NO: 2827289 - RNA, 20 nt, Human
caaggacuaggguccugggg

SEQ ID NO: 2827290 - RNA, 19 nt, Human
caaggacuaggguccuggg

SEQ ID NO: 2827291 - RNA, 18 nt, Human
caaggacuaggguccugg

SEQ ID NO: 2827292 - RNA, 14 nt, Human
caaggacuaggguc

SEQ ID NO: 2827293 - RNA, 16 nt, Human
caaggacuaggguccu

SEQ ID NO: 2827294 - RNA, 14 nt, Human
caagcuguuuucuu

SEQ ID NO: 2827295 - RNA, 20 nt, Human
caagcuuguuaucagcuuuc

SEQ ID NO: 2827296 - RNA, 16 nt, Human
caagcuguuuucuucu

SEQ ID NO: 2827297 - RNA, 14 nt, Human
caaggacugaggga

SEQ ID NO: 2827298 - RNA, 15 nt, Human
caaggacugagggac

SEQ ID NO: 2827299 - RNA, 23 nt, Human
caagggaauuucuucaacucccu

SEQ ID NO: 2827300 - RNA, 17 nt, Human
caaggucauggccacac

SEQ ID NO: 2827301 - RNA, 19 nt, Human
caaggucauggccacacug

SEQ ID NO: 2827302 - RNA, 20 nt, Human
caaggucauggccacacugu

SEQ ID NO: 2827303 - RNA, 22 nt, Human
caaggucauggccacacuguga

SEQ ID NO: 2827304 - RNA, 23 nt, Human
caaggucauggccacacugugac

SEQ ID NO: 2827305 - RNA, 15 nt, Human
caaggucauuucuuc

SEQ ID NO: 2827306 - RNA, 17 nt, Human
caaggggccauuuggca

SEQ ID NO: 2827307 - RNA, 23 nt, Human
caaggggaauguuugccucugcc

SEQ ID NO: 2827308 - RNA, 19 nt, Human
caaggggagucaccuuccc

SEQ ID NO: 2827309 - RNA, 20 nt, Human
caaggggagucaccuucccu

SEQ ID NO: 2827310 - RNA, 23 nt, Human
caaggggagucaccuucccuugc

SEQ ID NO: 2827311 - RNA, 21 nt, Human
caaggggaauguuugccucug

SEQ ID NO: 2827312 - RNA, 13 nt, Human
caagggauggugc

SEQ ID NO: 2827313 - RNA, 19 nt, Human
caagggcaaaaagucuaca

SEQ ID NO: 2827314 - RNA, 14 nt, Human
caagggcagaaagu

SEQ ID NO: 2827315 - RNA, 17 nt, Human
caagggcaugagcauug

SEQ ID NO: 2827316 - RNA, 19 nt, Human
caagggacaaggacacgcg

SEQ ID NO: 2827317 - RNA, 18 nt, Human
caagggagguaagggagg

SEQ ID NO: 2827318 - RNA, 20 nt, Human
caagugauucuccugccuca

SEQ ID NO: 2827319 - RNA, 19 nt, Human
caagugacuguaucugugu

SEQ ID NO: 2827320 - RNA, 18 nt, Human
caagugacuguaucugug

SEQ ID NO: 2827321 - RNA, 20 nt, Human
caagugccagucuugugucu

SEQ ID NO: 2827322 - RNA, 16 nt, Human
caagugccgcaaauug

SEQ ID NO: 2827323 - RNA, 17 nt, Human
caagugccgcaaauugu

SEQ ID NO: 2827324 - RNA, 18 nt, Human
caagugccgcaaauugua

SEQ ID NO: 2827325 - RNA, 21 nt, Human
caagugacuguaucuguguag

SEQ ID NO: 2827326 - RNA, 15 nt, Human
caagugccaaaugcu

SEQ ID NO: 2827327 - RNA, 16 nt, Human
caagugccaaaugcuc

SEQ ID NO: 2827328 - RNA, 18 nt, Human
caagugauucuccugccu

SEQ ID NO: 2827329 - RNA, 19 nt, Human
caagugauucuccugccuc

SEQ ID NO: 2827330 - RNA, 16 nt, Human
caagugacaucucuuu

SEQ ID NO: 2827331 - RNA, 15 nt, Human
caagugacaucucuu

SEQ ID NO: 2827332 - RNA, 20 nt, Human
caagugaaauaacaaaaugg

SEQ ID NO: 2827333 - RNA, 21 nt, Human
caagugaaauaacaaaaugga

SEQ ID NO: 2827334 - RNA, 22 nt, Human
caagugaaauaacaaaauggac

SEQ ID NO: 2827335 - RNA, 21 nt, Human
caagguuuaaagagucuagau

SEQ ID NO: 2827336 - RNA, 18 nt, Human
caagguuuaaagagucua

SEQ ID NO: 2827337 - RNA, 20 nt, Human
caagguuuaaagagucuaga

SEQ ID NO: 2827338 - RNA, 22 nt, Human
caagguuuaaagagucuagauu

SEQ ID NO: 2827339 - RNA, 16 nt, Human
caagguucccuugugg

SEQ ID NO: 2827340 - RNA, 13 nt, Human
caagguucuaacc

SEQ ID NO: 2827341 - RNA, 17 nt, Human
caagguuuaaagagucu

SEQ ID NO: 2827342 - RNA, 14 nt, Human
caagguuccacaga

SEQ ID NO: 2827343 - RNA, 15 nt, Human
caagguuccacagag

SEQ ID NO: 2827344 - RNA, 16 nt, Human
caagguuccacagagu

SEQ ID NO: 2827345 - RNA, 17 nt, Human
caagguuccacagagua

SEQ ID NO: 2827346 - RNA, 18 nt, Human
caagguuccacagaguaa

SEQ ID NO: 2827347 - RNA, 14 nt, Human
caacaggcugggcu

SEQ ID NO: 2827348 - RNA, 17 nt, Human
caacaggcugggcuuca

SEQ ID NO: 2827349 - RNA, 11 nt, Human
caacagugagu

SEQ ID NO: 2827350 - RNA, 12 nt, Human
caacagugaguc

SEQ ID NO: 2827351 - RNA, 21 nt, Human
caaauuuagaaacuaauugac

SEQ ID NO: 2827352 - RNA, 22 nt, Human
caaauuuagaaacuaauugacu

SEQ ID NO: 2827353 - RNA, 13 nt, Human
caacaggcugggc

SEQ ID NO: 2827354 - RNA, 14 nt, Human
caacaguuccuuca

SEQ ID NO: 2827355 - RNA, 16 nt, Human
caacauaacccacuug

SEQ ID NO: 2827356 - RNA, 17 nt, Human
caacauaacccacuugu

SEQ ID NO: 2827357 - RNA, 18 nt, Human
caacauaacccacuuguc

SEQ ID NO: 2827358 - RNA, 14 nt, Human
caaccuaaccugug

SEQ ID NO: 2827359 - RNA, 16 nt, Human
caaccuaaccuguguc

SEQ ID NO: 2827360 - RNA, 17 nt, Human
caaccuaaccugugucu

SEQ ID NO: 2827361 - RNA, 19 nt, Human
caaccuaaccugugucugc

SEQ ID NO: 2827362 - RNA, 16 nt, Human
caacauaaucuaguuu

SEQ ID NO: 2827363 - RNA, 14 nt, Human
caaccucauugaca

SEQ ID NO: 2827364 - RNA, 13 nt, Human
caacugggcccaa

SEQ ID NO: 2827365 - RNA, 19 nt, Human
caacuggacauugucugcg

SEQ ID NO: 2827366 - RNA, 19 nt, Human
caacugcaauaacuucuga

SEQ ID NO: 2827367 - RNA, 23 nt, Human
caacugcaauaacuucugaccuu

SEQ ID NO: 2827368 - RNA, 18 nt, Human
caacugucuuauuuaaug

SEQ ID NO: 2827369 - RNA, 16 nt, Human
caacuguguucauuag

SEQ ID NO: 2827370 - RNA, 12 nt, Human
caacuguguugu

SEQ ID NO: 2827371 - RNA, 14 nt, Human
caacuguguuguau

SEQ ID NO: 2827372 - RNA, 15 nt, Human
caacuguguuguauu

SEQ ID NO: 2827373 - RNA, 16 nt, Human
caacuguguuguauua

SEQ ID NO: 2827374 - RNA, 17 nt, Human
caacuguguuguauuaa

SEQ ID NO: 2827375 - RNA, 19 nt, Human
caacuguguuguauuaaca

SEQ ID NO: 2827376 - RNA, 21 nt, Human
caacuguguuguauuaacaaa

SEQ ID NO: 2827377 - RNA, 12 nt, Human
caacuguauaua

SEQ ID NO: 2827378 - RNA, 13 nt, Human
caacuguauauau

SEQ ID NO: 2827379 - RNA, 15 nt, Human
caacuguauauauuc

SEQ ID NO: 2827380 - RNA, 19 nt, Human
caacugcaaagaaaguggg

SEQ ID NO: 2827381 - RNA, 23 nt, Human
caacugcaaagaaagugggaggu

SEQ ID NO: 2827382 - RNA, 12 nt, Human
caacugcaacuc

SEQ ID NO: 2827383 - RNA, 11 nt, Human
caacugacaca

SEQ ID NO: 2827384 - RNA, 13 nt, Human
caacugacacagg

SEQ ID NO: 2827385 - RNA, 14 nt, Human
caacugacacagga

SEQ ID NO: 2827386 - RNA, 15 nt, Human
caacugacacaggaa

SEQ ID NO: 2827387 - RNA, 16 nt, Human
caacugacacaggaaa

SEQ ID NO: 2827388 - RNA, 13 nt, Human
caacugacacucc

SEQ ID NO: 2827389 - RNA, 14 nt, Human
caacugacacuccc

SEQ ID NO: 2827390 - RNA, 17 nt, Human
caacugacacucccacc

SEQ ID NO: 2827391 - RNA, 16 nt, Human
caaccucccaacccag

SEQ ID NO: 2827392 - RNA, 17 nt, Human
caaccucccaacccaga

SEQ ID NO: 2827393 - RNA, 13 nt, Human
caaccucccucuu

SEQ ID NO: 2827394 - RNA, 15 nt, Human
caaccucccucuugu

SEQ ID NO: 2827395 - RNA, 16 nt, Human
caaccucccucuuguu

SEQ ID NO: 2827396 - RNA, 17 nt, Human
caaccucccucuuguuu

SEQ ID NO: 2827397 - RNA, 18 nt, Human
caaccucccucuuguuuu

SEQ ID NO: 2827398 - RNA, 19 nt, Human
caaccucccucuuguuuug

SEQ ID NO: 2827399 - RNA, 20 nt, Human
caaccucccucuuguuuugu

SEQ ID NO: 2827400 - RNA, 12 nt, Human
caacucuugauu

SEQ ID NO: 2827401 - RNA, 18 nt, Human
caacucuugauuauccau

SEQ ID NO: 2827402 - RNA, 16 nt, Human
caacucuugauuaucc

SEQ ID NO: 2827403 - RNA, 20 nt, Human
cacaagaaauuugauuucua

SEQ ID NO: 2827404 - RNA, 12 nt, Human
cacaagaaauuu

SEQ ID NO: 2827405 - RNA, 14 nt, Human
cacaagaaauuuga

SEQ ID NO: 2827406 - RNA, 17 nt, Human
cacaagaaucacuugaa

SEQ ID NO: 2827407 - RNA, 18 nt, Human
cacaaggcuccaagaccu

SEQ ID NO: 2827408 - RNA, 16 nt, Human
cacaaggucauggcca

SEQ ID NO: 2827409 - RNA, 17 nt, Human
cacaaggucauggccac

SEQ ID NO: 2827410 - RNA, 18 nt, Human
cacaaggucauggccaca

SEQ ID NO: 2827411 - RNA, 19 nt, Human
cacaaggucauggccacac

SEQ ID NO: 2827412 - RNA, 20 nt, Human
cacaaggucauggccacacu

SEQ ID NO: 2827413 - RNA, 21 nt, Human
cacaaggucauggccacacug

SEQ ID NO: 2827414 - RNA, 22 nt, Human
cacaaggucauggccacacugu

SEQ ID NO: 2827415 - RNA, 23 nt, Human
cacaaggucauggccacacugug

SEQ ID NO: 2827416 - RNA, 16 nt, Human
cacaaguccugugaau

SEQ ID NO: 2827417 - RNA, 20 nt, Human
cacaaguccugugaauuucu

SEQ ID NO: 2827418 - RNA, 13 nt, Human
cacaagucuucca

SEQ ID NO: 2827419 - RNA, 14 nt, Human
cacaagucuuccag

SEQ ID NO: 2827420 - RNA, 14 nt, Human
cacaaguaagagac

SEQ ID NO: 2827421 - RNA, 22 nt, Human
cacaaguaagagacucagccug

SEQ ID NO: 2827422 - RNA, 23 nt, Human
cacaaguaagagacucagccugc

SEQ ID NO: 2827423 - RNA, 21 nt, Human
cacaaguccuggauguugugu

SEQ ID NO: 2827424 - RNA, 17 nt, Human
cacaaggugcaaaucaa

SEQ ID NO: 2827425 - RNA, 17 nt, Human
cacaagggaaggacaga

SEQ ID NO: 2827426 - RNA, 22 nt, Human
cacaagggaaggacagaaagga

SEQ ID NO: 2827427 - RNA, 12 nt, Human
cacaagggcucu

SEQ ID NO: 2827428 - RNA, 19 nt, Human
cacaagugccgcaaauugu

SEQ ID NO: 2827429 - RNA, 21 nt, Human
cacaagugccgcaaauuguac

SEQ ID NO: 2827430 - RNA, 19 nt, Human
cacaagugcucaucuguug

SEQ ID NO: 2827431 - RNA, 19 nt, Human
cacaaucucggcucacugc

SEQ ID NO: 2827432 - RNA, 17 nt, Human
cacaacuuaguguaaua

SEQ ID NO: 2827433 - RNA, 18 nt, Human
cacaacugacacaggaaa

SEQ ID NO: 2827434 - RNA, 19 nt, Human
cacaacugcaauaacuucu

SEQ ID NO: 2827435 - RNA, 20 nt, Human
cacaacugcaauaacuucug

SEQ ID NO: 2827436 - RNA, 21 nt, Human
cacaacugcaauaacuucuga

SEQ ID NO: 2827437 - RNA, 23 nt, Human
cacaacugcaauaacuucugacc

SEQ ID NO: 2827438 - RNA, 15 nt, Human
cacaacuuuuaacca

SEQ ID NO: 2827439 - RNA, 12 nt, Human
cacaaauaaaau

SEQ ID NO: 2827440 - RNA, 13 nt, Human
cacaaacuguaaa

SEQ ID NO: 2827441 - RNA, 23 nt, Human
cacaaauauuuauuuucuuucug

SEQ ID NO: 2827442 - RNA, 21 nt, Human
cacaaauauuuauuuucuuuc

SEQ ID NO: 2827443 - RNA, 13 nt, Human
cacaaauauuuau

SEQ ID NO: 2827444 - RNA, 11 nt, Human
caauuuuguaa

SEQ ID NO: 2827445 - RNA, 20 nt, Human
caauuuucuggaauacauga

SEQ ID NO: 2827446 - RNA, 12 nt, Human
caauuuucuugu

SEQ ID NO: 2827447 - RNA, 13 nt, Human
caauucaaaaguu

SEQ ID NO: 2827448 - RNA, 12 nt, Human
caauuuuguaac

SEQ ID NO: 2827449 - RNA, 14 nt, Human
caauuuuuaggaag

SEQ ID NO: 2827450 - RNA, 12 nt, Human
caauuuuuaaug

SEQ ID NO: 2827451 - RNA, 13 nt, Human
caauuuuuaaugg

SEQ ID NO: 2827452 - RNA, 22 nt, Human
caauuuuuaauggcagcagaaa

SEQ ID NO: 2827453 - RNA, 11 nt, Human
caauuuuucca

SEQ ID NO: 2827454 - RNA, 15 nt, Human
cacaaaccaugcaaa

SEQ ID NO: 2827455 - RNA, 12 nt, Human
cacaaacauuuu

SEQ ID NO: 2827456 - RNA, 13 nt, Human
cacaaacauuuuu

SEQ ID NO: 2827457 - RNA, 15 nt, Human
cacaaacauuuuuca

SEQ ID NO: 2827458 - RNA, 18 nt, Human
cacaaaccacaacugaca

SEQ ID NO: 2827459 - RNA, 19 nt, Human
cacaaaccacaacugacac

SEQ ID NO: 2827460 - RNA, 20 nt, Human
cacaaaccacaacugacaca

SEQ ID NO: 2827461 - RNA, 13 nt, Human
cacaaaccugccu

SEQ ID NO: 2827462 - RNA, 17 nt, Human
cacaaaccugccugggu

SEQ ID NO: 2827463 - RNA, 17 nt, Human
cacaaaccuucugccuu

SEQ ID NO: 2827464 - RNA, 12 nt, Human
cacaaacuguaa

SEQ ID NO: 2827465 - RNA, 15 nt, Human
cacaaaccugccugg

SEQ ID NO: 2827466 - RNA, 13 nt, Human
cacaaacucacca

SEQ ID NO: 2827467 - RNA, 13 nt, Human
caaugcacaucca

SEQ ID NO: 2827468 - RNA, 14 nt, Human
caaugcacauccau

SEQ ID NO: 2827469 - RNA, 18 nt, Human
caaugcacauccauuccc

SEQ ID NO: 2827470 - RNA, 16 nt, Human
caaugcacauggugca

SEQ ID NO: 2827471 - RNA, 15 nt, Human
caaugguguuuuucu

SEQ ID NO: 2827472 - RNA, 19 nt, Human
caaugguguuuuucuugua

SEQ ID NO: 2827473 - RNA, 22 nt, Human
caaugguguuuuucuuguaaau

SEQ ID NO: 2827474 - RNA, 23 nt, Human
caaugguguuuuucuuguaaaug

SEQ ID NO: 2827475 - RNA, 16 nt, Human
caauuagggccuagcc

SEQ ID NO: 2827476 - RNA, 17 nt, Human
caauuagguuuuuccuu

SEQ ID NO: 2827477 - RNA, 16 nt, Human
caaugguuuuuaaauu

SEQ ID NO: 2827478 - RNA, 17 nt, Human
caaugguuuuuaaauuu

SEQ ID NO: 2827479 - RNA, 18 nt, Human
caaugguuuuuaaauuuu

SEQ ID NO: 2827480 - RNA, 21 nt, Human
caaugguuuuuaaauuuugua

SEQ ID NO: 2827481 - RNA, 23 nt, Human
caaugguuuuuaaauuuuguaau

SEQ ID NO: 2827482 - RNA, 15 nt, Human
caauuauaguuucug

SEQ ID NO: 2827483 - RNA, 18 nt, Human
caauuauaguuucugagg

SEQ ID NO: 2827484 - RNA, 14 nt, Human
caauuauaguuucu

SEQ ID NO: 2827485 - RNA, 22 nt, Human
caauuauaguuucugaggcuuu

SEQ ID NO: 2827486 - RNA, 14 nt, Human
caauuauugauaua

SEQ ID NO: 2827487 - RNA, 15 nt, Human
caauuauugauauau

SEQ ID NO: 2827488 - RNA, 17 nt, Human
caauuauugauauauau

SEQ ID NO: 2827489 - RNA, 18 nt, Human
caauuauugauauauauu

SEQ ID NO: 2827490 - RNA, 20 nt, Human
caauuauugauauauauuau

SEQ ID NO: 2827491 - RNA, 22 nt, Human
caauuauugauauauauuauaa

SEQ ID NO: 2827492 - RNA, 17 nt, Human
caauuauuguuacacau

SEQ ID NO: 2827493 - RNA, 22 nt, Human
caauuauuguuacacauuaagu

SEQ ID NO: 2827494 - RNA, 23 nt, Human
caauuauuguuacacauuaagua

SEQ ID NO: 2827495 - RNA, 13 nt, Human
cacacccagccca

SEQ ID NO: 2827496 - RNA, 12 nt, Human
cacaccagccau

SEQ ID NO: 2827497 - RNA, 22 nt, Human
cacaccagagcccaccuuggcu

SEQ ID NO: 2827498 - RNA, 21 nt, Human
cacaccagagcccaccuuggc

SEQ ID NO: 2827499 - RNA, 15 nt, Human
cacacagcucugucc

SEQ ID NO: 2827500 - RNA, 14 nt, Human
cacacagcucuguc

SEQ ID NO: 2827501 - RNA, 13 nt, Human
cacacagcucugu

SEQ ID NO: 2827502 - RNA, 15 nt, Human
cacacagcagcaguu

SEQ ID NO: 2827503 - RNA, 22 nt, Human
cacacagauuugagcucagccc

SEQ ID NO: 2827504 - RNA, 20 nt, Human
cacacccagcccacuucugc

SEQ ID NO: 2827505 - RNA, 14 nt, Human
cacacccagcccac

SEQ ID NO: 2827506 - RNA, 12 nt, Human
cacacccagccu

SEQ ID NO: 2827507 - RNA, 13 nt, Human
cacacccagccuc

SEQ ID NO: 2827508 - RNA, 14 nt, Human
cacacccagccuca

SEQ ID NO: 2827509 - RNA, 15 nt, Human
cacacccagccucag

SEQ ID NO: 2827510 - RNA, 16 nt, Human
cacacccagccucagu

SEQ ID NO: 2827511 - RNA, 18 nt, Human
cacacccagccucagucc

SEQ ID NO: 2827512 - RNA, 19 nt, Human
cacacccagccucaguccu

SEQ ID NO: 2827513 - RNA, 17 nt, Human
cacaccgggcacucaga

SEQ ID NO: 2827514 - RNA, 14 nt, Human
cacaccucacucuu

SEQ ID NO: 2827515 - RNA, 18 nt, Human
cacaccucacucuuuaua

SEQ ID NO: 2827516 - RNA, 13 nt, Human
cacaccucaguuc

SEQ ID NO: 2827517 - RNA, 21 nt, Human
cacaccucaguucccuuggcc

SEQ ID NO: 2827518 - RNA, 20 nt, Human
cacaccucaguucccuuggc

SEQ ID NO: 2827519 - RNA, 18 nt, Human
cacaccucaguucccuug

SEQ ID NO: 2827520 - RNA, 17 nt, Human
cacaccucaguucccuu

SEQ ID NO: 2827521 - RNA, 22 nt, Human
cacaccucaguucccuuggccu

SEQ ID NO: 2827522 - RNA, 21 nt, Human
cacacgcacauauacacacac

SEQ ID NO: 2827523 - RNA, 16 nt, Human
cacacagauacacaca

SEQ ID NO: 2827524 - RNA, 17 nt, Human
cacacagauacacacac

SEQ ID NO: 2827525 - RNA, 18 nt, Human
cacacagauacacacaca

SEQ ID NO: 2827526 - RNA, 20 nt, Human
cacacagauuugagcucagc

SEQ ID NO: 2827527 - RNA, 18 nt, Human
cacacagauuugagcuca

SEQ ID NO: 2827528 - RNA, 14 nt, Human
cacacacuuuggcu

SEQ ID NO: 2827529 - RNA, 12 nt, Human
cacacacacaca

SEQ ID NO: 2827530 - RNA, 11 nt, Human
cacacacacac

SEQ ID NO: 2827531 - RNA, 11 nt, Human
cacacacacaa

SEQ ID NO: 2827532 - RNA, 14 nt, Human
cacacaccucacca

SEQ ID NO: 2827533 - RNA, 12 nt, Human
cacacacacaag

SEQ ID NO: 2827534 - RNA, 15 nt, Human
cacacacccugaggu

SEQ ID NO: 2827535 - RNA, 18 nt, Human
cacacacccugaggucag

SEQ ID NO: 2827536 - RNA, 14 nt, Human
cacacacugaugcu

SEQ ID NO: 2827537 - RNA, 20 nt, Human
cacacaccagagcccaccuu

SEQ ID NO: 2827538 - RNA, 16 nt, Human
cacacaccagagccca

SEQ ID NO: 2827539 - RNA, 15 nt, Human
cacacaccagagccc

SEQ ID NO: 2827540 - RNA, 13 nt, Human
cacacacaacagc

SEQ ID NO: 2827541 - RNA, 15 nt, Human
cacacacaacagcca

SEQ ID NO: 2827542 - RNA, 16 nt, Human
cacacacaacagccaa

SEQ ID NO: 2827543 - RNA, 20 nt, Human
cacacacaacagccaacagc

SEQ ID NO: 2827544 - RNA, 9 nt, Human
cacacacac

SEQ ID NO: 2827545 - RNA, 10 nt, Human
cacacacaca

SEQ ID NO: 2827546 - RNA, 15 nt, Human
cacacacaaaauaaa

SEQ ID NO: 2827547 - RNA, 13 nt, Human
cacacacaaaccu

SEQ ID NO: 2827548 - RNA, 14 nt, Human
cacacacaaaccuu

SEQ ID NO: 2827549 - RNA, 18 nt, Human
cacacaagaagaagggca

SEQ ID NO: 2827550 - RNA, 16 nt, Human
cacacaagcccacagc

SEQ ID NO: 2827551 - RNA, 16 nt, Human
cacacaaguaagagac

SEQ ID NO: 2827552 - RNA, 20 nt, Human
cacacaaguaagagacucag

SEQ ID NO: 2827553 - RNA, 21 nt, Human
cacacaaguaagagacucagc

SEQ ID NO: 2827554 - RNA, 23 nt, Human
cacacaaguaagagacucagccu

SEQ ID NO: 2827555 - RNA, 16 nt, Human
cacacaagaagaaggg

SEQ ID NO: 2827556 - RNA, 15 nt, Human
cacacaacagccaac

SEQ ID NO: 2827557 - RNA, 16 nt, Human
cacacaagggaaggac

SEQ ID NO: 2827558 - RNA, 19 nt, Human
cacacaagggaaggacaga

SEQ ID NO: 2827559 - RNA, 24 nt, Human
cacaaucucggcucacugcauccu

SEQ ID NO: 2827560 - RNA, 23 nt, Human
cacaaucucggcucacugcaucc

SEQ ID NO: 2827561 - RNA, 22 nt, Human
cacaaucucggcucacugcauc

SEQ ID NO: 2827562 - RNA, 20 nt, Human
cacaaucucggcucacugca

SEQ ID NO: 2827563 - RNA, 13 nt, Human
cacacacacacaa

SEQ ID NO: 2827564 - RNA, 14 nt, Human
cacacacacacaaa

SEQ ID NO: 2827565 - RNA, 14 nt, Human
cacacacacacaag

SEQ ID NO: 2827566 - RNA, 16 nt, Human
caagugccugcuuuua

SEQ ID NO: 2827567 - RNA, 23 nt, Human
caauaucauaucaucacauugag

SEQ ID NO: 2827568 - RNA, 14 nt, Human
caauauuaaaucug

SEQ ID NO: 2827569 - RNA, 15 nt, Human
caauauuaaaucugc

SEQ ID NO: 2827570 - RNA, 17 nt, Human
caaucucccgcugcugc

SEQ ID NO: 2827571 - RNA, 18 nt, Human
caaucucggcucacugca

SEQ ID NO: 2827572 - RNA, 13 nt, Human
caaucuauuauuu

SEQ ID NO: 2827573 - RNA, 14 nt, Human
caaucuauuauuuc

SEQ ID NO: 2827574 - RNA, 23 nt, Human
caaucuauuauuucucuaauuau

SEQ ID NO: 2827575 - RNA, 14 nt, Human
caaucucaaggaau

SEQ ID NO: 2827576 - RNA, 18 nt, Human
caaucucaaggaaucuuu

SEQ ID NO: 2827577 - RNA, 20 nt, Human
caaucucaaggaaucuuuaa

SEQ ID NO: 2827578 - RNA, 12 nt, Human
caaucuaauuuu

SEQ ID NO: 2827579 - RNA, 14 nt, Human
caauccuuuauuau

SEQ ID NO: 2827580 - RNA, 13 nt, Human
caaucgcaaauca

SEQ ID NO: 2827581 - RNA, 15 nt, Human
caaucgcaaaucaaa

SEQ ID NO: 2827582 - RNA, 17 nt, Human
caauccugucuuucuga

SEQ ID NO: 2827583 - RNA, 19 nt, Human
caauccuggcucuguggcu

SEQ ID NO: 2827584 - RNA, 21 nt, Human
caaugauggcaauuuuguaac

SEQ ID NO: 2827585 - RNA, 24 nt, Human
caaugauggcaauuuuguaacgaa

SEQ ID NO: 2827586 - RNA, 19 nt, Human
caaugaaauauugcuguau

SEQ ID NO: 2827587 - RNA, 21 nt, Human
caaugaaaaauagugucuuug

SEQ ID NO: 2827588 - RNA, 17 nt, Human
caaugaaaguuugcacu

SEQ ID NO: 2827589 - RNA, 12 nt, Human
caaugaaaaguc

SEQ ID NO: 2827590 - RNA, 20 nt, Human
caaugaaaagucguuuucca

SEQ ID NO: 2827591 - RNA, 18 nt, Human
caaugaaagguacuauau

SEQ ID NO: 2827592 - RNA, 14 nt, Human
caaucuuugaaaga

SEQ ID NO: 2827593 - RNA, 16 nt, Human
caaucuuugaaagacu

SEQ ID NO: 2827594 - RNA, 19 nt, Human
caaucuuugaaagacuucc

SEQ ID NO: 2827595 - RNA, 20 nt, Human
caaucuuugaaagacuucca

SEQ ID NO: 2827596 - RNA, 23 nt, Human
caaucuuugaaagacuuccaaag

SEQ ID NO: 2827597 - RNA, 16 nt, Human
caaucuuuuuuacucu

SEQ ID NO: 2827598 - RNA, 13 nt, Human
caaugauuauuuu

SEQ ID NO: 2827599 - RNA, 15 nt, Human
caaugauuauuuuca

SEQ ID NO: 2827600 - RNA, 20 nt, Human
caaugauuauuuucauuaca

SEQ ID NO: 2827601 - RNA, 14 nt, Human
caaugcacugacau

SEQ ID NO: 2827602 - RNA, 16 nt, Human
caaugcaagagugauu

SEQ ID NO: 2827603 - RNA, 21 nt, Human
caaugcaagagugauugcagc

SEQ ID NO: 2827604 - RNA, 22 nt, Human
caaugcaagagugauugcagcu

SEQ ID NO: 2827605 - RNA, 23 nt, Human
caaugcaagagugauugcagcuu

SEQ ID NO: 2827606 - RNA, 21 nt, Human
cacacuaaccuggguucccuu

SEQ ID NO: 2827607 - RNA, 14 nt, Human
cacacuacaccaca

SEQ ID NO: 2827608 - RNA, 16 nt, Human
cacacuacaccacaca

SEQ ID NO: 2827609 - RNA, 17 nt, Human
cacacuacaccacacac

SEQ ID NO: 2827610 - RNA, 18 nt, Human
cacacuacaccacacaca

SEQ ID NO: 2827611 - RNA, 19 nt, Human
cacacuacaccacacacaa

SEQ ID NO: 2827612 - RNA, 15 nt, Human
cacagugaagugcug

SEQ ID NO: 2827613 - RNA, 11 nt, Human
cacagugaccc

SEQ ID NO: 2827614 - RNA, 16 nt, Human
cacagugacccuuccc

SEQ ID NO: 2827615 - RNA, 17 nt, Human
cacagugacccuuccca

SEQ ID NO: 2827616 - RNA, 19 nt, Human
cacagugagggagauccca

SEQ ID NO: 2827617 - RNA, 23 nt, Human
cacaugaccugaucacuagccug

SEQ ID NO: 2827618 - RNA, 24 nt, Human
cacaugaaucccacccacauguga

SEQ ID NO: 2827619 - RNA, 18 nt, Human
cacaugcacgugugugca

SEQ ID NO: 2827620 - RNA, 12 nt, Human
cacaugcacaca

SEQ ID NO: 2827621 - RNA, 13 nt, Human
cacaugcacacac

SEQ ID NO: 2827622 - RNA, 12 nt, Human
cacaugcuggcc

SEQ ID NO: 2827623 - RNA, 13 nt, Human
cacaugcuggcca

SEQ ID NO: 2827624 - RNA, 14 nt, Human
cacaugcuggccag

SEQ ID NO: 2827625 - RNA, 15 nt, Human
cacaugcuggccagc

SEQ ID NO: 2827626 - RNA, 16 nt, Human
cacaugcuggccagcc

SEQ ID NO: 2827627 - RNA, 17 nt, Human
cacaugcuggccagccu

SEQ ID NO: 2827628 - RNA, 18 nt, Human
cacaugcuggccagccug

SEQ ID NO: 2827629 - RNA, 19 nt, Human
cacaugcuggccagccugg

SEQ ID NO: 2827630 - RNA, 12 nt, Human
cacaugcuucaa

SEQ ID NO: 2827631 - RNA, 18 nt, Human
cacaugcggagaacaaau

SEQ ID NO: 2827632 - RNA, 9 nt, Human
cacaugcua

SEQ ID NO: 2827633 - RNA, 21 nt, Human
cacaugcuaggaugcggaaau

SEQ ID NO: 2827634 - RNA, 20 nt, Human
cacaggcaaaauccuugcuu

SEQ ID NO: 2827635 - RNA, 16 nt, Human
cacaggcaaaauccuu

SEQ ID NO: 2827636 - RNA, 19 nt, Human
cacaggcagguccaggguu

SEQ ID NO: 2827637 - RNA, 14 nt, Human
cacaggcccggcuc

SEQ ID NO: 2827638 - RNA, 12 nt, Human
cacaggcccccu

SEQ ID NO: 2827639 - RNA, 13 nt, Human
cacaggcccccuu

SEQ ID NO: 2827640 - RNA, 21 nt, Human
cacaggcccccuugagugggg

SEQ ID NO: 2827641 - RNA, 22 nt, Human
cacaggcccccuugaguggggu

SEQ ID NO: 2827642 - RNA, 20 nt, Human
cacagcucuucuccaggcug

SEQ ID NO: 2827643 - RNA, 19 nt, Human
cacagcucuucuccaggcu

SEQ ID NO: 2827644 - RNA, 17 nt, Human
cacaggaucagucugau

SEQ ID NO: 2827645 - RNA, 16 nt, Human
cacaggaugaaggcaa

SEQ ID NO: 2827646 - RNA, 23 nt, Human
cacaggaugaggugguggagugg

SEQ ID NO: 2827647 - RNA, 16 nt, Human
cacaggaugcuggccu

SEQ ID NO: 2827648 - RNA, 16 nt, Human
cacaggaugcuguguu

SEQ ID NO: 2827649 - RNA, 17 nt, Human
cacaggaugcuguguug

SEQ ID NO: 2827650 - RNA, 15 nt, Human
cacaggacucugccu

SEQ ID NO: 2827651 - RNA, 16 nt, Human
cacaggacucugccuc

SEQ ID NO: 2827652 - RNA, 18 nt, Human
cacagcucuucuccaggc

SEQ ID NO: 2827653 - RNA, 22 nt, Human
cacagccagggggaugccacuc

SEQ ID NO: 2827654 - RNA, 13 nt, Human
cacagcacagcuc

SEQ ID NO: 2827655 - RNA, 17 nt, Human
cacagcacagcucccug

SEQ ID NO: 2827656 - RNA, 13 nt, Human
cacagcacaugcu

SEQ ID NO: 2827657 - RNA, 19 nt, Human
cacacgcgcgcgcacacac

SEQ ID NO: 2827658 - RNA, 21 nt, Human
cacacgcgcgcgcacacacac

SEQ ID NO: 2827659 - RNA, 17 nt, Human
cacacgccucccacugg

SEQ ID NO: 2827660 - RNA, 20 nt, Human
cacacgccucccacuggggu

SEQ ID NO: 2827661 - RNA, 14 nt, Human
cacacgcgcgcaca

SEQ ID NO: 2827662 - RNA, 21 nt, Human
cacacgccccaauuuucaggu

SEQ ID NO: 2827663 - RNA, 18 nt, Human
cacacgcgcgcacacaca

SEQ ID NO: 2827664 - RNA, 13 nt, Human
cacacgcacgcac

SEQ ID NO: 2827665 - RNA, 14 nt, Human
cacacgcacgcaca

SEQ ID NO: 2827666 - RNA, 15 nt, Human
cacacgcacgcacac

SEQ ID NO: 2827667 - RNA, 17 nt, Human
cacacgcacgcacacac

SEQ ID NO: 2827668 - RNA, 19 nt, Human
cacacgcacgcacacacac

SEQ ID NO: 2827669 - RNA, 21 nt, Human
cacacgcacgcacacacacaa

SEQ ID NO: 2827670 - RNA, 13 nt, Human
cacagauuuuaau

SEQ ID NO: 2827671 - RNA, 14 nt, Human
cacagauuuuaauu

SEQ ID NO: 2827672 - RNA, 15 nt, Human
cacagauuuuaauug

SEQ ID NO: 2827673 - RNA, 16 nt, Human
cacagauuuuaauugu

SEQ ID NO: 2827674 - RNA, 18 nt, Human
cacagauuuuaauuguca

SEQ ID NO: 2827675 - RNA, 19 nt, Human
cacagauuuuaauugucau

SEQ ID NO: 2827676 - RNA, 21 nt, Human
cacagauuuuaauugucaugg

SEQ ID NO: 2827677 - RNA, 17 nt, Human
cacagcaaacugucccc

SEQ ID NO: 2827678 - RNA, 15 nt, Human
cacacacacaaaccu

SEQ ID NO: 2827679 - RNA, 20 nt, Human
cacacgguuugaagccugga

SEQ ID NO: 2827680 - RNA, 19 nt, Human
cacacgguuugaagccugg

SEQ ID NO: 2827681 - RNA, 11 nt, Human
caccagcacca

SEQ ID NO: 2827682 - RNA, 16 nt, Human
caccagauagcagagg

SEQ ID NO: 2827683 - RNA, 21 nt, Human
caccagagcauuuccaacacc

SEQ ID NO: 2827684 - RNA, 16 nt, Human
caccagucacaugacc

SEQ ID NO: 2827685 - RNA, 23 nt, Human
caccagucacaugaccugaucac

SEQ ID NO: 2827686 - RNA, 19 nt, Human
caccaggugccuuucaaau

SEQ ID NO: 2827687 - RNA, 22 nt, Human
caccaggugccuuucaaauuua

SEQ ID NO: 2827688 - RNA, 20 nt, Human
caccagucccuguccggaau

SEQ ID NO: 2827689 - RNA, 14 nt, Human
caccagucccuguc

SEQ ID NO: 2827690 - RNA, 13 nt, Human
caccagugucccc

SEQ ID NO: 2827691 - RNA, 14 nt, Human
caccaguguccccu

SEQ ID NO: 2827692 - RNA, 16 nt, Human
caccaguguccccucc

SEQ ID NO: 2827693 - RNA, 18 nt, Human
caccaguguccccuccac

SEQ ID NO: 2827694 - RNA, 18 nt, Human
caccagugugggguucug

SEQ ID NO: 2827695 - RNA, 23 nt, Human
caccagugugggguucugcuggg

SEQ ID NO: 2827696 - RNA, 18 nt, Human
caccauaggucaccuuua

SEQ ID NO: 2827697 - RNA, 16 nt, Human
caccauaccuuugcua

SEQ ID NO: 2827698 - RNA, 21 nt, Human
caccauauucagugcuguggc

SEQ ID NO: 2827699 - RNA, 16 nt, Human
caccauauucagugcu

SEQ ID NO: 2827700 - RNA, 17 nt, Human
caccaucaugucuggcu

SEQ ID NO: 2827701 - RNA, 15 nt, Human
caccaucaugucugg

SEQ ID NO: 2827702 - RNA, 18 nt, Human
caccaucaugucuggcua

SEQ ID NO: 2827703 - RNA, 23 nt, Human
caccaucuuaagagaugccucau

SEQ ID NO: 2827704 - RNA, 15 nt, Human
caccaugauggccag

SEQ ID NO: 2827705 - RNA, 18 nt, Human
caccaugauggggcccua

SEQ ID NO: 2827706 - RNA, 14 nt, Human
caccaugcuuccag

SEQ ID NO: 2827707 - RNA, 14 nt, Human
caccaucgcuggcc

SEQ ID NO: 2827708 - RNA, 17 nt, Human
caccaucgcuggccccu

SEQ ID NO: 2827709 - RNA, 19 nt, Human
caccauguuggccaggcug

SEQ ID NO: 2827710 - RNA, 20 nt, Human
caccauguuggccaggcugg

SEQ ID NO: 2827711 - RNA, 20 nt, Human
caccauguuggccaggcugc

SEQ ID NO: 2827712 - RNA, 16 nt, Human
caccauggccagccaa

SEQ ID NO: 2827713 - RNA, 12 nt, Human
caccauggccag

SEQ ID NO: 2827714 - RNA, 15 nt, Human
caccauguauuuugu

SEQ ID NO: 2827715 - RNA, 20 nt, Human
caccauguugcccaggcugg

SEQ ID NO: 2827716 - RNA, 15 nt, Human
caccaagaaagcagg

SEQ ID NO: 2827717 - RNA, 22 nt, Human
caccaagacuuguuuuaugcuc

SEQ ID NO: 2827718 - RNA, 15 nt, Human
caccaagaugucugu

SEQ ID NO: 2827719 - RNA, 17 nt, Human
caccaagaugucugucu

SEQ ID NO: 2827720 - RNA, 13 nt, Human
caccaagcccagu

SEQ ID NO: 2827721 - RNA, 12 nt, Human
caccaagcccag

SEQ ID NO: 2827722 - RNA, 21 nt, Human
caccaauuggauaaagcagcu

SEQ ID NO: 2827723 - RNA, 11 nt, Human
caccaaggaaa

SEQ ID NO: 2827724 - RNA, 12 nt, Human
caccaaggaaac

SEQ ID NO: 2827725 - RNA, 20 nt, Human
caccaaggaaacgcuaccuc

SEQ ID NO: 2827726 - RNA, 21 nt, Human
caccaaggaaacgcuaccucu

SEQ ID NO: 2827727 - RNA, 15 nt, Human
caccagagcccaccu

SEQ ID NO: 2827728 - RNA, 18 nt, Human
caccagagcaaccucuca

SEQ ID NO: 2827729 - RNA, 20 nt, Human
caccagagcaaccucucacu

SEQ ID NO: 2827730 - RNA, 22 nt, Human
caccagagcaaccucucacucc

SEQ ID NO: 2827731 - RNA, 12 nt, Human
caccagagcaga

SEQ ID NO: 2827732 - RNA, 16 nt, Human
caccagagcagaugca

SEQ ID NO: 2827733 - RNA, 17 nt, Human
caccagagcagaugcag

SEQ ID NO: 2827734 - RNA, 18 nt, Human
caccagagcagaugcaga

SEQ ID NO: 2827735 - RNA, 19 nt, Human
caccagagcagaugcagag

SEQ ID NO: 2827736 - RNA, 20 nt, Human
caccagagcagaugcagaga

SEQ ID NO: 2827737 - RNA, 16 nt, Human
caccagagaccguccu

SEQ ID NO: 2827738 - RNA, 19 nt, Human
caccagagaccguccucac

SEQ ID NO: 2827739 - RNA, 20 nt, Human
caccagagaccguccucacc

SEQ ID NO: 2827740 - RNA, 21 nt, Human
caccagagaccguccucaccc

SEQ ID NO: 2827741 - RNA, 11 nt, Human
caccagagacc

SEQ ID NO: 2827742 - RNA, 22 nt, Human
caccagagcccaccuuggcuca

SEQ ID NO: 2827743 - RNA, 20 nt, Human
caccagagcccaccuuggcu

SEQ ID NO: 2827744 - RNA, 18 nt, Human
caccagagcccaccuugg

SEQ ID NO: 2827745 - RNA, 17 nt, Human
caccagagcccaccuug

SEQ ID NO: 2827746 - RNA, 19 nt, Human
caccacacccagcccacuu

SEQ ID NO: 2827747 - RNA, 15 nt, Human
caccacacccagccu

SEQ ID NO: 2827748 - RNA, 16 nt, Human
caccacacccagccuc

SEQ ID NO: 2827749 - RNA, 14 nt, Human
caccacagacacac

SEQ ID NO: 2827750 - RNA, 17 nt, Human
caccacacccagccuca

SEQ ID NO: 2827751 - RNA, 18 nt, Human
caccacacccagccucag

SEQ ID NO: 2827752 - RNA, 12 nt, Human
caccacagacac

SEQ ID NO: 2827753 - RNA, 13 nt, Human
caccacagacaca

SEQ ID NO: 2827754 - RNA, 14 nt, Human
caccacgcccggcu

SEQ ID NO: 2827755 - RNA, 15 nt, Human
caccacgcccggcua

SEQ ID NO: 2827756 - RNA, 19 nt, Human
caccacgcuggggucuggg

SEQ ID NO: 2827757 - RNA, 23 nt, Human
cacccaacccuaucuccugacag

SEQ ID NO: 2827758 - RNA, 22 nt, Human
cacccaacccuaucuccugaca

SEQ ID NO: 2827759 - RNA, 24 nt, Human
cacccaacccuaucuccugacaga

SEQ ID NO: 2827760 - RNA, 15 nt, Human
cacccaaccccaagc

SEQ ID NO: 2827761 - RNA, 19 nt, Human
cacccaagagauuguuguu

SEQ ID NO: 2827762 - RNA, 22 nt, Human
cacccaaagagguauuuaucuu

SEQ ID NO: 2827763 - RNA, 17 nt, Human
cacccaaagcauggacu

SEQ ID NO: 2827764 - RNA, 18 nt, Human
cacccaaagcauggacua

SEQ ID NO: 2827765 - RNA, 22 nt, Human
cccaggguggacuuagaaagca

SEQ ID NO: 2827766 - RNA, 18 nt, Human
cccaggguggagugcagu

SEQ ID NO: 2827767 - RNA, 19 nt, Human
cccaggguggagugcagug

SEQ ID NO: 2827768 - RNA, 13 nt, Human
cccagguccucac

SEQ ID NO: 2827769 - RNA, 21 nt, Human
cccagguggaaggcagacagc

SEQ ID NO: 2827770 - RNA, 23 nt, Human
cccagguggaaggcagacagcag

SEQ ID NO: 2827771 - RNA, 16 nt, Human
cccaggugccagccug

SEQ ID NO: 2827772 - RNA, 19 nt, Human
cccagguguuaacauucca

SEQ ID NO: 2827773 - RNA, 21 nt, Human
cccagguguuaacauuccaag

SEQ ID NO: 2827774 - RNA, 22 nt, Human
cccagguguuaacauuccaaga

SEQ ID NO: 2827775 - RNA, 13 nt, Human
cccagugcccaca

SEQ ID NO: 2827776 - RNA, 19 nt, Human
cccagugagauuacagagg

SEQ ID NO: 2827777 - RNA, 23 nt, Human
cccagugagucucuggggcaggc

SEQ ID NO: 2827778 - RNA, 20 nt, Human
cccagucuggaaugcagugg

SEQ ID NO: 2827779 - RNA, 19 nt, Human
cccaguccaaauguccucc

SEQ ID NO: 2827780 - RNA, 23 nt, Human
cccaguccaaauguccuccagaa

SEQ ID NO: 2827781 - RNA, 21 nt, Human
cccaggccgggguggagcaug

SEQ ID NO: 2827782 - RNA, 12 nt, Human
cccaggccggcc

SEQ ID NO: 2827783 - RNA, 13 nt, Human
cccaggccggcca

SEQ ID NO: 2827784 - RNA, 17 nt, Human
cccaggccggccagccu

SEQ ID NO: 2827785 - RNA, 21 nt, Human
cccaggccggccagccucacc

SEQ ID NO: 2827786 - RNA, 23 nt, Human
cccaggccggccagccucacccu

SEQ ID NO: 2827787 - RNA, 13 nt, Human
cccaggcgggagc

SEQ ID NO: 2827788 - RNA, 22 nt, Human
cccaggcgggagcgguggcccu

SEQ ID NO: 2827789 - RNA, 23 nt, Human
cccaggcgggagcgguggcccug

SEQ ID NO: 2827790 - RNA, 14 nt, Human
cccaggcuccgccc

SEQ ID NO: 2827791 - RNA, 18 nt, Human
cccaggcuccgcccuuag

SEQ ID NO: 2827792 - RNA, 21 nt, Human
cccaggcuccgcccuuagucc

SEQ ID NO: 2827793 - RNA, 23 nt, Human
cccaggcuccgcccuuagucccc

SEQ ID NO: 2827794 - RNA, 14 nt, Human
cccaggcugagccu

SEQ ID NO: 2827795 - RNA, 13 nt, Human
cccaggccucugu

SEQ ID NO: 2827796 - RNA, 14 nt, Human
cccaggccuauguu

SEQ ID NO: 2827797 - RNA, 21 nt, Human
cccaggccuauguugauccau

SEQ ID NO: 2827798 - RNA, 15 nt, Human
cccaggccugccugu

SEQ ID NO: 2827799 - RNA, 16 nt, Human
cccaggccugccuguu

SEQ ID NO: 2827800 - RNA, 18 nt, Human
cccaggcgccccuucccc

SEQ ID NO: 2827801 - RNA, 20 nt, Human
cccaggggucccagccaccc

SEQ ID NO: 2827802 - RNA, 15 nt, Human
cccagggucuucccu

SEQ ID NO: 2827803 - RNA, 18 nt, Human
cccagggucuucccuacc

SEQ ID NO: 2827804 - RNA, 16 nt, Human
cccagggucuucccua

SEQ ID NO: 2827805 - RNA, 23 nt, Human
cccagggucuucccuaccucagg

SEQ ID NO: 2827806 - RNA, 19 nt, Human
cccagggggcaugaccaga

SEQ ID NO: 2827807 - RNA, 19 nt, Human
cccaggggucccagccacc

SEQ ID NO: 2827808 - RNA, 18 nt, Human
cccaggggucccagccac

SEQ ID NO: 2827809 - RNA, 16 nt, Human
cccaggggucccagcc

SEQ ID NO: 2827810 - RNA, 15 nt, Human
cccaggggucccagc

SEQ ID NO: 2827811 - RNA, 16 nt, Human
cccaggggaggcggca

SEQ ID NO: 2827812 - RNA, 23 nt, Human
cccaggggaggcggcacuccaac

SEQ ID NO: 2827813 - RNA, 23 nt, Human
cccaggaguuugaggcugcagcg

SEQ ID NO: 2827814 - RNA, 22 nt, Human
cccaggaguuugaggcugcagc

SEQ ID NO: 2827815 - RNA, 13 nt, Human
cccaggcaggucu

SEQ ID NO: 2827816 - RNA, 11 nt, Human
cccaggcaggu

SEQ ID NO: 2827817 - RNA, 14 nt, Human
cccaggcaggccac

SEQ ID NO: 2827818 - RNA, 14 nt, Human
cccaggagggaggg

SEQ ID NO: 2827819 - RNA, 24 nt, Human
cccaggaguucgaggcugcaguca

SEQ ID NO: 2827820 - RNA, 18 nt, Human
cccaggagggagggggcu

SEQ ID NO: 2827821 - RNA, 18 nt, Human
cccaggagggcauccaua

SEQ ID NO: 2827822 - RNA, 20 nt, Human
cccaggaggggaacacugcc

SEQ ID NO: 2827823 - RNA, 22 nt, Human
cccaggaggggaacacugcccu

SEQ ID NO: 2827824 - RNA, 18 nt, Human
cccaggagccccgaggcc

SEQ ID NO: 2827825 - RNA, 21 nt, Human
cccaggagccccgaggccuuc

SEQ ID NO: 2827826 - RNA, 22 nt, Human
cccaggccccugccacccuggg

SEQ ID NO: 2827827 - RNA, 21 nt, Human
cccaggccccugccacccugg

SEQ ID NO: 2827828 - RNA, 18 nt, Human
cccaggccccugccaccc

SEQ ID NO: 2827829 - RNA, 16 nt, Human
cccaggccccugccac

SEQ ID NO: 2827830 - RNA, 11 nt, Human
cccaggccccu

SEQ ID NO: 2827831 - RNA, 13 nt, Human
cccaggcccacuc

SEQ ID NO: 2827832 - RNA, 15 nt, Human
cccaggcccacucag

SEQ ID NO: 2827833 - RNA, 16 nt, Human
cccaggcccacucagg

SEQ ID NO: 2827834 - RNA, 17 nt, Human
cccaggcaggucuugaa

SEQ ID NO: 2827835 - RNA, 16 nt, Human
cccaagugugaacaaa

SEQ ID NO: 2827836 - RNA, 21 nt, Human
cccaaguuuccauagcaacag

SEQ ID NO: 2827837 - RNA, 23 nt, Human
cccaaguuuccauagcaacagga

SEQ ID NO: 2827838 - RNA, 12 nt, Human
cccaauagcugc

SEQ ID NO: 2827839 - RNA, 19 nt, Human
cccaaucccagcuaccuca

SEQ ID NO: 2827840 - RNA, 15 nt, Human
cccaaucagcacuga

SEQ ID NO: 2827841 - RNA, 16 nt, Human
cccaaucagcacugaa

SEQ ID NO: 2827842 - RNA, 17 nt, Human
cccaaucagcacugaaa

SEQ ID NO: 2827843 - RNA, 22 nt, Human
cccaauccagguacgcacagac

SEQ ID NO: 2827844 - RNA, 23 nt, Human
cccaauccagguacgcacagaca

SEQ ID NO: 2827845 - RNA, 24 nt, Human
cccaauccagguacgcacagacag

SEQ ID NO: 2827846 - RNA, 12 nt, Human
cccacacccugg

SEQ ID NO: 2827847 - RNA, 13 nt, Human
cccacaaaaaugu

SEQ ID NO: 2827848 - RNA, 16 nt, Human
cccaauguaggagcug

SEQ ID NO: 2827849 - RNA, 20 nt, Human
cccaaucccagcuaccucaa

SEQ ID NO: 2827850 - RNA, 15 nt, Human
cccaaugcugauguc

SEQ ID NO: 2827851 - RNA, 17 nt, Human
cccaaugguguuuuucu

SEQ ID NO: 2827852 - RNA, 15 nt, Human
cccaauugagaaaaa

SEQ ID NO: 2827853 - RNA, 11 nt, Human
cccaauuuccc

SEQ ID NO: 2827854 - RNA, 14 nt, Human
cccaauuggaggaa

SEQ ID NO: 2827855 - RNA, 19 nt, Human
cccaaauuugauugauuug

SEQ ID NO: 2827856 - RNA, 17 nt, Human
cccaacaaaccauccag

SEQ ID NO: 2827857 - RNA, 15 nt, Human
cccaacaacauccau

SEQ ID NO: 2827858 - RNA, 16 nt, Human
cccaaauuugauugau

SEQ ID NO: 2827859 - RNA, 18 nt, Human
cccaaguggugaaugaca

SEQ ID NO: 2827860 - RNA, 15 nt, Human
cccaagugugaacaa

SEQ ID NO: 2827861 - RNA, 23 nt, Human
cccaaauuagggcaauuggaaca

SEQ ID NO: 2827862 - RNA, 20 nt, Human
cccaagugguuuccacaugc

SEQ ID NO: 2827863 - RNA, 21 nt, Human
cccaagugguuuccacaugcu

SEQ ID NO: 2827864 - RNA, 24 nt, Human
cccaagugguuuccacaugcucug

SEQ ID NO: 2827865 - RNA, 18 nt, Human
cccagcaagugagagcug

SEQ ID NO: 2827866 - RNA, 16 nt, Human
cccagcaagugagagc

SEQ ID NO: 2827867 - RNA, 22 nt, Human
cccagauugcaacaggcugggc

SEQ ID NO: 2827868 - RNA, 21 nt, Human
cccagauugcaacaggcuggg

SEQ ID NO: 2827869 - RNA, 20 nt, Human
cccagauugcaacaggcugg

SEQ ID NO: 2827870 - RNA, 20 nt, Human
cccagaucuggucccuugca

SEQ ID NO: 2827871 - RNA, 21 nt, Human
cccagaugggggaaagcacag

SEQ ID NO: 2827872 - RNA, 23 nt, Human
cccagauggcuggaaggggucca

SEQ ID NO: 2827873 - RNA, 19 nt, Human
cccagaucuggucccuugc

SEQ ID NO: 2827874 - RNA, 18 nt, Human
cccagaucuggucccuug

SEQ ID NO: 2827875 - RNA, 19 nt, Human
cccagaucagucagagccc

SEQ ID NO: 2827876 - RNA, 20 nt, Human
cccagaucauguuuugguga

SEQ ID NO: 2827877 - RNA, 16 nt, Human
cccacaccucugccag

SEQ ID NO: 2827878 - RNA, 15 nt, Human
cccacaccucugcca

SEQ ID NO: 2827879 - RNA, 22 nt, Human
cccacaccucaguucccuuggc

SEQ ID NO: 2827880 - RNA, 13 nt, Human
cccacaccucagu

SEQ ID NO: 2827881 - RNA, 14 nt, Human
cccacacuaaccug

SEQ ID NO: 2827882 - RNA, 22 nt, Human
cccagagguaacagaacagcuu

SEQ ID NO: 2827883 - RNA, 13 nt, Human
cccagagguaaca

SEQ ID NO: 2827884 - RNA, 18 nt, Human
cccagagguaacagaaca

SEQ ID NO: 2827885 - RNA, 20 nt, Human
cccagagguaacagaacagc

SEQ ID NO: 2827886 - RNA, 23 nt, Human
cccagagguaacagaacagcuuc

SEQ ID NO: 2827887 - RNA, 13 nt, Human
cccagagguccag

SEQ ID NO: 2827888 - RNA, 15 nt, Human
cccagagguccagcc

SEQ ID NO: 2827889 - RNA, 16 nt, Human
cccagagguccagccc

SEQ ID NO: 2827890 - RNA, 17 nt, Human
cccagagguccagccca

SEQ ID NO: 2827891 - RNA, 18 nt, Human
cccagagguccagcccau

SEQ ID NO: 2827892 - RNA, 19 nt, Human
cccagagguccagcccauc

SEQ ID NO: 2827893 - RNA, 15 nt, Human
cccagagucaucuga

SEQ ID NO: 2827894 - RNA, 15 nt, Human
cccagcgagcccugg

SEQ ID NO: 2827895 - RNA, 18 nt, Human
cccagcgagcccuggugg

SEQ ID NO: 2827896 - RNA, 17 nt, Human
cccagcgagcccuggug

SEQ ID NO: 2827897 - RNA, 23 nt, Human
cccagcgagcccugguggcagug

SEQ ID NO: 2827898 - RNA, 19 nt, Human
cccagcgagcccugguggc

SEQ ID NO: 2827899 - RNA, 15 nt, Human
cccagcgcucugccu

SEQ ID NO: 2827900 - RNA, 16 nt, Human
cccagcgcucugccuc

SEQ ID NO: 2827901 - RNA, 16 nt, Human
cccagcucgcgggacc

SEQ ID NO: 2827902 - RNA, 15 nt, Human
cccagcucccuagga

SEQ ID NO: 2827903 - RNA, 12 nt, Human
cccagcccuggc

SEQ ID NO: 2827904 - RNA, 23 nt, Human
cccagcuacucagaagccugagg

SEQ ID NO: 2827905 - RNA, 20 nt, Human
cccagcucaggggcagcuca

SEQ ID NO: 2827906 - RNA, 22 nt, Human
cccagcuacucagaagccugag

SEQ ID NO: 2827907 - RNA, 21 nt, Human
cccagcuacucagaagccuga

SEQ ID NO: 2827908 - RNA, 15 nt, Human
cccagcuaaauaauc

SEQ ID NO: 2827909 - RNA, 14 nt, Human
cccagcuaccucaa

SEQ ID NO: 2827910 - RNA, 22 nt, Human
cccagcuacccuuuuucuccag

SEQ ID NO: 2827911 - RNA, 22 nt, Human
cccagcuaccucaaccaaugcc

SEQ ID NO: 2827912 - RNA, 17 nt, Human
cccagcuacucagaagc

SEQ ID NO: 2827913 - RNA, 22 nt, Human
cccagcgggcagguucugccug

SEQ ID NO: 2827914 - RNA, 22 nt, Human
cccagccccuagcccaggagag

SEQ ID NO: 2827915 - RNA, 16 nt, Human
cccagccccuccccca

SEQ ID NO: 2827916 - RNA, 18 nt, Human
cccagccccucccccauc

SEQ ID NO: 2827917 - RNA, 20 nt, Human
cccagccccuagcccaggag

SEQ ID NO: 2827918 - RNA, 14 nt, Human
cccagcccuggcuc

SEQ ID NO: 2827919 - RNA, 15 nt, Human
cccagcccuggcucu

SEQ ID NO: 2827920 - RNA, 16 nt, Human
cccagcccuggcucug

SEQ ID NO: 2827921 - RNA, 18 nt, Human
cccagcccuggcucugca

SEQ ID NO: 2827922 - RNA, 18 nt, Human
cccagccggccaauggaa

SEQ ID NO: 2827923 - RNA, 12 nt, Human
cccagccugcua

SEQ ID NO: 2827924 - RNA, 12 nt, Human
cccagccuauga

SEQ ID NO: 2827925 - RNA, 15 nt, Human
cccagccuaugagca

SEQ ID NO: 2827926 - RNA, 23 nt, Human
cccagccuaugagcauccugagc

SEQ ID NO: 2827927 - RNA, 22 nt, Human
cccagcaagugagagcugggug

SEQ ID NO: 2827928 - RNA, 21 nt, Human
cccagcaagugagagcugggu

SEQ ID NO: 2827929 - RNA, 20 nt, Human
cccagcaagugagagcuggg

SEQ ID NO: 2827930 - RNA, 19 nt, Human
cccagcaagugagagcugg

SEQ ID NO: 2827931 - RNA, 23 nt, Human
cccagcaagugagagcugggugu

SEQ ID NO: 2827932 - RNA, 13 nt, Human
cccagccccuaga

SEQ ID NO: 2827933 - RNA, 14 nt, Human
cccagccccuagaa

SEQ ID NO: 2827934 - RNA, 16 nt, Human
cccagccccuagaaac

SEQ ID NO: 2827935 - RNA, 19 nt, Human
cccagccccuagaaaccca

SEQ ID NO: 2827936 - RNA, 21 nt, Human
cccagccccuagaaacccaag

SEQ ID NO: 2827937 - RNA, 22 nt, Human
cccagccccuagaaacccaagc

SEQ ID NO: 2827938 - RNA, 13 nt, Human
cccagccccuagc

SEQ ID NO: 2827939 - RNA, 11 nt, Human
cccagccccua

SEQ ID NO: 2827940 - RNA, 14 nt, Human
cccagccccuagcc

SEQ ID NO: 2827941 - RNA, 17 nt, Human
cccagccccuagcccag

SEQ ID NO: 2827942 - RNA, 18 nt, Human
cccagccccuagcccagg

SEQ ID NO: 2827943 - RNA, 19 nt, Human
cccagccccuagcccagga

SEQ ID NO: 2827944 - RNA, 13 nt, Human
ccccaccccuacc

SEQ ID NO: 2827945 - RNA, 14 nt, Human
ccccaccccuccag

SEQ ID NO: 2827946 - RNA, 16 nt, Human
ccccaagcuguuuucu

SEQ ID NO: 2827947 - RNA, 14 nt, Human
ccccaagcuguuuu

SEQ ID NO: 2827948 - RNA, 14 nt, Human
ccccaagccuggca

SEQ ID NO: 2827949 - RNA, 13 nt, Human
ccccaagccuggc

SEQ ID NO: 2827950 - RNA, 17 nt, Human
ccccaagcuguuuucuu

SEQ ID NO: 2827951 - RNA, 13 nt, Human
cccauucugccug

SEQ ID NO: 2827952 - RNA, 18 nt, Human
cccauucugcccuguggg

SEQ ID NO: 2827953 - RNA, 15 nt, Human
cccauucucaucugc

SEQ ID NO: 2827954 - RNA, 16 nt, Human
cccauucucaucugca

SEQ ID NO: 2827955 - RNA, 22 nt, Human
ccccaacaaaccauccagugac

SEQ ID NO: 2827956 - RNA, 18 nt, Human
ccccaacauauaaaauaa

SEQ ID NO: 2827957 - RNA, 14 nt, Human
ccccaacucugagc

SEQ ID NO: 2827958 - RNA, 16 nt, Human
ccccaacucugagccc

SEQ ID NO: 2827959 - RNA, 17 nt, Human
ccccaacucugagccca

SEQ ID NO: 2827960 - RNA, 18 nt, Human
ccccaacucugagcccau

SEQ ID NO: 2827961 - RNA, 19 nt, Human
ccccaacucugagcccaug

SEQ ID NO: 2827962 - RNA, 22 nt, Human
ccccaacagcgacauagcccau

SEQ ID NO: 2827963 - RNA, 20 nt, Human
ccccaacagcgacauagccc

SEQ ID NO: 2827964 - RNA, 13 nt, Human
cccauggagccag

SEQ ID NO: 2827965 - RNA, 19 nt, Human
cccauggagccagcucccu

SEQ ID NO: 2827966 - RNA, 17 nt, Human
cccaguggccacucagc

SEQ ID NO: 2827967 - RNA, 22 nt, Human
cccaguggccacucagcuuccu

SEQ ID NO: 2827968 - RNA, 17 nt, Human
cccauggcccucccagu

SEQ ID NO: 2827969 - RNA, 14 nt, Human
cccauggcccugug

SEQ ID NO: 2827970 - RNA, 15 nt, Human
cccauggcccugugc

SEQ ID NO: 2827971 - RNA, 21 nt, Human
cccauggcccugugcuaaucc

SEQ ID NO: 2827972 - RNA, 22 nt, Human
cccauggcccugugcuaauccc

SEQ ID NO: 2827973 - RNA, 24 nt, Human
cccaugggacaaauugcacagaag

SEQ ID NO: 2827974 - RNA, 14 nt, Human
cccaugggcucuga

SEQ ID NO: 2827975 - RNA, 17 nt, Human
cccauucgcgcucugcu

SEQ ID NO: 2827976 - RNA, 20 nt, Human
cccauucgcgcucugcucag

SEQ ID NO: 2827977 - RNA, 16 nt, Human
cccaguggccacucag

SEQ ID NO: 2827978 - RNA, 20 nt, Human
cccagugcccacaggaucag

SEQ ID NO: 2827979 - RNA, 15 nt, Human
cccagugcccacagg

SEQ ID NO: 2827980 - RNA, 14 nt, Human
cccaguggcugcug

SEQ ID NO: 2827981 - RNA, 16 nt, Human
ccauaucuuaaagaaa

SEQ ID NO: 2827982 - RNA, 21 nt, Human
ccauaucuuaaagaaacagcu

SEQ ID NO: 2827983 - RNA, 14 nt, Human
ccauaucuugcgaa

SEQ ID NO: 2827984 - RNA, 21 nt, Human
ccauaucuugcgaauccaagc

SEQ ID NO: 2827985 - RNA, 22 nt, Human
ccauaucuugcgaauccaagcu

SEQ ID NO: 2827986 - RNA, 23 nt, Human
ccauaucuugcgaauccaagcuc

SEQ ID NO: 2827987 - RNA, 15 nt, Human
ccauauaaguuugaa

SEQ ID NO: 2827988 - RNA, 16 nt, Human
ccauauaaguuugaag

SEQ ID NO: 2827989 - RNA, 23 nt, Human
ccauauaaguuugaaggaaacag

SEQ ID NO: 2827990 - RNA, 19 nt, Human
ccauauaaguuugaaggaa

SEQ ID NO: 2827991 - RNA, 22 nt, Human
ccauauaaguuugaaggaaaca

SEQ ID NO: 2827992 - RNA, 16 nt, Human
ccauauauaacagaua

SEQ ID NO: 2827993 - RNA, 21 nt, Human
ccauauauaacagauacauuu

SEQ ID NO: 2827994 - RNA, 14 nt, Human
ccauauauauauau

SEQ ID NO: 2827995 - RNA, 15 nt, Human
ccauauauccuuuuc

SEQ ID NO: 2827996 - RNA, 15 nt, Human
ccauaugaucuguuu

SEQ ID NO: 2827997 - RNA, 13 nt, Human
ccaucacaggguu

SEQ ID NO: 2827998 - RNA, 16 nt, Human
ccaucacaauacagau

SEQ ID NO: 2827999 - RNA, 17 nt, Human
ccaucacaauacagaua

SEQ ID NO: 2828000 - RNA, 20 nt, Human
ccaucacaggguugggccca

SEQ ID NO: 2828001 - RNA, 18 nt, Human
ccagugagggacgucaga

SEQ ID NO: 2828002 - RNA, 22 nt, Human
ccauaccacccaaugcugaugu

SEQ ID NO: 2828003 - RNA, 14 nt, Human
ccauaccagcucgc

SEQ ID NO: 2828004 - RNA, 12 nt, Human
ccauacuaauua

SEQ ID NO: 2828005 - RNA, 23 nt, Human
ccauacuaauuauacccccugca

SEQ ID NO: 2828006 - RNA, 13 nt, Human
ccauacuaauuau

SEQ ID NO: 2828007 - RNA, 13 nt, Human
ccauacucagccu

SEQ ID NO: 2828008 - RNA, 14 nt, Human
ccauacucagccug

SEQ ID NO: 2828009 - RNA, 15 nt, Human
ccauacucagccugc

SEQ ID NO: 2828010 - RNA, 21 nt, Human
ccauacucagccugcugccca

SEQ ID NO: 2828011 - RNA, 14 nt, Human
ccauacucauuucu

SEQ ID NO: 2828012 - RNA, 15 nt, Human
ccauacucauuucua

SEQ ID NO: 2828013 - RNA, 17 nt, Human
ccauacuuaucucucug

SEQ ID NO: 2828014 - RNA, 15 nt, Human
ccaucucccacccug

SEQ ID NO: 2828015 - RNA, 16 nt, Human
ccaucucccacccugu

SEQ ID NO: 2828016 - RNA, 17 nt, Human
ccaucucccacccugua

SEQ ID NO: 2828017 - RNA, 18 nt, Human
ccaucucgcucccuccca

SEQ ID NO: 2828018 - RNA, 22 nt, Human
ccaucucgcucccucccaggac

SEQ ID NO: 2828019 - RNA, 13 nt, Human
ccaucucggagca

SEQ ID NO: 2828020 - RNA, 20 nt, Human
ccaucucggagcaucccgga

SEQ ID NO: 2828021 - RNA, 21 nt, Human
ccaucucggagcaucccggag

SEQ ID NO: 2828022 - RNA, 22 nt, Human
ccaucucggagcaucccggagg

SEQ ID NO: 2828023 - RNA, 23 nt, Human
ccaucucggagcaucccggagga

SEQ ID NO: 2828024 - RNA, 20 nt, Human
ccaucucgggcacaggccca

SEQ ID NO: 2828025 - RNA, 23 nt, Human
ccaucucuauauaaaaacaaaaa

SEQ ID NO: 2828026 - RNA, 18 nt, Human
ccaucucucauccuccag

SEQ ID NO: 2828027 - RNA, 17 nt, Human
ccaucuccuuucaggga

SEQ ID NO: 2828028 - RNA, 16 nt, Human
ccaucuccuuucaggg

SEQ ID NO: 2828029 - RNA, 20 nt, Human
ccaucuccuauaaucuguca

SEQ ID NO: 2828030 - RNA, 21 nt, Human
ccaucuccuauaaucugucaa

SEQ ID NO: 2828031 - RNA, 22 nt, Human
ccaucuccuauaaucugucaaa

SEQ ID NO: 2828032 - RNA, 23 nt, Human
ccaucuccuauaaucugucaaaa

SEQ ID NO: 2828033 - RNA, 18 nt, Human
ccaucuccuuucagggaa

SEQ ID NO: 2828034 - RNA, 16 nt, Human
ccauccacucuacccu

SEQ ID NO: 2828035 - RNA, 19 nt, Human
ccauccaccgcugcuccac

SEQ ID NO: 2828036 - RNA, 16 nt, Human
ccaucaguuagagcug

SEQ ID NO: 2828037 - RNA, 18 nt, Human
ccaucauugcugucugca

SEQ ID NO: 2828038 - RNA, 22 nt, Human
ccaucauugcugucugcagccu

SEQ ID NO: 2828039 - RNA, 22 nt, Human
ccauccacucuacccucccacc

SEQ ID NO: 2828040 - RNA, 19 nt, Human
ccauccacucuacccuccc

SEQ ID NO: 2828041 - RNA, 13 nt, Human
ccauccagcuugc

SEQ ID NO: 2828042 - RNA, 15 nt, Human
ccauccagcuugcca

SEQ ID NO: 2828043 - RNA, 16 nt, Human
ccauccagcuugccag

SEQ ID NO: 2828044 - RNA, 21 nt, Human
ccaucagcccaacgggaagca

SEQ ID NO: 2828045 - RNA, 18 nt, Human
ccauccacuuacauauau

SEQ ID NO: 2828046 - RNA, 14 nt, Human
ccaugaagacagga

SEQ ID NO: 2828047 - RNA, 15 nt, Human
ccaugaagacaggau

SEQ ID NO: 2828048 - RNA, 23 nt, Human
ccaucugcuuuuauuaaauuugu

SEQ ID NO: 2828049 - RNA, 12 nt, Human
ccaugaugcugg

SEQ ID NO: 2828050 - RNA, 11 nt, Human
ccaugaagccu

SEQ ID NO: 2828051 - RNA, 12 nt, Human
ccaugaagccuu

SEQ ID NO: 2828052 - RNA, 13 nt, Human
ccaugaagccuuu

SEQ ID NO: 2828053 - RNA, 14 nt, Human
ccaugaagccuuuu

SEQ ID NO: 2828054 - RNA, 16 nt, Human
ccaugaagccuuuuga

SEQ ID NO: 2828055 - RNA, 13 nt, Human
ccaugauggccag

SEQ ID NO: 2828056 - RNA, 18 nt, Human
ccaugauggccaggcuga

SEQ ID NO: 2828057 - RNA, 22 nt, Human
ccaucuggguccuugcaccccu

SEQ ID NO: 2828058 - RNA, 23 nt, Human
ccaucuggguccuugcaccccuc

SEQ ID NO: 2828059 - RNA, 12 nt, Human
ccaugaagacag

SEQ ID NO: 2828060 - RNA, 14 nt, Human
ccaugaagaauucc

SEQ ID NO: 2828061 - RNA, 19 nt, Human
ccaugaagacaggacagug

SEQ ID NO: 2828062 - RNA, 17 nt, Human
ccaugaagacaggacag

SEQ ID NO: 2828063 - RNA, 16 nt, Human
ccaugaagacaggaca

SEQ ID NO: 2828064 - RNA, 13 nt, Human
ccaugaagacagg

SEQ ID NO: 2828065 - RNA, 12 nt, Human
ccaucuggccug

SEQ ID NO: 2828066 - RNA, 13 nt, Human
ccaucuggccugg

SEQ ID NO: 2828067 - RNA, 14 nt, Human
ccaucuggccuggc

SEQ ID NO: 2828068 - RNA, 15 nt, Human
ccaucuggccuggcc

SEQ ID NO: 2828069 - RNA, 16 nt, Human
ccaucuggccuggccu

SEQ ID NO: 2828070 - RNA, 17 nt, Human
ccaucuggccuggccug

SEQ ID NO: 2828071 - RNA, 18 nt, Human
ccaucuggccuggccugg

SEQ ID NO: 2828072 - RNA, 22 nt, Human
ccaucuggccuggccuggcccu

SEQ ID NO: 2828073 - RNA, 17 nt, Human
ccaucuggguccuugca

SEQ ID NO: 2828074 - RNA, 18 nt, Human
ccaucuggguccuugcac

SEQ ID NO: 2828075 - RNA, 22 nt, Human
ccaucugggcuccuaaccuucc

SEQ ID NO: 2828076 - RNA, 22 nt, Human
ccaugcaagaacucaucacugu

SEQ ID NO: 2828077 - RNA, 23 nt, Human
ccaugauucuauuuauauguaca

SEQ ID NO: 2828078 - RNA, 17 nt, Human
ccaugcaauucauccca

SEQ ID NO: 2828079 - RNA, 12 nt, Human
ccaugcaccaaa

SEQ ID NO: 2828080 - RNA, 13 nt, Human
ccaugcaccaaac

SEQ ID NO: 2828081 - RNA, 16 nt, Human
ccaugcugggaagacg

SEQ ID NO: 2828082 - RNA, 15 nt, Human
ccaugcuccucacug

SEQ ID NO: 2828083 - RNA, 16 nt, Human
ccaugcuccucacugc

SEQ ID NO: 2828084 - RNA, 17 nt, Human
ccaugcuccucacugcc

SEQ ID NO: 2828085 - RNA, 21 nt, Human
ccaugcuccucacugcccgca

SEQ ID NO: 2828086 - RNA, 22 nt, Human
ccaugcuccucacugcccgcac

SEQ ID NO: 2828087 - RNA, 14 nt, Human
ccaugccaggaacc

SEQ ID NO: 2828088 - RNA, 18 nt, Human
ccaugcaugacagccucu

SEQ ID NO: 2828089 - RNA, 11 nt, Human
ccaugcauuuc

SEQ ID NO: 2828090 - RNA, 20 nt, Human
ccaugcauuucauaaacuaa

SEQ ID NO: 2828091 - RNA, 15 nt, Human
ccaugcccaccugcc

SEQ ID NO: 2828092 - RNA, 13 nt, Human
ccaugcccaccug

SEQ ID NO: 2828093 - RNA, 21 nt, Human
ccaugcccaccugcccaucac

SEQ ID NO: 2828094 - RNA, 18 nt, Human
ccaugcccaccugcccau

SEQ ID NO: 2828095 - RNA, 17 nt, Human
ccaugcccaccugccca

SEQ ID NO: 2828096 - RNA, 16 nt, Human
ccaugcccaccugccc

SEQ ID NO: 2828097 - RNA, 20 nt, Human
ccaugccaaagcuagggugg

SEQ ID NO: 2828098 - RNA, 13 nt, Human
ccaugccacguuc

SEQ ID NO: 2828099 - RNA, 18 nt, Human
ccaugccacguuccacag

SEQ ID NO: 2828100 - RNA, 21 nt, Human
ccaugccacguuccacaguug

SEQ ID NO: 2828101 - RNA, 13 nt, Human
ccaugcaggcccu

SEQ ID NO: 2828102 - RNA, 14 nt, Human
ccaugcaggcccuu

SEQ ID NO: 2828103 - RNA, 17 nt, Human
ccaugcaggcccuuuga

SEQ ID NO: 2828104 - RNA, 12 nt, Human
ccaugcaggggg

SEQ ID NO: 2828105 - RNA, 19 nt, Human
ccaugcagggggcuccugg

SEQ ID NO: 2828106 - RNA, 15 nt, Human
ccaugccaggaaccu

SEQ ID NO: 2828107 - RNA, 17 nt, Human
cccaaacaaauaugcaa

SEQ ID NO: 2828108 - RNA, 20 nt, Human
cccaaacaaauaugcaaaag

SEQ ID NO: 2828109 - RNA, 20 nt, Human
ccauuuugggguacccacug

SEQ ID NO: 2828110 - RNA, 22 nt, Human
ccauuuugggguacccacugcu

SEQ ID NO: 2828111 - RNA, 19 nt, Human
cccaaagcagcccuucccc

SEQ ID NO: 2828112 - RNA, 21 nt, Human
cccaaagagcacaaacauuuu

SEQ ID NO: 2828113 - RNA, 13 nt, Human
cccaaacccuagg

SEQ ID NO: 2828114 - RNA, 14 nt, Human
cccaaaagauugcu

SEQ ID NO: 2828115 - RNA, 12 nt, Human
cccaaacuguga

SEQ ID NO: 2828116 - RNA, 22 nt, Human
cccaaacuguucaagaaauaau

SEQ ID NO: 2828117 - RNA, 16 nt, Human
cccaaacaccuuccag

SEQ ID NO: 2828118 - RNA, 19 nt, Human
cccaaacaccuuccagcuc

SEQ ID NO: 2828119 - RNA, 21 nt, Human
cccaaacaccuuccagcuccu

SEQ ID NO: 2828120 - RNA, 22 nt, Human
cccaaacaccuuccagcuccug

SEQ ID NO: 2828121 - RNA, 18 nt, Human
ccauucugccugcccagg

SEQ ID NO: 2828122 - RNA, 17 nt, Human
ccauucugccugcccag

SEQ ID NO: 2828123 - RNA, 16 nt, Human
ccauucugccugccca

SEQ ID NO: 2828124 - RNA, 20 nt, Human
ccauucugccugcccaggcc

SEQ ID NO: 2828125 - RNA, 19 nt, Human
ccauucugccugcccaggc

SEQ ID NO: 2828126 - RNA, 21 nt, Human
ccauucugccugcccaggccc

SEQ ID NO: 2828127 - RNA, 14 nt, Human
ccauggacuuuaua

SEQ ID NO: 2828128 - RNA, 21 nt, Human
ccaugcugggaagacgccuga

SEQ ID NO: 2828129 - RNA, 16 nt, Human
ccaggugccuuucaaa

SEQ ID NO: 2828130 - RNA, 18 nt, Human
ccaggugccuuucaaauu

SEQ ID NO: 2828131 - RNA, 20 nt, Human
ccaggugccuuucaaauuua

SEQ ID NO: 2828132 - RNA, 21 nt, Human
ccaggugccuuucaaauuuag

SEQ ID NO: 2828133 - RNA, 15 nt, Human
ccaggugcccagcua

SEQ ID NO: 2828134 - RNA, 13 nt, Human
ccaggugcccagc

SEQ ID NO: 2828135 - RNA, 15 nt, Human
ccaggucucacgggc

SEQ ID NO: 2828136 - RNA, 16 nt, Human
ccaggucucacgggca

SEQ ID NO: 2828137 - RNA, 23 nt, Human
ccaggucucacgggcaugggcac

SEQ ID NO: 2828138 - RNA, 23 nt, Human
ccaggucugggaagcugagggca

SEQ ID NO: 2828139 - RNA, 13 nt, Human
ccaggucaacaga

SEQ ID NO: 2828140 - RNA, 14 nt, Human
ccaggucaacagaa

SEQ ID NO: 2828141 - RNA, 19 nt, Human
ccaggucaacagaaugaaa

SEQ ID NO: 2828142 - RNA, 20 nt, Human
ccaggucaacagaaugaaaa

SEQ ID NO: 2828143 - RNA, 21 nt, Human
ccaggucaacagaaugaaaaa

SEQ ID NO: 2828144 - RNA, 22 nt, Human
ccaggucaacagaaugaaaaau

SEQ ID NO: 2828145 - RNA, 14 nt, Human
ccaggucacacgac

SEQ ID NO: 2828146 - RNA, 21 nt, Human
ccagggccuggaagacagaga

SEQ ID NO: 2828147 - RNA, 16 nt, Human
ccagggccuggaagac

SEQ ID NO: 2828148 - RNA, 17 nt, Human
ccagggccuggaagaca

SEQ ID NO: 2828149 - RNA, 19 nt, Human
ccagggccuggaagacaga

SEQ ID NO: 2828150 - RNA, 20 nt, Human
ccagggccuggaagacagag

SEQ ID NO: 2828151 - RNA, 15 nt, Human
ccaggucccccugca

SEQ ID NO: 2828152 - RNA, 16 nt, Human
ccaggucccccugcag

SEQ ID NO: 2828153 - RNA, 17 nt, Human
ccaggucccccugcagc

SEQ ID NO: 2828154 - RNA, 18 nt, Human
ccaggucccccugcagcu

SEQ ID NO: 2828155 - RNA, 12 nt, Human
ccagguccccuc

SEQ ID NO: 2828156 - RNA, 20 nt, Human
ccagugaauucuugaaggaa

SEQ ID NO: 2828157 - RNA, 16 nt, Human
ccagugaauucuugaa

SEQ ID NO: 2828158 - RNA, 20 nt, Human
ccagugaaaucaguuacucu

SEQ ID NO: 2828159 - RNA, 12 nt, Human
ccagucuugugu

SEQ ID NO: 2828160 - RNA, 18 nt, Human
ccagucuuuaaaggccca

SEQ ID NO: 2828161 - RNA, 19 nt, Human
ccagucuuuaaaggcccag

SEQ ID NO: 2828162 - RNA, 20 nt, Human
ccagucuuuaaaggcccagc

SEQ ID NO: 2828163 - RNA, 21 nt, Human
ccagucuuuaaaggcccagcc

SEQ ID NO: 2828164 - RNA, 22 nt, Human
ccagucuuuaaaggcccagccc

SEQ ID NO: 2828165 - RNA, 23 nt, Human
ccagucuuuaaaggcccagcccc

SEQ ID NO: 2828166 - RNA, 18 nt, Human
ccaguaucuauauaugug

SEQ ID NO: 2828167 - RNA, 14 nt, Human
ccaguaccuugcuu

SEQ ID NO: 2828168 - RNA, 18 nt, Human
ccaguaccuccugucucu

SEQ ID NO: 2828169 - RNA, 20 nt, Human
ccaguaccuccugucucugg

SEQ ID NO: 2828170 - RNA, 22 nt, Human
ccaguaccuccugucucuggcc

SEQ ID NO: 2828171 - RNA, 20 nt, Human
ccaguaggggcuuauaauaa

SEQ ID NO: 2828172 - RNA, 14 nt, Human
ccaguaucuauaua

SEQ ID NO: 2828173 - RNA, 14 nt, Human
ccagguucagcuug

SEQ ID NO: 2828174 - RNA, 16 nt, Human
ccagguuaucugggca

SEQ ID NO: 2828175 - RNA, 15 nt, Human
ccagguucaacccac

SEQ ID NO: 2828176 - RNA, 20 nt, Human
ccagguucaacccacagcua

SEQ ID NO: 2828177 - RNA, 20 nt, Human
ccagguucaagcgauucucc

SEQ ID NO: 2828178 - RNA, 22 nt, Human
ccagguucaagcgauucuccug

SEQ ID NO: 2828179 - RNA, 23 nt, Human
ccagguucaagcgauucuccugc

SEQ ID NO: 2828180 - RNA, 21 nt, Human
ccagguguuacuguaauuccu

SEQ ID NO: 2828181 - RNA, 17 nt, Human
ccagguguuacuguaau

SEQ ID NO: 2828182 - RNA, 22 nt, Human
ccagguguguccaccugggcau

SEQ ID NO: 2828183 - RNA, 19 nt, Human
ccagguguuaacauuccaa

SEQ ID NO: 2828184 - RNA, 20 nt, Human
ccagguguuaacauuccaag

SEQ ID NO: 2828185 - RNA, 23 nt, Human
ccagguguuaacauuccaagacu

SEQ ID NO: 2828186 - RNA, 22 nt, Human
ccaguaacgggucguaaugacu

SEQ ID NO: 2828187 - RNA, 13 nt, Human
ccaggccccugcc

SEQ ID NO: 2828188 - RNA, 15 nt, Human
ccaggcccccaccac

SEQ ID NO: 2828189 - RNA, 19 nt, Human
ccaggcccccaccacacau

SEQ ID NO: 2828190 - RNA, 20 nt, Human
ccaggcccccaccacacauc

SEQ ID NO: 2828191 - RNA, 21 nt, Human
ccaggcccccaccacacaucc

SEQ ID NO: 2828192 - RNA, 22 nt, Human
ccaggcccccaccacacauccc

SEQ ID NO: 2828193 - RNA, 23 nt, Human
ccaggcccccaccacacauccca

SEQ ID NO: 2828194 - RNA, 19 nt, Human
ccaggcuggucucaaacuc

SEQ ID NO: 2828195 - RNA, 21 nt, Human
ccaggcuggucucgaacuccu

SEQ ID NO: 2828196 - RNA, 20 nt, Human
ccaggcuguaucccaugagc

SEQ ID NO: 2828197 - RNA, 17 nt, Human
ccaggcuugccugcagg

SEQ ID NO: 2828198 - RNA, 13 nt, Human
ccaggcuggucuu

SEQ ID NO: 2828199 - RNA, 22 nt, Human
ccaggcuggucuugaaguccug

SEQ ID NO: 2828200 - RNA, 21 nt, Human
ccaggcugguuucgaacuccu

SEQ ID NO: 2828201 - RNA, 18 nt, Human
ccaggcuugccugcaggc

SEQ ID NO: 2828202 - RNA, 17 nt, Human
ccagggaagcugucccu

SEQ ID NO: 2828203 - RNA, 22 nt, Human
ccagggcacccuguggcccugg

SEQ ID NO: 2828204 - RNA, 23 nt, Human
ccagggcacccuguggcccuggc

SEQ ID NO: 2828205 - RNA, 18 nt, Human
ccagggaagcuggccgag

SEQ ID NO: 2828206 - RNA, 17 nt, Human
ccagggaagcuggccga

SEQ ID NO: 2828207 - RNA, 18 nt, Human
ccaggcuuuguacagagu

SEQ ID NO: 2828208 - RNA, 12 nt, Human
ccagggcagugc

SEQ ID NO: 2828209 - RNA, 14 nt, Human
ccagggcagugcua

SEQ ID NO: 2828210 - RNA, 17 nt, Human
ccagggcagugcuagug

SEQ ID NO: 2828211 - RNA, 22 nt, Human
ccagggcagugcuagugagcug

SEQ ID NO: 2828212 - RNA, 23 nt, Human
ccagggcagugcuagugagcugg

SEQ ID NO: 2828213 - RNA, 15 nt, Human
ccaggagccccgagg

SEQ ID NO: 2828214 - RNA, 15 nt, Human
ccaggagcugucacc

SEQ ID NO: 2828215 - RNA, 23 nt, Human
ccaggagcugucaccaaggaaac

SEQ ID NO: 2828216 - RNA, 19 nt, Human
ccaggcaggugccuggaca

SEQ ID NO: 2828217 - RNA, 20 nt, Human
ccaggaauauugucauccuu

SEQ ID NO: 2828218 - RNA, 19 nt, Human
ccaggaauuugggacccug

SEQ ID NO: 2828219 - RNA, 20 nt, Human
ccaggaauuugggacccugc

SEQ ID NO: 2828220 - RNA, 22 nt, Human
ccaggaauuugggacccugcuu

SEQ ID NO: 2828221 - RNA, 23 nt, Human
ccaggaauuugggacccugcuuu

SEQ ID NO: 2828222 - RNA, 19 nt, Human
ccagcugggcucugcaauu

SEQ ID NO: 2828223 - RNA, 14 nt, Human
ccaggaccaagcca

SEQ ID NO: 2828224 - RNA, 13 nt, Human
ccaggacagucag

SEQ ID NO: 2828225 - RNA, 22 nt, Human
ccaggacaccacacccagccuc

SEQ ID NO: 2828226 - RNA, 23 nt, Human
ccaggacaccacacccagccuca

SEQ ID NO: 2828227 - RNA, 17 nt, Human
ccaggacaccacaccca

SEQ ID NO: 2828228 - RNA, 18 nt, Human
ccaggacaccacacccag

SEQ ID NO: 2828229 - RNA, 19 nt, Human
ccaggacaccacacccagc

SEQ ID NO: 2828230 - RNA, 20 nt, Human
ccaggacaccacacccagcc

SEQ ID NO: 2828231 - RNA, 21 nt, Human
ccaggacaccacacccagccu

SEQ ID NO: 2828232 - RNA, 22 nt, Human
ccaggacucccuccucaccucu

SEQ ID NO: 2828233 - RNA, 18 nt, Human
ccaggacucccuccucac

SEQ ID NO: 2828234 - RNA, 17 nt, Human
ccaggacucccuccuca

SEQ ID NO: 2828235 - RNA, 16 nt, Human
ccaggacucccuccuc

SEQ ID NO: 2828236 - RNA, 23 nt, Human
ccaggacucccuccucaccucug

SEQ ID NO: 2828237 - RNA, 14 nt, Human
ccaggacuccuccc

SEQ ID NO: 2828238 - RNA, 17 nt, Human
ccaggacuccuccccac

SEQ ID NO: 2828239 - RNA, 11 nt, Human
ccaggacucug

SEQ ID NO: 2828240 - RNA, 22 nt, Human
ccaggacucugaccccagcauu

SEQ ID NO: 2828241 - RNA, 18 nt, Human
ccaggacucugaccccag

SEQ ID NO: 2828242 - RNA, 14 nt, Human
ccaggacucugacc

SEQ ID NO: 2828243 - RNA, 13 nt, Human
ccaggacucugac

SEQ ID NO: 2828244 - RNA, 14 nt, Human
ccaggacucccucc

SEQ ID NO: 2828245 - RNA, 22 nt, Human
ccagacaaggaaauacccuucu

SEQ ID NO: 2828246 - RNA, 12 nt, Human
ccagcugccucc

SEQ ID NO: 2828247 - RNA, 16 nt, Human
ccagcugcaggaauca

SEQ ID NO: 2828248 - RNA, 19 nt, Human
ccagcugcaggaaucaaaa

SEQ ID NO: 2828249 - RNA, 20 nt, Human
ccagcugcaggaaucaaaaa

SEQ ID NO: 2828250 - RNA, 23 nt, Human
ccagcugcaggaaucaaaaauug

SEQ ID NO: 2828251 - RNA, 24 nt, Human
ccagcuggagaaauaugguacuca

SEQ ID NO: 2828252 - RNA, 15 nt, Human
ccagcugcugcucug

SEQ ID NO: 2828253 - RNA, 16 nt, Human
ccagcugcugcucuga

SEQ ID NO: 2828254 - RNA, 11 nt, Human
ccagcugcugu

SEQ ID NO: 2828255 - RNA, 13 nt, Human
ccagcugcugucu

SEQ ID NO: 2828256 - RNA, 14 nt, Human
ccagcugcugucuu

SEQ ID NO: 2828257 - RNA, 19 nt, Human
ccagcugcugucuucugga

SEQ ID NO: 2828258 - RNA, 16 nt, Human
ccagcugggcucugca

SEQ ID NO: 2828259 - RNA, 18 nt, Human
ccagcugggcucugcaau

SEQ ID NO: 2828260 - RNA, 18 nt, Human
ccagccuucuuccauccc

SEQ ID NO: 2828261 - RNA, 19 nt, Human
ccagccuucuuccauccca

SEQ ID NO: 2828262 - RNA, 22 nt, Human
ccagccuucuuccaucccagga

SEQ ID NO: 2828263 - RNA, 16 nt, Human
ccagagcccaccuugg

SEQ ID NO: 2828264 - RNA, 12 nt, Human
ccagagcagggu

SEQ ID NO: 2828265 - RNA, 14 nt, Human
ccagagcagggugu

SEQ ID NO: 2828266 - RNA, 22 nt, Human
ccagagcccaccuuggcucaag

SEQ ID NO: 2828267 - RNA, 18 nt, Human
ccagagcauuuccaacac

SEQ ID NO: 2828268 - RNA, 16 nt, Human
ccagcgagcccuggug

SEQ ID NO: 2828269 - RNA, 15 nt, Human
ccagcgagcccuggu

SEQ ID NO: 2828270 - RNA, 14 nt, Human
ccagcgagcccugg

SEQ ID NO: 2828271 - RNA, 14 nt, Human
ccagcucuggcuuc

SEQ ID NO: 2828272 - RNA, 12 nt, Human
ccagcucuggcu

SEQ ID NO: 2828273 - RNA, 13 nt, Human
ccacucccaggca

SEQ ID NO: 2828274 - RNA, 15 nt, Human
ccacucccaggcagc

SEQ ID NO: 2828275 - RNA, 14 nt, Human
ccacucccaguccc

SEQ ID NO: 2828276 - RNA, 13 nt, Human
ccacuccauuccc

SEQ ID NO: 2828277 - RNA, 14 nt, Human
ccacuccauuccca

SEQ ID NO: 2828278 - RNA, 12 nt, Human
ccacuuaccuag

SEQ ID NO: 2828279 - RNA, 18 nt, Human
ccacuuacauauauuuuu

SEQ ID NO: 2828280 - RNA, 20 nt, Human
ccacuuacauauauuuuuaa

SEQ ID NO: 2828281 - RNA, 19 nt, Human
ccacuuagaaauugcauuu

SEQ ID NO: 2828282 - RNA, 14 nt, Human
ccacucccaggcag

SEQ ID NO: 2828283 - RNA, 16 nt, Human
ccagaaaucauuuuac

SEQ ID NO: 2828284 - RNA, 17 nt, Human
ccagaacaacaacuauc

SEQ ID NO: 2828285 - RNA, 13 nt, Human
ccagaaauuagaa

SEQ ID NO: 2828286 - RNA, 22 nt, Human
ccagaaaugucuaaaugcugaa

SEQ ID NO: 2828287 - RNA, 17 nt, Human
ccagaaauuagaaaccu

SEQ ID NO: 2828288 - RNA, 24 nt, Human
ccagaaacuguucccaccugcugg

SEQ ID NO: 2828289 - RNA, 20 nt, Human
ccacuucaaugcacauggug

SEQ ID NO: 2828290 - RNA, 16 nt, Human
ccagaaaggagacuag

SEQ ID NO: 2828291 - RNA, 14 nt, Human
ccagaaaggagacu

SEQ ID NO: 2828292 - RNA, 21 nt, Human
ccacuuagaaauugcauuucc

SEQ ID NO: 2828293 - RNA, 18 nt, Human
ccacuccagcgcugagug

SEQ ID NO: 2828294 - RNA, 16 nt, Human
ccacuuaggcuuugua

SEQ ID NO: 2828295 - RNA, 22 nt, Human
ccacuuauuccccauucuuccu

SEQ ID NO: 2828296 - RNA, 13 nt, Human
ccagaaguugugg

SEQ ID NO: 2828297 - RNA, 22 nt, Human
ccagaaguuguggauuucaguu

SEQ ID NO: 2828298 - RNA, 23 nt, Human
ccagaaguuguggauuucaguuu

SEQ ID NO: 2828299 - RNA, 22 nt, Human
ccagaagauagcuucaccccaa

SEQ ID NO: 2828300 - RNA, 24 nt, Human
ccagaagauccccucaggacugca

SEQ ID NO: 2828301 - RNA, 18 nt, Human
ccagaagauccccucagg

SEQ ID NO: 2828302 - RNA, 22 nt, Human
ccagaagauccccucaggacug

SEQ ID NO: 2828303 - RNA, 20 nt, Human
ccagaacacggcucacgcuu

SEQ ID NO: 2828304 - RNA, 21 nt, Human
ccagaagaagagaagcugcug

SEQ ID NO: 2828305 - RNA, 22 nt, Human
ccagaagaagagaagcugcuga

SEQ ID NO: 2828306 - RNA, 23 nt, Human
ccagaagaagagaagcugcugac

SEQ ID NO: 2828307 - RNA, 17 nt, Human
ccagaagaagauggcug

SEQ ID NO: 2828308 - RNA, 21 nt, Human
ccagacaccuugacagggcac

SEQ ID NO: 2828309 - RNA, 13 nt, Human
ccagaauuuggaa

SEQ ID NO: 2828310 - RNA, 15 nt, Human
ccagaauuuggaaau

SEQ ID NO: 2828311 - RNA, 16 nt, Human
ccagaauuuggaaauc

SEQ ID NO: 2828312 - RNA, 17 nt, Human
ccagaauuuggaaaucc

SEQ ID NO: 2828313 - RNA, 18 nt, Human
ccagaauuuggaaauccu

SEQ ID NO: 2828314 - RNA, 21 nt, Human
ccagaauuuggaaauccuagu

SEQ ID NO: 2828315 - RNA, 23 nt, Human
ccagaauuuggaaauccuaguuu

SEQ ID NO: 2828316 - RNA, 23 nt, Human
ccagaauggucuuucuaaugugu

SEQ ID NO: 2828317 - RNA, 16 nt, Human
ccagaaugcuuuagga

SEQ ID NO: 2828318 - RNA, 21 nt, Human
ccagaaugcuguacaucuauu

SEQ ID NO: 2828319 - RNA, 20 nt, Human
ccagaauugugcaaauggaa

SEQ ID NO: 2828320 - RNA, 13 nt, Human
ccagaauuucaaa

SEQ ID NO: 2828321 - RNA, 17 nt, Human
ccagacagacaacacug

SEQ ID NO: 2828322 - RNA, 22 nt, Human
ccagacagacaucucugcaccc

SEQ ID NO: 2828323 - RNA, 11 nt, Human
ccagacagacc

SEQ ID NO: 2828324 - RNA, 12 nt, Human
ccagacagaggg

SEQ ID NO: 2828325 - RNA, 15 nt, Human
ccagacagaggguca

SEQ ID NO: 2828326 - RNA, 17 nt, Human
ccagacagagggucaca

SEQ ID NO: 2828327 - RNA, 23 nt, Human
ccagacagagggucacaguguuu

SEQ ID NO: 2828328 - RNA, 23 nt, Human
ccagacacugaccauccacucua

SEQ ID NO: 2828329 - RNA, 19 nt, Human
ccagacagacaucucugca

SEQ ID NO: 2828330 - RNA, 18 nt, Human
ccagacagacaucucugc

SEQ ID NO: 2828331 - RNA, 14 nt, Human
ccagaccccuggcu

SEQ ID NO: 2828332 - RNA, 15 nt, Human
ccagagcagaugcag

SEQ ID NO: 2828333 - RNA, 16 nt, Human
ccagagcagaugcaga

SEQ ID NO: 2828334 - RNA, 17 nt, Human
ccagagcagaugcagag

SEQ ID NO: 2828335 - RNA, 18 nt, Human
ccagagcagaugcagaga

SEQ ID NO: 2828336 - RNA, 20 nt, Human
ccagagcagaugcagagagc

SEQ ID NO: 2828337 - RNA, 22 nt, Human
ccagagcagaugcagagagcca

SEQ ID NO: 2828338 - RNA, 23 nt, Human
ccagagcagaugcagagagccau

SEQ ID NO: 2828339 - RNA, 14 nt, Human
ccagagcaggaagc

SEQ ID NO: 2828340 - RNA, 15 nt, Human
ccagagcaggaagca

SEQ ID NO: 2828341 - RNA, 15 nt, Human
ccagaccccuggcuu

SEQ ID NO: 2828342 - RNA, 16 nt, Human
ccagaccccuggcuuu

SEQ ID NO: 2828343 - RNA, 14 nt, Human
ccagagcagaugca

SEQ ID NO: 2828344 - RNA, 17 nt, Human
ccagaccccuggcuuuu

SEQ ID NO: 2828345 - RNA, 22 nt, Human
ccacuacaugcagcccaugccc

SEQ ID NO: 2828346 - RNA, 22 nt, Human
ccacuacacuccagccugagca

SEQ ID NO: 2828347 - RNA, 21 nt, Human
ccacuacacuccagccugagc

SEQ ID NO: 2828348 - RNA, 20 nt, Human
ccacuacacuccagccugag

SEQ ID NO: 2828349 - RNA, 21 nt, Human
ccacuagaacucuccaucuua

SEQ ID NO: 2828350 - RNA, 18 nt, Human
ccacuaggacucugaggc

SEQ ID NO: 2828351 - RNA, 16 nt, Human
ccacuaggacucugag

SEQ ID NO: 2828352 - RNA, 17 nt, Human
ccacuagacccacugga

SEQ ID NO: 2828353 - RNA, 15 nt, Human
ccacuagacccacug

SEQ ID NO: 2828354 - RNA, 20 nt, Human
ccacuauaaaaugucuucaa

SEQ ID NO: 2828355 - RNA, 16 nt, Human
ccacuauccuucguga

SEQ ID NO: 2828356 - RNA, 20 nt, Human
ccacuaggacucugaggcuc

SEQ ID NO: 2828357 - RNA, 19 nt, Human
ccacuaggacucugaggcu

SEQ ID NO: 2828358 - RNA, 22 nt, Human
ccacuaguaaguaauuaugcac

SEQ ID NO: 2828359 - RNA, 23 nt, Human
ccacuaguaaguaauuaugcacu

SEQ ID NO: 2828360 - RNA, 12 nt, Human
ccacucagcccc

SEQ ID NO: 2828361 - RNA, 13 nt, Human
ccacucagccccu

SEQ ID NO: 2828362 - RNA, 14 nt, Human
ccacucagccccua

SEQ ID NO: 2828363 - RNA, 15 nt, Human
ccacucagccccuag

SEQ ID NO: 2828364 - RNA, 16 nt, Human
ccacucagccccuagg

SEQ ID NO: 2828365 - RNA, 17 nt, Human
ccacucagccccuagga

SEQ ID NO: 2828366 - RNA, 18 nt, Human
ccacucagccccuaggag

SEQ ID NO: 2828367 - RNA, 16 nt, Human
ccacuagacucuucac

SEQ ID NO: 2828368 - RNA, 13 nt, Human
ccacucagcuucc

SEQ ID NO: 2828369 - RNA, 13 nt, Human
ccacucaggaggc

SEQ ID NO: 2828370 - RNA, 15 nt, Human
ccacucagcuccgug

SEQ ID NO: 2828371 - RNA, 11 nt, Human
ccacucagcuc

SEQ ID NO: 2828372 - RNA, 20 nt, Human
ccacucaggccaacaagcca

SEQ ID NO: 2828373 - RNA, 14 nt, Human
ccacucagggguca

SEQ ID NO: 2828374 - RNA, 13 nt, Human
ccacucaggccaa

SEQ ID NO: 2828375 - RNA, 20 nt, Human
ccacucaggaggcugaggca

SEQ ID NO: 2828376 - RNA, 14 nt, Human
ccacucagcuuccu

SEQ ID NO: 2828377 - RNA, 18 nt, Human
ccacucaggcauuugacu

SEQ ID NO: 2828378 - RNA, 20 nt, Human
ccacuccagaccccuggcuu

SEQ ID NO: 2828379 - RNA, 21 nt, Human
ccacuccagaccccuggcuuu

SEQ ID NO: 2828380 - RNA, 22 nt, Human
ccacuccagaccccuggcuuuu

SEQ ID NO: 2828381 - RNA, 13 nt, Human
ccacgcuggagug

SEQ ID NO: 2828382 - RNA, 16 nt, Human
ccacgcuggagugcag

SEQ ID NO: 2828383 - RNA, 18 nt, Human
ccaccugucucagccucc

SEQ ID NO: 2828384 - RNA, 16 nt, Human
ccaccugucucagccu

SEQ ID NO: 2828385 - RNA, 15 nt, Human
ccaccugucucagcc

SEQ ID NO: 2828386 - RNA, 12 nt, Human
ccaccugucuca

SEQ ID NO: 2828387 - RNA, 23 nt, Human
ccaccugucucagccucccagag

SEQ ID NO: 2828388 - RNA, 20 nt, Human
ccaccugucucagccuccca

SEQ ID NO: 2828389 - RNA, 18 nt, Human
ccaccccauccaguucau

SEQ ID NO: 2828390 - RNA, 11 nt, Human
ccaccugucuc

SEQ ID NO: 2828391 - RNA, 18 nt, Human
ccacggccaggccagagg

SEQ ID NO: 2828392 - RNA, 16 nt, Human
ccacggccaggccaga

SEQ ID NO: 2828393 - RNA, 19 nt, Human
ccacgcuggagugcaguga

SEQ ID NO: 2828394 - RNA, 18 nt, Human
ccacgcuggagugcagug

SEQ ID NO: 2828395 - RNA, 23 nt, Human
ccacggccaggccagagggagug

SEQ ID NO: 2828396 - RNA, 20 nt, Human
ccacggcguuguaccuguag

SEQ ID NO: 2828397 - RNA, 13 nt, Human
ccacggcuaagag

SEQ ID NO: 2828398 - RNA, 17 nt, Human
ccacggcuaagaggcug

SEQ ID NO: 2828399 - RNA, 18 nt, Human
ccacggcuaagaggcugc

SEQ ID NO: 2828400 - RNA, 21 nt, Human
ccacggcuaagaggcugcuga

SEQ ID NO: 2828401 - RNA, 12 nt, Human
ccaccccacacu

SEQ ID NO: 2828402 - RNA, 13 nt, Human
ccaccccacacuu

SEQ ID NO: 2828403 - RNA, 19 nt, Human
ccaccccagaaauggugaa

SEQ ID NO: 2828404 - RNA, 14 nt, Human
ccaccccagccccc

SEQ ID NO: 2828405 - RNA, 16 nt, Human
ccaccccaccugcagg

SEQ ID NO: 2828406 - RNA, 14 nt, Human
ccacuacacuccag

SEQ ID NO: 2828407 - RNA, 19 nt, Human
ccacuacacuccagccuga

SEQ ID NO: 2828408 - RNA, 18 nt, Human
ccacuacacuccagccug

SEQ ID NO: 2828409 - RNA, 15 nt, Human
ccacguauuccccuu

SEQ ID NO: 2828410 - RNA, 20 nt, Human
ccacguauuccccuucccac

SEQ ID NO: 2828411 - RNA, 14 nt, Human
ccacaggaaagugu

SEQ ID NO: 2828412 - RNA, 19 nt, Human
ccacaggaagccugcaguc

SEQ ID NO: 2828413 - RNA, 22 nt, Human
ccacaggaagccugcaguccug

SEQ ID NO: 2828414 - RNA, 12 nt, Human
ccacagcuuccu

SEQ ID NO: 2828415 - RNA, 14 nt, Human
ccacagcuuccugu

SEQ ID NO: 2828416 - RNA, 16 nt, Human
ccacagcugcuggaga

SEQ ID NO: 2828417 - RNA, 11 nt, Human
ccacagcuucc

SEQ ID NO: 2828418 - RNA, 12 nt, Human
ccacagcugcug

SEQ ID NO: 2828419 - RNA, 13 nt, Human
ccacagcugcugg

SEQ ID NO: 2828420 - RNA, 14 nt, Human
ccacagcugcugga

SEQ ID NO: 2828421 - RNA, 12 nt, Human
ccacacuccagc

SEQ ID NO: 2828422 - RNA, 14 nt, Human
ccacagcugcucaa

SEQ ID NO: 2828423 - RNA, 23 nt, Human
ccacacuaaccuggguucccuuu

SEQ ID NO: 2828424 - RNA, 22 nt, Human
ccacacuaaccuggguucccuu

SEQ ID NO: 2828425 - RNA, 16 nt, Human
ccacacuaaccugggu

SEQ ID NO: 2828426 - RNA, 21 nt, Human
ccacacccucccccgccacuc

SEQ ID NO: 2828427 - RNA, 16 nt, Human
ccacacccuguacugu

SEQ ID NO: 2828428 - RNA, 16 nt, Human
ccacaggaucagucug

SEQ ID NO: 2828429 - RNA, 17 nt, Human
ccacaggaagugaagaa

SEQ ID NO: 2828430 - RNA, 23 nt, Human
ccacaggaagccugcaguccugg

SEQ ID NO: 2828431 - RNA, 19 nt, Human
ccacaggaggcaagcaagc

SEQ ID NO: 2828432 - RNA, 21 nt, Human
ccacaggaggcaagcaagcuc

SEQ ID NO: 2828433 - RNA, 22 nt, Human
ccacaggaggcaagcaagcucu

SEQ ID NO: 2828434 - RNA, 20 nt, Human
ccacaggagugggaaaacac

SEQ ID NO: 2828435 - RNA, 15 nt, Human
ccacaggcccuuccu

SEQ ID NO: 2828436 - RNA, 16 nt, Human
ccacaggcccuuccuc

SEQ ID NO: 2828437 - RNA, 23 nt, Human
ccacaggcccuuccucuccacug

SEQ ID NO: 2828438 - RNA, 17 nt, Human
ccacaggcccuuccucu

SEQ ID NO: 2828439 - RNA, 18 nt, Human
ccacaggcccuuccucuc

SEQ ID NO: 2828440 - RNA, 19 nt, Human
ccacaggcccuuccucucc

SEQ ID NO: 2828441 - RNA, 22 nt, Human
ccacaggcccuuccucuccacu

SEQ ID NO: 2828442 - RNA, 15 nt, Human
ccacacccagcccac

SEQ ID NO: 2828443 - RNA, 20 nt, Human
ccacacccagcccacuucug

SEQ ID NO: 2828444 - RNA, 22 nt, Human
ccacacccagcccacuucugcc

SEQ ID NO: 2828445 - RNA, 21 nt, Human
ccacacccagcccacuucugc

SEQ ID NO: 2828446 - RNA, 17 nt, Human
ccacacccagccucagu

SEQ ID NO: 2828447 - RNA, 19 nt, Human
ccacacccagccucagucc

SEQ ID NO: 2828448 - RNA, 13 nt, Human
ccacacccagccu

SEQ ID NO: 2828449 - RNA, 14 nt, Human
ccacacccagccuc

SEQ ID NO: 2828450 - RNA, 15 nt, Human
ccacacccagccuca

SEQ ID NO: 2828451 - RNA, 16 nt, Human
ccacacccagccucag

SEQ ID NO: 2828452 - RNA, 11 nt, Human
ccacacccucc

SEQ ID NO: 2828453 - RNA, 15 nt, Human
ccacacagcuacagc

SEQ ID NO: 2828454 - RNA, 19 nt, Human
ccacacagcuacagcuuuc

SEQ ID NO: 2828455 - RNA, 14 nt, Human
ccacacaggcuggc

SEQ ID NO: 2828456 - RNA, 12 nt, Human
ccacacauccca

SEQ ID NO: 2828457 - RNA, 15 nt, Human
ccacacaucccagcc

SEQ ID NO: 2828458 - RNA, 17 nt, Human
ccacacaucccagccca

SEQ ID NO: 2828459 - RNA, 18 nt, Human
ccacacaucccagcccaa

SEQ ID NO: 2828460 - RNA, 15 nt, Human
ccaauauguauugua

SEQ ID NO: 2828461 - RNA, 15 nt, Human
ccaauauuaaaucug

SEQ ID NO: 2828462 - RNA, 16 nt, Human
ccaauauguauuguaa

SEQ ID NO: 2828463 - RNA, 22 nt, Human
ccaauauguauuguaaacaugu

SEQ ID NO: 2828464 - RNA, 18 nt, Human
ccaauauuaaaucugcug

SEQ ID NO: 2828465 - RNA, 16 nt, Human
ccacauuuucagccaa

SEQ ID NO: 2828466 - RNA, 19 nt, Human
ccacauuuggaauacuuuu

SEQ ID NO: 2828467 - RNA, 22 nt, Human
ccacauuuggaauacuuuuugu

SEQ ID NO: 2828468 - RNA, 23 nt, Human
ccacauuugguucuaagaaaccc

SEQ ID NO: 2828469 - RNA, 17 nt, Human
ccacauuugugccgaca

SEQ ID NO: 2828470 - RNA, 14 nt, Human
ccacauuagaacuu

SEQ ID NO: 2828471 - RNA, 13 nt, Human
ccacauuuggaau

SEQ ID NO: 2828472 - RNA, 14 nt, Human
ccacauuucuaaaa

SEQ ID NO: 2828473 - RNA, 15 nt, Human
ccacauuucuaaaau

SEQ ID NO: 2828474 - RNA, 14 nt, Human
ccacauuguuuuaa

SEQ ID NO: 2828475 - RNA, 16 nt, Human
ccacauuguuuuaaaa

SEQ ID NO: 2828476 - RNA, 17 nt, Human
ccacauuuagucucuuu

SEQ ID NO: 2828477 - RNA, 19 nt, Human
ccacauuuagucucuuuau

SEQ ID NO: 2828478 - RNA, 20 nt, Human
ccacauuuagucucuuuauu

SEQ ID NO: 2828479 - RNA, 23 nt, Human
ccacauuuagucucuuuauuccu

SEQ ID NO: 2828480 - RNA, 21 nt, Human
ccaccauggccagccaacuuu

SEQ ID NO: 2828481 - RNA, 17 nt, Human
ccaccauggccagccaa

SEQ ID NO: 2828482 - RNA, 16 nt, Human
ccaccauggccagcca

SEQ ID NO: 2828483 - RNA, 17 nt, Human
ccaccaagacuuguuuu

SEQ ID NO: 2828484 - RNA, 15 nt, Human
ccaccaacccucaga

SEQ ID NO: 2828485 - RNA, 17 nt, Human
ccacaucuugcucugcu

SEQ ID NO: 2828486 - RNA, 18 nt, Human
ccacaucuugcucugcug

SEQ ID NO: 2828487 - RNA, 19 nt, Human
ccacaucuugcucugcuga

SEQ ID NO: 2828488 - RNA, 17 nt, Human
ccacaugcggagaacaa

SEQ ID NO: 2828489 - RNA, 16 nt, Human
ccacaugugcacaugc

SEQ ID NO: 2828490 - RNA, 17 nt, Human
ccacaugggagcagucc

SEQ ID NO: 2828491 - RNA, 18 nt, Human
ccacaugggagcagucca

SEQ ID NO: 2828492 - RNA, 24 nt, Human
ccacaugggagcaguccaugcaug

SEQ ID NO: 2828493 - RNA, 20 nt, Human
ccacauguacagacauacau

SEQ ID NO: 2828494 - RNA, 15 nt, Human
ccacaugugacacau

SEQ ID NO: 2828495 - RNA, 19 nt, Human
ccacaugugacacauaugc

SEQ ID NO: 2828496 - RNA, 22 nt, Human
ccacauaagggguuugccauuu

SEQ ID NO: 2828497 - RNA, 16 nt, Human
ccacaguugccaccac

SEQ ID NO: 2828498 - RNA, 20 nt, Human
ccacaguugccaccaccucu

SEQ ID NO: 2828499 - RNA, 22 nt, Human
ccacaguugccaccaccucugu

SEQ ID NO: 2828500 - RNA, 23 nt, Human
ccacaguugccaccaccucugug

SEQ ID NO: 2828501 - RNA, 16 nt, Human
ccacagucaaagaagg

SEQ ID NO: 2828502 - RNA, 20 nt, Human
ccacauccuccguccagccg

SEQ ID NO: 2828503 - RNA, 19 nt, Human
ccacauccuccguccagcc

SEQ ID NO: 2828504 - RNA, 20 nt, Human
ccacaucccgggacgcagca

SEQ ID NO: 2828505 - RNA, 15 nt, Human
ccacaguagucuuga

SEQ ID NO: 2828506 - RNA, 17 nt, Human
ccacaguagucuugaug

SEQ ID NO: 2828507 - RNA, 14 nt, Human
ccacagucaaagaa

SEQ ID NO: 2828508 - RNA, 22 nt, Human
ccacagguucaugccaccaugg

SEQ ID NO: 2828509 - RNA, 23 nt, Human
ccacagguguuuauacagcucag

SEQ ID NO: 2828510 - RNA, 14 nt, Human
ccacaggugugagc

SEQ ID NO: 2828511 - RNA, 17 nt, Human
ccacaggugugagccac

SEQ ID NO: 2828512 - RNA, 15 nt, Human
ccacaggucuagacu

SEQ ID NO: 2828513 - RNA, 14 nt, Human
ccacaggucuagac

SEQ ID NO: 2828514 - RNA, 23 nt, Human
ccacccaggagccccgaggccuu

SEQ ID NO: 2828515 - RNA, 14 nt, Human
ccacccaggaggga

SEQ ID NO: 2828516 - RNA, 12 nt, Human
ccacccaggagg

SEQ ID NO: 2828517 - RNA, 15 nt, Human
ccacccagucucugc

SEQ ID NO: 2828518 - RNA, 23 nt, Human
ccacccauaauccuuucugccga

SEQ ID NO: 2828519 - RNA, 18 nt, Human
ccacccaggagggagggg

SEQ ID NO: 2828520 - RNA, 17 nt, Human
ccacccaggagggaggg

SEQ ID NO: 2828521 - RNA, 23 nt, Human
ccacccaggagggagggggcuau

SEQ ID NO: 2828522 - RNA, 21 nt, Human
ccacccaggagccccgaggcc

SEQ ID NO: 2828523 - RNA, 13 nt, Human
ccacccaacccua

SEQ ID NO: 2828524 - RNA, 21 nt, Human
ccacccaaccccaagccagcc

SEQ ID NO: 2828525 - RNA, 19 nt, Human
ccacccaacccuaucuccu

SEQ ID NO: 2828526 - RNA, 16 nt, Human
ccacccaacccuaucu

SEQ ID NO: 2828527 - RNA, 21 nt, Human
ccacccaacccuaucuccuga

SEQ ID NO: 2828528 - RNA, 19 nt, Human
ccaaagccaaagcuaggcc

SEQ ID NO: 2828529 - RNA, 21 nt, Human
ccaaacugacucaacagucau

SEQ ID NO: 2828530 - RNA, 20 nt, Human
ccaaagccaauaacacacag

SEQ ID NO: 2828531 - RNA, 21 nt, Human
ccaaagccaauaacacacagc

SEQ ID NO: 2828532 - RNA, 13 nt, Human
ccaaagcauggac

SEQ ID NO: 2828533 - RNA, 14 nt, Human
ccaaagcauggacu

SEQ ID NO: 2828534 - RNA, 22 nt, Human
ccaaagccaccagacugacaaa

SEQ ID NO: 2828535 - RNA, 13 nt, Human
ccaaagccaccag

SEQ ID NO: 2828536 - RNA, 13 nt, Human
ccaaacucugcca

SEQ ID NO: 2828537 - RNA, 13 nt, Human
ccaaacagugaca

SEQ ID NO: 2828538 - RNA, 12 nt, Human
ccaaacauguau

SEQ ID NO: 2828539 - RNA, 14 nt, Human
ccaaacauguauuu

SEQ ID NO: 2828540 - RNA, 15 nt, Human
ccaaacauguauuua

SEQ ID NO: 2828541 - RNA, 17 nt, Human
ccaaacauguauuuaug

SEQ ID NO: 2828542 - RNA, 18 nt, Human
ccaaacauguauuuaugu

SEQ ID NO: 2828543 - RNA, 16 nt, Human
ccaaaggcucucuccu

SEQ ID NO: 2828544 - RNA, 19 nt, Human
ccaaaggccauggagagcu

SEQ ID NO: 2828545 - RNA, 20 nt, Human
ccaaaggccauggagagcug

SEQ ID NO: 2828546 - RNA, 18 nt, Human
ccaaaggaggcuggcagg

SEQ ID NO: 2828547 - RNA, 17 nt, Human
ccaaaggaggcuggcag

SEQ ID NO: 2828548 - RNA, 16 nt, Human
ccaaaggaggcuggca

SEQ ID NO: 2828549 - RNA, 15 nt, Human
ccaaaggaggcuggc

SEQ ID NO: 2828550 - RNA, 12 nt, Human
ccaaaggaggcu

SEQ ID NO: 2828551 - RNA, 20 nt, Human
ccaaaggacauuaugugugc

SEQ ID NO: 2828552 - RNA, 15 nt, Human
ccaaagcuaggccug

SEQ ID NO: 2828553 - RNA, 23 nt, Human
ccaaagccccuugcucuccccug

SEQ ID NO: 2828554 - RNA, 17 nt, Human
ccaaacauaugcacauu

SEQ ID NO: 2828555 - RNA, 20 nt, Human
ccaaagccaccucugucauu

SEQ ID NO: 2828556 - RNA, 17 nt, Human
ccaaagcuaggccuggc

SEQ ID NO: 2828557 - RNA, 16 nt, Human
ccaaagcuaggccugg

SEQ ID NO: 2828558 - RNA, 21 nt, Human
ccaaagcuaggccuggccaga

SEQ ID NO: 2828559 - RNA, 13 nt, Human
ccaaagcugccca

SEQ ID NO: 2828560 - RNA, 19 nt, Human
ccaaagcuaggguggcccu

SEQ ID NO: 2828561 - RNA, 18 nt, Human
ccaaagcuaggguggccc

SEQ ID NO: 2828562 - RNA, 21 nt, Human
ccaaagcugcccacuguuucu

SEQ ID NO: 2828563 - RNA, 20 nt, Human
ccaaagcugcccacuguuuc

SEQ ID NO: 2828564 - RNA, 12 nt, Human
ccaaagcuuuau

SEQ ID NO: 2828565 - RNA, 18 nt, Human
ccaaagcugcccacuguu

SEQ ID NO: 2828566 - RNA, 23 nt, Human
ccaaagcuaggguggcccuugca

SEQ ID NO: 2828567 - RNA, 17 nt, Human
ccaaauuuucuuuuuau

SEQ ID NO: 2828568 - RNA, 15 nt, Human
ccaaauuugauugau

SEQ ID NO: 2828569 - RNA, 14 nt, Human
ccaaaguaaaagaa

SEQ ID NO: 2828570 - RNA, 17 nt, Human
ccaaaguaaaagaaacc

SEQ ID NO: 2828571 - RNA, 11 nt, Human
ccaacaaacca

SEQ ID NO: 2828572 - RNA, 12 nt, Human
ccaacaaaccau

SEQ ID NO: 2828573 - RNA, 13 nt, Human
ccaacaaaccauc

SEQ ID NO: 2828574 - RNA, 16 nt, Human
ccaacaaaccauccag

SEQ ID NO: 2828575 - RNA, 20 nt, Human
ccaaauuugauugauuugaa

SEQ ID NO: 2828576 - RNA, 17 nt, Human
ccaaaggggacaggccu

SEQ ID NO: 2828577 - RNA, 18 nt, Human
ccaaaggggacaggccuc

SEQ ID NO: 2828578 - RNA, 19 nt, Human
ccaaaggggacaggccuca

SEQ ID NO: 2828579 - RNA, 23 nt, Human
ccaaaggggacaggccucaccuc

SEQ ID NO: 2828580 - RNA, 20 nt, Human
ccaaaggggaccccuaugaa

SEQ ID NO: 2828581 - RNA, 14 nt, Human
ccaaaggcccccua

SEQ ID NO: 2828582 - RNA, 21 nt, Human
ccaaaggccauggagagcugg

SEQ ID NO: 2828583 - RNA, 12 nt, Human
ccaaaggccccc

SEQ ID NO: 2828584 - RNA, 12 nt, Human
ccaaaggcuggu

SEQ ID NO: 2828585 - RNA, 13 nt, Human
ccaaaggcuggug

SEQ ID NO: 2828586 - RNA, 15 nt, Human
ccaaaggcugguggc

SEQ ID NO: 2828587 - RNA, 21 nt, Human
ccaaaggcugguggcaagugc

SEQ ID NO: 2828588 - RNA, 20 nt, Human
ccaaagggagaguuccagag

SEQ ID NO: 2828589 - RNA, 21 nt, Human
ccaaagggagaguuccagagg

SEQ ID NO: 2828590 - RNA, 14 nt, Human
ccaacaagcagcug

SEQ ID NO: 2828591 - RNA, 18 nt, Human
ccaacaagccagaaucag

SEQ ID NO: 2828592 - RNA, 17 nt, Human
ccaacaacauccauguc

SEQ ID NO: 2828593 - RNA, 13 nt, Human
ccaacaagaaugc

SEQ ID NO: 2828594 - RNA, 15 nt, Human
ccaacaagaaugcau

SEQ ID NO: 2828595 - RNA, 16 nt, Human
ccaacaagaaugcauu

SEQ ID NO: 2828596 - RNA, 18 nt, Human
ccaacaagaaugcauuga

SEQ ID NO: 2828597 - RNA, 19 nt, Human
ccaacaagaaugcauugau

SEQ ID NO: 2828598 - RNA, 15 nt, Human
ccaacaccacagaaa

SEQ ID NO: 2828599 - RNA, 14 nt, Human
ccaacaccacagac

SEQ ID NO: 2828600 - RNA, 15 nt, Human
ccaacaccacagaca

SEQ ID NO: 2828601 - RNA, 16 nt, Human
ccaacaccacagacac

SEQ ID NO: 2828602 - RNA, 17 nt, Human
ccaacaccacagacaca

SEQ ID NO: 2828603 - RNA, 14 nt, Human
ccaacacucaagaa

SEQ ID NO: 2828604 - RNA, 21 nt, Human
ccaacacucaagaagcaggcu

SEQ ID NO: 2828605 - RNA, 18 nt, Human
ccaacaccacagacacac

SEQ ID NO: 2828606 - RNA, 21 nt, Human
ccaacaccacagacacacaca

SEQ ID NO: 2828607 - RNA, 23 nt, Human
ccaacaccacagacacacacacg

SEQ ID NO: 2828608 - RNA, 18 nt, Human
ccaacagaacuaaauguu

SEQ ID NO: 2828609 - RNA, 20 nt, Human
ccaacacuguggguguguga

SEQ ID NO: 2828610 - RNA, 12 nt, Human
ccaacagccaug

SEQ ID NO: 2828611 - RNA, 13 nt, Human
ccaacagccaugc

SEQ ID NO: 2828612 - RNA, 15 nt, Human
ccaacagccaugccc

SEQ ID NO: 2828613 - RNA, 22 nt, Human
ccaacagcgacauagcccaucc

SEQ ID NO: 2828614 - RNA, 23 nt, Human
ccaacagcgacauagcccauccc

SEQ ID NO: 2828615 - RNA, 11 nt, Human
ccaacagcuac

SEQ ID NO: 2828616 - RNA, 13 nt, Human
ccaacagcuacaa

SEQ ID NO: 2828617 - RNA, 16 nt, Human
ccaacagcuacaacag

SEQ ID NO: 2828618 - RNA, 17 nt, Human
ccaacagcuacaacagc

SEQ ID NO: 2828619 - RNA, 18 nt, Human
ccaacagcuacaacagcc

SEQ ID NO: 2828620 - RNA, 21 nt, Human
ccaacagcuacaacagccuca

SEQ ID NO: 2828621 - RNA, 23 nt, Human
ccaacagcuacaacagccucacu

SEQ ID NO: 2828622 - RNA, 22 nt, Human
ccaacaggcuguucugcacuga

SEQ ID NO: 2828623 - RNA, 20 nt, Human
ccaaccaaguggcucccaca

SEQ ID NO: 2828624 - RNA, 23 nt, Human
ccaaccaacuugguucugcuuca

SEQ ID NO: 2828625 - RNA, 17 nt, Human
ccaaccagugccaagga

SEQ ID NO: 2828626 - RNA, 18 nt, Human
ccaaccagugccaaggac

SEQ ID NO: 2828627 - RNA, 20 nt, Human
ccaacccccaccccacacuu

SEQ ID NO: 2828628 - RNA, 19 nt, Human
ccaacccccaccccacacu

SEQ ID NO: 2828629 - RNA, 19 nt, Human
ccaacccccauucucaucu

SEQ ID NO: 2828630 - RNA, 18 nt, Human
ccaacccccaccccacac

SEQ ID NO: 2828631 - RNA, 17 nt, Human
ccaacccccaccccaca

SEQ ID NO: 2828632 - RNA, 16 nt, Human
ccaacccccaccccac

SEQ ID NO: 2828633 - RNA, 13 nt, Human
ccaacccccaccc

SEQ ID NO: 2828634 - RNA, 19 nt, Human
ccaaccccuuaagcccugg

SEQ ID NO: 2828635 - RNA, 18 nt, Human
ccaaccccccaccugcca

SEQ ID NO: 2828636 - RNA, 14 nt, Human
ccaacccucagagc

SEQ ID NO: 2828637 - RNA, 15 nt, Human
ccaacccucagagcc

SEQ ID NO: 2828638 - RNA, 19 nt, Human
ccaacccuagguucccugu

SEQ ID NO: 2828639 - RNA, 22 nt, Human
ccaacccuagguucccuguucu

SEQ ID NO: 2828640 - RNA, 20 nt, Human
ccaacccuaucuccugacag

SEQ ID NO: 2828641 - RNA, 19 nt, Human
ccaacccuaucuccugaca

SEQ ID NO: 2828642 - RNA, 23 nt, Human
ccaacccuaucuccugacagaag

SEQ ID NO: 2828643 - RNA, 19 nt, Human
ccaagaauagaugcugacu

SEQ ID NO: 2828644 - RNA, 18 nt, Human
ccaagaauccacauuucu

SEQ ID NO: 2828645 - RNA, 20 nt, Human
ccaagaauagcaucuguaca

SEQ ID NO: 2828646 - RNA, 22 nt, Human
ccaagaauagcaucuguacaaa

SEQ ID NO: 2828647 - RNA, 19 nt, Human
ccaagaauccacauuucua

SEQ ID NO: 2828648 - RNA, 21 nt, Human
ccaagaauccacauuucuaaa

SEQ ID NO: 2828649 - RNA, 20 nt, Human
ccaagaauagaugcugacug

SEQ ID NO: 2828650 - RNA, 13 nt, Human
ccaagacaaauca

SEQ ID NO: 2828651 - RNA, 14 nt, Human
ccaagacaaaucaa

SEQ ID NO: 2828652 - RNA, 16 nt, Human
ccaagacaaaucaaca

SEQ ID NO: 2828653 - RNA, 18 nt, Human
ccaagacaaaucaacaga

SEQ ID NO: 2828654 - RNA, 22 nt, Human
ccaagacaaaucaacagaagca

SEQ ID NO: 2828655 - RNA, 18 nt, Human
ccaagacagaugccccag

SEQ ID NO: 2828656 - RNA, 21 nt, Human
ccaagacagaugccccagagc

SEQ ID NO: 2828657 - RNA, 19 nt, Human
ccaagacagaugccccaga

SEQ ID NO: 2828658 - RNA, 14 nt, Human
ccaagacucuagag

SEQ ID NO: 2828659 - RNA, 15 nt, Human
ccaagacucuagagu

SEQ ID NO: 2828660 - RNA, 21 nt, Human
ccaagacucuagaguccaagg

SEQ ID NO: 2828661 - RNA, 20 nt, Human
ccaagagaaggggaagcacu

SEQ ID NO: 2828662 - RNA, 24 nt, Human
ccaagagacuccuugagagaccag

SEQ ID NO: 2828663 - RNA, 22 nt, Human
ccaagacuuggcaacagaagca

SEQ ID NO: 2828664 - RNA, 18 nt, Human
ccaagacuuggcaacaga

SEQ ID NO: 2828665 - RNA, 20 nt, Human
ccaagacuuggcaacagaag

SEQ ID NO: 2828666 - RNA, 21 nt, Human
ccaagagaaaggccugcacac

SEQ ID NO: 2828667 - RNA, 22 nt, Human
ccaagagaaaggccugcacaca

SEQ ID NO: 2828668 - RNA, 23 nt, Human
ccaagagaaaggccugcacacaa

SEQ ID NO: 2828669 - RNA, 13 nt, Human
ccaacauauaaaa

SEQ ID NO: 2828670 - RNA, 19 nt, Human
ccaagacuucauugucccu

SEQ ID NO: 2828671 - RNA, 22 nt, Human
ccaagacucuagaguccaaggu

SEQ ID NO: 2828672 - RNA, 20 nt, Human
ccaagagagggccaugcaau

SEQ ID NO: 2828673 - RNA, 19 nt, Human
ccaagaggguccuuuagua

SEQ ID NO: 2828674 - RNA, 11 nt, Human
ccaagagucua

SEQ ID NO: 2828675 - RNA, 15 nt, Human
ccaagagucuaaaga

SEQ ID NO: 2828676 - RNA, 16 nt, Human
ccaagagucugaugau

SEQ ID NO: 2828677 - RNA, 16 nt, Human
ccaagagucuaaagau

SEQ ID NO: 2828678 - RNA, 13 nt, Human
ccaagaucuauaa

SEQ ID NO: 2828679 - RNA, 17 nt, Human
ccaagaugacuggggug

SEQ ID NO: 2828680 - RNA, 15 nt, Human
ccaagauaggaccuu

SEQ ID NO: 2828681 - RNA, 21 nt, Human
ccaagauaggaccuugggcca

SEQ ID NO: 2828682 - RNA, 17 nt, Human
ccaagauucuagaugau

SEQ ID NO: 2828683 - RNA, 13 nt, Human
ccaagauuccgga

SEQ ID NO: 2828684 - RNA, 20 nt, Human
ccaagauuccggauccuaag

SEQ ID NO: 2828685 - RNA, 13 nt, Human
ccaagauucuaga

SEQ ID NO: 2828686 - RNA, 14 nt, Human
ccaagauucuagau

SEQ ID NO: 2828687 - RNA, 15 nt, Human
ccaagauucuagaug

SEQ ID NO: 2828688 - RNA, 16 nt, Human
ccaagauucuagauga

SEQ ID NO: 2828689 - RNA, 14 nt, Human
ccaagcacugugcu

SEQ ID NO: 2828690 - RNA, 21 nt, Human
ccaagcacugugcucagggcu

SEQ ID NO: 2828691 - RNA, 22 nt, Human
ccaagcacugugcucagggcua

SEQ ID NO: 2828692 - RNA, 19 nt, Human
ccaagcacuuucaguccaa

SEQ ID NO: 2828693 - RNA, 21 nt, Human
ccaagcagagcaaucaguuag

SEQ ID NO: 2828694 - RNA, 15 nt, Human
ccaagccaaaaaccu

SEQ ID NO: 2828695 - RNA, 21 nt, Human
ccaagccaaaaaccuuagcuc

SEQ ID NO: 2828696 - RNA, 16 nt, Human
ccaagcaucaggggga

SEQ ID NO: 2828697 - RNA, 19 nt, Human
ccaagcaucagggggaaga

SEQ ID NO: 2828698 - RNA, 18 nt, Human
ccaagcucaaagcgugga

SEQ ID NO: 2828699 - RNA, 16 nt, Human
ccaagcuauccuggcu

SEQ ID NO: 2828700 - RNA, 15 nt, Human
ccaagcuaucuaaag

SEQ ID NO: 2828701 - RNA, 18 nt, Human
ccaagcuaucuaaaguuu

SEQ ID NO: 2828702 - RNA, 17 nt, Human
ccaagcucaaagcgugg

SEQ ID NO: 2828703 - RNA, 13 nt, Human
ccaagcuauuccu

SEQ ID NO: 2828704 - RNA, 16 nt, Human
ccaagcuauuccuuuc

SEQ ID NO: 2828705 - RNA, 17 nt, Human
ccaagcuauuccuuucc

SEQ ID NO: 2828706 - RNA, 18 nt, Human
ccaagcuauuccuuuccc

SEQ ID NO: 2828707 - RNA, 19 nt, Human
ccaagcuauuccuuucccu

SEQ ID NO: 2828708 - RNA, 20 nt, Human
ccaagcuauuccuuucccuu

SEQ ID NO: 2828709 - RNA, 23 nt, Human
ccaagcuauuccuuucccuuccu

SEQ ID NO: 2828710 - RNA, 17 nt, Human
ccaagcuaagcacugcc

SEQ ID NO: 2828711 - RNA, 20 nt, Human
ccaagcuaagcacugccacu

SEQ ID NO: 2828712 - RNA, 19 nt, Human
ccaagccuccacagcgagg

SEQ ID NO: 2828713 - RNA, 18 nt, Human
ccaagccuccacagcgag

SEQ ID NO: 2828714 - RNA, 16 nt, Human
ccaagccuccacagcg

SEQ ID NO: 2828715 - RNA, 15 nt, Human
ccaagccuccacagc

SEQ ID NO: 2828716 - RNA, 14 nt, Human
ccaagccuccacag

SEQ ID NO: 2828717 - RNA, 13 nt, Human
ccaagccuccaca

SEQ ID NO: 2828718 - RNA, 20 nt, Human
ccaagccuccacagcgaggg

SEQ ID NO: 2828719 - RNA, 15 nt, Human
ccaagccuggcaagg

SEQ ID NO: 2828720 - RNA, 13 nt, Human
ccaagccguggcu

SEQ ID NO: 2828721 - RNA, 22 nt, Human
ccaagccuacuuuugccauuga

SEQ ID NO: 2828722 - RNA, 16 nt, Human
ccaaggucugagcacu

SEQ ID NO: 2828723 - RNA, 15 nt, Human
ccaaggucugagcca

SEQ ID NO: 2828724 - RNA, 21 nt, Human
ccaaggucugagccacagcag

SEQ ID NO: 2828725 - RNA, 22 nt, Human
ccaaggggaauguuugccucug

SEQ ID NO: 2828726 - RNA, 21 nt, Human
ccaaggggcaaauuuuuauuu

SEQ ID NO: 2828727 - RNA, 20 nt, Human
ccaaggggagucaccuuccc

SEQ ID NO: 2828728 - RNA, 21 nt, Human
ccaaggggagucaccuucccu

SEQ ID NO: 2828729 - RNA, 22 nt, Human
ccaaggggagucaccuucccuu

SEQ ID NO: 2828730 - RNA, 19 nt, Human
ccaaggccagaguggccug

SEQ ID NO: 2828731 - RNA, 21 nt, Human
ccaagggaaagaaaaggaagg

SEQ ID NO: 2828732 - RNA, 18 nt, Human
ccaaggccagaguggccu

SEQ ID NO: 2828733 - RNA, 15 nt, Human
ccaaggccagagugg

SEQ ID NO: 2828734 - RNA, 15 nt, Human
ccaagggcagaaagu

SEQ ID NO: 2828735 - RNA, 20 nt, Human
ccaagggaugaaagagaagg

SEQ ID NO: 2828736 - RNA, 19 nt, Human
ccaagggaugaaagagaag

SEQ ID NO: 2828737 - RNA, 18 nt, Human
ccaaggggugggccacag

SEQ ID NO: 2828738 - RNA, 19 nt, Human
ccaagucagcccaacaggc

SEQ ID NO: 2828739 - RNA, 14 nt, Human
ccaaguauuuauua

SEQ ID NO: 2828740 - RNA, 21 nt, Human
ccaaguauagccuauggcaga

SEQ ID NO: 2828741 - RNA, 20 nt, Human
ccaaguagcugggauuacag

SEQ ID NO: 2828742 - RNA, 15 nt, Human
ccaaguagucugcuc

SEQ ID NO: 2828743 - RNA, 18 nt, Human
ccaaguagucugcucaca

SEQ ID NO: 2828744 - RNA, 20 nt, Human
ccaaguagucugcucacagu

SEQ ID NO: 2828745 - RNA, 15 nt, Human
ccaaguaagaggcug

SEQ ID NO: 2828746 - RNA, 16 nt, Human
ccaaguaagaggcugg

SEQ ID NO: 2828747 - RNA, 17 nt, Human
ccaaguaagaggcugga

SEQ ID NO: 2828748 - RNA, 21 nt, Human
ccaaguaagaggcuggaguug

SEQ ID NO: 2828749 - RNA, 16 nt, Human
ccaaguaauauaaugg

SEQ ID NO: 2828750 - RNA, 14 nt, Human
ccaauaacacacag

SEQ ID NO: 2828751 - RNA, 18 nt, Human
ccaauagcaaauucaaag

SEQ ID NO: 2828752 - RNA, 14 nt, Human
ccaauagcugccca

SEQ ID NO: 2828753 - RNA, 15 nt, Human
ccaauagcugcccau

SEQ ID NO: 2828754 - RNA, 22 nt, Human
ccaauaguuguugauuggcagg

SEQ ID NO: 2828755 - RNA, 16 nt, Human
ccaauaacacacagcu

SEQ ID NO: 2828756 - RNA, 14 nt, Human
ccaauaacauucuu

SEQ ID NO: 2828757 - RNA, 16 nt, Human
ccaaguuuccauagca

SEQ ID NO: 2828758 - RNA, 17 nt, Human
ccaaguuuccauagcaa

SEQ ID NO: 2828759 - RNA, 20 nt, Human
ccaaguuuccauagcaacag

SEQ ID NO: 2828760 - RNA, 21 nt, Human
ccaaguccgcagaagcccuga

SEQ ID NO: 2828761 - RNA, 18 nt, Human
ccaagucggaacagcaga

SEQ ID NO: 2828762 - RNA, 19 nt, Human
ccaagucggaacagcagau

SEQ ID NO: 2828763 - RNA, 22 nt, Human
cauuuagcuaaacggauuccaa

SEQ ID NO: 2828764 - RNA, 22 nt, Human
cauuuagauccugguuucauaa

SEQ ID NO: 2828765 - RNA, 19 nt, Human
cauuuagauugaaaacuuu

SEQ ID NO: 2828766 - RNA, 20 nt, Human
cauuuagauugaaaacuuuu

SEQ ID NO: 2828767 - RNA, 16 nt, Human
cauuuaggggcaagca

SEQ ID NO: 2828768 - RNA, 20 nt, Human
cauuuccucagcuuaucucu

SEQ ID NO: 2828769 - RNA, 17 nt, Human
cauuuaggggccacuuu

SEQ ID NO: 2828770 - RNA, 23 nt, Human
cauuuccuaucaccuauuuccau

SEQ ID NO: 2828771 - RNA, 13 nt, Human
cauuuccugacag

SEQ ID NO: 2828772 - RNA, 20 nt, Human
cauuuccugacagaaggacu

SEQ ID NO: 2828773 - RNA, 19 nt, Human
cauuuccugagaccacaga

SEQ ID NO: 2828774 - RNA, 16 nt, Human
cauuguuuuaaaaaga

SEQ ID NO: 2828775 - RNA, 13 nt, Human
cauuguuuuaaaa

SEQ ID NO: 2828776 - RNA, 19 nt, Human
cauuguuguuuuuuuaaua

SEQ ID NO: 2828777 - RNA, 13 nt, Human
cauuuccuguguc

SEQ ID NO: 2828778 - RNA, 12 nt, Human
cauuuccugugu

SEQ ID NO: 2828779 - RNA, 21 nt, Human
cauuucgccccucauuuaucc

SEQ ID NO: 2828780 - RNA, 17 nt, Human
cauuucgccccucauuu

SEQ ID NO: 2828781 - RNA, 19 nt, Human
cauuucgugagccccaucu

SEQ ID NO: 2828782 - RNA, 20 nt, Human
cauuucgugagccccaucuu

SEQ ID NO: 2828783 - RNA, 21 nt, Human
cauuucgugagccccaucuuc

SEQ ID NO: 2828784 - RNA, 22 nt, Human
cauuucgugagccccaucuuca

SEQ ID NO: 2828785 - RNA, 14 nt, Human
cauuucuaaaagaa

SEQ ID NO: 2828786 - RNA, 22 nt, Human
cauuucuaaaagaauauucaga

SEQ ID NO: 2828787 - RNA, 16 nt, Human
cauuuccuucaaggca

SEQ ID NO: 2828788 - RNA, 22 nt, Human
cauuucuaccaaggcauaucau

SEQ ID NO: 2828789 - RNA, 12 nt, Human
cauuucuaaaau

SEQ ID NO: 2828790 - RNA, 16 nt, Human
cauugccaccaggaga

SEQ ID NO: 2828791 - RNA, 15 nt, Human
cauugccaccaggag

SEQ ID NO: 2828792 - RNA, 14 nt, Human
cauugccaccagga

SEQ ID NO: 2828793 - RNA, 13 nt, Human
cauugccaccagg

SEQ ID NO: 2828794 - RNA, 18 nt, Human
cauugcauucuauugccu

SEQ ID NO: 2828795 - RNA, 19 nt, Human
cauugcauucuauugccuu

SEQ ID NO: 2828796 - RNA, 20 nt, Human
cauugcauucuauugccuuc

SEQ ID NO: 2828797 - RNA, 15 nt, Human
cauuguagagcuucu

SEQ ID NO: 2828798 - RNA, 22 nt, Human
cauugccuaacuacuaguuuuu

SEQ ID NO: 2828799 - RNA, 16 nt, Human
cauugccuagcucuuu

SEQ ID NO: 2828800 - RNA, 20 nt, Human
cauugccaccaggagaacca

SEQ ID NO: 2828801 - RNA, 17 nt, Human
cauugccaccaggagaa

SEQ ID NO: 2828802 - RNA, 15 nt, Human
cauugccaaaaagga

SEQ ID NO: 2828803 - RNA, 14 nt, Human
cauugcccagucuu

SEQ ID NO: 2828804 - RNA, 17 nt, Human
cauugcccagucuuuca

SEQ ID NO: 2828805 - RNA, 18 nt, Human
cauugcccagucuuucau

SEQ ID NO: 2828806 - RNA, 20 nt, Human
cauugcccagucuuucaugu

SEQ ID NO: 2828807 - RNA, 15 nt, Human
cauuguacuaccugu

SEQ ID NO: 2828808 - RNA, 16 nt, Human
cauuguacuaccugug

SEQ ID NO: 2828809 - RNA, 16 nt, Human
cauuguagagcuucug

SEQ ID NO: 2828810 - RNA, 17 nt, Human
cauuguagagcuucugg

SEQ ID NO: 2828811 - RNA, 19 nt, Human
cauuguagagcuucuggca

SEQ ID NO: 2828812 - RNA, 21 nt, Human
cauuguagagcuucuggcacu

SEQ ID NO: 2828813 - RNA, 18 nt, Human
cauuguuggccaaagcca

SEQ ID NO: 2828814 - RNA, 12 nt, Human
cauuguuucugu

SEQ ID NO: 2828815 - RNA, 21 nt, Human
cauuguuucugugggcgggcc

SEQ ID NO: 2828816 - RNA, 14 nt, Human
cauuguuugcugcu

SEQ ID NO: 2828817 - RNA, 16 nt, Human
cauuguuugcugcuau

SEQ ID NO: 2828818 - RNA, 17 nt, Human
cauuguuggccaaagcc

SEQ ID NO: 2828819 - RNA, 16 nt, Human
cauuguugcucccugu

SEQ ID NO: 2828820 - RNA, 17 nt, Human
cauuguugcucccugug

SEQ ID NO: 2828821 - RNA, 20 nt, Human
cauuguugagcuauugcugu

SEQ ID NO: 2828822 - RNA, 13 nt, Human
cauuguugagcua

SEQ ID NO: 2828823 - RNA, 17 nt, Human
cauuguucaccuuugua

SEQ ID NO: 2828824 - RNA, 18 nt, Human
cauuguucaccuuuguag

SEQ ID NO: 2828825 - RNA, 19 nt, Human
cauuguucaccuuuguagc

SEQ ID NO: 2828826 - RNA, 17 nt, Human
cauugucccucuucacu

SEQ ID NO: 2828827 - RNA, 18 nt, Human
cauugucccucuucacuc

SEQ ID NO: 2828828 - RNA, 20 nt, Human
cauugucccucuucacuccc

SEQ ID NO: 2828829 - RNA, 17 nt, Human
cauugucucguuuguga

SEQ ID NO: 2828830 - RNA, 19 nt, Human
cauugugaguaaaucagau

SEQ ID NO: 2828831 - RNA, 22 nt, Human
cauugugauguauauuccuuug

SEQ ID NO: 2828832 - RNA, 15 nt, Human
cauuguaugaugugu

SEQ ID NO: 2828833 - RNA, 16 nt, Human
cauuguaugauguguu

SEQ ID NO: 2828834 - RNA, 17 nt, Human
cauuguaugauguguug

SEQ ID NO: 2828835 - RNA, 18 nt, Human
cauuguaugauguguugu

SEQ ID NO: 2828836 - RNA, 20 nt, Human
cauuguaugauguguuguga

SEQ ID NO: 2828837 - RNA, 22 nt, Human
cauuguaugauguguugugaua

SEQ ID NO: 2828838 - RNA, 15 nt, Human
cauuguauguaucua

SEQ ID NO: 2828839 - RNA, 16 nt, Human
cauuguauguaucuau

SEQ ID NO: 2828840 - RNA, 17 nt, Human
cauuguauguaucuauu

SEQ ID NO: 2828841 - RNA, 22 nt, Human
cauuugcguuccaugaugcugg

SEQ ID NO: 2828842 - RNA, 19 nt, Human
cauuugcucuuucaucucu

SEQ ID NO: 2828843 - RNA, 18 nt, Human
cauuugagcagggcucag

SEQ ID NO: 2828844 - RNA, 17 nt, Human
cauuugagcagggcuca

SEQ ID NO: 2828845 - RNA, 20 nt, Human
cauuugagcagggcucagcg

SEQ ID NO: 2828846 - RNA, 17 nt, Human
cauuugccaauuuuccu

SEQ ID NO: 2828847 - RNA, 21 nt, Human
cauuugcguuccaugaugcug

SEQ ID NO: 2828848 - RNA, 12 nt, Human
cauuugccuugc

SEQ ID NO: 2828849 - RNA, 15 nt, Human
cauuugccuugcaga

SEQ ID NO: 2828850 - RNA, 16 nt, Human
cauuugccuugcagaa

SEQ ID NO: 2828851 - RNA, 19 nt, Human
cauuugccuugcagaacug

SEQ ID NO: 2828852 - RNA, 20 nt, Human
cauuugccuugcagaacugc

SEQ ID NO: 2828853 - RNA, 21 nt, Human
cauuugccuugcagaacugcc

SEQ ID NO: 2828854 - RNA, 22 nt, Human
cauuugccuugcagaacugcca

SEQ ID NO: 2828855 - RNA, 14 nt, Human
cauuugccuugcug

SEQ ID NO: 2828856 - RNA, 21 nt, Human
cauuugaauaaagccugcuuu

SEQ ID NO: 2828857 - RNA, 18 nt, Human
cauuugaaguguaccugu

SEQ ID NO: 2828858 - RNA, 19 nt, Human
cauuugaaguguaccugug

SEQ ID NO: 2828859 - RNA, 14 nt, Human
cauuuuaggaaagg

SEQ ID NO: 2828860 - RNA, 13 nt, Human
cauuuuaaaaaca

SEQ ID NO: 2828861 - RNA, 21 nt, Human
cauuuuaaaaacauagaaaaa

SEQ ID NO: 2828862 - RNA, 16 nt, Human
cauuuguuuuucucac

SEQ ID NO: 2828863 - RNA, 15 nt, Human
cauuuuauaaagugc

SEQ ID NO: 2828864 - RNA, 22 nt, Human
cauuuuauaaagugcuugugua

SEQ ID NO: 2828865 - RNA, 23 nt, Human
cauuuuauaaagugcuuguguaa

SEQ ID NO: 2828866 - RNA, 17 nt, Human
cauuuuauagacacccu

SEQ ID NO: 2828867 - RNA, 18 nt, Human
cauuuugugaauggauug

SEQ ID NO: 2828868 - RNA, 21 nt, Human
cauuuugugaauggauuggau

SEQ ID NO: 2828869 - RNA, 13 nt, Human
cauuuugugaaug

SEQ ID NO: 2828870 - RNA, 14 nt, Human
cauuuugugaaugg

SEQ ID NO: 2828871 - RNA, 15 nt, Human
cauuuugugaaugga

SEQ ID NO: 2828872 - RNA, 16 nt, Human
cauuuugugaauggau

SEQ ID NO: 2828873 - RNA, 12 nt, Human
cauuuugugaag

SEQ ID NO: 2828874 - RNA, 13 nt, Human
cauuuugugaagc

SEQ ID NO: 2828875 - RNA, 15 nt, Human
cauuuugugaagccc

SEQ ID NO: 2828876 - RNA, 17 nt, Human
cauuuugugaagcccug

SEQ ID NO: 2828877 - RNA, 18 nt, Human
cauuuugugaagcccugu

SEQ ID NO: 2828878 - RNA, 20 nt, Human
cauuuugugaagcccuguug

SEQ ID NO: 2828879 - RNA, 12 nt, Human
cauuuugugaau

SEQ ID NO: 2828880 - RNA, 20 nt, Human
ccaaacauccuacaagacac

SEQ ID NO: 2828881 - RNA, 19 nt, Human
ccaaacauccuacaagaca

SEQ ID NO: 2828882 - RNA, 16 nt, Human
ccaaacagccacacug

SEQ ID NO: 2828883 - RNA, 22 nt, Human
ccaaacaccuuccagcuccugu

SEQ ID NO: 2828884 - RNA, 12 nt, Human
ccaaacagcaaa

SEQ ID NO: 2828885 - RNA, 13 nt, Human
ccaaacagcaaac

SEQ ID NO: 2828886 - RNA, 19 nt, Human
ccaaacagcaaaccaagag

SEQ ID NO: 2828887 - RNA, 22 nt, Human
ccaaacagcaaaccaagagauu

SEQ ID NO: 2828888 - RNA, 23 nt, Human
ccaaacagcaaaccaagagauug

SEQ ID NO: 2828889 - RNA, 12 nt, Human
cauuuuucugca

SEQ ID NO: 2828890 - RNA, 13 nt, Human
cauuuuguucuua

SEQ ID NO: 2828891 - RNA, 15 nt, Human
cauuuuguucuuaca

SEQ ID NO: 2828892 - RNA, 18 nt, Human
cauuuuguucuuacacau

SEQ ID NO: 2828893 - RNA, 19 nt, Human
cauuuuguucuuacacaua

SEQ ID NO: 2828894 - RNA, 21 nt, Human
cauuuuguucuuacacauaca

SEQ ID NO: 2828895 - RNA, 12 nt, Human
cauuuuguugua

SEQ ID NO: 2828896 - RNA, 13 nt, Human
cauuuuguuguaa

SEQ ID NO: 2828897 - RNA, 19 nt, Human
cauuuuuccguuugcuuuu

SEQ ID NO: 2828898 - RNA, 13 nt, Human
cauuuuucauuca

SEQ ID NO: 2828899 - RNA, 21 nt, Human
cauuuuucauucacuucucuu

SEQ ID NO: 2828900 - RNA, 20 nt, Human
ccaaacaccuuccagcuccu

SEQ ID NO: 2828901 - RNA, 15 nt, Human
cggccccucccgccc

SEQ ID NO: 2828902 - RNA, 12 nt, Human
cggcccccugcc

SEQ ID NO: 2828903 - RNA, 15 nt, Human
cggcccccuggucuc

SEQ ID NO: 2828904 - RNA, 18 nt, Human
cggcccccuggucucugg

SEQ ID NO: 2828905 - RNA, 22 nt, Human
cggccccagcaccucagccugc

SEQ ID NO: 2828906 - RNA, 14 nt, Human
cggccucccaaagu

SEQ ID NO: 2828907 - RNA, 23 nt, Human
cggccugaugcucccuccccugc

SEQ ID NO: 2828908 - RNA, 19 nt, Human
cggccugaugcucccuccc

SEQ ID NO: 2828909 - RNA, 17 nt, Human
cggccugaugcucccuc

SEQ ID NO: 2828910 - RNA, 22 nt, Human
cggggagggugacaguggccgc

SEQ ID NO: 2828911 - RNA, 15 nt, Human
cggggagggugacag

SEQ ID NO: 2828912 - RNA, 15 nt, Human
cgggcaugggcacuc

SEQ ID NO: 2828913 - RNA, 16 nt, Human
cgggagggcggcacag

SEQ ID NO: 2828914 - RNA, 20 nt, Human
cgggaggauguucugggaca

SEQ ID NO: 2828915 - RNA, 21 nt, Human
cgggagccugaucaccugccc

SEQ ID NO: 2828916 - RNA, 22 nt, Human
cgggagccugaucaccugcccu

SEQ ID NO: 2828917 - RNA, 22 nt, Human
cgggaggcggagcuugcaguga

SEQ ID NO: 2828918 - RNA, 13 nt, Human
cgggaggaggugu

SEQ ID NO: 2828919 - RNA, 17 nt, Human
cgggagcgguggcccug

SEQ ID NO: 2828920 - RNA, 20 nt, Human
cgggagcgguggcccugucc

SEQ ID NO: 2828921 - RNA, 12 nt, Human
cggcugggcaca

SEQ ID NO: 2828922 - RNA, 20 nt, Human
cggcugggcacacgccuccc

SEQ ID NO: 2828923 - RNA, 16 nt, Human
cggcugggcacacgcc

SEQ ID NO: 2828924 - RNA, 17 nt, Human
cggcugggcacacgccu

SEQ ID NO: 2828925 - RNA, 14 nt, Human
cggcugggucugug

SEQ ID NO: 2828926 - RNA, 14 nt, Human
cggcugugcucaga

SEQ ID NO: 2828927 - RNA, 16 nt, Human
cggcugugcucagaga

SEQ ID NO: 2828928 - RNA, 13 nt, Human
cggaugcugcuuc

SEQ ID NO: 2828929 - RNA, 14 nt, Human
cggaugcugcuucc

SEQ ID NO: 2828930 - RNA, 20 nt, Human
cggauccuaagcaucuaagu

SEQ ID NO: 2828931 - RNA, 20 nt, Human
cggacuaagccuaccugcuc

SEQ ID NO: 2828932 - RNA, 21 nt, Human
cggacuaagccuaccugcucu

SEQ ID NO: 2828933 - RNA, 15 nt, Human
cggacuccuccuuuc

SEQ ID NO: 2828934 - RNA, 19 nt, Human
cggacuccuccuuucuccu

SEQ ID NO: 2828935 - RNA, 19 nt, Human
cggauccuaagcaucuaag

SEQ ID NO: 2828936 - RNA, 17 nt, Human
cggauccuaagcaucua

SEQ ID NO: 2828937 - RNA, 12 nt, Human
cggaccccagcu

SEQ ID NO: 2828938 - RNA, 13 nt, Human
cggaccccagcug

SEQ ID NO: 2828939 - RNA, 16 nt, Human
cggacacuccuagaga

SEQ ID NO: 2828940 - RNA, 14 nt, Human
cggacacuccuaga

SEQ ID NO: 2828941 - RNA, 15 nt, Human
cggacacuccuagag

SEQ ID NO: 2828942 - RNA, 22 nt, Human
cggaccgcuuguggggacccag

SEQ ID NO: 2828943 - RNA, 23 nt, Human
cggaccgcuuguggggacccagg

SEQ ID NO: 2828944 - RNA, 14 nt, Human
cggaccccagcugu

SEQ ID NO: 2828945 - RNA, 20 nt, Human
cggaccccagcugugagccu

SEQ ID NO: 2828946 - RNA, 21 nt, Human
cggaccuuggcagcccaggcc

SEQ ID NO: 2828947 - RNA, 22 nt, Human
cggaccccagcugugagccuug

SEQ ID NO: 2828948 - RNA, 15 nt, Human
cggauugcguuccuc

SEQ ID NO: 2828949 - RNA, 24 nt, Human
cggauuccaaagaguagaauugca

SEQ ID NO: 2828950 - RNA, 12 nt, Human
cggauuccagcc

SEQ ID NO: 2828951 - RNA, 16 nt, Human
cggauuccagcccaca

SEQ ID NO: 2828952 - RNA, 19 nt, Human
cggcaacuaagcagucccu

SEQ ID NO: 2828953 - RNA, 22 nt, Human
cggcaacuaagcagucccugag

SEQ ID NO: 2828954 - RNA, 11 nt, Human
cggcaggcccu

SEQ ID NO: 2828955 - RNA, 12 nt, Human
cggcaggcccug

SEQ ID NO: 2828956 - RNA, 13 nt, Human
cggcaggcccugc

SEQ ID NO: 2828957 - RNA, 14 nt, Human
cggcaggcccugca

SEQ ID NO: 2828958 - RNA, 15 nt, Human
cggcaggcccugcag

SEQ ID NO: 2828959 - RNA, 16 nt, Human
cggcaggcccugcagu

SEQ ID NO: 2828960 - RNA, 17 nt, Human
cggcaggcccugcagug

SEQ ID NO: 2828961 - RNA, 14 nt, Human
cgcuaucuucacau

SEQ ID NO: 2828962 - RNA, 13 nt, Human
cgcuauuacaaau

SEQ ID NO: 2828963 - RNA, 14 nt, Human
cgcuauuacaaaua

SEQ ID NO: 2828964 - RNA, 17 nt, Human
cgcucaccuagagccag

SEQ ID NO: 2828965 - RNA, 18 nt, Human
cgcucaccuagagccaga

SEQ ID NO: 2828966 - RNA, 17 nt, Human
cgcuauugucaccaggg

SEQ ID NO: 2828967 - RNA, 15 nt, Human
cgcucgccccaccgg

SEQ ID NO: 2828968 - RNA, 21 nt, Human
cgcucgccccaccggcgcgcu

SEQ ID NO: 2828969 - RNA, 13 nt, Human
cgcuccugugucu

SEQ ID NO: 2828970 - RNA, 17 nt, Human
cgcucuccuuucuuucu

SEQ ID NO: 2828971 - RNA, 13 nt, Human
cgcucuccugcca

SEQ ID NO: 2828972 - RNA, 14 nt, Human
cgcucuccugccac

SEQ ID NO: 2828973 - RNA, 15 nt, Human
cgcucguguguucua

SEQ ID NO: 2828974 - RNA, 23 nt, Human
cgcucguguguucuauccaaaca

SEQ ID NO: 2828975 - RNA, 19 nt, Human
cggaacccaagcuuagaac

SEQ ID NO: 2828976 - RNA, 21 nt, Human
cggaaccgcucaccuagagcc

SEQ ID NO: 2828977 - RNA, 17 nt, Human
cggaacccaagcuuaga

SEQ ID NO: 2828978 - RNA, 12 nt, Human
cggaacagcaga

SEQ ID NO: 2828979 - RNA, 13 nt, Human
cggaacagcagau

SEQ ID NO: 2828980 - RNA, 12 nt, Human
cggaaagguauu

SEQ ID NO: 2828981 - RNA, 20 nt, Human
cggaaagguauuugggaaac

SEQ ID NO: 2828982 - RNA, 21 nt, Human
cggaaagguauuugggaaacu

SEQ ID NO: 2828983 - RNA, 13 nt, Human
cggaaauuaaagu

SEQ ID NO: 2828984 - RNA, 14 nt, Human
cggaaauuaaaguu

SEQ ID NO: 2828985 - RNA, 18 nt, Human
cggacagccacggccagg

SEQ ID NO: 2828986 - RNA, 16 nt, Human
cggacagccacggcca

SEQ ID NO: 2828987 - RNA, 15 nt, Human
cggacagccacggcc

SEQ ID NO: 2828988 - RNA, 12 nt, Human
cggacacccccu

SEQ ID NO: 2828989 - RNA, 14 nt, Human
cggacacccccucg

SEQ ID NO: 2828990 - RNA, 12 nt, Human
cggacaauaaac

SEQ ID NO: 2828991 - RNA, 13 nt, Human
cggacaauaaacc

SEQ ID NO: 2828992 - RNA, 20 nt, Human
cggacaauaaaccuccgcca

SEQ ID NO: 2828993 - RNA, 22 nt, Human
cggacaauaaaccuccgccaau

SEQ ID NO: 2828994 - RNA, 20 nt, Human
cggaaugaaccacaucuugc

SEQ ID NO: 2828995 - RNA, 19 nt, Human
cggaauuuaccugauuucu

SEQ ID NO: 2828996 - RNA, 13 nt, Human
cggaauuuaccug

SEQ ID NO: 2828997 - RNA, 22 nt, Human
cgcacaauaguaaccuggguaa

SEQ ID NO: 2828998 - RNA, 14 nt, Human
cgcacacacacaca

SEQ ID NO: 2828999 - RNA, 14 nt, Human
cgcacuuuccacuu

SEQ ID NO: 2829000 - RNA, 15 nt, Human
cgcacuuuccacuuc

SEQ ID NO: 2829001 - RNA, 19 nt, Human
cgcacuuuccacuucuucc

SEQ ID NO: 2829002 - RNA, 20 nt, Human
cgcacuuuccacuucuuccu

SEQ ID NO: 2829003 - RNA, 13 nt, Human
cgcacacacacaa

SEQ ID NO: 2829004 - RNA, 11 nt, Human
cgcaagcugag

SEQ ID NO: 2829005 - RNA, 22 nt, Human
cgcaaugaaaagucguuuucca

SEQ ID NO: 2829006 - RNA, 19 nt, Human
cgauucuucugcuucagcc

SEQ ID NO: 2829007 - RNA, 13 nt, Human
cgauucuucugcu

SEQ ID NO: 2829008 - RNA, 21 nt, Human
cgauucuucugcuucagccuc

SEQ ID NO: 2829009 - RNA, 12 nt, Human
cgauuccuucuc

SEQ ID NO: 2829010 - RNA, 13 nt, Human
cgauuccuucucu

SEQ ID NO: 2829011 - RNA, 12 nt, Human
cgauucuccugc

SEQ ID NO: 2829012 - RNA, 18 nt, Human
cgauucuccugccucagc

SEQ ID NO: 2829013 - RNA, 19 nt, Human
cgaucuggguucacugcaa

SEQ ID NO: 2829014 - RNA, 14 nt, Human
cgaugaaggcugcc

SEQ ID NO: 2829015 - RNA, 17 nt, Human
cgaucucuuauuuuaca

SEQ ID NO: 2829016 - RNA, 21 nt, Human
cgaugaauuuggagacucugu

SEQ ID NO: 2829017 - RNA, 14 nt, Human
cgaucucccaccuu

SEQ ID NO: 2829018 - RNA, 15 nt, Human
cgaucucggcucagu

SEQ ID NO: 2829019 - RNA, 16 nt, Human
cgagggcagcugcuau

SEQ ID NO: 2829020 - RNA, 22 nt, Human
cgauccaccugucucagccucc

SEQ ID NO: 2829021 - RNA, 14 nt, Human
cgaucccacacagg

SEQ ID NO: 2829022 - RNA, 19 nt, Human
cgaucgcggcggagcuggc

SEQ ID NO: 2829023 - RNA, 13 nt, Human
cgauccugccacc

SEQ ID NO: 2829024 - RNA, 17 nt, Human
cgauccugccacccugu

SEQ ID NO: 2829025 - RNA, 18 nt, Human
cgauccugccacccugua

SEQ ID NO: 2829026 - RNA, 12 nt, Human
cgaggacaggga

SEQ ID NO: 2829027 - RNA, 13 nt, Human
cgaggacagggag

SEQ ID NO: 2829028 - RNA, 19 nt, Human
cgaggccuucucugaagga

SEQ ID NO: 2829029 - RNA, 18 nt, Human
cgaggccuucucugaagg

SEQ ID NO: 2829030 - RNA, 13 nt, Human
cgagggcagcugc

SEQ ID NO: 2829031 - RNA, 20 nt, Human
cgauccaccugucucagccu

SEQ ID NO: 2829032 - RNA, 23 nt, Human
ccuuuguaaauugucagaugcug

SEQ ID NO: 2829033 - RNA, 16 nt, Human
ccuuuguacagcccag

SEQ ID NO: 2829034 - RNA, 17 nt, Human
ccuuuguacagcccaga

SEQ ID NO: 2829035 - RNA, 16 nt, Human
ccuuuguagcacucag

SEQ ID NO: 2829036 - RNA, 14 nt, Human
ccuuuggcucugga

SEQ ID NO: 2829037 - RNA, 15 nt, Human
ccuuuggcucuggag

SEQ ID NO: 2829038 - RNA, 16 nt, Human
ccuuuggcucuggaga

SEQ ID NO: 2829039 - RNA, 19 nt, Human
ccuuuggcucuggagacag

SEQ ID NO: 2829040 - RNA, 19 nt, Human
cgagcgcuaucuucacaua

SEQ ID NO: 2829041 - RNA, 15 nt, Human
cgagcuccagagcaa

SEQ ID NO: 2829042 - RNA, 12 nt, Human
cgagcugucccc

SEQ ID NO: 2829043 - RNA, 21 nt, Human
cgagcuguuuauguuuuuaua

SEQ ID NO: 2829044 - RNA, 12 nt, Human
ccuuuaagaaaa

SEQ ID NO: 2829045 - RNA, 11 nt, Human
ccuuucugugu

SEQ ID NO: 2829046 - RNA, 13 nt, Human
ccuuucugugugc

SEQ ID NO: 2829047 - RNA, 16 nt, Human
ccuuucuguaccauuu

SEQ ID NO: 2829048 - RNA, 12 nt, Human
ccuuucugugcc

SEQ ID NO: 2829049 - RNA, 13 nt, Human
ccuuucugugccc

SEQ ID NO: 2829050 - RNA, 14 nt, Human
ccuuucugugcccu

SEQ ID NO: 2829051 - RNA, 19 nt, Human
ccuuucugugcccuacuca

SEQ ID NO: 2829052 - RNA, 20 nt, Human
ccuuucugugcccuacucau

SEQ ID NO: 2829053 - RNA, 14 nt, Human
ccuuucuggcucuc

SEQ ID NO: 2829054 - RNA, 12 nt, Human
ccuuucucuuuc

SEQ ID NO: 2829055 - RNA, 14 nt, Human
ccuuucucuuucuc

SEQ ID NO: 2829056 - RNA, 16 nt, Human
ccuuucucuuucucuc

SEQ ID NO: 2829057 - RNA, 17 nt, Human
ccuuucucuuucucucu

SEQ ID NO: 2829058 - RNA, 18 nt, Human
ccuuucucuuucucucuu

SEQ ID NO: 2829059 - RNA, 21 nt, Human
ccuuucucuuucucucuuccc

SEQ ID NO: 2829060 - RNA, 22 nt, Human
ccuuucucuuucucucuucccu

SEQ ID NO: 2829061 - RNA, 15 nt, Human
ccuuucugccgaccc

SEQ ID NO: 2829062 - RNA, 17 nt, Human
ccuuucugccgaccccu

SEQ ID NO: 2829063 - RNA, 16 nt, Human
ccuuguuacccaugaa

SEQ ID NO: 2829064 - RNA, 18 nt, Human
ccuuguuacccaugaaaa

SEQ ID NO: 2829065 - RNA, 20 nt, Human
ccuuguuuugaaaaccuaaa

SEQ ID NO: 2829066 - RNA, 20 nt, Human
ccuuuaaaaaaauuuaagug

SEQ ID NO: 2829067 - RNA, 15 nt, Human
ccuuuaaaaaagaaa

SEQ ID NO: 2829068 - RNA, 15 nt, Human
ccuuguguauauuug

SEQ ID NO: 2829069 - RNA, 16 nt, Human
ccuuguguauauuugu

SEQ ID NO: 2829070 - RNA, 18 nt, Human
ccuuguguauauuuguau

SEQ ID NO: 2829071 - RNA, 13 nt, Human
ccuuggcugcagg

SEQ ID NO: 2829072 - RNA, 12 nt, Human
ccuuggcugcag

SEQ ID NO: 2829073 - RNA, 12 nt, Human
ccuuggcucaga

SEQ ID NO: 2829074 - RNA, 15 nt, Human
ccuuggcucagacau

SEQ ID NO: 2829075 - RNA, 22 nt, Human
ccuuggcucaauccucuaagcu

SEQ ID NO: 2829076 - RNA, 18 nt, Human
ccuuggcucaauccucua

SEQ ID NO: 2829077 - RNA, 18 nt, Human
ccuuugcaaaucaguguu

SEQ ID NO: 2829078 - RNA, 14 nt, Human
ccuuugcacaggau

SEQ ID NO: 2829079 - RNA, 18 nt, Human
ccuuugaauguuaauuuu

SEQ ID NO: 2829080 - RNA, 13 nt, Human
ccuuugagacagu

SEQ ID NO: 2829081 - RNA, 14 nt, Human
ccuuugacauuuaa

SEQ ID NO: 2829082 - RNA, 16 nt, Human
ccuuugacauuuaauu

SEQ ID NO: 2829083 - RNA, 15 nt, Human
ccuuugagacaguuu

SEQ ID NO: 2829084 - RNA, 17 nt, Human
ccuuugagacaguuucu

SEQ ID NO: 2829085 - RNA, 19 nt, Human
ccuuugagacaguuucuua

SEQ ID NO: 2829086 - RNA, 14 nt, Human
ccuuucuugacaaa

SEQ ID NO: 2829087 - RNA, 23 nt, Human
ccuuucuugacaaaaccuaacuu

SEQ ID NO: 2829088 - RNA, 17 nt, Human
ccuuugaaaccugcucu

SEQ ID NO: 2829089 - RNA, 14 nt, Human
ccuuugaagccuca

SEQ ID NO: 2829090 - RNA, 20 nt, Human
ccuuugaagccucagcuacc

SEQ ID NO: 2829091 - RNA, 19 nt, Human
ccuuugcugaggccuccag

SEQ ID NO: 2829092 - RNA, 11 nt, Human
ccuuugccccu

SEQ ID NO: 2829093 - RNA, 13 nt, Human
ccuuugccuccag

SEQ ID NO: 2829094 - RNA, 14 nt, Human
ccuuugccuccaga

SEQ ID NO: 2829095 - RNA, 23 nt, Human
ccuuugccuccagaagcacuggg

SEQ ID NO: 2829096 - RNA, 16 nt, Human
ccuuugcgccugugac

SEQ ID NO: 2829097 - RNA, 13 nt, Human
ccuuugcucuuuc

SEQ ID NO: 2829098 - RNA, 21 nt, Human
ccuuuaaagaugaacucugaa

SEQ ID NO: 2829099 - RNA, 13 nt, Human
ccuuugcagggca

SEQ ID NO: 2829100 - RNA, 14 nt, Human
ccuuugcagggcag

SEQ ID NO: 2829101 - RNA, 15 nt, Human
ccuuugcagggcagc

SEQ ID NO: 2829102 - RNA, 16 nt, Human
ccuuugcagggcagcc

SEQ ID NO: 2829103 - RNA, 17 nt, Human
ccuuugcagggcagccc

SEQ ID NO: 2829104 - RNA, 18 nt, Human
ccuuugcagggcagcccc

SEQ ID NO: 2829105 - RNA, 20 nt, Human
ccuuugcaucguccccuccc

SEQ ID NO: 2829106 - RNA, 15 nt, Human
ccuuuggagaugcug

SEQ ID NO: 2829107 - RNA, 20 nt, Human
ccuuuggagaugcugagggu

SEQ ID NO: 2829108 - RNA, 15 nt, Human
ccuuuggccuuggcu

SEQ ID NO: 2829109 - RNA, 12 nt, Human
ccuuuggcucug

SEQ ID NO: 2829110 - RNA, 19 nt, Human
cgcgugcacguggagagcu

SEQ ID NO: 2829111 - RNA, 21 nt, Human
cgcgucuccuguuuuucuggg

SEQ ID NO: 2829112 - RNA, 19 nt, Human
cgcgugcccucgcugcuuc

SEQ ID NO: 2829113 - RNA, 20 nt, Human
cgcgugcacacaccagagcc

SEQ ID NO: 2829114 - RNA, 19 nt, Human
cgcgugcacacaccagagc

SEQ ID NO: 2829115 - RNA, 16 nt, Human
cgcgugcacacaccag

SEQ ID NO: 2829116 - RNA, 22 nt, Human
cgcgacuaauuucaaaaugcuu

SEQ ID NO: 2829117 - RNA, 14 nt, Human
cgcgaucccacaca

SEQ ID NO: 2829118 - RNA, 16 nt, Human
cgcgaucccacacagg

SEQ ID NO: 2829119 - RNA, 15 nt, Human
cgcgacuaauuucaa

SEQ ID NO: 2829120 - RNA, 21 nt, Human
cgcgucgcccucccaggcucu

SEQ ID NO: 2829121 - RNA, 12 nt, Human
cgcgucuccugu

SEQ ID NO: 2829122 - RNA, 13 nt, Human
cgcgucuccuguu

SEQ ID NO: 2829123 - RNA, 23 nt, Human
cgcguguccccggggcccagggg

SEQ ID NO: 2829124 - RNA, 14 nt, Human
cgcuaccucccucc

SEQ ID NO: 2829125 - RNA, 15 nt, Human
cgcuaccucccuccc

SEQ ID NO: 2829126 - RNA, 15 nt, Human
cgcuaccucucuguc

SEQ ID NO: 2829127 - RNA, 17 nt, Human
cgcuaccucucuguccc

SEQ ID NO: 2829128 - RNA, 16 nt, Human
cgcuacuauaaagaga

SEQ ID NO: 2829129 - RNA, 17 nt, Human
cgcuacuauaaagagaa

SEQ ID NO: 2829130 - RNA, 15 nt, Human
cgcuagagcagccca

SEQ ID NO: 2829131 - RNA, 17 nt, Human
cgcuagagcagcccaaa

SEQ ID NO: 2829132 - RNA, 13 nt, Human
cgcccucuuccug

SEQ ID NO: 2829133 - RNA, 14 nt, Human
cgcccucuuccuga

SEQ ID NO: 2829134 - RNA, 15 nt, Human
cgcccucuuccugac

SEQ ID NO: 2829135 - RNA, 14 nt, Human
cgccccccucccag

SEQ ID NO: 2829136 - RNA, 15 nt, Human
cgccccccucccaga

SEQ ID NO: 2829137 - RNA, 17 nt, Human
cgccccccucccagagg

SEQ ID NO: 2829138 - RNA, 12 nt, Human
cgcccccugccc

SEQ ID NO: 2829139 - RNA, 14 nt, Human
cgcccccuccucua

SEQ ID NO: 2829140 - RNA, 22 nt, Human
cgcccuccccuccccugcugca

SEQ ID NO: 2829141 - RNA, 16 nt, Human
cgcccuccuuucugug

SEQ ID NO: 2829142 - RNA, 14 nt, Human
cgcccuccccuccc

SEQ ID NO: 2829143 - RNA, 16 nt, Human
cgcccuccccuccccu

SEQ ID NO: 2829144 - RNA, 18 nt, Human
cgcccuccccuccccugc

SEQ ID NO: 2829145 - RNA, 20 nt, Human
cgcccuccccuccccugcug

SEQ ID NO: 2829146 - RNA, 23 nt, Human
cgcccgucugugugugaccccuc

SEQ ID NO: 2829147 - RNA, 13 nt, Human
cgcccucccaggc

SEQ ID NO: 2829148 - RNA, 12 nt, Human
cgcccucccagg

SEQ ID NO: 2829149 - RNA, 19 nt, Human
cgcccccacccugagcgcc

SEQ ID NO: 2829150 - RNA, 11 nt, Human
cgcccccagcc

SEQ ID NO: 2829151 - RNA, 13 nt, Human
cgcccccagccua

SEQ ID NO: 2829152 - RNA, 15 nt, Human
cgcccaggagacauc

SEQ ID NO: 2829153 - RNA, 12 nt, Human
cgcccaggcugg

SEQ ID NO: 2829154 - RNA, 20 nt, Human
cgcccaggcuggagugcaau

SEQ ID NO: 2829155 - RNA, 19 nt, Human
cgcccaggcuggagugcaa

SEQ ID NO: 2829156 - RNA, 15 nt, Human
cgcccagcugcaccu

SEQ ID NO: 2829157 - RNA, 13 nt, Human
cgcagaagcccug

SEQ ID NO: 2829158 - RNA, 20 nt, Human
cgcccagcugcaccugccag

SEQ ID NO: 2829159 - RNA, 18 nt, Human
cgcccagcugcaccugcc

SEQ ID NO: 2829160 - RNA, 23 nt, Human
cgcccagcugcaccugccagccu

SEQ ID NO: 2829161 - RNA, 11 nt, Human
cgcccaggaga

SEQ ID NO: 2829162 - RNA, 20 nt, Human
cguuuacuaugccugugucu

SEQ ID NO: 2829163 - RNA, 13 nt, Human
cguuuagaccaag

SEQ ID NO: 2829164 - RNA, 15 nt, Human
cguuuagaccaagga

SEQ ID NO: 2829165 - RNA, 16 nt, Human
cguuuagaccaaggaa

SEQ ID NO: 2829166 - RNA, 18 nt, Human
cguuuagaccaaggaaca

SEQ ID NO: 2829167 - RNA, 21 nt, Human
cguuuagaccaaggaacaaaa

SEQ ID NO: 2829168 - RNA, 19 nt, Human
cguucuuaggcugcuggga

SEQ ID NO: 2829169 - RNA, 20 nt, Human
cguucuuaggcugcugggau

SEQ ID NO: 2829170 - RNA, 12 nt, Human
cguucucugccu

SEQ ID NO: 2829171 - RNA, 19 nt, Human
cguuccugacaucacagca

SEQ ID NO: 2829172 - RNA, 21 nt, Human
cguuccugacaucacagcagc

SEQ ID NO: 2829173 - RNA, 22 nt, Human
cguuccugacaucacagcagcc

SEQ ID NO: 2829174 - RNA, 22 nt, Human
cguuccuucaaagcaaaugucu

SEQ ID NO: 2829175 - RNA, 20 nt, Human
cguuccaugaugcugggauu

SEQ ID NO: 2829176 - RNA, 15 nt, Human
cguuuuggaagcucu

SEQ ID NO: 2829177 - RNA, 23 nt, Human
cguuuugugugguggcaccuccu

SEQ ID NO: 2829178 - RNA, 20 nt, Human
cguuuugaagcuacugugug

SEQ ID NO: 2829179 - RNA, 13 nt, Human
cguuuugaagcua

SEQ ID NO: 2829180 - RNA, 15 nt, Human
cguuuucuguuugga

SEQ ID NO: 2829181 - RNA, 17 nt, Human
cguuugaccuuuuaugu

SEQ ID NO: 2829182 - RNA, 19 nt, Human
cguuuuccaaacugacuca

SEQ ID NO: 2829183 - RNA, 20 nt, Human
cguuuccugagaagugucua

SEQ ID NO: 2829184 - RNA, 18 nt, Human
cguuucuccaccuagacu

SEQ ID NO: 2829185 - RNA, 22 nt, Human
cguuucuccaccuagacuguaa

SEQ ID NO: 2829186 - RNA, 15 nt, Human
cguuucuucacuuuu

SEQ ID NO: 2829187 - RNA, 11 nt, Human
cguucauuugu

SEQ ID NO: 2829188 - RNA, 12 nt, Human
cguucauuugug

SEQ ID NO: 2829189 - RNA, 12 nt, Human
cguuccacaguu

SEQ ID NO: 2829190 - RNA, 14 nt, Human
cguuccacaguugc

SEQ ID NO: 2829191 - RNA, 16 nt, Human
cguuccacaguugcca

SEQ ID NO: 2829192 - RNA, 17 nt, Human
cguuccacaguugccac

SEQ ID NO: 2829193 - RNA, 19 nt, Human
cguuccacaguugccacca

SEQ ID NO: 2829194 - RNA, 20 nt, Human
cguuccacaguugccaccac

SEQ ID NO: 2829195 - RNA, 22 nt, Human
cguuccacaguugccaccaccu

SEQ ID NO: 2829196 - RNA, 22 nt, Human
cguggcugcgugccccugcugc

SEQ ID NO: 2829197 - RNA, 16 nt, Human
cgugccuggccacgcc

SEQ ID NO: 2829198 - RNA, 12 nt, Human
cgugccuggcca

SEQ ID NO: 2829199 - RNA, 13 nt, Human
cgugccuucagcu

SEQ ID NO: 2829200 - RNA, 15 nt, Human
cgugccuucagcucu

SEQ ID NO: 2829201 - RNA, 16 nt, Human
cgugccuucagcucua

SEQ ID NO: 2829202 - RNA, 18 nt, Human
cgugccuucagcucuaca

SEQ ID NO: 2829203 - RNA, 15 nt, Human
cguggcccugcccuc

SEQ ID NO: 2829204 - RNA, 18 nt, Human
cguggcccugcccucucc

SEQ ID NO: 2829205 - RNA, 15 nt, Human
cgucuggaaguccaa

SEQ ID NO: 2829206 - RNA, 23 nt, Human
cgucucuggagcggaauuuaccu

SEQ ID NO: 2829207 - RNA, 15 nt, Human
cgucugaagcuugac

SEQ ID NO: 2829208 - RNA, 18 nt, Human
cgucugaagcuugacucc

SEQ ID NO: 2829209 - RNA, 21 nt, Human
cgucugaagcuugacucccaa

SEQ ID NO: 2829210 - RNA, 14 nt, Human
cgucugacaggcaa

SEQ ID NO: 2829211 - RNA, 13 nt, Human
cgucugacaggca

SEQ ID NO: 2829212 - RNA, 22 nt, Human
cgucccccucuggcuccagcug

SEQ ID NO: 2829213 - RNA, 15 nt, Human
cgucccuagcaguga

SEQ ID NO: 2829214 - RNA, 16 nt, Human
cgucccuagcagugaa

SEQ ID NO: 2829215 - RNA, 13 nt, Human
cguccccuccccc

SEQ ID NO: 2829216 - RNA, 21 nt, Human
cguccccucccccaccccugc

SEQ ID NO: 2829217 - RNA, 22 nt, Human
cguccccucccccaccccugcu

SEQ ID NO: 2829218 - RNA, 17 nt, Human
cgucgaggggcucucag

SEQ ID NO: 2829219 - RNA, 16 nt, Human
cgucgaggggcucuca

SEQ ID NO: 2829220 - RNA, 15 nt, Human
cgucgcccucccagg

SEQ ID NO: 2829221 - RNA, 16 nt, Human
cgucgcccucccaggc

SEQ ID NO: 2829222 - RNA, 22 nt, Human
cguccucaccccuguccucacu

SEQ ID NO: 2829223 - RNA, 20 nt, Human
cguccguggguugcuaacug

SEQ ID NO: 2829224 - RNA, 21 nt, Human
cguccguggguugcuaacuga

SEQ ID NO: 2829225 - RNA, 23 nt, Human
cguccguggguugcuaacugaac

SEQ ID NO: 2829226 - RNA, 14 nt, Human
cguccucaccccug

SEQ ID NO: 2829227 - RNA, 17 nt, Human
cguccucaccccugucc

SEQ ID NO: 2829228 - RNA, 20 nt, Human
cguccucaccccuguccuca

SEQ ID NO: 2829229 - RNA, 22 nt, Human
cgugcacacaccagagcccacc

SEQ ID NO: 2829230 - RNA, 22 nt, Human
cgugcaguggugcgaucugggu

SEQ ID NO: 2829231 - RNA, 15 nt, Human
cgugcaccuguacuc

SEQ ID NO: 2829232 - RNA, 22 nt, Human
cgugccgugugagugugacagg

SEQ ID NO: 2829233 - RNA, 16 nt, Human
cgugccgccugcacuc

SEQ ID NO: 2829234 - RNA, 15 nt, Human
cgugccgccugcacu

SEQ ID NO: 2829235 - RNA, 13 nt, Human
cgugccccugcug

SEQ ID NO: 2829236 - RNA, 15 nt, Human
cgugccccugcugcu

SEQ ID NO: 2829237 - RNA, 18 nt, Human
cgugccccugcugcuguc

SEQ ID NO: 2829238 - RNA, 21 nt, Human
cgugcacacaccagagcccac

SEQ ID NO: 2829239 - RNA, 20 nt, Human
cgugcacacaccagagccca

SEQ ID NO: 2829240 - RNA, 12 nt, Human
cgugaacugugc

SEQ ID NO: 2829241 - RNA, 13 nt, Human
cgugaagggauuu

SEQ ID NO: 2829242 - RNA, 18 nt, Human
cgugaaaacggagcugaa

SEQ ID NO: 2829243 - RNA, 18 nt, Human
cgucugucuucacagcuc

SEQ ID NO: 2829244 - RNA, 11 nt, Human
cgucugugugc

SEQ ID NO: 2829245 - RNA, 20 nt, Human
cgucugugugugaccccucc

SEQ ID NO: 2829246 - RNA, 21 nt, Human
cgucugugugugaccccuccu

SEQ ID NO: 2829247 - RNA, 22 nt, Human
cgucugugugugaccccuccug

SEQ ID NO: 2829248 - RNA, 23 nt, Human
cgucugugugugaccccuccugg

SEQ ID NO: 2829249 - RNA, 14 nt, Human
cgucuguccaucug

SEQ ID NO: 2829250 - RNA, 15 nt, Human
cgucuguccaucugc

SEQ ID NO: 2829251 - RNA, 20 nt, Human
cgucuguccaucugcccgcc

SEQ ID NO: 2829252 - RNA, 15 nt, Human
cgucaacguuguacu

SEQ ID NO: 2829253 - RNA, 16 nt, Human
cgucaacguuguacug

SEQ ID NO: 2829254 - RNA, 17 nt, Human
cgucaacguuguacugu

SEQ ID NO: 2829255 - RNA, 21 nt, Human
cgucaacguuguacuguaugu

SEQ ID NO: 2829256 - RNA, 19 nt, Human
cgucacgugcgcugggcac

SEQ ID NO: 2829257 - RNA, 20 nt, Human
cgucacgugcgcugggcacu

SEQ ID NO: 2829258 - RNA, 17 nt, Human
cgucagaagcacccagg

SEQ ID NO: 2829259 - RNA, 11 nt, Human
cguaugaaaau

SEQ ID NO: 2829260 - RNA, 12 nt, Human
cguaugaaaaug

SEQ ID NO: 2829261 - RNA, 21 nt, Human
cguaugaaaaugaguugugaa

SEQ ID NO: 2829262 - RNA, 17 nt, Human
cguauauauaagaaaga

SEQ ID NO: 2829263 - RNA, 18 nt, Human
cguauauauaagaaagac

SEQ ID NO: 2829264 - RNA, 23 nt, Human
cguauauauaagaaagacaucuu

SEQ ID NO: 2829265 - RNA, 22 nt, Human
cguauaugucucaggucccugc

SEQ ID NO: 2829266 - RNA, 14 nt, Human
cguauuccccuucc

SEQ ID NO: 2829267 - RNA, 18 nt, Human
cguauuccccuucccacu

SEQ ID NO: 2829268 - RNA, 12 nt, Human
cguauuuuaaaa

SEQ ID NO: 2829269 - RNA, 20 nt, Human
cguauuuuaaaagccacaua

SEQ ID NO: 2829270 - RNA, 22 nt, Human
cguauuuuaaaagccacauaga

SEQ ID NO: 2829271 - RNA, 21 nt, Human
cguccaggccgcgcccuuucc

SEQ ID NO: 2829272 - RNA, 21 nt, Human
cguccagguucaacccacagc

SEQ ID NO: 2829273 - RNA, 22 nt, Human
cguccaggccgcgcccuuuccc

SEQ ID NO: 2829274 - RNA, 16 nt, Human
cguaucccgagucugg

SEQ ID NO: 2829275 - RNA, 15 nt, Human
cgucccaagauguug

SEQ ID NO: 2829276 - RNA, 21 nt, Human
cgucccccucuggcuccagcu

SEQ ID NO: 2829277 - RNA, 14 nt, Human
cgucccccucuggc

SEQ ID NO: 2829278 - RNA, 14 nt, Human
cguccacagcuucc

SEQ ID NO: 2829279 - RNA, 15 nt, Human
cguccacagcuuccu

SEQ ID NO: 2829280 - RNA, 16 nt, Human
cguccacagcuuccug

SEQ ID NO: 2829281 - RNA, 21 nt, Human
cguccagccgccauugccacc

SEQ ID NO: 2829282 - RNA, 19 nt, Human
cguccaggagccugugccu

SEQ ID NO: 2829283 - RNA, 19 nt, Human
cgucaucacuuuucaguga

SEQ ID NO: 2829284 - RNA, 17 nt, Human
cgucagucuuuuucugu

SEQ ID NO: 2829285 - RNA, 22 nt, Human
cgucagucuuuuucuguuguaa

SEQ ID NO: 2829286 - RNA, 16 nt, Human
cgucaggguuggugug

SEQ ID NO: 2829287 - RNA, 18 nt, Human
cgucaggguuggugugcu

SEQ ID NO: 2829288 - RNA, 19 nt, Human
cgucaggguuggugugcug

SEQ ID NO: 2829289 - RNA, 20 nt, Human
cgucaggguuggugugcuga

SEQ ID NO: 2829290 - RNA, 14 nt, Human
cggggccccagggc

SEQ ID NO: 2829291 - RNA, 19 nt, Human
cggggcaugcuggggcaag

SEQ ID NO: 2829292 - RNA, 17 nt, Human
cggggcaugcuggggca

SEQ ID NO: 2829293 - RNA, 16 nt, Human
cggggcaugcuggggc

SEQ ID NO: 2829294 - RNA, 15 nt, Human
cgguggaagagcuca

SEQ ID NO: 2829295 - RNA, 22 nt, Human
cgguggacuugaacuuuccugg

SEQ ID NO: 2829296 - RNA, 14 nt, Human
cgguggcccugucc

SEQ ID NO: 2829297 - RNA, 16 nt, Human
cgguggcccugucccu

SEQ ID NO: 2829298 - RNA, 14 nt, Human
cgggcaucuuuggg

SEQ ID NO: 2829299 - RNA, 16 nt, Human
cggugcuccaggcagg

SEQ ID NO: 2829300 - RNA, 15 nt, Human
cggggccccagggcu

SEQ ID NO: 2829301 - RNA, 13 nt, Human
cggugcuccaggc

SEQ ID NO: 2829302 - RNA, 14 nt, Human
cggugcuccaggca

SEQ ID NO: 2829303 - RNA, 15 nt, Human
cggugcuccaggcag

SEQ ID NO: 2829304 - RNA, 21 nt, Human
cguaggaugaaaagauucuuc

SEQ ID NO: 2829305 - RNA, 22 nt, Human
cguagcuucuaccaugaacaga

SEQ ID NO: 2829306 - RNA, 20 nt, Human
cguagccaaggugggcugag

SEQ ID NO: 2829307 - RNA, 20 nt, Human
cguagcgugcccgugugcau

SEQ ID NO: 2829308 - RNA, 15 nt, Human
ccuggugcugccaca

SEQ ID NO: 2829309 - RNA, 18 nt, Human
ccuggugcugccacacuu

SEQ ID NO: 2829310 - RNA, 21 nt, Human
ccuggugcugccacacuucag

SEQ ID NO: 2829311 - RNA, 15 nt, Human
ccuggugcuuccaaa

SEQ ID NO: 2829312 - RNA, 13 nt, Human
ccugguggcagcu

SEQ ID NO: 2829313 - RNA, 12 nt, Human
ccugguggcagc

SEQ ID NO: 2829314 - RNA, 20 nt, Human
ccugguggacaguccuggga

SEQ ID NO: 2829315 - RNA, 19 nt, Human
ccugguggacaguccuggg

SEQ ID NO: 2829316 - RNA, 18 nt, Human
ccugguggacaguccugg

SEQ ID NO: 2829317 - RNA, 17 nt, Human
ccugguggacaguccug

SEQ ID NO: 2829318 - RNA, 14 nt, Human
ccugguggacaguc

SEQ ID NO: 2829319 - RNA, 12 nt, Human
ccugguggacag

SEQ ID NO: 2829320 - RNA, 14 nt, Human
ccuguaauucagug

SEQ ID NO: 2829321 - RNA, 15 nt, Human
ccuguaauucagugu

SEQ ID NO: 2829322 - RNA, 17 nt, Human
ccuguaauucaguguau

SEQ ID NO: 2829323 - RNA, 18 nt, Human
ccuguaaucccagcacuu

SEQ ID NO: 2829324 - RNA, 18 nt, Human
ccuguacuguucuguguc

SEQ ID NO: 2829325 - RNA, 23 nt, Human
ccuguacucaggaggcugagggg

SEQ ID NO: 2829326 - RNA, 17 nt, Human
ccuguacuguucugugu

SEQ ID NO: 2829327 - RNA, 22 nt, Human
ccuguacucaggaggcugaggg

SEQ ID NO: 2829328 - RNA, 21 nt, Human
ccuguacucaggaggcugagg

SEQ ID NO: 2829329 - RNA, 15 nt, Human
ccuguacucaggagg

SEQ ID NO: 2829330 - RNA, 14 nt, Human
ccuguacucaggag

SEQ ID NO: 2829331 - RNA, 13 nt, Human
ccuguacucagga

SEQ ID NO: 2829332 - RNA, 23 nt, Human
ccuguaccuuuugaggagcccca

SEQ ID NO: 2829333 - RNA, 22 nt, Human
ccuguaccuuuugaggagcccc

SEQ ID NO: 2829334 - RNA, 14 nt, Human
ccuguauuuaagca

SEQ ID NO: 2829335 - RNA, 16 nt, Human
ccuguauuuaagcaaa

SEQ ID NO: 2829336 - RNA, 17 nt, Human
ccuguauuuaagcaaau

SEQ ID NO: 2829337 - RNA, 18 nt, Human
ccuguauuuaagcaaaua

SEQ ID NO: 2829338 - RNA, 19 nt, Human
ccuguauuuaagcaaauac

SEQ ID NO: 2829339 - RNA, 20 nt, Human
ccuguauuuaagcaaauacu

SEQ ID NO: 2829340 - RNA, 13 nt, Human
ccuguauguuguc

SEQ ID NO: 2829341 - RNA, 14 nt, Human
ccuguauguugucc

SEQ ID NO: 2829342 - RNA, 19 nt, Human
ccuguaguugcguggacuc

SEQ ID NO: 2829343 - RNA, 16 nt, Human
ccuguaugucuccagu

SEQ ID NO: 2829344 - RNA, 17 nt, Human
ccuguaugucuccagua

SEQ ID NO: 2829345 - RNA, 14 nt, Human
ccuguaugucuguc

SEQ ID NO: 2829346 - RNA, 15 nt, Human
ccuguaugucuguca

SEQ ID NO: 2829347 - RNA, 16 nt, Human
ccuguaugucugucau

SEQ ID NO: 2829348 - RNA, 18 nt, Human
ccuguaugucugucauug

SEQ ID NO: 2829349 - RNA, 19 nt, Human
ccuguaugucugucauugu

SEQ ID NO: 2829350 - RNA, 14 nt, Human
ccugucacauugca

SEQ ID NO: 2829351 - RNA, 15 nt, Human
ccugucacauugcau

SEQ ID NO: 2829352 - RNA, 20 nt, Human
ccugucacauugcauucuau

SEQ ID NO: 2829353 - RNA, 21 nt, Human
ccugucacauugcauucuauu

SEQ ID NO: 2829354 - RNA, 15 nt, Human
ccuguaguuaggaaa

SEQ ID NO: 2829355 - RNA, 14 nt, Human
ccuguaguuaggaa

SEQ ID NO: 2829356 - RNA, 13 nt, Human
ccuguaguccuag

SEQ ID NO: 2829357 - RNA, 19 nt, Human
ccuguaguuaggaaauaaa

SEQ ID NO: 2829358 - RNA, 18 nt, Human
ccuguaguuaggaaauaa

SEQ ID NO: 2829359 - RNA, 17 nt, Human
ccuguaguuaggaaaua

SEQ ID NO: 2829360 - RNA, 16 nt, Human
ccuguaguuaggaaau

SEQ ID NO: 2829361 - RNA, 22 nt, Human
ccuguaguuaggaaauaaaacc

SEQ ID NO: 2829362 - RNA, 21 nt, Human
ccuguaguuaggaaauaaaac

SEQ ID NO: 2829363 - RNA, 23 nt, Human
ccuguaguuaggaaauaaaaccu

SEQ ID NO: 2829364 - RNA, 18 nt, Human
ccuguaguugcguggacu

SEQ ID NO: 2829365 - RNA, 21 nt, Human
ccugugccuccucacccccag

SEQ ID NO: 2829366 - RNA, 20 nt, Human
ccugugccuccucaccccca

SEQ ID NO: 2829367 - RNA, 15 nt, Human
ccugugccuccucac

SEQ ID NO: 2829368 - RNA, 20 nt, Human
ccugugcauguaugucuugg

SEQ ID NO: 2829369 - RNA, 14 nt, Human
ccugugcauguaug

SEQ ID NO: 2829370 - RNA, 17 nt, Human
ccugugcauguaugucu

SEQ ID NO: 2829371 - RNA, 17 nt, Human
ccugugcaaugcauuag

SEQ ID NO: 2829372 - RNA, 12 nt, Human
ccugugcacaca

SEQ ID NO: 2829373 - RNA, 13 nt, Human
ccugugcacacac

SEQ ID NO: 2829374 - RNA, 14 nt, Human
ccugugcacacaca

SEQ ID NO: 2829375 - RNA, 17 nt, Human
ccugugcacacacacac

SEQ ID NO: 2829376 - RNA, 22 nt, Human
ccugugcacacacacacacaug

SEQ ID NO: 2829377 - RNA, 21 nt, Human
ccugugaggagccccaucugu

SEQ ID NO: 2829378 - RNA, 17 nt, Human
ccugugcaaaaaaauua

SEQ ID NO: 2829379 - RNA, 20 nt, Human
ccugugauccacccaacccu

SEQ ID NO: 2829380 - RNA, 17 nt, Human
ccugugaucuuauuuuu

SEQ ID NO: 2829381 - RNA, 19 nt, Human
ccugugaucuuauuuuucu

SEQ ID NO: 2829382 - RNA, 21 nt, Human
ccugugaucuuauuuuucuaa

SEQ ID NO: 2829383 - RNA, 22 nt, Human
ccugugaucuuauuuuucuaaa

SEQ ID NO: 2829384 - RNA, 16 nt, Human
ccugugaugcugggca

SEQ ID NO: 2829385 - RNA, 17 nt, Human
ccugugagguuucccaa

SEQ ID NO: 2829386 - RNA, 19 nt, Human
ccugugagguuucccaaug

SEQ ID NO: 2829387 - RNA, 15 nt, Human
ccugugaguaaauau

SEQ ID NO: 2829388 - RNA, 16 nt, Human
ccugugaguaaauauu

SEQ ID NO: 2829389 - RNA, 17 nt, Human
ccugugaguaaauauug

SEQ ID NO: 2829390 - RNA, 16 nt, Human
ccuguccucccauccc

SEQ ID NO: 2829391 - RNA, 22 nt, Human
ccuguccucacugcucccugaa

SEQ ID NO: 2829392 - RNA, 21 nt, Human
ccuguccucacugcucccuga

SEQ ID NO: 2829393 - RNA, 17 nt, Human
ccuguccucccaucccc

SEQ ID NO: 2829394 - RNA, 21 nt, Human
ccuguccucccauccccugga

SEQ ID NO: 2829395 - RNA, 22 nt, Human
ccuguccucccauccccuggac

SEQ ID NO: 2829396 - RNA, 23 nt, Human
ccuguccucccauccccuggacu

SEQ ID NO: 2829397 - RNA, 18 nt, Human
ccugugacuucagcucug

SEQ ID NO: 2829398 - RNA, 12 nt, Human
ccuguccccgca

SEQ ID NO: 2829399 - RNA, 14 nt, Human
ccuguccccgcagc

SEQ ID NO: 2829400 - RNA, 16 nt, Human
ccuguccagccugggc

SEQ ID NO: 2829401 - RNA, 14 nt, Human
ccuguccagccugg

SEQ ID NO: 2829402 - RNA, 12 nt, Human
ccuguccagccu

SEQ ID NO: 2829403 - RNA, 22 nt, Human
ccuguccagccugggcagccag

SEQ ID NO: 2829404 - RNA, 21 nt, Human
ccuguggaaugagugugcaug

SEQ ID NO: 2829405 - RNA, 23 nt, Human
ccuguggaaugagugugcaugga

SEQ ID NO: 2829406 - RNA, 12 nt, Human
ccugggaggccc

SEQ ID NO: 2829407 - RNA, 17 nt, Human
ccuggcugagggcagcu

SEQ ID NO: 2829408 - RNA, 13 nt, Human
ccugggaggcagu

SEQ ID NO: 2829409 - RNA, 16 nt, Human
ccuggccuuuccuggu

SEQ ID NO: 2829410 - RNA, 20 nt, Human
ccuggcgacugccccugccu

SEQ ID NO: 2829411 - RNA, 22 nt, Human
ccuggcuaauaaggcuuuagug

SEQ ID NO: 2829412 - RNA, 13 nt, Human
ccuggcucuugug

SEQ ID NO: 2829413 - RNA, 20 nt, Human
ccuggcucuguggcuugcua

SEQ ID NO: 2829414 - RNA, 17 nt, Human
ccuggcucuguggcuug

SEQ ID NO: 2829415 - RNA, 20 nt, Human
ccuggcucuugugcuggaug

SEQ ID NO: 2829416 - RNA, 22 nt, Human
ccuggcucuuucgucacccuug

SEQ ID NO: 2829417 - RNA, 23 nt, Human
ccuggcucuuucgucacccuugg

SEQ ID NO: 2829418 - RNA, 22 nt, Human
ccuggcucugcaaugggcacug

SEQ ID NO: 2829419 - RNA, 15 nt, Human
ccuggcucugcuguc

SEQ ID NO: 2829420 - RNA, 17 nt, Human
ccuggcucugcuguccc

SEQ ID NO: 2829421 - RNA, 13 nt, Human
ccuggccaggagc

SEQ ID NO: 2829422 - RNA, 14 nt, Human
ccuggccaggagcu

SEQ ID NO: 2829423 - RNA, 22 nt, Human
ccuggccaggagcucuucaggc

SEQ ID NO: 2829424 - RNA, 21 nt, Human
ccuggccaggagcucuucagg

SEQ ID NO: 2829425 - RNA, 20 nt, Human
ccuggccaggagcucuucag

SEQ ID NO: 2829426 - RNA, 19 nt, Human
ccuggccaggagcucuuca

SEQ ID NO: 2829427 - RNA, 18 nt, Human
ccuggccaggagcucuuc

SEQ ID NO: 2829428 - RNA, 16 nt, Human
ccuggccaggagcucu

SEQ ID NO: 2829429 - RNA, 15 nt, Human
ccuggccaggagcuc

SEQ ID NO: 2829430 - RNA, 15 nt, Human
ccuggcccccugagu

SEQ ID NO: 2829431 - RNA, 18 nt, Human
ccuggccccucaaccucc

SEQ ID NO: 2829432 - RNA, 22 nt, Human
ccuggccaggcagaucugugcc

SEQ ID NO: 2829433 - RNA, 14 nt, Human
ccuggccaggcaga

SEQ ID NO: 2829434 - RNA, 14 nt, Human
ccuggccagggccu

SEQ ID NO: 2829435 - RNA, 15 nt, Human
ccuggccagggccug

SEQ ID NO: 2829436 - RNA, 19 nt, Human
ccuggccagggccuggaag

SEQ ID NO: 2829437 - RNA, 20 nt, Human
ccuggccagggccuggaaga

SEQ ID NO: 2829438 - RNA, 23 nt, Human
ccuggccagggccuggaagacag

SEQ ID NO: 2829439 - RNA, 13 nt, Human
ccuggacugggag

SEQ ID NO: 2829440 - RNA, 14 nt, Human
ccuggacugggagg

SEQ ID NO: 2829441 - RNA, 14 nt, Human
ccuggacuguuuuc

SEQ ID NO: 2829442 - RNA, 17 nt, Human
ccuggacugggagguag

SEQ ID NO: 2829443 - RNA, 18 nt, Human
ccuggacugggagguaga

SEQ ID NO: 2829444 - RNA, 20 nt, Human
ccuggagcaaucacagauga

SEQ ID NO: 2829445 - RNA, 21 nt, Human
ccuggagcaaucacagaugag

SEQ ID NO: 2829446 - RNA, 18 nt, Human
ccuggagcagaccacccc

SEQ ID NO: 2829447 - RNA, 12 nt, Human
ccuggcagccgu

SEQ ID NO: 2829448 - RNA, 18 nt, Human
ccuggcagccgugccuuc

SEQ ID NO: 2829449 - RNA, 19 nt, Human
ccuggcagccgugccuuca

SEQ ID NO: 2829450 - RNA, 21 nt, Human
ccuggaccugcccugggccac

SEQ ID NO: 2829451 - RNA, 23 nt, Human
ccuggaccugcccugggccacac

SEQ ID NO: 2829452 - RNA, 13 nt, Human
ccuggaccugccu

SEQ ID NO: 2829453 - RNA, 14 nt, Human
ccuggaccugccuc

SEQ ID NO: 2829454 - RNA, 16 nt, Human
ccuggaccugccuccu

SEQ ID NO: 2829455 - RNA, 20 nt, Human
ccuggaccugccuccugccu

SEQ ID NO: 2829456 - RNA, 22 nt, Human
ccuggaccugccuccugccugc

SEQ ID NO: 2829457 - RNA, 23 nt, Human
ccuggaccugccuccugccugcc

SEQ ID NO: 2829458 - RNA, 22 nt, Human
ccuggacuagagggaccucucc

SEQ ID NO: 2829459 - RNA, 15 nt, Human
ccuggacuagaggga

SEQ ID NO: 2829460 - RNA, 14 nt, Human
ccuggacuccugca

SEQ ID NO: 2829461 - RNA, 23 nt, Human
ccuggacaguaucccacauccaa

SEQ ID NO: 2829462 - RNA, 19 nt, Human
ccuggacaguaucccacau

SEQ ID NO: 2829463 - RNA, 20 nt, Human
ccuggacauuugccuugcug

SEQ ID NO: 2829464 - RNA, 21 nt, Human
ccuggacauuugccuugcugg

SEQ ID NO: 2829465 - RNA, 22 nt, Human
ccuggaaaggcucagucucagg

SEQ ID NO: 2829466 - RNA, 21 nt, Human
ccuggaaaggcucagucucag

SEQ ID NO: 2829467 - RNA, 20 nt, Human
ccuggaaaggcucagucuca

SEQ ID NO: 2829468 - RNA, 17 nt, Human
ccuggaaaggcucaguc

SEQ ID NO: 2829469 - RNA, 15 nt, Human
ccuggaaaggcucag

SEQ ID NO: 2829470 - RNA, 17 nt, Human
ccugcuuugggcugccc

SEQ ID NO: 2829471 - RNA, 18 nt, Human
ccugcuuugggcugcccu

SEQ ID NO: 2829472 - RNA, 16 nt, Human
ccugcuuuuugaaaug

SEQ ID NO: 2829473 - RNA, 17 nt, Human
ccugcuuuuugaaauga

SEQ ID NO: 2829474 - RNA, 22 nt, Human
ccugcuuuuugaaaugaaauuu

SEQ ID NO: 2829475 - RNA, 23 nt, Human
ccugcuuuuugaaaugaaauuua

SEQ ID NO: 2829476 - RNA, 15 nt, Human
ccugcuuuggcgggc

SEQ ID NO: 2829477 - RNA, 17 nt, Human
ccuggaaaaauuccaga

SEQ ID NO: 2829478 - RNA, 17 nt, Human
ccugcuuuagagcuagg

SEQ ID NO: 2829479 - RNA, 17 nt, Human
ccugcuggucacagccu

SEQ ID NO: 2829480 - RNA, 13 nt, Human
ccugcugguucag

SEQ ID NO: 2829481 - RNA, 18 nt, Human
ccugcucccucucccccu

SEQ ID NO: 2829482 - RNA, 20 nt, Human
ccugcucccucucccccuua

SEQ ID NO: 2829483 - RNA, 14 nt, Human
ccugcuccgcugcu

SEQ ID NO: 2829484 - RNA, 15 nt, Human
ccugcuccgcugcuc

SEQ ID NO: 2829485 - RNA, 17 nt, Human
ccugcuccgcugcuccu

SEQ ID NO: 2829486 - RNA, 20 nt, Human
ccugcuccgcugcuccuugg

SEQ ID NO: 2829487 - RNA, 21 nt, Human
ccugcuccgcugcuccuuggc

SEQ ID NO: 2829488 - RNA, 22 nt, Human
ccugcuccgcugcuccuuggcu

SEQ ID NO: 2829489 - RNA, 19 nt, Human
ccugcugguucaggguugg

SEQ ID NO: 2829490 - RNA, 18 nt, Human
ccugcuggucacagccuc

SEQ ID NO: 2829491 - RNA, 20 nt, Human
ccugcuggucacagccuccu

SEQ ID NO: 2829492 - RNA, 12 nt, Human
ccugcuucccac

SEQ ID NO: 2829493 - RNA, 14 nt, Human
ccugcuucccaccu

SEQ ID NO: 2829494 - RNA, 18 nt, Human
ccugcuucccaccucccu

SEQ ID NO: 2829495 - RNA, 20 nt, Human
ccugcuucccaccucccugc

SEQ ID NO: 2829496 - RNA, 21 nt, Human
ccugcuucccaccucccugcc

SEQ ID NO: 2829497 - RNA, 23 nt, Human
ccugcuucccaccucccugccca

SEQ ID NO: 2829498 - RNA, 24 nt, Human
ccugcuucccaccucccugcccag

SEQ ID NO: 2829499 - RNA, 15 nt, Human
ccugauuucuucagg

SEQ ID NO: 2829500 - RNA, 18 nt, Human
ccugauuugguacuuuug

SEQ ID NO: 2829501 - RNA, 19 nt, Human
ccugcaaagcccagcuuga

SEQ ID NO: 2829502 - RNA, 14 nt, Human
ccugcgucuuccgc

SEQ ID NO: 2829503 - RNA, 17 nt, Human
ccugcgucuuccgcccc

SEQ ID NO: 2829504 - RNA, 18 nt, Human
ccugcgucuuccgccccu

SEQ ID NO: 2829505 - RNA, 23 nt, Human
ccugcgucuuccgccccugccug

SEQ ID NO: 2829506 - RNA, 22 nt, Human
ccugcguuuuggaagcucugaa

SEQ ID NO: 2829507 - RNA, 17 nt, Human
ccugcguugguccagag

SEQ ID NO: 2829508 - RNA, 18 nt, Human
ccugcguugguccagagc

SEQ ID NO: 2829509 - RNA, 19 nt, Human
ccugcguugguccagagcg

SEQ ID NO: 2829510 - RNA, 12 nt, Human
ccuucagcucca

SEQ ID NO: 2829511 - RNA, 18 nt, Human
ccuucagcucacgcuuca

SEQ ID NO: 2829512 - RNA, 20 nt, Human
ccuucaauuccugggcccca

SEQ ID NO: 2829513 - RNA, 16 nt, Human
ccuucaauuccugggc

SEQ ID NO: 2829514 - RNA, 15 nt, Human
ccuucaauuccuggg

SEQ ID NO: 2829515 - RNA, 14 nt, Human
ccuucaauuccugg

SEQ ID NO: 2829516 - RNA, 19 nt, Human
ccuucaaguuagcucagga

SEQ ID NO: 2829517 - RNA, 17 nt, Human
ccuucaaguuagcucag

SEQ ID NO: 2829518 - RNA, 17 nt, Human
ccuucaguacccucuca

SEQ ID NO: 2829519 - RNA, 19 nt, Human
ccuucaguacccucucagc

SEQ ID NO: 2829520 - RNA, 20 nt, Human
ccuucaguacccucucagcu

SEQ ID NO: 2829521 - RNA, 23 nt, Human
ccuucaguacccucucagcucca

SEQ ID NO: 2829522 - RNA, 21 nt, Human
ccuucagucuugaauuucuaa

SEQ ID NO: 2829523 - RNA, 20 nt, Human
ccuucagucuugaauuucua

SEQ ID NO: 2829524 - RNA, 24 nt, Human
ccuucaguacccucucagcuccag

SEQ ID NO: 2829525 - RNA, 13 nt, Human
ccuuccacugccu

SEQ ID NO: 2829526 - RNA, 15 nt, Human
ccuuccacugccucu

SEQ ID NO: 2829527 - RNA, 16 nt, Human
ccuuccacugccucug

SEQ ID NO: 2829528 - RNA, 17 nt, Human
ccuuccacugccucugc

SEQ ID NO: 2829529 - RNA, 18 nt, Human
ccuuccacugccucugcc

SEQ ID NO: 2829530 - RNA, 20 nt, Human
ccuuccacugccucugccuu

SEQ ID NO: 2829531 - RNA, 21 nt, Human
ccuuccacugccucugccuua

SEQ ID NO: 2829532 - RNA, 13 nt, Human
ccuuccagacaua

SEQ ID NO: 2829533 - RNA, 14 nt, Human
ccuuccagacauac

SEQ ID NO: 2829534 - RNA, 22 nt, Human
ccuuccagacauacgaaacaca

SEQ ID NO: 2829535 - RNA, 19 nt, Human
ccuuccaugucgccucugc

SEQ ID NO: 2829536 - RNA, 20 nt, Human
ccuuccaugucgccucugca

SEQ ID NO: 2829537 - RNA, 21 nt, Human
ccuuccaugucgccucugcau

SEQ ID NO: 2829538 - RNA, 23 nt, Human
ccuuccaugucgccucugcauuc

SEQ ID NO: 2829539 - RNA, 14 nt, Human
ccuuccucuggggc

SEQ ID NO: 2829540 - RNA, 15 nt, Human
ccuuccucuggggcu

SEQ ID NO: 2829541 - RNA, 22 nt, Human
ccuuccucuggggcucuagggu

SEQ ID NO: 2829542 - RNA, 12 nt, Human
ccuuccucuucg

SEQ ID NO: 2829543 - RNA, 14 nt, Human
ccuuccucuucggc

SEQ ID NO: 2829544 - RNA, 20 nt, Human
ccuuccucuucggcccucag

SEQ ID NO: 2829545 - RNA, 14 nt, Human
ccugugcuggggga

SEQ ID NO: 2829546 - RNA, 20 nt, Human
ccuucccaaguaagaggcug

SEQ ID NO: 2829547 - RNA, 21 nt, Human
ccuucccaaguaagaggcugg

SEQ ID NO: 2829548 - RNA, 14 nt, Human
ccuuccucugaggc

SEQ ID NO: 2829549 - RNA, 13 nt, Human
ccuuccugcuuga

SEQ ID NO: 2829550 - RNA, 15 nt, Human
ccuucgauacaccgg

SEQ ID NO: 2829551 - RNA, 20 nt, Human
ccuucgauacaccgggccug

SEQ ID NO: 2829552 - RNA, 22 nt, Human
ccuucgauacaccgggccugga

SEQ ID NO: 2829553 - RNA, 23 nt, Human
ccuucgauacaccgggccuggag

SEQ ID NO: 2829554 - RNA, 13 nt, Human
ccuucgccaccug

SEQ ID NO: 2829555 - RNA, 23 nt, Human
ccuguggaacauaaaaaggacau

SEQ ID NO: 2829556 - RNA, 19 nt, Human
ccuguggaacauaaaaagg

SEQ ID NO: 2829557 - RNA, 24 nt, Human
ccuguggaacauaaaaaggacauc

SEQ ID NO: 2829558 - RNA, 15 nt, Human
ccuguggaacccagc

SEQ ID NO: 2829559 - RNA, 17 nt, Human
ccuguggaacccagcag

SEQ ID NO: 2829560 - RNA, 22 nt, Human
ccuguggaacccagcaguucug

SEQ ID NO: 2829561 - RNA, 19 nt, Human
ccuguggaagagugugugu

SEQ ID NO: 2829562 - RNA, 14 nt, Human
ccuguggcccuggc

SEQ ID NO: 2829563 - RNA, 13 nt, Human
ccuguggcccugu

SEQ ID NO: 2829564 - RNA, 18 nt, Human
ccuguggcccuguccugc

SEQ ID NO: 2829565 - RNA, 21 nt, Human
ccuguggcccuguccugccau

SEQ ID NO: 2829566 - RNA, 22 nt, Human
ccuguggcccuguccugccaug

SEQ ID NO: 2829567 - RNA, 23 nt, Human
ccuguggcaucuuugccuugggc

SEQ ID NO: 2829568 - RNA, 18 nt, Human
ccuguggcaucuuugccu

SEQ ID NO: 2829569 - RNA, 13 nt, Human
ccuuacccuggga

SEQ ID NO: 2829570 - RNA, 14 nt, Human
ccuuacccuuagaa

SEQ ID NO: 2829571 - RNA, 15 nt, Human
ccuuacccuuagaau

SEQ ID NO: 2829572 - RNA, 15 nt, Human
ccuuagaaaaugugu

SEQ ID NO: 2829573 - RNA, 16 nt, Human
ccuuagaaaauguguc

SEQ ID NO: 2829574 - RNA, 18 nt, Human
ccuuagaaauguaaacug

SEQ ID NO: 2829575 - RNA, 19 nt, Human
ccuuagaaauguaaacugc

SEQ ID NO: 2829576 - RNA, 21 nt, Human
ccuuagaaauguaaacugcca

SEQ ID NO: 2829577 - RNA, 22 nt, Human
ccuuagaaauguaaacugccau

SEQ ID NO: 2829578 - RNA, 23 nt, Human
ccuuagaaauguaaacugccaua

SEQ ID NO: 2829579 - RNA, 14 nt, Human
ccuuagaaccuuuc

SEQ ID NO: 2829580 - RNA, 15 nt, Human
ccuuagaaccuuucu

SEQ ID NO: 2829581 - RNA, 16 nt, Human
ccuuagaaccuuucuu

SEQ ID NO: 2829582 - RNA, 18 nt, Human
ccuuagaaccuuucuuac

SEQ ID NO: 2829583 - RNA, 22 nt, Human
ccuuauuugcuaaucaaagcca

SEQ ID NO: 2829584 - RNA, 19 nt, Human
ccuucaaagcaaaugucuu

SEQ ID NO: 2829585 - RNA, 14 nt, Human
ccuucaaccauucc

SEQ ID NO: 2829586 - RNA, 19 nt, Human
ccuucaagaacucugggcu

SEQ ID NO: 2829587 - RNA, 17 nt, Human
ccuucaacguuucuuca

SEQ ID NO: 2829588 - RNA, 19 nt, Human
ccuucaacguuucuucacu

SEQ ID NO: 2829589 - RNA, 21 nt, Human
ccuucaacguuucuucacuuu

SEQ ID NO: 2829590 - RNA, 23 nt, Human
ccuucaagccagcaacacagagc

SEQ ID NO: 2829591 - RNA, 20 nt, Human
ccuuagagguccucuggagc

SEQ ID NO: 2829592 - RNA, 23 nt, Human
ccuuagauugaaguaaacugcag

SEQ ID NO: 2829593 - RNA, 19 nt, Human
ccuuagauuuaguagugua

SEQ ID NO: 2829594 - RNA, 15 nt, Human
ccuucaaagcaaaug

SEQ ID NO: 2829595 - RNA, 18 nt, Human
ccuuauuuucaagaaacu

SEQ ID NO: 2829596 - RNA, 14 nt, Human
ccuuauuuucaaga

SEQ ID NO: 2829597 - RNA, 17 nt, Human
ccuuagagguccucugg

SEQ ID NO: 2829598 - RNA, 19 nt, Human
ccuuagagguccucuggag

SEQ ID NO: 2829599 - RNA, 18 nt, Human
ccuuagagguccucugga

SEQ ID NO: 2829600 - RNA, 16 nt, Human
ccuuagaccuuccaua

SEQ ID NO: 2829601 - RNA, 16 nt, Human
ccuugaacuggguacu

SEQ ID NO: 2829602 - RNA, 14 nt, Human
ccuugaacugggua

SEQ ID NO: 2829603 - RNA, 18 nt, Human
ccuucgcuccugugucuu

SEQ ID NO: 2829604 - RNA, 15 nt, Human
ccuucgcuccugugu

SEQ ID NO: 2829605 - RNA, 14 nt, Human
ccuucgcuccugug

SEQ ID NO: 2829606 - RNA, 13 nt, Human
ccuucgcuccugu

SEQ ID NO: 2829607 - RNA, 14 nt, Human
ccuucuuuuucuuc

SEQ ID NO: 2829608 - RNA, 16 nt, Human
ccuucuuuuucuucuu

SEQ ID NO: 2829609 - RNA, 13 nt, Human
ccuucuuugauaa

SEQ ID NO: 2829610 - RNA, 13 nt, Human
ccuucuuugaaga

SEQ ID NO: 2829611 - RNA, 14 nt, Human
ccuucuuugaagaa

SEQ ID NO: 2829612 - RNA, 15 nt, Human
ccuucuuugaagaag

SEQ ID NO: 2829613 - RNA, 14 nt, Human
ccuucuuuuaugag

SEQ ID NO: 2829614 - RNA, 22 nt, Human
ccuucuuuuaugagcagaagga

SEQ ID NO: 2829615 - RNA, 24 nt, Human
ccuucuuuuaugagcagaaggaaa

SEQ ID NO: 2829616 - RNA, 19 nt, Human
ccuucuuuucucauguguu

SEQ ID NO: 2829617 - RNA, 12 nt, Human
ccuucuuuugua

SEQ ID NO: 2829618 - RNA, 18 nt, Human
ccuucuuugauaauguua

SEQ ID NO: 2829619 - RNA, 19 nt, Human
ccuucuuugauaauguuaa

SEQ ID NO: 2829620 - RNA, 20 nt, Human
ccuucuuugauaauguuaaa

SEQ ID NO: 2829621 - RNA, 21 nt, Human
ccuucuuugauaauguuaaau

SEQ ID NO: 2829622 - RNA, 17 nt, Human
ccuugacagggcacacc

SEQ ID NO: 2829623 - RNA, 15 nt, Human
ccuugacagggcaca

SEQ ID NO: 2829624 - RNA, 13 nt, Human
ccuugacagggca

SEQ ID NO: 2829625 - RNA, 14 nt, Human
ccuugacagggcac

SEQ ID NO: 2829626 - RNA, 12 nt, Human
ccuugaaugugg

SEQ ID NO: 2829627 - RNA, 12 nt, Human
ccuugaaugcug

SEQ ID NO: 2829628 - RNA, 14 nt, Human
ccuugaaugcugcc

SEQ ID NO: 2829629 - RNA, 15 nt, Human
ccuugaaugcugcca

SEQ ID NO: 2829630 - RNA, 16 nt, Human
ccuugaaugcugccag

SEQ ID NO: 2829631 - RNA, 17 nt, Human
ccuugaaugcugccagu

SEQ ID NO: 2829632 - RNA, 18 nt, Human
ccuugaaugcugccagug

SEQ ID NO: 2829633 - RNA, 19 nt, Human
ccuugaaugcugccagugu

SEQ ID NO: 2829634 - RNA, 20 nt, Human
ccuugaaugcugccagugug

SEQ ID NO: 2829635 - RNA, 22 nt, Human
ccuugaaugcugccagugugga

SEQ ID NO: 2829636 - RNA, 14 nt, Human
ccuugaucuguaua

SEQ ID NO: 2829637 - RNA, 11 nt, Human
ccuugaucauu

SEQ ID NO: 2829638 - RNA, 13 nt, Human
ccuugaucauuuu

SEQ ID NO: 2829639 - RNA, 19 nt, Human
ccuuggcaucacagggcag

SEQ ID NO: 2829640 - RNA, 19 nt, Human
ccuuggcagguccuggcca

SEQ ID NO: 2829641 - RNA, 16 nt, Human
ccuuggcauagacaug

SEQ ID NO: 2829642 - RNA, 14 nt, Human
ccuuggcaccaaag

SEQ ID NO: 2829643 - RNA, 16 nt, Human
ccuuggcaccaaagau

SEQ ID NO: 2829644 - RNA, 20 nt, Human
ccuuggcaccaaagaugcag

SEQ ID NO: 2829645 - RNA, 23 nt, Human
ccuuggcaccaaagaugcagccg

SEQ ID NO: 2829646 - RNA, 15 nt, Human
ccuugaccaggccug

SEQ ID NO: 2829647 - RNA, 16 nt, Human
ccuugaccaggccugg

SEQ ID NO: 2829648 - RNA, 12 nt, Human
ccuugaccaggc

SEQ ID NO: 2829649 - RNA, 24 nt, Human
ccucaguccuccccucacagccuc

SEQ ID NO: 2829650 - RNA, 22 nt, Human
ccucaguccuccccucacagcc

SEQ ID NO: 2829651 - RNA, 23 nt, Human
ccucaguccuccccucacagccu

SEQ ID NO: 2829652 - RNA, 16 nt, Human
ccuccccucucugcac

SEQ ID NO: 2829653 - RNA, 13 nt, Human
ccucccggugccc

SEQ ID NO: 2829654 - RNA, 15 nt, Human
ccucccuagccagca

SEQ ID NO: 2829655 - RNA, 16 nt, Human
ccucccggugcccaag

SEQ ID NO: 2829656 - RNA, 21 nt, Human
ccucccuagccagcacuugua

SEQ ID NO: 2829657 - RNA, 20 nt, Human
ccucccugaaaauguuuuuc

SEQ ID NO: 2829658 - RNA, 13 nt, Human
ccucccugcccag

SEQ ID NO: 2829659 - RNA, 14 nt, Human
ccucccugcccagg

SEQ ID NO: 2829660 - RNA, 15 nt, Human
ccucccugcccaggc

SEQ ID NO: 2829661 - RNA, 14 nt, Human
ccuccuccccacuu

SEQ ID NO: 2829662 - RNA, 13 nt, Human
ccuccuccccacu

SEQ ID NO: 2829663 - RNA, 21 nt, Human
ccuccuccccaacuguggggg

SEQ ID NO: 2829664 - RNA, 15 nt, Human
ccuccucccuguuau

SEQ ID NO: 2829665 - RNA, 19 nt, Human
ccuccucccuguuauuuuc

SEQ ID NO: 2829666 - RNA, 16 nt, Human
ccuccugagggaggac

SEQ ID NO: 2829667 - RNA, 19 nt, Human
ccuccugagggaggaccug

SEQ ID NO: 2829668 - RNA, 13 nt, Human
ccuccugccucga

SEQ ID NO: 2829669 - RNA, 14 nt, Human
ccuccuccuggacu

SEQ ID NO: 2829670 - RNA, 22 nt, Human
ccuccugugugugcgccuacag

SEQ ID NO: 2829671 - RNA, 15 nt, Human
ccuccugugugugcg

SEQ ID NO: 2829672 - RNA, 13 nt, Human
ccuccugugugug

SEQ ID NO: 2829673 - RNA, 12 nt, Human
ccuccugugggg

SEQ ID NO: 2829674 - RNA, 18 nt, Human
ccuccuguggggaaaggg

SEQ ID NO: 2829675 - RNA, 17 nt, Human
ccuccuguguacugugu

SEQ ID NO: 2829676 - RNA, 18 nt, Human
ccuccuguguacuguguc

SEQ ID NO: 2829677 - RNA, 13 nt, Human
ccuccugggcuaa

SEQ ID NO: 2829678 - RNA, 20 nt, Human
ccuccuggaaccuugcuguc

SEQ ID NO: 2829679 - RNA, 21 nt, Human
ccuccuggaaccuugcugucc

SEQ ID NO: 2829680 - RNA, 22 nt, Human
ccuccuggaaccuugcuguccu

SEQ ID NO: 2829681 - RNA, 15 nt, Human
ccuccuggccucaga

SEQ ID NO: 2829682 - RNA, 18 nt, Human
ccuccuggccucagacug

SEQ ID NO: 2829683 - RNA, 19 nt, Human
ccuccuggccucagacugc

SEQ ID NO: 2829684 - RNA, 21 nt, Human
ccuccuggccucagacugcac

SEQ ID NO: 2829685 - RNA, 13 nt, Human
ccuccuggacucc

SEQ ID NO: 2829686 - RNA, 12 nt, Human
ccuccugccucc

SEQ ID NO: 2829687 - RNA, 14 nt, Human
ccucagucucccuc

SEQ ID NO: 2829688 - RNA, 11 nt, Human
ccucaguccuc

SEQ ID NO: 2829689 - RNA, 12 nt, Human
ccucaguccucc

SEQ ID NO: 2829690 - RNA, 16 nt, Human
ccucaguccuccccuc

SEQ ID NO: 2829691 - RNA, 17 nt, Human
ccucaguccuccccuca

SEQ ID NO: 2829692 - RNA, 18 nt, Human
ccucaguccuccccucac

SEQ ID NO: 2829693 - RNA, 19 nt, Human
ccucaguccuccccucaca

SEQ ID NO: 2829694 - RNA, 20 nt, Human
ccucaguccuccccucacag

SEQ ID NO: 2829695 - RNA, 21 nt, Human
ccucaguccuccccucacagc

SEQ ID NO: 2829696 - RNA, 24 nt, Human
ccucagguguuuuuuaugaagugc

SEQ ID NO: 2829697 - RNA, 15 nt, Human
ccucaguaagacgac

SEQ ID NO: 2829698 - RNA, 19 nt, Human
ccucaguauauuuaaacuc

SEQ ID NO: 2829699 - RNA, 16 nt, Human
ccucaguccauuuaua

SEQ ID NO: 2829700 - RNA, 18 nt, Human
ccucaguccauuuauaua

SEQ ID NO: 2829701 - RNA, 20 nt, Human
ccucaguccauuuauauaug

SEQ ID NO: 2829702 - RNA, 22 nt, Human
ccucagucccaaauccuuccca

SEQ ID NO: 2829703 - RNA, 19 nt, Human
ccucaggugauccacccac

SEQ ID NO: 2829704 - RNA, 17 nt, Human
ccucaggugauccaccc

SEQ ID NO: 2829705 - RNA, 22 nt, Human
ccucaggugauccacccaccuc

SEQ ID NO: 2829706 - RNA, 21 nt, Human
ccucagguaaucgaccugccu

SEQ ID NO: 2829707 - RNA, 23 nt, Human
ccucagguaaucgaccugccucg

SEQ ID NO: 2829708 - RNA, 22 nt, Human
ccucagguaaucgaccugccuc

SEQ ID NO: 2829709 - RNA, 21 nt, Human
ccucacuaucccggcugcccu

SEQ ID NO: 2829710 - RNA, 21 nt, Human
ccucacuaggcuucugguuga

SEQ ID NO: 2829711 - RNA, 22 nt, Human
ccucacuaucccggcugcccuu

SEQ ID NO: 2829712 - RNA, 21 nt, Human
ccucagaacccuuggcuugcc

SEQ ID NO: 2829713 - RNA, 16 nt, Human
ccucagaacccuuggc

SEQ ID NO: 2829714 - RNA, 21 nt, Human
ccucagaacaaagugagacag

SEQ ID NO: 2829715 - RNA, 14 nt, Human
ccucagcauccugg

SEQ ID NO: 2829716 - RNA, 22 nt, Human
ccucagaacccuuggcuugccc

SEQ ID NO: 2829717 - RNA, 23 nt, Human
ccucagacgagacccaagggcag

SEQ ID NO: 2829718 - RNA, 23 nt, Human
ccucagaacaaagugagacaguc

SEQ ID NO: 2829719 - RNA, 12 nt, Human
ccucagacugca

SEQ ID NO: 2829720 - RNA, 16 nt, Human
ccucagacugcaccca

SEQ ID NO: 2829721 - RNA, 17 nt, Human
ccucagcauccuggcac

SEQ ID NO: 2829722 - RNA, 16 nt, Human
ccucagcauccuggca

SEQ ID NO: 2829723 - RNA, 16 nt, Human
ccucagccacacccag

SEQ ID NO: 2829724 - RNA, 19 nt, Human
ccucagccacacccaggca

SEQ ID NO: 2829725 - RNA, 18 nt, Human
ccucaggggaaaacuguu

SEQ ID NO: 2829726 - RNA, 21 nt, Human
ccucaggggaaaacuguuacc

SEQ ID NO: 2829727 - RNA, 11 nt, Human
ccucugccacc

SEQ ID NO: 2829728 - RNA, 13 nt, Human
ccucugccaccag

SEQ ID NO: 2829729 - RNA, 13 nt, Human
ccucugccacacu

SEQ ID NO: 2829730 - RNA, 18 nt, Human
ccucugccacacucugac

SEQ ID NO: 2829731 - RNA, 24 nt, Human
ccucugccaccagagaccguccuc

SEQ ID NO: 2829732 - RNA, 17 nt, Human
ccucugccaccagagac

SEQ ID NO: 2829733 - RNA, 19 nt, Human
ccucugccaccagagaccg

SEQ ID NO: 2829734 - RNA, 16 nt, Human
ccucuggaauugcuca

SEQ ID NO: 2829735 - RNA, 17 nt, Human
ccucuggagcccuaacc

SEQ ID NO: 2829736 - RNA, 18 nt, Human
ccucuggacuggcuagag

SEQ ID NO: 2829737 - RNA, 17 nt, Human
ccucuggaggggugugg

SEQ ID NO: 2829738 - RNA, 17 nt, Human
ccucuggacuggcuaga

SEQ ID NO: 2829739 - RNA, 16 nt, Human
ccucuggacuggcuag

SEQ ID NO: 2829740 - RNA, 15 nt, Human
ccucuggacuggcua

SEQ ID NO: 2829741 - RNA, 14 nt, Human
ccucuggacuggcu

SEQ ID NO: 2829742 - RNA, 21 nt, Human
ccucuggauuaggucucuguu

SEQ ID NO: 2829743 - RNA, 21 nt, Human
ccucuggcauuagaauuauuu

SEQ ID NO: 2829744 - RNA, 23 nt, Human
ccucuggcauuagaauuauuuaa

SEQ ID NO: 2829745 - RNA, 20 nt, Human
ccucuggagggguguggcuc

SEQ ID NO: 2829746 - RNA, 22 nt, Human
ccucuggagggguguggcuccu

SEQ ID NO: 2829747 - RNA, 22 nt, Human
ccucuggcuugggcagggucug

SEQ ID NO: 2829748 - RNA, 23 nt, Human
ccucugggaaaugagaaggcagc

SEQ ID NO: 2829749 - RNA, 12 nt, Human
ccucugggaacc

SEQ ID NO: 2829750 - RNA, 13 nt, Human
ccucugggaaccu

SEQ ID NO: 2829751 - RNA, 14 nt, Human
ccucugggaaccuc

SEQ ID NO: 2829752 - RNA, 15 nt, Human
ccucugggaaccucc

SEQ ID NO: 2829753 - RNA, 17 nt, Human
ccucugggaaccuccca

SEQ ID NO: 2829754 - RNA, 18 nt, Human
ccucugggaaccucccag

SEQ ID NO: 2829755 - RNA, 19 nt, Human
ccucugggaaccucccaga

SEQ ID NO: 2829756 - RNA, 20 nt, Human
ccucugggaaccucccagag

SEQ ID NO: 2829757 - RNA, 21 nt, Human
ccucugggaaccucccagagg

SEQ ID NO: 2829758 - RNA, 22 nt, Human
ccucugggaaccucccagaggu

SEQ ID NO: 2829759 - RNA, 23 nt, Human
ccucugggaaccucccagagguc

SEQ ID NO: 2829760 - RNA, 20 nt, Human
ccucugggucagugguccac

SEQ ID NO: 2829761 - RNA, 17 nt, Human
ccucugggucagugguc

SEQ ID NO: 2829762 - RNA, 17 nt, Human
ccucuggggcucuaggg

SEQ ID NO: 2829763 - RNA, 18 nt, Human
ccucuggggcucuagggu

SEQ ID NO: 2829764 - RNA, 23 nt, Human
ccucuggcuagaggccagcccca

SEQ ID NO: 2829765 - RNA, 22 nt, Human
ccucuggcuagaggccagcccc

SEQ ID NO: 2829766 - RNA, 13 nt, Human
ccucuggcuagag

SEQ ID NO: 2829767 - RNA, 12 nt, Human
ccucuggcuaga

SEQ ID NO: 2829768 - RNA, 17 nt, Human
ccucuggccgccuaggc

SEQ ID NO: 2829769 - RNA, 20 nt, Human
ccucuggccgccuaggcuca

SEQ ID NO: 2829770 - RNA, 24 nt, Human
ccucuggcuagaggccagccccac

SEQ ID NO: 2829771 - RNA, 17 nt, Human
ccucuggcuccagcugg

SEQ ID NO: 2829772 - RNA, 16 nt, Human
ccucuggcuccagcug

SEQ ID NO: 2829773 - RNA, 18 nt, Human
ccucugacacacagcucu

SEQ ID NO: 2829774 - RNA, 17 nt, Human
ccucugacacacagcuc

SEQ ID NO: 2829775 - RNA, 11 nt, Human
ccucuccugga

SEQ ID NO: 2829776 - RNA, 12 nt, Human
ccucuccuggag

SEQ ID NO: 2829777 - RNA, 13 nt, Human
ccucuccuggagg

SEQ ID NO: 2829778 - RNA, 14 nt, Human
ccucuccuggagga

SEQ ID NO: 2829779 - RNA, 15 nt, Human
ccucuccuggaggau

SEQ ID NO: 2829780 - RNA, 13 nt, Human
ccucucugcccua

SEQ ID NO: 2829781 - RNA, 12 nt, Human
ccucucccccuu

SEQ ID NO: 2829782 - RNA, 12 nt, Human
ccucuccccucc

SEQ ID NO: 2829783 - RNA, 13 nt, Human
ccucuccccucca

SEQ ID NO: 2829784 - RNA, 14 nt, Human
ccucuccccuccag

SEQ ID NO: 2829785 - RNA, 15 nt, Human
ccucuccccuccagc

SEQ ID NO: 2829786 - RNA, 16 nt, Human
ccucuccccuccagcc

SEQ ID NO: 2829787 - RNA, 17 nt, Human
ccucuccccuccagccu

SEQ ID NO: 2829788 - RNA, 15 nt, Human
ccucugacacacagc

SEQ ID NO: 2829789 - RNA, 16 nt, Human
ccucugacacacagcu

SEQ ID NO: 2829790 - RNA, 13 nt, Human
ccucucugggccu

SEQ ID NO: 2829791 - RNA, 16 nt, Human
ccucucugggccucag

SEQ ID NO: 2829792 - RNA, 10 nt, Human
ccucucuggu

SEQ ID NO: 2829793 - RNA, 12 nt, Human
ccucucuguccc

SEQ ID NO: 2829794 - RNA, 13 nt, Human
ccucucugucccu

SEQ ID NO: 2829795 - RNA, 17 nt, Human
ccucucugucccuugcu

SEQ ID NO: 2829796 - RNA, 19 nt, Human
ccucuccacugccuucgau

SEQ ID NO: 2829797 - RNA, 12 nt, Human
ccucucccaggg

SEQ ID NO: 2829798 - RNA, 12 nt, Human
ccucuccacugc

SEQ ID NO: 2829799 - RNA, 13 nt, Human
ccucuccacugcc

SEQ ID NO: 2829800 - RNA, 14 nt, Human
ccucuccacugccu

SEQ ID NO: 2829801 - RNA, 16 nt, Human
ccucuccacugccuuc

SEQ ID NO: 2829802 - RNA, 23 nt, Human
ccuccugugugugcgccuacagg

SEQ ID NO: 2829803 - RNA, 12 nt, Human
ccuccuucagac

SEQ ID NO: 2829804 - RNA, 16 nt, Human
ccucucacuaaacuuu

SEQ ID NO: 2829805 - RNA, 14 nt, Human
ccucucacucccca

SEQ ID NO: 2829806 - RNA, 17 nt, Human
ccuccuucaauuccaua

SEQ ID NO: 2829807 - RNA, 15 nt, Human
ccucucaccucugug

SEQ ID NO: 2829808 - RNA, 20 nt, Human
ccuccuuaucaaaggacacc

SEQ ID NO: 2829809 - RNA, 18 nt, Human
ccuccuuaucaaaggaca

SEQ ID NO: 2829810 - RNA, 23 nt, Human
ccucucaggauccaagcuaagca

SEQ ID NO: 2829811 - RNA, 13 nt, Human
ccucucagcucca

SEQ ID NO: 2829812 - RNA, 16 nt, Human
ccucucagcuccaggu

SEQ ID NO: 2829813 - RNA, 18 nt, Human
ccucucagcuccaggugg

SEQ ID NO: 2829814 - RNA, 15 nt, Human
ccucucaggagccau

SEQ ID NO: 2829815 - RNA, 15 nt, Human
ccucucaggauccaa

SEQ ID NO: 2829816 - RNA, 18 nt, Human
ccucucaggauccaagcu

SEQ ID NO: 2829817 - RNA, 21 nt, Human
ccugaauuuuguugcuguuuu

SEQ ID NO: 2829818 - RNA, 14 nt, Human
ccugaucugugaua

SEQ ID NO: 2829819 - RNA, 14 nt, Human
ccugaucucuuccu

SEQ ID NO: 2829820 - RNA, 15 nt, Human
ccugaucucuuccug

SEQ ID NO: 2829821 - RNA, 16 nt, Human
ccugaucucuuccugu

SEQ ID NO: 2829822 - RNA, 17 nt, Human
ccugaucucuuccuguu

SEQ ID NO: 2829823 - RNA, 20 nt, Human
ccugaucucuuccuguuuug

SEQ ID NO: 2829824 - RNA, 15 nt, Human
ccugauccugugaag

SEQ ID NO: 2829825 - RNA, 23 nt, Human
ccugaugcucccuccccugcccu

SEQ ID NO: 2829826 - RNA, 20 nt, Human
ccugaugcucccuccccugc

SEQ ID NO: 2829827 - RNA, 19 nt, Human
ccugaugcucccuccccug

SEQ ID NO: 2829828 - RNA, 16 nt, Human
ccugaugcucccuccc

SEQ ID NO: 2829829 - RNA, 14 nt, Human
ccugaugcucccuc

SEQ ID NO: 2829830 - RNA, 13 nt, Human
ccugaugcucccu

SEQ ID NO: 2829831 - RNA, 15 nt, Human
ccugaugcagucacg

SEQ ID NO: 2829832 - RNA, 16 nt, Human
ccugaugcagucacgu

SEQ ID NO: 2829833 - RNA, 21 nt, Human
ccugauguguccucagggagc

SEQ ID NO: 2829834 - RNA, 19 nt, Human
ccugauguguccucaggga

SEQ ID NO: 2829835 - RNA, 21 nt, Human
ccugaugguacaggaaagcuc

SEQ ID NO: 2829836 - RNA, 18 nt, Human
ccugaugguacaggaaag

SEQ ID NO: 2829837 - RNA, 20 nt, Human
ccugauggcaggauggccug

SEQ ID NO: 2829838 - RNA, 23 nt, Human
ccugauggcaggauggccuggcc

SEQ ID NO: 2829839 - RNA, 18 nt, Human
ccugaugcuuuugucuaa

SEQ ID NO: 2829840 - RNA, 19 nt, Human
ccugaugcuuuugucuaau

SEQ ID NO: 2829841 - RNA, 21 nt, Human
ccugauggaaguaaagccuca

SEQ ID NO: 2829842 - RNA, 17 nt, Human
ccugauggaccugucac

SEQ ID NO: 2829843 - RNA, 21 nt, Human
ccugauggcacuuagcuauca

SEQ ID NO: 2829844 - RNA, 13 nt, Human
ccugaaauuccaa

SEQ ID NO: 2829845 - RNA, 14 nt, Human
ccugaaauuccaaa

SEQ ID NO: 2829846 - RNA, 17 nt, Human
ccugaacaagaauugga

SEQ ID NO: 2829847 - RNA, 16 nt, Human
ccugaacaagaauugg

SEQ ID NO: 2829848 - RNA, 15 nt, Human
ccugaacaagaauug

SEQ ID NO: 2829849 - RNA, 13 nt, Human
ccugaacaagaau

SEQ ID NO: 2829850 - RNA, 15 nt, Human
ccugaaauuucagau

SEQ ID NO: 2829851 - RNA, 14 nt, Human
ccugaaauuucaga

SEQ ID NO: 2829852 - RNA, 14 nt, Human
ccugaaauuucacc

SEQ ID NO: 2829853 - RNA, 18 nt, Human
ccugaaauuccaaagucu

SEQ ID NO: 2829854 - RNA, 15 nt, Human
ccugaaauuccaaag

SEQ ID NO: 2829855 - RNA, 16 nt, Human
ccugaaauuccaaagu

SEQ ID NO: 2829856 - RNA, 22 nt, Human
ccucuuugucugcgugggucag

SEQ ID NO: 2829857 - RNA, 19 nt, Human
ccucuuuuguuaaauaaua

SEQ ID NO: 2829858 - RNA, 11 nt, Human
ccucuuuucuu

SEQ ID NO: 2829859 - RNA, 15 nt, Human
ccucuuuucuuacuc

SEQ ID NO: 2829860 - RNA, 20 nt, Human
ccucuuuucuuacuccuccu

SEQ ID NO: 2829861 - RNA, 21 nt, Human
ccucuuuucuuacuccuccuc

SEQ ID NO: 2829862 - RNA, 22 nt, Human
ccucuuuucuuacuccuccucu

SEQ ID NO: 2829863 - RNA, 15 nt, Human
ccucuuccucccuca

SEQ ID NO: 2829864 - RNA, 16 nt, Human
ccucuuccucccucau

SEQ ID NO: 2829865 - RNA, 19 nt, Human
ccucuuccucccucauucc

SEQ ID NO: 2829866 - RNA, 18 nt, Human
ccucuuccgugacgucac

SEQ ID NO: 2829867 - RNA, 13 nt, Human
ccucuucaccccc

SEQ ID NO: 2829868 - RNA, 17 nt, Human
ccucuucaccccccacu

SEQ ID NO: 2829869 - RNA, 17 nt, Human
ccucuucaccccggcag

SEQ ID NO: 2829870 - RNA, 20 nt, Human
ccucuucaccccggcaggcc

SEQ ID NO: 2829871 - RNA, 21 nt, Human
ccucuucaccccggcaggccc

SEQ ID NO: 2829872 - RNA, 22 nt, Human
ccucuucaccccggcaggcccu

SEQ ID NO: 2829873 - RNA, 23 nt, Human
ccucuucaccccggcaggcccug

SEQ ID NO: 2829874 - RNA, 13 nt, Human
ccucuucacuccc

SEQ ID NO: 2829875 - RNA, 14 nt, Human
ccucuucacucccc

SEQ ID NO: 2829876 - RNA, 17 nt, Human
ccugaagucacacagug

SEQ ID NO: 2829877 - RNA, 16 nt, Human
ccugaagucacacagu

SEQ ID NO: 2829878 - RNA, 15 nt, Human
ccugaagucacacag

SEQ ID NO: 2829879 - RNA, 23 nt, Human
ccugaauguauugaacuuggaaa

SEQ ID NO: 2829880 - RNA, 21 nt, Human
ccugaauguuuaaagaucaug

SEQ ID NO: 2829881 - RNA, 15 nt, Human
ccugaauucuuuuuc

SEQ ID NO: 2829882 - RNA, 22 nt, Human
ccugaaucccccuugccacccc

SEQ ID NO: 2829883 - RNA, 21 nt, Human
ccugaaggaacauuccuuagu

SEQ ID NO: 2829884 - RNA, 19 nt, Human
ccugaaucccccuugccac

SEQ ID NO: 2829885 - RNA, 20 nt, Human
ccugaaucccccuugccacc

SEQ ID NO: 2829886 - RNA, 21 nt, Human
ccugaagacucauucuucugu

SEQ ID NO: 2829887 - RNA, 18 nt, Human
ccugaagaauuaagauac

SEQ ID NO: 2829888 - RNA, 21 nt, Human
ccugaacaagaauuggaagcu

SEQ ID NO: 2829889 - RNA, 15 nt, Human
ccugaaccgcacagc

SEQ ID NO: 2829890 - RNA, 22 nt, Human
ccugaacagcauggcacucccu

SEQ ID NO: 2829891 - RNA, 23 nt, Human
ccugaacagcauggcacucccuc

SEQ ID NO: 2829892 - RNA, 20 nt, Human
ccugaaccgcacagcucagg

SEQ ID NO: 2829893 - RNA, 18 nt, Human
ccugaaccgcacagcuca

SEQ ID NO: 2829894 - RNA, 16 nt, Human
ccugaaccgcacagcu

SEQ ID NO: 2829895 - RNA, 22 nt, Human
ccugaaccgcacagcucaggag

SEQ ID NO: 2829896 - RNA, 21 nt, Human
ccugaaccgcacagcucagga

SEQ ID NO: 2829897 - RNA, 14 nt, Human
ccugaagaacagua

SEQ ID NO: 2829898 - RNA, 23 nt, Human
ccucuuaaagcugccuguaguua

SEQ ID NO: 2829899 - RNA, 19 nt, Human
ccucuuacgguaguuagga

SEQ ID NO: 2829900 - RNA, 16 nt, Human
ccucuuacuaauguaa

SEQ ID NO: 2829901 - RNA, 22 nt, Human
ccucuuaaagcugccuguaguu

SEQ ID NO: 2829902 - RNA, 21 nt, Human
ccucuuaaagcugccuguagu

SEQ ID NO: 2829903 - RNA, 20 nt, Human
ccucuuaaagcugccuguag

SEQ ID NO: 2829904 - RNA, 19 nt, Human
ccucuuaaagcugccugua

SEQ ID NO: 2829905 - RNA, 17 nt, Human
ccucuuaaagcugccug

SEQ ID NO: 2829906 - RNA, 20 nt, Human
ccucugucuucagcacccuc

SEQ ID NO: 2829907 - RNA, 14 nt, Human
ccucugucugcccu

SEQ ID NO: 2829908 - RNA, 16 nt, Human
ccucugucugcccuuc

SEQ ID NO: 2829909 - RNA, 22 nt, Human
ccucugucugcccuucacccca

SEQ ID NO: 2829910 - RNA, 22 nt, Human
ccucugucuugugaaggcaggg

SEQ ID NO: 2829911 - RNA, 14 nt, Human
ccucugugccuucu

SEQ ID NO: 2829912 - RNA, 17 nt, Human
ccucugugaccucaggc

SEQ ID NO: 2829913 - RNA, 23 nt, Human
ccucugugaggaaagcacacagu

SEQ ID NO: 2829914 - RNA, 15 nt, Human
ccucugugaccucag

SEQ ID NO: 2829915 - RNA, 23 nt, Human
ccucuguggcauugaaaugagca

SEQ ID NO: 2829916 - RNA, 16 nt, Human
ccucuguggugucugc

SEQ ID NO: 2829917 - RNA, 17 nt, Human
ccucuguggugucugcc

SEQ ID NO: 2829918 - RNA, 21 nt, Human
ccucugugccuucuuuugauu

SEQ ID NO: 2829919 - RNA, 16 nt, Human
ccucugugaccucagg

SEQ ID NO: 2829920 - RNA, 13 nt, Human
ccucuguguccuu

SEQ ID NO: 2829921 - RNA, 19 nt, Human
ccucuguguccuucccugc

SEQ ID NO: 2829922 - RNA, 20 nt, Human
ccucuguguccuucccugca

SEQ ID NO: 2829923 - RNA, 21 nt, Human
ccucuguucugcacacagcac

SEQ ID NO: 2829924 - RNA, 19 nt, Human
ccucugugugcuccuccuu

SEQ ID NO: 2829925 - RNA, 13 nt, Human
ccucugucugccc

SEQ ID NO: 2829926 - RNA, 22 nt, Human
ccucugucucauccuccuggaa

SEQ ID NO: 2829927 - RNA, 23 nt, Human
ccucugucucauccuccuggaac

SEQ ID NO: 2829928 - RNA, 24 nt, Human
ccucugucucauccuccuggaacc

SEQ ID NO: 2829929 - RNA, 17 nt, Human
ccucuguccaggcacug

SEQ ID NO: 2829930 - RNA, 14 nt, Human
ccucugucauuugu

SEQ ID NO: 2829931 - RNA, 15 nt, Human
ccucugucauuuguu

SEQ ID NO: 2829932 - RNA, 16 nt, Human
ccucugucauuuguug

SEQ ID NO: 2829933 - RNA, 19 nt, Human
ccucugguucuucauuuau

SEQ ID NO: 2829934 - RNA, 17 nt, Human
ccucuguaccccaugac

SEQ ID NO: 2829935 - RNA, 19 nt, Human
ccucuguaccccaugaccu

SEQ ID NO: 2829936 - RNA, 17 nt, Human
ccucuguccugcuucug

SEQ ID NO: 2829937 - RNA, 18 nt, Human
ccucuguccugcuucuga

SEQ ID NO: 2829938 - RNA, 15 nt, Human
ccucugucuagcaug

SEQ ID NO: 2829939 - RNA, 16 nt, Human
ccucugucuagcaugc

SEQ ID NO: 2829940 - RNA, 17 nt, Human
ccucugucuagcaugcc

SEQ ID NO: 2829941 - RNA, 20 nt, Human
ccucugucuagcaugccaac

SEQ ID NO: 2829942 - RNA, 21 nt, Human
ccucugucuagcaugccaaca

SEQ ID NO: 2829943 - RNA, 11 nt, Human
ccucugucuca

SEQ ID NO: 2829944 - RNA, 12 nt, Human
ccucugucucau

SEQ ID NO: 2829945 - RNA, 14 nt, Human
ccucugucucaucc

SEQ ID NO: 2829946 - RNA, 15 nt, Human
ccucugucucauccu

SEQ ID NO: 2829947 - RNA, 18 nt, Human
ccucugucucauccuccu

SEQ ID NO: 2829948 - RNA, 20 nt, Human
ccucugucucauccuccugg

SEQ ID NO: 2829949 - RNA, 16 nt, Human
cccuuccucuccacug

SEQ ID NO: 2829950 - RNA, 17 nt, Human
cccuuccucuccacugc

SEQ ID NO: 2829951 - RNA, 20 nt, Human
cccuuccucuccacugccuu

SEQ ID NO: 2829952 - RNA, 15 nt, Human
cccuugaugcacaga

SEQ ID NO: 2829953 - RNA, 16 nt, Human
cccuugaugcacagag

SEQ ID NO: 2829954 - RNA, 19 nt, Human
cccuugaugcacagagaag

SEQ ID NO: 2829955 - RNA, 19 nt, Human
cccuugauuuaaacacaca

SEQ ID NO: 2829956 - RNA, 20 nt, Human
cccuugauuuaaacacacag

SEQ ID NO: 2829957 - RNA, 21 nt, Human
cccuugauuuaaacacacaga

SEQ ID NO: 2829958 - RNA, 21 nt, Human
cccuuaccacugcucugauga

SEQ ID NO: 2829959 - RNA, 17 nt, Human
cccuuaccacugcucug

SEQ ID NO: 2829960 - RNA, 22 nt, Human
cccuuaccccuuagccucccug

SEQ ID NO: 2829961 - RNA, 21 nt, Human
cccuuacccuuuccuccuuua

SEQ ID NO: 2829962 - RNA, 21 nt, Human
cccuuccuaauuccacagcug

SEQ ID NO: 2829963 - RNA, 17 nt, Human
cccuuaccccuuagccu

SEQ ID NO: 2829964 - RNA, 13 nt, Human
cccuuccucucca

SEQ ID NO: 2829965 - RNA, 13 nt, Human
cccuuccuccucc

SEQ ID NO: 2829966 - RNA, 14 nt, Human
cccuuccuccucca

SEQ ID NO: 2829967 - RNA, 19 nt, Human
cccuuccuccuccaccacc

SEQ ID NO: 2829968 - RNA, 23 nt, Human
cccuuccuccuccaccaccgccc

SEQ ID NO: 2829969 - RNA, 10 nt, Human
cccuuccucu

SEQ ID NO: 2829970 - RNA, 22 nt, Human
cccuugcacuaaaguauguaaa

SEQ ID NO: 2829971 - RNA, 16 nt, Human
cccuugcagcuaguuu

SEQ ID NO: 2829972 - RNA, 19 nt, Human
cccuugcaguucagcacca

SEQ ID NO: 2829973 - RNA, 19 nt, Human
cccuugcagcuaguuuucu

SEQ ID NO: 2829974 - RNA, 23 nt, Human
cccuugcaguucagcaccacccu

SEQ ID NO: 2829975 - RNA, 21 nt, Human
cccuugcaguucagcaccacc

SEQ ID NO: 2829976 - RNA, 13 nt, Human
cccuugccacccc

SEQ ID NO: 2829977 - RNA, 16 nt, Human
cccuuggccugucuca

SEQ ID NO: 2829978 - RNA, 19 nt, Human
cccuugggccaccccuccu

SEQ ID NO: 2829979 - RNA, 12 nt, Human
cccuugggccac

SEQ ID NO: 2829980 - RNA, 18 nt, Human
cccuuggcuucugugaug

SEQ ID NO: 2829981 - RNA, 16 nt, Human
cccuuggcuucuguga

SEQ ID NO: 2829982 - RNA, 23 nt, Human
cccuuggcugugaggccccugga

SEQ ID NO: 2829983 - RNA, 15 nt, Human
cccuuggcucaaucc

SEQ ID NO: 2829984 - RNA, 19 nt, Human
cccuuggccugucucaucc

SEQ ID NO: 2829985 - RNA, 22 nt, Human
cccuuggcugugaggccccugg

SEQ ID NO: 2829986 - RNA, 14 nt, Human
cccuuggcugugag

SEQ ID NO: 2829987 - RNA, 14 nt, Human
cccuuucccucgcu

SEQ ID NO: 2829988 - RNA, 15 nt, Human
cccuuucccucgcua

SEQ ID NO: 2829989 - RNA, 18 nt, Human
cccuuuccuuccaucccu

SEQ ID NO: 2829990 - RNA, 14 nt, Human
cccuuuccuuccua

SEQ ID NO: 2829991 - RNA, 15 nt, Human
cccuuuccuuccauc

SEQ ID NO: 2829992 - RNA, 13 nt, Human
cccuuuccuucca

SEQ ID NO: 2829993 - RNA, 15 nt, Human
cccuuugaagccuca

SEQ ID NO: 2829994 - RNA, 17 nt, Human
cccuuugaagccucagc

SEQ ID NO: 2829995 - RNA, 18 nt, Human
cccuuugaagccucagcu

SEQ ID NO: 2829996 - RNA, 21 nt, Human
cccuuugaagccucagcuacc

SEQ ID NO: 2829997 - RNA, 22 nt, Human
cccuuucugggcaccggggccu

SEQ ID NO: 2829998 - RNA, 12 nt, Human
cccuuucugugu

SEQ ID NO: 2829999 - RNA, 14 nt, Human
cccuuucuggcucu

SEQ ID NO: 2830000 - RNA, 17 nt, Human
cccuuucuugacaaaac

SEQ ID NO: 2830001 - RNA, 13 nt, Human
cccuuugggcccu

SEQ ID NO: 2830002 - RNA, 15 nt, Human
cccuuugggcccugc

SEQ ID NO: 2830003 - RNA, 16 nt, Human
cccuuugggcccugca

SEQ ID NO: 2830004 - RNA, 17 nt, Human
cccuuugggcccugcau

SEQ ID NO: 2830005 - RNA, 18 nt, Human
cccuuugggcccugcaug

SEQ ID NO: 2830006 - RNA, 19 nt, Human
cccuuugggcccugcaugu

SEQ ID NO: 2830007 - RNA, 20 nt, Human
cccuuugggcccugcaugua

SEQ ID NO: 2830008 - RNA, 22 nt, Human
cccuuugggcccugcauguagu

SEQ ID NO: 2830009 - RNA, 13 nt, Human
cccuuuuauacua

SEQ ID NO: 2830010 - RNA, 19 nt, Human
cccuuuguuucuuguuuau

SEQ ID NO: 2830011 - RNA, 23 nt, Human
cccuuuggagaugcugagggugu

SEQ ID NO: 2830012 - RNA, 21 nt, Human
cccuuugcaucguccccuccc

SEQ ID NO: 2830013 - RNA, 15 nt, Human
cccuuuuucuccagc

SEQ ID NO: 2830014 - RNA, 20 nt, Human
cccuuuuguugagccaggcc

SEQ ID NO: 2830015 - RNA, 16 nt, Human
cccuuuuucuccagcu

SEQ ID NO: 2830016 - RNA, 17 nt, Human
cccuuugucuuucaaac

SEQ ID NO: 2830017 - RNA, 17 nt, Human
ccgaggccuucucugaa

SEQ ID NO: 2830018 - RNA, 17 nt, Human
ccgagcuccagagcaac

SEQ ID NO: 2830019 - RNA, 18 nt, Human
ccgagaucacgccacugc

SEQ ID NO: 2830020 - RNA, 21 nt, Human
ccgagcaaagaucaaaauaaa

SEQ ID NO: 2830021 - RNA, 23 nt, Human
ccgagcaaagaucaaaauaaaaa

SEQ ID NO: 2830022 - RNA, 22 nt, Human
ccgagcaauauuuauggaugca

SEQ ID NO: 2830023 - RNA, 13 nt, Human
ccgagucugggac

SEQ ID NO: 2830024 - RNA, 14 nt, Human
ccgagucugggaca

SEQ ID NO: 2830025 - RNA, 17 nt, Human
ccgagucugggacacaa

SEQ ID NO: 2830026 - RNA, 22 nt, Human
ccgagucugggacacaaaacuc

SEQ ID NO: 2830027 - RNA, 21 nt, Human
ccgagucucuucuccacugga

SEQ ID NO: 2830028 - RNA, 16 nt, Human
ccgaggguccuggcuc

SEQ ID NO: 2830029 - RNA, 22 nt, Human
ccgagucucuucuccacuggau

SEQ ID NO: 2830030 - RNA, 13 nt, Human
ccgcccucuuccu

SEQ ID NO: 2830031 - RNA, 14 nt, Human
ccgcccucuuccug

SEQ ID NO: 2830032 - RNA, 15 nt, Human
ccgcccucuuccuga

SEQ ID NO: 2830033 - RNA, 18 nt, Human
ccgccccuucccuucccu

SEQ ID NO: 2830034 - RNA, 13 nt, Human
ccgccccugcagc

SEQ ID NO: 2830035 - RNA, 14 nt, Human
ccgccccugcagca

SEQ ID NO: 2830036 - RNA, 16 nt, Human
ccgccccugcagcacg

SEQ ID NO: 2830037 - RNA, 17 nt, Human
ccgccccugcagcacgg

SEQ ID NO: 2830038 - RNA, 17 nt, Human
ccgccccugccugccau

SEQ ID NO: 2830039 - RNA, 19 nt, Human
cccugguggcagugggagc

SEQ ID NO: 2830040 - RNA, 16 nt, Human
cccugguggcaguggg

SEQ ID NO: 2830041 - RNA, 15 nt, Human
cccugguggcagugg

SEQ ID NO: 2830042 - RNA, 21 nt, Human
cccugguuuccugcccuggga

SEQ ID NO: 2830043 - RNA, 21 nt, Human
cccugguggcagugggagcug

SEQ ID NO: 2830044 - RNA, 13 nt, Human
ccccuccccugcu

SEQ ID NO: 2830045 - RNA, 15 nt, Human
ccccuccccugcugc

SEQ ID NO: 2830046 - RNA, 18 nt, Human
ccccucccccaaccccca

SEQ ID NO: 2830047 - RNA, 16 nt, Human
ccccucccccaacccc

SEQ ID NO: 2830048 - RNA, 21 nt, Human
ccccucccccaacccccaccc

SEQ ID NO: 2830049 - RNA, 14 nt, Human
ccccucccagggcc

SEQ ID NO: 2830050 - RNA, 13 nt, Human
ccccuagcccagg

SEQ ID NO: 2830051 - RNA, 17 nt, Human
ccccuagcccaggagag

SEQ ID NO: 2830052 - RNA, 15 nt, Human
ccccucccccaaccc

SEQ ID NO: 2830053 - RNA, 12 nt, Human
ccccuagcccag

SEQ ID NO: 2830054 - RNA, 13 nt, Human
ccccuagaaaccc

SEQ ID NO: 2830055 - RNA, 16 nt, Human
ccccuagaaacccaag

SEQ ID NO: 2830056 - RNA, 17 nt, Human
ccccuagaaacccaagc

SEQ ID NO: 2830057 - RNA, 18 nt, Human
ccccuagaaacccaagcu

SEQ ID NO: 2830058 - RNA, 19 nt, Human
ccccuagaaacccaagcuc

SEQ ID NO: 2830059 - RNA, 21 nt, Human
ccccuagaaacccaagcuccu

SEQ ID NO: 2830060 - RNA, 17 nt, Human
ccccuaaaccccugucc

SEQ ID NO: 2830061 - RNA, 16 nt, Human
ccccguuacagcuccc

SEQ ID NO: 2830062 - RNA, 21 nt, Human
ccccguuccugacaucacagc

SEQ ID NO: 2830063 - RNA, 20 nt, Human
ccccguggccaucccuguga

SEQ ID NO: 2830064 - RNA, 22 nt, Human
ccccguggccaucccugugagg

SEQ ID NO: 2830065 - RNA, 13 nt, Human
ccccgucucuguu

SEQ ID NO: 2830066 - RNA, 17 nt, Human
ccccuaccccuggcugu

SEQ ID NO: 2830067 - RNA, 15 nt, Human
ccccuacgcgccuug

SEQ ID NO: 2830068 - RNA, 18 nt, Human
ccccuacgcgccuugucu

SEQ ID NO: 2830069 - RNA, 17 nt, Human
cccugucccucccaccu

SEQ ID NO: 2830070 - RNA, 18 nt, Human
cccugucccucccaccuc

SEQ ID NO: 2830071 - RNA, 19 nt, Human
cccugucccucccaccucu

SEQ ID NO: 2830072 - RNA, 20 nt, Human
cccugucccucccaccucug

SEQ ID NO: 2830073 - RNA, 20 nt, Human
cccuguccccucccccuucc

SEQ ID NO: 2830074 - RNA, 10 nt, Human
cccugucccu

SEQ ID NO: 2830075 - RNA, 12 nt, Human
cccugucccucc

SEQ ID NO: 2830076 - RNA, 13 nt, Human
cccugucccuccc

SEQ ID NO: 2830077 - RNA, 14 nt, Human
cccugucccuccca

SEQ ID NO: 2830078 - RNA, 15 nt, Human
cccugucccucccac

SEQ ID NO: 2830079 - RNA, 16 nt, Human
cccugucccucccacc

SEQ ID NO: 2830080 - RNA, 13 nt, Human
cccugucccaugc

SEQ ID NO: 2830081 - RNA, 14 nt, Human
cccugucccaugca

SEQ ID NO: 2830082 - RNA, 15 nt, Human
cccugucccaugcag

SEQ ID NO: 2830083 - RNA, 17 nt, Human
cccugucccaugcaggc

SEQ ID NO: 2830084 - RNA, 19 nt, Human
cccugucccaugcaggccc

SEQ ID NO: 2830085 - RNA, 20 nt, Human
cccugucccaugcaggcccu

SEQ ID NO: 2830086 - RNA, 21 nt, Human
cccugucccaugcaggcccuu

SEQ ID NO: 2830087 - RNA, 23 nt, Human
cccugucccaugcaggcccuuug

SEQ ID NO: 2830088 - RNA, 19 nt, Human
cccuguaccuuuugaggag

SEQ ID NO: 2830089 - RNA, 16 nt, Human
cccuguaccucauccc

SEQ ID NO: 2830090 - RNA, 17 nt, Human
cccuguaccucauccca

SEQ ID NO: 2830091 - RNA, 20 nt, Human
cccuguaccucaucccauga

SEQ ID NO: 2830092 - RNA, 22 nt, Human
cccuguaccucaucccaugaga

SEQ ID NO: 2830093 - RNA, 18 nt, Human
cccuguacuguucugugu

SEQ ID NO: 2830094 - RNA, 18 nt, Human
ccccuccccugcugcagg

SEQ ID NO: 2830095 - RNA, 17 nt, Human
ccccucccgccccuucc

SEQ ID NO: 2830096 - RNA, 23 nt, Human
cccugguuuccugcccugggagg

SEQ ID NO: 2830097 - RNA, 22 nt, Human
cccugguuuccugcccugggag

SEQ ID NO: 2830098 - RNA, 21 nt, Human
cccuguuuaauauuuaaacag

SEQ ID NO: 2830099 - RNA, 17 nt, Human
cccuguuucaaucacug

SEQ ID NO: 2830100 - RNA, 19 nt, Human
cccuguuucaaucacuguc

SEQ ID NO: 2830101 - RNA, 17 nt, Human
cccuuaagcccuggccc

SEQ ID NO: 2830102 - RNA, 20 nt, Human
cccuuaagucacccuagccc

SEQ ID NO: 2830103 - RNA, 18 nt, Human
cccuuaauuacuuaaaaa

SEQ ID NO: 2830104 - RNA, 19 nt, Human
cccuuaauuacuuaaaaaa

SEQ ID NO: 2830105 - RNA, 20 nt, Human
cccuuaauuacuuaaaaaaa

SEQ ID NO: 2830106 - RNA, 21 nt, Human
cccugucccucccaccucugu

SEQ ID NO: 2830107 - RNA, 22 nt, Human
cccugucccucccaccucugug

SEQ ID NO: 2830108 - RNA, 19 nt, Human
cccuguguauacagcccug

SEQ ID NO: 2830109 - RNA, 19 nt, Human
cccuguguccaccuguggg

SEQ ID NO: 2830110 - RNA, 21 nt, Human
cccuguguccaccugugggug

SEQ ID NO: 2830111 - RNA, 13 nt, Human
cccuguugugcca

SEQ ID NO: 2830112 - RNA, 16 nt, Human
cccuguugugccacag

SEQ ID NO: 2830113 - RNA, 11 nt, Human
cccuguuuaau

SEQ ID NO: 2830114 - RNA, 14 nt, Human
cccuguuuaauauu

SEQ ID NO: 2830115 - RNA, 16 nt, Human
cccuguuuaauauuua

SEQ ID NO: 2830116 - RNA, 17 nt, Human
cccuguuuaauauuuaa

SEQ ID NO: 2830117 - RNA, 18 nt, Human
cccuguuuaauauuuaaa

SEQ ID NO: 2830118 - RNA, 19 nt, Human
cccuguuuaauauuuaaac

SEQ ID NO: 2830119 - RNA, 19 nt, Human
ccccagcccuccuuaucaa

SEQ ID NO: 2830120 - RNA, 19 nt, Human
ccccagcccuggcucugca

SEQ ID NO: 2830121 - RNA, 13 nt, Human
ccccagcccuggc

SEQ ID NO: 2830122 - RNA, 16 nt, Human
ccccagcccuggcucu

SEQ ID NO: 2830123 - RNA, 14 nt, Human
ccccagccucuggc

SEQ ID NO: 2830124 - RNA, 15 nt, Human
ccccagccucuggca

SEQ ID NO: 2830125 - RNA, 14 nt, Human
ccccagccuaugag

SEQ ID NO: 2830126 - RNA, 22 nt, Human
ccccagccuaugagcauccuga

SEQ ID NO: 2830127 - RNA, 23 nt, Human
ccccagccuaugagcauccugag

SEQ ID NO: 2830128 - RNA, 16 nt, Human
ccccagccucuggcau

SEQ ID NO: 2830129 - RNA, 18 nt, Human
ccccagcgucccagucuc

SEQ ID NO: 2830130 - RNA, 15 nt, Human
ccccacugacagccu

SEQ ID NO: 2830131 - RNA, 21 nt, Human
ccccacugacagccucccacc

SEQ ID NO: 2830132 - RNA, 15 nt, Human
ccccacugccagcag

SEQ ID NO: 2830133 - RNA, 11 nt, Human
ccccacugaug

SEQ ID NO: 2830134 - RNA, 13 nt, Human
ccccacugaugcu

SEQ ID NO: 2830135 - RNA, 14 nt, Human
ccccacugaugcug

SEQ ID NO: 2830136 - RNA, 15 nt, Human
ccccacugaugcugu

SEQ ID NO: 2830137 - RNA, 19 nt, Human
ccccacugaugcuguucuc

SEQ ID NO: 2830138 - RNA, 22 nt, Human
ccccacugccagcagcagcagg

SEQ ID NO: 2830139 - RNA, 19 nt, Human
ccccacugccagcagcagc

SEQ ID NO: 2830140 - RNA, 17 nt, Human
ccccacugccagcagca

SEQ ID NO: 2830141 - RNA, 16 nt, Human
ccccacugccagcagc

SEQ ID NO: 2830142 - RNA, 20 nt, Human
ccccaggaauuugggacccu

SEQ ID NO: 2830143 - RNA, 18 nt, Human
ccccaggaagcccaggag

SEQ ID NO: 2830144 - RNA, 14 nt, Human
ccccagcugugagc

SEQ ID NO: 2830145 - RNA, 15 nt, Human
ccccagcugugagcc

SEQ ID NO: 2830146 - RNA, 16 nt, Human
ccccagcugugagccu

SEQ ID NO: 2830147 - RNA, 19 nt, Human
ccccagcugugagccuugg

SEQ ID NO: 2830148 - RNA, 21 nt, Human
ccccagcugugagccuuggcu

SEQ ID NO: 2830149 - RNA, 23 nt, Human
ccccagcgucccagucucuggca

SEQ ID NO: 2830150 - RNA, 11 nt, Human
ccccagcuacc

SEQ ID NO: 2830151 - RNA, 22 nt, Human
ccccagcuacccuuuuucucca

SEQ ID NO: 2830152 - RNA, 14 nt, Human
ccccagcucaaugg

SEQ ID NO: 2830153 - RNA, 13 nt, Human
ccccagcucaggg

SEQ ID NO: 2830154 - RNA, 14 nt, Human
ccccagcucagggg

SEQ ID NO: 2830155 - RNA, 16 nt, Human
ccccagcucaggggca

SEQ ID NO: 2830156 - RNA, 17 nt, Human
ccccagcucaggggcag

SEQ ID NO: 2830157 - RNA, 21 nt, Human
ccccagcucaggggcagcuca

SEQ ID NO: 2830158 - RNA, 20 nt, Human
cccccaacucugagcccaug

SEQ ID NO: 2830159 - RNA, 21 nt, Human
cccccaacuugagauguauga

SEQ ID NO: 2830160 - RNA, 19 nt, Human
cccccaagcuguuuucuuc

SEQ ID NO: 2830161 - RNA, 23 nt, Human
cccccaaccaaguggcucccaca

SEQ ID NO: 2830162 - RNA, 11 nt, Human
ccccaggccca

SEQ ID NO: 2830163 - RNA, 16 nt, Human
ccccaggcccacucag

SEQ ID NO: 2830164 - RNA, 17 nt, Human
ccccaggcccacucagg

SEQ ID NO: 2830165 - RNA, 12 nt, Human
cccccagccuau

SEQ ID NO: 2830166 - RNA, 13 nt, Human
cccccagccuaug

SEQ ID NO: 2830167 - RNA, 23 nt, Human
cccccagcuuugcuaccaaagca

SEQ ID NO: 2830168 - RNA, 13 nt, Human
cccccaggaagcc

SEQ ID NO: 2830169 - RNA, 12 nt, Human
cccccagcccaa

SEQ ID NO: 2830170 - RNA, 15 nt, Human
cccccagcccaaagg

SEQ ID NO: 2830171 - RNA, 20 nt, Human
cccccagguuccgaagaaga

SEQ ID NO: 2830172 - RNA, 16 nt, Human
cccccaucucuucugg

SEQ ID NO: 2830173 - RNA, 22 nt, Human
cccccauguuguaaugcugcac

SEQ ID NO: 2830174 - RNA, 23 nt, Human
cccccauguuguaaugcugcacu

SEQ ID NO: 2830175 - RNA, 17 nt, Human
cccccauucucaucugc

SEQ ID NO: 2830176 - RNA, 20 nt, Human
cccccauucucaucugcacc

SEQ ID NO: 2830177 - RNA, 16 nt, Human
cccccaucuucgggac

SEQ ID NO: 2830178 - RNA, 21 nt, Human
cccccaucuucgggaccagga

SEQ ID NO: 2830179 - RNA, 18 nt, Human
cccccaucuucgggacca

SEQ ID NO: 2830180 - RNA, 12 nt, Human
cccccccuucca

SEQ ID NO: 2830181 - RNA, 13 nt, Human
cccccccuuccac

SEQ ID NO: 2830182 - RNA, 13 nt, Human
cccccccaugcag

SEQ ID NO: 2830183 - RNA, 12 nt, Human
ccccccagccuc

SEQ ID NO: 2830184 - RNA, 13 nt, Human
ccccccagccucu

SEQ ID NO: 2830185 - RNA, 12 nt, Human
ccccccagcuca

SEQ ID NO: 2830186 - RNA, 11 nt, Human
ccccccacucu

SEQ ID NO: 2830187 - RNA, 12 nt, Human
ccccccacucuc

SEQ ID NO: 2830188 - RNA, 13 nt, Human
cccccggcccccu

SEQ ID NO: 2830189 - RNA, 14 nt, Human
cccccggcccccug

SEQ ID NO: 2830190 - RNA, 15 nt, Human
cccccggcccccugg

SEQ ID NO: 2830191 - RNA, 17 nt, Human
cccccucucaggagcca

SEQ ID NO: 2830192 - RNA, 11 nt, Human
ccccccuucca

SEQ ID NO: 2830193 - RNA, 12 nt, Human
ccccccuuccac

SEQ ID NO: 2830194 - RNA, 13 nt, Human
ccccccuuccacu

SEQ ID NO: 2830195 - RNA, 12 nt, Human
ccccccucuguc

SEQ ID NO: 2830196 - RNA, 12 nt, Human
ccccccucccag

SEQ ID NO: 2830197 - RNA, 14 nt, Human
ccccccucccagag

SEQ ID NO: 2830198 - RNA, 13 nt, Human
cccccgcccccug

SEQ ID NO: 2830199 - RNA, 14 nt, Human
cccccgcccccugc

SEQ ID NO: 2830200 - RNA, 16 nt, Human
cccccgcccccugccc

SEQ ID NO: 2830201 - RNA, 12 nt, Human
cccccgcccccu

SEQ ID NO: 2830202 - RNA, 12 nt, Human
cccccgccacuc

SEQ ID NO: 2830203 - RNA, 18 nt, Human
cccccugcuggcucuucu

SEQ ID NO: 2830204 - RNA, 20 nt, Human
cccccugcuggcucuucugc

SEQ ID NO: 2830205 - RNA, 15 nt, Human
cccccuggccucugu

SEQ ID NO: 2830206 - RNA, 19 nt, Human
cccccuggccucugugccu

SEQ ID NO: 2830207 - RNA, 22 nt, Human
cccccuggccucugugccuucu

SEQ ID NO: 2830208 - RNA, 10 nt, Human
cccccugggc

SEQ ID NO: 2830209 - RNA, 21 nt, Human
ccccgucucugguuccucccc

SEQ ID NO: 2830210 - RNA, 20 nt, Human
ccccgucccccucuggcucc

SEQ ID NO: 2830211 - RNA, 16 nt, Human
ccccgucccccucugg

SEQ ID NO: 2830212 - RNA, 12 nt, Human
cccccugcuggc

SEQ ID NO: 2830213 - RNA, 15 nt, Human
cccccugcuggcucu

SEQ ID NO: 2830214 - RNA, 13 nt, Human
cccccugcccucc

SEQ ID NO: 2830215 - RNA, 21 nt, Human
cccccugccccccagccucug

SEQ ID NO: 2830216 - RNA, 16 nt, Human
cccccucugcccugcg

SEQ ID NO: 2830217 - RNA, 22 nt, Human
cccccugccccccagccucugg

SEQ ID NO: 2830218 - RNA, 14 nt, Human
cccccucugcccug

SEQ ID NO: 2830219 - RNA, 13 nt, Human
cccccucugcccu

SEQ ID NO: 2830220 - RNA, 15 nt, Human
ccgggcacucagaag

SEQ ID NO: 2830221 - RNA, 12 nt, Human
ccggcugcccuu

SEQ ID NO: 2830222 - RNA, 14 nt, Human
ccggacccaccuca

SEQ ID NO: 2830223 - RNA, 16 nt, Human
ccggaaugccacccac

SEQ ID NO: 2830224 - RNA, 16 nt, Human
ccggacacuccuagag

SEQ ID NO: 2830225 - RNA, 20 nt, Human
ccggaaugccacccacaucu

SEQ ID NO: 2830226 - RNA, 17 nt, Human
ccggacacuccuagaga

SEQ ID NO: 2830227 - RNA, 23 nt, Human
ccgcuuucuacccagcgagcccu

SEQ ID NO: 2830228 - RNA, 13 nt, Human
ccgcuuuggccug

SEQ ID NO: 2830229 - RNA, 14 nt, Human
ccgcuuuggccuga

SEQ ID NO: 2830230 - RNA, 16 nt, Human
ccgcuuuggccugagu

SEQ ID NO: 2830231 - RNA, 19 nt, Human
ccgcuuuuguucucgcaaa

SEQ ID NO: 2830232 - RNA, 19 nt, Human
ccgcuugaaaagcuagugu

SEQ ID NO: 2830233 - RNA, 23 nt, Human
ccgcuugaaaagcuaguguaccu

SEQ ID NO: 2830234 - RNA, 15 nt, Human
ccgcuucccuauuua

SEQ ID NO: 2830235 - RNA, 16 nt, Human
ccgcuucccuccugcc

SEQ ID NO: 2830236 - RNA, 20 nt, Human
ccgcugugagccccuggucc

SEQ ID NO: 2830237 - RNA, 15 nt, Human
ccgcugugagccccu

SEQ ID NO: 2830238 - RNA, 18 nt, Human
ccgcugugagccccuggu

SEQ ID NO: 2830239 - RNA, 19 nt, Human
ccgcugugagccccugguc

SEQ ID NO: 2830240 - RNA, 16 nt, Human
ccgcuguaagcuccuu

SEQ ID NO: 2830241 - RNA, 18 nt, Human
ccgcuguaagcuccuuug

SEQ ID NO: 2830242 - RNA, 20 nt, Human
ccgcuguaagcuccuuugug

SEQ ID NO: 2830243 - RNA, 16 nt, Human
ccgugccuucagcucu

SEQ ID NO: 2830244 - RNA, 17 nt, Human
ccgugccuucagcucua

SEQ ID NO: 2830245 - RNA, 19 nt, Human
ccgggcgcggccagccccg

SEQ ID NO: 2830246 - RNA, 15 nt, Human
ccgggcgcggccagc

SEQ ID NO: 2830247 - RNA, 17 nt, Human
ccgggcgcggccagccc

SEQ ID NO: 2830248 - RNA, 17 nt, Human
ccgugccgccugcacuc

SEQ ID NO: 2830249 - RNA, 14 nt, Human
ccgugccgccugca

SEQ ID NO: 2830250 - RNA, 21 nt, Human
ccgugccgccugcacuccuca

SEQ ID NO: 2830251 - RNA, 14 nt, Human
ccgugccuucagcu

SEQ ID NO: 2830252 - RNA, 15 nt, Human
ccgugccuucagcuc

SEQ ID NO: 2830253 - RNA, 19 nt, Human
ccgggccuggagaacuaga

SEQ ID NO: 2830254 - RNA, 23 nt, Human
ccgggccgaauccccucccuguc

SEQ ID NO: 2830255 - RNA, 14 nt, Human
ccgggccuguacag

SEQ ID NO: 2830256 - RNA, 21 nt, Human
ccuaaaccaaaaacugaaagu

SEQ ID NO: 2830257 - RNA, 15 nt, Human
ccuaaaccccugucc

SEQ ID NO: 2830258 - RNA, 17 nt, Human
ccuaaaccccuguccca

SEQ ID NO: 2830259 - RNA, 12 nt, Human
ccuaaaacaaau

SEQ ID NO: 2830260 - RNA, 17 nt, Human
ccuaaaacauaagauca

SEQ ID NO: 2830261 - RNA, 15 nt, Human
ccuaaaacuggccug

SEQ ID NO: 2830262 - RNA, 16 nt, Human
ccuaaaacuggccuga

SEQ ID NO: 2830263 - RNA, 20 nt, Human
ccuaaaacuggccugacuug

SEQ ID NO: 2830264 - RNA, 13 nt, Human
ccuaaaacaaaag

SEQ ID NO: 2830265 - RNA, 20 nt, Human
ccguuguuuacuuaaagauu

SEQ ID NO: 2830266 - RNA, 17 nt, Human
ccguuuaccuagaagaa

SEQ ID NO: 2830267 - RNA, 12 nt, Human
ccguuguuuacu

SEQ ID NO: 2830268 - RNA, 15 nt, Human
ccguggcuucccgcu

SEQ ID NO: 2830269 - RNA, 21 nt, Human
ccguggcuucccgcucagccc

SEQ ID NO: 2830270 - RNA, 13 nt, Human
ccgugggccuggg

SEQ ID NO: 2830271 - RNA, 23 nt, Human
ccguggcuucccgcucagcccuc

SEQ ID NO: 2830272 - RNA, 13 nt, Human
ccuaccccuggcu

SEQ ID NO: 2830273 - RNA, 15 nt, Human
ccuaccccuggcugu

SEQ ID NO: 2830274 - RNA, 13 nt, Human
ccuaccugaugga

SEQ ID NO: 2830275 - RNA, 17 nt, Human
ccuaccuucuucaggcu

SEQ ID NO: 2830276 - RNA, 16 nt, Human
ccuacgcgccuugucu

SEQ ID NO: 2830277 - RNA, 16 nt, Human
ccuaccugcucuccaa

SEQ ID NO: 2830278 - RNA, 20 nt, Human
ccuagagaacgcagcccuag

SEQ ID NO: 2830279 - RNA, 17 nt, Human
ccuagagaacgcagccc

SEQ ID NO: 2830280 - RNA, 18 nt, Human
ccuagagaacgcagcccu

SEQ ID NO: 2830281 - RNA, 19 nt, Human
ccuagagaacgcagcccua

SEQ ID NO: 2830282 - RNA, 21 nt, Human
ccuaccugauuggugcaaccc

SEQ ID NO: 2830283 - RNA, 14 nt, Human
ccuaccugcccugg

SEQ ID NO: 2830284 - RNA, 15 nt, Human
ccuaccugcccugga

SEQ ID NO: 2830285 - RNA, 12 nt, Human
ccuaccugguaa

SEQ ID NO: 2830286 - RNA, 16 nt, Human
ccuaccugugccugac

SEQ ID NO: 2830287 - RNA, 21 nt, Human
ccuaccugugugguacucuga

SEQ ID NO: 2830288 - RNA, 15 nt, Human
ccuaccugugccuga

SEQ ID NO: 2830289 - RNA, 14 nt, Human
ccuaccugugccug

SEQ ID NO: 2830290 - RNA, 12 nt, Human
ccuaccugcucu

SEQ ID NO: 2830291 - RNA, 13 nt, Human
ccuaccugcucuc

SEQ ID NO: 2830292 - RNA, 13 nt, Human
ccguuugcuuuug

SEQ ID NO: 2830293 - RNA, 18 nt, Human
ccuaauucgaugaaggcu

SEQ ID NO: 2830294 - RNA, 15 nt, Human
ccuaauucuucuguc

SEQ ID NO: 2830295 - RNA, 17 nt, Human
ccuaauuccacagcugc

SEQ ID NO: 2830296 - RNA, 16 nt, Human
ccuaauuccacagcug

SEQ ID NO: 2830297 - RNA, 15 nt, Human
ccuaauuccacagcu

SEQ ID NO: 2830298 - RNA, 14 nt, Human
ccuaauuccacagc

SEQ ID NO: 2830299 - RNA, 12 nt, Human
ccuaaagaaaaa

SEQ ID NO: 2830300 - RNA, 15 nt, Human
ccuaaaccuuugccc

SEQ ID NO: 2830301 - RNA, 18 nt, Human
ccuaaaacaaaagcucau

SEQ ID NO: 2830302 - RNA, 11 nt, Human
ccuaaacugua

SEQ ID NO: 2830303 - RNA, 13 nt, Human
ccuaaagagagua

SEQ ID NO: 2830304 - RNA, 23 nt, Human
ccuaaagagaguauuuuuauaca

SEQ ID NO: 2830305 - RNA, 12 nt, Human
ccuaaagagaua

SEQ ID NO: 2830306 - RNA, 13 nt, Human
ccuaauuccacag

SEQ ID NO: 2830307 - RNA, 16 nt, Human
ccuaaagugcugggau

SEQ ID NO: 2830308 - RNA, 21 nt, Human
ccuaaagugcugggauuacag

SEQ ID NO: 2830309 - RNA, 16 nt, Human
ccucacagucccacug

SEQ ID NO: 2830310 - RNA, 19 nt, Human
ccucacagucccacugugc

SEQ ID NO: 2830311 - RNA, 23 nt, Human
ccucacagucccacugugcaggu

SEQ ID NO: 2830312 - RNA, 19 nt, Human
ccucacccccagcuuugcu

SEQ ID NO: 2830313 - RNA, 17 nt, Human
ccucacccccagcuuug

SEQ ID NO: 2830314 - RNA, 17 nt, Human
ccucaccccgaggcccu

SEQ ID NO: 2830315 - RNA, 18 nt, Human
ccucaccccgaggcccug

SEQ ID NO: 2830316 - RNA, 19 nt, Human
ccucaccccgaggcccugc

SEQ ID NO: 2830317 - RNA, 20 nt, Human
ccucaccccgaggcccugca

SEQ ID NO: 2830318 - RNA, 21 nt, Human
ccucaccccgaggcccugcau

SEQ ID NO: 2830319 - RNA, 22 nt, Human
ccucaccccgaggcccugcaug

SEQ ID NO: 2830320 - RNA, 19 nt, Human
ccucaccccguuacagcuc

SEQ ID NO: 2830321 - RNA, 13 nt, Human
ccucacgcugggu

SEQ ID NO: 2830322 - RNA, 15 nt, Human
ccucaccuucugagu

SEQ ID NO: 2830323 - RNA, 22 nt, Human
ccucaccucuggacuggcuaga

SEQ ID NO: 2830324 - RNA, 20 nt, Human
ccucaccucuggacuggcua

SEQ ID NO: 2830325 - RNA, 18 nt, Human
ccucaccucuggacuggc

SEQ ID NO: 2830326 - RNA, 13 nt, Human
ccucaccucugga

SEQ ID NO: 2830327 - RNA, 12 nt, Human
ccucaccucugg

SEQ ID NO: 2830328 - RNA, 14 nt, Human
ccucaccuccucua

SEQ ID NO: 2830329 - RNA, 13 nt, Human
ccucaccucuacc

SEQ ID NO: 2830330 - RNA, 14 nt, Human
ccucaccucuaccc

SEQ ID NO: 2830331 - RNA, 16 nt, Human
ccucaccucuacccaa

SEQ ID NO: 2830332 - RNA, 13 nt, Human
ccucaccuccucu

SEQ ID NO: 2830333 - RNA, 21 nt, Human
ccucaccccuguccucacugc

SEQ ID NO: 2830334 - RNA, 22 nt, Human
ccucaccccuguccucacugcu

SEQ ID NO: 2830335 - RNA, 15 nt, Human
ccucaccccuguccu

SEQ ID NO: 2830336 - RNA, 19 nt, Human
ccucaccccuguccucacu

SEQ ID NO: 2830337 - RNA, 20 nt, Human
ccucaccccuguccucacug

SEQ ID NO: 2830338 - RNA, 12 nt, Human
ccuagagccaga

SEQ ID NO: 2830339 - RNA, 13 nt, Human
ccuagagccagac

SEQ ID NO: 2830340 - RNA, 14 nt, Human
ccuagagccagacc

SEQ ID NO: 2830341 - RNA, 15 nt, Human
ccuagagccagacca

SEQ ID NO: 2830342 - RNA, 16 nt, Human
ccuagagccagaccaa

SEQ ID NO: 2830343 - RNA, 21 nt, Human
ccuagagaagauaauuguuga

SEQ ID NO: 2830344 - RNA, 18 nt, Human
ccuagagccugccuggag

SEQ ID NO: 2830345 - RNA, 19 nt, Human
ccuagagccugccuggagc

SEQ ID NO: 2830346 - RNA, 13 nt, Human
ccuagagccugcc

SEQ ID NO: 2830347 - RNA, 14 nt, Human
ccuagagccugccu

SEQ ID NO: 2830348 - RNA, 17 nt, Human
ccuagagccugccugga

SEQ ID NO: 2830349 - RNA, 17 nt, Human
ccuaucaccuauuucca

SEQ ID NO: 2830350 - RNA, 16 nt, Human
ccuaucaccuauuucc

SEQ ID NO: 2830351 - RNA, 23 nt, Human
ccuauggcagaaaaaaugucugu

SEQ ID NO: 2830352 - RNA, 13 nt, Human
ccuaucauuuauu

SEQ ID NO: 2830353 - RNA, 17 nt, Human
ccuaucagaaguuucuc

SEQ ID NO: 2830354 - RNA, 13 nt, Human
ccucaauguuuga

SEQ ID NO: 2830355 - RNA, 19 nt, Human
ccucaauuuuugucucaga

SEQ ID NO: 2830356 - RNA, 21 nt, Human
ccucaauuuuugucucagaag

SEQ ID NO: 2830357 - RNA, 18 nt, Human
ccucaaucucaauccugc

SEQ ID NO: 2830358 - RNA, 22 nt, Human
ccuaugguauaaugguugacug

SEQ ID NO: 2830359 - RNA, 22 nt, Human
ccuauguaagaauucagaagac

SEQ ID NO: 2830360 - RNA, 14 nt, Human
ccuauguauuugca

SEQ ID NO: 2830361 - RNA, 15 nt, Human
ccucaguauauuuaa

SEQ ID NO: 2830362 - RNA, 16 nt, Human
ccucaguauauuuaaa

SEQ ID NO: 2830363 - RNA, 14 nt, Human
cugguccugugugc

SEQ ID NO: 2830364 - RNA, 21 nt, Human
cugguccugaggguccccacc

SEQ ID NO: 2830365 - RNA, 17 nt, Human
cugguccuuccaggccc

SEQ ID NO: 2830366 - RNA, 16 nt, Human
cugguccuuccaggcc

SEQ ID NO: 2830367 - RNA, 19 nt, Human
cugguccuuccaggccccc

SEQ ID NO: 2830368 - RNA, 14 nt, Human
cuggucccacucag

SEQ ID NO: 2830369 - RNA, 18 nt, Human
cuggucccacucagucca

SEQ ID NO: 2830370 - RNA, 15 nt, Human
cuggucccacucagu

SEQ ID NO: 2830371 - RNA, 13 nt, Human
cuggguuggaggg

SEQ ID NO: 2830372 - RNA, 13 nt, Human
cuggguuggaaaa

SEQ ID NO: 2830373 - RNA, 18 nt, Human
cuggguuggaaaacagua

SEQ ID NO: 2830374 - RNA, 13 nt, Human
cuggguaugugua

SEQ ID NO: 2830375 - RNA, 15 nt, Human
cuggguauuggaaau

SEQ ID NO: 2830376 - RNA, 19 nt, Human
cuggguauuggaaauggau

SEQ ID NO: 2830377 - RNA, 14 nt, Human
cugggucacacacg

SEQ ID NO: 2830378 - RNA, 13 nt, Human
cugggucagucug

SEQ ID NO: 2830379 - RNA, 17 nt, Human
cugggucagucuggugg

SEQ ID NO: 2830380 - RNA, 12 nt, Human
cugggucagugg

SEQ ID NO: 2830381 - RNA, 18 nt, Human
cugggucagucugguggg

SEQ ID NO: 2830382 - RNA, 21 nt, Human
cugggucagucuggugggagg

SEQ ID NO: 2830383 - RNA, 17 nt, Human
cugguucucaaugaaaa

SEQ ID NO: 2830384 - RNA, 16 nt, Human
cugguucucaaugaaa

SEQ ID NO: 2830385 - RNA, 15 nt, Human
cugguucucaaugaa

SEQ ID NO: 2830386 - RNA, 18 nt, Human
cugguucucaaugaaaaa

SEQ ID NO: 2830387 - RNA, 13 nt, Human
cugguucucaaug

SEQ ID NO: 2830388 - RNA, 23 nt, Human
cugguggcagugggagcugccug

SEQ ID NO: 2830389 - RNA, 19 nt, Human
cugguggcagugggagcug

SEQ ID NO: 2830390 - RNA, 18 nt, Human
cugguggacaguccuggg

SEQ ID NO: 2830391 - RNA, 17 nt, Human
cugguggacaguccugg

SEQ ID NO: 2830392 - RNA, 16 nt, Human
cugguggacaguccug

SEQ ID NO: 2830393 - RNA, 15 nt, Human
cugguggacaguccu

SEQ ID NO: 2830394 - RNA, 21 nt, Human
cugguggacaguccugggaga

SEQ ID NO: 2830395 - RNA, 19 nt, Human
cugguggacaguccuggga

SEQ ID NO: 2830396 - RNA, 15 nt, Human
cugguggacccaggg

SEQ ID NO: 2830397 - RNA, 18 nt, Human
cuggucucaaacuccuga

SEQ ID NO: 2830398 - RNA, 17 nt, Human
cuggugcuuccaaauau

SEQ ID NO: 2830399 - RNA, 12 nt, Human
cugguggacagu

SEQ ID NO: 2830400 - RNA, 12 nt, Human
cugggguggccu

SEQ ID NO: 2830401 - RNA, 13 nt, Human
cugggguggccug

SEQ ID NO: 2830402 - RNA, 17 nt, Human
cugggguggccugugug

SEQ ID NO: 2830403 - RNA, 18 nt, Human
cugggguggccugugugg

SEQ ID NO: 2830404 - RNA, 21 nt, Human
cugggguggccuguguggcca

SEQ ID NO: 2830405 - RNA, 14 nt, Human
cuggggugggaggu

SEQ ID NO: 2830406 - RNA, 20 nt, Human
cuggggugggaggucuugcu

SEQ ID NO: 2830407 - RNA, 21 nt, Human
cuggggugggaggucuugcua

SEQ ID NO: 2830408 - RNA, 18 nt, Human
cugggggccucagugcca

SEQ ID NO: 2830409 - RNA, 22 nt, Human
cugggauuacaggcgugagcca

SEQ ID NO: 2830410 - RNA, 20 nt, Human
cuggggugcugccugaaucc

SEQ ID NO: 2830411 - RNA, 17 nt, Human
cugggggccucagugcc

SEQ ID NO: 2830412 - RNA, 13 nt, Human
cugggggccucag

SEQ ID NO: 2830413 - RNA, 20 nt, Human
cuggguacuuguggacacag

SEQ ID NO: 2830414 - RNA, 23 nt, Human
cuggguacuuguggacacagcuc

SEQ ID NO: 2830415 - RNA, 21 nt, Human
cuggguacuuguggacacagc

SEQ ID NO: 2830416 - RNA, 19 nt, Human
cuggguacuuguggacaca

SEQ ID NO: 2830417 - RNA, 20 nt, Human
cugggcuucaguggcagcug

SEQ ID NO: 2830418 - RNA, 19 nt, Human
cugggcuucaguggcagcu

SEQ ID NO: 2830419 - RNA, 17 nt, Human
cugggcuucaguggcag

SEQ ID NO: 2830420 - RNA, 18 nt, Human
cugggcuucaguggcagc

SEQ ID NO: 2830421 - RNA, 22 nt, Human
cugggcggcgggcggcuggguc

SEQ ID NO: 2830422 - RNA, 23 nt, Human
cugggcguaguggcucacaccug

SEQ ID NO: 2830423 - RNA, 15 nt, Human
cugggcuaggggaca

SEQ ID NO: 2830424 - RNA, 20 nt, Human
cugggcuaggggacaucaga

SEQ ID NO: 2830425 - RNA, 18 nt, Human
cugggcuagguagaaaaa

SEQ ID NO: 2830426 - RNA, 20 nt, Human
cugggcuagguagaaaaagg

SEQ ID NO: 2830427 - RNA, 22 nt, Human
cugggcuagguagaaaaagggu

SEQ ID NO: 2830428 - RNA, 14 nt, Human
cugggcuauggaca

SEQ ID NO: 2830429 - RNA, 15 nt, Human
cugggcuauggacac

SEQ ID NO: 2830430 - RNA, 16 nt, Human
cugggcuauggacaca

SEQ ID NO: 2830431 - RNA, 17 nt, Human
cugggcuauggacacag

SEQ ID NO: 2830432 - RNA, 18 nt, Human
cugggcuauggacacagg

SEQ ID NO: 2830433 - RNA, 19 nt, Human
cugggcuauggacacaggg

SEQ ID NO: 2830434 - RNA, 20 nt, Human
cugggcuauggacacagggu

SEQ ID NO: 2830435 - RNA, 13 nt, Human
cugggcgacagag

SEQ ID NO: 2830436 - RNA, 23 nt, Human
cugggcuucaguggcagcugcuu

SEQ ID NO: 2830437 - RNA, 22 nt, Human
cugggcuucaguggcagcugcu

SEQ ID NO: 2830438 - RNA, 21 nt, Human
cugggcuucaguggcagcugc

SEQ ID NO: 2830439 - RNA, 13 nt, Human
cugggaaccuccc

SEQ ID NO: 2830440 - RNA, 15 nt, Human
cugggaaccucccag

SEQ ID NO: 2830441 - RNA, 16 nt, Human
cugggaaccucccaga

SEQ ID NO: 2830442 - RNA, 17 nt, Human
cugggaaccucccagag

SEQ ID NO: 2830443 - RNA, 18 nt, Human
cugggaaccucccagagg

SEQ ID NO: 2830444 - RNA, 21 nt, Human
cugggaaccucccagaggucc

SEQ ID NO: 2830445 - RNA, 22 nt, Human
cugggaaccucccagaggucca

SEQ ID NO: 2830446 - RNA, 23 nt, Human
cugggaaccucccagagguccag

SEQ ID NO: 2830447 - RNA, 19 nt, Human
cugggaagacgccugagcu

SEQ ID NO: 2830448 - RNA, 20 nt, Human
cugggaacucaccuggggcu

SEQ ID NO: 2830449 - RNA, 17 nt, Human
cugggaacucaccuggg

SEQ ID NO: 2830450 - RNA, 14 nt, Human
cugggagcucugca

SEQ ID NO: 2830451 - RNA, 15 nt, Human
cugggagcucugcag

SEQ ID NO: 2830452 - RNA, 13 nt, Human
cugggaagggaag

SEQ ID NO: 2830453 - RNA, 13 nt, Human
cugggagcucugc

SEQ ID NO: 2830454 - RNA, 19 nt, Human
cugggaagcugagggcaaa

SEQ ID NO: 2830455 - RNA, 20 nt, Human
cugggaagcugagggcaaau

SEQ ID NO: 2830456 - RNA, 13 nt, Human
cugggaaggccuc

SEQ ID NO: 2830457 - RNA, 22 nt, Human
cugggaggcauggcccuggggu

SEQ ID NO: 2830458 - RNA, 14 nt, Human
cugggaggaagcag

SEQ ID NO: 2830459 - RNA, 13 nt, Human
cugggaggaagca

SEQ ID NO: 2830460 - RNA, 14 nt, Human
cugggaggcaguga

SEQ ID NO: 2830461 - RNA, 13 nt, Human
cugggaggcaugg

SEQ ID NO: 2830462 - RNA, 19 nt, Human
cugggaggcauggcccugg

SEQ ID NO: 2830463 - RNA, 16 nt, Human
cugggaggcagugaug

SEQ ID NO: 2830464 - RNA, 12 nt, Human
cugggagugagc

SEQ ID NO: 2830465 - RNA, 13 nt, Human
cugggagugagcu

SEQ ID NO: 2830466 - RNA, 16 nt, Human
cugggagugagcuggu

SEQ ID NO: 2830467 - RNA, 21 nt, Human
cugggauuacaggcgugagcc

SEQ ID NO: 2830468 - RNA, 19 nt, Human
cugggaguggguggaggca

SEQ ID NO: 2830469 - RNA, 16 nt, Human
cugggaguguguggug

SEQ ID NO: 2830470 - RNA, 15 nt, Human
cugggaucacaggug

SEQ ID NO: 2830471 - RNA, 22 nt, Human
cugggaucacaggugucagcca

SEQ ID NO: 2830472 - RNA, 20 nt, Human
cugggauuacaggcuccugc

SEQ ID NO: 2830473 - RNA, 19 nt, Human
cugggauuacaggcuccug

SEQ ID NO: 2830474 - RNA, 19 nt, Human
cugggcaaugauggcaauu

SEQ ID NO: 2830475 - RNA, 22 nt, Human
cugggauuacaggcuccugcca

SEQ ID NO: 2830476 - RNA, 21 nt, Human
cugggauuacaggcuccugcc

SEQ ID NO: 2830477 - RNA, 16 nt, Human
cugggcacacgccucc

SEQ ID NO: 2830478 - RNA, 17 nt, Human
cugggcacacgccuccc

SEQ ID NO: 2830479 - RNA, 22 nt, Human
cugggcacacgccucccacugg

SEQ ID NO: 2830480 - RNA, 23 nt, Human
cugggcacacgccucccacuggg

SEQ ID NO: 2830481 - RNA, 17 nt, Human
cugggcacacucugcca

SEQ ID NO: 2830482 - RNA, 18 nt, Human
cugggcacacucugccag

SEQ ID NO: 2830483 - RNA, 21 nt, Human
cugggcacacucugccagcaa

SEQ ID NO: 2830484 - RNA, 22 nt, Human
cugggcacacucugccagcaaa

SEQ ID NO: 2830485 - RNA, 20 nt, Human
cuggcuguuggcugggggcc

SEQ ID NO: 2830486 - RNA, 21 nt, Human
cuggcuguuuggacuuuguau

SEQ ID NO: 2830487 - RNA, 14 nt, Human
cuggcuucacagau

SEQ ID NO: 2830488 - RNA, 21 nt, Human
cuggcuucaggcaauucuccu

SEQ ID NO: 2830489 - RNA, 22 nt, Human
cuggcuucaggcaauucuccug

SEQ ID NO: 2830490 - RNA, 14 nt, Human
cuggcuuauuuuaa

SEQ ID NO: 2830491 - RNA, 15 nt, Human
cuggcuuauuuuaau

SEQ ID NO: 2830492 - RNA, 16 nt, Human
cuggcuuauuuuaaug

SEQ ID NO: 2830493 - RNA, 22 nt, Human
cuggcuuauuuuaaugugauga

SEQ ID NO: 2830494 - RNA, 19 nt, Human
cuggcugggguggccugug

SEQ ID NO: 2830495 - RNA, 20 nt, Human
cuggcugggguggccugugu

SEQ ID NO: 2830496 - RNA, 21 nt, Human
cuggcugggguggccugugug

SEQ ID NO: 2830497 - RNA, 23 nt, Human
cuggcugggguggccuguguggc

SEQ ID NO: 2830498 - RNA, 19 nt, Human
cuggcuguuggcugggggc

SEQ ID NO: 2830499 - RNA, 15 nt, Human
cuggcuuuucacugc

SEQ ID NO: 2830500 - RNA, 16 nt, Human
cuggcuuuucacugcu

SEQ ID NO: 2830501 - RNA, 20 nt, Human
cuggcuucuggagcccuugg

SEQ ID NO: 2830502 - RNA, 16 nt, Human
cuggcuucuggagccc

SEQ ID NO: 2830503 - RNA, 15 nt, Human
cuggcuucuggagcc

SEQ ID NO: 2830504 - RNA, 14 nt, Human
cuggcuucuggagc

SEQ ID NO: 2830505 - RNA, 18 nt, Human
cuggcuuccuucucucaa

SEQ ID NO: 2830506 - RNA, 16 nt, Human
cuggcuucgcaaaaug

SEQ ID NO: 2830507 - RNA, 19 nt, Human
cugggaaaugagaaggcag

SEQ ID NO: 2830508 - RNA, 20 nt, Human
cugggaaaugagaaggcagc

SEQ ID NO: 2830509 - RNA, 19 nt, Human
cugggaacaccauagguca

SEQ ID NO: 2830510 - RNA, 23 nt, Human
cugggaaaugagaaggcagccac

SEQ ID NO: 2830511 - RNA, 16 nt, Human
cugggaaaugagcagg

SEQ ID NO: 2830512 - RNA, 21 nt, Human
cugggaaaugagaaggcagcc

SEQ ID NO: 2830513 - RNA, 22 nt, Human
cugggaaaugagaaggcagcca

SEQ ID NO: 2830514 - RNA, 17 nt, Human
cuggcuuuucacugcug

SEQ ID NO: 2830515 - RNA, 19 nt, Human
cuggcuuuucacugcuggc

SEQ ID NO: 2830516 - RNA, 20 nt, Human
cuggcuuuucacugcuggcu

SEQ ID NO: 2830517 - RNA, 22 nt, Human
cuggcuuuucacugcuggcugc

SEQ ID NO: 2830518 - RNA, 20 nt, Human
cuggcucuugauaccccccu

SEQ ID NO: 2830519 - RNA, 21 nt, Human
cuggcucuugauaccccccuc

SEQ ID NO: 2830520 - RNA, 22 nt, Human
cuggcucuugauaccccccucu

SEQ ID NO: 2830521 - RNA, 23 nt, Human
cuggcucuugauaccccccucug

SEQ ID NO: 2830522 - RNA, 19 nt, Human
cuggccugagaggggaagc

SEQ ID NO: 2830523 - RNA, 12 nt, Human
cuggccugacuu

SEQ ID NO: 2830524 - RNA, 18 nt, Human
cuggccugacuuggggga

SEQ ID NO: 2830525 - RNA, 14 nt, Human
cuggccucugugcc

SEQ ID NO: 2830526 - RNA, 15 nt, Human
cuggccucugugccu

SEQ ID NO: 2830527 - RNA, 16 nt, Human
cuggccucugugccuu

SEQ ID NO: 2830528 - RNA, 20 nt, Human
cuggccucugugccuucuuu

SEQ ID NO: 2830529 - RNA, 17 nt, Human
cuggcugggcauggacg

SEQ ID NO: 2830530 - RNA, 15 nt, Human
cuggcugggcaugga

SEQ ID NO: 2830531 - RNA, 14 nt, Human
cuggcugggcaugg

SEQ ID NO: 2830532 - RNA, 14 nt, Human
cuggcugccuuaga

SEQ ID NO: 2830533 - RNA, 19 nt, Human
cuggcugccuuagaaccuu

SEQ ID NO: 2830534 - RNA, 20 nt, Human
cuggcucuugugcuggaugg

SEQ ID NO: 2830535 - RNA, 20 nt, Human
cuggcucuuucgucacccuu

SEQ ID NO: 2830536 - RNA, 23 nt, Human
cuggcucuuucgucacccuugga

SEQ ID NO: 2830537 - RNA, 17 nt, Human
cuggcucuugugcugga

SEQ ID NO: 2830538 - RNA, 22 nt, Human
cuggcucuuuggagaucaagga

SEQ ID NO: 2830539 - RNA, 21 nt, Human
cuggcugccccaaccugcuga

SEQ ID NO: 2830540 - RNA, 16 nt, Human
cuggcacagggcagug

SEQ ID NO: 2830541 - RNA, 17 nt, Human
cuggcacagggcagugg

SEQ ID NO: 2830542 - RNA, 13 nt, Human
cuggauuuuguca

SEQ ID NO: 2830543 - RNA, 16 nt, Human
cuggcaaacaugaaaa

SEQ ID NO: 2830544 - RNA, 22 nt, Human
cuggcaaacaugaaaaaucggc

SEQ ID NO: 2830545 - RNA, 15 nt, Human
cuggcaauugucuau

SEQ ID NO: 2830546 - RNA, 18 nt, Human
cuggcaauugucuauuua

SEQ ID NO: 2830547 - RNA, 19 nt, Human
cuggcaauugucuauuuau

SEQ ID NO: 2830548 - RNA, 12 nt, Human
cuggcacacauc

SEQ ID NO: 2830549 - RNA, 21 nt, Human
cuggcacacaucaggaguuca

SEQ ID NO: 2830550 - RNA, 15 nt, Human
cuggaugucugccaa

SEQ ID NO: 2830551 - RNA, 16 nt, Human
cuggauucauugucuc

SEQ ID NO: 2830552 - RNA, 17 nt, Human
cuggauucauugucucu

SEQ ID NO: 2830553 - RNA, 14 nt, Human
cuggauucccagga

SEQ ID NO: 2830554 - RNA, 13 nt, Human
cuggauucccagg

SEQ ID NO: 2830555 - RNA, 23 nt, Human
cuggauuauucaaaaugauguau

SEQ ID NO: 2830556 - RNA, 19 nt, Human
cuggaugucugccaauuuu

SEQ ID NO: 2830557 - RNA, 15 nt, Human
cuggauguuuggaaa

SEQ ID NO: 2830558 - RNA, 12 nt, Human
cuggaugucuga

SEQ ID NO: 2830559 - RNA, 13 nt, Human
cuggaugucugaa

SEQ ID NO: 2830560 - RNA, 16 nt, Human
cuggaugucugaacuu

SEQ ID NO: 2830561 - RNA, 17 nt, Human
cuggaugucugaacuuu

SEQ ID NO: 2830562 - RNA, 21 nt, Human
cuggaugucugaacuuuggga

SEQ ID NO: 2830563 - RNA, 21 nt, Human
cuggauggaggaaaaccaagc

SEQ ID NO: 2830564 - RNA, 16 nt, Human
cuggaggccuuccagc

SEQ ID NO: 2830565 - RNA, 18 nt, Human
cuggaggccuuccagcug

SEQ ID NO: 2830566 - RNA, 19 nt, Human
cuggaggccuuccagcugc

SEQ ID NO: 2830567 - RNA, 20 nt, Human
cuggaggccuuccagcugcu

SEQ ID NO: 2830568 - RNA, 21 nt, Human
cuggaggccuuccagcugcug

SEQ ID NO: 2830569 - RNA, 22 nt, Human
cuggaggccuuccagcugcugu

SEQ ID NO: 2830570 - RNA, 16 nt, Human
cuggccagaugcacca

SEQ ID NO: 2830571 - RNA, 18 nt, Human
cuggccaacauggcgaaa

SEQ ID NO: 2830572 - RNA, 13 nt, Human
cuggcauuuuaua

SEQ ID NO: 2830573 - RNA, 17 nt, Human
cuggcauuuuauagaca

SEQ ID NO: 2830574 - RNA, 23 nt, Human
cuggcauuuuauagacacccugg

SEQ ID NO: 2830575 - RNA, 21 nt, Human
cuggcauuauguccacugugu

SEQ ID NO: 2830576 - RNA, 17 nt, Human
cuggcauucuuguacag

SEQ ID NO: 2830577 - RNA, 20 nt, Human
cuggcauuagaauuauuuaa

SEQ ID NO: 2830578 - RNA, 22 nt, Human
cuggcauuagaauuauuuaaac

SEQ ID NO: 2830579 - RNA, 19 nt, Human
cuggcauuauguccacugu

SEQ ID NO: 2830580 - RNA, 19 nt, Human
cuggcacugaauuaaucau

SEQ ID NO: 2830581 - RNA, 19 nt, Human
cuggcauuagaauuauuua

SEQ ID NO: 2830582 - RNA, 20 nt, Human
cuggccagaugcaccagccc

SEQ ID NO: 2830583 - RNA, 19 nt, Human
cuggccagaugcaccagcc

SEQ ID NO: 2830584 - RNA, 18 nt, Human
cuggccagaugcaccagc

SEQ ID NO: 2830585 - RNA, 17 nt, Human
cuggccagaugcaccag

SEQ ID NO: 2830586 - RNA, 21 nt, Human
cuggccagaugcaccagcccu

SEQ ID NO: 2830587 - RNA, 17 nt, Human
cuggccaacaugguaaa

SEQ ID NO: 2830588 - RNA, 22 nt, Human
cuggccauuugccaauuuuccu

SEQ ID NO: 2830589 - RNA, 19 nt, Human
cuggccucccacagacuca

SEQ ID NO: 2830590 - RNA, 17 nt, Human
cuggccucccacagacu

SEQ ID NO: 2830591 - RNA, 11 nt, Human
cuggccucugu

SEQ ID NO: 2830592 - RNA, 13 nt, Human
cuggccucugugc

SEQ ID NO: 2830593 - RNA, 17 nt, Human
cuggccucuggcucuca

SEQ ID NO: 2830594 - RNA, 20 nt, Human
cuggccucuaccacaagggc

SEQ ID NO: 2830595 - RNA, 15 nt, Human
cuggaagcacagcuu

SEQ ID NO: 2830596 - RNA, 18 nt, Human
cuggaagcacagcuucau

SEQ ID NO: 2830597 - RNA, 14 nt, Human
cuggaagcacagcu

SEQ ID NO: 2830598 - RNA, 15 nt, Human
cuggaaugcaguggu

SEQ ID NO: 2830599 - RNA, 20 nt, Human
cuggaauggaaggguucugg

SEQ ID NO: 2830600 - RNA, 22 nt, Human
cuggaaugguacaugucuucca

SEQ ID NO: 2830601 - RNA, 14 nt, Human
cuggaaugcagugg

SEQ ID NO: 2830602 - RNA, 13 nt, Human
cuggaauaagaag

SEQ ID NO: 2830603 - RNA, 19 nt, Human
cuggaauaagaagcaaaua

SEQ ID NO: 2830604 - RNA, 21 nt, Human
cuggaauaagaagcaaauaaa

SEQ ID NO: 2830605 - RNA, 17 nt, Human
cuggacacucagaccug

SEQ ID NO: 2830606 - RNA, 20 nt, Human
cuggaauuagcuuggggcca

SEQ ID NO: 2830607 - RNA, 22 nt, Human
cuggaauuagcuuggggccagg

SEQ ID NO: 2830608 - RNA, 23 nt, Human
cuggaauuccuaacuuuucaaug

SEQ ID NO: 2830609 - RNA, 18 nt, Human
cuggacacucagaccuga

SEQ ID NO: 2830610 - RNA, 13 nt, Human
cuggacagagggg

SEQ ID NO: 2830611 - RNA, 14 nt, Human
cuggacagagggga

SEQ ID NO: 2830612 - RNA, 19 nt, Human
cuggacagaggggacucug

SEQ ID NO: 2830613 - RNA, 20 nt, Human
cuggacagaggggacucugg

SEQ ID NO: 2830614 - RNA, 21 nt, Human
cuggacagaggggacucuggg

SEQ ID NO: 2830615 - RNA, 22 nt, Human
cuggacagaggggacucugggc

SEQ ID NO: 2830616 - RNA, 14 nt, Human
cugcucuuguuucu

SEQ ID NO: 2830617 - RNA, 19 nt, Human
cugcucuuuuauacuguac

SEQ ID NO: 2830618 - RNA, 20 nt, Human
cugcugaaaaccaucuggcc

SEQ ID NO: 2830619 - RNA, 21 nt, Human
cugcugaaaaccaucuggccu

SEQ ID NO: 2830620 - RNA, 22 nt, Human
cugcugaaaaccaucuggccug

SEQ ID NO: 2830621 - RNA, 23 nt, Human
cugcugaaaaccaucuggccugg

SEQ ID NO: 2830622 - RNA, 23 nt, Human
cugcucugaguuauguuaaaauc

SEQ ID NO: 2830623 - RNA, 12 nt, Human
cugcucugauga

SEQ ID NO: 2830624 - RNA, 19 nt, Human
cugcuuucugauguugccu

SEQ ID NO: 2830625 - RNA, 12 nt, Human
cugcuuucuccc

SEQ ID NO: 2830626 - RNA, 13 nt, Human
cugcuuucucccc

SEQ ID NO: 2830627 - RNA, 14 nt, Human
cugcuuucucccca

SEQ ID NO: 2830628 - RNA, 19 nt, Human
cugcuuugggcugcccugg

SEQ ID NO: 2830629 - RNA, 20 nt, Human
cugcuuugggcugcccuggu

SEQ ID NO: 2830630 - RNA, 17 nt, Human
cugcuuugggcugcccu

SEQ ID NO: 2830631 - RNA, 18 nt, Human
cugcuuugggcugcccug

SEQ ID NO: 2830632 - RNA, 13 nt, Human
cugcuuuuauauc

SEQ ID NO: 2830633 - RNA, 21 nt, Human
cugcuuugggcugcccuggug

SEQ ID NO: 2830634 - RNA, 22 nt, Human
cugcuuugggcugcccuggugc

SEQ ID NO: 2830635 - RNA, 23 nt, Human
cugcuuugggcugcccuggugcu

SEQ ID NO: 2830636 - RNA, 18 nt, Human
cuggagcuucauuuuggu

SEQ ID NO: 2830637 - RNA, 15 nt, Human
cuggagccaugggca

SEQ ID NO: 2830638 - RNA, 21 nt, Human
cuggagccaugggcacaaagg

SEQ ID NO: 2830639 - RNA, 16 nt, Human
cuggagagaaguggaa

SEQ ID NO: 2830640 - RNA, 14 nt, Human
cuggagagaaacaa

SEQ ID NO: 2830641 - RNA, 22 nt, Human
cuggagagaaacaauaaagaga

SEQ ID NO: 2830642 - RNA, 23 nt, Human
cuggagaggagggaugcugccug

SEQ ID NO: 2830643 - RNA, 16 nt, Human
cuggagauacuggugg

SEQ ID NO: 2830644 - RNA, 13 nt, Human
cuggagcagacca

SEQ ID NO: 2830645 - RNA, 15 nt, Human
cuggagcagaccacc

SEQ ID NO: 2830646 - RNA, 18 nt, Human
cuggagcagaccaccccg

SEQ ID NO: 2830647 - RNA, 22 nt, Human
cuggagcagaccaccccgccug

SEQ ID NO: 2830648 - RNA, 20 nt, Human
cuggacaguaucccacaucc

SEQ ID NO: 2830649 - RNA, 17 nt, Human
cuggacagucacugcca

SEQ ID NO: 2830650 - RNA, 23 nt, Human
cuggacagucacugccacuuugc

SEQ ID NO: 2830651 - RNA, 16 nt, Human
cuggacagucagcucu

SEQ ID NO: 2830652 - RNA, 19 nt, Human
cuggacagucagcucuuca

SEQ ID NO: 2830653 - RNA, 17 nt, Human
cuggacauaacauuuuc

SEQ ID NO: 2830654 - RNA, 18 nt, Human
cuggacauaacauuuuca

SEQ ID NO: 2830655 - RNA, 18 nt, Human
cuggacaguaucccacau

SEQ ID NO: 2830656 - RNA, 16 nt, Human
cuggacaguaucccac

SEQ ID NO: 2830657 - RNA, 15 nt, Human
cuggaccacugggca

SEQ ID NO: 2830658 - RNA, 14 nt, Human
cuggaccacugggc

SEQ ID NO: 2830659 - RNA, 18 nt, Human
cuggacauuugccuugcu

SEQ ID NO: 2830660 - RNA, 15 nt, Human
cuggacaugcugacu

SEQ ID NO: 2830661 - RNA, 22 nt, Human
cugcuuuuauuaaauuuguuga

SEQ ID NO: 2830662 - RNA, 15 nt, Human
cuggacggcauuccu

SEQ ID NO: 2830663 - RNA, 20 nt, Human
cuggacggcauuccugcuua

SEQ ID NO: 2830664 - RNA, 15 nt, Human
cuggacggggacugg

SEQ ID NO: 2830665 - RNA, 18 nt, Human
cuggacggggacugggga

SEQ ID NO: 2830666 - RNA, 19 nt, Human
cuggacggcauuccugcuu

SEQ ID NO: 2830667 - RNA, 17 nt, Human
cuggacggcauuccugc

SEQ ID NO: 2830668 - RNA, 23 nt, Human
cuggacuagagggaccucuccca

SEQ ID NO: 2830669 - RNA, 21 nt, Human
cuggacuagagggaccucucc

SEQ ID NO: 2830670 - RNA, 20 nt, Human
cuggacuagagggaccucuc

SEQ ID NO: 2830671 - RNA, 23 nt, Human
cuggacggggacuggggaugugg

SEQ ID NO: 2830672 - RNA, 16 nt, Human
cuggacgucuuucuuu

SEQ ID NO: 2830673 - RNA, 16 nt, Human
cuggacucaccucccc

SEQ ID NO: 2830674 - RNA, 22 nt, Human
cugcccugggaggcagugaugg

SEQ ID NO: 2830675 - RNA, 15 nt, Human
cugcccugggaggca

SEQ ID NO: 2830676 - RNA, 16 nt, Human
cugcccugccacuuug

SEQ ID NO: 2830677 - RNA, 11 nt, Human
cugcccuggga

SEQ ID NO: 2830678 - RNA, 13 nt, Human
cugcccugggagg

SEQ ID NO: 2830679 - RNA, 12 nt, Human
cugcccugggag

SEQ ID NO: 2830680 - RNA, 13 nt, Human
cugccucagccuc

SEQ ID NO: 2830681 - RNA, 12 nt, Human
cugccucagccu

SEQ ID NO: 2830682 - RNA, 23 nt, Human
cugccucacuuccuacaagagca

SEQ ID NO: 2830683 - RNA, 14 nt, Human
cugccucacuuccu

SEQ ID NO: 2830684 - RNA, 15 nt, Human
cugccucaccgcuuc

SEQ ID NO: 2830685 - RNA, 16 nt, Human
cugccucaccgcuucc

SEQ ID NO: 2830686 - RNA, 18 nt, Human
cugccucaccgcuucccu

SEQ ID NO: 2830687 - RNA, 14 nt, Human
cugccucagccucc

SEQ ID NO: 2830688 - RNA, 14 nt, Human
cugccugcccaggc

SEQ ID NO: 2830689 - RNA, 13 nt, Human
cugccugcccagg

SEQ ID NO: 2830690 - RNA, 15 nt, Human
cugccugcccaggcc

SEQ ID NO: 2830691 - RNA, 13 nt, Human
cugccugcccaca

SEQ ID NO: 2830692 - RNA, 18 nt, Human
cugccugcaauauuugaa

SEQ ID NO: 2830693 - RNA, 19 nt, Human
cugccugcaauauuugaau

SEQ ID NO: 2830694 - RNA, 16 nt, Human
cugccugcccacacag

SEQ ID NO: 2830695 - RNA, 17 nt, Human
cugccugcaauauuuga

SEQ ID NO: 2830696 - RNA, 16 nt, Human
cugccugauggaccug

SEQ ID NO: 2830697 - RNA, 23 nt, Human
cugccugaagucacacagugagu

SEQ ID NO: 2830698 - RNA, 12 nt, Human
cugccucuuccu

SEQ ID NO: 2830699 - RNA, 14 nt, Human
cugccucucuagga

SEQ ID NO: 2830700 - RNA, 17 nt, Human
cugccucugccuuagag

SEQ ID NO: 2830701 - RNA, 23 nt, Human
cugccucugccuuagaggagccc

SEQ ID NO: 2830702 - RNA, 18 nt, Human
cugcuccucuccccagca

SEQ ID NO: 2830703 - RNA, 13 nt, Human
cugcuccugcagc

SEQ ID NO: 2830704 - RNA, 14 nt, Human
cugcuccugcagca

SEQ ID NO: 2830705 - RNA, 16 nt, Human
cugcuccugcagcaug

SEQ ID NO: 2830706 - RNA, 15 nt, Human
cugcucgccuuagca

SEQ ID NO: 2830707 - RNA, 13 nt, Human
cugcuccuuggcu

SEQ ID NO: 2830708 - RNA, 19 nt, Human
cugcuccuuggcuuaccug

SEQ ID NO: 2830709 - RNA, 20 nt, Human
cugcuccuuggcuuaccuga

SEQ ID NO: 2830710 - RNA, 13 nt, Human
cugcuccuuuccc

SEQ ID NO: 2830711 - RNA, 14 nt, Human
cugcuccuuucccc

SEQ ID NO: 2830712 - RNA, 15 nt, Human
cugcuccuuuccccu

SEQ ID NO: 2830713 - RNA, 14 nt, Human
cugcucgcccuccu

SEQ ID NO: 2830714 - RNA, 15 nt, Human
cugcucgcccuccuu

SEQ ID NO: 2830715 - RNA, 17 nt, Human
cugcucgcccuccuuuc

SEQ ID NO: 2830716 - RNA, 18 nt, Human
cugcucgcccuccuuucu

SEQ ID NO: 2830717 - RNA, 19 nt, Human
cugcucgcccuccuuucug

SEQ ID NO: 2830718 - RNA, 22 nt, Human
cugcucgcccuccuuucugugc

SEQ ID NO: 2830719 - RNA, 23 nt, Human
cugcucgcccuccuuucugugcc

SEQ ID NO: 2830720 - RNA, 16 nt, Human
cugcucgccuuagcac

SEQ ID NO: 2830721 - RNA, 14 nt, Human
cugcucccugaagc

SEQ ID NO: 2830722 - RNA, 12 nt, Human
cugcucccucuc

SEQ ID NO: 2830723 - RNA, 16 nt, Human
cugcucccucuccccc

SEQ ID NO: 2830724 - RNA, 20 nt, Human
cugcucccucucccccuuac

SEQ ID NO: 2830725 - RNA, 13 nt, Human
cugcucccuaagc

SEQ ID NO: 2830726 - RNA, 17 nt, Human
cugcucccuaagccagc

SEQ ID NO: 2830727 - RNA, 19 nt, Human
cugcucccuaagccagccu

SEQ ID NO: 2830728 - RNA, 20 nt, Human
cugcucccuaagccagccug

SEQ ID NO: 2830729 - RNA, 21 nt, Human
cugcucccuaagccagccugg

SEQ ID NO: 2830730 - RNA, 17 nt, Human
cugcuccucuccccagc

SEQ ID NO: 2830731 - RNA, 16 nt, Human
cugcuccucuccccag

SEQ ID NO: 2830732 - RNA, 14 nt, Human
cugcuccgcugcuc

SEQ ID NO: 2830733 - RNA, 15 nt, Human
cugcuccgcugcucc

SEQ ID NO: 2830734 - RNA, 16 nt, Human
cugcuccgcugcuccu

SEQ ID NO: 2830735 - RNA, 17 nt, Human
cugcuccgcugcuccuu

SEQ ID NO: 2830736 - RNA, 18 nt, Human
cugcuccgcugcuccuug

SEQ ID NO: 2830737 - RNA, 21 nt, Human
cugcuccgcugcuccuuggcu

SEQ ID NO: 2830738 - RNA, 15 nt, Human
cugcucccugaagcc

SEQ ID NO: 2830739 - RNA, 16 nt, Human
cugcucccugaagcca

SEQ ID NO: 2830740 - RNA, 17 nt, Human
cugcucccugaagccag

SEQ ID NO: 2830741 - RNA, 18 nt, Human
cugcucccugaagccagc

SEQ ID NO: 2830742 - RNA, 19 nt, Human
cugcucccugaagccagcc

SEQ ID NO: 2830743 - RNA, 20 nt, Human
cugcucccugaagccagccu

SEQ ID NO: 2830744 - RNA, 21 nt, Human
cugcucccugaagccagccuu

SEQ ID NO: 2830745 - RNA, 22 nt, Human
cugcucccugaagccagccuuc

SEQ ID NO: 2830746 - RNA, 20 nt, Human
cugcggaaugaaccacaucu

SEQ ID NO: 2830747 - RNA, 15 nt, Human
cugccuuagaggagc

SEQ ID NO: 2830748 - RNA, 16 nt, Human
cugccuuagaggagcc

SEQ ID NO: 2830749 - RNA, 23 nt, Human
cugccuuagaggagcccacggcu

SEQ ID NO: 2830750 - RNA, 17 nt, Human
cugccuuaggccuaccu

SEQ ID NO: 2830751 - RNA, 19 nt, Human
cugccuuaggccuaccuga

SEQ ID NO: 2830752 - RNA, 16 nt, Human
cugccuuagucucagu

SEQ ID NO: 2830753 - RNA, 20 nt, Human
cugccuuagucucaguuugu

SEQ ID NO: 2830754 - RNA, 23 nt, Human
cugccuuagucucaguuugugug

SEQ ID NO: 2830755 - RNA, 15 nt, Human
cugcgguccacccag

SEQ ID NO: 2830756 - RNA, 23 nt, Human
cugcggaccccagcugugagccu

SEQ ID NO: 2830757 - RNA, 21 nt, Human
cugcggaaugaaccacaucuu

SEQ ID NO: 2830758 - RNA, 17 nt, Human
cugcgcuuuauuuucuu

SEQ ID NO: 2830759 - RNA, 14 nt, Human
cugcggaaaaggaa

SEQ ID NO: 2830760 - RNA, 13 nt, Human
cugcggaccccag

SEQ ID NO: 2830761 - RNA, 14 nt, Human
cugcggaccccagc

SEQ ID NO: 2830762 - RNA, 15 nt, Human
cugcggaccccagcu

SEQ ID NO: 2830763 - RNA, 16 nt, Human
cugcggaccccagcug

SEQ ID NO: 2830764 - RNA, 20 nt, Human
cugcggaccccagcugugag

SEQ ID NO: 2830765 - RNA, 16 nt, Human
cugcgguccacccagg

SEQ ID NO: 2830766 - RNA, 14 nt, Human
cugcgugggucaga

SEQ ID NO: 2830767 - RNA, 20 nt, Human
cugcguuuuggaagcucuga

SEQ ID NO: 2830768 - RNA, 16 nt, Human
cugcguugguccagag

SEQ ID NO: 2830769 - RNA, 17 nt, Human
cugcguugguccagagc

SEQ ID NO: 2830770 - RNA, 18 nt, Human
cugcguugguccagagcg

SEQ ID NO: 2830771 - RNA, 19 nt, Human
cugcguugguccagagcgg

SEQ ID NO: 2830772 - RNA, 13 nt, Human
cugcguucugcaa

SEQ ID NO: 2830773 - RNA, 15 nt, Human
cugcguucugcaagc

SEQ ID NO: 2830774 - RNA, 18 nt, Human
cugcccaggcugugcagc

SEQ ID NO: 2830775 - RNA, 12 nt, Human
cugcuccacgcg

SEQ ID NO: 2830776 - RNA, 13 nt, Human
cugcuccacgcgc

SEQ ID NO: 2830777 - RNA, 14 nt, Human
cugcuccacgcgcu

SEQ ID NO: 2830778 - RNA, 20 nt, Human
cugcuccacgcgcuucgacu

SEQ ID NO: 2830779 - RNA, 18 nt, Human
cugcuccagaauuuggaa

SEQ ID NO: 2830780 - RNA, 20 nt, Human
cugcuccagaauuuggaaau

SEQ ID NO: 2830781 - RNA, 21 nt, Human
cugcuccagaauuuggaaauc

SEQ ID NO: 2830782 - RNA, 22 nt, Human
cugcuccagaauuuggaaaucc

SEQ ID NO: 2830783 - RNA, 23 nt, Human
cugcuccagaauuuggaaauccu

SEQ ID NO: 2830784 - RNA, 21 nt, Human
cugccagcagcagcaggugau

SEQ ID NO: 2830785 - RNA, 13 nt, Human
cugccagccccac

SEQ ID NO: 2830786 - RNA, 15 nt, Human
cugccagccccacac

SEQ ID NO: 2830787 - RNA, 17 nt, Human
cugccagccccacacag

SEQ ID NO: 2830788 - RNA, 18 nt, Human
cugccagccccacacagc

SEQ ID NO: 2830789 - RNA, 19 nt, Human
cugccagccccacacagcu

SEQ ID NO: 2830790 - RNA, 20 nt, Human
cugccagccuggcuucugga

SEQ ID NO: 2830791 - RNA, 19 nt, Human
cugccagccuggcuucugg

SEQ ID NO: 2830792 - RNA, 16 nt, Human
cugccagccuggcuuc

SEQ ID NO: 2830793 - RNA, 15 nt, Human
cugccagccuggcuu

SEQ ID NO: 2830794 - RNA, 14 nt, Human
cugccagccuggcu

SEQ ID NO: 2830795 - RNA, 13 nt, Human
cugccagccuggc

SEQ ID NO: 2830796 - RNA, 12 nt, Human
cugccagccugg

SEQ ID NO: 2830797 - RNA, 14 nt, Human
cugccaugccagga

SEQ ID NO: 2830798 - RNA, 22 nt, Human
cugccaugccaggaaccugucc

SEQ ID NO: 2830799 - RNA, 18 nt, Human
cugccaugccaggaaccu

SEQ ID NO: 2830800 - RNA, 17 nt, Human
cugccaugccaggaacc

SEQ ID NO: 2830801 - RNA, 16 nt, Human
cugccaugccaggaac

SEQ ID NO: 2830802 - RNA, 23 nt, Human
cugccagccuggcuucuggagcc

SEQ ID NO: 2830803 - RNA, 22 nt, Human
cugccagccuggcuucuggagc

SEQ ID NO: 2830804 - RNA, 12 nt, Human
cugccagccaca

SEQ ID NO: 2830805 - RNA, 14 nt, Human
cugccacccugggg

SEQ ID NO: 2830806 - RNA, 12 nt, Human
cugccagcagca

SEQ ID NO: 2830807 - RNA, 11 nt, Human
cugccagcagc

SEQ ID NO: 2830808 - RNA, 19 nt, Human
cugccagcagcagcaggug

SEQ ID NO: 2830809 - RNA, 17 nt, Human
cugccagcagcagcagg

SEQ ID NO: 2830810 - RNA, 15 nt, Human
cugccagcagcagca

SEQ ID NO: 2830811 - RNA, 13 nt, Human
cugccagcagcag

SEQ ID NO: 2830812 - RNA, 20 nt, Human
cugccacccuggggagaaag

SEQ ID NO: 2830813 - RNA, 16 nt, Human
cugccacccuggggag

SEQ ID NO: 2830814 - RNA, 15 nt, Human
cugccacccugggga

SEQ ID NO: 2830815 - RNA, 22 nt, Human
cugccaccagagaccguccuca

SEQ ID NO: 2830816 - RNA, 15 nt, Human
cugccaccagagacc

SEQ ID NO: 2830817 - RNA, 21 nt, Human
cugccaccagagaccguccuc

SEQ ID NO: 2830818 - RNA, 19 nt, Human
cugccaccacgcccggcua

SEQ ID NO: 2830819 - RNA, 14 nt, Human
cugccaccagagac

SEQ ID NO: 2830820 - RNA, 16 nt, Human
cugccacauuagaacu

SEQ ID NO: 2830821 - RNA, 18 nt, Human
cugccacauuagaacuuc

SEQ ID NO: 2830822 - RNA, 12 nt, Human
cugcaggggcuc

SEQ ID NO: 2830823 - RNA, 21 nt, Human
cugccacacucuccaucaccc

SEQ ID NO: 2830824 - RNA, 13 nt, Human
cugccacacucug

SEQ ID NO: 2830825 - RNA, 15 nt, Human
cugccacacucugac

SEQ ID NO: 2830826 - RNA, 16 nt, Human
cugccacacucugacg

SEQ ID NO: 2830827 - RNA, 18 nt, Human
cugccacacucugacgca

SEQ ID NO: 2830828 - RNA, 13 nt, Human
cugccacacuuca

SEQ ID NO: 2830829 - RNA, 17 nt, Human
cugccacacuucaggcu

SEQ ID NO: 2830830 - RNA, 22 nt, Human
cugccacacuucaggcucuucu

SEQ ID NO: 2830831 - RNA, 21 nt, Human
cugcagggccaggacugagcc

SEQ ID NO: 2830832 - RNA, 14 nt, Human
cugcagggccagga

SEQ ID NO: 2830833 - RNA, 15 nt, Human
cugcagggccaggac

SEQ ID NO: 2830834 - RNA, 16 nt, Human
cugcagggccaggacu

SEQ ID NO: 2830835 - RNA, 17 nt, Human
cugcagggccaggacug

SEQ ID NO: 2830836 - RNA, 11 nt, Human
cugcaggggcu

SEQ ID NO: 2830837 - RNA, 12 nt, Human
cugcagggcugc

SEQ ID NO: 2830838 - RNA, 15 nt, Human
cugcccggcugcgga

SEQ ID NO: 2830839 - RNA, 11 nt, Human
cugcccggcug

SEQ ID NO: 2830840 - RNA, 10 nt, Human
cugcccuccc

SEQ ID NO: 2830841 - RNA, 14 nt, Human
cugcccuccccucu

SEQ ID NO: 2830842 - RNA, 21 nt, Human
cugcccgggaaggucaccagc

SEQ ID NO: 2830843 - RNA, 20 nt, Human
cugcccuccccucucugcac

SEQ ID NO: 2830844 - RNA, 16 nt, Human
cugcccucccuggagc

SEQ ID NO: 2830845 - RNA, 20 nt, Human
cugcccuccuuguccaccca

SEQ ID NO: 2830846 - RNA, 12 nt, Human
cugcccucgcac

SEQ ID NO: 2830847 - RNA, 22 nt, Human
cugcccucgcacggccccgaag

SEQ ID NO: 2830848 - RNA, 18 nt, Human
cugcccuccuuguccacc

SEQ ID NO: 2830849 - RNA, 17 nt, Human
cugcccuccuuaauuug

SEQ ID NO: 2830850 - RNA, 11 nt, Human
cugcccugaga

SEQ ID NO: 2830851 - RNA, 12 nt, Human
cugcccugagaa

SEQ ID NO: 2830852 - RNA, 19 nt, Human
cugcccugagaagcugcuc

SEQ ID NO: 2830853 - RNA, 21 nt, Human
cugcccugagaagcugcucca

SEQ ID NO: 2830854 - RNA, 13 nt, Human
cugcccugccacu

SEQ ID NO: 2830855 - RNA, 19 nt, Human
cugcccaggccugccuguu

SEQ ID NO: 2830856 - RNA, 17 nt, Human
cugcccaggccugccug

SEQ ID NO: 2830857 - RNA, 18 nt, Human
cugcccaggccugccugu

SEQ ID NO: 2830858 - RNA, 13 nt, Human
cugcccaggcccc

SEQ ID NO: 2830859 - RNA, 21 nt, Human
cugccauuugauuuuucuaac

SEQ ID NO: 2830860 - RNA, 23 nt, Human
cugcccaggaccaucuucccgag

SEQ ID NO: 2830861 - RNA, 19 nt, Human
cugccauuugcacccuccg

SEQ ID NO: 2830862 - RNA, 23 nt, Human
cugccaugccaggaaccuguccu

SEQ ID NO: 2830863 - RNA, 21 nt, Human
cugccauuugcacccuccgcc

SEQ ID NO: 2830864 - RNA, 20 nt, Human
cugccauuugcacccuccgc

SEQ ID NO: 2830865 - RNA, 17 nt, Human
cugcccaaaaauauggu

SEQ ID NO: 2830866 - RNA, 17 nt, Human
cugcccaaccugcucuc

SEQ ID NO: 2830867 - RNA, 15 nt, Human
cugcagagcaccuuu

SEQ ID NO: 2830868 - RNA, 15 nt, Human
cugcagaagcaaggg

SEQ ID NO: 2830869 - RNA, 23 nt, Human
cugcagaggggaaaccaguguag

SEQ ID NO: 2830870 - RNA, 20 nt, Human
cugcagagcaggaaacauga

SEQ ID NO: 2830871 - RNA, 17 nt, Human
cugcacuugcagacucu

SEQ ID NO: 2830872 - RNA, 16 nt, Human
cugcacuugcagacuc

SEQ ID NO: 2830873 - RNA, 14 nt, Human
cugcacuugcagac

SEQ ID NO: 2830874 - RNA, 14 nt, Human
cugcacuuccuguu

SEQ ID NO: 2830875 - RNA, 11 nt, Human
cugcagccuca

SEQ ID NO: 2830876 - RNA, 12 nt, Human
cugcagccagcu

SEQ ID NO: 2830877 - RNA, 14 nt, Human
cugcagccagcuca

SEQ ID NO: 2830878 - RNA, 22 nt, Human
cugcagccagcucacguccagg

SEQ ID NO: 2830879 - RNA, 21 nt, Human
cugcagaugccacccuagcca

SEQ ID NO: 2830880 - RNA, 19 nt, Human
cugcagaugccacccuagc

SEQ ID NO: 2830881 - RNA, 22 nt, Human
cugcagaugccacccuagccaa

SEQ ID NO: 2830882 - RNA, 17 nt, Human
cugcagauuugggcugg

SEQ ID NO: 2830883 - RNA, 16 nt, Human
cugcagaugccacccu

SEQ ID NO: 2830884 - RNA, 14 nt, Human
cugcagaugccacc

SEQ ID NO: 2830885 - RNA, 14 nt, Human
cugcagaguuugga

SEQ ID NO: 2830886 - RNA, 15 nt, Human
cugcagaguuuggau

SEQ ID NO: 2830887 - RNA, 23 nt, Human
cugcagaggggcuuucuggagag

SEQ ID NO: 2830888 - RNA, 13 nt, Human
cugcagaggguua

SEQ ID NO: 2830889 - RNA, 22 nt, Human
cugcagaggguuaggagugggu

SEQ ID NO: 2830890 - RNA, 22 nt, Human
cugcagaggggcuuucuggaga

SEQ ID NO: 2830891 - RNA, 20 nt, Human
cugcagaggggcuuucugga

SEQ ID NO: 2830892 - RNA, 19 nt, Human
cugcagaggggcuuucugg

SEQ ID NO: 2830893 - RNA, 22 nt, Human
cugcagggaguccgaaagggac

SEQ ID NO: 2830894 - RNA, 16 nt, Human
cugcagggccaagcac

SEQ ID NO: 2830895 - RNA, 13 nt, Human
cugcagggccagg

SEQ ID NO: 2830896 - RNA, 15 nt, Human
cugcagggacugcca

SEQ ID NO: 2830897 - RNA, 17 nt, Human
cugcagggacugccagu

SEQ ID NO: 2830898 - RNA, 20 nt, Human
cugcagccucaaccuccugg

SEQ ID NO: 2830899 - RNA, 19 nt, Human
cugcagccucaaccuccug

SEQ ID NO: 2830900 - RNA, 22 nt, Human
cugcagccucaaccuccugggc

SEQ ID NO: 2830901 - RNA, 18 nt, Human
cugcagauagaaagcauu

SEQ ID NO: 2830902 - RNA, 15 nt, Human
cugcaggcuuaauaa

SEQ ID NO: 2830903 - RNA, 23 nt, Human
cugcaggcuuaauaaaaaugaca

SEQ ID NO: 2830904 - RNA, 15 nt, Human
cugcaggcugagcca

SEQ ID NO: 2830905 - RNA, 16 nt, Human
cugcaggcugagccac

SEQ ID NO: 2830906 - RNA, 13 nt, Human
cugauucugggau

SEQ ID NO: 2830907 - RNA, 14 nt, Human
cugauucugggaug

SEQ ID NO: 2830908 - RNA, 16 nt, Human
cugauucugggaugcu

SEQ ID NO: 2830909 - RNA, 19 nt, Human
cugauucugggaugcuccu

SEQ ID NO: 2830910 - RNA, 14 nt, Human
cugauucucagggu

SEQ ID NO: 2830911 - RNA, 15 nt, Human
cugauucucaggguc

SEQ ID NO: 2830912 - RNA, 17 nt, Human
cugauucucagggucuc

SEQ ID NO: 2830913 - RNA, 18 nt, Human
cugauucucagggucucu

SEQ ID NO: 2830914 - RNA, 20 nt, Human
cugauucucagggucucugc

SEQ ID NO: 2830915 - RNA, 21 nt, Human
cugauucucagggucucugcu

SEQ ID NO: 2830916 - RNA, 12 nt, Human
cugcaaaauaga

SEQ ID NO: 2830917 - RNA, 13 nt, Human
cugcaaaaucugu

SEQ ID NO: 2830918 - RNA, 18 nt, Human
cugcaaaaggagagacuc

SEQ ID NO: 2830919 - RNA, 17 nt, Human
cugauuggcuuguagaa

SEQ ID NO: 2830920 - RNA, 15 nt, Human
cugauugaccugcuc

SEQ ID NO: 2830921 - RNA, 16 nt, Human
cugauugaccugcucc

SEQ ID NO: 2830922 - RNA, 17 nt, Human
cugauugaccugcuccg

SEQ ID NO: 2830923 - RNA, 20 nt, Human
cugauugaccugcuccgcug

SEQ ID NO: 2830924 - RNA, 17 nt, Human
cugauugagaaguucau

SEQ ID NO: 2830925 - RNA, 19 nt, Human
cugauugagaaguucauug

SEQ ID NO: 2830926 - RNA, 14 nt, Human
cugcaaacagaaca

SEQ ID NO: 2830927 - RNA, 15 nt, Human
cugcaaacagaacag

SEQ ID NO: 2830928 - RNA, 16 nt, Human
cugcaaacagaacagg

SEQ ID NO: 2830929 - RNA, 19 nt, Human
cugcaaacagaacaggguc

SEQ ID NO: 2830930 - RNA, 20 nt, Human
cugcaaacagaacaggguca

SEQ ID NO: 2830931 - RNA, 21 nt, Human
cugcaaacagaacagggucau

SEQ ID NO: 2830932 - RNA, 15 nt, Human
cugcaaacaaacacc

SEQ ID NO: 2830933 - RNA, 18 nt, Human
cugcaaacaaacaccuuc

SEQ ID NO: 2830934 - RNA, 23 nt, Human
cugcaaaauuugaugccaggaca

SEQ ID NO: 2830935 - RNA, 13 nt, Human
cugcaaacgcugc

SEQ ID NO: 2830936 - RNA, 12 nt, Human
cugcaauauuug

SEQ ID NO: 2830937 - RNA, 16 nt, Human
cugcaaacgcugccug

SEQ ID NO: 2830938 - RNA, 15 nt, Human
cugcaaacgcugccu

SEQ ID NO: 2830939 - RNA, 16 nt, Human
cugcaauauuugaauu

SEQ ID NO: 2830940 - RNA, 18 nt, Human
cugcaauauuugaauuuu

SEQ ID NO: 2830941 - RNA, 17 nt, Human
cugcaaacgcugccugc

SEQ ID NO: 2830942 - RNA, 19 nt, Human
cugcaauauuugaauuuua

SEQ ID NO: 2830943 - RNA, 16 nt, Human
cugcaaucauauguga

SEQ ID NO: 2830944 - RNA, 17 nt, Human
cugcaaucauaugugau

SEQ ID NO: 2830945 - RNA, 18 nt, Human
cugcaaucauaugugauc

SEQ ID NO: 2830946 - RNA, 19 nt, Human
cugcaaucauaugugaucu

SEQ ID NO: 2830947 - RNA, 15 nt, Human
cugcaauccugucuu

SEQ ID NO: 2830948 - RNA, 16 nt, Human
cugcaauccugucuuu

SEQ ID NO: 2830949 - RNA, 18 nt, Human
cugcaauuucauaugcug

SEQ ID NO: 2830950 - RNA, 20 nt, Human
cugcaauuucauaugcugua

SEQ ID NO: 2830951 - RNA, 13 nt, Human
cugcacaaagccc

SEQ ID NO: 2830952 - RNA, 21 nt, Human
cugcacaaagcccuuccaugu

SEQ ID NO: 2830953 - RNA, 16 nt, Human
cugcacaaacucacca

SEQ ID NO: 2830954 - RNA, 14 nt, Human
cugcaauuuucuaa

SEQ ID NO: 2830955 - RNA, 18 nt, Human
cugcacaaagcccuucca

SEQ ID NO: 2830956 - RNA, 20 nt, Human
cugcacaaagcccuuccaug

SEQ ID NO: 2830957 - RNA, 24 nt, Human
cugcaauucaaaaguuccaagagu

SEQ ID NO: 2830958 - RNA, 17 nt, Human
cugcaauuccccucugc

SEQ ID NO: 2830959 - RNA, 20 nt, Human
cugcaauuccccucugcugc

SEQ ID NO: 2830960 - RNA, 15 nt, Human
cugcaauuccccucu

SEQ ID NO: 2830961 - RNA, 16 nt, Human
cugcaauuccccucug

SEQ ID NO: 2830962 - RNA, 14 nt, Human
cugcaauucaaaag

SEQ ID NO: 2830963 - RNA, 18 nt, Human
cugcaauucaaaaguucc

SEQ ID NO: 2830964 - RNA, 21 nt, Human
cugcaauucaaaaguuccaag

SEQ ID NO: 2830965 - RNA, 22 nt, Human
cugcaauucaaaaguuccaaga

SEQ ID NO: 2830966 - RNA, 13 nt, Human
cugcaaugaaagg

SEQ ID NO: 2830967 - RNA, 23 nt, Human
cugcaauccugucuuucugagca

SEQ ID NO: 2830968 - RNA, 17 nt, Human
cugcaaugggcacuggg

SEQ ID NO: 2830969 - RNA, 21 nt, Human
cugcaaugggcacugggauga

SEQ ID NO: 2830970 - RNA, 20 nt, Human
cugcaauguaucccuucuca

SEQ ID NO: 2830971 - RNA, 18 nt, Human
cugcaaugugaucuaugu

SEQ ID NO: 2830972 - RNA, 18 nt, Human
cugcaaugugggcagaga

SEQ ID NO: 2830973 - RNA, 12 nt, Human
cugcacccagga

SEQ ID NO: 2830974 - RNA, 13 nt, Human
cugcacccaggag

SEQ ID NO: 2830975 - RNA, 14 nt, Human
cugcacccaggagg

SEQ ID NO: 2830976 - RNA, 15 nt, Human
cugcacccaggaggg

SEQ ID NO: 2830977 - RNA, 21 nt, Human
cugcacagugcaucucagccc

SEQ ID NO: 2830978 - RNA, 12 nt, Human
cugcaccagagc

SEQ ID NO: 2830979 - RNA, 13 nt, Human
cugcaccagagca

SEQ ID NO: 2830980 - RNA, 20 nt, Human
cugcaccagagcaaccucuc

SEQ ID NO: 2830981 - RNA, 13 nt, Human
cugcacagcggcc

SEQ ID NO: 2830982 - RNA, 19 nt, Human
cugcacagcggccccugca

SEQ ID NO: 2830983 - RNA, 18 nt, Human
cugcacagugcaucucag

SEQ ID NO: 2830984 - RNA, 14 nt, Human
cugauuaugucuuu

SEQ ID NO: 2830985 - RNA, 23 nt, Human
cugauuaugucuuuuauauuugu

SEQ ID NO: 2830986 - RNA, 17 nt, Human
cugauuauuuucuucau

SEQ ID NO: 2830987 - RNA, 12 nt, Human
cugauuagcuuu

SEQ ID NO: 2830988 - RNA, 15 nt, Human
cugauuagcuuugug

SEQ ID NO: 2830989 - RNA, 16 nt, Human
cugauuagcuuugugu

SEQ ID NO: 2830990 - RNA, 17 nt, Human
cugauuagcuuuguguu

SEQ ID NO: 2830991 - RNA, 18 nt, Human
cugauuagcuuuguguuu

SEQ ID NO: 2830992 - RNA, 21 nt, Human
cugauuaaguugucuaaacaa

SEQ ID NO: 2830993 - RNA, 15 nt, Human
cugauguuggaagag

SEQ ID NO: 2830994 - RNA, 15 nt, Human
cugauucccaagcuc

SEQ ID NO: 2830995 - RNA, 13 nt, Human
cugauucacugca

SEQ ID NO: 2830996 - RNA, 18 nt, Human
cugauucccaagcucugc

SEQ ID NO: 2830997 - RNA, 17 nt, Human
cugauucccaagcucug

SEQ ID NO: 2830998 - RNA, 20 nt, Human
cugauucccaagcucugcuc

SEQ ID NO: 2830999 - RNA, 19 nt, Human
cugauucccaagcucugcu

SEQ ID NO: 2831000 - RNA, 22 nt, Human
cugauucccaagcucugcuccu

SEQ ID NO: 2831001 - RNA, 20 nt, Human
cugauucacugcauggcucc

SEQ ID NO: 2831002 - RNA, 15 nt, Human
cugauucacugcaug

SEQ ID NO: 2831003 - RNA, 18 nt, Human
cugauucacugcauggcu

SEQ ID NO: 2831004 - RNA, 17 nt, Human
cugaguuuuucagaugu

SEQ ID NO: 2831005 - RNA, 19 nt, Human
cugauaaaacaacagcucg

SEQ ID NO: 2831006 - RNA, 18 nt, Human
cugauagaauuauuucac

SEQ ID NO: 2831007 - RNA, 18 nt, Human
cugaucaucgccagaggu

SEQ ID NO: 2831008 - RNA, 19 nt, Human
cugaucaucgccagaggug

SEQ ID NO: 2831009 - RNA, 14 nt, Human
cugauauaaauucu

SEQ ID NO: 2831010 - RNA, 16 nt, Human
cugauauaaauucugu

SEQ ID NO: 2831011 - RNA, 17 nt, Human
cugauauaaauucugug

SEQ ID NO: 2831012 - RNA, 18 nt, Human
cugauauaaauucugugg

SEQ ID NO: 2831013 - RNA, 14 nt, Human
cugauauacugugu

SEQ ID NO: 2831014 - RNA, 19 nt, Human
cugaugucccuagaaaaca

SEQ ID NO: 2831015 - RNA, 20 nt, Human
cugauguacaauuaaaaacc

SEQ ID NO: 2831016 - RNA, 20 nt, Human
cugauguguccucagggagc

SEQ ID NO: 2831017 - RNA, 12 nt, Human
cugaugucucua

SEQ ID NO: 2831018 - RNA, 18 nt, Human
cugaugucucuaaagcac

SEQ ID NO: 2831019 - RNA, 19 nt, Human
cugaugucucuaaagcacu

SEQ ID NO: 2831020 - RNA, 15 nt, Human
cugauguccucacca

SEQ ID NO: 2831021 - RNA, 20 nt, Human
cugauccugugaaguaagga

SEQ ID NO: 2831022 - RNA, 23 nt, Human
cugauccugugaaguaaggaugu

SEQ ID NO: 2831023 - RNA, 19 nt, Human
cugaaucgagugagacaaa

SEQ ID NO: 2831024 - RNA, 13 nt, Human
cugagugccuggc

SEQ ID NO: 2831025 - RNA, 14 nt, Human
cugagugccuggcc

SEQ ID NO: 2831026 - RNA, 16 nt, Human
cugagugccuggccaa

SEQ ID NO: 2831027 - RNA, 14 nt, Human
cugagugccuuuug

SEQ ID NO: 2831028 - RNA, 15 nt, Human
cugaguuuuguuuug

SEQ ID NO: 2831029 - RNA, 21 nt, Human
cugaguuuucucuuugugggg

SEQ ID NO: 2831030 - RNA, 16 nt, Human
cugagugccuuuuggu

SEQ ID NO: 2831031 - RNA, 15 nt, Human
cugagugccuuuugg

SEQ ID NO: 2831032 - RNA, 19 nt, Human
cugagugccuggccaaagg

SEQ ID NO: 2831033 - RNA, 13 nt, Human
cugaguccuggcc

SEQ ID NO: 2831034 - RNA, 14 nt, Human
cugaguccuggccc

SEQ ID NO: 2831035 - RNA, 15 nt, Human
cugaguccuggccca

SEQ ID NO: 2831036 - RNA, 20 nt, Human
cugagucccaggcugagccu

SEQ ID NO: 2831037 - RNA, 12 nt, Human
cugagggcaaau

SEQ ID NO: 2831038 - RNA, 13 nt, Human
cugagggcaaauc

SEQ ID NO: 2831039 - RNA, 19 nt, Human
cugagggcaaauccagucc

SEQ ID NO: 2831040 - RNA, 20 nt, Human
cugagggcagaaagguucug

SEQ ID NO: 2831041 - RNA, 23 nt, Human
cugagggcagaaagguucugccc

SEQ ID NO: 2831042 - RNA, 21 nt, Human
cugagggaccaacugggccca

SEQ ID NO: 2831043 - RNA, 20 nt, Human
cugagggaccaacugggccc

SEQ ID NO: 2831044 - RNA, 19 nt, Human
cugagggaccaacugggcc

SEQ ID NO: 2831045 - RNA, 12 nt, Human
cugagggaccaa

SEQ ID NO: 2831046 - RNA, 18 nt, Human
cugagggaccaacugggc

SEQ ID NO: 2831047 - RNA, 16 nt, Human
cugagggaccaacugg

SEQ ID NO: 2831048 - RNA, 21 nt, Human
cugaggcuuuggauuugacau

SEQ ID NO: 2831049 - RNA, 16 nt, Human
cugagggaaagugcau

SEQ ID NO: 2831050 - RNA, 18 nt, Human
cugaggcuuuggauuuga

SEQ ID NO: 2831051 - RNA, 17 nt, Human
cugaggcuuuggauuug

SEQ ID NO: 2831052 - RNA, 15 nt, Human
cugaggcuuuggauu

SEQ ID NO: 2831053 - RNA, 14 nt, Human
cugaggcuuuggau

SEQ ID NO: 2831054 - RNA, 14 nt, Human
cugacccagugaga

SEQ ID NO: 2831055 - RNA, 13 nt, Human
cugacccagugag

SEQ ID NO: 2831056 - RNA, 22 nt, Human
cugaagucacugcacagugcau

SEQ ID NO: 2831057 - RNA, 17 nt, Human
cugaagucacugcacag

SEQ ID NO: 2831058 - RNA, 16 nt, Human
cugaagucacugcaca

SEQ ID NO: 2831059 - RNA, 15 nt, Human
cugaagucacacagu

SEQ ID NO: 2831060 - RNA, 17 nt, Human
cugaaguagugugcagu

SEQ ID NO: 2831061 - RNA, 16 nt, Human
cugaaguacuaacaca

SEQ ID NO: 2831062 - RNA, 17 nt, Human
cugaaguacuaacacaa

SEQ ID NO: 2831063 - RNA, 14 nt, Human
cugaagucacacag

SEQ ID NO: 2831064 - RNA, 22 nt, Human
cugaagguggccacuuuaagag

SEQ ID NO: 2831065 - RNA, 18 nt, Human
cugaagugagcacagccu

SEQ ID NO: 2831066 - RNA, 19 nt, Human
cugaagugagcacagccua

SEQ ID NO: 2831067 - RNA, 21 nt, Human
cugaagugagcacagccuagg

SEQ ID NO: 2831068 - RNA, 16 nt, Human
cugaagugcuuagugu

SEQ ID NO: 2831069 - RNA, 12 nt, Human
cugaauaaaugg

SEQ ID NO: 2831070 - RNA, 14 nt, Human
cugaauaaauggua

SEQ ID NO: 2831071 - RNA, 17 nt, Human
cugaauaaaugguagua

SEQ ID NO: 2831072 - RNA, 18 nt, Human
cucuuuggcuccccugua

SEQ ID NO: 2831073 - RNA, 23 nt, Human
cugaaccgcacagcucaggaggc

SEQ ID NO: 2831074 - RNA, 21 nt, Human
cugaaccgcacagcucaggag

SEQ ID NO: 2831075 - RNA, 20 nt, Human
cugaaccgcacagcucagga

SEQ ID NO: 2831076 - RNA, 19 nt, Human
cugaaccgcacagcucagg

SEQ ID NO: 2831077 - RNA, 18 nt, Human
cugaaccgcacagcucag

SEQ ID NO: 2831078 - RNA, 17 nt, Human
cugaaccgcacagcuca

SEQ ID NO: 2831079 - RNA, 15 nt, Human
cugaaccgcacagcu

SEQ ID NO: 2831080 - RNA, 21 nt, Human
cugaagacucauucuucugua

SEQ ID NO: 2831081 - RNA, 19 nt, Human
cugaagacucauucuucug

SEQ ID NO: 2831082 - RNA, 22 nt, Human
cugaacuucaggauaauaaagu

SEQ ID NO: 2831083 - RNA, 19 nt, Human
cugaagaggaacugggccu

SEQ ID NO: 2831084 - RNA, 22 nt, Human
cugaagagacaguuauuuauag

SEQ ID NO: 2831085 - RNA, 14 nt, Human
cugaacuuugaaga

SEQ ID NO: 2831086 - RNA, 18 nt, Human
cugaacuuugaagacccg

SEQ ID NO: 2831087 - RNA, 14 nt, Human
cugaagacugagga

SEQ ID NO: 2831088 - RNA, 15 nt, Human
cugaagacugaggac

SEQ ID NO: 2831089 - RNA, 14 nt, Human
cugaagacuugccc

SEQ ID NO: 2831090 - RNA, 19 nt, Human
cugacagacacaggcccgg

SEQ ID NO: 2831091 - RNA, 21 nt, Human
cugacagacacaggcccggcu

SEQ ID NO: 2831092 - RNA, 19 nt, Human
cugacagacagcccuccau

SEQ ID NO: 2831093 - RNA, 17 nt, Human
cugacagacagcccucc

SEQ ID NO: 2831094 - RNA, 11 nt, Human
cugacaggcaa

SEQ ID NO: 2831095 - RNA, 19 nt, Human
cugacagcugucccugccc

SEQ ID NO: 2831096 - RNA, 17 nt, Human
cugaauauacagcaggu

SEQ ID NO: 2831097 - RNA, 15 nt, Human
cugaauagaaauggg

SEQ ID NO: 2831098 - RNA, 16 nt, Human
cugaauagaaauggga

SEQ ID NO: 2831099 - RNA, 18 nt, Human
cugaauauuuuuugaggc

SEQ ID NO: 2831100 - RNA, 20 nt, Human
cugaauccauuaaaaauggg

SEQ ID NO: 2831101 - RNA, 19 nt, Human
cugaaucccccuugccacc

SEQ ID NO: 2831102 - RNA, 20 nt, Human
cugaaucccccuugccaccc

SEQ ID NO: 2831103 - RNA, 21 nt, Human
cugaaucccccuugccacccc

SEQ ID NO: 2831104 - RNA, 22 nt, Human
cugaaucccccuugccacccca

SEQ ID NO: 2831105 - RNA, 19 nt, Human
cugacaggcaaugcuggcu

SEQ ID NO: 2831106 - RNA, 18 nt, Human
cugacaggcaaugcuggc

SEQ ID NO: 2831107 - RNA, 17 nt, Human
cugacaggcaaugcugg

SEQ ID NO: 2831108 - RNA, 16 nt, Human
cugacaggcaaugcug

SEQ ID NO: 2831109 - RNA, 20 nt, Human
cugacaggcaaugcuggcug

SEQ ID NO: 2831110 - RNA, 17 nt, Human
cugacauuguuggccaa

SEQ ID NO: 2831111 - RNA, 14 nt, Human
cugacauugccaaa

SEQ ID NO: 2831112 - RNA, 16 nt, Human
cugacauugccaaaaa

SEQ ID NO: 2831113 - RNA, 17 nt, Human
cugacauugccaaaaag

SEQ ID NO: 2831114 - RNA, 20 nt, Human
cugacauugccaaaaaggau

SEQ ID NO: 2831115 - RNA, 21 nt, Human
cugacauugccaaaaaggaua

SEQ ID NO: 2831116 - RNA, 11 nt, Human
cugacccacug

SEQ ID NO: 2831117 - RNA, 23 nt, Human
cugaccauccacucuacccuccc

SEQ ID NO: 2831118 - RNA, 22 nt, Human
cugaccauccacucuacccucc

SEQ ID NO: 2831119 - RNA, 19 nt, Human
cugaccauccacucuaccc

SEQ ID NO: 2831120 - RNA, 22 nt, Human
cugaccauauugugcuucacag

SEQ ID NO: 2831121 - RNA, 23 nt, Human
cugaccaguuuaaccugaugcag

SEQ ID NO: 2831122 - RNA, 16 nt, Human
cugaccauccacucua

SEQ ID NO: 2831123 - RNA, 15 nt, Human
cugaccauccacucu

SEQ ID NO: 2831124 - RNA, 13 nt, Human
cucuucuccuuuc

SEQ ID NO: 2831125 - RNA, 15 nt, Human
cucuucuccuuucac

SEQ ID NO: 2831126 - RNA, 16 nt, Human
cucuucuccuuucaca

SEQ ID NO: 2831127 - RNA, 23 nt, Human
cucuucuggggcaggcugggcca

SEQ ID NO: 2831128 - RNA, 21 nt, Human
cucuucuggggcaggcugggc

SEQ ID NO: 2831129 - RNA, 19 nt, Human
cucuucuggggcaggcugg

SEQ ID NO: 2831130 - RNA, 11 nt, Human
cucuucuggcu

SEQ ID NO: 2831131 - RNA, 14 nt, Human
cucuucuggcucaa

SEQ ID NO: 2831132 - RNA, 18 nt, Human
cucuucugcuccacccuu

SEQ ID NO: 2831133 - RNA, 16 nt, Human
cucuucugcuccaccc

SEQ ID NO: 2831134 - RNA, 15 nt, Human
cucuucugcuccacc

SEQ ID NO: 2831135 - RNA, 14 nt, Human
cucuucugcuccac

SEQ ID NO: 2831136 - RNA, 20 nt, Human
cucuucugcuccacccuugg

SEQ ID NO: 2831137 - RNA, 19 nt, Human
cucuucugcuccacccuug

SEQ ID NO: 2831138 - RNA, 21 nt, Human
cucuucugcuccacccuuggc

SEQ ID NO: 2831139 - RNA, 13 nt, Human
cucuucugcucca

SEQ ID NO: 2831140 - RNA, 19 nt, Human
cucuucauacuuuuuuuca

SEQ ID NO: 2831141 - RNA, 13 nt, Human
cucuucauacuuu

SEQ ID NO: 2831142 - RNA, 12 nt, Human
cucuucuccagg

SEQ ID NO: 2831143 - RNA, 19 nt, Human
cucuucuccacuggaugga

SEQ ID NO: 2831144 - RNA, 16 nt, Human
cucuucuccccagagu

SEQ ID NO: 2831145 - RNA, 15 nt, Human
cucuucuccacugga

SEQ ID NO: 2831146 - RNA, 17 nt, Human
cucuucuccacuggaug

SEQ ID NO: 2831147 - RNA, 14 nt, Human
cucuucuccacugg

SEQ ID NO: 2831148 - RNA, 19 nt, Human
cucuguucugcacacagca

SEQ ID NO: 2831149 - RNA, 21 nt, Human
cucuguucugcacacagcacg

SEQ ID NO: 2831150 - RNA, 20 nt, Human
cucuguucugcacacagcac

SEQ ID NO: 2831151 - RNA, 20 nt, Human
cucuuaaagcugccuguagu

SEQ ID NO: 2831152 - RNA, 12 nt, Human
cucuuaaaguug

SEQ ID NO: 2831153 - RNA, 18 nt, Human
cucuuaaaguuggaauuu

SEQ ID NO: 2831154 - RNA, 22 nt, Human
cucuuaaaguuggaauuuacca

SEQ ID NO: 2831155 - RNA, 17 nt, Human
cucuuaaacuugugaau

SEQ ID NO: 2831156 - RNA, 13 nt, Human
cucuguugacugg

SEQ ID NO: 2831157 - RNA, 17 nt, Human
cucuguugacuggcugu

SEQ ID NO: 2831158 - RNA, 19 nt, Human
cucuguugacuggcugugu

SEQ ID NO: 2831159 - RNA, 17 nt, Human
cucuucaggccucccuc

SEQ ID NO: 2831160 - RNA, 20 nt, Human
cucuucaggccucccucucu

SEQ ID NO: 2831161 - RNA, 19 nt, Human
cucuucaggccucccucuc

SEQ ID NO: 2831162 - RNA, 18 nt, Human
cucuucaggccucccucu

SEQ ID NO: 2831163 - RNA, 19 nt, Human
cucuucaguuaagccuuug

SEQ ID NO: 2831164 - RNA, 23 nt, Human
cucuucaguuaagccuuuggaaa

SEQ ID NO: 2831165 - RNA, 20 nt, Human
cucuucaguuaagccuuugg

SEQ ID NO: 2831166 - RNA, 14 nt, Human
cucuuucacauugu

SEQ ID NO: 2831167 - RNA, 15 nt, Human
cucuuucacauuguu

SEQ ID NO: 2831168 - RNA, 16 nt, Human
cucuuucacauuguuu

SEQ ID NO: 2831169 - RNA, 11 nt, Human
cucuuucaaag

SEQ ID NO: 2831170 - RNA, 23 nt, Human
cucuugugcuggauggagcccag

SEQ ID NO: 2831171 - RNA, 14 nt, Human
cucuugugcuggau

SEQ ID NO: 2831172 - RNA, 13 nt, Human
cucuuuauuuucc

SEQ ID NO: 2831173 - RNA, 22 nt, Human
cucuuuauuuuccccuaucauu

SEQ ID NO: 2831174 - RNA, 20 nt, Human
cucuuguauaagauccuaga

SEQ ID NO: 2831175 - RNA, 21 nt, Human
cucuuguauaagauccuagau

SEQ ID NO: 2831176 - RNA, 14 nt, Human
cucuugucccacgu

SEQ ID NO: 2831177 - RNA, 16 nt, Human
cucuugucccacgugu

SEQ ID NO: 2831178 - RNA, 18 nt, Human
cucuugucccacgugucu

SEQ ID NO: 2831179 - RNA, 21 nt, Human
cucuugucccacgugucuucc

SEQ ID NO: 2831180 - RNA, 23 nt, Human
cucuugucccacgugucuuccac

SEQ ID NO: 2831181 - RNA, 21 nt, Human
cucuuguccucaguccauuua

SEQ ID NO: 2831182 - RNA, 22 nt, Human
cucuuguccucaguccauuuau

SEQ ID NO: 2831183 - RNA, 20 nt, Human
cucuuguagcccaggcugga

SEQ ID NO: 2831184 - RNA, 12 nt, Human
cucuuucugggc

SEQ ID NO: 2831185 - RNA, 13 nt, Human
cucuuucuguaua

SEQ ID NO: 2831186 - RNA, 11 nt, Human
cucuuucugua

SEQ ID NO: 2831187 - RNA, 22 nt, Human
cucuugucuggcaaaagaaaaa

SEQ ID NO: 2831188 - RNA, 12 nt, Human
cucuuucucucc

SEQ ID NO: 2831189 - RNA, 13 nt, Human
cucuuucucuccc

SEQ ID NO: 2831190 - RNA, 14 nt, Human
cucuuucucucccc

SEQ ID NO: 2831191 - RNA, 15 nt, Human
cucuuucucucccca

SEQ ID NO: 2831192 - RNA, 13 nt, Human
cucuuucucucuu

SEQ ID NO: 2831193 - RNA, 14 nt, Human
cucuuucucucuuc

SEQ ID NO: 2831194 - RNA, 16 nt, Human
cucuuucucucuuccc

SEQ ID NO: 2831195 - RNA, 17 nt, Human
cucuuucucucuucccu

SEQ ID NO: 2831196 - RNA, 12 nt, Human
cucuuucucuuu

SEQ ID NO: 2831197 - RNA, 13 nt, Human
cucuuucucuuuc

SEQ ID NO: 2831198 - RNA, 14 nt, Human
cucuuucucuuucu

SEQ ID NO: 2831199 - RNA, 18 nt, Human
cucuuucucuuucuuccu

SEQ ID NO: 2831200 - RNA, 15 nt, Human
cucuugaccucaggu

SEQ ID NO: 2831201 - RNA, 13 nt, Human
cucuugaccucag

SEQ ID NO: 2831202 - RNA, 16 nt, Human
cucuugaccucaggug

SEQ ID NO: 2831203 - RNA, 16 nt, Human
cucuugaccuuguaga

SEQ ID NO: 2831204 - RNA, 18 nt, Human
cucuugaacuccugaccu

SEQ ID NO: 2831205 - RNA, 17 nt, Human
cucuugguguuaaaaca

SEQ ID NO: 2831206 - RNA, 22 nt, Human
cucuugguguuaaaacacuucu

SEQ ID NO: 2831207 - RNA, 14 nt, Human
cucuuggcuccacu

SEQ ID NO: 2831208 - RNA, 21 nt, Human
cucuugggaacugaacucacu

SEQ ID NO: 2831209 - RNA, 12 nt, Human
cucuccuguaag

SEQ ID NO: 2831210 - RNA, 19 nt, Human
cucuccuguaagccaaaga

SEQ ID NO: 2831211 - RNA, 20 nt, Human
cucuccuguaagccaaagaa

SEQ ID NO: 2831212 - RNA, 12 nt, Human
cucuccccacac

SEQ ID NO: 2831213 - RNA, 14 nt, Human
cucucccauuuccu

SEQ ID NO: 2831214 - RNA, 18 nt, Human
cucuccccaacccccauu

SEQ ID NO: 2831215 - RNA, 20 nt, Human
cucuccccaacccccauucu

SEQ ID NO: 2831216 - RNA, 15 nt, Human
cucuccccacacuaa

SEQ ID NO: 2831217 - RNA, 14 nt, Human
cucuccccaccccu

SEQ ID NO: 2831218 - RNA, 17 nt, Human
cucuccccaccccuacc

SEQ ID NO: 2831219 - RNA, 19 nt, Human
cucuccccaccccuacccc

SEQ ID NO: 2831220 - RNA, 22 nt, Human
cucuccccaccccuaccccugg

SEQ ID NO: 2831221 - RNA, 14 nt, Human
cucuccccacacua

SEQ ID NO: 2831222 - RNA, 13 nt, Human
cucuccccacacu

SEQ ID NO: 2831223 - RNA, 13 nt, Human
cucuccuuugaaa

SEQ ID NO: 2831224 - RNA, 21 nt, Human
cucuccuuugaaaccugcucu

SEQ ID NO: 2831225 - RNA, 10 nt, Human
cucuccuuuu

SEQ ID NO: 2831226 - RNA, 11 nt, Human
cucuccuuuuc

SEQ ID NO: 2831227 - RNA, 12 nt, Human
cucuccuuuucu

SEQ ID NO: 2831228 - RNA, 13 nt, Human
cucuccuuuucuu

SEQ ID NO: 2831229 - RNA, 17 nt, Human
cucuccuuuucuuuugu

SEQ ID NO: 2831230 - RNA, 18 nt, Human
cucuccuuuucuuuuguu

SEQ ID NO: 2831231 - RNA, 19 nt, Human
cucuccuuuucuuuuguua

SEQ ID NO: 2831232 - RNA, 21 nt, Human
cucuccuuuucuuuuguuacu

SEQ ID NO: 2831233 - RNA, 22 nt, Human
cucuccuuuucuuuuguuacug

SEQ ID NO: 2831234 - RNA, 17 nt, Human
cucucgcaccuuuccaa

SEQ ID NO: 2831235 - RNA, 19 nt, Human
cucucgcaccuuuccaaag

SEQ ID NO: 2831236 - RNA, 15 nt, Human
cucucgcaucuuccc

SEQ ID NO: 2831237 - RNA, 16 nt, Human
cucucgcaucuuccca

SEQ ID NO: 2831238 - RNA, 17 nt, Human
cucucgcaucuucccaa

SEQ ID NO: 2831239 - RNA, 22 nt, Human
cucucggaaggcuggcugggca

SEQ ID NO: 2831240 - RNA, 19 nt, Human
cucucggaaggcuggcugg

SEQ ID NO: 2831241 - RNA, 18 nt, Human
cucucggaaggcuggcug

SEQ ID NO: 2831242 - RNA, 16 nt, Human
cucucggaaggcuggc

SEQ ID NO: 2831243 - RNA, 18 nt, Human
cucucgcaccuuuccaaa

SEQ ID NO: 2831244 - RNA, 13 nt, Human
cucucuacagugc

SEQ ID NO: 2831245 - RNA, 15 nt, Human
cucucuacagugcca

SEQ ID NO: 2831246 - RNA, 19 nt, Human
cucucuacaaacucccacu

SEQ ID NO: 2831247 - RNA, 14 nt, Human
cucucggcucccca

SEQ ID NO: 2831248 - RNA, 15 nt, Human
cucucggcuccccau

SEQ ID NO: 2831249 - RNA, 16 nt, Human
cucucggcuccccaug

SEQ ID NO: 2831250 - RNA, 19 nt, Human
cucucggguugugugucug

SEQ ID NO: 2831251 - RNA, 16 nt, Human
cucucgguugaaaccu

SEQ ID NO: 2831252 - RNA, 17 nt, Human
cucucggcuccccaugu

SEQ ID NO: 2831253 - RNA, 18 nt, Human
cucucggcuccccaugug

SEQ ID NO: 2831254 - RNA, 18 nt, Human
cucucugcaccguacugu

SEQ ID NO: 2831255 - RNA, 18 nt, Human
cucucugaguccuggccc

SEQ ID NO: 2831256 - RNA, 19 nt, Human
cucucugaguccuggccca

SEQ ID NO: 2831257 - RNA, 20 nt, Human
cucucugaguccuggcccaa

SEQ ID NO: 2831258 - RNA, 14 nt, Human
cucuccaggcacca

SEQ ID NO: 2831259 - RNA, 20 nt, Human
cucuccagauguuuccagac

SEQ ID NO: 2831260 - RNA, 15 nt, Human
cucuccacugccuuc

SEQ ID NO: 2831261 - RNA, 11 nt, Human
cucucccaggg

SEQ ID NO: 2831262 - RNA, 15 nt, Human
cucucccaaguccac

SEQ ID NO: 2831263 - RNA, 20 nt, Human
cucucccacgggaccugggg

SEQ ID NO: 2831264 - RNA, 21 nt, Human
cucucccacgggaccuggggc

SEQ ID NO: 2831265 - RNA, 17 nt, Human
cucuaaucgaaagaaaa

SEQ ID NO: 2831266 - RNA, 19 nt, Human
cucuaaauucuuuauuucu

SEQ ID NO: 2831267 - RNA, 14 nt, Human
cucuaagguugggc

SEQ ID NO: 2831268 - RNA, 13 nt, Human
cucuaauaaaaca

SEQ ID NO: 2831269 - RNA, 12 nt, Human
cucuaauaagaa

SEQ ID NO: 2831270 - RNA, 14 nt, Human
cucuaauaagaaaa

SEQ ID NO: 2831271 - RNA, 15 nt, Human
cucuaauaagaaaac

SEQ ID NO: 2831272 - RNA, 18 nt, Human
cucuaauaagaaaaccac

SEQ ID NO: 2831273 - RNA, 12 nt, Human
cucucaguguuu

SEQ ID NO: 2831274 - RNA, 13 nt, Human
cucucaguguuuu

SEQ ID NO: 2831275 - RNA, 18 nt, Human
cucucaguguuuuggacu

SEQ ID NO: 2831276 - RNA, 22 nt, Human
cucucaguguuuuggacuccau

SEQ ID NO: 2831277 - RNA, 18 nt, Human
cucucaguuaaaauguga

SEQ ID NO: 2831278 - RNA, 22 nt, Human
cucucauauauagacagcuuug

SEQ ID NO: 2831279 - RNA, 23 nt, Human
cucuccaagucucaguggcuuca

SEQ ID NO: 2831280 - RNA, 13 nt, Human
cucucaucucagg

SEQ ID NO: 2831281 - RNA, 20 nt, Human
cucuccaagucucaguggcu

SEQ ID NO: 2831282 - RNA, 11 nt, Human
cucucaucuga

SEQ ID NO: 2831283 - RNA, 14 nt, Human
cucucaucugaggc

SEQ ID NO: 2831284 - RNA, 15 nt, Human
cucucaucugaggca

SEQ ID NO: 2831285 - RNA, 19 nt, Human
cucucauccuccaguaccu

SEQ ID NO: 2831286 - RNA, 16 nt, Human
cucuccacugccuucg

SEQ ID NO: 2831287 - RNA, 19 nt, Human
cucugccaacuucuucaga

SEQ ID NO: 2831288 - RNA, 13 nt, Human
cucugcaucccag

SEQ ID NO: 2831289 - RNA, 14 nt, Human
cucugcaucccagc

SEQ ID NO: 2831290 - RNA, 15 nt, Human
cucugcaucccagca

SEQ ID NO: 2831291 - RNA, 22 nt, Human
cucugcaauuccccucugcugc

SEQ ID NO: 2831292 - RNA, 23 nt, Human
cucugcaauuccccucugcugcu

SEQ ID NO: 2831293 - RNA, 18 nt, Human
cucugcaauuccccucug

SEQ ID NO: 2831294 - RNA, 19 nt, Human
cucugcaauuccccucugc

SEQ ID NO: 2831295 - RNA, 20 nt, Human
cucugcaauuccccucugcu

SEQ ID NO: 2831296 - RNA, 21 nt, Human
cucugcaauuccccucugcug

SEQ ID NO: 2831297 - RNA, 17 nt, Human
cucugcaaugggcacug

SEQ ID NO: 2831298 - RNA, 15 nt, Human
cucugcaauuccccu

SEQ ID NO: 2831299 - RNA, 18 nt, Human
cucugcaaugggcacugg

SEQ ID NO: 2831300 - RNA, 23 nt, Human
cucugcaaugggcacugggauga

SEQ ID NO: 2831301 - RNA, 16 nt, Human
cucugcaauuccccuc

SEQ ID NO: 2831302 - RNA, 17 nt, Human
cucugcaauuccccucu

SEQ ID NO: 2831303 - RNA, 20 nt, Human
cucugauuuucaaagcuuuu

SEQ ID NO: 2831304 - RNA, 22 nt, Human
cucugauuuucaaagcuuuuuc

SEQ ID NO: 2831305 - RNA, 17 nt, Human
cucugcaaaaggagaga

SEQ ID NO: 2831306 - RNA, 18 nt, Human
cucugcaaaaggagagac

SEQ ID NO: 2831307 - RNA, 15 nt, Human
cucugauuuucaaag

SEQ ID NO: 2831308 - RNA, 19 nt, Human
cucugauuuucaaagcuuu

SEQ ID NO: 2831309 - RNA, 18 nt, Human
cucugauuuucaaagcuu

SEQ ID NO: 2831310 - RNA, 17 nt, Human
cucugaugaagaggagu

SEQ ID NO: 2831311 - RNA, 13 nt, Human
cucugauauggga

SEQ ID NO: 2831312 - RNA, 14 nt, Human
cucugauaugggac

SEQ ID NO: 2831313 - RNA, 15 nt, Human
cucugauaugggacu

SEQ ID NO: 2831314 - RNA, 16 nt, Human
cucugauaugggacug

SEQ ID NO: 2831315 - RNA, 17 nt, Human
cucugauaugggacuga

SEQ ID NO: 2831316 - RNA, 19 nt, Human
cucugauaugggacugagc

SEQ ID NO: 2831317 - RNA, 21 nt, Human
cucugauaugggacugagccu

SEQ ID NO: 2831318 - RNA, 15 nt, Human
cucugagcgggaggc

SEQ ID NO: 2831319 - RNA, 16 nt, Human
cucugagcgggaggca

SEQ ID NO: 2831320 - RNA, 17 nt, Human
cucugagcgggaggcag

SEQ ID NO: 2831321 - RNA, 15 nt, Human
cucugagccuuggga

SEQ ID NO: 2831322 - RNA, 16 nt, Human
cucugagcaaaugugg

SEQ ID NO: 2831323 - RNA, 18 nt, Human
cucugagagucuagauuc

SEQ ID NO: 2831324 - RNA, 19 nt, Human
cucugagagucuagauucu

SEQ ID NO: 2831325 - RNA, 22 nt, Human
cucugagagucuagauucucug

SEQ ID NO: 2831326 - RNA, 12 nt, Human
cucugagcccau

SEQ ID NO: 2831327 - RNA, 13 nt, Human
cucugagcccaug

SEQ ID NO: 2831328 - RNA, 21 nt, Human
cucugagcccauguucugccc

SEQ ID NO: 2831329 - RNA, 22 nt, Human
cucugagcccauguucugcccc

SEQ ID NO: 2831330 - RNA, 21 nt, Human
cucugagaucuaaggauguca

SEQ ID NO: 2831331 - RNA, 22 nt, Human
cucugagaucuaaggaugucac

SEQ ID NO: 2831332 - RNA, 20 nt, Human
cucugaggcucuuucugggc

SEQ ID NO: 2831333 - RNA, 19 nt, Human
cucugaggcucuuucuggg

SEQ ID NO: 2831334 - RNA, 15 nt, Human
cucugagaagaggag

SEQ ID NO: 2831335 - RNA, 16 nt, Human
cucugagaagaggagc

SEQ ID NO: 2831336 - RNA, 18 nt, Human
cucugagaagaggagccc

SEQ ID NO: 2831337 - RNA, 19 nt, Human
cucugacuuaagcaaaaga

SEQ ID NO: 2831338 - RNA, 20 nt, Human
cucugacuuaagcaaaagaa

SEQ ID NO: 2831339 - RNA, 22 nt, Human
cucugacuuaagcaaaagaaaa

SEQ ID NO: 2831340 - RNA, 13 nt, Human
cucucugcuguac

SEQ ID NO: 2831341 - RNA, 12 nt, Human
cucucugcagcu

SEQ ID NO: 2831342 - RNA, 13 nt, Human
cucucugcagcug

SEQ ID NO: 2831343 - RNA, 14 nt, Human
cucucugcagcugc

SEQ ID NO: 2831344 - RNA, 15 nt, Human
cucucugcagcugcc

SEQ ID NO: 2831345 - RNA, 16 nt, Human
cucucugcagcugccg

SEQ ID NO: 2831346 - RNA, 12 nt, Human
cucucugcccua

SEQ ID NO: 2831347 - RNA, 21 nt, Human
cucucugcccuaaugcgcagg

SEQ ID NO: 2831348 - RNA, 13 nt, Human
cucucugcccuaa

SEQ ID NO: 2831349 - RNA, 14 nt, Human
cucugccuccucuu

SEQ ID NO: 2831350 - RNA, 12 nt, Human
cucugcccugcg

SEQ ID NO: 2831351 - RNA, 22 nt, Human
cucugcccucauuacugggccu

SEQ ID NO: 2831352 - RNA, 23 nt, Human
cucugcccucauuacugggccuu

SEQ ID NO: 2831353 - RNA, 11 nt, Human
cucugcccugc

SEQ ID NO: 2831354 - RNA, 23 nt, Human
cucugcccuaaugcgcaggcugg

SEQ ID NO: 2831355 - RNA, 23 nt, Human
cucugccaccagagaccguccuc

SEQ ID NO: 2831356 - RNA, 11 nt, Human
cucugccacca

SEQ ID NO: 2831357 - RNA, 23 nt, Human
cucugccaacuucuucagagcug

SEQ ID NO: 2831358 - RNA, 14 nt, Human
cucugccacacucu

SEQ ID NO: 2831359 - RNA, 15 nt, Human
cucugccacacucug

SEQ ID NO: 2831360 - RNA, 17 nt, Human
cucugccacacucugac

SEQ ID NO: 2831361 - RNA, 14 nt, Human
cucugccaccagag

SEQ ID NO: 2831362 - RNA, 16 nt, Human
cucugccaccagagac

SEQ ID NO: 2831363 - RNA, 17 nt, Human
cucugccaccagagacc

SEQ ID NO: 2831364 - RNA, 18 nt, Human
cucugccaccagagaccg

SEQ ID NO: 2831365 - RNA, 14 nt, Human
cucugccagccaca

SEQ ID NO: 2831366 - RNA, 13 nt, Human
cucugccagggca

SEQ ID NO: 2831367 - RNA, 15 nt, Human
cucugccagggcagu

SEQ ID NO: 2831368 - RNA, 18 nt, Human
cucugccagggcagugcu

SEQ ID NO: 2831369 - RNA, 19 nt, Human
cucugccagggcagugcua

SEQ ID NO: 2831370 - RNA, 22 nt, Human
cucugccagggcagugcuagug

SEQ ID NO: 2831371 - RNA, 22 nt, Human
cucugccagaagauccccucag

SEQ ID NO: 2831372 - RNA, 17 nt, Human
cucugccagaagauccc

SEQ ID NO: 2831373 - RNA, 23 nt, Human
cucugccagaagauccccucagg

SEQ ID NO: 2831374 - RNA, 15 nt, Human
cucugccagcaaaga

SEQ ID NO: 2831375 - RNA, 16 nt, Human
cucugccagcaaagag

SEQ ID NO: 2831376 - RNA, 12 nt, Human
cucugccccagc

SEQ ID NO: 2831377 - RNA, 18 nt, Human
cucugccccagcucuggc

SEQ ID NO: 2831378 - RNA, 17 nt, Human
cucugccccagcucugg

SEQ ID NO: 2831379 - RNA, 16 nt, Human
cucugccccagcucug

SEQ ID NO: 2831380 - RNA, 13 nt, Human
cucugccccagcu

SEQ ID NO: 2831381 - RNA, 21 nt, Human
cucugccccagcucuggcuuc

SEQ ID NO: 2831382 - RNA, 19 nt, Human
cucugccccagcucuggcu

SEQ ID NO: 2831383 - RNA, 22 nt, Human
cucugcccuaaugcgcaggcug

SEQ ID NO: 2831384 - RNA, 14 nt, Human
cucugccucugaca

SEQ ID NO: 2831385 - RNA, 15 nt, Human
cucugccuccucuuc

SEQ ID NO: 2831386 - RNA, 16 nt, Human
cucugccuccucuuca

SEQ ID NO: 2831387 - RNA, 16 nt, Human
cucugccuccuggguu

SEQ ID NO: 2831388 - RNA, 20 nt, Human
cucugccuucgaggucagag

SEQ ID NO: 2831389 - RNA, 13 nt, Human
cucugccuugccu

SEQ ID NO: 2831390 - RNA, 14 nt, Human
cucugccuugccuu

SEQ ID NO: 2831391 - RNA, 15 nt, Human
cucugccuugccuuu

SEQ ID NO: 2831392 - RNA, 23 nt, Human
cucugccuugccuuuagccccuc

SEQ ID NO: 2831393 - RNA, 15 nt, Human
cucugccuuugacau

SEQ ID NO: 2831394 - RNA, 19 nt, Human
cucugccuuugacauuuaa

SEQ ID NO: 2831395 - RNA, 23 nt, Human
cucugccuuugacauuuaauuua

SEQ ID NO: 2831396 - RNA, 14 nt, Human
cucugcggacccca

SEQ ID NO: 2831397 - RNA, 15 nt, Human
cucugcggaccccag

SEQ ID NO: 2831398 - RNA, 16 nt, Human
cucugcggaccccagc

SEQ ID NO: 2831399 - RNA, 17 nt, Human
cucugcggaccccagcu

SEQ ID NO: 2831400 - RNA, 19 nt, Human
cucugcggaccccagcugu

SEQ ID NO: 2831401 - RNA, 20 nt, Human
cucugcggaccccagcugug

SEQ ID NO: 2831402 - RNA, 15 nt, Human
cucugcuuuggaaau

SEQ ID NO: 2831403 - RNA, 14 nt, Human
cucuggacucuaaa

SEQ ID NO: 2831404 - RNA, 16 nt, Human
cucuggacucuaaaga

SEQ ID NO: 2831405 - RNA, 21 nt, Human
cucuggacucuaaagaccaaa

SEQ ID NO: 2831406 - RNA, 13 nt, Human
cucuggacuggcu

SEQ ID NO: 2831407 - RNA, 18 nt, Human
cucuggaagcccuggaga

SEQ ID NO: 2831408 - RNA, 19 nt, Human
cucuggaagcccuggagac

SEQ ID NO: 2831409 - RNA, 16 nt, Human
cucuggacaaagcguu

SEQ ID NO: 2831410 - RNA, 15 nt, Human
cucuggagacagccc

SEQ ID NO: 2831411 - RNA, 16 nt, Human
cucuggagacagcccc

SEQ ID NO: 2831412 - RNA, 17 nt, Human
cucuggagacagcccca

SEQ ID NO: 2831413 - RNA, 18 nt, Human
cucuggagacagccccag

SEQ ID NO: 2831414 - RNA, 19 nt, Human
cucuggagacagccccaga

SEQ ID NO: 2831415 - RNA, 19 nt, Human
cucuggacuggcuagaguc

SEQ ID NO: 2831416 - RNA, 16 nt, Human
cucuggacuggcuaga

SEQ ID NO: 2831417 - RNA, 15 nt, Human
cucuggacuggcuag

SEQ ID NO: 2831418 - RNA, 14 nt, Human
cucuggacuggcua

SEQ ID NO: 2831419 - RNA, 15 nt, Human
cucuggagagaaaca

SEQ ID NO: 2831420 - RNA, 20 nt, Human
cucuggagacagccccagag

SEQ ID NO: 2831421 - RNA, 24 nt, Human
cucuggagacagccccagagcagg

SEQ ID NO: 2831422 - RNA, 12 nt, Human
cucuggagagaa

SEQ ID NO: 2831423 - RNA, 13 nt, Human
cucuggagagaaa

SEQ ID NO: 2831424 - RNA, 12 nt, Human
cuccacccugcu

SEQ ID NO: 2831425 - RNA, 11 nt, Human
cuccacccugc

SEQ ID NO: 2831426 - RNA, 23 nt, Human
cuccacagcgagggcagcugcua

SEQ ID NO: 2831427 - RNA, 22 nt, Human
cuccacagcgagggcagcugcu

SEQ ID NO: 2831428 - RNA, 21 nt, Human
cuccacagcgagggcagcugc

SEQ ID NO: 2831429 - RNA, 20 nt, Human
cuccacagcgagggcagcug

SEQ ID NO: 2831430 - RNA, 15 nt, Human
cuccacagcuaccuc

SEQ ID NO: 2831431 - RNA, 19 nt, Human
cuccacagcgagggcagcu

SEQ ID NO: 2831432 - RNA, 16 nt, Human
cuccacagcgagggca

SEQ ID NO: 2831433 - RNA, 14 nt, Human
cuccacagcgaggg

SEQ ID NO: 2831434 - RNA, 13 nt, Human
cuccacagcgagg

SEQ ID NO: 2831435 - RNA, 15 nt, Human
cuccacagccgcagc

SEQ ID NO: 2831436 - RNA, 14 nt, Human
cuccacagccgcag

SEQ ID NO: 2831437 - RNA, 14 nt, Human
cucauuuaaauauc

SEQ ID NO: 2831438 - RNA, 20 nt, Human
cuccagcucaccagccccag

SEQ ID NO: 2831439 - RNA, 19 nt, Human
cuccagcucaccagcccca

SEQ ID NO: 2831440 - RNA, 13 nt, Human
cuccagccugagc

SEQ ID NO: 2831441 - RNA, 21 nt, Human
cuccagcaacuucuucuccau

SEQ ID NO: 2831442 - RNA, 11 nt, Human
cuccagcacaa

SEQ ID NO: 2831443 - RNA, 16 nt, Human
cuccagcacaaacaca

SEQ ID NO: 2831444 - RNA, 18 nt, Human
cuccagcacaaacacaag

SEQ ID NO: 2831445 - RNA, 19 nt, Human
cuccagcacaaacacaagg

SEQ ID NO: 2831446 - RNA, 21 nt, Human
cuccagcacaaacacaagguc

SEQ ID NO: 2831447 - RNA, 14 nt, Human
cuccagccccuuuc

SEQ ID NO: 2831448 - RNA, 17 nt, Human
cuccagccccuuuccaa

SEQ ID NO: 2831449 - RNA, 18 nt, Human
cuccagccccuuuccaaa

SEQ ID NO: 2831450 - RNA, 19 nt, Human
cuccagccccuuuccaaaa

SEQ ID NO: 2831451 - RNA, 14 nt, Human
cuccagcccgggag

SEQ ID NO: 2831452 - RNA, 15 nt, Human
cuccagcccgggagc

SEQ ID NO: 2831453 - RNA, 16 nt, Human
cuccagcccgggagcc

SEQ ID NO: 2831454 - RNA, 19 nt, Human
cuccagcccgggagccuag

SEQ ID NO: 2831455 - RNA, 20 nt, Human
cuccagcccgggagccuagg

SEQ ID NO: 2831456 - RNA, 21 nt, Human
cuccagcccgggagccuagga

SEQ ID NO: 2831457 - RNA, 22 nt, Human
cuccagcccgggagccuaggac

SEQ ID NO: 2831458 - RNA, 23 nt, Human
cuccagcccgggagccuaggacc

SEQ ID NO: 2831459 - RNA, 15 nt, Human
cuccagcaacuucuu

SEQ ID NO: 2831460 - RNA, 21 nt, Human
cuccagcaacacagccugggc

SEQ ID NO: 2831461 - RNA, 20 nt, Human
cuccagcaacacagccuggg

SEQ ID NO: 2831462 - RNA, 18 nt, Human
cuccagcaacacagccug

SEQ ID NO: 2831463 - RNA, 17 nt, Human
cuccagcaacacagccu

SEQ ID NO: 2831464 - RNA, 16 nt, Human
cuccacugccucugga

SEQ ID NO: 2831465 - RNA, 19 nt, Human
cuccagaccccuggcuuuu

SEQ ID NO: 2831466 - RNA, 20 nt, Human
cuccagaccccuggcuuuuc

SEQ ID NO: 2831467 - RNA, 14 nt, Human
cuccagaccccugg

SEQ ID NO: 2831468 - RNA, 15 nt, Human
cuccagaccccuggc

SEQ ID NO: 2831469 - RNA, 17 nt, Human
cuccagaccccuggcuu

SEQ ID NO: 2831470 - RNA, 18 nt, Human
cuccagaccccuggcuuu

SEQ ID NO: 2831471 - RNA, 11 nt, Human
cuccacugccu

SEQ ID NO: 2831472 - RNA, 19 nt, Human
cuccacucucuaccagaua

SEQ ID NO: 2831473 - RNA, 14 nt, Human
cuccacucucuacc

SEQ ID NO: 2831474 - RNA, 14 nt, Human
cucccaggcgcccc

SEQ ID NO: 2831475 - RNA, 19 nt, Human
cucccaaguuuccauagca

SEQ ID NO: 2831476 - RNA, 14 nt, Human
cucccaagggaugg

SEQ ID NO: 2831477 - RNA, 18 nt, Human
cucccaagggauggugcc

SEQ ID NO: 2831478 - RNA, 22 nt, Human
cucccaaguagcugggauuaca

SEQ ID NO: 2831479 - RNA, 14 nt, Human
cuccaugugggcua

SEQ ID NO: 2831480 - RNA, 17 nt, Human
cuccauucaauuucagg

SEQ ID NO: 2831481 - RNA, 18 nt, Human
cuccauucaauuucaggc

SEQ ID NO: 2831482 - RNA, 21 nt, Human
cuccauucaauuucaggcucc

SEQ ID NO: 2831483 - RNA, 21 nt, Human
cuccauguuggucaggcuggu

SEQ ID NO: 2831484 - RNA, 14 nt, Human
cuccauuaaagucu

SEQ ID NO: 2831485 - RNA, 15 nt, Human
cuccauuaaagucug

SEQ ID NO: 2831486 - RNA, 16 nt, Human
cuccauuaaagucuga

SEQ ID NO: 2831487 - RNA, 20 nt, Human
cuccauuaaagucugaauca

SEQ ID NO: 2831488 - RNA, 13 nt, Human
cuccauucuauuu

SEQ ID NO: 2831489 - RNA, 14 nt, Human
cuccauucuauuuu

SEQ ID NO: 2831490 - RNA, 17 nt, Human
cuccauucuauuuuaga

SEQ ID NO: 2831491 - RNA, 23 nt, Human
cuccauugguccuuuuuuuuucu

SEQ ID NO: 2831492 - RNA, 20 nt, Human
cuccaucgcugucaucucag

SEQ ID NO: 2831493 - RNA, 17 nt, Human
cuccaucuaaacugccc

SEQ ID NO: 2831494 - RNA, 13 nt, Human
cuccaucuccacu

SEQ ID NO: 2831495 - RNA, 14 nt, Human
cuccaucucaugua

SEQ ID NO: 2831496 - RNA, 23 nt, Human
cuccaucucauguaucaucugga

SEQ ID NO: 2831497 - RNA, 18 nt, Human
cuccaucuaaacugcccc

SEQ ID NO: 2831498 - RNA, 11 nt, Human
cuccaggcucc

SEQ ID NO: 2831499 - RNA, 19 nt, Human
cuccagcuggguuggaaaa

SEQ ID NO: 2831500 - RNA, 14 nt, Human
cuccagccugagca

SEQ ID NO: 2831501 - RNA, 21 nt, Human
cuccagccugcccaagcccag

SEQ ID NO: 2831502 - RNA, 23 nt, Human
cuccagccugcccaagcccaggc

SEQ ID NO: 2831503 - RNA, 16 nt, Human
cuccagcucagaaccc

SEQ ID NO: 2831504 - RNA, 17 nt, Human
cuccagcucagaaccca

SEQ ID NO: 2831505 - RNA, 19 nt, Human
cuccagcucagaacccagg

SEQ ID NO: 2831506 - RNA, 20 nt, Human
cuccagcucagaacccaggg

SEQ ID NO: 2831507 - RNA, 21 nt, Human
cuccagcucagaacccagggc

SEQ ID NO: 2831508 - RNA, 22 nt, Human
cuccagcucagaacccagggcu

SEQ ID NO: 2831509 - RNA, 23 nt, Human
cuccagcucagaacccagggcuc

SEQ ID NO: 2831510 - RNA, 24 nt, Human
cuccagcucagaacccagggcucu

SEQ ID NO: 2831511 - RNA, 15 nt, Human
cuccaggccugcagc

SEQ ID NO: 2831512 - RNA, 17 nt, Human
cuccaggccugcagcag

SEQ ID NO: 2831513 - RNA, 22 nt, Human
cuccaggccugcagcaggagug

SEQ ID NO: 2831514 - RNA, 14 nt, Human
cuccaggcccgucu

SEQ ID NO: 2831515 - RNA, 15 nt, Human
cuccaggcccgucug

SEQ ID NO: 2831516 - RNA, 16 nt, Human
cuccaggcccgucugu

SEQ ID NO: 2831517 - RNA, 17 nt, Human
cuccaggcccgucuguc

SEQ ID NO: 2831518 - RNA, 18 nt, Human
cuccaggcccgucugucc

SEQ ID NO: 2831519 - RNA, 19 nt, Human
cuccaggcccgucugucca

SEQ ID NO: 2831520 - RNA, 20 nt, Human
cuccaggcccgucuguccau

SEQ ID NO: 2831521 - RNA, 23 nt, Human
cuccaggcccgucuguccaucug

SEQ ID NO: 2831522 - RNA, 13 nt, Human
cuccaggcaggcu

SEQ ID NO: 2831523 - RNA, 15 nt, Human
cuccaggcaggcuaa

SEQ ID NO: 2831524 - RNA, 15 nt, Human
cucaucuaugaggaa

SEQ ID NO: 2831525 - RNA, 19 nt, Human
cucaucuaugaggaaaggu

SEQ ID NO: 2831526 - RNA, 20 nt, Human
cucaucuaugaggaaagguu

SEQ ID NO: 2831527 - RNA, 12 nt, Human
cucaucucaggu

SEQ ID NO: 2831528 - RNA, 14 nt, Human
cucauccugcaggc

SEQ ID NO: 2831529 - RNA, 12 nt, Human
cucauauuuugu

SEQ ID NO: 2831530 - RNA, 13 nt, Human
cucauauuuugua

SEQ ID NO: 2831531 - RNA, 21 nt, Human
cucauauuuuguauauaucug

SEQ ID NO: 2831532 - RNA, 14 nt, Human
cucaucaacaaaga

SEQ ID NO: 2831533 - RNA, 15 nt, Human
cucaucaacaaagaa

SEQ ID NO: 2831534 - RNA, 18 nt, Human
cucaucaacaaagaaaua

SEQ ID NO: 2831535 - RNA, 14 nt, Human
cucaucauuugugg

SEQ ID NO: 2831536 - RNA, 16 nt, Human
cucauauuuuguauau

SEQ ID NO: 2831537 - RNA, 20 nt, Human
cucauccaaacaauuuaaaa

SEQ ID NO: 2831538 - RNA, 20 nt, Human
cucauauggucuaccaguuu

SEQ ID NO: 2831539 - RNA, 15 nt, Human
cucauauuuaaagac

SEQ ID NO: 2831540 - RNA, 12 nt, Human
cucauauuuaaa

SEQ ID NO: 2831541 - RNA, 13 nt, Human
cucauauuuaaag

SEQ ID NO: 2831542 - RNA, 13 nt, Human
cucauccugcagg

SEQ ID NO: 2831543 - RNA, 18 nt, Human
cucauccugaacagcaug

SEQ ID NO: 2831544 - RNA, 22 nt, Human
cucauccccaggggucccagcc

SEQ ID NO: 2831545 - RNA, 14 nt, Human
cucauccccagggg

SEQ ID NO: 2831546 - RNA, 13 nt, Human
cucauccccaggg

SEQ ID NO: 2831547 - RNA, 16 nt, Human
cucauccagggcucug

SEQ ID NO: 2831548 - RNA, 21 nt, Human
cucaucccaugagacccuggu

SEQ ID NO: 2831549 - RNA, 22 nt, Human
cucaucccaugagacccuggug

SEQ ID NO: 2831550 - RNA, 24 nt, Human
cucauccaccccaucccuccccag

SEQ ID NO: 2831551 - RNA, 15 nt, Human
cucauccagggcucu

SEQ ID NO: 2831552 - RNA, 13 nt, Human
cucauccacccca

SEQ ID NO: 2831553 - RNA, 15 nt, Human
cucauccaccccauc

SEQ ID NO: 2831554 - RNA, 16 nt, Human
cucauccaccccaucc

SEQ ID NO: 2831555 - RNA, 19 nt, Human
cucauccaccccaucccuc

SEQ ID NO: 2831556 - RNA, 12 nt, Human
cucauucuucug

SEQ ID NO: 2831557 - RNA, 14 nt, Human
cucauucuucugua

SEQ ID NO: 2831558 - RNA, 13 nt, Human
cucauucuucugu

SEQ ID NO: 2831559 - RNA, 21 nt, Human
cucauuccaccuucccaugcc

SEQ ID NO: 2831560 - RNA, 18 nt, Human
cucauuccaccuucccau

SEQ ID NO: 2831561 - RNA, 17 nt, Human
cucauuccaacagugag

SEQ ID NO: 2831562 - RNA, 18 nt, Human
cucauuccaacagugagu

SEQ ID NO: 2831563 - RNA, 13 nt, Human
cucauucauuuua

SEQ ID NO: 2831564 - RNA, 15 nt, Human
cucauucauuuuaua

SEQ ID NO: 2831565 - RNA, 21 nt, Human
cucauucauuuuauauugaaa

SEQ ID NO: 2831566 - RNA, 22 nt, Human
cucauucauuuuauauugaaaa

SEQ ID NO: 2831567 - RNA, 23 nt, Human
cucauucuucuguacgucugaca

SEQ ID NO: 2831568 - RNA, 17 nt, Human
cucauugacaagaacug

SEQ ID NO: 2831569 - RNA, 14 nt, Human
cucauucuuguuuu

SEQ ID NO: 2831570 - RNA, 10 nt, Human
cucauugaaa

SEQ ID NO: 2831571 - RNA, 11 nt, Human
cucauugaaau

SEQ ID NO: 2831572 - RNA, 12 nt, Human
cucauugaaaug

SEQ ID NO: 2831573 - RNA, 13 nt, Human
cucauugaaaugu

SEQ ID NO: 2831574 - RNA, 14 nt, Human
cucauugaaauguc

SEQ ID NO: 2831575 - RNA, 15 nt, Human
cucauugaaauguca

SEQ ID NO: 2831576 - RNA, 16 nt, Human
cucauugaaaugucac

SEQ ID NO: 2831577 - RNA, 20 nt, Human
cucauugcugagccucugcu

SEQ ID NO: 2831578 - RNA, 18 nt, Human
cucauugcugagccucug

SEQ ID NO: 2831579 - RNA, 19 nt, Human
cucauugcugagccucugc

SEQ ID NO: 2831580 - RNA, 12 nt, Human
cucauugggguu

SEQ ID NO: 2831581 - RNA, 18 nt, Human
cucauugacaagaacuga

SEQ ID NO: 2831582 - RNA, 16 nt, Human
cucaggugucccugca

SEQ ID NO: 2831583 - RNA, 15 nt, Human
cucaggugucccugc

SEQ ID NO: 2831584 - RNA, 19 nt, Human
cucaggggucacugaggcc

SEQ ID NO: 2831585 - RNA, 17 nt, Human
cucaggguauugcuugc

SEQ ID NO: 2831586 - RNA, 19 nt, Human
cucaggucacauaaaacuu

SEQ ID NO: 2831587 - RNA, 17 nt, Human
cucagguagaagguuga

SEQ ID NO: 2831588 - RNA, 23 nt, Human
cucagguagaagguugacacagu

SEQ ID NO: 2831589 - RNA, 17 nt, Human
cucaggucccugcaggg

SEQ ID NO: 2831590 - RNA, 18 nt, Human
cucaggucccugcagggc

SEQ ID NO: 2831591 - RNA, 18 nt, Human
cucaggggccagaggaac

SEQ ID NO: 2831592 - RNA, 20 nt, Human
cucaggggccagaggaacug

SEQ ID NO: 2831593 - RNA, 19 nt, Human
cucaggggaaaacuguuac

SEQ ID NO: 2831594 - RNA, 13 nt, Human
cucaggggcagcu

SEQ ID NO: 2831595 - RNA, 14 nt, Human
cucaggggcagcuc

SEQ ID NO: 2831596 - RNA, 13 nt, Human
cucaggggccaga

SEQ ID NO: 2831597 - RNA, 17 nt, Human
cucaggggccagaggaa

SEQ ID NO: 2831598 - RNA, 12 nt, Human
cuaaaagcacac

SEQ ID NO: 2831599 - RNA, 12 nt, Human
cuaaaagcaccu

SEQ ID NO: 2831600 - RNA, 15 nt, Human
cuaaaagccacccca

SEQ ID NO: 2831601 - RNA, 12 nt, Human
cuaaaagcaaaa

SEQ ID NO: 2831602 - RNA, 20 nt, Human
cuaaaagcaaaauaaaaacu

SEQ ID NO: 2831603 - RNA, 22 nt, Human
cuaaaagcaaaauaaaaacuau

SEQ ID NO: 2831604 - RNA, 17 nt, Human
cguuuuuuaaauguaua

SEQ ID NO: 2831605 - RNA, 13 nt, Human
cguuuuuccuuua

SEQ ID NO: 2831606 - RNA, 19 nt, Human
cucauaguaugguggcugg

SEQ ID NO: 2831607 - RNA, 18 nt, Human
cucauaguaugguggcug

SEQ ID NO: 2831608 - RNA, 20 nt, Human
cucauaguaugguggcuggg

SEQ ID NO: 2831609 - RNA, 12 nt, Human
cucauaauuccu

SEQ ID NO: 2831610 - RNA, 21 nt, Human
cucauaauuccuacagcacua

SEQ ID NO: 2831611 - RNA, 16 nt, Human
cucauaaauuuacuuu

SEQ ID NO: 2831612 - RNA, 21 nt, Human
cucaguucagaaucacuucug

SEQ ID NO: 2831613 - RNA, 15 nt, Human
cucauaacucauugu

SEQ ID NO: 2831614 - RNA, 18 nt, Human
cucaggugucccugcacu

SEQ ID NO: 2831615 - RNA, 17 nt, Human
cucaggugucccugcac

SEQ ID NO: 2831616 - RNA, 19 nt, Human
cucaggugucccugcacuu

SEQ ID NO: 2831617 - RNA, 12 nt, Human
cucaguguuuug

SEQ ID NO: 2831618 - RNA, 17 nt, Human
cucaguguuuuggacuc

SEQ ID NO: 2831619 - RNA, 22 nt, Human
cucaguguuuuggacuccaucu

SEQ ID NO: 2831620 - RNA, 23 nt, Human
cucaguguuuuggacuccaucuc

SEQ ID NO: 2831621 - RNA, 16 nt, Human
cucaguuaaaauguga

SEQ ID NO: 2831622 - RNA, 15 nt, Human
cucaguucagaauca

SEQ ID NO: 2831623 - RNA, 18 nt, Human
cucaguucccuuggccuc

SEQ ID NO: 2831624 - RNA, 17 nt, Human
cucaguucccuuggccu

SEQ ID NO: 2831625 - RNA, 16 nt, Human
cucaguucccuuggcc

SEQ ID NO: 2831626 - RNA, 15 nt, Human
cucaguucccuuggc

SEQ ID NO: 2831627 - RNA, 14 nt, Human
cucaguucccuugg

SEQ ID NO: 2831628 - RNA, 19 nt, Human
cucggacuuagcugggaga

SEQ ID NO: 2831629 - RNA, 18 nt, Human
cucggacuuagcugggag

SEQ ID NO: 2831630 - RNA, 22 nt, Human
cucgcuuggacggcugggcaca

SEQ ID NO: 2831631 - RNA, 11 nt, Human
cucgcuuguaa

SEQ ID NO: 2831632 - RNA, 12 nt, Human
cucgcuuguaaa

SEQ ID NO: 2831633 - RNA, 13 nt, Human
cucgcuuguaaau

SEQ ID NO: 2831634 - RNA, 14 nt, Human
cucgcuuguaaaua

SEQ ID NO: 2831635 - RNA, 20 nt, Human
cucgcuuguaaauaccagga

SEQ ID NO: 2831636 - RNA, 21 nt, Human
cucgcuuguaaauaccaggau

SEQ ID NO: 2831637 - RNA, 21 nt, Human
cucgcuauugucaccagggcu

SEQ ID NO: 2831638 - RNA, 20 nt, Human
cucggaaggcuggcugggca

SEQ ID NO: 2831639 - RNA, 16 nt, Human
cucggaaggcuggcug

SEQ ID NO: 2831640 - RNA, 17 nt, Human
cucgcuuuguugcccag

SEQ ID NO: 2831641 - RNA, 20 nt, Human
cucggaaauuaaaguuugcu

SEQ ID NO: 2831642 - RNA, 18 nt, Human
cucggaaccgcucaccua

SEQ ID NO: 2831643 - RNA, 20 nt, Human
cucggaaccgcucaccuaga

SEQ ID NO: 2831644 - RNA, 21 nt, Human
cucggaaccgcucaccuagag

SEQ ID NO: 2831645 - RNA, 23 nt, Human
cucggaaccgcucaccuagagcc

SEQ ID NO: 2831646 - RNA, 18 nt, Human
cucggacuaagccuaccu

SEQ ID NO: 2831647 - RNA, 22 nt, Human
cucggacuaagccuaccugcuc

SEQ ID NO: 2831648 - RNA, 18 nt, Human
cucggagcaucccggagg

SEQ ID NO: 2831649 - RNA, 22 nt, Human
cucggagcaucccggaggaaau

SEQ ID NO: 2831650 - RNA, 15 nt, Human
cucggccucccaaag

SEQ ID NO: 2831651 - RNA, 21 nt, Human
cucggcaacuaagcagucccu

SEQ ID NO: 2831652 - RNA, 22 nt, Human
cucggccuccuaaagugcuggg

SEQ ID NO: 2831653 - RNA, 22 nt, Human
cucggccuggucaggcccuggu

SEQ ID NO: 2831654 - RNA, 23 nt, Human
cucggccucccaaagugcuggga

SEQ ID NO: 2831655 - RNA, 22 nt, Human
cucggccucccaaagugcuggg

SEQ ID NO: 2831656 - RNA, 20 nt, Human
cucggccucccaaagugcug

SEQ ID NO: 2831657 - RNA, 18 nt, Human
cucggccucccaaagugc

SEQ ID NO: 2831658 - RNA, 11 nt, Human
cucuaaagcac

SEQ ID NO: 2831659 - RNA, 19 nt, Human
cucgcuauugucaccaggg

SEQ ID NO: 2831660 - RNA, 14 nt, Human
cucgcaucauugca

SEQ ID NO: 2831661 - RNA, 16 nt, Human
cucgcaucauugcaga

SEQ ID NO: 2831662 - RNA, 17 nt, Human
cucgcaucauugcagau

SEQ ID NO: 2831663 - RNA, 14 nt, Human
cucgcaucuuccca

SEQ ID NO: 2831664 - RNA, 15 nt, Human
cucgcaucuucccaa

SEQ ID NO: 2831665 - RNA, 17 nt, Human
cucgccccaccggcgcg

SEQ ID NO: 2831666 - RNA, 13 nt, Human
cucgaggugccuu

SEQ ID NO: 2831667 - RNA, 14 nt, Human
cucgaggugccuuc

SEQ ID NO: 2831668 - RNA, 15 nt, Human
cucgaggugccuucu

SEQ ID NO: 2831669 - RNA, 20 nt, Human
cucgaggugccuucuucagg

SEQ ID NO: 2831670 - RNA, 21 nt, Human
cucgaggugccuucuucaggg

SEQ ID NO: 2831671 - RNA, 14 nt, Human
cucgauccaaauug

SEQ ID NO: 2831672 - RNA, 15 nt, Human
cucgauccaaauugu

SEQ ID NO: 2831673 - RNA, 19 nt, Human
cucgauccaaauugugcuu

SEQ ID NO: 2831674 - RNA, 21 nt, Human
cucgauccaaauugugcuucu

SEQ ID NO: 2831675 - RNA, 20 nt, Human
cucgaagcgcgccacucgcu

SEQ ID NO: 2831676 - RNA, 17 nt, Human
cucgaagcgcgccacuc

SEQ ID NO: 2831677 - RNA, 13 nt, Human
cucgaagcgcgcc

SEQ ID NO: 2831678 - RNA, 12 nt, Human
cucgaagcgcgc

SEQ ID NO: 2831679 - RNA, 19 nt, Human
cucgacaucacuguucaug

SEQ ID NO: 2831680 - RNA, 20 nt, Human
cuccuucuguccuacucugu

SEQ ID NO: 2831681 - RNA, 15 nt, Human
cuccuucuguccuac

SEQ ID NO: 2831682 - RNA, 14 nt, Human
cuccuucuguccua

SEQ ID NO: 2831683 - RNA, 13 nt, Human
cuccuucucccuu

SEQ ID NO: 2831684 - RNA, 19 nt, Human
cuccuucagacacccucaa

SEQ ID NO: 2831685 - RNA, 13 nt, Human
cuccuucagacac

SEQ ID NO: 2831686 - RNA, 14 nt, Human
cuccuucagacacc

SEQ ID NO: 2831687 - RNA, 20 nt, Human
cuccugacgucugaagcuug

SEQ ID NO: 2831688 - RNA, 12 nt, Human
cuccuucagaca

SEQ ID NO: 2831689 - RNA, 19 nt, Human
cuccuucgcaggcaugucc

SEQ ID NO: 2831690 - RNA, 18 nt, Human
cuccuucguaucccgagu

SEQ ID NO: 2831691 - RNA, 19 nt, Human
cuccuucguaucccgaguc

SEQ ID NO: 2831692 - RNA, 22 nt, Human
cuccuucguaucccgagucugg

SEQ ID NO: 2831693 - RNA, 16 nt, Human
cucgaacuggcugcaa

SEQ ID NO: 2831694 - RNA, 10 nt, Human
cuccuuggcc

SEQ ID NO: 2831695 - RNA, 11 nt, Human
cuccuuggccu

SEQ ID NO: 2831696 - RNA, 12 nt, Human
cuccuuggccua

SEQ ID NO: 2831697 - RNA, 14 nt, Human
cuccuuggccuagc

SEQ ID NO: 2831698 - RNA, 17 nt, Human
cuccuuggccuagccca

SEQ ID NO: 2831699 - RNA, 22 nt, Human
cuccuuggccuagcccacccug

SEQ ID NO: 2831700 - RNA, 13 nt, Human
cuccuuggcuuac

SEQ ID NO: 2831701 - RNA, 16 nt, Human
cuccuuggcuuaccug

SEQ ID NO: 2831702 - RNA, 17 nt, Human
cuccuuggcuuaccuga

SEQ ID NO: 2831703 - RNA, 19 nt, Human
cuccuuggcuuaccugacc

SEQ ID NO: 2831704 - RNA, 20 nt, Human
cuccuuggcuuaccugaccu

SEQ ID NO: 2831705 - RNA, 21 nt, Human
cuccuuggcuuaccugaccuc

SEQ ID NO: 2831706 - RNA, 17 nt, Human
cuccuugcuuguuacau

SEQ ID NO: 2831707 - RNA, 17 nt, Human
cuccuugagagaccagg

SEQ ID NO: 2831708 - RNA, 20 nt, Human
cuccuugagagaccaggcaa

SEQ ID NO: 2831709 - RNA, 12 nt, Human
cuccuugcaguu

SEQ ID NO: 2831710 - RNA, 13 nt, Human
cuccuugcaguuc

SEQ ID NO: 2831711 - RNA, 16 nt, Human
cuccuugcaucaaggg

SEQ ID NO: 2831712 - RNA, 15 nt, Human
cuccuugaauaucuu

SEQ ID NO: 2831713 - RNA, 20 nt, Human
cuccuugaauaucuuucgau

SEQ ID NO: 2831714 - RNA, 16 nt, Human
cuccuguuagcuccuc

SEQ ID NO: 2831715 - RNA, 23 nt, Human
cuccuguuagcuccucacugugg

SEQ ID NO: 2831716 - RNA, 17 nt, Human
cuccuuaacacugagcu

SEQ ID NO: 2831717 - RNA, 20 nt, Human
cuccuuaacacugagcuguc

SEQ ID NO: 2831718 - RNA, 18 nt, Human
cuccuguuuauucccauc

SEQ ID NO: 2831719 - RNA, 18 nt, Human
cuccuguuucccuucccu

SEQ ID NO: 2831720 - RNA, 20 nt, Human
cuccuguuucccuucccuuc

SEQ ID NO: 2831721 - RNA, 23 nt, Human
cuccugaggggcaucugccccuc

SEQ ID NO: 2831722 - RNA, 14 nt, Human
cuccugccaaggag

SEQ ID NO: 2831723 - RNA, 13 nt, Human
cuccugccacauu

SEQ ID NO: 2831724 - RNA, 21 nt, Human
cuccugccacauuagaacuuc

SEQ ID NO: 2831725 - RNA, 11 nt, Human
cuccugugugu

SEQ ID NO: 2831726 - RNA, 23 nt, Human
cuccugugucuugcaauggcagc

SEQ ID NO: 2831727 - RNA, 15 nt, Human
cuccugugucuugca

SEQ ID NO: 2831728 - RNA, 18 nt, Human
cuccugccaguguggaac

SEQ ID NO: 2831729 - RNA, 11 nt, Human
cuccugccacc

SEQ ID NO: 2831730 - RNA, 17 nt, Human
cucccuuuccuuccuaa

SEQ ID NO: 2831731 - RNA, 17 nt, Human
cuccuaguuugggagga

SEQ ID NO: 2831732 - RNA, 14 nt, Human
cuccuauaaucugu

SEQ ID NO: 2831733 - RNA, 15 nt, Human
cuccuauaaucuguc

SEQ ID NO: 2831734 - RNA, 16 nt, Human
cuccuauaaucuguca

SEQ ID NO: 2831735 - RNA, 17 nt, Human
cuccuauaaucugucaa

SEQ ID NO: 2831736 - RNA, 18 nt, Human
cuccuauaaucugucaaa

SEQ ID NO: 2831737 - RNA, 21 nt, Human
cuccuauaaucugucaaaaca

SEQ ID NO: 2831738 - RNA, 22 nt, Human
cuccuauaaucugucaaaacac

SEQ ID NO: 2831739 - RNA, 23 nt, Human
cuccuauaaucugucaaaacacu

SEQ ID NO: 2831740 - RNA, 19 nt, Human
cuccuaguuugaccucaca

SEQ ID NO: 2831741 - RNA, 23 nt, Human
cuccuaguuugaccucacaguga

SEQ ID NO: 2831742 - RNA, 11 nt, Human
cucccuuaccc

SEQ ID NO: 2831743 - RNA, 14 nt, Human
cucccuuccgaccc

SEQ ID NO: 2831744 - RNA, 17 nt, Human
cucccuuccgacccucu

SEQ ID NO: 2831745 - RNA, 19 nt, Human
cucccuuccgacccucugg

SEQ ID NO: 2831746 - RNA, 20 nt, Human
cucccuuccgacccucuggg

SEQ ID NO: 2831747 - RNA, 21 nt, Human
cucccuuccgacccucuggga

SEQ ID NO: 2831748 - RNA, 22 nt, Human
cucccuuccgacccucugggaa

SEQ ID NO: 2831749 - RNA, 23 nt, Human
cucccuuccgacccucugggaac

SEQ ID NO: 2831750 - RNA, 13 nt, Human
cucccuucggugg

SEQ ID NO: 2831751 - RNA, 17 nt, Human
cucccuucgguggaaga

SEQ ID NO: 2831752 - RNA, 21 nt, Human
cucccuucgguggaagagcuc

SEQ ID NO: 2831753 - RNA, 22 nt, Human
cucccuucgguggaagagcuca

SEQ ID NO: 2831754 - RNA, 23 nt, Human
cucccauccccuggacugggagg

SEQ ID NO: 2831755 - RNA, 17 nt, Human
cucccauaaccgcugau

SEQ ID NO: 2831756 - RNA, 20 nt, Human
cucccauaaccgcugauucu

SEQ ID NO: 2831757 - RNA, 13 nt, Human
cuccauccugcug

SEQ ID NO: 2831758 - RNA, 20 nt, Human
cucccaguccaaauguccuc

SEQ ID NO: 2831759 - RNA, 11 nt, Human
cucccaguccc

SEQ ID NO: 2831760 - RNA, 20 nt, Human
cucccaguccccagcccuuc

SEQ ID NO: 2831761 - RNA, 16 nt, Human
cucccaguaccuccug

SEQ ID NO: 2831762 - RNA, 21 nt, Human
cucccagguguuaacauucca

SEQ ID NO: 2831763 - RNA, 22 nt, Human
cucccagguguuaacauuccaa

SEQ ID NO: 2831764 - RNA, 17 nt, Human
cucccaguuaugaauca

SEQ ID NO: 2831765 - RNA, 12 nt, Human
cucccuggcucc

SEQ ID NO: 2831766 - RNA, 11 nt, Human
cucccuggcuc

SEQ ID NO: 2831767 - RNA, 12 nt, Human
cucccuucaacc

SEQ ID NO: 2831768 - RNA, 18 nt, Human
cucccuucaaccauuccc

SEQ ID NO: 2831769 - RNA, 19 nt, Human
cucccuucaaccauucccc

SEQ ID NO: 2831770 - RNA, 20 nt, Human
cucccuucaaccauucccca

SEQ ID NO: 2831771 - RNA, 15 nt, Human
cucccuggcucccau

SEQ ID NO: 2831772 - RNA, 14 nt, Human
cucccuggcuccca

SEQ ID NO: 2831773 - RNA, 22 nt, Human
cuccucaccucuggacuggcua

SEQ ID NO: 2831774 - RNA, 13 nt, Human
cuccucacugccc

SEQ ID NO: 2831775 - RNA, 15 nt, Human
cuccucacugcccgc

SEQ ID NO: 2831776 - RNA, 16 nt, Human
cuccucacugcccgca

SEQ ID NO: 2831777 - RNA, 17 nt, Human
cuccucacugcccgcac

SEQ ID NO: 2831778 - RNA, 18 nt, Human
cuccucacugcccgcaca

SEQ ID NO: 2831779 - RNA, 14 nt, Human
cuccucacuggcca

SEQ ID NO: 2831780 - RNA, 18 nt, Human
cuccucacuggccauccc

SEQ ID NO: 2831781 - RNA, 20 nt, Human
cuccucacuggccaucccuc

SEQ ID NO: 2831782 - RNA, 13 nt, Human
cuccucccuguua

SEQ ID NO: 2831783 - RNA, 19 nt, Human
cuccucccuguuauuuuca

SEQ ID NO: 2831784 - RNA, 20 nt, Human
cuccucccuguuauuuucaa

SEQ ID NO: 2831785 - RNA, 22 nt, Human
cuccucccuguuauuuucaagu

SEQ ID NO: 2831786 - RNA, 13 nt, Human
cuccucguuccuu

SEQ ID NO: 2831787 - RNA, 19 nt, Human
cuccucguuccuuucuccu

SEQ ID NO: 2831788 - RNA, 19 nt, Human
cuccucuagcugugggggu

SEQ ID NO: 2831789 - RNA, 17 nt, Human
cuccucuagcugugggg

SEQ ID NO: 2831790 - RNA, 18 nt, Human
cuccucuagcuguggggg

SEQ ID NO: 2831791 - RNA, 18 nt, Human
cuccucccuuuccuuccu

SEQ ID NO: 2831792 - RNA, 19 nt, Human
cuccucggaaccgcucacc

SEQ ID NO: 2831793 - RNA, 22 nt, Human
cuccucggaaccgcucaccuag

SEQ ID NO: 2831794 - RNA, 23 nt, Human
cuccucggaaccgcucaccuaga

SEQ ID NO: 2831795 - RNA, 12 nt, Human
cuccucuuuaaa

SEQ ID NO: 2831796 - RNA, 13 nt, Human
cuccucuuuaaaa

SEQ ID NO: 2831797 - RNA, 15 nt, Human
cuccucuuuaaaaca

SEQ ID NO: 2831798 - RNA, 16 nt, Human
cuccucuuuaaaacaa

SEQ ID NO: 2831799 - RNA, 18 nt, Human
cuccucuuuaaaacaaaa

SEQ ID NO: 2831800 - RNA, 19 nt, Human
cuccucuuuaaaacaaaac

SEQ ID NO: 2831801 - RNA, 12 nt, Human
cuccucuuucuc

SEQ ID NO: 2831802 - RNA, 13 nt, Human
cuccucuuucucu

SEQ ID NO: 2831803 - RNA, 14 nt, Human
cuccucuuucucuc

SEQ ID NO: 2831804 - RNA, 15 nt, Human
cuccucuuucucucc

SEQ ID NO: 2831805 - RNA, 16 nt, Human
cuccucuuucucuccc

SEQ ID NO: 2831806 - RNA, 17 nt, Human
cuccucuuucucucccc

SEQ ID NO: 2831807 - RNA, 20 nt, Human
cuccucuuucucuccccaac

SEQ ID NO: 2831808 - RNA, 19 nt, Human
cuccucuugccacugccuc

SEQ ID NO: 2831809 - RNA, 18 nt, Human
cuccucuugccacugccu

SEQ ID NO: 2831810 - RNA, 13 nt, Human
cuccucucagccc

SEQ ID NO: 2831811 - RNA, 14 nt, Human
cuccucucaguguu

SEQ ID NO: 2831812 - RNA, 15 nt, Human
cuccucucaguguuu

SEQ ID NO: 2831813 - RNA, 22 nt, Human
cuccugaguagcugggauuaca

SEQ ID NO: 2831814 - RNA, 21 nt, Human
cuccugaguagcuggauuaca

SEQ ID NO: 2831815 - RNA, 17 nt, Human
cuccugaguagcuggga

SEQ ID NO: 2831816 - RNA, 22 nt, Human
cuccugaggggcaucugccccu

SEQ ID NO: 2831817 - RNA, 21 nt, Human
cuccugaggggcaucugcccc

SEQ ID NO: 2831818 - RNA, 20 nt, Human
cuccugaggggcaucugccc

SEQ ID NO: 2831819 - RNA, 19 nt, Human
cuccugaggggcaucugcc

SEQ ID NO: 2831820 - RNA, 16 nt, Human
cuccugaggggcaucu

SEQ ID NO: 2831821 - RNA, 16 nt, Human
cuccugaggcuuugga

SEQ ID NO: 2831822 - RNA, 17 nt, Human
cuccugaggcuuuggau

SEQ ID NO: 2831823 - RNA, 19 nt, Human
cuccugagggaggaccugg

SEQ ID NO: 2831824 - RNA, 20 nt, Human
cuccugagggaggaccuggg

SEQ ID NO: 2831825 - RNA, 23 nt, Human
cuccugagggaggaccuggggca

SEQ ID NO: 2831826 - RNA, 14 nt, Human
cuccugacagaagg

SEQ ID NO: 2831827 - RNA, 18 nt, Human
cuccugacagaaggugcc

SEQ ID NO: 2831828 - RNA, 16 nt, Human
cuccugacagaaggug

SEQ ID NO: 2831829 - RNA, 19 nt, Human
cuccugacagaaggugcca

SEQ ID NO: 2831830 - RNA, 23 nt, Human
cuccugaaccgcacagcucagga

SEQ ID NO: 2831831 - RNA, 21 nt, Human
cuccugaaccgcacagcucag

SEQ ID NO: 2831832 - RNA, 20 nt, Human
cuccugaaccgcacagcuca

SEQ ID NO: 2831833 - RNA, 19 nt, Human
cuccugaaccgcacagcuc

SEQ ID NO: 2831834 - RNA, 18 nt, Human
cuccugaaccgcacagcu

SEQ ID NO: 2831835 - RNA, 15 nt, Human
cuccugaccucaagu

SEQ ID NO: 2831836 - RNA, 14 nt, Human
cuccugaccucagg

SEQ ID NO: 2831837 - RNA, 14 nt, Human
cuccugaccuuagg

SEQ ID NO: 2831838 - RNA, 15 nt, Human
cuccugacuguaaca

SEQ ID NO: 2831839 - RNA, 16 nt, Human
cuccugagaaauguua

SEQ ID NO: 2831840 - RNA, 17 nt, Human
cuucgacuuuucuuaac

SEQ ID NO: 2831841 - RNA, 18 nt, Human
cuucgacuuuucuuaaca

SEQ ID NO: 2831842 - RNA, 18 nt, Human
cuucgggcgucugugugc

SEQ ID NO: 2831843 - RNA, 16 nt, Human
cuucggccagagcuga

SEQ ID NO: 2831844 - RNA, 16 nt, Human
cuucggccaggucaca

SEQ ID NO: 2831845 - RNA, 19 nt, Human
cuucguucuuuuuaaguua

SEQ ID NO: 2831846 - RNA, 14 nt, Human
cuucucaucacaca

SEQ ID NO: 2831847 - RNA, 15 nt, Human
cuucucaucacacac

SEQ ID NO: 2831848 - RNA, 16 nt, Human
cuucucaucacacaca

SEQ ID NO: 2831849 - RNA, 18 nt, Human
cuucguuuacuaugccug

SEQ ID NO: 2831850 - RNA, 21 nt, Human
cuucguuuacuaugccugugu

SEQ ID NO: 2831851 - RNA, 19 nt, Human
cuucguuuacuaugccugu

SEQ ID NO: 2831852 - RNA, 18 nt, Human
cuucuaaacuuccccauc

SEQ ID NO: 2831853 - RNA, 19 nt, Human
cuucuaaacccaauccaaa

SEQ ID NO: 2831854 - RNA, 22 nt, Human
cuucuaaacuuccccaucuucu

SEQ ID NO: 2831855 - RNA, 19 nt, Human
cuucuaaacuuccccaucu

SEQ ID NO: 2831856 - RNA, 20 nt, Human
cuuccuugcuguccuaggcc

SEQ ID NO: 2831857 - RNA, 19 nt, Human
cuuccuugcuguccuaggc

SEQ ID NO: 2831858 - RNA, 15 nt, Human
cuucgaaaccuggga

SEQ ID NO: 2831859 - RNA, 15 nt, Human
cuucgcuccuguguc

SEQ ID NO: 2831860 - RNA, 14 nt, Human
cuucgcuccugugu

SEQ ID NO: 2831861 - RNA, 13 nt, Human
cuucgcuccugug

SEQ ID NO: 2831862 - RNA, 14 nt, Human
cuuccuuccugcuu

SEQ ID NO: 2831863 - RNA, 13 nt, Human
cuuccuuccuguu

SEQ ID NO: 2831864 - RNA, 17 nt, Human
cuuccuucuguaaauac

SEQ ID NO: 2831865 - RNA, 17 nt, Human
cuuccuugaccuuccuc

SEQ ID NO: 2831866 - RNA, 18 nt, Human
cuuccuugaccuuccucu

SEQ ID NO: 2831867 - RNA, 18 nt, Human
cuuccuugagacacggag

SEQ ID NO: 2831868 - RNA, 20 nt, Human
cuuccuugagacacggagcc

SEQ ID NO: 2831869 - RNA, 23 nt, Human
cuuccuugagacacggagcccag

SEQ ID NO: 2831870 - RNA, 17 nt, Human
cuuccuugcuguccuag

SEQ ID NO: 2831871 - RNA, 23 nt, Human
cuuccuacccacaccucugccag

SEQ ID NO: 2831872 - RNA, 16 nt, Human
cuuccuacccuccugc

SEQ ID NO: 2831873 - RNA, 15 nt, Human
cuuccuaccuauccc

SEQ ID NO: 2831874 - RNA, 16 nt, Human
cuucuccccagaguuc

SEQ ID NO: 2831875 - RNA, 12 nt, Human
cuucuccccaga

SEQ ID NO: 2831876 - RNA, 13 nt, Human
cuucuccccagaa

SEQ ID NO: 2831877 - RNA, 14 nt, Human
cuucuccccagaau

SEQ ID NO: 2831878 - RNA, 12 nt, Human
cuucucccagaa

SEQ ID NO: 2831879 - RNA, 13 nt, Human
cuucucccagaau

SEQ ID NO: 2831880 - RNA, 16 nt, Human
cuucucccagaauccc

SEQ ID NO: 2831881 - RNA, 20 nt, Human
cuucucccagaaucccagcc

SEQ ID NO: 2831882 - RNA, 23 nt, Human
cuucucccagaaucccagccggc

SEQ ID NO: 2831883 - RNA, 20 nt, Human
cuucccuuuuaaacacauuu

SEQ ID NO: 2831884 - RNA, 20 nt, Human
cuucuccuuucacaaccuuc

SEQ ID NO: 2831885 - RNA, 22 nt, Human
cuucuccuuucacaaccuucug

SEQ ID NO: 2831886 - RNA, 14 nt, Human
cuucuccuuucaca

SEQ ID NO: 2831887 - RNA, 17 nt, Human
cuucuccuuucacaacc

SEQ ID NO: 2831888 - RNA, 15 nt, Human
cuucuccacccugcu

SEQ ID NO: 2831889 - RNA, 14 nt, Human
cuucuccacccugc

SEQ ID NO: 2831890 - RNA, 14 nt, Human
cuucuccaggcugu

SEQ ID NO: 2831891 - RNA, 14 nt, Human
cuucuccaaggaaa

SEQ ID NO: 2831892 - RNA, 17 nt, Human
cuucuccaggcuguauc

SEQ ID NO: 2831893 - RNA, 19 nt, Human
cuucuccaauucugcccaa

SEQ ID NO: 2831894 - RNA, 13 nt, Human
cuucuccaggguc

SEQ ID NO: 2831895 - RNA, 19 nt, Human
cuucuccaggguccacagg

SEQ ID NO: 2831896 - RNA, 20 nt, Human
cuucuccaggucucacgggc

SEQ ID NO: 2831897 - RNA, 21 nt, Human
cuucugccauauucuguuggc

SEQ ID NO: 2831898 - RNA, 20 nt, Human
cuucucucagacuuacuuua

SEQ ID NO: 2831899 - RNA, 13 nt, Human
cuucugccuuuuc

SEQ ID NO: 2831900 - RNA, 15 nt, Human
cuucugcgccucagg

SEQ ID NO: 2831901 - RNA, 16 nt, Human
cuucugcgccucaggc

SEQ ID NO: 2831902 - RNA, 21 nt, Human
cuucugccuuagucucaguuu

SEQ ID NO: 2831903 - RNA, 19 nt, Human
cuucugccuuagucucagu

SEQ ID NO: 2831904 - RNA, 20 nt, Human
cuucugccuuagucucaguu

SEQ ID NO: 2831905 - RNA, 17 nt, Human
cuucugccauauucugu

SEQ ID NO: 2831906 - RNA, 15 nt, Human
cuucugccauauucu

SEQ ID NO: 2831907 - RNA, 17 nt, Human
cuucugcuucagccucc

SEQ ID NO: 2831908 - RNA, 16 nt, Human
cuucugcuucagccuc

SEQ ID NO: 2831909 - RNA, 14 nt, Human
cuucugcuccaccc

SEQ ID NO: 2831910 - RNA, 12 nt, Human
cuucugcuccac

SEQ ID NO: 2831911 - RNA, 10 nt, Human
cuucugcucc

SEQ ID NO: 2831912 - RNA, 18 nt, Human
cuucugcuucagccuccc

SEQ ID NO: 2831913 - RNA, 13 nt, Human
cuucugcuccacc

SEQ ID NO: 2831914 - RNA, 14 nt, Human
cuucuggaaacugu

SEQ ID NO: 2831915 - RNA, 18 nt, Human
cuucuggaaacugugaag

SEQ ID NO: 2831916 - RNA, 16 nt, Human
cuucuggaauuuguuc

SEQ ID NO: 2831917 - RNA, 18 nt, Human
cuucuggaauuuguucaa

SEQ ID NO: 2831918 - RNA, 15 nt, Human
cuucuggacaggcuc

SEQ ID NO: 2831919 - RNA, 18 nt, Human
cuucuggacaggcucugc

SEQ ID NO: 2831920 - RNA, 21 nt, Human
cuucuggacaggcucugcuuc

SEQ ID NO: 2831921 - RNA, 13 nt, Human
cuucuggagcccu

SEQ ID NO: 2831922 - RNA, 11 nt, Human
cuucuggagcc

SEQ ID NO: 2831923 - RNA, 14 nt, Human
cuucagcccccagc

SEQ ID NO: 2831924 - RNA, 15 nt, Human
cuucagcccccagcc

SEQ ID NO: 2831925 - RNA, 16 nt, Human
cuucagcccccagccc

SEQ ID NO: 2831926 - RNA, 17 nt, Human
cuucagcccccagcccc

SEQ ID NO: 2831927 - RNA, 18 nt, Human
cuucagcccccagccccu

SEQ ID NO: 2831928 - RNA, 20 nt, Human
cuucagcccccagccccucc

SEQ ID NO: 2831929 - RNA, 21 nt, Human
cuucagcccccagccccuccc

SEQ ID NO: 2831930 - RNA, 16 nt, Human
cuuauuuucauguaua

SEQ ID NO: 2831931 - RNA, 17 nt, Human
cuuauuuuugacagugu

SEQ ID NO: 2831932 - RNA, 13 nt, Human
cuuauuuuuccua

SEQ ID NO: 2831933 - RNA, 16 nt, Human
cuuauuuuucuaaacg

SEQ ID NO: 2831934 - RNA, 17 nt, Human
cuucagccaccucucuu

SEQ ID NO: 2831935 - RNA, 15 nt, Human
cuucagccaccucuc

SEQ ID NO: 2831936 - RNA, 15 nt, Human
cuucaaaaacuguuu

SEQ ID NO: 2831937 - RNA, 15 nt, Human
cuucaaaaguaaugc

SEQ ID NO: 2831938 - RNA, 17 nt, Human
cuucaaaaguaaugccu

SEQ ID NO: 2831939 - RNA, 20 nt, Human
cuucaaaaguaaugccucug

SEQ ID NO: 2831940 - RNA, 21 nt, Human
cuucaaaaguaaugccucugu

SEQ ID NO: 2831941 - RNA, 21 nt, Human
cuucagcauucccucccauca

SEQ ID NO: 2831942 - RNA, 16 nt, Human
cuucagcguaaaaugg

SEQ ID NO: 2831943 - RNA, 17 nt, Human
cuucagcguaaaauggu

SEQ ID NO: 2831944 - RNA, 20 nt, Human
cuucagcuagcuuuuaggaa

SEQ ID NO: 2831945 - RNA, 21 nt, Human
cuucagcuagcuuuuaggaaa

SEQ ID NO: 2831946 - RNA, 17 nt, Human
cuucagcucacgcuuca

SEQ ID NO: 2831947 - RNA, 20 nt, Human
cuucagcucacgcuucacag

SEQ ID NO: 2831948 - RNA, 11 nt, Human
cuucagcucca

SEQ ID NO: 2831949 - RNA, 15 nt, Human
cuucagcuccagccc

SEQ ID NO: 2831950 - RNA, 16 nt, Human
cuucagcuccagcccc

SEQ ID NO: 2831951 - RNA, 19 nt, Human
cuucagcuccagccccuuu

SEQ ID NO: 2831952 - RNA, 23 nt, Human
cuucagcuccagccccuuuccaa

SEQ ID NO: 2831953 - RNA, 15 nt, Human
cuucagcuccaggga

SEQ ID NO: 2831954 - RNA, 13 nt, Human
cuucagcuccagg

SEQ ID NO: 2831955 - RNA, 23 nt, Human
cuucagcuccagggaauccaagc

SEQ ID NO: 2831956 - RNA, 15 nt, Human
cuucagcucuuuuug

SEQ ID NO: 2831957 - RNA, 15 nt, Human
cuucaggccucccuc

SEQ ID NO: 2831958 - RNA, 12 nt, Human
cuucaggccucc

SEQ ID NO: 2831959 - RNA, 14 nt, Human
cuucaggcucuucu

SEQ ID NO: 2831960 - RNA, 16 nt, Human
cuucagggcugcuggg

SEQ ID NO: 2831961 - RNA, 20 nt, Human
cuucaggccucccucucucu

SEQ ID NO: 2831962 - RNA, 17 nt, Human
cuucaggggcacuucau

SEQ ID NO: 2831963 - RNA, 19 nt, Human
cuucaggggcacuucauug

SEQ ID NO: 2831964 - RNA, 15 nt, Human
cuucaggcucuucuc

SEQ ID NO: 2831965 - RNA, 16 nt, Human
cuucaggcucuucucc

SEQ ID NO: 2831966 - RNA, 17 nt, Human
cuucaggcucuucuccu

SEQ ID NO: 2831967 - RNA, 18 nt, Human
cuucaggcucuucuccuu

SEQ ID NO: 2831968 - RNA, 18 nt, Human
cuucauuuccugugucuu

SEQ ID NO: 2831969 - RNA, 18 nt, Human
cuucauuucauuguauga

SEQ ID NO: 2831970 - RNA, 19 nt, Human
cuucauuucauuguaugau

SEQ ID NO: 2831971 - RNA, 14 nt, Human
cuucauuucauugu

SEQ ID NO: 2831972 - RNA, 15 nt, Human
cuucauuucauugua

SEQ ID NO: 2831973 - RNA, 16 nt, Human
cuucauuucauuguau

SEQ ID NO: 2831974 - RNA, 17 nt, Human
cuucauuucauuguaug

SEQ ID NO: 2831975 - RNA, 15 nt, Human
cuuccaaauaauaaa

SEQ ID NO: 2831976 - RNA, 17 nt, Human
cuuccaaauaauaaagu

SEQ ID NO: 2831977 - RNA, 19 nt, Human
cuuccaaauaauaaagucu

SEQ ID NO: 2831978 - RNA, 20 nt, Human
cuuccaaauaauaaagucua

SEQ ID NO: 2831979 - RNA, 13 nt, Human
cuucauuuggaga

SEQ ID NO: 2831980 - RNA, 14 nt, Human
cuucauuuggagau

SEQ ID NO: 2831981 - RNA, 19 nt, Human
cuuccaaaugcaauuugau

SEQ ID NO: 2831982 - RNA, 21 nt, Human
cuuccaaaguaaaauugcugu

SEQ ID NO: 2831983 - RNA, 12 nt, Human
cuuccagcuccu

SEQ ID NO: 2831984 - RNA, 13 nt, Human
cuuccagcuccug

SEQ ID NO: 2831985 - RNA, 15 nt, Human
cuuccagcuccugua

SEQ ID NO: 2831986 - RNA, 12 nt, Human
cuuccagcugcu

SEQ ID NO: 2831987 - RNA, 13 nt, Human
cuuccagcugcug

SEQ ID NO: 2831988 - RNA, 14 nt, Human
cuuccagcugcugu

SEQ ID NO: 2831989 - RNA, 16 nt, Human
cuuccagcugcugucu

SEQ ID NO: 2831990 - RNA, 21 nt, Human
cuuccagcugcugucuucugg

SEQ ID NO: 2831991 - RNA, 22 nt, Human
cuuccagguguuacuguaauuc

SEQ ID NO: 2831992 - RNA, 20 nt, Human
cuuccagguguuacuguaau

SEQ ID NO: 2831993 - RNA, 19 nt, Human
cuuccagguguuacuguaa

SEQ ID NO: 2831994 - RNA, 16 nt, Human
cuuccagguguuacug

SEQ ID NO: 2831995 - RNA, 19 nt, Human
cuuccaggugcccagcuau

SEQ ID NO: 2831996 - RNA, 16 nt, Human
cuuccaggugcccagc

SEQ ID NO: 2831997 - RNA, 14 nt, Human
cuuccagcuccugu

SEQ ID NO: 2831998 - RNA, 18 nt, Human
cuucccagguucaagcga

SEQ ID NO: 2831999 - RNA, 14 nt, Human
cuucccaguggcug

SEQ ID NO: 2832000 - RNA, 15 nt, Human
cuucccgcucagccc

SEQ ID NO: 2832001 - RNA, 15 nt, Human
cuucccgccagaggg

SEQ ID NO: 2832002 - RNA, 19 nt, Human
cuucccgccagagggcuug

SEQ ID NO: 2832003 - RNA, 15 nt, Human
cuucccucaguccca

SEQ ID NO: 2832004 - RNA, 13 nt, Human
cuucccuauuuau

SEQ ID NO: 2832005 - RNA, 15 nt, Human
cuucccucacaccgc

SEQ ID NO: 2832006 - RNA, 16 nt, Human
cuucccgcucagcccu

SEQ ID NO: 2832007 - RNA, 17 nt, Human
cuucccgcucagcccuc

SEQ ID NO: 2832008 - RNA, 13 nt, Human
cuuccgacccucu

SEQ ID NO: 2832009 - RNA, 15 nt, Human
cuuccgacccucugg

SEQ ID NO: 2832010 - RNA, 17 nt, Human
cuuccgacccucuggga

SEQ ID NO: 2832011 - RNA, 18 nt, Human
cuuccgacccucugggaa

SEQ ID NO: 2832012 - RNA, 19 nt, Human
cuuccgacccucugggaac

SEQ ID NO: 2832013 - RNA, 21 nt, Human
cuuccgacccucugggaaccu

SEQ ID NO: 2832014 - RNA, 22 nt, Human
cuuccgacccucugggaaccuc

SEQ ID NO: 2832015 - RNA, 23 nt, Human
cuuccgacccucugggaaccucc

SEQ ID NO: 2832016 - RNA, 22 nt, Human
cuuccgauggaugaaucuccca

SEQ ID NO: 2832017 - RNA, 14 nt, Human
cuucccucuucccu

SEQ ID NO: 2832018 - RNA, 15 nt, Human
cuucccucuucccuc

SEQ ID NO: 2832019 - RNA, 14 nt, Human
cuuccgccccugcc

SEQ ID NO: 2832020 - RNA, 15 nt, Human
cuuccgccccugccu

SEQ ID NO: 2832021 - RNA, 16 nt, Human
cuuccgccccugccug

SEQ ID NO: 2832022 - RNA, 17 nt, Human
cuuccgccccugccugc

SEQ ID NO: 2832023 - RNA, 18 nt, Human
cuuccgccccugccugcc

SEQ ID NO: 2832024 - RNA, 20 nt, Human
cuuccgccccugccugccau

SEQ ID NO: 2832025 - RNA, 22 nt, Human
cuuccgccccugccugccaugu

SEQ ID NO: 2832026 - RNA, 15 nt, Human
cuuccgccccuuccc

SEQ ID NO: 2832027 - RNA, 18 nt, Human
cuuccgccccuucccuuc

SEQ ID NO: 2832028 - RNA, 19 nt, Human
cuuccgccccuucccuucc

SEQ ID NO: 2832029 - RNA, 18 nt, Human
cuuccuacaagagcagcc

SEQ ID NO: 2832030 - RNA, 16 nt, Human
cuuccgguagggaggc

SEQ ID NO: 2832031 - RNA, 21 nt, Human
cuuccuaauuucccuucuugc

SEQ ID NO: 2832032 - RNA, 22 nt, Human
cuuccuaauuucccuucuugca

SEQ ID NO: 2832033 - RNA, 23 nt, Human
cuuccuaauuucccuucuugcau

SEQ ID NO: 2832034 - RNA, 24 nt, Human
cuuccuacaagagcagccuguggc

SEQ ID NO: 2832035 - RNA, 22 nt, Human
cuuccuacaagagcagccugug

SEQ ID NO: 2832036 - RNA, 21 nt, Human
cuuccuacaagagcagccugu

SEQ ID NO: 2832037 - RNA, 16 nt, Human
cuuccuacccacaccu

SEQ ID NO: 2832038 - RNA, 18 nt, Human
cuuccuacccacaccucu

SEQ ID NO: 2832039 - RNA, 19 nt, Human
cuuccuacccacaccucug

SEQ ID NO: 2832040 - RNA, 22 nt, Human
cuuccuacccacaccucugcca

SEQ ID NO: 2832041 - RNA, 19 nt, Human
cuuauaagugaagugauac

SEQ ID NO: 2832042 - RNA, 17 nt, Human
cuuauaagguguuuucu

SEQ ID NO: 2832043 - RNA, 20 nt, Human
cuuauaagguguuuucugug

SEQ ID NO: 2832044 - RNA, 21 nt, Human
cuuauaagguguuuucugugu

SEQ ID NO: 2832045 - RNA, 22 nt, Human
cuuauaagguguuuucugugua

SEQ ID NO: 2832046 - RNA, 23 nt, Human
cuuauaagguguuuucuguguaa

SEQ ID NO: 2832047 - RNA, 13 nt, Human
cuuauaaaucaua

SEQ ID NO: 2832048 - RNA, 18 nt, Human
cuuauaaaucauauugau

SEQ ID NO: 2832049 - RNA, 21 nt, Human
cuuauaaaucauauugaugaa

SEQ ID NO: 2832050 - RNA, 22 nt, Human
cuuauaaaucauauugaugaaa

SEQ ID NO: 2832051 - RNA, 20 nt, Human
cuuauaauaaaggacuguaa

SEQ ID NO: 2832052 - RNA, 13 nt, Human
cuuauaauacucu

SEQ ID NO: 2832053 - RNA, 16 nt, Human
cuuauaauacucuguu

SEQ ID NO: 2832054 - RNA, 19 nt, Human
cuuauaauacucuguugua

SEQ ID NO: 2832055 - RNA, 16 nt, Human
cuuauaauaaaggacu

SEQ ID NO: 2832056 - RNA, 14 nt, Human
cuuauaauaaagga

SEQ ID NO: 2832057 - RNA, 21 nt, Human
cuuagguggcaagcugugacu

SEQ ID NO: 2832058 - RNA, 20 nt, Human
cuuaggugauccacucgccu

SEQ ID NO: 2832059 - RNA, 20 nt, Human
cuuauaagugaagugauacu

SEQ ID NO: 2832060 - RNA, 17 nt, Human
cuuauaauaaaggacug

SEQ ID NO: 2832061 - RNA, 14 nt, Human
cuuauaguucuagg

SEQ ID NO: 2832062 - RNA, 15 nt, Human
cuuauaguucuaggc

SEQ ID NO: 2832063 - RNA, 19 nt, Human
cuuauauucaaccauggac

SEQ ID NO: 2832064 - RNA, 21 nt, Human
cuuauauucaaccauggacuu

SEQ ID NO: 2832065 - RNA, 16 nt, Human
cuuauauugaagacaa

SEQ ID NO: 2832066 - RNA, 18 nt, Human
cuuauauugaagacaauu

SEQ ID NO: 2832067 - RNA, 23 nt, Human
cuuauauugaagacaauuugaua

SEQ ID NO: 2832068 - RNA, 12 nt, Human
cuuauacacauu

SEQ ID NO: 2832069 - RNA, 23 nt, Human
cuuauagucaauguuucuuuuau

SEQ ID NO: 2832070 - RNA, 19 nt, Human
cuuauaguacaugauaaau

SEQ ID NO: 2832071 - RNA, 13 nt, Human
cuuauagguggcc

SEQ ID NO: 2832072 - RNA, 14 nt, Human
cuuauagguguugg

SEQ ID NO: 2832073 - RNA, 17 nt, Human
cuuauaguacaugauaa

SEQ ID NO: 2832074 - RNA, 13 nt, Human
cuuauaguacaug

SEQ ID NO: 2832075 - RNA, 12 nt, Human
cuuauuuucaag

SEQ ID NO: 2832076 - RNA, 19 nt, Human
cuuauuuucaagaaacuga

SEQ ID NO: 2832077 - RNA, 18 nt, Human
cuuauuuucaagaaacug

SEQ ID NO: 2832078 - RNA, 15 nt, Human
cuuauuuucaagaaa

SEQ ID NO: 2832079 - RNA, 14 nt, Human
cuuauuuucaagaa

SEQ ID NO: 2832080 - RNA, 15 nt, Human
cuuaugauugcagau

SEQ ID NO: 2832081 - RNA, 18 nt, Human
cuuaugacuugcuacuuu

SEQ ID NO: 2832082 - RNA, 13 nt, Human
cuuaugagaaacu

SEQ ID NO: 2832083 - RNA, 14 nt, Human
cuuaugcaaaaugg

SEQ ID NO: 2832084 - RNA, 15 nt, Human
cuuaugcaaaaugga

SEQ ID NO: 2832085 - RNA, 16 nt, Human
cuuaugcaaaauggaa

SEQ ID NO: 2832086 - RNA, 20 nt, Human
cuuauuguggauaacaaaga

SEQ ID NO: 2832087 - RNA, 23 nt, Human
cuuaugauucagauuguuaucua

SEQ ID NO: 2832088 - RNA, 15 nt, Human
cuuaugaauauauuu

SEQ ID NO: 2832089 - RNA, 12 nt, Human
cuuaugaauguu

SEQ ID NO: 2832090 - RNA, 14 nt, Human
cuuaugaauguuuc

SEQ ID NO: 2832091 - RNA, 15 nt, Human
cuuaugaauguuucc

SEQ ID NO: 2832092 - RNA, 17 nt, Human
cuuaugaauguuuccgg

SEQ ID NO: 2832093 - RNA, 21 nt, Human
cuuaugacaucacuuguacaa

SEQ ID NO: 2832094 - RNA, 20 nt, Human
cuuaugaggguccucuacuu

SEQ ID NO: 2832095 - RNA, 22 nt, Human
cuuaugacaucacuuguacaaa

SEQ ID NO: 2832096 - RNA, 22 nt, Human
cuuaucugugcucaggacucag

SEQ ID NO: 2832097 - RNA, 15 nt, Human
cuuaucucucugugc

SEQ ID NO: 2832098 - RNA, 16 nt, Human
cuuaucugugcucagg

SEQ ID NO: 2832099 - RNA, 14 nt, Human
cuuaucugugcuca

SEQ ID NO: 2832100 - RNA, 12 nt, Human
cuuaucucucug

SEQ ID NO: 2832101 - RNA, 16 nt, Human
cuuaucuccaagacca

SEQ ID NO: 2832102 - RNA, 14 nt, Human
cuuaucuccaagac

SEQ ID NO: 2832103 - RNA, 13 nt, Human
cuuaucuccaaga

SEQ ID NO: 2832104 - RNA, 13 nt, Human
cuuaucucucugu

SEQ ID NO: 2832105 - RNA, 14 nt, Human
cuuaucucucugug

SEQ ID NO: 2832106 - RNA, 21 nt, Human
cuuaucucucugugcugugga

SEQ ID NO: 2832107 - RNA, 12 nt, Human
cuuaucucuuuu

SEQ ID NO: 2832108 - RNA, 21 nt, Human
cuuaucucuuuuauauuugua

SEQ ID NO: 2832109 - RNA, 18 nt, Human
cuuaucugagcugagcca

SEQ ID NO: 2832110 - RNA, 20 nt, Human
cuuaucugagcugagccagg

SEQ ID NO: 2832111 - RNA, 21 nt, Human
cuuaucugagcugagccaggc

SEQ ID NO: 2832112 - RNA, 22 nt, Human
cuuaucugagcugagccaggcu

SEQ ID NO: 2832113 - RNA, 21 nt, Human
cuuaucaaggacucugguuuc

SEQ ID NO: 2832114 - RNA, 16 nt, Human
cuuaucaaaggacacc

SEQ ID NO: 2832115 - RNA, 21 nt, Human
cuuaucucagucaugcauaaa

SEQ ID NO: 2832116 - RNA, 22 nt, Human
cuuaucucagucaugcauaaau

SEQ ID NO: 2832117 - RNA, 23 nt, Human
cuuaucucagucaugcauaaaua

SEQ ID NO: 2832118 - RNA, 14 nt, Human
cuuaucaaaggaca

SEQ ID NO: 2832119 - RNA, 14 nt, Human
cuuauauuucccua

SEQ ID NO: 2832120 - RNA, 19 nt, Human
cuuauauuucccuaaaaua

SEQ ID NO: 2832121 - RNA, 23 nt, Human
cuuauauuucccuaaaauacauu

SEQ ID NO: 2832122 - RNA, 15 nt, Human
cuuauauuuucguau

SEQ ID NO: 2832123 - RNA, 19 nt, Human
cuuauauuuucguaugaaa

SEQ ID NO: 2832124 - RNA, 20 nt, Human
cuuauauuuucguaugaaaa

SEQ ID NO: 2832125 - RNA, 21 nt, Human
cuuauauuuucguaugaaaau

SEQ ID NO: 2832126 - RNA, 22 nt, Human
cuuauauuuucguaugaaaaug

SEQ ID NO: 2832127 - RNA, 22 nt, Human
cuuagggugaaccacuucauuc

SEQ ID NO: 2832128 - RNA, 14 nt, Human
cuuagaguuucugu

SEQ ID NO: 2832129 - RNA, 17 nt, Human
cuuagaguuucuguuug

SEQ ID NO: 2832130 - RNA, 18 nt, Human
cuuagaguuucuguuuga

SEQ ID NO: 2832131 - RNA, 22 nt, Human
cuuagaguuucuguuugauucu

SEQ ID NO: 2832132 - RNA, 23 nt, Human
cuuagaguuucuguuugauucuu

SEQ ID NO: 2832133 - RNA, 19 nt, Human
cuuagagggauuucuuugc

SEQ ID NO: 2832134 - RNA, 20 nt, Human
cuuagagggauuucuuugcu

SEQ ID NO: 2832135 - RNA, 21 nt, Human
cuuagagggauuucuuugcug

SEQ ID NO: 2832136 - RNA, 16 nt, Human
cuuagacauaacaaaa

SEQ ID NO: 2832137 - RNA, 15 nt, Human
cuuagaagucacaca

SEQ ID NO: 2832138 - RNA, 17 nt, Human
cuuagaaauugcauuuc

SEQ ID NO: 2832139 - RNA, 15 nt, Human
cuuagaaccuuucuu

SEQ ID NO: 2832140 - RNA, 15 nt, Human
cuuacuaauguaaaa

SEQ ID NO: 2832141 - RNA, 18 nt, Human
cuuacuaauguaaaauga

SEQ ID NO: 2832142 - RNA, 16 nt, Human
cuuacuacacugagga

SEQ ID NO: 2832143 - RNA, 21 nt, Human
cuuacuauucauuaaauguuu

SEQ ID NO: 2832144 - RNA, 23 nt, Human
cuuacuauucauuaaauguuuga

SEQ ID NO: 2832145 - RNA, 11 nt, Human
cuuacuauuuc

SEQ ID NO: 2832146 - RNA, 13 nt, Human
cuuacuauuucug

SEQ ID NO: 2832147 - RNA, 22 nt, Human
cuuacuauuucugggucuuuug

SEQ ID NO: 2832148 - RNA, 12 nt, Human
cuuacuauuuug

SEQ ID NO: 2832149 - RNA, 22 nt, Human
cuuacuauuuugacaguuauuu

SEQ ID NO: 2832150 - RNA, 14 nt, Human
cuuacuaaaauaua

SEQ ID NO: 2832151 - RNA, 15 nt, Human
cuuacuaaaauauau

SEQ ID NO: 2832152 - RNA, 22 nt, Human
cuuacuaaaauauauauagaaa

SEQ ID NO: 2832153 - RNA, 16 nt, Human
cuuacgaauauuuuca

SEQ ID NO: 2832154 - RNA, 17 nt, Human
cuuacgaauauuuucag

SEQ ID NO: 2832155 - RNA, 20 nt, Human
cuuacgaauauuuucaguaa

SEQ ID NO: 2832156 - RNA, 15 nt, Human
cuuacgaucaggcac

SEQ ID NO: 2832157 - RNA, 16 nt, Human
cuuacgaucaggcaca

SEQ ID NO: 2832158 - RNA, 17 nt, Human
cuuacgaucaggcacag

SEQ ID NO: 2832159 - RNA, 21 nt, Human
cuuacgaucaggcacagguca

SEQ ID NO: 2832160 - RNA, 14 nt, Human
cuuacgcuuuguca

SEQ ID NO: 2832161 - RNA, 18 nt, Human
cuuacggccaucucuuug

SEQ ID NO: 2832162 - RNA, 16 nt, Human
cuuacuguggaggaag

SEQ ID NO: 2832163 - RNA, 17 nt, Human
cuuacuguggaggaagg

SEQ ID NO: 2832164 - RNA, 18 nt, Human
cuuacuguggaggaagga

SEQ ID NO: 2832165 - RNA, 15 nt, Human
cuuacuguaccuguu

SEQ ID NO: 2832166 - RNA, 18 nt, Human
cuuacuguaccuguuccu

SEQ ID NO: 2832167 - RNA, 23 nt, Human
cuuacuguaccuguuccuuagac

SEQ ID NO: 2832168 - RNA, 12 nt, Human
cuuacuccuccu

SEQ ID NO: 2832169 - RNA, 13 nt, Human
cuuacuccuccuc

SEQ ID NO: 2832170 - RNA, 14 nt, Human
cuuacuccuccucu

SEQ ID NO: 2832171 - RNA, 15 nt, Human
cuuacuccuccucuu

SEQ ID NO: 2832172 - RNA, 16 nt, Human
cuuacuccuccucuuu

SEQ ID NO: 2832173 - RNA, 18 nt, Human
cuuacuccuccucuuucu

SEQ ID NO: 2832174 - RNA, 22 nt, Human
cuuacuccuccucuuucucucc

SEQ ID NO: 2832175 - RNA, 23 nt, Human
cuuacuccuccucuuucucuccc

SEQ ID NO: 2832176 - RNA, 20 nt, Human
cuuacuuuccuuuccccagc

SEQ ID NO: 2832177 - RNA, 21 nt, Human
cuuacuuuccuuuccccagcc

SEQ ID NO: 2832178 - RNA, 22 nt, Human
cuuacuuuccuuuccccagccc

SEQ ID NO: 2832179 - RNA, 23 nt, Human
cuuacuuuccuuuccccagccca

SEQ ID NO: 2832180 - RNA, 14 nt, Human
cuuacuucuugccc

SEQ ID NO: 2832181 - RNA, 15 nt, Human
cuuacuucuugcccu

SEQ ID NO: 2832182 - RNA, 16 nt, Human
cuuacuucuugcccug

SEQ ID NO: 2832183 - RNA, 19 nt, Human
cuuacuuacuaaaauauau

SEQ ID NO: 2832184 - RNA, 16 nt, Human
cuuacuuacuaaaaua

SEQ ID NO: 2832185 - RNA, 19 nt, Human
cuuacuguggaggaaggau

SEQ ID NO: 2832186 - RNA, 17 nt, Human
cuguuuuggguagcugc

SEQ ID NO: 2832187 - RNA, 17 nt, Human
cuguuuugaaggcaaaa

SEQ ID NO: 2832188 - RNA, 18 nt, Human
cuguuuucuucuauucca

SEQ ID NO: 2832189 - RNA, 12 nt, Human
cuguuuucuucu

SEQ ID NO: 2832190 - RNA, 20 nt, Human
cuguuuuguacauagauuua

SEQ ID NO: 2832191 - RNA, 14 nt, Human
cuguuuuuccauag

SEQ ID NO: 2832192 - RNA, 18 nt, Human
cuguuuuuccauaguuuu

SEQ ID NO: 2832193 - RNA, 21 nt, Human
cuguuuuucuggguggccucg

SEQ ID NO: 2832194 - RNA, 15 nt, Human
cuguuuuucugggug

SEQ ID NO: 2832195 - RNA, 17 nt, Human
cuguuuuguuuggcaag

SEQ ID NO: 2832196 - RNA, 22 nt, Human
cuguuuauggccucagcugccu

SEQ ID NO: 2832197 - RNA, 21 nt, Human
cuguuuauggccacauuuaau

SEQ ID NO: 2832198 - RNA, 21 nt, Human
cuguuuauggccucagcugcc

SEQ ID NO: 2832199 - RNA, 19 nt, Human
cuguuuauggccucagcug

SEQ ID NO: 2832200 - RNA, 18 nt, Human
cuguuuauggccucagcu

SEQ ID NO: 2832201 - RNA, 17 nt, Human
cuguuuauggccucagc

SEQ ID NO: 2832202 - RNA, 12 nt, Human
cuguuucccagc

SEQ ID NO: 2832203 - RNA, 11 nt, Human
cuguuuccugu

SEQ ID NO: 2832204 - RNA, 15 nt, Human
cuguuucccagcagu

SEQ ID NO: 2832205 - RNA, 21 nt, Human
cuguuucccagcaguggacuc

SEQ ID NO: 2832206 - RNA, 16 nt, Human
cuguuucccuucccuu

SEQ ID NO: 2832207 - RNA, 19 nt, Human
cuguuucccuucccuucca

SEQ ID NO: 2832208 - RNA, 21 nt, Human
cuguuucccuucccuuccacu

SEQ ID NO: 2832209 - RNA, 22 nt, Human
cuguuucucuugagcuggccuc

SEQ ID NO: 2832210 - RNA, 21 nt, Human
cuguuucucuugagcuggccu

SEQ ID NO: 2832211 - RNA, 12 nt, Human
cuguuucugaaa

SEQ ID NO: 2832212 - RNA, 15 nt, Human
cuguuucugaaaaga

SEQ ID NO: 2832213 - RNA, 16 nt, Human
cuguuucugaaaagaa

SEQ ID NO: 2832214 - RNA, 17 nt, Human
cuguuucugaaaagaaa

SEQ ID NO: 2832215 - RNA, 18 nt, Human
cuguuucugaaaagaaau

SEQ ID NO: 2832216 - RNA, 19 nt, Human
cuguuucugaaaagaaaua

SEQ ID NO: 2832217 - RNA, 21 nt, Human
cuguuucugaaaagaaauaau

SEQ ID NO: 2832218 - RNA, 20 nt, Human
cuguuucucuugagcuggcc

SEQ ID NO: 2832219 - RNA, 17 nt, Human
cuguuucucuugagcug

SEQ ID NO: 2832220 - RNA, 16 nt, Human
cuguuucucuugagcu

SEQ ID NO: 2832221 - RNA, 15 nt, Human
cuguuucucuugagc

SEQ ID NO: 2832222 - RNA, 11 nt, Human
cuguuucucau

SEQ ID NO: 2832223 - RNA, 21 nt, Human
cuguuucucugccgcuaccuc

SEQ ID NO: 2832224 - RNA, 15 nt, Human
cuguuuccuuuuaug

SEQ ID NO: 2832225 - RNA, 13 nt, Human
cuguuuccuuuua

SEQ ID NO: 2832226 - RNA, 17 nt, Human
cuguuuaccauuuuuca

SEQ ID NO: 2832227 - RNA, 16 nt, Human
cuguuuauggccucag

SEQ ID NO: 2832228 - RNA, 15 nt, Human
cuguuuauggccuca

SEQ ID NO: 2832229 - RNA, 14 nt, Human
cuguuuauggccuc

SEQ ID NO: 2832230 - RNA, 13 nt, Human
cuguuuauggccu

SEQ ID NO: 2832231 - RNA, 16 nt, Human
cuguuuauauguguug

SEQ ID NO: 2832232 - RNA, 20 nt, Human
cuguuuauauguguugaaaa

SEQ ID NO: 2832233 - RNA, 22 nt, Human
cugguucuucauuuauugagca

SEQ ID NO: 2832234 - RNA, 23 nt, Human
cugguucugaugaugugccuggg

SEQ ID NO: 2832235 - RNA, 13 nt, Human
cugguugaagaag

SEQ ID NO: 2832236 - RNA, 19 nt, Human
cugguugaagaagaugauc

SEQ ID NO: 2832237 - RNA, 17 nt, Human
cugguugaugccuguga

SEQ ID NO: 2832238 - RNA, 15 nt, Human
cuguuuaauguucug

SEQ ID NO: 2832239 - RNA, 21 nt, Human
cuguuuaauauuuaaacagca

SEQ ID NO: 2832240 - RNA, 23 nt, Human
cuuaauccguaguuauuuugcac

SEQ ID NO: 2832241 - RNA, 22 nt, Human
cuuaaucagguccucagagaau

SEQ ID NO: 2832242 - RNA, 20 nt, Human
cuuaaucagguccucagaga

SEQ ID NO: 2832243 - RNA, 20 nt, Human
cuuaauaaaaacuuacacuc

SEQ ID NO: 2832244 - RNA, 14 nt, Human
cuuaauaaaaauga

SEQ ID NO: 2832245 - RNA, 16 nt, Human
cuuaauaaaaaugaca

SEQ ID NO: 2832246 - RNA, 17 nt, Human
cuuaauaaaaaugacag

SEQ ID NO: 2832247 - RNA, 18 nt, Human
cuuaauaaaaaugacaga

SEQ ID NO: 2832248 - RNA, 20 nt, Human
cuuaauaaaaaugacagacu

SEQ ID NO: 2832249 - RNA, 21 nt, Human
cuuaauaaaaaugacagacug

SEQ ID NO: 2832250 - RNA, 16 nt, Human
cuuaaguuuauacucu

SEQ ID NO: 2832251 - RNA, 12 nt, Human
cuuaagagaaau

SEQ ID NO: 2832252 - RNA, 16 nt, Human
cuuaagagaaauggca

SEQ ID NO: 2832253 - RNA, 17 nt, Human
cuuaagagaugccucau

SEQ ID NO: 2832254 - RNA, 14 nt, Human
cuuaagcaaaagaa

SEQ ID NO: 2832255 - RNA, 15 nt, Human
cuuaagcaaaagaaa

SEQ ID NO: 2832256 - RNA, 17 nt, Human
cuuaagcaaaagaaaaa

SEQ ID NO: 2832257 - RNA, 18 nt, Human
cuuaagcaaaagaaaaag

SEQ ID NO: 2832258 - RNA, 11 nt, Human
cuuaagcacaa

SEQ ID NO: 2832259 - RNA, 20 nt, Human
cuuaagucacccuagcccuc

SEQ ID NO: 2832260 - RNA, 13 nt, Human
cuuaagcccuggc

SEQ ID NO: 2832261 - RNA, 14 nt, Human
cuuaagcccuggcc

SEQ ID NO: 2832262 - RNA, 16 nt, Human
cuuaagcccuggcccc

SEQ ID NO: 2832263 - RNA, 11 nt, Human
cuuaacuauuc

SEQ ID NO: 2832264 - RNA, 22 nt, Human
cuuaacuuaaauuuuaauuuau

SEQ ID NO: 2832265 - RNA, 21 nt, Human
cuuaaauuugauuuacauaua

SEQ ID NO: 2832266 - RNA, 13 nt, Human
cuuaacccaagga

SEQ ID NO: 2832267 - RNA, 14 nt, Human
cuuaacccaaggag

SEQ ID NO: 2832268 - RNA, 16 nt, Human
cuuaacccaaggagca

SEQ ID NO: 2832269 - RNA, 17 nt, Human
cuuaacccaaggagcac

SEQ ID NO: 2832270 - RNA, 16 nt, Human
cuuaaauuuuaauuua

SEQ ID NO: 2832271 - RNA, 23 nt, Human
cuuaaauuggguucaugaugcag

SEQ ID NO: 2832272 - RNA, 15 nt, Human
cuguuuuuuuuucau

SEQ ID NO: 2832273 - RNA, 16 nt, Human
cuguuuuuuuuucauu

SEQ ID NO: 2832274 - RNA, 19 nt, Human
cuuaaaaaaaaaaaaaagc

SEQ ID NO: 2832275 - RNA, 20 nt, Human
cuuaaaaaaaaaaaaaagcu

SEQ ID NO: 2832276 - RNA, 21 nt, Human
cuuaaaaaaaaaaaaaagcuu

SEQ ID NO: 2832277 - RNA, 22 nt, Human
cuuaaaaaaaaaaaaaagcuuu

SEQ ID NO: 2832278 - RNA, 23 nt, Human
cuuaaaaaaaaaaaaaagcuuua

SEQ ID NO: 2832279 - RNA, 13 nt, Human
cuguuuuuuaguu

SEQ ID NO: 2832280 - RNA, 13 nt, Human
cuguuuuuguugu

SEQ ID NO: 2832281 - RNA, 14 nt, Human
cuguuuuuguugug

SEQ ID NO: 2832282 - RNA, 20 nt, Human
cuguuuuuguuuauuucauu

SEQ ID NO: 2832283 - RNA, 15 nt, Human
cuuaaauaucuuuua

SEQ ID NO: 2832284 - RNA, 16 nt, Human
cuuaaauaucuuuuau

SEQ ID NO: 2832285 - RNA, 22 nt, Human
cuuaaauaucuuuuauguuuga

SEQ ID NO: 2832286 - RNA, 13 nt, Human
cuuaaauauaguu

SEQ ID NO: 2832287 - RNA, 15 nt, Human
cuuaaauauaguucc

SEQ ID NO: 2832288 - RNA, 22 nt, Human
cuuaaauauaguuccuaagaag

SEQ ID NO: 2832289 - RNA, 21 nt, Human
cuuaaauguagcaauggcacu

SEQ ID NO: 2832290 - RNA, 22 nt, Human
gaaaagucaaggguaggguggg

SEQ ID NO: 2832291 - RNA, 12 nt, Human
gaaaaguauuuu

SEQ ID NO: 2832292 - RNA, 14 nt, Human
gaaaaguauuuuga

SEQ ID NO: 2832293 - RNA, 17 nt, Human
gaaaaguauuuugaagu

SEQ ID NO: 2832294 - RNA, 18 nt, Human
gaaaaguauuuugaaguu

SEQ ID NO: 2832295 - RNA, 19 nt, Human
gaaaaguauuuugaaguuu

SEQ ID NO: 2832296 - RNA, 23 nt, Human
gaaaaguauuuugaaguuuacau

SEQ ID NO: 2832297 - RNA, 18 nt, Human
gaaaagucacuuacuauu

SEQ ID NO: 2832298 - RNA, 23 nt, Human
gaaaaguagacaaucauuguuuu

SEQ ID NO: 2832299 - RNA, 14 nt, Human
gaaaaccccagcau

SEQ ID NO: 2832300 - RNA, 21 nt, Human
gaaaaccuaaguccuuuaugu

SEQ ID NO: 2832301 - RNA, 13 nt, Human
gaaaacggagcug

SEQ ID NO: 2832302 - RNA, 14 nt, Human
gaaaacggagcuga

SEQ ID NO: 2832303 - RNA, 13 nt, Human
gaaaaccucuccu

SEQ ID NO: 2832304 - RNA, 19 nt, Human
gaaaagggaaguugugccu

SEQ ID NO: 2832305 - RNA, 23 nt, Human
gaaaagguagcuuaccugacaca

SEQ ID NO: 2832306 - RNA, 23 nt, Human
gaaaagguucuucaucccuuucc

SEQ ID NO: 2832307 - RNA, 19 nt, Human
gaaaacaaaauuuuauuuu

SEQ ID NO: 2832308 - RNA, 11 nt, Human
cuuuuuuacuc

SEQ ID NO: 2832309 - RNA, 13 nt, Human
cuuuuuuacucau

SEQ ID NO: 2832310 - RNA, 19 nt, Human
cuuuuuuacucauugaaau

SEQ ID NO: 2832311 - RNA, 20 nt, Human
cuuuuuuacucauugaaaug

SEQ ID NO: 2832312 - RNA, 21 nt, Human
cuuuuuuacucauugaaaugu

SEQ ID NO: 2832313 - RNA, 23 nt, Human
cuuuuuuacucauugaaauguca

SEQ ID NO: 2832314 - RNA, 20 nt, Human
cuuuuuuaagauuuuucuca

SEQ ID NO: 2832315 - RNA, 21 nt, Human
cuuuuuuaagauuuuucucaa

SEQ ID NO: 2832316 - RNA, 16 nt, Human
cuuuuuuaauaaacua

SEQ ID NO: 2832317 - RNA, 20 nt, Human
gaaaaauagugucuuuguga

SEQ ID NO: 2832318 - RNA, 17 nt, Human
gaaaaauagugucuuug

SEQ ID NO: 2832319 - RNA, 19 nt, Human
gaaaaauaacuucaagcaa

SEQ ID NO: 2832320 - RNA, 16 nt, Human
gaaaaauagcaacuug

SEQ ID NO: 2832321 - RNA, 17 nt, Human
gaaaaauagcaacuugu

SEQ ID NO: 2832322 - RNA, 19 nt, Human
gaaaaauauauacuaaaca

SEQ ID NO: 2832323 - RNA, 20 nt, Human
gaaaaauucagcaaaccauu

SEQ ID NO: 2832324 - RNA, 15 nt, Human
gaaaaaucacuugau

SEQ ID NO: 2832325 - RNA, 21 nt, Human
gaaaaaucacuugauucauaa

SEQ ID NO: 2832326 - RNA, 20 nt, Human
cuuuguuuucugacuaauua

SEQ ID NO: 2832327 - RNA, 24 nt, Human
cuuuguuuugauguuuguggccuc

SEQ ID NO: 2832328 - RNA, 17 nt, Human
cuuuguuuucugacuaa

SEQ ID NO: 2832329 - RNA, 23 nt, Human
cuuuguuuugauguuuguggccu

SEQ ID NO: 2832330 - RNA, 19 nt, Human
cuuuguuuugauguuugug

SEQ ID NO: 2832331 - RNA, 17 nt, Human
cuuuguuuuacugucuu

SEQ ID NO: 2832332 - RNA, 16 nt, Human
cuuugugguuuuaugg

SEQ ID NO: 2832333 - RNA, 17 nt, Human
cuuuguguagcuuugcu

SEQ ID NO: 2832334 - RNA, 11 nt, Human
cuuuguugcac

SEQ ID NO: 2832335 - RNA, 15 nt, Human
cuuuguugcacugaa

SEQ ID NO: 2832336 - RNA, 16 nt, Human
cuuuguugcccaggcu

SEQ ID NO: 2832337 - RNA, 15 nt, Human
cuuuucugcagaggg

SEQ ID NO: 2832338 - RNA, 12 nt, Human
cuuuucugcaga

SEQ ID NO: 2832339 - RNA, 14 nt, Human
cuuuugaacccagg

SEQ ID NO: 2832340 - RNA, 13 nt, Human
cuuuugaacccag

SEQ ID NO: 2832341 - RNA, 14 nt, Human
cuuuucuuuuucuc

SEQ ID NO: 2832342 - RNA, 14 nt, Human
cuuuucuuccuggc

SEQ ID NO: 2832343 - RNA, 15 nt, Human
cuuuucuuccuggcu

SEQ ID NO: 2832344 - RNA, 14 nt, Human
cuuuucuucuaugu

SEQ ID NO: 2832345 - RNA, 22 nt, Human
cuuuucuuuuguuacuguucuu

SEQ ID NO: 2832346 - RNA, 14 nt, Human
cuuuucuuuuuaca

SEQ ID NO: 2832347 - RNA, 15 nt, Human
cuuuucuuuuuacau

SEQ ID NO: 2832348 - RNA, 16 nt, Human
cuuuucuuuuuacaua

SEQ ID NO: 2832349 - RNA, 23 nt, Human
cuuuucuuuuuacauaacugccu

SEQ ID NO: 2832350 - RNA, 12 nt, Human
cuuuucuguuuc

SEQ ID NO: 2832351 - RNA, 19 nt, Human
cuuuucuguuuccuguacc

SEQ ID NO: 2832352 - RNA, 13 nt, Human
cuuuucuuaacaa

SEQ ID NO: 2832353 - RNA, 18 nt, Human
cuuuucuuaacaaccugg

SEQ ID NO: 2832354 - RNA, 19 nt, Human
cuuuucuuaacaaccuggc

SEQ ID NO: 2832355 - RNA, 14 nt, Human
cuuuucuuacuccu

SEQ ID NO: 2832356 - RNA, 15 nt, Human
cuuuucuuacuccuc

SEQ ID NO: 2832357 - RNA, 17 nt, Human
cuuuucuuacuccuccu

SEQ ID NO: 2832358 - RNA, 18 nt, Human
cuuuucuuacuccuccuc

SEQ ID NO: 2832359 - RNA, 19 nt, Human
cuuuucuuacuccuccucu

SEQ ID NO: 2832360 - RNA, 23 nt, Human
cuuuucuuacuccuccucuuucu

SEQ ID NO: 2832361 - RNA, 17 nt, Human
cuuuuuuaaaaaagcaa

SEQ ID NO: 2832362 - RNA, 18 nt, Human
cuuuuuuaaaaucaacuu

SEQ ID NO: 2832363 - RNA, 13 nt, Human
cuuuuuuaaauaa

SEQ ID NO: 2832364 - RNA, 14 nt, Human
cuuuuuuaaauaaa

SEQ ID NO: 2832365 - RNA, 15 nt, Human
cuuuuuuaaauaaac

SEQ ID NO: 2832366 - RNA, 17 nt, Human
cuuuuuuaaauaaacuu

SEQ ID NO: 2832367 - RNA, 18 nt, Human
cuuuuuuaaauaaacuuu

SEQ ID NO: 2832368 - RNA, 19 nt, Human
cuuuuuuaaauaaacuuuu

SEQ ID NO: 2832369 - RNA, 15 nt, Human
cuuuuucauccccuu

SEQ ID NO: 2832370 - RNA, 16 nt, Human
cuuuuucauccccuua

SEQ ID NO: 2832371 - RNA, 17 nt, Human
cuuuuucauccccuuac

SEQ ID NO: 2832372 - RNA, 23 nt, Human
cuuuuugaaaugaaauuuaaaca

SEQ ID NO: 2832373 - RNA, 19 nt, Human
cuuuuugaauguuauuugu

SEQ ID NO: 2832374 - RNA, 11 nt, Human
cuuuuugaaug

SEQ ID NO: 2832375 - RNA, 16 nt, Human
cuuuuuaaaguguuuc

SEQ ID NO: 2832376 - RNA, 18 nt, Human
cuuuucugucucucucuu

SEQ ID NO: 2832377 - RNA, 20 nt, Human
cuuuugaaguaguuuguaua

SEQ ID NO: 2832378 - RNA, 22 nt, Human
cuuuugaacuggcaauugucua

SEQ ID NO: 2832379 - RNA, 20 nt, Human
cuuuugaacccaggaguuca

SEQ ID NO: 2832380 - RNA, 18 nt, Human
cuuuugaacccaggaguu

SEQ ID NO: 2832381 - RNA, 14 nt, Human
cuuuugaauuguua

SEQ ID NO: 2832382 - RNA, 16 nt, Human
cuuuugaauuguuaca

SEQ ID NO: 2832383 - RNA, 14 nt, Human
cuuuugaauuguuu

SEQ ID NO: 2832384 - RNA, 13 nt, Human
cuuuugaauauuc

SEQ ID NO: 2832385 - RNA, 22 nt, Human
cuuuugaaguaguuuguauaac

SEQ ID NO: 2832386 - RNA, 16 nt, Human
cuuuuuauuucugcau

SEQ ID NO: 2832387 - RNA, 13 nt, Human
cuuuuuauuucug

SEQ ID NO: 2832388 - RNA, 17 nt, Human
cuuuuuaaaacacaugu

SEQ ID NO: 2832389 - RNA, 22 nt, Human
cuuuuuaaaagguauuuugaau

SEQ ID NO: 2832390 - RNA, 22 nt, Human
cuuuuuaaaauggugcuuaagu

SEQ ID NO: 2832391 - RNA, 14 nt, Human
cuuuuuaaagcuua

SEQ ID NO: 2832392 - RNA, 15 nt, Human
cuuuuuaaagcuuau

SEQ ID NO: 2832393 - RNA, 14 nt, Human
cuuuuuaaaacaca

SEQ ID NO: 2832394 - RNA, 19 nt, Human
cuuuuuaaaaauagacacu

SEQ ID NO: 2832395 - RNA, 19 nt, Human
cuuuccucaaauguugaca

SEQ ID NO: 2832396 - RNA, 19 nt, Human
cuuuaguaccugaaaagua

SEQ ID NO: 2832397 - RNA, 17 nt, Human
cuuuaguaccugaaaag

SEQ ID NO: 2832398 - RNA, 22 nt, Human
cuuuaguaccugaaaaguaacu

SEQ ID NO: 2832399 - RNA, 17 nt, Human
cuuuaguaucaguguuu

SEQ ID NO: 2832400 - RNA, 21 nt, Human
cuuuaguaugacgcugauaca

SEQ ID NO: 2832401 - RNA, 22 nt, Human
cuuuaguaugacgcugauacau

SEQ ID NO: 2832402 - RNA, 15 nt, Human
cuuuaggucuuugua

SEQ ID NO: 2832403 - RNA, 16 nt, Human
cuuuaggucuuuguaa

SEQ ID NO: 2832404 - RNA, 17 nt, Human
cuuuaggucuuuguaag

SEQ ID NO: 2832405 - RNA, 13 nt, Human
cuuuaggcuuuca

SEQ ID NO: 2832406 - RNA, 17 nt, Human
cuuuaggcuuucagcuu

SEQ ID NO: 2832407 - RNA, 18 nt, Human
cuuuaggcuuucagcuua

SEQ ID NO: 2832408 - RNA, 13 nt, Human
cuuuagagaacug

SEQ ID NO: 2832409 - RNA, 15 nt, Human
cuuuagagaacugaa

SEQ ID NO: 2832410 - RNA, 16 nt, Human
cuuuagagaacugaaa

SEQ ID NO: 2832411 - RNA, 17 nt, Human
cuuuagagaacugaaaa

SEQ ID NO: 2832412 - RNA, 19 nt, Human
cuuuagagaacugaaaaga

SEQ ID NO: 2832413 - RNA, 20 nt, Human
cuuuagagaacugaaaagag

SEQ ID NO: 2832414 - RNA, 22 nt, Human
cuuuagcgcucaauaggaccag

SEQ ID NO: 2832415 - RNA, 17 nt, Human
cuuucucuuucucucuu

SEQ ID NO: 2832416 - RNA, 14 nt, Human
cuuucucuuucuuc

SEQ ID NO: 2832417 - RNA, 15 nt, Human
cuuucucuuucuucc

SEQ ID NO: 2832418 - RNA, 16 nt, Human
cuuucucuuucuuccu

SEQ ID NO: 2832419 - RNA, 18 nt, Human
cuuucucuuucuuccuuu

SEQ ID NO: 2832420 - RNA, 12 nt, Human
cuuucucuuuuc

SEQ ID NO: 2832421 - RNA, 17 nt, Human
cuuuccuccuuuaucac

SEQ ID NO: 2832422 - RNA, 17 nt, Human
cuuucucuuuucuaaaa

SEQ ID NO: 2832423 - RNA, 20 nt, Human
cuuucucuuuucuaaaagac

SEQ ID NO: 2832424 - RNA, 19 nt, Human
cuuucucuuuucucuuuuu

SEQ ID NO: 2832425 - RNA, 14 nt, Human
cuuucugaccuuca

SEQ ID NO: 2832426 - RNA, 18 nt, Human
cuuucugaccuucagcuc

SEQ ID NO: 2832427 - RNA, 21 nt, Human
cuuucugagcacacuuuagug

SEQ ID NO: 2832428 - RNA, 17 nt, Human
cuuucugagcacacuuu

SEQ ID NO: 2832429 - RNA, 20 nt, Human
cuuucugagcacacuuuagu

SEQ ID NO: 2832430 - RNA, 18 nt, Human
cuuucuguauauacuuuu

SEQ ID NO: 2832431 - RNA, 20 nt, Human
cuuucuguauauacuuuuuu

SEQ ID NO: 2832432 - RNA, 19 nt, Human
cuuucuguauauacuuuuu

SEQ ID NO: 2832433 - RNA, 23 nt, Human
cuuucugucccuucugucccuca

SEQ ID NO: 2832434 - RNA, 18 nt, Human
cuuucugucccuucuguc

SEQ ID NO: 2832435 - RNA, 18 nt, Human
cuuucugccgaccccuag

SEQ ID NO: 2832436 - RNA, 15 nt, Human
cuuucugcagaaaca

SEQ ID NO: 2832437 - RNA, 15 nt, Human
cuuucugcaguuuuu

SEQ ID NO: 2832438 - RNA, 19 nt, Human
cuuucugcaguuuuucagg

SEQ ID NO: 2832439 - RNA, 20 nt, Human
cuuucugcaguuuuucagga

SEQ ID NO: 2832440 - RNA, 21 nt, Human
cuuucugcaguuuuucaggag

SEQ ID NO: 2832441 - RNA, 13 nt, Human
cuuucugugcccu

SEQ ID NO: 2832442 - RNA, 14 nt, Human
cuuucugugcccua

SEQ ID NO: 2832443 - RNA, 22 nt, Human
cuuucugugcccuacucauugg

SEQ ID NO: 2832444 - RNA, 21 nt, Human
cuuucugugugcaccuuacca

SEQ ID NO: 2832445 - RNA, 12 nt, Human
cuuucugugugc

SEQ ID NO: 2832446 - RNA, 15 nt, Human
cuuucugugugcacc

SEQ ID NO: 2832447 - RNA, 15 nt, Human
cuuucuucuauuuua

SEQ ID NO: 2832448 - RNA, 11 nt, Human
cuuucuuccuu

SEQ ID NO: 2832449 - RNA, 12 nt, Human
cuuucuuccuuu

SEQ ID NO: 2832450 - RNA, 16 nt, Human
cuuucuuccucugcug

SEQ ID NO: 2832451 - RNA, 21 nt, Human
cuuugaaagacuuccaaagaa

SEQ ID NO: 2832452 - RNA, 17 nt, Human
cuuugaaaccugcucug

SEQ ID NO: 2832453 - RNA, 19 nt, Human
cuuugaaaccugcucugua

SEQ ID NO: 2832454 - RNA, 20 nt, Human
cuuugaaaccugcucuguag

SEQ ID NO: 2832455 - RNA, 19 nt, Human
cuuucuuuuuuuuuuuuga

SEQ ID NO: 2832456 - RNA, 16 nt, Human
cuuucuuuuuuucccc

SEQ ID NO: 2832457 - RNA, 18 nt, Human
cuuucuuuuuuucccccc

SEQ ID NO: 2832458 - RNA, 19 nt, Human
cuuucuuuuuuuccccccc

SEQ ID NO: 2832459 - RNA, 23 nt, Human
cuuugaaaaaguuaaugcuuaag

SEQ ID NO: 2832460 - RNA, 23 nt, Human
cuuugaaaaaucacuugauucau

SEQ ID NO: 2832461 - RNA, 16 nt, Human
cuuucuucuauuuuau

SEQ ID NO: 2832462 - RNA, 12 nt, Human
cuuucuugacaa

SEQ ID NO: 2832463 - RNA, 20 nt, Human
cuuucuugacaaaaccuaac

SEQ ID NO: 2832464 - RNA, 22 nt, Human
cuuucuugacaaaaccuaacuu

SEQ ID NO: 2832465 - RNA, 14 nt, Human
cuuucuugcucccu

SEQ ID NO: 2832466 - RNA, 16 nt, Human
cuuucuugcucccuuc

SEQ ID NO: 2832467 - RNA, 17 nt, Human
cuuucuugcucccuuca

SEQ ID NO: 2832468 - RNA, 19 nt, Human
cuuucuugcucccuucagc

SEQ ID NO: 2832469 - RNA, 20 nt, Human
cuuucuugcucccuucagcc

SEQ ID NO: 2832470 - RNA, 15 nt, Human
cuuucuuuaaauguu

SEQ ID NO: 2832471 - RNA, 16 nt, Human
cuuucuuuaaauguuu

SEQ ID NO: 2832472 - RNA, 13 nt, Human
cuuucuuuaaauu

SEQ ID NO: 2832473 - RNA, 18 nt, Human
cuuucuuuugauucuucc

SEQ ID NO: 2832474 - RNA, 18 nt, Human
cuuugcuuugucuggaag

SEQ ID NO: 2832475 - RNA, 17 nt, Human
cuuuggaaaaauguuug

SEQ ID NO: 2832476 - RNA, 18 nt, Human
cuuuggaaaaauguuugu

SEQ ID NO: 2832477 - RNA, 16 nt, Human
cuuugcuuugcccagc

SEQ ID NO: 2832478 - RNA, 17 nt, Human
cuuugcaucguccccuc

SEQ ID NO: 2832479 - RNA, 18 nt, Human
cuuugcaucguccccucc

SEQ ID NO: 2832480 - RNA, 22 nt, Human
cuuugcaucguccccuccccca

SEQ ID NO: 2832481 - RNA, 18 nt, Human
cuuugcauaugagccgug

SEQ ID NO: 2832482 - RNA, 21 nt, Human
cuuugcauaugagccgugaac

SEQ ID NO: 2832483 - RNA, 14 nt, Human
cuuugcauuuggaa

SEQ ID NO: 2832484 - RNA, 15 nt, Human
cuuugcauuuggaau

SEQ ID NO: 2832485 - RNA, 16 nt, Human
cuuugcauuuggaauu

SEQ ID NO: 2832486 - RNA, 22 nt, Human
cuuugcauuuggaauuuuugcu

SEQ ID NO: 2832487 - RNA, 14 nt, Human
cuuugacauuuaau

SEQ ID NO: 2832488 - RNA, 17 nt, Human
cuuugacauuuaauuua

SEQ ID NO: 2832489 - RNA, 18 nt, Human
cuuugacauuuaauuuag

SEQ ID NO: 2832490 - RNA, 14 nt, Human
cuuugacacucugc

SEQ ID NO: 2832491 - RNA, 13 nt, Human
cuuugaaauaccu

SEQ ID NO: 2832492 - RNA, 14 nt, Human
cuuugaaauaccuc

SEQ ID NO: 2832493 - RNA, 15 nt, Human
cuuugaaauaccuca

SEQ ID NO: 2832494 - RNA, 16 nt, Human
cuuugaaauaccucau

SEQ ID NO: 2832495 - RNA, 18 nt, Human
cuuugaaauaccucaugu

SEQ ID NO: 2832496 - RNA, 19 nt, Human
cuuugaaauaccucauguu

SEQ ID NO: 2832497 - RNA, 20 nt, Human
cuuugaaauaccucauguuu

SEQ ID NO: 2832498 - RNA, 21 nt, Human
cuuugaaauaccucauguuua

SEQ ID NO: 2832499 - RNA, 16 nt, Human
cuuuguguagcuuugc

SEQ ID NO: 2832500 - RNA, 12 nt, Human
cuuuguggggcu

SEQ ID NO: 2832501 - RNA, 13 nt, Human
cuuuguggggcuu

SEQ ID NO: 2832502 - RNA, 16 nt, Human
cuuuguggggcuuggc

SEQ ID NO: 2832503 - RNA, 21 nt, Human
cuuuguggggcuuggcgugga

SEQ ID NO: 2832504 - RNA, 13 nt, Human
cuuugugauaauu

SEQ ID NO: 2832505 - RNA, 15 nt, Human
cuuugugauaauuua

SEQ ID NO: 2832506 - RNA, 16 nt, Human
cuuugugauaauuuaa

SEQ ID NO: 2832507 - RNA, 17 nt, Human
cuuugugauaauuuaag

SEQ ID NO: 2832508 - RNA, 18 nt, Human
cuuugugauaauuuaaga

SEQ ID NO: 2832509 - RNA, 13 nt, Human
cuuuguggcuucc

SEQ ID NO: 2832510 - RNA, 13 nt, Human
cuuugggcccugc

SEQ ID NO: 2832511 - RNA, 14 nt, Human
cuuugggcccugca

SEQ ID NO: 2832512 - RNA, 15 nt, Human
cuuugggcccugcau

SEQ ID NO: 2832513 - RNA, 17 nt, Human
cuuugggcccugcaugu

SEQ ID NO: 2832514 - RNA, 18 nt, Human
cuuugggccucugcuucu

SEQ ID NO: 2832515 - RNA, 18 nt, Human
cuuugggaggcugaggcg

SEQ ID NO: 2832516 - RNA, 15 nt, Human
cuuugggauuuaauu

SEQ ID NO: 2832517 - RNA, 19 nt, Human
cuuugggauuuaauuucca

SEQ ID NO: 2832518 - RNA, 20 nt, Human
cuuugggauuuaauuuccag

SEQ ID NO: 2832519 - RNA, 17 nt, Human
cuuugggaggcugaggc

SEQ ID NO: 2832520 - RNA, 13 nt, Human
cuuuggcaguguu

SEQ ID NO: 2832521 - RNA, 15 nt, Human
cuuuggauuugacau

SEQ ID NO: 2832522 - RNA, 13 nt, Human
cuuuggauuugac

SEQ ID NO: 2832523 - RNA, 17 nt, Human
cuuuggauuugacauug

SEQ ID NO: 2832524 - RNA, 16 nt, Human
cuuuggauuugacauu

SEQ ID NO: 2832525 - RNA, 12 nt, Human
cuuguacaaaau

SEQ ID NO: 2832526 - RNA, 14 nt, Human
cuuguagaauuguu

SEQ ID NO: 2832527 - RNA, 15 nt, Human
cuuguagaauuguua

SEQ ID NO: 2832528 - RNA, 17 nt, Human
cuuguagaauuguuaua

SEQ ID NO: 2832529 - RNA, 13 nt, Human
cuuguacaaaaua

SEQ ID NO: 2832530 - RNA, 14 nt, Human
cuuguaauuuccag

SEQ ID NO: 2832531 - RNA, 16 nt, Human
cuuguaauuuuuauuu

SEQ ID NO: 2832532 - RNA, 15 nt, Human
cuuggggccuaugca

SEQ ID NO: 2832533 - RNA, 19 nt, Human
cuugguuucucucuacagu

SEQ ID NO: 2832534 - RNA, 20 nt, Human
cuugguuucucucuacagug

SEQ ID NO: 2832535 - RNA, 23 nt, Human
cuugguuucucucuacagugcca

SEQ ID NO: 2832536 - RNA, 16 nt, Human
cuugguuggcuggccu

SEQ ID NO: 2832537 - RNA, 15 nt, Human
cuugguuggcuggcc

SEQ ID NO: 2832538 - RNA, 21 nt, Human
cuugggggaacgaugugucug

SEQ ID NO: 2832539 - RNA, 22 nt, Human
cuugggggaacgaugugucugu

SEQ ID NO: 2832540 - RNA, 14 nt, Human
cuuggacuauuaua

SEQ ID NO: 2832541 - RNA, 22 nt, Human
cuuggacaagacaaaccaaguc

SEQ ID NO: 2832542 - RNA, 22 nt, Human
cuuggacuauuauaauuuaaug

SEQ ID NO: 2832543 - RNA, 11 nt, Human
cuuggacucau

SEQ ID NO: 2832544 - RNA, 21 nt, Human
cuuggaaguuucauauauugu

SEQ ID NO: 2832545 - RNA, 17 nt, Human
cuuggaauuccauuuga

SEQ ID NO: 2832546 - RNA, 18 nt, Human
cuuggaaguugcauggca

SEQ ID NO: 2832547 - RNA, 16 nt, Human
cuuggaaguacaugaa

SEQ ID NO: 2832548 - RNA, 22 nt, Human
cuuggaaguacaugaauacaaa

SEQ ID NO: 2832549 - RNA, 13 nt, Human
cuuggacacugua

SEQ ID NO: 2832550 - RNA, 15 nt, Human
cuuggagacccugca

SEQ ID NO: 2832551 - RNA, 14 nt, Human
cuuggagaccuuac

SEQ ID NO: 2832552 - RNA, 16 nt, Human
cuuggagaccuuaccc

SEQ ID NO: 2832553 - RNA, 15 nt, Human
cuuggagagacacag

SEQ ID NO: 2832554 - RNA, 16 nt, Human
cuuggagagacacagc

SEQ ID NO: 2832555 - RNA, 22 nt, Human
cuuggagccaauggagacuguc

SEQ ID NO: 2832556 - RNA, 15 nt, Human
cuugggaggcuuccc

SEQ ID NO: 2832557 - RNA, 16 nt, Human
cuugggaggcuucccc

SEQ ID NO: 2832558 - RNA, 14 nt, Human
cuugggaguuuuga

SEQ ID NO: 2832559 - RNA, 12 nt, Human
cuuguucuguca

SEQ ID NO: 2832560 - RNA, 17 nt, Human
cuuguucugucacucag

SEQ ID NO: 2832561 - RNA, 13 nt, Human
cuuguuagaaaac

SEQ ID NO: 2832562 - RNA, 16 nt, Human
cuuguuagaaaacaaa

SEQ ID NO: 2832563 - RNA, 23 nt, Human
cuuguuagaaaacaaaauuuuau

SEQ ID NO: 2832564 - RNA, 17 nt, Human
cuuguuacccaugaaaa

SEQ ID NO: 2832565 - RNA, 18 nt, Human
cuuguuacccaugaaaaa

SEQ ID NO: 2832566 - RNA, 19 nt, Human
cuuguuacccaugaaaaac

SEQ ID NO: 2832567 - RNA, 16 nt, Human
cuuguccucaguccau

SEQ ID NO: 2832568 - RNA, 22 nt, Human
cuuguccucaguccauuuauau

SEQ ID NO: 2832569 - RNA, 18 nt, Human
cuuguccuagcuugggag

SEQ ID NO: 2832570 - RNA, 23 nt, Human
cuuguccuuuuguaccauggugu

SEQ ID NO: 2832571 - RNA, 15 nt, Human
cuuguccuuucccuu

SEQ ID NO: 2832572 - RNA, 14 nt, Human
cuuguccuuucccu

SEQ ID NO: 2832573 - RNA, 18 nt, Human
cuuguagcccaggcugga

SEQ ID NO: 2832574 - RNA, 23 nt, Human
cuuguagcggaugauucuucaag

SEQ ID NO: 2832575 - RNA, 13 nt, Human
cuuguagcuguaa

SEQ ID NO: 2832576 - RNA, 14 nt, Human
cuuguagcuguaaa

SEQ ID NO: 2832577 - RNA, 15 nt, Human
cuuguagcuguaaaa

SEQ ID NO: 2832578 - RNA, 16 nt, Human
cuuguagcuguaaaac

SEQ ID NO: 2832579 - RNA, 17 nt, Human
cuuuaaaaaaauuuaag

SEQ ID NO: 2832580 - RNA, 18 nt, Human
cuuuaaaaaaauuuaagu

SEQ ID NO: 2832581 - RNA, 19 nt, Human
cuuuaaaaaaauuuaagug

SEQ ID NO: 2832582 - RNA, 23 nt, Human
cuuuaaaaaagaaaagugcauau

SEQ ID NO: 2832583 - RNA, 12 nt, Human
cuuguuucuugg

SEQ ID NO: 2832584 - RNA, 14 nt, Human
cuuguuucuuuuca

SEQ ID NO: 2832585 - RNA, 14 nt, Human
cuuguuucucaacu

SEQ ID NO: 2832586 - RNA, 12 nt, Human
cuuguuuauuga

SEQ ID NO: 2832587 - RNA, 19 nt, Human
cuuguuuauugaguuugua

SEQ ID NO: 2832588 - RNA, 23 nt, Human
cuuguuuauugaguuuguaggua

SEQ ID NO: 2832589 - RNA, 16 nt, Human
cuuguuuauuuugugg

SEQ ID NO: 2832590 - RNA, 18 nt, Human
cuuguuuaucagauacau

SEQ ID NO: 2832591 - RNA, 21 nt, Human
cuuguuuaucagauacaucac

SEQ ID NO: 2832592 - RNA, 22 nt, Human
cuuguuuaucagauacaucacu

SEQ ID NO: 2832593 - RNA, 12 nt, Human
cuuguugcuuug

SEQ ID NO: 2832594 - RNA, 13 nt, Human
cuuguugcuuugu

SEQ ID NO: 2832595 - RNA, 14 nt, Human
cuuguugcuuuguu

SEQ ID NO: 2832596 - RNA, 15 nt, Human
cuuguugcuuuguug

SEQ ID NO: 2832597 - RNA, 16 nt, Human
cuuguugcuuuguugc

SEQ ID NO: 2832598 - RNA, 18 nt, Human
cuuguugcuuuguugcac

SEQ ID NO: 2832599 - RNA, 21 nt, Human
cuuguugcuuuguugcacuga

SEQ ID NO: 2832600 - RNA, 14 nt, Human
cuuuaaaacaaaac

SEQ ID NO: 2832601 - RNA, 15 nt, Human
cuuuaaaacaaaaca

SEQ ID NO: 2832602 - RNA, 17 nt, Human
cuuuaaaacaaaacaaa

SEQ ID NO: 2832603 - RNA, 20 nt, Human
cuuuaaaagacaaaucaaag

SEQ ID NO: 2832604 - RNA, 13 nt, Human
cuuuaaaagagag

SEQ ID NO: 2832605 - RNA, 15 nt, Human
cuuuaaaagagagag

SEQ ID NO: 2832606 - RNA, 16 nt, Human
cuuuaaaagagagaga

SEQ ID NO: 2832607 - RNA, 21 nt, Human
cuuuaaaagagagagagagaa

SEQ ID NO: 2832608 - RNA, 16 nt, Human
cuuuacccuugagccc

SEQ ID NO: 2832609 - RNA, 18 nt, Human
cuuuacccuugagcccuc

SEQ ID NO: 2832610 - RNA, 19 nt, Human
cuuuacccuugagcccucc

SEQ ID NO: 2832611 - RNA, 20 nt, Human
cuuuacccuugagcccuccc

SEQ ID NO: 2832612 - RNA, 22 nt, Human
cuuuacccuugagcccucccca

SEQ ID NO: 2832613 - RNA, 21 nt, Human
cuuuaaaaagcuccaaaugca

SEQ ID NO: 2832614 - RNA, 17 nt, Human
cuuuaaaaaauauuuau

SEQ ID NO: 2832615 - RNA, 18 nt, Human
cuuuaaaaaauauuuauu

SEQ ID NO: 2832616 - RNA, 19 nt, Human
cuuuaaaaaauauuuauua

SEQ ID NO: 2832617 - RNA, 22 nt, Human
cuuuaaaaaauuaaucugggcc

SEQ ID NO: 2832618 - RNA, 22 nt, Human
cuugcucugcugacagacacag

SEQ ID NO: 2832619 - RNA, 14 nt, Human
cuuggaagcuccgc

SEQ ID NO: 2832620 - RNA, 20 nt, Human
cuuggaagcuccgcuuucua

SEQ ID NO: 2832621 - RNA, 18 nt, Human
cuugcugagcuguuuaua

SEQ ID NO: 2832622 - RNA, 14 nt, Human
cuugcuucuuacug

SEQ ID NO: 2832623 - RNA, 15 nt, Human
cuugcuucuuacuga

SEQ ID NO: 2832624 - RNA, 19 nt, Human
cuugcuucuuacugauaau

SEQ ID NO: 2832625 - RNA, 20 nt, Human
cuugcuucuuacugauaauu

SEQ ID NO: 2832626 - RNA, 21 nt, Human
cuugccaccccacccucccug

SEQ ID NO: 2832627 - RNA, 22 nt, Human
cuugccaccccacccucccugg

SEQ ID NO: 2832628 - RNA, 23 nt, Human
cuugccaccccacccucccugga

SEQ ID NO: 2832629 - RNA, 19 nt, Human
cuugccacuaagccaugaa

SEQ ID NO: 2832630 - RNA, 13 nt, Human
cuugccaccccac

SEQ ID NO: 2832631 - RNA, 18 nt, Human
cuugccaccccacccucc

SEQ ID NO: 2832632 - RNA, 20 nt, Human
cuugccaccccacccucccu

SEQ ID NO: 2832633 - RNA, 15 nt, Human
cuugcauccaacucc

SEQ ID NO: 2832634 - RNA, 14 nt, Human
cuugcaugaagaga

SEQ ID NO: 2832635 - RNA, 20 nt, Human
cuugcaugaagagaagcaau

SEQ ID NO: 2832636 - RNA, 12 nt, Human
cuugcagcagga

SEQ ID NO: 2832637 - RNA, 13 nt, Human
cuugcagcaggau

SEQ ID NO: 2832638 - RNA, 23 nt, Human
cuugcagcaggaucuagaggggg

SEQ ID NO: 2832639 - RNA, 18 nt, Human
cuugcagcuaaggagggg

SEQ ID NO: 2832640 - RNA, 19 nt, Human
cuugcauccaacuccagga

SEQ ID NO: 2832641 - RNA, 14 nt, Human
cuugcauccuuccu

SEQ ID NO: 2832642 - RNA, 15 nt, Human
cuugcauccuuccua

SEQ ID NO: 2832643 - RNA, 16 nt, Human
cuugcauccuuccuau

SEQ ID NO: 2832644 - RNA, 17 nt, Human
cuugcauccuuccuaua

SEQ ID NO: 2832645 - RNA, 20 nt, Human
cuugcauccuuccuauaacu

SEQ ID NO: 2832646 - RNA, 21 nt, Human
cuugcagacucuacagaggcc

SEQ ID NO: 2832647 - RNA, 20 nt, Human
cuugcaccccucacucuggc

SEQ ID NO: 2832648 - RNA, 20 nt, Human
cuugcagacucuacagaggc

SEQ ID NO: 2832649 - RNA, 14 nt, Human
cuugcaccccucac

SEQ ID NO: 2832650 - RNA, 16 nt, Human
cuugcaccccucacuc

SEQ ID NO: 2832651 - RNA, 18 nt, Human
cuugcaccccucacucug

SEQ ID NO: 2832652 - RNA, 18 nt, Human
cuugcaauggcagccuug

SEQ ID NO: 2832653 - RNA, 17 nt, Human
cuugcaauggcagccuu

SEQ ID NO: 2832654 - RNA, 16 nt, Human
cuugcaauggcagccu

SEQ ID NO: 2832655 - RNA, 15 nt, Human
cuugcaauggcagcc

SEQ ID NO: 2832656 - RNA, 14 nt, Human
cuugagcccaggag

SEQ ID NO: 2832657 - RNA, 15 nt, Human
cuugagcccaggagu

SEQ ID NO: 2832658 - RNA, 16 nt, Human
cuugagcccuccccag

SEQ ID NO: 2832659 - RNA, 17 nt, Human
cuugagcccuccccagg

SEQ ID NO: 2832660 - RNA, 20 nt, Human
cuugagcccuccccaggaau

SEQ ID NO: 2832661 - RNA, 21 nt, Human
cuugagcccuccccaggaauu

SEQ ID NO: 2832662 - RNA, 14 nt, Human
cuugagagaccagg

SEQ ID NO: 2832663 - RNA, 13 nt, Human
cuugagcccagga

SEQ ID NO: 2832664 - RNA, 16 nt, Human
cuugagagaccaggca

SEQ ID NO: 2832665 - RNA, 12 nt, Human
cuugagcccagg

SEQ ID NO: 2832666 - RNA, 17 nt, Human
cuugaggguugggcugg

SEQ ID NO: 2832667 - RNA, 15 nt, Human
cuugaggguugggcu

SEQ ID NO: 2832668 - RNA, 17 nt, Human
cuugagacacggagccc

SEQ ID NO: 2832669 - RNA, 22 nt, Human
cuugagacacggagcccagccc

SEQ ID NO: 2832670 - RNA, 23 nt, Human
cuugagaagaccucaccuagaaa

SEQ ID NO: 2832671 - RNA, 22 nt, Human
cuugagaaauauggacacuuaa

SEQ ID NO: 2832672 - RNA, 18 nt, Human
cuucuggcagauucaaau

SEQ ID NO: 2832673 - RNA, 20 nt, Human
cuucuggcuuccuucucuca

SEQ ID NO: 2832674 - RNA, 17 nt, Human
cuucugggagcaggaac

SEQ ID NO: 2832675 - RNA, 14 nt, Human
cuucuggcuuccuu

SEQ ID NO: 2832676 - RNA, 12 nt, Human
cuucuggcucaa

SEQ ID NO: 2832677 - RNA, 22 nt, Human
cuucuggcucccucuucuuuca

SEQ ID NO: 2832678 - RNA, 15 nt, Human
cuucuggccuuuccu

SEQ ID NO: 2832679 - RNA, 21 nt, Human
cuucuggccuuuccucucucc

SEQ ID NO: 2832680 - RNA, 22 nt, Human
cuucuggccuuuccucucuccu

SEQ ID NO: 2832681 - RNA, 19 nt, Human
cuucuggccucccacagac

SEQ ID NO: 2832682 - RNA, 11 nt, Human
cuucuggccuu

SEQ ID NO: 2832683 - RNA, 16 nt, Human
cuucuggccucccaca

SEQ ID NO: 2832684 - RNA, 14 nt, Human
cuucuggccuccca

SEQ ID NO: 2832685 - RNA, 15 nt, Human
cuucuggccucccac

SEQ ID NO: 2832686 - RNA, 14 nt, Human
cuucuggagcccuu

SEQ ID NO: 2832687 - RNA, 17 nt, Human
cuucuggcacuuggaga

SEQ ID NO: 2832688 - RNA, 16 nt, Human
gacugauucugggaug

SEQ ID NO: 2832689 - RNA, 20 nt, Human
gacugccagucccccugccc

SEQ ID NO: 2832690 - RNA, 18 nt, Human
gacugcaagaggcuccug

SEQ ID NO: 2832691 - RNA, 15 nt, Human
gacugcacagcggcc

SEQ ID NO: 2832692 - RNA, 18 nt, Human
gacugcacagcggccccu

SEQ ID NO: 2832693 - RNA, 14 nt, Human
gacugcacccagga

SEQ ID NO: 2832694 - RNA, 15 nt, Human
gacugcacccaggag

SEQ ID NO: 2832695 - RNA, 16 nt, Human
gacugcacccaggagg

SEQ ID NO: 2832696 - RNA, 15 nt, Human
gacugagggacucug

SEQ ID NO: 2832697 - RNA, 21 nt, Human
gacugagggacucugaagccu

SEQ ID NO: 2832698 - RNA, 21 nt, Human
gacugacuuguuugucuucca

SEQ ID NO: 2832699 - RNA, 12 nt, Human
gacugaggacaa

SEQ ID NO: 2832700 - RNA, 15 nt, Human
gacugaggacaaagu

SEQ ID NO: 2832701 - RNA, 22 nt, Human
gacugagccccgcagaccuccc

SEQ ID NO: 2832702 - RNA, 23 nt, Human
gacugagccuggcccauagaaac

SEQ ID NO: 2832703 - RNA, 15 nt, Human
gacuacaggcaccca

SEQ ID NO: 2832704 - RNA, 13 nt, Human
gacuacaggcacc

SEQ ID NO: 2832705 - RNA, 18 nt, Human
gacuacaggcacccacca

SEQ ID NO: 2832706 - RNA, 15 nt, Human
gacuaauuaggcaag

SEQ ID NO: 2832707 - RNA, 21 nt, Human
gacuaauuaggguacauuuau

SEQ ID NO: 2832708 - RNA, 21 nt, Human
gacucuacagaggccaugggc

SEQ ID NO: 2832709 - RNA, 15 nt, Human
gacucuacagaggcc

SEQ ID NO: 2832710 - RNA, 14 nt, Human
gacucuaaagacca

SEQ ID NO: 2832711 - RNA, 15 nt, Human
gacucuaaagaccaa

SEQ ID NO: 2832712 - RNA, 16 nt, Human
gacucuaaagaccaaa

SEQ ID NO: 2832713 - RNA, 17 nt, Human
gacucuaaagaccaaac

SEQ ID NO: 2832714 - RNA, 19 nt, Human
gacucuaaagaccaaacuu

SEQ ID NO: 2832715 - RNA, 21 nt, Human
gacucuaaauucuuuauuucu

SEQ ID NO: 2832716 - RNA, 23 nt, Human
gacucuaaauucuuuauuucugu

SEQ ID NO: 2832717 - RNA, 14 nt, Human
gacugacagcaugu

SEQ ID NO: 2832718 - RNA, 20 nt, Human
gacugacagcaugugcccuc

SEQ ID NO: 2832719 - RNA, 21 nt, Human
gacugacagcaugugcccucc

SEQ ID NO: 2832720 - RNA, 23 nt, Human
gacugacagcaugugcccuccug

SEQ ID NO: 2832721 - RNA, 16 nt, Human
gacugcuaguguucug

SEQ ID NO: 2832722 - RNA, 17 nt, Human
gacugcuaguguucugu

SEQ ID NO: 2832723 - RNA, 18 nt, Human
gacugcuaguguucuguc

SEQ ID NO: 2832724 - RNA, 20 nt, Human
gacugcuaguguucugucua

SEQ ID NO: 2832725 - RNA, 21 nt, Human
gacugcuccccagcccuggcu

SEQ ID NO: 2832726 - RNA, 24 nt, Human
gacugcuccccagcccuggcucug

SEQ ID NO: 2832727 - RNA, 15 nt, Human
gacugcuccccagcc

SEQ ID NO: 2832728 - RNA, 19 nt, Human
gacugcuccccagcccugg

SEQ ID NO: 2832729 - RNA, 20 nt, Human
gacugcuccccagcccuggc

SEQ ID NO: 2832730 - RNA, 22 nt, Human
gacugcgggaugguccuggggc

SEQ ID NO: 2832731 - RNA, 14 nt, Human
gacugcguucugca

SEQ ID NO: 2832732 - RNA, 15 nt, Human
gacugcguucugcaa

SEQ ID NO: 2832733 - RNA, 16 nt, Human
gacugcguucugcaag

SEQ ID NO: 2832734 - RNA, 21 nt, Human
gacugcgggaugguccugggg

SEQ ID NO: 2832735 - RNA, 21 nt, Human
gacugccucugccacacucug

SEQ ID NO: 2832736 - RNA, 23 nt, Human
gacuggcuagaguccucacuccc

SEQ ID NO: 2832737 - RNA, 21 nt, Human
gacuggcuagaguccucacuc

SEQ ID NO: 2832738 - RNA, 20 nt, Human
gacuggcuagaguccucacu

SEQ ID NO: 2832739 - RNA, 17 nt, Human
gacuggcuagaguccuc

SEQ ID NO: 2832740 - RNA, 22 nt, Human
gacuggccccugggucagucug

SEQ ID NO: 2832741 - RNA, 16 nt, Human
gacuggccccuggguc

SEQ ID NO: 2832742 - RNA, 14 nt, Human
gacuggccccuggg

SEQ ID NO: 2832743 - RNA, 17 nt, Human
gacuggcuggcugcagu

SEQ ID NO: 2832744 - RNA, 16 nt, Human
gacuggcuggcugcag

SEQ ID NO: 2832745 - RNA, 14 nt, Human
gacuggcuggcugc

SEQ ID NO: 2832746 - RNA, 16 nt, Human
gacuuaauagaaacau

SEQ ID NO: 2832747 - RNA, 14 nt, Human
gacuuaaugugauu

SEQ ID NO: 2832748 - RNA, 15 nt, Human
gacuuaaugugauua

SEQ ID NO: 2832749 - RNA, 23 nt, Human
gacuuaaugugauuacugcucua

SEQ ID NO: 2832750 - RNA, 14 nt, Human
gacuucagcucugu

SEQ ID NO: 2832751 - RNA, 14 nt, Human
gacuucacuuauua

SEQ ID NO: 2832752 - RNA, 22 nt, Human
gacuuaguugcguuacacccuu

SEQ ID NO: 2832753 - RNA, 15 nt, Human
gacuuagcugggaga

SEQ ID NO: 2832754 - RNA, 16 nt, Human
gacuuauaguacauga

SEQ ID NO: 2832755 - RNA, 18 nt, Human
gacuuauaguacaugaua

SEQ ID NO: 2832756 - RNA, 17 nt, Human
gacuuauaguacaugau

SEQ ID NO: 2832757 - RNA, 17 nt, Human
gacuuauuucuucaaau

SEQ ID NO: 2832758 - RNA, 18 nt, Human
gacuuauuucuucaaauc

SEQ ID NO: 2832759 - RNA, 13 nt, Human
gacuuaugggccc

SEQ ID NO: 2832760 - RNA, 15 nt, Human
gacuuauuacaauuu

SEQ ID NO: 2832761 - RNA, 20 nt, Human
gacuuauuguggauaacaaa

SEQ ID NO: 2832762 - RNA, 22 nt, Human
gacuuauuguggauaacaaaga

SEQ ID NO: 2832763 - RNA, 23 nt, Human
gacuuauuguggauaacaaagau

SEQ ID NO: 2832764 - RNA, 16 nt, Human
gacuuagaaagcaggg

SEQ ID NO: 2832765 - RNA, 18 nt, Human
gacuuagaaagcaggggc

SEQ ID NO: 2832766 - RNA, 19 nt, Human
gacuuagaaagcaggggcu

SEQ ID NO: 2832767 - RNA, 12 nt, Human
gacuuacucuaa

SEQ ID NO: 2832768 - RNA, 14 nt, Human
gacuuagaaagcag

SEQ ID NO: 2832769 - RNA, 14 nt, Human
gacuuacucuaaga

SEQ ID NO: 2832770 - RNA, 15 nt, Human
gacuuacucuaagau

SEQ ID NO: 2832771 - RNA, 20 nt, Human
gacuaaaugccuaguuuuua

SEQ ID NO: 2832772 - RNA, 14 nt, Human
gacuaaauucguga

SEQ ID NO: 2832773 - RNA, 20 nt, Human
gacuaaauuuggggacagau

SEQ ID NO: 2832774 - RNA, 23 nt, Human
gacuaacuagacaccaaaguucu

SEQ ID NO: 2832775 - RNA, 21 nt, Human
gacuaacuagacaccaaaguu

SEQ ID NO: 2832776 - RNA, 19 nt, Human
gacuaaccccaacgcacag

SEQ ID NO: 2832777 - RNA, 22 nt, Human
gacuaaccccaacgcacaggaa

SEQ ID NO: 2832778 - RNA, 23 nt, Human
gacuaaccccaacgcacaggaaa

SEQ ID NO: 2832779 - RNA, 15 nt, Human
gacuaagccuaccug

SEQ ID NO: 2832780 - RNA, 18 nt, Human
gacuaagccuaccugcuc

SEQ ID NO: 2832781 - RNA, 21 nt, Human
gacuaagccuaccugcucucc

SEQ ID NO: 2832782 - RNA, 18 nt, Human
gacguuuacaagcccccc

SEQ ID NO: 2832783 - RNA, 21 nt, Human
gacguucggggcaugcugggg

SEQ ID NO: 2832784 - RNA, 12 nt, Human
gacguuucucau

SEQ ID NO: 2832785 - RNA, 23 nt, Human
gacguuucucauuuguuuuucuc

SEQ ID NO: 2832786 - RNA, 23 nt, Human
gaccuuuauuggguaucaagaca

SEQ ID NO: 2832787 - RNA, 13 nt, Human
gacgcuuugucug

SEQ ID NO: 2832788 - RNA, 13 nt, Human
gacggagucccac

SEQ ID NO: 2832789 - RNA, 23 nt, Human
gacggagucccaccuuggcugca

SEQ ID NO: 2832790 - RNA, 22 nt, Human
gacgugauucaauucaacacuc

SEQ ID NO: 2832791 - RNA, 21 nt, Human
gaccugggguugucagcucuc

SEQ ID NO: 2832792 - RNA, 14 nt, Human
gacgucuuucuuuu

SEQ ID NO: 2832793 - RNA, 22 nt, Human
gacgucuuucuuuuuuuccccc

SEQ ID NO: 2832794 - RNA, 18 nt, Human
gacguggaaccucugucu

SEQ ID NO: 2832795 - RNA, 20 nt, Human
gacguggaaccucugucuca

SEQ ID NO: 2832796 - RNA, 22 nt, Human
gacguggaaccucugucucauc

SEQ ID NO: 2832797 - RNA, 20 nt, Human
gacguggagcgggguaugaa

SEQ ID NO: 2832798 - RNA, 18 nt, Human
gacgugcaccuguacuca

SEQ ID NO: 2832799 - RNA, 11 nt, Human
gacggcccugc

SEQ ID NO: 2832800 - RNA, 12 nt, Human
gacggcccugca

SEQ ID NO: 2832801 - RNA, 13 nt, Human
gacggcccugcaa

SEQ ID NO: 2832802 - RNA, 20 nt, Human
gacggccugaugcucccucc

SEQ ID NO: 2832803 - RNA, 15 nt, Human
gacggccugaugcuc

SEQ ID NO: 2832804 - RNA, 22 nt, Human
gacggcacggucuucccucuuc

SEQ ID NO: 2832805 - RNA, 23 nt, Human
gacggccugaugcucccuccccu

SEQ ID NO: 2832806 - RNA, 22 nt, Human
gacggccugaugcucccucccc

SEQ ID NO: 2832807 - RNA, 12 nt, Human
gacggcugggca

SEQ ID NO: 2832808 - RNA, 13 nt, Human
gacggcugggcac

SEQ ID NO: 2832809 - RNA, 14 nt, Human
gaccuugaacuggg

SEQ ID NO: 2832810 - RNA, 23 nt, Human
gaccuucuaggacgccacccagc

SEQ ID NO: 2832811 - RNA, 19 nt, Human
gaccuucuagaauuauaag

SEQ ID NO: 2832812 - RNA, 13 nt, Human
gaccuuaggccuu

SEQ ID NO: 2832813 - RNA, 15 nt, Human
gaccuuaggccuucc

SEQ ID NO: 2832814 - RNA, 16 nt, Human
gaccuuaggccuuccu

SEQ ID NO: 2832815 - RNA, 18 nt, Human
gaccuuaggccuuccucu

SEQ ID NO: 2832816 - RNA, 21 nt, Human
gaccuuaggccuuccucucuc

SEQ ID NO: 2832817 - RNA, 22 nt, Human
gaccuuaccccuggcuguuugg

SEQ ID NO: 2832818 - RNA, 18 nt, Human
gaccuuacgaucaggcac

SEQ ID NO: 2832819 - RNA, 19 nt, Human
gaccuuacgaucaggcaca

SEQ ID NO: 2832820 - RNA, 12 nt, Human
gaccuuccucug

SEQ ID NO: 2832821 - RNA, 17 nt, Human
gaccuuccucuggggcu

SEQ ID NO: 2832822 - RNA, 18 nt, Human
gaccuuccucuggggcuc

SEQ ID NO: 2832823 - RNA, 21 nt, Human
gaccuuccucuggggcucuag

SEQ ID NO: 2832824 - RNA, 22 nt, Human
gaccuuccauaaugcuacuguc

SEQ ID NO: 2832825 - RNA, 13 nt, Human
gaccuucagcuca

SEQ ID NO: 2832826 - RNA, 18 nt, Human
gaccuucagcucacgcuu

SEQ ID NO: 2832827 - RNA, 16 nt, Human
gaccuucauuucaugu

SEQ ID NO: 2832828 - RNA, 17 nt, Human
gaccuucauuucaugua

SEQ ID NO: 2832829 - RNA, 12 nt, Human
gaccuuccucau

SEQ ID NO: 2832830 - RNA, 14 nt, Human
gaccuuccucaucc

SEQ ID NO: 2832831 - RNA, 22 nt, Human
gaccuuccucauccaccccauc

SEQ ID NO: 2832832 - RNA, 23 nt, Human
gaccuuccucauccaccccaucc

SEQ ID NO: 2832833 - RNA, 20 nt, Human
gacccugcgaaggggcccug

SEQ ID NO: 2832834 - RNA, 18 nt, Human
gaccuggcaaggacacag

SEQ ID NO: 2832835 - RNA, 13 nt, Human
gaccuggggcaca

SEQ ID NO: 2832836 - RNA, 14 nt, Human
gaccuggggcacag

SEQ ID NO: 2832837 - RNA, 15 nt, Human
gaccuggggcacagu

SEQ ID NO: 2832838 - RNA, 20 nt, Human
gaccuggggcacaguccagg

SEQ ID NO: 2832839 - RNA, 21 nt, Human
gaccuggggcacaguccagga

SEQ ID NO: 2832840 - RNA, 22 nt, Human
gaccuggggcacaguccaggaa

SEQ ID NO: 2832841 - RNA, 17 nt, Human
gaccugguacccuccug

SEQ ID NO: 2832842 - RNA, 19 nt, Human
gaccugguacccuccuggc

SEQ ID NO: 2832843 - RNA, 21 nt, Human
gaccugguacccuccuggcuc

SEQ ID NO: 2832844 - RNA, 17 nt, Human
gaccuggcaaggacaca

SEQ ID NO: 2832845 - RNA, 13 nt, Human
gaccuguauuuaa

SEQ ID NO: 2832846 - RNA, 16 nt, Human
gaccuguauuuaagca

SEQ ID NO: 2832847 - RNA, 19 nt, Human
gaccuguauuuaagcaaau

SEQ ID NO: 2832848 - RNA, 22 nt, Human
gaccuguauuuaagcaaauacu

SEQ ID NO: 2832849 - RNA, 13 nt, Human
gaccugguuuuua

SEQ ID NO: 2832850 - RNA, 18 nt, Human
gaccugguuaaacaaacc

SEQ ID NO: 2832851 - RNA, 23 nt, Human
gaccugguacccuccuggcucuu

SEQ ID NO: 2832852 - RNA, 17 nt, Human
gaccuguuuaugagaug

SEQ ID NO: 2832853 - RNA, 21 nt, Human
gaccagacaccuugacagggc

SEQ ID NO: 2832854 - RNA, 22 nt, Human
gaccagacaccuugacagggca

SEQ ID NO: 2832855 - RNA, 16 nt, Human
gaccaccaccucagag

SEQ ID NO: 2832856 - RNA, 22 nt, Human
gaccaccaccccaacaaaccau

SEQ ID NO: 2832857 - RNA, 17 nt, Human
gaccacaucuuuaucug

SEQ ID NO: 2832858 - RNA, 23 nt, Human
gaccacaucuuuaucuguucuug

SEQ ID NO: 2832859 - RNA, 23 nt, Human
gaccagacaccuugacagggcac

SEQ ID NO: 2832860 - RNA, 21 nt, Human
gaccagaggagccuuuuuaaa

SEQ ID NO: 2832861 - RNA, 19 nt, Human
gaccagaggagccuuuuua

SEQ ID NO: 2832862 - RNA, 18 nt, Human
gaccagaggagccuuuuu

SEQ ID NO: 2832863 - RNA, 15 nt, Human
gaccagaggagccuu

SEQ ID NO: 2832864 - RNA, 12 nt, Human
gaccacucagcc

SEQ ID NO: 2832865 - RNA, 13 nt, Human
gaccacucagccc

SEQ ID NO: 2832866 - RNA, 14 nt, Human
gaccacucagcccc

SEQ ID NO: 2832867 - RNA, 15 nt, Human
gaccacucagccccu

SEQ ID NO: 2832868 - RNA, 16 nt, Human
gaccacucagccccua

SEQ ID NO: 2832869 - RNA, 17 nt, Human
gaccacucagccccuag

SEQ ID NO: 2832870 - RNA, 19 nt, Human
gaccacucagccccuagga

SEQ ID NO: 2832871 - RNA, 13 nt, Human
gaccaauugugcu

SEQ ID NO: 2832872 - RNA, 15 nt, Human
gaccaauugugcugc

SEQ ID NO: 2832873 - RNA, 17 nt, Human
gaccaauugugcugcca

SEQ ID NO: 2832874 - RNA, 18 nt, Human
gaccaauugugcugccau

SEQ ID NO: 2832875 - RNA, 16 nt, Human
gaccacacccuguacu

SEQ ID NO: 2832876 - RNA, 16 nt, Human
gaccaauuauugauau

SEQ ID NO: 2832877 - RNA, 18 nt, Human
gaccaauuauugauauau

SEQ ID NO: 2832878 - RNA, 20 nt, Human
gaccaauuauugauauauau

SEQ ID NO: 2832879 - RNA, 14 nt, Human
gaccacacuccagc

SEQ ID NO: 2832880 - RNA, 22 nt, Human
gaccacacuccagcugggauca

SEQ ID NO: 2832881 - RNA, 16 nt, Human
gaccacacuccagcug

SEQ ID NO: 2832882 - RNA, 11 nt, Human
gaccaaggaac

SEQ ID NO: 2832883 - RNA, 15 nt, Human
gaccaaggaacaaaa

SEQ ID NO: 2832884 - RNA, 16 nt, Human
gaccaaggaacaaaaa

SEQ ID NO: 2832885 - RNA, 23 nt, Human
gaccaaggaacaaaaaaaccaca

SEQ ID NO: 2832886 - RNA, 20 nt, Human
gaccaauaaaauuucuaaga

SEQ ID NO: 2832887 - RNA, 21 nt, Human
gaccaauaaaauuucuaagag

SEQ ID NO: 2832888 - RNA, 18 nt, Human
gaccaaggggugggccac

SEQ ID NO: 2832889 - RNA, 16 nt, Human
gaccaauagcccacag

SEQ ID NO: 2832890 - RNA, 13 nt, Human
gacaucagcuggu

SEQ ID NO: 2832891 - RNA, 14 nt, Human
gacaucagcaaaca

SEQ ID NO: 2832892 - RNA, 21 nt, Human
gacaucaguuccuuugugugu

SEQ ID NO: 2832893 - RNA, 18 nt, Human
gacaucaugaauuuuaca

SEQ ID NO: 2832894 - RNA, 22 nt, Human
gacaucacuuguacaaaauaaa

SEQ ID NO: 2832895 - RNA, 20 nt, Human
gacaucagagguucuuugag

SEQ ID NO: 2832896 - RNA, 16 nt, Human
gacaucacuuguacaa

SEQ ID NO: 2832897 - RNA, 12 nt, Human
gacaucagccag

SEQ ID NO: 2832898 - RNA, 13 nt, Human
gacaucagccagc

SEQ ID NO: 2832899 - RNA, 14 nt, Human
gacaucagccagcu

SEQ ID NO: 2832900 - RNA, 15 nt, Human
gacaucagccagcug

SEQ ID NO: 2832901 - RNA, 16 nt, Human
gacaucagccagcugc

SEQ ID NO: 2832902 - RNA, 17 nt, Human
gacaucagccagcugcc

SEQ ID NO: 2832903 - RNA, 11 nt, Human
gacaucacugu

SEQ ID NO: 2832904 - RNA, 19 nt, Human
gacccacuggacucaccuc

SEQ ID NO: 2832905 - RNA, 18 nt, Human
gacccacuucucaucaca

SEQ ID NO: 2832906 - RNA, 19 nt, Human
gacccacuucucaucacac

SEQ ID NO: 2832907 - RNA, 21 nt, Human
gacccacuucucaucacacac

SEQ ID NO: 2832908 - RNA, 22 nt, Human
gacccacuucucaucacacaca

SEQ ID NO: 2832909 - RNA, 23 nt, Human
gacccacuucucaucacacacau

SEQ ID NO: 2832910 - RNA, 18 nt, Human
gacccacugguuccuucu

SEQ ID NO: 2832911 - RNA, 20 nt, Human
gacccacugguuccuucuuc

SEQ ID NO: 2832912 - RNA, 20 nt, Human
gacccagcauggguuagugc

SEQ ID NO: 2832913 - RNA, 18 nt, Human
gacccauagaucuucuga

SEQ ID NO: 2832914 - RNA, 12 nt, Human
gacccagugaga

SEQ ID NO: 2832915 - RNA, 22 nt, Human
gacccagugagauuacagagga

SEQ ID NO: 2832916 - RNA, 23 nt, Human
gacccagugagauuacagaggaa

SEQ ID NO: 2832917 - RNA, 22 nt, Human
gacccauguaaauaccagacug

SEQ ID NO: 2832918 - RNA, 19 nt, Human
gacccccgcccccugcccu

SEQ ID NO: 2832919 - RNA, 23 nt, Human
gaccccaaacaccuuccagcucc

SEQ ID NO: 2832920 - RNA, 17 nt, Human
gaccccccgugggcucc

SEQ ID NO: 2832921 - RNA, 11 nt, Human
gacccccgccc

SEQ ID NO: 2832922 - RNA, 15 nt, Human
gacccccgcccccug

SEQ ID NO: 2832923 - RNA, 16 nt, Human
gacccccgcccccugc

SEQ ID NO: 2832924 - RNA, 18 nt, Human
gacccccgcccccugccc

SEQ ID NO: 2832925 - RNA, 17 nt, Human
gacagauucagucuugc

SEQ ID NO: 2832926 - RNA, 20 nt, Human
gacagauucagucuugccuu

SEQ ID NO: 2832927 - RNA, 18 nt, Human
gacaggcaagcaccuccu

SEQ ID NO: 2832928 - RNA, 17 nt, Human
gacaggcaagcaccucc

SEQ ID NO: 2832929 - RNA, 13 nt, Human
gacaggcaagcac

SEQ ID NO: 2832930 - RNA, 12 nt, Human
gacagcaggcag

SEQ ID NO: 2832931 - RNA, 14 nt, Human
gacagcaggcagcg

SEQ ID NO: 2832932 - RNA, 17 nt, Human
gacagcaggcagcgcca

SEQ ID NO: 2832933 - RNA, 19 nt, Human
gacagaugccccagagcug

SEQ ID NO: 2832934 - RNA, 19 nt, Human
gacaggcaaugcuggcugu

SEQ ID NO: 2832935 - RNA, 18 nt, Human
gacaggcaaugcuggcug

SEQ ID NO: 2832936 - RNA, 21 nt, Human
gacaggcaagcaccuccugcc

SEQ ID NO: 2832937 - RNA, 20 nt, Human
gacaggcaagcaccuccugc

SEQ ID NO: 2832938 - RNA, 21 nt, Human
gacaggcauguucucugagga

SEQ ID NO: 2832939 - RNA, 20 nt, Human
gacaggcauguucucugagg

SEQ ID NO: 2832940 - RNA, 23 nt, Human
gacaggcaaugcuggcuguuggc

SEQ ID NO: 2832941 - RNA, 14 nt, Human
gacauaacguuuuu

SEQ ID NO: 2832942 - RNA, 15 nt, Human
gacauaacagugcag

SEQ ID NO: 2832943 - RNA, 15 nt, Human
gacaucacuuguaca

SEQ ID NO: 2832944 - RNA, 13 nt, Human
gacaucacagcag

SEQ ID NO: 2832945 - RNA, 14 nt, Human
gacaucacagcagc

SEQ ID NO: 2832946 - RNA, 15 nt, Human
gacaucacagcagcc

SEQ ID NO: 2832947 - RNA, 18 nt, Human
gacaucacagcagccucc

SEQ ID NO: 2832948 - RNA, 16 nt, Human
gacauaacguuuuucc

SEQ ID NO: 2832949 - RNA, 21 nt, Human
gacauaacguuuuuccuuuaa

SEQ ID NO: 2832950 - RNA, 18 nt, Human
gacaguugucuagagaua

SEQ ID NO: 2832951 - RNA, 14 nt, Human
gacaguuuuucugu

SEQ ID NO: 2832952 - RNA, 11 nt, Human
gacauaaagcc

SEQ ID NO: 2832953 - RNA, 12 nt, Human
gacauaaagcca

SEQ ID NO: 2832954 - RNA, 18 nt, Human
gacauaaagccauguuuc

SEQ ID NO: 2832955 - RNA, 12 nt, Human
gacaguuucuua

SEQ ID NO: 2832956 - RNA, 17 nt, Human
gacaguuuaucaugaag

SEQ ID NO: 2832957 - RNA, 18 nt, Human
gacaguuuaucaugaagc

SEQ ID NO: 2832958 - RNA, 19 nt, Human
gacaguuuaucaugaagcc

SEQ ID NO: 2832959 - RNA, 20 nt, Human
gacaguuuaucaugaagccu

SEQ ID NO: 2832960 - RNA, 21 nt, Human
gacaguuuaucaugaagccug

SEQ ID NO: 2832961 - RNA, 23 nt, Human
gacaguuuaucaugaagccugug

SEQ ID NO: 2832962 - RNA, 14 nt, Human
gacaguuucuuagc

SEQ ID NO: 2832963 - RNA, 20 nt, Human
gacaguuucuuagcuuuuua

SEQ ID NO: 2832964 - RNA, 21 nt, Human
gacaguuucuuagcuuuuuaa

SEQ ID NO: 2832965 - RNA, 23 nt, Human
gacaguuucuuagcuuuuuaauu

SEQ ID NO: 2832966 - RNA, 13 nt, Human
gacaguuuguaaa

SEQ ID NO: 2832967 - RNA, 15 nt, Human
gacaguuuguaaaug

SEQ ID NO: 2832968 - RNA, 16 nt, Human
gacaguuuguaaaugu

SEQ ID NO: 2832969 - RNA, 17 nt, Human
gacaguuuguaaauguu

SEQ ID NO: 2832970 - RNA, 18 nt, Human
gacaguuuguaaauguua

SEQ ID NO: 2832971 - RNA, 19 nt, Human
gacaguuuguaaauguuau

SEQ ID NO: 2832972 - RNA, 20 nt, Human
gacaguuuguaaauguuauu

SEQ ID NO: 2832973 - RNA, 22 nt, Human
gacaggcauguucucugaggac

SEQ ID NO: 2832974 - RNA, 14 nt, Human
gacagggcauggcc

SEQ ID NO: 2832975 - RNA, 15 nt, Human
gacagggcauggcca

SEQ ID NO: 2832976 - RNA, 20 nt, Human
gacagggcauggccaggugg

SEQ ID NO: 2832977 - RNA, 10 nt, Human
gacagggcca

SEQ ID NO: 2832978 - RNA, 11 nt, Human
gacagggccag

SEQ ID NO: 2832979 - RNA, 12 nt, Human
gacagggccagu

SEQ ID NO: 2832980 - RNA, 13 nt, Human
gacagggccagug

SEQ ID NO: 2832981 - RNA, 22 nt, Human
gacagggcauggccagguggcc

SEQ ID NO: 2832982 - RNA, 14 nt, Human
gacaguucaagaaa

SEQ ID NO: 2832983 - RNA, 15 nt, Human
gacaguucacacccu

SEQ ID NO: 2832984 - RNA, 17 nt, Human
gacaguucacacccugc

SEQ ID NO: 2832985 - RNA, 18 nt, Human
gacaguucacacccugca

SEQ ID NO: 2832986 - RNA, 19 nt, Human
gacaguucacacccugcaa

SEQ ID NO: 2832987 - RNA, 14 nt, Human
gacagggccagugg

SEQ ID NO: 2832988 - RNA, 16 nt, Human
gacagggccagugggg

SEQ ID NO: 2832989 - RNA, 19 nt, Human
gacagggccaguggggccu

SEQ ID NO: 2832990 - RNA, 20 nt, Human
gacagggccaguggggccug

SEQ ID NO: 2832991 - RNA, 21 nt, Human
gacagggccaguggggccugu

SEQ ID NO: 2832992 - RNA, 22 nt, Human
gacagggccaguggggccugug

SEQ ID NO: 2832993 - RNA, 14 nt, Human
gacaguucugaaga

SEQ ID NO: 2832994 - RNA, 15 nt, Human
gacaguucugaagaa

SEQ ID NO: 2832995 - RNA, 20 nt, Human
gacagagacccucugccacc

SEQ ID NO: 2832996 - RNA, 15 nt, Human
gacagagaccuccug

SEQ ID NO: 2832997 - RNA, 16 nt, Human
gacagagaccuccugc

SEQ ID NO: 2832998 - RNA, 18 nt, Human
gacagacaucucugcacc

SEQ ID NO: 2832999 - RNA, 18 nt, Human
gacagaccacaucuuuau

SEQ ID NO: 2833000 - RNA, 22 nt, Human
gacagaccacaucuuuaucugu

SEQ ID NO: 2833001 - RNA, 22 nt, Human
gacagacugcaagaggcuccug

SEQ ID NO: 2833002 - RNA, 12 nt, Human
gacagagaaggg

SEQ ID NO: 2833003 - RNA, 22 nt, Human
gacagagaauaugucugcuccu

SEQ ID NO: 2833004 - RNA, 23 nt, Human
gacagacacuucuaaaugaagug

SEQ ID NO: 2833005 - RNA, 16 nt, Human
gacagacagcccucca

SEQ ID NO: 2833006 - RNA, 20 nt, Human
gacacuauaguuuaaaacac

SEQ ID NO: 2833007 - RNA, 23 nt, Human
gacacuauaguuuaaaacacauu

SEQ ID NO: 2833008 - RNA, 16 nt, Human
gacagagugagacucu

SEQ ID NO: 2833009 - RNA, 21 nt, Human
gacagagucucacuguugccc

SEQ ID NO: 2833010 - RNA, 19 nt, Human
gacagagugagacucuguc

SEQ ID NO: 2833011 - RNA, 20 nt, Human
gacagaugccccagagcugu

SEQ ID NO: 2833012 - RNA, 23 nt, Human
gacagaggcagccccauucugcc

SEQ ID NO: 2833013 - RNA, 15 nt, Human
gacagaggaugagcu

SEQ ID NO: 2833014 - RNA, 15 nt, Human
gacagaggggacucu

SEQ ID NO: 2833015 - RNA, 16 nt, Human
gacagaggggacucug

SEQ ID NO: 2833016 - RNA, 17 nt, Human
gacagaggggacucugg

SEQ ID NO: 2833017 - RNA, 19 nt, Human
gacagaggggacucugggc

SEQ ID NO: 2833018 - RNA, 20 nt, Human
gacagaggggacucugggcu

SEQ ID NO: 2833019 - RNA, 21 nt, Human
gacagaggggacucugggcua

SEQ ID NO: 2833020 - RNA, 12 nt, Human
gacagaggccug

SEQ ID NO: 2833021 - RNA, 13 nt, Human
gacagaggccugc

SEQ ID NO: 2833022 - RNA, 15 nt, Human
gacagaggccugccc

SEQ ID NO: 2833023 - RNA, 18 nt, Human
gaauuucauaucuacaga

SEQ ID NO: 2833024 - RNA, 17 nt, Human
gacacgccuuccccuca

SEQ ID NO: 2833025 - RNA, 21 nt, Human
gacacgccuuccccucagcca

SEQ ID NO: 2833026 - RNA, 21 nt, Human
gacacgcgccccccucccaga

SEQ ID NO: 2833027 - RNA, 22 nt, Human
gacacgcgccccccucccagag

SEQ ID NO: 2833028 - RNA, 23 nt, Human
gacacgcgccccccucccagagg

SEQ ID NO: 2833029 - RNA, 22 nt, Human
gacagacacaggcccggcucca

SEQ ID NO: 2833030 - RNA, 20 nt, Human
gacagacacaggcccggcuc

SEQ ID NO: 2833031 - RNA, 17 nt, Human
gacagacacaggcccgg

SEQ ID NO: 2833032 - RNA, 15 nt, Human
gacacggagcccagc

SEQ ID NO: 2833033 - RNA, 14 nt, Human
gacacuagaaaacu

SEQ ID NO: 2833034 - RNA, 17 nt, Human
gaaguaucuaaaagugu

SEQ ID NO: 2833035 - RNA, 19 nt, Human
gaaguaucuaaaaguguca

SEQ ID NO: 2833036 - RNA, 19 nt, Human
gaaguaguuuguauaacuu

SEQ ID NO: 2833037 - RNA, 12 nt, Human
gaagucauaugu

SEQ ID NO: 2833038 - RNA, 15 nt, Human
gaagucaugaagccc

SEQ ID NO: 2833039 - RNA, 19 nt, Human
gaagucaugaagcccaagu

SEQ ID NO: 2833040 - RNA, 15 nt, Human
gaaguaguucuguuu

SEQ ID NO: 2833041 - RNA, 20 nt, Human
gaaguaguucuguuuggugu

SEQ ID NO: 2833042 - RNA, 18 nt, Human
gaaguagcuugcucccug

SEQ ID NO: 2833043 - RNA, 19 nt, Human
gaaguagcuugcucccugu

SEQ ID NO: 2833044 - RNA, 18 nt, Human
gaagucucuagguucuga

SEQ ID NO: 2833045 - RNA, 18 nt, Human
gaagucgucuuaacucac

SEQ ID NO: 2833046 - RNA, 19 nt, Human
gaagggggggcuacauuau

SEQ ID NO: 2833047 - RNA, 20 nt, Human
gaagggggggcuacauuaua

SEQ ID NO: 2833048 - RNA, 12 nt, Human
gaaggugcugga

SEQ ID NO: 2833049 - RNA, 14 nt, Human
gaaggugcuggagg

SEQ ID NO: 2833050 - RNA, 16 nt, Human
gaaggugcuggaggug

SEQ ID NO: 2833051 - RNA, 17 nt, Human
gaaggugcuggaggugg

SEQ ID NO: 2833052 - RNA, 18 nt, Human
gaaggugcuggagguggg

SEQ ID NO: 2833053 - RNA, 19 nt, Human
gaaggugcuggagguggga

SEQ ID NO: 2833054 - RNA, 20 nt, Human
gaaggugcuggaggugggag

SEQ ID NO: 2833055 - RNA, 21 nt, Human
gaaggugcuggaggugggagc

SEQ ID NO: 2833056 - RNA, 23 nt, Human
gaaggugcuggaggugggagcag

SEQ ID NO: 2833057 - RNA, 23 nt, Human
gaagguggaccuuuuaaaguguu

SEQ ID NO: 2833058 - RNA, 19 nt, Human
gaaguacuugccagaaguu

SEQ ID NO: 2833059 - RNA, 23 nt, Human
gaaguacuugccagaaguugugg

SEQ ID NO: 2833060 - RNA, 23 nt, Human
gaagguggugggggugcagauga

SEQ ID NO: 2833061 - RNA, 16 nt, Human
gaaguacaugaauaca

SEQ ID NO: 2833062 - RNA, 20 nt, Human
gaauaggcauuaacacaaag

SEQ ID NO: 2833063 - RNA, 14 nt, Human
gaauauuuuaucuu

SEQ ID NO: 2833064 - RNA, 21 nt, Human
gaauauuuucaguaauguuau

SEQ ID NO: 2833065 - RNA, 22 nt, Human
gaauauuuuuugaggcuaaaga

SEQ ID NO: 2833066 - RNA, 15 nt, Human
gaaucaaaaauugaa

SEQ ID NO: 2833067 - RNA, 21 nt, Human
gaaucaaaaauugaagagaga

SEQ ID NO: 2833068 - RNA, 21 nt, Human
gaaucaagaugucagacuggc

SEQ ID NO: 2833069 - RNA, 20 nt, Human
gaaucaagaugucagacugg

SEQ ID NO: 2833070 - RNA, 18 nt, Human
gaaucaagagcugcccuc

SEQ ID NO: 2833071 - RNA, 19 nt, Human
gaaucaagagcugcccucc

SEQ ID NO: 2833072 - RNA, 14 nt, Human
gaaucaagagcugc

SEQ ID NO: 2833073 - RNA, 15 nt, Human
gaaucaagagcugcc

SEQ ID NO: 2833074 - RNA, 16 nt, Human
gaaucaagagcugccc

SEQ ID NO: 2833075 - RNA, 17 nt, Human
gaaucaagagcugcccu

SEQ ID NO: 2833076 - RNA, 22 nt, Human
gaauagcugggacuacaggugu

SEQ ID NO: 2833077 - RNA, 23 nt, Human
gaauagcugggacuacaggugug

SEQ ID NO: 2833078 - RNA, 19 nt, Human
gaauaccauuaaaacugcu

SEQ ID NO: 2833079 - RNA, 20 nt, Human
gaauaccauuaaaacugcuu

SEQ ID NO: 2833080 - RNA, 21 nt, Human
gaauaccauuaaaacugcuuu

SEQ ID NO: 2833081 - RNA, 22 nt, Human
gaauaccauuaaaacugcuuuu

SEQ ID NO: 2833082 - RNA, 12 nt, Human
gaauaagagacc

SEQ ID NO: 2833083 - RNA, 20 nt, Human
gaauaagagaccuguuuuaa

SEQ ID NO: 2833084 - RNA, 22 nt, Human
gaauaagagaccuguuuuaaaa

SEQ ID NO: 2833085 - RNA, 14 nt, Human
gaauaauaagcagg

SEQ ID NO: 2833086 - RNA, 16 nt, Human
gaauaauaagcaggau

SEQ ID NO: 2833087 - RNA, 23 nt, Human
gaauaauaagcaggauguuggcc

SEQ ID NO: 2833088 - RNA, 22 nt, Human
gaauaauaauuagguuaacauu

SEQ ID NO: 2833089 - RNA, 21 nt, Human
gaauaacucuguggcauuauu

SEQ ID NO: 2833090 - RNA, 11 nt, Human
gaauaagaaaa

SEQ ID NO: 2833091 - RNA, 23 nt, Human
gaauaagaaaacaaucacacuca

SEQ ID NO: 2833092 - RNA, 17 nt, Human
gaauaagaaaguuucac

SEQ ID NO: 2833093 - RNA, 16 nt, Human
gaauaagaauggagca

SEQ ID NO: 2833094 - RNA, 22 nt, Human
gaauacaauauauagcuggcaa

SEQ ID NO: 2833095 - RNA, 12 nt, Human
gaauacagcagc

SEQ ID NO: 2833096 - RNA, 16 nt, Human
gaauacagcagcaaga

SEQ ID NO: 2833097 - RNA, 18 nt, Human
gaauacagcagcaagaaa

SEQ ID NO: 2833098 - RNA, 20 nt, Human
gaauacagcagcaagaaaaa

SEQ ID NO: 2833099 - RNA, 21 nt, Human
gaauacagcagcaagaaaaaa

SEQ ID NO: 2833100 - RNA, 21 nt, Human
gaauaaaaggcuugaagcugu

SEQ ID NO: 2833101 - RNA, 12 nt, Human
gaauaaaagugc

SEQ ID NO: 2833102 - RNA, 14 nt, Human
gaauaaaaaagaaa

SEQ ID NO: 2833103 - RNA, 14 nt, Human
gaauaaaauccuaa

SEQ ID NO: 2833104 - RNA, 20 nt, Human
gaauaaaauccuaagacaca

SEQ ID NO: 2833105 - RNA, 23 nt, Human
gaauaaaauccuaagacacaaau

SEQ ID NO: 2833106 - RNA, 13 nt, Human
gaaguuuucugua

SEQ ID NO: 2833107 - RNA, 16 nt, Human
gaaguuuguccauuug

SEQ ID NO: 2833108 - RNA, 20 nt, Human
gaaguuuguccauuuguaaa

SEQ ID NO: 2833109 - RNA, 21 nt, Human
gaaguuuguccauuuguaaaa

SEQ ID NO: 2833110 - RNA, 14 nt, Human
gaaguaguccuugg

SEQ ID NO: 2833111 - RNA, 13 nt, Human
gaaguuuuacauu

SEQ ID NO: 2833112 - RNA, 19 nt, Human
gaauuuauugcacauuguu

SEQ ID NO: 2833113 - RNA, 13 nt, Human
gaauuuaaauaua

SEQ ID NO: 2833114 - RNA, 14 nt, Human
gaauuuaaauauaa

SEQ ID NO: 2833115 - RNA, 15 nt, Human
gaauuuaaauauaau

SEQ ID NO: 2833116 - RNA, 17 nt, Human
gaauuuaaauauaauuc

SEQ ID NO: 2833117 - RNA, 20 nt, Human
gaauuuaaauauaauucugu

SEQ ID NO: 2833118 - RNA, 22 nt, Human
gaauuuaaauauaauucuguaa

SEQ ID NO: 2833119 - RNA, 23 nt, Human
gaauuuaaauauaauucuguaaa

SEQ ID NO: 2833120 - RNA, 16 nt, Human
gaauuuacuggacaua

SEQ ID NO: 2833121 - RNA, 13 nt, Human
gaauuuauaauuc

SEQ ID NO: 2833122 - RNA, 16 nt, Human
gaauuuauaauucagu

SEQ ID NO: 2833123 - RNA, 18 nt, Human
gaauuuauaauucaguau

SEQ ID NO: 2833124 - RNA, 23 nt, Human
gaauuuauaccuaccuguguggu

SEQ ID NO: 2833125 - RNA, 13 nt, Human
gaauuuauaccuc

SEQ ID NO: 2833126 - RNA, 20 nt, Human
gaauuuaucacacuucugug

SEQ ID NO: 2833127 - RNA, 22 nt, Human
gaauuuaucacacuucugugag

SEQ ID NO: 2833128 - RNA, 12 nt, Human
gaauugugcaaa

SEQ ID NO: 2833129 - RNA, 21 nt, Human
gaauugaucauuuucccccca

SEQ ID NO: 2833130 - RNA, 12 nt, Human
gaauugauuugc

SEQ ID NO: 2833131 - RNA, 14 nt, Human
gaauucuuuugcca

SEQ ID NO: 2833132 - RNA, 17 nt, Human
gaauugauuugcauuga

SEQ ID NO: 2833133 - RNA, 15 nt, Human
gaauugauuugcauu

SEQ ID NO: 2833134 - RNA, 14 nt, Human
gaauugauuugcau

SEQ ID NO: 2833135 - RNA, 13 nt, Human
gaauugauuugca

SEQ ID NO: 2833136 - RNA, 12 nt, Human
gaauuguuacau

SEQ ID NO: 2833137 - RNA, 20 nt, Human
gaauuguuuucuuuaaagau

SEQ ID NO: 2833138 - RNA, 22 nt, Human
gaauuguugacaaauguaaaca

SEQ ID NO: 2833139 - RNA, 9 nt, Human
gaauuguuu

SEQ ID NO: 2833140 - RNA, 23 nt, Human
gaauucuugaaggaaaaugauac

SEQ ID NO: 2833141 - RNA, 13 nt, Human
gaauugaaacacu

SEQ ID NO: 2833142 - RNA, 14 nt, Human
gaauugaaacacuu

SEQ ID NO: 2833143 - RNA, 20 nt, Human
gaauugaaacacuuuuuugg

SEQ ID NO: 2833144 - RNA, 18 nt, Human
gaauucucagugccaacu

SEQ ID NO: 2833145 - RNA, 17 nt, Human
gaauugagaugauuaaa

SEQ ID NO: 2833146 - RNA, 20 nt, Human
gaauugaucauuuucccccc

SEQ ID NO: 2833147 - RNA, 17 nt, Human
gaauuccauuugaggau

SEQ ID NO: 2833148 - RNA, 18 nt, Human
gaauuccuaacuuuucaa

SEQ ID NO: 2833149 - RNA, 17 nt, Human
gaauuccuagaauuaaa

SEQ ID NO: 2833150 - RNA, 23 nt, Human
gaauucaaacuggggccuccaga

SEQ ID NO: 2833151 - RNA, 23 nt, Human
gaauucagaagaccccugacuca

SEQ ID NO: 2833152 - RNA, 17 nt, Human
gaaugggaucaugaaag

SEQ ID NO: 2833153 - RNA, 21 nt, Human
gaaugggaucaugaaaguaga

SEQ ID NO: 2833154 - RNA, 20 nt, Human
gaauggauuggauuauuuaa

SEQ ID NO: 2833155 - RNA, 19 nt, Human
gaauggauuggauuauuua

SEQ ID NO: 2833156 - RNA, 21 nt, Human
gaauggaaggguucuggcugc

SEQ ID NO: 2833157 - RNA, 22 nt, Human
gaauggaaggguucuggcugcc

SEQ ID NO: 2833158 - RNA, 15 nt, Human
gaauggacauccugu

SEQ ID NO: 2833159 - RNA, 19 nt, Human
gaauggacauccuguauaa

SEQ ID NO: 2833160 - RNA, 16 nt, Human
gaauggacuuuggaag

SEQ ID NO: 2833161 - RNA, 19 nt, Human
gaauggacuuuggaagcag

SEQ ID NO: 2833162 - RNA, 21 nt, Human
gaauggacuuuggaagcaggg

SEQ ID NO: 2833163 - RNA, 11 nt, Human
gaauggagcag

SEQ ID NO: 2833164 - RNA, 21 nt, Human
gaauggagcaguacaugggaa

SEQ ID NO: 2833165 - RNA, 22 nt, Human
gaauggauaaaauaaugcugca

SEQ ID NO: 2833166 - RNA, 20 nt, Human
gaaugguacaugucuuccau

SEQ ID NO: 2833167 - RNA, 22 nt, Human
gaauguaaaagaacuuacugau

SEQ ID NO: 2833168 - RNA, 13 nt, Human
gaauguauuuauu

SEQ ID NO: 2833169 - RNA, 16 nt, Human
gaauguauuuauuugg

SEQ ID NO: 2833170 - RNA, 14 nt, Human
gaauguauguaaug

SEQ ID NO: 2833171 - RNA, 17 nt, Human
gaauguauguaaugugu

SEQ ID NO: 2833172 - RNA, 14 nt, Human
gaauguaucuguga

SEQ ID NO: 2833173 - RNA, 15 nt, Human
gaauguaucugugaa

SEQ ID NO: 2833174 - RNA, 16 nt, Human
gaauguaucugugaag

SEQ ID NO: 2833175 - RNA, 17 nt, Human
gaauguaucugugaagu

SEQ ID NO: 2833176 - RNA, 18 nt, Human
gaaugaaccacaucuugc

SEQ ID NO: 2833177 - RNA, 22 nt, Human
gaaugaaccacaucuugcucug

SEQ ID NO: 2833178 - RNA, 23 nt, Human
gaaugaaccacaucuugcucugc

SEQ ID NO: 2833179 - RNA, 17 nt, Human
gaaugaaccuucuggcc

SEQ ID NO: 2833180 - RNA, 14 nt, Human
gaaucuuuguuaag

SEQ ID NO: 2833181 - RNA, 15 nt, Human
gaaugaaccacugcc

SEQ ID NO: 2833182 - RNA, 15 nt, Human
gaaugaaccuucugg

SEQ ID NO: 2833183 - RNA, 15 nt, Human
gaaugaaaacucauu

SEQ ID NO: 2833184 - RNA, 13 nt, Human
gaaugaaaagaca

SEQ ID NO: 2833185 - RNA, 20 nt, Human
gaaugaaaagacaagaaaau

SEQ ID NO: 2833186 - RNA, 15 nt, Human
gaaugaaaaaacagu

SEQ ID NO: 2833187 - RNA, 12 nt, Human
gaaugaaaaaug

SEQ ID NO: 2833188 - RNA, 13 nt, Human
gaaugaaaaauga

SEQ ID NO: 2833189 - RNA, 14 nt, Human
gaaugaaaaaugaa

SEQ ID NO: 2833190 - RNA, 17 nt, Human
gaaugaaaaaugaaaga

SEQ ID NO: 2833191 - RNA, 19 nt, Human
gaaugaaaaaugaaagaug

SEQ ID NO: 2833192 - RNA, 20 nt, Human
gaaugaaaaaugaaagauga

SEQ ID NO: 2833193 - RNA, 21 nt, Human
gaaugaaaaaugaaagaugau

SEQ ID NO: 2833194 - RNA, 22 nt, Human
gaaugaaaaaugaaagaugauu

SEQ ID NO: 2833195 - RNA, 11 nt, Human
gaaugcagugg

SEQ ID NO: 2833196 - RNA, 13 nt, Human
gaaugcuuuagga

SEQ ID NO: 2833197 - RNA, 18 nt, Human
gaaugcuuuuugaauguu

SEQ ID NO: 2833198 - RNA, 20 nt, Human
gaaugccagugugcugaugg

SEQ ID NO: 2833199 - RNA, 21 nt, Human
gaaugccauagucaaagagag

SEQ ID NO: 2833200 - RNA, 23 nt, Human
gaaugccauagucaaagagaguu

SEQ ID NO: 2833201 - RNA, 17 nt, Human
gaaugccacccacaucu

SEQ ID NO: 2833202 - RNA, 12 nt, Human
gaaugcauugau

SEQ ID NO: 2833203 - RNA, 20 nt, Human
gaaugcauugauauugugaa

SEQ ID NO: 2833204 - RNA, 21 nt, Human
gaaugcauugauauugugaac

SEQ ID NO: 2833205 - RNA, 14 nt, Human
gaaugcauaaaaug

SEQ ID NO: 2833206 - RNA, 20 nt, Human
gaagauaauguaaagguuuu

SEQ ID NO: 2833207 - RNA, 13 nt, Human
gaagauaauuguu

SEQ ID NO: 2833208 - RNA, 16 nt, Human
gaagauaauuguugaa

SEQ ID NO: 2833209 - RNA, 17 nt, Human
gaagauaauuguugaaa

SEQ ID NO: 2833210 - RNA, 19 nt, Human
gaagauaauuguugaaauu

SEQ ID NO: 2833211 - RNA, 18 nt, Human
gaagaggguguguuugaa

SEQ ID NO: 2833212 - RNA, 17 nt, Human
gaagaggguuuuaggua

SEQ ID NO: 2833213 - RNA, 17 nt, Human
gaagcauuuacuuugug

SEQ ID NO: 2833214 - RNA, 22 nt, Human
gaagcauuccuucuuugauaau

SEQ ID NO: 2833215 - RNA, 15 nt, Human
gaagcauuccuucuu

SEQ ID NO: 2833216 - RNA, 18 nt, Human
gaagcauuccuucuuuga

SEQ ID NO: 2833217 - RNA, 15 nt, Human
gaagcauucagagag

SEQ ID NO: 2833218 - RNA, 16 nt, Human
gaagcauucagagagc

SEQ ID NO: 2833219 - RNA, 17 nt, Human
gaagcauucagagagca

SEQ ID NO: 2833220 - RNA, 23 nt, Human
gaagauguugaagaauacaguua

SEQ ID NO: 2833221 - RNA, 18 nt, Human
gaagauguugagaaaccu

SEQ ID NO: 2833222 - RNA, 15 nt, Human
gaagcauucucccca

SEQ ID NO: 2833223 - RNA, 17 nt, Human
gaagcauucuccccagu

SEQ ID NO: 2833224 - RNA, 19 nt, Human
gaagcauucuccccagugu

SEQ ID NO: 2833225 - RNA, 11 nt, Human
gaagcccuguu

SEQ ID NO: 2833226 - RNA, 14 nt, Human
gaagcccuguugug

SEQ ID NO: 2833227 - RNA, 23 nt, Human
gaagcccuguugugccacagagu

SEQ ID NO: 2833228 - RNA, 13 nt, Human
gaagcccuggaga

SEQ ID NO: 2833229 - RNA, 13 nt, Human
gaagcccucccag

SEQ ID NO: 2833230 - RNA, 15 nt, Human
gaagcccucccaggu

SEQ ID NO: 2833231 - RNA, 19 nt, Human
gaagcauguuucauguuuu

SEQ ID NO: 2833232 - RNA, 22 nt, Human
gaagaacuagcauauagccauu

SEQ ID NO: 2833233 - RNA, 16 nt, Human
gaagacuggaagcuaa

SEQ ID NO: 2833234 - RNA, 15 nt, Human
gaagacuggaagcua

SEQ ID NO: 2833235 - RNA, 17 nt, Human
gaagacuggaagcuaau

SEQ ID NO: 2833236 - RNA, 16 nt, Human
gaacucagcugucugu

SEQ ID NO: 2833237 - RNA, 20 nt, Human
gaacucagcugucuguggcu

SEQ ID NO: 2833238 - RNA, 21 nt, Human
gaacucagcugucuguggcuu

SEQ ID NO: 2833239 - RNA, 14 nt, Human
gaacucaucacugu

SEQ ID NO: 2833240 - RNA, 16 nt, Human
gaacucaucacugugg

SEQ ID NO: 2833241 - RNA, 17 nt, Human
gaacucaucacuguggc

SEQ ID NO: 2833242 - RNA, 18 nt, Human
gaacucaucacuguggcu

SEQ ID NO: 2833243 - RNA, 19 nt, Human
gaacucaucacuguggcug

SEQ ID NO: 2833244 - RNA, 15 nt, Human
gaacuuuuucuuuuc

SEQ ID NO: 2833245 - RNA, 18 nt, Human
gaacucaucccuaaugcu

SEQ ID NO: 2833246 - RNA, 22 nt, Human
gaacucaucccuaaugcugcag

SEQ ID NO: 2833247 - RNA, 11 nt, Human
gaacuuuggga

SEQ ID NO: 2833248 - RNA, 14 nt, Human
gaacuuugggaagc

SEQ ID NO: 2833249 - RNA, 15 nt, Human
gaacuuuuuuaaaua

SEQ ID NO: 2833250 - RNA, 16 nt, Human
gaacuuuuuuaaauaa

SEQ ID NO: 2833251 - RNA, 17 nt, Human
gaacuuuuuuaaauaaa

SEQ ID NO: 2833252 - RNA, 18 nt, Human
gaacuuuuuuaaauaaac

SEQ ID NO: 2833253 - RNA, 19 nt, Human
gaacuuuuuuaaauaaacu

SEQ ID NO: 2833254 - RNA, 20 nt, Human
gaacuuuuuuaaauaaacuu

SEQ ID NO: 2833255 - RNA, 21 nt, Human
gaacuuuuuuaaauaaacuuu

SEQ ID NO: 2833256 - RNA, 22 nt, Human
gaacuuuuuuaaauaaacuuuu

SEQ ID NO: 2833257 - RNA, 23 nt, Human
gaacuuuuuuaaauaaacuuuuu

SEQ ID NO: 2833258 - RNA, 10 nt, Human
gaagaaaaaa

SEQ ID NO: 2833259 - RNA, 11 nt, Human
gaagaaaaaaa

SEQ ID NO: 2833260 - RNA, 20 nt, Human
gaagaaaaaaacgaaaacag

SEQ ID NO: 2833261 - RNA, 14 nt, Human
gaagaaaaaaaucu

SEQ ID NO: 2833262 - RNA, 16 nt, Human
gaagaaaaaaaucuuc

SEQ ID NO: 2833263 - RNA, 21 nt, Human
gaagaaaaaaaucuucuccag

SEQ ID NO: 2833264 - RNA, 23 nt, Human
gaagaaaaaaaucuucuccagau

SEQ ID NO: 2833265 - RNA, 15 nt, Human
gaagagaaccagcca

SEQ ID NO: 2833266 - RNA, 14 nt, Human
gaagagaagcugcu

SEQ ID NO: 2833267 - RNA, 15 nt, Human
gaagagaagcugcug

SEQ ID NO: 2833268 - RNA, 16 nt, Human
gaagagaagcugcuga

SEQ ID NO: 2833269 - RNA, 17 nt, Human
gaagagaagcugcugac

SEQ ID NO: 2833270 - RNA, 20 nt, Human
gaagagaagcugcugaccaa

SEQ ID NO: 2833271 - RNA, 22 nt, Human
gaacuuuuccucuguaucacug

SEQ ID NO: 2833272 - RNA, 22 nt, Human
gaagagagaaggggcgggaaua

SEQ ID NO: 2833273 - RNA, 18 nt, Human
gaagagagauauaucuga

SEQ ID NO: 2833274 - RNA, 19 nt, Human
gaagagagauauaucugaa

SEQ ID NO: 2833275 - RNA, 23 nt, Human
gaagagagauauaucugaaaacu

SEQ ID NO: 2833276 - RNA, 14 nt, Human
gaagagaggggaag

SEQ ID NO: 2833277 - RNA, 13 nt, Human
gaagagcaaaaau

SEQ ID NO: 2833278 - RNA, 16 nt, Human
gaagagcaaaaauauc

SEQ ID NO: 2833279 - RNA, 17 nt, Human
gaagagcaaaaauaucc

SEQ ID NO: 2833280 - RNA, 21 nt, Human
gaagagcaaaaauaucccuuc

SEQ ID NO: 2833281 - RNA, 22 nt, Human
gaagagcaaaaauaucccuucc

SEQ ID NO: 2833282 - RNA, 13 nt, Human
gaagagaggagag

SEQ ID NO: 2833283 - RNA, 14 nt, Human
gaagagaggagagg

SEQ ID NO: 2833284 - RNA, 19 nt, Human
gaagagaggagaggagaga

SEQ ID NO: 2833285 - RNA, 21 nt, Human
gaagagaggagaggagagagg

SEQ ID NO: 2833286 - RNA, 12 nt, Human
gaagagccacag

SEQ ID NO: 2833287 - RNA, 13 nt, Human
gaagagccacagu

SEQ ID NO: 2833288 - RNA, 15 nt, Human
gaagaggagcccuca

SEQ ID NO: 2833289 - RNA, 13 nt, Human
gaaaauaguuugu

SEQ ID NO: 2833290 - RNA, 14 nt, Human
gaaaauaguuuguu

SEQ ID NO: 2833291 - RNA, 21 nt, Human
gaaaauauaaaacaaauaaaa

SEQ ID NO: 2833292 - RNA, 19 nt, Human
gaaaaaucacaauuuuuaa

SEQ ID NO: 2833293 - RNA, 23 nt, Human
gaaaauaaaucaaugcuauaacu

SEQ ID NO: 2833294 - RNA, 20 nt, Human
gaaaauaaagacaaccauau

SEQ ID NO: 2833295 - RNA, 22 nt, Human
gaaaauaaagacaaccauauuu

SEQ ID NO: 2833296 - RNA, 23 nt, Human
gaaaauaaagacaaccauauuua

SEQ ID NO: 2833297 - RNA, 18 nt, Human
gaaauuguacauauuugu

SEQ ID NO: 2833298 - RNA, 19 nt, Human
gaaauuuauuaguuaauau

SEQ ID NO: 2833299 - RNA, 21 nt, Human
gaaauuuauuaguuaauauau

SEQ ID NO: 2833300 - RNA, 11 nt, Human
gaaauuucaga

SEQ ID NO: 2833301 - RNA, 21 nt, Human
gaacagcuaugggagccccag

SEQ ID NO: 2833302 - RNA, 23 nt, Human
gaacagcuaugggagccccaggg

SEQ ID NO: 2833303 - RNA, 22 nt, Human
gaacagcuaugggagccccagg

SEQ ID NO: 2833304 - RNA, 17 nt, Human
gaacagauucacacugu

SEQ ID NO: 2833305 - RNA, 21 nt, Human
gaacagauucacacugucugg

SEQ ID NO: 2833306 - RNA, 18 nt, Human
gaacacucuuuugcuuua

SEQ ID NO: 2833307 - RNA, 16 nt, Human
gaacacucuuuugcuu

SEQ ID NO: 2833308 - RNA, 21 nt, Human
gaaauuucagauucccagagc

SEQ ID NO: 2833309 - RNA, 23 nt, Human
gaacacugcacucuuaagcuucc

SEQ ID NO: 2833310 - RNA, 13 nt, Human
gaacacugcccuc

SEQ ID NO: 2833311 - RNA, 17 nt, Human
gaacacugcccucgcac

SEQ ID NO: 2833312 - RNA, 22 nt, Human
gaacagaucuuuuacuuuggcc

SEQ ID NO: 2833313 - RNA, 13 nt, Human
gaacagcauggca

SEQ ID NO: 2833314 - RNA, 16 nt, Human
gaacagcauggcacuc

SEQ ID NO: 2833315 - RNA, 18 nt, Human
gaacagcauggcacuccc

SEQ ID NO: 2833316 - RNA, 19 nt, Human
gaacagcauggcacucccu

SEQ ID NO: 2833317 - RNA, 20 nt, Human
gaacagcauggcacucccuc

SEQ ID NO: 2833318 - RNA, 22 nt, Human
gaacauaaaaaggacaucagca

SEQ ID NO: 2833319 - RNA, 18 nt, Human
gaacauaaaaaggacauc

SEQ ID NO: 2833320 - RNA, 16 nt, Human
gaacauaaaaaggaca

SEQ ID NO: 2833321 - RNA, 21 nt, Human
gaacagcgaaguagcuugcuc

SEQ ID NO: 2833322 - RNA, 14 nt, Human
gaacauaaaaagga

SEQ ID NO: 2833323 - RNA, 18 nt, Human
gaacagugcuugccacag

SEQ ID NO: 2833324 - RNA, 20 nt, Human
gaacaucaucaaggcacugc

SEQ ID NO: 2833325 - RNA, 23 nt, Human
gaacaucaccgacgcgucuccug

SEQ ID NO: 2833326 - RNA, 17 nt, Human
gaacauccaaccuuccc

SEQ ID NO: 2833327 - RNA, 21 nt, Human
gaacaucaucaaggcacugcc

SEQ ID NO: 2833328 - RNA, 22 nt, Human
gaacaucaucaaggcacugccu

SEQ ID NO: 2833329 - RNA, 18 nt, Human
gaacauccaaccuuccca

SEQ ID NO: 2833330 - RNA, 15 nt, Human
gaacaucauuagaac

SEQ ID NO: 2833331 - RNA, 21 nt, Human
gaacauaaagguaaaacaaaa

SEQ ID NO: 2833332 - RNA, 12 nt, Human
gaacgcagcccu

SEQ ID NO: 2833333 - RNA, 16 nt, Human
gaacgaugugucugua

SEQ ID NO: 2833334 - RNA, 22 nt, Human
gaacgcagcccuagagccugcc

SEQ ID NO: 2833335 - RNA, 23 nt, Human
gaacgcagcccuagagccugccu

SEQ ID NO: 2833336 - RNA, 16 nt, Human
gaacgcagcccuagag

SEQ ID NO: 2833337 - RNA, 17 nt, Human
gaacgcagcccuagagc

SEQ ID NO: 2833338 - RNA, 20 nt, Human
gaacgcagcccuagagccug

SEQ ID NO: 2833339 - RNA, 21 nt, Human
gaacgcagcccuagagccugc

SEQ ID NO: 2833340 - RNA, 12 nt, Human
gaacuaaagaag

SEQ ID NO: 2833341 - RNA, 19 nt, Human
gaacuaaagguggccacaa

SEQ ID NO: 2833342 - RNA, 14 nt, Human
gaacucacuggggc

SEQ ID NO: 2833343 - RNA, 16 nt, Human
gaacucacuggggccu

SEQ ID NO: 2833344 - RNA, 16 nt, Human
gaacucaccuggggcu

SEQ ID NO: 2833345 - RNA, 21 nt, Human
gaacucaccuggggcugcugg

SEQ ID NO: 2833346 - RNA, 22 nt, Human
gaacucaccuggggcugcuggc

SEQ ID NO: 2833347 - RNA, 18 nt, Human
gaacucagaucugucuga

SEQ ID NO: 2833348 - RNA, 16 nt, Human
gaacuaauaaauacau

SEQ ID NO: 2833349 - RNA, 17 nt, Human
gaacuaauaaauacaua

SEQ ID NO: 2833350 - RNA, 19 nt, Human
gaacuaauuucuucuccug

SEQ ID NO: 2833351 - RNA, 17 nt, Human
gaacuaagaaacuuuug

SEQ ID NO: 2833352 - RNA, 18 nt, Human
gaacuaagaaacuuuugu

SEQ ID NO: 2833353 - RNA, 22 nt, Human
gaacuaagaaacuuuuguaaag

SEQ ID NO: 2833354 - RNA, 23 nt, Human
gaacuaagaaacuuuuguaaaga

SEQ ID NO: 2833355 - RNA, 12 nt, Human
gaacuaaauguu

SEQ ID NO: 2833356 - RNA, 13 nt, Human
gaacuaaauguuc

SEQ ID NO: 2833357 - RNA, 14 nt, Human
gaacuaaauguucu

SEQ ID NO: 2833358 - RNA, 15 nt, Human
gaacuaaauguucua

SEQ ID NO: 2833359 - RNA, 16 nt, Human
gaacuaaauguucuau

SEQ ID NO: 2833360 - RNA, 13 nt, Human
gaacuaacacgug

SEQ ID NO: 2833361 - RNA, 18 nt, Human
gaacuaacacgugaugug

SEQ ID NO: 2833362 - RNA, 22 nt, Human
gaacuacgcuugcucauuuuuu

SEQ ID NO: 2833363 - RNA, 19 nt, Human
gaacuagacugccuggguu

SEQ ID NO: 2833364 - RNA, 16 nt, Human
gaacuagagaugugca

SEQ ID NO: 2833365 - RNA, 17 nt, Human
gaacuagagaugugcaa

SEQ ID NO: 2833366 - RNA, 14 nt, Human
gaaccucuucccca

SEQ ID NO: 2833367 - RNA, 13 nt, Human
gaaccucuucccc

SEQ ID NO: 2833368 - RNA, 12 nt, Human
gaaccucugucu

SEQ ID NO: 2833369 - RNA, 14 nt, Human
gaaccucugucuca

SEQ ID NO: 2833370 - RNA, 15 nt, Human
gaaccucugucucau

SEQ ID NO: 2833371 - RNA, 18 nt, Human
gaaccucugucucauccu

SEQ ID NO: 2833372 - RNA, 22 nt, Human
gaaccucugucucauccuccug

SEQ ID NO: 2833373 - RNA, 18 nt, Human
gaaccucaggcuuccuug

SEQ ID NO: 2833374 - RNA, 12 nt, Human
gaaccucccaga

SEQ ID NO: 2833375 - RNA, 13 nt, Human
gaaccucccagag

SEQ ID NO: 2833376 - RNA, 14 nt, Human
gaaccucccagagg

SEQ ID NO: 2833377 - RNA, 18 nt, Human
gaaccucccagaggucca

SEQ ID NO: 2833378 - RNA, 19 nt, Human
gaaccucccagagguccag

SEQ ID NO: 2833379 - RNA, 21 nt, Human
gaaccucccagagguccagcc

SEQ ID NO: 2833380 - RNA, 22 nt, Human
gaaccucccagagguccagccc

SEQ ID NO: 2833381 - RNA, 14 nt, Human
gaaccucaggcuuc

SEQ ID NO: 2833382 - RNA, 11 nt, Human
gaaccucaggc

SEQ ID NO: 2833383 - RNA, 15 nt, Human
gaaccuaugaagcaa

SEQ ID NO: 2833384 - RNA, 21 nt, Human
gaaccucaccccgaggcccug

SEQ ID NO: 2833385 - RNA, 22 nt, Human
gaaccucaccccgaggcccugc

SEQ ID NO: 2833386 - RNA, 23 nt, Human
gaaccucaccccgaggcccugca

SEQ ID NO: 2833387 - RNA, 11 nt, Human
gaaccucaccu

SEQ ID NO: 2833388 - RNA, 20 nt, Human
gaacauuucuguaaauacca

SEQ ID NO: 2833389 - RNA, 13 nt, Human
gaacauuugugau

SEQ ID NO: 2833390 - RNA, 15 nt, Human
gaacauuugugauau

SEQ ID NO: 2833391 - RNA, 19 nt, Human
gaacaugugagagguuuga

SEQ ID NO: 2833392 - RNA, 20 nt, Human
gaacauuccaaggaguugga

SEQ ID NO: 2833393 - RNA, 10 nt, Human
gaacauugua

SEQ ID NO: 2833394 - RNA, 16 nt, Human
gaacauuuauuuuaug

SEQ ID NO: 2833395 - RNA, 17 nt, Human
gaacauuuauuuuauga

SEQ ID NO: 2833396 - RNA, 18 nt, Human
gaacauuuauuuuaugag

SEQ ID NO: 2833397 - RNA, 19 nt, Human
gaacauuuauuuuaugaga

SEQ ID NO: 2833398 - RNA, 21 nt, Human
gaacauuuauuuuaugagaaa

SEQ ID NO: 2833399 - RNA, 22 nt, Human
gaacauuuauuuuaugagaaau

SEQ ID NO: 2833400 - RNA, 17 nt, Human
gauccucuccuuugaaa

SEQ ID NO: 2833401 - RNA, 21 nt, Human
gauccucuccuuugaaaccug

SEQ ID NO: 2833402 - RNA, 16 nt, Human
gauccucccaggcuuc

SEQ ID NO: 2833403 - RNA, 23 nt, Human
gaucuaaggaugucacagggcca

SEQ ID NO: 2833404 - RNA, 14 nt, Human
gaucuaaggcuguu

SEQ ID NO: 2833405 - RNA, 13 nt, Human
gaucuacaugaau

SEQ ID NO: 2833406 - RNA, 21 nt, Human
gaucuacaugaaugcaaaaca

SEQ ID NO: 2833407 - RNA, 12 nt, Human
gauccugugaag

SEQ ID NO: 2833408 - RNA, 22 nt, Human
gauccugugaggagccccaucu

SEQ ID NO: 2833409 - RNA, 23 nt, Human
gauccugugaggagccccaucug

SEQ ID NO: 2833410 - RNA, 20 nt, Human
gauccugucuuuaaggaaaa

SEQ ID NO: 2833411 - RNA, 19 nt, Human
gauccugucuuuaaggaaa

SEQ ID NO: 2833412 - RNA, 16 nt, Human
gauccugucuuuaagg

SEQ ID NO: 2833413 - RNA, 22 nt, Human
gauccuggguacugaaagccuu

SEQ ID NO: 2833414 - RNA, 23 nt, Human
gaucuacaugaggaacuguagau

SEQ ID NO: 2833415 - RNA, 21 nt, Human
gaucuaaggaugucacagggc

SEQ ID NO: 2833416 - RNA, 18 nt, Human
gaucuagaauaaucuugc

SEQ ID NO: 2833417 - RNA, 17 nt, Human
gauccucccaccucagc

SEQ ID NO: 2833418 - RNA, 16 nt, Human
gauccucccaccucag

SEQ ID NO: 2833419 - RNA, 20 nt, Human
gaucagcuuucaaagcauuu

SEQ ID NO: 2833420 - RNA, 15 nt, Human
gauccuagauccuaa

SEQ ID NO: 2833421 - RNA, 23 nt, Human
gauccuaaugaaugcauaaaaug

SEQ ID NO: 2833422 - RNA, 19 nt, Human
gauccuaacugaagagaca

SEQ ID NO: 2833423 - RNA, 20 nt, Human
gauccuaacugaagagacag

SEQ ID NO: 2833424 - RNA, 16 nt, Human
gauccuaagcaucuaa

SEQ ID NO: 2833425 - RNA, 19 nt, Human
gauccuaagcaucuaaguu

SEQ ID NO: 2833426 - RNA, 13 nt, Human
gaucauccacugu

SEQ ID NO: 2833427 - RNA, 15 nt, Human
gaucaucaacaagau

SEQ ID NO: 2833428 - RNA, 21 nt, Human
gaucaucaacaagauuuccuu

SEQ ID NO: 2833429 - RNA, 13 nt, Human
gaucaucaugcag

SEQ ID NO: 2833430 - RNA, 18 nt, Human
gaucauagguauuucaaa

SEQ ID NO: 2833431 - RNA, 17 nt, Human
gaucauagguauuucaa

SEQ ID NO: 2833432 - RNA, 19 nt, Human
gaucauaaaguuagaaucu

SEQ ID NO: 2833433 - RNA, 13 nt, Human
gaucauaaggcuu

SEQ ID NO: 2833434 - RNA, 17 nt, Human
gaucauaaggcuucaaa

SEQ ID NO: 2833435 - RNA, 15 nt, Human
gaucauaagugaauu

SEQ ID NO: 2833436 - RNA, 17 nt, Human
gaucauaagugaauuua

SEQ ID NO: 2833437 - RNA, 19 nt, Human
gaucauaagugaauuuaua

SEQ ID NO: 2833438 - RNA, 14 nt, Human
gaucccucucugga

SEQ ID NO: 2833439 - RNA, 19 nt, Human
gaucccugucuuuccuaag

SEQ ID NO: 2833440 - RNA, 23 nt, Human
gaugcaccagcccuuagcaggga

SEQ ID NO: 2833441 - RNA, 15 nt, Human
gaugcaccagcccuu

SEQ ID NO: 2833442 - RNA, 14 nt, Human
gaugcaccagcccu

SEQ ID NO: 2833443 - RNA, 15 nt, Human
gaugaccuggauaac

SEQ ID NO: 2833444 - RNA, 14 nt, Human
gaugagaacaaagc

SEQ ID NO: 2833445 - RNA, 15 nt, Human
gaugagaacaaagcu

SEQ ID NO: 2833446 - RNA, 17 nt, Human
gaugagaacaaagcugu

SEQ ID NO: 2833447 - RNA, 22 nt, Human
gaugagaacaaagcuguuaaac

SEQ ID NO: 2833448 - RNA, 21 nt, Human
gaugagaauuucuaaaaagau

SEQ ID NO: 2833449 - RNA, 22 nt, Human
gaugagaauuucuaaaaagauu

SEQ ID NO: 2833450 - RNA, 14 nt, Human
gaugagagcccaga

SEQ ID NO: 2833451 - RNA, 15 nt, Human
gaugagagcccagag

SEQ ID NO: 2833452 - RNA, 17 nt, Human
gaugagagcccagaggu

SEQ ID NO: 2833453 - RNA, 18 nt, Human
gaugagagcccagaggua

SEQ ID NO: 2833454 - RNA, 16 nt, Human
gaugccugguggcagc

SEQ ID NO: 2833455 - RNA, 15 nt, Human
gaugccugguggcag

SEQ ID NO: 2833456 - RNA, 14 nt, Human
gaugccugguggca

SEQ ID NO: 2833457 - RNA, 22 nt, Human
gaugcaggugagcccauggccc

SEQ ID NO: 2833458 - RNA, 13 nt, Human
gaugcagucuccu

SEQ ID NO: 2833459 - RNA, 17 nt, Human
gaugcagucuccucuuu

SEQ ID NO: 2833460 - RNA, 19 nt, Human
gaugcagucuccucuuuaa

SEQ ID NO: 2833461 - RNA, 21 nt, Human
gaugcagucuccucuuuaaaa

SEQ ID NO: 2833462 - RNA, 21 nt, Human
gaugcaggauuuguucucugu

SEQ ID NO: 2833463 - RNA, 22 nt, Human
gaugcaggauuuguucucuguc

SEQ ID NO: 2833464 - RNA, 21 nt, Human
gaugcaggcacuuauuguaaa

SEQ ID NO: 2833465 - RNA, 22 nt, Human
gaugcaggcacuuauuguaaau

SEQ ID NO: 2833466 - RNA, 21 nt, Human
gaugagagcccagagguaaca

SEQ ID NO: 2833467 - RNA, 21 nt, Human
gaugaaaugaggucagagccu

SEQ ID NO: 2833468 - RNA, 15 nt, Human
gaugaaaugagguca

SEQ ID NO: 2833469 - RNA, 23 nt, Human
gaucuugaguauaagaaaugcau

SEQ ID NO: 2833470 - RNA, 15 nt, Human
gaucuugcagaaguu

SEQ ID NO: 2833471 - RNA, 13 nt, Human
gaucuugaaugug

SEQ ID NO: 2833472 - RNA, 14 nt, Human
gaucuugaaugugg

SEQ ID NO: 2833473 - RNA, 22 nt, Human
gaucuugaauguggucucagga

SEQ ID NO: 2833474 - RNA, 23 nt, Human
gaucuugaauguggucucaggau

SEQ ID NO: 2833475 - RNA, 12 nt, Human
gaucuucugaaa

SEQ ID NO: 2833476 - RNA, 14 nt, Human
gaucuucugaaaug

SEQ ID NO: 2833477 - RNA, 15 nt, Human
gaucuucugaaauga

SEQ ID NO: 2833478 - RNA, 16 nt, Human
gaucuucugaaaugaa

SEQ ID NO: 2833479 - RNA, 18 nt, Human
gaucuucugaaaugaaac

SEQ ID NO: 2833480 - RNA, 20 nt, Human
gaucuucugggagcaggaac

SEQ ID NO: 2833481 - RNA, 16 nt, Human
gaucugucacaccagc

SEQ ID NO: 2833482 - RNA, 20 nt, Human
gaucuguauauacaauaaca

SEQ ID NO: 2833483 - RNA, 15 nt, Human
gaucuguauauacaa

SEQ ID NO: 2833484 - RNA, 20 nt, Human
gaucugucacaccagccaua

SEQ ID NO: 2833485 - RNA, 17 nt, Human
gaucugucacaccagcc

SEQ ID NO: 2833486 - RNA, 18 nt, Human
gaucugucacaccagcca

SEQ ID NO: 2833487 - RNA, 19 nt, Human
gaucugucacaccagccau

SEQ ID NO: 2833488 - RNA, 20 nt, Human
gaugaaaucuuacagcuggg

SEQ ID NO: 2833489 - RNA, 16 nt, Human
gaugaaauguaaauac

SEQ ID NO: 2833490 - RNA, 18 nt, Human
gaugaacucugaacuuug

SEQ ID NO: 2833491 - RNA, 19 nt, Human
gaucuuggcuuacugcagc

SEQ ID NO: 2833492 - RNA, 23 nt, Human
gaugaaauuuucuagacuuucug

SEQ ID NO: 2833493 - RNA, 14 nt, Human
gaugaauacauuuu

SEQ ID NO: 2833494 - RNA, 23 nt, Human
gaugaaugaggucccaggcagag

SEQ ID NO: 2833495 - RNA, 19 nt, Human
gaugaaugaggucccaggc

SEQ ID NO: 2833496 - RNA, 13 nt, Human
gaugaaugagaau

SEQ ID NO: 2833497 - RNA, 17 nt, Human
gaugaaguuuuacauug

SEQ ID NO: 2833498 - RNA, 13 nt, Human
gaugaaucacugu

SEQ ID NO: 2833499 - RNA, 20 nt, Human
gaugaaucacuguuuuuaga

SEQ ID NO: 2833500 - RNA, 19 nt, Human
gaugaaucucccacuccag

SEQ ID NO: 2833501 - RNA, 23 nt, Human
gaugaaguuuuacauuguugagc

SEQ ID NO: 2833502 - RNA, 22 nt, Human
gaugaaguuuuacauuguugag

SEQ ID NO: 2833503 - RNA, 14 nt, Human
gaugaauguauuua

SEQ ID NO: 2833504 - RNA, 20 nt, Human
gaugaauuaggggacacugu

SEQ ID NO: 2833505 - RNA, 22 nt, Human
gaugaauugcguuggucucugc

SEQ ID NO: 2833506 - RNA, 23 nt, Human
gaugacccugcgaaggggcccug

SEQ ID NO: 2833507 - RNA, 17 nt, Human
gaugaccucauuaaccg

SEQ ID NO: 2833508 - RNA, 21 nt, Human
gauaaaauaaugcugcaaacu

SEQ ID NO: 2833509 - RNA, 13 nt, Human
gaguucuggaaaa

SEQ ID NO: 2833510 - RNA, 16 nt, Human
gauaaaaugacuacuu

SEQ ID NO: 2833511 - RNA, 18 nt, Human
gauaaaaugacuacuuag

SEQ ID NO: 2833512 - RNA, 16 nt, Human
gauaaacaacaaggug

SEQ ID NO: 2833513 - RNA, 18 nt, Human
gauaaacaacaagguggu

SEQ ID NO: 2833514 - RNA, 16 nt, Human
gauaaauuccacugga

SEQ ID NO: 2833515 - RNA, 11 nt, Human
gauaacaaaga

SEQ ID NO: 2833516 - RNA, 12 nt, Human
gauaacaaagau

SEQ ID NO: 2833517 - RNA, 13 nt, Human
gauaacaaagaua

SEQ ID NO: 2833518 - RNA, 17 nt, Human
gauaacaaagauaucuu

SEQ ID NO: 2833519 - RNA, 18 nt, Human
gauaacaaagauaucuuu

SEQ ID NO: 2833520 - RNA, 22 nt, Human
gauaacaaagauaucuuuucuu

SEQ ID NO: 2833521 - RNA, 20 nt, Human
gauaacaaugcagcaaggcc

SEQ ID NO: 2833522 - RNA, 17 nt, Human
gauaauaauauuguuuu

SEQ ID NO: 2833523 - RNA, 18 nt, Human
gauaauaauauuguuuuu

SEQ ID NO: 2833524 - RNA, 19 nt, Human
gauaauaauauuguuuuuc

SEQ ID NO: 2833525 - RNA, 20 nt, Human
gauaauaauauuguuuuucu

SEQ ID NO: 2833526 - RNA, 12 nt, Human
gauaauaauggg

SEQ ID NO: 2833527 - RNA, 23 nt, Human
gauaaguucuuaugccauguuaa

SEQ ID NO: 2833528 - RNA, 21 nt, Human
gauaacgcuuaaaggaaguca

SEQ ID NO: 2833529 - RNA, 23 nt, Human
gauaaccuauaugauuuauaguu

SEQ ID NO: 2833530 - RNA, 17 nt, Human
gauaaccuauaugauuu

SEQ ID NO: 2833531 - RNA, 15 nt, Human
gauaaccagcuguaa

SEQ ID NO: 2833532 - RNA, 19 nt, Human
gauaaaagggcaaaucugc

SEQ ID NO: 2833533 - RNA, 17 nt, Human
gauaacauuuguguguu

SEQ ID NO: 2833534 - RNA, 10 nt, Human
gagugugugu

SEQ ID NO: 2833535 - RNA, 15 nt, Human
gagugugugugugca

SEQ ID NO: 2833536 - RNA, 14 nt, Human
gagugugugugugu

SEQ ID NO: 2833537 - RNA, 19 nt, Human
gaguguguguuugugcuga

SEQ ID NO: 2833538 - RNA, 18 nt, Human
gaguguguuuuauaaacu

SEQ ID NO: 2833539 - RNA, 14 nt, Human
gaguguuauguauu

SEQ ID NO: 2833540 - RNA, 15 nt, Human
gaguguuauguauuu

SEQ ID NO: 2833541 - RNA, 14 nt, Human
gaguuauugagauu

SEQ ID NO: 2833542 - RNA, 22 nt, Human
gaguucaauaaaugucuguuga

SEQ ID NO: 2833543 - RNA, 11 nt, Human
gaguucuacau

SEQ ID NO: 2833544 - RNA, 19 nt, Human
gaguucgaggcugcaguca

SEQ ID NO: 2833545 - RNA, 18 nt, Human
gaguucggcucugggugg

SEQ ID NO: 2833546 - RNA, 21 nt, Human
gaguucgagaccagccuggcc

SEQ ID NO: 2833547 - RNA, 20 nt, Human
gaguucgagaccagccuggc

SEQ ID NO: 2833548 - RNA, 19 nt, Human
gaguucgagaccagccugg

SEQ ID NO: 2833549 - RNA, 18 nt, Human
gaguucgagaccagccug

SEQ ID NO: 2833550 - RNA, 17 nt, Human
gaguucgagaccagccu

SEQ ID NO: 2833551 - RNA, 21 nt, Human
gaguucagaguccuuaaaaug

SEQ ID NO: 2833552 - RNA, 18 nt, Human
gacuuccucgccucuccc

SEQ ID NO: 2833553 - RNA, 19 nt, Human
gacuuccucgccucuccca

SEQ ID NO: 2833554 - RNA, 21 nt, Human
gacuucccuaacacuuacccc

SEQ ID NO: 2833555 - RNA, 14 nt, Human
gacuuccuuacuaa

SEQ ID NO: 2833556 - RNA, 17 nt, Human
gaguguguaugccaaga

SEQ ID NO: 2833557 - RNA, 12 nt, Human
gacuuccaaaga

SEQ ID NO: 2833558 - RNA, 15 nt, Human
gacuuccaaagaaug

SEQ ID NO: 2833559 - RNA, 16 nt, Human
gacuuccaaagaaugu

SEQ ID NO: 2833560 - RNA, 23 nt, Human
gacuucauugucccucuucacuc

SEQ ID NO: 2833561 - RNA, 14 nt, Human
gaucacuggagccc

SEQ ID NO: 2833562 - RNA, 13 nt, Human
gaucaggcacagg

SEQ ID NO: 2833563 - RNA, 15 nt, Human
gaucaggcacagguc

SEQ ID NO: 2833564 - RNA, 16 nt, Human
gaucaggcacagguca

SEQ ID NO: 2833565 - RNA, 17 nt, Human
gaucaggcacaggucag

SEQ ID NO: 2833566 - RNA, 20 nt, Human
gaucacggcucacugcagcc

SEQ ID NO: 2833567 - RNA, 23 nt, Human
gaucacggcucacugcagccuca

SEQ ID NO: 2833568 - RNA, 16 nt, Human
gaucacugccacacuc

SEQ ID NO: 2833569 - RNA, 13 nt, Human
gaucacugccaga

SEQ ID NO: 2833570 - RNA, 15 nt, Human
gaucacugccacacu

SEQ ID NO: 2833571 - RNA, 13 nt, Human
gaucacugccaca

SEQ ID NO: 2833572 - RNA, 13 nt, Human
gaucacugaauuu

SEQ ID NO: 2833573 - RNA, 16 nt, Human
gaucacugaauuuaua

SEQ ID NO: 2833574 - RNA, 17 nt, Human
gaucacugaauuuauaa

SEQ ID NO: 2833575 - RNA, 13 nt, Human
gaucacuggagcc

SEQ ID NO: 2833576 - RNA, 12 nt, Human
gaucacuggagc

SEQ ID NO: 2833577 - RNA, 18 nt, Human
gaucacuagccugucauc

SEQ ID NO: 2833578 - RNA, 19 nt, Human
gaucaccauguauuuugua

SEQ ID NO: 2833579 - RNA, 16 nt, Human
gaucacauguggacuu

SEQ ID NO: 2833580 - RNA, 21 nt, Human
gauaucuggccuaaaaucuug

SEQ ID NO: 2833581 - RNA, 20 nt, Human
gauaucuagcuaguaauaua

SEQ ID NO: 2833582 - RNA, 21 nt, Human
gauaucuagcuaguaauauau

SEQ ID NO: 2833583 - RNA, 21 nt, Human
gauaucccugauccuaacuga

SEQ ID NO: 2833584 - RNA, 16 nt, Human
gauauccuuaucagag

SEQ ID NO: 2833585 - RNA, 18 nt, Human
gauauccuuaucagagcu

SEQ ID NO: 2833586 - RNA, 23 nt, Human
gauagugggcaccccacugcaau

SEQ ID NO: 2833587 - RNA, 17 nt, Human
gauaggagccugcuggu

SEQ ID NO: 2833588 - RNA, 18 nt, Human
gauaggaaugugaaagca

SEQ ID NO: 2833589 - RNA, 15 nt, Human
gauaggaccuugggc

SEQ ID NO: 2833590 - RNA, 17 nt, Human
gauaggaccuugggcca

SEQ ID NO: 2833591 - RNA, 18 nt, Human
gauaggaccuugggccaa

SEQ ID NO: 2833592 - RNA, 20 nt, Human
gauagcuuuauuuuuuaagu

SEQ ID NO: 2833593 - RNA, 15 nt, Human
gauaauucuuauuuu

SEQ ID NO: 2833594 - RNA, 18 nt, Human
gauaauucuagcuuugag

SEQ ID NO: 2833595 - RNA, 18 nt, Human
gauaauugcauucaucuu

SEQ ID NO: 2833596 - RNA, 11 nt, Human
gauaauugcua

SEQ ID NO: 2833597 - RNA, 14 nt, Human
gauaauugcuauuu

SEQ ID NO: 2833598 - RNA, 16 nt, Human
gauaauugcuauuuau

SEQ ID NO: 2833599 - RNA, 22 nt, Human
gauaauugcuauuuauuuuuac

SEQ ID NO: 2833600 - RNA, 14 nt, Human
gauaauuguugaaa

SEQ ID NO: 2833601 - RNA, 16 nt, Human
gauaauuguugaaauu

SEQ ID NO: 2833602 - RNA, 12 nt, Human
gauaauuuaaga

SEQ ID NO: 2833603 - RNA, 23 nt, Human
gauaauauuacuguuuauuucug

SEQ ID NO: 2833604 - RNA, 18 nt, Human
gauaauauuguggugcca

SEQ ID NO: 2833605 - RNA, 22 nt, Human
gauaauaaauugaaauugugaa

SEQ ID NO: 2833606 - RNA, 23 nt, Human
gauaauaucuuugugauaauuua

SEQ ID NO: 2833607 - RNA, 12 nt, Human
gauaauagauuc

SEQ ID NO: 2833608 - RNA, 13 nt, Human
gauaauagauucu

SEQ ID NO: 2833609 - RNA, 14 nt, Human
gauaauagauucuc

SEQ ID NO: 2833610 - RNA, 22 nt, Human
gauaauaguuuuuucuuuuaac

SEQ ID NO: 2833611 - RNA, 13 nt, Human
gauauauaucaua

SEQ ID NO: 2833612 - RNA, 23 nt, Human
gauauauauuauaaauauauaua

SEQ ID NO: 2833613 - RNA, 12 nt, Human
gauauaucugaa

SEQ ID NO: 2833614 - RNA, 14 nt, Human
gauauaucugaaaa

SEQ ID NO: 2833615 - RNA, 16 nt, Human
gauauaucugaaaacu

SEQ ID NO: 2833616 - RNA, 18 nt, Human
gauauaucugaaaacugg

SEQ ID NO: 2833617 - RNA, 23 nt, Human
gauaguggggagacuucuuggcu

SEQ ID NO: 2833618 - RNA, 15 nt, Human
gauagggcugggcaa

SEQ ID NO: 2833619 - RNA, 21 nt, Human
gauagggcugggcaaggaaaa

SEQ ID NO: 2833620 - RNA, 22 nt, Human
gauagggcugggcaaggaaaaa

SEQ ID NO: 2833621 - RNA, 21 nt, Human
gauaguuaucuguucuuuuga

SEQ ID NO: 2833622 - RNA, 15 nt, Human
gauaguucacccccu

SEQ ID NO: 2833623 - RNA, 14 nt, Human
gauaguuuucuccu

SEQ ID NO: 2833624 - RNA, 14 nt, Human
gauauaaaaugugc

SEQ ID NO: 2833625 - RNA, 15 nt, Human
gauauaaaaugugca

SEQ ID NO: 2833626 - RNA, 19 nt, Human
gcaagcaacacagaggaau

SEQ ID NO: 2833627 - RNA, 21 nt, Human
gcaagcaacuugcaggcucca

SEQ ID NO: 2833628 - RNA, 22 nt, Human
gcaagcaacuugcaggcuccau

SEQ ID NO: 2833629 - RNA, 13 nt, Human
gcaagauugcuua

SEQ ID NO: 2833630 - RNA, 20 nt, Human
gcaacuucuucuccaucccu

SEQ ID NO: 2833631 - RNA, 15 nt, Human
gcaacuugaaauuau

SEQ ID NO: 2833632 - RNA, 19 nt, Human
gcaacuugaaauuauaucu

SEQ ID NO: 2833633 - RNA, 18 nt, Human
gcaacuucuucuccaucc

SEQ ID NO: 2833634 - RNA, 14 nt, Human
gcaacuucuucucc

SEQ ID NO: 2833635 - RNA, 12 nt, Human
gcaacuguuaug

SEQ ID NO: 2833636 - RNA, 18 nt, Human
gcaacuguuaugaaauaa

SEQ ID NO: 2833637 - RNA, 20 nt, Human
gcaacuguuaugaaauaaag

SEQ ID NO: 2833638 - RNA, 21 nt, Human
gcaacuguuaugaaauaaaga

SEQ ID NO: 2833639 - RNA, 16 nt, Human
gcaacuucaguccugg

SEQ ID NO: 2833640 - RNA, 17 nt, Human
gcaacuucaguccuggg

SEQ ID NO: 2833641 - RNA, 19 nt, Human
gcaacuucaguccugggag

SEQ ID NO: 2833642 - RNA, 20 nt, Human
gcaacuuuuguguaaugaaa

SEQ ID NO: 2833643 - RNA, 17 nt, Human
gcaagaaaaaaaaaugc

SEQ ID NO: 2833644 - RNA, 18 nt, Human
gcaagaaaaaaaaaugcc

SEQ ID NO: 2833645 - RNA, 14 nt, Human
gcaagcacaucugc

SEQ ID NO: 2833646 - RNA, 17 nt, Human
gcaagcaagcucucuug

SEQ ID NO: 2833647 - RNA, 14 nt, Human
gcaagauugcuuaa

SEQ ID NO: 2833648 - RNA, 18 nt, Human
gcaagcaagaaacacugg

SEQ ID NO: 2833649 - RNA, 16 nt, Human
gcaagcaccuccugcc

SEQ ID NO: 2833650 - RNA, 15 nt, Human
gcaagcaccuccugc

SEQ ID NO: 2833651 - RNA, 20 nt, Human
gcaagcaccuccugccucga

SEQ ID NO: 2833652 - RNA, 18 nt, Human
gcaagcaccuccugccuc

SEQ ID NO: 2833653 - RNA, 16 nt, Human
gcaagcaugcuuguga

SEQ ID NO: 2833654 - RNA, 15 nt, Human
gcaagcaugcuugug

SEQ ID NO: 2833655 - RNA, 11 nt, Human
gcaagcaugcu

SEQ ID NO: 2833656 - RNA, 13 nt, Human
gcaaggcugugcu

SEQ ID NO: 2833657 - RNA, 18 nt, Human
gcaaggcugugcucccug

SEQ ID NO: 2833658 - RNA, 20 nt, Human
gcaaggaccaggacucccuc

SEQ ID NO: 2833659 - RNA, 21 nt, Human
gcaaggacacagaugaaacac

SEQ ID NO: 2833660 - RNA, 12 nt, Human
gcaaggcugugc

SEQ ID NO: 2833661 - RNA, 21 nt, Human
gcaagggaauuucuucaacuc

SEQ ID NO: 2833662 - RNA, 15 nt, Human
gcaaggaccaggacu

SEQ ID NO: 2833663 - RNA, 14 nt, Human
gcaaggaccaggac

SEQ ID NO: 2833664 - RNA, 14 nt, Human
gcaaggaaggaaag

SEQ ID NO: 2833665 - RNA, 13 nt, Human
gcaaggaaggaaa

SEQ ID NO: 2833666 - RNA, 15 nt, Human
gcaaggaaggaaaga

SEQ ID NO: 2833667 - RNA, 9 nt, Human
gcaaggaaa

SEQ ID NO: 2833668 - RNA, 11 nt, Human
gcaaggaaaaa

SEQ ID NO: 2833669 - RNA, 14 nt, Human
gcaagcucucuugc

SEQ ID NO: 2833670 - RNA, 22 nt, Human
gcaagcugccgaaccaaaagaa

SEQ ID NO: 2833671 - RNA, 12 nt, Human
gcaagcuggccu

SEQ ID NO: 2833672 - RNA, 14 nt, Human
gcaagcuggccucu

SEQ ID NO: 2833673 - RNA, 16 nt, Human
gcaaggaaaaacaggu

SEQ ID NO: 2833674 - RNA, 14 nt, Human
gcaaggaaaaagaa

SEQ ID NO: 2833675 - RNA, 16 nt, Human
gcaaggaaaaagaaaa

SEQ ID NO: 2833676 - RNA, 17 nt, Human
gcaaggaaaaagaaaau

SEQ ID NO: 2833677 - RNA, 18 nt, Human
gcaaggaaaaagaaaaua

SEQ ID NO: 2833678 - RNA, 19 nt, Human
gcaaggaaaaagaaaauaa

SEQ ID NO: 2833679 - RNA, 10 nt, Human
gcaaggaaag

SEQ ID NO: 2833680 - RNA, 14 nt, Human
gcaauccugucuuu

SEQ ID NO: 2833681 - RNA, 21 nt, Human
gcaaucuccccuugauuuaaa

SEQ ID NO: 2833682 - RNA, 23 nt, Human
gcaaucuccccuugauuuaaaca

SEQ ID NO: 2833683 - RNA, 23 nt, Human
gcaaugaaaagucguuuuccaaa

SEQ ID NO: 2833684 - RNA, 16 nt, Human
gcaaugaaagguacua

SEQ ID NO: 2833685 - RNA, 18 nt, Human
gcaaugaaagguacuaua

SEQ ID NO: 2833686 - RNA, 23 nt, Human
gcaaugaaagguacuauauuugc

SEQ ID NO: 2833687 - RNA, 12 nt, Human
gcaaucuuugaa

SEQ ID NO: 2833688 - RNA, 13 nt, Human
gcaaucuuugaaa

SEQ ID NO: 2833689 - RNA, 17 nt, Human
gcaaucuuugaaagacu

SEQ ID NO: 2833690 - RNA, 18 nt, Human
gcaaucuuugaaagacuu

SEQ ID NO: 2833691 - RNA, 18 nt, Human
gcaaugacagguaaauua

SEQ ID NO: 2833692 - RNA, 19 nt, Human
gcaagguuaagcaaggugg

SEQ ID NO: 2833693 - RNA, 13 nt, Human
gcaagguuccaca

SEQ ID NO: 2833694 - RNA, 14 nt, Human
gcaagguuccacag

SEQ ID NO: 2833695 - RNA, 16 nt, Human
gcaagguuccacagag

SEQ ID NO: 2833696 - RNA, 17 nt, Human
gcaagguuccacagagu

SEQ ID NO: 2833697 - RNA, 23 nt, Human
gcaagguuccacagaguaagaca

SEQ ID NO: 2833698 - RNA, 17 nt, Human
gcaauccucucaccuca

SEQ ID NO: 2833699 - RNA, 14 nt, Human
gcaaguagauaaau

SEQ ID NO: 2833700 - RNA, 18 nt, Human
gcaaguagauaaauauuu

SEQ ID NO: 2833701 - RNA, 19 nt, Human
gcaaguagauaaauauuug

SEQ ID NO: 2833702 - RNA, 15 nt, Human
gcaacugacacuccc

SEQ ID NO: 2833703 - RNA, 19 nt, Human
gcaacugacacucccaccc

SEQ ID NO: 2833704 - RNA, 15 nt, Human
gcaacucuugauuau

SEQ ID NO: 2833705 - RNA, 11 nt, Human
gcaacugggac

SEQ ID NO: 2833706 - RNA, 12 nt, Human
gcaaaucuugaa

SEQ ID NO: 2833707 - RNA, 16 nt, Human
gcaaaugacaugcacu

SEQ ID NO: 2833708 - RNA, 19 nt, Human
gcaaaugacaugcacugac

SEQ ID NO: 2833709 - RNA, 14 nt, Human
gcaaaugcccaagg

SEQ ID NO: 2833710 - RNA, 20 nt, Human
gcaaaugcccaagggaaaga

SEQ ID NO: 2833711 - RNA, 16 nt, Human
gcaaaguucuguguuu

SEQ ID NO: 2833712 - RNA, 21 nt, Human
gcaaaugucagauacaaugua

SEQ ID NO: 2833713 - RNA, 22 nt, Human
gcaaagaaagugggaggucagg

SEQ ID NO: 2833714 - RNA, 23 nt, Human
gcaaagaaagugggaggucagga

SEQ ID NO: 2833715 - RNA, 23 nt, Human
gcaaacuuuguaugucauuuccu

SEQ ID NO: 2833716 - RNA, 22 nt, Human
gcaaagacuauucccuucuaac

SEQ ID NO: 2833717 - RNA, 16 nt, Human
gcaaagaggacucgcu

SEQ ID NO: 2833718 - RNA, 20 nt, Human
gcaaagaggacucgcuugua

SEQ ID NO: 2833719 - RNA, 21 nt, Human
gcaaagaggacucgcuuguaa

SEQ ID NO: 2833720 - RNA, 23 nt, Human
gcaaagaggacucgcuuguaaau

SEQ ID NO: 2833721 - RNA, 21 nt, Human
gcaaagacuauucccuucuaa

SEQ ID NO: 2833722 - RNA, 21 nt, Human
gcaaagucaugcaaaggcugg

SEQ ID NO: 2833723 - RNA, 16 nt, Human
gcaaagucaugcaaag

SEQ ID NO: 2833724 - RNA, 22 nt, Human
gcaaagucaugcaaaggcuggg

SEQ ID NO: 2833725 - RNA, 23 nt, Human
gcaaagucaugcaaaggcuggga

SEQ ID NO: 2833726 - RNA, 18 nt, Human
gcaaauacuuagcaaaaa

SEQ ID NO: 2833727 - RNA, 22 nt, Human
gcaaauacuuagcaaaaagugg

SEQ ID NO: 2833728 - RNA, 11 nt, Human
gcaaauauaaa

SEQ ID NO: 2833729 - RNA, 14 nt, Human
gcaaauauaaaacu

SEQ ID NO: 2833730 - RNA, 14 nt, Human
gcaaauauaaacau

SEQ ID NO: 2833731 - RNA, 23 nt, Human
gcaaaguucccuacuuccuguga

SEQ ID NO: 2833732 - RNA, 13 nt, Human
gauuuuaaacuag

SEQ ID NO: 2833733 - RNA, 14 nt, Human
gauuuuaaacuaga

SEQ ID NO: 2833734 - RNA, 15 nt, Human
gauuuuaaacuagau

SEQ ID NO: 2833735 - RNA, 17 nt, Human
gauuuuaaacuagauga

SEQ ID NO: 2833736 - RNA, 21 nt, Human
gauuuuaaacuagaugaccuc

SEQ ID NO: 2833737 - RNA, 22 nt, Human
gauuuuaaacuagaugaccuca

SEQ ID NO: 2833738 - RNA, 23 nt, Human
gauuuuaaacuagaugaccucau

SEQ ID NO: 2833739 - RNA, 18 nt, Human
gcaaacgcugccugcccg

SEQ ID NO: 2833740 - RNA, 16 nt, Human
gcaaacgcugccugcc

SEQ ID NO: 2833741 - RNA, 15 nt, Human
gcaaacgcugccugc

SEQ ID NO: 2833742 - RNA, 14 nt, Human
gcaaacgcugccug

SEQ ID NO: 2833743 - RNA, 16 nt, Human
gcaaaccauuuuuaaa

SEQ ID NO: 2833744 - RNA, 18 nt, Human
gcaaacuuaauguucuua

SEQ ID NO: 2833745 - RNA, 17 nt, Human
gcaaacgcugccugccg

SEQ ID NO: 2833746 - RNA, 22 nt, Human
gaugcggccauucaaggggagc

SEQ ID NO: 2833747 - RNA, 16 nt, Human
gaugcgcagccccauc

SEQ ID NO: 2833748 - RNA, 19 nt, Human
gaugcgcagccccaucugu

SEQ ID NO: 2833749 - RNA, 13 nt, Human
gaugcggccaaga

SEQ ID NO: 2833750 - RNA, 20 nt, Human
gaugccugugaacugaacuc

SEQ ID NO: 2833751 - RNA, 18 nt, Human
gaugccuuuuuuguaguu

SEQ ID NO: 2833752 - RNA, 22 nt, Human
gaugccuuuuuuguaguuuuuu

SEQ ID NO: 2833753 - RNA, 22 nt, Human
gaugcgagcgcuaucuucacau

SEQ ID NO: 2833754 - RNA, 20 nt, Human
gauguucuaaggcucugaga

SEQ ID NO: 2833755 - RNA, 14 nt, Human
gauguucuaaggcu

SEQ ID NO: 2833756 - RNA, 16 nt, Human
gauguucuaaggcucu

SEQ ID NO: 2833757 - RNA, 18 nt, Human
gauguucuaaggcucuga

SEQ ID NO: 2833758 - RNA, 19 nt, Human
gauguucuaaggcucugag

SEQ ID NO: 2833759 - RNA, 18 nt, Human
gaugcguuguuacaggaa

SEQ ID NO: 2833760 - RNA, 20 nt, Human
gaugcguuguuacaggaagu

SEQ ID NO: 2833761 - RNA, 13 nt, Human
gauguucuaaggc

SEQ ID NO: 2833762 - RNA, 14 nt, Human
gauuaauggcacug

SEQ ID NO: 2833763 - RNA, 16 nt, Human
gauuaauggcacugau

SEQ ID NO: 2833764 - RNA, 18 nt, Human
gauguuuguggccucaga

SEQ ID NO: 2833765 - RNA, 17 nt, Human
gauuaaggugaugugau

SEQ ID NO: 2833766 - RNA, 18 nt, Human
gauuaagauuuuacaaaa

SEQ ID NO: 2833767 - RNA, 12 nt, Human
gauguuuccaga

SEQ ID NO: 2833768 - RNA, 21 nt, Human
gauguuuauucuucuagaguu

SEQ ID NO: 2833769 - RNA, 23 nt, Human
gauguuuauucuucuagaguuca

SEQ ID NO: 2833770 - RNA, 13 nt, Human
gauguuuccagac

SEQ ID NO: 2833771 - RNA, 19 nt, Human
gauguuuccagacuuccuu

SEQ ID NO: 2833772 - RNA, 19 nt, Human
gauguuuauucuucuagag

SEQ ID NO: 2833773 - RNA, 18 nt, Human
gauguuuauucuucuaga

SEQ ID NO: 2833774 - RNA, 17 nt, Human
gauguuuguggccucag

SEQ ID NO: 2833775 - RNA, 16 nt, Human
gauguuuguggccuca

SEQ ID NO: 2833776 - RNA, 15 nt, Human
gauguuuguggccuc

SEQ ID NO: 2833777 - RNA, 14 nt, Human
gauguuuguggccu

SEQ ID NO: 2833778 - RNA, 13 nt, Human
gauguuuguggcc

SEQ ID NO: 2833779 - RNA, 22 nt, Human
gauguuugcucuuguuuuuauu

SEQ ID NO: 2833780 - RNA, 20 nt, Human
gauuaauuugcaucugaaau

SEQ ID NO: 2833781 - RNA, 14 nt, Human
gauuaauugcugca

SEQ ID NO: 2833782 - RNA, 21 nt, Human
gauuacaagcgugagccacug

SEQ ID NO: 2833783 - RNA, 13 nt, Human
gauuacaagcgug

SEQ ID NO: 2833784 - RNA, 15 nt, Human
gauucccaagcucug

SEQ ID NO: 2833785 - RNA, 23 nt, Human
gauuccaaagaguagaauugcau

SEQ ID NO: 2833786 - RNA, 19 nt, Human
gauuccaaagaguagaauu

SEQ ID NO: 2833787 - RNA, 18 nt, Human
gauuccaaagaguagaau

SEQ ID NO: 2833788 - RNA, 19 nt, Human
gauucauuuuuaaucauga

SEQ ID NO: 2833789 - RNA, 17 nt, Human
gauucaugauuuauaaa

SEQ ID NO: 2833790 - RNA, 10 nt, Human
gauucauuuu

SEQ ID NO: 2833791 - RNA, 12 nt, Human
gauucaugauuu

SEQ ID NO: 2833792 - RNA, 21 nt, Human
gauucaugccaauuagcaauu

SEQ ID NO: 2833793 - RNA, 11 nt, Human
gauucaugugg

SEQ ID NO: 2833794 - RNA, 18 nt, Human
gauucauguuauauuuaa

SEQ ID NO: 2833795 - RNA, 15 nt, Human
gauucauucucauaa

SEQ ID NO: 2833796 - RNA, 20 nt, Human
gauucauucucauaauuccu

SEQ ID NO: 2833797 - RNA, 17 nt, Human
gauucauuuauaagaag

SEQ ID NO: 2833798 - RNA, 11 nt, Human
gauucagucuu

SEQ ID NO: 2833799 - RNA, 13 nt, Human
gauucagucuugc

SEQ ID NO: 2833800 - RNA, 14 nt, Human
gauucagucuugcc

SEQ ID NO: 2833801 - RNA, 15 nt, Human
gauucagucuugccu

SEQ ID NO: 2833802 - RNA, 17 nt, Human
gauucagucuugccuua

SEQ ID NO: 2833803 - RNA, 18 nt, Human
gauucagucuugccuuac

SEQ ID NO: 2833804 - RNA, 23 nt, Human
gauucagucuugccuuacacaaa

SEQ ID NO: 2833805 - RNA, 17 nt, Human
gauucagguauguugcc

SEQ ID NO: 2833806 - RNA, 18 nt, Human
gauucaggugcagaggaa

SEQ ID NO: 2833807 - RNA, 20 nt, Human
gauucaggugcagaggaagu

SEQ ID NO: 2833808 - RNA, 16 nt, Human
gauucauaguaacuuc

SEQ ID NO: 2833809 - RNA, 22 nt, Human
gauucaucuacccugcugaccu

SEQ ID NO: 2833810 - RNA, 22 nt, Human
gauucaguuuucauuugguuca

SEQ ID NO: 2833811 - RNA, 15 nt, Human
gauucaguuuucauu

SEQ ID NO: 2833812 - RNA, 13 nt, Human
gauucaggaaugu

SEQ ID NO: 2833813 - RNA, 16 nt, Human
gauucaggcugcuugg

SEQ ID NO: 2833814 - RNA, 13 nt, Human
gauucaggcugcu

SEQ ID NO: 2833815 - RNA, 12 nt, Human
gauucaggcugc

SEQ ID NO: 2833816 - RNA, 16 nt, Human
gauuucaugcuaucuc

SEQ ID NO: 2833817 - RNA, 20 nt, Human
gauuucaugcuaucucugug

SEQ ID NO: 2833818 - RNA, 18 nt, Human
gauuucaugcuaucucug

SEQ ID NO: 2833819 - RNA, 19 nt, Human
gauuuguuaaugauagcua

SEQ ID NO: 2833820 - RNA, 13 nt, Human
gauuugaacucag

SEQ ID NO: 2833821 - RNA, 23 nt, Human
gauuucuuuuguaauaaacuauu

SEQ ID NO: 2833822 - RNA, 16 nt, Human
gauuugaacucagauc

SEQ ID NO: 2833823 - RNA, 22 nt, Human
gauuugaacucagaucugucug

SEQ ID NO: 2833824 - RNA, 13 nt, Human
gauuugaacacuu

SEQ ID NO: 2833825 - RNA, 20 nt, Human
gauuugaacacuuggugcug

SEQ ID NO: 2833826 - RNA, 22 nt, Human
gauuucuuuuguaauaaacuau

SEQ ID NO: 2833827 - RNA, 17 nt, Human
gauuucuuugcuguaag

SEQ ID NO: 2833828 - RNA, 19 nt, Human
gauuucuuugcuguaagau

SEQ ID NO: 2833829 - RNA, 18 nt, Human
gauuucuuuucuuccugg

SEQ ID NO: 2833830 - RNA, 19 nt, Human
gauuucuuuucuuccuggc

SEQ ID NO: 2833831 - RNA, 15 nt, Human
gauuuccagccaggg

SEQ ID NO: 2833832 - RNA, 13 nt, Human
gauuucuuaaaua

SEQ ID NO: 2833833 - RNA, 11 nt, Human
gauuucuuagg

SEQ ID NO: 2833834 - RNA, 12 nt, Human
gauuucuuaggg

SEQ ID NO: 2833835 - RNA, 15 nt, Human
gauuuccaaguaaua

SEQ ID NO: 2833836 - RNA, 18 nt, Human
gauuuccaaguaauauaa

SEQ ID NO: 2833837 - RNA, 20 nt, Human
gauuuccaaguaauauaaug

SEQ ID NO: 2833838 - RNA, 16 nt, Human
gauuguuaaaauaacu

SEQ ID NO: 2833839 - RNA, 15 nt, Human
gauuguuaauuucag

SEQ ID NO: 2833840 - RNA, 13 nt, Human
gauugggacagag

SEQ ID NO: 2833841 - RNA, 16 nt, Human
gauuggcuuguagaau

SEQ ID NO: 2833842 - RNA, 20 nt, Human
gauuggcuuguagaauuguu

SEQ ID NO: 2833843 - RNA, 15 nt, Human
gauuuaaaacaugua

SEQ ID NO: 2833844 - RNA, 12 nt, Human
gauuguuuuauc

SEQ ID NO: 2833845 - RNA, 18 nt, Human
gauuguuuuaucaugaca

SEQ ID NO: 2833846 - RNA, 22 nt, Human
gauuguuuuuuaaaaauggaua

SEQ ID NO: 2833847 - RNA, 16 nt, Human
gauuuaaaaacuggaa

SEQ ID NO: 2833848 - RNA, 17 nt, Human
gauuguuugcucugaga

SEQ ID NO: 2833849 - RNA, 13 nt, Human
gauuguuguuugc

SEQ ID NO: 2833850 - RNA, 18 nt, Human
gauuguuuccucuuccaa

SEQ ID NO: 2833851 - RNA, 11 nt, Human
gauuguuucua

SEQ ID NO: 2833852 - RNA, 15 nt, Human
gauuguuucuauaca

SEQ ID NO: 2833853 - RNA, 18 nt, Human
gauuguuucuauacaaau

SEQ ID NO: 2833854 - RNA, 15 nt, Human
gauuuaaacacacag

SEQ ID NO: 2833855 - RNA, 16 nt, Human
gauuuaaacacacaga

SEQ ID NO: 2833856 - RNA, 17 nt, Human
gauuuaaacacacagau

SEQ ID NO: 2833857 - RNA, 18 nt, Human
gauugcaacaggcugggc

SEQ ID NO: 2833858 - RNA, 17 nt, Human
gauugcaacaggcuggg

SEQ ID NO: 2833859 - RNA, 15 nt, Human
gauugcaacaggcug

SEQ ID NO: 2833860 - RNA, 15 nt, Human
gauugcuaugaauga

SEQ ID NO: 2833861 - RNA, 13 nt, Human
gauugcuaauugc

SEQ ID NO: 2833862 - RNA, 17 nt, Human
gauugcuaauugcuguu

SEQ ID NO: 2833863 - RNA, 21 nt, Human
gauugcuaauugcuguugaaa

SEQ ID NO: 2833864 - RNA, 13 nt, Human
gauugcugccacu

SEQ ID NO: 2833865 - RNA, 16 nt, Human
gauugcugccacuuuu

SEQ ID NO: 2833866 - RNA, 19 nt, Human
gauugcuugagcccaggag

SEQ ID NO: 2833867 - RNA, 16 nt, Human
gauugcuugagcccag

SEQ ID NO: 2833868 - RNA, 18 nt, Human
gauugcuuaaaauagcaa

SEQ ID NO: 2833869 - RNA, 17 nt, Human
gauugcuuaaaauagca

SEQ ID NO: 2833870 - RNA, 14 nt, Human
gauugcuuaaaaua

SEQ ID NO: 2833871 - RNA, 22 nt, Human
gauugcugccacuuuuuaacua

SEQ ID NO: 2833872 - RNA, 13 nt, Human
gauuggcauggcu

SEQ ID NO: 2833873 - RNA, 17 nt, Human
gauucccaagcucugcu

SEQ ID NO: 2833874 - RNA, 16 nt, Human
gauucccaagcucugc

SEQ ID NO: 2833875 - RNA, 16 nt, Human
gauugcaacaggcugg

SEQ ID NO: 2833876 - RNA, 20 nt, Human
gauucuuuuuaaaguguuuc

SEQ ID NO: 2833877 - RNA, 14 nt, Human
gauucuuuuucuga

SEQ ID NO: 2833878 - RNA, 14 nt, Human
gauugaaaacuuuu

SEQ ID NO: 2833879 - RNA, 15 nt, Human
gauugaaaacuuuuc

SEQ ID NO: 2833880 - RNA, 16 nt, Human
gcagaagacaaaaaga

SEQ ID NO: 2833881 - RNA, 14 nt, Human
gcagaagacaccag

SEQ ID NO: 2833882 - RNA, 15 nt, Human
gcagaagacaccaga

SEQ ID NO: 2833883 - RNA, 22 nt, Human
gcagaagaaugggaauauuuua

SEQ ID NO: 2833884 - RNA, 13 nt, Human
gcagaagaaagga

SEQ ID NO: 2833885 - RNA, 14 nt, Human
gcagaagaaaggaa

SEQ ID NO: 2833886 - RNA, 15 nt, Human
gcagaagaaaggaac

SEQ ID NO: 2833887 - RNA, 16 nt, Human
gcagaagaaaggaaca

SEQ ID NO: 2833888 - RNA, 23 nt, Human
gcagaacugccauuauuuucugu

SEQ ID NO: 2833889 - RNA, 12 nt, Human
gcagaagagggu

SEQ ID NO: 2833890 - RNA, 14 nt, Human
gcagaagagggugu

SEQ ID NO: 2833891 - RNA, 16 nt, Human
gcagaagagggugugu

SEQ ID NO: 2833892 - RNA, 21 nt, Human
gcagaagcaagggggugaugu

SEQ ID NO: 2833893 - RNA, 16 nt, Human
gcagaagacaccagag

SEQ ID NO: 2833894 - RNA, 18 nt, Human
gcagaagacaccagagca

SEQ ID NO: 2833895 - RNA, 20 nt, Human
gcagaagacaccagagcaga

SEQ ID NO: 2833896 - RNA, 21 nt, Human
gcagaagacaccagagcagau

SEQ ID NO: 2833897 - RNA, 16 nt, Human
gcacuguaugcuggac

SEQ ID NO: 2833898 - RNA, 15 nt, Human
gcacuguaugcugga

SEQ ID NO: 2833899 - RNA, 19 nt, Human
gcacuguaguucuaagacu

SEQ ID NO: 2833900 - RNA, 15 nt, Human
gcacuggggagcccg

SEQ ID NO: 2833901 - RNA, 18 nt, Human
gcacuggggagcccgucu

SEQ ID NO: 2833902 - RNA, 19 nt, Human
gcacuggggagcccgucuc

SEQ ID NO: 2833903 - RNA, 22 nt, Human
gcacuggggagcccgucucagu

SEQ ID NO: 2833904 - RNA, 16 nt, Human
gcacuguaguucuaag

SEQ ID NO: 2833905 - RNA, 17 nt, Human
gcacuguaguucuaaga

SEQ ID NO: 2833906 - RNA, 18 nt, Human
gcacuguaguucuaagac

SEQ ID NO: 2833907 - RNA, 14 nt, Human
gcacugauauuuua

SEQ ID NO: 2833908 - RNA, 18 nt, Human
gcacuaaggugugcucug

SEQ ID NO: 2833909 - RNA, 20 nt, Human
gcacuaacguugagccccug

SEQ ID NO: 2833910 - RNA, 20 nt, Human
gcacuaccacuccugccaag

SEQ ID NO: 2833911 - RNA, 21 nt, Human
gcacuaccacuccugccaagg

SEQ ID NO: 2833912 - RNA, 16 nt, Human
gcacuaccgauucuuu

SEQ ID NO: 2833913 - RNA, 12 nt, Human
gcacuacugggu

SEQ ID NO: 2833914 - RNA, 14 nt, Human
gcacuacugggugu

SEQ ID NO: 2833915 - RNA, 16 nt, Human
gcacuacuggguguca

SEQ ID NO: 2833916 - RNA, 17 nt, Human
gcacuacugggugucau

SEQ ID NO: 2833917 - RNA, 18 nt, Human
gcacuacugggugucauu

SEQ ID NO: 2833918 - RNA, 19 nt, Human
gcacuacugggugucauuu

SEQ ID NO: 2833919 - RNA, 21 nt, Human
gcacuacugggugucauuuca

SEQ ID NO: 2833920 - RNA, 17 nt, Human
gcacugaggaccagcca

SEQ ID NO: 2833921 - RNA, 13 nt, Human
gcacuagccuuug

SEQ ID NO: 2833922 - RNA, 16 nt, Human
gcacuagagaaugcac

SEQ ID NO: 2833923 - RNA, 18 nt, Human
gcacuagagaaugcacag

SEQ ID NO: 2833924 - RNA, 20 nt, Human
gcacuagagaaugcacagau

SEQ ID NO: 2833925 - RNA, 15 nt, Human
gcacuagccuuuggc

SEQ ID NO: 2833926 - RNA, 16 nt, Human
gcacuagccuuuggcu

SEQ ID NO: 2833927 - RNA, 18 nt, Human
gcacuagccuuuggcucu

SEQ ID NO: 2833928 - RNA, 20 nt, Human
gcacuagccuuuggcucugg

SEQ ID NO: 2833929 - RNA, 22 nt, Human
gcacuagccuuuggcucuggag

SEQ ID NO: 2833930 - RNA, 17 nt, Human
gcacuaggcacccagcu

SEQ ID NO: 2833931 - RNA, 21 nt, Human
gcacuaggcacccagcugcca

SEQ ID NO: 2833932 - RNA, 21 nt, Human
gcacuagccuuuggcucugga

SEQ ID NO: 2833933 - RNA, 19 nt, Human
gcacuagguucaauucccu

SEQ ID NO: 2833934 - RNA, 17 nt, Human
gcacuaaggugugcucu

SEQ ID NO: 2833935 - RNA, 19 nt, Human
gcacuaacguugagccccu

SEQ ID NO: 2833936 - RNA, 17 nt, Human
gcacuaaaucagagaca

SEQ ID NO: 2833937 - RNA, 22 nt, Human
gcaccugcccccugguggacag

SEQ ID NO: 2833938 - RNA, 19 nt, Human
gcaccugcaaucccagcua

SEQ ID NO: 2833939 - RNA, 14 nt, Human
gcaccugccagccu

SEQ ID NO: 2833940 - RNA, 13 nt, Human
gcaccugccagcc

SEQ ID NO: 2833941 - RNA, 18 nt, Human
gcaccugcccccuggugg

SEQ ID NO: 2833942 - RNA, 17 nt, Human
gcaccugcccccuggug

SEQ ID NO: 2833943 - RNA, 16 nt, Human
gcaccugcccccuggu

SEQ ID NO: 2833944 - RNA, 15 nt, Human
gcaccugcccccugg

SEQ ID NO: 2833945 - RNA, 22 nt, Human
gcaccugccagccuggcuucug

SEQ ID NO: 2833946 - RNA, 17 nt, Human
gcaccugccagccuggc

SEQ ID NO: 2833947 - RNA, 16 nt, Human
gcaccugccagccugg

SEQ ID NO: 2833948 - RNA, 15 nt, Human
gcaccugccagccug

SEQ ID NO: 2833949 - RNA, 19 nt, Human
gcaaugacagguaaauuaa

SEQ ID NO: 2833950 - RNA, 16 nt, Human
gcaaugacaucucagg

SEQ ID NO: 2833951 - RNA, 19 nt, Human
gcaaugacaucucaggggc

SEQ ID NO: 2833952 - RNA, 21 nt, Human
gcaaugacaucucaggggcca

SEQ ID NO: 2833953 - RNA, 21 nt, Human
gcacagcggggccccagggcu

SEQ ID NO: 2833954 - RNA, 15 nt, Human
gcacagcucaggagg

SEQ ID NO: 2833955 - RNA, 19 nt, Human
gcacagcugaaaguucuug

SEQ ID NO: 2833956 - RNA, 20 nt, Human
gcacagcucaggaggcgccc

SEQ ID NO: 2833957 - RNA, 14 nt, Human
gcacagcucccugc

SEQ ID NO: 2833958 - RNA, 16 nt, Human
gcacagcucccugcca

SEQ ID NO: 2833959 - RNA, 17 nt, Human
gcacagcucccugccaa

SEQ ID NO: 2833960 - RNA, 23 nt, Human
gcacagcucccugccaaacugaa

SEQ ID NO: 2833961 - RNA, 12 nt, Human
gcacagcucagg

SEQ ID NO: 2833962 - RNA, 13 nt, Human
gcacaugcuggcc

SEQ ID NO: 2833963 - RNA, 14 nt, Human
gcacaugcuggcca

SEQ ID NO: 2833964 - RNA, 15 nt, Human
gcacaugcuggccag

SEQ ID NO: 2833965 - RNA, 16 nt, Human
gcacaugcuggccagc

SEQ ID NO: 2833966 - RNA, 18 nt, Human
gcacaugcuggccagccu

SEQ ID NO: 2833967 - RNA, 19 nt, Human
gcacaugcuggccagccug

SEQ ID NO: 2833968 - RNA, 21 nt, Human
gcacaugcuggccagccuggg

SEQ ID NO: 2833969 - RNA, 22 nt, Human
gcacaugcuggccagccugggg

SEQ ID NO: 2833970 - RNA, 23 nt, Human
gcacaugcuggccagccuggggc

SEQ ID NO: 2833971 - RNA, 13 nt, Human
gcacaugcuucaa

SEQ ID NO: 2833972 - RNA, 15 nt, Human
gcacaggaugcuggc

SEQ ID NO: 2833973 - RNA, 16 nt, Human
gcacaggaugcuggcc

SEQ ID NO: 2833974 - RNA, 17 nt, Human
gcacaggaugcuggccu

SEQ ID NO: 2833975 - RNA, 14 nt, Human
gcacaggcccccuu

SEQ ID NO: 2833976 - RNA, 16 nt, Human
gcacagcuucauuucc

SEQ ID NO: 2833977 - RNA, 16 nt, Human
gcacagcuguaguggg

SEQ ID NO: 2833978 - RNA, 23 nt, Human
gcacagcuguagugggguucuag

SEQ ID NO: 2833979 - RNA, 16 nt, Human
gcacaggacugauucu

SEQ ID NO: 2833980 - RNA, 21 nt, Human
gcacaggacugauucugggau

SEQ ID NO: 2833981 - RNA, 23 nt, Human
gcaccacccuagucccuuccccu

SEQ ID NO: 2833982 - RNA, 17 nt, Human
gcacccacccugggacc

SEQ ID NO: 2833983 - RNA, 13 nt, Human
gcacccacccugg

SEQ ID NO: 2833984 - RNA, 14 nt, Human
gcacccacccuggg

SEQ ID NO: 2833985 - RNA, 21 nt, Human
gcacaugucuuguacaugugu

SEQ ID NO: 2833986 - RNA, 13 nt, Human
gcacaugucuugu

SEQ ID NO: 2833987 - RNA, 20 nt, Human
gcacaugucuuguacaugug

SEQ ID NO: 2833988 - RNA, 22 nt, Human
gcaccacccuagucccuucccc

SEQ ID NO: 2833989 - RNA, 20 nt, Human
gcaccacccuagucccuucc

SEQ ID NO: 2833990 - RNA, 11 nt, Human
gcaccacccua

SEQ ID NO: 2833991 - RNA, 15 nt, Human
gcaccuccugccucg

SEQ ID NO: 2833992 - RNA, 14 nt, Human
gcaccuccugccuc

SEQ ID NO: 2833993 - RNA, 17 nt, Human
gcacccggccccugcug

SEQ ID NO: 2833994 - RNA, 15 nt, Human
gcacccggccccugc

SEQ ID NO: 2833995 - RNA, 14 nt, Human
gcacccggccccug

SEQ ID NO: 2833996 - RNA, 14 nt, Human
gcacccagcccaga

SEQ ID NO: 2833997 - RNA, 20 nt, Human
gcacccaggaggggaacacu

SEQ ID NO: 2833998 - RNA, 22 nt, Human
gcagauggaaugcuguguuaaa

SEQ ID NO: 2833999 - RNA, 18 nt, Human
gcagauggaaugcugugu

SEQ ID NO: 2834000 - RNA, 23 nt, Human
gcagaugcuagcgcguugccugu

SEQ ID NO: 2834001 - RNA, 18 nt, Human
gcagaugccacccuagcc

SEQ ID NO: 2834002 - RNA, 17 nt, Human
gcagaugccacccuagc

SEQ ID NO: 2834003 - RNA, 16 nt, Human
gcagaugccacccuag

SEQ ID NO: 2834004 - RNA, 14 nt, Human
gcagaugccacccu

SEQ ID NO: 2834005 - RNA, 18 nt, Human
gcagaugcagagagccau

SEQ ID NO: 2834006 - RNA, 19 nt, Human
gcagaugcaaugacucagg

SEQ ID NO: 2834007 - RNA, 15 nt, Human
gcagaugcagagagc

SEQ ID NO: 2834008 - RNA, 17 nt, Human
gcagaugcagagagcca

SEQ ID NO: 2834009 - RNA, 13 nt, Human
gcagaugcaauga

SEQ ID NO: 2834010 - RNA, 16 nt, Human
gcagcaaggcccugcu

SEQ ID NO: 2834011 - RNA, 17 nt, Human
gcagcaaggcccugcug

SEQ ID NO: 2834012 - RNA, 19 nt, Human
gcagcaaggcccugcugcc

SEQ ID NO: 2834013 - RNA, 14 nt, Human
gcagcaagaaaaaa

SEQ ID NO: 2834014 - RNA, 15 nt, Human
gcagcaagaaaaaaa

SEQ ID NO: 2834015 - RNA, 19 nt, Human
gcagcaagaaaaaaaaaug

SEQ ID NO: 2834016 - RNA, 20 nt, Human
gcagcaagaaaaaaaaaugc

SEQ ID NO: 2834017 - RNA, 23 nt, Human
gcagauuuuuauauuaguugcuu

SEQ ID NO: 2834018 - RNA, 14 nt, Human
gcagcaaaaauaua

SEQ ID NO: 2834019 - RNA, 15 nt, Human
gcagcaaaaauauaa

SEQ ID NO: 2834020 - RNA, 16 nt, Human
gcagcaaaaauauaaa

SEQ ID NO: 2834021 - RNA, 18 nt, Human
gcagcaaaaauauaaaau

SEQ ID NO: 2834022 - RNA, 19 nt, Human
gcagcaaaaauauaaaaua

SEQ ID NO: 2834023 - RNA, 15 nt, Human
gcagcacggacaaua

SEQ ID NO: 2834024 - RNA, 18 nt, Human
gcagcacggacaauaaac

SEQ ID NO: 2834025 - RNA, 19 nt, Human
gcagcacggacaauaaacc

SEQ ID NO: 2834026 - RNA, 18 nt, Human
gcagagucacaagccucg

SEQ ID NO: 2834027 - RNA, 15 nt, Human
gcagagugcacagcu

SEQ ID NO: 2834028 - RNA, 16 nt, Human
gcagagugcacagcug

SEQ ID NO: 2834029 - RNA, 17 nt, Human
gcagagugcacagcugu

SEQ ID NO: 2834030 - RNA, 18 nt, Human
gcagagugcacagcuguc

SEQ ID NO: 2834031 - RNA, 23 nt, Human
gcagagucacacgggggcagcug

SEQ ID NO: 2834032 - RNA, 13 nt, Human
gcagagucacacg

SEQ ID NO: 2834033 - RNA, 14 nt, Human
gcagagucacacgg

SEQ ID NO: 2834034 - RNA, 23 nt, Human
gcagagaaugaaagggcccagag

SEQ ID NO: 2834035 - RNA, 22 nt, Human
gcagagaaugaaagggcccaga

SEQ ID NO: 2834036 - RNA, 12 nt, Human
gcagagaauaua

SEQ ID NO: 2834037 - RNA, 23 nt, Human
gcagagaauauaacaugaaauga

SEQ ID NO: 2834038 - RNA, 20 nt, Human
gcagagaaucauacuuagca

SEQ ID NO: 2834039 - RNA, 12 nt, Human
gcagaaggaaac

SEQ ID NO: 2834040 - RNA, 21 nt, Human
gcagagaaugaaagggcccag

SEQ ID NO: 2834041 - RNA, 20 nt, Human
gcagagaaugaaagggccca

SEQ ID NO: 2834042 - RNA, 19 nt, Human
gcagagaaugaaagggccc

SEQ ID NO: 2834043 - RNA, 15 nt, Human
gcagaagcccugaug

SEQ ID NO: 2834044 - RNA, 22 nt, Human
gcagccugcuucccaccucccu

SEQ ID NO: 2834045 - RNA, 23 nt, Human
gcagccugcuucccaccucccug

SEQ ID NO: 2834046 - RNA, 17 nt, Human
gcaccuccuugucacuu

SEQ ID NO: 2834047 - RNA, 20 nt, Human
gcagccuggagacccacccc

SEQ ID NO: 2834048 - RNA, 14 nt, Human
gcagcgaccgcccc

SEQ ID NO: 2834049 - RNA, 22 nt, Human
gcagccucaaccuccugggcua

SEQ ID NO: 2834050 - RNA, 21 nt, Human
gcagccucaaccuccugggcu

SEQ ID NO: 2834051 - RNA, 13 nt, Human
gcagccugagucc

SEQ ID NO: 2834052 - RNA, 18 nt, Human
gcagccgugccuucagcu

SEQ ID NO: 2834053 - RNA, 20 nt, Human
gcagccucaaccuccugggc

SEQ ID NO: 2834054 - RNA, 19 nt, Human
gcagccucaaccuccuggg

SEQ ID NO: 2834055 - RNA, 14 nt, Human
gcagccgugccuuc

SEQ ID NO: 2834056 - RNA, 15 nt, Human
gcagccgugccuuca

SEQ ID NO: 2834057 - RNA, 17 nt, Human
gcagccgugccuucagc

SEQ ID NO: 2834058 - RNA, 13 nt, Human
gcagcagaaaacu

SEQ ID NO: 2834059 - RNA, 14 nt, Human
gcagcagaaaacuu

SEQ ID NO: 2834060 - RNA, 21 nt, Human
gcagcaggugauuggaccagg

SEQ ID NO: 2834061 - RNA, 21 nt, Human
gcaggagauugagaaggagag

SEQ ID NO: 2834062 - RNA, 22 nt, Human
gcaggagauugagaaggagaga

SEQ ID NO: 2834063 - RNA, 14 nt, Human
gcaggagccugagc

SEQ ID NO: 2834064 - RNA, 23 nt, Human
gcaggagauugagaaggagagaa

SEQ ID NO: 2834065 - RNA, 22 nt, Human
gcaggagggcccuaccugauug

SEQ ID NO: 2834066 - RNA, 18 nt, Human
gcaggagggcccuaccug

SEQ ID NO: 2834067 - RNA, 15 nt, Human
gcaggaguggugcag

SEQ ID NO: 2834068 - RNA, 18 nt, Human
gcaggaguggugcagaca

SEQ ID NO: 2834069 - RNA, 19 nt, Human
gcaggaguggugcagacag

SEQ ID NO: 2834070 - RNA, 24 nt, Human
gcagcgaguuguggaaagccucug

SEQ ID NO: 2834071 - RNA, 22 nt, Human
gcagcgagcuaugaucgcgcca

SEQ ID NO: 2834072 - RNA, 13 nt, Human
gcagcgagggcgg

SEQ ID NO: 2834073 - RNA, 14 nt, Human
gcagcgagggcgga

SEQ ID NO: 2834074 - RNA, 21 nt, Human
gcagcgagggcggagccggcc

SEQ ID NO: 2834075 - RNA, 16 nt, Human
gcagcgaccgcccccu

SEQ ID NO: 2834076 - RNA, 17 nt, Human
gcagcgaccgcccccuc

SEQ ID NO: 2834077 - RNA, 18 nt, Human
gcagcgaccgcccccucc

SEQ ID NO: 2834078 - RNA, 22 nt, Human
gcagcgaccgcccccuccucua

SEQ ID NO: 2834079 - RNA, 16 nt, Human
gcaggaccucccuucc

SEQ ID NO: 2834080 - RNA, 18 nt, Human
gcaggaccucccuuccga

SEQ ID NO: 2834081 - RNA, 21 nt, Human
gcaggaccucccuuccgaccc

SEQ ID NO: 2834082 - RNA, 22 nt, Human
gcaggaccucccuuccgacccu

SEQ ID NO: 2834083 - RNA, 12 nt, Human
gcaggaccucug

SEQ ID NO: 2834084 - RNA, 14 nt, Human
gcaggagauugaga

SEQ ID NO: 2834085 - RNA, 20 nt, Human
gcaggaccugccuguagccc

SEQ ID NO: 2834086 - RNA, 18 nt, Human
gcaggagauugagaagga

SEQ ID NO: 2834087 - RNA, 19 nt, Human
gcaggagauugagaaggag

SEQ ID NO: 2834088 - RNA, 16 nt, Human
gcaggaccugccugua

SEQ ID NO: 2834089 - RNA, 15 nt, Human
gcaggaccugccugu

SEQ ID NO: 2834090 - RNA, 14 nt, Human
gcaggaccugccug

SEQ ID NO: 2834091 - RNA, 20 nt, Human
gcaggaccucugaaacccug

SEQ ID NO: 2834092 - RNA, 20 nt, Human
gcaggcuacacugacacugg

SEQ ID NO: 2834093 - RNA, 20 nt, Human
gcaggcuaaggcguggagcu

SEQ ID NO: 2834094 - RNA, 21 nt, Human
gcaggcuaaggcguggagcug

SEQ ID NO: 2834095 - RNA, 22 nt, Human
gcaggcuaaggcguggagcugc

SEQ ID NO: 2834096 - RNA, 16 nt, Human
gcaggcuacacugaca

SEQ ID NO: 2834097 - RNA, 17 nt, Human
gcagggagggccugggc

SEQ ID NO: 2834098 - RNA, 14 nt, Human
gcagggagggccug

SEQ ID NO: 2834099 - RNA, 20 nt, Human
gcaggaucucagaucacugc

SEQ ID NO: 2834100 - RNA, 16 nt, Human
gcaggauggccuggcc

SEQ ID NO: 2834101 - RNA, 24 nt, Human
gcaggauggccuggccagggccug

SEQ ID NO: 2834102 - RNA, 18 nt, Human
gcaggauucagccggagg

SEQ ID NO: 2834103 - RNA, 16 nt, Human
gcaggauuuguucucu

SEQ ID NO: 2834104 - RNA, 17 nt, Human
gcaggauuuguucucug

SEQ ID NO: 2834105 - RNA, 19 nt, Human
gcaggauuuguucucuguc

SEQ ID NO: 2834106 - RNA, 22 nt, Human
gcaggauuuguucucuguccag

SEQ ID NO: 2834107 - RNA, 16 nt, Human
gcaggcgguggggaga

SEQ ID NO: 2834108 - RNA, 19 nt, Human
gcaggcguucagcucacug

SEQ ID NO: 2834109 - RNA, 17 nt, Human
gcaggcuaaggcgugga

SEQ ID NO: 2834110 - RNA, 12 nt, Human
gcagggcucagc

SEQ ID NO: 2834111 - RNA, 12 nt, Human
gcaggggcucug

SEQ ID NO: 2834112 - RNA, 13 nt, Human
gcaggggcucugg

SEQ ID NO: 2834113 - RNA, 14 nt, Human
gcaggggcucugga

SEQ ID NO: 2834114 - RNA, 16 nt, Human
gcaggggcucuggaga

SEQ ID NO: 2834115 - RNA, 17 nt, Human
gcaggggcucuggagag

SEQ ID NO: 2834116 - RNA, 18 nt, Human
gcaggggcucuggagaga

SEQ ID NO: 2834117 - RNA, 21 nt, Human
gcaggggcucuggagagaaac

SEQ ID NO: 2834118 - RNA, 19 nt, Human
gcaggggcucuggagagaa

SEQ ID NO: 2834119 - RNA, 20 nt, Human
gcaggggcucuggagagaaa

SEQ ID NO: 2834120 - RNA, 22 nt, Human
gcaggggcucuggagagaaaca

SEQ ID NO: 2834121 - RNA, 15 nt, Human
gcaggggcugcagua

SEQ ID NO: 2834122 - RNA, 22 nt, Human
gcagggagggccugggccccag

SEQ ID NO: 2834123 - RNA, 18 nt, Human
gcagggagggccugggcc

SEQ ID NO: 2834124 - RNA, 16 nt, Human
gcagggccucacacgg

SEQ ID NO: 2834125 - RNA, 16 nt, Human
gcagugggagcugccu

SEQ ID NO: 2834126 - RNA, 22 nt, Human
gcagugcgcgugcacguggaga

SEQ ID NO: 2834127 - RNA, 19 nt, Human
gcagugcuagugagcuggg

SEQ ID NO: 2834128 - RNA, 22 nt, Human
gcagugcuagugagcugggcau

SEQ ID NO: 2834129 - RNA, 20 nt, Human
gcaggggugacggcccucau

SEQ ID NO: 2834130 - RNA, 16 nt, Human
gcagggggacugcuug

SEQ ID NO: 2834131 - RNA, 21 nt, Human
gcaggggguggacaaacugga

SEQ ID NO: 2834132 - RNA, 22 nt, Human
gcaggugauuggaccaggccau

SEQ ID NO: 2834133 - RNA, 21 nt, Human
gcaggugauuggaccaggcca

SEQ ID NO: 2834134 - RNA, 18 nt, Human
gcaggugauuggaccagg

SEQ ID NO: 2834135 - RNA, 16 nt, Human
gcaggugcuauuguua

SEQ ID NO: 2834136 - RNA, 16 nt, Human
gcaguucuaguuugca

SEQ ID NO: 2834137 - RNA, 16 nt, Human
gcauagcaagacacau

SEQ ID NO: 2834138 - RNA, 21 nt, Human
gcaguucuaguuugcauuccu

SEQ ID NO: 2834139 - RNA, 14 nt, Human
gcauagcaaacaga

SEQ ID NO: 2834140 - RNA, 18 nt, Human
gcauagcuacguggcacu

SEQ ID NO: 2834141 - RNA, 14 nt, Human
gcauauagagauga

SEQ ID NO: 2834142 - RNA, 17 nt, Human
gcauauaggugauguuu

SEQ ID NO: 2834143 - RNA, 19 nt, Human
gcauauaggugauguuugc

SEQ ID NO: 2834144 - RNA, 18 nt, Human
gcagugggagcugccugu

SEQ ID NO: 2834145 - RNA, 17 nt, Human
gcagugggagcugccug

SEQ ID NO: 2834146 - RNA, 21 nt, Human
gcaguguuccccaucuggguc

SEQ ID NO: 2834147 - RNA, 20 nt, Human
gcaguguuccccaucugggu

SEQ ID NO: 2834148 - RNA, 17 nt, Human
gcaguuaauuagcauuc

SEQ ID NO: 2834149 - RNA, 16 nt, Human
gcaguguucgcuuggc

SEQ ID NO: 2834150 - RNA, 17 nt, Human
gcaguguucgcuuggcu

SEQ ID NO: 2834151 - RNA, 22 nt, Human
gcaguguucgcuuggcuccaug

SEQ ID NO: 2834152 - RNA, 12 nt, Human
gcauauguugaa

SEQ ID NO: 2834153 - RNA, 17 nt, Human
gcauauguugaauacuu

SEQ ID NO: 2834154 - RNA, 14 nt, Human
gcauauguugaaua

SEQ ID NO: 2834155 - RNA, 21 nt, Human
gcauauguugaauacuuuuua

SEQ ID NO: 2834156 - RNA, 20 nt, Human
gcauauguugaauacuuuuu

SEQ ID NO: 2834157 - RNA, 19 nt, Human
gcauauguugaauacuuuu

SEQ ID NO: 2834158 - RNA, 18 nt, Human
gcauauguugaauacuuu

SEQ ID NO: 2834159 - RNA, 22 nt, Human
gcauauucuuuucugcaaaaua

SEQ ID NO: 2834160 - RNA, 17 nt, Human
gcauuggauacagcagu

SEQ ID NO: 2834161 - RNA, 18 nt, Human
gcauuggauacagcagua

SEQ ID NO: 2834162 - RNA, 20 nt, Human
gcauuggauacagcaguaga

SEQ ID NO: 2834163 - RNA, 20 nt, Human
gcauugcuuuuauuuugaaa

SEQ ID NO: 2834164 - RNA, 13 nt, Human
gcauuuuauagac

SEQ ID NO: 2834165 - RNA, 20 nt, Human
gcauuuggguaauuuagauu

SEQ ID NO: 2834166 - RNA, 22 nt, Human
gcauuccuucuuugauaauguu

SEQ ID NO: 2834167 - RNA, 23 nt, Human
gcauuccuucuuugauaauguua

SEQ ID NO: 2834168 - RNA, 16 nt, Human
gcauuccuuugucuuc

SEQ ID NO: 2834169 - RNA, 14 nt, Human
gcauucuauugccu

SEQ ID NO: 2834170 - RNA, 15 nt, Human
gcauucuauugccuu

SEQ ID NO: 2834171 - RNA, 16 nt, Human
gcauucuauugccuuc

SEQ ID NO: 2834172 - RNA, 18 nt, Human
gcauucuauugccuucuu

SEQ ID NO: 2834173 - RNA, 20 nt, Human
gcauucuauugccuucuuug

SEQ ID NO: 2834174 - RNA, 22 nt, Human
gcauucuauugccuucuuugaa

SEQ ID NO: 2834175 - RNA, 13 nt, Human
gcauucucacucc

SEQ ID NO: 2834176 - RNA, 15 nt, Human
gcauucucacuccua

SEQ ID NO: 2834177 - RNA, 18 nt, Human
gcauucucacuccuaccu

SEQ ID NO: 2834178 - RNA, 21 nt, Human
gcauucuccccaguguauguc

SEQ ID NO: 2834179 - RNA, 16 nt, Human
gcauucuccuggaugc

SEQ ID NO: 2834180 - RNA, 16 nt, Human
gcauugauucaguauu

SEQ ID NO: 2834181 - RNA, 17 nt, Human
gcauugauauugugaac

SEQ ID NO: 2834182 - RNA, 18 nt, Human
gcauugauauugugaaca

SEQ ID NO: 2834183 - RNA, 13 nt, Human
gcauugcuuucgu

SEQ ID NO: 2834184 - RNA, 12 nt, Human
gcauugcuguua

SEQ ID NO: 2834185 - RNA, 12 nt, Human
gcauugccuggc

SEQ ID NO: 2834186 - RNA, 20 nt, Human
gcauugccuggccuuccugu

SEQ ID NO: 2834187 - RNA, 14 nt, Human
gcauugcuagauaa

SEQ ID NO: 2834188 - RNA, 15 nt, Human
gcauugcuagauaaa

SEQ ID NO: 2834189 - RNA, 16 nt, Human
gcauugcuagauaaaa

SEQ ID NO: 2834190 - RNA, 17 nt, Human
gcauugcuagauaaaag

SEQ ID NO: 2834191 - RNA, 18 nt, Human
gcauugcuagauaaaagc

SEQ ID NO: 2834192 - RNA, 18 nt, Human
gcauuuucaccccacccu

SEQ ID NO: 2834193 - RNA, 18 nt, Human
gcauuuuccagcacuuug

SEQ ID NO: 2834194 - RNA, 13 nt, Human
gccaaaaggaaaa

SEQ ID NO: 2834195 - RNA, 14 nt, Human
gccaaaaggaaaaa

SEQ ID NO: 2834196 - RNA, 17 nt, Human
gccaaaaggaaaaagcu

SEQ ID NO: 2834197 - RNA, 18 nt, Human
gccaaaaggaaaaagcuc

SEQ ID NO: 2834198 - RNA, 19 nt, Human
gccaaaaggaaaaagcucc

SEQ ID NO: 2834199 - RNA, 23 nt, Human
gccaaaaggaaaaagcuccaugu

SEQ ID NO: 2834200 - RNA, 15 nt, Human
gccaaaagcugcuca

SEQ ID NO: 2834201 - RNA, 14 nt, Human
gccaaaagcugcuc

SEQ ID NO: 2834202 - RNA, 16 nt, Human
gccaaaagcuagacag

SEQ ID NO: 2834203 - RNA, 21 nt, Human
gccaaaagcuagacagauccc

SEQ ID NO: 2834204 - RNA, 17 nt, Human
gccaaacucugccagcc

SEQ ID NO: 2834205 - RNA, 18 nt, Human
gccaaacucugccagcca

SEQ ID NO: 2834206 - RNA, 12 nt, Human
gccaaacugcug

SEQ ID NO: 2834207 - RNA, 13 nt, Human
gccaaacugcugg

SEQ ID NO: 2834208 - RNA, 14 nt, Human
gccaaacugcugga

SEQ ID NO: 2834209 - RNA, 23 nt, Human
gccaaacugcuggacgucuuucu

SEQ ID NO: 2834210 - RNA, 13 nt, Human
gccaaagaaauga

SEQ ID NO: 2834211 - RNA, 17 nt, Human
gccaaagaaaugaacau

SEQ ID NO: 2834212 - RNA, 18 nt, Human
gccaaagaaaugaacauu

SEQ ID NO: 2834213 - RNA, 22 nt, Human
gccaaagaaaugaacauuccaa

SEQ ID NO: 2834214 - RNA, 15 nt, Human
gccaaacagccacac

SEQ ID NO: 2834215 - RNA, 16 nt, Human
gcaugcuggggcaagu

SEQ ID NO: 2834216 - RNA, 12 nt, Human
gcaugccuugug

SEQ ID NO: 2834217 - RNA, 13 nt, Human
gcaugccuugugc

SEQ ID NO: 2834218 - RNA, 16 nt, Human
gcauggagacgcauuu

SEQ ID NO: 2834219 - RNA, 18 nt, Human
gcauguugaccaugucua

SEQ ID NO: 2834220 - RNA, 20 nt, Human
gcauguugaccaugucuaug

SEQ ID NO: 2834221 - RNA, 15 nt, Human
gcauuagaauuauuu

SEQ ID NO: 2834222 - RNA, 14 nt, Human
gcauguuuuguaua

SEQ ID NO: 2834223 - RNA, 15 nt, Human
gcauguuuuguauac

SEQ ID NO: 2834224 - RNA, 16 nt, Human
gcauguuuuguauaca

SEQ ID NO: 2834225 - RNA, 17 nt, Human
gcauguuuuguauacaa

SEQ ID NO: 2834226 - RNA, 18 nt, Human
gcauguuuuguauacaaa

SEQ ID NO: 2834227 - RNA, 20 nt, Human
gcauguuuuguauacaaaua

SEQ ID NO: 2834228 - RNA, 18 nt, Human
gcauguuuugugcauuug

SEQ ID NO: 2834229 - RNA, 15 nt, Human
gcauguuucauguuu

SEQ ID NO: 2834230 - RNA, 20 nt, Human
gcauguuucauguuuuguga

SEQ ID NO: 2834231 - RNA, 15 nt, Human
gcauguuuccagcag

SEQ ID NO: 2834232 - RNA, 14 nt, Human
gcauguuugaaaug

SEQ ID NO: 2834233 - RNA, 15 nt, Human
gcauguuugaaauga

SEQ ID NO: 2834234 - RNA, 18 nt, Human
gcauguuugaaaugaggu

SEQ ID NO: 2834235 - RNA, 18 nt, Human
gcauguuuuccagcuccu

SEQ ID NO: 2834236 - RNA, 19 nt, Human
gcauguuuuccagcuccuc

SEQ ID NO: 2834237 - RNA, 18 nt, Human
gcauuagggaugccuccu

SEQ ID NO: 2834238 - RNA, 14 nt, Human
gcauuagcacagau

SEQ ID NO: 2834239 - RNA, 17 nt, Human
gcauuagcacagauuuu

SEQ ID NO: 2834240 - RNA, 19 nt, Human
gcauuagcacagauuuuaa

SEQ ID NO: 2834241 - RNA, 20 nt, Human
gcauuagcacagauuuuaau

SEQ ID NO: 2834242 - RNA, 21 nt, Human
gcauuagcacagauuuuaauu

SEQ ID NO: 2834243 - RNA, 22 nt, Human
gcauuagcacagauuuuaauug

SEQ ID NO: 2834244 - RNA, 20 nt, Human
gcauuagauuucucauuugc

SEQ ID NO: 2834245 - RNA, 17 nt, Human
gcauuagaauuauuuaa

SEQ ID NO: 2834246 - RNA, 18 nt, Human
gcauuagaauuauuuaaa

SEQ ID NO: 2834247 - RNA, 22 nt, Human
gcaucacagggcagagccggga

SEQ ID NO: 2834248 - RNA, 21 nt, Human
gcaucacagggcagagccggg

SEQ ID NO: 2834249 - RNA, 17 nt, Human
gcaucacagggcagagc

SEQ ID NO: 2834250 - RNA, 16 nt, Human
gcaucacagggcagag

SEQ ID NO: 2834251 - RNA, 15 nt, Human
gcaucacagggcaga

SEQ ID NO: 2834252 - RNA, 14 nt, Human
gcaucacagggcag

SEQ ID NO: 2834253 - RNA, 18 nt, Human
gcaucaaggggucacuua

SEQ ID NO: 2834254 - RNA, 22 nt, Human
gcaucaaggggucacuuacaga

SEQ ID NO: 2834255 - RNA, 21 nt, Human
gcaucaaggucagcaugagga

SEQ ID NO: 2834256 - RNA, 13 nt, Human
gcaucaccucagg

SEQ ID NO: 2834257 - RNA, 18 nt, Human
gcaugccaacaagaaugc

SEQ ID NO: 2834258 - RNA, 20 nt, Human
gcaugccaacaagaaugcau

SEQ ID NO: 2834259 - RNA, 21 nt, Human
gcaugccaacaagaaugcauu

SEQ ID NO: 2834260 - RNA, 23 nt, Human
gcaugccaacaagaaugcauuga

SEQ ID NO: 2834261 - RNA, 14 nt, Human
gcaugcaccugcaa

SEQ ID NO: 2834262 - RNA, 23 nt, Human
gcaucaagaggugggagggcccu

SEQ ID NO: 2834263 - RNA, 16 nt, Human
gcccuccuuguccacc

SEQ ID NO: 2834264 - RNA, 15 nt, Human
gcccuccuuguccac

SEQ ID NO: 2834265 - RNA, 18 nt, Human
gcccuccugugcuggggg

SEQ ID NO: 2834266 - RNA, 12 nt, Human
gcccuccugugc

SEQ ID NO: 2834267 - RNA, 19 nt, Human
gcccuccccauggagccag

SEQ ID NO: 2834268 - RNA, 21 nt, Human
gcccggagauuggacggccug

SEQ ID NO: 2834269 - RNA, 19 nt, Human
gcccggagauuggacggcc

SEQ ID NO: 2834270 - RNA, 18 nt, Human
gcccuccccauggagcca

SEQ ID NO: 2834271 - RNA, 13 nt, Human
gcccuccccuccc

SEQ ID NO: 2834272 - RNA, 12 nt, Human
gcccuccccucc

SEQ ID NO: 2834273 - RNA, 16 nt, Human
gcccuccccuccccug

SEQ ID NO: 2834274 - RNA, 17 nt, Human
gcccuccccuccccugc

SEQ ID NO: 2834275 - RNA, 18 nt, Human
gcccuccccuccccugcu

SEQ ID NO: 2834276 - RNA, 19 nt, Human
gcccuccccuccccugcug

SEQ ID NO: 2834277 - RNA, 15 nt, Human
gcccuccccucucug

SEQ ID NO: 2834278 - RNA, 20 nt, Human
gcccuccccuccccugcugc

SEQ ID NO: 2834279 - RNA, 21 nt, Human
gcccuccccuccccugcugca

SEQ ID NO: 2834280 - RNA, 18 nt, Human
gcccuccccucucugcac

SEQ ID NO: 2834281 - RNA, 19 nt, Human
gcccuccccucucugcacc

SEQ ID NO: 2834282 - RNA, 19 nt, Human
gcccuccuacccugcgccc

SEQ ID NO: 2834283 - RNA, 24 nt, Human
gcccuccuacccugcgcccagucc

SEQ ID NO: 2834284 - RNA, 19 nt, Human
gcccucccuccccagcucc

SEQ ID NO: 2834285 - RNA, 15 nt, Human
gcccucccugccccu

SEQ ID NO: 2834286 - RNA, 18 nt, Human
gcccuccuacccugcgcc

SEQ ID NO: 2834287 - RNA, 22 nt, Human
gcccuccccuccccugcugcag

SEQ ID NO: 2834288 - RNA, 15 nt, Human
gcccggcuccaggcu

SEQ ID NO: 2834289 - RNA, 14 nt, Human
gcccggcuccaggc

SEQ ID NO: 2834290 - RNA, 13 nt, Human
gcccggcuccagg

SEQ ID NO: 2834291 - RNA, 12 nt, Human
gcccggcuccag

SEQ ID NO: 2834292 - RNA, 14 nt, Human
gcccggaccuuggc

SEQ ID NO: 2834293 - RNA, 18 nt, Human
gcccgcggggacauuggg

SEQ ID NO: 2834294 - RNA, 22 nt, Human
gcccgcucuacaucuucugccu

SEQ ID NO: 2834295 - RNA, 12 nt, Human
gccccuucccuu

SEQ ID NO: 2834296 - RNA, 13 nt, Human
gccccuucccuuc

SEQ ID NO: 2834297 - RNA, 23 nt, Human
gccccuucuagguggcaaggcug

SEQ ID NO: 2834298 - RNA, 14 nt, Human
gccccuuccuuuaa

SEQ ID NO: 2834299 - RNA, 16 nt, Human
gccccuucucucccug

SEQ ID NO: 2834300 - RNA, 17 nt, Human
gccccuucucucccugc

SEQ ID NO: 2834301 - RNA, 19 nt, Human
gccccuucucucccugcca

SEQ ID NO: 2834302 - RNA, 23 nt, Human
gccccuucucucccugccagagg

SEQ ID NO: 2834303 - RNA, 13 nt, Human
gccccugcacaaa

SEQ ID NO: 2834304 - RNA, 17 nt, Human
gccccuucccccuccaa

SEQ ID NO: 2834305 - RNA, 15 nt, Human
gccccugcagcacgg

SEQ ID NO: 2834306 - RNA, 23 nt, Human
gccccugcagcacggacaauaaa

SEQ ID NO: 2834307 - RNA, 20 nt, Human
gccccuagcccaggagagag

SEQ ID NO: 2834308 - RNA, 21 nt, Human
gccccuagcccaggagagaga

SEQ ID NO: 2834309 - RNA, 14 nt, Human
gccccuagcccagg

SEQ ID NO: 2834310 - RNA, 15 nt, Human
gccccuagcccagga

SEQ ID NO: 2834311 - RNA, 18 nt, Human
gccccuagcccaggagag

SEQ ID NO: 2834312 - RNA, 19 nt, Human
gccccuagcccaggagaga

SEQ ID NO: 2834313 - RNA, 13 nt, Human
gccccuagcccag

SEQ ID NO: 2834314 - RNA, 18 nt, Human
gccccuagaaacccaagc

SEQ ID NO: 2834315 - RNA, 19 nt, Human
gccccuagaaacccaagcu

SEQ ID NO: 2834316 - RNA, 21 nt, Human
gccccuagaaacccaagcucc

SEQ ID NO: 2834317 - RNA, 18 nt, Human
gccccucccaagcuggcu

SEQ ID NO: 2834318 - RNA, 19 nt, Human
gccccucccaagcuggcug

SEQ ID NO: 2834319 - RNA, 16 nt, Human
gccccucaaccuccug

SEQ ID NO: 2834320 - RNA, 14 nt, Human
gccccgucucuguu

SEQ ID NO: 2834321 - RNA, 17 nt, Human
gccccgucccccucugg

SEQ ID NO: 2834322 - RNA, 21 nt, Human
gccccgucccccucuggcucc

SEQ ID NO: 2834323 - RNA, 18 nt, Human
gccccggucaccuagcaa

SEQ ID NO: 2834324 - RNA, 15 nt, Human
gccccggcccugggc

SEQ ID NO: 2834325 - RNA, 17 nt, Human
gccccggcccugggcuc

SEQ ID NO: 2834326 - RNA, 21 nt, Human
gccccggcccugggcucggag

SEQ ID NO: 2834327 - RNA, 17 nt, Human
gccccggccaccucugc

SEQ ID NO: 2834328 - RNA, 18 nt, Human
gccccggccaccucugcg

SEQ ID NO: 2834329 - RNA, 14 nt, Human
gccccggcccuggg

SEQ ID NO: 2834330 - RNA, 15 nt, Human
gccccggaucagagc

SEQ ID NO: 2834331 - RNA, 16 nt, Human
gccccggaucagagca

SEQ ID NO: 2834332 - RNA, 17 nt, Human
gccccggaucagagcag

SEQ ID NO: 2834333 - RNA, 18 nt, Human
gccccggaucagagcagg

SEQ ID NO: 2834334 - RNA, 21 nt, Human
gccccggaucagagcaggacc

SEQ ID NO: 2834335 - RNA, 22 nt, Human
gccccggaucagagcaggaccu

SEQ ID NO: 2834336 - RNA, 23 nt, Human
gccccggaucagagcaggaccuc

SEQ ID NO: 2834337 - RNA, 13 nt, Human
gccccggccaccu

SEQ ID NO: 2834338 - RNA, 14 nt, Human
gccccggccaccuc

SEQ ID NO: 2834339 - RNA, 15 nt, Human
gccccggccaccucu

SEQ ID NO: 2834340 - RNA, 16 nt, Human
gccccggccaccucug

SEQ ID NO: 2834341 - RNA, 17 nt, Human
gccccgcgccuccuucc

SEQ ID NO: 2834342 - RNA, 23 nt, Human
gccccauucugccugcccaggcc

SEQ ID NO: 2834343 - RNA, 22 nt, Human
gccccauucugccugcccaggc

SEQ ID NO: 2834344 - RNA, 23 nt, Human
gccccgaggccuucucugaagga

SEQ ID NO: 2834345 - RNA, 22 nt, Human
gccccgaggccuucucugaagg

SEQ ID NO: 2834346 - RNA, 15 nt, Human
gccccgcagaccucc

SEQ ID NO: 2834347 - RNA, 15 nt, Human
gccccgcaccuguac

SEQ ID NO: 2834348 - RNA, 18 nt, Human
gccccgcagaccucccca

SEQ ID NO: 2834349 - RNA, 19 nt, Human
gccccgcagaccuccccag

SEQ ID NO: 2834350 - RNA, 13 nt, Human
gccccgccgccug

SEQ ID NO: 2834351 - RNA, 20 nt, Human
gccccgcagaccuccccagc

SEQ ID NO: 2834352 - RNA, 21 nt, Human
gccccgcagaccuccccagcc

SEQ ID NO: 2834353 - RNA, 15 nt, Human
gccccgcccucuucc

SEQ ID NO: 2834354 - RNA, 16 nt, Human
gccccgcccucuuccu

SEQ ID NO: 2834355 - RNA, 17 nt, Human
gccccgcccucuuccug

SEQ ID NO: 2834356 - RNA, 18 nt, Human
gccccgcccucuuccuga

SEQ ID NO: 2834357 - RNA, 22 nt, Human
gccccgcccucuuccugacgaa

SEQ ID NO: 2834358 - RNA, 15 nt, Human
gcccaggcuggcgug

SEQ ID NO: 2834359 - RNA, 14 nt, Human
gcccaggcuggcgu

SEQ ID NO: 2834360 - RNA, 16 nt, Human
gcccaggcuggcgugc

SEQ ID NO: 2834361 - RNA, 20 nt, Human
gcccagucuggaaugcagug

SEQ ID NO: 2834362 - RNA, 22 nt, Human
gcccagucuggaaugcaguggu

SEQ ID NO: 2834363 - RNA, 17 nt, Human
gcccagguuucuggucu

SEQ ID NO: 2834364 - RNA, 14 nt, Human
gcccagguuucugg

SEQ ID NO: 2834365 - RNA, 23 nt, Human
gcccagguuucuggucucuaggc

SEQ ID NO: 2834366 - RNA, 18 nt, Human
gcccagucuuucaugugu

SEQ ID NO: 2834367 - RNA, 11 nt, Human
gcccaggcugg

SEQ ID NO: 2834368 - RNA, 17 nt, Human
gcccaggccugccuguu

SEQ ID NO: 2834369 - RNA, 12 nt, Human
gcccaggcggga

SEQ ID NO: 2834370 - RNA, 22 nt, Human
gcccaggcgggagcgguggccc

SEQ ID NO: 2834371 - RNA, 12 nt, Human
gcccaggcucca

SEQ ID NO: 2834372 - RNA, 12 nt, Human
gcccaccugccu

SEQ ID NO: 2834373 - RNA, 13 nt, Human
gcccaccugccug

SEQ ID NO: 2834374 - RNA, 18 nt, Human
gcccaccuccccacgccc

SEQ ID NO: 2834375 - RNA, 19 nt, Human
gcccagcuauaccugugcc

SEQ ID NO: 2834376 - RNA, 20 nt, Human
gcccagcuauaccugugccu

SEQ ID NO: 2834377 - RNA, 20 nt, Human
gcccaccugcccaucacagg

SEQ ID NO: 2834378 - RNA, 15 nt, Human
gcccaccugcccauc

SEQ ID NO: 2834379 - RNA, 14 nt, Human
gcccaccugcccau

SEQ ID NO: 2834380 - RNA, 13 nt, Human
gcccaccugccca

SEQ ID NO: 2834381 - RNA, 10 nt, Human
gcccaccucc

SEQ ID NO: 2834382 - RNA, 12 nt, Human
gcccaccucccc

SEQ ID NO: 2834383 - RNA, 15 nt, Human
gcccaccuccccacg

SEQ ID NO: 2834384 - RNA, 17 nt, Human
gcccaccuccccacgcc

SEQ ID NO: 2834385 - RNA, 21 nt, Human
gcccaccuccccacgcccucc

SEQ ID NO: 2834386 - RNA, 11 nt, Human
gcccaccugcc

SEQ ID NO: 2834387 - RNA, 24 nt, Human
gcccagcugcaccugccagccugg

SEQ ID NO: 2834388 - RNA, 23 nt, Human
gcccagcugcaccugccagccug

SEQ ID NO: 2834389 - RNA, 18 nt, Human
gcccagcugcaccugcca

SEQ ID NO: 2834390 - RNA, 15 nt, Human
gcccagcugcaccug

SEQ ID NO: 2834391 - RNA, 14 nt, Human
gcccagcugcaccu

SEQ ID NO: 2834392 - RNA, 13 nt, Human
gcccagcugcacc

SEQ ID NO: 2834393 - RNA, 21 nt, Human
gccccagugcccacaggauca

SEQ ID NO: 2834394 - RNA, 17 nt, Human
gccccagugcccacagg

SEQ ID NO: 2834395 - RNA, 16 nt, Human
gccccagugcccacag

SEQ ID NO: 2834396 - RNA, 15 nt, Human
gccccagugcccaca

SEQ ID NO: 2834397 - RNA, 21 nt, Human
gccccauucugccugcccagg

SEQ ID NO: 2834398 - RNA, 20 nt, Human
gccccauucugccugcccag

SEQ ID NO: 2834399 - RNA, 18 nt, Human
gccccauucugccugccc

SEQ ID NO: 2834400 - RNA, 17 nt, Human
gccccauucugccugcc

SEQ ID NO: 2834401 - RNA, 15 nt, Human
gccccaucugugcau

SEQ ID NO: 2834402 - RNA, 15 nt, Human
gccccaucuucaccc

SEQ ID NO: 2834403 - RNA, 16 nt, Human
gccccaucuucaccca

SEQ ID NO: 2834404 - RNA, 20 nt, Human
gccccaugccuguccagccu

SEQ ID NO: 2834405 - RNA, 17 nt, Human
gccccaugccuguccag

SEQ ID NO: 2834406 - RNA, 23 nt, Human
gccccaugccuguccagccuggg

SEQ ID NO: 2834407 - RNA, 16 nt, Human
gccccaugccugucca

SEQ ID NO: 2834408 - RNA, 14 nt, Human
gccccaugccuguc

SEQ ID NO: 2834409 - RNA, 12 nt, Human
gcccauccuucc

SEQ ID NO: 2834410 - RNA, 13 nt, Human
gcccauccuuccc

SEQ ID NO: 2834411 - RNA, 12 nt, Human
gcccaucccugc

SEQ ID NO: 2834412 - RNA, 14 nt, Human
gcccaucccugccu

SEQ ID NO: 2834413 - RNA, 16 nt, Human
gcccaucccugccugg

SEQ ID NO: 2834414 - RNA, 18 nt, Human
gcccaucccugccugguc

SEQ ID NO: 2834415 - RNA, 19 nt, Human
gcccaucccugccugguca

SEQ ID NO: 2834416 - RNA, 22 nt, Human
gcccaucuaugucccuugcugu

SEQ ID NO: 2834417 - RNA, 13 nt, Human
gcccaucucggag

SEQ ID NO: 2834418 - RNA, 14 nt, Human
gcccaucucggagc

SEQ ID NO: 2834419 - RNA, 18 nt, Human
gcccaucucggagcaucc

SEQ ID NO: 2834420 - RNA, 20 nt, Human
gcccaucucggagcaucccg

SEQ ID NO: 2834421 - RNA, 23 nt, Human
gcccaucucggagcaucccggag

SEQ ID NO: 2834422 - RNA, 17 nt, Human
gcccaugcacuggggac

SEQ ID NO: 2834423 - RNA, 17 nt, Human
gcccaugaguccuugaa

SEQ ID NO: 2834424 - RNA, 19 nt, Human
gcccaugcccaccugccca

SEQ ID NO: 2834425 - RNA, 15 nt, Human
gcccaugcccaccug

SEQ ID NO: 2834426 - RNA, 14 nt, Human
gcccaugcccaccu

SEQ ID NO: 2834427 - RNA, 13 nt, Human
gcccaugcccacc

SEQ ID NO: 2834428 - RNA, 13 nt, Human
gccccagcucugg

SEQ ID NO: 2834429 - RNA, 14 nt, Human
gccccagcucuggc

SEQ ID NO: 2834430 - RNA, 16 nt, Human
gcccacaggaggcaag

SEQ ID NO: 2834431 - RNA, 17 nt, Human
gcccacaggaggcaagc

SEQ ID NO: 2834432 - RNA, 22 nt, Human
gcccacaggaggcaagcaagcu

SEQ ID NO: 2834433 - RNA, 24 nt, Human
gcccacaggaggcaagcaagcucu

SEQ ID NO: 2834434 - RNA, 20 nt, Human
gcccacagcacagcucccug

SEQ ID NO: 2834435 - RNA, 22 nt, Human
gcccacagcacagcucccugcc

SEQ ID NO: 2834436 - RNA, 11 nt, Human
gcccacacaca

SEQ ID NO: 2834437 - RNA, 12 nt, Human
gcccacacacag

SEQ ID NO: 2834438 - RNA, 13 nt, Human
gcccacacacagg

SEQ ID NO: 2834439 - RNA, 14 nt, Human
gcccacacacaggu

SEQ ID NO: 2834440 - RNA, 15 nt, Human
gcccacacacaggug

SEQ ID NO: 2834441 - RNA, 17 nt, Human
gcccaaagucuguguga

SEQ ID NO: 2834442 - RNA, 19 nt, Human
gcccaaaggggacaggccu

SEQ ID NO: 2834443 - RNA, 20 nt, Human
gcccaaaggggacaggccuc

SEQ ID NO: 2834444 - RNA, 21 nt, Human
gcccaaaggggacaggccuca

SEQ ID NO: 2834445 - RNA, 18 nt, Human
gcccacaggaucagucug

SEQ ID NO: 2834446 - RNA, 13 nt, Human
gcccacaggauca

SEQ ID NO: 2834447 - RNA, 19 nt, Human
gcccacaggaucagucuga

SEQ ID NO: 2834448 - RNA, 12 nt, Human
gcccacccugcu

SEQ ID NO: 2834449 - RNA, 15 nt, Human
gcccacccugcugcc

SEQ ID NO: 2834450 - RNA, 18 nt, Human
gcccacccugcugccuuc

SEQ ID NO: 2834451 - RNA, 16 nt, Human
gccauuuauuuauuga

SEQ ID NO: 2834452 - RNA, 13 nt, Human
gccauuuauuuau

SEQ ID NO: 2834453 - RNA, 21 nt, Human
gccauuuaugugagugugugu

SEQ ID NO: 2834454 - RNA, 11 nt, Human
gccauuuaaaa

SEQ ID NO: 2834455 - RNA, 18 nt, Human
gccauuuaaaaaguugua

SEQ ID NO: 2834456 - RNA, 13 nt, Human
gccauuugauacc

SEQ ID NO: 2834457 - RNA, 17 nt, Human
gccauuugauuuuucua

SEQ ID NO: 2834458 - RNA, 23 nt, Human
gccauuugcacccuccgccuuca

SEQ ID NO: 2834459 - RNA, 20 nt, Human
gccauuugcacccuccgccu

SEQ ID NO: 2834460 - RNA, 15 nt, Human
gccauuugcuuuuuc

SEQ ID NO: 2834461 - RNA, 22 nt, Human
gccauggcgugucccucucgga

SEQ ID NO: 2834462 - RNA, 17 nt, Human
gccauggcgugucccuc

SEQ ID NO: 2834463 - RNA, 16 nt, Human
gccauggcgugucccu

SEQ ID NO: 2834464 - RNA, 13 nt, Human
gccauggaguugu

SEQ ID NO: 2834465 - RNA, 19 nt, Human
gccauggaguugugaucau

SEQ ID NO: 2834466 - RNA, 18 nt, Human
gccauccccagggggcau

SEQ ID NO: 2834467 - RNA, 22 nt, Human
gccauggagagcuggagccugg

SEQ ID NO: 2834468 - RNA, 23 nt, Human
gccauggagagcuggagccuggu

SEQ ID NO: 2834469 - RNA, 15 nt, Human
gccauggagagcugg

SEQ ID NO: 2834470 - RNA, 16 nt, Human
gccauggagagcugga

SEQ ID NO: 2834471 - RNA, 18 nt, Human
gccauggagagcuggagc

SEQ ID NO: 2834472 - RNA, 20 nt, Human
gccauggagagcuggagccu

SEQ ID NO: 2834473 - RNA, 14 nt, Human
gccauccagguuca

SEQ ID NO: 2834474 - RNA, 16 nt, Human
gccauccccagggggc

SEQ ID NO: 2834475 - RNA, 20 nt, Human
gccauccagguucagcuugu

SEQ ID NO: 2834476 - RNA, 19 nt, Human
gccauccagguucagcuug

SEQ ID NO: 2834477 - RNA, 13 nt, Human
gccagucuugugu

SEQ ID NO: 2834478 - RNA, 13 nt, Human
gccaggugcagug

SEQ ID NO: 2834479 - RNA, 14 nt, Human
gccaggugcagugg

SEQ ID NO: 2834480 - RNA, 18 nt, Human
gccaguccugccuggcca

SEQ ID NO: 2834481 - RNA, 20 nt, Human
gccaguccugccuggccagg

SEQ ID NO: 2834482 - RNA, 19 nt, Human
gccaguccugccuggccag

SEQ ID NO: 2834483 - RNA, 22 nt, Human
gccaggaaccuguccuaaggaa

SEQ ID NO: 2834484 - RNA, 15 nt, Human
gccaggaaccugucc

SEQ ID NO: 2834485 - RNA, 19 nt, Human
gccagggcccugcagaggg

SEQ ID NO: 2834486 - RNA, 17 nt, Human
gccagggcccugcagag

SEQ ID NO: 2834487 - RNA, 16 nt, Human
gccagggcccugcaga

SEQ ID NO: 2834488 - RNA, 15 nt, Human
gccagggcccugcag

SEQ ID NO: 2834489 - RNA, 13 nt, Human
gccagggcccugc

SEQ ID NO: 2834490 - RNA, 15 nt, Human
gccagggccuggaag

SEQ ID NO: 2834491 - RNA, 16 nt, Human
gccagggccuggaaga

SEQ ID NO: 2834492 - RNA, 11 nt, Human
gccagggcugc

SEQ ID NO: 2834493 - RNA, 22 nt, Human
gccagggccuggaagacagaga

SEQ ID NO: 2834494 - RNA, 10 nt, Human
gccagggcug

SEQ ID NO: 2834495 - RNA, 20 nt, Human
gccaggguggucuugaucuc

SEQ ID NO: 2834496 - RNA, 14 nt, Human
gccagggcugcccu

SEQ ID NO: 2834497 - RNA, 17 nt, Human
gccagggcugcccugag

SEQ ID NO: 2834498 - RNA, 18 nt, Human
gccagggcugcccugaga

SEQ ID NO: 2834499 - RNA, 19 nt, Human
gccagggcugcccugagaa

SEQ ID NO: 2834500 - RNA, 15 nt, Human
gccaggucccccugc

SEQ ID NO: 2834501 - RNA, 16 nt, Human
gccaggucccccugca

SEQ ID NO: 2834502 - RNA, 17 nt, Human
gccaggucccccugcag

SEQ ID NO: 2834503 - RNA, 18 nt, Human
gccaggucccccugcagc

SEQ ID NO: 2834504 - RNA, 19 nt, Human
gccaggucccccugcagcu

SEQ ID NO: 2834505 - RNA, 16 nt, Human
gccagguauggcucug

SEQ ID NO: 2834506 - RNA, 15 nt, Human
gccaggucacacgac

SEQ ID NO: 2834507 - RNA, 15 nt, Human
gccacguuccacagu

SEQ ID NO: 2834508 - RNA, 16 nt, Human
gccacggccaggccag

SEQ ID NO: 2834509 - RNA, 22 nt, Human
gccacucagaguucuauacugu

SEQ ID NO: 2834510 - RNA, 13 nt, Human
gccacucagcuuc

SEQ ID NO: 2834511 - RNA, 15 nt, Human
gccacggccaggcca

SEQ ID NO: 2834512 - RNA, 14 nt, Human
gccacggccaggcc

SEQ ID NO: 2834513 - RNA, 17 nt, Human
gccaaauccgcucucuu

SEQ ID NO: 2834514 - RNA, 18 nt, Human
gccaaauccgcucucuuc

SEQ ID NO: 2834515 - RNA, 19 nt, Human
gccaaauccgcucucuucc

SEQ ID NO: 2834516 - RNA, 20 nt, Human
gccaaauccgcucucuuccu

SEQ ID NO: 2834517 - RNA, 22 nt, Human
gccaaauccgcucucuuccugc

SEQ ID NO: 2834518 - RNA, 23 nt, Human
gccaaauccgcucucuuccugcc

SEQ ID NO: 2834519 - RNA, 22 nt, Human
gccaaaugcucucucaaauugu

SEQ ID NO: 2834520 - RNA, 20 nt, Human
gccaaaggcugguggcaagu

SEQ ID NO: 2834521 - RNA, 19 nt, Human
gccaaagggaaauaucauu

SEQ ID NO: 2834522 - RNA, 18 nt, Human
gccagagggagugacaga

SEQ ID NO: 2834523 - RNA, 14 nt, Human
gccagaggaacugu

SEQ ID NO: 2834524 - RNA, 18 nt, Human
gccagaggaacuguccag

SEQ ID NO: 2834525 - RNA, 20 nt, Human
gccagaggaacuguccagag

SEQ ID NO: 2834526 - RNA, 21 nt, Human
gccagaggaacuguccagaga

SEQ ID NO: 2834527 - RNA, 17 nt, Human
gccagagggagugacag

SEQ ID NO: 2834528 - RNA, 14 nt, Human
gccagagccgggca

SEQ ID NO: 2834529 - RNA, 17 nt, Human
gccagagcugaagaguu

SEQ ID NO: 2834530 - RNA, 15 nt, Human
gccagagcugggagg

SEQ ID NO: 2834531 - RNA, 18 nt, Human
gccacugcaccgggccac

SEQ ID NO: 2834532 - RNA, 17 nt, Human
gccacugcaccgggcca

SEQ ID NO: 2834533 - RNA, 16 nt, Human
gccacugauauucaga

SEQ ID NO: 2834534 - RNA, 15 nt, Human
gccacucagcuuccu

SEQ ID NO: 2834535 - RNA, 16 nt, Human
gccacucauuccugua

SEQ ID NO: 2834536 - RNA, 21 nt, Human
gccacucaggaggcugaggca

SEQ ID NO: 2834537 - RNA, 20 nt, Human
gccacucaggaggcugaggc

SEQ ID NO: 2834538 - RNA, 19 nt, Human
gccacugaagcugggauuc

SEQ ID NO: 2834539 - RNA, 17 nt, Human
gccacugaagcugggau

SEQ ID NO: 2834540 - RNA, 19 nt, Human
gccacuccagaccccuggc

SEQ ID NO: 2834541 - RNA, 16 nt, Human
gccacuccagaccccu

SEQ ID NO: 2834542 - RNA, 18 nt, Human
gccacuccagaccccugg

SEQ ID NO: 2834543 - RNA, 13 nt, Human
gccagcugccucc

SEQ ID NO: 2834544 - RNA, 13 nt, Human
gccagcucccucu

SEQ ID NO: 2834545 - RNA, 16 nt, Human
gccagcucagucccau

SEQ ID NO: 2834546 - RNA, 13 nt, Human
gccagcuggagaa

SEQ ID NO: 2834547 - RNA, 22 nt, Human
gccagcuuggggccaccaaagc

SEQ ID NO: 2834548 - RNA, 18 nt, Human
gccagcuuggggccacca

SEQ ID NO: 2834549 - RNA, 21 nt, Human
gccagccuucuuccaucccag

SEQ ID NO: 2834550 - RNA, 19 nt, Human
gccagcgggaauggcagcu

SEQ ID NO: 2834551 - RNA, 23 nt, Human
gccagcuacuuccuccuccccac

SEQ ID NO: 2834552 - RNA, 17 nt, Human
gccagcucacagugcug

SEQ ID NO: 2834553 - RNA, 19 nt, Human
gccagcucacagugcugug

SEQ ID NO: 2834554 - RNA, 20 nt, Human
gccagccugucccauggaca

SEQ ID NO: 2834555 - RNA, 12 nt, Human
gccagccuucuu

SEQ ID NO: 2834556 - RNA, 19 nt, Human
gccagccuucuuccauccc

SEQ ID NO: 2834557 - RNA, 22 nt, Human
gccagcccggccgcuccaccag

SEQ ID NO: 2834558 - RNA, 21 nt, Human
gccagcccggccgcuccacca

SEQ ID NO: 2834559 - RNA, 22 nt, Human
gccagaggaacuguccagagag

SEQ ID NO: 2834560 - RNA, 23 nt, Human
gccagaggaacuguccagagagc

SEQ ID NO: 2834561 - RNA, 20 nt, Human
gccagagggagugacagagg

SEQ ID NO: 2834562 - RNA, 19 nt, Human
gccagagggagugacagag

SEQ ID NO: 2834563 - RNA, 12 nt, Human
gccagaugcugc

SEQ ID NO: 2834564 - RNA, 15 nt, Human
gccagaugcugcaga

SEQ ID NO: 2834565 - RNA, 15 nt, Human
gccagauggcccgga

SEQ ID NO: 2834566 - RNA, 17 nt, Human
gccagccccacccagga

SEQ ID NO: 2834567 - RNA, 17 nt, Human
gccagccccggcccugg

SEQ ID NO: 2834568 - RNA, 19 nt, Human
gccagccccacccaggagg

SEQ ID NO: 2834569 - RNA, 18 nt, Human
gccagccccacccaggag

SEQ ID NO: 2834570 - RNA, 21 nt, Human
gccagccccggcccugggcuc

SEQ ID NO: 2834571 - RNA, 13 nt, Human
gccagccccucca

SEQ ID NO: 2834572 - RNA, 18 nt, Human
gccagccccggcccuggg

SEQ ID NO: 2834573 - RNA, 19 nt, Human
gccagccccggcccugggc

SEQ ID NO: 2834574 - RNA, 20 nt, Human
gccuuggcuguuggcaguga

SEQ ID NO: 2834575 - RNA, 15 nt, Human
gccuugggcugcucc

SEQ ID NO: 2834576 - RNA, 14 nt, Human
gccuugggcugcuc

SEQ ID NO: 2834577 - RNA, 22 nt, Human
gccuugggcugcuccucauggu

SEQ ID NO: 2834578 - RNA, 18 nt, Human
gccuugggcugcuccuca

SEQ ID NO: 2834579 - RNA, 16 nt, Human
gccuugggcugcuccu

SEQ ID NO: 2834580 - RNA, 17 nt, Human
gccuuggggaggacaaa

SEQ ID NO: 2834581 - RNA, 20 nt, Human
gccuuggggaggacaaaacu

SEQ ID NO: 2834582 - RNA, 21 nt, Human
gccuuggggaggacaaaacuu

SEQ ID NO: 2834583 - RNA, 23 nt, Human
gccuuggggaggacaaaacuucu

SEQ ID NO: 2834584 - RNA, 21 nt, Human
gccuuuagugaucacagcagc

SEQ ID NO: 2834585 - RNA, 22 nt, Human
gccuuuagugaucacagcagcu

SEQ ID NO: 2834586 - RNA, 19 nt, Human
gccuuuagugaucacagca

SEQ ID NO: 2834587 - RNA, 21 nt, Human
gccuuuaauggacuuauuucu

SEQ ID NO: 2834588 - RNA, 20 nt, Human
gccuuuacauggacagaauu

SEQ ID NO: 2834589 - RNA, 16 nt, Human
gccuuuacugacccug

SEQ ID NO: 2834590 - RNA, 21 nt, Human
gccuuuacugacccuggggcu

SEQ ID NO: 2834591 - RNA, 23 nt, Human
gccuuuacugacccuggggcugg

SEQ ID NO: 2834592 - RNA, 23 nt, Human
gccuucccccucccagggccagg

SEQ ID NO: 2834593 - RNA, 12 nt, Human
gccuuccccuca

SEQ ID NO: 2834594 - RNA, 18 nt, Human
gccuuccccucagccaca

SEQ ID NO: 2834595 - RNA, 18 nt, Human
gccuucccccucccaggg

SEQ ID NO: 2834596 - RNA, 14 nt, Human
gccuucagcuccag

SEQ ID NO: 2834597 - RNA, 17 nt, Human
gccuucagaaccaucca

SEQ ID NO: 2834598 - RNA, 13 nt, Human
gccuucagcucca

SEQ ID NO: 2834599 - RNA, 13 nt, Human
gccuucagcucua

SEQ ID NO: 2834600 - RNA, 20 nt, Human
gccuucacuccggugugccu

SEQ ID NO: 2834601 - RNA, 18 nt, Human
gccuucacauuccccugg

SEQ ID NO: 2834602 - RNA, 22 nt, Human
gccuucacauuccccuggggac

SEQ ID NO: 2834603 - RNA, 22 nt, Human
gccuuuuuaaaacacauguuuu

SEQ ID NO: 2834604 - RNA, 16 nt, Human
gccuuuugcagaagag

SEQ ID NO: 2834605 - RNA, 21 nt, Human
gccuuuugggggugggucugg

SEQ ID NO: 2834606 - RNA, 12 nt, Human
gccuuuuguaua

SEQ ID NO: 2834607 - RNA, 13 nt, Human
gccuuuuguauac

SEQ ID NO: 2834608 - RNA, 14 nt, Human
gccuuuuguauaca

SEQ ID NO: 2834609 - RNA, 22 nt, Human
gccuuuuguauacauccugggu

SEQ ID NO: 2834610 - RNA, 13 nt, Human
gcgaccgcccccu

SEQ ID NO: 2834611 - RNA, 14 nt, Human
gcgaccgcccccuc

SEQ ID NO: 2834612 - RNA, 15 nt, Human
gcgaccgcccccucc

SEQ ID NO: 2834613 - RNA, 22 nt, Human
gcgaccgcccuccgcgaaaaua

SEQ ID NO: 2834614 - RNA, 15 nt, Human
gcgaccuuccucauc

SEQ ID NO: 2834615 - RNA, 22 nt, Human
gcgaccuuccucauccacccca

SEQ ID NO: 2834616 - RNA, 18 nt, Human
gccuuuuuaaaacacaug

SEQ ID NO: 2834617 - RNA, 16 nt, Human
gcgacauagcccaucc

SEQ ID NO: 2834618 - RNA, 17 nt, Human
gcgacauagcccauccc

SEQ ID NO: 2834619 - RNA, 18 nt, Human
gcgacauagcccaucccu

SEQ ID NO: 2834620 - RNA, 21 nt, Human
gcgacauagcccaucccugcc

SEQ ID NO: 2834621 - RNA, 13 nt, Human
gccuuuuaacauu

SEQ ID NO: 2834622 - RNA, 14 nt, Human
gccuuuuaacauuu

SEQ ID NO: 2834623 - RNA, 15 nt, Human
gccuuuuaacauuuu

SEQ ID NO: 2834624 - RNA, 16 nt, Human
gccuuuuaacauuuug

SEQ ID NO: 2834625 - RNA, 20 nt, Human
gccuuuuaacauuuuguucu

SEQ ID NO: 2834626 - RNA, 21 nt, Human
gccuuuuaacauuuuguucuu

SEQ ID NO: 2834627 - RNA, 16 nt, Human
gccuuuuaagaagaaa

SEQ ID NO: 2834628 - RNA, 14 nt, Human
gccuuuuauagcua

SEQ ID NO: 2834629 - RNA, 17 nt, Human
gccuuuucuuuaacuuu

SEQ ID NO: 2834630 - RNA, 12 nt, Human
gccuuuugaaag

SEQ ID NO: 2834631 - RNA, 13 nt, Human
gccuuuucccucu

SEQ ID NO: 2834632 - RNA, 20 nt, Human
gccuuuucccucuuuggcuc

SEQ ID NO: 2834633 - RNA, 13 nt, Human
gccuuugggaaau

SEQ ID NO: 2834634 - RNA, 15 nt, Human
gccuuugggagcagg

SEQ ID NO: 2834635 - RNA, 15 nt, Human
gccuuucaaauuuag

SEQ ID NO: 2834636 - RNA, 14 nt, Human
gccuuuaugguuuc

SEQ ID NO: 2834637 - RNA, 12 nt, Human
gccuggagcccu

SEQ ID NO: 2834638 - RNA, 13 nt, Human
gccuggagcccuc

SEQ ID NO: 2834639 - RNA, 14 nt, Human
gccuggagcccucc

SEQ ID NO: 2834640 - RNA, 20 nt, Human
gccuggagcccuccgccuuc

SEQ ID NO: 2834641 - RNA, 22 nt, Human
gccuggagcccuccgccuucac

SEQ ID NO: 2834642 - RNA, 13 nt, Human
gccugguugaaga

SEQ ID NO: 2834643 - RNA, 15 nt, Human
gccugguugaagaag

SEQ ID NO: 2834644 - RNA, 19 nt, Human
gccugguugaagaagauga

SEQ ID NO: 2834645 - RNA, 17 nt, Human
gccugguggcagcugcg

SEQ ID NO: 2834646 - RNA, 16 nt, Human
gccugguggcagcugc

SEQ ID NO: 2834647 - RNA, 19 nt, Human
gccugucauccuuggucuu

SEQ ID NO: 2834648 - RNA, 14 nt, Human
gccuguccagccug

SEQ ID NO: 2834649 - RNA, 13 nt, Human
gccuguccagccu

SEQ ID NO: 2834650 - RNA, 12 nt, Human
gccuguccagcc

SEQ ID NO: 2834651 - RNA, 15 nt, Human
gccugguggcagcug

SEQ ID NO: 2834652 - RNA, 14 nt, Human
gccugguggcagcu

SEQ ID NO: 2834653 - RNA, 11 nt, Human
gccuggagccc

SEQ ID NO: 2834654 - RNA, 23 nt, Human
gccuggaccugccuccugccugc

SEQ ID NO: 2834655 - RNA, 15 nt, Human
gccuggagacccacc

SEQ ID NO: 2834656 - RNA, 24 nt, Human
gccuggagacccaccccaccugca

SEQ ID NO: 2834657 - RNA, 11 nt, Human
gccuggaccug

SEQ ID NO: 2834658 - RNA, 14 nt, Human
gccuggaccugccu

SEQ ID NO: 2834659 - RNA, 15 nt, Human
gccuggaccugccuc

SEQ ID NO: 2834660 - RNA, 16 nt, Human
gccuggaccugccucc

SEQ ID NO: 2834661 - RNA, 17 nt, Human
gccuggaccugccuccu

SEQ ID NO: 2834662 - RNA, 18 nt, Human
gccuggaccugccuccug

SEQ ID NO: 2834663 - RNA, 19 nt, Human
gccuggaccugccuccugc

SEQ ID NO: 2834664 - RNA, 20 nt, Human
gccuuagaagucacacagua

SEQ ID NO: 2834665 - RNA, 16 nt, Human
gccuuagaaccuuucu

SEQ ID NO: 2834666 - RNA, 20 nt, Human
gccuuagaaauguaaacugc

SEQ ID NO: 2834667 - RNA, 22 nt, Human
gccuuagaaauguaaacugcca

SEQ ID NO: 2834668 - RNA, 23 nt, Human
gccuuagaaauguaaacugccau

SEQ ID NO: 2834669 - RNA, 17 nt, Human
gccuguccagccugggc

SEQ ID NO: 2834670 - RNA, 15 nt, Human
gccuguccagccugg

SEQ ID NO: 2834671 - RNA, 20 nt, Human
gccugucccacccccacccc

SEQ ID NO: 2834672 - RNA, 21 nt, Human
gccugucccauggacacucca

SEQ ID NO: 2834673 - RNA, 22 nt, Human
gccugucccauggacacuccag

SEQ ID NO: 2834674 - RNA, 21 nt, Human
gccuuagccgcccaugcacug

SEQ ID NO: 2834675 - RNA, 13 nt, Human
gccuuagaggagc

SEQ ID NO: 2834676 - RNA, 15 nt, Human
gccuuagaggagccc

SEQ ID NO: 2834677 - RNA, 22 nt, Human
gccuuagggaagcuggccugag

SEQ ID NO: 2834678 - RNA, 15 nt, Human
gccuuagucucaguu

SEQ ID NO: 2834679 - RNA, 15 nt, Human
gccuuagggaagcug

SEQ ID NO: 2834680 - RNA, 15 nt, Human
gccuuaggccuaccu

SEQ ID NO: 2834681 - RNA, 22 nt, Human
gccuuagucucaguuugugugu

SEQ ID NO: 2834682 - RNA, 12 nt, Human
gccuuagugggc

SEQ ID NO: 2834683 - RNA, 18 nt, Human
gccuuagucucaguuugu

SEQ ID NO: 2834684 - RNA, 12 nt, Human
gccuuauuaaag

SEQ ID NO: 2834685 - RNA, 23 nt, Human
gcuagagcagcccaaauuuuucu

SEQ ID NO: 2834686 - RNA, 15 nt, Human
gcuagacacccauuu

SEQ ID NO: 2834687 - RNA, 22 nt, Human
gcuacccuuuuucuccagcugg

SEQ ID NO: 2834688 - RNA, 14 nt, Human
gcuaccguugacuu

SEQ ID NO: 2834689 - RNA, 18 nt, Human
gcuacccuuuuucuccag

SEQ ID NO: 2834690 - RNA, 19 nt, Human
gcuacccuuuuucuccagc

SEQ ID NO: 2834691 - RNA, 20 nt, Human
gcuacccuuuuucuccagcu

SEQ ID NO: 2834692 - RNA, 21 nt, Human
gcuacccuuuuucuccagcug

SEQ ID NO: 2834693 - RNA, 17 nt, Human
gcuacccacuucuaaau

SEQ ID NO: 2834694 - RNA, 15 nt, Human
gcuacccaaaagaga

SEQ ID NO: 2834695 - RNA, 16 nt, Human
gcuacccaaaagagaa

SEQ ID NO: 2834696 - RNA, 19 nt, Human
gcuacccaaaagagaaaaa

SEQ ID NO: 2834697 - RNA, 23 nt, Human
gcuacccaaaagagaaaaaaaau

SEQ ID NO: 2834698 - RNA, 16 nt, Human
gcuacccuuuuucucc

SEQ ID NO: 2834699 - RNA, 14 nt, Human
gcuacccuuuuccu

SEQ ID NO: 2834700 - RNA, 19 nt, Human
gcuacccuuuuccuuugug

SEQ ID NO: 2834701 - RNA, 20 nt, Human
gcuacccuuuuccuuugugg

SEQ ID NO: 2834702 - RNA, 20 nt, Human
gcuaccaaagcaccuuagcu

SEQ ID NO: 2834703 - RNA, 11 nt, Human
gcuacauuaua

SEQ ID NO: 2834704 - RNA, 13 nt, Human
gcuacauuauaaa

SEQ ID NO: 2834705 - RNA, 15 nt, Human
gcuacauuauaaacg

SEQ ID NO: 2834706 - RNA, 17 nt, Human
gcuacauuauaaacgcu

SEQ ID NO: 2834707 - RNA, 16 nt, Human
gcgucgcccucccagg

SEQ ID NO: 2834708 - RNA, 15 nt, Human
gcgugagaccugccc

SEQ ID NO: 2834709 - RNA, 14 nt, Human
gcgugagccacugc

SEQ ID NO: 2834710 - RNA, 15 nt, Human
gcgugagccacugca

SEQ ID NO: 2834711 - RNA, 16 nt, Human
gcgugagaccugcccc

SEQ ID NO: 2834712 - RNA, 13 nt, Human
gcuaacauuuuaa

SEQ ID NO: 2834713 - RNA, 22 nt, Human
gcuaacccccuucuacugagcc

SEQ ID NO: 2834714 - RNA, 19 nt, Human
gcuaaccuuauccugcauu

SEQ ID NO: 2834715 - RNA, 20 nt, Human
gcuaaccuuauccugcauug

SEQ ID NO: 2834716 - RNA, 21 nt, Human
gcuaaccuuauccugcauugu

SEQ ID NO: 2834717 - RNA, 22 nt, Human
gcuaaccuuauccugcauuguu

SEQ ID NO: 2834718 - RNA, 14 nt, Human
gcuaacauuuuaaa

SEQ ID NO: 2834719 - RNA, 17 nt, Human
gcuaacauuuuaaauaa

SEQ ID NO: 2834720 - RNA, 23 nt, Human
gcuaacauuuuaaauaaaagaaa

SEQ ID NO: 2834721 - RNA, 22 nt, Human
gcuaacccagguccccucauuc

SEQ ID NO: 2834722 - RNA, 11 nt, Human
gcuaacugaac

SEQ ID NO: 2834723 - RNA, 15 nt, Human
gcuaacugaacuuug

SEQ ID NO: 2834724 - RNA, 17 nt, Human
gcuaacugaacuuugaa

SEQ ID NO: 2834725 - RNA, 18 nt, Human
gcuaacugaacuuugaag

SEQ ID NO: 2834726 - RNA, 21 nt, Human
gcuaacauuuuaaauaaaaga

SEQ ID NO: 2834727 - RNA, 21 nt, Human
gcuaacccccuucuacugagc

SEQ ID NO: 2834728 - RNA, 18 nt, Human
gcguccguggguugcuaa

SEQ ID NO: 2834729 - RNA, 20 nt, Human
gcggucucaggcugguggga

SEQ ID NO: 2834730 - RNA, 14 nt, Human
gcgcuucccagcac

SEQ ID NO: 2834731 - RNA, 22 nt, Human
gcggucucaggcuggugggagg

SEQ ID NO: 2834732 - RNA, 19 nt, Human
gcggucuucaacauccugc

SEQ ID NO: 2834733 - RNA, 23 nt, Human
gcggucuucaacauccugccagc

SEQ ID NO: 2834734 - RNA, 23 nt, Human
gcgguccacccaggagccccgag

SEQ ID NO: 2834735 - RNA, 19 nt, Human
gcggggacucgguaagcac

SEQ ID NO: 2834736 - RNA, 20 nt, Human
gcgguccacccaggagcccc

SEQ ID NO: 2834737 - RNA, 23 nt, Human
gcggggacagcuccuucuguccu

SEQ ID NO: 2834738 - RNA, 23 nt, Human
gcggacagccacggccaggccag

SEQ ID NO: 2834739 - RNA, 20 nt, Human
gcggaacaaggagucagaca

SEQ ID NO: 2834740 - RNA, 14 nt, Human
gcgcuuugggaggc

SEQ ID NO: 2834741 - RNA, 19 nt, Human
gcggggacagcuccuucug

SEQ ID NO: 2834742 - RNA, 18 nt, Human
gcggggacagcuccuucu

SEQ ID NO: 2834743 - RNA, 19 nt, Human
gcggacagccacggccagg

SEQ ID NO: 2834744 - RNA, 16 nt, Human
gcggacagccacggcc

SEQ ID NO: 2834745 - RNA, 19 nt, Human
gcggaaugaaccacaucuu

SEQ ID NO: 2834746 - RNA, 18 nt, Human
gcgcuguuuuuguugugu

SEQ ID NO: 2834747 - RNA, 21 nt, Human
gcgcuguuuuuguugugugug

SEQ ID NO: 2834748 - RNA, 22 nt, Human
gcgcuguuuuuguugugugugc

SEQ ID NO: 2834749 - RNA, 18 nt, Human
gcgccuacaggagugagc

SEQ ID NO: 2834750 - RNA, 17 nt, Human
gcgcccaguccuuccac

SEQ ID NO: 2834751 - RNA, 17 nt, Human
gcgcccaccuccccacg

SEQ ID NO: 2834752 - RNA, 12 nt, Human
gcgcccaccucc

SEQ ID NO: 2834753 - RNA, 13 nt, Human
gcgcccaccuccc

SEQ ID NO: 2834754 - RNA, 19 nt, Human
gcgccaguguaauccccca

SEQ ID NO: 2834755 - RNA, 23 nt, Human
gcgccaguguaaucccccaggag

SEQ ID NO: 2834756 - RNA, 23 nt, Human
gcgccacucgcuucccccauagc

SEQ ID NO: 2834757 - RNA, 13 nt, Human
gcgacuaauuuca

SEQ ID NO: 2834758 - RNA, 23 nt, Human
gcgacuaauuucaaaaugcuuuu

SEQ ID NO: 2834759 - RNA, 21 nt, Human
gcgacuaauuucaaaaugcuu

SEQ ID NO: 2834760 - RNA, 23 nt, Human
gcgaccuuccucauccaccccau

SEQ ID NO: 2834761 - RNA, 21 nt, Human
gcgccuacaggagugagcacu

SEQ ID NO: 2834762 - RNA, 20 nt, Human
gcgccuacaggagugagcac

SEQ ID NO: 2834763 - RNA, 20 nt, Human
gcgccucaggcugcuggggc

SEQ ID NO: 2834764 - RNA, 20 nt, Human
gcgcucugccucaccgcuuc

SEQ ID NO: 2834765 - RNA, 23 nt, Human
gcgcucuguggaugccagggccg

SEQ ID NO: 2834766 - RNA, 15 nt, Human
gcgcugggcacuucc

SEQ ID NO: 2834767 - RNA, 16 nt, Human
gcgcugggcacuuccc

SEQ ID NO: 2834768 - RNA, 18 nt, Human
gcgcugggcacuucccug

SEQ ID NO: 2834769 - RNA, 19 nt, Human
gcgcugggcacuucccugc

SEQ ID NO: 2834770 - RNA, 20 nt, Human
gcgcugggcacuucccugcu

SEQ ID NO: 2834771 - RNA, 22 nt, Human
gcgcugggcacuucccugcugc

SEQ ID NO: 2834772 - RNA, 17 nt, Human
gcgcuggguauuggaaa

SEQ ID NO: 2834773 - RNA, 19 nt, Human
gccucccgaauagcuggga

SEQ ID NO: 2834774 - RNA, 18 nt, Human
gccucccgaauagcuggg

SEQ ID NO: 2834775 - RNA, 23 nt, Human
gccucccgaguagcugggacuac

SEQ ID NO: 2834776 - RNA, 21 nt, Human
gccucccgaguagcugggacu

SEQ ID NO: 2834777 - RNA, 20 nt, Human
gccucccgaauagcugggac

SEQ ID NO: 2834778 - RNA, 14 nt, Human
gccucagccuccca

SEQ ID NO: 2834779 - RNA, 12 nt, Human
gccucagccucc

SEQ ID NO: 2834780 - RNA, 22 nt, Human
gccucagccucccaaagugcug

SEQ ID NO: 2834781 - RNA, 12 nt, Human
gccuccccaccu

SEQ ID NO: 2834782 - RNA, 13 nt, Human
gccucucccaccc

SEQ ID NO: 2834783 - RNA, 16 nt, Human
gccucuccaggcacca

SEQ ID NO: 2834784 - RNA, 23 nt, Human
gccucuccaggcaccaucucccu

SEQ ID NO: 2834785 - RNA, 22 nt, Human
gccucccugaaaauguuuuucu

SEQ ID NO: 2834786 - RNA, 11 nt, Human
gccucccugaa

SEQ ID NO: 2834787 - RNA, 14 nt, Human
gccucccucaaccc

SEQ ID NO: 2834788 - RNA, 13 nt, Human
gccucccucaacc

SEQ ID NO: 2834789 - RNA, 16 nt, Human
gccucccuagccagca

SEQ ID NO: 2834790 - RNA, 21 nt, Human
gccucccucugaccugcaggc

SEQ ID NO: 2834791 - RNA, 20 nt, Human
gccucccucugaccugcagg

SEQ ID NO: 2834792 - RNA, 14 nt, Human
gccucccucugacc

SEQ ID NO: 2834793 - RNA, 12 nt, Human
gccucccucuga

SEQ ID NO: 2834794 - RNA, 23 nt, Human
gccucccucucucuucugcucca

SEQ ID NO: 2834795 - RNA, 22 nt, Human
gccucccucucucuucugcucc

SEQ ID NO: 2834796 - RNA, 21 nt, Human
gccucccucucucuucugcuc

SEQ ID NO: 2834797 - RNA, 16 nt, Human
gccucccucucucuuc

SEQ ID NO: 2834798 - RNA, 13 nt, Human
gccucucucccuc

SEQ ID NO: 2834799 - RNA, 14 nt, Human
gccucucucccucu

SEQ ID NO: 2834800 - RNA, 21 nt, Human
gccucucccuaggagaagagu

SEQ ID NO: 2834801 - RNA, 12 nt, Human
gccucugcauuc

SEQ ID NO: 2834802 - RNA, 14 nt, Human
gccugaaaggagcc

SEQ ID NO: 2834803 - RNA, 18 nt, Human
gccugaaauuucaccauu

SEQ ID NO: 2834804 - RNA, 23 nt, Human
gccugaaaggagcccuuaucugu

SEQ ID NO: 2834805 - RNA, 17 nt, Human
gccugaaaggagcccuu

SEQ ID NO: 2834806 - RNA, 20 nt, Human
gccugaagaguccucugaau

SEQ ID NO: 2834807 - RNA, 21 nt, Human
gccugaaggaggugagagaag

SEQ ID NO: 2834808 - RNA, 18 nt, Human
gccugaagaguccucuga

SEQ ID NO: 2834809 - RNA, 16 nt, Human
gccugagaggggaagc

SEQ ID NO: 2834810 - RNA, 16 nt, Human
gccucugacacacagc

SEQ ID NO: 2834811 - RNA, 15 nt, Human
gccucugacacacag

SEQ ID NO: 2834812 - RNA, 17 nt, Human
gccugcuggucacagcc

SEQ ID NO: 2834813 - RNA, 18 nt, Human
gccugcuggucacagccu

SEQ ID NO: 2834814 - RNA, 19 nt, Human
gccugcuggucacagccuc

SEQ ID NO: 2834815 - RNA, 21 nt, Human
gccugcuggucacagccuccu

SEQ ID NO: 2834816 - RNA, 12 nt, Human
gccugcccaggc

SEQ ID NO: 2834817 - RNA, 11 nt, Human
gccugcccagg

SEQ ID NO: 2834818 - RNA, 13 nt, Human
gccugcccaccug

SEQ ID NO: 2834819 - RNA, 14 nt, Human
gccugcccaccugc

SEQ ID NO: 2834820 - RNA, 15 nt, Human
gccugcccaccugcc

SEQ ID NO: 2834821 - RNA, 16 nt, Human
gccugcccaccugccu

SEQ ID NO: 2834822 - RNA, 17 nt, Human
gccugcccaccugccug

SEQ ID NO: 2834823 - RNA, 18 nt, Human
gccugcccaccugccugg

SEQ ID NO: 2834824 - RNA, 19 nt, Human
gccugcccaccugccuggc

SEQ ID NO: 2834825 - RNA, 20 nt, Human
gccugcccaccugccuggcc

SEQ ID NO: 2834826 - RNA, 21 nt, Human
gccugcccaccugccuggccg

SEQ ID NO: 2834827 - RNA, 22 nt, Human
gccugagcccuacucccugcag

SEQ ID NO: 2834828 - RNA, 10 nt, Human
gccugcagcc

SEQ ID NO: 2834829 - RNA, 22 nt, Human
gccugagcaacagagugagacc

SEQ ID NO: 2834830 - RNA, 18 nt, Human
gccugagcaacucuugau

SEQ ID NO: 2834831 - RNA, 11 nt, Human
gccugcagccc

SEQ ID NO: 2834832 - RNA, 17 nt, Human
gccugcaggaccugccu

SEQ ID NO: 2834833 - RNA, 16 nt, Human
gccugcaggaccugcc

SEQ ID NO: 2834834 - RNA, 14 nt, Human
gccugcaggaccug

SEQ ID NO: 2834835 - RNA, 21 nt, Human
gccugcaggaccugccuguag

SEQ ID NO: 2834836 - RNA, 20 nt, Human
gccugcaggaccugccugua

SEQ ID NO: 2834837 - RNA, 19 nt, Human
gccugcaggaccugccugu

SEQ ID NO: 2834838 - RNA, 18 nt, Human
gccugcaggaccugccug

SEQ ID NO: 2834839 - RNA, 10 nt, Human
gccugccaug

SEQ ID NO: 2834840 - RNA, 14 nt, Human
gccugccauguacc

SEQ ID NO: 2834841 - RNA, 15 nt, Human
gccugccauguaccu

SEQ ID NO: 2834842 - RNA, 20 nt, Human
gccugccauguaccuccccu

SEQ ID NO: 2834843 - RNA, 17 nt, Human
gccugcccaagcccagg

SEQ ID NO: 2834844 - RNA, 20 nt, Human
gccugcccaagcccaggcca

SEQ ID NO: 2834845 - RNA, 21 nt, Human
gccugcccaagcccaggccac

SEQ ID NO: 2834846 - RNA, 19 nt, Human
gccccaucggucaccuugu

SEQ ID NO: 2834847 - RNA, 22 nt, Human
gcccuuccucuccacugccuuc

SEQ ID NO: 2834848 - RNA, 12 nt, Human
gcccucuuccug

SEQ ID NO: 2834849 - RNA, 13 nt, Human
gcccucuuccuga

SEQ ID NO: 2834850 - RNA, 13 nt, Human
gccgaccuuagau

SEQ ID NO: 2834851 - RNA, 22 nt, Human
gcccuugcaguucagcaccacc

SEQ ID NO: 2834852 - RNA, 21 nt, Human
gcccuugcaguucagcaccac

SEQ ID NO: 2834853 - RNA, 20 nt, Human
gcccuugcaguucagcacca

SEQ ID NO: 2834854 - RNA, 19 nt, Human
gcccuugcaguucagcacc

SEQ ID NO: 2834855 - RNA, 14 nt, Human
gcccuugagggaga

SEQ ID NO: 2834856 - RNA, 16 nt, Human
gcccuucuuccccuuc

SEQ ID NO: 2834857 - RNA, 22 nt, Human
gccgacugcacagcggccccug

SEQ ID NO: 2834858 - RNA, 16 nt, Human
gccgcaaaccacacug

SEQ ID NO: 2834859 - RNA, 17 nt, Human
gccgcaaaccacacugg

SEQ ID NO: 2834860 - RNA, 19 nt, Human
gccgcaaaccacacuggac

SEQ ID NO: 2834861 - RNA, 21 nt, Human
gccgcaaaccacacuggacuc

SEQ ID NO: 2834862 - RNA, 16 nt, Human
gccgaggguccuggcu

SEQ ID NO: 2834863 - RNA, 20 nt, Human
gccgaggguccuggcuccug

SEQ ID NO: 2834864 - RNA, 18 nt, Human
gccgaggguccuggcucc

SEQ ID NO: 2834865 - RNA, 22 nt, Human
gccgauauacucuagaugaagu

SEQ ID NO: 2834866 - RNA, 17 nt, Human
gccgauauacucuagau

SEQ ID NO: 2834867 - RNA, 17 nt, Human
gccgauucaccugagca

SEQ ID NO: 2834868 - RNA, 13 nt, Human
gccgauggagaca

SEQ ID NO: 2834869 - RNA, 21 nt, Human
gccgauggagacaccaaccga

SEQ ID NO: 2834870 - RNA, 22 nt, Human
gccgggcacauugagcugugca

SEQ ID NO: 2834871 - RNA, 19 nt, Human
gccgggccgaauccccucc

SEQ ID NO: 2834872 - RNA, 16 nt, Human
gccggggacagaggcc

SEQ ID NO: 2834873 - RNA, 23 nt, Human
gccggggacagaggccugcccgg

SEQ ID NO: 2834874 - RNA, 19 nt, Human
gccggggacagaggccugc

SEQ ID NO: 2834875 - RNA, 21 nt, Human
gccggggacagaggccugccc

SEQ ID NO: 2834876 - RNA, 22 nt, Human
gccgggguggagcaugggccug

SEQ ID NO: 2834877 - RNA, 17 nt, Human
gccuaaaaaugcaacuu

SEQ ID NO: 2834878 - RNA, 18 nt, Human
gccuaaaacuggccugac

SEQ ID NO: 2834879 - RNA, 23 nt, Human
gccuaaaagugggcuugauucug

SEQ ID NO: 2834880 - RNA, 12 nt, Human
gccuaaaaucuu

SEQ ID NO: 2834881 - RNA, 13 nt, Human
gccuaaaaucuug

SEQ ID NO: 2834882 - RNA, 20 nt, Human
gccuaaaaucuuggaaguac

SEQ ID NO: 2834883 - RNA, 13 nt, Human
gccguuguuuacu

SEQ ID NO: 2834884 - RNA, 14 nt, Human
gccuaaaaaugcaa

SEQ ID NO: 2834885 - RNA, 20 nt, Human
gccguugauguuggcuggga

SEQ ID NO: 2834886 - RNA, 17 nt, Human
gccguugauguuggcug

SEQ ID NO: 2834887 - RNA, 19 nt, Human
gccguugauguuggcuggg

SEQ ID NO: 2834888 - RNA, 11 nt, Human
gccguggcuuc

SEQ ID NO: 2834889 - RNA, 12 nt, Human
gccguggcuucc

SEQ ID NO: 2834890 - RNA, 18 nt, Human
gccguugaagaggaaggg

SEQ ID NO: 2834891 - RNA, 13 nt, Human
gccguggcuuccc

SEQ ID NO: 2834892 - RNA, 11 nt, Human
gccgucucaac

SEQ ID NO: 2834893 - RNA, 12 nt, Human
gccgucucugga

SEQ ID NO: 2834894 - RNA, 16 nt, Human
gccgugcauuagcaca

SEQ ID NO: 2834895 - RNA, 19 nt, Human
gccgugcauuagcacagau

SEQ ID NO: 2834896 - RNA, 15 nt, Human
gccgugaacugugca

SEQ ID NO: 2834897 - RNA, 16 nt, Human
gccgugaacugugcau

SEQ ID NO: 2834898 - RNA, 20 nt, Human
gccuaaaggauagaucaaag

SEQ ID NO: 2834899 - RNA, 15 nt, Human
gccuaagacauguaa

SEQ ID NO: 2834900 - RNA, 22 nt, Human
gccuaaaagugggcuugauucu

SEQ ID NO: 2834901 - RNA, 18 nt, Human
gccuaacuacuaguuuuu

SEQ ID NO: 2834902 - RNA, 17 nt, Human
gccuauuuaccugcagg

SEQ ID NO: 2834903 - RNA, 20 nt, Human
gccuauuuaccugcaggcug

SEQ ID NO: 2834904 - RNA, 15 nt, Human
gccucaaaggcccgc

SEQ ID NO: 2834905 - RNA, 12 nt, Human
gccucaaaaugu

SEQ ID NO: 2834906 - RNA, 13 nt, Human
gccucaaaaugug

SEQ ID NO: 2834907 - RNA, 14 nt, Human
gccucaaaaugugu

SEQ ID NO: 2834908 - RNA, 17 nt, Human
gccucaaaggcccgcuc

SEQ ID NO: 2834909 - RNA, 18 nt, Human
gccuaagcauugccuggc

SEQ ID NO: 2834910 - RNA, 21 nt, Human
gccuaagcauugccuggccuu

SEQ ID NO: 2834911 - RNA, 21 nt, Human
gccucagcauccuggcacccg

SEQ ID NO: 2834912 - RNA, 17 nt, Human
gccucagcauccuggca

SEQ ID NO: 2834913 - RNA, 18 nt, Human
gccucagcauccuggcac

SEQ ID NO: 2834914 - RNA, 24 nt, Human
gccucaagugauucuccugccuca

SEQ ID NO: 2834915 - RNA, 22 nt, Human
gccucaagugauucuccugccu

SEQ ID NO: 2834916 - RNA, 23 nt, Human
gccucacacgguuugaagccugg

SEQ ID NO: 2834917 - RNA, 21 nt, Human
ggcagcuugaggguugggcug

SEQ ID NO: 2834918 - RNA, 19 nt, Human
ggcagcugcgguccaccca

SEQ ID NO: 2834919 - RNA, 13 nt, Human
ggcagguccaggg

SEQ ID NO: 2834920 - RNA, 23 nt, Human
ggcaggaaggagagccugcugca

SEQ ID NO: 2834921 - RNA, 18 nt, Human
ggcagaggaugucucaaa

SEQ ID NO: 2834922 - RNA, 20 nt, Human
ggcagguagccagggggacu

SEQ ID NO: 2834923 - RNA, 14 nt, Human
ggcaggaaggcuga

SEQ ID NO: 2834924 - RNA, 16 nt, Human
ggcaggaaggagagcc

SEQ ID NO: 2834925 - RNA, 15 nt, Human
ggcaggaaggagagc

SEQ ID NO: 2834926 - RNA, 14 nt, Human
ggcagcuuucuaga

SEQ ID NO: 2834927 - RNA, 23 nt, Human
ggcaggucuugaacuccuggccu

SEQ ID NO: 2834928 - RNA, 15 nt, Human
ggcagguccuggcca

SEQ ID NO: 2834929 - RNA, 21 nt, Human
ggcagaguuuguguguugucu

SEQ ID NO: 2834930 - RNA, 23 nt, Human
ggcagauacaggaaaagcugcug

SEQ ID NO: 2834931 - RNA, 20 nt, Human
ggcagauaaucagccucuua

SEQ ID NO: 2834932 - RNA, 19 nt, Human
ggcagauaaucagccucuu

SEQ ID NO: 2834933 - RNA, 18 nt, Human
ggcagauaaucagccucu

SEQ ID NO: 2834934 - RNA, 15 nt, Human
ggcagauaaucagcc

SEQ ID NO: 2834935 - RNA, 13 nt, Human
ggcagagcuucuu

SEQ ID NO: 2834936 - RNA, 17 nt, Human
ggcagagcuuggacugg

SEQ ID NO: 2834937 - RNA, 21 nt, Human
ggcagagcuuggacuggaugc

SEQ ID NO: 2834938 - RNA, 20 nt, Human
ggcagaucugugccccaugc

SEQ ID NO: 2834939 - RNA, 16 nt, Human
ggcagaugacaagaug

SEQ ID NO: 2834940 - RNA, 18 nt, Human
ggcagaucugugccccau

SEQ ID NO: 2834941 - RNA, 17 nt, Human
ggcagaucugugcccca

SEQ ID NO: 2834942 - RNA, 16 nt, Human
ggcagaucugugcccc

SEQ ID NO: 2834943 - RNA, 15 nt, Human
ggcagaucugugccc

SEQ ID NO: 2834944 - RNA, 14 nt, Human
ggcagaucaccuga

SEQ ID NO: 2834945 - RNA, 18 nt, Human
ggcagaucaccugagguc

SEQ ID NO: 2834946 - RNA, 15 nt, Human
ggcagcaauuuaaau

SEQ ID NO: 2834947 - RNA, 16 nt, Human
ggcagcaauuuaaaug

SEQ ID NO: 2834948 - RNA, 21 nt, Human
ggcagcaccugucuccuuuca

SEQ ID NO: 2834949 - RNA, 13 nt, Human
ggcagcagaaaac

SEQ ID NO: 2834950 - RNA, 14 nt, Human
ggcagcagaaaacu

SEQ ID NO: 2834951 - RNA, 22 nt, Human
ggauccccucugucuacaaaua

SEQ ID NO: 2834952 - RNA, 17 nt, Human
ggcaaccugauuguaaa

SEQ ID NO: 2834953 - RNA, 18 nt, Human
ggcaaccugauuguaaac

SEQ ID NO: 2834954 - RNA, 19 nt, Human
ggcaaccuugucucuaugc

SEQ ID NO: 2834955 - RNA, 15 nt, Human
ggcaaccuugucucu

SEQ ID NO: 2834956 - RNA, 18 nt, Human
ggcaacuaagcagucccu

SEQ ID NO: 2834957 - RNA, 19 nt, Human
ggcaacuaagcagucccug

SEQ ID NO: 2834958 - RNA, 12 nt, Human
ggcaacuggcca

SEQ ID NO: 2834959 - RNA, 18 nt, Human
ggcaacuugggaacuaga

SEQ ID NO: 2834960 - RNA, 23 nt, Human
ggcaacuugggaacuagacuccc

SEQ ID NO: 2834961 - RNA, 19 nt, Human
ggcaacccccagccugcua

SEQ ID NO: 2834962 - RNA, 21 nt, Human
ggaucaucuaauucucugugg

SEQ ID NO: 2834963 - RNA, 12 nt, Human
ggaucaugaaag

SEQ ID NO: 2834964 - RNA, 19 nt, Human
ggaucaugaaaguagacag

SEQ ID NO: 2834965 - RNA, 21 nt, Human
ggaucaugguguaauaagaca

SEQ ID NO: 2834966 - RNA, 16 nt, Human
ggaucaugguguaaua

SEQ ID NO: 2834967 - RNA, 19 nt, Human
ggaucaugguguaauaaga

SEQ ID NO: 2834968 - RNA, 21 nt, Human
ggaucagucugauucccaagc

SEQ ID NO: 2834969 - RNA, 21 nt, Human
ggaucaguuaacuauugcauu

SEQ ID NO: 2834970 - RNA, 12 nt, Human
ggaucaguuuuu

SEQ ID NO: 2834971 - RNA, 13 nt, Human
ggaucauaaaguu

SEQ ID NO: 2834972 - RNA, 19 nt, Human
ggaucaucaacaagauuuc

SEQ ID NO: 2834973 - RNA, 18 nt, Human
ggaucaucaugcagcuca

SEQ ID NO: 2834974 - RNA, 21 nt, Human
ggaucagaugaacucuuagaa

SEQ ID NO: 2834975 - RNA, 12 nt, Human
ggaucagaauag

SEQ ID NO: 2834976 - RNA, 15 nt, Human
ggaucagagcaggac

SEQ ID NO: 2834977 - RNA, 16 nt, Human
ggaucagagcaggacc

SEQ ID NO: 2834978 - RNA, 17 nt, Human
ggaucagagcaggaccu

SEQ ID NO: 2834979 - RNA, 18 nt, Human
ggaucagagcaggaccuc

SEQ ID NO: 2834980 - RNA, 22 nt, Human
ggaucagagcaggaccucccuu

SEQ ID NO: 2834981 - RNA, 13 nt, Human
ggaucagccagga

SEQ ID NO: 2834982 - RNA, 16 nt, Human
ggaucagaugaacucu

SEQ ID NO: 2834983 - RNA, 23 nt, Human
ggcaccuccuacgucaaacauga

SEQ ID NO: 2834984 - RNA, 22 nt, Human
ggcaccuauagucccagcuacu

SEQ ID NO: 2834985 - RNA, 19 nt, Human
ggcaccuauagucccagcu

SEQ ID NO: 2834986 - RNA, 18 nt, Human
ggcaccuauagucccagc

SEQ ID NO: 2834987 - RNA, 16 nt, Human
ggcacccggccccugc

SEQ ID NO: 2834988 - RNA, 15 nt, Human
ggcacccggccccug

SEQ ID NO: 2834989 - RNA, 19 nt, Human
ggcaacuggccauuugcca

SEQ ID NO: 2834990 - RNA, 21 nt, Human
ggcaacuucaguccugggaga

SEQ ID NO: 2834991 - RNA, 23 nt, Human
ggcaacuucaguccugggagacc

SEQ ID NO: 2834992 - RNA, 13 nt, Human
ggcaaggcugugc

SEQ ID NO: 2834993 - RNA, 14 nt, Human
ggcaaggcugugcu

SEQ ID NO: 2834994 - RNA, 22 nt, Human
ggcaagucccugacucucugug

SEQ ID NO: 2834995 - RNA, 23 nt, Human
ggcaagucccugacucucuguga

SEQ ID NO: 2834996 - RNA, 13 nt, Human
ggcaagugugggc

SEQ ID NO: 2834997 - RNA, 13 nt, Human
ggccaugggccuc

SEQ ID NO: 2834998 - RNA, 21 nt, Human
ggccauggagagcuggagccu

SEQ ID NO: 2834999 - RNA, 13 nt, Human
ggccauggcagaa

SEQ ID NO: 2835000 - RNA, 16 nt, Human
ggccaggcugcucuug

SEQ ID NO: 2835001 - RNA, 22 nt, Human
ggccauggagagcuggagccug

SEQ ID NO: 2835002 - RNA, 24 nt, Human
ggcccccacauuugugccgacacu

SEQ ID NO: 2835003 - RNA, 20 nt, Human
ggcccccaccacacauccca

SEQ ID NO: 2835004 - RNA, 21 nt, Human
ggcccccaccacacaucccag

SEQ ID NO: 2835005 - RNA, 22 nt, Human
ggcccccaccacacaucccagc

SEQ ID NO: 2835006 - RNA, 15 nt, Human
ggccccccagcucag

SEQ ID NO: 2835007 - RNA, 17 nt, Human
ggccccccagcucaggg

SEQ ID NO: 2835008 - RNA, 19 nt, Human
ggccccccagcucaggggc

SEQ ID NO: 2835009 - RNA, 21 nt, Human
ggccccccagcucaggggcag

SEQ ID NO: 2835010 - RNA, 23 nt, Human
ggccccccagcucaggggcagcu

SEQ ID NO: 2835011 - RNA, 13 nt, Human
ggcccccugcccg

SEQ ID NO: 2835012 - RNA, 11 nt, Human
ggcccccugcc

SEQ ID NO: 2835013 - RNA, 20 nt, Human
ggcccccucucaggagccau

SEQ ID NO: 2835014 - RNA, 14 nt, Human
ggccccccugcccu

SEQ ID NO: 2835015 - RNA, 16 nt, Human
ggccccccugcccugu

SEQ ID NO: 2835016 - RNA, 17 nt, Human
ggccccggaucagagca

SEQ ID NO: 2835017 - RNA, 18 nt, Human
ggccccggaucagagcag

SEQ ID NO: 2835018 - RNA, 23 nt, Human
ggccccggaucagagcaggaccu

SEQ ID NO: 2835019 - RNA, 24 nt, Human
ggccccggaucagagcaggaccuc

SEQ ID NO: 2835020 - RNA, 14 nt, Human
ggccccgccgccug

SEQ ID NO: 2835021 - RNA, 15 nt, Human
ggccccgccgccugg

SEQ ID NO: 2835022 - RNA, 18 nt, Human
ggccccgccgccugguac

SEQ ID NO: 2835023 - RNA, 17 nt, Human
ggcccccuggucucugg

SEQ ID NO: 2835024 - RNA, 18 nt, Human
ggcccccuggucucuggu

SEQ ID NO: 2835025 - RNA, 12 nt, Human
ggccccugccac

SEQ ID NO: 2835026 - RNA, 16 nt, Human
ggccccugccacccug

SEQ ID NO: 2835027 - RNA, 13 nt, Human
ggccccugccacc

SEQ ID NO: 2835028 - RNA, 13 nt, Human
ggccccugcccgg

SEQ ID NO: 2835029 - RNA, 18 nt, Human
ggccccugccacccuggg

SEQ ID NO: 2835030 - RNA, 17 nt, Human
ggccccugccacccugg

SEQ ID NO: 2835031 - RNA, 13 nt, Human
ggccaauccccag

SEQ ID NO: 2835032 - RNA, 14 nt, Human
ggccccucugaccu

SEQ ID NO: 2835033 - RNA, 17 nt, Human
ggccaauggaaaccuca

SEQ ID NO: 2835034 - RNA, 22 nt, Human
ggccaauggaaaccucacgcug

SEQ ID NO: 2835035 - RNA, 23 nt, Human
ggcauguucucugaggacacuaa

SEQ ID NO: 2835036 - RNA, 15 nt, Human
ggcagugagugagcc

SEQ ID NO: 2835037 - RNA, 16 nt, Human
ggcagugagugagccu

SEQ ID NO: 2835038 - RNA, 18 nt, Human
ggcagugagugagccugg

SEQ ID NO: 2835039 - RNA, 19 nt, Human
ggcagugagugagccuggc

SEQ ID NO: 2835040 - RNA, 24 nt, Human
ggcagugcuagugagcugggcaug

SEQ ID NO: 2835041 - RNA, 16 nt, Human
ggcauguuuccagcag

SEQ ID NO: 2835042 - RNA, 19 nt, Human
ggcauguuuugugcauuug

SEQ ID NO: 2835043 - RNA, 16 nt, Human
ggcauuaacacaaagg

SEQ ID NO: 2835044 - RNA, 16 nt, Human
ggcauuaauguuucua

SEQ ID NO: 2835045 - RNA, 17 nt, Human
ggcauuaauguuucuau

SEQ ID NO: 2835046 - RNA, 20 nt, Human
ggcauuauguccacugugua

SEQ ID NO: 2835047 - RNA, 20 nt, Human
ggcauuagaauuauuuaaac

SEQ ID NO: 2835048 - RNA, 17 nt, Human
ggcauuagaauuauuua

SEQ ID NO: 2835049 - RNA, 19 nt, Human
ggcauuagaauuauuuaaa

SEQ ID NO: 2835050 - RNA, 14 nt, Human
ggcagucucucucu

SEQ ID NO: 2835051 - RNA, 16 nt, Human
ggccaggccagaggga

SEQ ID NO: 2835052 - RNA, 14 nt, Human
ggccaggccagagg

SEQ ID NO: 2835053 - RNA, 20 nt, Human
ggccaggaguuugagaccag

SEQ ID NO: 2835054 - RNA, 15 nt, Human
ggccaggagcucuuc

SEQ ID NO: 2835055 - RNA, 15 nt, Human
ggccaggcagaucug

SEQ ID NO: 2835056 - RNA, 22 nt, Human
ggccaggcagaucugugcccca

SEQ ID NO: 2835057 - RNA, 12 nt, Human
ggccaggcaggu

SEQ ID NO: 2835058 - RNA, 11 nt, Human
ggccaggcugg

SEQ ID NO: 2835059 - RNA, 17 nt, Human
ggccaggccagcugccu

SEQ ID NO: 2835060 - RNA, 15 nt, Human
ggccaggccagcugc

SEQ ID NO: 2835061 - RNA, 11 nt, Human
ggccaggcagg

SEQ ID NO: 2835062 - RNA, 13 nt, Human
ggccaggagcucu

SEQ ID NO: 2835063 - RNA, 19 nt, Human
ggccaggaguuugagacca

SEQ ID NO: 2835064 - RNA, 14 nt, Human
ggccacugaagaua

SEQ ID NO: 2835065 - RNA, 13 nt, Human
ggccacugcuccc

SEQ ID NO: 2835066 - RNA, 20 nt, Human
ggccacugcucccuaagcca

SEQ ID NO: 2835067 - RNA, 22 nt, Human
ggccacugcucccuaagccagc

SEQ ID NO: 2835068 - RNA, 13 nt, Human
ggccaccugccug

SEQ ID NO: 2835069 - RNA, 14 nt, Human
ggccaccugccugc

SEQ ID NO: 2835070 - RNA, 15 nt, Human
ggccaccugccugcg

SEQ ID NO: 2835071 - RNA, 21 nt, Human
ggccaccugccugcgucuucc

SEQ ID NO: 2835072 - RNA, 21 nt, Human
ggagccgagaucacgccacug

SEQ ID NO: 2835073 - RNA, 13 nt, Human
ggagcccuugggu

SEQ ID NO: 2835074 - RNA, 12 nt, Human
ggaggagcaaag

SEQ ID NO: 2835075 - RNA, 13 nt, Human
ggaggagaaugag

SEQ ID NO: 2835076 - RNA, 17 nt, Human
ggaggagcaaaggcuga

SEQ ID NO: 2835077 - RNA, 15 nt, Human
ggaggagcacaguuu

SEQ ID NO: 2835078 - RNA, 20 nt, Human
ggaggaggacccuggaaaug

SEQ ID NO: 2835079 - RNA, 22 nt, Human
ggaggagcuuuguuuugggggu

SEQ ID NO: 2835080 - RNA, 17 nt, Human
ggaggagcagugcaggc

SEQ ID NO: 2835081 - RNA, 15 nt, Human
ggaggagcuucuggg

SEQ ID NO: 2835082 - RNA, 21 nt, Human
ggaggaucacuggagcccagg

SEQ ID NO: 2835083 - RNA, 20 nt, Human
ggaggaucacuggagcccag

SEQ ID NO: 2835084 - RNA, 19 nt, Human
ggaggaucacuggagccca

SEQ ID NO: 2835085 - RNA, 17 nt, Human
ggaggaucacuggagcc

SEQ ID NO: 2835086 - RNA, 16 nt, Human
ggaggaucacuggagc

SEQ ID NO: 2835087 - RNA, 15 nt, Human
ggaggagugagacag

SEQ ID NO: 2835088 - RNA, 20 nt, Human
ggaggagguggcagcccugu

SEQ ID NO: 2835089 - RNA, 15 nt, Human
ggaggauguucuggg

SEQ ID NO: 2835090 - RNA, 20 nt, Human
ggaggaugucccugggccag

SEQ ID NO: 2835091 - RNA, 21 nt, Human
ggaggaugucccugggccagg

SEQ ID NO: 2835092 - RNA, 20 nt, Human
ggaggaucuuuugaacccag

SEQ ID NO: 2835093 - RNA, 22 nt, Human
ggaggaucacuggagcccagga

SEQ ID NO: 2835094 - RNA, 15 nt, Human
ggaggaggguugugc

SEQ ID NO: 2835095 - RNA, 18 nt, Human
ggaggaucaguuuuuugu

SEQ ID NO: 2835096 - RNA, 16 nt, Human
ggagggagcagacagg

SEQ ID NO: 2835097 - RNA, 21 nt, Human
ggagggcacauuccuugccug

SEQ ID NO: 2835098 - RNA, 21 nt, Human
ggagugacagaggcagcccca

SEQ ID NO: 2835099 - RNA, 19 nt, Human
ggagugacagaggcagccc

SEQ ID NO: 2835100 - RNA, 18 nt, Human
ggagugacagaggcagcc

SEQ ID NO: 2835101 - RNA, 17 nt, Human
ggagugacagaggcagc

SEQ ID NO: 2835102 - RNA, 14 nt, Human
ggagugagcugguu

SEQ ID NO: 2835103 - RNA, 12 nt, Human
ggagugagcugg

SEQ ID NO: 2835104 - RNA, 13 nt, Human
ggaucacuggagc

SEQ ID NO: 2835105 - RNA, 18 nt, Human
ggaucacaggugucagcc

SEQ ID NO: 2835106 - RNA, 22 nt, Human
ggaucacaggugucagccauug

SEQ ID NO: 2835107 - RNA, 19 nt, Human
ggaucacgacgcugcagag

SEQ ID NO: 2835108 - RNA, 17 nt, Human
ggauaggagccugcugg

SEQ ID NO: 2835109 - RNA, 19 nt, Human
ggaucacuggagcccagga

SEQ ID NO: 2835110 - RNA, 18 nt, Human
ggaucacuggagcccagg

SEQ ID NO: 2835111 - RNA, 17 nt, Human
ggaucacuggagcccag

SEQ ID NO: 2835112 - RNA, 14 nt, Human
ggaucacuggagcc

SEQ ID NO: 2835113 - RNA, 14 nt, Human
ggauaggagccugc

SEQ ID NO: 2835114 - RNA, 15 nt, Human
ggauaggagccugcu

SEQ ID NO: 2835115 - RNA, 13 nt, Human
ggauagcauuuuu

SEQ ID NO: 2835116 - RNA, 16 nt, Human
ggagugacagaggcag

SEQ ID NO: 2835117 - RNA, 11 nt, Human
ggagugacaga

SEQ ID NO: 2835118 - RNA, 18 nt, Human
ggagucuggagugggcag

SEQ ID NO: 2835119 - RNA, 18 nt, Human
ggagucuguccugugacg

SEQ ID NO: 2835120 - RNA, 21 nt, Human
ggagucccaccuuggcugcag

SEQ ID NO: 2835121 - RNA, 20 nt, Human
ggagucccaccuuggcugca

SEQ ID NO: 2835122 - RNA, 17 nt, Human
ggagucccaaggaaagc

SEQ ID NO: 2835123 - RNA, 16 nt, Human
ggagucccaaggaaag

SEQ ID NO: 2835124 - RNA, 15 nt, Human
ggaguccaggcacag

SEQ ID NO: 2835125 - RNA, 16 nt, Human
ggaguccaggcacagg

SEQ ID NO: 2835126 - RNA, 17 nt, Human
ggaguccaggcacagga

SEQ ID NO: 2835127 - RNA, 17 nt, Human
ggaggggaaaaaaaugu

SEQ ID NO: 2835128 - RNA, 18 nt, Human
ggaggggaaaaaaauguu

SEQ ID NO: 2835129 - RNA, 13 nt, Human
ggaggggaagcug

SEQ ID NO: 2835130 - RNA, 14 nt, Human
ggaggggaagcugc

SEQ ID NO: 2835131 - RNA, 17 nt, Human
ggaggggaagcugcagc

SEQ ID NO: 2835132 - RNA, 22 nt, Human
ggacccagggaacagccacucc

SEQ ID NO: 2835133 - RNA, 16 nt, Human
ggacccagggaacagc

SEQ ID NO: 2835134 - RNA, 12 nt, Human
ggacccaggcuc

SEQ ID NO: 2835135 - RNA, 13 nt, Human
ggacccaggcucc

SEQ ID NO: 2835136 - RNA, 17 nt, Human
ggacccaggcuccgccc

SEQ ID NO: 2835137 - RNA, 23 nt, Human
ggacccagccgccaucagcccaa

SEQ ID NO: 2835138 - RNA, 17 nt, Human
ggacccagcgggcaggu

SEQ ID NO: 2835139 - RNA, 18 nt, Human
ggacccagcgggcagguu

SEQ ID NO: 2835140 - RNA, 15 nt, Human
ggaccaggacucccu

SEQ ID NO: 2835141 - RNA, 17 nt, Human
ggaccaggacucccucc

SEQ ID NO: 2835142 - RNA, 12 nt, Human
ggaccccagaga

SEQ ID NO: 2835143 - RNA, 21 nt, Human
ggaccccagagauucccaagc

SEQ ID NO: 2835144 - RNA, 19 nt, Human
ggacccauagaucuucuga

SEQ ID NO: 2835145 - RNA, 20 nt, Human
ggacccauagaucuucugaa

SEQ ID NO: 2835146 - RNA, 15 nt, Human
ggaccucucccaggg

SEQ ID NO: 2835147 - RNA, 14 nt, Human
ggaccucucccagg

SEQ ID NO: 2835148 - RNA, 12 nt, Human
ggaccucuccca

SEQ ID NO: 2835149 - RNA, 20 nt, Human
ggaccucuacuuuccaggcu

SEQ ID NO: 2835150 - RNA, 19 nt, Human
ggaaggaggggaagcugca

SEQ ID NO: 2835151 - RNA, 20 nt, Human
ggaaggaggggaagcugcag

SEQ ID NO: 2835152 - RNA, 20 nt, Human
ggaaggaggguacagcuggg

SEQ ID NO: 2835153 - RNA, 17 nt, Human
ggaaggagagccugcug

SEQ ID NO: 2835154 - RNA, 16 nt, Human
ggaaggagagccugcu

SEQ ID NO: 2835155 - RNA, 15 nt, Human
ggaaggagagccugc

SEQ ID NO: 2835156 - RNA, 14 nt, Human
ggaaggagagccug

SEQ ID NO: 2835157 - RNA, 16 nt, Human
ggaaggaggagccgac

SEQ ID NO: 2835158 - RNA, 11 nt, Human
ggacucugccu

SEQ ID NO: 2835159 - RNA, 21 nt, Human
ggacucugcaucccagcaccu

SEQ ID NO: 2835160 - RNA, 17 nt, Human
ggacucuggugccucca

SEQ ID NO: 2835161 - RNA, 18 nt, Human
ggacucuggugccuccag

SEQ ID NO: 2835162 - RNA, 13 nt, Human
ggacucugaggcu

SEQ ID NO: 2835163 - RNA, 11 nt, Human
ggacucugagg

SEQ ID NO: 2835164 - RNA, 21 nt, Human
ggacucugaggcucuuucugg

SEQ ID NO: 2835165 - RNA, 13 nt, Human
ggacucugcacau

SEQ ID NO: 2835166 - RNA, 21 nt, Human
ggacucugcacaugucuugua

SEQ ID NO: 2835167 - RNA, 15 nt, Human
ggacucugcacauga

SEQ ID NO: 2835168 - RNA, 20 nt, Human
ggacucugcacaugucuugu

SEQ ID NO: 2835169 - RNA, 14 nt, Human
ggacucgcuuguaa

SEQ ID NO: 2835170 - RNA, 16 nt, Human
ggacucgcuuguaaau

SEQ ID NO: 2835171 - RNA, 17 nt, Human
ggacucugaagccucug

SEQ ID NO: 2835172 - RNA, 19 nt, Human
ggacucugaagccucuggg

SEQ ID NO: 2835173 - RNA, 15 nt, Human
ggacucugagcggga

SEQ ID NO: 2835174 - RNA, 19 nt, Human
ggacucugagcgggaggca

SEQ ID NO: 2835175 - RNA, 21 nt, Human
ggacucugagcgggaggcaga

SEQ ID NO: 2835176 - RNA, 20 nt, Human
ggaccuuacgaucaggcaca

SEQ ID NO: 2835177 - RNA, 21 nt, Human
ggaccuuacgaucaggcacag

SEQ ID NO: 2835178 - RNA, 17 nt, Human
ggaccugguacccuccu

SEQ ID NO: 2835179 - RNA, 18 nt, Human
ggaccuguauuuaagcaa

SEQ ID NO: 2835180 - RNA, 20 nt, Human
ggaccuguauuuaagcaaau

SEQ ID NO: 2835181 - RNA, 22 nt, Human
ggaccuguauuuaagcaaauac

SEQ ID NO: 2835182 - RNA, 23 nt, Human
ggaccuguauuuaagcaaauacu

SEQ ID NO: 2835183 - RNA, 18 nt, Human
ggaccuuaggccuuccuc

SEQ ID NO: 2835184 - RNA, 21 nt, Human
ggaccuuaggccuuccucucu

SEQ ID NO: 2835185 - RNA, 15 nt, Human
ggacuccucugucca

SEQ ID NO: 2835186 - RNA, 14 nt, Human
ggacuccucugucc

SEQ ID NO: 2835187 - RNA, 12 nt, Human
ggacuccucugu

SEQ ID NO: 2835188 - RNA, 19 nt, Human
ggaccugaaauuccaaagu

SEQ ID NO: 2835189 - RNA, 22 nt, Human
ggaccugccuccugccugcccc

SEQ ID NO: 2835190 - RNA, 14 nt, Human
ggaccugccuguag

SEQ ID NO: 2835191 - RNA, 19 nt, Human
ggaccugccuccugccugc

SEQ ID NO: 2835192 - RNA, 13 nt, Human
ggaccuggggcac

SEQ ID NO: 2835193 - RNA, 15 nt, Human
ggaccuggggcacag

SEQ ID NO: 2835194 - RNA, 16 nt, Human
ggaccuggggcacagu

SEQ ID NO: 2835195 - RNA, 21 nt, Human
ggaccuggggcacaguccagg

SEQ ID NO: 2835196 - RNA, 15 nt, Human
ggaccugccuguagc

SEQ ID NO: 2835197 - RNA, 23 nt, Human
ggaccugccuccugccugccccu

SEQ ID NO: 2835198 - RNA, 13 nt, Human
ggagauggaguuc

SEQ ID NO: 2835199 - RNA, 17 nt, Human
ggagauuggacggccug

SEQ ID NO: 2835200 - RNA, 20 nt, Human
ggagauugagaaggagagaa

SEQ ID NO: 2835201 - RNA, 21 nt, Human
ggagauugagaaggagagaaa

SEQ ID NO: 2835202 - RNA, 14 nt, Human
ggagauugagaagg

SEQ ID NO: 2835203 - RNA, 16 nt, Human
ggagauugagaaggag

SEQ ID NO: 2835204 - RNA, 17 nt, Human
ggagauugagaaggaga

SEQ ID NO: 2835205 - RNA, 21 nt, Human
ggagauuuugagguaaagaua

SEQ ID NO: 2835206 - RNA, 16 nt, Human
ggagcccgucucagug

SEQ ID NO: 2835207 - RNA, 13 nt, Human
ggagcccucaucu

SEQ ID NO: 2835208 - RNA, 18 nt, Human
ggagcccuccgccuucac

SEQ ID NO: 2835209 - RNA, 22 nt, Human
ggagcccuuaucugugcucagg

SEQ ID NO: 2835210 - RNA, 20 nt, Human
ggagcccuuaucugugcuca

SEQ ID NO: 2835211 - RNA, 20 nt, Human
ggagaccgggguauccuggg

SEQ ID NO: 2835212 - RNA, 21 nt, Human
ggagaccucuccuuccuaccc

SEQ ID NO: 2835213 - RNA, 10 nt, Human
ggagacuaga

SEQ ID NO: 2835214 - RNA, 19 nt, Human
ggagacguggaaccucugu

SEQ ID NO: 2835215 - RNA, 23 nt, Human
ggagacguggaaccucugucuca

SEQ ID NO: 2835216 - RNA, 22 nt, Human
ggagagcuggagccuggugccc

SEQ ID NO: 2835217 - RNA, 18 nt, Human
ggagagcuggugcccgga

SEQ ID NO: 2835218 - RNA, 17 nt, Human
ggagagcuggugcccgg

SEQ ID NO: 2835219 - RNA, 15 nt, Human
ggagagcuggugccc

SEQ ID NO: 2835220 - RNA, 19 nt, Human
ggagacuagauugccuuug

SEQ ID NO: 2835221 - RNA, 14 nt, Human
ggagacuagauugc

SEQ ID NO: 2835222 - RNA, 13 nt, Human
ggagagcuggagc

SEQ ID NO: 2835223 - RNA, 17 nt, Human
ggagagcuggagccugg

SEQ ID NO: 2835224 - RNA, 18 nt, Human
ggagagcuggagccuggu

SEQ ID NO: 2835225 - RNA, 15 nt, Human
ggacugucauagaaa

SEQ ID NO: 2835226 - RNA, 13 nt, Human
ggagacccugcaa

SEQ ID NO: 2835227 - RNA, 16 nt, Human
ggagacccugcaaaca

SEQ ID NO: 2835228 - RNA, 21 nt, Human
ggagacccugcaaacagaaca

SEQ ID NO: 2835229 - RNA, 22 nt, Human
ggagacccugcaaacagaacag

SEQ ID NO: 2835230 - RNA, 23 nt, Human
ggagacccugcaaacagaacagg

SEQ ID NO: 2835231 - RNA, 20 nt, Human
ggacucugggcuauggacac

SEQ ID NO: 2835232 - RNA, 14 nt, Human
ggacugguuugaga

SEQ ID NO: 2835233 - RNA, 11 nt, Human
ggacugggagg

SEQ ID NO: 2835234 - RNA, 12 nt, Human
ggacugggaggu

SEQ ID NO: 2835235 - RNA, 15 nt, Human
ggacugggggccaga

SEQ ID NO: 2835236 - RNA, 17 nt, Human
ggacuggggauguggga

SEQ ID NO: 2835237 - RNA, 23 nt, Human
ggacuggggaugugggagggagc

SEQ ID NO: 2835238 - RNA, 12 nt, Human
ggacugccucug

SEQ ID NO: 2835239 - RNA, 13 nt, Human
ggacugccucugc

SEQ ID NO: 2835240 - RNA, 14 nt, Human
ggacugccucugcc

SEQ ID NO: 2835241 - RNA, 15 nt, Human
ggacugccucugcca

SEQ ID NO: 2835242 - RNA, 22 nt, Human
ggacugccucugccacacucug

SEQ ID NO: 2835243 - RNA, 21 nt, Human
ggacugccagucccccugccc

SEQ ID NO: 2835244 - RNA, 22 nt, Human
gcugguucaggguuggccccug

SEQ ID NO: 2835245 - RNA, 20 nt, Human
gcugucaaaacaaguuuuuc

SEQ ID NO: 2835246 - RNA, 14 nt, Human
gcugguuagaaaug

SEQ ID NO: 2835247 - RNA, 18 nt, Human
gcugucaaguuccuuugg

SEQ ID NO: 2835248 - RNA, 15 nt, Human
gcugguucaggguug

SEQ ID NO: 2835249 - RNA, 14 nt, Human
gcuggucccacuca

SEQ ID NO: 2835250 - RNA, 20 nt, Human
gcuggucccacucaguccau

SEQ ID NO: 2835251 - RNA, 21 nt, Human
gcugguggacccagggaacag

SEQ ID NO: 2835252 - RNA, 16 nt, Human
gcugguggacccaggg

SEQ ID NO: 2835253 - RNA, 18 nt, Human
gcuggugucaccugaaga

SEQ ID NO: 2835254 - RNA, 14 nt, Human
gcuggugggagggg

SEQ ID NO: 2835255 - RNA, 16 nt, Human
gcuggugucaccugaa

SEQ ID NO: 2835256 - RNA, 12 nt, Human
gcuggugggagg

SEQ ID NO: 2835257 - RNA, 13 nt, Human
gcuggugggaggg

SEQ ID NO: 2835258 - RNA, 12 nt, Human
gcugucucugcu

SEQ ID NO: 2835259 - RNA, 13 nt, Human
gcugucucugcuc

SEQ ID NO: 2835260 - RNA, 14 nt, Human
gcugucucugcucg

SEQ ID NO: 2835261 - RNA, 12 nt, Human
gcugucugcagc

SEQ ID NO: 2835262 - RNA, 14 nt, Human
gcugucugcagccu

SEQ ID NO: 2835263 - RNA, 15 nt, Human
gcugucugcagccuu

SEQ ID NO: 2835264 - RNA, 13 nt, Human
gcugucuucugga

SEQ ID NO: 2835265 - RNA, 23 nt, Human
gcugucuucuggacaggcucugc

SEQ ID NO: 2835266 - RNA, 24 nt, Human
gcugucuucuggacaggcucugcu

SEQ ID NO: 2835267 - RNA, 14 nt, Human
gcugucuguggcuu

SEQ ID NO: 2835268 - RNA, 15 nt, Human
gcugucuguggcuuc

SEQ ID NO: 2835269 - RNA, 23 nt, Human
gcugugguuuccaucugaaagua

SEQ ID NO: 2835270 - RNA, 13 nt, Human
gcugucccucacu

SEQ ID NO: 2835271 - RNA, 16 nt, Human
gcugucccucccccuu

SEQ ID NO: 2835272 - RNA, 15 nt, Human
gcugucccucccccu

SEQ ID NO: 2835273 - RNA, 13 nt, Human
gcugucacaggcg

SEQ ID NO: 2835274 - RNA, 16 nt, Human
gcugucaccaaggaaa

SEQ ID NO: 2835275 - RNA, 17 nt, Human
gcugucaccaaggaaac

SEQ ID NO: 2835276 - RNA, 13 nt, Human
gcugucaccucuc

SEQ ID NO: 2835277 - RNA, 19 nt, Human
gcugggcuucaguggcagc

SEQ ID NO: 2835278 - RNA, 18 nt, Human
gcugggcuucaguggcag

SEQ ID NO: 2835279 - RNA, 14 nt, Human
gcuggggccucaga

SEQ ID NO: 2835280 - RNA, 15 nt, Human
gcuggggccucagac

SEQ ID NO: 2835281 - RNA, 16 nt, Human
gcuggggccucagacg

SEQ ID NO: 2835282 - RNA, 17 nt, Human
gcuggggccucagacga

SEQ ID NO: 2835283 - RNA, 19 nt, Human
gcuggucccacucagucca

SEQ ID NO: 2835284 - RNA, 15 nt, Human
gcuggucccacucag

SEQ ID NO: 2835285 - RNA, 14 nt, Human
gcugggguggccug

SEQ ID NO: 2835286 - RNA, 18 nt, Human
gcugggguggccugugug

SEQ ID NO: 2835287 - RNA, 19 nt, Human
gcugggguggccugugugg

SEQ ID NO: 2835288 - RNA, 20 nt, Human
gcugggguggccuguguggc

SEQ ID NO: 2835289 - RNA, 20 nt, Human
gcugggggccucagugccac

SEQ ID NO: 2835290 - RNA, 19 nt, Human
gcugggggccucagugcca

SEQ ID NO: 2835291 - RNA, 18 nt, Human
gcugggggcaacuggcca

SEQ ID NO: 2835292 - RNA, 14 nt, Human
gcugggggcaacug

SEQ ID NO: 2835293 - RNA, 20 nt, Human
gcugggggaaugagcccaga

SEQ ID NO: 2835294 - RNA, 21 nt, Human
gcugggggaaugagcccagag

SEQ ID NO: 2835295 - RNA, 22 nt, Human
gcugggggaaugagcccagaga

SEQ ID NO: 2835296 - RNA, 23 nt, Human
gcugggggcaggagggcccuacc

SEQ ID NO: 2835297 - RNA, 20 nt, Human
gcugggggcaggagggcccu

SEQ ID NO: 2835298 - RNA, 13 nt, Human
gcugggggcagga

SEQ ID NO: 2835299 - RNA, 16 nt, Human
gcugggacuggccagg

SEQ ID NO: 2835300 - RNA, 15 nt, Human
gcugggacuggccag

SEQ ID NO: 2835301 - RNA, 15 nt, Human
gcugggagcucugca

SEQ ID NO: 2835302 - RNA, 16 nt, Human
gcugggagcucugcag

SEQ ID NO: 2835303 - RNA, 17 nt, Human
gcugggcuucaguggca

SEQ ID NO: 2835304 - RNA, 18 nt, Human
gcugggauggugggcuuc

SEQ ID NO: 2835305 - RNA, 20 nt, Human
gcugggauggugggcuucag

SEQ ID NO: 2835306 - RNA, 23 nt, Human
gcugggauggugggcuucagggc

SEQ ID NO: 2835307 - RNA, 20 nt, Human
gcugggauuacaggcuccug

SEQ ID NO: 2835308 - RNA, 19 nt, Human
gcugggauuacaggcuccu

SEQ ID NO: 2835309 - RNA, 18 nt, Human
gcugggauuacaggcgug

SEQ ID NO: 2835310 - RNA, 17 nt, Human
gcugggauuacaggcgu

SEQ ID NO: 2835311 - RNA, 21 nt, Human
gcuagaggccagccccaccca

SEQ ID NO: 2835312 - RNA, 20 nt, Human
gcuagaggccagccccaccc

SEQ ID NO: 2835313 - RNA, 19 nt, Human
gcuagaggccagccccacc

SEQ ID NO: 2835314 - RNA, 18 nt, Human
gcuagaggccagccccac

SEQ ID NO: 2835315 - RNA, 18 nt, Human
gcugcccuggugcugcca

SEQ ID NO: 2835316 - RNA, 19 nt, Human
gcugcccuggugcugccac

SEQ ID NO: 2835317 - RNA, 20 nt, Human
gcugcccuggugcugccaca

SEQ ID NO: 2835318 - RNA, 22 nt, Human
gcugcccuggugcugccacacu

SEQ ID NO: 2835319 - RNA, 20 nt, Human
gcugcccuugggccaccccu

SEQ ID NO: 2835320 - RNA, 18 nt, Human
gcugcccuugggccaccc

SEQ ID NO: 2835321 - RNA, 17 nt, Human
gcugcccuuucugggca

SEQ ID NO: 2835322 - RNA, 13 nt, Human
gcugcccuugggc

SEQ ID NO: 2835323 - RNA, 18 nt, Human
gcugcccuguaccccagc

SEQ ID NO: 2835324 - RNA, 23 nt, Human
gcugcccuggugcugccacacuu

SEQ ID NO: 2835325 - RNA, 16 nt, Human
gcugcgguccacccag

SEQ ID NO: 2835326 - RNA, 19 nt, Human
gcugcgcccuuaccuuccc

SEQ ID NO: 2835327 - RNA, 21 nt, Human
gcugccuuggcucagacaugu

SEQ ID NO: 2835328 - RNA, 23 nt, Human
gcugccuuggcucagacauguuu

SEQ ID NO: 2835329 - RNA, 17 nt, Human
gcugccuuggcucagac

SEQ ID NO: 2835330 - RNA, 19 nt, Human
gcugccuuggcucagacau

SEQ ID NO: 2835331 - RNA, 16 nt, Human
gcugccuuggcucaga

SEQ ID NO: 2835332 - RNA, 14 nt, Human
gcugccuuggcuca

SEQ ID NO: 2835333 - RNA, 18 nt, Human
gcugcuauuuauuuuccu

SEQ ID NO: 2835334 - RNA, 19 nt, Human
gcugcuauuuauuuuccua

SEQ ID NO: 2835335 - RNA, 20 nt, Human
gcugcucagggaaaagcagc

SEQ ID NO: 2835336 - RNA, 21 nt, Human
gcugcucagggaaaagcagcu

SEQ ID NO: 2835337 - RNA, 14 nt, Human
gcugcuccaggccu

SEQ ID NO: 2835338 - RNA, 15 nt, Human
gcugcuccaggccug

SEQ ID NO: 2835339 - RNA, 16 nt, Human
gcugcuccaggccugc

SEQ ID NO: 2835340 - RNA, 19 nt, Human
gcugcuccaggccugcagc

SEQ ID NO: 2835341 - RNA, 22 nt, Human
gcugcuccaggccugcagcagg

SEQ ID NO: 2835342 - RNA, 23 nt, Human
gcugcuccaggccugcagcagga

SEQ ID NO: 2835343 - RNA, 17 nt, Human
gcugcuagaacuuuuuu

SEQ ID NO: 2835344 - RNA, 18 nt, Human
gcugcuagaacuuuuuua

SEQ ID NO: 2835345 - RNA, 19 nt, Human
gcugcuagaacuuuuuuaa

SEQ ID NO: 2835346 - RNA, 21 nt, Human
gcugcuagaacuuuuuuaaau

SEQ ID NO: 2835347 - RNA, 22 nt, Human
gcugcuagaacuuuuuuaaaua

SEQ ID NO: 2835348 - RNA, 19 nt, Human
gcugcgguccacccaggag

SEQ ID NO: 2835349 - RNA, 18 nt, Human
gcugcgguccacccagga

SEQ ID NO: 2835350 - RNA, 17 nt, Human
gcugcgguccacccagg

SEQ ID NO: 2835351 - RNA, 23 nt, Human
gcugcuuccgguagggaggcagc

SEQ ID NO: 2835352 - RNA, 20 nt, Human
gcugcuguuacuguuaacca

SEQ ID NO: 2835353 - RNA, 18 nt, Human
gcugcuuagacauaacaa

SEQ ID NO: 2835354 - RNA, 19 nt, Human
gcuagcaaauggcagaacc

SEQ ID NO: 2835355 - RNA, 22 nt, Human
gcuggaccuugaacuggguacu

SEQ ID NO: 2835356 - RNA, 21 nt, Human
gcuggaccuugaacuggguac

SEQ ID NO: 2835357 - RNA, 14 nt, Human
gcuggauggagccc

SEQ ID NO: 2835358 - RNA, 16 nt, Human
gcuggauggagcccag

SEQ ID NO: 2835359 - RNA, 18 nt, Human
gcuggauggagcccaggc

SEQ ID NO: 2835360 - RNA, 18 nt, Human
gcuggaugucugccaauu

SEQ ID NO: 2835361 - RNA, 21 nt, Human
gcuggaugucugccaauuuuu

SEQ ID NO: 2835362 - RNA, 15 nt, Human
gcuggaugauggucu

SEQ ID NO: 2835363 - RNA, 18 nt, Human
gcuggaccuugaacuggg

SEQ ID NO: 2835364 - RNA, 16 nt, Human
gcuggaccuugaacug

SEQ ID NO: 2835365 - RNA, 16 nt, Human
gcuggccccagggcac

SEQ ID NO: 2835366 - RNA, 18 nt, Human
gcuggccccagggcaccc

SEQ ID NO: 2835367 - RNA, 20 nt, Human
gcuggccccagggcacccug

SEQ ID NO: 2835368 - RNA, 13 nt, Human
gcuggccccgccg

SEQ ID NO: 2835369 - RNA, 22 nt, Human
gcuggccccgccgccugguacu

SEQ ID NO: 2835370 - RNA, 23 nt, Human
gcuggccccgccgccugguacuc

SEQ ID NO: 2835371 - RNA, 24 nt, Human
gcuggccccgccgccugguacuca

SEQ ID NO: 2835372 - RNA, 14 nt, Human
gcuggccccuuugg

SEQ ID NO: 2835373 - RNA, 21 nt, Human
gcuggccccuuugggcccugc

SEQ ID NO: 2835374 - RNA, 22 nt, Human
gcuggccccuuugggcccugca

SEQ ID NO: 2835375 - RNA, 23 nt, Human
gcuggccccuuugggcccugcau

SEQ ID NO: 2835376 - RNA, 16 nt, Human
gcuggauuacaggcau

SEQ ID NO: 2835377 - RNA, 22 nt, Human
gcuggaugucugccaauuuuug

SEQ ID NO: 2835378 - RNA, 14 nt, Human
gcuggccuggacag

SEQ ID NO: 2835379 - RNA, 23 nt, Human
gcuggccucuggcucucaugggg

SEQ ID NO: 2835380 - RNA, 18 nt, Human
gcuggccucuggcucuca

SEQ ID NO: 2835381 - RNA, 19 nt, Human
gcuggccucucuagcacaa

SEQ ID NO: 2835382 - RNA, 15 nt, Human
gcuggccucucuagc

SEQ ID NO: 2835383 - RNA, 14 nt, Human
gcuggccucuacca

SEQ ID NO: 2835384 - RNA, 16 nt, Human
gcuggccucuaccaca

SEQ ID NO: 2835385 - RNA, 18 nt, Human
gcuggccgugggccuggg

SEQ ID NO: 2835386 - RNA, 17 nt, Human
gcuggccgggagccuga

SEQ ID NO: 2835387 - RNA, 12 nt, Human
gcuggcccugcc

SEQ ID NO: 2835388 - RNA, 20 nt, Human
gcugggacuacaggcaccca

SEQ ID NO: 2835389 - RNA, 19 nt, Human
gcugggacuacaggcaccc

SEQ ID NO: 2835390 - RNA, 18 nt, Human
gcugggacuacaggcacc

SEQ ID NO: 2835391 - RNA, 13 nt, Human
gcugggacuacag

SEQ ID NO: 2835392 - RNA, 19 nt, Human
gcugggacuacagguguga

SEQ ID NO: 2835393 - RNA, 14 nt, Human
gcugggacuggcca

SEQ ID NO: 2835394 - RNA, 18 nt, Human
ggaaagugcuuuccagaa

SEQ ID NO: 2835395 - RNA, 17 nt, Human
ggaacagacuggaagca

SEQ ID NO: 2835396 - RNA, 17 nt, Human
ggaaauauugcuggggu

SEQ ID NO: 2835397 - RNA, 22 nt, Human
ggaaaagagcgcaucaggccug

SEQ ID NO: 2835398 - RNA, 21 nt, Human
ggaaagggguuggggugacag

SEQ ID NO: 2835399 - RNA, 22 nt, Human
ggaaagggguuggggugacagu

SEQ ID NO: 2835400 - RNA, 19 nt, Human
gcuuuuacugaacuuucuu

SEQ ID NO: 2835401 - RNA, 18 nt, Human
ggaacgggguccuucaag

SEQ ID NO: 2835402 - RNA, 21 nt, Human
ggaaccucaggguauugcuug

SEQ ID NO: 2835403 - RNA, 13 nt, Human
ggaaccucccaga

SEQ ID NO: 2835404 - RNA, 14 nt, Human
ggaaccucccagag

SEQ ID NO: 2835405 - RNA, 15 nt, Human
ggaaccucccagagg

SEQ ID NO: 2835406 - RNA, 16 nt, Human
ggaaccucccagaggu

SEQ ID NO: 2835407 - RNA, 22 nt, Human
ggaaccucccagagguccagcc

SEQ ID NO: 2835408 - RNA, 23 nt, Human
ggaaccucccagagguccagccc

SEQ ID NO: 2835409 - RNA, 17 nt, Human
ggaacucaccuggggcu

SEQ ID NO: 2835410 - RNA, 20 nt, Human
ggaacuagacugccuggguu

SEQ ID NO: 2835411 - RNA, 18 nt, Human
ggaacuagacugccuggg

SEQ ID NO: 2835412 - RNA, 14 nt, Human
ggaacuaauaaaua

SEQ ID NO: 2835413 - RNA, 23 nt, Human
ggaacuagacucccaagcuggac

SEQ ID NO: 2835414 - RNA, 22 nt, Human
ggaacggugaaggugacagcag

SEQ ID NO: 2835415 - RNA, 20 nt, Human
ggaacagacuggaagcacag

SEQ ID NO: 2835416 - RNA, 19 nt, Human
ggaacagacuggaagcaca

SEQ ID NO: 2835417 - RNA, 19 nt, Human
ggaacagcuaugggagccc

SEQ ID NO: 2835418 - RNA, 21 nt, Human
ggaacagcacuggggagucuu

SEQ ID NO: 2835419 - RNA, 11 nt, Human
ggaacagcaga

SEQ ID NO: 2835420 - RNA, 17 nt, Human
ggaacagcacuggggag

SEQ ID NO: 2835421 - RNA, 14 nt, Human
ggaaccgcucaccu

SEQ ID NO: 2835422 - RNA, 19 nt, Human
ggaaccgcucaccuagagc

SEQ ID NO: 2835423 - RNA, 20 nt, Human
ggaaccgcucaccuagagcc

SEQ ID NO: 2835424 - RNA, 21 nt, Human
ggaaccgcucaccuagagcca

SEQ ID NO: 2835425 - RNA, 18 nt, Human
ggaaccguugccaaccga

SEQ ID NO: 2835426 - RNA, 20 nt, Human
ggaaauauuuugauaauaaa

SEQ ID NO: 2835427 - RNA, 17 nt, Human
ggaagcacagcuucauu

SEQ ID NO: 2835428 - RNA, 14 nt, Human
ggaagauuucuaaa

SEQ ID NO: 2835429 - RNA, 18 nt, Human
ggaagauuucuaaauaaa

SEQ ID NO: 2835430 - RNA, 16 nt, Human
ggaagauccugugagg

SEQ ID NO: 2835431 - RNA, 19 nt, Human
ggaagauccugugaggagc

SEQ ID NO: 2835432 - RNA, 14 nt, Human
ggaagaggaaaauu

SEQ ID NO: 2835433 - RNA, 20 nt, Human
ggaagagcucaagggacaag

SEQ ID NO: 2835434 - RNA, 22 nt, Human
ggaagagcucaagggacaagga

SEQ ID NO: 2835435 - RNA, 23 nt, Human
ggaagagcucaagggacaaggac

SEQ ID NO: 2835436 - RNA, 14 nt, Human
ggaagauauacaug

SEQ ID NO: 2835437 - RNA, 14 nt, Human
ggaagagugugugu

SEQ ID NO: 2835438 - RNA, 13 nt, Human
ggaacuccuuggc

SEQ ID NO: 2835439 - RNA, 15 nt, Human
ggaacuccuuggccu

SEQ ID NO: 2835440 - RNA, 16 nt, Human
ggaacuccuuggccua

SEQ ID NO: 2835441 - RNA, 17 nt, Human
ggaacuccuuggccuag

SEQ ID NO: 2835442 - RNA, 18 nt, Human
ggaacucuaucugggccu

SEQ ID NO: 2835443 - RNA, 19 nt, Human
ggaacucuaucugggccug

SEQ ID NO: 2835444 - RNA, 21 nt, Human
ggaacucuaucugggccuggg

SEQ ID NO: 2835445 - RNA, 23 nt, Human
ggaacucuaucugggccugggcu

SEQ ID NO: 2835446 - RNA, 11 nt, Human
ggaacucugac

SEQ ID NO: 2835447 - RNA, 12 nt, Human
ggaacucugaca

SEQ ID NO: 2835448 - RNA, 13 nt, Human
ggaacucugacaa

SEQ ID NO: 2835449 - RNA, 14 nt, Human
ggaacucugacaag

SEQ ID NO: 2835450 - RNA, 21 nt, Human
ggaacuccuaaaccuuugccc

SEQ ID NO: 2835451 - RNA, 22 nt, Human
ggaacuccuaaaccuuugcccc

SEQ ID NO: 2835452 - RNA, 19 nt, Human
ggaagagcagaacggagcc

SEQ ID NO: 2835453 - RNA, 15 nt, Human
ggaagcaccccaugc

SEQ ID NO: 2835454 - RNA, 13 nt, Human
ggaagcaccccau

SEQ ID NO: 2835455 - RNA, 22 nt, Human
ggaagcaccccaugccaaagcu

SEQ ID NO: 2835456 - RNA, 13 nt, Human
ggaagcagcuuuc

SEQ ID NO: 2835457 - RNA, 15 nt, Human
ggaagccaaauuuau

SEQ ID NO: 2835458 - RNA, 20 nt, Human
ggaagcauucagagagcagc

SEQ ID NO: 2835459 - RNA, 16 nt, Human
ggaagcauucagagag

SEQ ID NO: 2835460 - RNA, 18 nt, Human
ggaagcauucagagagca

SEQ ID NO: 2835461 - RNA, 18 nt, Human
gcuguucaacaucacuga

SEQ ID NO: 2835462 - RNA, 12 nt, Human
gcuucugggguc

SEQ ID NO: 2835463 - RNA, 18 nt, Human
gcuucugggguccccagg

SEQ ID NO: 2835464 - RNA, 19 nt, Human
gcuucugggguccccaggg

SEQ ID NO: 2835465 - RNA, 20 nt, Human
gcuucugggguccccagggc

SEQ ID NO: 2835466 - RNA, 21 nt, Human
gcuucugggguccccagggcu

SEQ ID NO: 2835467 - RNA, 16 nt, Human
gcuugccacagagcgg

SEQ ID NO: 2835468 - RNA, 14 nt, Human
gcuugccacagagc

SEQ ID NO: 2835469 - RNA, 19 nt, Human
gcuugcagugagccgagau

SEQ ID NO: 2835470 - RNA, 19 nt, Human
gcuugaguuaggaaugaga

SEQ ID NO: 2835471 - RNA, 14 nt, Human
gcuugauucugcag

SEQ ID NO: 2835472 - RNA, 22 nt, Human
gcuugcagagaugaggccgcca

SEQ ID NO: 2835473 - RNA, 22 nt, Human
gcuugaggguugggcugguguc

SEQ ID NO: 2835474 - RNA, 14 nt, Human
gcuugauauuuucu

SEQ ID NO: 2835475 - RNA, 13 nt, Human
gcuugaugaagca

SEQ ID NO: 2835476 - RNA, 14 nt, Human
gcuugaugaagcaa

SEQ ID NO: 2835477 - RNA, 19 nt, Human
gcuugaugaagcaaggaag

SEQ ID NO: 2835478 - RNA, 20 nt, Human
gcuugaugaagcaaggaaga

SEQ ID NO: 2835479 - RNA, 16 nt, Human
gcuucuguugcugccu

SEQ ID NO: 2835480 - RNA, 20 nt, Human
gcuucugugaugagcugauc

SEQ ID NO: 2835481 - RNA, 19 nt, Human
gcuucugugaugagcugau

SEQ ID NO: 2835482 - RNA, 18 nt, Human
gcuucugugaugagcuga

SEQ ID NO: 2835483 - RNA, 17 nt, Human
gcuucugugaugagcug

SEQ ID NO: 2835484 - RNA, 16 nt, Human
gcuucugugaugagcu

SEQ ID NO: 2835485 - RNA, 15 nt, Human
gcuuugggcugcccu

SEQ ID NO: 2835486 - RNA, 16 nt, Human
gcuuugggcugcccug

SEQ ID NO: 2835487 - RNA, 17 nt, Human
gcuuuuaaccaucugau

SEQ ID NO: 2835488 - RNA, 15 nt, Human
gcuuuuaauuaaaua

SEQ ID NO: 2835489 - RNA, 22 nt, Human
ggaaaaccaagccguggcuucc

SEQ ID NO: 2835490 - RNA, 13 nt, Human
ggaaaacuuauuu

SEQ ID NO: 2835491 - RNA, 23 nt, Human
ggaaaacuuauuuuauauuuucc

SEQ ID NO: 2835492 - RNA, 22 nt, Human
ggaaaacuugcagcuaaggagg

SEQ ID NO: 2835493 - RNA, 9 nt, Human
ggaaaagaa

SEQ ID NO: 2835494 - RNA, 12 nt, Human
ggaaaagaaaaa

SEQ ID NO: 2835495 - RNA, 13 nt, Human
ggaaaagaaaaaa

SEQ ID NO: 2835496 - RNA, 14 nt, Human
ggaaaagaaaaaaa

SEQ ID NO: 2835497 - RNA, 22 nt, Human
ggaaaagaaaaaaaaaagaaga

SEQ ID NO: 2835498 - RNA, 23 nt, Human
ggaaaagaaaaaaaaaagaagaa

SEQ ID NO: 2835499 - RNA, 20 nt, Human
ggaaaacuccaccuucccac

SEQ ID NO: 2835500 - RNA, 16 nt, Human
ggaaaaccugaagacu

SEQ ID NO: 2835501 - RNA, 21 nt, Human
ggaaaaccaagccguggcuuc

SEQ ID NO: 2835502 - RNA, 13 nt, Human
ggaaaaagaaaau

SEQ ID NO: 2835503 - RNA, 14 nt, Human
ggaaaaagaaaaua

SEQ ID NO: 2835504 - RNA, 20 nt, Human
ggaaaaagaaaauaaagaca

SEQ ID NO: 2835505 - RNA, 19 nt, Human
ggaaaaaccacccccaaau

SEQ ID NO: 2835506 - RNA, 23 nt, Human
ggaaaaagcuccaugugccucuu

SEQ ID NO: 2835507 - RNA, 13 nt, Human
gcuuggcagcuga

SEQ ID NO: 2835508 - RNA, 15 nt, Human
gcuuggcccuuuccu

SEQ ID NO: 2835509 - RNA, 16 nt, Human
gcuuggccuaucuccu

SEQ ID NO: 2835510 - RNA, 12 nt, Human
gcuuuacaugca

SEQ ID NO: 2835511 - RNA, 14 nt, Human
gcuuuaccaaacag

SEQ ID NO: 2835512 - RNA, 16 nt, Human
gcuuuaccaaacagca

SEQ ID NO: 2835513 - RNA, 17 nt, Human
gcuuuaccaaacagcaa

SEQ ID NO: 2835514 - RNA, 21 nt, Human
gcuuuaccaaacagcaaacca

SEQ ID NO: 2835515 - RNA, 12 nt, Human
gcuuuacacaca

SEQ ID NO: 2835516 - RNA, 16 nt, Human
gcuuuacacacacaga

SEQ ID NO: 2835517 - RNA, 20 nt, Human
gcuuuaugauaauagauucu

SEQ ID NO: 2835518 - RNA, 21 nt, Human
gcuuuaugauaauagauucuc

SEQ ID NO: 2835519 - RNA, 11 nt, Human
gcuuuaugauu

SEQ ID NO: 2835520 - RNA, 12 nt, Human
gcuuuaugauuu

SEQ ID NO: 2835521 - RNA, 14 nt, Human
gcuuuaugauuuuc

SEQ ID NO: 2835522 - RNA, 15 nt, Human
gcuuuaugauuuuca

SEQ ID NO: 2835523 - RNA, 16 nt, Human
gcuuuaugauuuucau

SEQ ID NO: 2835524 - RNA, 18 nt, Human
gcuuuaugauuuucauaa

SEQ ID NO: 2835525 - RNA, 22 nt, Human
gcuuuaugguccuaaaagcaaa

SEQ ID NO: 2835526 - RNA, 17 nt, Human
gcuuuauuccagaaugc

SEQ ID NO: 2835527 - RNA, 12 nt, Human
gcuuuauguuca

SEQ ID NO: 2835528 - RNA, 23 nt, Human
gcuuuauguucauuuguuuguuu

SEQ ID NO: 2835529 - RNA, 21 nt, Human
gcuuuauuuguuuuuuuuguu

SEQ ID NO: 2835530 - RNA, 13 nt, Human
gcuuuauucuuca

SEQ ID NO: 2835531 - RNA, 22 nt, Human
gcuuuauucuucagauacaaac

SEQ ID NO: 2835532 - RNA, 17 nt, Human
gcuuuggacccaaggaa

SEQ ID NO: 2835533 - RNA, 18 nt, Human
gcuuuggacccaaggaaa

SEQ ID NO: 2835534 - RNA, 19 nt, Human
gcuuuggacccaaggaaaa

SEQ ID NO: 2835535 - RNA, 13 nt, Human
gcuuuauuuuuua

SEQ ID NO: 2835536 - RNA, 17 nt, Human
gcuuuggauuugacauu

SEQ ID NO: 2835537 - RNA, 22 nt, Human
gcuuugggaauguuuuuagcug

SEQ ID NO: 2835538 - RNA, 14 nt, Human
gcuuuggccugagu

SEQ ID NO: 2835539 - RNA, 14 nt, Human
gcuuugggcugccc

SEQ ID NO: 2835540 - RNA, 12 nt, Human
ggcuuguuuauu

SEQ ID NO: 2835541 - RNA, 15 nt, Human
ggcuuguuuauuuug

SEQ ID NO: 2835542 - RNA, 15 nt, Human
ggcuuguuguaaagc

SEQ ID NO: 2835543 - RNA, 16 nt, Human
ggcuuguagaauuguu

SEQ ID NO: 2835544 - RNA, 19 nt, Human
ggcuuguagaauuguuaua

SEQ ID NO: 2835545 - RNA, 15 nt, Human
ggcuuuucucagcug

SEQ ID NO: 2835546 - RNA, 14 nt, Human
ggcuuuucucagcu

SEQ ID NO: 2835547 - RNA, 19 nt, Human
ggcuuuucacugcuggcug

SEQ ID NO: 2835548 - RNA, 22 nt, Human
ggcuuuucacugcuggcugccu

SEQ ID NO: 2835549 - RNA, 22 nt, Human
ggcuuucauuauuaguacugcu

SEQ ID NO: 2835550 - RNA, 13 nt, Human
ggcuuuccuugug

SEQ ID NO: 2835551 - RNA, 20 nt, Human
ggcuuuccuuguggcagagg

SEQ ID NO: 2835552 - RNA, 19 nt, Human
ggcuuucguccacagcuuc

SEQ ID NO: 2835553 - RNA, 20 nt, Human
ggcuuucguccacagcuucc

SEQ ID NO: 2835554 - RNA, 21 nt, Human
ggcuuucguccacagcuuccu

SEQ ID NO: 2835555 - RNA, 22 nt, Human
ggcuuucguccacagcuuccug

SEQ ID NO: 2835556 - RNA, 23 nt, Human
ggcuuucguccacagcuuccugu

SEQ ID NO: 2835557 - RNA, 15 nt, Human
ggcuuucucuuuucu

SEQ ID NO: 2835558 - RNA, 20 nt, Human
ggcuuuaugauaauagauuc

SEQ ID NO: 2835559 - RNA, 22 nt, Human
ggcuuuaugauaauagauucuc

SEQ ID NO: 2835560 - RNA, 19 nt, Human
ggcuuucagaaaacgggaa

SEQ ID NO: 2835561 - RNA, 12 nt, Human
ggcuuucagcuu

SEQ ID NO: 2835562 - RNA, 13 nt, Human
ggcuuucagcuua

SEQ ID NO: 2835563 - RNA, 14 nt, Human
ggcuuuucacugcu

SEQ ID NO: 2835564 - RNA, 13 nt, Human
ggcuuuucacugc

SEQ ID NO: 2835565 - RNA, 15 nt, Human
ggcuuuucacugcug

SEQ ID NO: 2835566 - RNA, 17 nt, Human
ggcuuuucacugcuggc

SEQ ID NO: 2835567 - RNA, 13 nt, Human
ggcuuacacccac

SEQ ID NO: 2835568 - RNA, 19 nt, Human
ggcuuaccugaccucuugc

SEQ ID NO: 2835569 - RNA, 22 nt, Human
ggcuuaccugaccucuugcugu

SEQ ID NO: 2835570 - RNA, 23 nt, Human
ggcuuaccugaccucuugcuguc

SEQ ID NO: 2835571 - RNA, 14 nt, Human
ggcuugaagcugug

SEQ ID NO: 2835572 - RNA, 15 nt, Human
ggcuugacucaggau

SEQ ID NO: 2835573 - RNA, 17 nt, Human
ggcuugacucaggauuu

SEQ ID NO: 2835574 - RNA, 13 nt, Human
ggcuugaagcugu

SEQ ID NO: 2835575 - RNA, 20 nt, Human
ggcuugagcccccgcgccca

SEQ ID NO: 2835576 - RNA, 21 nt, Human
ggcuugagaaauauggacacu

SEQ ID NO: 2835577 - RNA, 18 nt, Human
ggcuucuuuucuuuguau

SEQ ID NO: 2835578 - RNA, 23 nt, Human
ggcuuauauucaaccauggacuu

SEQ ID NO: 2835579 - RNA, 14 nt, Human
ggcuuauauucaac

SEQ ID NO: 2835580 - RNA, 23 nt, Human
ggcuuaguguuuuaaaacaccuc

SEQ ID NO: 2835581 - RNA, 16 nt, Human
ggcuuauccagcuggu

SEQ ID NO: 2835582 - RNA, 20 nt, Human
ggcuuauuuauuaacaggau

SEQ ID NO: 2835583 - RNA, 12 nt, Human
ggcuuauuuuaa

SEQ ID NO: 2835584 - RNA, 17 nt, Human
ggcuuauuuuaauguga

SEQ ID NO: 2835585 - RNA, 18 nt, Human
ggcuuauuuuaaugugau

SEQ ID NO: 2835586 - RNA, 20 nt, Human
ggcuuauuuuaaugugauga

SEQ ID NO: 2835587 - RNA, 21 nt, Human
ggcuuauuuuaaugugaugau

SEQ ID NO: 2835588 - RNA, 15 nt, Human
ggcuuauauucaacc

SEQ ID NO: 2835589 - RNA, 20 nt, Human
ggcuuauauucaaccaugga

SEQ ID NO: 2835590 - RNA, 21 nt, Human
ggcuuauauucaaccauggac

SEQ ID NO: 2835591 - RNA, 22 nt, Human
ggcuuauauucaaccauggacu

SEQ ID NO: 2835592 - RNA, 17 nt, Human
ggcugggcuucaguggc

SEQ ID NO: 2835593 - RNA, 13 nt, Human
ggcugggcuucag

SEQ ID NO: 2835594 - RNA, 15 nt, Human
ggcuuaaaacaacac

SEQ ID NO: 2835595 - RNA, 19 nt, Human
ggcuuaagaaaucuaguau

SEQ ID NO: 2835596 - RNA, 13 nt, Human
ggcuuaauaaaaa

SEQ ID NO: 2835597 - RNA, 14 nt, Human
ggcuuaauaaaaau

SEQ ID NO: 2835598 - RNA, 22 nt, Human
ggcuuaauaaaaaugacagacu

SEQ ID NO: 2835599 - RNA, 12 nt, Human
ggcugggcuuca

SEQ ID NO: 2835600 - RNA, 13 nt, Human
ggcugggcccccc

SEQ ID NO: 2835601 - RNA, 19 nt, Human
ggcugggccccccagcuca

SEQ ID NO: 2835602 - RNA, 21 nt, Human
ggcugggccccccagcucagg

SEQ ID NO: 2835603 - RNA, 22 nt, Human
ggcugggccccccagcucaggg

SEQ ID NO: 2835604 - RNA, 20 nt, Human
ggcugggccauguccaaaga

SEQ ID NO: 2835605 - RNA, 17 nt, Human
ggcugggccauguccaa

SEQ ID NO: 2835606 - RNA, 21 nt, Human
ggcugggccauguccaaagag

SEQ ID NO: 2835607 - RNA, 15 nt, Human
gggaauggcagcugc

SEQ ID NO: 2835608 - RNA, 17 nt, Human
gggaauuucuucaacuc

SEQ ID NO: 2835609 - RNA, 23 nt, Human
gggacaaggacuaggguccuggg

SEQ ID NO: 2835610 - RNA, 15 nt, Human
gggaaugauaugcau

SEQ ID NO: 2835611 - RNA, 12 nt, Human
gggacccugcuu

SEQ ID NO: 2835612 - RNA, 13 nt, Human
gggacccugcuuu

SEQ ID NO: 2835613 - RNA, 14 nt, Human
gggaccccugagcu

SEQ ID NO: 2835614 - RNA, 16 nt, Human
gggacucaaugcacug

SEQ ID NO: 2835615 - RNA, 17 nt, Human
gggacuacaggcaccca

SEQ ID NO: 2835616 - RNA, 16 nt, Human
gggaccucucccaggg

SEQ ID NO: 2835617 - RNA, 12 nt, Human
gggaccucuccc

SEQ ID NO: 2835618 - RNA, 14 nt, Human
gggacguuucucau

SEQ ID NO: 2835619 - RNA, 18 nt, Human
gggaaggcacagggagaa

SEQ ID NO: 2835620 - RNA, 22 nt, Human
gggaaggcagggagggccuggg

SEQ ID NO: 2835621 - RNA, 11 nt, Human
gggaaggccuc

SEQ ID NO: 2835622 - RNA, 15 nt, Human
gggaaggccugacuu

SEQ ID NO: 2835623 - RNA, 13 nt, Human
gggaaggccugac

SEQ ID NO: 2835624 - RNA, 14 nt, Human
gggaagggacacac

SEQ ID NO: 2835625 - RNA, 19 nt, Human
gggaagucccugggaggcc

SEQ ID NO: 2835626 - RNA, 14 nt, Human
gggaaguccucccu

SEQ ID NO: 2835627 - RNA, 21 nt, Human
gggaaucuaauauccccaaau

SEQ ID NO: 2835628 - RNA, 21 nt, Human
gggaaggugggguccuggagc

SEQ ID NO: 2835629 - RNA, 15 nt, Human
gggaaguaguccuug

SEQ ID NO: 2835630 - RNA, 16 nt, Human
gggaaguaguccuugg

SEQ ID NO: 2835631 - RNA, 19 nt, Human
gggaaggucaccagcacca

SEQ ID NO: 2835632 - RNA, 17 nt, Human
gggaaugccugagugcc

SEQ ID NO: 2835633 - RNA, 21 nt, Human
gggaaugccugagugccuggc

SEQ ID NO: 2835634 - RNA, 14 nt, Human
gggaaugagcccag

SEQ ID NO: 2835635 - RNA, 15 nt, Human
gggaaugagcccaga

SEQ ID NO: 2835636 - RNA, 16 nt, Human
gggaaugagcccagag

SEQ ID NO: 2835637 - RNA, 17 nt, Human
gggaaugagcccagaga

SEQ ID NO: 2835638 - RNA, 18 nt, Human
gggaaugagcccagagaa

SEQ ID NO: 2835639 - RNA, 21 nt, Human
gggaaugagcccagagaacag

SEQ ID NO: 2835640 - RNA, 22 nt, Human
gggaaugagcccagagaacagc

SEQ ID NO: 2835641 - RNA, 13 nt, Human
ggcuuuucuguuu

SEQ ID NO: 2835642 - RNA, 21 nt, Human
gggaagggggggcuacauuau

SEQ ID NO: 2835643 - RNA, 17 nt, Human
gggaagggucauagaaa

SEQ ID NO: 2835644 - RNA, 16 nt, Human
gggaaggguuugaauu

SEQ ID NO: 2835645 - RNA, 18 nt, Human
gggaaggggacccccgcc

SEQ ID NO: 2835646 - RNA, 14 nt, Human
gggaaggggcggug

SEQ ID NO: 2835647 - RNA, 23 nt, Human
ggcugcaaaggguaucaggugcu

SEQ ID NO: 2835648 - RNA, 22 nt, Human
ggcugcaaaggguaucaggugc

SEQ ID NO: 2835649 - RNA, 18 nt, Human
ggcugcaaaggguaucag

SEQ ID NO: 2835650 - RNA, 15 nt, Human
ggcugauggaguaaa

SEQ ID NO: 2835651 - RNA, 24 nt, Human
ggcugcaaaggguaucaggugcug

SEQ ID NO: 2835652 - RNA, 21 nt, Human
ggcugaguucuggucaaagaa

SEQ ID NO: 2835653 - RNA, 17 nt, Human
ggccccugcccggcugc

SEQ ID NO: 2835654 - RNA, 16 nt, Human
ggccccugcccggcug

SEQ ID NO: 2835655 - RNA, 20 nt, Human
ggccccugcccggcugcgga

SEQ ID NO: 2835656 - RNA, 16 nt, Human
ggcucuggacucuaaa

SEQ ID NO: 2835657 - RNA, 18 nt, Human
ggcucuggacucuaaaga

SEQ ID NO: 2835658 - RNA, 17 nt, Human
ggccccugcauccccuu

SEQ ID NO: 2835659 - RNA, 12 nt, Human
ggcucuggagac

SEQ ID NO: 2835660 - RNA, 15 nt, Human
ggcucuggagacagc

SEQ ID NO: 2835661 - RNA, 16 nt, Human
ggcucuggagacagcc

SEQ ID NO: 2835662 - RNA, 17 nt, Human
ggcucuggagacagccc

SEQ ID NO: 2835663 - RNA, 19 nt, Human
ggcucuggagacagcccca

SEQ ID NO: 2835664 - RNA, 21 nt, Human
ggcucuggagacagccccaga

SEQ ID NO: 2835665 - RNA, 14 nt, Human
ggcucuggagagaa

SEQ ID NO: 2835666 - RNA, 14 nt, Human
ggcugagggcagcu

SEQ ID NO: 2835667 - RNA, 15 nt, Human
ggcucuggagagaaa

SEQ ID NO: 2835668 - RNA, 14 nt, Human
ggcugagcccuggc

SEQ ID NO: 2835669 - RNA, 13 nt, Human
ggcugagcccugg

SEQ ID NO: 2835670 - RNA, 12 nt, Human
ggcugagcccug

SEQ ID NO: 2835671 - RNA, 16 nt, Human
ggcugagcccuggcag

SEQ ID NO: 2835672 - RNA, 15 nt, Human
ggcugagcccuggca

SEQ ID NO: 2835673 - RNA, 11 nt, Human
ggcugggccau

SEQ ID NO: 2835674 - RNA, 23 nt, Human
ggcuggaacagauucacacuguc

SEQ ID NO: 2835675 - RNA, 16 nt, Human
ggcuggaaggggucca

SEQ ID NO: 2835676 - RNA, 22 nt, Human
ggcuggaacagauucacacugu

SEQ ID NO: 2835677 - RNA, 13 nt, Human
ggcugcagggagu

SEQ ID NO: 2835678 - RNA, 12 nt, Human
ggcugcagggag

SEQ ID NO: 2835679 - RNA, 15 nt, Human
ggcugcagcuggaca

SEQ ID NO: 2835680 - RNA, 16 nt, Human
ggcugcagcuggacag

SEQ ID NO: 2835681 - RNA, 17 nt, Human
ggcugcagcuggacaga

SEQ ID NO: 2835682 - RNA, 18 nt, Human
ggcugcagcuggacagag

SEQ ID NO: 2835683 - RNA, 19 nt, Human
ggcugcagcuggacagagg

SEQ ID NO: 2835684 - RNA, 24 nt, Human
ggcugcagcuggacagaggggacu

SEQ ID NO: 2835685 - RNA, 12 nt, Human
ggcugcugccca

SEQ ID NO: 2835686 - RNA, 14 nt, Human
ggcugcugcccagg

SEQ ID NO: 2835687 - RNA, 22 nt, Human
ggcugcugggggcaacuggcca

SEQ ID NO: 2835688 - RNA, 11 nt, Human
ggcugcuggga

SEQ ID NO: 2835689 - RNA, 21 nt, Human
ggcugcuggggccucagacga

SEQ ID NO: 2835690 - RNA, 13 nt, Human
ggcugcuggccug

SEQ ID NO: 2835691 - RNA, 15 nt, Human
gggcccugcagaggg

SEQ ID NO: 2835692 - RNA, 11 nt, Human
gggcccugcau

SEQ ID NO: 2835693 - RNA, 12 nt, Human
gggcccugcaug

SEQ ID NO: 2835694 - RNA, 14 nt, Human
gggcccugcaugua

SEQ ID NO: 2835695 - RNA, 18 nt, Human
gggcccugcauguagugu

SEQ ID NO: 2835696 - RNA, 19 nt, Human
gggcccugcccuggcaggg

SEQ ID NO: 2835697 - RNA, 22 nt, Human
gggccccaaacgggcugcccug

SEQ ID NO: 2835698 - RNA, 11 nt, Human
gggcccagggg

SEQ ID NO: 2835699 - RNA, 14 nt, Human
gggccccagaggcu

SEQ ID NO: 2835700 - RNA, 13 nt, Human
gggcccaggcagg

SEQ ID NO: 2835701 - RNA, 13 nt, Human
gggcccaggaggg

SEQ ID NO: 2835702 - RNA, 11 nt, Human
gggccccagcu

SEQ ID NO: 2835703 - RNA, 15 nt, Human
gggccccccagcuca

SEQ ID NO: 2835704 - RNA, 22 nt, Human
gggccccccagcucaggggcag

SEQ ID NO: 2835705 - RNA, 23 nt, Human
gggccccccagcucaggggcagc

SEQ ID NO: 2835706 - RNA, 13 nt, Human
gggccccccugcc

SEQ ID NO: 2835707 - RNA, 17 nt, Human
gggccccccugcccugu

SEQ ID NO: 2835708 - RNA, 15 nt, Human
gggccccccugcccu

SEQ ID NO: 2835709 - RNA, 19 nt, Human
gggcagugcuagugagcug

SEQ ID NO: 2835710 - RNA, 23 nt, Human
gggcagugcuagugagcugggca

SEQ ID NO: 2835711 - RNA, 21 nt, Human
gggcagugggacccauagauc

SEQ ID NO: 2835712 - RNA, 22 nt, Human
gggcauagaugcaggugagccc

SEQ ID NO: 2835713 - RNA, 17 nt, Human
gggcauauccaccaccu

SEQ ID NO: 2835714 - RNA, 23 nt, Human
gggcauaucggcucacaaagaga

SEQ ID NO: 2835715 - RNA, 19 nt, Human
gggcauccauaccagcucg

SEQ ID NO: 2835716 - RNA, 20 nt, Human
gggcauccauaccagcucgc

SEQ ID NO: 2835717 - RNA, 14 nt, Human
gggcaucuauggga

SEQ ID NO: 2835718 - RNA, 19 nt, Human
gggcaucugccccuccccc

SEQ ID NO: 2835719 - RNA, 17 nt, Human
gggcaucugccccuccc

SEQ ID NO: 2835720 - RNA, 14 nt, Human
gggcaucugccccu

SEQ ID NO: 2835721 - RNA, 17 nt, Human
gggcaugcuggggcaag

SEQ ID NO: 2835722 - RNA, 14 nt, Human
gggcaugcuggggc

SEQ ID NO: 2835723 - RNA, 20 nt, Human
gggcaugccccggccaccuc

SEQ ID NO: 2835724 - RNA, 22 nt, Human
gggcaugccccggccaccucug

SEQ ID NO: 2835725 - RNA, 23 nt, Human
gggcaugccccggccaccucugc

SEQ ID NO: 2835726 - RNA, 13 nt, Human
gggcaugccuugu

SEQ ID NO: 2835727 - RNA, 14 nt, Human
gggcaugccuugug

SEQ ID NO: 2835728 - RNA, 20 nt, Human
gggcaucugccccuccccca

SEQ ID NO: 2835729 - RNA, 16 nt, Human
gggcaugccccggcca

SEQ ID NO: 2835730 - RNA, 20 nt, Human
gggcaugagcauuggauaca

SEQ ID NO: 2835731 - RNA, 22 nt, Human
gggcauggacguucggggcaug

SEQ ID NO: 2835732 - RNA, 20 nt, Human
gggcauggacguucggggca

SEQ ID NO: 2835733 - RNA, 15 nt, Human
gggcauggccaggug

SEQ ID NO: 2835734 - RNA, 17 nt, Human
gggcauggccagguggc

SEQ ID NO: 2835735 - RNA, 20 nt, Human
gggcauggccagguggccac

SEQ ID NO: 2835736 - RNA, 18 nt, Human
gggcaugguaccagcccu

SEQ ID NO: 2835737 - RNA, 19 nt, Human
gggcaugguaccagcccug

SEQ ID NO: 2835738 - RNA, 20 nt, Human
gggcaugguaccagcccugg

SEQ ID NO: 2835739 - RNA, 14 nt, Human
gggcaugugggcuu

SEQ ID NO: 2835740 - RNA, 13 nt, Human
gggcauugacaaa

SEQ ID NO: 2835741 - RNA, 16 nt, Human
gggccacagagaaagu

SEQ ID NO: 2835742 - RNA, 21 nt, Human
gggccaauucaauacaaacaa

SEQ ID NO: 2835743 - RNA, 17 nt, Human
gggccaagacuuggcaa

SEQ ID NO: 2835744 - RNA, 22 nt, Human
gggccaacuugagggcccagag

SEQ ID NO: 2835745 - RNA, 23 nt, Human
gggccaacuugagggcccagagc

SEQ ID NO: 2835746 - RNA, 21 nt, Human
gggcauuucuugcgagccucg

SEQ ID NO: 2835747 - RNA, 21 nt, Human
gggccaaauccgcucucuucc

SEQ ID NO: 2835748 - RNA, 22 nt, Human
gggccaaauccgcucucuuccu

SEQ ID NO: 2835749 - RNA, 23 nt, Human
gggccaaauccgcucucuuccug

SEQ ID NO: 2835750 - RNA, 13 nt, Human
gggccaaaaggaa

SEQ ID NO: 2835751 - RNA, 15 nt, Human
gggccaaaaggaaaa

SEQ ID NO: 2835752 - RNA, 17 nt, Human
gggccaaaaggaaaaag

SEQ ID NO: 2835753 - RNA, 23 nt, Human
gggccacagagaaaguacuucuc

SEQ ID NO: 2835754 - RNA, 13 nt, Human
gggccaccccucc

SEQ ID NO: 2835755 - RNA, 19 nt, Human
gggccaccaaagcugccca

SEQ ID NO: 2835756 - RNA, 20 nt, Human
gggccaccaggaucagccag

SEQ ID NO: 2835757 - RNA, 17 nt, Human
gggccaccaaagcugcc

SEQ ID NO: 2835758 - RNA, 16 nt, Human
gggccaccaaagcugc

SEQ ID NO: 2835759 - RNA, 14 nt, Human
gggccaccaaagcu

SEQ ID NO: 2835760 - RNA, 14 nt, Human
gggccaccccuccu

SEQ ID NO: 2835761 - RNA, 13 nt, Human
gggccaccugccu

SEQ ID NO: 2835762 - RNA, 14 nt, Human
gggccaccugccug

SEQ ID NO: 2835763 - RNA, 15 nt, Human
gggccaccugccugc

SEQ ID NO: 2835764 - RNA, 17 nt, Human
gggcccagagagggugg

SEQ ID NO: 2835765 - RNA, 23 nt, Human
gggcccaagacagaugccccaga

SEQ ID NO: 2835766 - RNA, 18 nt, Human
gggcccaaggcggccccu

SEQ ID NO: 2835767 - RNA, 19 nt, Human
gggcccaaggcggccccuc

SEQ ID NO: 2835768 - RNA, 19 nt, Human
gggcccaagacagaugccc

SEQ ID NO: 2835769 - RNA, 14 nt, Human
gggcccagauucua

SEQ ID NO: 2835770 - RNA, 13 nt, Human
gggcccagaucug

SEQ ID NO: 2835771 - RNA, 14 nt, Human
gggcccagaggcug

SEQ ID NO: 2835772 - RNA, 14 nt, Human
gggcccagagcagg

SEQ ID NO: 2835773 - RNA, 19 nt, Human
gggcccacgugguuggggc

SEQ ID NO: 2835774 - RNA, 12 nt, Human
gggcccagagca

SEQ ID NO: 2835775 - RNA, 15 nt, Human
gggcaccagccagcg

SEQ ID NO: 2835776 - RNA, 20 nt, Human
gggcacuuuaaaugaagcua

SEQ ID NO: 2835777 - RNA, 14 nt, Human
gggcacuucccugc

SEQ ID NO: 2835778 - RNA, 18 nt, Human
gggcacuucccugcugcc

SEQ ID NO: 2835779 - RNA, 20 nt, Human
gggcacucagaagacacuga

SEQ ID NO: 2835780 - RNA, 13 nt, Human
gggcacugguggc

SEQ ID NO: 2835781 - RNA, 16 nt, Human
gggcacugguggcccg

SEQ ID NO: 2835782 - RNA, 13 nt, Human
gggcacuggccca

SEQ ID NO: 2835783 - RNA, 14 nt, Human
gggcacuggcccag

SEQ ID NO: 2835784 - RNA, 15 nt, Human
gggcacuggcccagg

SEQ ID NO: 2835785 - RNA, 13 nt, Human
gggcaggggcugg

SEQ ID NO: 2835786 - RNA, 14 nt, Human
gggcagggugaccc

SEQ ID NO: 2835787 - RNA, 14 nt, Human
gggcagguggggug

SEQ ID NO: 2835788 - RNA, 21 nt, Human
gggcagguucugccugcuuug

SEQ ID NO: 2835789 - RNA, 19 nt, Human
gggcacucagaagacacug

SEQ ID NO: 2835790 - RNA, 16 nt, Human
gggcacucagaagaca

SEQ ID NO: 2835791 - RNA, 12 nt, Human
gggcacccaccc

SEQ ID NO: 2835792 - RNA, 20 nt, Human
gggcacccuguggcccuggc

SEQ ID NO: 2835793 - RNA, 19 nt, Human
gggcaccuauagucccagc

SEQ ID NO: 2835794 - RNA, 14 nt, Human
gggcaccggggccu

SEQ ID NO: 2835795 - RNA, 15 nt, Human
gggcacaguccagga

SEQ ID NO: 2835796 - RNA, 16 nt, Human
gggcacaguccaggaa

SEQ ID NO: 2835797 - RNA, 23 nt, Human
gggcacaccgggcacucagaaga

SEQ ID NO: 2835798 - RNA, 15 nt, Human
gggcacacgccuccc

SEQ ID NO: 2835799 - RNA, 12 nt, Human
gggcacacacug

SEQ ID NO: 2835800 - RNA, 13 nt, Human
gggcacacacugu

SEQ ID NO: 2835801 - RNA, 19 nt, Human
gggcacacgccucccacug

SEQ ID NO: 2835802 - RNA, 15 nt, Human
gggcacagcaucugu

SEQ ID NO: 2835803 - RNA, 13 nt, Human
gggcacacucugc

SEQ ID NO: 2835804 - RNA, 15 nt, Human
gggcacacucugcca

SEQ ID NO: 2835805 - RNA, 22 nt, Human
gggcacacucugccagcaaaga

SEQ ID NO: 2835806 - RNA, 14 nt, Human
gggagugagcuggu

SEQ ID NO: 2835807 - RNA, 11 nt, Human
gggagugagcu

SEQ ID NO: 2835808 - RNA, 18 nt, Human
gggagugacagaggcagc

SEQ ID NO: 2835809 - RNA, 20 nt, Human
gggagguggagguugcauug

SEQ ID NO: 2835810 - RNA, 11 nt, Human
gggagugggug

SEQ ID NO: 2835811 - RNA, 22 nt, Human
gggaguugucaagucucugcug

SEQ ID NO: 2835812 - RNA, 15 nt, Human
gggauaaaaugacua

SEQ ID NO: 2835813 - RNA, 20 nt, Human
gggauaacccuacacccaga

SEQ ID NO: 2835814 - RNA, 22 nt, Human
gggauacaaccucccucuuguu

SEQ ID NO: 2835815 - RNA, 16 nt, Human
gggaggugaccccagg

SEQ ID NO: 2835816 - RNA, 19 nt, Human
gggacugaaaaccucuccu

SEQ ID NO: 2835817 - RNA, 18 nt, Human
gggacugaaaaccucucc

SEQ ID NO: 2835818 - RNA, 17 nt, Human
gggacucagcccugagg

SEQ ID NO: 2835819 - RNA, 16 nt, Human
gggacucagcccugag

SEQ ID NO: 2835820 - RNA, 15 nt, Human
gggacuagccccugu

SEQ ID NO: 2835821 - RNA, 20 nt, Human
gggacucugaagccucuggg

SEQ ID NO: 2835822 - RNA, 19 nt, Human
gggacucugagcgggaggc

SEQ ID NO: 2835823 - RNA, 21 nt, Human
gggacucugagcgggaggcag

SEQ ID NO: 2835824 - RNA, 22 nt, Human
gggacucugagcgggaggcaga

SEQ ID NO: 2835825 - RNA, 23 nt, Human
gggacucugagcgggaggcagag

SEQ ID NO: 2835826 - RNA, 19 nt, Human
gggacucugaagccucugg

SEQ ID NO: 2835827 - RNA, 20 nt, Human
gggcaacccccagccugcua

SEQ ID NO: 2835828 - RNA, 19 nt, Human
gggaucccugucuuuccua

SEQ ID NO: 2835829 - RNA, 11 nt, Human
gggaugaaaga

SEQ ID NO: 2835830 - RNA, 15 nt, Human
gggaugaaagagaag

SEQ ID NO: 2835831 - RNA, 14 nt, Human
gggcaaggaaaaag

SEQ ID NO: 2835832 - RNA, 16 nt, Human
gggcaaggaaaaagaa

SEQ ID NO: 2835833 - RNA, 20 nt, Human
gggcaaggaaaaagaaaaua

SEQ ID NO: 2835834 - RNA, 24 nt, Human
gggcaagucccugacucucuguga

SEQ ID NO: 2835835 - RNA, 22 nt, Human
gggcaagucuuuaggucuuugu

SEQ ID NO: 2835836 - RNA, 15 nt, Human
gggcacaaagggccc

SEQ ID NO: 2835837 - RNA, 17 nt, Human
gggcaauuggaacaaag

SEQ ID NO: 2835838 - RNA, 17 nt, Human
gggcacaaagggcccag

SEQ ID NO: 2835839 - RNA, 21 nt, Human
gggcacaacugcaauaacuuc

SEQ ID NO: 2835840 - RNA, 16 nt, Human
gggcacaaagggccca

SEQ ID NO: 2835841 - RNA, 23 nt, Human
gggaucaaaguucugcuuucucc

SEQ ID NO: 2835842 - RNA, 18 nt, Human
gggaucaucaugcagcuc

SEQ ID NO: 2835843 - RNA, 13 nt, Human
gggaucaugaaag

SEQ ID NO: 2835844 - RNA, 17 nt, Human
gggaucacaggugucag

SEQ ID NO: 2835845 - RNA, 13 nt, Human
gggauagagagag

SEQ ID NO: 2835846 - RNA, 13 nt, Human
gggauacugcagg

SEQ ID NO: 2835847 - RNA, 18 nt, Human
ggugccuuucaaauuuag

SEQ ID NO: 2835848 - RNA, 19 nt, Human
ggugccuuucaaauuuaga

SEQ ID NO: 2835849 - RNA, 15 nt, Human
ggugcuacgccugca

SEQ ID NO: 2835850 - RNA, 16 nt, Human
ggugagaggggaacag

SEQ ID NO: 2835851 - RNA, 14 nt, Human
ggugagaugcugga

SEQ ID NO: 2835852 - RNA, 17 nt, Human
ggugagaugcuggagaa

SEQ ID NO: 2835853 - RNA, 21 nt, Human
ggugagaugcuggagaagaga

SEQ ID NO: 2835854 - RNA, 22 nt, Human
ggugagaugcuggagaagagag

SEQ ID NO: 2835855 - RNA, 23 nt, Human
ggugagaugcuggagaagagagg

SEQ ID NO: 2835856 - RNA, 21 nt, Human
ggugagaauugggcggcucug

SEQ ID NO: 2835857 - RNA, 13 nt, Human
ggugaggagcaca

SEQ ID NO: 2835858 - RNA, 22 nt, Human
ggugagcccauggcccucccag

SEQ ID NO: 2835859 - RNA, 19 nt, Human
ggugagcagaaguggagcu

SEQ ID NO: 2835860 - RNA, 19 nt, Human
ggugagcccauggcccucc

SEQ ID NO: 2835861 - RNA, 20 nt, Human
ggugccuucuucagggccug

SEQ ID NO: 2835862 - RNA, 17 nt, Human
ggugccugucccacccc

SEQ ID NO: 2835863 - RNA, 13 nt, Human
ggugccuguccca

SEQ ID NO: 2835864 - RNA, 12 nt, Human
gguggccucggg

SEQ ID NO: 2835865 - RNA, 22 nt, Human
gguggccucgggacaccugccc

SEQ ID NO: 2835866 - RNA, 16 nt, Human
gguggcggccccagca

SEQ ID NO: 2835867 - RNA, 19 nt, Human
gguggcgggcaccuauagu

SEQ ID NO: 2835868 - RNA, 19 nt, Human
gguggcgggugccuguaau

SEQ ID NO: 2835869 - RNA, 23 nt, Human
gguggccucuccuuguggccugg

SEQ ID NO: 2835870 - RNA, 23 nt, Human
gguggccacuccagaccccuggc

SEQ ID NO: 2835871 - RNA, 21 nt, Human
gguggcaugcaccugcaaucc

SEQ ID NO: 2835872 - RNA, 20 nt, Human
gguggccacuccagaccccu

SEQ ID NO: 2835873 - RNA, 21 nt, Human
gguggccacuccagaccccug

SEQ ID NO: 2835874 - RNA, 22 nt, Human
gguggccacuccagaccccugg

SEQ ID NO: 2835875 - RNA, 16 nt, Human
gguggcagugggagcu

SEQ ID NO: 2835876 - RNA, 15 nt, Human
gguggcauacgccug

SEQ ID NO: 2835877 - RNA, 22 nt, Human
gguggcagugggagcugccugu

SEQ ID NO: 2835878 - RNA, 19 nt, Human
gguggcagugggagcugcc

SEQ ID NO: 2835879 - RNA, 21 nt, Human
ggugcugccauccagguucag

SEQ ID NO: 2835880 - RNA, 15 nt, Human
ggugcugccauccag

SEQ ID NO: 2835881 - RNA, 22 nt, Human
ggugcugaguagaugcgcagcc

SEQ ID NO: 2835882 - RNA, 12 nt, Human
ggugagaaaaaa

SEQ ID NO: 2835883 - RNA, 23 nt, Human
ggugagaaaccuguaucuuucua

SEQ ID NO: 2835884 - RNA, 16 nt, Human
ggugacgguugggagc

SEQ ID NO: 2835885 - RNA, 12 nt, Human
ggugacggcccu

SEQ ID NO: 2835886 - RNA, 19 nt, Human
ggugacggcccucaucuau

SEQ ID NO: 2835887 - RNA, 22 nt, Human
ggugacugguuaucacaccauc

SEQ ID NO: 2835888 - RNA, 19 nt, Human
ggugacuucacagugaagu

SEQ ID NO: 2835889 - RNA, 15 nt, Human
ggugacaugugaaac

SEQ ID NO: 2835890 - RNA, 18 nt, Human
ggugacaugugaaaccuu

SEQ ID NO: 2835891 - RNA, 21 nt, Human
ggugaccucugccugaaguca

SEQ ID NO: 2835892 - RNA, 14 nt, Human
ggucugacccacug

SEQ ID NO: 2835893 - RNA, 13 nt, Human
ggucugccaggcc

SEQ ID NO: 2835894 - RNA, 14 nt, Human
ggucugccaggccc

SEQ ID NO: 2835895 - RNA, 15 nt, Human
ggucugccaggcccc

SEQ ID NO: 2835896 - RNA, 17 nt, Human
ggucugccaggccccca

SEQ ID NO: 2835897 - RNA, 21 nt, Human
ggugacagagugagacucugu

SEQ ID NO: 2835898 - RNA, 12 nt, Human
ggugacaguggc

SEQ ID NO: 2835899 - RNA, 14 nt, Human
ggugacaugugaaa

SEQ ID NO: 2835900 - RNA, 17 nt, Human
ggugacagcagucgguu

SEQ ID NO: 2835901 - RNA, 12 nt, Human
ggugacagucau

SEQ ID NO: 2835902 - RNA, 18 nt, Human
ggugacagucaucaucag

SEQ ID NO: 2835903 - RNA, 19 nt, Human
ggugacagucaucaucagg

SEQ ID NO: 2835904 - RNA, 20 nt, Human
ggugacagucaucaucaggg

SEQ ID NO: 2835905 - RNA, 21 nt, Human
ggugacagucaucaucagggc

SEQ ID NO: 2835906 - RNA, 22 nt, Human
ggugacagucaucaucagggcc

SEQ ID NO: 2835907 - RNA, 23 nt, Human
ggugacagucaucaucagggccu

SEQ ID NO: 2835908 - RNA, 13 nt, Human
ggucuauuccagc

SEQ ID NO: 2835909 - RNA, 14 nt, Human
ggucuauuccagcu

SEQ ID NO: 2835910 - RNA, 15 nt, Human
ggucuauuccagcuc

SEQ ID NO: 2835911 - RNA, 16 nt, Human
ggucuauuccagcuca

SEQ ID NO: 2835912 - RNA, 17 nt, Human
ggucuauuccagcucau

SEQ ID NO: 2835913 - RNA, 18 nt, Human
ggucuauuccagcucauu

SEQ ID NO: 2835914 - RNA, 20 nt, Human
ggucuauuccagcucauuca

SEQ ID NO: 2835915 - RNA, 17 nt, Human
ggucucaaacuccugac

SEQ ID NO: 2835916 - RNA, 14 nt, Human
ggucagguuuaaca

SEQ ID NO: 2835917 - RNA, 15 nt, Human
ggucagguuuaacau

SEQ ID NO: 2835918 - RNA, 17 nt, Human
ggucagguuuaacauuu

SEQ ID NO: 2835919 - RNA, 18 nt, Human
ggucucacaguguugccc

SEQ ID NO: 2835920 - RNA, 23 nt, Human
ggucucaaacuccugggcucagg

SEQ ID NO: 2835921 - RNA, 21 nt, Human
ggucucaaacuccugggcuca

SEQ ID NO: 2835922 - RNA, 23 nt, Human
ggucucacucugucgcccagucu

SEQ ID NO: 2835923 - RNA, 22 nt, Human
ggucucacucugucgcccaguc

SEQ ID NO: 2835924 - RNA, 21 nt, Human
ggucucacaguguugcccagg

SEQ ID NO: 2835925 - RNA, 20 nt, Human
ggucucacaguguugcccag

SEQ ID NO: 2835926 - RNA, 19 nt, Human
ggucucacaguguugccca

SEQ ID NO: 2835927 - RNA, 21 nt, Human
ggucucgcuuuguugcccagg

SEQ ID NO: 2835928 - RNA, 20 nt, Human
ggucucgcuuuguugcccag

SEQ ID NO: 2835929 - RNA, 19 nt, Human
ggucucgcuuuguugccca

SEQ ID NO: 2835930 - RNA, 15 nt, Human
ggucucuaggcuggg

SEQ ID NO: 2835931 - RNA, 16 nt, Human
ggucucuaggcugggg

SEQ ID NO: 2835932 - RNA, 17 nt, Human
ggucucuaggcugggga

SEQ ID NO: 2835933 - RNA, 16 nt, Human
ggucucccacguggga

SEQ ID NO: 2835934 - RNA, 18 nt, Human
ggucucaggcugguggga

SEQ ID NO: 2835935 - RNA, 21 nt, Human
ggucucaggauauccuuauca

SEQ ID NO: 2835936 - RNA, 22 nt, Human
ggucucaggauauccuuaucag

SEQ ID NO: 2835937 - RNA, 20 nt, Human
ggucucuuacuuuccuuucc

SEQ ID NO: 2835938 - RNA, 14 nt, Human
ggucucuucuccca

SEQ ID NO: 2835939 - RNA, 15 nt, Human
ggucucuucucccag

SEQ ID NO: 2835940 - RNA, 16 nt, Human
ggucucuucucccaga

SEQ ID NO: 2835941 - RNA, 17 nt, Human
ggucucuucucccagaa

SEQ ID NO: 2835942 - RNA, 10 nt, Human
ggucucuuuu

SEQ ID NO: 2835943 - RNA, 20 nt, Human
ggucucuuuuguaaauuaaa

SEQ ID NO: 2835944 - RNA, 12 nt, Human
ggucucugcugc

SEQ ID NO: 2835945 - RNA, 16 nt, Human
ggucucucccucaggu

SEQ ID NO: 2835946 - RNA, 17 nt, Human
ggucucucccucaggug

SEQ ID NO: 2835947 - RNA, 13 nt, Human
ggucucugcugcc

SEQ ID NO: 2835948 - RNA, 14 nt, Human
ggucucugcugccg

SEQ ID NO: 2835949 - RNA, 10 nt, Human
ggucucuggu

SEQ ID NO: 2835950 - RNA, 19 nt, Human
ggucucuguugacuggcug

SEQ ID NO: 2835951 - RNA, 19 nt, Human
ggucucucucucucuacaa

SEQ ID NO: 2835952 - RNA, 20 nt, Human
ggucucugcauuuuucugca

SEQ ID NO: 2835953 - RNA, 22 nt, Human
ggucucugcauuuuucugcaga

SEQ ID NO: 2835954 - RNA, 23 nt, Human
ggucucugcauuuuucugcagaa

SEQ ID NO: 2835955 - RNA, 18 nt, Human
ggucucuaggcuggggaa

SEQ ID NO: 2835956 - RNA, 14 nt, Human
ggucucuauuucau

SEQ ID NO: 2835957 - RNA, 14 nt, Human
gguuaucucugugu

SEQ ID NO: 2835958 - RNA, 17 nt, Human
gguuaucgaaauaacaa

SEQ ID NO: 2835959 - RNA, 15 nt, Human
gguuauaguaacauc

SEQ ID NO: 2835960 - RNA, 22 nt, Human
gguuaguggauggaaggggcug

SEQ ID NO: 2835961 - RNA, 21 nt, Human
gguuaguggauggaaggggcu

SEQ ID NO: 2835962 - RNA, 20 nt, Human
gguuaggaguucgagaccag

SEQ ID NO: 2835963 - RNA, 18 nt, Human
gguuagauguugccaugu

SEQ ID NO: 2835964 - RNA, 18 nt, Human
gguuagauucaaggcccc

SEQ ID NO: 2835965 - RNA, 13 nt, Human
gguuagauguugc

SEQ ID NO: 2835966 - RNA, 14 nt, Human
gguuaaauacugug

SEQ ID NO: 2835967 - RNA, 17 nt, Human
gguuagcagagcuggac

SEQ ID NO: 2835968 - RNA, 16 nt, Human
gguuacagagaccuau

SEQ ID NO: 2835969 - RNA, 22 nt, Human
gguuacaguaugcuugcucuaa

SEQ ID NO: 2835970 - RNA, 21 nt, Human
gguuaagcauuaccacucagg

SEQ ID NO: 2835971 - RNA, 17 nt, Human
gguuaaucuuuccugau

SEQ ID NO: 2835972 - RNA, 22 nt, Human
gguuaauuuuuacauggagaaa

SEQ ID NO: 2835973 - RNA, 21 nt, Human
gguuaaaacuguacauuuaaa

SEQ ID NO: 2835974 - RNA, 22 nt, Human
gguuaaaacuguacauuuaaaa

SEQ ID NO: 2835975 - RNA, 13 nt, Human
gguguuuucugug

SEQ ID NO: 2835976 - RNA, 17 nt, Human
gguguuuucuguguaac

SEQ ID NO: 2835977 - RNA, 23 nt, Human
gguuaaaaaaaggcauuguuuga

SEQ ID NO: 2835978 - RNA, 20 nt, Human
gguuaaaaaaauggcaguga

SEQ ID NO: 2835979 - RNA, 22 nt, Human
gguguuuuucuuguaaaugugu

SEQ ID NO: 2835980 - RNA, 19 nt, Human
gguguuuuuuaugaagugc

SEQ ID NO: 2835981 - RNA, 22 nt, Human
gguguuuuuuaugaagugcgug

SEQ ID NO: 2835982 - RNA, 24 nt, Human
gguuauuucucaacaaagcacagu

SEQ ID NO: 2835983 - RNA, 17 nt, Human
gguuauguaucagaaga

SEQ ID NO: 2835984 - RNA, 22 nt, Human
gguuauguguaugugccauuua

SEQ ID NO: 2835985 - RNA, 20 nt, Human
gguuauugaaaauaugaugu

SEQ ID NO: 2835986 - RNA, 15 nt, Human
gguuaucugucccag

SEQ ID NO: 2835987 - RNA, 12 nt, Human
gguuaugaaaga

SEQ ID NO: 2835988 - RNA, 21 nt, Human
gguuaugaaagaauauauuua

SEQ ID NO: 2835989 - RNA, 23 nt, Human
gguuaucgaaauaacaauguuaa

SEQ ID NO: 2835990 - RNA, 15 nt, Human
gguucacuaaagcag

SEQ ID NO: 2835991 - RNA, 20 nt, Human
gguucacgugcagcucaagg

SEQ ID NO: 2835992 - RNA, 22 nt, Human
gguugauaguuuaccugaauaa

SEQ ID NO: 2835993 - RNA, 13 nt, Human
gguugauuaaggc

SEQ ID NO: 2835994 - RNA, 20 nt, Human
gguugauuaaggcaguacaa

SEQ ID NO: 2835995 - RNA, 19 nt, Human
gguugaggggcuccuggaa

SEQ ID NO: 2835996 - RNA, 18 nt, Human
gguugaggggcuccugga

SEQ ID NO: 2835997 - RNA, 23 nt, Human
gguugagaauggaaaccacaacu

SEQ ID NO: 2835998 - RNA, 16 nt, Human
gguugacuuucaggua

SEQ ID NO: 2835999 - RNA, 14 nt, Human
gguucuuucuuccu

SEQ ID NO: 2836000 - RNA, 16 nt, Human
gguucuuucuuccucu

SEQ ID NO: 2836001 - RNA, 16 nt, Human
gguguaugguucugug

SEQ ID NO: 2836002 - RNA, 17 nt, Human
ggugucaagagggucug

SEQ ID NO: 2836003 - RNA, 19 nt, Human
ggugucaagagggucugag

SEQ ID NO: 2836004 - RNA, 11 nt, Human
ggugucacccc

SEQ ID NO: 2836005 - RNA, 13 nt, Human
ggugucaccccag

SEQ ID NO: 2836006 - RNA, 14 nt, Human
ggugucaccccaga

SEQ ID NO: 2836007 - RNA, 15 nt, Human
ggugucaccccagag

SEQ ID NO: 2836008 - RNA, 16 nt, Human
ggugucaccccagagc

SEQ ID NO: 2836009 - RNA, 17 nt, Human
ggugucaccccagagcc

SEQ ID NO: 2836010 - RNA, 21 nt, Human
ggugucaccccagagccacac

SEQ ID NO: 2836011 - RNA, 22 nt, Human
ggugucaccccagagccacaca

SEQ ID NO: 2836012 - RNA, 13 nt, Human
gguguauuuaaac

SEQ ID NO: 2836013 - RNA, 16 nt, Human
gguguauuuaaacuau

SEQ ID NO: 2836014 - RNA, 19 nt, Human
ggugucaccugaagacuca

SEQ ID NO: 2836015 - RNA, 19 nt, Human
ggugucacauggugccccu

SEQ ID NO: 2836016 - RNA, 13 nt, Human
ggugucacugucc

SEQ ID NO: 2836017 - RNA, 14 nt, Human
ggugucacuguccc

SEQ ID NO: 2836018 - RNA, 20 nt, Human
ggugucacugucccuccugg

SEQ ID NO: 2836019 - RNA, 21 nt, Human
ggugucacugucccuccuggu

SEQ ID NO: 2836020 - RNA, 20 nt, Human
ggugucagccauugcaccca

SEQ ID NO: 2836021 - RNA, 17 nt, Human
ggugucaguauccaggc

SEQ ID NO: 2836022 - RNA, 14 nt, Human
ggugucauuucauu

SEQ ID NO: 2836023 - RNA, 17 nt, Human
ggugucauuucauucca

SEQ ID NO: 2836024 - RNA, 18 nt, Human
ggugucauuucauuccau

SEQ ID NO: 2836025 - RNA, 12 nt, Human
gguguagccagg

SEQ ID NO: 2836026 - RNA, 18 nt, Human
gguguaauaagacauaac

SEQ ID NO: 2836027 - RNA, 15 nt, Human
gguguaauaagacau

SEQ ID NO: 2836028 - RNA, 16 nt, Human
gguguaauaagacaua

SEQ ID NO: 2836029 - RNA, 14 nt, Human
gguguaauaagaca

SEQ ID NO: 2836030 - RNA, 15 nt, Human
gguggugaccucugc

SEQ ID NO: 2836031 - RNA, 14 nt, Human
gguggugaccucug

SEQ ID NO: 2836032 - RNA, 16 nt, Human
gguggugaccucugcc

SEQ ID NO: 2836033 - RNA, 13 nt, Human
ggugguggagcca

SEQ ID NO: 2836034 - RNA, 20 nt, Human
gguggugggaaccaugaaga

SEQ ID NO: 2836035 - RNA, 19 nt, Human
gguggcucacgccuguaau

SEQ ID NO: 2836036 - RNA, 19 nt, Human
gguggcucacaccuguaau

SEQ ID NO: 2836037 - RNA, 14 nt, Human
ggugggguccugga

SEQ ID NO: 2836038 - RNA, 23 nt, Human
ggugggguccuggagcagaccac

SEQ ID NO: 2836039 - RNA, 12 nt, Human
ggugggugcuca

SEQ ID NO: 2836040 - RNA, 13 nt, Human
ggugggugcucag

SEQ ID NO: 2836041 - RNA, 14 nt, Human
ggugggugcucaga

SEQ ID NO: 2836042 - RNA, 16 nt, Human
ggugguacccucugga

SEQ ID NO: 2836043 - RNA, 21 nt, Human
ggggauuuccagccagggcug

SEQ ID NO: 2836044 - RNA, 13 nt, Human
ggggaggggaagu

SEQ ID NO: 2836045 - RNA, 18 nt, Human
ggggaggggcugugggcg

SEQ ID NO: 2836046 - RNA, 16 nt, Human
ggggaggcggcacucc

SEQ ID NO: 2836047 - RNA, 18 nt, Human
ggggaggcggcacuccaa

SEQ ID NO: 2836048 - RNA, 14 nt, Human
ggggaaaaaaaugu

SEQ ID NO: 2836049 - RNA, 19 nt, Human
ggggaggaucacuggagcc

SEQ ID NO: 2836050 - RNA, 13 nt, Human
gggcuugugaaca

SEQ ID NO: 2836051 - RNA, 19 nt, Human
gggcuuucguccacagcuu

SEQ ID NO: 2836052 - RNA, 15 nt, Human
gggcuuucuggagag

SEQ ID NO: 2836053 - RNA, 15 nt, Human
gggcuuugugugaag

SEQ ID NO: 2836054 - RNA, 20 nt, Human
gggcuuugugugaaggcaga

SEQ ID NO: 2836055 - RNA, 14 nt, Human
gggcuuucuggaga

SEQ ID NO: 2836056 - RNA, 13 nt, Human
gggccuggggccu

SEQ ID NO: 2836057 - RNA, 14 nt, Human
gggccuggggccug

SEQ ID NO: 2836058 - RNA, 16 nt, Human
gggccuggggccugag

SEQ ID NO: 2836059 - RNA, 17 nt, Human
gggccuggggccugaga

SEQ ID NO: 2836060 - RNA, 18 nt, Human
gggccuggggccugagag

SEQ ID NO: 2836061 - RNA, 19 nt, Human
gggccuggggccugagaga

SEQ ID NO: 2836062 - RNA, 11 nt, Human
gggccugggcc

SEQ ID NO: 2836063 - RNA, 14 nt, Human
ggggcaucugcccc

SEQ ID NO: 2836064 - RNA, 13 nt, Human
ggggcaguggcaa

SEQ ID NO: 2836065 - RNA, 13 nt, Human
ggggcguccaggc

SEQ ID NO: 2836066 - RNA, 17 nt, Human
ggggcacaguccaggaa

SEQ ID NO: 2836067 - RNA, 19 nt, Human
ggggcacaguccaggaaca

SEQ ID NO: 2836068 - RNA, 14 nt, Human
ggggcucuggagag

SEQ ID NO: 2836069 - RNA, 16 nt, Human
ggggcucuggagagaa

SEQ ID NO: 2836070 - RNA, 17 nt, Human
ggggcucuggagagaaa

SEQ ID NO: 2836071 - RNA, 13 nt, Human
ggggcucuggaga

SEQ ID NO: 2836072 - RNA, 16 nt, Human
ggggcucucagcucag

SEQ ID NO: 2836073 - RNA, 20 nt, Human
ggggcucucagcucagcgcc

SEQ ID NO: 2836074 - RNA, 22 nt, Human
ggggcucuaggguugcuggagc

SEQ ID NO: 2836075 - RNA, 23 nt, Human
ggggcucuaggguugcuggagcc

SEQ ID NO: 2836076 - RNA, 21 nt, Human
ggggcuccuggaaaggcucag

SEQ ID NO: 2836077 - RNA, 14 nt, Human
ggggcuacaagagg

SEQ ID NO: 2836078 - RNA, 15 nt, Human
ggggcuacaagaggg

SEQ ID NO: 2836079 - RNA, 17 nt, Human
ggggcgugaggucccag

SEQ ID NO: 2836080 - RNA, 16 nt, Human
ggggcuacaagaggga

SEQ ID NO: 2836081 - RNA, 17 nt, Human
ggggcuacaagagggaa

SEQ ID NO: 2836082 - RNA, 13 nt, Human
ggggcuccuggaa

SEQ ID NO: 2836083 - RNA, 12 nt, Human
ggggcuccugga

SEQ ID NO: 2836084 - RNA, 11 nt, Human
ggggcuccugg

SEQ ID NO: 2836085 - RNA, 19 nt, Human
gggguuucgcagccugagu

SEQ ID NO: 2836086 - RNA, 18 nt, Human
gggguuugccauuugaua

SEQ ID NO: 2836087 - RNA, 13 nt, Human
ggguaaacugugg

SEQ ID NO: 2836088 - RNA, 13 nt, Human
ggguaagagagga

SEQ ID NO: 2836089 - RNA, 16 nt, Human
ggguaaggcccccucu

SEQ ID NO: 2836090 - RNA, 16 nt, Human
ggguaagggauuucuu

SEQ ID NO: 2836091 - RNA, 20 nt, Human
ggguaagggauuucuuaggg

SEQ ID NO: 2836092 - RNA, 21 nt, Human
ggguaagggauuucuuagggg

SEQ ID NO: 2836093 - RNA, 20 nt, Human
gggguguuugggaggcugcg

SEQ ID NO: 2836094 - RNA, 16 nt, Human
gggguguuaauuuaug

SEQ ID NO: 2836095 - RNA, 13 nt, Human
ggggugucuuuuu

SEQ ID NO: 2836096 - RNA, 19 nt, Human
gggguguggcuccuuccca

SEQ ID NO: 2836097 - RNA, 15 nt, Human
gggguuaucucugug

SEQ ID NO: 2836098 - RNA, 13 nt, Human
gggguuaugugga

SEQ ID NO: 2836099 - RNA, 17 nt, Human
gggguuggggugacagu

SEQ ID NO: 2836100 - RNA, 15 nt, Human
gggguuguguuguca

SEQ ID NO: 2836101 - RNA, 14 nt, Human
gggucucacucugu

SEQ ID NO: 2836102 - RNA, 12 nt, Human
gggucucacucu

SEQ ID NO: 2836103 - RNA, 21 nt, Human
gggucugaggaauccagaccc

SEQ ID NO: 2836104 - RNA, 12 nt, Human
gggucugaggaa

SEQ ID NO: 2836105 - RNA, 12 nt, Human
gggucucugcug

SEQ ID NO: 2836106 - RNA, 13 nt, Human
gggucucugcugc

SEQ ID NO: 2836107 - RNA, 14 nt, Human
gggucucucccuca

SEQ ID NO: 2836108 - RNA, 17 nt, Human
gggucucucccucaggu

SEQ ID NO: 2836109 - RNA, 18 nt, Human
gggucucucccucaggug

SEQ ID NO: 2836110 - RNA, 14 nt, Human
gggucucugcugcc

SEQ ID NO: 2836111 - RNA, 15 nt, Human
gggucucugcugccg

SEQ ID NO: 2836112 - RNA, 18 nt, Human
gggucucugcugccgccc

SEQ ID NO: 2836113 - RNA, 17 nt, Human
gggucucuuuuguaaau

SEQ ID NO: 2836114 - RNA, 21 nt, Human
gggucucuuuuguaaauuaaa

SEQ ID NO: 2836115 - RNA, 23 nt, Human
gggucugggcggcgggcggcugg

SEQ ID NO: 2836116 - RNA, 16 nt, Human
gggggacuagccccug

SEQ ID NO: 2836117 - RNA, 20 nt, Human
gggggacucugagcgggagg

SEQ ID NO: 2836118 - RNA, 21 nt, Human
gggggacucugagcgggaggc

SEQ ID NO: 2836119 - RNA, 19 nt, Human
gggggacugcugcugccug

SEQ ID NO: 2836120 - RNA, 18 nt, Human
ggggcucuggagagaaac

SEQ ID NO: 2836121 - RNA, 17 nt, Human
gggguggccugcaguga

SEQ ID NO: 2836122 - RNA, 13 nt, Human
gggguggccugug

SEQ ID NO: 2836123 - RNA, 15 nt, Human
gggguggccugugug

SEQ ID NO: 2836124 - RNA, 11 nt, Human
ggggugcugcc

SEQ ID NO: 2836125 - RNA, 12 nt, Human
ggucaccuuguu

SEQ ID NO: 2836126 - RNA, 19 nt, Human
ggucagaagaguugugcac

SEQ ID NO: 2836127 - RNA, 14 nt, Human
ggucaggcagccag

SEQ ID NO: 2836128 - RNA, 17 nt, Human
ggucaggcagccaguga

SEQ ID NO: 2836129 - RNA, 19 nt, Human
ggucaggcagccagugaga

SEQ ID NO: 2836130 - RNA, 11 nt, Human
ggucagagccu

SEQ ID NO: 2836131 - RNA, 13 nt, Human
ggucaggcccugg

SEQ ID NO: 2836132 - RNA, 14 nt, Human
ggucaggcccugga

SEQ ID NO: 2836133 - RNA, 16 nt, Human
ggucaggcccuggaac

SEQ ID NO: 2836134 - RNA, 17 nt, Human
ggucaggcccuggaacu

SEQ ID NO: 2836135 - RNA, 18 nt, Human
ggucaggcccuggaacuc

SEQ ID NO: 2836136 - RNA, 14 nt, Human
ggucaggcccuggu

SEQ ID NO: 2836137 - RNA, 16 nt, Human
ggucagggagugcugg

SEQ ID NO: 2836138 - RNA, 20 nt, Human
ggucagggagugcuggcuca

SEQ ID NO: 2836139 - RNA, 23 nt, Human
ggucagggagugcuggcucacag

SEQ ID NO: 2836140 - RNA, 17 nt, Human
ggucaggggugacacag

SEQ ID NO: 2836141 - RNA, 18 nt, Human
ggucaggggugacacaga

SEQ ID NO: 2836142 - RNA, 12 nt, Human
ggucaggcuggu

SEQ ID NO: 2836143 - RNA, 18 nt, Human
ggucaggcuggucucaaa

SEQ ID NO: 2836144 - RNA, 21 nt, Human
gguauuuuuuuguaauugcuu

SEQ ID NO: 2836145 - RNA, 11 nt, Human
ggucaacagaa

SEQ ID NO: 2836146 - RNA, 17 nt, Human
ggucaacagaaugaaaa

SEQ ID NO: 2836147 - RNA, 18 nt, Human
ggucaacagaaugaaaaa

SEQ ID NO: 2836148 - RNA, 20 nt, Human
ggucaacagaaugaaaaaug

SEQ ID NO: 2836149 - RNA, 21 nt, Human
ggucaacagaaugaaaaauga

SEQ ID NO: 2836150 - RNA, 18 nt, Human
ggucaacagcuaugcugg

SEQ ID NO: 2836151 - RNA, 16 nt, Human
gguauuuugaauacca

SEQ ID NO: 2836152 - RNA, 15 nt, Human
gguauuuuguuucuu

SEQ ID NO: 2836153 - RNA, 18 nt, Human
gguauuuuguuucuuuua

SEQ ID NO: 2836154 - RNA, 19 nt, Human
gguauuuuucagagauuua

SEQ ID NO: 2836155 - RNA, 18 nt, Human
gguauuuuugcccugagu

SEQ ID NO: 2836156 - RNA, 23 nt, Human
ggucaacaucuuuuacauucugc

SEQ ID NO: 2836157 - RNA, 16 nt, Human
ggucacaggacucugc

SEQ ID NO: 2836158 - RNA, 18 nt, Human
ggucacaggacucugccu

SEQ ID NO: 2836159 - RNA, 15 nt, Human
ggucacuuaaaaugu

SEQ ID NO: 2836160 - RNA, 21 nt, Human
ggucacuuaaaaugugcagua

SEQ ID NO: 2836161 - RNA, 19 nt, Human
ggucacugaggccugagac

SEQ ID NO: 2836162 - RNA, 20 nt, Human
ggucacugaggccugagacc

SEQ ID NO: 2836163 - RNA, 22 nt, Human
ggucacugaggccugagaccca

SEQ ID NO: 2836164 - RNA, 23 nt, Human
ggucacugaggccugagacccag

SEQ ID NO: 2836165 - RNA, 24 nt, Human
ggucacugaggccugagacccagg

SEQ ID NO: 2836166 - RNA, 13 nt, Human
gguacccacugcu

SEQ ID NO: 2836167 - RNA, 11 nt, Human
gguacccacug

SEQ ID NO: 2836168 - RNA, 18 nt, Human
gguaccagcccuggggcu

SEQ ID NO: 2836169 - RNA, 17 nt, Human
gguacuuguggacacag

SEQ ID NO: 2836170 - RNA, 16 nt, Human
gguacuuguggacaca

SEQ ID NO: 2836171 - RNA, 17 nt, Human
gguagagccacaaaaga

SEQ ID NO: 2836172 - RNA, 14 nt, Human
gguauuuauaauau

SEQ ID NO: 2836173 - RNA, 18 nt, Human
gguagaguuuacagcucu

SEQ ID NO: 2836174 - RNA, 14 nt, Human
gguagccaggggga

SEQ ID NO: 2836175 - RNA, 15 nt, Human
gggugcagcugagaa

SEQ ID NO: 2836176 - RNA, 14 nt, Human
gggugcagcaguga

SEQ ID NO: 2836177 - RNA, 18 nt, Human
gggugcuaguggugggca

SEQ ID NO: 2836178 - RNA, 12 nt, Human
gggugcucagaa

SEQ ID NO: 2836179 - RNA, 13 nt, Human
gggugcucagaau

SEQ ID NO: 2836180 - RNA, 18 nt, Human
gggugcucagaauaaggc

SEQ ID NO: 2836181 - RNA, 21 nt, Human
gggugcucagaauaaggcagg

SEQ ID NO: 2836182 - RNA, 17 nt, Human
gggugagggucccaugu

SEQ ID NO: 2836183 - RNA, 20 nt, Human
gggugagaugcuggagaaga

SEQ ID NO: 2836184 - RNA, 15 nt, Human
gggugagaugcugga

SEQ ID NO: 2836185 - RNA, 18 nt, Human
gggugagaugcuggagaa

SEQ ID NO: 2836186 - RNA, 13 nt, Human
gggugacggcccu

SEQ ID NO: 2836187 - RNA, 18 nt, Human
gggugacggcccucaucu

SEQ ID NO: 2836188 - RNA, 13 nt, Human
gggugauuccuaa

SEQ ID NO: 2836189 - RNA, 23 nt, Human
gggugauuuuaugaucaguguug

SEQ ID NO: 2836190 - RNA, 16 nt, Human
gggugacaagagccug

SEQ ID NO: 2836191 - RNA, 13 nt, Human
gggugacacagac

SEQ ID NO: 2836192 - RNA, 14 nt, Human
gggugacacagacu

SEQ ID NO: 2836193 - RNA, 13 nt, Human
gggugacagucau

SEQ ID NO: 2836194 - RNA, 18 nt, Human
gggugacagucaucauca

SEQ ID NO: 2836195 - RNA, 20 nt, Human
gggugacagucaucaucagg

SEQ ID NO: 2836196 - RNA, 22 nt, Human
gggugacagucaucaucagggc

SEQ ID NO: 2836197 - RNA, 19 nt, Human
gggugaagagaaccgagca

SEQ ID NO: 2836198 - RNA, 23 nt, Human
gggucuucccuaccucaggcagg

SEQ ID NO: 2836199 - RNA, 15 nt, Human
gggucugugugaaug

SEQ ID NO: 2836200 - RNA, 17 nt, Human
gggucugugugaaugug

SEQ ID NO: 2836201 - RNA, 24 nt, Human
gggucugugugaaugugggcacug

SEQ ID NO: 2836202 - RNA, 20 nt, Human
gggucuucagcauucccucc

SEQ ID NO: 2836203 - RNA, 21 nt, Human
gggucuucagcauucccuccc

SEQ ID NO: 2836204 - RNA, 18 nt, Human
ggguuagauguugccaug

SEQ ID NO: 2836205 - RNA, 20 nt, Human
ggguuauguguaugugccau

SEQ ID NO: 2836206 - RNA, 13 nt, Human
ggguucaggggac

SEQ ID NO: 2836207 - RNA, 23 nt, Human
ggguucaagcgauucuucugcuu

SEQ ID NO: 2836208 - RNA, 20 nt, Human
ggguucaccugggcugaggc

SEQ ID NO: 2836209 - RNA, 13 nt, Human
ggguuaucucugu

SEQ ID NO: 2836210 - RNA, 18 nt, Human
ggguuauguaucagaaga

SEQ ID NO: 2836211 - RNA, 19 nt, Human
ggguuauguaucagaagag

SEQ ID NO: 2836212 - RNA, 22 nt, Human
ggguucaagcgauucuucugcu

SEQ ID NO: 2836213 - RNA, 18 nt, Human
ggguguuguauggggagg

SEQ ID NO: 2836214 - RNA, 17 nt, Human
ggguuaaaucaaagaua

SEQ ID NO: 2836215 - RNA, 22 nt, Human
ggguuacaguaugcuugcucua

SEQ ID NO: 2836216 - RNA, 15 nt, Human
ggguguuaauuuaug

SEQ ID NO: 2836217 - RNA, 21 nt, Human
ggguuccuuccucugagccuu

SEQ ID NO: 2836218 - RNA, 20 nt, Human
ggguuccuuccucugagccu

SEQ ID NO: 2836219 - RNA, 14 nt, Human
ggguucaugaugca

SEQ ID NO: 2836220 - RNA, 15 nt, Human
ggguucaugaugcag

SEQ ID NO: 2836221 - RNA, 19 nt, Human
ggguuccuuccucugagcc

SEQ ID NO: 2836222 - RNA, 14 nt, Human
ggguuccucuuccc

SEQ ID NO: 2836223 - RNA, 14 nt, Human
ggguugcuggagcc

SEQ ID NO: 2836224 - RNA, 15 nt, Human
ggguugcuggagccu

SEQ ID NO: 2836225 - RNA, 12 nt, Human
ggguugaaaauu

SEQ ID NO: 2836226 - RNA, 23 nt, Human
ggguugaaaauucaaaaaguguu

SEQ ID NO: 2836227 - RNA, 11 nt, Human
ggguugauuaa

SEQ ID NO: 2836228 - RNA, 17 nt, Human
ggguugauuaaggcagu

SEQ ID NO: 2836229 - RNA, 19 nt, Human
ggguugauuaaggcaguac

SEQ ID NO: 2836230 - RNA, 19 nt, Human
ggguucuuucuuccucugc

SEQ ID NO: 2836231 - RNA, 17 nt, Human
ggguucuuucuuccucu

SEQ ID NO: 2836232 - RNA, 16 nt, Human
ggguucuuucuuccuc

SEQ ID NO: 2836233 - RNA, 20 nt, Human
uauauuuuuauauuuaguua

SEQ ID NO: 2836234 - RNA, 18 nt, Human
uauauuuuuauauuuagu

SEQ ID NO: 2836235 - RNA, 17 nt, Human
uaucaggugcugccauc

SEQ ID NO: 2836236 - RNA, 15 nt, Human
uaucaggucucccac

SEQ ID NO: 2836237 - RNA, 23 nt, Human
uaucaggucucccacgugggaga

SEQ ID NO: 2836238 - RNA, 14 nt, Human
uaucagcuucagaa

SEQ ID NO: 2836239 - RNA, 18 nt, Human
uaucagcuacuuaagaga

SEQ ID NO: 2836240 - RNA, 19 nt, Human
uaucagcuacuuaagagaa

SEQ ID NO: 2836241 - RNA, 20 nt, Human
uaucagcuacuuaagagaaa

SEQ ID NO: 2836242 - RNA, 21 nt, Human
uaucagcuacuuaagagaaau

SEQ ID NO: 2836243 - RNA, 16 nt, Human
uaucaugucaaacgug

SEQ ID NO: 2836244 - RNA, 22 nt, Human
uaucauguaaagaaaugucuua

SEQ ID NO: 2836245 - RNA, 11 nt, Human
uaucaugaagc

SEQ ID NO: 2836246 - RNA, 19 nt, Human
uaucaucuggauaggagcc

SEQ ID NO: 2836247 - RNA, 12 nt, Human
uaucaugaagcc

SEQ ID NO: 2836248 - RNA, 13 nt, Human
uaucaugaagccu

SEQ ID NO: 2836249 - RNA, 14 nt, Human
uaucaugaagccug

SEQ ID NO: 2836250 - RNA, 16 nt, Human
uaucaugaagccugug

SEQ ID NO: 2836251 - RNA, 16 nt, Human
uaucauccacauuguu

SEQ ID NO: 2836252 - RNA, 17 nt, Human
uaucauccacauuguuu

SEQ ID NO: 2836253 - RNA, 22 nt, Human
uaucauccacauuguuuuaaaa

SEQ ID NO: 2836254 - RNA, 12 nt, Human
uaucaguuugau

SEQ ID NO: 2836255 - RNA, 13 nt, Human
uaucaguuugauc

SEQ ID NO: 2836256 - RNA, 22 nt, Human
uaucaguuugaucacacuauuu

SEQ ID NO: 2836257 - RNA, 17 nt, Human
uaucaguguuuuaaauu

SEQ ID NO: 2836258 - RNA, 19 nt, Human
uaucaguguuuuaaauucu

SEQ ID NO: 2836259 - RNA, 20 nt, Human
uaucaguguuuuaaauucug

SEQ ID NO: 2836260 - RNA, 21 nt, Human
uaucaguguuuuaaauucuga

SEQ ID NO: 2836261 - RNA, 13 nt, Human
uaucuaaaagugu

SEQ ID NO: 2836262 - RNA, 23 nt, Human
uaucuaaaagugucaccuuuucu

SEQ ID NO: 2836263 - RNA, 12 nt, Human
uaucuaaaugau

SEQ ID NO: 2836264 - RNA, 16 nt, Human
uaucucuuuuauauuu

SEQ ID NO: 2836265 - RNA, 21 nt, Human
uaucucuuuuauauuuguagg

SEQ ID NO: 2836266 - RNA, 12 nt, Human
uaucucuguguu

SEQ ID NO: 2836267 - RNA, 12 nt, Human
uaucuaaaguua

SEQ ID NO: 2836268 - RNA, 13 nt, Human
uaucuaaaguuau

SEQ ID NO: 2836269 - RNA, 14 nt, Human
uaucuaaaguuaua

SEQ ID NO: 2836270 - RNA, 18 nt, Human
uaucuaaaguuauauuuc

SEQ ID NO: 2836271 - RNA, 19 nt, Human
uaucuaaaguuauauuuca

SEQ ID NO: 2836272 - RNA, 20 nt, Human
uaucuaaaguuauauuucag

SEQ ID NO: 2836273 - RNA, 12 nt, Human
uaucuaaaguuu

SEQ ID NO: 2836274 - RNA, 15 nt, Human
uaucuaaaguuuguu

SEQ ID NO: 2836275 - RNA, 17 nt, Human
uaucggcucacaaagag

SEQ ID NO: 2836276 - RNA, 20 nt, Human
uaucgaaauaacaauguuaa

SEQ ID NO: 2836277 - RNA, 21 nt, Human
uaucgaaauaacaauguuaag

SEQ ID NO: 2836278 - RNA, 15 nt, Human
uaucgaaauaacaau

SEQ ID NO: 2836279 - RNA, 16 nt, Human
uaucgaaauaacaaug

SEQ ID NO: 2836280 - RNA, 18 nt, Human
uaucgaaauaacaauguu

SEQ ID NO: 2836281 - RNA, 19 nt, Human
uaucgaaauaacaauguua

SEQ ID NO: 2836282 - RNA, 16 nt, Human
uaucgaucucuuauuu

SEQ ID NO: 2836283 - RNA, 16 nt, Human
uaucgauguuuuauua

SEQ ID NO: 2836284 - RNA, 22 nt, Human
uaucgauguuuuauuauuucua

SEQ ID NO: 2836285 - RNA, 20 nt, Human
uaucgcugacuucauggaau

SEQ ID NO: 2836286 - RNA, 21 nt, Human
uaucaugucaaacgugaaaau

SEQ ID NO: 2836287 - RNA, 18 nt, Human
uauccugccaaaaucauu

SEQ ID NO: 2836288 - RNA, 22 nt, Human
uauccugggggacccaauguag

SEQ ID NO: 2836289 - RNA, 13 nt, Human
uauccugugacug

SEQ ID NO: 2836290 - RNA, 22 nt, Human
uauccugcuucugauaugcagu

SEQ ID NO: 2836291 - RNA, 15 nt, Human
uauccugcuguucua

SEQ ID NO: 2836292 - RNA, 18 nt, Human
uauccuuuucuucuaugu

SEQ ID NO: 2836293 - RNA, 14 nt, Human
uaucgaaauaacaa

SEQ ID NO: 2836294 - RNA, 22 nt, Human
uauccuuuguggcaccuuuucu

SEQ ID NO: 2836295 - RNA, 14 nt, Human
uauccugugacugu

SEQ ID NO: 2836296 - RNA, 16 nt, Human
uauccugugacugucu

SEQ ID NO: 2836297 - RNA, 17 nt, Human
uauccugugacugucuc

SEQ ID NO: 2836298 - RNA, 23 nt, Human
uauccugugacugucucacuuaa

SEQ ID NO: 2836299 - RNA, 12 nt, Human
uauauuuauuua

SEQ ID NO: 2836300 - RNA, 16 nt, Human
uauauuuauuuaaagc

SEQ ID NO: 2836301 - RNA, 22 nt, Human
uauauuuauuuaaagcauugcu

SEQ ID NO: 2836302 - RNA, 21 nt, Human
uauauguauauuuuuuuaauu

SEQ ID NO: 2836303 - RNA, 16 nt, Human
uauauuucagauguaa

SEQ ID NO: 2836304 - RNA, 19 nt, Human
uauauuucagauguaaugu

SEQ ID NO: 2836305 - RNA, 20 nt, Human
uauauuucccuaaaauacau

SEQ ID NO: 2836306 - RNA, 14 nt, Human
uauauguacuguuu

SEQ ID NO: 2836307 - RNA, 19 nt, Human
uauauguaccguaggcuuu

SEQ ID NO: 2836308 - RNA, 12 nt, Human
uauauguacaug

SEQ ID NO: 2836309 - RNA, 15 nt, Human
uauauggcauuugca

SEQ ID NO: 2836310 - RNA, 16 nt, Human
uauauggcaagaaagc

SEQ ID NO: 2836311 - RNA, 17 nt, Human
uauaugccuuuuuccua

SEQ ID NO: 2836312 - RNA, 18 nt, Human
uauaugccuuuuuccuag

SEQ ID NO: 2836313 - RNA, 16 nt, Human
uauauuugugcuauag

SEQ ID NO: 2836314 - RNA, 17 nt, Human
uauauuugugcuauagu

SEQ ID NO: 2836315 - RNA, 20 nt, Human
uauauuugugcuauaguauu

SEQ ID NO: 2836316 - RNA, 21 nt, Human
uauauuugugcuauaguauuu

SEQ ID NO: 2836317 - RNA, 22 nt, Human
uauauuugugcuauaguauuug

SEQ ID NO: 2836318 - RNA, 15 nt, Human
uauauuuuaccauac

SEQ ID NO: 2836319 - RNA, 16 nt, Human
uauauuuguguauuua

SEQ ID NO: 2836320 - RNA, 14 nt, Human
uauauuucuuuguu

SEQ ID NO: 2836321 - RNA, 20 nt, Human
uauauuuguguauuuaacag

SEQ ID NO: 2836322 - RNA, 22 nt, Human
uauauggaugauucagaaauug

SEQ ID NO: 2836323 - RNA, 16 nt, Human
uauaugaauaaagugu

SEQ ID NO: 2836324 - RNA, 15 nt, Human
uauaugauuuauagu

SEQ ID NO: 2836325 - RNA, 16 nt, Human
uauaugauuuauaguu

SEQ ID NO: 2836326 - RNA, 21 nt, Human
uauaugauuuauaguuuguac

SEQ ID NO: 2836327 - RNA, 19 nt, Human
uauaugaggacuugugucu

SEQ ID NO: 2836328 - RNA, 13 nt, Human
uauaugauggggg

SEQ ID NO: 2836329 - RNA, 13 nt, Human
uauauagagaugu

SEQ ID NO: 2836330 - RNA, 14 nt, Human
uauauagagauguu

SEQ ID NO: 2836331 - RNA, 16 nt, Human
uauauagagauguuuu

SEQ ID NO: 2836332 - RNA, 19 nt, Human
uauauagagauguuuuuaa

SEQ ID NO: 2836333 - RNA, 22 nt, Human
uauaugaauuuaaauauaauuc

SEQ ID NO: 2836334 - RNA, 14 nt, Human
uauaugagaagaau

SEQ ID NO: 2836335 - RNA, 15 nt, Human
uauaugagaagaaua

SEQ ID NO: 2836336 - RNA, 16 nt, Human
uauaugagaagaauag

SEQ ID NO: 2836337 - RNA, 17 nt, Human
uauaugagaagaauagc

SEQ ID NO: 2836338 - RNA, 20 nt, Human
uauaugagaagaauagccua

SEQ ID NO: 2836339 - RNA, 13 nt, Human
uauauacauaugu

SEQ ID NO: 2836340 - RNA, 14 nt, Human
uauauacauaugua

SEQ ID NO: 2836341 - RNA, 15 nt, Human
uauauacauauguag

SEQ ID NO: 2836342 - RNA, 16 nt, Human
uauauacauauguaga

SEQ ID NO: 2836343 - RNA, 17 nt, Human
uauauacauauguagac

SEQ ID NO: 2836344 - RNA, 14 nt, Human
uauauacaguaacu

SEQ ID NO: 2836345 - RNA, 17 nt, Human
uauauacaguaacuuua

SEQ ID NO: 2836346 - RNA, 22 nt, Human
uauauacaguaacuuuaugugu

SEQ ID NO: 2836347 - RNA, 22 nt, Human
uauauacaauaacauaauuugu

SEQ ID NO: 2836348 - RNA, 13 nt, Human
uauauacaauaau

SEQ ID NO: 2836349 - RNA, 16 nt, Human
uauauacaauaaugga

SEQ ID NO: 2836350 - RNA, 13 nt, Human
uauauacacacac

SEQ ID NO: 2836351 - RNA, 14 nt, Human
uauauacacacaca

SEQ ID NO: 2836352 - RNA, 12 nt, Human
uauauacacaua

SEQ ID NO: 2836353 - RNA, 13 nt, Human
uauauacacauau

SEQ ID NO: 2836354 - RNA, 14 nt, Human
uauauacacauaua

SEQ ID NO: 2836355 - RNA, 18 nt, Human
uauauacacauauaccua

SEQ ID NO: 2836356 - RNA, 16 nt, Human
uauauacagaggaaau

SEQ ID NO: 2836357 - RNA, 23 nt, Human
uauauacagaggaaaucuguaac

SEQ ID NO: 2836358 - RNA, 18 nt, Human
uauauacgcaucuauaaa

SEQ ID NO: 2836359 - RNA, 17 nt, Human
uauauacgaacaaaaca

SEQ ID NO: 2836360 - RNA, 17 nt, Human
uauauagaaauauauac

SEQ ID NO: 2836361 - RNA, 13 nt, Human
uauauagaaugcu

SEQ ID NO: 2836362 - RNA, 14 nt, Human
uauauagaaugcug

SEQ ID NO: 2836363 - RNA, 16 nt, Human
uauauagacagcuuug

SEQ ID NO: 2836364 - RNA, 21 nt, Human
uauauacuugugguuuucaaa

SEQ ID NO: 2836365 - RNA, 23 nt, Human
uauauacaguaacuuuaugugua

SEQ ID NO: 2836366 - RNA, 23 nt, Human
uauauacauacacuuguauaaau

SEQ ID NO: 2836367 - RNA, 13 nt, Human
uauauacaugugu

SEQ ID NO: 2836368 - RNA, 14 nt, Human
uauauacaugugug

SEQ ID NO: 2836369 - RNA, 15 nt, Human
uauauacaugugugu

SEQ ID NO: 2836370 - RNA, 16 nt, Human
uauauacaugugugua

SEQ ID NO: 2836371 - RNA, 17 nt, Human
uauauacauguguguau

SEQ ID NO: 2836372 - RNA, 18 nt, Human
uauauacauguguguaua

SEQ ID NO: 2836373 - RNA, 18 nt, Human
uauacuugugguuuucaa

SEQ ID NO: 2836374 - RNA, 12 nt, Human
uauauaauaucu

SEQ ID NO: 2836375 - RNA, 13 nt, Human
uauauaauaucua

SEQ ID NO: 2836376 - RNA, 17 nt, Human
uauauaauaucuaaagu

SEQ ID NO: 2836377 - RNA, 19 nt, Human
uauauaauaucuaaaguua

SEQ ID NO: 2836378 - RNA, 17 nt, Human
uauauacaauaacauaa

SEQ ID NO: 2836379 - RNA, 16 nt, Human
uauauacaauaacaua

SEQ ID NO: 2836380 - RNA, 13 nt, Human
uauauaauucacu

SEQ ID NO: 2836381 - RNA, 21 nt, Human
uauauaauucacucaagcacu

SEQ ID NO: 2836382 - RNA, 22 nt, Human
uauacuuaaauggaaaaaauga

SEQ ID NO: 2836383 - RNA, 13 nt, Human
uauacuugaacaa

SEQ ID NO: 2836384 - RNA, 14 nt, Human
uauacuugaacaaa

SEQ ID NO: 2836385 - RNA, 15 nt, Human
uauacuugaacaaaa

SEQ ID NO: 2836386 - RNA, 16 nt, Human
uauacuugaacaaaag

SEQ ID NO: 2836387 - RNA, 17 nt, Human
uauacuugaacaaaagg

SEQ ID NO: 2836388 - RNA, 21 nt, Human
uauacuugaacaaaaggguca

SEQ ID NO: 2836389 - RNA, 23 nt, Human
uauacuugaacaaaagggucaga

SEQ ID NO: 2836390 - RNA, 15 nt, Human
uauacuguaauuuag

SEQ ID NO: 2836391 - RNA, 14 nt, Human
uauacuguaauuua

SEQ ID NO: 2836392 - RNA, 13 nt, Human
uauacuguucuuc

SEQ ID NO: 2836393 - RNA, 18 nt, Human
uauacugugugcuuguuu

SEQ ID NO: 2836394 - RNA, 22 nt, Human
uauacuguaauuuaguuauuga

SEQ ID NO: 2836395 - RNA, 13 nt, Human
uauacuguacaau

SEQ ID NO: 2836396 - RNA, 15 nt, Human
uauacuguacaauaa

SEQ ID NO: 2836397 - RNA, 17 nt, Human
uauacuguacaauaaaa

SEQ ID NO: 2836398 - RNA, 21 nt, Human
uauacuguacaauaaaaacau

SEQ ID NO: 2836399 - RNA, 22 nt, Human
uauacuguacaauaaaaacauu

SEQ ID NO: 2836400 - RNA, 21 nt, Human
uagucacauggccuaugcaca

SEQ ID NO: 2836401 - RNA, 13 nt, Human
uagugaugguucc

SEQ ID NO: 2836402 - RNA, 16 nt, Human
uaggcgugagaagcau

SEQ ID NO: 2836403 - RNA, 13 nt, Human
uaggcuaauguca

SEQ ID NO: 2836404 - RNA, 14 nt, Human
uaggcuaaugucaa

SEQ ID NO: 2836405 - RNA, 22 nt, Human
uaggccucucaccucugugccu

SEQ ID NO: 2836406 - RNA, 16 nt, Human
uaggccuuuuaacauu

SEQ ID NO: 2836407 - RNA, 18 nt, Human
uaggccuuuuaacauuuu

SEQ ID NO: 2836408 - RNA, 14 nt, Human
uagugcuauauaua

SEQ ID NO: 2836409 - RNA, 15 nt, Human
uagugcuauauauau

SEQ ID NO: 2836410 - RNA, 21 nt, Human
uagugcuauauauauaaauau

SEQ ID NO: 2836411 - RNA, 22 nt, Human
uagugcuauauauauaaauauu

SEQ ID NO: 2836412 - RNA, 12 nt, Human
uagugcugggau

SEQ ID NO: 2836413 - RNA, 13 nt, Human
uaguggaaaaaca

SEQ ID NO: 2836414 - RNA, 14 nt, Human
uaguggaaaaacac

SEQ ID NO: 2836415 - RNA, 23 nt, Human
uaguggaaaaacacauggggaaa

SEQ ID NO: 2836416 - RNA, 17 nt, Human
uaguggaaacauuuaua

SEQ ID NO: 2836417 - RNA, 14 nt, Human
uagugaugguuccc

SEQ ID NO: 2836418 - RNA, 18 nt, Human
uagugaugguuccccugu

SEQ ID NO: 2836419 - RNA, 16 nt, Human
uagucacacguggucu

SEQ ID NO: 2836420 - RNA, 18 nt, Human
uaguugucaguauuauuc

SEQ ID NO: 2836421 - RNA, 21 nt, Human
uaguuguccauauuuucacag

SEQ ID NO: 2836422 - RNA, 17 nt, Human
uaguugucucucuucag

SEQ ID NO: 2836423 - RNA, 17 nt, Human
uaguugucuuuccuggc

SEQ ID NO: 2836424 - RNA, 18 nt, Human
uaguuucagauauauauc

SEQ ID NO: 2836425 - RNA, 11 nt, Human
uaguuucaagc

SEQ ID NO: 2836426 - RNA, 17 nt, Human
uaguuucauaauugugu

SEQ ID NO: 2836427 - RNA, 22 nt, Human
uaguuuaccugaauaaauggua

SEQ ID NO: 2836428 - RNA, 11 nt, Human
uaguuuacugu

SEQ ID NO: 2836429 - RNA, 13 nt, Human
uaguuuacuguuu

SEQ ID NO: 2836430 - RNA, 14 nt, Human
uaguuuacuguuuu

SEQ ID NO: 2836431 - RNA, 13 nt, Human
uaguuucugaggc

SEQ ID NO: 2836432 - RNA, 17 nt, Human
uaguugcguuacacccu

SEQ ID NO: 2836433 - RNA, 14 nt, Human
uaguugcuuuguua

SEQ ID NO: 2836434 - RNA, 17 nt, Human
uaguugcuuuugaagga

SEQ ID NO: 2836435 - RNA, 18 nt, Human
uaguugcuuuugaaggaa

SEQ ID NO: 2836436 - RNA, 21 nt, Human
uaguugcuuuugaaggaauac

SEQ ID NO: 2836437 - RNA, 15 nt, Human
uaguuggugagaaac

SEQ ID NO: 2836438 - RNA, 21 nt, Human
uaguguaccuccucucagugu

SEQ ID NO: 2836439 - RNA, 22 nt, Human
uaguguaccuccucucaguguu

SEQ ID NO: 2836440 - RNA, 23 nt, Human
uaguguaccuccucucaguguuu

SEQ ID NO: 2836441 - RNA, 18 nt, Human
uaguguaagcuagaagaa

SEQ ID NO: 2836442 - RNA, 14 nt, Human
uaguguaauaagac

SEQ ID NO: 2836443 - RNA, 17 nt, Human
uaguguaauaagacuua

SEQ ID NO: 2836444 - RNA, 15 nt, Human
uaguguaauauacca

SEQ ID NO: 2836445 - RNA, 23 nt, Human
uaguggucuuuguaagaguguag

SEQ ID NO: 2836446 - RNA, 13 nt, Human
uaguguaaaauaa

SEQ ID NO: 2836447 - RNA, 19 nt, Human
uaguguaaaauaagaauga

SEQ ID NO: 2836448 - RNA, 22 nt, Human
uaguguaaaauaagaaugauuu

SEQ ID NO: 2836449 - RNA, 14 nt, Human
uaguguaguauucu

SEQ ID NO: 2836450 - RNA, 19 nt, Human
uaguguaguauucuucccu

SEQ ID NO: 2836451 - RNA, 15 nt, Human
uaguggauggaaggg

SEQ ID NO: 2836452 - RNA, 11 nt, Human
uaguguaaaau

SEQ ID NO: 2836453 - RNA, 19 nt, Human
uaguggucuuuguaagagu

SEQ ID NO: 2836454 - RNA, 21 nt, Human
uaguggucuuuguaagagugu

SEQ ID NO: 2836455 - RNA, 20 nt, Human
uagugguuuaucagcaaaaa

SEQ ID NO: 2836456 - RNA, 18 nt, Human
uaguggauggaaggggcu

SEQ ID NO: 2836457 - RNA, 18 nt, Human
uaguggucuuuguaagag

SEQ ID NO: 2836458 - RNA, 21 nt, Human
uauaauuccuauauccuguga

SEQ ID NO: 2836459 - RNA, 12 nt, Human
uauaauucugua

SEQ ID NO: 2836460 - RNA, 17 nt, Human
uauacccccugcaaagc

SEQ ID NO: 2836461 - RNA, 15 nt, Human
uauaccuauaaugug

SEQ ID NO: 2836462 - RNA, 17 nt, Human
uauaccuauaaugugug

SEQ ID NO: 2836463 - RNA, 18 nt, Human
uauaccuauaaugugugu

SEQ ID NO: 2836464 - RNA, 19 nt, Human
uauaccuauaaugugugua

SEQ ID NO: 2836465 - RNA, 21 nt, Human
uauaccuauaauguguguaug

SEQ ID NO: 2836466 - RNA, 15 nt, Human
uauaccucaaacuau

SEQ ID NO: 2836467 - RNA, 20 nt, Human
uauacucuuauagacaacau

SEQ ID NO: 2836468 - RNA, 18 nt, Human
uauacucuagaugaaguu

SEQ ID NO: 2836469 - RNA, 18 nt, Human
uauacuccaguguacaua

SEQ ID NO: 2836470 - RNA, 22 nt, Human
uauacuccaguguacauagugu

SEQ ID NO: 2836471 - RNA, 22 nt, Human
uauacucuuucuguauauacuu

SEQ ID NO: 2836472 - RNA, 19 nt, Human
uauacucuuucuguauaua

SEQ ID NO: 2836473 - RNA, 17 nt, Human
uauacucuuucuguaua

SEQ ID NO: 2836474 - RNA, 16 nt, Human
uauacucuuucuguau

SEQ ID NO: 2836475 - RNA, 20 nt, Human
uauacuauaguaccaguagg

SEQ ID NO: 2836476 - RNA, 13 nt, Human
uauaccugugccu

SEQ ID NO: 2836477 - RNA, 14 nt, Human
uauaccugugccuc

SEQ ID NO: 2836478 - RNA, 17 nt, Human
uauacuauaguaccagu

SEQ ID NO: 2836479 - RNA, 17 nt, Human
uauaauggaagagaaau

SEQ ID NO: 2836480 - RNA, 21 nt, Human
uauaauggaagagaaaucuca

SEQ ID NO: 2836481 - RNA, 15 nt, Human
uauaaugguugacug

SEQ ID NO: 2836482 - RNA, 22 nt, Human
uauaauuccuauauccugugac

SEQ ID NO: 2836483 - RNA, 20 nt, Human
uauaauucacucaagcacug

SEQ ID NO: 2836484 - RNA, 23 nt, Human
uauaauucacucaagcacugaua

SEQ ID NO: 2836485 - RNA, 13 nt, Human
uauaauucaguau

SEQ ID NO: 2836486 - RNA, 16 nt, Human
uauaauucaguauguu

SEQ ID NO: 2836487 - RNA, 22 nt, Human
uauaauucaguauguuuuacac

SEQ ID NO: 2836488 - RNA, 23 nt, Human
uauaauucaguauguuuuacacu

SEQ ID NO: 2836489 - RNA, 11 nt, Human
uauaaugaacc

SEQ ID NO: 2836490 - RNA, 21 nt, Human
uaguuugcucauacuacauug

SEQ ID NO: 2836491 - RNA, 14 nt, Human
uauaaaucauauug

SEQ ID NO: 2836492 - RNA, 18 nt, Human
uauaaaucauauugauga

SEQ ID NO: 2836493 - RNA, 21 nt, Human
uauaaaucauauugaugaaaa

SEQ ID NO: 2836494 - RNA, 22 nt, Human
uauaaaucauauugaugaaaag

SEQ ID NO: 2836495 - RNA, 11 nt, Human
uauaaauucug

SEQ ID NO: 2836496 - RNA, 12 nt, Human
uauaaauucugu

SEQ ID NO: 2836497 - RNA, 13 nt, Human
uauaaauucugug

SEQ ID NO: 2836498 - RNA, 17 nt, Human
uauaaauucuguggguc

SEQ ID NO: 2836499 - RNA, 19 nt, Human
uauaaauauauauaaagaa

SEQ ID NO: 2836500 - RNA, 20 nt, Human
uauaaauauauauaaagaau

SEQ ID NO: 2836501 - RNA, 19 nt, Human
uauaaauaggagaggauga

SEQ ID NO: 2836502 - RNA, 17 nt, Human
uauaaauauaagccuuu

SEQ ID NO: 2836503 - RNA, 17 nt, Human
uauaaauaggagaggau

SEQ ID NO: 2836504 - RNA, 14 nt, Human
uaguuuuaguuuuc

SEQ ID NO: 2836505 - RNA, 13 nt, Human
uaguuuguuuaau

SEQ ID NO: 2836506 - RNA, 21 nt, Human
uaguuuguuuaaugugaacuu

SEQ ID NO: 2836507 - RNA, 14 nt, Human
uaguuuuaaacuca

SEQ ID NO: 2836508 - RNA, 16 nt, Human
uaguuuuaaacucauu

SEQ ID NO: 2836509 - RNA, 16 nt, Human
uaguuugggcuucagc

SEQ ID NO: 2836510 - RNA, 18 nt, Human
uaguuuggggcaaaaauc

SEQ ID NO: 2836511 - RNA, 17 nt, Human
uaguuuguacaugcauu

SEQ ID NO: 2836512 - RNA, 14 nt, Human
uaguuuguauaacu

SEQ ID NO: 2836513 - RNA, 17 nt, Human
uaguuuguauaacuucu

SEQ ID NO: 2836514 - RNA, 18 nt, Human
uaguuuguauaacuucuu

SEQ ID NO: 2836515 - RNA, 12 nt, Human
uaguuugucuau

SEQ ID NO: 2836516 - RNA, 15 nt, Human
uaguuugucuauuuu

SEQ ID NO: 2836517 - RNA, 18 nt, Human
uaguuugucuauuuuaaa

SEQ ID NO: 2836518 - RNA, 22 nt, Human
uaguuugucuauuuuaaaauaa

SEQ ID NO: 2836519 - RNA, 18 nt, Human
uaguuugcauuccugaua

SEQ ID NO: 2836520 - RNA, 11 nt, Human
uaguuuggauu

SEQ ID NO: 2836521 - RNA, 11 nt, Human
uaguuugcauu

SEQ ID NO: 2836522 - RNA, 17 nt, Human
uaguuugcauuccugau

SEQ ID NO: 2836523 - RNA, 22 nt, Human
uaggaaguugacuuauaguaca

SEQ ID NO: 2836524 - RNA, 16 nt, Human
uaggaaguuuucugua

SEQ ID NO: 2836525 - RNA, 17 nt, Human
uaggaaguuuucuguag

SEQ ID NO: 2836526 - RNA, 22 nt, Human
uaggaaguuuucuguagucauu

SEQ ID NO: 2836527 - RNA, 18 nt, Human
uaggaaggucucauucuu

SEQ ID NO: 2836528 - RNA, 21 nt, Human
uaggaaggucucauucuucca

SEQ ID NO: 2836529 - RNA, 17 nt, Human
uaggaaguugacuuaua

SEQ ID NO: 2836530 - RNA, 17 nt, Human
uaggccguuccuucaaa

SEQ ID NO: 2836531 - RNA, 14 nt, Human
uaggccuggccaga

SEQ ID NO: 2836532 - RNA, 13 nt, Human
uaggccuggccag

SEQ ID NO: 2836533 - RNA, 14 nt, Human
uaggccaugaaaaa

SEQ ID NO: 2836534 - RNA, 20 nt, Human
uaggccaugaaaaaaaugau

SEQ ID NO: 2836535 - RNA, 14 nt, Human
uaggaacuucagag

SEQ ID NO: 2836536 - RNA, 15 nt, Human
uaggaacuucagaga

SEQ ID NO: 2836537 - RNA, 16 nt, Human
uaggaacuucagagau

SEQ ID NO: 2836538 - RNA, 12 nt, Human
uagcuggagccu

SEQ ID NO: 2836539 - RNA, 16 nt, Human
uagcuggcaagaaugg

SEQ ID NO: 2836540 - RNA, 15 nt, Human
uagcugggauuacag

SEQ ID NO: 2836541 - RNA, 15 nt, Human
uagcugggauuuuaa

SEQ ID NO: 2836542 - RNA, 21 nt, Human
uagcugggauuuuaaacuaga

SEQ ID NO: 2836543 - RNA, 23 nt, Human
uagcugggauuuuaaacuagaug

SEQ ID NO: 2836544 - RNA, 15 nt, Human
uagcccuuucugugu

SEQ ID NO: 2836545 - RNA, 17 nt, Human
uagcccuuucugugugc

SEQ ID NO: 2836546 - RNA, 13 nt, Human
uagcccuuucugu

SEQ ID NO: 2836547 - RNA, 14 nt, Human
uagcccuuucugug

SEQ ID NO: 2836548 - RNA, 21 nt, Human
uagccuauuuaccugcaggcu

SEQ ID NO: 2836549 - RNA, 16 nt, Human
uagccuaggugacaga

SEQ ID NO: 2836550 - RNA, 14 nt, Human
uagccugcacuuug

SEQ ID NO: 2836551 - RNA, 23 nt, Human
uagccugcacuuugaugucaugu

SEQ ID NO: 2836552 - RNA, 13 nt, Human
uagccucccugaa

SEQ ID NO: 2836553 - RNA, 14 nt, Human
uagccucauaguua

SEQ ID NO: 2836554 - RNA, 12 nt, Human
uagccucccuga

SEQ ID NO: 2836555 - RNA, 16 nt, Human
uagcaggggcugcagu

SEQ ID NO: 2836556 - RNA, 18 nt, Human
uagcccucacccuggggc

SEQ ID NO: 2836557 - RNA, 15 nt, Human
uagcccucucccucu

SEQ ID NO: 2836558 - RNA, 22 nt, Human
uagcccucucccucuaggcucu

SEQ ID NO: 2836559 - RNA, 17 nt, Human
uagccauugaucauaaa

SEQ ID NO: 2836560 - RNA, 17 nt, Human
uagccauguuaacauga

SEQ ID NO: 2836561 - RNA, 19 nt, Human
uagccauguuaacaugaca

SEQ ID NO: 2836562 - RNA, 16 nt, Human
uagcaguaaaagauga

SEQ ID NO: 2836563 - RNA, 20 nt, Human
uagcaguaaaagaugaaguu

SEQ ID NO: 2836564 - RNA, 13 nt, Human
uagcauaagggcu

SEQ ID NO: 2836565 - RNA, 20 nt, Human
uagcagugucuguaaaagag

SEQ ID NO: 2836566 - RNA, 17 nt, Human
uagcagugugaaguaca

SEQ ID NO: 2836567 - RNA, 21 nt, Human
uagcagugugaaguacaauaa

SEQ ID NO: 2836568 - RNA, 12 nt, Human
uagcccaggaga

SEQ ID NO: 2836569 - RNA, 17 nt, Human
uagcccagcgcucugcc

SEQ ID NO: 2836570 - RNA, 18 nt, Human
uagcccagcgcucugccu

SEQ ID NO: 2836571 - RNA, 13 nt, Human
uagcccaggagag

SEQ ID NO: 2836572 - RNA, 14 nt, Human
uagcccaggagaga

SEQ ID NO: 2836573 - RNA, 15 nt, Human
uagcccaggagagag

SEQ ID NO: 2836574 - RNA, 16 nt, Human
uagcccaggagagaga

SEQ ID NO: 2836575 - RNA, 15 nt, Human
uagcccacucugcuc

SEQ ID NO: 2836576 - RNA, 13 nt, Human
uagcccacccugc

SEQ ID NO: 2836577 - RNA, 14 nt, Human
uagcccacccugcu

SEQ ID NO: 2836578 - RNA, 15 nt, Human
uagcccacccugcug

SEQ ID NO: 2836579 - RNA, 18 nt, Human
uagcccacccugcugccu

SEQ ID NO: 2836580 - RNA, 14 nt, Human
uagcccaggcugga

SEQ ID NO: 2836581 - RNA, 19 nt, Human
uagcccaggcuggagugca

SEQ ID NO: 2836582 - RNA, 22 nt, Human
uagcccaggagagagaaagcca

SEQ ID NO: 2836583 - RNA, 17 nt, Human
uagcccaggagagagaa

SEQ ID NO: 2836584 - RNA, 18 nt, Human
uagcccaggagagagaaa

SEQ ID NO: 2836585 - RNA, 12 nt, Human
uagcccaucccu

SEQ ID NO: 2836586 - RNA, 14 nt, Human
uagcccaucccugc

SEQ ID NO: 2836587 - RNA, 15 nt, Human
uagcccaucccugcc

SEQ ID NO: 2836588 - RNA, 16 nt, Human
uagcccaucccugccu

SEQ ID NO: 2836589 - RNA, 17 nt, Human
uagcccaucccugccug

SEQ ID NO: 2836590 - RNA, 18 nt, Human
uagcccaucccugccugg

SEQ ID NO: 2836591 - RNA, 20 nt, Human
uagcccaucccugccugguc

SEQ ID NO: 2836592 - RNA, 21 nt, Human
uagcccaucccugccugguca

SEQ ID NO: 2836593 - RNA, 13 nt, Human
uagcucuuuccuu

SEQ ID NO: 2836594 - RNA, 15 nt, Human
uagcugccacuugaa

SEQ ID NO: 2836595 - RNA, 21 nt, Human
uagcugccacuugaacaaaau

SEQ ID NO: 2836596 - RNA, 15 nt, Human
uagcugcccauuucg

SEQ ID NO: 2836597 - RNA, 23 nt, Human
uagcugcccauuucgugagcccc

SEQ ID NO: 2836598 - RNA, 23 nt, Human
uagcugccuagcaagcuggccuc

SEQ ID NO: 2836599 - RNA, 11 nt, Human
uagcugggacu

SEQ ID NO: 2836600 - RNA, 20 nt, Human
uagcugggacuacaggcacc

SEQ ID NO: 2836601 - RNA, 18 nt, Human
uagcugggacuacaggug

SEQ ID NO: 2836602 - RNA, 22 nt, Human
uagcugggagaaagagagagcu

SEQ ID NO: 2836603 - RNA, 16 nt, Human
uagcuccucacugugg

SEQ ID NO: 2836604 - RNA, 19 nt, Human
uagccuccuucgcaggcau

SEQ ID NO: 2836605 - RNA, 20 nt, Human
uagccucgccgucugugaau

SEQ ID NO: 2836606 - RNA, 13 nt, Human
uagaguuuaacac

SEQ ID NO: 2836607 - RNA, 15 nt, Human
uagaguuuacagcuc

SEQ ID NO: 2836608 - RNA, 17 nt, Human
uagaguuuacagcucug

SEQ ID NO: 2836609 - RNA, 13 nt, Human
uagaguuucuguu

SEQ ID NO: 2836610 - RNA, 15 nt, Human
uagaguuucuguuug

SEQ ID NO: 2836611 - RNA, 20 nt, Human
uagaguuucuguuugauucu

SEQ ID NO: 2836612 - RNA, 21 nt, Human
uagaguuucuguuugauucuu

SEQ ID NO: 2836613 - RNA, 23 nt, Human
uagaguuucuguuugauucuuuu

SEQ ID NO: 2836614 - RNA, 12 nt, Human
uagaguuuaaca

SEQ ID NO: 2836615 - RNA, 17 nt, Human
uagaguuugcuauuaga

SEQ ID NO: 2836616 - RNA, 14 nt, Human
uagagucagccuuc

SEQ ID NO: 2836617 - RNA, 13 nt, Human
uagagucagccuu

SEQ ID NO: 2836618 - RNA, 14 nt, Human
uagaguauaugcac

SEQ ID NO: 2836619 - RNA, 13 nt, Human
uagaguccaaggu

SEQ ID NO: 2836620 - RNA, 16 nt, Human
uagaguccaagguuua

SEQ ID NO: 2836621 - RNA, 17 nt, Human
uagagaggaagauugaa

SEQ ID NO: 2836622 - RNA, 21 nt, Human
uagagaguuguuguguacaga

SEQ ID NO: 2836623 - RNA, 16 nt, Human
uagagagagaccacuu

SEQ ID NO: 2836624 - RNA, 16 nt, Human
uagagaacuguggccg

SEQ ID NO: 2836625 - RNA, 12 nt, Human
uagagaacugaa

SEQ ID NO: 2836626 - RNA, 13 nt, Human
uagagaacugaaa

SEQ ID NO: 2836627 - RNA, 14 nt, Human
uagagaacugaaaa

SEQ ID NO: 2836628 - RNA, 15 nt, Human
uagagaacugaaaag

SEQ ID NO: 2836629 - RNA, 16 nt, Human
uagagaacugaaaaga

SEQ ID NO: 2836630 - RNA, 21 nt, Human
uagagaacugaaaagagagca

SEQ ID NO: 2836631 - RNA, 22 nt, Human
uagagaacugaaaagagagcag

SEQ ID NO: 2836632 - RNA, 17 nt, Human
uagagacuuuuuucuag

SEQ ID NO: 2836633 - RNA, 21 nt, Human
uagagacuuuuuucuaguaca

SEQ ID NO: 2836634 - RNA, 16 nt, Human
uagagacugguuucuc

SEQ ID NO: 2836635 - RNA, 16 nt, Human
uagagguuuuguuguu

SEQ ID NO: 2836636 - RNA, 19 nt, Human
uagagguuuuguuguuuua

SEQ ID NO: 2836637 - RNA, 18 nt, Human
uagaguaaauacagguag

SEQ ID NO: 2836638 - RNA, 13 nt, Human
uagaguaagaaau

SEQ ID NO: 2836639 - RNA, 14 nt, Human
uagaguaagaaauu

SEQ ID NO: 2836640 - RNA, 15 nt, Human
uagaguaagaaauuu

SEQ ID NO: 2836641 - RNA, 21 nt, Human
uagaguaagaaauuucagguu

SEQ ID NO: 2836642 - RNA, 17 nt, Human
uagacugccuggguucc

SEQ ID NO: 2836643 - RNA, 19 nt, Human
uagacuggaaaaaaugagc

SEQ ID NO: 2836644 - RNA, 17 nt, Human
uagacugccgugcauua

SEQ ID NO: 2836645 - RNA, 16 nt, Human
uagacuggaaguucau

SEQ ID NO: 2836646 - RNA, 11 nt, Human
uagagacaggg

SEQ ID NO: 2836647 - RNA, 16 nt, Human
uagagaacgcagcccu

SEQ ID NO: 2836648 - RNA, 17 nt, Human
uagagaacgcagcccua

SEQ ID NO: 2836649 - RNA, 19 nt, Human
uagagaacgcagcccuaga

SEQ ID NO: 2836650 - RNA, 11 nt, Human
uagacuuucug

SEQ ID NO: 2836651 - RNA, 12 nt, Human
uagacuuucugu

SEQ ID NO: 2836652 - RNA, 20 nt, Human
uagagaacacgcguauuuac

SEQ ID NO: 2836653 - RNA, 15 nt, Human
uagacuuuaggcuuu

SEQ ID NO: 2836654 - RNA, 16 nt, Human
uagacuuuaggcuuuc

SEQ ID NO: 2836655 - RNA, 18 nt, Human
uagacuuuaggcuuucag

SEQ ID NO: 2836656 - RNA, 21 nt, Human
uagacuuuaggcuuucagcuu

SEQ ID NO: 2836657 - RNA, 12 nt, Human
uagacucuucac

SEQ ID NO: 2836658 - RNA, 16 nt, Human
uagacucuucacuguu

SEQ ID NO: 2836659 - RNA, 22 nt, Human
uagacugacuuguuugucuucc

SEQ ID NO: 2836660 - RNA, 23 nt, Human
uagaccgcucucuuuucuguacu

SEQ ID NO: 2836661 - RNA, 13 nt, Human
uagaccguuauaa

SEQ ID NO: 2836662 - RNA, 21 nt, Human
uagaaccauguugguugcacu

SEQ ID NO: 2836663 - RNA, 23 nt, Human
uagaaccauguugguugcacuuu

SEQ ID NO: 2836664 - RNA, 23 nt, Human
uagaaccaggcaacuugggaacu

SEQ ID NO: 2836665 - RNA, 20 nt, Human
uagaaccaccaacaagcaag

SEQ ID NO: 2836666 - RNA, 22 nt, Human
uagaaccaccaacaagcaagcu

SEQ ID NO: 2836667 - RNA, 12 nt, Human
uagaaccaggca

SEQ ID NO: 2836668 - RNA, 21 nt, Human
uagaugucuagguacuucagg

SEQ ID NO: 2836669 - RNA, 12 nt, Human
uagaugucuuuu

SEQ ID NO: 2836670 - RNA, 14 nt, Human
uagaugucuuuuau

SEQ ID NO: 2836671 - RNA, 17 nt, Human
uagaugucuuuuauagu

SEQ ID NO: 2836672 - RNA, 18 nt, Human
uagauguuccaguaaucu

SEQ ID NO: 2836673 - RNA, 14 nt, Human
uagauggugaaauu

SEQ ID NO: 2836674 - RNA, 15 nt, Human
uagauggugaaauuu

SEQ ID NO: 2836675 - RNA, 16 nt, Human
uagauaaauauuugac

SEQ ID NO: 2836676 - RNA, 19 nt, Human
uagauaaauauuugacuug

SEQ ID NO: 2836677 - RNA, 19 nt, Human
uagauaacgcuuaaaggaa

SEQ ID NO: 2836678 - RNA, 15 nt, Human
uagauaaaagcugaa

SEQ ID NO: 2836679 - RNA, 22 nt, Human
uagcagccccgggagggcggca

SEQ ID NO: 2836680 - RNA, 23 nt, Human
uagcagagaaugaaagggcccag

SEQ ID NO: 2836681 - RNA, 19 nt, Human
uagcagagaaugaaagggc

SEQ ID NO: 2836682 - RNA, 12 nt, Human
uagcagaugguu

SEQ ID NO: 2836683 - RNA, 14 nt, Human
uagcagaugguuuc

SEQ ID NO: 2836684 - RNA, 21 nt, Human
uagcagaugguuuccacauuu

SEQ ID NO: 2836685 - RNA, 23 nt, Human
uagcagauuguuuccucuuccaa

SEQ ID NO: 2836686 - RNA, 17 nt, Human
uagcagcaaaaauauaa

SEQ ID NO: 2836687 - RNA, 18 nt, Human
uagcagcaaaaauauaaa

SEQ ID NO: 2836688 - RNA, 20 nt, Human
uagcagcaaaaauauaaaau

SEQ ID NO: 2836689 - RNA, 21 nt, Human
uagcagcaaaaauauaaaaua

SEQ ID NO: 2836690 - RNA, 22 nt, Human
uagcagagggguaagagaggau

SEQ ID NO: 2836691 - RNA, 16 nt, Human
uagcagaagaaaggaa

SEQ ID NO: 2836692 - RNA, 17 nt, Human
uagcagaagaaaggaac

SEQ ID NO: 2836693 - RNA, 21 nt, Human
uagcagaagaaaggaacauuu

SEQ ID NO: 2836694 - RNA, 22 nt, Human
uagcagaagaaaggaacauuua

SEQ ID NO: 2836695 - RNA, 23 nt, Human
uagauugaaaacuuuucucagau

SEQ ID NO: 2836696 - RNA, 18 nt, Human
uagauugaaaacuuuucu

SEQ ID NO: 2836697 - RNA, 23 nt, Human
uagauucucuuguauaagauccu

SEQ ID NO: 2836698 - RNA, 20 nt, Human
uagauugaaaacuuuucuca

SEQ ID NO: 2836699 - RNA, 21 nt, Human
uagauugaaaacuuuucucag

SEQ ID NO: 2836700 - RNA, 16 nt, Human
uagauuguuaaaauaa

SEQ ID NO: 2836701 - RNA, 12 nt, Human
uagauuguaaac

SEQ ID NO: 2836702 - RNA, 15 nt, Human
uagauguugccaugu

SEQ ID NO: 2836703 - RNA, 14 nt, Human
uagauguugccaug

SEQ ID NO: 2836704 - RNA, 20 nt, Human
uagauguuuauucuucuaga

SEQ ID NO: 2836705 - RNA, 21 nt, Human
uagauguuuauucuucuagag

SEQ ID NO: 2836706 - RNA, 13 nt, Human
uagauguuucaca

SEQ ID NO: 2836707 - RNA, 14 nt, Human
uagauuaaauaaaa

SEQ ID NO: 2836708 - RNA, 13 nt, Human
uagauuaaauaua

SEQ ID NO: 2836709 - RNA, 15 nt, Human
uagauuaaauauaga

SEQ ID NO: 2836710 - RNA, 18 nt, Human
uagauuaaauauagauua

SEQ ID NO: 2836711 - RNA, 20 nt, Human
uagauuaaauauagauuaga

SEQ ID NO: 2836712 - RNA, 22 nt, Human
uagauuaaauauagauuagaaa

SEQ ID NO: 2836713 - RNA, 20 nt, Human
uagauucuacauauucuuua

SEQ ID NO: 2836714 - RNA, 15 nt, Human
uagauucuaaagauu

SEQ ID NO: 2836715 - RNA, 17 nt, Human
uagauucuaaagauucu

SEQ ID NO: 2836716 - RNA, 16 nt, Human
uagauguuuugguaga

SEQ ID NO: 2836717 - RNA, 20 nt, Human
uagauguuuugguagauuaa

SEQ ID NO: 2836718 - RNA, 21 nt, Human
uagauguuuugguagauuaaa

SEQ ID NO: 2836719 - RNA, 18 nt, Human
uagauucuaaagauucua

SEQ ID NO: 2836720 - RNA, 22 nt, Human
uagauucucuggcuguaaggcu

SEQ ID NO: 2836721 - RNA, 23 nt, Human
uagauucucuggcuguaaggcuc

SEQ ID NO: 2836722 - RNA, 19 nt, Human
uagauucucugugucuaag

SEQ ID NO: 2836723 - RNA, 20 nt, Human
uagauucucugugucuaaga

SEQ ID NO: 2836724 - RNA, 21 nt, Human
uagauucucugugucuaagau

SEQ ID NO: 2836725 - RNA, 22 nt, Human
uagauucucugugucuaagauu

SEQ ID NO: 2836726 - RNA, 23 nt, Human
uagauucucugugucuaagauuc

SEQ ID NO: 2836727 - RNA, 22 nt, Human
uacugauuauuuucuucaucca

SEQ ID NO: 2836728 - RNA, 18 nt, Human
uacugauucacugcaugg

SEQ ID NO: 2836729 - RNA, 16 nt, Human
uacugauugagaaguu

SEQ ID NO: 2836730 - RNA, 20 nt, Human
uacugaguauguggaaggca

SEQ ID NO: 2836731 - RNA, 23 nt, Human
uacugagggaccaacugggccca

SEQ ID NO: 2836732 - RNA, 17 nt, Human
uacuccucuuuacacug

SEQ ID NO: 2836733 - RNA, 11 nt, Human
uacuccugacu

SEQ ID NO: 2836734 - RNA, 12 nt, Human
uacuccugacuc

SEQ ID NO: 2836735 - RNA, 13 nt, Human
uacuccugacucc

SEQ ID NO: 2836736 - RNA, 13 nt, Human
uacuccuccucuu

SEQ ID NO: 2836737 - RNA, 15 nt, Human
uacuccuccucuuuc

SEQ ID NO: 2836738 - RNA, 16 nt, Human
uacuccuccucuuucu

SEQ ID NO: 2836739 - RNA, 18 nt, Human
uacuccuccucuuucucu

SEQ ID NO: 2836740 - RNA, 19 nt, Human
uacuccuccucuuucucuc

SEQ ID NO: 2836741 - RNA, 22 nt, Human
uacuccuccucuuucucucccc

SEQ ID NO: 2836742 - RNA, 23 nt, Human
uacuccuccucuuucucucccca

SEQ ID NO: 2836743 - RNA, 15 nt, Human
uacucacugaagccu

SEQ ID NO: 2836744 - RNA, 20 nt, Human
uacuaccuugaaaauaagaa

SEQ ID NO: 2836745 - RNA, 16 nt, Human
uacuaccuugaaaaua

SEQ ID NO: 2836746 - RNA, 18 nt, Human
uacuacauugaguagaca

SEQ ID NO: 2836747 - RNA, 15 nt, Human
uacuaccaaugccaa

SEQ ID NO: 2836748 - RNA, 14 nt, Human
uacuacaguuuuua

SEQ ID NO: 2836749 - RNA, 14 nt, Human
uacuaccuugaaaa

SEQ ID NO: 2836750 - RNA, 13 nt, Human
uacuaccuugaaa

SEQ ID NO: 2836751 - RNA, 13 nt, Human
uacuaccugugua

SEQ ID NO: 2836752 - RNA, 22 nt, Human
uacuaccuguguauauaguuuu

SEQ ID NO: 2836753 - RNA, 17 nt, Human
uacucagaagccugagg

SEQ ID NO: 2836754 - RNA, 16 nt, Human
uacucagaagccugag

SEQ ID NO: 2836755 - RNA, 19 nt, Human
uacucagaagccugaggcu

SEQ ID NO: 2836756 - RNA, 12 nt, Human
uacucagccugc

SEQ ID NO: 2836757 - RNA, 13 nt, Human
uacucagccugcu

SEQ ID NO: 2836758 - RNA, 16 nt, Human
uacucagccugcugcc

SEQ ID NO: 2836759 - RNA, 15 nt, Human
uacucagggcuccuc

SEQ ID NO: 2836760 - RNA, 16 nt, Human
uacucagggcuccucc

SEQ ID NO: 2836761 - RNA, 17 nt, Human
uacucagggcuccuccc

SEQ ID NO: 2836762 - RNA, 18 nt, Human
uacucagggcuccuccca

SEQ ID NO: 2836763 - RNA, 19 nt, Human
uacucagggcuccucccag

SEQ ID NO: 2836764 - RNA, 20 nt, Human
uacucagggcuccucccagc

SEQ ID NO: 2836765 - RNA, 21 nt, Human
uacucagggcuccucccagcu

SEQ ID NO: 2836766 - RNA, 21 nt, Human
uacucaguuuauguuguacaa

SEQ ID NO: 2836767 - RNA, 15 nt, Human
uacuacacauuuuua

SEQ ID NO: 2836768 - RNA, 22 nt, Human
uacuacacauuuuuaaauuguu

SEQ ID NO: 2836769 - RNA, 20 nt, Human
uacuacacuccaugucaggu

SEQ ID NO: 2836770 - RNA, 13 nt, Human
uacuacacugagg

SEQ ID NO: 2836771 - RNA, 15 nt, Human
uacuacacugaggag

SEQ ID NO: 2836772 - RNA, 15 nt, Human
uacuacagcuaugaa

SEQ ID NO: 2836773 - RNA, 15 nt, Human
uacgaauauuuucag

SEQ ID NO: 2836774 - RNA, 22 nt, Human
uaccuugaaaauaagaauagaa

SEQ ID NO: 2836775 - RNA, 14 nt, Human
uaccuucucccuca

SEQ ID NO: 2836776 - RNA, 15 nt, Human
uaccuucuucaggcu

SEQ ID NO: 2836777 - RNA, 12 nt, Human
uaccuucuuuca

SEQ ID NO: 2836778 - RNA, 22 nt, Human
uaccuucucccucauuucagga

SEQ ID NO: 2836779 - RNA, 16 nt, Human
uaccuugaccuuugua

SEQ ID NO: 2836780 - RNA, 18 nt, Human
uaccuugaccuuuguaca

SEQ ID NO: 2836781 - RNA, 16 nt, Human
uaccuugacuguugau

SEQ ID NO: 2836782 - RNA, 18 nt, Human
uacccaugacuuuauaug

SEQ ID NO: 2836783 - RNA, 23 nt, Human
uacccauacacccccucuucuga

SEQ ID NO: 2836784 - RNA, 20 nt, Human
uacccaucuaguacuugaaa

SEQ ID NO: 2836785 - RNA, 21 nt, Human
uacccaucuaguacuugaaaa

SEQ ID NO: 2836786 - RNA, 16 nt, Human
uacccagcuaaauaau

SEQ ID NO: 2836787 - RNA, 21 nt, Human
uacccagcuaaauaaucuuac

SEQ ID NO: 2836788 - RNA, 16 nt, Human
uacccaggaccaagcc

SEQ ID NO: 2836789 - RNA, 21 nt, Human
uacccaggaccaagccacagc

SEQ ID NO: 2836790 - RNA, 16 nt, Human
uacccagggccugcag

SEQ ID NO: 2836791 - RNA, 18 nt, Human
uacccaggguggagugca

SEQ ID NO: 2836792 - RNA, 20 nt, Human
uacccaggguggagugcagu

SEQ ID NO: 2836793 - RNA, 16 nt, Human
uacccauacacccccu

SEQ ID NO: 2836794 - RNA, 21 nt, Human
uaccuuucacagcuuuuauca

SEQ ID NO: 2836795 - RNA, 22 nt, Human
uaccuuguuauuuaacccauuu

SEQ ID NO: 2836796 - RNA, 12 nt, Human
uacuguguacug

SEQ ID NO: 2836797 - RNA, 13 nt, Human
uacuguguacugu

SEQ ID NO: 2836798 - RNA, 15 nt, Human
uacuguguacuguau

SEQ ID NO: 2836799 - RNA, 18 nt, Human
uacuguguacuguauaga

SEQ ID NO: 2836800 - RNA, 16 nt, Human
uacugugucauaaaca

SEQ ID NO: 2836801 - RNA, 16 nt, Human
uacuguguaauauaaa

SEQ ID NO: 2836802 - RNA, 14 nt, Human
uacuguguguguga

SEQ ID NO: 2836803 - RNA, 21 nt, Human
uacugugugcuuguuuuauaa

SEQ ID NO: 2836804 - RNA, 13 nt, Human
uacuguguggaac

SEQ ID NO: 2836805 - RNA, 19 nt, Human
uacuguguggaacuuuuau

SEQ ID NO: 2836806 - RNA, 18 nt, Human
uacugugugugugaauga

SEQ ID NO: 2836807 - RNA, 17 nt, Human
uacugugugugugaaug

SEQ ID NO: 2836808 - RNA, 19 nt, Human
uacugugugugugaaugaa

SEQ ID NO: 2836809 - RNA, 12 nt, Human
uacuguucuaaa

SEQ ID NO: 2836810 - RNA, 13 nt, Human
uacuguucuaaag

SEQ ID NO: 2836811 - RNA, 14 nt, Human
uacuguucuaaagc

SEQ ID NO: 2836812 - RNA, 16 nt, Human
uacuguucugugucuu

SEQ ID NO: 2836813 - RNA, 11 nt, Human
uacuguuggug

SEQ ID NO: 2836814 - RNA, 21 nt, Human
uacuguucuaaagcucugaca

SEQ ID NO: 2836815 - RNA, 14 nt, Human
uacuguucuguguc

SEQ ID NO: 2836816 - RNA, 15 nt, Human
uacuguucuaaagcu

SEQ ID NO: 2836817 - RNA, 17 nt, Human
uacuguucuaaagcucu

SEQ ID NO: 2836818 - RNA, 18 nt, Human
uacuguucuaaagcucug

SEQ ID NO: 2836819 - RNA, 19 nt, Human
uacuguucuaaagcucuga

SEQ ID NO: 2836820 - RNA, 17 nt, Human
uacuguucugugucuuu

SEQ ID NO: 2836821 - RNA, 10 nt, Human
uacuguucuu

SEQ ID NO: 2836822 - RNA, 17 nt, Human
uacuguucuucauuuua

SEQ ID NO: 2836823 - RNA, 12 nt, Human
uacuguucuugc

SEQ ID NO: 2836824 - RNA, 13 nt, Human
uacuguucuugcu

SEQ ID NO: 2836825 - RNA, 14 nt, Human
uacuguucuugcug

SEQ ID NO: 2836826 - RNA, 15 nt, Human
uacuguucuugcugc

SEQ ID NO: 2836827 - RNA, 16 nt, Human
uacuguucuugcugcu

SEQ ID NO: 2836828 - RNA, 17 nt, Human
uacuguucuugcugcua

SEQ ID NO: 2836829 - RNA, 18 nt, Human
uacuguucuugcugcuag

SEQ ID NO: 2836830 - RNA, 19 nt, Human
uacuguucuugcugcuaga

SEQ ID NO: 2836831 - RNA, 20 nt, Human
uacuguucuugcugcuagaa

SEQ ID NO: 2836832 - RNA, 21 nt, Human
uacuguucuugcugcuagaac

SEQ ID NO: 2836833 - RNA, 22 nt, Human
uacuguucuugcugcuagaacu

SEQ ID NO: 2836834 - RNA, 23 nt, Human
uacuguucuugcugcuagaacuu

SEQ ID NO: 2836835 - RNA, 20 nt, Human
uacuguugauaauucuuauu

SEQ ID NO: 2836836 - RNA, 22 nt, Human
uacuguugauaauucuuauuuu

SEQ ID NO: 2836837 - RNA, 15 nt, Human
uacugcagcuuuaca

SEQ ID NO: 2836838 - RNA, 19 nt, Human
uacugcagcuuuacaugca

SEQ ID NO: 2836839 - RNA, 22 nt, Human
uacugcagcuuuacaugcaauu

SEQ ID NO: 2836840 - RNA, 23 nt, Human
uacugcagcuuuacaugcaauuu

SEQ ID NO: 2836841 - RNA, 10 nt, Human
uacugcaggg

SEQ ID NO: 2836842 - RNA, 12 nt, Human
uacugcagggcc

SEQ ID NO: 2836843 - RNA, 14 nt, Human
uacugcagggccag

SEQ ID NO: 2836844 - RNA, 16 nt, Human
uacugcagggccagga

SEQ ID NO: 2836845 - RNA, 18 nt, Human
uacugcagggccaggacu

SEQ ID NO: 2836846 - RNA, 19 nt, Human
uacugcagggccaggacug

SEQ ID NO: 2836847 - RNA, 11 nt, Human
uacugcaguug

SEQ ID NO: 2836848 - RNA, 19 nt, Human
uacugcaguugaaagggca

SEQ ID NO: 2836849 - RNA, 23 nt, Human
uacuguggaggaaggauuguaaa

SEQ ID NO: 2836850 - RNA, 14 nt, Human
uacuguaugugaug

SEQ ID NO: 2836851 - RNA, 16 nt, Human
uacuguaugugaugaa

SEQ ID NO: 2836852 - RNA, 18 nt, Human
uacuuguggacacagcuc

SEQ ID NO: 2836853 - RNA, 15 nt, Human
uacuuguggacacag

SEQ ID NO: 2836854 - RNA, 19 nt, Human
uacuuguggacacagcucu

SEQ ID NO: 2836855 - RNA, 18 nt, Human
uacuuuacacaauucuua

SEQ ID NO: 2836856 - RNA, 14 nt, Human
uacuuguggacaca

SEQ ID NO: 2836857 - RNA, 17 nt, Human
uacuugguccaacugca

SEQ ID NO: 2836858 - RNA, 13 nt, Human
uacuugguuugug

SEQ ID NO: 2836859 - RNA, 14 nt, Human
uacuugguuugugu

SEQ ID NO: 2836860 - RNA, 20 nt, Human
uacuugguuuguguucuucu

SEQ ID NO: 2836861 - RNA, 14 nt, Human
uacuuacauucucu

SEQ ID NO: 2836862 - RNA, 15 nt, Human
uacuuacauucucua

SEQ ID NO: 2836863 - RNA, 22 nt, Human
uacuuacauucucuaauaagaa

SEQ ID NO: 2836864 - RNA, 15 nt, Human
uacuuacuaaaauau

SEQ ID NO: 2836865 - RNA, 16 nt, Human
uacuuagaguuucugu

SEQ ID NO: 2836866 - RNA, 18 nt, Human
uacuuagaguuucuguuu

SEQ ID NO: 2836867 - RNA, 19 nt, Human
uacuuagaguuucuguuug

SEQ ID NO: 2836868 - RNA, 20 nt, Human
uacuuagaguuucuguuuga

SEQ ID NO: 2836869 - RNA, 17 nt, Human
uacuuagcaaaaagugg

SEQ ID NO: 2836870 - RNA, 14 nt, Human
uacuuagcauccua

SEQ ID NO: 2836871 - RNA, 15 nt, Human
uacuuagcauccuaa

SEQ ID NO: 2836872 - RNA, 19 nt, Human
uacuuagcauccuaagaaa

SEQ ID NO: 2836873 - RNA, 20 nt, Human
uacuuagcauccuaagaaau

SEQ ID NO: 2836874 - RNA, 21 nt, Human
uacuuagcauccuaagaaaua

SEQ ID NO: 2836875 - RNA, 22 nt, Human
uacuuagcauccuaagaaauau

SEQ ID NO: 2836876 - RNA, 17 nt, Human
uacuuacuaaaauauau

SEQ ID NO: 2836877 - RNA, 18 nt, Human
uacuuagcaaaguuuuac

SEQ ID NO: 2836878 - RNA, 22 nt, Human
uacuugaagucuaaaagcagaa

SEQ ID NO: 2836879 - RNA, 23 nt, Human
uacuugaagucuaaaagcagaaa

SEQ ID NO: 2836880 - RNA, 18 nt, Human
uacuugaguguaauguuu

SEQ ID NO: 2836881 - RNA, 20 nt, Human
uacuugcagcucccauucua

SEQ ID NO: 2836882 - RNA, 22 nt, Human
uacuugcagcucccauucuaug

SEQ ID NO: 2836883 - RNA, 14 nt, Human
uacuugccagaagu

SEQ ID NO: 2836884 - RNA, 15 nt, Human
uacuugccagaaguu

SEQ ID NO: 2836885 - RNA, 14 nt, Human
uagaaagcaggggc

SEQ ID NO: 2836886 - RNA, 22 nt, Human
uagaaagcaggggcuacaagag

SEQ ID NO: 2836887 - RNA, 15 nt, Human
uagaaagcauuacau

SEQ ID NO: 2836888 - RNA, 12 nt, Human
uagaaagaaagu

SEQ ID NO: 2836889 - RNA, 15 nt, Human
uacuuuaguaugacg

SEQ ID NO: 2836890 - RNA, 14 nt, Human
uacuuuagaagcac

SEQ ID NO: 2836891 - RNA, 16 nt, Human
uacuuuacucauuuuu

SEQ ID NO: 2836892 - RNA, 14 nt, Human
uacuuuaucacuuu

SEQ ID NO: 2836893 - RNA, 18 nt, Human
uacuuuaucacuuuuuga

SEQ ID NO: 2836894 - RNA, 20 nt, Human
uacuuuaucacuuuuugaac

SEQ ID NO: 2836895 - RNA, 20 nt, Human
uacuuucauccugacucugc

SEQ ID NO: 2836896 - RNA, 18 nt, Human
uagaaagcugacauugcc

SEQ ID NO: 2836897 - RNA, 21 nt, Human
uagaaagcugacauugccaaa

SEQ ID NO: 2836898 - RNA, 15 nt, Human
uagaaagcaggggcu

SEQ ID NO: 2836899 - RNA, 19 nt, Human
uagaaauaaaggaugugau

SEQ ID NO: 2836900 - RNA, 20 nt, Human
uagaaaguucaaaaagucua

SEQ ID NO: 2836901 - RNA, 21 nt, Human
uagaaauaaaagugaaugaaa

SEQ ID NO: 2836902 - RNA, 23 nt, Human
uagaaauaaaagugaaugaaaga

SEQ ID NO: 2836903 - RNA, 15 nt, Human
uagaaauaauaugca

SEQ ID NO: 2836904 - RNA, 16 nt, Human
uagaaauaagugguua

SEQ ID NO: 2836905 - RNA, 22 nt, Human
uagaaauaagugguuauuucuc

SEQ ID NO: 2836906 - RNA, 16 nt, Human
uagaaauaauaugcau

SEQ ID NO: 2836907 - RNA, 23 nt, Human
uagaaauaagugguuauuucuca

SEQ ID NO: 2836908 - RNA, 11 nt, Human
uagaaauaagu

SEQ ID NO: 2836909 - RNA, 12 nt, Human
uagaaauaagug

SEQ ID NO: 2836910 - RNA, 20 nt, Human
uagaaauaaaggaugugauu

SEQ ID NO: 2836911 - RNA, 17 nt, Human
uagaacagauaaucagu

SEQ ID NO: 2836912 - RNA, 23 nt, Human
uagaacagagaaagaggaagcuu

SEQ ID NO: 2836913 - RNA, 16 nt, Human
uagaacacuaacucac

SEQ ID NO: 2836914 - RNA, 15 nt, Human
uagaacacaggcaaa

SEQ ID NO: 2836915 - RNA, 16 nt, Human
uagaacaaaggacaga

SEQ ID NO: 2836916 - RNA, 20 nt, Human
uagaacaaaggacagaguau

SEQ ID NO: 2836917 - RNA, 17 nt, Human
uagaacaauuuucuugu

SEQ ID NO: 2836918 - RNA, 22 nt, Human
uagaaauuagaaaaaaauuacu

SEQ ID NO: 2836919 - RNA, 23 nt, Human
uagaaauuagaaaaaaauuacua

SEQ ID NO: 2836920 - RNA, 19 nt, Human
uagaaauuacacccaaaga

SEQ ID NO: 2836921 - RNA, 15 nt, Human
uagaaaugugaauga

SEQ ID NO: 2836922 - RNA, 19 nt, Human
uagaaauguaacuuuugua

SEQ ID NO: 2836923 - RNA, 15 nt, Human
uagaaauguaaacug

SEQ ID NO: 2836924 - RNA, 16 nt, Human
uagaaauguaaacugc

SEQ ID NO: 2836925 - RNA, 18 nt, Human
uagaaauguaaacugcca

SEQ ID NO: 2836926 - RNA, 19 nt, Human
uagaaauguaaacugccau

SEQ ID NO: 2836927 - RNA, 14 nt, Human
uagaaauaguuuga

SEQ ID NO: 2836928 - RNA, 19 nt, Human
uaccaaugcuuuuaucaaa

SEQ ID NO: 2836929 - RNA, 15 nt, Human
uaccaccacgcccgg

SEQ ID NO: 2836930 - RNA, 16 nt, Human
uaccauugcuguucua

SEQ ID NO: 2836931 - RNA, 23 nt, Human
uaccauuuugggguacccacugc

SEQ ID NO: 2836932 - RNA, 20 nt, Human
uaccauuuuuuaaggaaaca

SEQ ID NO: 2836933 - RNA, 23 nt, Human
uaccauuuccucagcuuaucucu

SEQ ID NO: 2836934 - RNA, 14 nt, Human
uaccauuuuucauu

SEQ ID NO: 2836935 - RNA, 16 nt, Human
uaccauuucagagagg

SEQ ID NO: 2836936 - RNA, 15 nt, Human
uaccauuugccuccc

SEQ ID NO: 2836937 - RNA, 21 nt, Human
uaccauuugcuacuguacaua

SEQ ID NO: 2836938 - RNA, 15 nt, Human
uaccauuucagagag

SEQ ID NO: 2836939 - RNA, 12 nt, Human
uaccauuucaga

SEQ ID NO: 2836940 - RNA, 13 nt, Human
uaccaaugcugca

SEQ ID NO: 2836941 - RNA, 17 nt, Human
uaccacacaucuaugau

SEQ ID NO: 2836942 - RNA, 14 nt, Human
uaccaaugccaaga

SEQ ID NO: 2836943 - RNA, 21 nt, Human
uaccaaugccaagauaauuca

SEQ ID NO: 2836944 - RNA, 20 nt, Human
uaccaaguauagccuauggc

SEQ ID NO: 2836945 - RNA, 14 nt, Human
uaccaacuuucugu

SEQ ID NO: 2836946 - RNA, 15 nt, Human
uaccaacuuucugua

SEQ ID NO: 2836947 - RNA, 17 nt, Human
uaccaacuuucuguaaa

SEQ ID NO: 2836948 - RNA, 19 nt, Human
uaccaacuuucuguaaacu

SEQ ID NO: 2836949 - RNA, 21 nt, Human
uaccaagaugccaucuguguc

SEQ ID NO: 2836950 - RNA, 18 nt, Human
uacccacaccucugccag

SEQ ID NO: 2836951 - RNA, 17 nt, Human
uacccacaccucugcca

SEQ ID NO: 2836952 - RNA, 18 nt, Human
uacccaagggcagaaagu

SEQ ID NO: 2836953 - RNA, 15 nt, Human
uacccaauagcugcc

SEQ ID NO: 2836954 - RNA, 13 nt, Human
uacccaauuuccc

SEQ ID NO: 2836955 - RNA, 19 nt, Human
uacccacaccucugccaga

SEQ ID NO: 2836956 - RNA, 18 nt, Human
uacccacauguacagaca

SEQ ID NO: 2836957 - RNA, 23 nt, Human
uacccaacggcccugcagccagc

SEQ ID NO: 2836958 - RNA, 21 nt, Human
uaccauuuuuuaaggaaacaa

SEQ ID NO: 2836959 - RNA, 17 nt, Human
uacccaaaacaagccug

SEQ ID NO: 2836960 - RNA, 15 nt, Human
uacccaaaagagaaa

SEQ ID NO: 2836961 - RNA, 17 nt, Human
uacccaaaagagaaaaa

SEQ ID NO: 2836962 - RNA, 16 nt, Human
uacccaaacccuaggu

SEQ ID NO: 2836963 - RNA, 20 nt, Human
uacccaaacccuagguuccc

SEQ ID NO: 2836964 - RNA, 18 nt, Human
uacccagcgagcccuggu

SEQ ID NO: 2836965 - RNA, 16 nt, Human
uacccagcgagcccug

SEQ ID NO: 2836966 - RNA, 14 nt, Human
uacccacugcucug

SEQ ID NO: 2836967 - RNA, 13 nt, Human
uacccacugcucu

SEQ ID NO: 2836968 - RNA, 12 nt, Human
uacccacugcuc

SEQ ID NO: 2836969 - RNA, 11 nt, Human
uacccacugcu

SEQ ID NO: 2836970 - RNA, 22 nt, Human
uacccaccuagaacacuaacuc

SEQ ID NO: 2836971 - RNA, 15 nt, Human
uacccaccuagaaca

SEQ ID NO: 2836972 - RNA, 12 nt, Human
uacccaccuaga

SEQ ID NO: 2836973 - RNA, 16 nt, Human
uacaugcaauuuauua

SEQ ID NO: 2836974 - RNA, 19 nt, Human
uacaugcaauuuauuaaaa

SEQ ID NO: 2836975 - RNA, 16 nt, Human
uacaugcaaaaagaaa

SEQ ID NO: 2836976 - RNA, 18 nt, Human
uacaugcaaaaagaaaug

SEQ ID NO: 2836977 - RNA, 19 nt, Human
uacaugcaaaaagaaauga

SEQ ID NO: 2836978 - RNA, 23 nt, Human
uacauuuggagacacaacuauuu

SEQ ID NO: 2836979 - RNA, 12 nt, Human
uacagcccagag

SEQ ID NO: 2836980 - RNA, 14 nt, Human
uacauuuggaacua

SEQ ID NO: 2836981 - RNA, 20 nt, Human
uacaugcaauuuauuaaaau

SEQ ID NO: 2836982 - RNA, 12 nt, Human
uaccaaacagca

SEQ ID NO: 2836983 - RNA, 14 nt, Human
uaccaaacagcaaa

SEQ ID NO: 2836984 - RNA, 15 nt, Human
uaccaaacagcaaac

SEQ ID NO: 2836985 - RNA, 21 nt, Human
uaccaaacagcaaaccaagag

SEQ ID NO: 2836986 - RNA, 19 nt, Human
uaccaaagugaccuaccca

SEQ ID NO: 2836987 - RNA, 15 nt, Human
uaccaaaguuuuauc

SEQ ID NO: 2836988 - RNA, 17 nt, Human
uaccaaaguuuuaucaa

SEQ ID NO: 2836989 - RNA, 18 nt, Human
uaccaaaguuuuaucaag

SEQ ID NO: 2836990 - RNA, 13 nt, Human
uaccaacuuucug

SEQ ID NO: 2836991 - RNA, 18 nt, Human
uacauuuggauaaacaac

SEQ ID NO: 2836992 - RNA, 16 nt, Human
uacauuugugagauuc

SEQ ID NO: 2836993 - RNA, 13 nt, Human
uacauuuuguugu

SEQ ID NO: 2836994 - RNA, 16 nt, Human
uacauuuuguuguaaa

SEQ ID NO: 2836995 - RNA, 17 nt, Human
uacauuuuguuguaaaa

SEQ ID NO: 2836996 - RNA, 18 nt, Human
uacauuuuguuguaaaaa

SEQ ID NO: 2836997 - RNA, 20 nt, Human
uacaguuaggcaccagaaga

SEQ ID NO: 2836998 - RNA, 23 nt, Human
uacaguuaggcaccagaagaaca

SEQ ID NO: 2836999 - RNA, 16 nt, Human
uacaguucaauaaacu

SEQ ID NO: 2837000 - RNA, 22 nt, Human
uacauaagcggcguaaguuuaa

SEQ ID NO: 2837001 - RNA, 13 nt, Human
uacauccugggua

SEQ ID NO: 2837002 - RNA, 14 nt, Human
uacauccuggguaa

SEQ ID NO: 2837003 - RNA, 19 nt, Human
uacaucuauuuuggauugu

SEQ ID NO: 2837004 - RNA, 18 nt, Human
uacaucuauuuuggauug

SEQ ID NO: 2837005 - RNA, 23 nt, Human
uacaucuauuuuggauuguauau

SEQ ID NO: 2837006 - RNA, 15 nt, Human
uacaucucuccccaa

SEQ ID NO: 2837007 - RNA, 19 nt, Human
uacaucugagguccuguga

SEQ ID NO: 2837008 - RNA, 13 nt, Human
uacaucuggcuua

SEQ ID NO: 2837009 - RNA, 14 nt, Human
uacaucuggcuuau

SEQ ID NO: 2837010 - RNA, 15 nt, Human
uacaucuggcuuauu

SEQ ID NO: 2837011 - RNA, 17 nt, Human
uacaucuggcuuauuuu

SEQ ID NO: 2837012 - RNA, 20 nt, Human
uacaucuggcuuauuuuaau

SEQ ID NO: 2837013 - RNA, 21 nt, Human
uacaucuggcuuauuuuaaug

SEQ ID NO: 2837014 - RNA, 23 nt, Human
uacaucuggcuuauuuuaaugug

SEQ ID NO: 2837015 - RNA, 22 nt, Human
uacaucuauuuuggauuguaua

SEQ ID NO: 2837016 - RNA, 20 nt, Human
uacaucuauuuuggauugua

SEQ ID NO: 2837017 - RNA, 23 nt, Human
uacaugaggaacuguagaugaug

SEQ ID NO: 2837018 - RNA, 20 nt, Human
uacaugaggaacuguagaug

SEQ ID NO: 2837019 - RNA, 19 nt, Human
uacaugaggaacuguagau

SEQ ID NO: 2837020 - RNA, 16 nt, Human
uacaugagaaggaacu

SEQ ID NO: 2837021 - RNA, 18 nt, Human
uacaugagaacaaacaga

SEQ ID NO: 2837022 - RNA, 17 nt, Human
uacaugagaacaaacag

SEQ ID NO: 2837023 - RNA, 14 nt, Human
uacaugaauacaaa

SEQ ID NO: 2837024 - RNA, 20 nt, Human
uacaugaaauuuuuguaaau

SEQ ID NO: 2837025 - RNA, 13 nt, Human
uacaucugucaug

SEQ ID NO: 2837026 - RNA, 14 nt, Human
uacaucuucugccu

SEQ ID NO: 2837027 - RNA, 17 nt, Human
uacaucuucugccuuag

SEQ ID NO: 2837028 - RNA, 16 nt, Human
uacaucuuuaaacagu

SEQ ID NO: 2837029 - RNA, 16 nt, Human
uacaggcacccaccau

SEQ ID NO: 2837030 - RNA, 19 nt, Human
uacaggaaaagcugcugac

SEQ ID NO: 2837031 - RNA, 19 nt, Human
uacagcuuugaucccugac

SEQ ID NO: 2837032 - RNA, 21 nt, Human
uacaggaagcaccccaugcca

SEQ ID NO: 2837033 - RNA, 14 nt, Human
uacaggcagucucu

SEQ ID NO: 2837034 - RNA, 15 nt, Human
uacaggcagucucuc

SEQ ID NO: 2837035 - RNA, 23 nt, Human
uacaggauuugaacucagaucug

SEQ ID NO: 2837036 - RNA, 13 nt, Human
uacaggcaauucc

SEQ ID NO: 2837037 - RNA, 14 nt, Human
uacaggcaauuccg

SEQ ID NO: 2837038 - RNA, 20 nt, Human
uacaggauuugaacucagau

SEQ ID NO: 2837039 - RNA, 21 nt, Human
uacagccaagugccaaaugcu

SEQ ID NO: 2837040 - RNA, 17 nt, Human
uacagcacuacugggug

SEQ ID NO: 2837041 - RNA, 18 nt, Human
uacagcacuacugggugu

SEQ ID NO: 2837042 - RNA, 19 nt, Human
uacagcacuacuggguguc

SEQ ID NO: 2837043 - RNA, 22 nt, Human
uacagcacuacugggugucauu

SEQ ID NO: 2837044 - RNA, 23 nt, Human
uacagcacuacugggugucauuu

SEQ ID NO: 2837045 - RNA, 13 nt, Human
uacagcagcaaga

SEQ ID NO: 2837046 - RNA, 14 nt, Human
uacagcagcaagaa

SEQ ID NO: 2837047 - RNA, 15 nt, Human
uacagcagcaagaaa

SEQ ID NO: 2837048 - RNA, 16 nt, Human
uacagcagcaagaaaa

SEQ ID NO: 2837049 - RNA, 22 nt, Human
uacagcagcaagaaaaaaaaau

SEQ ID NO: 2837050 - RNA, 23 nt, Human
uacagcagcaagaaaaaaaaaug

SEQ ID NO: 2837051 - RNA, 14 nt, Human
uacagcaguagaca

SEQ ID NO: 2837052 - RNA, 16 nt, Human
uacagcaguagacauu

SEQ ID NO: 2837053 - RNA, 17 nt, Human
uacagcaguagacauuu

SEQ ID NO: 2837054 - RNA, 19 nt, Human
uacagcaguagacauuuua

SEQ ID NO: 2837055 - RNA, 20 nt, Human
uacagcaguagacauuuuaa

SEQ ID NO: 2837056 - RNA, 18 nt, Human
uacaggaaaagcugcuga

SEQ ID NO: 2837057 - RNA, 17 nt, Human
uacaggaaaagcugcug

SEQ ID NO: 2837058 - RNA, 20 nt, Human
uacagcuuuacacacacaga

SEQ ID NO: 2837059 - RNA, 21 nt, Human
uacagcuuuacacacacagau

SEQ ID NO: 2837060 - RNA, 12 nt, Human
uacagcuuucug

SEQ ID NO: 2837061 - RNA, 21 nt, Human
uacagcuuucugaccuucagc

SEQ ID NO: 2837062 - RNA, 23 nt, Human
uacagcuuucugaccuucagcuc

SEQ ID NO: 2837063 - RNA, 23 nt, Human
uacagcuuucuugcucccuucag

SEQ ID NO: 2837064 - RNA, 18 nt, Human
uacagaaauuagccgggc

SEQ ID NO: 2837065 - RNA, 14 nt, Human
uacagaaauacuau

SEQ ID NO: 2837066 - RNA, 19 nt, Human
uacagaaauacuauaacau

SEQ ID NO: 2837067 - RNA, 22 nt, Human
uacagaaauacuauaacauaug

SEQ ID NO: 2837068 - RNA, 23 nt, Human
uacagaaauauaauaaaaugugu

SEQ ID NO: 2837069 - RNA, 17 nt, Human
uacagaaauuagccggg

SEQ ID NO: 2837070 - RNA, 15 nt, Human
uacacuugcccugcu

SEQ ID NO: 2837071 - RNA, 16 nt, Human
uacacuugcccugcuc

SEQ ID NO: 2837072 - RNA, 21 nt, Human
uacacuugcccugcucccucu

SEQ ID NO: 2837073 - RNA, 21 nt, Human
uacacuuggggagauuugcca

SEQ ID NO: 2837074 - RNA, 16 nt, Human
uacacuuguauaaaug

SEQ ID NO: 2837075 - RNA, 17 nt, Human
uacacuuguauaaaugu

SEQ ID NO: 2837076 - RNA, 18 nt, Human
uacacuuguauaaaugua

SEQ ID NO: 2837077 - RNA, 19 nt, Human
uacacuuguauaaauguau

SEQ ID NO: 2837078 - RNA, 20 nt, Human
uacacuuguauaaauguaua

SEQ ID NO: 2837079 - RNA, 21 nt, Human
uacacuuguauaaauguauau

SEQ ID NO: 2837080 - RNA, 22 nt, Human
uacacuuguauaaauguauaua

SEQ ID NO: 2837081 - RNA, 15 nt, Human
uacagaaaaagacuu

SEQ ID NO: 2837082 - RNA, 14 nt, Human
uacagaaaaaucuu

SEQ ID NO: 2837083 - RNA, 15 nt, Human
uacagaaaaaucuug

SEQ ID NO: 2837084 - RNA, 15 nt, Human
uacacuuuuaugagc

SEQ ID NO: 2837085 - RNA, 18 nt, Human
uacacuuuuaugagcuuc

SEQ ID NO: 2837086 - RNA, 14 nt, Human
uaauuguuccuuuu

SEQ ID NO: 2837087 - RNA, 17 nt, Human
uaauuuugaaaagaugu

SEQ ID NO: 2837088 - RNA, 13 nt, Human
uacaagauuagaa

SEQ ID NO: 2837089 - RNA, 21 nt, Human
uacaagauuagaagcugaaaa

SEQ ID NO: 2837090 - RNA, 15 nt, Human
uacaagauugaaaau

SEQ ID NO: 2837091 - RNA, 20 nt, Human
uacaagauugaaaaucuugu

SEQ ID NO: 2837092 - RNA, 17 nt, Human
uacaagauuuagaaaaa

SEQ ID NO: 2837093 - RNA, 23 nt, Human
uacacaaaucuauuuaauuagga

SEQ ID NO: 2837094 - RNA, 13 nt, Human
uacacaaagggga

SEQ ID NO: 2837095 - RNA, 14 nt, Human
uacacaaaggggau

SEQ ID NO: 2837096 - RNA, 24 nt, Human
uacacaaaggggaucauaaaguua

SEQ ID NO: 2837097 - RNA, 18 nt, Human
uacacaacuaguuuuguu

SEQ ID NO: 2837098 - RNA, 24 nt, Human
uacaagaugaaggagaggcaacau

SEQ ID NO: 2837099 - RNA, 23 nt, Human
uacaagagcagccuguggcaucu

SEQ ID NO: 2837100 - RNA, 20 nt, Human
uacaagagcagccuguggca

SEQ ID NO: 2837101 - RNA, 19 nt, Human
uacaagagcuuaacagugu

SEQ ID NO: 2837102 - RNA, 19 nt, Human
uacaagagcagccuguggc

SEQ ID NO: 2837103 - RNA, 16 nt, Human
uacaagagcagccugu

SEQ ID NO: 2837104 - RNA, 15 nt, Human
uacaagacacaguga

SEQ ID NO: 2837105 - RNA, 15 nt, Human
uacaagaaguuuauu

SEQ ID NO: 2837106 - RNA, 22 nt, Human
uacaagaaguuuauucucauuu

SEQ ID NO: 2837107 - RNA, 14 nt, Human
uacacaauaagcaa

SEQ ID NO: 2837108 - RNA, 15 nt, Human
uacacaauaagcaaa

SEQ ID NO: 2837109 - RNA, 15 nt, Human
uacacacacauacac

SEQ ID NO: 2837110 - RNA, 21 nt, Human
uacacacacacgcgugcacac

SEQ ID NO: 2837111 - RNA, 14 nt, Human
uacacacacagaug

SEQ ID NO: 2837112 - RNA, 15 nt, Human
uacacacacagaugu

SEQ ID NO: 2837113 - RNA, 16 nt, Human
uacacacacagaugug

SEQ ID NO: 2837114 - RNA, 15 nt, Human
uacacuguaccauau

SEQ ID NO: 2837115 - RNA, 16 nt, Human
uacacuguauuuguau

SEQ ID NO: 2837116 - RNA, 15 nt, Human
uacacagaaacacug

SEQ ID NO: 2837117 - RNA, 14 nt, Human
uacacagaaacacu

SEQ ID NO: 2837118 - RNA, 13 nt, Human
uacacagaaacac

SEQ ID NO: 2837119 - RNA, 11 nt, Human
uacacagaaac

SEQ ID NO: 2837120 - RNA, 20 nt, Human
uacacacugucaugcuucau

SEQ ID NO: 2837121 - RNA, 18 nt, Human
uacacacugguacuuaga

SEQ ID NO: 2837122 - RNA, 18 nt, Human
uacacagaaacacugccu

SEQ ID NO: 2837123 - RNA, 13 nt, Human
uacacugccugua

SEQ ID NO: 2837124 - RNA, 15 nt, Human
uacacugccuguaua

SEQ ID NO: 2837125 - RNA, 16 nt, Human
uacacugccuguauac

SEQ ID NO: 2837126 - RNA, 17 nt, Human
uacacugccuguauacu

SEQ ID NO: 2837127 - RNA, 18 nt, Human
uacacugccuguauacuu

SEQ ID NO: 2837128 - RNA, 19 nt, Human
uacacugccuguauacuuu

SEQ ID NO: 2837129 - RNA, 20 nt, Human
uacacugccuguauacuuua

SEQ ID NO: 2837130 - RNA, 21 nt, Human
uacacugccuguauacuuuag

SEQ ID NO: 2837131 - RNA, 23 nt, Human
uacacugccuguauacuuuagua

SEQ ID NO: 2837132 - RNA, 17 nt, Human
uaaugcauguuaggaaa

SEQ ID NO: 2837133 - RNA, 16 nt, Human
uaaugcauguuaggaa

SEQ ID NO: 2837134 - RNA, 21 nt, Human
uaaugcaaaauuuuuuuaauc

SEQ ID NO: 2837135 - RNA, 14 nt, Human
uaaugcaaagaauc

SEQ ID NO: 2837136 - RNA, 18 nt, Human
uaaugcaauagaagugcu

SEQ ID NO: 2837137 - RNA, 17 nt, Human
uaaugcaguugcuuacu

SEQ ID NO: 2837138 - RNA, 15 nt, Human
uaaugcauacagaaa

SEQ ID NO: 2837139 - RNA, 17 nt, Human
uaaugaugucguuugaa

SEQ ID NO: 2837140 - RNA, 23 nt, Human
uaaugaugucguuugaaucacag

SEQ ID NO: 2837141 - RNA, 19 nt, Human
uaaugauaaguaaaugcua

SEQ ID NO: 2837142 - RNA, 15 nt, Human
uaaucuuauuuagga

SEQ ID NO: 2837143 - RNA, 23 nt, Human
uaaucugucaaaacacuguggaa

SEQ ID NO: 2837144 - RNA, 13 nt, Human
uaaucuguuaugu

SEQ ID NO: 2837145 - RNA, 20 nt, Human
uaaucuguuauguacuagug

SEQ ID NO: 2837146 - RNA, 20 nt, Human
uaaucugauggcuucuccag

SEQ ID NO: 2837147 - RNA, 14 nt, Human
uaaucugaaauucu

SEQ ID NO: 2837148 - RNA, 15 nt, Human
uaaucugaaauucua

SEQ ID NO: 2837149 - RNA, 16 nt, Human
uaaucugaaauucuaa

SEQ ID NO: 2837150 - RNA, 22 nt, Human
uaaucugaaauucuaaagagca

SEQ ID NO: 2837151 - RNA, 17 nt, Human
uaaucucucugcagcug

SEQ ID NO: 2837152 - RNA, 18 nt, Human
uaaucucucugcagcugc

SEQ ID NO: 2837153 - RNA, 19 nt, Human
uaaucucucugcagcugcc

SEQ ID NO: 2837154 - RNA, 20 nt, Human
uaaucucucugcagcugccg

SEQ ID NO: 2837155 - RNA, 12 nt, Human
uaaucucuguua

SEQ ID NO: 2837156 - RNA, 16 nt, Human
uaaucucuguuaugua

SEQ ID NO: 2837157 - RNA, 17 nt, Human
uaaucucuguuauguac

SEQ ID NO: 2837158 - RNA, 18 nt, Human
uaaucucuguuauguacu

SEQ ID NO: 2837159 - RNA, 21 nt, Human
uaaucucuguuauguacugua

SEQ ID NO: 2837160 - RNA, 22 nt, Human
uaaucucuguuauguacuguac

SEQ ID NO: 2837161 - RNA, 24 nt, Human
uaaucucuguuauguacuguacua

SEQ ID NO: 2837162 - RNA, 13 nt, Human
uaaucuccacagu

SEQ ID NO: 2837163 - RNA, 17 nt, Human
uaaucucauaccucuga

SEQ ID NO: 2837164 - RNA, 20 nt, Human
uaaucucauaccucugacca

SEQ ID NO: 2837165 - RNA, 14 nt, Human
uaauauuaaaaaua

SEQ ID NO: 2837166 - RNA, 18 nt, Human
uaauauuaaaaauaugga

SEQ ID NO: 2837167 - RNA, 22 nt, Human
uaauauuaaaaauauggaacuu

SEQ ID NO: 2837168 - RNA, 12 nt, Human
uaauauuaaaag

SEQ ID NO: 2837169 - RNA, 17 nt, Human
uaauauuaaaagucaca

SEQ ID NO: 2837170 - RNA, 18 nt, Human
uaauauuaaaagucacaa

SEQ ID NO: 2837171 - RNA, 16 nt, Human
uaaucguguccccuau

SEQ ID NO: 2837172 - RNA, 22 nt, Human
uaauccuuuguuuucugacuaa

SEQ ID NO: 2837173 - RNA, 16 nt, Human
uaaucgaccugccucg

SEQ ID NO: 2837174 - RNA, 21 nt, Human
uaauauauucugaagcaacau

SEQ ID NO: 2837175 - RNA, 16 nt, Human
uaauccuuuguuuucu

SEQ ID NO: 2837176 - RNA, 17 nt, Human
uaauccuuucugccgac

SEQ ID NO: 2837177 - RNA, 20 nt, Human
uaauccuuucugccgacccc

SEQ ID NO: 2837178 - RNA, 18 nt, Human
uaauccuuuguuuucuga

SEQ ID NO: 2837179 - RNA, 20 nt, Human
uaauccuuuguuuucugacu

SEQ ID NO: 2837180 - RNA, 23 nt, Human
uaauccuuuguuuucugacuaau

SEQ ID NO: 2837181 - RNA, 13 nt, Human
uaaucgaaagaaa

SEQ ID NO: 2837182 - RNA, 14 nt, Human
uaaucgaccugccu

SEQ ID NO: 2837183 - RNA, 13 nt, Human
uaaucgaccugcc

SEQ ID NO: 2837184 - RNA, 20 nt, Human
uaauauauuuguguauuuaa

SEQ ID NO: 2837185 - RNA, 19 nt, Human
uaauauauuuguguauuua

SEQ ID NO: 2837186 - RNA, 20 nt, Human
uaauauauguauuauuuaua

SEQ ID NO: 2837187 - RNA, 17 nt, Human
uaauauaucccagaaau

SEQ ID NO: 2837188 - RNA, 14 nt, Human
uaauauauauauau

SEQ ID NO: 2837189 - RNA, 19 nt, Human
uaauauauauauauaucag

SEQ ID NO: 2837190 - RNA, 20 nt, Human
uaauauauauauauaucagu

SEQ ID NO: 2837191 - RNA, 22 nt, Human
uaauauauauauauaucaguuu

SEQ ID NO: 2837192 - RNA, 14 nt, Human
uaauauauaugaau

SEQ ID NO: 2837193 - RNA, 16 nt, Human
uaauauauaugaauaa

SEQ ID NO: 2837194 - RNA, 18 nt, Human
uaauauauaugaauaaag

SEQ ID NO: 2837195 - RNA, 13 nt, Human
uaauauaauggaa

SEQ ID NO: 2837196 - RNA, 18 nt, Human
uaauauaauggaagagaa

SEQ ID NO: 2837197 - RNA, 19 nt, Human
uaauauaauggaagagaaa

SEQ ID NO: 2837198 - RNA, 20 nt, Human
uaauauaauggaagagaaau

SEQ ID NO: 2837199 - RNA, 21 nt, Human
uaauauaccagcuuguaugca

SEQ ID NO: 2837200 - RNA, 13 nt, Human
uaauaauaccuca

SEQ ID NO: 2837201 - RNA, 14 nt, Human
uaauaauaccucaa

SEQ ID NO: 2837202 - RNA, 20 nt, Human
uaauaauaccucaauguuug

SEQ ID NO: 2837203 - RNA, 17 nt, Human
uaauaauuauuauuaaa

SEQ ID NO: 2837204 - RNA, 20 nt, Human
uaauaauugcucauaagcaa

SEQ ID NO: 2837205 - RNA, 13 nt, Human
uaauaauuucuaa

SEQ ID NO: 2837206 - RNA, 14 nt, Human
uaauaauuucuaau

SEQ ID NO: 2837207 - RNA, 16 nt, Human
uaauaauuucuaaugu

SEQ ID NO: 2837208 - RNA, 21 nt, Human
uaauaguucagguaacaggca

SEQ ID NO: 2837209 - RNA, 13 nt, Human
uaauaguuugucu

SEQ ID NO: 2837210 - RNA, 17 nt, Human
uaauaguuugucuauuu

SEQ ID NO: 2837211 - RNA, 18 nt, Human
uaauaguuugucuauuuu

SEQ ID NO: 2837212 - RNA, 19 nt, Human
uaauaguuugucuauuuua

SEQ ID NO: 2837213 - RNA, 20 nt, Human
uaauaguuugucuauuuuaa

SEQ ID NO: 2837214 - RNA, 22 nt, Human
uaauacaacauguagcugaguu

SEQ ID NO: 2837215 - RNA, 20 nt, Human
uaauaacucggauuccagcc

SEQ ID NO: 2837216 - RNA, 18 nt, Human
uaauacaaaaggcuccau

SEQ ID NO: 2837217 - RNA, 21 nt, Human
uaauauaaaaagcuuccauga

SEQ ID NO: 2837218 - RNA, 16 nt, Human
uaauauaaaagaucuu

SEQ ID NO: 2837219 - RNA, 20 nt, Human
uaauauaaaagaucuugcag

SEQ ID NO: 2837220 - RNA, 15 nt, Human
uaauaacugugaagu

SEQ ID NO: 2837221 - RNA, 21 nt, Human
uaauaacauuaccuuacugug

SEQ ID NO: 2837222 - RNA, 12 nt, Human
uaauaacauuac

SEQ ID NO: 2837223 - RNA, 15 nt, Human
uaauaacauuaccuu

SEQ ID NO: 2837224 - RNA, 20 nt, Human
uaauaacauuaccuuacugu

SEQ ID NO: 2837225 - RNA, 21 nt, Human
uaauaaauuguuuggcuuccu

SEQ ID NO: 2837226 - RNA, 13 nt, Human
uaauaaauugaaa

SEQ ID NO: 2837227 - RNA, 17 nt, Human
uaauaaauugaaauugu

SEQ ID NO: 2837228 - RNA, 19 nt, Human
uaauaaauugaaauuguga

SEQ ID NO: 2837229 - RNA, 20 nt, Human
uaauaaauugaaauugugaa

SEQ ID NO: 2837230 - RNA, 17 nt, Human
uaauaaagaugcucuuu

SEQ ID NO: 2837231 - RNA, 16 nt, Human
uaauaaagaugcucuu

SEQ ID NO: 2837232 - RNA, 14 nt, Human
uaauaaagaugcuc

SEQ ID NO: 2837233 - RNA, 19 nt, Human
uaaguggggcaaaaccuug

SEQ ID NO: 2837234 - RNA, 13 nt, Human
uaauaaagacagg

SEQ ID NO: 2837235 - RNA, 20 nt, Human
uaauaaagaauuaacagaga

SEQ ID NO: 2837236 - RNA, 18 nt, Human
uaaggcaugugugaaaca

SEQ ID NO: 2837237 - RNA, 16 nt, Human
uaaggcguggagcugc

SEQ ID NO: 2837238 - RNA, 17 nt, Human
uaaggcguggagcugcc

SEQ ID NO: 2837239 - RNA, 18 nt, Human
uaaggccuaggauucuaa

SEQ ID NO: 2837240 - RNA, 19 nt, Human
uaaggccuaggauucuaaa

SEQ ID NO: 2837241 - RNA, 20 nt, Human
uaaggccuaggauucuaaaa

SEQ ID NO: 2837242 - RNA, 21 nt, Human
uaaggccuaggauucuaaaau

SEQ ID NO: 2837243 - RNA, 16 nt, Human
uaaggccuaggauucu

SEQ ID NO: 2837244 - RNA, 22 nt, Human
uaaggcccccucucaggagcca

SEQ ID NO: 2837245 - RNA, 23 nt, Human
uaaggcccccucucaggagccau

SEQ ID NO: 2837246 - RNA, 20 nt, Human
uaaggcguggagcugccuga

SEQ ID NO: 2837247 - RNA, 12 nt, Human
uaaggcucuaga

SEQ ID NO: 2837248 - RNA, 22 nt, Human
uaauuuggggaaaccuagagaa

SEQ ID NO: 2837249 - RNA, 14 nt, Human
uaauuguuguuucu

SEQ ID NO: 2837250 - RNA, 15 nt, Human
uaauuuuaaaaaugg

SEQ ID NO: 2837251 - RNA, 17 nt, Human
uaauuuuaaaaauggug

SEQ ID NO: 2837252 - RNA, 14 nt, Human
uaauuuuaaacaaa

SEQ ID NO: 2837253 - RNA, 21 nt, Human
uaauuuguacauauguaaaau

SEQ ID NO: 2837254 - RNA, 13 nt, Human
uaauuuuaagaaa

SEQ ID NO: 2837255 - RNA, 14 nt, Human
uaauuuuacacauu

SEQ ID NO: 2837256 - RNA, 15 nt, Human
uaauuuuacacauua

SEQ ID NO: 2837257 - RNA, 23 nt, Human
uaauuuuaguauucauucugcau

SEQ ID NO: 2837258 - RNA, 16 nt, Human
uaauuuuauucaagaa

SEQ ID NO: 2837259 - RNA, 21 nt, Human
uaauuuucuagauuuucuacu

SEQ ID NO: 2837260 - RNA, 12 nt, Human
uaauuuucucaa

SEQ ID NO: 2837261 - RNA, 13 nt, Human
uaauuuucucaaa

SEQ ID NO: 2837262 - RNA, 18 nt, Human
uaauuuucucaaaagcau

SEQ ID NO: 2837263 - RNA, 19 nt, Human
uaauuuucucaaaagcauu

SEQ ID NO: 2837264 - RNA, 22 nt, Human
uaauuuucucaaaagcauuuau

SEQ ID NO: 2837265 - RNA, 12 nt, Human
uaauuuucugaa

SEQ ID NO: 2837266 - RNA, 14 nt, Human
uaauugcuguugaa

SEQ ID NO: 2837267 - RNA, 17 nt, Human
uaauugcuguugaaagc

SEQ ID NO: 2837268 - RNA, 18 nt, Human
uaauugcuguugaaagca

SEQ ID NO: 2837269 - RNA, 20 nt, Human
uaauugcuguugaaagcaaa

SEQ ID NO: 2837270 - RNA, 21 nt, Human
uaauugcuguugaaagcaaaa

SEQ ID NO: 2837271 - RNA, 12 nt, Human
uaauugcuauuu

SEQ ID NO: 2837272 - RNA, 22 nt, Human
uaauugcagauaacuuugacuu

SEQ ID NO: 2837273 - RNA, 23 nt, Human
uaauugcagauaacuuugacuuu

SEQ ID NO: 2837274 - RNA, 18 nt, Human
uaauugcaucucaaaauu

SEQ ID NO: 2837275 - RNA, 12 nt, Human
uaauugcauuca

SEQ ID NO: 2837276 - RNA, 13 nt, Human
uaauugcauucau

SEQ ID NO: 2837277 - RNA, 22 nt, Human
uaauugcauucaucuuguguuu

SEQ ID NO: 2837278 - RNA, 12 nt, Human
uaauugcugcaa

SEQ ID NO: 2837279 - RNA, 12 nt, Human
uaauugucaugg

SEQ ID NO: 2837280 - RNA, 14 nt, Human
uaauugucaugguu

SEQ ID NO: 2837281 - RNA, 12 nt, Human
uaauuguugaaa

SEQ ID NO: 2837282 - RNA, 14 nt, Human
uaauuguugaaauu

SEQ ID NO: 2837283 - RNA, 18 nt, Human
uaauuguugaaauuuugc

SEQ ID NO: 2837284 - RNA, 22 nt, Human
uaauuguugaaauuuugcaaau

SEQ ID NO: 2837285 - RNA, 20 nt, Human
uaauuguugaacagguguuu

SEQ ID NO: 2837286 - RNA, 16 nt, Human
uaauuguugcuaaucu

SEQ ID NO: 2837287 - RNA, 23 nt, Human
uaauuaaauuuugaguucuacau

SEQ ID NO: 2837288 - RNA, 14 nt, Human
uaauuaaauuaugg

SEQ ID NO: 2837289 - RNA, 19 nt, Human
uaauuaaauuaugguauua

SEQ ID NO: 2837290 - RNA, 22 nt, Human
uaauuaaauaaaucauuaauac

SEQ ID NO: 2837291 - RNA, 21 nt, Human
uaauuaaacauugugaucauu

SEQ ID NO: 2837292 - RNA, 19 nt, Human
uaauuaaaaacuaguaguu

SEQ ID NO: 2837293 - RNA, 20 nt, Human
uaauuaaaaacuaguaguuc

SEQ ID NO: 2837294 - RNA, 22 nt, Human
uaauuaaaaacuaguaguucuc

SEQ ID NO: 2837295 - RNA, 15 nt, Human
uaauuaaaaaguuaa

SEQ ID NO: 2837296 - RNA, 18 nt, Human
uaauuaaaaaguuaaucu

SEQ ID NO: 2837297 - RNA, 23 nt, Human
uaaugcgcaggcuggcccugccc

SEQ ID NO: 2837298 - RNA, 14 nt, Human
uaaugcgauuuuau

SEQ ID NO: 2837299 - RNA, 15 nt, Human
uaaugcgauuuuauu

SEQ ID NO: 2837300 - RNA, 17 nt, Human
uaaugcgauuuuauuac

SEQ ID NO: 2837301 - RNA, 18 nt, Human
uaaugcgauuuuauuacu

SEQ ID NO: 2837302 - RNA, 22 nt, Human
uaaugcgcaggcuggcccugcc

SEQ ID NO: 2837303 - RNA, 19 nt, Human
uaaugcgcaggcuggcccu

SEQ ID NO: 2837304 - RNA, 21 nt, Human
uaaugcauguuaggaaaauuu

SEQ ID NO: 2837305 - RNA, 16 nt, Human
uaaugcauuaaaccug

SEQ ID NO: 2837306 - RNA, 17 nt, Human
uaaugcauuaaaccugu

SEQ ID NO: 2837307 - RNA, 18 nt, Human
uaaugcauuaaaccuguc

SEQ ID NO: 2837308 - RNA, 22 nt, Human
uaaugcauuaaaccugucucca

SEQ ID NO: 2837309 - RNA, 17 nt, Human
uaauugacgguuuuuua

SEQ ID NO: 2837310 - RNA, 23 nt, Human
uaauugacgguuuuuuauuauug

SEQ ID NO: 2837311 - RNA, 19 nt, Human
uaauucuucagcguaaaau

SEQ ID NO: 2837312 - RNA, 22 nt, Human
uaauucuucagcguaaaauggu

SEQ ID NO: 2837313 - RNA, 23 nt, Human
uaauucuucagcguaaaauggug

SEQ ID NO: 2837314 - RNA, 13 nt, Human
uaauucuucaguu

SEQ ID NO: 2837315 - RNA, 17 nt, Human
uaauucuuauuuugugg

SEQ ID NO: 2837316 - RNA, 18 nt, Human
uaauucuuauuuugugga

SEQ ID NO: 2837317 - RNA, 15 nt, Human
uaauucuucuguccu

SEQ ID NO: 2837318 - RNA, 22 nt, Human
uaauucuuacacugccuguaua

SEQ ID NO: 2837319 - RNA, 17 nt, Human
uaauucuggagauacug

SEQ ID NO: 2837320 - RNA, 12 nt, Human
uaauucuguaaa

SEQ ID NO: 2837321 - RNA, 13 nt, Human
uaauucuguaaau

SEQ ID NO: 2837322 - RNA, 15 nt, Human
uaauucuguaaaugu

SEQ ID NO: 2837323 - RNA, 16 nt, Human
uaauucucuuucaaag

SEQ ID NO: 2837324 - RNA, 15 nt, Human
uaauuaaaacacuuu

SEQ ID NO: 2837325 - RNA, 13 nt, Human
uaauuacuuaaaa

SEQ ID NO: 2837326 - RNA, 15 nt, Human
uaauuacgauaagga

SEQ ID NO: 2837327 - RNA, 20 nt, Human
uaauuacgauaaggaagaaa

SEQ ID NO: 2837328 - RNA, 13 nt, Human
uaauuaauuugau

SEQ ID NO: 2837329 - RNA, 16 nt, Human
uaauuaauuugauuaa

SEQ ID NO: 2837330 - RNA, 19 nt, Human
uaauuaauuugauuaacaa

SEQ ID NO: 2837331 - RNA, 21 nt, Human
uaauuaauuugauuaacaaau

SEQ ID NO: 2837332 - RNA, 22 nt, Human
uaauuaauuugauuaacaaaua

SEQ ID NO: 2837333 - RNA, 23 nt, Human
uaauuaauuugauuaacaaauau

SEQ ID NO: 2837334 - RNA, 23 nt, Human
uaaauuguuuggcuuccuccuga

SEQ ID NO: 2837335 - RNA, 14 nt, Human
uaaauuuaaagaua

SEQ ID NO: 2837336 - RNA, 15 nt, Human
uaaauuuaaagauau

SEQ ID NO: 2837337 - RNA, 16 nt, Human
uaaauuuaaagauauu

SEQ ID NO: 2837338 - RNA, 20 nt, Human
uaaauuuaaagauauuguuc

SEQ ID NO: 2837339 - RNA, 21 nt, Human
uaaauuuaaagauauuguuca

SEQ ID NO: 2837340 - RNA, 22 nt, Human
uaaauuuaaagauauuguucaa

SEQ ID NO: 2837341 - RNA, 13 nt, Human
uaaauuuaaauuu

SEQ ID NO: 2837342 - RNA, 15 nt, Human
uaaauuuaaauuuaa

SEQ ID NO: 2837343 - RNA, 18 nt, Human
uaaauuuaaauuuaaaga

SEQ ID NO: 2837344 - RNA, 22 nt, Human
uaaauuuaagcuuaagccauaa

SEQ ID NO: 2837345 - RNA, 23 nt, Human
uaaauuguccguguucauacauu

SEQ ID NO: 2837346 - RNA, 16 nt, Human
uaaauuggguucauga

SEQ ID NO: 2837347 - RNA, 21 nt, Human
uaaauuggguucaugaugcag

SEQ ID NO: 2837348 - RNA, 21 nt, Human
uaaauuggccugguauggcug

SEQ ID NO: 2837349 - RNA, 14 nt, Human
uaaauuuaaugcug

SEQ ID NO: 2837350 - RNA, 15 nt, Human
uaaauuuaaugcugc

SEQ ID NO: 2837351 - RNA, 16 nt, Human
uaaauuuaaugcugcc

SEQ ID NO: 2837352 - RNA, 15 nt, Human
uaaauuuaauucuuc

SEQ ID NO: 2837353 - RNA, 17 nt, Human
uaaauuuacuuuacaca

SEQ ID NO: 2837354 - RNA, 21 nt, Human
uaaauuguuagcuuccuuaag

SEQ ID NO: 2837355 - RNA, 13 nt, Human
uaacaauguuaag

SEQ ID NO: 2837356 - RNA, 12 nt, Human
uaacaauguuaa

SEQ ID NO: 2837357 - RNA, 14 nt, Human
uaacaauguuaagg

SEQ ID NO: 2837358 - RNA, 15 nt, Human
uaacaauguuaagga

SEQ ID NO: 2837359 - RNA, 16 nt, Human
uaacaauguuaaggaa

SEQ ID NO: 2837360 - RNA, 19 nt, Human
uaacaauguuaaggaaacu

SEQ ID NO: 2837361 - RNA, 21 nt, Human
uaacaauguuaaggaaacucu

SEQ ID NO: 2837362 - RNA, 22 nt, Human
uaacaauguuaaggaaacucuu

SEQ ID NO: 2837363 - RNA, 23 nt, Human
uaacaauguuaaggaaacucuua

SEQ ID NO: 2837364 - RNA, 15 nt, Human
uaacaauugugaagu

SEQ ID NO: 2837365 - RNA, 13 nt, Human
uaacaauuuccuu

SEQ ID NO: 2837366 - RNA, 15 nt, Human
uaacaauuuccuuua

SEQ ID NO: 2837367 - RNA, 21 nt, Human
uaacaauuuccuuuauauuua

SEQ ID NO: 2837368 - RNA, 14 nt, Human
uaaauccaguucua

SEQ ID NO: 2837369 - RNA, 16 nt, Human
uaaauugauguugcug

SEQ ID NO: 2837370 - RNA, 16 nt, Human
uaaauugcauaaagca

SEQ ID NO: 2837371 - RNA, 17 nt, Human
uaaauugcauaaagcau

SEQ ID NO: 2837372 - RNA, 18 nt, Human
uaaauugcauaaagcaua

SEQ ID NO: 2837373 - RNA, 15 nt, Human
uaaauugcuccuuga

SEQ ID NO: 2837374 - RNA, 22 nt, Human
uaacagauuuugggguuguguu

SEQ ID NO: 2837375 - RNA, 13 nt, Human
uaacagauacauu

SEQ ID NO: 2837376 - RNA, 18 nt, Human
uaacagaacagcuucagg

SEQ ID NO: 2837377 - RNA, 19 nt, Human
uaacagaacagcuucaggu

SEQ ID NO: 2837378 - RNA, 20 nt, Human
uaacagaacagcuucagguu

SEQ ID NO: 2837379 - RNA, 21 nt, Human
uaacagaacagcuucagguua

SEQ ID NO: 2837380 - RNA, 22 nt, Human
uaacagaacagcuucagguuau

SEQ ID NO: 2837381 - RNA, 23 nt, Human
uaacagcauccccaaaacaaagu

SEQ ID NO: 2837382 - RNA, 18 nt, Human
uaacacacuuuuuauuag

SEQ ID NO: 2837383 - RNA, 17 nt, Human
uaacacaaguccuguga

SEQ ID NO: 2837384 - RNA, 23 nt, Human
uaacacaaguccugugaauuucu

SEQ ID NO: 2837385 - RNA, 15 nt, Human
uaacacacacagaaa

SEQ ID NO: 2837386 - RNA, 20 nt, Human
uaacacacacagaaaagcau

SEQ ID NO: 2837387 - RNA, 21 nt, Human
uaacacacacagaaaagcaua

SEQ ID NO: 2837388 - RNA, 15 nt, Human
uaacacacagcuccc

SEQ ID NO: 2837389 - RNA, 17 nt, Human
uaacacacagcucccau

SEQ ID NO: 2837390 - RNA, 18 nt, Human
uaacacaaguccugugaa

SEQ ID NO: 2837391 - RNA, 12 nt, Human
uaacacacagcu

SEQ ID NO: 2837392 - RNA, 13 nt, Human
uaacacacagcua

SEQ ID NO: 2837393 - RNA, 14 nt, Human
uaacacacagcucc

SEQ ID NO: 2837394 - RNA, 12 nt, Human
uaacagaacagc

SEQ ID NO: 2837395 - RNA, 14 nt, Human
uaacagaacagcuu

SEQ ID NO: 2837396 - RNA, 16 nt, Human
uaacagaacagcuuca

SEQ ID NO: 2837397 - RNA, 17 nt, Human
uaacagaacagcuucag

SEQ ID NO: 2837398 - RNA, 19 nt, Human
uaacaggcagauacaggaa

SEQ ID NO: 2837399 - RNA, 15 nt, Human
uaacaggcauuuguu

SEQ ID NO: 2837400 - RNA, 20 nt, Human
uaacaggcauuuguucacug

SEQ ID NO: 2837401 - RNA, 12 nt, Human
uaacauuaccuu

SEQ ID NO: 2837402 - RNA, 13 nt, Human
uaacauuaccuua

SEQ ID NO: 2837403 - RNA, 17 nt, Human
uaacauuaccuuacugu

SEQ ID NO: 2837404 - RNA, 19 nt, Human
uaacauuaccuuacugugg

SEQ ID NO: 2837405 - RNA, 15 nt, Human
uaacauuauuuauau

SEQ ID NO: 2837406 - RNA, 16 nt, Human
uaacauuauuuauaug

SEQ ID NO: 2837407 - RNA, 12 nt, Human
uaacauuccaag

SEQ ID NO: 2837408 - RNA, 12 nt, Human
uaacauuauuua

SEQ ID NO: 2837409 - RNA, 14 nt, Human
uaacauuauuuaua

SEQ ID NO: 2837410 - RNA, 15 nt, Human
uaaccaaggaaauau

SEQ ID NO: 2837411 - RNA, 20 nt, Human
uaaccaaggaaauauauuuu

SEQ ID NO: 2837412 - RNA, 22 nt, Human
uaacauuccaagacucuagagu

SEQ ID NO: 2837413 - RNA, 13 nt, Human
uaacauuccuaaa

SEQ ID NO: 2837414 - RNA, 16 nt, Human
uaacauuccuaaaaug

SEQ ID NO: 2837415 - RNA, 17 nt, Human
uaacauuccuaaaaugc

SEQ ID NO: 2837416 - RNA, 20 nt, Human
uaacauuccuaaaaugcuuc

SEQ ID NO: 2837417 - RNA, 13 nt, Human
uaacauuccaaga

SEQ ID NO: 2837418 - RNA, 18 nt, Human
uaacauuccaagacucua

SEQ ID NO: 2837419 - RNA, 19 nt, Human
uaaccacaaagcacaguuu

SEQ ID NO: 2837420 - RNA, 23 nt, Human
uaaccacaaagcacaguuugaac

SEQ ID NO: 2837421 - RNA, 20 nt, Human
uaaccagccagauccucuug

SEQ ID NO: 2837422 - RNA, 15 nt, Human
uaaccagcuguaaca

SEQ ID NO: 2837423 - RNA, 23 nt, Human
uaacccuucaacguuucuucacu

SEQ ID NO: 2837424 - RNA, 11 nt, Human
uaacuguaucu

SEQ ID NO: 2837425 - RNA, 12 nt, Human
uaacuguaucuu

SEQ ID NO: 2837426 - RNA, 15 nt, Human
uaacuguaucuugag

SEQ ID NO: 2837427 - RNA, 13 nt, Human
uaacuguacauuu

SEQ ID NO: 2837428 - RNA, 14 nt, Human
uaacuguacauuuc

SEQ ID NO: 2837429 - RNA, 17 nt, Human
uaacuggugcacuuugu

SEQ ID NO: 2837430 - RNA, 20 nt, Human
uaacuggugcacuuuguaaa

SEQ ID NO: 2837431 - RNA, 22 nt, Human
uaacuggugcacuuuguaaauu

SEQ ID NO: 2837432 - RNA, 13 nt, Human
uaacugguauaga

SEQ ID NO: 2837433 - RNA, 21 nt, Human
uaacugauuugcaauaaaaau

SEQ ID NO: 2837434 - RNA, 20 nt, Human
uaacugaguagcucuccuga

SEQ ID NO: 2837435 - RNA, 23 nt, Human
uaacugaguagcucuccugacuu

SEQ ID NO: 2837436 - RNA, 17 nt, Human
uaacugagugccuuuug

SEQ ID NO: 2837437 - RNA, 23 nt, Human
uaacugccaucaagaugagagaa

SEQ ID NO: 2837438 - RNA, 14 nt, Human
uaaccgaugcuuua

SEQ ID NO: 2837439 - RNA, 15 nt, Human
uaaccgaugcuuuac

SEQ ID NO: 2837440 - RNA, 17 nt, Human
uaaccgaugcuuuacca

SEQ ID NO: 2837441 - RNA, 19 nt, Human
uaaccgaugcuuuaccaaa

SEQ ID NO: 2837442 - RNA, 19 nt, Human
uaaccgcacaugcacacac

SEQ ID NO: 2837443 - RNA, 13 nt, Human
uaaccgcuccagg

SEQ ID NO: 2837444 - RNA, 14 nt, Human
uaaccgcuccaggu

SEQ ID NO: 2837445 - RNA, 21 nt, Human
uaaccggcauguuuccagcag

SEQ ID NO: 2837446 - RNA, 20 nt, Human
uaaccuauaugauuuauagu

SEQ ID NO: 2837447 - RNA, 22 nt, Human
uaaccuauaugauuuauaguuu

SEQ ID NO: 2837448 - RNA, 19 nt, Human
uaaccucaagugauccucc

SEQ ID NO: 2837449 - RNA, 22 nt, Human
uaaccucaagugauccucccac

SEQ ID NO: 2837450 - RNA, 14 nt, Human
uaacucagaauuau

SEQ ID NO: 2837451 - RNA, 20 nt, Human
uaacucauuuguuaaaauua

SEQ ID NO: 2837452 - RNA, 12 nt, Human
uaacucauuugu

SEQ ID NO: 2837453 - RNA, 16 nt, Human
uaacucauaguuuguu

SEQ ID NO: 2837454 - RNA, 16 nt, Human
uaacugagugccuuuu

SEQ ID NO: 2837455 - RNA, 14 nt, Human
uaacucaucauaaa

SEQ ID NO: 2837456 - RNA, 16 nt, Human
uaacucaucauaaaau

SEQ ID NO: 2837457 - RNA, 15 nt, Human
uaacucaucauaaaa

SEQ ID NO: 2837458 - RNA, 17 nt, Human
uaacucaucauaaaaua

SEQ ID NO: 2837459 - RNA, 12 nt, Human
uaagaguguaga

SEQ ID NO: 2837460 - RNA, 13 nt, Human
uaagaguguagaa

SEQ ID NO: 2837461 - RNA, 16 nt, Human
uaagaguguagaagca

SEQ ID NO: 2837462 - RNA, 18 nt, Human
uaagaguguagaagcauu

SEQ ID NO: 2837463 - RNA, 19 nt, Human
uaagaguguagaagcauuc

SEQ ID NO: 2837464 - RNA, 22 nt, Human
uaagaguguagaagcauuccuu

SEQ ID NO: 2837465 - RNA, 23 nt, Human
uaagaguguagaagcauuccuuc

SEQ ID NO: 2837466 - RNA, 22 nt, Human
uaagaguaugugccaggaaacu

SEQ ID NO: 2837467 - RNA, 20 nt, Human
uaagagggcacacacugugu

SEQ ID NO: 2837468 - RNA, 18 nt, Human
uaagaguccaagaaucca

SEQ ID NO: 2837469 - RNA, 14 nt, Human
uaagagugcugggc

SEQ ID NO: 2837470 - RNA, 17 nt, Human
uaagagggcacacacug

SEQ ID NO: 2837471 - RNA, 18 nt, Human
uaagagggcacacacugu

SEQ ID NO: 2837472 - RNA, 21 nt, Human
uaagaguuaguuucuuuggga

SEQ ID NO: 2837473 - RNA, 14 nt, Human
uaagauacaaauua

SEQ ID NO: 2837474 - RNA, 22 nt, Human
uaagauacaaauuaauuuuacu

SEQ ID NO: 2837475 - RNA, 20 nt, Human
uaacuuuucaaugacauuuu

SEQ ID NO: 2837476 - RNA, 16 nt, Human
uaagaucacugccaga

SEQ ID NO: 2837477 - RNA, 18 nt, Human
uaagaucacugccagaga

SEQ ID NO: 2837478 - RNA, 21 nt, Human
uaagaucacugccagagauaa

SEQ ID NO: 2837479 - RNA, 23 nt, Human
uaagauccuagauccuaaggguc

SEQ ID NO: 2837480 - RNA, 18 nt, Human
uaagaucguucucugccu

SEQ ID NO: 2837481 - RNA, 14 nt, Human
uaagaagcaaauaa

SEQ ID NO: 2837482 - RNA, 15 nt, Human
uaagaacgaggauuu

SEQ ID NO: 2837483 - RNA, 16 nt, Human
uaagaacuaaagaaga

SEQ ID NO: 2837484 - RNA, 17 nt, Human
uaagaacuaaagaagau

SEQ ID NO: 2837485 - RNA, 22 nt, Human
uaagaggcagggucucacucug

SEQ ID NO: 2837486 - RNA, 22 nt, Human
uaagagccauauaaguuugaag

SEQ ID NO: 2837487 - RNA, 22 nt, Human
uaagagccauuuaggggccacu

SEQ ID NO: 2837488 - RNA, 22 nt, Human
uaagagcaguccauuucuacca

SEQ ID NO: 2837489 - RNA, 13 nt, Human
uaagagauucuga

SEQ ID NO: 2837490 - RNA, 14 nt, Human
uaagagauucugau

SEQ ID NO: 2837491 - RNA, 15 nt, Human
uaagagauucugauu

SEQ ID NO: 2837492 - RNA, 12 nt, Human
uaagaaauaugu

SEQ ID NO: 2837493 - RNA, 16 nt, Human
uaagaaauaugugaga

SEQ ID NO: 2837494 - RNA, 17 nt, Human
uaagaaauaugugagau

SEQ ID NO: 2837495 - RNA, 20 nt, Human
uaagaaauaugugagauuuu

SEQ ID NO: 2837496 - RNA, 22 nt, Human
uaagccacaagaaauuugauuu

SEQ ID NO: 2837497 - RNA, 11 nt, Human
uaagccaaaga

SEQ ID NO: 2837498 - RNA, 12 nt, Human
uaagccaaagaa

SEQ ID NO: 2837499 - RNA, 16 nt, Human
uaagccaaagaaauga

SEQ ID NO: 2837500 - RNA, 20 nt, Human
uaagccaaagaaaugaacau

SEQ ID NO: 2837501 - RNA, 21 nt, Human
uaagccaaagaaaugaacauu

SEQ ID NO: 2837502 - RNA, 23 nt, Human
uaagccaaagaaaugaacauucc

SEQ ID NO: 2837503 - RNA, 20 nt, Human
uaagcauugaaauuauaguu

SEQ ID NO: 2837504 - RNA, 15 nt, Human
uaagcauugugagua

SEQ ID NO: 2837505 - RNA, 14 nt, Human
uaagcauugccugg

SEQ ID NO: 2837506 - RNA, 15 nt, Human
uaagcauugccuggc

SEQ ID NO: 2837507 - RNA, 14 nt, Human
uaagcaucuaaguu

SEQ ID NO: 2837508 - RNA, 18 nt, Human
uaagcauuaccacucagg

SEQ ID NO: 2837509 - RNA, 19 nt, Human
uaagcauuaccacucaggc

SEQ ID NO: 2837510 - RNA, 21 nt, Human
uaagcauuaccacucaggcau

SEQ ID NO: 2837511 - RNA, 14 nt, Human
uaagaucuuagauu

SEQ ID NO: 2837512 - RNA, 16 nt, Human
uaagaucuuagauucu

SEQ ID NO: 2837513 - RNA, 17 nt, Human
uaagaucuuagauucuc

SEQ ID NO: 2837514 - RNA, 20 nt, Human
uaagaucuuagauucucugu

SEQ ID NO: 2837515 - RNA, 20 nt, Human
uaagccucauauuuaaagac

SEQ ID NO: 2837516 - RNA, 19 nt, Human
uaagccaguguugccuaag

SEQ ID NO: 2837517 - RNA, 18 nt, Human
uaagccaguguugccuaa

SEQ ID NO: 2837518 - RNA, 14 nt, Human
uaagccacuugaaa

SEQ ID NO: 2837519 - RNA, 16 nt, Human
uaagccacaagaaauu

SEQ ID NO: 2837520 - RNA, 13 nt, Human
uaagccagccugg

SEQ ID NO: 2837521 - RNA, 14 nt, Human
uaagccagccuggu

SEQ ID NO: 2837522 - RNA, 24 nt, Human
uaagccagccugguccaugcaggg

SEQ ID NO: 2837523 - RNA, 21 nt, Human
uaagccuuuggaaacagcucg

SEQ ID NO: 2837524 - RNA, 12 nt, Human
uaagccuguggc

SEQ ID NO: 2837525 - RNA, 13 nt, Human
uaagccuguggcu

SEQ ID NO: 2837526 - RNA, 14 nt, Human
uaagccuguggcug

SEQ ID NO: 2837527 - RNA, 18 nt, Human
uaagccuguggcugugga

SEQ ID NO: 2837528 - RNA, 20 nt, Human
uaagccuguggcuguggaga

SEQ ID NO: 2837529 - RNA, 17 nt, Human
uaagccuuuggaaacag

SEQ ID NO: 2837530 - RNA, 14 nt, Human
uaagccuuuggaaa

SEQ ID NO: 2837531 - RNA, 20 nt, Human
uaagccuuuuauacugauua

SEQ ID NO: 2837532 - RNA, 23 nt, Human
uaagcgaauguguacaaagugua

SEQ ID NO: 2837533 - RNA, 17 nt, Human
uaaggaugucacagggc

SEQ ID NO: 2837534 - RNA, 19 nt, Human
uaaggaugucacagggcca

SEQ ID NO: 2837535 - RNA, 20 nt, Human
uaaggaugggguuaugaacc

SEQ ID NO: 2837536 - RNA, 13 nt, Human
uaaggauguagcu

SEQ ID NO: 2837537 - RNA, 16 nt, Human
uaaggauguagcuuuu

SEQ ID NO: 2837538 - RNA, 17 nt, Human
uaaggauguagcuuuuc

SEQ ID NO: 2837539 - RNA, 21 nt, Human
uaaggauguagcuuuucaccu

SEQ ID NO: 2837540 - RNA, 22 nt, Human
uaaggauguagcuuuucaccuu

SEQ ID NO: 2837541 - RNA, 14 nt, Human
uaaggcaggcauug

SEQ ID NO: 2837542 - RNA, 20 nt, Human
uaaggaugucacagggccaa

SEQ ID NO: 2837543 - RNA, 18 nt, Human
guuuagauagggcugggc

SEQ ID NO: 2837544 - RNA, 19 nt, Human
guuuagauagggcugggca

SEQ ID NO: 2837545 - RNA, 14 nt, Human
guuuagauuucaag

SEQ ID NO: 2837546 - RNA, 15 nt, Human
guuuaggugaauuaa

SEQ ID NO: 2837547 - RNA, 16 nt, Human
guuuacuuaaagauuu

SEQ ID NO: 2837548 - RNA, 22 nt, Human
guuuacuuaaagauuuaucaaa

SEQ ID NO: 2837549 - RNA, 20 nt, Human
guuuacuuccccuauggaau

SEQ ID NO: 2837550 - RNA, 13 nt, Human
guuuacuuucaaa

SEQ ID NO: 2837551 - RNA, 14 nt, Human
guuuacuuucaaau

SEQ ID NO: 2837552 - RNA, 15 nt, Human
guuuacuuucaaauc

SEQ ID NO: 2837553 - RNA, 14 nt, Human
guuuacuuaaagau

SEQ ID NO: 2837554 - RNA, 21 nt, Human
gguuggccccugcccggcugc

SEQ ID NO: 2837555 - RNA, 15 nt, Human
gguugcacuuuguag

SEQ ID NO: 2837556 - RNA, 13 nt, Human
gguugcagggagc

SEQ ID NO: 2837557 - RNA, 11 nt, Human
gguuggcuggc

SEQ ID NO: 2837558 - RNA, 18 nt, Human
gguucaauucccugaagg

SEQ ID NO: 2837559 - RNA, 10 nt, Human
guuucaggug

SEQ ID NO: 2837560 - RNA, 19 nt, Human
guuucauucuccugccugu

SEQ ID NO: 2837561 - RNA, 21 nt, Human
guuuccaauuauuugacuuua

SEQ ID NO: 2837562 - RNA, 19 nt, Human
guuuccagacuuccuugag

SEQ ID NO: 2837563 - RNA, 16 nt, Human
guuuccaaccuggagu

SEQ ID NO: 2837564 - RNA, 13 nt, Human
guuuccacaugcu

SEQ ID NO: 2837565 - RNA, 14 nt, Human
guuuccacaugcuc

SEQ ID NO: 2837566 - RNA, 23 nt, Human
guuuacuguuuugaaaucaaugc

SEQ ID NO: 2837567 - RNA, 21 nt, Human
guuuccauagcaacaggaaaa

SEQ ID NO: 2837568 - RNA, 20 nt, Human
guuuccagacuuccuugaga

SEQ ID NO: 2837569 - RNA, 17 nt, Human
guuuccagcagaagaca

SEQ ID NO: 2837570 - RNA, 21 nt, Human
guuucagcuaagggaagacau

SEQ ID NO: 2837571 - RNA, 22 nt, Human
guuucagcuaagggaagacauu

SEQ ID NO: 2837572 - RNA, 23 nt, Human
guuucagcuaagggaagacauuu

SEQ ID NO: 2837573 - RNA, 13 nt, Human
guuuaguaaguuu

SEQ ID NO: 2837574 - RNA, 16 nt, Human
guuucagauauauauc

SEQ ID NO: 2837575 - RNA, 17 nt, Human
guuucagauauauauca

SEQ ID NO: 2837576 - RNA, 21 nt, Human
guuucagauauauaucauauu

SEQ ID NO: 2837577 - RNA, 14 nt, Human
guuuccucuuccaa

SEQ ID NO: 2837578 - RNA, 16 nt, Human
guuuccugcaggccag

SEQ ID NO: 2837579 - RNA, 22 nt, Human
guuuccugcccugggaggcagu

SEQ ID NO: 2837580 - RNA, 14 nt, Human
guuuccugcaggcc

SEQ ID NO: 2837581 - RNA, 19 nt, Human
guuucccaaugguguuuuu

SEQ ID NO: 2837582 - RNA, 17 nt, Human
guuuccugcccugggag

SEQ ID NO: 2837583 - RNA, 13 nt, Human
guuuccugcccug

SEQ ID NO: 2837584 - RNA, 23 nt, Human
guuugugauucuuccagauguga

SEQ ID NO: 2837585 - RNA, 11 nt, Human
guuugucuguu

SEQ ID NO: 2837586 - RNA, 16 nt, Human
guuugucuguuuguuu

SEQ ID NO: 2837587 - RNA, 18 nt, Human
guuugucuguuuguuuca

SEQ ID NO: 2837588 - RNA, 21 nt, Human
guuugucuuccauuccauugu

SEQ ID NO: 2837589 - RNA, 14 nt, Human
guuuguggccucag

SEQ ID NO: 2837590 - RNA, 13 nt, Human
guuuguggccuca

SEQ ID NO: 2837591 - RNA, 18 nt, Human
guuuguuccccaagacau

SEQ ID NO: 2837592 - RNA, 12 nt, Human
guuuguggccuc

SEQ ID NO: 2837593 - RNA, 19 nt, Human
guuuguggaaaaugaaaau

SEQ ID NO: 2837594 - RNA, 13 nt, Human
guuuguaaaacua

SEQ ID NO: 2837595 - RNA, 17 nt, Human
guuugucucuccuuuuc

SEQ ID NO: 2837596 - RNA, 18 nt, Human
guuugucucuccuuuucu

SEQ ID NO: 2837597 - RNA, 21 nt, Human
guuugucucuccuuuucuuuu

SEQ ID NO: 2837598 - RNA, 14 nt, Human
guuuguaaauguua

SEQ ID NO: 2837599 - RNA, 19 nt, Human
guuuguaaauguuauuucu

SEQ ID NO: 2837600 - RNA, 20 nt, Human
guuuguaaauguuauuucug

SEQ ID NO: 2837601 - RNA, 22 nt, Human
guuugaugcaggcacuuauugu

SEQ ID NO: 2837602 - RNA, 13 nt, Human
guuugguuuacau

SEQ ID NO: 2837603 - RNA, 14 nt, Human
guuugguuuacauu

SEQ ID NO: 2837604 - RNA, 15 nt, Human
guuugguuuacauuu

SEQ ID NO: 2837605 - RNA, 16 nt, Human
guuugguuuacauuua

SEQ ID NO: 2837606 - RNA, 20 nt, Human
guuugguuuacauuuaaagc

SEQ ID NO: 2837607 - RNA, 14 nt, Human
guuugguuccucuc

SEQ ID NO: 2837608 - RNA, 18 nt, Human
guuugguuccucucuggu

SEQ ID NO: 2837609 - RNA, 15 nt, Human
guuugagaugcugua

SEQ ID NO: 2837610 - RNA, 16 nt, Human
guuugaggcugcagcg

SEQ ID NO: 2837611 - RNA, 22 nt, Human
guuugaggagcauguuuuguau

SEQ ID NO: 2837612 - RNA, 20 nt, Human
guuugaucacacuauuuuag

SEQ ID NO: 2837613 - RNA, 12 nt, Human
guuugaacuuca

SEQ ID NO: 2837614 - RNA, 14 nt, Human
guuugaagccugga

SEQ ID NO: 2837615 - RNA, 15 nt, Human
guuugaaggaaacag

SEQ ID NO: 2837616 - RNA, 16 nt, Human
guuugaaggaaacagu

SEQ ID NO: 2837617 - RNA, 17 nt, Human
guuugaaggaaacaguu

SEQ ID NO: 2837618 - RNA, 13 nt, Human
guuugaauaugga

SEQ ID NO: 2837619 - RNA, 14 nt, Human
guuugaauauggac

SEQ ID NO: 2837620 - RNA, 18 nt, Human
guuugaauauggacaaga

SEQ ID NO: 2837621 - RNA, 21 nt, Human
guuugaacacgaaagaaaugu

SEQ ID NO: 2837622 - RNA, 23 nt, Human
guuucuuucuaguggucuuugua

SEQ ID NO: 2837623 - RNA, 18 nt, Human
guuucuuucuaguggucu

SEQ ID NO: 2837624 - RNA, 15 nt, Human
guuucguuauauuaa

SEQ ID NO: 2837625 - RNA, 14 nt, Human
guuucguuucugua

SEQ ID NO: 2837626 - RNA, 15 nt, Human
guuucguuucuguau

SEQ ID NO: 2837627 - RNA, 16 nt, Human
guuucguuucuguaua

SEQ ID NO: 2837628 - RNA, 16 nt, Human
guuucgcagccugagu

SEQ ID NO: 2837629 - RNA, 18 nt, Human
guuucgcagccugagucc

SEQ ID NO: 2837630 - RNA, 22 nt, Human
guuucggccuucauaauggccu

SEQ ID NO: 2837631 - RNA, 23 nt, Human
guuuccuuguuuaucagauacau

SEQ ID NO: 2837632 - RNA, 14 nt, Human
guuuccuucagugc

SEQ ID NO: 2837633 - RNA, 23 nt, Human
guuuccuuuucugucucucucuu

SEQ ID NO: 2837634 - RNA, 17 nt, Human
uaaaaaaauuuaagugc

SEQ ID NO: 2837635 - RNA, 11 nt, Human
uaaaaaacaac

SEQ ID NO: 2837636 - RNA, 15 nt, Human
uaaaaaauggaaaga

SEQ ID NO: 2837637 - RNA, 15 nt, Human
uaaaaaaugaaaaua

SEQ ID NO: 2837638 - RNA, 13 nt, Human
uaaaaaaugaaau

SEQ ID NO: 2837639 - RNA, 15 nt, Human
uaaaaaaugugugua

SEQ ID NO: 2837640 - RNA, 20 nt, Human
uaaaaaauguguguauucuu

SEQ ID NO: 2837641 - RNA, 22 nt, Human
uaaaaaauguguguauucuuaa

SEQ ID NO: 2837642 - RNA, 23 nt, Human
uaaaaaauguguguauucuuaaa

SEQ ID NO: 2837643 - RNA, 18 nt, Human
uaaaaaauuaugacaaug

SEQ ID NO: 2837644 - RNA, 22 nt, Human
uaaaaacaaaaacaucccaaga

SEQ ID NO: 2837645 - RNA, 23 nt, Human
uaaaaacaaaaacaucccaagau

SEQ ID NO: 2837646 - RNA, 14 nt, Human
uaaaaacuaguagu

SEQ ID NO: 2837647 - RNA, 19 nt, Human
uaaaaacuaguaguucucu

SEQ ID NO: 2837648 - RNA, 20 nt, Human
uaaaaacuaguaguucucuu

SEQ ID NO: 2837649 - RNA, 18 nt, Human
uaaaaaccagacaaggaa

SEQ ID NO: 2837650 - RNA, 16 nt, Human
uaaaaacccacaaaaa

SEQ ID NO: 2837651 - RNA, 17 nt, Human
uaaaaacccacaaaaau

SEQ ID NO: 2837652 - RNA, 23 nt, Human
uaaaaacccacaaaaauguugaa

SEQ ID NO: 2837653 - RNA, 19 nt, Human
uaaaaacauugccuuugaa

SEQ ID NO: 2837654 - RNA, 21 nt, Human
uaaaaacauugccuuugaaug

SEQ ID NO: 2837655 - RNA, 12 nt, Human
uaaaaagaaaaa

SEQ ID NO: 2837656 - RNA, 20 nt, Human
uaaaaagaaaaaccacuccc

SEQ ID NO: 2837657 - RNA, 23 nt, Human
uaaaaagaaaaaccacucccagu

SEQ ID NO: 2837658 - RNA, 11 nt, Human
uaaaaaugcaa

SEQ ID NO: 2837659 - RNA, 19 nt, Human
guuuuuaugauaucccuga

SEQ ID NO: 2837660 - RNA, 20 nt, Human
guuuuuaugauaucccugau

SEQ ID NO: 2837661 - RNA, 15 nt, Human
guuuuuauaauaaaa

SEQ ID NO: 2837662 - RNA, 17 nt, Human
guuuuuauauuaaugua

SEQ ID NO: 2837663 - RNA, 16 nt, Human
guuuuuauuccuugug

SEQ ID NO: 2837664 - RNA, 21 nt, Human
uaaaaaaaaauagaugucuuu

SEQ ID NO: 2837665 - RNA, 23 nt, Human
uaaaaaaaaauagaugucuuuua

SEQ ID NO: 2837666 - RNA, 15 nt, Human
uaaaaaaaaaugccu

SEQ ID NO: 2837667 - RNA, 16 nt, Human
uaaaaaaaaaugccuu

SEQ ID NO: 2837668 - RNA, 19 nt, Human
uaaaaaaaaagaucuguuu

SEQ ID NO: 2837669 - RNA, 20 nt, Human
guuuuucaccacuucacuga

SEQ ID NO: 2837670 - RNA, 14 nt, Human
uaaaaaaauggcag

SEQ ID NO: 2837671 - RNA, 12 nt, Human
uaaaaaaauuua

SEQ ID NO: 2837672 - RNA, 15 nt, Human
uaaaaaaauuuaagu

SEQ ID NO: 2837673 - RNA, 16 nt, Human
uaaaaaaauuuaagug

SEQ ID NO: 2837674 - RNA, 11 nt, Human
uaaaaaaagaa

SEQ ID NO: 2837675 - RNA, 17 nt, Human
guuuuuauuaauuuaua

SEQ ID NO: 2837676 - RNA, 14 nt, Human
uaaaaaaagaaaau

SEQ ID NO: 2837677 - RNA, 12 nt, Human
uaaaaaaagaaa

SEQ ID NO: 2837678 - RNA, 13 nt, Human
uaaaaaaagaaaa

SEQ ID NO: 2837679 - RNA, 15 nt, Human
uaaaaaaagagaauu

SEQ ID NO: 2837680 - RNA, 18 nt, Human
uaaaaaaaggcauuguuu

SEQ ID NO: 2837681 - RNA, 11 nt, Human
uaaaaaaauaa

SEQ ID NO: 2837682 - RNA, 21 nt, Human
uaaaaaaacaaucauuugcuu

SEQ ID NO: 2837683 - RNA, 18 nt, Human
uaaaaaaaaaugccuuug

SEQ ID NO: 2837684 - RNA, 17 nt, Human
uaaaaaaaaaugccuuu

SEQ ID NO: 2837685 - RNA, 14 nt, Human
guuuucaucaagac

SEQ ID NO: 2837686 - RNA, 16 nt, Human
guuuguugugaggauu

SEQ ID NO: 2837687 - RNA, 16 nt, Human
guuuguugcuggcuug

SEQ ID NO: 2837688 - RNA, 20 nt, Human
guuugaugucauuaaugugu

SEQ ID NO: 2837689 - RNA, 20 nt, Human
guuuguuucucccccugggc

SEQ ID NO: 2837690 - RNA, 19 nt, Human
guuuguuucucccccuggg

SEQ ID NO: 2837691 - RNA, 21 nt, Human
guuuguuucucccccugggcu

SEQ ID NO: 2837692 - RNA, 18 nt, Human
guuuguuucucccccugg

SEQ ID NO: 2837693 - RNA, 18 nt, Human
guuuguuuauuagaugaa

SEQ ID NO: 2837694 - RNA, 19 nt, Human
guuuguuuauuagaugaau

SEQ ID NO: 2837695 - RNA, 18 nt, Human
guuuguuucaagaaccug

SEQ ID NO: 2837696 - RNA, 23 nt, Human
guuuguuucauauauacaggcau

SEQ ID NO: 2837697 - RNA, 23 nt, Human
guuuucauggugaaaauguacug

SEQ ID NO: 2837698 - RNA, 21 nt, Human
guuuucauggugaaaauguac

SEQ ID NO: 2837699 - RNA, 22 nt, Human
guuuucauggugaaaauguacu

SEQ ID NO: 2837700 - RNA, 10 nt, Human
guuuucaugg

SEQ ID NO: 2837701 - RNA, 16 nt, Human
guuuuccacccuggaa

SEQ ID NO: 2837702 - RNA, 14 nt, Human
guuuuccacccugg

SEQ ID NO: 2837703 - RNA, 16 nt, Human
guuuucauuugguuca

SEQ ID NO: 2837704 - RNA, 17 nt, Human
guuuucauuugguucau

SEQ ID NO: 2837705 - RNA, 11 nt, Human
guuuuccaaac

SEQ ID NO: 2837706 - RNA, 23 nt, Human
guuuuccacccauaauccuuucu

SEQ ID NO: 2837707 - RNA, 23 nt, Human
guuuucgcaccuaccaucaggga

SEQ ID NO: 2837708 - RNA, 17 nt, Human
guuuucucucggcuccc

SEQ ID NO: 2837709 - RNA, 19 nt, Human
guuuucuccugccugugcu

SEQ ID NO: 2837710 - RNA, 21 nt, Human
guuuucuccucccaggaacug

SEQ ID NO: 2837711 - RNA, 18 nt, Human
guuuucuccucccaggaa

SEQ ID NO: 2837712 - RNA, 16 nt, Human
guuuucuccucccagg

SEQ ID NO: 2837713 - RNA, 13 nt, Human
guuuucuccuccc

SEQ ID NO: 2837714 - RNA, 18 nt, Human
guuuucuauuuaugccuu

SEQ ID NO: 2837715 - RNA, 17 nt, Human
guuuuuaguaaucugua

SEQ ID NO: 2837716 - RNA, 20 nt, Human
guuuuuaguaaucuguacau

SEQ ID NO: 2837717 - RNA, 21 nt, Human
guuuuuaguaaucuguacauu

SEQ ID NO: 2837718 - RNA, 21 nt, Human
guuuuuagacaccuucauuuu

SEQ ID NO: 2837719 - RNA, 18 nt, Human
guuuuuaaaugaggauua

SEQ ID NO: 2837720 - RNA, 15 nt, Human
guuuuuaaauuuugu

SEQ ID NO: 2837721 - RNA, 19 nt, Human
guuuuuaaauuuuguaaug

SEQ ID NO: 2837722 - RNA, 20 nt, Human
guuuuuaaauuuuguaauga

SEQ ID NO: 2837723 - RNA, 18 nt, Human
guuuuuaaauagaguuug

SEQ ID NO: 2837724 - RNA, 23 nt, Human
guuuuuaaauagaguuugcuauu

SEQ ID NO: 2837725 - RNA, 20 nt, Human
guuuuuaccugucacauugc

SEQ ID NO: 2837726 - RNA, 21 nt, Human
guuuuuaccugucacauugca

SEQ ID NO: 2837727 - RNA, 23 nt, Human
guuuuuaccugucacauugcauu

SEQ ID NO: 2837728 - RNA, 13 nt, Human
guuuuuaaaaguu

SEQ ID NO: 2837729 - RNA, 15 nt, Human
guuuuuaaaaguuuc

SEQ ID NO: 2837730 - RNA, 16 nt, Human
guuuuuaaaaguuuca

SEQ ID NO: 2837731 - RNA, 18 nt, Human
guuuuuaaaaguuucaau

SEQ ID NO: 2837732 - RNA, 12 nt, Human
guuuuguauaca

SEQ ID NO: 2837733 - RNA, 21 nt, Human
guuuuguauacaaauauauug

SEQ ID NO: 2837734 - RNA, 22 nt, Human
guuuuguauacaaauauauugu

SEQ ID NO: 2837735 - RNA, 19 nt, Human
guuuuguaucuuaaauuug

SEQ ID NO: 2837736 - RNA, 17 nt, Human
guuuuguaggagacuug

SEQ ID NO: 2837737 - RNA, 19 nt, Human
guuuucucucggcucccca

SEQ ID NO: 2837738 - RNA, 20 nt, Human
guuuucuccugccugugcug

SEQ ID NO: 2837739 - RNA, 17 nt, Human
guuuucucuuugugggg

SEQ ID NO: 2837740 - RNA, 20 nt, Human
guuuucucuuuguggggcuu

SEQ ID NO: 2837741 - RNA, 14 nt, Human
guuuugucuugaau

SEQ ID NO: 2837742 - RNA, 11 nt, Human
guuuuguuugu

SEQ ID NO: 2837743 - RNA, 12 nt, Human
guuuuguuuguc

SEQ ID NO: 2837744 - RNA, 13 nt, Human
guuuuguuugucu

SEQ ID NO: 2837745 - RNA, 15 nt, Human
guuuuguuugucucu

SEQ ID NO: 2837746 - RNA, 22 nt, Human
guuuuguuugucucuccuuuuc

SEQ ID NO: 2837747 - RNA, 12 nt, Human
guuuuguuuugg

SEQ ID NO: 2837748 - RNA, 24 nt, Human
guuuugugacuauauagagauguu

SEQ ID NO: 2837749 - RNA, 15 nt, Human
uaaaagaucuucaaa

SEQ ID NO: 2837750 - RNA, 19 nt, Human
uaaaagaucuucaaaagua

SEQ ID NO: 2837751 - RNA, 23 nt, Human
uaaaagaucuucaaaaguaaugc

SEQ ID NO: 2837752 - RNA, 16 nt, Human
uaaaagaucuugcaga

SEQ ID NO: 2837753 - RNA, 22 nt, Human
uaaaagaugaaguuuuauacac

SEQ ID NO: 2837754 - RNA, 17 nt, Human
uaaaaaugauacugaug

SEQ ID NO: 2837755 - RNA, 18 nt, Human
uaaaaaugagugugaagg

SEQ ID NO: 2837756 - RNA, 12 nt, Human
uaaaaauggugg

SEQ ID NO: 2837757 - RNA, 13 nt, Human
uaaaaaugguggc

SEQ ID NO: 2837758 - RNA, 16 nt, Human
uaaaaaugguggcuuc

SEQ ID NO: 2837759 - RNA, 20 nt, Human
uaaaaaugguggcuucagcu

SEQ ID NO: 2837760 - RNA, 23 nt, Human
uaaaaaugguggcuucagcucca

SEQ ID NO: 2837761 - RNA, 20 nt, Human
uaaaagcguuggauguagca

SEQ ID NO: 2837762 - RNA, 13 nt, Human
uaaaagccacaua

SEQ ID NO: 2837763 - RNA, 15 nt, Human
uaaaagccacauaga

SEQ ID NO: 2837764 - RNA, 15 nt, Human
uaaaaucuauucugu

SEQ ID NO: 2837765 - RNA, 16 nt, Human
uaaaaucuauucugug

SEQ ID NO: 2837766 - RNA, 17 nt, Human
uaaaaucuauucugugu

SEQ ID NO: 2837767 - RNA, 19 nt, Human
uaaaauccccaugccugug

SEQ ID NO: 2837768 - RNA, 23 nt, Human
uaaaauccccaugccuguggcug

SEQ ID NO: 2837769 - RNA, 17 nt, Human
uaaaauccuaagacaca

SEQ ID NO: 2837770 - RNA, 22 nt, Human
uaaaauccuaagacacaaaugc

SEQ ID NO: 2837771 - RNA, 18 nt, Human
uaaaaggcuugaagcugu

SEQ ID NO: 2837772 - RNA, 13 nt, Human
uaaaauauuuauu

SEQ ID NO: 2837773 - RNA, 17 nt, Human
uaaaauauuuuugaaag

SEQ ID NO: 2837774 - RNA, 17 nt, Human
uaaaaucaaaacaagug

SEQ ID NO: 2837775 - RNA, 18 nt, Human
uaaaaucaacuuaacaug

SEQ ID NO: 2837776 - RNA, 17 nt, Human
uaaaaucaaguuuuaag

SEQ ID NO: 2837777 - RNA, 19 nt, Human
uaaaaucaauuuuuaggaa

SEQ ID NO: 2837778 - RNA, 14 nt, Human
uaaaaugauuguaa

SEQ ID NO: 2837779 - RNA, 15 nt, Human
uaaaaugauuguaaa

SEQ ID NO: 2837780 - RNA, 16 nt, Human
uaaaaugauuguaaaa

SEQ ID NO: 2837781 - RNA, 17 nt, Human
uaaaaugauuguaaaau

SEQ ID NO: 2837782 - RNA, 18 nt, Human
uaaaaugauuguaaaaua

SEQ ID NO: 2837783 - RNA, 20 nt, Human
uaaaaugauuguaaaauagc

SEQ ID NO: 2837784 - RNA, 15 nt, Human
uaaaaugacuacuua

SEQ ID NO: 2837785 - RNA, 16 nt, Human
uaaaaugacuacuuag

SEQ ID NO: 2837786 - RNA, 19 nt, Human
uaaaaugacuacuuagcau

SEQ ID NO: 2837787 - RNA, 20 nt, Human
uaaaaugacuacuuagcauc

SEQ ID NO: 2837788 - RNA, 17 nt, Human
uaaaaugaggacauguu

SEQ ID NO: 2837789 - RNA, 24 nt, Human
uaaacaacauugagauuaugauga

SEQ ID NO: 2837790 - RNA, 21 nt, Human
uaaacaaauucauauucuguc

SEQ ID NO: 2837791 - RNA, 22 nt, Human
uaaacaaauucauauucugucu

SEQ ID NO: 2837792 - RNA, 17 nt, Human
uaaacaaauucauauuc

SEQ ID NO: 2837793 - RNA, 19 nt, Human
uaaacaaauucauauucug

SEQ ID NO: 2837794 - RNA, 12 nt, Human
uaaaauggaauu

SEQ ID NO: 2837795 - RNA, 13 nt, Human
uaaaauggaauug

SEQ ID NO: 2837796 - RNA, 15 nt, Human
uaaaauggaauugaa

SEQ ID NO: 2837797 - RNA, 23 nt, Human
uaaaauggaauugaaaaacucuu

SEQ ID NO: 2837798 - RNA, 18 nt, Human
uaaaauggaugccuugaa

SEQ ID NO: 2837799 - RNA, 22 nt, Human
uaaaauggaugccuugaauaau

SEQ ID NO: 2837800 - RNA, 21 nt, Human
uaaaaugcuucacuguacgua

SEQ ID NO: 2837801 - RNA, 12 nt, Human
uaaaaugcaaua

SEQ ID NO: 2837802 - RNA, 16 nt, Human
uaaaaugcaauauuug

SEQ ID NO: 2837803 - RNA, 18 nt, Human
uaaaaugcaauauuugua

SEQ ID NO: 2837804 - RNA, 22 nt, Human
uaaaaugauuguaaaauagcuu

SEQ ID NO: 2837805 - RNA, 17 nt, Human
uaaaaugauuuguagug

SEQ ID NO: 2837806 - RNA, 23 nt, Human
uaaaaugauuuguaguggaaaca

SEQ ID NO: 2837807 - RNA, 21 nt, Human
uaaacaaugcugauuugguga

SEQ ID NO: 2837808 - RNA, 16 nt, Human
uaaacaauucaaguga

SEQ ID NO: 2837809 - RNA, 23 nt, Human
uaaacaaugaaauauugcuguau

SEQ ID NO: 2837810 - RNA, 22 nt, Human
uaaacaaugaugcccugcucca

SEQ ID NO: 2837811 - RNA, 23 nt, Human
uaaacaaugaugcccugcuccag

SEQ ID NO: 2837812 - RNA, 14 nt, Human
uaaacacugcgcuu

SEQ ID NO: 2837813 - RNA, 16 nt, Human
uaaacacagucaaaau

SEQ ID NO: 2837814 - RNA, 18 nt, Human
uaaacacagucaaaauaa

SEQ ID NO: 2837815 - RNA, 21 nt, Human
uaaacacagucaaaauaauuc

SEQ ID NO: 2837816 - RNA, 13 nt, Human
uaaacagacaaua

SEQ ID NO: 2837817 - RNA, 16 nt, Human
uaaacagacuguuaau

SEQ ID NO: 2837818 - RNA, 16 nt, Human
uaaacagaugaauaaa

SEQ ID NO: 2837819 - RNA, 17 nt, Human
uaaacagaugaugagaa

SEQ ID NO: 2837820 - RNA, 18 nt, Human
uaaacagaugaugagaau

SEQ ID NO: 2837821 - RNA, 19 nt, Human
uaaacagaugaugagaauu

SEQ ID NO: 2837822 - RNA, 20 nt, Human
uaaacagaugaugagaauuu

SEQ ID NO: 2837823 - RNA, 12 nt, Human
uaaacacacaga

SEQ ID NO: 2837824 - RNA, 14 nt, Human
uaaacacacagaua

SEQ ID NO: 2837825 - RNA, 18 nt, Human
uaaacacacagauacaca

SEQ ID NO: 2837826 - RNA, 21 nt, Human
uaaacacacagauacacacac

SEQ ID NO: 2837827 - RNA, 22 nt, Human
uaaacacacagauacacacaca

SEQ ID NO: 2837828 - RNA, 20 nt, Human
uaaacuuuacccaaaaacua

SEQ ID NO: 2837829 - RNA, 15 nt, Human
uaaacaguauuucau

SEQ ID NO: 2837830 - RNA, 23 nt, Human
uaaacagugagccugaauuuugu

SEQ ID NO: 2837831 - RNA, 20 nt, Human
uaaacagugagccugaauuu

SEQ ID NO: 2837832 - RNA, 17 nt, Human
uaaacagguggugagaa

SEQ ID NO: 2837833 - RNA, 23 nt, Human
uaaacagguggugagaaauuucu

SEQ ID NO: 2837834 - RNA, 18 nt, Human
uaaacaggagacaggaag

SEQ ID NO: 2837835 - RNA, 13 nt, Human
uaaacagcagugu

SEQ ID NO: 2837836 - RNA, 17 nt, Human
uaaacagcaguguuccc

SEQ ID NO: 2837837 - RNA, 22 nt, Human
uaaacagcaguguuccccaucu

SEQ ID NO: 2837838 - RNA, 22 nt, Human
uaaacuggaauuaaaaggauag

SEQ ID NO: 2837839 - RNA, 15 nt, Human
uaaacauaugauuuc

SEQ ID NO: 2837840 - RNA, 16 nt, Human
uaaacauaugauuuca

SEQ ID NO: 2837841 - RNA, 18 nt, Human
uaaacauaugauuucacu

SEQ ID NO: 2837842 - RNA, 23 nt, Human
uaaacugcccccucugcccugcg

SEQ ID NO: 2837843 - RNA, 22 nt, Human
uaaacugcccccucugcccugc

SEQ ID NO: 2837844 - RNA, 15 nt, Human
uaaacauaaguguac

SEQ ID NO: 2837845 - RNA, 23 nt, Human
uaaacauaaguguacgauucuua

SEQ ID NO: 2837846 - RNA, 15 nt, Human
uaaacauaaugaaaa

SEQ ID NO: 2837847 - RNA, 16 nt, Human
uaaacauaaugaaaau

SEQ ID NO: 2837848 - RNA, 14 nt, Human
uaaacauaaaacaa

SEQ ID NO: 2837849 - RNA, 21 nt, Human
uaaacugcccccucugcccug

SEQ ID NO: 2837850 - RNA, 20 nt, Human
uaaacugcccccucugcccu

SEQ ID NO: 2837851 - RNA, 22 nt, Human
uaaaggagaaggcaugaaauug

SEQ ID NO: 2837852 - RNA, 17 nt, Human
uaaaggagaaggcauga

SEQ ID NO: 2837853 - RNA, 14 nt, Human
uaaaggacuguaau

SEQ ID NO: 2837854 - RNA, 14 nt, Human
uaaagcucugacau

SEQ ID NO: 2837855 - RNA, 12 nt, Human
uaaaggacugua

SEQ ID NO: 2837856 - RNA, 17 nt, Human
uaaagcgauauacagau

SEQ ID NO: 2837857 - RNA, 18 nt, Human
uaaagcgauauacagaug

SEQ ID NO: 2837858 - RNA, 23 nt, Human
uaaagcgauauacagaugaaaau

SEQ ID NO: 2837859 - RNA, 16 nt, Human
uaaagccugcuuuuua

SEQ ID NO: 2837860 - RNA, 21 nt, Human
uaaagccugcuuuuuaagugu

SEQ ID NO: 2837861 - RNA, 21 nt, Human
uaaagccuuuaguaucagugu

SEQ ID NO: 2837862 - RNA, 12 nt, Human
uaaagcauugcu

SEQ ID NO: 2837863 - RNA, 15 nt, Human
uaaagcauugcuguu

SEQ ID NO: 2837864 - RNA, 19 nt, Human
uaaagcauugcuguuaugu

SEQ ID NO: 2837865 - RNA, 20 nt, Human
uaaagcauugcuguuauguc

SEQ ID NO: 2837866 - RNA, 21 nt, Human
uaaagcauugcuguuaugucu

SEQ ID NO: 2837867 - RNA, 23 nt, Human
uaaagcauugcuguuaugucugu

SEQ ID NO: 2837868 - RNA, 13 nt, Human
uaaagcauugcuu

SEQ ID NO: 2837869 - RNA, 21 nt, Human
uaaagcauugcuuuuauuuug

SEQ ID NO: 2837870 - RNA, 14 nt, Human
uaaacuuuuuuuca

SEQ ID NO: 2837871 - RNA, 15 nt, Human
uaaacuuuuuuucaa

SEQ ID NO: 2837872 - RNA, 16 nt, Human
uaaacuuuuuuucaau

SEQ ID NO: 2837873 - RNA, 17 nt, Human
uaaacuuuuuuucaaug

SEQ ID NO: 2837874 - RNA, 18 nt, Human
uaaacuuuuuuucaaugu

SEQ ID NO: 2837875 - RNA, 19 nt, Human
uaaacuuuuuuucaaugug

SEQ ID NO: 2837876 - RNA, 16 nt, Human
uaaagcauaaguauac

SEQ ID NO: 2837877 - RNA, 17 nt, Human
uaaagcauaaguauaca

SEQ ID NO: 2837878 - RNA, 21 nt, Human
uaaagcauaaguauacaguuc

SEQ ID NO: 2837879 - RNA, 12 nt, Human
uaaagcauauag

SEQ ID NO: 2837880 - RNA, 22 nt, Human
uaaagcaugaaugguauggaac

SEQ ID NO: 2837881 - RNA, 21 nt, Human
uaaauaaaacuuaaaucucac

SEQ ID NO: 2837882 - RNA, 13 nt, Human
uaaauaaaagaaa

SEQ ID NO: 2837883 - RNA, 13 nt, Human
uaaaguuucucag

SEQ ID NO: 2837884 - RNA, 14 nt, Human
uaaaguuucucaga

SEQ ID NO: 2837885 - RNA, 14 nt, Human
uaaaguuugcuuag

SEQ ID NO: 2837886 - RNA, 17 nt, Human
uaaaguuugcuuagaaa

SEQ ID NO: 2837887 - RNA, 18 nt, Human
uaaaguuugcuuguuucu

SEQ ID NO: 2837888 - RNA, 21 nt, Human
uaaaguuugcuuguuucuugg

SEQ ID NO: 2837889 - RNA, 17 nt, Human
uaaaggauguugguguu

SEQ ID NO: 2837890 - RNA, 22 nt, Human
uaaaggaugugauuguggaaug

SEQ ID NO: 2837891 - RNA, 16 nt, Human
uaaaggaugugauugu

SEQ ID NO: 2837892 - RNA, 21 nt, Human
uaaauaucugaacauuuacua

SEQ ID NO: 2837893 - RNA, 22 nt, Human
uaaauaucaaucaagccaugua

SEQ ID NO: 2837894 - RNA, 14 nt, Human
uaaauaucuuuuau

SEQ ID NO: 2837895 - RNA, 15 nt, Human
uaaauaucuuuuaug

SEQ ID NO: 2837896 - RNA, 17 nt, Human
uaaauaucuuuuauguu

SEQ ID NO: 2837897 - RNA, 18 nt, Human
uaaauaucuuuuauguuu

SEQ ID NO: 2837898 - RNA, 20 nt, Human
uaaauaucuuuuauguuuga

SEQ ID NO: 2837899 - RNA, 21 nt, Human
uaaauaucuuuuauguuugaa

SEQ ID NO: 2837900 - RNA, 22 nt, Human
uaaauaucuuuuauguuugaau

SEQ ID NO: 2837901 - RNA, 23 nt, Human
uaaauaucuuuuauguuugaaua

SEQ ID NO: 2837902 - RNA, 18 nt, Human
uaaauaugaacccuuugu

SEQ ID NO: 2837903 - RNA, 22 nt, Human
uaaauaugaacccuuuguuucu

SEQ ID NO: 2837904 - RNA, 23 nt, Human
uaaauaugaacccuuuguuucuu

SEQ ID NO: 2837905 - RNA, 13 nt, Human
uaaauaugcagug

SEQ ID NO: 2837906 - RNA, 22 nt, Human
uaaauaugaaucugcucacuuu

SEQ ID NO: 2837907 - RNA, 23 nt, Human
uaaauaugaaucugcucacuuua

SEQ ID NO: 2837908 - RNA, 14 nt, Human
uaaauauauauaaa

SEQ ID NO: 2837909 - RNA, 15 nt, Human
uaaauauauauaaag

SEQ ID NO: 2837910 - RNA, 20 nt, Human
uaaauauauauaaagaauau

SEQ ID NO: 2837911 - RNA, 11 nt, Human
uaaauauauau

SEQ ID NO: 2837912 - RNA, 13 nt, Human
uaaauauauauaa

SEQ ID NO: 2837913 - RNA, 16 nt, Human
uaaauauagauuagaa

SEQ ID NO: 2837914 - RNA, 17 nt, Human
uaaauauagauuagaaa

SEQ ID NO: 2837915 - RNA, 20 nt, Human
uaaauauagauuagaaaaau

SEQ ID NO: 2837916 - RNA, 15 nt, Human
uaaauauaguuccua

SEQ ID NO: 2837917 - RNA, 16 nt, Human
uaaauauaguuccuaa

SEQ ID NO: 2837918 - RNA, 19 nt, Human
uaaauauaguuccuaagaa

SEQ ID NO: 2837919 - RNA, 20 nt, Human
uaaauauaguuccuaagaag

SEQ ID NO: 2837920 - RNA, 23 nt, Human
uaaauauaguuccuaagaagcuu

SEQ ID NO: 2837921 - RNA, 20 nt, Human
uaaauaaacuguugcucguu

SEQ ID NO: 2837922 - RNA, 11 nt, Human
uaaauaaacuu

SEQ ID NO: 2837923 - RNA, 12 nt, Human
uaaauaaacuuu

SEQ ID NO: 2837924 - RNA, 13 nt, Human
uaaauaaacuuuu

SEQ ID NO: 2837925 - RNA, 14 nt, Human
uaaauaaacuuuuu

SEQ ID NO: 2837926 - RNA, 15 nt, Human
uaaauaaacuuuuuu

SEQ ID NO: 2837927 - RNA, 18 nt, Human
uaaauaaacuuuuuuuca

SEQ ID NO: 2837928 - RNA, 19 nt, Human
uaaauaaacuuuuuuucaa

SEQ ID NO: 2837929 - RNA, 20 nt, Human
uaaauaaacuuuuuuucaau

SEQ ID NO: 2837930 - RNA, 22 nt, Human
uaaauaaaccucaaaaugucua

SEQ ID NO: 2837931 - RNA, 13 nt, Human
uaaauaaacccuu

SEQ ID NO: 2837932 - RNA, 18 nt, Human
uaaauaaaaguuuuacaa

SEQ ID NO: 2837933 - RNA, 22 nt, Human
uaaauaaaaguuuuacaaaggg

SEQ ID NO: 2837934 - RNA, 21 nt, Human
uaaauaaaagaaaaaauaucu

SEQ ID NO: 2837935 - RNA, 12 nt, Human
uaaauaaaauca

SEQ ID NO: 2837936 - RNA, 14 nt, Human
uaaauaaaaucaau

SEQ ID NO: 2837937 - RNA, 15 nt, Human
uaaauaaaaucaauu

SEQ ID NO: 2837938 - RNA, 14 nt, Human
uaaaucauuaauac

SEQ ID NO: 2837939 - RNA, 16 nt, Human
uaaaucagauguugaa

SEQ ID NO: 2837940 - RNA, 22 nt, Human
uaaaucagauguuuuggucaag

SEQ ID NO: 2837941 - RNA, 14 nt, Human
uaaaucauauugau

SEQ ID NO: 2837942 - RNA, 19 nt, Human
uaaaucauauugaugaaaa

SEQ ID NO: 2837943 - RNA, 20 nt, Human
uaaaucauauugaugaaaag

SEQ ID NO: 2837944 - RNA, 16 nt, Human
uaaaucaugaugcuag

SEQ ID NO: 2837945 - RNA, 22 nt, Human
uaaaucaugaugcuagccagca

SEQ ID NO: 2837946 - RNA, 12 nt, Human
uaaaucauuuua

SEQ ID NO: 2837947 - RNA, 17 nt, Human
uaaaucauuuuaggaaa

SEQ ID NO: 2837948 - RNA, 19 nt, Human
uaaaucauuuuaggaaagg

SEQ ID NO: 2837949 - RNA, 20 nt, Human
uaaaucauuuuaggaaagga

SEQ ID NO: 2837950 - RNA, 21 nt, Human
uaaaucauuuuaggaaaggau

SEQ ID NO: 2837951 - RNA, 14 nt, Human
uaaaucacauccuu

SEQ ID NO: 2837952 - RNA, 19 nt, Human
uaaaucaaguuggcuucua

SEQ ID NO: 2837953 - RNA, 20 nt, Human
uaaauauguacaauuguggg

SEQ ID NO: 2837954 - RNA, 14 nt, Human
uaaauaugcaguga

SEQ ID NO: 2837955 - RNA, 16 nt, Human
uaaauaugcagugaua

SEQ ID NO: 2837956 - RNA, 17 nt, Human
uaaauaugcagugauau

SEQ ID NO: 2837957 - RNA, 13 nt, Human
uaaauauucuaua

SEQ ID NO: 2837958 - RNA, 18 nt, Human
uaaauauuaguuaaugga

SEQ ID NO: 2837959 - RNA, 19 nt, Human
uaaauauuaguuaauggau

SEQ ID NO: 2837960 - RNA, 20 nt, Human
uaaauauuaguuaauggauu

SEQ ID NO: 2837961 - RNA, 21 nt, Human
uaaauauuaguuaauggauua

SEQ ID NO: 2837962 - RNA, 12 nt, Human
uaaauauugagg

SEQ ID NO: 2837963 - RNA, 18 nt, Human
uaaauauugaggcuuugu

SEQ ID NO: 2837964 - RNA, 20 nt, Human
uaaauauugaggcuuugugu

SEQ ID NO: 2837965 - RNA, 21 nt, Human
uaaauauugaggcuuuguguu

SEQ ID NO: 2837966 - RNA, 15 nt, Human
uaaauauucuauaug

SEQ ID NO: 2837967 - RNA, 19 nt, Human
uaaauauucuauaugaauu

SEQ ID NO: 2837968 - RNA, 18 nt, Human
uaaauauuugacuugcau

SEQ ID NO: 2837969 - RNA, 19 nt, Human
uaaauauuuggucucuauu

SEQ ID NO: 2837970 - RNA, 22 nt, Human
uaaauauuuggucucuauuuca

SEQ ID NO: 2837971 - RNA, 15 nt, Human
uauuuauuuaaaaga

SEQ ID NO: 2837972 - RNA, 16 nt, Human
uauuuauuuaaaagau

SEQ ID NO: 2837973 - RNA, 13 nt, Human
uauuuauuuaaaa

SEQ ID NO: 2837974 - RNA, 12 nt, Human
uauuuauuuaaa

SEQ ID NO: 2837975 - RNA, 19 nt, Human
uauuuauuaauauuuaaca

SEQ ID NO: 2837976 - RNA, 13 nt, Human
uauuuauuaauau

SEQ ID NO: 2837977 - RNA, 17 nt, Human
uauuuauuaauauuuaa

SEQ ID NO: 2837978 - RNA, 21 nt, Human
uauuuauucagcuucauuugu

SEQ ID NO: 2837979 - RNA, 13 nt, Human
uauuuauuaacag

SEQ ID NO: 2837980 - RNA, 21 nt, Human
uauuuauugaagaaacagaua

SEQ ID NO: 2837981 - RNA, 18 nt, Human
uauuuauuaauauuuaac

SEQ ID NO: 2837982 - RNA, 14 nt, Human
uauuuauuacuaug

SEQ ID NO: 2837983 - RNA, 24 nt, Human
uauuuauucagcuucauuuguguc

SEQ ID NO: 2837984 - RNA, 16 nt, Human
uaucugagcugagcca

SEQ ID NO: 2837985 - RNA, 12 nt, Human
uaucugaaaacu

SEQ ID NO: 2837986 - RNA, 13 nt, Human
uaucugaaaacug

SEQ ID NO: 2837987 - RNA, 14 nt, Human
uaucugaaaacugg

SEQ ID NO: 2837988 - RNA, 15 nt, Human
uaucugaaaacugga

SEQ ID NO: 2837989 - RNA, 16 nt, Human
uaucugaaaacuggaa

SEQ ID NO: 2837990 - RNA, 14 nt, Human
uaucugaacauuua

SEQ ID NO: 2837991 - RNA, 15 nt, Human
uaucugaacauuuac

SEQ ID NO: 2837992 - RNA, 17 nt, Human
uaucugaacauuuacua

SEQ ID NO: 2837993 - RNA, 19 nt, Human
uaucugaacauuuacuaca

SEQ ID NO: 2837994 - RNA, 15 nt, Human
uauuugcuuuuugcu

SEQ ID NO: 2837995 - RNA, 15 nt, Human
uauuugcuucauugu

SEQ ID NO: 2837996 - RNA, 14 nt, Human
uauuuggcaguuug

SEQ ID NO: 2837997 - RNA, 17 nt, Human
uauuuggcaguuuggua

SEQ ID NO: 2837998 - RNA, 21 nt, Human
uauuuggcaguuugguauuug

SEQ ID NO: 2837999 - RNA, 14 nt, Human
uauuuggcuuaaau

SEQ ID NO: 2838000 - RNA, 15 nt, Human
uauuuggcuuaaaua

SEQ ID NO: 2838001 - RNA, 16 nt, Human
uauuuggcuuaaauau

SEQ ID NO: 2838002 - RNA, 19 nt, Human
uauuuggcuuaaauauagu

SEQ ID NO: 2838003 - RNA, 16 nt, Human
uauuugggaaacuugu

SEQ ID NO: 2838004 - RNA, 21 nt, Human
uauuugggaaacuugucacuu

SEQ ID NO: 2838005 - RNA, 14 nt, Human
uauuugggaaguga

SEQ ID NO: 2838006 - RNA, 15 nt, Human
uauuugggaagugaa

SEQ ID NO: 2838007 - RNA, 22 nt, Human
uauuugggagggaaaagggaag

SEQ ID NO: 2838008 - RNA, 23 nt, Human
uauuugggagggaaaagggaagu

SEQ ID NO: 2838009 - RNA, 21 nt, Human
uauuuggaagaaaaaaaucuu

SEQ ID NO: 2838010 - RNA, 16 nt, Human
uauuuuagaauaaauu

SEQ ID NO: 2838011 - RNA, 16 nt, Human
uauuugagaguucuaa

SEQ ID NO: 2838012 - RNA, 15 nt, Human
uauuugagaguucua

SEQ ID NO: 2838013 - RNA, 18 nt, Human
uauuucuuauacgcuuuu

SEQ ID NO: 2838014 - RNA, 19 nt, Human
uauuugagaguucuaaauu

SEQ ID NO: 2838015 - RNA, 18 nt, Human
uauuugagaguucuaaau

SEQ ID NO: 2838016 - RNA, 15 nt, Human
uauuugauucaaaau

SEQ ID NO: 2838017 - RNA, 16 nt, Human
uauuugauucaaaaua

SEQ ID NO: 2838018 - RNA, 16 nt, Human
uauuugagacuaguuu

SEQ ID NO: 2838019 - RNA, 19 nt, Human
uauuugagggguuucagaa

SEQ ID NO: 2838020 - RNA, 20 nt, Human
uauuucugucauucaaaugg

SEQ ID NO: 2838021 - RNA, 16 nt, Human
uauuucuguuucucau

SEQ ID NO: 2838022 - RNA, 17 nt, Human
uauuucuguuucucaua

SEQ ID NO: 2838023 - RNA, 15 nt, Human
uauuucugcuuucuu

SEQ ID NO: 2838024 - RNA, 17 nt, Human
uauuucugggucuuuug

SEQ ID NO: 2838025 - RNA, 18 nt, Human
uauuucugggucuuuugc

SEQ ID NO: 2838026 - RNA, 22 nt, Human
uauuucugggucuuuugcuacu

SEQ ID NO: 2838027 - RNA, 17 nt, Human
uauuucugcauauguug

SEQ ID NO: 2838028 - RNA, 14 nt, Human
uauuucugcaaaca

SEQ ID NO: 2838029 - RNA, 21 nt, Human
uauuucucaacaaagcacagu

SEQ ID NO: 2838030 - RNA, 19 nt, Human
uauuucucaacaaagcaca

SEQ ID NO: 2838031 - RNA, 15 nt, Human
uauuucucuaguagu

SEQ ID NO: 2838032 - RNA, 16 nt, Human
uauuucucuaguaguu

SEQ ID NO: 2838033 - RNA, 18 nt, Human
ucaaaacucacaagugcu

SEQ ID NO: 2838034 - RNA, 23 nt, Human
ucaaacggccucacuaggcuucu

SEQ ID NO: 2838035 - RNA, 18 nt, Human
ucaaaacggggcagccaa

SEQ ID NO: 2838036 - RNA, 16 nt, Human
ucaaaacuacaaauca

SEQ ID NO: 2838037 - RNA, 21 nt, Human
ucaaacuccaagguucccuug

SEQ ID NO: 2838038 - RNA, 22 nt, Human
ucaaacuccaagguucccuugu

SEQ ID NO: 2838039 - RNA, 17 nt, Human
ucaaacuaucuggccau

SEQ ID NO: 2838040 - RNA, 15 nt, Human
ucaaacgugaaaaug

SEQ ID NO: 2838041 - RNA, 16 nt, Human
ucaaacgugaaaaugc

SEQ ID NO: 2838042 - RNA, 13 nt, Human
ucaaacuaaaaga

SEQ ID NO: 2838043 - RNA, 14 nt, Human
ucaaacuaaaagac

SEQ ID NO: 2838044 - RNA, 17 nt, Human
ucaaacuaaaagacauu

SEQ ID NO: 2838045 - RNA, 21 nt, Human
ucaaacuaaaagacauuuguu

SEQ ID NO: 2838046 - RNA, 12 nt, Human
ucaaaaaguguu

SEQ ID NO: 2838047 - RNA, 14 nt, Human
ucaaaaaguguuua

SEQ ID NO: 2838048 - RNA, 15 nt, Human
ucaaaaaguguuuau

SEQ ID NO: 2838049 - RNA, 23 nt, Human
ucaaaaagucuacgcucuccuuu

SEQ ID NO: 2838050 - RNA, 19 nt, Human
ucaaaacccaucugggcuc

SEQ ID NO: 2838051 - RNA, 23 nt, Human
ucaaaaaguguuuauuuuucaua

SEQ ID NO: 2838052 - RNA, 14 nt, Human
ucaaaaauacaaaa

SEQ ID NO: 2838053 - RNA, 15 nt, Human
ucaaaaauacaaaau

SEQ ID NO: 2838054 - RNA, 21 nt, Human
ucaaaaauacaaaauaaaaac

SEQ ID NO: 2838055 - RNA, 19 nt, Human
ucaaaaaguguuuauuuuu

SEQ ID NO: 2838056 - RNA, 13 nt, Human
ucaaaaauauaac

SEQ ID NO: 2838057 - RNA, 22 nt, Human
ucaaaaacuuuggaguccccuc

SEQ ID NO: 2838058 - RNA, 13 nt, Human
ucaaaaacuguuu

SEQ ID NO: 2838059 - RNA, 17 nt, Human
ucaaaaacuuuggaguc

SEQ ID NO: 2838060 - RNA, 15 nt, Human
ucaaaaacauucuua

SEQ ID NO: 2838061 - RNA, 12 nt, Human
uauuuuaugaga

SEQ ID NO: 2838062 - RNA, 14 nt, Human
uauuuuaugagaaa

SEQ ID NO: 2838063 - RNA, 15 nt, Human
uauuuuaugagaaau

SEQ ID NO: 2838064 - RNA, 16 nt, Human
uauuuuaugagaaaug

SEQ ID NO: 2838065 - RNA, 17 nt, Human
uauuuuaugagaaaugu

SEQ ID NO: 2838066 - RNA, 18 nt, Human
uauuuuaugagaaaugua

SEQ ID NO: 2838067 - RNA, 17 nt, Human
uauuuucaguauuuugg

SEQ ID NO: 2838068 - RNA, 18 nt, Human
uauuuucaguaauguuau

SEQ ID NO: 2838069 - RNA, 16 nt, Human
uauuuucaagaaacug

SEQ ID NO: 2838070 - RNA, 13 nt, Human
uauuuucaagaaa

SEQ ID NO: 2838071 - RNA, 11 nt, Human
uauuuucacaa

SEQ ID NO: 2838072 - RNA, 12 nt, Human
uauuuucacaau

SEQ ID NO: 2838073 - RNA, 14 nt, Human
uauuuucacaaugu

SEQ ID NO: 2838074 - RNA, 16 nt, Human
uauuuucacaauguca

SEQ ID NO: 2838075 - RNA, 19 nt, Human
uauuuucaacgcagcccug

SEQ ID NO: 2838076 - RNA, 21 nt, Human
uauuuucaacgcagcccugcu

SEQ ID NO: 2838077 - RNA, 14 nt, Human
uauuuugaaguuua

SEQ ID NO: 2838078 - RNA, 15 nt, Human
uauuuugaaguuuac

SEQ ID NO: 2838079 - RNA, 17 nt, Human
uauuuugaaguuuacau

SEQ ID NO: 2838080 - RNA, 18 nt, Human
uauuuugaaguuuacauu

SEQ ID NO: 2838081 - RNA, 19 nt, Human
uauuuugaaguuuacauuu

SEQ ID NO: 2838082 - RNA, 22 nt, Human
uauuuugaaguuuacauuuuua

SEQ ID NO: 2838083 - RNA, 11 nt, Human
uauuuugaagu

SEQ ID NO: 2838084 - RNA, 16 nt, Human
uauuuucuuuuguaaa

SEQ ID NO: 2838085 - RNA, 14 nt, Human
uauuuugaaaagcu

SEQ ID NO: 2838086 - RNA, 16 nt, Human
uauuuugaaaagcuuc

SEQ ID NO: 2838087 - RNA, 17 nt, Human
uauuuugaaaagcuucu

SEQ ID NO: 2838088 - RNA, 20 nt, Human
uauuuugaaaagcuucuuaa

SEQ ID NO: 2838089 - RNA, 16 nt, Human
uauuuucuuuugaauu

SEQ ID NO: 2838090 - RNA, 19 nt, Human
uauuuucuuuugaauuguu

SEQ ID NO: 2838091 - RNA, 13 nt, Human
uauuuucauuaca

SEQ ID NO: 2838092 - RNA, 17 nt, Human
uauuuucauuacaaugg

SEQ ID NO: 2838093 - RNA, 21 nt, Human
uauuuucauuacaauggaaac

SEQ ID NO: 2838094 - RNA, 21 nt, Human
uauuuucuuacccaauuuccc

SEQ ID NO: 2838095 - RNA, 12 nt, Human
uauuuucuucau

SEQ ID NO: 2838096 - RNA, 19 nt, Human
uauuuucuucauccaacuu

SEQ ID NO: 2838097 - RNA, 15 nt, Human
uauuuucuucuaagu

SEQ ID NO: 2838098 - RNA, 13 nt, Human
uauuuuuuaagua

SEQ ID NO: 2838099 - RNA, 14 nt, Human
uauuuuuguaguga

SEQ ID NO: 2838100 - RNA, 23 nt, Human
uauuuuuguagugaccuguuuau

SEQ ID NO: 2838101 - RNA, 13 nt, Human
uauuuuuuauugu

SEQ ID NO: 2838102 - RNA, 17 nt, Human
uauuuuuuauuguuuuc

SEQ ID NO: 2838103 - RNA, 16 nt, Human
uauuuuuuauauauac

SEQ ID NO: 2838104 - RNA, 19 nt, Human
uauuuuuuauaucuggaau

SEQ ID NO: 2838105 - RNA, 21 nt, Human
uauuuuuuaaguauuuauaua

SEQ ID NO: 2838106 - RNA, 15 nt, Human
uauuuuuuaaguauu

SEQ ID NO: 2838107 - RNA, 12 nt, Human
ucaacuauuuua

SEQ ID NO: 2838108 - RNA, 23 nt, Human
ucaacuaccucgcaucauugcag

SEQ ID NO: 2838109 - RNA, 17 nt, Human
ucaacuacuauucaaaa

SEQ ID NO: 2838110 - RNA, 22 nt, Human
ucaagcagcgaccgcccccucc

SEQ ID NO: 2838111 - RNA, 23 nt, Human
ucaagcagcgaccgcccccuccu

SEQ ID NO: 2838112 - RNA, 16 nt, Human
ucaagcagguuagaga

SEQ ID NO: 2838113 - RNA, 17 nt, Human
ucaagcagguuagagaa

SEQ ID NO: 2838114 - RNA, 23 nt, Human
ucaagcagguuagagaaaauaga

SEQ ID NO: 2838115 - RNA, 14 nt, Human
ucaaccuccugggc

SEQ ID NO: 2838116 - RNA, 13 nt, Human
ucaaccuccuggg

SEQ ID NO: 2838117 - RNA, 15 nt, Human
ucaacguauuguuuc

SEQ ID NO: 2838118 - RNA, 14 nt, Human
ucaacguuguacug

SEQ ID NO: 2838119 - RNA, 20 nt, Human
ucaacguuguacuguaugug

SEQ ID NO: 2838120 - RNA, 17 nt, Human
ucaacguuucuucacuu

SEQ ID NO: 2838121 - RNA, 21 nt, Human
ucaaagaaagaaaguuuagaa

SEQ ID NO: 2838122 - RNA, 22 nt, Human
ucaaagaaagaaaguuuagaag

SEQ ID NO: 2838123 - RNA, 22 nt, Human
ucaaacucuugaccucagguga

SEQ ID NO: 2838124 - RNA, 22 nt, Human
ucaagugauucuccugccucag

SEQ ID NO: 2838125 - RNA, 16 nt, Human
ucaagcgauucuucug

SEQ ID NO: 2838126 - RNA, 15 nt, Human
ucaagccugugcaaa

SEQ ID NO: 2838127 - RNA, 18 nt, Human
ucaagccugugcaaaaaa

SEQ ID NO: 2838128 - RNA, 19 nt, Human
ucaagccugugcaaaaaaa

SEQ ID NO: 2838129 - RNA, 15 nt, Human
ucaagcgauucuccu

SEQ ID NO: 2838130 - RNA, 16 nt, Human
ucaagcgauucuccug

SEQ ID NO: 2838131 - RNA, 17 nt, Human
ucaagcgauucuccugc

SEQ ID NO: 2838132 - RNA, 16 nt, Human
ucaagcccgcggggac

SEQ ID NO: 2838133 - RNA, 11 nt, Human
ucacaggcagg

SEQ ID NO: 2838134 - RNA, 23 nt, Human
ucacacagugagucgaggacagg

SEQ ID NO: 2838135 - RNA, 22 nt, Human
ucacacagugagucgaggacag

SEQ ID NO: 2838136 - RNA, 14 nt, Human
ucacacauccagac

SEQ ID NO: 2838137 - RNA, 19 nt, Human
ucacacauccagacaucau

SEQ ID NO: 2838138 - RNA, 22 nt, Human
ucacacauccagacaucaugaa

SEQ ID NO: 2838139 - RNA, 14 nt, Human
ucacaauaaaagcu

SEQ ID NO: 2838140 - RNA, 13 nt, Human
ucacaauacagau

SEQ ID NO: 2838141 - RNA, 14 nt, Human
ucacaauacagaua

SEQ ID NO: 2838142 - RNA, 15 nt, Human
ucacaauacagauaa

SEQ ID NO: 2838143 - RNA, 20 nt, Human
ucacaauacagauaacauua

SEQ ID NO: 2838144 - RNA, 17 nt, Human
ucaaugcgcaaaaugca

SEQ ID NO: 2838145 - RNA, 22 nt, Human
ucacaaugaaaugcucuccuuu

SEQ ID NO: 2838146 - RNA, 17 nt, Human
ucacaaugucaguauuu

SEQ ID NO: 2838147 - RNA, 19 nt, Human
ucacaaugucaguauuuca

SEQ ID NO: 2838148 - RNA, 14 nt, Human
ucacaauguucuuu

SEQ ID NO: 2838149 - RNA, 15 nt, Human
ucacaauguucuuua

SEQ ID NO: 2838150 - RNA, 16 nt, Human
ucacaauguucuuuau

SEQ ID NO: 2838151 - RNA, 17 nt, Human
ucacaauguucuuuaua

SEQ ID NO: 2838152 - RNA, 13 nt, Human
ucacaauuuuuaa

SEQ ID NO: 2838153 - RNA, 15 nt, Human
ucacaauuuuuaaug

SEQ ID NO: 2838154 - RNA, 13 nt, Human
ucacacagugagu

SEQ ID NO: 2838155 - RNA, 22 nt, Human
ucacacaguauuacuucugcua

SEQ ID NO: 2838156 - RNA, 21 nt, Human
ucacacaguauuacuucugcu

SEQ ID NO: 2838157 - RNA, 10 nt, Human
ucacacacac

SEQ ID NO: 2838158 - RNA, 23 nt, Human
ucacaaugaaaugcucuccuuuc

SEQ ID NO: 2838159 - RNA, 17 nt, Human
ucaaugggcaaugacag

SEQ ID NO: 2838160 - RNA, 17 nt, Human
ucaaugggcucuuccaa

SEQ ID NO: 2838161 - RNA, 11 nt, Human
ucaauuaauaa

SEQ ID NO: 2838162 - RNA, 14 nt, Human
ucaaugggcaauga

SEQ ID NO: 2838163 - RNA, 17 nt, Human
ucaaugcuauaacuaug

SEQ ID NO: 2838164 - RNA, 18 nt, Human
ucaaugcacugacauugu

SEQ ID NO: 2838165 - RNA, 21 nt, Human
ucaauggaguaugucugaugg

SEQ ID NO: 2838166 - RNA, 20 nt, Human
ucaauggauuugaugcuguu

SEQ ID NO: 2838167 - RNA, 21 nt, Human
ucaauggccuaaaacuggccu

SEQ ID NO: 2838168 - RNA, 23 nt, Human
ucaauggccuaaaacuggccuga

SEQ ID NO: 2838169 - RNA, 12 nt, Human
ucaaugcuauuu

SEQ ID NO: 2838170 - RNA, 15 nt, Human
ucaaugcuauuuuug

SEQ ID NO: 2838171 - RNA, 14 nt, Human
ucaaugcacugaca

SEQ ID NO: 2838172 - RNA, 16 nt, Human
ucaaugauuauuuuca

SEQ ID NO: 2838173 - RNA, 20 nt, Human
ucaaugcaagagugauugca

SEQ ID NO: 2838174 - RNA, 22 nt, Human
ucaaugcaagagugauugcagc

SEQ ID NO: 2838175 - RNA, 15 nt, Human
ucaaguuagcucagg

SEQ ID NO: 2838176 - RNA, 18 nt, Human
ucaagugggaucugucac

SEQ ID NO: 2838177 - RNA, 14 nt, Human
ucagaggaccugua

SEQ ID NO: 2838178 - RNA, 17 nt, Human
ucagaggaccuguauuu

SEQ ID NO: 2838179 - RNA, 18 nt, Human
ucagaggaccuguauuua

SEQ ID NO: 2838180 - RNA, 21 nt, Human
ucagaggaccuguauuuaagc

SEQ ID NO: 2838181 - RNA, 22 nt, Human
ucagaggaccuguauuuaagca

SEQ ID NO: 2838182 - RNA, 23 nt, Human
ucagaggaccuguauuuaagcaa

SEQ ID NO: 2838183 - RNA, 21 nt, Human
ucagaggagagauagccugug

SEQ ID NO: 2838184 - RNA, 22 nt, Human
ucagaggagagauagccugugg

SEQ ID NO: 2838185 - RNA, 23 nt, Human
ucagaggagagauagccuguggc

SEQ ID NO: 2838186 - RNA, 17 nt, Human
ucagacugcugggacug

SEQ ID NO: 2838187 - RNA, 16 nt, Human
ucagacugcugggacu

SEQ ID NO: 2838188 - RNA, 15 nt, Human
ucagacugcugggac

SEQ ID NO: 2838189 - RNA, 14 nt, Human
ucagacugcuggga

SEQ ID NO: 2838190 - RNA, 13 nt, Human
ucagacugcuggg

SEQ ID NO: 2838191 - RNA, 14 nt, Human
ucagacugcaugua

SEQ ID NO: 2838192 - RNA, 14 nt, Human
ucagacugcaccca

SEQ ID NO: 2838193 - RNA, 15 nt, Human
ucagacugcacccag

SEQ ID NO: 2838194 - RNA, 16 nt, Human
ucagacugcacccagg

SEQ ID NO: 2838195 - RNA, 17 nt, Human
ucagacugcacccagga

SEQ ID NO: 2838196 - RNA, 18 nt, Human
ucagacugcacccaggag

SEQ ID NO: 2838197 - RNA, 19 nt, Human
ucagacugcacccaggagg

SEQ ID NO: 2838198 - RNA, 20 nt, Human
ucagacugcacccaggaggg

SEQ ID NO: 2838199 - RNA, 16 nt, Human
ucagacucucagccca

SEQ ID NO: 2838200 - RNA, 17 nt, Human
ucagacucucagcccag

SEQ ID NO: 2838201 - RNA, 18 nt, Human
ucagacucucagcccaga

SEQ ID NO: 2838202 - RNA, 19 nt, Human
ucagacucucagcccagaa

SEQ ID NO: 2838203 - RNA, 20 nt, Human
ucagacucucagcccagaag

SEQ ID NO: 2838204 - RNA, 21 nt, Human
ucagacucucagcccagaaga

SEQ ID NO: 2838205 - RNA, 22 nt, Human
ucagacauccauguuuguaaaa

SEQ ID NO: 2838206 - RNA, 21 nt, Human
ucagacauccauguuuguaaa

SEQ ID NO: 2838207 - RNA, 14 nt, Human
ucagacauguuuuc

SEQ ID NO: 2838208 - RNA, 15 nt, Human
ucagacauguuuucc

SEQ ID NO: 2838209 - RNA, 20 nt, Human
ucagacauguuuuccgugaa

SEQ ID NO: 2838210 - RNA, 14 nt, Human
ucagaccagcucuu

SEQ ID NO: 2838211 - RNA, 13 nt, Human
ucagaccagagaa

SEQ ID NO: 2838212 - RNA, 12 nt, Human
ucagacauaaag

SEQ ID NO: 2838213 - RNA, 13 nt, Human
ucagacauaaagc

SEQ ID NO: 2838214 - RNA, 14 nt, Human
ucagacauaaagcc

SEQ ID NO: 2838215 - RNA, 15 nt, Human
ucagacauaaagcca

SEQ ID NO: 2838216 - RNA, 16 nt, Human
ucagacauaaagccau

SEQ ID NO: 2838217 - RNA, 11 nt, Human
ucagcacugaa

SEQ ID NO: 2838218 - RNA, 12 nt, Human
ucagcacugaaa

SEQ ID NO: 2838219 - RNA, 13 nt, Human
ucagcacugaaaa

SEQ ID NO: 2838220 - RNA, 14 nt, Human
ucagcacugaaaau

SEQ ID NO: 2838221 - RNA, 15 nt, Human
ucagcacugaaaaua

SEQ ID NO: 2838222 - RNA, 21 nt, Human
ucagcacugaaaauaccauca

SEQ ID NO: 2838223 - RNA, 14 nt, Human
ucagcacuugucuc

SEQ ID NO: 2838224 - RNA, 15 nt, Human
ucagcacuugucuca

SEQ ID NO: 2838225 - RNA, 17 nt, Human
ucagcacuugucucauu

SEQ ID NO: 2838226 - RNA, 18 nt, Human
ucagcacuugucucauuu

SEQ ID NO: 2838227 - RNA, 21 nt, Human
ucagcacuugucucauuuuaa

SEQ ID NO: 2838228 - RNA, 23 nt, Human
ucagcacuugucucauuuuaaug

SEQ ID NO: 2838229 - RNA, 19 nt, Human
ucagcaauuuaacuagaca

SEQ ID NO: 2838230 - RNA, 12 nt, Human
ucagcaagagaa

SEQ ID NO: 2838231 - RNA, 14 nt, Human
ucagcaagagagaa

SEQ ID NO: 2838232 - RNA, 15 nt, Human
ucagcaagagagaac

SEQ ID NO: 2838233 - RNA, 16 nt, Human
ucagcaagagagaacc

SEQ ID NO: 2838234 - RNA, 21 nt, Human
ucagcaaccuuucaccuuugu

SEQ ID NO: 2838235 - RNA, 21 nt, Human
ucagcaagcccuacagagcug

SEQ ID NO: 2838236 - RNA, 23 nt, Human
ucagagugcaagccccugcucca

SEQ ID NO: 2838237 - RNA, 20 nt, Human
ucagaguucuauacuguaaa

SEQ ID NO: 2838238 - RNA, 22 nt, Human
ucagaguucuauacuguaaagc

SEQ ID NO: 2838239 - RNA, 21 nt, Human
ucagcaaacaggaucaguuaa

SEQ ID NO: 2838240 - RNA, 13 nt, Human
ucagcaaaccauu

SEQ ID NO: 2838241 - RNA, 20 nt, Human
ucagcaaaccauuuuuaaag

SEQ ID NO: 2838242 - RNA, 22 nt, Human
ucagcaaaccauuuuuaaagua

SEQ ID NO: 2838243 - RNA, 14 nt, Human
ucagaguuuucugg

SEQ ID NO: 2838244 - RNA, 15 nt, Human
ucagaguuuucuggg

SEQ ID NO: 2838245 - RNA, 15 nt, Human
ucagcaaacaggauc

SEQ ID NO: 2838246 - RNA, 17 nt, Human
ucagaguccuuaaaaug

SEQ ID NO: 2838247 - RNA, 18 nt, Human
ucagaguccuuaaaaugu

SEQ ID NO: 2838248 - RNA, 22 nt, Human
ucagaggccuuaugaggguccu

SEQ ID NO: 2838249 - RNA, 17 nt, Human
ucacuuguacaaaauaa

SEQ ID NO: 2838250 - RNA, 16 nt, Human
ucacuuguacaaaaua

SEQ ID NO: 2838251 - RNA, 13 nt, Human
ucacuuguacaaa

SEQ ID NO: 2838252 - RNA, 12 nt, Human
ucacuugcaugu

SEQ ID NO: 2838253 - RNA, 13 nt, Human
ucacuugcauguc

SEQ ID NO: 2838254 - RNA, 15 nt, Human
ucacuugcauguccc

SEQ ID NO: 2838255 - RNA, 21 nt, Human
ucacuuggucugccaggcccc

SEQ ID NO: 2838256 - RNA, 15 nt, Human
ucacuuguacaaaau

SEQ ID NO: 2838257 - RNA, 14 nt, Human
ucacuuguacaaaa

SEQ ID NO: 2838258 - RNA, 14 nt, Human
ucacuugauucaua

SEQ ID NO: 2838259 - RNA, 15 nt, Human
ucacuugauucauaa

SEQ ID NO: 2838260 - RNA, 16 nt, Human
ucacuugauucauaaa

SEQ ID NO: 2838261 - RNA, 22 nt, Human
ucacuugauucauaaagauuca

SEQ ID NO: 2838262 - RNA, 16 nt, Human
ucacucugucaucuuu

SEQ ID NO: 2838263 - RNA, 17 nt, Human
ucacuggagcccaggag

SEQ ID NO: 2838264 - RNA, 14 nt, Human
ucacucuggccuca

SEQ ID NO: 2838265 - RNA, 21 nt, Human
ucacucugggcacacucugcc

SEQ ID NO: 2838266 - RNA, 22 nt, Human
ucacucugggcacacucugcca

SEQ ID NO: 2838267 - RNA, 15 nt, Human
ucacuggccaucccu

SEQ ID NO: 2838268 - RNA, 16 nt, Human
ucacucugucgcccag

SEQ ID NO: 2838269 - RNA, 12 nt, Human
ucacucugucgc

SEQ ID NO: 2838270 - RNA, 19 nt, Human
ucacucugucgcccagucu

SEQ ID NO: 2838271 - RNA, 13 nt, Human
ucacucugcugcu

SEQ ID NO: 2838272 - RNA, 14 nt, Human
ucacucugcugcuu

SEQ ID NO: 2838273 - RNA, 13 nt, Human
ucacucuggccuc

SEQ ID NO: 2838274 - RNA, 13 nt, Human
ucacuuuugcaag

SEQ ID NO: 2838275 - RNA, 18 nt, Human
ucacuuuugcaagguucc

SEQ ID NO: 2838276 - RNA, 21 nt, Human
ucacuuuugcaagguuccaca

SEQ ID NO: 2838277 - RNA, 21 nt, Human
ucacuuuugcuccgaagcuac

SEQ ID NO: 2838278 - RNA, 18 nt, Human
ucacuuuuccucccucag

SEQ ID NO: 2838279 - RNA, 13 nt, Human
ucacuuuuccucc

SEQ ID NO: 2838280 - RNA, 15 nt, Human
ucacuuuuugaacua

SEQ ID NO: 2838281 - RNA, 17 nt, Human
ucacuuuuugaacuaag

SEQ ID NO: 2838282 - RNA, 18 nt, Human
ucacuuuuugaacuaaga

SEQ ID NO: 2838283 - RNA, 19 nt, Human
ucacuuuuugaacuaagaa

SEQ ID NO: 2838284 - RNA, 20 nt, Human
ucacuuuuugaacuaagaaa

SEQ ID NO: 2838285 - RNA, 21 nt, Human
ucacuuuuugaacuaagaaac

SEQ ID NO: 2838286 - RNA, 22 nt, Human
ucacuuuuugaacuaagaaacu

SEQ ID NO: 2838287 - RNA, 13 nt, Human
ucacuuugucuaa

SEQ ID NO: 2838288 - RNA, 19 nt, Human
ucacuuugucuaacucaga

SEQ ID NO: 2838289 - RNA, 22 nt, Human
ucacuuuuauuuagcaccaggg

SEQ ID NO: 2838290 - RNA, 12 nt, Human
ucacuuuuauuu

SEQ ID NO: 2838291 - RNA, 12 nt, Human
ucacuuuuccuc

SEQ ID NO: 2838292 - RNA, 13 nt, Human
ucacuuuucagug

SEQ ID NO: 2838293 - RNA, 14 nt, Human
ucacuuuucaguga

SEQ ID NO: 2838294 - RNA, 16 nt, Human
ucacuuuucagugaug

SEQ ID NO: 2838295 - RNA, 17 nt, Human
ucagaaaauauuaugug

SEQ ID NO: 2838296 - RNA, 17 nt, Human
ucagaaaaauggagcaa

SEQ ID NO: 2838297 - RNA, 18 nt, Human
ucacuuuuuuuuuuuguu

SEQ ID NO: 2838298 - RNA, 22 nt, Human
ucacuuuuuuuuuuuguuugau

SEQ ID NO: 2838299 - RNA, 20 nt, Human
ucagaaaauauuauguguuu

SEQ ID NO: 2838300 - RNA, 19 nt, Human
ucagaaaauauuauguguu

SEQ ID NO: 2838301 - RNA, 14 nt, Human
ucagaaaagggaag

SEQ ID NO: 2838302 - RNA, 18 nt, Human
ucagaaaacuuuaaaaaa

SEQ ID NO: 2838303 - RNA, 22 nt, Human
ucagaaaacuuuaaaaaauauu

SEQ ID NO: 2838304 - RNA, 15 nt, Human
ucagaaaguguaaau

SEQ ID NO: 2838305 - RNA, 18 nt, Human
ucagaaaguguaaauguu

SEQ ID NO: 2838306 - RNA, 19 nt, Human
ucacucuacuuagcauguc

SEQ ID NO: 2838307 - RNA, 20 nt, Human
ucacucuacuuagcaugucc

SEQ ID NO: 2838308 - RNA, 17 nt, Human
ucacucuccuaugccuu

SEQ ID NO: 2838309 - RNA, 11 nt, Human
ucacucugcca

SEQ ID NO: 2838310 - RNA, 12 nt, Human
ucacucugccag

SEQ ID NO: 2838311 - RNA, 13 nt, Human
ucacucugccagg

SEQ ID NO: 2838312 - RNA, 14 nt, Human
ucacucugccaggg

SEQ ID NO: 2838313 - RNA, 20 nt, Human
ucacucugccagggcagugc

SEQ ID NO: 2838314 - RNA, 21 nt, Human
ucacucugccagggcagugcu

SEQ ID NO: 2838315 - RNA, 14 nt, Human
ucacucggcacccu

SEQ ID NO: 2838316 - RNA, 17 nt, Human
ucacucggcacccugca

SEQ ID NO: 2838317 - RNA, 19 nt, Human
ucacgggcaugggcacucc

SEQ ID NO: 2838318 - RNA, 18 nt, Human
ucacuccuaccugguaau

SEQ ID NO: 2838319 - RNA, 20 nt, Human
ucacgggcaugggcacuccc

SEQ ID NO: 2838320 - RNA, 20 nt, Human
ucacggcucacugcagccuc

SEQ ID NO: 2838321 - RNA, 15 nt, Human
ucacggcucacugca

SEQ ID NO: 2838322 - RNA, 13 nt, Human
ucacggcucacug

SEQ ID NO: 2838323 - RNA, 18 nt, Human
ucacggagauaugaagag

SEQ ID NO: 2838324 - RNA, 14 nt, Human
ucacgcuucacagu

SEQ ID NO: 2838325 - RNA, 15 nt, Human
ucacgcuucacagug

SEQ ID NO: 2838326 - RNA, 15 nt, Human
ucacaggcaggucca

SEQ ID NO: 2838327 - RNA, 12 nt, Human
ucacaggcaggu

SEQ ID NO: 2838328 - RNA, 19 nt, Human
ucacaggcagguccagggu

SEQ ID NO: 2838329 - RNA, 15 nt, Human
ucaccuagaaauuga

SEQ ID NO: 2838330 - RNA, 13 nt, Human
ucaccuagagcca

SEQ ID NO: 2838331 - RNA, 14 nt, Human
ucaccuagagccag

SEQ ID NO: 2838332 - RNA, 15 nt, Human
ucaccuagagccaga

SEQ ID NO: 2838333 - RNA, 18 nt, Human
ucaccuagagccagacca

SEQ ID NO: 2838334 - RNA, 14 nt, Human
ucacagggccaacu

SEQ ID NO: 2838335 - RNA, 22 nt, Human
ucacagggccaacuugagggcc

SEQ ID NO: 2838336 - RNA, 20 nt, Human
ucacagggcaugccccggcc

SEQ ID NO: 2838337 - RNA, 12 nt, Human
ucacagggccaa

SEQ ID NO: 2838338 - RNA, 23 nt, Human
ucacagggacugaaaaccucucc

SEQ ID NO: 2838339 - RNA, 15 nt, Human
ucacagggcagagcc

SEQ ID NO: 2838340 - RNA, 12 nt, Human
ucacaggcuaau

SEQ ID NO: 2838341 - RNA, 19 nt, Human
ucacagggcagagccggga

SEQ ID NO: 2838342 - RNA, 18 nt, Human
ucacagggcagagccggg

SEQ ID NO: 2838343 - RNA, 13 nt, Human
ucaccuuuauucu

SEQ ID NO: 2838344 - RNA, 22 nt, Human
ucaccuucguuuacuaugccug

SEQ ID NO: 2838345 - RNA, 18 nt, Human
ucaccucaggccaggugc

SEQ ID NO: 2838346 - RNA, 12 nt, Human
ucaccucagccu

SEQ ID NO: 2838347 - RNA, 13 nt, Human
ucaccucagccuc

SEQ ID NO: 2838348 - RNA, 20 nt, Human
ucaccuauuuccauucaaca

SEQ ID NO: 2838349 - RNA, 12 nt, Human
ucaccuuuguag

SEQ ID NO: 2838350 - RNA, 15 nt, Human
ucaccuuuguagcac

SEQ ID NO: 2838351 - RNA, 19 nt, Human
ucaccuuuguagcacucag

SEQ ID NO: 2838352 - RNA, 20 nt, Human
ucaccuuguguguuccaagu

SEQ ID NO: 2838353 - RNA, 18 nt, Human
ucaccuuguuucucaacu

SEQ ID NO: 2838354 - RNA, 15 nt, Human
ucaccuuuacuuuag

SEQ ID NO: 2838355 - RNA, 17 nt, Human
ucaccuuuacuuuagaa

SEQ ID NO: 2838356 - RNA, 14 nt, Human
ucacgcaccugggu

SEQ ID NO: 2838357 - RNA, 18 nt, Human
ucacgauugucaucagga

SEQ ID NO: 2838358 - RNA, 21 nt, Human
ucacgauugucaucaggagaa

SEQ ID NO: 2838359 - RNA, 15 nt, Human
ucacgcaacuugaaa

SEQ ID NO: 2838360 - RNA, 16 nt, Human
ucacgcaacuugaaau

SEQ ID NO: 2838361 - RNA, 13 nt, Human
ucacgacgcugca

SEQ ID NO: 2838362 - RNA, 16 nt, Human
ucacgacgcugcagag

SEQ ID NO: 2838363 - RNA, 14 nt, Human
ucaccuuuguguau

SEQ ID NO: 2838364 - RNA, 16 nt, Human
ucaccuuuguguauuu

SEQ ID NO: 2838365 - RNA, 17 nt, Human
ucaccuuuguguauuuu

SEQ ID NO: 2838366 - RNA, 14 nt, Human
ucaccuuuucuugc

SEQ ID NO: 2838367 - RNA, 17 nt, Human
ucaccuuuucuugccug

SEQ ID NO: 2838368 - RNA, 14 nt, Human
ucacgccacugcac

SEQ ID NO: 2838369 - RNA, 13 nt, Human
ucacgccacugca

SEQ ID NO: 2838370 - RNA, 16 nt, Human
ucacgccacugcacua

SEQ ID NO: 2838371 - RNA, 22 nt, Human
ucacgccacugcacuccagccu

SEQ ID NO: 2838372 - RNA, 21 nt, Human
ucacgccuaugaucccagcac

SEQ ID NO: 2838373 - RNA, 19 nt, Human
ucacgccuaugaucccagc

SEQ ID NO: 2838374 - RNA, 16 nt, Human
ucccaaauccuuccca

SEQ ID NO: 2838375 - RNA, 19 nt, Human
ucccaaauccuucccaagu

SEQ ID NO: 2838376 - RNA, 19 nt, Human
ucccaaauuugauugauuu

SEQ ID NO: 2838377 - RNA, 17 nt, Human
ucccaaauuugauugau

SEQ ID NO: 2838378 - RNA, 22 nt, Human
uccauccauaaauccaguucua

SEQ ID NO: 2838379 - RNA, 19 nt, Human
ucccaacaacauccauguc

SEQ ID NO: 2838380 - RNA, 22 nt, Human
ucccaaauuugauugauuugaa

SEQ ID NO: 2838381 - RNA, 20 nt, Human
ucccaaauuugauugauuug

SEQ ID NO: 2838382 - RNA, 15 nt, Human
ucccaagcucugcuc

SEQ ID NO: 2838383 - RNA, 14 nt, Human
ucccaagcucugcu

SEQ ID NO: 2838384 - RNA, 13 nt, Human
ucccaagcucugc

SEQ ID NO: 2838385 - RNA, 12 nt, Human
ucccaagcucug

SEQ ID NO: 2838386 - RNA, 17 nt, Human
ucccaagcucugcuccu

SEQ ID NO: 2838387 - RNA, 20 nt, Human
ucccaagcuaucuaaaguuu

SEQ ID NO: 2838388 - RNA, 13 nt, Human
ucccaagcuggcu

SEQ ID NO: 2838389 - RNA, 15 nt, Human
ucccaagcuggcugg

SEQ ID NO: 2838390 - RNA, 16 nt, Human
ucccaagcuggcuggg

SEQ ID NO: 2838391 - RNA, 17 nt, Human
ucccaagcuggcugggg

SEQ ID NO: 2838392 - RNA, 13 nt, Human
ucccaaggaaagc

SEQ ID NO: 2838393 - RNA, 12 nt, Human
ucccaaggaaag

SEQ ID NO: 2838394 - RNA, 22 nt, Human
ucccaaggaaagccccagcacu

SEQ ID NO: 2838395 - RNA, 16 nt, Human
ucccaaggagaacaaa

SEQ ID NO: 2838396 - RNA, 17 nt, Human
ucccaaggagaacaaau

SEQ ID NO: 2838397 - RNA, 18 nt, Human
ucccaaggagaacaaaua

SEQ ID NO: 2838398 - RNA, 19 nt, Human
ucccaaggagaacaaauau

SEQ ID NO: 2838399 - RNA, 18 nt, Human
ucccaaggcucugagcaa

SEQ ID NO: 2838400 - RNA, 21 nt, Human
ucccaaagugcugggauuaca

SEQ ID NO: 2838401 - RNA, 14 nt, Human
uccauguacuuguu

SEQ ID NO: 2838402 - RNA, 17 nt, Human
uccauguacuuguuugc

SEQ ID NO: 2838403 - RNA, 18 nt, Human
uccauguacuuguuugca

SEQ ID NO: 2838404 - RNA, 23 nt, Human
uccagcucaccagccccagugcc

SEQ ID NO: 2838405 - RNA, 15 nt, Human
uccagcucagaaccc

SEQ ID NO: 2838406 - RNA, 16 nt, Human
uccagcucagaaccca

SEQ ID NO: 2838407 - RNA, 17 nt, Human
uccagcucagaacccag

SEQ ID NO: 2838408 - RNA, 18 nt, Human
uccagcucagaacccagg

SEQ ID NO: 2838409 - RNA, 19 nt, Human
uccagcucagaacccaggg

SEQ ID NO: 2838410 - RNA, 20 nt, Human
uccagcucagaacccagggc

SEQ ID NO: 2838411 - RNA, 21 nt, Human
uccagcucagaacccagggcu

SEQ ID NO: 2838412 - RNA, 16 nt, Human
uccagcucauucauuu

SEQ ID NO: 2838413 - RNA, 18 nt, Human
uccagcucauucauuuua

SEQ ID NO: 2838414 - RNA, 19 nt, Human
uccagcucauucauuuuau

SEQ ID NO: 2838415 - RNA, 20 nt, Human
uccagcucauucauuuuaua

SEQ ID NO: 2838416 - RNA, 18 nt, Human
uccagcuccucauccagg

SEQ ID NO: 2838417 - RNA, 11 nt, Human
uccauccaauc

SEQ ID NO: 2838418 - RNA, 16 nt, Human
uccauccaggccauuc

SEQ ID NO: 2838419 - RNA, 16 nt, Human
uccauccagcuugcca

SEQ ID NO: 2838420 - RNA, 18 nt, Human
uccauccagcuugccaga

SEQ ID NO: 2838421 - RNA, 14 nt, Human
uccaucccuacccc

SEQ ID NO: 2838422 - RNA, 15 nt, Human
uccaucccaggacac

SEQ ID NO: 2838423 - RNA, 21 nt, Human
uccaucccaggacaccacacc

SEQ ID NO: 2838424 - RNA, 22 nt, Human
uccaucccaggacaccacaccc

SEQ ID NO: 2838425 - RNA, 17 nt, Human
uccaucccaacagccau

SEQ ID NO: 2838426 - RNA, 19 nt, Human
uccaucccaacagccaugc

SEQ ID NO: 2838427 - RNA, 18 nt, Human
uccaucccaaccagugcc

SEQ ID NO: 2838428 - RNA, 19 nt, Human
uccaucccaaccagugcca

SEQ ID NO: 2838429 - RNA, 21 nt, Human
uccaucccaaccagugccaag

SEQ ID NO: 2838430 - RNA, 22 nt, Human
uccaucccaaccagugccaagg

SEQ ID NO: 2838431 - RNA, 23 nt, Human
uccaucccaaccagugccaagga

SEQ ID NO: 2838432 - RNA, 19 nt, Human
uccccacuuguccgcuggg

SEQ ID NO: 2838433 - RNA, 19 nt, Human
uccccacuugcagcccugu

SEQ ID NO: 2838434 - RNA, 22 nt, Human
ucccauugcaucaccucuguaa

SEQ ID NO: 2838435 - RNA, 17 nt, Human
uccccagaaaggagacu

SEQ ID NO: 2838436 - RNA, 21 nt, Human
uccccacuuguccgcugggug

SEQ ID NO: 2838437 - RNA, 13 nt, Human
ucccauguagccc

SEQ ID NO: 2838438 - RNA, 15 nt, Human
ucccauguagccccc

SEQ ID NO: 2838439 - RNA, 21 nt, Human
ucccauguagcccccuggccu

SEQ ID NO: 2838440 - RNA, 13 nt, Human
ucccauucuaugu

SEQ ID NO: 2838441 - RNA, 14 nt, Human
ucccauucuaugug

SEQ ID NO: 2838442 - RNA, 15 nt, Human
ucccauucuaugugu

SEQ ID NO: 2838443 - RNA, 18 nt, Human
ucccauucuaugugucau

SEQ ID NO: 2838444 - RNA, 16 nt, Human
ucccaggcugagccuc

SEQ ID NO: 2838445 - RNA, 21 nt, Human
ucccaggcucucaacagggga

SEQ ID NO: 2838446 - RNA, 22 nt, Human
ucccaggaugagcaucccagga

SEQ ID NO: 2838447 - RNA, 16 nt, Human
ucccaucuccacuguu

SEQ ID NO: 2838448 - RNA, 21 nt, Human
ucccauggacacuccagugcc

SEQ ID NO: 2838449 - RNA, 22 nt, Human
ucccauggacacuccagugcca

SEQ ID NO: 2838450 - RNA, 12 nt, Human
ucccaugcccug

SEQ ID NO: 2838451 - RNA, 14 nt, Human
ucccauggacacuc

SEQ ID NO: 2838452 - RNA, 15 nt, Human
ucccauggacacucc

SEQ ID NO: 2838453 - RNA, 20 nt, Human
ucccauggacacuccagugc

SEQ ID NO: 2838454 - RNA, 24 nt, Human
ucccaggaugagcaucccaggauc

SEQ ID NO: 2838455 - RNA, 15 nt, Human
ucccaggaugcuggg

SEQ ID NO: 2838456 - RNA, 18 nt, Human
ucccaggaugcugggugg

SEQ ID NO: 2838457 - RNA, 20 nt, Human
ucccaggcgccccuuccccc

SEQ ID NO: 2838458 - RNA, 18 nt, Human
ucccaggcgccccuuccc

SEQ ID NO: 2838459 - RNA, 21 nt, Human
ucccaggcgccccuucccccu

SEQ ID NO: 2838460 - RNA, 15 nt, Human
ucccaggcugagccu

SEQ ID NO: 2838461 - RNA, 22 nt, Human
ucccaggagacaguucaagaaa

SEQ ID NO: 2838462 - RNA, 16 nt, Human
ucccaggagacaguuc

SEQ ID NO: 2838463 - RNA, 16 nt, Human
ucccaggaugagcauc

SEQ ID NO: 2838464 - RNA, 15 nt, Human
ucccaccucagccuc

SEQ ID NO: 2838465 - RNA, 14 nt, Human
ucccaccucagccu

SEQ ID NO: 2838466 - RNA, 15 nt, Human
ucccaggagacaguu

SEQ ID NO: 2838467 - RNA, 13 nt, Human
ucccaccucagcc

SEQ ID NO: 2838468 - RNA, 18 nt, Human
ucccaaguaagaggcugg

SEQ ID NO: 2838469 - RNA, 23 nt, Human
ucccaaguaagaggcuggaguug

SEQ ID NO: 2838470 - RNA, 18 nt, Human
ucccaaggaaagccccag

SEQ ID NO: 2838471 - RNA, 22 nt, Human
ucccaaggcucugagcaaaugu

SEQ ID NO: 2838472 - RNA, 18 nt, Human
ucccaagggauggugccc

SEQ ID NO: 2838473 - RNA, 21 nt, Human
ucccaagggauggugcccugu

SEQ ID NO: 2838474 - RNA, 15 nt, Human
ucccuacuuccugug

SEQ ID NO: 2838475 - RNA, 16 nt, Human
ucccuacuuccuguga

SEQ ID NO: 2838476 - RNA, 17 nt, Human
ucccuaccucaggcagg

SEQ ID NO: 2838477 - RNA, 15 nt, Human
ucccuaccucaggca

SEQ ID NO: 2838478 - RNA, 13 nt, Human
ucccuaccucagg

SEQ ID NO: 2838479 - RNA, 13 nt, Human
uccccuguuucaa

SEQ ID NO: 2838480 - RNA, 22 nt, Human
uccccuuccuaauuccacagcu

SEQ ID NO: 2838481 - RNA, 21 nt, Human
uccccuuccuaauuccacagc

SEQ ID NO: 2838482 - RNA, 22 nt, Human
ucccuaaggcaugugugaaaca

SEQ ID NO: 2838483 - RNA, 16 nt, Human
ucccuaagccagccug

SEQ ID NO: 2838484 - RNA, 17 nt, Human
ucccuaagccagccugg

SEQ ID NO: 2838485 - RNA, 18 nt, Human
ucccuaaagaaaaaaaau

SEQ ID NO: 2838486 - RNA, 15 nt, Human
ucccuaacacuuacc

SEQ ID NO: 2838487 - RNA, 16 nt, Human
ucccuaacacuuaccc

SEQ ID NO: 2838488 - RNA, 16 nt, Human
uccccuuccucacugc

SEQ ID NO: 2838489 - RNA, 13 nt, Human
ucccuaaacugua

SEQ ID NO: 2838490 - RNA, 19 nt, Human
ucccuaaaauacauuuaaa

SEQ ID NO: 2838491 - RNA, 24 nt, Human
uccccugcccugguccagggaagc

SEQ ID NO: 2838492 - RNA, 17 nt, Human
uccccugcccuggucca

SEQ ID NO: 2838493 - RNA, 15 nt, Human
uccccugcugcaggg

SEQ ID NO: 2838494 - RNA, 12 nt, Human
uccccugccuug

SEQ ID NO: 2838495 - RNA, 15 nt, Human
uccccugccuugcug

SEQ ID NO: 2838496 - RNA, 13 nt, Human
uccccugcuaccc

SEQ ID NO: 2838497 - RNA, 14 nt, Human
uccccugcuacccu

SEQ ID NO: 2838498 - RNA, 17 nt, Human
uccccugcugcaggggc

SEQ ID NO: 2838499 - RNA, 18 nt, Human
uccccugcugcaggggcu

SEQ ID NO: 2838500 - RNA, 21 nt, Human
uccccugcugcaggggcucug

SEQ ID NO: 2838501 - RNA, 23 nt, Human
uccccugcugcaggggcucugga

SEQ ID NO: 2838502 - RNA, 22 nt, Human
uccccugccccuuuacggacac

SEQ ID NO: 2838503 - RNA, 19 nt, Human
uccccugccccuuccuuua

SEQ ID NO: 2838504 - RNA, 15 nt, Human
uccccugcccugcug

SEQ ID NO: 2838505 - RNA, 12 nt, Human
uccccugcccug

SEQ ID NO: 2838506 - RNA, 15 nt, Human
uccccugcccugguc

SEQ ID NO: 2838507 - RNA, 13 nt, Human
uccccugcccugg

SEQ ID NO: 2838508 - RNA, 23 nt, Human
uccccugcccugcugccgccucc

SEQ ID NO: 2838509 - RNA, 16 nt, Human
uccccugcccugcugc

SEQ ID NO: 2838510 - RNA, 15 nt, Human
uccccuguucacucu

SEQ ID NO: 2838511 - RNA, 17 nt, Human
uccccuggacugggagg

SEQ ID NO: 2838512 - RNA, 19 nt, Human
uccccuggggacagcaagg

SEQ ID NO: 2838513 - RNA, 14 nt, Human
uccccuggggaccc

SEQ ID NO: 2838514 - RNA, 15 nt, Human
uccccuggggaccca

SEQ ID NO: 2838515 - RNA, 11 nt, Human
uccccugcuuc

SEQ ID NO: 2838516 - RNA, 14 nt, Human
uccccugcuucaga

SEQ ID NO: 2838517 - RNA, 15 nt, Human
uccccuggacuggga

SEQ ID NO: 2838518 - RNA, 16 nt, Human
uccccuggacugggag

SEQ ID NO: 2838519 - RNA, 14 nt, Human
ucccccuuuuuugu

SEQ ID NO: 2838520 - RNA, 19 nt, Human
ucccccuuuuuuguccccc

SEQ ID NO: 2838521 - RNA, 21 nt, Human
ucccccuuuuuugucccccaa

SEQ ID NO: 2838522 - RNA, 17 nt, Human
ucccccuugccacccca

SEQ ID NO: 2838523 - RNA, 23 nt, Human
ucccccuugccaccccacccucc

SEQ ID NO: 2838524 - RNA, 12 nt, Human
ucccccuugcca

SEQ ID NO: 2838525 - RNA, 13 nt, Human
ucccccuugccac

SEQ ID NO: 2838526 - RNA, 14 nt, Human
ucccccuugccacc

SEQ ID NO: 2838527 - RNA, 16 nt, Human
ucccccuugccacccc

SEQ ID NO: 2838528 - RNA, 18 nt, Human
uccccgacgcccacccaa

SEQ ID NO: 2838529 - RNA, 19 nt, Human
uccccgaaggugcuggagg

SEQ ID NO: 2838530 - RNA, 18 nt, Human
uccccgcagcccuggcag

SEQ ID NO: 2838531 - RNA, 21 nt, Human
uccccgcaccccccaagcugu

SEQ ID NO: 2838532 - RNA, 14 nt, Human
uccccgcacccccc

SEQ ID NO: 2838533 - RNA, 22 nt, Human
uccccgccuuccgccccuuccc

SEQ ID NO: 2838534 - RNA, 15 nt, Human
uccccgcuaaggaag

SEQ ID NO: 2838535 - RNA, 13 nt, Human
uccccugccauuu

SEQ ID NO: 2838536 - RNA, 23 nt, Human
uccccugcccccagaccuuuuau

SEQ ID NO: 2838537 - RNA, 13 nt, Human
ucccccaucuccc

SEQ ID NO: 2838538 - RNA, 15 nt, Human
ucccccaucucccac

SEQ ID NO: 2838539 - RNA, 17 nt, Human
ucccccaucucccaccc

SEQ ID NO: 2838540 - RNA, 15 nt, Human
ucccccauagccacc

SEQ ID NO: 2838541 - RNA, 14 nt, Human
ucccccauagccac

SEQ ID NO: 2838542 - RNA, 12 nt, Human
ucccccauagcc

SEQ ID NO: 2838543 - RNA, 22 nt, Human
uccccagcgucccagucucugg

SEQ ID NO: 2838544 - RNA, 13 nt, Human
ucccccucuggcu

SEQ ID NO: 2838545 - RNA, 12 nt, Human
ucccccugcagc

SEQ ID NO: 2838546 - RNA, 13 nt, Human
ucccccugcagcu

SEQ ID NO: 2838547 - RNA, 14 nt, Human
ucccccugcagcua

SEQ ID NO: 2838548 - RNA, 13 nt, Human
ucccccugcccca

SEQ ID NO: 2838549 - RNA, 17 nt, Human
ucccccucccagggcca

SEQ ID NO: 2838550 - RNA, 15 nt, Human
ucccccuauccuugg

SEQ ID NO: 2838551 - RNA, 17 nt, Human
ucccccuauccuuggca

SEQ ID NO: 2838552 - RNA, 16 nt, Human
ucccccucagcaagcc

SEQ ID NO: 2838553 - RNA, 19 nt, Human
ucccccucccagggccagg

SEQ ID NO: 2838554 - RNA, 18 nt, Human
ucccccucccagggccag

SEQ ID NO: 2838555 - RNA, 20 nt, Human
uccccccuuuuuuuccuuuu

SEQ ID NO: 2838556 - RNA, 13 nt, Human
uccccccucccac

SEQ ID NO: 2838557 - RNA, 14 nt, Human
ucccccgccacucc

SEQ ID NO: 2838558 - RNA, 23 nt, Human
ucccccaucucgcucccucccag

SEQ ID NO: 2838559 - RNA, 17 nt, Human
ucccccaucucuucugg

SEQ ID NO: 2838560 - RNA, 13 nt, Human
uccaagauuccgg

SEQ ID NO: 2838561 - RNA, 15 nt, Human
uccaagauuccggau

SEQ ID NO: 2838562 - RNA, 12 nt, Human
uccaagauucua

SEQ ID NO: 2838563 - RNA, 13 nt, Human
uccaagauucuag

SEQ ID NO: 2838564 - RNA, 14 nt, Human
uccaagauucuaga

SEQ ID NO: 2838565 - RNA, 15 nt, Human
uccaagauucuagau

SEQ ID NO: 2838566 - RNA, 16 nt, Human
uccaagauucuagaug

SEQ ID NO: 2838567 - RNA, 17 nt, Human
uccaagauucuagauga

SEQ ID NO: 2838568 - RNA, 16 nt, Human
uccaagagucuaaaga

SEQ ID NO: 2838569 - RNA, 17 nt, Human
uccaagagucuaaagau

SEQ ID NO: 2838570 - RNA, 16 nt, Human
uccaagagucugauga

SEQ ID NO: 2838571 - RNA, 18 nt, Human
uccaagagucuaaagaug

SEQ ID NO: 2838572 - RNA, 17 nt, Human
uccaagagucugaugau

SEQ ID NO: 2838573 - RNA, 14 nt, Human
uccaagaccagacu

SEQ ID NO: 2838574 - RNA, 22 nt, Human
uccaagaauccacauuucuaaa

SEQ ID NO: 2838575 - RNA, 23 nt, Human
uccaagaauccacauuucuaaaa

SEQ ID NO: 2838576 - RNA, 16 nt, Human
uccaagaauccacauu

SEQ ID NO: 2838577 - RNA, 19 nt, Human
uccaagaauccacauuucu

SEQ ID NO: 2838578 - RNA, 20 nt, Human
uccaagaauccacauuucua

SEQ ID NO: 2838579 - RNA, 21 nt, Human
uccaagaauccacauuucuaa

SEQ ID NO: 2838580 - RNA, 14 nt, Human
uccaagaauccaca

SEQ ID NO: 2838581 - RNA, 18 nt, Human
uccaagaauagcaucugu

SEQ ID NO: 2838582 - RNA, 19 nt, Human
uccaagaauagcaucugua

SEQ ID NO: 2838583 - RNA, 23 nt, Human
uccaagaauagcaucuguacaaa

SEQ ID NO: 2838584 - RNA, 19 nt, Human
uccaaaggaggcuggcagg

SEQ ID NO: 2838585 - RNA, 15 nt, Human
uccaaaggaggcugg

SEQ ID NO: 2838586 - RNA, 13 nt, Human
uccaaaggaggcu

SEQ ID NO: 2838587 - RNA, 13 nt, Human
uccaaagcuuuau

SEQ ID NO: 2838588 - RNA, 20 nt, Human
uccaaagcuuuauuaccagu

SEQ ID NO: 2838589 - RNA, 21 nt, Human
uccaaagcuuuauuaccagug

SEQ ID NO: 2838590 - RNA, 13 nt, Human
uccaaagcagggu

SEQ ID NO: 2838591 - RNA, 19 nt, Human
ucauuucuccagauuaucu

SEQ ID NO: 2838592 - RNA, 16 nt, Human
ucauucacuagcuuug

SEQ ID NO: 2838593 - RNA, 16 nt, Human
ucauucacuucucuua

SEQ ID NO: 2838594 - RNA, 19 nt, Human
ucauucauggaccacuguu

SEQ ID NO: 2838595 - RNA, 20 nt, Human
ucauucauggaccacuguuu

SEQ ID NO: 2838596 - RNA, 14 nt, Human
ucauucauuuuaua

SEQ ID NO: 2838597 - RNA, 19 nt, Human
ucauucauuuuauauugaa

SEQ ID NO: 2838598 - RNA, 23 nt, Human
ucauuucucacuguguacauaau

SEQ ID NO: 2838599 - RNA, 24 nt, Human
ucauuucucacuguguacauaaug

SEQ ID NO: 2838600 - RNA, 23 nt, Human
uccaaagaguagaauugcauuga

SEQ ID NO: 2838601 - RNA, 22 nt, Human
uccaaagaguagaauugcauug

SEQ ID NO: 2838602 - RNA, 20 nt, Human
uccaaaagcaaccacaaacc

SEQ ID NO: 2838603 - RNA, 19 nt, Human
uccaaacuaccuuccaguu

SEQ ID NO: 2838604 - RNA, 20 nt, Human
uccacccuuggccugucuca

SEQ ID NO: 2838605 - RNA, 14 nt, Human
uccaccgcugcucc

SEQ ID NO: 2838606 - RNA, 15 nt, Human
uccaccgcugcucca

SEQ ID NO: 2838607 - RNA, 18 nt, Human
uccaccucgacguuuaca

SEQ ID NO: 2838608 - RNA, 18 nt, Human
uccaauuuucuggaauac

SEQ ID NO: 2838609 - RNA, 18 nt, Human
uccaagauucuagaugau

SEQ ID NO: 2838610 - RNA, 20 nt, Human
uccaagauucuagaugauua

SEQ ID NO: 2838611 - RNA, 14 nt, Human
uccacaacacacag

SEQ ID NO: 2838612 - RNA, 22 nt, Human
uccaauuuucuggaauacauga

SEQ ID NO: 2838613 - RNA, 19 nt, Human
uccacccuuggccugucuc

SEQ ID NO: 2838614 - RNA, 17 nt, Human
uccacccuuggccuguc

SEQ ID NO: 2838615 - RNA, 16 nt, Human
uccacccuuggccugu

SEQ ID NO: 2838616 - RNA, 15 nt, Human
uccacccuuggccug

SEQ ID NO: 2838617 - RNA, 14 nt, Human
uccacccuuggccu

SEQ ID NO: 2838618 - RNA, 13 nt, Human
uccacccuuggcc

SEQ ID NO: 2838619 - RNA, 19 nt, Human
uccagaagccucuggcuag

SEQ ID NO: 2838620 - RNA, 18 nt, Human
uccagaagccucuggcua

SEQ ID NO: 2838621 - RNA, 17 nt, Human
uccagaagccucuggcu

SEQ ID NO: 2838622 - RNA, 14 nt, Human
uccagcagucacuu

SEQ ID NO: 2838623 - RNA, 20 nt, Human
uccagcagucacuucggcca

SEQ ID NO: 2838624 - RNA, 17 nt, Human
uccagcagucucugccu

SEQ ID NO: 2838625 - RNA, 18 nt, Human
uccagcagucucugccuu

SEQ ID NO: 2838626 - RNA, 19 nt, Human
uccagcagucucugccuug

SEQ ID NO: 2838627 - RNA, 20 nt, Human
uccagcagucucugccuugc

SEQ ID NO: 2838628 - RNA, 23 nt, Human
uccagcagucucugccuugccuu

SEQ ID NO: 2838629 - RNA, 18 nt, Human
uccaccucuucacccccc

SEQ ID NO: 2838630 - RNA, 14 nt, Human
uccacuucuuccuu

SEQ ID NO: 2838631 - RNA, 17 nt, Human
uccacuucuuccuuucu

SEQ ID NO: 2838632 - RNA, 18 nt, Human
uccacuucuuccuuucuc

SEQ ID NO: 2838633 - RNA, 20 nt, Human
uccacuucuuccuuucucuu

SEQ ID NO: 2838634 - RNA, 22 nt, Human
uccagaacucacuggggccuac

SEQ ID NO: 2838635 - RNA, 15 nt, Human
uccagaagaagagaa

SEQ ID NO: 2838636 - RNA, 17 nt, Human
uccagaagaagagaagc

SEQ ID NO: 2838637 - RNA, 18 nt, Human
uccagaagaagagaagcu

SEQ ID NO: 2838638 - RNA, 19 nt, Human
uccagaagaagagaagcug

SEQ ID NO: 2838639 - RNA, 20 nt, Human
uccagaagaagagaagcugc

SEQ ID NO: 2838640 - RNA, 21 nt, Human
uccagaagaagagaagcugcu

SEQ ID NO: 2838641 - RNA, 22 nt, Human
uccagaagaagagaagcugcug

SEQ ID NO: 2838642 - RNA, 23 nt, Human
uccagaagaagagaagcugcuga

SEQ ID NO: 2838643 - RNA, 16 nt, Human
uccagaagccucuggc

SEQ ID NO: 2838644 - RNA, 11 nt, Human
uccagaaaugg

SEQ ID NO: 2838645 - RNA, 23 nt, Human
uccagaaaugucuaaaugcugaa

SEQ ID NO: 2838646 - RNA, 20 nt, Human
uccagaacacggcucacgcu

SEQ ID NO: 2838647 - RNA, 18 nt, Human
ucauguaaauacuguugg

SEQ ID NO: 2838648 - RNA, 20 nt, Human
ucauguaaauacuguuggug

SEQ ID NO: 2838649 - RNA, 14 nt, Human
ucauguaaacauac

SEQ ID NO: 2838650 - RNA, 22 nt, Human
ucauguaaacauaccaacaugu

SEQ ID NO: 2838651 - RNA, 22 nt, Human
ucaugguguaauaagacauaac

SEQ ID NO: 2838652 - RNA, 16 nt, Human
ucaugguguguuacac

SEQ ID NO: 2838653 - RNA, 16 nt, Human
ucauguaaagaaaugu

SEQ ID NO: 2838654 - RNA, 19 nt, Human
ucauguaaagaaaugucuu

SEQ ID NO: 2838655 - RNA, 22 nt, Human
ucauguaaagaaaugucuuaau

SEQ ID NO: 2838656 - RNA, 18 nt, Human
ucaugccuggcuucgcaa

SEQ ID NO: 2838657 - RNA, 13 nt, Human
ucaugccuggcuu

SEQ ID NO: 2838658 - RNA, 23 nt, Human
ucaugccuggaagcuuugucccc

SEQ ID NO: 2838659 - RNA, 15 nt, Human
ucaugccuggcuucg

SEQ ID NO: 2838660 - RNA, 17 nt, Human
ucaugccuggcuucgca

SEQ ID NO: 2838661 - RNA, 20 nt, Human
ucaugguguaauaagacaua

SEQ ID NO: 2838662 - RNA, 21 nt, Human
ucaugguguaauaagacauaa

SEQ ID NO: 2838663 - RNA, 18 nt, Human
ucaugcuacccagccauu

SEQ ID NO: 2838664 - RNA, 15 nt, Human
ucaugcuaucucugu

SEQ ID NO: 2838665 - RNA, 17 nt, Human
ucaugcccggucccacc

SEQ ID NO: 2838666 - RNA, 21 nt, Human
ucauaguaacuucuuauggaa

SEQ ID NO: 2838667 - RNA, 18 nt, Human
ucauaguaacuucuuaug

SEQ ID NO: 2838668 - RNA, 16 nt, Human
ucauaguaacuucuua

SEQ ID NO: 2838669 - RNA, 15 nt, Human
ucauaguaacuucuu

SEQ ID NO: 2838670 - RNA, 14 nt, Human
ucauaguaacuucu

SEQ ID NO: 2838671 - RNA, 16 nt, Human
ucauagguauuucaaa

SEQ ID NO: 2838672 - RNA, 16 nt, Human
ucauagguugccaaua

SEQ ID NO: 2838673 - RNA, 20 nt, Human
ucauagguugccaauaauac

SEQ ID NO: 2838674 - RNA, 17 nt, Human
ucaucuguuuuucuuuu

SEQ ID NO: 2838675 - RNA, 19 nt, Human
ucaucugugugaaaauggg

SEQ ID NO: 2838676 - RNA, 12 nt, Human
ucaucuguguga

SEQ ID NO: 2838677 - RNA, 14 nt, Human
ucaucugugugaaa

SEQ ID NO: 2838678 - RNA, 17 nt, Human
ucaucugugugaaaaug

SEQ ID NO: 2838679 - RNA, 15 nt, Human
ucaucugucaagugg

SEQ ID NO: 2838680 - RNA, 13 nt, Human
ucaucugaagggg

SEQ ID NO: 2838681 - RNA, 23 nt, Human
ucaucugaaggggcaaauucuuu

SEQ ID NO: 2838682 - RNA, 20 nt, Human
ucaucugaauuugcccuggg

SEQ ID NO: 2838683 - RNA, 21 nt, Human
ucaucugaauuugcccuggga

SEQ ID NO: 2838684 - RNA, 14 nt, Human
ucaucucuguccca

SEQ ID NO: 2838685 - RNA, 21 nt, Human
ucagugguccacaucccggga

SEQ ID NO: 2838686 - RNA, 16 nt, Human
ucaguguccaaagcag

SEQ ID NO: 2838687 - RNA, 24 nt, Human
ucagucugauucccaagcucugcu

SEQ ID NO: 2838688 - RNA, 21 nt, Human
ucagcagccgccuuaagcuga

SEQ ID NO: 2838689 - RNA, 22 nt, Human
ucagcagccgccuuaagcugau

SEQ ID NO: 2838690 - RNA, 23 nt, Human
ucagcagccgccuuaagcugauc

SEQ ID NO: 2838691 - RNA, 14 nt, Human
ucagcagcuagaaa

SEQ ID NO: 2838692 - RNA, 17 nt, Human
ucagcagcuagaaaaca

SEQ ID NO: 2838693 - RNA, 19 nt, Human
ucagucuggugggaggacg

SEQ ID NO: 2838694 - RNA, 16 nt, Human
ucaguggggcucucug

SEQ ID NO: 2838695 - RNA, 17 nt, Human
ucaguggggcucucuga

SEQ ID NO: 2838696 - RNA, 18 nt, Human
ucaguggggcucucugag

SEQ ID NO: 2838697 - RNA, 19 nt, Human
ucaguggggcucucugagu

SEQ ID NO: 2838698 - RNA, 20 nt, Human
ucaguggggcccauggaugu

SEQ ID NO: 2838699 - RNA, 13 nt, Human
ucagucugguggg

SEQ ID NO: 2838700 - RNA, 16 nt, Human
ucagucuggugggagg

SEQ ID NO: 2838701 - RNA, 17 nt, Human
ucagucuggugggagga

SEQ ID NO: 2838702 - RNA, 12 nt, Human
ucagucuugccu

SEQ ID NO: 2838703 - RNA, 13 nt, Human
ucagucuugccuu

SEQ ID NO: 2838704 - RNA, 20 nt, Human
ucagucuugccuuacacaaa

SEQ ID NO: 2838705 - RNA, 18 nt, Human
ucauaauuccuacagcac

SEQ ID NO: 2838706 - RNA, 20 nt, Human
ucauaauuccuacagcacua

SEQ ID NO: 2838707 - RNA, 23 nt, Human
ucauaauuccuacagcacuacug

SEQ ID NO: 2838708 - RNA, 12 nt, Human
ucauaauggccu

SEQ ID NO: 2838709 - RNA, 13 nt, Human
ucauaauggccug

SEQ ID NO: 2838710 - RNA, 19 nt, Human
ucauacacuaaccaaaucu

SEQ ID NO: 2838711 - RNA, 16 nt, Human
ucaguugguugugucu

SEQ ID NO: 2838712 - RNA, 17 nt, Human
ucaguugguugugucuu

SEQ ID NO: 2838713 - RNA, 18 nt, Human
ucaguugguugugucuuu

SEQ ID NO: 2838714 - RNA, 19 nt, Human
ucaguugguugugucuuuu

SEQ ID NO: 2838715 - RNA, 15 nt, Human
ucaguugugacuaac

SEQ ID NO: 2838716 - RNA, 13 nt, Human
ucaguugugcagc

SEQ ID NO: 2838717 - RNA, 14 nt, Human
ucaguuggcugacu

SEQ ID NO: 2838718 - RNA, 16 nt, Human
ucaguugcuaaacacu

SEQ ID NO: 2838719 - RNA, 17 nt, Human
ucaguugcuaaacacug

SEQ ID NO: 2838720 - RNA, 18 nt, Human
ucaguugcuaaacacugc

SEQ ID NO: 2838721 - RNA, 22 nt, Human
ucaguugcuaaacacugcgcuu

SEQ ID NO: 2838722 - RNA, 12 nt, Human
ucaguuccaaga

SEQ ID NO: 2838723 - RNA, 20 nt, Human
ucaguucagaaucacuucug

SEQ ID NO: 2838724 - RNA, 15 nt, Human
ucaguuacucuucag

SEQ ID NO: 2838725 - RNA, 18 nt, Human
ucaguuagagcugacaca

SEQ ID NO: 2838726 - RNA, 22 nt, Human
ucaguuagagcugacacaaacc

SEQ ID NO: 2838727 - RNA, 13 nt, Human
ucaguuauucauu

SEQ ID NO: 2838728 - RNA, 16 nt, Human
ucaguuauucauucug

SEQ ID NO: 2838729 - RNA, 15 nt, Human
ucaguuauuggugga

SEQ ID NO: 2838730 - RNA, 17 nt, Human
ucaguuauugguggaau

SEQ ID NO: 2838731 - RNA, 17 nt, Human
ucucuucagacucucag

SEQ ID NO: 2838732 - RNA, 19 nt, Human
ucucuucagacucucagcc

SEQ ID NO: 2838733 - RNA, 22 nt, Human
ucucuucagacucucagcccag

SEQ ID NO: 2838734 - RNA, 14 nt, Human
ucucuucauacuuu

SEQ ID NO: 2838735 - RNA, 17 nt, Human
ucucuucccugcgccug

SEQ ID NO: 2838736 - RNA, 12 nt, Human
ucucuucccuuu

SEQ ID NO: 2838737 - RNA, 19 nt, Human
ucucuucccuuuccccagc

SEQ ID NO: 2838738 - RNA, 23 nt, Human
ucucuucccuuuccccagcauca

SEQ ID NO: 2838739 - RNA, 18 nt, Human
ucucugcaccguacugug

SEQ ID NO: 2838740 - RNA, 11 nt, Human
ucucugcaccc

SEQ ID NO: 2838741 - RNA, 12 nt, Human
ucucugcagcug

SEQ ID NO: 2838742 - RNA, 13 nt, Human
ucucugcagcugc

SEQ ID NO: 2838743 - RNA, 14 nt, Human
ucucugcagcugcc

SEQ ID NO: 2838744 - RNA, 15 nt, Human
ucucugcagcugccg

SEQ ID NO: 2838745 - RNA, 16 nt, Human
ucucugcagcugccgg

SEQ ID NO: 2838746 - RNA, 13 nt, Human
ucucuucucccag

SEQ ID NO: 2838747 - RNA, 14 nt, Human
ucucuucucccaga

SEQ ID NO: 2838748 - RNA, 16 nt, Human
ucucuucucccagaau

SEQ ID NO: 2838749 - RNA, 21 nt, Human
ucucuucucccagaaucccag

SEQ ID NO: 2838750 - RNA, 11 nt, Human
ucucuucucca

SEQ ID NO: 2838751 - RNA, 11 nt, Human
ucucuuccugu

SEQ ID NO: 2838752 - RNA, 11 nt, Human
ucucuuccugc

SEQ ID NO: 2838753 - RNA, 13 nt, Human
ucucuuccugccc

SEQ ID NO: 2838754 - RNA, 14 nt, Human
ucucuuccugcccc

SEQ ID NO: 2838755 - RNA, 15 nt, Human
ucucuuccugccccu

SEQ ID NO: 2838756 - RNA, 16 nt, Human
ucucuuccugccccuc

SEQ ID NO: 2838757 - RNA, 18 nt, Human
ucucuuccugccccucuu

SEQ ID NO: 2838758 - RNA, 22 nt, Human
ucucuuccugccccucuuucuc

SEQ ID NO: 2838759 - RNA, 13 nt, Human
ucucuucuccacu

SEQ ID NO: 2838760 - RNA, 14 nt, Human
ucucuucuccacug

SEQ ID NO: 2838761 - RNA, 15 nt, Human
ucucuucuccacugg

SEQ ID NO: 2838762 - RNA, 16 nt, Human
ucucuucuccacugga

SEQ ID NO: 2838763 - RNA, 19 nt, Human
ucugaaaguuacccacuga

SEQ ID NO: 2838764 - RNA, 15 nt, Human
ucugaaaguuguaca

SEQ ID NO: 2838765 - RNA, 17 nt, Human
ucugaaaguuguacaug

SEQ ID NO: 2838766 - RNA, 21 nt, Human
ucugaaaguuguacaugaaau

SEQ ID NO: 2838767 - RNA, 22 nt, Human
ucugaaaauguuguuaugcuau

SEQ ID NO: 2838768 - RNA, 14 nt, Human
ucugaaaugugaua

SEQ ID NO: 2838769 - RNA, 18 nt, Human
ucugaaauaggaaacaag

SEQ ID NO: 2838770 - RNA, 17 nt, Human
ucugaaauaggaaacaa

SEQ ID NO: 2838771 - RNA, 20 nt, Human
ucugaaauaggaaacaagug

SEQ ID NO: 2838772 - RNA, 14 nt, Human
ucugaaaugaaaca

SEQ ID NO: 2838773 - RNA, 14 nt, Human
ucugaaaucuccuu

SEQ ID NO: 2838774 - RNA, 12 nt, Human
ucugaaauucua

SEQ ID NO: 2838775 - RNA, 14 nt, Human
ucugaaauucuaaa

SEQ ID NO: 2838776 - RNA, 21 nt, Human
ucugaaaugugauaaguucuu

SEQ ID NO: 2838777 - RNA, 14 nt, Human
ucugaacuggagcc

SEQ ID NO: 2838778 - RNA, 15 nt, Human
ucugaacuggagcca

SEQ ID NO: 2838779 - RNA, 16 nt, Human
ucucuuuucaaaacau

SEQ ID NO: 2838780 - RNA, 20 nt, Human
ucucuuuuauauuuguagga

SEQ ID NO: 2838781 - RNA, 19 nt, Human
ucucuuuuaucuguuuaaa

SEQ ID NO: 2838782 - RNA, 15 nt, Human
ucucuuuucaaaaca

SEQ ID NO: 2838783 - RNA, 17 nt, Human
ucucuuuguucuaaaga

SEQ ID NO: 2838784 - RNA, 16 nt, Human
ucucuuuguggggcuu

SEQ ID NO: 2838785 - RNA, 20 nt, Human
ucucuuuguggggcuuggcg

SEQ ID NO: 2838786 - RNA, 21 nt, Human
ucucuuuguggggcuuggcgu

SEQ ID NO: 2838787 - RNA, 13 nt, Human
ucucuuuuucagu

SEQ ID NO: 2838788 - RNA, 17 nt, Human
ucucuuuucucuuuuua

SEQ ID NO: 2838789 - RNA, 17 nt, Human
ucucuuuucuguacuuc

SEQ ID NO: 2838790 - RNA, 13 nt, Human
ucucuuuucucuu

SEQ ID NO: 2838791 - RNA, 21 nt, Human
ucucuuuuccuguuguauuga

SEQ ID NO: 2838792 - RNA, 11 nt, Human
ucucuuuucua

SEQ ID NO: 2838793 - RNA, 14 nt, Human
ucucuuuucuaguu

SEQ ID NO: 2838794 - RNA, 23 nt, Human
ucugaggacacuaaccacgcugg

SEQ ID NO: 2838795 - RNA, 20 nt, Human
ucugaggacacuaaccacgc

SEQ ID NO: 2838796 - RNA, 17 nt, Human
ucugaggaauccagacc

SEQ ID NO: 2838797 - RNA, 16 nt, Human
ucugaggaauccagac

SEQ ID NO: 2838798 - RNA, 15 nt, Human
ucugagcugagccag

SEQ ID NO: 2838799 - RNA, 16 nt, Human
ucugagcugagccagg

SEQ ID NO: 2838800 - RNA, 17 nt, Human
ucugagcugagccaggc

SEQ ID NO: 2838801 - RNA, 18 nt, Human
ucugagcugagccaggcu

SEQ ID NO: 2838802 - RNA, 15 nt, Human
ucugagccacagcag

SEQ ID NO: 2838803 - RNA, 19 nt, Human
ucugagccacagcagcauu

SEQ ID NO: 2838804 - RNA, 20 nt, Human
ucugagccacagcagcauuu

SEQ ID NO: 2838805 - RNA, 21 nt, Human
ucugagccacagcagcauuuu

SEQ ID NO: 2838806 - RNA, 22 nt, Human
ucugagcauuagauuucucauu

SEQ ID NO: 2838807 - RNA, 23 nt, Human
ucugauucccaagcucugcuccu

SEQ ID NO: 2838808 - RNA, 13 nt, Human
ucugauuggcuug

SEQ ID NO: 2838809 - RNA, 17 nt, Human
ucugauuggcuuguaga

SEQ ID NO: 2838810 - RNA, 21 nt, Human
ucugauuggcuuguagaauug

SEQ ID NO: 2838811 - RNA, 22 nt, Human
ucugauuggcuuguagaauugu

SEQ ID NO: 2838812 - RNA, 23 nt, Human
ucugauuggcuuguagaauuguu

SEQ ID NO: 2838813 - RNA, 16 nt, Human
ucugcaauuccccucu

SEQ ID NO: 2838814 - RNA, 23 nt, Human
ucugcaauucaaaaguuccaaga

SEQ ID NO: 2838815 - RNA, 18 nt, Human
ucugcaauuccccucugc

SEQ ID NO: 2838816 - RNA, 20 nt, Human
ucugcaauuccccucugcug

SEQ ID NO: 2838817 - RNA, 20 nt, Human
ucugcacaugucuuguacau

SEQ ID NO: 2838818 - RNA, 19 nt, Human
ucugcacaugucuuguaca

SEQ ID NO: 2838819 - RNA, 21 nt, Human
ucugcaauuccccucugcugc

SEQ ID NO: 2838820 - RNA, 22 nt, Human
ucugcaauuccccucugcugcu

SEQ ID NO: 2838821 - RNA, 21 nt, Human
ucugacccagugagauuacag

SEQ ID NO: 2838822 - RNA, 15 nt, Human
ucugagcacacuuua

SEQ ID NO: 2838823 - RNA, 12 nt, Human
ucugagcacaga

SEQ ID NO: 2838824 - RNA, 20 nt, Human
ucugagcauuagauuucuca

SEQ ID NO: 2838825 - RNA, 20 nt, Human
ucugaacuggagccaugggc

SEQ ID NO: 2838826 - RNA, 22 nt, Human
ucugacauuaugugguuuuaga

SEQ ID NO: 2838827 - RNA, 23 nt, Human
ucugacauuaugugguuuuagau

SEQ ID NO: 2838828 - RNA, 14 nt, Human
ucugacccagugag

SEQ ID NO: 2838829 - RNA, 15 nt, Human
ucugacccagugaga

SEQ ID NO: 2838830 - RNA, 13 nt, Human
ucucuagcacaau

SEQ ID NO: 2838831 - RNA, 19 nt, Human
ucuccuguaagccaaagaa

SEQ ID NO: 2838832 - RNA, 23 nt, Human
ucuccuguaagccaaagaaauga

SEQ ID NO: 2838833 - RNA, 15 nt, Human
ucucuaauucuauua

SEQ ID NO: 2838834 - RNA, 22 nt, Human
ucucuacuuuucccuguacuuu

SEQ ID NO: 2838835 - RNA, 21 nt, Human
ucucuacuccuaccucagccu

SEQ ID NO: 2838836 - RNA, 20 nt, Human
ucucuacuccuaccucagcc

SEQ ID NO: 2838837 - RNA, 19 nt, Human
ucucuacuccuaccucagc

SEQ ID NO: 2838838 - RNA, 19 nt, Human
ucucuaauuccauccauaa

SEQ ID NO: 2838839 - RNA, 13 nt, Human
ucucuaccagaua

SEQ ID NO: 2838840 - RNA, 14 nt, Human
ucucuacagugcca

SEQ ID NO: 2838841 - RNA, 14 nt, Human
ucucucuuaaaguu

SEQ ID NO: 2838842 - RNA, 16 nt, Human
ucucucuuaaaguugg

SEQ ID NO: 2838843 - RNA, 14 nt, Human
ucucucuucugcuc

SEQ ID NO: 2838844 - RNA, 11 nt, Human
ucucucuucug

SEQ ID NO: 2838845 - RNA, 20 nt, Human
ucucucuucugcuccacccu

SEQ ID NO: 2838846 - RNA, 19 nt, Human
ucucucuucugcuccaccc

SEQ ID NO: 2838847 - RNA, 17 nt, Human
ucucucuucugcuccac

SEQ ID NO: 2838848 - RNA, 16 nt, Human
ucucucuucugcucca

SEQ ID NO: 2838849 - RNA, 14 nt, Human
ucucucuucugccu

SEQ ID NO: 2838850 - RNA, 15 nt, Human
ucucugaacacaggc

SEQ ID NO: 2838851 - RNA, 16 nt, Human
ucucugaacacaggca

SEQ ID NO: 2838852 - RNA, 17 nt, Human
ucucugaacacaggcag

SEQ ID NO: 2838853 - RNA, 18 nt, Human
ucucugaacacaggcagc

SEQ ID NO: 2838854 - RNA, 19 nt, Human
ucucugaacacaggcagcu

SEQ ID NO: 2838855 - RNA, 20 nt, Human
ucucugaacacaggcagcuu

SEQ ID NO: 2838856 - RNA, 21 nt, Human
ucucugaacacaggcagcuuu

SEQ ID NO: 2838857 - RNA, 13 nt, Human
ucucugaggacac

SEQ ID NO: 2838858 - RNA, 20 nt, Human
ucucugauuuucaaagcuuu

SEQ ID NO: 2838859 - RNA, 19 nt, Human
ucucugauuuucaaagcuu

SEQ ID NO: 2838860 - RNA, 21 nt, Human
ucucucaaaagagaaaaacaa

SEQ ID NO: 2838861 - RNA, 13 nt, Human
ucucucaaaucug

SEQ ID NO: 2838862 - RNA, 14 nt, Human
ucucucaaauuguc

SEQ ID NO: 2838863 - RNA, 15 nt, Human
ucucucaaauuguca

SEQ ID NO: 2838864 - RNA, 17 nt, Human
ucucuauuuaauauuua

SEQ ID NO: 2838865 - RNA, 14 nt, Human
ucucuccuuugcug

SEQ ID NO: 2838866 - RNA, 11 nt, Human
ucucuccuuuu

SEQ ID NO: 2838867 - RNA, 12 nt, Human
ucucuccuuuuc

SEQ ID NO: 2838868 - RNA, 13 nt, Human
ucucuccuuuucu

SEQ ID NO: 2838869 - RNA, 17 nt, Human
ucucuccuuuucuuuug

SEQ ID NO: 2838870 - RNA, 23 nt, Human
ucucucggcuccccauguguccu

SEQ ID NO: 2838871 - RNA, 15 nt, Human
ucucucggcucccca

SEQ ID NO: 2838872 - RNA, 20 nt, Human
ucucucggcuccccaugugu

SEQ ID NO: 2838873 - RNA, 14 nt, Human
ucucuauuuaauau

SEQ ID NO: 2838874 - RNA, 15 nt, Human
ucucuauuuaauauu

SEQ ID NO: 2838875 - RNA, 20 nt, Human
ucucucuacuccuaccucag

SEQ ID NO: 2838876 - RNA, 19 nt, Human
ucucucuacuccuaccuca

SEQ ID NO: 2838877 - RNA, 15 nt, Human
ucucucuacagugcc

SEQ ID NO: 2838878 - RNA, 16 nt, Human
ucucucuucagacucu

SEQ ID NO: 2838879 - RNA, 18 nt, Human
ucucucuucagacucuca

SEQ ID NO: 2838880 - RNA, 20 nt, Human
ucucucuucagacucucagc

SEQ ID NO: 2838881 - RNA, 14 nt, Human
ucucucuucccuca

SEQ ID NO: 2838882 - RNA, 17 nt, Human
ucucucugugcugugga

SEQ ID NO: 2838883 - RNA, 21 nt, Human
ucucucugugcuguggaagca

SEQ ID NO: 2838884 - RNA, 22 nt, Human
ucucucuacuccuaccucagcc

SEQ ID NO: 2838885 - RNA, 19 nt, Human
ucucagugccaacuguggc

SEQ ID NO: 2838886 - RNA, 20 nt, Human
ucucagugccaacuguggcu

SEQ ID NO: 2838887 - RNA, 21 nt, Human
ucucagugccaacuguggcug

SEQ ID NO: 2838888 - RNA, 23 nt, Human
ucucagugccaacuguggcuggu

SEQ ID NO: 2838889 - RNA, 14 nt, Human
ucucagucaugcau

SEQ ID NO: 2838890 - RNA, 19 nt, Human
ucucagggucucugcugcc

SEQ ID NO: 2838891 - RNA, 22 nt, Human
ucucagguagaagguugacaca

SEQ ID NO: 2838892 - RNA, 15 nt, Human
ucucaggucccugca

SEQ ID NO: 2838893 - RNA, 12 nt, Human
ucucaguguuuu

SEQ ID NO: 2838894 - RNA, 15 nt, Human
ucucaguguuuugga

SEQ ID NO: 2838895 - RNA, 19 nt, Human
ucucaguguuuuggacucc

SEQ ID NO: 2838896 - RNA, 23 nt, Human
ucucaguguuuuggacuccaucu

SEQ ID NO: 2838897 - RNA, 21 nt, Human
ucucaguuaaaaugugaggaa

SEQ ID NO: 2838898 - RNA, 20 nt, Human
ucucaguggcuucaucuguc

SEQ ID NO: 2838899 - RNA, 18 nt, Human
ucucaguguugagccuuu

SEQ ID NO: 2838900 - RNA, 22 nt, Human
ucucaguguugagccuuuuccc

SEQ ID NO: 2838901 - RNA, 14 nt, Human
ucucccccugggcu

SEQ ID NO: 2838902 - RNA, 13 nt, Human
ucucccccugggc

SEQ ID NO: 2838903 - RNA, 12 nt, Human
ucucccccuggg

SEQ ID NO: 2838904 - RNA, 17 nt, Human
ucuccccugcccugcug

SEQ ID NO: 2838905 - RNA, 15 nt, Human
ucuccccugcccugc

SEQ ID NO: 2838906 - RNA, 14 nt, Human
ucuccccugcccug

SEQ ID NO: 2838907 - RNA, 13 nt, Human
ucucccgcugcug

SEQ ID NO: 2838908 - RNA, 14 nt, Human
ucucccgcugcugc

SEQ ID NO: 2838909 - RNA, 20 nt, Human
ucucccggagguuggguggg

SEQ ID NO: 2838910 - RNA, 15 nt, Human
ucucccgcugcugcu

SEQ ID NO: 2838911 - RNA, 16 nt, Human
ucucccgcugcugcug

SEQ ID NO: 2838912 - RNA, 20 nt, Human
ucuccugccugugcugugac

SEQ ID NO: 2838913 - RNA, 12 nt, Human
ucuccugccuuu

SEQ ID NO: 2838914 - RNA, 13 nt, Human
ucuccugccuuug

SEQ ID NO: 2838915 - RNA, 15 nt, Human
ucuccugccuuugcc

SEQ ID NO: 2838916 - RNA, 16 nt, Human
ucuccugccuuugccu

SEQ ID NO: 2838917 - RNA, 17 nt, Human
ucuccugccuuugccuc

SEQ ID NO: 2838918 - RNA, 19 nt, Human
ucuccugccucagccuccc

SEQ ID NO: 2838919 - RNA, 13 nt, Human
ucuccugccugua

SEQ ID NO: 2838920 - RNA, 20 nt, Human
ucuccugccuguagcaguga

SEQ ID NO: 2838921 - RNA, 22 nt, Human
ucuccugccuguagcagugaga

SEQ ID NO: 2838922 - RNA, 22 nt, Human
ucuccugccucagccucccaaa

SEQ ID NO: 2838923 - RNA, 14 nt, Human
ucuccugacuuuua

SEQ ID NO: 2838924 - RNA, 17 nt, Human
ucuccugaagauacuua

SEQ ID NO: 2838925 - RNA, 18 nt, Human
ucucccucuaggcucugc

SEQ ID NO: 2838926 - RNA, 21 nt, Human
ucucccucuaggcucugccuu

SEQ ID NO: 2838927 - RNA, 22 nt, Human
ucucccucuaggcucugccuuc

SEQ ID NO: 2838928 - RNA, 15 nt, Human
ucuccugacagaagg

SEQ ID NO: 2838929 - RNA, 12 nt, Human
ucuccugccaca

SEQ ID NO: 2838930 - RNA, 19 nt, Human
ucuccugccacauuagaac

SEQ ID NO: 2838931 - RNA, 22 nt, Human
ucuccugccacauuagaacuuc

SEQ ID NO: 2838932 - RNA, 13 nt, Human
ucuccucuuuaaa

SEQ ID NO: 2838933 - RNA, 14 nt, Human
ucuccucuuuaaaa

SEQ ID NO: 2838934 - RNA, 17 nt, Human
ucuccucuuuaaaacaa

SEQ ID NO: 2838935 - RNA, 19 nt, Human
ucuccucuuuaaaacaaaa

SEQ ID NO: 2838936 - RNA, 20 nt, Human
ucuccucuuuaaaacaaaac

SEQ ID NO: 2838937 - RNA, 22 nt, Human
ucuccucuugccacugccucuu

SEQ ID NO: 2838938 - RNA, 24 nt, Human
uccuugcaccccucacucuggccu

SEQ ID NO: 2838939 - RNA, 21 nt, Human
uccuugcaccccucacucugg

SEQ ID NO: 2838940 - RNA, 22 nt, Human
uccuugcaccccucacucuggc

SEQ ID NO: 2838941 - RNA, 14 nt, Human
uccuugcaccccuc

SEQ ID NO: 2838942 - RNA, 15 nt, Human
uccuugcaccccuca

SEQ ID NO: 2838943 - RNA, 20 nt, Human
uccuugcaccccucacucug

SEQ ID NO: 2838944 - RNA, 22 nt, Human
uccuugaucuguauauacaaua

SEQ ID NO: 2838945 - RNA, 16 nt, Human
uccuugaucuguauau

SEQ ID NO: 2838946 - RNA, 14 nt, Human
uccuugaucauuuu

SEQ ID NO: 2838947 - RNA, 21 nt, Human
uccuugcaagguuaagcaagg

SEQ ID NO: 2838948 - RNA, 20 nt, Human
uccuucugugaaaguacauu

SEQ ID NO: 2838949 - RNA, 14 nt, Human
uccuggucugaaaa

SEQ ID NO: 2838950 - RNA, 15 nt, Human
uccuucaagccagca

SEQ ID NO: 2838951 - RNA, 20 nt, Human
uccuucuggcagauucaaau

SEQ ID NO: 2838952 - RNA, 21 nt, Human
uccuucuggcagauucaaauc

SEQ ID NO: 2838953 - RNA, 12 nt, Human
uccuucuggccu

SEQ ID NO: 2838954 - RNA, 13 nt, Human
uccuucuggccuu

SEQ ID NO: 2838955 - RNA, 20 nt, Human
uccuucuggccuuuccucuc

SEQ ID NO: 2838956 - RNA, 19 nt, Human
uccuucuguccuacucugu

SEQ ID NO: 2838957 - RNA, 12 nt, Human
uccuucuguccu

SEQ ID NO: 2838958 - RNA, 23 nt, Human
uccuucaaguuagcucaggaggc

SEQ ID NO: 2838959 - RNA, 15 nt, Human
uccuucaauuccaua

SEQ ID NO: 2838960 - RNA, 23 nt, Human
uccuucaauuccauauauccuuu

SEQ ID NO: 2838961 - RNA, 20 nt, Human
uccuucaaguuagcucagga

SEQ ID NO: 2838962 - RNA, 19 nt, Human
uccuucaaguuagcucagg

SEQ ID NO: 2838963 - RNA, 18 nt, Human
uccuucaaguuagcucag

SEQ ID NO: 2838964 - RNA, 15 nt, Human
uccuucaaaauccuu

SEQ ID NO: 2838965 - RNA, 19 nt, Human
uccuucaaaauccuuccaa

SEQ ID NO: 2838966 - RNA, 20 nt, Human
uccuucaaaauccuuccaaa

SEQ ID NO: 2838967 - RNA, 23 nt, Human
uccuucaagaacucugggcugcu

SEQ ID NO: 2838968 - RNA, 21 nt, Human
uccuucaagaacucugggcug

SEQ ID NO: 2838969 - RNA, 20 nt, Human
uccuucaagaacucugggcu

SEQ ID NO: 2838970 - RNA, 19 nt, Human
uccuucaagaacucugggc

SEQ ID NO: 2838971 - RNA, 20 nt, Human
uccuuauuugcuucauugua

SEQ ID NO: 2838972 - RNA, 16 nt, Human
uccuucaaagcaaaug

SEQ ID NO: 2838973 - RNA, 11 nt, Human
uccuuaaguau

SEQ ID NO: 2838974 - RNA, 21 nt, Human
uccuuaaguauaucauguaaa

SEQ ID NO: 2838975 - RNA, 17 nt, Human
uccuggcagcccagaga

SEQ ID NO: 2838976 - RNA, 16 nt, Human
uccuggcagcccagag

SEQ ID NO: 2838977 - RNA, 19 nt, Human
uccuggcagcccagagacu

SEQ ID NO: 2838978 - RNA, 20 nt, Human
uccuggccagauggcccgga

SEQ ID NO: 2838979 - RNA, 15 nt, Human
uccuggugucacccc

SEQ ID NO: 2838980 - RNA, 17 nt, Human
uccuggugucaccccag

SEQ ID NO: 2838981 - RNA, 18 nt, Human
uccuggugucaccccaga

SEQ ID NO: 2838982 - RNA, 19 nt, Human
uccuggugucaccccagag

SEQ ID NO: 2838983 - RNA, 20 nt, Human
uccuggugucaccccagagc

SEQ ID NO: 2838984 - RNA, 22 nt, Human
uccuggugucaccccagagcca

SEQ ID NO: 2838985 - RNA, 24 nt, Human
uccuggugucaccccagagccaca

SEQ ID NO: 2838986 - RNA, 16 nt, Human
uccuguagcucucccu

SEQ ID NO: 2838987 - RNA, 15 nt, Human
uccugguucccguuu

SEQ ID NO: 2838988 - RNA, 21 nt, Human
uccugguucccguuucuccac

SEQ ID NO: 2838989 - RNA, 23 nt, Human
uccugguucccguuucuccaccu

SEQ ID NO: 2838990 - RNA, 22 nt, Human
uccugguuucauaacuuccugu

SEQ ID NO: 2838991 - RNA, 23 nt, Human
uccugguuucauaacuuccugua

SEQ ID NO: 2838992 - RNA, 21 nt, Human
uccuguaguugcguggacucu

SEQ ID NO: 2838993 - RNA, 22 nt, Human
uccuguaguugcguggacucug

SEQ ID NO: 2838994 - RNA, 23 nt, Human
uccuguaguugcguggacucugc

SEQ ID NO: 2838995 - RNA, 15 nt, Human
uccuguaguuuuauu

SEQ ID NO: 2838996 - RNA, 17 nt, Human
uccuguaguuuuauuuu

SEQ ID NO: 2838997 - RNA, 21 nt, Human
uccuguaguuuuauuuuaugu

SEQ ID NO: 2838998 - RNA, 14 nt, Human
uccuguauaagcac

SEQ ID NO: 2838999 - RNA, 22 nt, Human
uccuguauaagcacugaaaaac

SEQ ID NO: 2839000 - RNA, 13 nt, Human
uccuguauguugu

SEQ ID NO: 2839001 - RNA, 19 nt, Human
uccuguaugaaagauugug

SEQ ID NO: 2839002 - RNA, 14 nt, Human
uccuguaugucugu

SEQ ID NO: 2839003 - RNA, 15 nt, Human
uccuguaugucuguc

SEQ ID NO: 2839004 - RNA, 16 nt, Human
uccuguaugucuguca

SEQ ID NO: 2839005 - RNA, 17 nt, Human
ucgauucauauugaaua

SEQ ID NO: 2839006 - RNA, 18 nt, Human
ucgaguucggcucugggu

SEQ ID NO: 2839007 - RNA, 21 nt, Human
ucgauacccaggaccaagcca

SEQ ID NO: 2839008 - RNA, 14 nt, Human
uccuuuuucugauu

SEQ ID NO: 2839009 - RNA, 15 nt, Human
uccuuuuucugauua

SEQ ID NO: 2839010 - RNA, 20 nt, Human
uccuuuuucugauuagcuuu

SEQ ID NO: 2839011 - RNA, 22 nt, Human
uccuuuuucugauuagcuuugu

SEQ ID NO: 2839012 - RNA, 23 nt, Human
uccuuuuucugauuagcuuugug

SEQ ID NO: 2839013 - RNA, 15 nt, Human
ucgaaaauucauuuc

SEQ ID NO: 2839014 - RNA, 19 nt, Human
ucgaaaauucauuucacau

SEQ ID NO: 2839015 - RNA, 21 nt, Human
ucgaaaauucauuucacauua

SEQ ID NO: 2839016 - RNA, 24 nt, Human
ucgaaaauucauuucacauuaaug

SEQ ID NO: 2839017 - RNA, 21 nt, Human
uccuuuuuuuccaucuuuaca

SEQ ID NO: 2839018 - RNA, 12 nt, Human
uccuuuuuauga

SEQ ID NO: 2839019 - RNA, 21 nt, Human
uccuuuuuaugaggcaaccug

SEQ ID NO: 2839020 - RNA, 14 nt, Human
uccuuuugaccuuc

SEQ ID NO: 2839021 - RNA, 18 nt, Human
uccuuuugaccuucauuu

SEQ ID NO: 2839022 - RNA, 20 nt, Human
uccuuuugaccuucauuuca

SEQ ID NO: 2839023 - RNA, 23 nt, Human
uccuuuugaccuucauuucaugu

SEQ ID NO: 2839024 - RNA, 14 nt, Human
uccuuuuggaguca

SEQ ID NO: 2839025 - RNA, 23 nt, Human
uccuuuuggagucagacagaugu

SEQ ID NO: 2839026 - RNA, 15 nt, Human
uccuuuugguguguu

SEQ ID NO: 2839027 - RNA, 12 nt, Human
uccuuuuguaaa

SEQ ID NO: 2839028 - RNA, 13 nt, Human
uccuuuuguaaag

SEQ ID NO: 2839029 - RNA, 14 nt, Human
uccuuuuguaaagu

SEQ ID NO: 2839030 - RNA, 15 nt, Human
uccuuuuguaaagug

SEQ ID NO: 2839031 - RNA, 20 nt, Human
uccuuuuguaaagugaagaa

SEQ ID NO: 2839032 - RNA, 21 nt, Human
uccuuuuguaaagugaagaau

SEQ ID NO: 2839033 - RNA, 11 nt, Human
uccuuuuguag

SEQ ID NO: 2839034 - RNA, 12 nt, Human
uccuuuuguaga

SEQ ID NO: 2839035 - RNA, 17 nt, Human
uccuuuuguagaaugaa

SEQ ID NO: 2839036 - RNA, 14 nt, Human
uccuuuugucuucu

SEQ ID NO: 2839037 - RNA, 22 nt, Human
uccuuuugucuucucugucuca

SEQ ID NO: 2839038 - RNA, 23 nt, Human
uccuugcacgcgcccuuucuacc

SEQ ID NO: 2839039 - RNA, 10 nt, Human
uccuuggccu

SEQ ID NO: 2839040 - RNA, 13 nt, Human
uccuuggccuagc

SEQ ID NO: 2839041 - RNA, 22 nt, Human
uccuuggccuagcccacccugc

SEQ ID NO: 2839042 - RNA, 23 nt, Human
uccuuggccuagcccacccugcu

SEQ ID NO: 2839043 - RNA, 22 nt, Human
uccuugcaucaaggggucacuu

SEQ ID NO: 2839044 - RNA, 23 nt, Human
uccuugcaucaaggggucacuua

SEQ ID NO: 2839045 - RNA, 15 nt, Human
uccuuggcuggugca

SEQ ID NO: 2839046 - RNA, 20 nt, Human
uccuuggcuuaccugaccuc

SEQ ID NO: 2839047 - RNA, 15 nt, Human
ucgcaccccccuguu

SEQ ID NO: 2839048 - RNA, 17 nt, Human
ucgcaccccccuguucu

SEQ ID NO: 2839049 - RNA, 19 nt, Human
ucgcaccccccuguucuaa

SEQ ID NO: 2839050 - RNA, 22 nt, Human
ucgcaccccccuguucuaaggg

SEQ ID NO: 2839051 - RNA, 12 nt, Human
ucgcaccuacca

SEQ ID NO: 2839052 - RNA, 18 nt, Human
ucgcaccuaccaucaggg

SEQ ID NO: 2839053 - RNA, 17 nt, Human
ucgcaauguaagacucg

SEQ ID NO: 2839054 - RNA, 19 nt, Human
ucgcccaggcuggagugca

SEQ ID NO: 2839055 - RNA, 12 nt, Human
ucgcccaggaga

SEQ ID NO: 2839056 - RNA, 11 nt, Human
ucgcccaggag

SEQ ID NO: 2839057 - RNA, 14 nt, Human
ucgcccaggcugga

SEQ ID NO: 2839058 - RNA, 12 nt, Human
ucgcccaggcug

SEQ ID NO: 2839059 - RNA, 22 nt, Human
ucgcuucuguguaucucuuuca

SEQ ID NO: 2839060 - RNA, 19 nt, Human
ucgcuucccccauagccac

SEQ ID NO: 2839061 - RNA, 17 nt, Human
ucgcuucccccauagcc

SEQ ID NO: 2839062 - RNA, 16 nt, Human
ucgcuucccccauagc

SEQ ID NO: 2839063 - RNA, 15 nt, Human
ucgcuucccccauag

SEQ ID NO: 2839064 - RNA, 14 nt, Human
ucgcuucccccaua

SEQ ID NO: 2839065 - RNA, 21 nt, Human
ucgcuguuaccgccugucucu

SEQ ID NO: 2839066 - RNA, 19 nt, Human
ucggaacccaagcuuagaa

SEQ ID NO: 2839067 - RNA, 20 nt, Human
ucggaacccaagcuuagaac

SEQ ID NO: 2839068 - RNA, 16 nt, Human
ucggaaccgcucaccu

SEQ ID NO: 2839069 - RNA, 17 nt, Human
ucggaaccgcucaccua

SEQ ID NO: 2839070 - RNA, 19 nt, Human
ucggaaccgcucaccuaga

SEQ ID NO: 2839071 - RNA, 20 nt, Human
ucggaaccgcucaccuagag

SEQ ID NO: 2839072 - RNA, 22 nt, Human
ucggaaccgcucaccuagagcc

SEQ ID NO: 2839073 - RNA, 14 nt, Human
ucggaacagcagau

SEQ ID NO: 2839074 - RNA, 19 nt, Human
ucggaaggcuggcugggca

SEQ ID NO: 2839075 - RNA, 23 nt, Human
ucggaccgcuuguggggacccag

SEQ ID NO: 2839076 - RNA, 19 nt, Human
ucggacuaagccuaccugc

SEQ ID NO: 2839077 - RNA, 22 nt, Human
ucggacuaagccuaccugcucu

SEQ ID NO: 2839078 - RNA, 23 nt, Human
ucggacuaagccuaccugcucuc

SEQ ID NO: 2839079 - RNA, 21 nt, Human
ucgaaaagagucuuccaauua

SEQ ID NO: 2839080 - RNA, 12 nt, Human
ucuaaccuugaa

SEQ ID NO: 2839081 - RNA, 17 nt, Human
ucuaaccuugaaugcug

SEQ ID NO: 2839082 - RNA, 18 nt, Human
ucuaaccuugaaugcugc

SEQ ID NO: 2839083 - RNA, 19 nt, Human
ucuaaccuugaaugcugcc

SEQ ID NO: 2839084 - RNA, 20 nt, Human
ucuaaccuugaaugcugcca

SEQ ID NO: 2839085 - RNA, 21 nt, Human
ucuaaccuugaaugcugccag

SEQ ID NO: 2839086 - RNA, 22 nt, Human
ucuaaccuugaaugcugccagu

SEQ ID NO: 2839087 - RNA, 15 nt, Human
ucuaaccugauggca

SEQ ID NO: 2839088 - RNA, 19 nt, Human
ucuaacuagaaaucugcca

SEQ ID NO: 2839089 - RNA, 14 nt, Human
ucuaacucagaauu

SEQ ID NO: 2839090 - RNA, 16 nt, Human
ucuaacucagaauuau

SEQ ID NO: 2839091 - RNA, 18 nt, Human
ucuaacucagaauuauuu

SEQ ID NO: 2839092 - RNA, 17 nt, Human
ucuaacggucuguucug

SEQ ID NO: 2839093 - RNA, 22 nt, Human
ucuaacggucuguucuguuuca

SEQ ID NO: 2839094 - RNA, 23 nt, Human
ucuaaauuugaauguuaagcaga

SEQ ID NO: 2839095 - RNA, 22 nt, Human
ucuaaauuugaauguuaagcag

SEQ ID NO: 2839096 - RNA, 19 nt, Human
ucuaacaaaaaaauauauu

SEQ ID NO: 2839097 - RNA, 19 nt, Human
ucuaacccuauacuguagu

SEQ ID NO: 2839098 - RNA, 17 nt, Human
ucuaaauuugaauguua

SEQ ID NO: 2839099 - RNA, 13 nt, Human
ucuaaauuugaau

SEQ ID NO: 2839100 - RNA, 18 nt, Human
ucuaaauuaaagccuuua

SEQ ID NO: 2839101 - RNA, 20 nt, Human
ucuaaauuaaagccuuuagu

SEQ ID NO: 2839102 - RNA, 17 nt, Human
ucuaaauucuuuauuuc

SEQ ID NO: 2839103 - RNA, 20 nt, Human
ucuaaauucuuuauuucugu

SEQ ID NO: 2839104 - RNA, 13 nt, Human
ucuaaaugaagug

SEQ ID NO: 2839105 - RNA, 21 nt, Human
ucuaacuuaagaaauaaauca

SEQ ID NO: 2839106 - RNA, 16 nt, Human
ucuacacugcaaucau

SEQ ID NO: 2839107 - RNA, 19 nt, Human
ucuacacugcaaucauaug

SEQ ID NO: 2839108 - RNA, 20 nt, Human
ucuacacugcaaucauaugu

SEQ ID NO: 2839109 - RNA, 21 nt, Human
ucuacacugggugcugauccu

SEQ ID NO: 2839110 - RNA, 16 nt, Human
ucuagaaguuguuugu

SEQ ID NO: 2839111 - RNA, 20 nt, Human
ucuagaaguuguuugucauc

SEQ ID NO: 2839112 - RNA, 18 nt, Human
ucuagaaguuucccuucc

SEQ ID NO: 2839113 - RNA, 20 nt, Human
ucuagaaguuucccuuccuc

SEQ ID NO: 2839114 - RNA, 17 nt, Human
ucuagaauuauaaguca

SEQ ID NO: 2839115 - RNA, 23 nt, Human
ucuagaauuauaagucacaaaga

SEQ ID NO: 2839116 - RNA, 22 nt, Human
ucuagaaucugcaauucaaaag

SEQ ID NO: 2839117 - RNA, 23 nt, Human
ucuagaaucugcaauucaaaagu

SEQ ID NO: 2839118 - RNA, 19 nt, Human
ucuagaauuuaucacacuu

SEQ ID NO: 2839119 - RNA, 17 nt, Human
ucuagaacacaggcaaa

SEQ ID NO: 2839120 - RNA, 18 nt, Human
ucuagaacuugacccccu

SEQ ID NO: 2839121 - RNA, 16 nt, Human
ucuaguacacuuuuau

SEQ ID NO: 2839122 - RNA, 13 nt, Human
ucuagggcuggga

SEQ ID NO: 2839123 - RNA, 19 nt, Human
ucuagggcugggaaacacu

SEQ ID NO: 2839124 - RNA, 17 nt, Human
ucuaggguugcuggagc

SEQ ID NO: 2839125 - RNA, 20 nt, Human
ucuagguuucaaagaugcug

SEQ ID NO: 2839126 - RNA, 15 nt, Human
ucuagguuucaaaga

SEQ ID NO: 2839127 - RNA, 17 nt, Human
ucuagguuucaaagaug

SEQ ID NO: 2839128 - RNA, 19 nt, Human
ucuagguuucaaagaugcu

SEQ ID NO: 2839129 - RNA, 14 nt, Human
ucucaaacuccuga

SEQ ID NO: 2839130 - RNA, 17 nt, Human
ucucaaacuaaaagaca

SEQ ID NO: 2839131 - RNA, 19 nt, Human
ucucaaacuaaaagacauu

SEQ ID NO: 2839132 - RNA, 15 nt, Human
ucuaguaguuaaaaa

SEQ ID NO: 2839133 - RNA, 21 nt, Human
ucucaaaacuggacagucacu

SEQ ID NO: 2839134 - RNA, 13 nt, Human
ucucaaaagaacu

SEQ ID NO: 2839135 - RNA, 14 nt, Human
ucucaaaagaacuu

SEQ ID NO: 2839136 - RNA, 18 nt, Human
ucucaaaagaacuuaccc

SEQ ID NO: 2839137 - RNA, 19 nt, Human
ucucaaaagaacuuacccc

SEQ ID NO: 2839138 - RNA, 13 nt, Human
ucucaaaagcauu

SEQ ID NO: 2839139 - RNA, 14 nt, Human
ucucaaaagcauuu

SEQ ID NO: 2839140 - RNA, 18 nt, Human
ucucaaaagcauuuauca

SEQ ID NO: 2839141 - RNA, 21 nt, Human
ucucaaaagcauuuaucauuc

SEQ ID NO: 2839142 - RNA, 23 nt, Human
ucucaaaagcauuuaucauucuu

SEQ ID NO: 2839143 - RNA, 20 nt, Human
ucucaaacaaggggcuguua

SEQ ID NO: 2839144 - RNA, 21 nt, Human
ucucaaacucuugaccucagg

SEQ ID NO: 2839145 - RNA, 13 nt, Human
ucucaaacucuug

SEQ ID NO: 2839146 - RNA, 22 nt, Human
ucucaaacucuugaccucaggu

SEQ ID NO: 2839147 - RNA, 17 nt, Human
ucuaguacuugaaaaag

SEQ ID NO: 2839148 - RNA, 23 nt, Human
ucucaaacucccgaccucaggug

SEQ ID NO: 2839149 - RNA, 21 nt, Human
ucucaaauuuggauugcuaau

SEQ ID NO: 2839150 - RNA, 21 nt, Human
ucucaacaaagcacaguguua

SEQ ID NO: 2839151 - RNA, 19 nt, Human
ucucaacaaagcacagugu

SEQ ID NO: 2839152 - RNA, 17 nt, Human
ucucacucugucgccca

SEQ ID NO: 2839153 - RNA, 16 nt, Human
ucucacucugucgccc

SEQ ID NO: 2839154 - RNA, 22 nt, Human
ucucacucugucgcccagucug

SEQ ID NO: 2839155 - RNA, 18 nt, Human
ucucacucugucgcccag

SEQ ID NO: 2839156 - RNA, 21 nt, Human
ucucacuguugcccaggcugg

SEQ ID NO: 2839157 - RNA, 20 nt, Human
ucucacuguugcccaggcug

SEQ ID NO: 2839158 - RNA, 19 nt, Human
ucucacuguugcccaggcu

SEQ ID NO: 2839159 - RNA, 18 nt, Human
ucucacuguugcccaggc

SEQ ID NO: 2839160 - RNA, 17 nt, Human
ucucaggggccagagga

SEQ ID NO: 2839161 - RNA, 20 nt, Human
ucucaggggccagaggaacu

SEQ ID NO: 2839162 - RNA, 15 nt, Human
ucucagggucucugc

SEQ ID NO: 2839163 - RNA, 16 nt, Human
ucucagggucucugcu

SEQ ID NO: 2839164 - RNA, 17 nt, Human
ucucagggucucugcug

SEQ ID NO: 2839165 - RNA, 18 nt, Human
ucucagggucucugcugc

SEQ ID NO: 2839166 - RNA, 20 nt, Human
ucucagggucucugcugccg

SEQ ID NO: 2839167 - RNA, 17 nt, Human
ucucacuguugcccagg

SEQ ID NO: 2839168 - RNA, 13 nt, Human
ucucacuugugcc

SEQ ID NO: 2839169 - RNA, 19 nt, Human
ugaacacaaacuguaaaua

SEQ ID NO: 2839170 - RNA, 22 nt, Human
ugaacacgaaagaaauguaccu

SEQ ID NO: 2839171 - RNA, 13 nt, Human
ugaacacaggcag

SEQ ID NO: 2839172 - RNA, 14 nt, Human
ugaacacaggcagc

SEQ ID NO: 2839173 - RNA, 15 nt, Human
ugaacacaggcagcu

SEQ ID NO: 2839174 - RNA, 16 nt, Human
ugaacacaggcagcuu

SEQ ID NO: 2839175 - RNA, 17 nt, Human
ugaacacaggcagcuuu

SEQ ID NO: 2839176 - RNA, 20 nt, Human
ugaacacaggcagcuuucua

SEQ ID NO: 2839177 - RNA, 23 nt, Human
ugaacacaggcagcuuucuagaa

SEQ ID NO: 2839178 - RNA, 20 nt, Human
ugaaaugcaucagguccuuu

SEQ ID NO: 2839179 - RNA, 16 nt, Human
ugaaaugcucuccuuu

SEQ ID NO: 2839180 - RNA, 17 nt, Human
ugaaaugcucuccuuuc

SEQ ID NO: 2839181 - RNA, 16 nt, Human
ugaaaugcuggcauuu

SEQ ID NO: 2839182 - RNA, 13 nt, Human
ugaacacuuauaa

SEQ ID NO: 2839183 - RNA, 20 nt, Human
ugaacagaaaacauucugau

SEQ ID NO: 2839184 - RNA, 15 nt, Human
ugaacacuuggugcu

SEQ ID NO: 2839185 - RNA, 16 nt, Human
ugaacacuuggugcug

SEQ ID NO: 2839186 - RNA, 18 nt, Human
ugaacacuuggugcuggg

SEQ ID NO: 2839187 - RNA, 19 nt, Human
ugaacacuuggugcuggga

SEQ ID NO: 2839188 - RNA, 11 nt, Human
ugaacauucca

SEQ ID NO: 2839189 - RNA, 12 nt, Human
ugaacauuccaa

SEQ ID NO: 2839190 - RNA, 17 nt, Human
ugaacauccccucccau

SEQ ID NO: 2839191 - RNA, 19 nt, Human
ugaaccacaucuugcucug

SEQ ID NO: 2839192 - RNA, 19 nt, Human
ugaacugaacucugacaac

SEQ ID NO: 2839193 - RNA, 17 nt, Human
ugaacugaacucugaca

SEQ ID NO: 2839194 - RNA, 22 nt, Human
ugaaccacaucuugcucugcug

SEQ ID NO: 2839195 - RNA, 21 nt, Human
ugaaccacaucuugcucugcu

SEQ ID NO: 2839196 - RNA, 20 nt, Human
ugaaccacaucuugcucugc

SEQ ID NO: 2839197 - RNA, 12 nt, Human
ugaacucuuaga

SEQ ID NO: 2839198 - RNA, 19 nt, Human
ugaacucuuagaaaugaag

SEQ ID NO: 2839199 - RNA, 14 nt, Human
ugaacugaacucug

SEQ ID NO: 2839200 - RNA, 19 nt, Human
ugaacucuucugcaaaaau

SEQ ID NO: 2839201 - RNA, 18 nt, Human
ugaacugaaauuaaaacu

SEQ ID NO: 2839202 - RNA, 19 nt, Human
ugaacuggguacuugugga

SEQ ID NO: 2839203 - RNA, 17 nt, Human
ugaacuggcaauugucu

SEQ ID NO: 2839204 - RNA, 21 nt, Human
ugaacuggcaauugucuauuu

SEQ ID NO: 2839205 - RNA, 13 nt, Human
ugaagaggaaggg

SEQ ID NO: 2839206 - RNA, 23 nt, Human
ugaagagaaccgagcaaagauca

SEQ ID NO: 2839207 - RNA, 13 nt, Human
ugaagacuugccc

SEQ ID NO: 2839208 - RNA, 17 nt, Human
ugaagacuggaagcuaa

SEQ ID NO: 2839209 - RNA, 18 nt, Human
ugaagacuggaagcuaau

SEQ ID NO: 2839210 - RNA, 14 nt, Human
ugaagacaggacag

SEQ ID NO: 2839211 - RNA, 14 nt, Human
ugaagacaggaugg

SEQ ID NO: 2839212 - RNA, 17 nt, Human
ugaaggcaaaauugcaa

SEQ ID NO: 2839213 - RNA, 16 nt, Human
ugaaggcaaaauugca

SEQ ID NO: 2839214 - RNA, 18 nt, Human
ugaaggaggugagagaag

SEQ ID NO: 2839215 - RNA, 14 nt, Human
ugaaggcaaaauug

SEQ ID NO: 2839216 - RNA, 20 nt, Human
ugaacugaaggcagcaugua

SEQ ID NO: 2839217 - RNA, 20 nt, Human
ugaaggagagcccuucauuu

SEQ ID NO: 2839218 - RNA, 22 nt, Human
ugaaggagaggcaacauccaaa

SEQ ID NO: 2839219 - RNA, 16 nt, Human
ugaagaugggaacgca

SEQ ID NO: 2839220 - RNA, 12 nt, Human
ugaagaugaaca

SEQ ID NO: 2839221 - RNA, 15 nt, Human
ugaagaugcagcuca

SEQ ID NO: 2839222 - RNA, 19 nt, Human
ugaagaugcauuguaguuu

SEQ ID NO: 2839223 - RNA, 23 nt, Human
ugaagauauaacuauugcccagg

SEQ ID NO: 2839224 - RNA, 17 nt, Human
ugaagagggagaaggga

SEQ ID NO: 2839225 - RNA, 21 nt, Human
ugaaagauucagguauguugc

SEQ ID NO: 2839226 - RNA, 14 nt, Human
ugaaagauuguggg

SEQ ID NO: 2839227 - RNA, 22 nt, Human
ugaaagauugugggggaaaaau

SEQ ID NO: 2839228 - RNA, 12 nt, Human
ugaaagcaaaaa

SEQ ID NO: 2839229 - RNA, 15 nt, Human
ugaaagcaaaaaugc

SEQ ID NO: 2839230 - RNA, 16 nt, Human
ugaaagcaaaaaugcu

SEQ ID NO: 2839231 - RNA, 17 nt, Human
ugaaagcaaaaaugcua

SEQ ID NO: 2839232 - RNA, 19 nt, Human
ugaaagcaaaaaugcuaau

SEQ ID NO: 2839233 - RNA, 20 nt, Human
ugaaagcaaaaaugcuaaua

SEQ ID NO: 2839234 - RNA, 11 nt, Human
ugaaagcacag

SEQ ID NO: 2839235 - RNA, 21 nt, Human
ugaaagcacaggagacacugu

SEQ ID NO: 2839236 - RNA, 19 nt, Human
ugaaagcagggaauuucua

SEQ ID NO: 2839237 - RNA, 20 nt, Human
ugaaagcagggaauuucuau

SEQ ID NO: 2839238 - RNA, 22 nt, Human
ugaaagcagggaauuucuaucu

SEQ ID NO: 2839239 - RNA, 18 nt, Human
ugaaaggaagcuccacug

SEQ ID NO: 2839240 - RNA, 13 nt, Human
ugaaaggaaagug

SEQ ID NO: 2839241 - RNA, 14 nt, Human
ugaaaggaaagugc

SEQ ID NO: 2839242 - RNA, 12 nt, Human
ugaaagauuaaa

SEQ ID NO: 2839243 - RNA, 13 nt, Human
ugaaagauuaaac

SEQ ID NO: 2839244 - RNA, 15 nt, Human
ugaaagauuaaacag

SEQ ID NO: 2839245 - RNA, 12 nt, Human
ugaaaagaugua

SEQ ID NO: 2839246 - RNA, 16 nt, Human
ugaaaccuacacacug

SEQ ID NO: 2839247 - RNA, 20 nt, Human
ugaaaccuacacacugucau

SEQ ID NO: 2839248 - RNA, 22 nt, Human
ugaaagauggcugugccucugc

SEQ ID NO: 2839249 - RNA, 23 nt, Human
ugaaagauggcugugccucugcc

SEQ ID NO: 2839250 - RNA, 21 nt, Human
ugaaagauggcugugccucug

SEQ ID NO: 2839251 - RNA, 21 nt, Human
ugaaaccuuuuuuaagauuuu

SEQ ID NO: 2839252 - RNA, 23 nt, Human
ugaaaccuuuuuuaagauuuuuc

SEQ ID NO: 2839253 - RNA, 19 nt, Human
ugaaagauggcugugccuc

SEQ ID NO: 2839254 - RNA, 19 nt, Human
ugaaaccuaguacugcccc

SEQ ID NO: 2839255 - RNA, 13 nt, Human
ugaaaccuguaua

SEQ ID NO: 2839256 - RNA, 22 nt, Human
ugaaaccuguauaacccuguua

SEQ ID NO: 2839257 - RNA, 18 nt, Human
ugaaaccuaguacugccc

SEQ ID NO: 2839258 - RNA, 18 nt, Human
ugaaaagagagcagagaa

SEQ ID NO: 2839259 - RNA, 19 nt, Human
ugaaaagagagcagagaau

SEQ ID NO: 2839260 - RNA, 19 nt, Human
ugaaaccuuuuuccuagua

SEQ ID NO: 2839261 - RNA, 16 nt, Human
ugaaaccuuuuuuaag

SEQ ID NO: 2839262 - RNA, 17 nt, Human
ugaaaccuuuuuuaaga

SEQ ID NO: 2839263 - RNA, 18 nt, Human
ugaaaccuuuuuuaagau

SEQ ID NO: 2839264 - RNA, 19 nt, Human
ugaaaccuuuuuuaagauu

SEQ ID NO: 2839265 - RNA, 20 nt, Human
ugaaaccuuuuuuaagauuu

SEQ ID NO: 2839266 - RNA, 22 nt, Human
ugaaaugaggucagagccugca

SEQ ID NO: 2839267 - RNA, 21 nt, Human
ugaaaugaggucagagccugc

SEQ ID NO: 2839268 - RNA, 23 nt, Human
ugaaaugaggucagagccugcag

SEQ ID NO: 2839269 - RNA, 19 nt, Human
ugaaaugcagagucaauga

SEQ ID NO: 2839270 - RNA, 17 nt, Human
ugaaaugaggucuguuu

SEQ ID NO: 2839271 - RNA, 18 nt, Human
ugaaaugaggucuguuua

SEQ ID NO: 2839272 - RNA, 19 nt, Human
ugaaaugaggucuguuuaa

SEQ ID NO: 2839273 - RNA, 23 nt, Human
ugaaaugaggucuguuuaaagug

SEQ ID NO: 2839274 - RNA, 14 nt, Human
ugaaaugauagauu

SEQ ID NO: 2839275 - RNA, 17 nt, Human
ugaaaugauagauuuga

SEQ ID NO: 2839276 - RNA, 21 nt, Human
ugaaaugauagauuugaccuc

SEQ ID NO: 2839277 - RNA, 22 nt, Human
ugaaaugauagauuugaccucc

SEQ ID NO: 2839278 - RNA, 20 nt, Human
ugaaaugaggucagagccug

SEQ ID NO: 2839279 - RNA, 19 nt, Human
ugaaaugaggucagagccu

SEQ ID NO: 2839280 - RNA, 21 nt, Human
ugaaaugaaacaaauaaucac

SEQ ID NO: 2839281 - RNA, 13 nt, Human
ugaaaugaaauuu

SEQ ID NO: 2839282 - RNA, 14 nt, Human
ugaaaugaaauuua

SEQ ID NO: 2839283 - RNA, 15 nt, Human
ugaaaugaaauuuaa

SEQ ID NO: 2839284 - RNA, 16 nt, Human
ugaaaugaaauuuaaa

SEQ ID NO: 2839285 - RNA, 17 nt, Human
ugaaaugaaauuuaaac

SEQ ID NO: 2839286 - RNA, 23 nt, Human
ugaaaugaaauuuaaacauuaaa

SEQ ID NO: 2839287 - RNA, 17 nt, Human
ugaaaugaccucugucc

SEQ ID NO: 2839288 - RNA, 17 nt, Human
ugaaaugagcaccucca

SEQ ID NO: 2839289 - RNA, 21 nt, Human
ugaaaugagcaccuccauuaa

SEQ ID NO: 2839290 - RNA, 18 nt, Human
ugaaagggcccagagagg

SEQ ID NO: 2839291 - RNA, 17 nt, Human
ugaaagggcccagagag

SEQ ID NO: 2839292 - RNA, 16 nt, Human
ugaaagggcccagaga

SEQ ID NO: 2839293 - RNA, 15 nt, Human
ugaaagggcccagag

SEQ ID NO: 2839294 - RNA, 19 nt, Human
ugaaaucuuacagcugggu

SEQ ID NO: 2839295 - RNA, 15 nt, Human
ugaaaucugucaaga

SEQ ID NO: 2839296 - RNA, 21 nt, Human
ugaaaucugucaagaguaguu

SEQ ID NO: 2839297 - RNA, 14 nt, Human
ugaaaggagcccuu

SEQ ID NO: 2839298 - RNA, 14 nt, Human
ugaaauccugcuuc

SEQ ID NO: 2839299 - RNA, 17 nt, Human
ugaaauccuugacugga

SEQ ID NO: 2839300 - RNA, 18 nt, Human
ugaaauccuugacuggac

SEQ ID NO: 2839301 - RNA, 20 nt, Human
ugaaauccuugacuggaccu

SEQ ID NO: 2839302 - RNA, 19 nt, Human
ugaaaacucauuacuuuuc

SEQ ID NO: 2839303 - RNA, 12 nt, Human
ugaaaacuggaa

SEQ ID NO: 2839304 - RNA, 13 nt, Human
ugaaaacuggaau

SEQ ID NO: 2839305 - RNA, 14 nt, Human
ugaaaacuggaaua

SEQ ID NO: 2839306 - RNA, 21 nt, Human
ugaaaacuggaauaagaagca

SEQ ID NO: 2839307 - RNA, 23 nt, Human
ugaaaacuggaauaagaagcaaa

SEQ ID NO: 2839308 - RNA, 17 nt, Human
ugaaaacuuuucucaga

SEQ ID NO: 2839309 - RNA, 13 nt, Human
ugaaaagaaauaa

SEQ ID NO: 2839310 - RNA, 14 nt, Human
ugaaaagaaauaau

SEQ ID NO: 2839311 - RNA, 16 nt, Human
ugaaaagaaauaauaa

SEQ ID NO: 2839312 - RNA, 16 nt, Human
ugaaaagacaagaaaa

SEQ ID NO: 2839313 - RNA, 19 nt, Human
ugaaaagacaagaaaauca

SEQ ID NO: 2839314 - RNA, 14 nt, Human
ucuuuuuaugcauu

SEQ ID NO: 2839315 - RNA, 19 nt, Human
ucuuuuguaauaaacuauu

SEQ ID NO: 2839316 - RNA, 13 nt, Human
ucuuuuuauugaa

SEQ ID NO: 2839317 - RNA, 14 nt, Human
ucuuuuuauugaau

SEQ ID NO: 2839318 - RNA, 15 nt, Human
ucuuuuuauugaauc

SEQ ID NO: 2839319 - RNA, 12 nt, Human
ucuuuuucaguu

SEQ ID NO: 2839320 - RNA, 11 nt, Human
ucuuuuucuga

SEQ ID NO: 2839321 - RNA, 14 nt, Human
ucuuuuucuguugu

SEQ ID NO: 2839322 - RNA, 15 nt, Human
ucuuuuucuguugua

SEQ ID NO: 2839323 - RNA, 16 nt, Human
ucuuuuucuguuguaa

SEQ ID NO: 2839324 - RNA, 17 nt, Human
ucuuuuucuguuguaac

SEQ ID NO: 2839325 - RNA, 13 nt, Human
ucuuuuuucaaaa

SEQ ID NO: 2839326 - RNA, 13 nt, Human
ugaaaacuauaca

SEQ ID NO: 2839327 - RNA, 14 nt, Human
ugaaaacuauacaa

SEQ ID NO: 2839328 - RNA, 14 nt, Human
ucuuuuuuacucau

SEQ ID NO: 2839329 - RNA, 15 nt, Human
ucuuuuuuacucauu

SEQ ID NO: 2839330 - RNA, 19 nt, Human
ucuuuuuuacucauugaaa

SEQ ID NO: 2839331 - RNA, 20 nt, Human
ucuuuuuuacucauugaaau

SEQ ID NO: 2839332 - RNA, 21 nt, Human
ucuuuuuuacucauugaaaug

SEQ ID NO: 2839333 - RNA, 22 nt, Human
ucuuuuuuacucauugaaaugu

SEQ ID NO: 2839334 - RNA, 15 nt, Human
ucuuuuuuaaaauca

SEQ ID NO: 2839335 - RNA, 17 nt, Human
ucuuuuuuaauaaacua

SEQ ID NO: 2839336 - RNA, 19 nt, Human
ucuuuuuuaauaaacuacu

SEQ ID NO: 2839337 - RNA, 13 nt, Human
ucuuuucuuugua

SEQ ID NO: 2839338 - RNA, 14 nt, Human
ucuuuucuuuguau

SEQ ID NO: 2839339 - RNA, 17 nt, Human
ucuuuucuuuguaucau

SEQ ID NO: 2839340 - RNA, 20 nt, Human
ucuuuucuuuguaucauuca

SEQ ID NO: 2839341 - RNA, 13 nt, Human
ucuuuucuuuuua

SEQ ID NO: 2839342 - RNA, 14 nt, Human
ucuuuucuuuuuac

SEQ ID NO: 2839343 - RNA, 16 nt, Human
ucuuuucuuuuuacau

SEQ ID NO: 2839344 - RNA, 17 nt, Human
ucuuuucuuuuuacaua

SEQ ID NO: 2839345 - RNA, 14 nt, Human
ucuuuugaauuguu

SEQ ID NO: 2839346 - RNA, 17 nt, Human
ucuuuugaauuguuaca

SEQ ID NO: 2839347 - RNA, 18 nt, Human
ucuuuugaauuguuacau

SEQ ID NO: 2839348 - RNA, 15 nt, Human
ucuuuugaauuguuu

SEQ ID NO: 2839349 - RNA, 23 nt, Human
ucuuuugaauauucccaagccca

SEQ ID NO: 2839350 - RNA, 13 nt, Human
ucuuuuggcuucc

SEQ ID NO: 2839351 - RNA, 16 nt, Human
ucuuuugauuauguuu

SEQ ID NO: 2839352 - RNA, 22 nt, Human
ucuuuugacuuaaucucauuug

SEQ ID NO: 2839353 - RNA, 17 nt, Human
ucuuuugcuacuaaguu

SEQ ID NO: 2839354 - RNA, 19 nt, Human
ucuuuugcuacuaaguuca

SEQ ID NO: 2839355 - RNA, 17 nt, Human
ucuuuugggggaaacuu

SEQ ID NO: 2839356 - RNA, 16 nt, Human
ucuuuuuauacuauua

SEQ ID NO: 2839357 - RNA, 10 nt, Human
ucuuuuguaa

SEQ ID NO: 2839358 - RNA, 14 nt, Human
ucuuuuguaaauua

SEQ ID NO: 2839359 - RNA, 11 nt, Human
ucuuuuguaag

SEQ ID NO: 2839360 - RNA, 13 nt, Human
ucuuuuguaagug

SEQ ID NO: 2839361 - RNA, 18 nt, Human
ucuuuuguaagugcuaca

SEQ ID NO: 2839362 - RNA, 13 nt, Human
ucuuuucuuuaga

SEQ ID NO: 2839363 - RNA, 15 nt, Human
ucuuuucuuuagaga

SEQ ID NO: 2839364 - RNA, 17 nt, Human
ucuuuucuuuagagaac

SEQ ID NO: 2839365 - RNA, 21 nt, Human
ucuuuucuuuagagaacugaa

SEQ ID NO: 2839366 - RNA, 22 nt, Human
ucuuuucuuuagagaacugaaa

SEQ ID NO: 2839367 - RNA, 15 nt, Human
ucuuuucuuggcaaa

SEQ ID NO: 2839368 - RNA, 22 nt, Human
ucuuuucuuggcaaaagccuug

SEQ ID NO: 2839369 - RNA, 15 nt, Human
ucuuuucuuccuggc

SEQ ID NO: 2839370 - RNA, 22 nt, Human
ucuuucacauuguuugcugcua

SEQ ID NO: 2839371 - RNA, 23 nt, Human
ucuuucacauuguuugcugcuau

SEQ ID NO: 2839372 - RNA, 17 nt, Human
ucuuuucucugugcuuc

SEQ ID NO: 2839373 - RNA, 16 nt, Human
ucuuuucucuuuuuag

SEQ ID NO: 2839374 - RNA, 13 nt, Human
ucuuuucucugug

SEQ ID NO: 2839375 - RNA, 16 nt, Human
ucuuuucuguacuucc

SEQ ID NO: 2839376 - RNA, 18 nt, Human
ucuuuucuguacuuccug

SEQ ID NO: 2839377 - RNA, 17 nt, Human
ucuuuucuuacuccucc

SEQ ID NO: 2839378 - RNA, 18 nt, Human
ucuuuucuuacuccuccu

SEQ ID NO: 2839379 - RNA, 19 nt, Human
ucuuuucuuacuccuccuc

SEQ ID NO: 2839380 - RNA, 14 nt, Human
ucuuucaauucugu

SEQ ID NO: 2839381 - RNA, 14 nt, Human
ucuuucacagcucc

SEQ ID NO: 2839382 - RNA, 15 nt, Human
ucuuucacagcuccu

SEQ ID NO: 2839383 - RNA, 14 nt, Human
ucuuuucucaugug

SEQ ID NO: 2839384 - RNA, 15 nt, Human
ucuuuucucaugugu

SEQ ID NO: 2839385 - RNA, 20 nt, Human
ucuuucacagcuccucccac

SEQ ID NO: 2839386 - RNA, 18 nt, Human
ucuuucacagcuccuccc

SEQ ID NO: 2839387 - RNA, 19 nt, Human
ucuuucacagcuccuccca

SEQ ID NO: 2839388 - RNA, 13 nt, Human
ucuguucaccuuc

SEQ ID NO: 2839389 - RNA, 19 nt, Human
ucuguucacuuuuccuccc

SEQ ID NO: 2839390 - RNA, 22 nt, Human
ucuguucacuuuuccucccuca

SEQ ID NO: 2839391 - RNA, 21 nt, Human
ucuguucacuuuuccucccuc

SEQ ID NO: 2839392 - RNA, 14 nt, Human
ucuguuauguacug

SEQ ID NO: 2839393 - RNA, 15 nt, Human
ucuguuauguacugu

SEQ ID NO: 2839394 - RNA, 16 nt, Human
ucuguuauguacugua

SEQ ID NO: 2839395 - RNA, 17 nt, Human
ucuguuauguacuguac

SEQ ID NO: 2839396 - RNA, 18 nt, Human
ucuguuauguacuguacu

SEQ ID NO: 2839397 - RNA, 19 nt, Human
ucuguuauguacuguacua

SEQ ID NO: 2839398 - RNA, 22 nt, Human
ucuguuauguacuguacuaauu

SEQ ID NO: 2839399 - RNA, 15 nt, Human
ucuguuauuaacaaa

SEQ ID NO: 2839400 - RNA, 18 nt, Human
ucuguuauuuagacucau

SEQ ID NO: 2839401 - RNA, 19 nt, Human
ucuguuauauccccugcua

SEQ ID NO: 2839402 - RNA, 17 nt, Human
ucuguggugucugccug

SEQ ID NO: 2839403 - RNA, 20 nt, Human
ucuguuagcuggguuuacau

SEQ ID NO: 2839404 - RNA, 11 nt, Human
ucugugucuuu

SEQ ID NO: 2839405 - RNA, 21 nt, Human
ucuguguugcauuauucauuu

SEQ ID NO: 2839406 - RNA, 22 nt, Human
ucuguguugcauuauucauuua

SEQ ID NO: 2839407 - RNA, 17 nt, Human
ucuguguuuaauuucuu

SEQ ID NO: 2839408 - RNA, 18 nt, Human
ucuguguuuaauuucuuc

SEQ ID NO: 2839409 - RNA, 19 nt, Human
ucuguguuuaauuucuuca

SEQ ID NO: 2839410 - RNA, 22 nt, Human
ucuguguuuaauuucuucaaaa

SEQ ID NO: 2839411 - RNA, 23 nt, Human
ucuguguuuaauuucuucaaaau

SEQ ID NO: 2839412 - RNA, 13 nt, Human
ucuguguuuauaa

SEQ ID NO: 2839413 - RNA, 15 nt, Human
ucuguuaaaaucuau

SEQ ID NO: 2839414 - RNA, 20 nt, Human
ucuguuaaaaucuauucugu

SEQ ID NO: 2839415 - RNA, 13 nt, Human
ucuguuacccagg

SEQ ID NO: 2839416 - RNA, 16 nt, Human
ucuguaccauuuauuu

SEQ ID NO: 2839417 - RNA, 13 nt, Human
ucuguaccccaug

SEQ ID NO: 2839418 - RNA, 18 nt, Human
ucuguaccccaugaccuu

SEQ ID NO: 2839419 - RNA, 23 nt, Human
ucuguaccccaugaccuuauccu

SEQ ID NO: 2839420 - RNA, 20 nt, Human
ucugucccuucugucccuca

SEQ ID NO: 2839421 - RNA, 19 nt, Human
ucugucccuucugucccuc

SEQ ID NO: 2839422 - RNA, 15 nt, Human
ucugucccucacagc

SEQ ID NO: 2839423 - RNA, 23 nt, Human
ucugucccugagagugucucuga

SEQ ID NO: 2839424 - RNA, 14 nt, Human
ucugucccucacag

SEQ ID NO: 2839425 - RNA, 13 nt, Human
ucuguacauuuug

SEQ ID NO: 2839426 - RNA, 19 nt, Human
ucuguacauuuuguuguaa

SEQ ID NO: 2839427 - RNA, 21 nt, Human
ucuguacauuuuguuguaaaa

SEQ ID NO: 2839428 - RNA, 22 nt, Human
ucuguacauuuuguuguaaaaa

SEQ ID NO: 2839429 - RNA, 17 nt, Human
ucuguacgucugacagg

SEQ ID NO: 2839430 - RNA, 23 nt, Human
ucugucccuucugucccucacag

SEQ ID NO: 2839431 - RNA, 22 nt, Human
ucugucccuucugucccucaca

SEQ ID NO: 2839432 - RNA, 14 nt, Human
ucugucccuugcug

SEQ ID NO: 2839433 - RNA, 15 nt, Human
ucugucccuugcugu

SEQ ID NO: 2839434 - RNA, 16 nt, Human
ucugucccuugcugua

SEQ ID NO: 2839435 - RNA, 17 nt, Human
ucugucccuugcuguau

SEQ ID NO: 2839436 - RNA, 22 nt, Human
ucugugucagguggggcagcuu

SEQ ID NO: 2839437 - RNA, 19 nt, Human
ucuguguaaccauuuuaua

SEQ ID NO: 2839438 - RNA, 18 nt, Human
ucuguguccuucccugca

SEQ ID NO: 2839439 - RNA, 14 nt, Human
ucugugucuaagau

SEQ ID NO: 2839440 - RNA, 16 nt, Human
ucugugucuaagauuc

SEQ ID NO: 2839441 - RNA, 17 nt, Human
ucugugucuaagauucu

SEQ ID NO: 2839442 - RNA, 11 nt, Human
ucuguguccuu

SEQ ID NO: 2839443 - RNA, 15 nt, Human
ucuguguccuucccu

SEQ ID NO: 2839444 - RNA, 17 nt, Human
ucuguguccuucccugc

SEQ ID NO: 2839445 - RNA, 18 nt, Human
ucugugucuaagauucua

SEQ ID NO: 2839446 - RNA, 20 nt, Human
ucugugucuaagauucuaga

SEQ ID NO: 2839447 - RNA, 22 nt, Human
ucugugucuaagauucuagauc

SEQ ID NO: 2839448 - RNA, 23 nt, Human
ucugugucuaagauucuagauca

SEQ ID NO: 2839449 - RNA, 23 nt, Human
ucuggagcccuaaccccuuccag

SEQ ID NO: 2839450 - RNA, 21 nt, Human
ucuggagcccuaaccccuucc

SEQ ID NO: 2839451 - RNA, 16 nt, Human
ucuggagcccuaaccc

SEQ ID NO: 2839452 - RNA, 13 nt, Human
ucuggagcccuug

SEQ ID NO: 2839453 - RNA, 12 nt, Human
ucuggagcccuu

SEQ ID NO: 2839454 - RNA, 16 nt, Human
ucuggagcccuugggu

SEQ ID NO: 2839455 - RNA, 14 nt, Human
ucuggagcuguccg

SEQ ID NO: 2839456 - RNA, 16 nt, Human
ucuggaggccuuccag

SEQ ID NO: 2839457 - RNA, 17 nt, Human
ucuggaggccuuccagc

SEQ ID NO: 2839458 - RNA, 19 nt, Human
ucuggaggccuuccagcug

SEQ ID NO: 2839459 - RNA, 20 nt, Human
ucuggaggccuuccagcugc

SEQ ID NO: 2839460 - RNA, 21 nt, Human
ucuggaggccuuccagcugcu

SEQ ID NO: 2839461 - RNA, 22 nt, Human
ucuggaggccuuccagcugcug

SEQ ID NO: 2839462 - RNA, 23 nt, Human
ucuggaggccuuccagcugcugu

SEQ ID NO: 2839463 - RNA, 22 nt, Human
ucuggcuagaggccagccccac

SEQ ID NO: 2839464 - RNA, 21 nt, Human
ucuggcuagaggccagcccca

SEQ ID NO: 2839465 - RNA, 17 nt, Human
ucuggcuagaggccagc

SEQ ID NO: 2839466 - RNA, 16 nt, Human
ucuggcuagaggccag

SEQ ID NO: 2839467 - RNA, 13 nt, Human
ucuggccuuuccu

SEQ ID NO: 2839468 - RNA, 21 nt, Human
ucuggccuuuccucucuccug

SEQ ID NO: 2839469 - RNA, 15 nt, Human
ucuggagaccaggga

SEQ ID NO: 2839470 - RNA, 19 nt, Human
ucuggagaccagggagccu

SEQ ID NO: 2839471 - RNA, 20 nt, Human
ucuggagaccagggagccuu

SEQ ID NO: 2839472 - RNA, 15 nt, Human
ucuggagacagcccc

SEQ ID NO: 2839473 - RNA, 16 nt, Human
ucuggagacagcccca

SEQ ID NO: 2839474 - RNA, 17 nt, Human
ucuggagacagccccag

SEQ ID NO: 2839475 - RNA, 18 nt, Human
ucuggagacagccccaga

SEQ ID NO: 2839476 - RNA, 20 nt, Human
ucuggagacagccccagagc

SEQ ID NO: 2839477 - RNA, 22 nt, Human
ucuggagacagccccagagcag

SEQ ID NO: 2839478 - RNA, 24 nt, Human
ucuggagacagccccagagcaggg

SEQ ID NO: 2839479 - RNA, 21 nt, Human
ucuggagaccagggagccuuu

SEQ ID NO: 2839480 - RNA, 12 nt, Human
ucuggagagaaa

SEQ ID NO: 2839481 - RNA, 15 nt, Human
ucuggagagaaacaa

SEQ ID NO: 2839482 - RNA, 21 nt, Human
ucugcacaugucuuguacaug

SEQ ID NO: 2839483 - RNA, 22 nt, Human
ucugcacaugucuuguacaugu

SEQ ID NO: 2839484 - RNA, 13 nt, Human
ucugcaccccucu

SEQ ID NO: 2839485 - RNA, 21 nt, Human
ucugcaccccucugcccucau

SEQ ID NO: 2839486 - RNA, 12 nt, Human
ucuggagacagc

SEQ ID NO: 2839487 - RNA, 14 nt, Human
ucuguaaucccagc

SEQ ID NO: 2839488 - RNA, 15 nt, Human
ucugguuucaccgag

SEQ ID NO: 2839489 - RNA, 14 nt, Human
ucugguuucucauu

SEQ ID NO: 2839490 - RNA, 16 nt, Human
ucugguuucucauucu

SEQ ID NO: 2839491 - RNA, 13 nt, Human
ucugguuuuaaca

SEQ ID NO: 2839492 - RNA, 15 nt, Human
ucugguuuuaacaau

SEQ ID NO: 2839493 - RNA, 16 nt, Human
ucuguaaaaacacuga

SEQ ID NO: 2839494 - RNA, 19 nt, Human
ucuguaaaaacacugaaaa

SEQ ID NO: 2839495 - RNA, 12 nt, Human
ucugggacacag

SEQ ID NO: 2839496 - RNA, 15 nt, Human
ucugggaaccuccca

SEQ ID NO: 2839497 - RNA, 16 nt, Human
ucugggaaccucccag

SEQ ID NO: 2839498 - RNA, 17 nt, Human
ucugggaaccucccaga

SEQ ID NO: 2839499 - RNA, 18 nt, Human
ucugggaaccucccagag

SEQ ID NO: 2839500 - RNA, 19 nt, Human
ucugggaaccucccagagg

SEQ ID NO: 2839501 - RNA, 20 nt, Human
ucugggaaccucccagaggu

SEQ ID NO: 2839502 - RNA, 22 nt, Human
ucugggaaccucccagaggucc

SEQ ID NO: 2839503 - RNA, 14 nt, Human
ucugggaagggaag

SEQ ID NO: 2839504 - RNA, 13 nt, Human
ucugggacacagu

SEQ ID NO: 2839505 - RNA, 22 nt, Human
ucugggaaaugagaaggcagcc

SEQ ID NO: 2839506 - RNA, 13 nt, Human
ucugguucugaug

SEQ ID NO: 2839507 - RNA, 14 nt, Human
ucugguucugaugc

SEQ ID NO: 2839508 - RNA, 13 nt, Human
ucuggcuuggccu

SEQ ID NO: 2839509 - RNA, 14 nt, Human
ucuggcuuggccua

SEQ ID NO: 2839510 - RNA, 22 nt, Human
ucuggcuugggcagggucuguu

SEQ ID NO: 2839511 - RNA, 21 nt, Human
ucuuguuuuuuuuuuccacuu

SEQ ID NO: 2839512 - RNA, 18 nt, Human
ucuuguuuuuuuuuucca

SEQ ID NO: 2839513 - RNA, 12 nt, Human
ucuuuaaaacaa

SEQ ID NO: 2839514 - RNA, 13 nt, Human
ucuuuaaaacaaa

SEQ ID NO: 2839515 - RNA, 14 nt, Human
ucuuuaaaacaaaa

SEQ ID NO: 2839516 - RNA, 15 nt, Human
ucuuuaaaacaaaac

SEQ ID NO: 2839517 - RNA, 16 nt, Human
ucuuuaaaacaaaaca

SEQ ID NO: 2839518 - RNA, 14 nt, Human
ucuuuaaaagagag

SEQ ID NO: 2839519 - RNA, 15 nt, Human
ucuuuaaaagagaga

SEQ ID NO: 2839520 - RNA, 16 nt, Human
ucuuuaaaagagagag

SEQ ID NO: 2839521 - RNA, 17 nt, Human
ucuuuaaaagagagaga

SEQ ID NO: 2839522 - RNA, 23 nt, Human
ucuuuaaaagagagagagagaaa

SEQ ID NO: 2839523 - RNA, 15 nt, Human
ucuugugaaggcagg

SEQ ID NO: 2839524 - RNA, 16 nt, Human
ucuugugaaggccaug

SEQ ID NO: 2839525 - RNA, 14 nt, Human
ucuugugaaauggc

SEQ ID NO: 2839526 - RNA, 10 nt, Human
ucuugugaag

SEQ ID NO: 2839527 - RNA, 11 nt, Human
ucuugugaagg

SEQ ID NO: 2839528 - RNA, 11 nt, Human
ucuugcucugc

SEQ ID NO: 2839529 - RNA, 14 nt, Human
ucuugcucccuuca

SEQ ID NO: 2839530 - RNA, 17 nt, Human
ucuugcucccuucagcc

SEQ ID NO: 2839531 - RNA, 18 nt, Human
ucuugcucccuucagccc

SEQ ID NO: 2839532 - RNA, 19 nt, Human
ucuugcucccuucagcccc

SEQ ID NO: 2839533 - RNA, 22 nt, Human
ucuugcucccuucagcccccag

SEQ ID NO: 2839534 - RNA, 16 nt, Human
ucuugccuuacacaaa

SEQ ID NO: 2839535 - RNA, 13 nt, Human
ucuugcucugcug

SEQ ID NO: 2839536 - RNA, 12 nt, Human
ucuugcucugcu

SEQ ID NO: 2839537 - RNA, 17 nt, Human
ucuugcucuaucucuca

SEQ ID NO: 2839538 - RNA, 18 nt, Human
ucuugcucuaucucucaa

SEQ ID NO: 2839539 - RNA, 22 nt, Human
ucuuguccaugugguucuucaa

SEQ ID NO: 2839540 - RNA, 23 nt, Human
ucuuguccaugugguucuucaaa

SEQ ID NO: 2839541 - RNA, 20 nt, Human
ucuugucccacgugucuucc

SEQ ID NO: 2839542 - RNA, 23 nt, Human
ucuugucccacgugucuuccacu

SEQ ID NO: 2839543 - RNA, 13 nt, Human
ucuugucagacau

SEQ ID NO: 2839544 - RNA, 14 nt, Human
ucuugucagacaua

SEQ ID NO: 2839545 - RNA, 18 nt, Human
ucuugucagacauaaagc

SEQ ID NO: 2839546 - RNA, 19 nt, Human
ucuugucagacauaaagcc

SEQ ID NO: 2839547 - RNA, 20 nt, Human
ucuugucagacauaaagcca

SEQ ID NO: 2839548 - RNA, 21 nt, Human
ucuugucagacauaaagccau

SEQ ID NO: 2839549 - RNA, 23 nt, Human
ucuugucagacauaaagccaugu

SEQ ID NO: 2839550 - RNA, 12 nt, Human
ucuucuccaggc

SEQ ID NO: 2839551 - RNA, 16 nt, Human
ucuucuccacuggaug

SEQ ID NO: 2839552 - RNA, 14 nt, Human
ucuucuccagauuu

SEQ ID NO: 2839553 - RNA, 15 nt, Human
ucuucuccagauuuu

SEQ ID NO: 2839554 - RNA, 17 nt, Human
ucuucuccagauuuuuc

SEQ ID NO: 2839555 - RNA, 23 nt, Human
ucuucuccagauuuuucggaggc

SEQ ID NO: 2839556 - RNA, 14 nt, Human
ucuucuccaggcug

SEQ ID NO: 2839557 - RNA, 13 nt, Human
ucuucuccaggcu

SEQ ID NO: 2839558 - RNA, 18 nt, Human
ucuugaacuccuggccuc

SEQ ID NO: 2839559 - RNA, 17 nt, Human
ucuugaacuccuggccu

SEQ ID NO: 2839560 - RNA, 16 nt, Human
ucuugaacuccuggcc

SEQ ID NO: 2839561 - RNA, 15 nt, Human
ucuucuccaggcugu

SEQ ID NO: 2839562 - RNA, 18 nt, Human
ucuugaauuucuaaaaaa

SEQ ID NO: 2839563 - RNA, 13 nt, Human
ucuugacaaaacc

SEQ ID NO: 2839564 - RNA, 14 nt, Human
ucuuaaaaugcaau

SEQ ID NO: 2839565 - RNA, 15 nt, Human
ucuuaaaaugcaaua

SEQ ID NO: 2839566 - RNA, 16 nt, Human
ucuuaaaaugcaauau

SEQ ID NO: 2839567 - RNA, 21 nt, Human
ucuuaaaaugcaauauuugua

SEQ ID NO: 2839568 - RNA, 23 nt, Human
ucuuaguuuggauucuuauguag

SEQ ID NO: 2839569 - RNA, 16 nt, Human
ucuuaguuuggauucu

SEQ ID NO: 2839570 - RNA, 21 nt, Human
ucuuaguuuggauucuuaugu

SEQ ID NO: 2839571 - RNA, 16 nt, Human
ucuuaaaaaguuguuc

SEQ ID NO: 2839572 - RNA, 19 nt, Human
ucuuaaaaaguuguucaac

SEQ ID NO: 2839573 - RNA, 21 nt, Human
ucuuaaaaaguuguucaacua

SEQ ID NO: 2839574 - RNA, 20 nt, Human
ucuuaaaaauguuuuuucau

SEQ ID NO: 2839575 - RNA, 23 nt, Human
ucuuaaaaguugugauuccagau

SEQ ID NO: 2839576 - RNA, 13 nt, Human
ucuucagggccug

SEQ ID NO: 2839577 - RNA, 15 nt, Human
ucuucagggccuggu

SEQ ID NO: 2839578 - RNA, 22 nt, Human
ucuucagggccugguugaagaa

SEQ ID NO: 2839579 - RNA, 23 nt, Human
ucuucagggccugguugaagaag

SEQ ID NO: 2839580 - RNA, 22 nt, Human
ucuuauggaauugauuugcauu

SEQ ID NO: 2839581 - RNA, 21 nt, Human
ucuuauggaauugauuugcau

SEQ ID NO: 2839582 - RNA, 15 nt, Human
ucuuauggauucauu

SEQ ID NO: 2839583 - RNA, 17 nt, Human
ucuuauggauucauuua

SEQ ID NO: 2839584 - RNA, 18 nt, Human
ucuuauggaauugauuug

SEQ ID NO: 2839585 - RNA, 17 nt, Human
ucuuauggaauugauuu

SEQ ID NO: 2839586 - RNA, 15 nt, Human
ucuuauggaauugau

SEQ ID NO: 2839587 - RNA, 14 nt, Human
ucuuauggaauuga

SEQ ID NO: 2839588 - RNA, 14 nt, Human
ucuuaugcaauuuc

SEQ ID NO: 2839589 - RNA, 17 nt, Human
ucuuaugcuuauaauau

SEQ ID NO: 2839590 - RNA, 13 nt, Human
ucuuauaguucua

SEQ ID NO: 2839591 - RNA, 22 nt, Human
ucuuauagucaauguuucuuuu

SEQ ID NO: 2839592 - RNA, 16 nt, Human
ucuuauaguucuaggc

SEQ ID NO: 2839593 - RNA, 17 nt, Human
ucuuauaguucuaggca

SEQ ID NO: 2839594 - RNA, 12 nt, Human
ucuuauauagca

SEQ ID NO: 2839595 - RNA, 22 nt, Human
ucuuauauagcagcaaaaauau

SEQ ID NO: 2839596 - RNA, 13 nt, Human
ucuuauagaaagu

SEQ ID NO: 2839597 - RNA, 16 nt, Human
ucuuauagcacuuuga

SEQ ID NO: 2839598 - RNA, 17 nt, Human
ucuuauagcacuuugaa

SEQ ID NO: 2839599 - RNA, 18 nt, Human
ucuuauagcacuuugaaa

SEQ ID NO: 2839600 - RNA, 19 nt, Human
ucuuauagcacuuugaaau

SEQ ID NO: 2839601 - RNA, 23 nt, Human
ucuuauagcacuuugaaauaccu

SEQ ID NO: 2839602 - RNA, 17 nt, Human
ucuuauaauacucuguu

SEQ ID NO: 2839603 - RNA, 19 nt, Human
ucuuauaauacucuguugu

SEQ ID NO: 2839604 - RNA, 20 nt, Human
ucuuauaauacucuguugua

SEQ ID NO: 2839605 - RNA, 16 nt, Human
ucuuauacgcuuuucu

SEQ ID NO: 2839606 - RNA, 19 nt, Human
ucuuauacgcuuuucuuug

SEQ ID NO: 2839607 - RNA, 20 nt, Human
ucuuauacgcuuuucuuugu

SEQ ID NO: 2839608 - RNA, 14 nt, Human
ucuuauacuguaca

SEQ ID NO: 2839609 - RNA, 15 nt, Human
ucuuauacuguacaa

SEQ ID NO: 2839610 - RNA, 16 nt, Human
ucuuauacuguacaau

SEQ ID NO: 2839611 - RNA, 18 nt, Human
ucuuauacuguacaauaa

SEQ ID NO: 2839612 - RNA, 21 nt, Human
ucuuauacuguacaauaaaaa

SEQ ID NO: 2839613 - RNA, 16 nt, Human
ucuucagucagaaaac

SEQ ID NO: 2839614 - RNA, 22 nt, Human
ucuucagucagaaaacuuuaaa

SEQ ID NO: 2839615 - RNA, 13 nt, Human
ucuuccacuuugc

SEQ ID NO: 2839616 - RNA, 16 nt, Human
ucuuccagaugugaug

SEQ ID NO: 2839617 - RNA, 15 nt, Human
ucuucuaauuucaaa

SEQ ID NO: 2839618 - RNA, 20 nt, Human
ucuucuaauuucaaaaauau

SEQ ID NO: 2839619 - RNA, 22 nt, Human
ucuucuaaacuuccccaucuuc

SEQ ID NO: 2839620 - RNA, 13 nt, Human
ucuucuaaacuuc

SEQ ID NO: 2839621 - RNA, 17 nt, Human
ucuucaggcuuccugca

SEQ ID NO: 2839622 - RNA, 19 nt, Human
ucuucguucuuuuuaaguu

SEQ ID NO: 2839623 - RNA, 14 nt, Human
ucuucgucuucacu

SEQ ID NO: 2839624 - RNA, 18 nt, Human
ucuucgucuucacucuua

SEQ ID NO: 2839625 - RNA, 13 nt, Human
ucuucuccacugg

SEQ ID NO: 2839626 - RNA, 23 nt, Human
ucuucucaaguucuaagauucua

SEQ ID NO: 2839627 - RNA, 19 nt, Human
ucuucucaaguucuaagau

SEQ ID NO: 2839628 - RNA, 21 nt, Human
ucuucucaaguucuaagauuc

SEQ ID NO: 2839629 - RNA, 14 nt, Human
ucuucucaaguucu

SEQ ID NO: 2839630 - RNA, 15 nt, Human
ucuucucaaguucua

SEQ ID NO: 2839631 - RNA, 17 nt, Human
ucuucucaaguucuaag

SEQ ID NO: 2839632 - RNA, 18 nt, Human
ucuucucaaguucuaaga

SEQ ID NO: 2839633 - RNA, 12 nt, Human
ucuucuagaguu

SEQ ID NO: 2839634 - RNA, 17 nt, Human
ucuucuagaguucagag

SEQ ID NO: 2839635 - RNA, 14 nt, Human
ucuucuagaguuca

SEQ ID NO: 2839636 - RNA, 16 nt, Human
ucuucuauuuuauucc

SEQ ID NO: 2839637 - RNA, 15 nt, Human
ucuucuauuuuauuc

SEQ ID NO: 2839638 - RNA, 14 nt, Human
ucuucuaugaccca

SEQ ID NO: 2839639 - RNA, 19 nt, Human
ucuucuauguaggaaaaaa

SEQ ID NO: 2839640 - RNA, 13 nt, Human
ucuucuauuuugu

SEQ ID NO: 2839641 - RNA, 15 nt, Human
ucuucucaaaagaac

SEQ ID NO: 2839642 - RNA, 11 nt, Human
ucuucucaagu

SEQ ID NO: 2839643 - RNA, 21 nt, Human
ugccuaauaaacauccuucaa

SEQ ID NO: 2839644 - RNA, 18 nt, Human
ugccuaauaaacauccuu

SEQ ID NO: 2839645 - RNA, 16 nt, Human
ugccuagcaagcuggc

SEQ ID NO: 2839646 - RNA, 17 nt, Human
ugccuagcaagcuggcc

SEQ ID NO: 2839647 - RNA, 18 nt, Human
ugccuagcaagcuggccu

SEQ ID NO: 2839648 - RNA, 19 nt, Human
ugccuagcaagcuggccuc

SEQ ID NO: 2839649 - RNA, 20 nt, Human
ugccuagcaagcuggccucu

SEQ ID NO: 2839650 - RNA, 13 nt, Human
ugccuaaguauua

SEQ ID NO: 2839651 - RNA, 15 nt, Human
ugccuaaguauuaaa

SEQ ID NO: 2839652 - RNA, 19 nt, Human
ugccuaaggcugaacuugu

SEQ ID NO: 2839653 - RNA, 22 nt, Human
ugccuaaguauuaaaacauugg

SEQ ID NO: 2839654 - RNA, 23 nt, Human
ugccuaaguauuaaaacauugga

SEQ ID NO: 2839655 - RNA, 17 nt, Human
ugccuaaguauuaaaac

SEQ ID NO: 2839656 - RNA, 19 nt, Human
ugccuaaguauuaaaacau

SEQ ID NO: 2839657 - RNA, 20 nt, Human
ugccuaaguauuaaaacauu

SEQ ID NO: 2839658 - RNA, 21 nt, Human
ugccuaaguauuaaaacauug

SEQ ID NO: 2839659 - RNA, 23 nt, Human
ugcccaggcuggcgugcaguggu

SEQ ID NO: 2839660 - RNA, 13 nt, Human
ugcccaggcuggu

SEQ ID NO: 2839661 - RNA, 15 nt, Human
ugcccaggcuggucu

SEQ ID NO: 2839662 - RNA, 17 nt, Human
ugcccaggcuggucuca

SEQ ID NO: 2839663 - RNA, 16 nt, Human
ugcccaggcuggucuu

SEQ ID NO: 2839664 - RNA, 14 nt, Human
ugcccaggcugugc

SEQ ID NO: 2839665 - RNA, 17 nt, Human
ugccugaagucacacag

SEQ ID NO: 2839666 - RNA, 18 nt, Human
ugccugaagucacacagu

SEQ ID NO: 2839667 - RNA, 22 nt, Human
ugccugaagucacacagugagu

SEQ ID NO: 2839668 - RNA, 18 nt, Human
ugccugauccuccaacag

SEQ ID NO: 2839669 - RNA, 22 nt, Human
ugccugauauuucccuccccug

SEQ ID NO: 2839670 - RNA, 15 nt, Human
ugccugauggaccug

SEQ ID NO: 2839671 - RNA, 15 nt, Human
ugccugauugccaag

SEQ ID NO: 2839672 - RNA, 20 nt, Human
ugccugauugccaagcucag

SEQ ID NO: 2839673 - RNA, 17 nt, Human
ugccugcacaaacucac

SEQ ID NO: 2839674 - RNA, 19 nt, Human
ugccugagucacccaugaa

SEQ ID NO: 2839675 - RNA, 16 nt, Human
ugccugagugccuggc

SEQ ID NO: 2839676 - RNA, 17 nt, Human
ugccuccuguguacugu

SEQ ID NO: 2839677 - RNA, 18 nt, Human
ugccuccuguguacugug

SEQ ID NO: 2839678 - RNA, 20 nt, Human
ugccuccuguguacuguguc

SEQ ID NO: 2839679 - RNA, 21 nt, Human
ugccuccuguguacuguguca

SEQ ID NO: 2839680 - RNA, 17 nt, Human
ugccucugucuagcaug

SEQ ID NO: 2839681 - RNA, 21 nt, Human
ugccucugucuagcaugccaa

SEQ ID NO: 2839682 - RNA, 17 nt, Human
ugccuucugacggcccu

SEQ ID NO: 2839683 - RNA, 18 nt, Human
ugccuucugacggcccug

SEQ ID NO: 2839684 - RNA, 19 nt, Human
ugccuucugacggcccugc

SEQ ID NO: 2839685 - RNA, 20 nt, Human
ugccuucugacggcccugca

SEQ ID NO: 2839686 - RNA, 22 nt, Human
ugccuucugacggcccugcaau

SEQ ID NO: 2839687 - RNA, 16 nt, Human
ugcgcagaaaacaaga

SEQ ID NO: 2839688 - RNA, 15 nt, Human
ugcgcagccccaucu

SEQ ID NO: 2839689 - RNA, 16 nt, Human
ugcgcagccccaucug

SEQ ID NO: 2839690 - RNA, 17 nt, Human
ugcgcagccccaucugu

SEQ ID NO: 2839691 - RNA, 20 nt, Human
ugcgcagccccaucugugca

SEQ ID NO: 2839692 - RNA, 21 nt, Human
ugcgcagccccaucugugcau

SEQ ID NO: 2839693 - RNA, 15 nt, Human
ugcgauuuuauuacu

SEQ ID NO: 2839694 - RNA, 16 nt, Human
ugcgauuuuauuacug

SEQ ID NO: 2839695 - RNA, 16 nt, Human
ugccuuccuuucucca

SEQ ID NO: 2839696 - RNA, 18 nt, Human
ugccuuccuuucuccagg

SEQ ID NO: 2839697 - RNA, 19 nt, Human
ugccuuccuuucuccagga

SEQ ID NO: 2839698 - RNA, 20 nt, Human
ugccuuccuuucuccaggac

SEQ ID NO: 2839699 - RNA, 21 nt, Human
ugccuuccuuucuccaggacc

SEQ ID NO: 2839700 - RNA, 22 nt, Human
ugccuuccuuucuccaggacca

SEQ ID NO: 2839701 - RNA, 23 nt, Human
ugccuuccuuucuccaggaccaa

SEQ ID NO: 2839702 - RNA, 13 nt, Human
ugcgccuacagga

SEQ ID NO: 2839703 - RNA, 15 nt, Human
ugcgcccuuaccuuc

SEQ ID NO: 2839704 - RNA, 16 nt, Human
ugcgcccuuaccuucc

SEQ ID NO: 2839705 - RNA, 18 nt, Human
ugcgcccaguccuuccac

SEQ ID NO: 2839706 - RNA, 17 nt, Human
ugcgcccaguccuucca

SEQ ID NO: 2839707 - RNA, 19 nt, Human
ugcgauuuugccugugucu

SEQ ID NO: 2839708 - RNA, 16 nt, Human
ugcgcaaaaugcagcu

SEQ ID NO: 2839709 - RNA, 17 nt, Human
ugcgcaggcuggcccug

SEQ ID NO: 2839710 - RNA, 16 nt, Human
ugcgcaggcuggcccu

SEQ ID NO: 2839711 - RNA, 13 nt, Human
ugcgcaggcuggc

SEQ ID NO: 2839712 - RNA, 20 nt, Human
ugccuggccaggcagaucug

SEQ ID NO: 2839713 - RNA, 16 nt, Human
ugccuggccaggcaga

SEQ ID NO: 2839714 - RNA, 14 nt, Human
ugccuggccaggca

SEQ ID NO: 2839715 - RNA, 12 nt, Human
ugccuggccagg

SEQ ID NO: 2839716 - RNA, 15 nt, Human
ugccuggccacugcu

SEQ ID NO: 2839717 - RNA, 18 nt, Human
ugccuggccacugcuccc

SEQ ID NO: 2839718 - RNA, 23 nt, Human
ugccuggccacugcucccuaagc

SEQ ID NO: 2839719 - RNA, 19 nt, Human
ugccugcacaaacucacca

SEQ ID NO: 2839720 - RNA, 16 nt, Human
ugccuggccuggcaca

SEQ ID NO: 2839721 - RNA, 21 nt, Human
ugccuggccccucgccugugg

SEQ ID NO: 2839722 - RNA, 13 nt, Human
ugccuggccggcc

SEQ ID NO: 2839723 - RNA, 14 nt, Human
ugccuggccggcca

SEQ ID NO: 2839724 - RNA, 15 nt, Human
ugccuggccggccag

SEQ ID NO: 2839725 - RNA, 16 nt, Human
ugccuggccggccagc

SEQ ID NO: 2839726 - RNA, 17 nt, Human
ugccuggccggccagcc

SEQ ID NO: 2839727 - RNA, 18 nt, Human
ugccuggccggccagcca

SEQ ID NO: 2839728 - RNA, 23 nt, Human
ugccuggccggccagccagccac

SEQ ID NO: 2839729 - RNA, 17 nt, Human
ugccuggccuggcacac

SEQ ID NO: 2839730 - RNA, 20 nt, Human
ugccuggccuggcacacauc

SEQ ID NO: 2839731 - RNA, 16 nt, Human
ugccuuauuaaaguuc

SEQ ID NO: 2839732 - RNA, 22 nt, Human
ugccuggccuggcacacaucag

SEQ ID NO: 2839733 - RNA, 18 nt, Human
ugccuggccuuccugucu

SEQ ID NO: 2839734 - RNA, 13 nt, Human
ugccuucagcucu

SEQ ID NO: 2839735 - RNA, 19 nt, Human
ugccuucauuaccuuuuuu

SEQ ID NO: 2839736 - RNA, 17 nt, Human
ugccuucauuaccuuuu

SEQ ID NO: 2839737 - RNA, 24 nt, Human
ugccuucauggaacucagcugucu

SEQ ID NO: 2839738 - RNA, 17 nt, Human
ugccuucagcucuacag

SEQ ID NO: 2839739 - RNA, 18 nt, Human
ugccuucagcucuacagc

SEQ ID NO: 2839740 - RNA, 14 nt, Human
ugccuuccuaagcc

SEQ ID NO: 2839741 - RNA, 16 nt, Human
ugccuuccuaagccug

SEQ ID NO: 2839742 - RNA, 19 nt, Human
ugccuuccuaagccugugg

SEQ ID NO: 2839743 - RNA, 20 nt, Human
ugccuuccuaagccuguggc

SEQ ID NO: 2839744 - RNA, 21 nt, Human
ugccuuccuaagccuguggcu

SEQ ID NO: 2839745 - RNA, 23 nt, Human
ugccuuccuaagccuguggcugu

SEQ ID NO: 2839746 - RNA, 13 nt, Human
ugcgugggucaga

SEQ ID NO: 2839747 - RNA, 16 nt, Human
ugcgugggucagaaga

SEQ ID NO: 2839748 - RNA, 18 nt, Human
ugcguggacucugcacau

SEQ ID NO: 2839749 - RNA, 22 nt, Human
ugcguggacucugcacaugucu

SEQ ID NO: 2839750 - RNA, 13 nt, Human
ugcgugucguggg

SEQ ID NO: 2839751 - RNA, 16 nt, Human
ugcguggacucugcac

SEQ ID NO: 2839752 - RNA, 17 nt, Human
ugcguggacucugcaca

SEQ ID NO: 2839753 - RNA, 17 nt, Human
ugcgugccccugcugcu

SEQ ID NO: 2839754 - RNA, 15 nt, Human
ugcgugccgugugag

SEQ ID NO: 2839755 - RNA, 17 nt, Human
ugcgugccgugugagug

SEQ ID NO: 2839756 - RNA, 18 nt, Human
ugcgugccgugugagugu

SEQ ID NO: 2839757 - RNA, 19 nt, Human
ugcgugccgugugagugug

SEQ ID NO: 2839758 - RNA, 23 nt, Human
ugcgugccgugugagugugacag

SEQ ID NO: 2839759 - RNA, 23 nt, Human
ugcguacguuuccugagaagugu

SEQ ID NO: 2839760 - RNA, 20 nt, Human
ugcguacguuuccugagaag

SEQ ID NO: 2839761 - RNA, 15 nt, Human
ugcguacguuuccug

SEQ ID NO: 2839762 - RNA, 20 nt, Human
ugcuagcaaauggcagaacc

SEQ ID NO: 2839763 - RNA, 13 nt, Human
ugcuagauaaaag

SEQ ID NO: 2839764 - RNA, 14 nt, Human
ugcuagauaaaagc

SEQ ID NO: 2839765 - RNA, 13 nt, Human
ugcuagaauacuu

SEQ ID NO: 2839766 - RNA, 16 nt, Human
ugcuagaauacuuuuu

SEQ ID NO: 2839767 - RNA, 19 nt, Human
ugcuagacucuagacaaga

SEQ ID NO: 2839768 - RNA, 11 nt, Human
ugcuagaacuu

SEQ ID NO: 2839769 - RNA, 12 nt, Human
ugcuagaacuuu

SEQ ID NO: 2839770 - RNA, 13 nt, Human
ugcuagaacuuuu

SEQ ID NO: 2839771 - RNA, 14 nt, Human
ugcuagaacuuuuu

SEQ ID NO: 2839772 - RNA, 16 nt, Human
ugcuagaacuuuuuua

SEQ ID NO: 2839773 - RNA, 17 nt, Human
ugcuagaacuuuuuuaa

SEQ ID NO: 2839774 - RNA, 19 nt, Human
ugcuagaacuuuuuuaaau

SEQ ID NO: 2839775 - RNA, 20 nt, Human
ugcuagaacuuuuuuaaaua

SEQ ID NO: 2839776 - RNA, 21 nt, Human
ugcuagaacuuuuuuaaauaa

SEQ ID NO: 2839777 - RNA, 22 nt, Human
ugcuagaacuuuuuuaaauaaa

SEQ ID NO: 2839778 - RNA, 23 nt, Human
ugcuagaacuuuuuuaaauaaac

SEQ ID NO: 2839779 - RNA, 14 nt, Human
ugcuagaagaaaac

SEQ ID NO: 2839780 - RNA, 15 nt, Human
ugcuagaagaaaaca

SEQ ID NO: 2839781 - RNA, 18 nt, Human
ugcuagcgcguugccugu

SEQ ID NO: 2839782 - RNA, 19 nt, Human
ugcuagcgcguugccuguc

SEQ ID NO: 2839783 - RNA, 18 nt, Human
ugcuagcaguaaaagaug

SEQ ID NO: 2839784 - RNA, 22 nt, Human
ugcuagcaguaaaagaugaagu

SEQ ID NO: 2839785 - RNA, 18 nt, Human
ugcuagcuaugugaccuu

SEQ ID NO: 2839786 - RNA, 17 nt, Human
ugcuagcuaugugaccu

SEQ ID NO: 2839787 - RNA, 23 nt, Human
ugcuagguuaauuccaauuauau

SEQ ID NO: 2839788 - RNA, 16 nt, Human
ugcuagguuaauucca

SEQ ID NO: 2839789 - RNA, 22 nt, Human
ugcuaggucucggacuaagccu

SEQ ID NO: 2839790 - RNA, 14 nt, Human
ugcuaggucucgga

SEQ ID NO: 2839791 - RNA, 23 nt, Human
ugcucaggacucagaagccucug

SEQ ID NO: 2839792 - RNA, 17 nt, Human
ugcucaggacucagaag

SEQ ID NO: 2839793 - RNA, 14 nt, Human
ugcucaggacucag

SEQ ID NO: 2839794 - RNA, 19 nt, Human
ugcuccucuccccagcaag

SEQ ID NO: 2839795 - RNA, 18 nt, Human
ugcuccucuccccagcaa

SEQ ID NO: 2839796 - RNA, 16 nt, Human
ugcucaucuguuguag

SEQ ID NO: 2839797 - RNA, 13 nt, Human
ugcuccugcagca

SEQ ID NO: 2839798 - RNA, 15 nt, Human
ugcuccugcagcaug

SEQ ID NO: 2839799 - RNA, 22 nt, Human
ugcuccugccaggccuucagaa

SEQ ID NO: 2839800 - RNA, 22 nt, Human
ugcucaucauuccuugagaaaa

SEQ ID NO: 2839801 - RNA, 19 nt, Human
ugcugaucaucgccagagg

SEQ ID NO: 2839802 - RNA, 21 nt, Human
ugcugaucaucgccagaggug

SEQ ID NO: 2839803 - RNA, 23 nt, Human
ugcugaucaucgccagaggugcu

SEQ ID NO: 2839804 - RNA, 14 nt, Human
ugcugauccuugca

SEQ ID NO: 2839805 - RNA, 14 nt, Human
ugcugaugaaucac

SEQ ID NO: 2839806 - RNA, 19 nt, Human
ugcugaugaaucacuguuu

SEQ ID NO: 2839807 - RNA, 20 nt, Human
ugcugaugaaucacuguuuu

SEQ ID NO: 2839808 - RNA, 19 nt, Human
ugcugacagacacaggccc

SEQ ID NO: 2839809 - RNA, 16 nt, Human
ugcugacagacacagg

SEQ ID NO: 2839810 - RNA, 15 nt, Human
ugcugacagacacag

SEQ ID NO: 2839811 - RNA, 18 nt, Human
ugcugaauauacagcagg

SEQ ID NO: 2839812 - RNA, 17 nt, Human
ugcugauguccucacca

SEQ ID NO: 2839813 - RNA, 13 nt, Human
ugcugcaggggcu

SEQ ID NO: 2839814 - RNA, 17 nt, Human
ugcugcaggggcucugg

SEQ ID NO: 2839815 - RNA, 18 nt, Human
ugcugcaggggcucugga

SEQ ID NO: 2839816 - RNA, 19 nt, Human
ugcugcaggggcucuggag

SEQ ID NO: 2839817 - RNA, 21 nt, Human
ugcugcaggacuugagaagac

SEQ ID NO: 2839818 - RNA, 17 nt, Human
ugcugauucucccguuc

SEQ ID NO: 2839819 - RNA, 14 nt, Human
ugcugcacuaauug

SEQ ID NO: 2839820 - RNA, 15 nt, Human
ugcugcacuuccugu

SEQ ID NO: 2839821 - RNA, 17 nt, Human
ugcugcacuuccuguuu

SEQ ID NO: 2839822 - RNA, 15 nt, Human
ugcucuuuuuuacuc

SEQ ID NO: 2839823 - RNA, 17 nt, Human
ugcucuuuuuuacucau

SEQ ID NO: 2839824 - RNA, 18 nt, Human
ugcucuuuuuuacucauu

SEQ ID NO: 2839825 - RNA, 22 nt, Human
ugcucuuuuuuacucauugaaa

SEQ ID NO: 2839826 - RNA, 17 nt, Human
ugcuccuggccuugcug

SEQ ID NO: 2839827 - RNA, 19 nt, Human
ugcuccuggccuugcugac

SEQ ID NO: 2839828 - RNA, 12 nt, Human
ugcuccuuggcu

SEQ ID NO: 2839829 - RNA, 15 nt, Human
ugcuccuuggcuuac

SEQ ID NO: 2839830 - RNA, 17 nt, Human
ugcuccuuggcuuaccu

SEQ ID NO: 2839831 - RNA, 19 nt, Human
ugcuccuuggcuuaccuga

SEQ ID NO: 2839832 - RNA, 22 nt, Human
ugcuccuuggcuuaccugaccu

SEQ ID NO: 2839833 - RNA, 13 nt, Human
ugcugaagggcau

SEQ ID NO: 2839834 - RNA, 18 nt, Human
ugcugaagggcauucuuu

SEQ ID NO: 2839835 - RNA, 21 nt, Human
ugcugaagggcauucuuuccc

SEQ ID NO: 2839836 - RNA, 20 nt, Human
ugcugaaaaccaucuggccu

SEQ ID NO: 2839837 - RNA, 21 nt, Human
ugcugaaaaccaucuggccug

SEQ ID NO: 2839838 - RNA, 22 nt, Human
ugcugaaaaccaucuggccugg

SEQ ID NO: 2839839 - RNA, 23 nt, Human
ugcugaaaaccaucuggccuggc

SEQ ID NO: 2839840 - RNA, 17 nt, Human
ugcagauuugggcugga

SEQ ID NO: 2839841 - RNA, 23 nt, Human
ugcagagugccccaucggucacc

SEQ ID NO: 2839842 - RNA, 18 nt, Human
ugcagcaaggcccugcug

SEQ ID NO: 2839843 - RNA, 19 nt, Human
ugcagcaaggcccugcugc

SEQ ID NO: 2839844 - RNA, 20 nt, Human
ugcagcaaggcccugcugcc

SEQ ID NO: 2839845 - RNA, 16 nt, Human
ugcacguacacacaca

SEQ ID NO: 2839846 - RNA, 16 nt, Human
ugcacuugcagacucu

SEQ ID NO: 2839847 - RNA, 21 nt, Human
ugcacuugcagacucuacaga

SEQ ID NO: 2839848 - RNA, 20 nt, Human
ugcacuugugauuauuuauu

SEQ ID NO: 2839849 - RNA, 17 nt, Human
ugcacuugugauuauuu

SEQ ID NO: 2839850 - RNA, 18 nt, Human
ugcagcauuugauaauga

SEQ ID NO: 2839851 - RNA, 22 nt, Human
ugcagcauuugauaaugauaaa

SEQ ID NO: 2839852 - RNA, 11 nt, Human
ugcagccagcu

SEQ ID NO: 2839853 - RNA, 12 nt, Human
ugcagcccaugc

SEQ ID NO: 2839854 - RNA, 13 nt, Human
ugcagcuuuaaaa

SEQ ID NO: 2839855 - RNA, 14 nt, Human
ugcagcuuuugguc

SEQ ID NO: 2839856 - RNA, 15 nt, Human
ugcagcuuuacaugc

SEQ ID NO: 2839857 - RNA, 16 nt, Human
ugcagcuuuacaugca

SEQ ID NO: 2839858 - RNA, 13 nt, Human
ugcagcuuuaugu

SEQ ID NO: 2839859 - RNA, 15 nt, Human
ugcagcuuuauguuc

SEQ ID NO: 2839860 - RNA, 22 nt, Human
ugcagcuuuauguucauuuguu

SEQ ID NO: 2839861 - RNA, 23 nt, Human
ugcagcuugugugcaaaagcagu

SEQ ID NO: 2839862 - RNA, 22 nt, Human
ugcagcuuuaaaaaauuaaucu

SEQ ID NO: 2839863 - RNA, 12 nt, Human
ugcaggaaucaa

SEQ ID NO: 2839864 - RNA, 14 nt, Human
ugcaggaaucaaaa

SEQ ID NO: 2839865 - RNA, 15 nt, Human
ugcaggaaucaaaaa

SEQ ID NO: 2839866 - RNA, 19 nt, Human
ugcaggaaucaaaaauuga

SEQ ID NO: 2839867 - RNA, 20 nt, Human
ugcaggaaucaaaaauugaa

SEQ ID NO: 2839868 - RNA, 21 nt, Human
ugcaggaaucaaaaauugaag

SEQ ID NO: 2839869 - RNA, 15 nt, Human
ugcaggaccugccug

SEQ ID NO: 2839870 - RNA, 14 nt, Human
ugcacauauggacu

SEQ ID NO: 2839871 - RNA, 15 nt, Human
ugcacauauggacuc

SEQ ID NO: 2839872 - RNA, 17 nt, Human
ugcacauauggacucug

SEQ ID NO: 2839873 - RNA, 18 nt, Human
ugcacauauggacucugc

SEQ ID NO: 2839874 - RNA, 19 nt, Human
ugcacauauggacucugca

SEQ ID NO: 2839875 - RNA, 13 nt, Human
ugcacauccauuc

SEQ ID NO: 2839876 - RNA, 16 nt, Human
ugcacauccauuccca

SEQ ID NO: 2839877 - RNA, 18 nt, Human
ugcacauccauucccaag

SEQ ID NO: 2839878 - RNA, 20 nt, Human
ugcaccugccagccuggcuu

SEQ ID NO: 2839879 - RNA, 19 nt, Human
ugcaccugccagccuggcu

SEQ ID NO: 2839880 - RNA, 18 nt, Human
ugcaccugccagccuggc

SEQ ID NO: 2839881 - RNA, 17 nt, Human
ugcaccugccagccugg

SEQ ID NO: 2839882 - RNA, 16 nt, Human
ugcaccugccagccug

SEQ ID NO: 2839883 - RNA, 15 nt, Human
ugcaccugccagccu

SEQ ID NO: 2839884 - RNA, 23 nt, Human
ugcaccuacccauacacccccuc

SEQ ID NO: 2839885 - RNA, 17 nt, Human
ugcaccuagcugugcaa

SEQ ID NO: 2839886 - RNA, 19 nt, Human
ugcaccuagcugugcaaga

SEQ ID NO: 2839887 - RNA, 20 nt, Human
ugcaccuagcugugcaagac

SEQ ID NO: 2839888 - RNA, 18 nt, Human
ugcacagcggccccugca

SEQ ID NO: 2839889 - RNA, 10 nt, Human
ugcacagcug

SEQ ID NO: 2839890 - RNA, 11 nt, Human
ugcacagcugu

SEQ ID NO: 2839891 - RNA, 12 nt, Human
ugcacagcuguc

SEQ ID NO: 2839892 - RNA, 13 nt, Human
ugcacagcugucc

SEQ ID NO: 2839893 - RNA, 14 nt, Human
ugcacagcugucca

SEQ ID NO: 2839894 - RNA, 22 nt, Human
ugcacaguuagcaaacuuugua

SEQ ID NO: 2839895 - RNA, 19 nt, Human
ugcacagugcaucucagcc

SEQ ID NO: 2839896 - RNA, 20 nt, Human
ugcacagugcaucucagccc

SEQ ID NO: 2839897 - RNA, 18 nt, Human
ugcacagugcaucucagc

SEQ ID NO: 2839898 - RNA, 18 nt, Human
ugcacaggaugcuggccu

SEQ ID NO: 2839899 - RNA, 21 nt, Human
ugaagucgucuuaacucacca

SEQ ID NO: 2839900 - RNA, 14 nt, Human
ugaaguccuggcuu

SEQ ID NO: 2839901 - RNA, 16 nt, Human
ugaaguccuggcuuca

SEQ ID NO: 2839902 - RNA, 10 nt, Human
ugaagucuug

SEQ ID NO: 2839903 - RNA, 12 nt, Human
ugaagucuugua

SEQ ID NO: 2839904 - RNA, 13 nt, Human
ugaagucuuguau

SEQ ID NO: 2839905 - RNA, 14 nt, Human
ugaagucuuguaua

SEQ ID NO: 2839906 - RNA, 14 nt, Human
ugcacagaagcaca

SEQ ID NO: 2839907 - RNA, 14 nt, Human
ugcacagaaguccu

SEQ ID NO: 2839908 - RNA, 15 nt, Human
ugcacagaaguccug

SEQ ID NO: 2839909 - RNA, 16 nt, Human
ugcacagaaguccugu

SEQ ID NO: 2839910 - RNA, 21 nt, Human
ugcacagaaguccuguauguc

SEQ ID NO: 2839911 - RNA, 22 nt, Human
ugcacagaaguccuguaugucu

SEQ ID NO: 2839912 - RNA, 12 nt, Human
ugcacagagaag

SEQ ID NO: 2839913 - RNA, 13 nt, Human
ugcacagagaagc

SEQ ID NO: 2839914 - RNA, 15 nt, Human
ugcacagagaagcug

SEQ ID NO: 2839915 - RNA, 17 nt, Human
ugcacagagaagcuggg

SEQ ID NO: 2839916 - RNA, 18 nt, Human
ugcacagagaagcugggg

SEQ ID NO: 2839917 - RNA, 19 nt, Human
ugcacagagaagcugggga

SEQ ID NO: 2839918 - RNA, 16 nt, Human
ugcacagauauacuuu

SEQ ID NO: 2839919 - RNA, 18 nt, Human
ugcacagauauacuuugu

SEQ ID NO: 2839920 - RNA, 19 nt, Human
ugcacagauauacuuugug

SEQ ID NO: 2839921 - RNA, 16 nt, Human
ugcacagcggccccug

SEQ ID NO: 2839922 - RNA, 11 nt, Human
ugccauccuca

SEQ ID NO: 2839923 - RNA, 19 nt, Human
ugccauccucaaacacugc

SEQ ID NO: 2839924 - RNA, 17 nt, Human
ugccagucaagaagaaa

SEQ ID NO: 2839925 - RNA, 21 nt, Human
ugccauccuaaaagccacccc

SEQ ID NO: 2839926 - RNA, 23 nt, Human
ugccauccucaaacacugcaggc

SEQ ID NO: 2839927 - RNA, 13 nt, Human
ugccauccucuuu

SEQ ID NO: 2839928 - RNA, 15 nt, Human
ugccauccucuuucu

SEQ ID NO: 2839929 - RNA, 17 nt, Human
ugccauccucuuucucu

SEQ ID NO: 2839930 - RNA, 24 nt, Human
ugccagguuuuuggucugacccac

SEQ ID NO: 2839931 - RNA, 12 nt, Human
ugccagggagcu

SEQ ID NO: 2839932 - RNA, 11 nt, Human
ugccagggagc

SEQ ID NO: 2839933 - RNA, 22 nt, Human
ugccagggcaaugaugaaugag

SEQ ID NO: 2839934 - RNA, 17 nt, Human
ugccagggcaaugauga

SEQ ID NO: 2839935 - RNA, 20 nt, Human
ugccaagcaaggaaaacuua

SEQ ID NO: 2839936 - RNA, 23 nt, Human
ugccaagcaaggaaaacuuauuu

SEQ ID NO: 2839937 - RNA, 21 nt, Human
ugccacccaggugauguuagu

SEQ ID NO: 2839938 - RNA, 23 nt, Human
ugccaccccacccucccuggagu

SEQ ID NO: 2839939 - RNA, 14 nt, Human
ugccaccccacccu

SEQ ID NO: 2839940 - RNA, 15 nt, Human
ugccaccccacccuc

SEQ ID NO: 2839941 - RNA, 16 nt, Human
ugccaccccacccucc

SEQ ID NO: 2839942 - RNA, 17 nt, Human
ugccaccccacccuccc

SEQ ID NO: 2839943 - RNA, 19 nt, Human
ugccaccccacccucccug

SEQ ID NO: 2839944 - RNA, 20 nt, Human
ugccaccccacccucccugg

SEQ ID NO: 2839945 - RNA, 21 nt, Human
ugccaccccacccucccugga

SEQ ID NO: 2839946 - RNA, 22 nt, Human
ugccaccccacccucccuggag

SEQ ID NO: 2839947 - RNA, 19 nt, Human
ugcccagagggcccaggca

SEQ ID NO: 2839948 - RNA, 23 nt, Human
ugcccagagggcccaggcaggcc

SEQ ID NO: 2839949 - RNA, 21 nt, Human
ugcccagagggcccaggcagg

SEQ ID NO: 2839950 - RNA, 20 nt, Human
ugcccagagggcccaggcag

SEQ ID NO: 2839951 - RNA, 14 nt, Human
ugccaucgcuguga

SEQ ID NO: 2839952 - RNA, 20 nt, Human
ugccaucuguguccugguua

SEQ ID NO: 2839953 - RNA, 16 nt, Human
ugccaucuguguccug

SEQ ID NO: 2839954 - RNA, 16 nt, Human
ugccaugcagggccuc

SEQ ID NO: 2839955 - RNA, 17 nt, Human
ugccauggcgugucccu

SEQ ID NO: 2839956 - RNA, 18 nt, Human
ugccaugggcuucacugu

SEQ ID NO: 2839957 - RNA, 19 nt, Human
ugccaugggcuucacugua

SEQ ID NO: 2839958 - RNA, 20 nt, Human
ugccaugggcuucacuguau

SEQ ID NO: 2839959 - RNA, 16 nt, Human
ugcccacauuuagucu

SEQ ID NO: 2839960 - RNA, 18 nt, Human
ugcccacauuuagucucu

SEQ ID NO: 2839961 - RNA, 22 nt, Human
ugccaugggcuucacuguauaa

SEQ ID NO: 2839962 - RNA, 23 nt, Human
ugccaugggcuucacuguauaaa

SEQ ID NO: 2839963 - RNA, 13 nt, Human
ugcaggacuugag

SEQ ID NO: 2839964 - RNA, 15 nt, Human
ugcaggacuugagaa

SEQ ID NO: 2839965 - RNA, 18 nt, Human
ugcaggacuugagaagac

SEQ ID NO: 2839966 - RNA, 19 nt, Human
ugcaggaccugccuguagc

SEQ ID NO: 2839967 - RNA, 18 nt, Human
ugcaggaccugccuguag

SEQ ID NO: 2839968 - RNA, 17 nt, Human
ugcaggaccugccugua

SEQ ID NO: 2839969 - RNA, 16 nt, Human
ugcaggaccugccugu

SEQ ID NO: 2839970 - RNA, 16 nt, Human
ugcauguaugucuugg

SEQ ID NO: 2839971 - RNA, 14 nt, Human
ugcaucguccccuc

SEQ ID NO: 2839972 - RNA, 18 nt, Human
ugcaucguccccuccccc

SEQ ID NO: 2839973 - RNA, 20 nt, Human
ugcaugucaaacaugagaug

SEQ ID NO: 2839974 - RNA, 23 nt, Human
ugcauguccuuugcgccugugac

SEQ ID NO: 2839975 - RNA, 15 nt, Human
ugcauguggcuuuuu

SEQ ID NO: 2839976 - RNA, 21 nt, Human
ugcaugugguuugguuccucu

SEQ ID NO: 2839977 - RNA, 22 nt, Human
ugcaugugguuugguuccucuc

SEQ ID NO: 2839978 - RNA, 24 nt, Human
ugcaugugguuugguuccucucug

SEQ ID NO: 2839979 - RNA, 14 nt, Human
ugcauccagaggca

SEQ ID NO: 2839980 - RNA, 21 nt, Human
ugcauccagcaguacaauaaa

SEQ ID NO: 2839981 - RNA, 13 nt, Human
ugcauccaacucc

SEQ ID NO: 2839982 - RNA, 16 nt, Human
ugcauccaacuccagg

SEQ ID NO: 2839983 - RNA, 17 nt, Human
ugcauccaacuccagga

SEQ ID NO: 2839984 - RNA, 13 nt, Human
ugcaucagguccu

SEQ ID NO: 2839985 - RNA, 14 nt, Human
ugcaucaguauuaa

SEQ ID NO: 2839986 - RNA, 20 nt, Human
ugcaucaguauuaauacuaa

SEQ ID NO: 2839987 - RNA, 18 nt, Human
ugcauccuccgccucccg

SEQ ID NO: 2839988 - RNA, 15 nt, Human
ugcauccuccgccuc

SEQ ID NO: 2839989 - RNA, 13 nt, Human
ugcauccuuccua

SEQ ID NO: 2839990 - RNA, 14 nt, Human
ugcauccuuccuau

SEQ ID NO: 2839991 - RNA, 15 nt, Human
ugcauccuuccuaua

SEQ ID NO: 2839992 - RNA, 18 nt, Human
ugcauccuuccuauaacu

SEQ ID NO: 2839993 - RNA, 21 nt, Human
ugcauccuccgccucccgggu

SEQ ID NO: 2839994 - RNA, 21 nt, Human
ugcauuaaauucacaaacuuu

SEQ ID NO: 2839995 - RNA, 20 nt, Human
ugcauuaaauucacaaacuu

SEQ ID NO: 2839996 - RNA, 14 nt, Human
ugcaugugugugug

SEQ ID NO: 2839997 - RNA, 11 nt, Human
ugcaugugugu

SEQ ID NO: 2839998 - RNA, 13 nt, Human
ugcauguguguau

SEQ ID NO: 2839999 - RNA, 14 nt, Human
ugcauguguguaua

SEQ ID NO: 2840000 - RNA, 15 nt, Human
ugcauguguguauaa

SEQ ID NO: 2840001 - RNA, 19 nt, Human
ugcauguguguauaagugc

SEQ ID NO: 2840002 - RNA, 19 nt, Human
ugcauuaaauucacaaacu

SEQ ID NO: 2840003 - RNA, 17 nt, Human
ugcauuaaauucacaaa

SEQ ID NO: 2840004 - RNA, 16 nt, Human
ugcauuaaauucacaa

SEQ ID NO: 2840005 - RNA, 15 nt, Human
ugcauuaaauucaca

SEQ ID NO: 2840006 - RNA, 13 nt, Human
ugcauuaaaccug

SEQ ID NO: 2840007 - RNA, 14 nt, Human
ugcauuaaaccugu

SEQ ID NO: 2840008 - RNA, 15 nt, Human
ugcauuaaaccuguc

SEQ ID NO: 2840009 - RNA, 16 nt, Human
ugcauuaaaccugucu

SEQ ID NO: 2840010 - RNA, 21 nt, Human
ugcauuaaaccugucuccacu

SEQ ID NO: 2840011 - RNA, 14 nt, Human
ugcauuaaauucac

SEQ ID NO: 2840012 - RNA, 13 nt, Human
ugcauuaaauuca

SEQ ID NO: 2840013 - RNA, 13 nt, Human
ugcauuuuucugc

SEQ ID NO: 2840014 - RNA, 14 nt, Human
ugcauuuuucugca

SEQ ID NO: 2840015 - RNA, 15 nt, Human
ugcauuuuucugcag

SEQ ID NO: 2840016 - RNA, 17 nt, Human
ugcauuuuucugcagaa

SEQ ID NO: 2840017 - RNA, 20 nt, Human
ugccaaaaaaagacagggcu

SEQ ID NO: 2840018 - RNA, 19 nt, Human
ugccaaaaaggauacauaa

SEQ ID NO: 2840019 - RNA, 20 nt, Human
ugccaaaaaggauacauaau

SEQ ID NO: 2840020 - RNA, 21 nt, Human
ugccaaaaaggauacauaaug

SEQ ID NO: 2840021 - RNA, 13 nt, Human
ugccaacuccuca

SEQ ID NO: 2840022 - RNA, 21 nt, Human
ugccaacuucuucagagcuga

SEQ ID NO: 2840023 - RNA, 21 nt, Human
ugccaagaaaagggcugacau

SEQ ID NO: 2840024 - RNA, 14 nt, Human
ugccaacuguggcu

SEQ ID NO: 2840025 - RNA, 15 nt, Human
ugccaacuguggcug

SEQ ID NO: 2840026 - RNA, 16 nt, Human
ugccaacuguggcugg

SEQ ID NO: 2840027 - RNA, 17 nt, Human
ugccaacuguggcuggu

SEQ ID NO: 2840028 - RNA, 22 nt, Human
ugccaacuguucagcuguccuc

SEQ ID NO: 2840029 - RNA, 12 nt, Human
ugccaagacaaa

SEQ ID NO: 2840030 - RNA, 13 nt, Human
ugccaagacaaau

SEQ ID NO: 2840031 - RNA, 14 nt, Human
ugccaagacaaauc

SEQ ID NO: 2840032 - RNA, 16 nt, Human
ugccaagacaaaucaa

SEQ ID NO: 2840033 - RNA, 17 nt, Human
ugccaagacaaaucaac

SEQ ID NO: 2840034 - RNA, 19 nt, Human
ugccaagacaaaucaacag

SEQ ID NO: 2840035 - RNA, 22 nt, Human
ugccaagacaaaucaacagaag

SEQ ID NO: 2840036 - RNA, 23 nt, Human
ugccaagacaaaucaacagaagc

SEQ ID NO: 2840037 - RNA, 23 nt, Human
ugccaacuguuguaacuaggcuc

SEQ ID NO: 2840038 - RNA, 12 nt, Human
ugccaagagagg

SEQ ID NO: 2840039 - RNA, 18 nt, Human
uggaaccguugccaaccg

SEQ ID NO: 2840040 - RNA, 11 nt, Human
uggaacucuug

SEQ ID NO: 2840041 - RNA, 21 nt, Human
uggaacucuaucugggccugg

SEQ ID NO: 2840042 - RNA, 22 nt, Human
uggaacucuaucugggccuggg

SEQ ID NO: 2840043 - RNA, 23 nt, Human
uggaacucuaucugggccugggc

SEQ ID NO: 2840044 - RNA, 13 nt, Human
uggaagacagaga

SEQ ID NO: 2840045 - RNA, 15 nt, Human
uggaagacacauuga

SEQ ID NO: 2840046 - RNA, 22 nt, Human
uggaaaaaaugauguucauuua

SEQ ID NO: 2840047 - RNA, 11 nt, Human
uggaaaauaaa

SEQ ID NO: 2840048 - RNA, 15 nt, Human
uggaaaauaaaucaa

SEQ ID NO: 2840049 - RNA, 20 nt, Human
uggaaaaaccacccccaaau

SEQ ID NO: 2840050 - RNA, 17 nt, Human
ugcuuuuuuuuuuccag

SEQ ID NO: 2840051 - RNA, 19 nt, Human
ugcuuuuuuuuuuccagca

SEQ ID NO: 2840052 - RNA, 22 nt, Human
ugcuuuuuuuuuuccagcaagu

SEQ ID NO: 2840053 - RNA, 13 nt, Human
uggaaaaaaaaaa

SEQ ID NO: 2840054 - RNA, 16 nt, Human
uggaaaaaaaaaaaag

SEQ ID NO: 2840055 - RNA, 17 nt, Human
uggaaaaaaaaaaaaga

SEQ ID NO: 2840056 - RNA, 20 nt, Human
uggaaaaaaaaaaaagagga

SEQ ID NO: 2840057 - RNA, 21 nt, Human
uggaaaaaaaaaaaagaggaa

SEQ ID NO: 2840058 - RNA, 23 nt, Human
uggaaaaaaaaaaaagaggaaaa

SEQ ID NO: 2840059 - RNA, 21 nt, Human
uggaacccagcaguucuguua

SEQ ID NO: 2840060 - RNA, 21 nt, Human
uggaagugugugaucuguggg

SEQ ID NO: 2840061 - RNA, 20 nt, Human
uggaagacagagaccuccug

SEQ ID NO: 2840062 - RNA, 23 nt, Human
uggaagacagagaccuccugccu

SEQ ID NO: 2840063 - RNA, 18 nt, Human
uggaaguucauaccuaag

SEQ ID NO: 2840064 - RNA, 23 nt, Human
uggaaguucauaccuaaguacug

SEQ ID NO: 2840065 - RNA, 11 nt, Human
uggaaguugca

SEQ ID NO: 2840066 - RNA, 18 nt, Human
uggaaguguguguggcag

SEQ ID NO: 2840067 - RNA, 20 nt, Human
uggaaguguguguggcagca

SEQ ID NO: 2840068 - RNA, 16 nt, Human
uggaaguugcauggca

SEQ ID NO: 2840069 - RNA, 18 nt, Human
uggaaguugcauggcauc

SEQ ID NO: 2840070 - RNA, 22 nt, Human
uggaauacuaaaaaucaugaga

SEQ ID NO: 2840071 - RNA, 20 nt, Human
uggaauacuaaaaaucauga

SEQ ID NO: 2840072 - RNA, 18 nt, Human
uggaauacuuuuuguuau

SEQ ID NO: 2840073 - RNA, 14 nt, Human
uggaauaggaauaa

SEQ ID NO: 2840074 - RNA, 17 nt, Human
uggaauaggaauaagcu

SEQ ID NO: 2840075 - RNA, 13 nt, Human
uggaauacuuuuu

SEQ ID NO: 2840076 - RNA, 12 nt, Human
uggaauacuuuu

SEQ ID NO: 2840077 - RNA, 14 nt, Human
uggaauaauguaaa

SEQ ID NO: 2840078 - RNA, 14 nt, Human
uggaauacaugaaa

SEQ ID NO: 2840079 - RNA, 15 nt, Human
uggaauacaugaaau

SEQ ID NO: 2840080 - RNA, 21 nt, Human
uggaaucagauuuuaacagcu

SEQ ID NO: 2840081 - RNA, 18 nt, Human
uggaaucccacuguauga

SEQ ID NO: 2840082 - RNA, 17 nt, Human
uggaaucuggagaccag

SEQ ID NO: 2840083 - RNA, 18 nt, Human
uggaaucuggagaccagg

SEQ ID NO: 2840084 - RNA, 21 nt, Human
uggaauguggccccugaacaa

SEQ ID NO: 2840085 - RNA, 17 nt, Human
uggaauuaaaaggauag

SEQ ID NO: 2840086 - RNA, 21 nt, Human
uggaauuaaaaggauaguauu

SEQ ID NO: 2840087 - RNA, 16 nt, Human
uggaaugguuugggaa

SEQ ID NO: 2840088 - RNA, 23 nt, Human
uggaauguggccccugaacaaga

SEQ ID NO: 2840089 - RNA, 20 nt, Human
uggaauuagcuuggggccag

SEQ ID NO: 2840090 - RNA, 22 nt, Human
uggaauuagcuuggggccaggg

SEQ ID NO: 2840091 - RNA, 21 nt, Human
uggaauuaugcuggcuucuga

SEQ ID NO: 2840092 - RNA, 18 nt, Human
ugcuucugaaugugcuga

SEQ ID NO: 2840093 - RNA, 14 nt, Human
ugcugccuccagaa

SEQ ID NO: 2840094 - RNA, 13 nt, Human
ugcugccucaugc

SEQ ID NO: 2840095 - RNA, 19 nt, Human
ugcugccgccucccagccu

SEQ ID NO: 2840096 - RNA, 17 nt, Human
ugcugccgccucccagc

SEQ ID NO: 2840097 - RNA, 16 nt, Human
ugcugccgccucccag

SEQ ID NO: 2840098 - RNA, 21 nt, Human
ugcugccgccccacccagaug

SEQ ID NO: 2840099 - RNA, 23 nt, Human
ugcugccgccccacccagauggg

SEQ ID NO: 2840100 - RNA, 21 nt, Human
ugcugccgccucccagccugg

SEQ ID NO: 2840101 - RNA, 20 nt, Human
ugcugccgccucccagccug

SEQ ID NO: 2840102 - RNA, 17 nt, Human
ugcuuuauuccagaaug

SEQ ID NO: 2840103 - RNA, 16 nt, Human
ugcuuuauugcuuuuu

SEQ ID NO: 2840104 - RNA, 15 nt, Human
ugcuuuauuccagaa

SEQ ID NO: 2840105 - RNA, 14 nt, Human
ugcuuuauuccaga

SEQ ID NO: 2840106 - RNA, 14 nt, Human
ugcuuuuuuaaaua

SEQ ID NO: 2840107 - RNA, 17 nt, Human
ugcuuuuuuaaauauua

SEQ ID NO: 2840108 - RNA, 12 nt, Human
ugcuuucacucu

SEQ ID NO: 2840109 - RNA, 13 nt, Human
ugcuuuuuuguau

SEQ ID NO: 2840110 - RNA, 20 nt, Human
ugcuuuccagaauaauauga

SEQ ID NO: 2840111 - RNA, 12 nt, Human
ugcuucuuguga

SEQ ID NO: 2840112 - RNA, 14 nt, Human
ugcuucuugugaag

SEQ ID NO: 2840113 - RNA, 15 nt, Human
ugcuucuugugaagg

SEQ ID NO: 2840114 - RNA, 20 nt, Human
ugcuucuugugaaggccaug

SEQ ID NO: 2840115 - RNA, 12 nt, Human
ugcuuguuacau

SEQ ID NO: 2840116 - RNA, 19 nt, Human
ugcuuguucccucucccug

SEQ ID NO: 2840117 - RNA, 16 nt, Human
ugcuuguucccucucc

SEQ ID NO: 2840118 - RNA, 18 nt, Human
ugcuuguuaacugagugc

SEQ ID NO: 2840119 - RNA, 15 nt, Human
ugcuuuaugccuucu

SEQ ID NO: 2840120 - RNA, 13 nt, Human
ugcuuuaaagaua

SEQ ID NO: 2840121 - RNA, 16 nt, Human
ugcuuuaaagauaaaa

SEQ ID NO: 2840122 - RNA, 19 nt, Human
ugcuuuaaagggccugccu

SEQ ID NO: 2840123 - RNA, 20 nt, Human
ugcuuuaaagggccugccug

SEQ ID NO: 2840124 - RNA, 21 nt, Human
ugcuuuaaagggccugccugg

SEQ ID NO: 2840125 - RNA, 12 nt, Human
ugcuuguuuuau

SEQ ID NO: 2840126 - RNA, 13 nt, Human
ugcuuguuucuug

SEQ ID NO: 2840127 - RNA, 15 nt, Human
ugcuuguuucuuggu

SEQ ID NO: 2840128 - RNA, 17 nt, Human
uggaggccuuccagcug

SEQ ID NO: 2840129 - RNA, 18 nt, Human
uggaggccuuccagcugc

SEQ ID NO: 2840130 - RNA, 19 nt, Human
uggaggccuuccagcugcu

SEQ ID NO: 2840131 - RNA, 20 nt, Human
uggaggccuuccagcugcug

SEQ ID NO: 2840132 - RNA, 21 nt, Human
uggaggccuuccagcugcugu

SEQ ID NO: 2840133 - RNA, 16 nt, Human
uggaggcccuccugug

SEQ ID NO: 2840134 - RNA, 21 nt, Human
uggaggcccuccugugcuggg

SEQ ID NO: 2840135 - RNA, 15 nt, Human
uggaggcagugucau

SEQ ID NO: 2840136 - RNA, 16 nt, Human
uggaggcagugucauu

SEQ ID NO: 2840137 - RNA, 17 nt, Human
uggaggcagccagggcu

SEQ ID NO: 2840138 - RNA, 18 nt, Human
uggaggcagccagggcuu

SEQ ID NO: 2840139 - RNA, 14 nt, Human
uggauacuacaucu

SEQ ID NO: 2840140 - RNA, 15 nt, Human
uggauacuacaucuu

SEQ ID NO: 2840141 - RNA, 15 nt, Human
uggauacagcaguag

SEQ ID NO: 2840142 - RNA, 18 nt, Human
uggauacagcaguagaca

SEQ ID NO: 2840143 - RNA, 19 nt, Human
uggauacagcaguagacau

SEQ ID NO: 2840144 - RNA, 16 nt, Human
uggauaggagccugcu

SEQ ID NO: 2840145 - RNA, 15 nt, Human
uggauauaaaaugug

SEQ ID NO: 2840146 - RNA, 13 nt, Human
uggauagcuaaua

SEQ ID NO: 2840147 - RNA, 17 nt, Human
uggauagcuaauaauga

SEQ ID NO: 2840148 - RNA, 14 nt, Human
uggaucuugaaugu

SEQ ID NO: 2840149 - RNA, 15 nt, Human
uggaucuugaaugug

SEQ ID NO: 2840150 - RNA, 16 nt, Human
uggaucuugaaugugg

SEQ ID NO: 2840151 - RNA, 19 nt, Human
uggaucuugaauguggucu

SEQ ID NO: 2840152 - RNA, 21 nt, Human
uggaugauggucuucagccuc

SEQ ID NO: 2840153 - RNA, 20 nt, Human
uggaugauggucuucagccu

SEQ ID NO: 2840154 - RNA, 17 nt, Human
uggaugagcccucagaa

SEQ ID NO: 2840155 - RNA, 15 nt, Human
uggaugaucaauccu

SEQ ID NO: 2840156 - RNA, 19 nt, Human
uggaggcugacgugugagg

SEQ ID NO: 2840157 - RNA, 15 nt, Human
uggaugagcccucag

SEQ ID NO: 2840158 - RNA, 14 nt, Human
uggaugaaauuuuc

SEQ ID NO: 2840159 - RNA, 16 nt, Human
uggaucuuuucauucu

SEQ ID NO: 2840160 - RNA, 15 nt, Human
uggaugaaauuuucu

SEQ ID NO: 2840161 - RNA, 17 nt, Human
uggaugaaauuuucuag

SEQ ID NO: 2840162 - RNA, 18 nt, Human
uggaugaaauuuucuaga

SEQ ID NO: 2840163 - RNA, 16 nt, Human
uggacaggcauguucu

SEQ ID NO: 2840164 - RNA, 12 nt, Human
uggacaggcaug

SEQ ID NO: 2840165 - RNA, 17 nt, Human
uggagacugucucaaga

SEQ ID NO: 2840166 - RNA, 18 nt, Human
uggagacuuucuuuaaau

SEQ ID NO: 2840167 - RNA, 21 nt, Human
uggagagaaacaauaaagaga

SEQ ID NO: 2840168 - RNA, 22 nt, Human
uggagagaaacaauaaagagau

SEQ ID NO: 2840169 - RNA, 14 nt, Human
uggagagaggauuu

SEQ ID NO: 2840170 - RNA, 15 nt, Human
uggagagaaggccuc

SEQ ID NO: 2840171 - RNA, 21 nt, Human
uggagagaaggccucccuagc

SEQ ID NO: 2840172 - RNA, 18 nt, Human
uggagaugcugagggugu

SEQ ID NO: 2840173 - RNA, 16 nt, Human
uggagagucagaucuu

SEQ ID NO: 2840174 - RNA, 16 nt, Human
uggagagugagcuaca

SEQ ID NO: 2840175 - RNA, 19 nt, Human
uggagagggcucugugcug

SEQ ID NO: 2840176 - RNA, 23 nt, Human
uggagaggagggaugcugccuga

SEQ ID NO: 2840177 - RNA, 21 nt, Human
uggagaggagggaugcugccu

SEQ ID NO: 2840178 - RNA, 20 nt, Human
uggagaggcccggccucuca

SEQ ID NO: 2840179 - RNA, 22 nt, Human
uggagaggagggaugcugccug

SEQ ID NO: 2840180 - RNA, 20 nt, Human
uggccacuccagaccccugg

SEQ ID NO: 2840181 - RNA, 22 nt, Human
uggccacuccagaccccuggcu

SEQ ID NO: 2840182 - RNA, 20 nt, Human
uggcagugggagcugccugu

SEQ ID NO: 2840183 - RNA, 16 nt, Human
uggcaguguuuugaga

SEQ ID NO: 2840184 - RNA, 17 nt, Human
uggcaguguuuugagaa

SEQ ID NO: 2840185 - RNA, 18 nt, Human
uggcaguguuuugagaac

SEQ ID NO: 2840186 - RNA, 16 nt, Human
uggcaguuugguauuu

SEQ ID NO: 2840187 - RNA, 18 nt, Human
uggcaguuuugacaucag

SEQ ID NO: 2840188 - RNA, 21 nt, Human
uggcaguuuugacaucagcca

SEQ ID NO: 2840189 - RNA, 16 nt, Human
uggccacuuuaagaga

SEQ ID NO: 2840190 - RNA, 22 nt, Human
uggccacuuuaagagagaaauc

SEQ ID NO: 2840191 - RNA, 14 nt, Human
uggccacugcuccc

SEQ ID NO: 2840192 - RNA, 16 nt, Human
uggccacugcucccua

SEQ ID NO: 2840193 - RNA, 19 nt, Human
uggccacugcucccuaagc

SEQ ID NO: 2840194 - RNA, 20 nt, Human
uggccacugcucccuaagcc

SEQ ID NO: 2840195 - RNA, 17 nt, Human
uggccacuucuguccau

SEQ ID NO: 2840196 - RNA, 12 nt, Human
uggccagacucg

SEQ ID NO: 2840197 - RNA, 15 nt, Human
uggccagacucgaug

SEQ ID NO: 2840198 - RNA, 19 nt, Human
uggcagugggagcugccug

SEQ ID NO: 2840199 - RNA, 16 nt, Human
uggcagugggagcugc

SEQ ID NO: 2840200 - RNA, 15 nt, Human
uggcagugggagcug

SEQ ID NO: 2840201 - RNA, 14 nt, Human
uggcagugggagcu

SEQ ID NO: 2840202 - RNA, 13 nt, Human
uggcagugggagc

SEQ ID NO: 2840203 - RNA, 19 nt, Human
uggcagggaggucaggccc

SEQ ID NO: 2840204 - RNA, 20 nt, Human
uggcagggaggucaggcccu

SEQ ID NO: 2840205 - RNA, 21 nt, Human
uggcagggaggucaggcccug

SEQ ID NO: 2840206 - RNA, 22 nt, Human
uggcagggaggucaggcccugg

SEQ ID NO: 2840207 - RNA, 22 nt, Human
uggcagcugcgguccacccagg

SEQ ID NO: 2840208 - RNA, 21 nt, Human
uggcagcugcgguccacccag

SEQ ID NO: 2840209 - RNA, 23 nt, Human
uggcagcugcgguccacccagga

SEQ ID NO: 2840210 - RNA, 19 nt, Human
uggcaggauggccuggcca

SEQ ID NO: 2840211 - RNA, 21 nt, Human
uggcagaagacaccagagcag

SEQ ID NO: 2840212 - RNA, 20 nt, Human
uggcaggauggccuggccag

SEQ ID NO: 2840213 - RNA, 21 nt, Human
uggcagaaaaaaugucuguaa

SEQ ID NO: 2840214 - RNA, 13 nt, Human
uggcagaagacac

SEQ ID NO: 2840215 - RNA, 14 nt, Human
uggcagaagacacc

SEQ ID NO: 2840216 - RNA, 18 nt, Human
uggcagaagacaccagag

SEQ ID NO: 2840217 - RNA, 20 nt, Human
uggcagaagacaccagagca

SEQ ID NO: 2840218 - RNA, 19 nt, Human
uggcagcugcgguccaccc

SEQ ID NO: 2840219 - RNA, 20 nt, Human
uggcagaaaaaaugucugua

SEQ ID NO: 2840220 - RNA, 18 nt, Human
uggcacuugccuggguca

SEQ ID NO: 2840221 - RNA, 11 nt, Human
uggcacuuuga

SEQ ID NO: 2840222 - RNA, 16 nt, Human
uggcacuuugaagggg

SEQ ID NO: 2840223 - RNA, 17 nt, Human
uggcacuugccuggguc

SEQ ID NO: 2840224 - RNA, 16 nt, Human
uggcacuugccugggu

SEQ ID NO: 2840225 - RNA, 15 nt, Human
uggcacuugccuggg

SEQ ID NO: 2840226 - RNA, 14 nt, Human
uggcacuugccugg

SEQ ID NO: 2840227 - RNA, 10 nt, Human
uggcacugau

SEQ ID NO: 2840228 - RNA, 13 nt, Human
uggcacugccaug

SEQ ID NO: 2840229 - RNA, 21 nt, Human
uggcacuuagcuaucagaaga

SEQ ID NO: 2840230 - RNA, 15 nt, Human
uggcacuuaucauua

SEQ ID NO: 2840231 - RNA, 14 nt, Human
uggaugccuggugg

SEQ ID NO: 2840232 - RNA, 22 nt, Human
uggaugccagggccgaccagag

SEQ ID NO: 2840233 - RNA, 13 nt, Human
uggaugccugauu

SEQ ID NO: 2840234 - RNA, 20 nt, Human
uggaugccaauauuaaaucu

SEQ ID NO: 2840235 - RNA, 20 nt, Human
uggaugcauguuuuccagcu

SEQ ID NO: 2840236 - RNA, 22 nt, Human
uggaugcauguuuuccagcucc

SEQ ID NO: 2840237 - RNA, 20 nt, Human
uggaugccacagcccagcuu

SEQ ID NO: 2840238 - RNA, 21 nt, Human
uggaugccaauauuaaaucug

SEQ ID NO: 2840239 - RNA, 18 nt, Human
ugggucaccccuccagga

SEQ ID NO: 2840240 - RNA, 22 nt, Human
uggguagcugccacuugaacaa

SEQ ID NO: 2840241 - RNA, 21 nt, Human
uggguagugagcagugagcag

SEQ ID NO: 2840242 - RNA, 12 nt, Human
ugggucagucug

SEQ ID NO: 2840243 - RNA, 23 nt, Human
ugggucaguguccaaagcagggu

SEQ ID NO: 2840244 - RNA, 14 nt, Human
ugggucaggccacc

SEQ ID NO: 2840245 - RNA, 20 nt, Human
uggggcaggcugggccaugu

SEQ ID NO: 2840246 - RNA, 18 nt, Human
uggggcaggcugggccau

SEQ ID NO: 2840247 - RNA, 17 nt, Human
uggggcaggcugggcca

SEQ ID NO: 2840248 - RNA, 16 nt, Human
uggggcaggcugggcc

SEQ ID NO: 2840249 - RNA, 15 nt, Human
uggggcaggcugggc

SEQ ID NO: 2840250 - RNA, 14 nt, Human
uggggcaggcuggg

SEQ ID NO: 2840251 - RNA, 23 nt, Human
ugggugucaagagggucugagga

SEQ ID NO: 2840252 - RNA, 21 nt, Human
ugggugucaagagggucugag

SEQ ID NO: 2840253 - RNA, 16 nt, Human
uggguucacugcaacc

SEQ ID NO: 2840254 - RNA, 24 nt, Human
uggguucaggggacucagcccuga

SEQ ID NO: 2840255 - RNA, 15 nt, Human
uggguuauucuggag

SEQ ID NO: 2840256 - RNA, 16 nt, Human
uggguuauucuggagu

SEQ ID NO: 2840257 - RNA, 17 nt, Human
uggguuauucuggaguu

SEQ ID NO: 2840258 - RNA, 23 nt, Human
uggguucaagcgauucuucugcu

SEQ ID NO: 2840259 - RNA, 14 nt, Human
ugggugucauuuca

SEQ ID NO: 2840260 - RNA, 19 nt, Human
ugggugucauuucauucca

SEQ ID NO: 2840261 - RNA, 20 nt, Human
ugggugucauuucauuccau

SEQ ID NO: 2840262 - RNA, 20 nt, Human
uggguucccuuuccuuccau

SEQ ID NO: 2840263 - RNA, 21 nt, Human
uggguuccucuuccccacucc

SEQ ID NO: 2840264 - RNA, 13 nt, Human
uggguuccucuuc

SEQ ID NO: 2840265 - RNA, 22 nt, Human
uggguuccuuccucugagccuu

SEQ ID NO: 2840266 - RNA, 21 nt, Human
uggguuccuuccucugagccu

SEQ ID NO: 2840267 - RNA, 16 nt, Human
uggguucaugaugcag

SEQ ID NO: 2840268 - RNA, 17 nt, Human
uggguucaugaugcagu

SEQ ID NO: 2840269 - RNA, 19 nt, Human
uggguucaugaugcagucu

SEQ ID NO: 2840270 - RNA, 21 nt, Human
uggguuccagcaauucuccug

SEQ ID NO: 2840271 - RNA, 18 nt, Human
uggguuccaauccuggcu

SEQ ID NO: 2840272 - RNA, 16 nt, Human
uggguuggugcuucua

SEQ ID NO: 2840273 - RNA, 14 nt, Human
uggguugacuuuca

SEQ ID NO: 2840274 - RNA, 15 nt, Human
uggguugcuaacuga

SEQ ID NO: 2840275 - RNA, 17 nt, Human
uggguugcuaacugaac

SEQ ID NO: 2840276 - RNA, 17 nt, Human
uggguuggaaaacagua

SEQ ID NO: 2840277 - RNA, 18 nt, Human
ugggaggagcagauuuuu

SEQ ID NO: 2840278 - RNA, 13 nt, Human
ugggaggagcaga

SEQ ID NO: 2840279 - RNA, 20 nt, Human
ugggaggacggugcaaccca

SEQ ID NO: 2840280 - RNA, 13 nt, Human
ugggaggaagcag

SEQ ID NO: 2840281 - RNA, 24 nt, Human
ugggaggaagcagguugaggggcu

SEQ ID NO: 2840282 - RNA, 19 nt, Human
ugggaggacggugcaaccc

SEQ ID NO: 2840283 - RNA, 24 nt, Human
ugggagcugccuguucagcuccag

SEQ ID NO: 2840284 - RNA, 18 nt, Human
ugggagcugguuagaaau

SEQ ID NO: 2840285 - RNA, 20 nt, Human
ugggagcugguuagaaaugc

SEQ ID NO: 2840286 - RNA, 16 nt, Human
ugggagcuugggaaug

SEQ ID NO: 2840287 - RNA, 19 nt, Human
ugggagcugguuagaaaug

SEQ ID NO: 2840288 - RNA, 11 nt, Human
ugggaggaagc

SEQ ID NO: 2840289 - RNA, 16 nt, Human
ugggaggaaagagagc

SEQ ID NO: 2840290 - RNA, 18 nt, Human
ugggaggaaagagagcag

SEQ ID NO: 2840291 - RNA, 18 nt, Human
ugggccuucagggaguga

SEQ ID NO: 2840292 - RNA, 15 nt, Human
ugggccuucagggag

SEQ ID NO: 2840293 - RNA, 22 nt, Human
ugggccuccugugugugcgccu

SEQ ID NO: 2840294 - RNA, 16 nt, Human
ugggccuccugugugu

SEQ ID NO: 2840295 - RNA, 14 nt, Human
ugggccuccugugu

SEQ ID NO: 2840296 - RNA, 20 nt, Human
ugggcaugguaccagcccug

SEQ ID NO: 2840297 - RNA, 21 nt, Human
ugggcaugguaccagcccugg

SEQ ID NO: 2840298 - RNA, 22 nt, Human
ugggcaugguaccagcccuggg

SEQ ID NO: 2840299 - RNA, 12 nt, Human
ugggcauggugc

SEQ ID NO: 2840300 - RNA, 14 nt, Human
ugggcaugugggcu

SEQ ID NO: 2840301 - RNA, 15 nt, Human
ugggcaugugggcuu

SEQ ID NO: 2840302 - RNA, 16 nt, Human
ugggcaugugggcuuc

SEQ ID NO: 2840303 - RNA, 17 nt, Human
ugggcaugugggcuuca

SEQ ID NO: 2840304 - RNA, 20 nt, Human
ugggccuccucacaacaugg

SEQ ID NO: 2840305 - RNA, 16 nt, Human
ugggcauagaugcagg

SEQ ID NO: 2840306 - RNA, 22 nt, Human
ugggcauagaugcaggugagcc

SEQ ID NO: 2840307 - RNA, 19 nt, Human
ugggcuucaguggcagcug

SEQ ID NO: 2840308 - RNA, 18 nt, Human
ugggcuucaguggcagcu

SEQ ID NO: 2840309 - RNA, 16 nt, Human
ugggcgggcccagcac

SEQ ID NO: 2840310 - RNA, 17 nt, Human
ugggcgugagaccugcc

SEQ ID NO: 2840311 - RNA, 19 nt, Human
ugggcgugagaccugcccc

SEQ ID NO: 2840312 - RNA, 18 nt, Human
ugggcgugagaccugccc

SEQ ID NO: 2840313 - RNA, 15 nt, Human
ugggcauaaacuguu

SEQ ID NO: 2840314 - RNA, 16 nt, Human
ugggcggcucugaagc

SEQ ID NO: 2840315 - RNA, 16 nt, Human
uggggcagcuugaggg

SEQ ID NO: 2840316 - RNA, 20 nt, Human
ugggcuucaguggcagcugc

SEQ ID NO: 2840317 - RNA, 17 nt, Human
ugggcguacgcuggugc

SEQ ID NO: 2840318 - RNA, 18 nt, Human
ugggcguacgcuggugcu

SEQ ID NO: 2840319 - RNA, 19 nt, Human
ugggcguacgcuggugcug

SEQ ID NO: 2840320 - RNA, 21 nt, Human
ugggcguacgcuggugcugag

SEQ ID NO: 2840321 - RNA, 15 nt, Human
ugggaaugagacaua

SEQ ID NO: 2840322 - RNA, 14 nt, Human
uggcuuuucacugc

SEQ ID NO: 2840323 - RNA, 21 nt, Human
uggcuguaaggcucuagauca

SEQ ID NO: 2840324 - RNA, 19 nt, Human
uggcuguaaggcucuagau

SEQ ID NO: 2840325 - RNA, 20 nt, Human
uggcuguaaggcucuagauc

SEQ ID NO: 2840326 - RNA, 15 nt, Human
uggcuguaaggcucu

SEQ ID NO: 2840327 - RNA, 16 nt, Human
uggcuguaaggcucua

SEQ ID NO: 2840328 - RNA, 14 nt, Human
uggcugggggccuc

SEQ ID NO: 2840329 - RNA, 17 nt, Human
uggcuguagaucccaag

SEQ ID NO: 2840330 - RNA, 18 nt, Human
uggcuguagaucccaaga

SEQ ID NO: 2840331 - RNA, 16 nt, Human
ugggacagggcauggc

SEQ ID NO: 2840332 - RNA, 20 nt, Human
ugggacaguuuaucaugaag

SEQ ID NO: 2840333 - RNA, 22 nt, Human
ugggacaguuuaucaugaagcc

SEQ ID NO: 2840334 - RNA, 23 nt, Human
ugggacaguuuaucaugaagccu

SEQ ID NO: 2840335 - RNA, 19 nt, Human
ugggaccacgugagaucau

SEQ ID NO: 2840336 - RNA, 13 nt, Human
ugggacccugcuu

SEQ ID NO: 2840337 - RNA, 19 nt, Human
ugggacccugcuuuagagc

SEQ ID NO: 2840338 - RNA, 23 nt, Human
ugggacccugcuuuagagcuagg

SEQ ID NO: 2840339 - RNA, 20 nt, Human
ugggacccauagaucuucug

SEQ ID NO: 2840340 - RNA, 21 nt, Human
ugggacccauagaucuucuga

SEQ ID NO: 2840341 - RNA, 13 nt, Human
ugggaccccaggc

SEQ ID NO: 2840342 - RNA, 15 nt, Human
ugggaccccaggccc

SEQ ID NO: 2840343 - RNA, 16 nt, Human
ugggaccccaggccca

SEQ ID NO: 2840344 - RNA, 22 nt, Human
ugggaccccaggcccacucagg

SEQ ID NO: 2840345 - RNA, 23 nt, Human
ugggagcugccuguucagcucca

SEQ ID NO: 2840346 - RNA, 22 nt, Human
ugggagcuccucuccuggagga

SEQ ID NO: 2840347 - RNA, 23 nt, Human
ugggagcuccucuccuggaggau

SEQ ID NO: 2840348 - RNA, 18 nt, Human
ugggagcuccucuccugg

SEQ ID NO: 2840349 - RNA, 19 nt, Human
ugggagcuccucuccugga

SEQ ID NO: 2840350 - RNA, 20 nt, Human
ugggagcuccucuccuggag

SEQ ID NO: 2840351 - RNA, 21 nt, Human
ugggagcuccucuccuggagg

SEQ ID NO: 2840352 - RNA, 13 nt, Human
ugggagcuccucu

SEQ ID NO: 2840353 - RNA, 14 nt, Human
ugggagcuccucuc

SEQ ID NO: 2840354 - RNA, 15 nt, Human
ugggagcuccucucc

SEQ ID NO: 2840355 - RNA, 16 nt, Human
ugggagcuccucuccu

SEQ ID NO: 2840356 - RNA, 17 nt, Human
ugggagcuccucuccug

SEQ ID NO: 2840357 - RNA, 15 nt, Human
ugggagccucugggg

SEQ ID NO: 2840358 - RNA, 22 nt, Human
ugggagcgucaggguuggugug

SEQ ID NO: 2840359 - RNA, 13 nt, Human
ugggagccccagg

SEQ ID NO: 2840360 - RNA, 16 nt, Human
ugggagccccaggguc

SEQ ID NO: 2840361 - RNA, 14 nt, Human
ugggagccccaggg

SEQ ID NO: 2840362 - RNA, 11 nt, Human
ugggagcagga

SEQ ID NO: 2840363 - RNA, 13 nt, Human
ugggagcaggaga

SEQ ID NO: 2840364 - RNA, 14 nt, Human
ugggagcaggagau

SEQ ID NO: 2840365 - RNA, 22 nt, Human
ugggagcaggagauugagaagg

SEQ ID NO: 2840366 - RNA, 23 nt, Human
ugggagcaggagauugagaagga

SEQ ID NO: 2840367 - RNA, 15 nt, Human
ugggagcaggauuuu

SEQ ID NO: 2840368 - RNA, 14 nt, Human
ugggagcaguccau

SEQ ID NO: 2840369 - RNA, 17 nt, Human
ugggagcaguccaugca

SEQ ID NO: 2840370 - RNA, 19 nt, Human
ugggagcaguccaugcaug

SEQ ID NO: 2840371 - RNA, 23 nt, Human
ugggagccccagggucuucccua

SEQ ID NO: 2840372 - RNA, 22 nt, Human
ugggagccccagggucuucccu

SEQ ID NO: 2840373 - RNA, 18 nt, Human
uggccuugaaaccaccuu

SEQ ID NO: 2840374 - RNA, 24 nt, Human
uggccagagcugggaggcauggcc

SEQ ID NO: 2840375 - RNA, 12 nt, Human
uggccuugcuga

SEQ ID NO: 2840376 - RNA, 21 nt, Human
uggccuuggcuuuucuagccu

SEQ ID NO: 2840377 - RNA, 14 nt, Human
uggccuuuccucuc

SEQ ID NO: 2840378 - RNA, 15 nt, Human
uggccagaugcacca

SEQ ID NO: 2840379 - RNA, 20 nt, Human
uggccagagcugggaggcau

SEQ ID NO: 2840380 - RNA, 23 nt, Human
uggccagagcugggaggcauggc

SEQ ID NO: 2840381 - RNA, 14 nt, Human
uggccagagcuggg

SEQ ID NO: 2840382 - RNA, 15 nt, Human
uggccagagcuggga

SEQ ID NO: 2840383 - RNA, 17 nt, Human
uggccagagcugggagg

SEQ ID NO: 2840384 - RNA, 18 nt, Human
uggccagagcugggaggc

SEQ ID NO: 2840385 - RNA, 17 nt, Human
uggcgccaccagcucug

SEQ ID NO: 2840386 - RNA, 17 nt, Human
uggcgcuauuacaaaua

SEQ ID NO: 2840387 - RNA, 22 nt, Human
uggcgugcaguggugcgaucug

SEQ ID NO: 2840388 - RNA, 15 nt, Human
uggcucgccaggcca

SEQ ID NO: 2840389 - RNA, 21 nt, Human
uggcucucaguuaaaauguga

SEQ ID NO: 2840390 - RNA, 14 nt, Human
uggcucuggagaca

SEQ ID NO: 2840391 - RNA, 19 nt, Human
uggcucucauugacuuccu

SEQ ID NO: 2840392 - RNA, 21 nt, Human
uggcucuggagacagccccag

SEQ ID NO: 2840393 - RNA, 12 nt, Human
uggcugggggcc

SEQ ID NO: 2840394 - RNA, 17 nt, Human
uggcugggggcaggagg

SEQ ID NO: 2840395 - RNA, 16 nt, Human
uggcugggggcaggag

SEQ ID NO: 2840396 - RNA, 22 nt, Human
uggcucuggagacagccccaga

SEQ ID NO: 2840397 - RNA, 18 nt, Human
uggcucuguggcuugcua

SEQ ID NO: 2840398 - RNA, 14 nt, Human
uggcguggagcagg

SEQ ID NO: 2840399 - RNA, 15 nt, Human
uggcguggagcaggc

SEQ ID NO: 2840400 - RNA, 13 nt, Human
uggcguggauuaa

SEQ ID NO: 2840401 - RNA, 16 nt, Human
uggcguggauuaaacu

SEQ ID NO: 2840402 - RNA, 18 nt, Human
uggcguggauuaaacuua

SEQ ID NO: 2840403 - RNA, 18 nt, Human
uggcgugucccucucgga

SEQ ID NO: 2840404 - RNA, 14 nt, Human
uggcguuguugcau

SEQ ID NO: 2840405 - RNA, 12 nt, Human
uggcuaaagaua

SEQ ID NO: 2840406 - RNA, 18 nt, Human
uggcuaaagauaauugcu

SEQ ID NO: 2840407 - RNA, 22 nt, Human
uggcuaaagauaauugcuauuu

SEQ ID NO: 2840408 - RNA, 20 nt, Human
uggcuaaaugccuaauaaac

SEQ ID NO: 2840409 - RNA, 24 nt, Human
uggcucagcucggggagccuuagc

SEQ ID NO: 2840410 - RNA, 14 nt, Human
uggcuccuuuacaa

SEQ ID NO: 2840411 - RNA, 15 nt, Human
uggcuccuuuacaaa

SEQ ID NO: 2840412 - RNA, 16 nt, Human
uggcuccuuuacaaaa

SEQ ID NO: 2840413 - RNA, 18 nt, Human
uggcuccuuuacaaaaga

SEQ ID NO: 2840414 - RNA, 20 nt, Human
uggcuccugaggggcaucug

SEQ ID NO: 2840415 - RNA, 17 nt, Human
uggcuccuucccaucgc

SEQ ID NO: 2840416 - RNA, 19 nt, Human
uggcuccuucccaucgcug

SEQ ID NO: 2840417 - RNA, 23 nt, Human
uggcuccugaggggcaucugccc

SEQ ID NO: 2840418 - RNA, 21 nt, Human
uggcuccugaggggcaucugc

SEQ ID NO: 2840419 - RNA, 14 nt, Human
uuaaaacauguaau

SEQ ID NO: 2840420 - RNA, 13 nt, Human
uuaaaacauguaa

SEQ ID NO: 2840421 - RNA, 12 nt, Human
uuaaaacagcug

SEQ ID NO: 2840422 - RNA, 21 nt, Human
uuaaaacagcugcauuagaaa

SEQ ID NO: 2840423 - RNA, 13 nt, Human
uuaaaacaguauu

SEQ ID NO: 2840424 - RNA, 20 nt, Human
uuaaaacaguauuuauuuug

SEQ ID NO: 2840425 - RNA, 22 nt, Human
uuaaaacaguauuuauuuugua

SEQ ID NO: 2840426 - RNA, 23 nt, Human
uuaaaacaguauuuauuuuguaa

SEQ ID NO: 2840427 - RNA, 11 nt, Human
uuaaaagagag

SEQ ID NO: 2840428 - RNA, 23 nt, Human
uuaaaagagagagagagaaaaaa

SEQ ID NO: 2840429 - RNA, 18 nt, Human
uuaaagcugccuguaguu

SEQ ID NO: 2840430 - RNA, 17 nt, Human
uuaaagcugccuguagu

SEQ ID NO: 2840431 - RNA, 15 nt, Human
uuaaagcugccugua

SEQ ID NO: 2840432 - RNA, 14 nt, Human
uuaaagcugccugu

SEQ ID NO: 2840433 - RNA, 21 nt, Human
uuaaagauuuaucaaaucagu

SEQ ID NO: 2840434 - RNA, 16 nt, Human
uuaaagcaaaaaauga

SEQ ID NO: 2840435 - RNA, 17 nt, Human
uuaaagcaaaaaaugaa

SEQ ID NO: 2840436 - RNA, 14 nt, Human
uuaaagccuccuca

SEQ ID NO: 2840437 - RNA, 18 nt, Human
uuaaagccuuuaguauca

SEQ ID NO: 2840438 - RNA, 22 nt, Human
uuaaagccuuuaguaucagugu

SEQ ID NO: 2840439 - RNA, 14 nt, Human
uuaaagauuuauca

SEQ ID NO: 2840440 - RNA, 17 nt, Human
uuaaagauuuaucaaau

SEQ ID NO: 2840441 - RNA, 19 nt, Human
uuaaagagucuagauucaa

SEQ ID NO: 2840442 - RNA, 16 nt, Human
uuaaacuguuagcacu

SEQ ID NO: 2840443 - RNA, 18 nt, Human
uuaaacuguuagcacugu

SEQ ID NO: 2840444 - RNA, 19 nt, Human
uuaaacuguuagcacuguu

SEQ ID NO: 2840445 - RNA, 20 nt, Human
uuaaacuguuagcacuguug

SEQ ID NO: 2840446 - RNA, 21 nt, Human
uuaaacuguuagcacuguuga

SEQ ID NO: 2840447 - RNA, 22 nt, Human
uuaaacuguuagcacuguugau

SEQ ID NO: 2840448 - RNA, 12 nt, Human
uuaaagagucua

SEQ ID NO: 2840449 - RNA, 14 nt, Human
uuaaagagucuaga

SEQ ID NO: 2840450 - RNA, 15 nt, Human
uuaaagagucuagau

SEQ ID NO: 2840451 - RNA, 16 nt, Human
uuaaagagucuagauu

SEQ ID NO: 2840452 - RNA, 17 nt, Human
uuaaagagucuagauuc

SEQ ID NO: 2840453 - RNA, 18 nt, Human
uuaaagagucuagauuca

SEQ ID NO: 2840454 - RNA, 23 nt, Human
uuaaagagucuagauucaaaggu

SEQ ID NO: 2840455 - RNA, 14 nt, Human
uuaaagauauuguu

SEQ ID NO: 2840456 - RNA, 17 nt, Human
uuaaagauauuguucaa

SEQ ID NO: 2840457 - RNA, 19 nt, Human
uuaaagauauuguucaaac

SEQ ID NO: 2840458 - RNA, 18 nt, Human
uuaaagaucaugacauau

SEQ ID NO: 2840459 - RNA, 22 nt, Human
uuaaagaucuguaaguaacuuc

SEQ ID NO: 2840460 - RNA, 17 nt, Human
uuaaagaugaacucuga

SEQ ID NO: 2840461 - RNA, 18 nt, Human
uuaaagaugaacucugaa

SEQ ID NO: 2840462 - RNA, 13 nt, Human
uuaacauuauuua

SEQ ID NO: 2840463 - RNA, 13 nt, Human
uuaacauuccaag

SEQ ID NO: 2840464 - RNA, 22 nt, Human
uuaacauuccuaaaaugcuuca

SEQ ID NO: 2840465 - RNA, 14 nt, Human
uuaacauuccaaga

SEQ ID NO: 2840466 - RNA, 17 nt, Human
uuaacauuccaagacuc

SEQ ID NO: 2840467 - RNA, 14 nt, Human
uuaacaucaugaau

SEQ ID NO: 2840468 - RNA, 22 nt, Human
uuaacaugaacacccuuagaaa

SEQ ID NO: 2840469 - RNA, 21 nt, Human
uuaacaugacauuuaccagca

SEQ ID NO: 2840470 - RNA, 19 nt, Human
uuaacaugggcucuucacu

SEQ ID NO: 2840471 - RNA, 20 nt, Human
uuaacaugggcucuucacua

SEQ ID NO: 2840472 - RNA, 22 nt, Human
uuaacaugggcucuucacuagu

SEQ ID NO: 2840473 - RNA, 17 nt, Human
uuaacauauuuacuaag

SEQ ID NO: 2840474 - RNA, 23 nt, Human
uuaacauaguaaguucagcacuu

SEQ ID NO: 2840475 - RNA, 16 nt, Human
uuaaauguaaauaauc

SEQ ID NO: 2840476 - RNA, 16 nt, Human
uuaaauguacagacau

SEQ ID NO: 2840477 - RNA, 19 nt, Human
uuaaauguacagacauauu

SEQ ID NO: 2840478 - RNA, 21 nt, Human
uuaaauguacagacauauuua

SEQ ID NO: 2840479 - RNA, 21 nt, Human
uuaaaugggaauauuuauaaa

SEQ ID NO: 2840480 - RNA, 20 nt, Human
uuaaauggaaaaaaugaugu

SEQ ID NO: 2840481 - RNA, 14 nt, Human
uuaaauauagauua

SEQ ID NO: 2840482 - RNA, 17 nt, Human
uuaaauauagauuagaa

SEQ ID NO: 2840483 - RNA, 18 nt, Human
uuaaauauagauuagaaa

SEQ ID NO: 2840484 - RNA, 12 nt, Human
uuaaauauaguu

SEQ ID NO: 2840485 - RNA, 23 nt, Human
uuaaauauaguuccuaagaagcu

SEQ ID NO: 2840486 - RNA, 16 nt, Human
uuaaagcaagcaacac

SEQ ID NO: 2840487 - RNA, 18 nt, Human
uuaaauaguuauauaauu

SEQ ID NO: 2840488 - RNA, 18 nt, Human
uuaaauaggauauuaaca

SEQ ID NO: 2840489 - RNA, 18 nt, Human
uuaaauaguaaaaauaaa

SEQ ID NO: 2840490 - RNA, 12 nt, Human
uuaaauauaauu

SEQ ID NO: 2840491 - RNA, 13 nt, Human
uuaaauauaauuc

SEQ ID NO: 2840492 - RNA, 14 nt, Human
uuaaauauaauucu

SEQ ID NO: 2840493 - RNA, 16 nt, Human
uuaaauauaauucugu

SEQ ID NO: 2840494 - RNA, 17 nt, Human
uuaaauauaauucugua

SEQ ID NO: 2840495 - RNA, 18 nt, Human
uuaaauauaauucuguaa

SEQ ID NO: 2840496 - RNA, 19 nt, Human
uuaaauauaauucuguaaa

SEQ ID NO: 2840497 - RNA, 20 nt, Human
uuaaauauaauucuguaaau

SEQ ID NO: 2840498 - RNA, 13 nt, Human
uguuuguuuauua

SEQ ID NO: 2840499 - RNA, 18 nt, Human
uguuuguuuauuagauga

SEQ ID NO: 2840500 - RNA, 15 nt, Human
uguuuguuucaagaa

SEQ ID NO: 2840501 - RNA, 19 nt, Human
uguuuguuucaagaaccug

SEQ ID NO: 2840502 - RNA, 12 nt, Human
uguuuuaaaaaa

SEQ ID NO: 2840503 - RNA, 22 nt, Human
uguuuguuucucccccugggcu

SEQ ID NO: 2840504 - RNA, 13 nt, Human
uguuuguuucuuu

SEQ ID NO: 2840505 - RNA, 15 nt, Human
uguuuguuucuuugu

SEQ ID NO: 2840506 - RNA, 13 nt, Human
uguuuguuugucu

SEQ ID NO: 2840507 - RNA, 16 nt, Human
uguuuguuugucuguu

SEQ ID NO: 2840508 - RNA, 22 nt, Human
uguuucucuguuguaagaauag

SEQ ID NO: 2840509 - RNA, 20 nt, Human
uguuuuaaaaagaaacaaga

SEQ ID NO: 2840510 - RNA, 18 nt, Human
uguuuuaaaaaggaacug

SEQ ID NO: 2840511 - RNA, 21 nt, Human
uguuuuaaaaaggaacugcag

SEQ ID NO: 2840512 - RNA, 23 nt, Human
uguuuuaaaaaggaacugcagca

SEQ ID NO: 2840513 - RNA, 12 nt, Human
uguuuuaaaaag

SEQ ID NO: 2840514 - RNA, 17 nt, Human
uguuuguuuccuuuguu

SEQ ID NO: 2840515 - RNA, 14 nt, Human
uguuucugaaaaga

SEQ ID NO: 2840516 - RNA, 20 nt, Human
uguuucucuugagcuggccu

SEQ ID NO: 2840517 - RNA, 12 nt, Human
uguuucugaaaa

SEQ ID NO: 2840518 - RNA, 18 nt, Human
uguuucucuugagcuggc

SEQ ID NO: 2840519 - RNA, 17 nt, Human
uguuucuccuucugaaa

SEQ ID NO: 2840520 - RNA, 23 nt, Human
uguuucucccccugggcucugcc

SEQ ID NO: 2840521 - RNA, 17 nt, Human
uguuucucccccugggc

SEQ ID NO: 2840522 - RNA, 15 nt, Human
uguuucucaaaucuu

SEQ ID NO: 2840523 - RNA, 16 nt, Human
uguuucucccccuggg

SEQ ID NO: 2840524 - RNA, 15 nt, Human
uguuucucccccugg

SEQ ID NO: 2840525 - RNA, 19 nt, Human
uguuucuauugacuucaau

SEQ ID NO: 2840526 - RNA, 16 nt, Human
uguuucuauacaaaua

SEQ ID NO: 2840527 - RNA, 16 nt, Human
uguuucuaucugauuu

SEQ ID NO: 2840528 - RNA, 14 nt, Human
uguuuuucauucau

SEQ ID NO: 2840529 - RNA, 14 nt, Human
uguuuuuguugugu

SEQ ID NO: 2840530 - RNA, 15 nt, Human
uguuuuuguugugug

SEQ ID NO: 2840531 - RNA, 17 nt, Human
uguuuuuauuguuuucu

SEQ ID NO: 2840532 - RNA, 12 nt, Human
uguuuuucucac

SEQ ID NO: 2840533 - RNA, 13 nt, Human
uguuuuuuccuuu

SEQ ID NO: 2840534 - RNA, 15 nt, Human
uguuuuuuaugaagu

SEQ ID NO: 2840535 - RNA, 17 nt, Human
uguuuuuuaugaagugc

SEQ ID NO: 2840536 - RNA, 13 nt, Human
uguuuuuucaaaa

SEQ ID NO: 2840537 - RNA, 14 nt, Human
uguuuuuucaaaau

SEQ ID NO: 2840538 - RNA, 16 nt, Human
uguuuuuucaaaauag

SEQ ID NO: 2840539 - RNA, 23 nt, Human
uguuuuuucaaaauagaaaaguu

SEQ ID NO: 2840540 - RNA, 13 nt, Human
uguuuuuucaugu

SEQ ID NO: 2840541 - RNA, 14 nt, Human
uguuuuuucaugug

SEQ ID NO: 2840542 - RNA, 14 nt, Human
uuaaaacacuucug

SEQ ID NO: 2840543 - RNA, 17 nt, Human
uuaaaacacuucugucc

SEQ ID NO: 2840544 - RNA, 20 nt, Human
uuaaaacacuucuguccugu

SEQ ID NO: 2840545 - RNA, 12 nt, Human
uuaaaacacuuu

SEQ ID NO: 2840546 - RNA, 18 nt, Human
uuaaaacacuuucaaaac

SEQ ID NO: 2840547 - RNA, 20 nt, Human
uuaaaacacauguuuuuaua

SEQ ID NO: 2840548 - RNA, 19 nt, Human
uguuuuggacuccaucucu

SEQ ID NO: 2840549 - RNA, 21 nt, Human
uguuuuaaacucuccuaguca

SEQ ID NO: 2840550 - RNA, 21 nt, Human
uguuuuuauacaaaauaagaa

SEQ ID NO: 2840551 - RNA, 19 nt, Human
uguuuuggguagcugccac

SEQ ID NO: 2840552 - RNA, 16 nt, Human
uguuuugguagauuaa

SEQ ID NO: 2840553 - RNA, 19 nt, Human
uguuuugguagauuaaaua

SEQ ID NO: 2840554 - RNA, 21 nt, Human
uguuuugguagauuaaauaua

SEQ ID NO: 2840555 - RNA, 18 nt, Human
uguuuuuauuaauuuaua

SEQ ID NO: 2840556 - RNA, 16 nt, Human
uuaaggcuaaaaagua

SEQ ID NO: 2840557 - RNA, 18 nt, Human
uuaauagcuuuuauugua

SEQ ID NO: 2840558 - RNA, 18 nt, Human
uuaaggaugggguuauga

SEQ ID NO: 2840559 - RNA, 23 nt, Human
uuaaggaugggguuaugaacccu

SEQ ID NO: 2840560 - RNA, 19 nt, Human
uuaacaugcuuaugacaau

SEQ ID NO: 2840561 - RNA, 19 nt, Human
uuaacauuccaagacucua

SEQ ID NO: 2840562 - RNA, 22 nt, Human
uuaagcuuuggacccaaggaaa

SEQ ID NO: 2840563 - RNA, 20 nt, Human
uuaaggaaacucuuaucuca

SEQ ID NO: 2840564 - RNA, 12 nt, Human
uuaaggaaacaa

SEQ ID NO: 2840565 - RNA, 14 nt, Human
uuaaggaaacaaua

SEQ ID NO: 2840566 - RNA, 14 nt, Human
uuaaggaaacucuu

SEQ ID NO: 2840567 - RNA, 16 nt, Human
uuaaggaaacucuuau

SEQ ID NO: 2840568 - RNA, 17 nt, Human
uuaaugucacaggcagg

SEQ ID NO: 2840569 - RNA, 20 nt, Human
uuaauggacacuuuucaccu

SEQ ID NO: 2840570 - RNA, 14 nt, Human
uuaauggaaauguu

SEQ ID NO: 2840571 - RNA, 18 nt, Human
uuaauggacuuauuucuu

SEQ ID NO: 2840572 - RNA, 20 nt, Human
uuaauggacuuauuucuuca

SEQ ID NO: 2840573 - RNA, 21 nt, Human
uuaauggacuuauuucuucaa

SEQ ID NO: 2840574 - RNA, 14 nt, Human
uuaauggcacugau

SEQ ID NO: 2840575 - RNA, 14 nt, Human
uuaauggauuguua

SEQ ID NO: 2840576 - RNA, 16 nt, Human
uuaauggauuguuaau

SEQ ID NO: 2840577 - RNA, 20 nt, Human
uuaauggauuguuaauuuca

SEQ ID NO: 2840578 - RNA, 21 nt, Human
uuaauggauuguuaauuucag

SEQ ID NO: 2840579 - RNA, 18 nt, Human
uuaaugucacaggcaggu

SEQ ID NO: 2840580 - RNA, 14 nt, Human
uuaauuauuauuug

SEQ ID NO: 2840581 - RNA, 23 nt, Human
uuaauuauaggagccuuaauuuu

SEQ ID NO: 2840582 - RNA, 16 nt, Human
uuaauuauuaacuaca

SEQ ID NO: 2840583 - RNA, 17 nt, Human
uuaauuauuaacuacau

SEQ ID NO: 2840584 - RNA, 18 nt, Human
uuaauuauuaacuacauu

SEQ ID NO: 2840585 - RNA, 15 nt, Human
uuaauagucauucca

SEQ ID NO: 2840586 - RNA, 19 nt, Human
uuaauagucauuccaaaua

SEQ ID NO: 2840587 - RNA, 20 nt, Human
uuaauagcuuuuauuguaua

SEQ ID NO: 2840588 - RNA, 22 nt, Human
uuaauagcuuuuauuguauaaa

SEQ ID NO: 2840589 - RNA, 15 nt, Human
uuaauaguuugucua

SEQ ID NO: 2840590 - RNA, 16 nt, Human
uuaauaguuugucuau

SEQ ID NO: 2840591 - RNA, 18 nt, Human
uuaauaguuugucuauuu

SEQ ID NO: 2840592 - RNA, 19 nt, Human
uuaauaguuugucuauuuu

SEQ ID NO: 2840593 - RNA, 16 nt, Human
uuaaugcugccuuuuc

SEQ ID NO: 2840594 - RNA, 17 nt, Human
uuaaugcugccuuuucu

SEQ ID NO: 2840595 - RNA, 13 nt, Human
uuaaugcuucauu

SEQ ID NO: 2840596 - RNA, 14 nt, Human
uuaaugcuucauuc

SEQ ID NO: 2840597 - RNA, 15 nt, Human
uuaaugcuucauuca

SEQ ID NO: 2840598 - RNA, 23 nt, Human
uuaaugccgauauacucuagaug

SEQ ID NO: 2840599 - RNA, 12 nt, Human
uuaauauggauu

SEQ ID NO: 2840600 - RNA, 17 nt, Human
uuaauauggauuuguua

SEQ ID NO: 2840601 - RNA, 23 nt, Human
uuacaaucccaccuuuccucaaa

SEQ ID NO: 2840602 - RNA, 14 nt, Human
uuacaauggaaaca

SEQ ID NO: 2840603 - RNA, 16 nt, Human
uuacagaggaaguuau

SEQ ID NO: 2840604 - RNA, 23 nt, Human
uuacaauaaaaucuugaaaaugc

SEQ ID NO: 2840605 - RNA, 13 nt, Human
uuaaugugaacuu

SEQ ID NO: 2840606 - RNA, 21 nt, Human
uuaauuauuauuuguguuuua

SEQ ID NO: 2840607 - RNA, 14 nt, Human
uuacaaguguauau

SEQ ID NO: 2840608 - RNA, 21 nt, Human
uuacaauaaaacuuugcugcc

SEQ ID NO: 2840609 - RNA, 16 nt, Human
uuacaaguguauauca

SEQ ID NO: 2840610 - RNA, 22 nt, Human
uuacaugguuaagguaaaguaa

SEQ ID NO: 2840611 - RNA, 17 nt, Human
uuacauguauuauuuca

SEQ ID NO: 2840612 - RNA, 12 nt, Human
uuacaugugaug

SEQ ID NO: 2840613 - RNA, 18 nt, Human
uuacauguguagccuaug

SEQ ID NO: 2840614 - RNA, 20 nt, Human
uuacagaugaauguauuuau

SEQ ID NO: 2840615 - RNA, 16 nt, Human
uuacagauuuaauaca

SEQ ID NO: 2840616 - RNA, 20 nt, Human
uuacagcaaguagauaaaua

SEQ ID NO: 2840617 - RNA, 15 nt, Human
uuacagcacaaaaug

SEQ ID NO: 2840618 - RNA, 22 nt, Human
uuacagccaagugccaaaugcu

SEQ ID NO: 2840619 - RNA, 17 nt, Human
uuacauggacagaauuu

SEQ ID NO: 2840620 - RNA, 23 nt, Human
uuacauggagaaaaccaaaauga

SEQ ID NO: 2840621 - RNA, 17 nt, Human
uuaccagaagcuuccau

SEQ ID NO: 2840622 - RNA, 14 nt, Human
uuaccacucaggca

SEQ ID NO: 2840623 - RNA, 12 nt, Human
uuaccacucagg

SEQ ID NO: 2840624 - RNA, 12 nt, Human
uuaccagcaaga

SEQ ID NO: 2840625 - RNA, 19 nt, Human
uuaccagcaagaauaaaaa

SEQ ID NO: 2840626 - RNA, 22 nt, Human
uuaccagcaagaauaaaaaaga

SEQ ID NO: 2840627 - RNA, 23 nt, Human
uuaccuuuuuugauaaaguuucu

SEQ ID NO: 2840628 - RNA, 15 nt, Human
uuaccuuuuuugaua

SEQ ID NO: 2840629 - RNA, 17 nt, Human
uuaccuuuuuugauaaa

SEQ ID NO: 2840630 - RNA, 20 nt, Human
uuaccuuuuaccagcuuuua

SEQ ID NO: 2840631 - RNA, 16 nt, Human
uuacgguaguuaggau

SEQ ID NO: 2840632 - RNA, 16 nt, Human
uuacggacacccccuc

SEQ ID NO: 2840633 - RNA, 16 nt, Human
uuacgcuuugauucau

SEQ ID NO: 2840634 - RNA, 15 nt, Human
uuacgcuuugauuca

SEQ ID NO: 2840635 - RNA, 16 nt, Human
uuacgaauauuuucag

SEQ ID NO: 2840636 - RNA, 17 nt, Human
uuacgaauauuuucagu

SEQ ID NO: 2840637 - RNA, 16 nt, Human
uuacgauaaggaagaa

SEQ ID NO: 2840638 - RNA, 18 nt, Human
uuacgauaaggaagaaac

SEQ ID NO: 2840639 - RNA, 15 nt, Human
uuacgaucaggcaca

SEQ ID NO: 2840640 - RNA, 22 nt, Human
uuacgaucaggcacaggucagg

SEQ ID NO: 2840641 - RNA, 13 nt, Human
uuacgcuuugauu

SEQ ID NO: 2840642 - RNA, 16 nt, Human
ugugugaaugaacacu

SEQ ID NO: 2840643 - RNA, 12 nt, Human
ugugugaaugaa

SEQ ID NO: 2840644 - RNA, 13 nt, Human
ugugugaaggcag

SEQ ID NO: 2840645 - RNA, 15 nt, Human
ugugugaaggcagag

SEQ ID NO: 2840646 - RNA, 14 nt, Human
ugugucacuugugc

SEQ ID NO: 2840647 - RNA, 15 nt, Human
ugugucacuugugcu

SEQ ID NO: 2840648 - RNA, 16 nt, Human
ugugucacuugugcuu

SEQ ID NO: 2840649 - RNA, 17 nt, Human
ugugucacuugugcuuu

SEQ ID NO: 2840650 - RNA, 21 nt, Human
ugugucacuugugcuuugcuc

SEQ ID NO: 2840651 - RNA, 22 nt, Human
ugugucacuugugcuuugcucu

SEQ ID NO: 2840652 - RNA, 12 nt, Human
ugugugaccaac

SEQ ID NO: 2840653 - RNA, 16 nt, Human
ugugugaccaacugug

SEQ ID NO: 2840654 - RNA, 17 nt, Human
ugugugaccaacugugu

SEQ ID NO: 2840655 - RNA, 19 nt, Human
ugugugaccaacuguguug

SEQ ID NO: 2840656 - RNA, 20 nt, Human
ugugugaccaacuguguugu

SEQ ID NO: 2840657 - RNA, 18 nt, Human
ugugugaccccuccuggg

SEQ ID NO: 2840658 - RNA, 19 nt, Human
ugugugaccccuccugggg

SEQ ID NO: 2840659 - RNA, 22 nt, Human
ugugugaccccuccuggggcca

SEQ ID NO: 2840660 - RNA, 23 nt, Human
ugugugaccccuccuggggccag

SEQ ID NO: 2840661 - RNA, 18 nt, Human
ugugugacucuuuagcaa

SEQ ID NO: 2840662 - RNA, 16 nt, Human
ugugugagacuacuaa

SEQ ID NO: 2840663 - RNA, 17 nt, Human
ugugugaggagcugcug

SEQ ID NO: 2840664 - RNA, 22 nt, Human
ugugugaaugaacacucuuuug

SEQ ID NO: 2840665 - RNA, 12 nt, Human
ugugugaaugug

SEQ ID NO: 2840666 - RNA, 13 nt, Human
ugugugaaugugg

SEQ ID NO: 2840667 - RNA, 18 nt, Human
ugugugaaugaacacucu

SEQ ID NO: 2840668 - RNA, 17 nt, Human
ugugugaaugaacacuc

SEQ ID NO: 2840669 - RNA, 13 nt, Human
uguguauuuaaca

SEQ ID NO: 2840670 - RNA, 18 nt, Human
uguguauuuaacagggag

SEQ ID NO: 2840671 - RNA, 20 nt, Human
uguguauuuaacagggaggg

SEQ ID NO: 2840672 - RNA, 22 nt, Human
uguguauuuaacagggagggga

SEQ ID NO: 2840673 - RNA, 14 nt, Human
ugugucaauccaga

SEQ ID NO: 2840674 - RNA, 16 nt, Human
ugugucaaugggcaau

SEQ ID NO: 2840675 - RNA, 16 nt, Human
ugugucacaaagaauu

SEQ ID NO: 2840676 - RNA, 16 nt, Human
uguguauuucuuauac

SEQ ID NO: 2840677 - RNA, 15 nt, Human
uguguauuuacgcuu

SEQ ID NO: 2840678 - RNA, 16 nt, Human
uguguagggcgggagg

SEQ ID NO: 2840679 - RNA, 13 nt, Human
uguguagccuaug

SEQ ID NO: 2840680 - RNA, 14 nt, Human
uguguagccuaugu

SEQ ID NO: 2840681 - RNA, 21 nt, Human
uguguagaguuaagaagcugu

SEQ ID NO: 2840682 - RNA, 13 nt, Human
uguguagaguuaa

SEQ ID NO: 2840683 - RNA, 17 nt, Human
uguguagaaaaaaaaac

SEQ ID NO: 2840684 - RNA, 16 nt, Human
uguguagacaaauauu

SEQ ID NO: 2840685 - RNA, 21 nt, Human
uguguagacaaauauuuggag

SEQ ID NO: 2840686 - RNA, 16 nt, Human
uguguagaguuaagaa

SEQ ID NO: 2840687 - RNA, 18 nt, Human
uguguagaguuaagaagc

SEQ ID NO: 2840688 - RNA, 19 nt, Human
uguguagaguuaagaagcu

SEQ ID NO: 2840689 - RNA, 20 nt, Human
uguguauauauaugugagga

SEQ ID NO: 2840690 - RNA, 18 nt, Human
uguguauauauguguaua

SEQ ID NO: 2840691 - RNA, 23 nt, Human
uguguauauauguguauauauac

SEQ ID NO: 2840692 - RNA, 15 nt, Human
uguguauauaguuuu

SEQ ID NO: 2840693 - RNA, 13 nt, Human
uguguauauauac

SEQ ID NO: 2840694 - RNA, 14 nt, Human
uguguauauauaca

SEQ ID NO: 2840695 - RNA, 15 nt, Human
uguguauauauacau

SEQ ID NO: 2840696 - RNA, 16 nt, Human
uguguauauauacaua

SEQ ID NO: 2840697 - RNA, 17 nt, Human
uguguauaagugcacac

SEQ ID NO: 2840698 - RNA, 16 nt, Human
uguguauacagcccug

SEQ ID NO: 2840699 - RNA, 22 nt, Human
uguguauacagcccugacgcaa

SEQ ID NO: 2840700 - RNA, 22 nt, Human
uguguaguugucucucuucaga

SEQ ID NO: 2840701 - RNA, 15 nt, Human
uguguauauuauuug

SEQ ID NO: 2840702 - RNA, 16 nt, Human
uguguauauuauuugg

SEQ ID NO: 2840703 - RNA, 17 nt, Human
uguguauauuauuuggc

SEQ ID NO: 2840704 - RNA, 18 nt, Human
uguguauauuauuuggca

SEQ ID NO: 2840705 - RNA, 16 nt, Human
uguguauguguauuua

SEQ ID NO: 2840706 - RNA, 12 nt, Human
uguguauucuua

SEQ ID NO: 2840707 - RNA, 14 nt, Human
uguguauucuuaaa

SEQ ID NO: 2840708 - RNA, 20 nt, Human
uguguauucuuaaaaugcaa

SEQ ID NO: 2840709 - RNA, 23 nt, Human
uguguauucuuaaaaugcaauau

SEQ ID NO: 2840710 - RNA, 24 nt, Human
ugugugccauagaguuuaacacaa

SEQ ID NO: 2840711 - RNA, 20 nt, Human
ugugugaggagcugcuggcu

SEQ ID NO: 2840712 - RNA, 13 nt, Human
ugugugcagugaa

SEQ ID NO: 2840713 - RNA, 21 nt, Human
ugugugccauagaguuuaaca

SEQ ID NO: 2840714 - RNA, 23 nt, Human
ugugugccauagaguuuaacaca

SEQ ID NO: 2840715 - RNA, 14 nt, Human
ugugugcaugugug

SEQ ID NO: 2840716 - RNA, 19 nt, Human
ugugugcauguguguauaa

SEQ ID NO: 2840717 - RNA, 18 nt, Human
ugugugucaugccaguga

SEQ ID NO: 2840718 - RNA, 12 nt, Human
uguguaugugua

SEQ ID NO: 2840719 - RNA, 11 nt, Human
uguguguacuc

SEQ ID NO: 2840720 - RNA, 21 nt, Human
uguguguacucacugaagccu

SEQ ID NO: 2840721 - RNA, 14 nt, Human
uguguguauauaug

SEQ ID NO: 2840722 - RNA, 15 nt, Human
uguguguauauaugu

SEQ ID NO: 2840723 - RNA, 22 nt, Human
uguguguauauauguguauaua

SEQ ID NO: 2840724 - RNA, 14 nt, Human
ugugugguggccuc

SEQ ID NO: 2840725 - RNA, 16 nt, Human
ugugugguggccucag

SEQ ID NO: 2840726 - RNA, 14 nt, Human
uguguuuauaaaau

SEQ ID NO: 2840727 - RNA, 13 nt, Human
uguguugugauag

SEQ ID NO: 2840728 - RNA, 16 nt, Human
uguguuuaauuucuuc

SEQ ID NO: 2840729 - RNA, 21 nt, Human
uguguuguugcuucuugugaa

SEQ ID NO: 2840730 - RNA, 23 nt, Human
uguguuguugcuucuugugaagg

SEQ ID NO: 2840731 - RNA, 16 nt, Human
uguucaauguuuaaug

SEQ ID NO: 2840732 - RNA, 21 nt, Human
uguucaaugguucugaaauaa

SEQ ID NO: 2840733 - RNA, 14 nt, Human
uguucagcuccagc

SEQ ID NO: 2840734 - RNA, 17 nt, Human
uguucaacaucacugaa

SEQ ID NO: 2840735 - RNA, 14 nt, Human
uguucacaaccugg

SEQ ID NO: 2840736 - RNA, 16 nt, Human
uguucagcuccagcuc

SEQ ID NO: 2840737 - RNA, 15 nt, Human
uguucagcuccagcu

SEQ ID NO: 2840738 - RNA, 21 nt, Human
uguuagauagaauuuccaaua

SEQ ID NO: 2840739 - RNA, 19 nt, Human
uguuagauagcugcaugug

SEQ ID NO: 2840740 - RNA, 13 nt, Human
uguuagagacuuu

SEQ ID NO: 2840741 - RNA, 18 nt, Human
uguuagagacuuuuuucu

SEQ ID NO: 2840742 - RNA, 21 nt, Human
uguuagagacuuuuuucuagu

SEQ ID NO: 2840743 - RNA, 11 nt, Human
uguuagagcac

SEQ ID NO: 2840744 - RNA, 22 nt, Human
uguuagaggaucccucucugga

SEQ ID NO: 2840745 - RNA, 19 nt, Human
uguuagaaaauggacacug

SEQ ID NO: 2840746 - RNA, 15 nt, Human
uguuagacucauggu

SEQ ID NO: 2840747 - RNA, 15 nt, Human
uguucaacuauuuua

SEQ ID NO: 2840748 - RNA, 21 nt, Human
uguuaguguuuuaagaaaugu

SEQ ID NO: 2840749 - RNA, 22 nt, Human
uguuaguguuuuaagaaaugua

SEQ ID NO: 2840750 - RNA, 12 nt, Human
uguuagcacugu

SEQ ID NO: 2840751 - RNA, 13 nt, Human
uguuagcacuguu

SEQ ID NO: 2840752 - RNA, 14 nt, Human
uguuagcacuguug

SEQ ID NO: 2840753 - RNA, 15 nt, Human
uguuagcacuguuga

SEQ ID NO: 2840754 - RNA, 16 nt, Human
uguuagcacuguugau

SEQ ID NO: 2840755 - RNA, 17 nt, Human
uguuagcacuguugaug

SEQ ID NO: 2840756 - RNA, 14 nt, Human
uguuaguuccugua

SEQ ID NO: 2840757 - RNA, 20 nt, Human
uguuaguuccuguaugaaag

SEQ ID NO: 2840758 - RNA, 22 nt, Human
uguuaguuccuguaugaaagau

SEQ ID NO: 2840759 - RNA, 14 nt, Human
uguuaguuucuugg

SEQ ID NO: 2840760 - RNA, 17 nt, Human
uguuaguuauagauguc

SEQ ID NO: 2840761 - RNA, 11 nt, Human
uguuaaacugu

SEQ ID NO: 2840762 - RNA, 12 nt, Human
uguuaaacuguu

SEQ ID NO: 2840763 - RNA, 13 nt, Human
uguuaaacuguua

SEQ ID NO: 2840764 - RNA, 14 nt, Human
uguuaaacuguuag

SEQ ID NO: 2840765 - RNA, 19 nt, Human
uguuaaacuguuagcacug

SEQ ID NO: 2840766 - RNA, 20 nt, Human
uguuaaacuguuagcacugu

SEQ ID NO: 2840767 - RNA, 21 nt, Human
uguuaaacuguuagcacuguu

SEQ ID NO: 2840768 - RNA, 22 nt, Human
uguuaaacuguuagcacuguug

SEQ ID NO: 2840769 - RNA, 12 nt, Human
uguguuuuauaa

SEQ ID NO: 2840770 - RNA, 20 nt, Human
uguguuuguucuuuuuauug

SEQ ID NO: 2840771 - RNA, 14 nt, Human
uguguuuuagagua

SEQ ID NO: 2840772 - RNA, 20 nt, Human
uguguuuuagaguaagaaau

SEQ ID NO: 2840773 - RNA, 17 nt, Human
uguguuuucucuggaau

SEQ ID NO: 2840774 - RNA, 10 nt, Human
uguguuuguu

SEQ ID NO: 2840775 - RNA, 15 nt, Human
uguguuuguguauuu

SEQ ID NO: 2840776 - RNA, 16 nt, Human
uguguuugguuuacau

SEQ ID NO: 2840777 - RNA, 17 nt, Human
uguguuugguuuacauu

SEQ ID NO: 2840778 - RNA, 18 nt, Human
uguguuugguuuacauuu

SEQ ID NO: 2840779 - RNA, 23 nt, Human
uguguuugguuuacauuuaaagc

SEQ ID NO: 2840780 - RNA, 14 nt, Human
uguuaccauucaca

SEQ ID NO: 2840781 - RNA, 15 nt, Human
uguuaccauucacaa

SEQ ID NO: 2840782 - RNA, 17 nt, Human
uguuagaaaacaaaauu

SEQ ID NO: 2840783 - RNA, 15 nt, Human
uguuacuguaauucc

SEQ ID NO: 2840784 - RNA, 10 nt, Human
uguuacuguu

SEQ ID NO: 2840785 - RNA, 17 nt, Human
uguuacuguuaaccauu

SEQ ID NO: 2840786 - RNA, 18 nt, Human
uguuacuguuaaccauuu

SEQ ID NO: 2840787 - RNA, 11 nt, Human
uguuacuguuc

SEQ ID NO: 2840788 - RNA, 12 nt, Human
uguuacuguucu

SEQ ID NO: 2840789 - RNA, 13 nt, Human
uguuacuguucuu

SEQ ID NO: 2840790 - RNA, 14 nt, Human
uguuacuguucuug

SEQ ID NO: 2840791 - RNA, 15 nt, Human
uguuacuguucuugc

SEQ ID NO: 2840792 - RNA, 16 nt, Human
uguuacuguucuugcu

SEQ ID NO: 2840793 - RNA, 17 nt, Human
uguuacuguucuugcug

SEQ ID NO: 2840794 - RNA, 18 nt, Human
uguuacuguucuugcugc

SEQ ID NO: 2840795 - RNA, 19 nt, Human
uguuacuguucuugcugcu

SEQ ID NO: 2840796 - RNA, 20 nt, Human
uguuacuguucuugcugcua

SEQ ID NO: 2840797 - RNA, 21 nt, Human
uguuacuguucuugcugcuag

SEQ ID NO: 2840798 - RNA, 22 nt, Human
uguuacuguucuugcugcuaga

SEQ ID NO: 2840799 - RNA, 23 nt, Human
uguuacuguucuugcugcuagaa

SEQ ID NO: 2840800 - RNA, 24 nt, Human
uguuacuguucuugcugcuagaac

SEQ ID NO: 2840801 - RNA, 14 nt, Human
uguuuaaaaggauu

SEQ ID NO: 2840802 - RNA, 19 nt, Human
uguuguuuguuuuuuugcc

SEQ ID NO: 2840803 - RNA, 14 nt, Human
uguuuaauauuuaa

SEQ ID NO: 2840804 - RNA, 15 nt, Human
uguuuaauauuuaaa

SEQ ID NO: 2840805 - RNA, 17 nt, Human
uguuuaauauuuaaaca

SEQ ID NO: 2840806 - RNA, 13 nt, Human
uguuuaaugugaa

SEQ ID NO: 2840807 - RNA, 14 nt, Human
uguuuaaugugaac

SEQ ID NO: 2840808 - RNA, 15 nt, Human
uguuuaaugugaacu

SEQ ID NO: 2840809 - RNA, 16 nt, Human
uguuuaaugugaacuu

SEQ ID NO: 2840810 - RNA, 17 nt, Human
uguuuaaugugaacuug

SEQ ID NO: 2840811 - RNA, 18 nt, Human
uguuuaaugugaacuugu

SEQ ID NO: 2840812 - RNA, 19 nt, Human
uguuuaaugugaacuugua

SEQ ID NO: 2840813 - RNA, 22 nt, Human
uguuuaaugugaacuuguagcu

SEQ ID NO: 2840814 - RNA, 23 nt, Human
uguuuaaugugaacuuguagcug

SEQ ID NO: 2840815 - RNA, 16 nt, Human
uguuuaauguucugug

SEQ ID NO: 2840816 - RNA, 19 nt, Human
uguuuaauguucugugaua

SEQ ID NO: 2840817 - RNA, 14 nt, Human
uguuuaauuucuuc

SEQ ID NO: 2840818 - RNA, 15 nt, Human
uguuuaauuucuuca

SEQ ID NO: 2840819 - RNA, 17 nt, Human
uguuuaauuucuucaaa

SEQ ID NO: 2840820 - RNA, 20 nt, Human
uguuuaauuucuucaaaaug

SEQ ID NO: 2840821 - RNA, 21 nt, Human
uguuuaauuucuucaaaaugu

SEQ ID NO: 2840822 - RNA, 23 nt, Human
uguuuaauuucuucaaaauguau

SEQ ID NO: 2840823 - RNA, 14 nt, Human
uguuuaaucuguua

SEQ ID NO: 2840824 - RNA, 20 nt, Human
uguuuaaucuguuauguacu

SEQ ID NO: 2840825 - RNA, 17 nt, Human
uguuuacagauccccaa

SEQ ID NO: 2840826 - RNA, 15 nt, Human
uguuguuucuuucua

SEQ ID NO: 2840827 - RNA, 12 nt, Human
uguuguuugcca

SEQ ID NO: 2840828 - RNA, 13 nt, Human
uguuguuucuuuc

SEQ ID NO: 2840829 - RNA, 14 nt, Human
uguuguuucuuucu

SEQ ID NO: 2840830 - RNA, 20 nt, Human
uguuguuuuguuuuaaauac

SEQ ID NO: 2840831 - RNA, 11 nt, Human
uguuguuuugu

SEQ ID NO: 2840832 - RNA, 14 nt, Human
uguuggccaggcug

SEQ ID NO: 2840833 - RNA, 13 nt, Human
uguuggccaggcu

SEQ ID NO: 2840834 - RNA, 13 nt, Human
uguuguuucagug

SEQ ID NO: 2840835 - RNA, 14 nt, Human
uguuguuucaguga

SEQ ID NO: 2840836 - RNA, 21 nt, Human
uguuguuucagugaauaugcc

SEQ ID NO: 2840837 - RNA, 21 nt, Human
uguuguuuccuaauaucaaau

SEQ ID NO: 2840838 - RNA, 12 nt, Human
uguuguuucuuu

SEQ ID NO: 2840839 - RNA, 20 nt, Human
uguuguugcuucuugugaag

SEQ ID NO: 2840840 - RNA, 13 nt, Human
uguuguugguugu

SEQ ID NO: 2840841 - RNA, 15 nt, Human
uguugcuucuuguga

SEQ ID NO: 2840842 - RNA, 17 nt, Human
uguugcuucuugugaag

SEQ ID NO: 2840843 - RNA, 23 nt, Human
uguugcuugaauagcaauagcau

SEQ ID NO: 2840844 - RNA, 14 nt, Human
uguugcugccucau

SEQ ID NO: 2840845 - RNA, 14 nt, Human
uguugcuuggacua

SEQ ID NO: 2840846 - RNA, 12 nt, Human
uguugcuuuguu

SEQ ID NO: 2840847 - RNA, 16 nt, Human
uguugcuuuguugcac

SEQ ID NO: 2840848 - RNA, 11 nt, Human
uguuggccagg

SEQ ID NO: 2840849 - RNA, 15 nt, Human
uguuggccaaagcca

SEQ ID NO: 2840850 - RNA, 20 nt, Human
uguuggauuuguuuaaaagg

SEQ ID NO: 2840851 - RNA, 17 nt, Human
uguuggauuccaugcua

SEQ ID NO: 2840852 - RNA, 22 nt, Human
uguugaagaaauuauaaagaua

SEQ ID NO: 2840853 - RNA, 18 nt, Human
uguugaagaauacaguua

SEQ ID NO: 2840854 - RNA, 20 nt, Human
uguugaacagguguuuuucc

SEQ ID NO: 2840855 - RNA, 23 nt, Human
uguugaaccaaaccucccugcua

SEQ ID NO: 2840856 - RNA, 16 nt, Human
uguugaaauuuugcaa

SEQ ID NO: 2840857 - RNA, 18 nt, Human
uguugaaauuuugcaaau

SEQ ID NO: 2840858 - RNA, 21 nt, Human
uguugaaauuuugcaaauaua

SEQ ID NO: 2840859 - RNA, 23 nt, Human
uguugaaauuuugcaaauauaaa

SEQ ID NO: 2840860 - RNA, 23 nt, Human
uguugagaaucccaaauuugauu

SEQ ID NO: 2840861 - RNA, 14 nt, Human
uguugagcaagcag

SEQ ID NO: 2840862 - RNA, 23 nt, Human
uguugagcaagcaguagcauuug

SEQ ID NO: 2840863 - RNA, 22 nt, Human
uguugauaaauuccacuggacu

SEQ ID NO: 2840864 - RNA, 15 nt, Human
uguugauaauucuua

SEQ ID NO: 2840865 - RNA, 19 nt, Human
uguugauaaauuccacugg

SEQ ID NO: 2840866 - RNA, 16 nt, Human
uguugagccuuuuccc

SEQ ID NO: 2840867 - RNA, 18 nt, Human
uguugagccuuuucccuc

SEQ ID NO: 2840868 - RNA, 13 nt, Human
uguugcugccuca

SEQ ID NO: 2840869 - RNA, 16 nt, Human
uguucuuucuggaguc

SEQ ID NO: 2840870 - RNA, 21 nt, Human
uguugaaaauuauuuuaaaca

SEQ ID NO: 2840871 - RNA, 12 nt, Human
uguugaaagcaa

SEQ ID NO: 2840872 - RNA, 17 nt, Human
uguugaaagcaaaaaug

SEQ ID NO: 2840873 - RNA, 18 nt, Human
uguugaaagcaaaaaugc

SEQ ID NO: 2840874 - RNA, 19 nt, Human
uguugaaagcaaaaaugcu

SEQ ID NO: 2840875 - RNA, 23 nt, Human
uguugaaagcaaaaaugcuaaua

SEQ ID NO: 2840876 - RNA, 22 nt, Human
uguugaaaauuauuuuaaacaa

SEQ ID NO: 2840877 - RNA, 17 nt, Human
uguugaaaauguucaga

SEQ ID NO: 2840878 - RNA, 14 nt, Human
uguugaaaauguuc

SEQ ID NO: 2840879 - RNA, 14 nt, Human
uguucugcccccag

SEQ ID NO: 2840880 - RNA, 16 nt, Human
uguucugcccccagcc

SEQ ID NO: 2840881 - RNA, 23 nt, Human
uguucucuugggaacugaacuca

SEQ ID NO: 2840882 - RNA, 14 nt, Human
uguucucuucuuca

SEQ ID NO: 2840883 - RNA, 15 nt, Human
uguucucuucuucau

SEQ ID NO: 2840884 - RNA, 20 nt, Human
uguucucuucuucauucuau

SEQ ID NO: 2840885 - RNA, 12 nt, Human
uguucugcacug

SEQ ID NO: 2840886 - RNA, 13 nt, Human
uguucugcacuga

SEQ ID NO: 2840887 - RNA, 14 nt, Human
uguucugcacugaa

SEQ ID NO: 2840888 - RNA, 15 nt, Human
uguucugcacugaaa

SEQ ID NO: 2840889 - RNA, 16 nt, Human
uguucugcacugaaaa

SEQ ID NO: 2840890 - RNA, 17 nt, Human
uguucugcacugaaaag

SEQ ID NO: 2840891 - RNA, 17 nt, Human
uguucugcacacagcac

SEQ ID NO: 2840892 - RNA, 22 nt, Human
uguucauuaaagcaugaauggu

SEQ ID NO: 2840893 - RNA, 12 nt, Human
uguucauguuug

SEQ ID NO: 2840894 - RNA, 13 nt, Human
uguucauguuugg

SEQ ID NO: 2840895 - RNA, 17 nt, Human
uguucauguuuggugca

SEQ ID NO: 2840896 - RNA, 22 nt, Human
uguucauuuagauugaaaacuu

SEQ ID NO: 2840897 - RNA, 15 nt, Human
uguucacugaagacg

SEQ ID NO: 2840898 - RNA, 17 nt, Human
uguucacugaagacgcc

SEQ ID NO: 2840899 - RNA, 18 nt, Human
uguucacugaaggugauu

SEQ ID NO: 2840900 - RNA, 17 nt, Human
uguucacgcaacuugaa

SEQ ID NO: 2840901 - RNA, 18 nt, Human
uguucacgcaacuugaaa

SEQ ID NO: 2840902 - RNA, 21 nt, Human
uguucagcuguccucccucca

SEQ ID NO: 2840903 - RNA, 18 nt, Human
uguucucugaggacacua

SEQ ID NO: 2840904 - RNA, 16 nt, Human
uguucucugaggacac

SEQ ID NO: 2840905 - RNA, 13 nt, Human
uguucucugagga

SEQ ID NO: 2840906 - RNA, 17 nt, Human
uguucucccuucggugg

SEQ ID NO: 2840907 - RNA, 16 nt, Human
uguucuauucaucuca

SEQ ID NO: 2840908 - RNA, 13 nt, Human
uguucuauccaaa

SEQ ID NO: 2840909 - RNA, 14 nt, Human
uguucuauccaaac

SEQ ID NO: 2840910 - RNA, 18 nt, Human
uguucuauccaaacaugu

SEQ ID NO: 2840911 - RNA, 19 nt, Human
uguucuauccaaacaugua

SEQ ID NO: 2840912 - RNA, 14 nt, Human
uguucuaugaacaa

SEQ ID NO: 2840913 - RNA, 15 nt, Human
uguucuaugaacaac

SEQ ID NO: 2840914 - RNA, 17 nt, Human
uguucuaugguuaugaa

SEQ ID NO: 2840915 - RNA, 18 nt, Human
uguucuaugguuaugaaa

SEQ ID NO: 2840916 - RNA, 20 nt, Human
uguaucuacaucuuuuuuca

SEQ ID NO: 2840917 - RNA, 20 nt, Human
uguaucgggaagauuucuaa

SEQ ID NO: 2840918 - RNA, 19 nt, Human
uguaucguaaccagccaga

SEQ ID NO: 2840919 - RNA, 15 nt, Human
uguaucggaugcuuu

SEQ ID NO: 2840920 - RNA, 19 nt, Human
uguaucgauguuuuauuau

SEQ ID NO: 2840921 - RNA, 22 nt, Human
uguauugaacuuggaaagaaau

SEQ ID NO: 2840922 - RNA, 14 nt, Human
uguaugcacuuugu

SEQ ID NO: 2840923 - RNA, 19 nt, Human
uguauuguaaacauguguu

SEQ ID NO: 2840924 - RNA, 15 nt, Human
uguauuguaaacaug

SEQ ID NO: 2840925 - RNA, 16 nt, Human
uguauugguuaaaacu

SEQ ID NO: 2840926 - RNA, 18 nt, Human
uguauugguuaaaacugu

SEQ ID NO: 2840927 - RNA, 15 nt, Human
uguaugauuuauaaa

SEQ ID NO: 2840928 - RNA, 19 nt, Human
uguauuggauauauaagag

SEQ ID NO: 2840929 - RNA, 12 nt, Human
uguauugcuguc

SEQ ID NO: 2840930 - RNA, 14 nt, Human
uguauugcuguccu

SEQ ID NO: 2840931 - RNA, 15 nt, Human
uguauugagauuucu

SEQ ID NO: 2840932 - RNA, 20 nt, Human
uguauugagauuucuuaaau

SEQ ID NO: 2840933 - RNA, 16 nt, Human
uguauuuaugugugag

SEQ ID NO: 2840934 - RNA, 13 nt, Human
uguauuuauguaa

SEQ ID NO: 2840935 - RNA, 22 nt, Human
uguauuuauguaaugaaguaaa

SEQ ID NO: 2840936 - RNA, 23 nt, Human
uguauuuacgcuuugauucauag

SEQ ID NO: 2840937 - RNA, 21 nt, Human
uguauuuacgcuuugauucau

SEQ ID NO: 2840938 - RNA, 20 nt, Human
uguauuuacgcuuugauuca

SEQ ID NO: 2840939 - RNA, 18 nt, Human
uguauuuaacagggaggg

SEQ ID NO: 2840940 - RNA, 12 nt, Human
uguauuuaagca

SEQ ID NO: 2840941 - RNA, 13 nt, Human
uguauuuaagcaa

SEQ ID NO: 2840942 - RNA, 14 nt, Human
uguauuuaagcaaa

SEQ ID NO: 2840943 - RNA, 16 nt, Human
uguauuuaagcaaaua

SEQ ID NO: 2840944 - RNA, 19 nt, Human
uguauuuaagcaaauacuu

SEQ ID NO: 2840945 - RNA, 20 nt, Human
uguauuuaagcaaauacuua

SEQ ID NO: 2840946 - RNA, 17 nt, Human
uguauacuauaguacca

SEQ ID NO: 2840947 - RNA, 15 nt, Human
uguauacuauaguac

SEQ ID NO: 2840948 - RNA, 11 nt, Human
uguauacuuua

SEQ ID NO: 2840949 - RNA, 13 nt, Human
uguauacuuuaaa

SEQ ID NO: 2840950 - RNA, 14 nt, Human
uguauacuuuaaau

SEQ ID NO: 2840951 - RNA, 15 nt, Human
uguauacuuuaaaua

SEQ ID NO: 2840952 - RNA, 16 nt, Human
uguauacuuuaaauaa

SEQ ID NO: 2840953 - RNA, 17 nt, Human
uguauacuuuaaauaau

SEQ ID NO: 2840954 - RNA, 21 nt, Human
uguauacuuuaaauaauuuaa

SEQ ID NO: 2840955 - RNA, 12 nt, Human
uguauacuuuag

SEQ ID NO: 2840956 - RNA, 13 nt, Human
uguauacuuuagu

SEQ ID NO: 2840957 - RNA, 14 nt, Human
uguauacuuuagua

SEQ ID NO: 2840958 - RNA, 15 nt, Human
uguauacuuuaguau

SEQ ID NO: 2840959 - RNA, 17 nt, Human
uguauacuuuaguauga

SEQ ID NO: 2840960 - RNA, 19 nt, Human
uguauacuuuaguaugacg

SEQ ID NO: 2840961 - RNA, 15 nt, Human
uguauacauccuggg

SEQ ID NO: 2840962 - RNA, 17 nt, Human
uguauacauccugggua

SEQ ID NO: 2840963 - RNA, 16 nt, Human
uguauacaacccuggc

SEQ ID NO: 2840964 - RNA, 12 nt, Human
uguauaauuucg

SEQ ID NO: 2840965 - RNA, 13 nt, Human
uguauaauuucga

SEQ ID NO: 2840966 - RNA, 12 nt, Human
uguauacaaaua

SEQ ID NO: 2840967 - RNA, 13 nt, Human
uguauacaaauau

SEQ ID NO: 2840968 - RNA, 15 nt, Human
uguauacaaauauau

SEQ ID NO: 2840969 - RNA, 16 nt, Human
uguauacaaauauauu

SEQ ID NO: 2840970 - RNA, 18 nt, Human
uguauacaaauauauugu

SEQ ID NO: 2840971 - RNA, 22 nt, Human
uguauacaaauauauuguuaau

SEQ ID NO: 2840972 - RNA, 14 nt, Human
uguauacuauagua

SEQ ID NO: 2840973 - RNA, 23 nt, Human
uguaucccaugagccucagcauc

SEQ ID NO: 2840974 - RNA, 19 nt, Human
uguaucccaugagccucag

SEQ ID NO: 2840975 - RNA, 16 nt, Human
uguaucccaugagccu

SEQ ID NO: 2840976 - RNA, 20 nt, Human
uguauccccccccuguauag

SEQ ID NO: 2840977 - RNA, 21 nt, Human
uguauccccccccuguauagu

SEQ ID NO: 2840978 - RNA, 19 nt, Human
uguauacuauaguaccagu

SEQ ID NO: 2840979 - RNA, 22 nt, Human
uguauccccccccuguauaguu

SEQ ID NO: 2840980 - RNA, 20 nt, Human
uguaucccuucucacagcac

SEQ ID NO: 2840981 - RNA, 16 nt, Human
uguauaagugcacaca

SEQ ID NO: 2840982 - RNA, 18 nt, Human
uguauaagugcacacaga

SEQ ID NO: 2840983 - RNA, 20 nt, Human
uguauaagugcacacagaaa

SEQ ID NO: 2840984 - RNA, 21 nt, Human
uguauaagugcacacagaaau

SEQ ID NO: 2840985 - RNA, 22 nt, Human
uguauaagugcacacagaaaua

SEQ ID NO: 2840986 - RNA, 23 nt, Human
uguauaagugcacacagaaauau

SEQ ID NO: 2840987 - RNA, 14 nt, Human
uguauuuguucaug

SEQ ID NO: 2840988 - RNA, 16 nt, Human
uguauuuguucauguu

SEQ ID NO: 2840989 - RNA, 17 nt, Human
uguauuuguucauguuu

SEQ ID NO: 2840990 - RNA, 18 nt, Human
uguauuuguucauguuug

SEQ ID NO: 2840991 - RNA, 19 nt, Human
uguauuuguucauguuugg

SEQ ID NO: 2840992 - RNA, 13 nt, Human
ugucacguacugu

SEQ ID NO: 2840993 - RNA, 15 nt, Human
ugucacguacugucu

SEQ ID NO: 2840994 - RNA, 18 nt, Human
ugucacguacugucugau

SEQ ID NO: 2840995 - RNA, 19 nt, Human
ugucacguacugucugauu

SEQ ID NO: 2840996 - RNA, 21 nt, Human
ugucacucauugcugagccuc

SEQ ID NO: 2840997 - RNA, 22 nt, Human
ugucacucauugcugagccucu

SEQ ID NO: 2840998 - RNA, 23 nt, Human
ugucacucauugcugagccucug

SEQ ID NO: 2840999 - RNA, 18 nt, Human
ugucacugacacaaagga

SEQ ID NO: 2841000 - RNA, 19 nt, Human
ugucacugacacaaaggaa

SEQ ID NO: 2841001 - RNA, 20 nt, Human
ugucacugacacaaaggaag

SEQ ID NO: 2841002 - RNA, 13 nt, Human
ugucacugcuuuu

SEQ ID NO: 2841003 - RNA, 23 nt, Human
ugucaguauuucaguguaguuaa

SEQ ID NO: 2841004 - RNA, 15 nt, Human
ugucacucauugcug

SEQ ID NO: 2841005 - RNA, 16 nt, Human
ugucacucauugcuga

SEQ ID NO: 2841006 - RNA, 12 nt, Human
ugucacucaggc

SEQ ID NO: 2841007 - RNA, 15 nt, Human
ugucacucaggcugg

SEQ ID NO: 2841008 - RNA, 15 nt, Human
ugucacuagaaugga

SEQ ID NO: 2841009 - RNA, 20 nt, Human
ugucacuagaauggauaaaa

SEQ ID NO: 2841010 - RNA, 18 nt, Human
ugucauaaacagaugaau

SEQ ID NO: 2841011 - RNA, 21 nt, Human
ugucauaaacagaugaauaaa

SEQ ID NO: 2841012 - RNA, 18 nt, Human
ugucaguggggcucucug

SEQ ID NO: 2841013 - RNA, 19 nt, Human
ugucaguggggcucucuga

SEQ ID NO: 2841014 - RNA, 20 nt, Human
ugucaguggggcucucugag

SEQ ID NO: 2841015 - RNA, 19 nt, Human
ugucaguuucagauccuga

SEQ ID NO: 2841016 - RNA, 22 nt, Human
ugucccacgugucuuccacuuu

SEQ ID NO: 2841017 - RNA, 20 nt, Human
uguccauuuauccacaggaa

SEQ ID NO: 2841018 - RNA, 21 nt, Human
uguccauuuauccacaggaaa

SEQ ID NO: 2841019 - RNA, 13 nt, Human
uguccauuuguaa

SEQ ID NO: 2841020 - RNA, 15 nt, Human
uguccauuuugugaa

SEQ ID NO: 2841021 - RNA, 16 nt, Human
uguccauuuugugaag

SEQ ID NO: 2841022 - RNA, 18 nt, Human
uguccauuuugugaagcc

SEQ ID NO: 2841023 - RNA, 19 nt, Human
uguccauuuugugaagccc

SEQ ID NO: 2841024 - RNA, 21 nt, Human
uguccauuuugugaagcccug

SEQ ID NO: 2841025 - RNA, 22 nt, Human
uguccauuuugugaagcccugu

SEQ ID NO: 2841026 - RNA, 20 nt, Human
uguccaugugguucuucaaa

SEQ ID NO: 2841027 - RNA, 17 nt, Human
ugucccagguccucacu

SEQ ID NO: 2841028 - RNA, 16 nt, Human
ugucccagguccucac

SEQ ID NO: 2841029 - RNA, 14 nt, Human
ugucccagguccuc

SEQ ID NO: 2841030 - RNA, 22 nt, Human
ugucccauggacacuccagugc

SEQ ID NO: 2841031 - RNA, 18 nt, Human
ugucccauggacacucca

SEQ ID NO: 2841032 - RNA, 19 nt, Human
ugucccauggacacuccag

SEQ ID NO: 2841033 - RNA, 17 nt, Human
ugucccaugcaggcccu

SEQ ID NO: 2841034 - RNA, 17 nt, Human
ugucccauggacacucc

SEQ ID NO: 2841035 - RNA, 16 nt, Human
ugucauucaaaugggu

SEQ ID NO: 2841036 - RNA, 21 nt, Human
ugucauucaaaugggugauau

SEQ ID NO: 2841037 - RNA, 15 nt, Human
uguccaugcuucuca

SEQ ID NO: 2841038 - RNA, 17 nt, Human
uguccaugcuucucauc

SEQ ID NO: 2841039 - RNA, 14 nt, Human
ugucauuguaaaca

SEQ ID NO: 2841040 - RNA, 18 nt, Human
ugucauuguaaacaaacu

SEQ ID NO: 2841041 - RNA, 16 nt, Human
ugucauauacugccau

SEQ ID NO: 2841042 - RNA, 17 nt, Human
ugucauauacugccaug

SEQ ID NO: 2841043 - RNA, 16 nt, Human
ugucauagaaauuaca

SEQ ID NO: 2841044 - RNA, 15 nt, Human
ugucauagaaauuac

SEQ ID NO: 2841045 - RNA, 13 nt, Human
ugucauaucagca

SEQ ID NO: 2841046 - RNA, 17 nt, Human
ugucauaucagcacaua

SEQ ID NO: 2841047 - RNA, 23 nt, Human
ugucauaucagcacauauuuucu

SEQ ID NO: 2841048 - RNA, 23 nt, Human
ugucaucaauaguguccuaugca

SEQ ID NO: 2841049 - RNA, 23 nt, Human
ugucauuaaauggggcucacaaa

SEQ ID NO: 2841050 - RNA, 14 nt, Human
ugucauuaaugugu

SEQ ID NO: 2841051 - RNA, 15 nt, Human
ugucauuaauguguu

SEQ ID NO: 2841052 - RNA, 16 nt, Human
uguaacuuauauugaa

SEQ ID NO: 2841053 - RNA, 17 nt, Human
uguaacuuauauugaag

SEQ ID NO: 2841054 - RNA, 18 nt, Human
uguaacuuauauugaaga

SEQ ID NO: 2841055 - RNA, 20 nt, Human
uguaacuuauauugaagaca

SEQ ID NO: 2841056 - RNA, 23 nt, Human
uguaacuuauauugaagacaauu

SEQ ID NO: 2841057 - RNA, 15 nt, Human
uguaaucccagcacu

SEQ ID NO: 2841058 - RNA, 17 nt, Human
uguaaucccagcacacu

SEQ ID NO: 2841059 - RNA, 15 nt, Human
uguaaugaaguaaag

SEQ ID NO: 2841060 - RNA, 22 nt, Human
uguaacguuuucuuucacacac

SEQ ID NO: 2841061 - RNA, 18 nt, Human
uguaacuaggcucagaga

SEQ ID NO: 2841062 - RNA, 21 nt, Human
uguaacuaggcucagagaugu

SEQ ID NO: 2841063 - RNA, 20 nt, Human
uguaacuauagacuggaaaa

SEQ ID NO: 2841064 - RNA, 23 nt, Human
uguaacuauagacuggaaaaaau

SEQ ID NO: 2841065 - RNA, 19 nt, Human
uguaaccuguugcuguguu

SEQ ID NO: 2841066 - RNA, 23 nt, Human
uguaaccuguugcuguguuuaau

SEQ ID NO: 2841067 - RNA, 15 nt, Human
uguaacgaaacacuu

SEQ ID NO: 2841068 - RNA, 18 nt, Human
uguaacgguuaacuguaa

SEQ ID NO: 2841069 - RNA, 13 nt, Human
uguaaauuauauu

SEQ ID NO: 2841070 - RNA, 15 nt, Human
uguaaauuauauuug

SEQ ID NO: 2841071 - RNA, 22 nt, Human
uguaaauuauauuugugcuaua

SEQ ID NO: 2841072 - RNA, 23 nt, Human
uguaaauuaggaggcucaacaau

SEQ ID NO: 2841073 - RNA, 16 nt, Human
uguaaauuauguaaug

SEQ ID NO: 2841074 - RNA, 20 nt, Human
uguaaauuauguaaugcaaa

SEQ ID NO: 2841075 - RNA, 20 nt, Human
uguaaaaugugaagugaaug

SEQ ID NO: 2841076 - RNA, 17 nt, Human
uguaaaauguugaauaa

SEQ ID NO: 2841077 - RNA, 14 nt, Human
uguaaacaaacucu

SEQ ID NO: 2841078 - RNA, 15 nt, Human
uguaaacaaacucuu

SEQ ID NO: 2841079 - RNA, 18 nt, Human
uguaaacacagucaaaau

SEQ ID NO: 2841080 - RNA, 14 nt, Human
uguaaacauguguu

SEQ ID NO: 2841081 - RNA, 22 nt, Human
uguaaacauguguuuuaauucc

SEQ ID NO: 2841082 - RNA, 14 nt, Human
uguaaaccaauuuu

SEQ ID NO: 2841083 - RNA, 19 nt, Human
uguaaacauaccaacaugu

SEQ ID NO: 2841084 - RNA, 20 nt, Human
uguaaacaggagacaggaag

SEQ ID NO: 2841085 - RNA, 14 nt, Human
ugguaguaaaacac

SEQ ID NO: 2841086 - RNA, 15 nt, Human
ugguaguaaaacaca

SEQ ID NO: 2841087 - RNA, 18 nt, Human
ugguaguaaaacacagag

SEQ ID NO: 2841088 - RNA, 19 nt, Human
ugguaguaaaacacagagg

SEQ ID NO: 2841089 - RNA, 22 nt, Human
ugguaguaaucacaguuggccu

SEQ ID NO: 2841090 - RNA, 14 nt, Human
ugguagguacuuuu

SEQ ID NO: 2841091 - RNA, 20 nt, Human
ugguagguacuuuuugugaa

SEQ ID NO: 2841092 - RNA, 22 nt, Human
ugguagguacuuuuugugaaga

SEQ ID NO: 2841093 - RNA, 16 nt, Human
ugguaggcauuuccua

SEQ ID NO: 2841094 - RNA, 18 nt, Human
ugguaggccuuuuaacau

SEQ ID NO: 2841095 - RNA, 21 nt, Human
ugguaggccuuuuaacauuuu

SEQ ID NO: 2841096 - RNA, 12 nt, Human
uguaaauguguu

SEQ ID NO: 2841097 - RNA, 15 nt, Human
uguaaauguguugga

SEQ ID NO: 2841098 - RNA, 22 nt, Human
uguaaauguguuggacaaaugu

SEQ ID NO: 2841099 - RNA, 11 nt, Human
uguaaauguua

SEQ ID NO: 2841100 - RNA, 14 nt, Human
uguaaauguuaguu

SEQ ID NO: 2841101 - RNA, 17 nt, Human
uguaaauguuaguuucu

SEQ ID NO: 2841102 - RNA, 19 nt, Human
uguaaauguuaguuucuug

SEQ ID NO: 2841103 - RNA, 22 nt, Human
uguaaauguuaguuucuuggua

SEQ ID NO: 2841104 - RNA, 16 nt, Human
uguaaauguuauuucu

SEQ ID NO: 2841105 - RNA, 17 nt, Human
uguaaauguuauuucug

SEQ ID NO: 2841106 - RNA, 19 nt, Human
uguaaauguuauuucugca

SEQ ID NO: 2841107 - RNA, 21 nt, Human
uguaaauguuauuucugcaaa

SEQ ID NO: 2841108 - RNA, 22 nt, Human
uguaaauguuauuucugcaaac

SEQ ID NO: 2841109 - RNA, 22 nt, Human
uguaaauguuuguuaaaaauaa

SEQ ID NO: 2841110 - RNA, 21 nt, Human
uguagaguuaagaagcuguug

SEQ ID NO: 2841111 - RNA, 12 nt, Human
uguagaguuaag

SEQ ID NO: 2841112 - RNA, 13 nt, Human
uguagaguuaaga

SEQ ID NO: 2841113 - RNA, 14 nt, Human
uguagaguuaagaa

SEQ ID NO: 2841114 - RNA, 15 nt, Human
uguagaguuaagaag

SEQ ID NO: 2841115 - RNA, 16 nt, Human
uguagaguuaagaagc

SEQ ID NO: 2841116 - RNA, 17 nt, Human
uguagaguuaagaagcu

SEQ ID NO: 2841117 - RNA, 18 nt, Human
uguagaguuaagaagcug

SEQ ID NO: 2841118 - RNA, 19 nt, Human
uguagaguuaagaagcugu

SEQ ID NO: 2841119 - RNA, 21 nt, Human
uguaauguagcguguuuacau

SEQ ID NO: 2841120 - RNA, 15 nt, Human
uguacugacuugagg

SEQ ID NO: 2841121 - RNA, 20 nt, Human
uguacugaaaaaugguaauu

SEQ ID NO: 2841122 - RNA, 19 nt, Human
uguacucuggggugcugcc

SEQ ID NO: 2841123 - RNA, 12 nt, Human
uguacugaaaaa

SEQ ID NO: 2841124 - RNA, 15 nt, Human
uguacucuaacuuaa

SEQ ID NO: 2841125 - RNA, 18 nt, Human
uguacucaggaggcugag

SEQ ID NO: 2841126 - RNA, 12 nt, Human
uguacuccuccc

SEQ ID NO: 2841127 - RNA, 13 nt, Human
uguacuccuccca

SEQ ID NO: 2841128 - RNA, 16 nt, Human
uguacuaauucuuaca

SEQ ID NO: 2841129 - RNA, 14 nt, Human
uguacuaccugugu

SEQ ID NO: 2841130 - RNA, 17 nt, Human
uguacuaccuguguaua

SEQ ID NO: 2841131 - RNA, 16 nt, Human
uguacuaguacugugu

SEQ ID NO: 2841132 - RNA, 17 nt, Human
uguacuaguacugugua

SEQ ID NO: 2841133 - RNA, 18 nt, Human
uguacuaguacuguguac

SEQ ID NO: 2841134 - RNA, 19 nt, Human
uguacuaguacuguguacu

SEQ ID NO: 2841135 - RNA, 21 nt, Human
uguacuaguacuguguacugu

SEQ ID NO: 2841136 - RNA, 13 nt, Human
uguacuaguuuua

SEQ ID NO: 2841137 - RNA, 19 nt, Human
uguacuauggaaaaucagc

SEQ ID NO: 2841138 - RNA, 21 nt, Human
uguacuauggaaaaucagcug

SEQ ID NO: 2841139 - RNA, 16 nt, Human
uguacgucugacaggc

SEQ ID NO: 2841140 - RNA, 17 nt, Human
uguacgucugacaggca

SEQ ID NO: 2841141 - RNA, 20 nt, Human
uguacguuuguaugugugua

SEQ ID NO: 2841142 - RNA, 19 nt, Human
uguacguuuguaugugugu

SEQ ID NO: 2841143 - RNA, 16 nt, Human
uguacguuuguaugug

SEQ ID NO: 2841144 - RNA, 17 nt, Human
uguaccuguuccuuaga

SEQ ID NO: 2841145 - RNA, 18 nt, Human
uguaccuucuuucacucu

SEQ ID NO: 2841146 - RNA, 12 nt, Human
uguacccuuaag

SEQ ID NO: 2841147 - RNA, 22 nt, Human
uguacccuuaagucacccuagc

SEQ ID NO: 2841148 - RNA, 16 nt, Human
uguaccuguguacaua

SEQ ID NO: 2841149 - RNA, 19 nt, Human
uguaccuguguacauaacu

SEQ ID NO: 2841150 - RNA, 14 nt, Human
uguaccauuugccu

SEQ ID NO: 2841151 - RNA, 12 nt, Human
uguacagucugu

SEQ ID NO: 2841152 - RNA, 13 nt, Human
uguacagucuguc

SEQ ID NO: 2841153 - RNA, 14 nt, Human
uguacagucugucu

SEQ ID NO: 2841154 - RNA, 15 nt, Human
uguacagucugucuu

SEQ ID NO: 2841155 - RNA, 19 nt, Human
uguacagucugucuucugu

SEQ ID NO: 2841156 - RNA, 20 nt, Human
uguacagucugucuucugua

SEQ ID NO: 2841157 - RNA, 19 nt, Human
uguaaugaauuccuagaau

SEQ ID NO: 2841158 - RNA, 12 nt, Human
uguaaugcaaaa

SEQ ID NO: 2841159 - RNA, 17 nt, Human
uguaaugcgauuuuauu

SEQ ID NO: 2841160 - RNA, 22 nt, Human
uguaaugcgauuuuauuacugg

SEQ ID NO: 2841161 - RNA, 12 nt, Human
uguaaugcugca

SEQ ID NO: 2841162 - RNA, 13 nt, Human
uguaaugcugcac

SEQ ID NO: 2841163 - RNA, 14 nt, Human
uguaaugcugcacu

SEQ ID NO: 2841164 - RNA, 18 nt, Human
uguaaugcugcacuuccu

SEQ ID NO: 2841165 - RNA, 19 nt, Human
uguaaugcugcacuuccug

SEQ ID NO: 2841166 - RNA, 20 nt, Human
uguaaugcugcacuuccugu

SEQ ID NO: 2841167 - RNA, 15 nt, Human
ugugcgcucugugga

SEQ ID NO: 2841168 - RNA, 20 nt, Human
ugugccuggguggacauggc

SEQ ID NO: 2841169 - RNA, 15 nt, Human
ugugccucuuugucu

SEQ ID NO: 2841170 - RNA, 22 nt, Human
ugugccuggcuucuuucucuca

SEQ ID NO: 2841171 - RNA, 23 nt, Human
ugugccuggcuucuuucucucag

SEQ ID NO: 2841172 - RNA, 13 nt, Human
ugugccuggggga

SEQ ID NO: 2841173 - RNA, 21 nt, Human
ugugccugggggaguuuuccu

SEQ ID NO: 2841174 - RNA, 22 nt, Human
ugugccugggggaguuuuccuc

SEQ ID NO: 2841175 - RNA, 13 nt, Human
ugugccugcagcc

SEQ ID NO: 2841176 - RNA, 15 nt, Human
ugugccugacccuac

SEQ ID NO: 2841177 - RNA, 18 nt, Human
ugugccugacugcccagc

SEQ ID NO: 2841178 - RNA, 12 nt, Human
ugugccugcagc

SEQ ID NO: 2841179 - RNA, 15 nt, Human
ugugccucugccugu

SEQ ID NO: 2841180 - RNA, 23 nt, Human
ugugcuucacaguagagccagcu

SEQ ID NO: 2841181 - RNA, 12 nt, Human
ugugcuucuccc

SEQ ID NO: 2841182 - RNA, 15 nt, Human
ugugcuucuccccag

SEQ ID NO: 2841183 - RNA, 16 nt, Human
ugugcuucuccccaga

SEQ ID NO: 2841184 - RNA, 18 nt, Human
ugugcuucuccccagaau

SEQ ID NO: 2841185 - RNA, 20 nt, Human
ugugcuucuccccagaauuc

SEQ ID NO: 2841186 - RNA, 22 nt, Human
ugugcuuugcucuugucccacg

SEQ ID NO: 2841187 - RNA, 23 nt, Human
ugugcuuugcucuugucccacgu

SEQ ID NO: 2841188 - RNA, 16 nt, Human
ugugcuuuuaaaugca

SEQ ID NO: 2841189 - RNA, 16 nt, Human
ugugcuuuuccuauuu

SEQ ID NO: 2841190 - RNA, 14 nt, Human
ugugcuuuuccuga

SEQ ID NO: 2841191 - RNA, 21 nt, Human
ugugcuuuuccugauaaagca

SEQ ID NO: 2841192 - RNA, 14 nt, Human
ugugcuuuuccuau

SEQ ID NO: 2841193 - RNA, 22 nt, Human
ugugcuucacaguagagccagc

SEQ ID NO: 2841194 - RNA, 15 nt, Human
ugugcuucacaguag

SEQ ID NO: 2841195 - RNA, 22 nt, Human
ugugcuuauguaugagguacaa

SEQ ID NO: 2841196 - RNA, 23 nt, Human
ugugcuaaccacgucugucuuca

SEQ ID NO: 2841197 - RNA, 14 nt, Human
ugugcuacagauga

SEQ ID NO: 2841198 - RNA, 14 nt, Human
ugugcuaaauauca

SEQ ID NO: 2841199 - RNA, 21 nt, Human
ugugcuacugucuuuggaaaa

SEQ ID NO: 2841200 - RNA, 13 nt, Human
ugugccucugccu

SEQ ID NO: 2841201 - RNA, 15 nt, Human
ugugcauguguguau

SEQ ID NO: 2841202 - RNA, 16 nt, Human
ugugcauguguguaua

SEQ ID NO: 2841203 - RNA, 17 nt, Human
ugugcauguguguauaa

SEQ ID NO: 2841204 - RNA, 18 nt, Human
ugugcauguguguauaag

SEQ ID NO: 2841205 - RNA, 14 nt, Human
ugugccucugccug

SEQ ID NO: 2841206 - RNA, 20 nt, Human
ugugcagugaagguugcuga

SEQ ID NO: 2841207 - RNA, 13 nt, Human
ugugcaguucuag

SEQ ID NO: 2841208 - RNA, 19 nt, Human
ugugcaguucuaguuugca

SEQ ID NO: 2841209 - RNA, 22 nt, Human
ugugcaguucuaguuugcauuc

SEQ ID NO: 2841210 - RNA, 15 nt, Human
ugugcauagugcugg

SEQ ID NO: 2841211 - RNA, 17 nt, Human
ugugcauagugcuggga

SEQ ID NO: 2841212 - RNA, 18 nt, Human
ugugcauagugcugggau

SEQ ID NO: 2841213 - RNA, 16 nt, Human
ugugcauggaggcccu

SEQ ID NO: 2841214 - RNA, 19 nt, Human
ugugcauggaggcccuccu

SEQ ID NO: 2841215 - RNA, 22 nt, Human
ugugcauggaggcccuccugug

SEQ ID NO: 2841216 - RNA, 14 nt, Human
ugugcaugugugua

SEQ ID NO: 2841217 - RNA, 23 nt, Human
ugugcauguaugucuuggacacu

SEQ ID NO: 2841218 - RNA, 20 nt, Human
ugugcauguaugucuuggac

SEQ ID NO: 2841219 - RNA, 22 nt, Human
ugugcacaugcacgugugugca

SEQ ID NO: 2841220 - RNA, 16 nt, Human
ugugcacaugcacgug

SEQ ID NO: 2841221 - RNA, 19 nt, Human
ugugcaccaccacacccgg

SEQ ID NO: 2841222 - RNA, 21 nt, Human
ugugcaccaccacacccggcu

SEQ ID NO: 2841223 - RNA, 14 nt, Human
ugugcacccauggg

SEQ ID NO: 2841224 - RNA, 23 nt, Human
ugugcaagcgacgacagaugcua

SEQ ID NO: 2841225 - RNA, 19 nt, Human
ugugcaguaauagcacugc

SEQ ID NO: 2841226 - RNA, 15 nt, Human
ugugcagcgcagcug

SEQ ID NO: 2841227 - RNA, 20 nt, Human
ugugcagcgcagcuggacuc

SEQ ID NO: 2841228 - RNA, 12 nt, Human
ugugcagcuuuu

SEQ ID NO: 2841229 - RNA, 16 nt, Human
ugugcagcuuuugguc

SEQ ID NO: 2841230 - RNA, 17 nt, Human
ugugcagcuuuugguca

SEQ ID NO: 2841231 - RNA, 15 nt, Human
ugugcagggagggca

SEQ ID NO: 2841232 - RNA, 17 nt, Human
ugugcagggagggcagu

SEQ ID NO: 2841233 - RNA, 18 nt, Human
ugugcaggugcuauuguu

SEQ ID NO: 2841234 - RNA, 19 nt, Human
ugugcaggugcuauuguua

SEQ ID NO: 2841235 - RNA, 21 nt, Human
ugugcaggugcuauuguuacu

SEQ ID NO: 2841236 - RNA, 21 nt, Human
ugugcaccuuaccaacuuucu

SEQ ID NO: 2841237 - RNA, 22 nt, Human
ugugcaccuuaccaacuuucug

SEQ ID NO: 2841238 - RNA, 23 nt, Human
ugugcacgcagauuagcaggcca

SEQ ID NO: 2841239 - RNA, 13 nt, Human
ugugcagcagauu

SEQ ID NO: 2841240 - RNA, 15 nt, Human
ugugcagcagauugg

SEQ ID NO: 2841241 - RNA, 17 nt, Human
ugugcagcagauuggaa

SEQ ID NO: 2841242 - RNA, 22 nt, Human
uguggcugaggaggccuccauc

SEQ ID NO: 2841243 - RNA, 18 nt, Human
uguggcugggggcaggag

SEQ ID NO: 2841244 - RNA, 15 nt, Human
uguggcugggggcag

SEQ ID NO: 2841245 - RNA, 14 nt, Human
uguggcuccuuccc

SEQ ID NO: 2841246 - RNA, 15 nt, Human
uguggcuccuuccca

SEQ ID NO: 2841247 - RNA, 13 nt, Human
uguggcugaggag

SEQ ID NO: 2841248 - RNA, 16 nt, Human
uguggcugaggaggcc

SEQ ID NO: 2841249 - RNA, 21 nt, Human
uguggcugaggaggccuccau

SEQ ID NO: 2841250 - RNA, 18 nt, Human
uguggcuuuuuuaaaaaa

SEQ ID NO: 2841251 - RNA, 15 nt, Human
ugugggaaaaaaaug

SEQ ID NO: 2841252 - RNA, 21 nt, Human
ugugggaaaaaaaugaaugag

SEQ ID NO: 2841253 - RNA, 19 nt, Human
uguggcuugcuagcuaugu

SEQ ID NO: 2841254 - RNA, 21 nt, Human
uguggcugggggcaggagggc

SEQ ID NO: 2841255 - RNA, 20 nt, Human
uguggcuguagaucccaaga

SEQ ID NO: 2841256 - RNA, 15 nt, Human
ugugggaauuuaaga

SEQ ID NO: 2841257 - RNA, 12 nt, Human
ugugggacccca

SEQ ID NO: 2841258 - RNA, 18 nt, Human
ugugggaccccaggccca

SEQ ID NO: 2841259 - RNA, 13 nt, Human
uguggggaaaggg

SEQ ID NO: 2841260 - RNA, 17 nt, Human
uguggggacccaggcuc

SEQ ID NO: 2841261 - RNA, 14 nt, Human
ugugggggguccuu

SEQ ID NO: 2841262 - RNA, 12 nt, Human
uguggggccuug

SEQ ID NO: 2841263 - RNA, 18 nt, Human
uguggggcuuggcgugga

SEQ ID NO: 2841264 - RNA, 10 nt, Human
uguguacugu

SEQ ID NO: 2841265 - RNA, 19 nt, Human
uguguacauggcagaguuu

SEQ ID NO: 2841266 - RNA, 22 nt, Human
uguguacucacugaagccugcg

SEQ ID NO: 2841267 - RNA, 17 nt, Human
uguguacuguauagaca

SEQ ID NO: 2841268 - RNA, 19 nt, Human
uguguacuguauagacagu

SEQ ID NO: 2841269 - RNA, 20 nt, Human
uguguacuguauagacaguu

SEQ ID NO: 2841270 - RNA, 21 nt, Human
uguguacuguauagacaguuu

SEQ ID NO: 2841271 - RNA, 14 nt, Human
uguguacuguguca

SEQ ID NO: 2841272 - RNA, 15 nt, Human
uguggguaccuguau

SEQ ID NO: 2841273 - RNA, 13 nt, Human
uguggacacagcu

SEQ ID NO: 2841274 - RNA, 14 nt, Human
uguggacacagcuc

SEQ ID NO: 2841275 - RNA, 20 nt, Human
uguggaaagccucugcugcc

SEQ ID NO: 2841276 - RNA, 19 nt, Human
uguggaaagccucugcugc

SEQ ID NO: 2841277 - RNA, 17 nt, Human
uguggaaagccucugcu

SEQ ID NO: 2841278 - RNA, 15 nt, Human
uguggaaagccucug

SEQ ID NO: 2841279 - RNA, 14 nt, Human
uguggaaagccucu

SEQ ID NO: 2841280 - RNA, 18 nt, Human
uguggaaaccuccacagg

SEQ ID NO: 2841281 - RNA, 12 nt, Human
uguggaaagccu

SEQ ID NO: 2841282 - RNA, 17 nt, Human
uguggaaaaugaaaauu

SEQ ID NO: 2841283 - RNA, 15 nt, Human
uguggaaaagaaaca

SEQ ID NO: 2841284 - RNA, 20 nt, Human
uguggaaaagaaacacgcac

SEQ ID NO: 2841285 - RNA, 13 nt, Human
uguggaaaacaga

SEQ ID NO: 2841286 - RNA, 21 nt, Human
uguggcuccuggggguucuuu

SEQ ID NO: 2841287 - RNA, 16 nt, Human
uguggacacagcucuu

SEQ ID NO: 2841288 - RNA, 15 nt, Human
uguggacacagcucu

SEQ ID NO: 2841289 - RNA, 23 nt, Human
uguggacuguggcacuugccugg

SEQ ID NO: 2841290 - RNA, 12 nt, Human
uguggacucugg

SEQ ID NO: 2841291 - RNA, 22 nt, Human
uguggacucuggugccuccaga

SEQ ID NO: 2841292 - RNA, 23 nt, Human
uguggacucuggugccuccagag

SEQ ID NO: 2841293 - RNA, 15 nt, Human
ugucugcagccuuga

SEQ ID NO: 2841294 - RNA, 16 nt, Human
ugucugccaauuuuug

SEQ ID NO: 2841295 - RNA, 11 nt, Human
ugucugcccuu

SEQ ID NO: 2841296 - RNA, 16 nt, Human
ugucugcccuucaccc

SEQ ID NO: 2841297 - RNA, 15 nt, Human
ugucugcgaaguccu

SEQ ID NO: 2841298 - RNA, 23 nt, Human
ugucugcgaaguccuauggaaac

SEQ ID NO: 2841299 - RNA, 17 nt, Human
ugucugcgugggucaga

SEQ ID NO: 2841300 - RNA, 21 nt, Human
ugucugcgugguuccuuucuc

SEQ ID NO: 2841301 - RNA, 19 nt, Human
ugucucaagagggcacugg

SEQ ID NO: 2841302 - RNA, 23 nt, Human
ugucucaagagggcacugguggc

SEQ ID NO: 2841303 - RNA, 20 nt, Human
ugucucaagagggcacuggu

SEQ ID NO: 2841304 - RNA, 21 nt, Human
ugucucaagagggcacuggug

SEQ ID NO: 2841305 - RNA, 16 nt, Human
ugucucaggucccugc

SEQ ID NO: 2841306 - RNA, 17 nt, Human
ugucucaggucccugca

SEQ ID NO: 2841307 - RNA, 16 nt, Human
ugucuuuuuucacuac

SEQ ID NO: 2841308 - RNA, 14 nt, Human
ugugaaguuuacau

SEQ ID NO: 2841309 - RNA, 20 nt, Human
ugugaaguuuacauuguaaa

SEQ ID NO: 2841310 - RNA, 20 nt, Human
ugugaaaccuuuuuuaagau

SEQ ID NO: 2841311 - RNA, 14 nt, Human
ugugaaaccuguga

SEQ ID NO: 2841312 - RNA, 22 nt, Human
ugugaaaaagaugccaauuauu

SEQ ID NO: 2841313 - RNA, 22 nt, Human
ugugaaaccuuuuuuaagauuu

SEQ ID NO: 2841314 - RNA, 19 nt, Human
ugugaaacuggcacugaau

SEQ ID NO: 2841315 - RNA, 14 nt, Human
ugugaaaauguguu

SEQ ID NO: 2841316 - RNA, 15 nt, Human
ugugaaacacagcug

SEQ ID NO: 2841317 - RNA, 16 nt, Human
ugugaaacacagcugu

SEQ ID NO: 2841318 - RNA, 17 nt, Human
ugugaaacacagcuguu

SEQ ID NO: 2841319 - RNA, 19 nt, Human
ugugaaacacuuugccucc

SEQ ID NO: 2841320 - RNA, 14 nt, Human
ugugaaaaaaauaa

SEQ ID NO: 2841321 - RNA, 21 nt, Human
ugucuggugguggcaccaucu

SEQ ID NO: 2841322 - RNA, 14 nt, Human
ugugacccacuucu

SEQ ID NO: 2841323 - RNA, 21 nt, Human
ugugacccacuucucaucaca

SEQ ID NO: 2841324 - RNA, 13 nt, Human
ugugaccaccacc

SEQ ID NO: 2841325 - RNA, 20 nt, Human
ugugacaauaauauuguugu

SEQ ID NO: 2841326 - RNA, 22 nt, Human
ugugacaauaauauuguuguau

SEQ ID NO: 2841327 - RNA, 12 nt, Human
ugugacaaaauu

SEQ ID NO: 2841328 - RNA, 19 nt, Human
ugugacaacugucuaacuu

SEQ ID NO: 2841329 - RNA, 21 nt, Human
ugugacaacugucuaacuuua

SEQ ID NO: 2841330 - RNA, 15 nt, Human
ugugacacacuacac

SEQ ID NO: 2841331 - RNA, 16 nt, Human
ugugacacacuacacc

SEQ ID NO: 2841332 - RNA, 19 nt, Human
ugugacacacuacaccaca

SEQ ID NO: 2841333 - RNA, 21 nt, Human
ugugacacacuacaccacaca

SEQ ID NO: 2841334 - RNA, 22 nt, Human
ugugacacacuacaccacacac

SEQ ID NO: 2841335 - RNA, 23 nt, Human
ugugacacacuacaccacacaca

SEQ ID NO: 2841336 - RNA, 17 nt, Human
ugugacacauaugcacc

SEQ ID NO: 2841337 - RNA, 22 nt, Human
ugugacacauaugcaccuugug

SEQ ID NO: 2841338 - RNA, 23 nt, Human
ugugacagcucuuuuugugaagu

SEQ ID NO: 2841339 - RNA, 12 nt, Human
ugugacagggcc

SEQ ID NO: 2841340 - RNA, 13 nt, Human
ugugacagggcca

SEQ ID NO: 2841341 - RNA, 14 nt, Human
ugugacagggccag

SEQ ID NO: 2841342 - RNA, 15 nt, Human
ugugacagggccagu

SEQ ID NO: 2841343 - RNA, 22 nt, Human
ugugacagggccaguggggccu

SEQ ID NO: 2841344 - RNA, 23 nt, Human
ugugacagggccaguggggccug

SEQ ID NO: 2841345 - RNA, 21 nt, Human
ugugacaaggauugcuacugu

SEQ ID NO: 2841346 - RNA, 13 nt, Human
ugugaauggauug

SEQ ID NO: 2841347 - RNA, 15 nt, Human
ugugaauggauugga

SEQ ID NO: 2841348 - RNA, 23 nt, Human
ugugaauuucuucacuguugaaa

SEQ ID NO: 2841349 - RNA, 14 nt, Human
ugugaaugcuucuc

SEQ ID NO: 2841350 - RNA, 15 nt, Human
ugugaaugcuucuca

SEQ ID NO: 2841351 - RNA, 17 nt, Human
ugugaaugcuucucacu

SEQ ID NO: 2841352 - RNA, 17 nt, Human
ugugaaugaacacucuu

SEQ ID NO: 2841353 - RNA, 14 nt, Human
ugugaaugaacacu

SEQ ID NO: 2841354 - RNA, 23 nt, Human
ugugaaugaacacucuuuugcuu

SEQ ID NO: 2841355 - RNA, 19 nt, Human
ugugaaugauucauguuau

SEQ ID NO: 2841356 - RNA, 20 nt, Human
ugugaaugauucauguuaua

SEQ ID NO: 2841357 - RNA, 22 nt, Human
ugugaaugauucauguuauauu

SEQ ID NO: 2841358 - RNA, 20 nt, Human
ugugaauauggacucaguuu

SEQ ID NO: 2841359 - RNA, 13 nt, Human
ugugauaauuuaa

SEQ ID NO: 2841360 - RNA, 19 nt, Human
ugugaguuuggucuggacu

SEQ ID NO: 2841361 - RNA, 20 nt, Human
ugugaguuuggucuggacug

SEQ ID NO: 2841362 - RNA, 21 nt, Human
ugugaguuuggucuggacuga

SEQ ID NO: 2841363 - RNA, 16 nt, Human
ugugaguaucagaauu

SEQ ID NO: 2841364 - RNA, 17 nt, Human
ugugaguaucagaauug

SEQ ID NO: 2841365 - RNA, 18 nt, Human
ugugaguaucagaauuga

SEQ ID NO: 2841366 - RNA, 16 nt, Human
ugugagguuucccaau

SEQ ID NO: 2841367 - RNA, 20 nt, Human
ugugagguuucccaauggug

SEQ ID NO: 2841368 - RNA, 21 nt, Human
ugugagguuucccaauggugu

SEQ ID NO: 2841369 - RNA, 22 nt, Human
ugugagguuucccaaugguguu

SEQ ID NO: 2841370 - RNA, 12 nt, Human
ugugaguaaaua

SEQ ID NO: 2841371 - RNA, 14 nt, Human
ugugaguaaauauu

SEQ ID NO: 2841372 - RNA, 15 nt, Human
ugugaguaaauauug

SEQ ID NO: 2841373 - RNA, 19 nt, Human
ugugaguaaaucagauguu

SEQ ID NO: 2841374 - RNA, 22 nt, Human
ugugaguaaaucagauguugaa

SEQ ID NO: 2841375 - RNA, 12 nt, Human
ugugaccccucc

SEQ ID NO: 2841376 - RNA, 14 nt, Human
ugugaccccuccug

SEQ ID NO: 2841377 - RNA, 15 nt, Human
ugugaccccuccugg

SEQ ID NO: 2841378 - RNA, 16 nt, Human
ugugaccccuccuggg

SEQ ID NO: 2841379 - RNA, 16 nt, Human
uuggcuuuguuuggau

SEQ ID NO: 2841380 - RNA, 14 nt, Human
uugggaggccgagg

SEQ ID NO: 2841381 - RNA, 18 nt, Human
uugggaggccgaggcagg

SEQ ID NO: 2841382 - RNA, 18 nt, Human
uugggaacugaacucacu

SEQ ID NO: 2841383 - RNA, 19 nt, Human
uugggagcuugggaaugga

SEQ ID NO: 2841384 - RNA, 16 nt, Human
uuggcuuaccugaccu

SEQ ID NO: 2841385 - RNA, 17 nt, Human
uugggaaacuugucacu

SEQ ID NO: 2841386 - RNA, 19 nt, Human
uugggaaacuugucacuug

SEQ ID NO: 2841387 - RNA, 21 nt, Human
uugggaaacuugucacuugca

SEQ ID NO: 2841388 - RNA, 22 nt, Human
uugggaaccaagcuauuccuuu

SEQ ID NO: 2841389 - RNA, 14 nt, Human
uuggcuuaaauaua

SEQ ID NO: 2841390 - RNA, 15 nt, Human
uuggcuuaaauauag

SEQ ID NO: 2841391 - RNA, 16 nt, Human
uuggguggaugccugg

SEQ ID NO: 2841392 - RNA, 15 nt, Human
uugguaaaguccuuu

SEQ ID NO: 2841393 - RNA, 20 nt, Human
uugguaaaguccuuuucuug

SEQ ID NO: 2841394 - RNA, 20 nt, Human
uuggccaccaggugccuuuc

SEQ ID NO: 2841395 - RNA, 18 nt, Human
uuggcugggggccucagu

SEQ ID NO: 2841396 - RNA, 23 nt, Human
uuggcuggaugaaauuuucuaga

SEQ ID NO: 2841397 - RNA, 21 nt, Human
uuggcuggaugaaauuuucua

SEQ ID NO: 2841398 - RNA, 20 nt, Human
uuggcuggaugaaauuuucu

SEQ ID NO: 2841399 - RNA, 22 nt, Human
uuggcugggggccucagugcca

SEQ ID NO: 2841400 - RNA, 21 nt, Human
uuggcugggggccucagugcc

SEQ ID NO: 2841401 - RNA, 17 nt, Human
uuggcugugaggccccu

SEQ ID NO: 2841402 - RNA, 24 nt, Human
uuggccaaagccaaagcuaggccu

SEQ ID NO: 2841403 - RNA, 14 nt, Human
uuggccaggcuggu

SEQ ID NO: 2841404 - RNA, 23 nt, Human
uuggauuuuuaauuaaaaacuag

SEQ ID NO: 2841405 - RNA, 19 nt, Human
uuggcauggauuucugucu

SEQ ID NO: 2841406 - RNA, 14 nt, Human
uuggcauggcuuua

SEQ ID NO: 2841407 - RNA, 21 nt, Human
uuggcaucacagggcagagcc

SEQ ID NO: 2841408 - RNA, 15 nt, Human
uuggcaacagaagca

SEQ ID NO: 2841409 - RNA, 13 nt, Human
uuggcaaggaaag

SEQ ID NO: 2841410 - RNA, 15 nt, Human
uuggcaucagcuggc

SEQ ID NO: 2841411 - RNA, 15 nt, Human
uuggcaaaagccuug

SEQ ID NO: 2841412 - RNA, 17 nt, Human
uuggcaaaagccuugug

SEQ ID NO: 2841413 - RNA, 20 nt, Human
uuggcaaaagccuuguguau

SEQ ID NO: 2841414 - RNA, 16 nt, Human
uuggcaaauuccuagu

SEQ ID NO: 2841415 - RNA, 14 nt, Human
uuggcaacagaagc

SEQ ID NO: 2841416 - RNA, 15 nt, Human
uuguagauuuagugu

SEQ ID NO: 2841417 - RNA, 20 nt, Human
uuguaucucugaagcauguu

SEQ ID NO: 2841418 - RNA, 21 nt, Human
uuguaucucugaagcauguuu

SEQ ID NO: 2841419 - RNA, 13 nt, Human
uuguauuacagau

SEQ ID NO: 2841420 - RNA, 14 nt, Human
uuguauuacagaug

SEQ ID NO: 2841421 - RNA, 14 nt, Human
uuguauuauugcug

SEQ ID NO: 2841422 - RNA, 19 nt, Human
uuguauuauugcuguugcu

SEQ ID NO: 2841423 - RNA, 22 nt, Human
uuguauuauugcuguugcuuga

SEQ ID NO: 2841424 - RNA, 22 nt, Human
uuguauucaaaaauuaucuaua

SEQ ID NO: 2841425 - RNA, 23 nt, Human
uuguagagaacacgcguauuuac

SEQ ID NO: 2841426 - RNA, 13 nt, Human
uuguagaauuguu

SEQ ID NO: 2841427 - RNA, 14 nt, Human
uuguagaauuguua

SEQ ID NO: 2841428 - RNA, 16 nt, Human
uuguagaauuguuaua

SEQ ID NO: 2841429 - RNA, 15 nt, Human
uuguagagccagggu

SEQ ID NO: 2841430 - RNA, 14 nt, Human
uuguagagccaggg

SEQ ID NO: 2841431 - RNA, 11 nt, Human
uuguacauaaa

SEQ ID NO: 2841432 - RNA, 16 nt, Human
uuguacagcuguuuaa

SEQ ID NO: 2841433 - RNA, 13 nt, Human
uuguacagcccag

SEQ ID NO: 2841434 - RNA, 15 nt, Human
uuguacagcccagag

SEQ ID NO: 2841435 - RNA, 21 nt, Human
uuguacagcguuuuaaaagaa

SEQ ID NO: 2841436 - RNA, 16 nt, Human
uuguacaguuuaaaau

SEQ ID NO: 2841437 - RNA, 14 nt, Human
uuguaaaucacauc

SEQ ID NO: 2841438 - RNA, 18 nt, Human
uuguacagaauuuuggaa

SEQ ID NO: 2841439 - RNA, 18 nt, Human
uuguaaagaaauuuacua

SEQ ID NO: 2841440 - RNA, 20 nt, Human
uuguaaagaaauuuacuaua

SEQ ID NO: 2841441 - RNA, 21 nt, Human
uuguaaagaaauuuacuauau

SEQ ID NO: 2841442 - RNA, 16 nt, Human
uuguaaagugaagaau

SEQ ID NO: 2841443 - RNA, 19 nt, Human
uuggaaauccuaguuuccu

SEQ ID NO: 2841444 - RNA, 22 nt, Human
uuggaaauccuaguuuccucuc

SEQ ID NO: 2841445 - RNA, 24 nt, Human
uuggaaauccuaguuuccucuccu

SEQ ID NO: 2841446 - RNA, 21 nt, Human
uuggaaauggaugcaaaguac

SEQ ID NO: 2841447 - RNA, 13 nt, Human
uuggaaauauuca

SEQ ID NO: 2841448 - RNA, 13 nt, Human
uuggaacagaaug

SEQ ID NO: 2841449 - RNA, 14 nt, Human
uuggaacagaaugu

SEQ ID NO: 2841450 - RNA, 22 nt, Human
uuggaaccacggagaucuccuu

SEQ ID NO: 2841451 - RNA, 22 nt, Human
uuggaaagcaucaccucaggcc

SEQ ID NO: 2841452 - RNA, 12 nt, Human
uugcuuaguaaa

SEQ ID NO: 2841453 - RNA, 17 nt, Human
uugcuuaccuugacugu

SEQ ID NO: 2841454 - RNA, 20 nt, Human
uuggaaagcaucaccucagg

SEQ ID NO: 2841455 - RNA, 13 nt, Human
uugcuguuuugau

SEQ ID NO: 2841456 - RNA, 18 nt, Human
uugcuguaugcugaucau

SEQ ID NO: 2841457 - RNA, 21 nt, Human
uugcuguaugcugaucaucgc

SEQ ID NO: 2841458 - RNA, 16 nt, Human
uugcugccucagagca

SEQ ID NO: 2841459 - RNA, 20 nt, Human
uugcugccacuuuuuaacua

SEQ ID NO: 2841460 - RNA, 16 nt, Human
uugcuguaggaucuaa

SEQ ID NO: 2841461 - RNA, 19 nt, Human
uugcuguaggaucuaaggc

SEQ ID NO: 2841462 - RNA, 16 nt, Human
uugcuguaagaugucu

SEQ ID NO: 2841463 - RNA, 18 nt, Human
uugcuguaagaugucugu

SEQ ID NO: 2841464 - RNA, 19 nt, Human
uugcuguaagaugucuguu

SEQ ID NO: 2841465 - RNA, 15 nt, Human
uuggacccaaggaaa

SEQ ID NO: 2841466 - RNA, 19 nt, Human
uuggacccaaggaaaacug

SEQ ID NO: 2841467 - RNA, 14 nt, Human
uuggaccccagaga

SEQ ID NO: 2841468 - RNA, 13 nt, Human
uuggaaguuucau

SEQ ID NO: 2841469 - RNA, 16 nt, Human
uuggaaguugcauggc

SEQ ID NO: 2841470 - RNA, 16 nt, Human
uuggaacaaagugaag

SEQ ID NO: 2841471 - RNA, 15 nt, Human
uuggaaguacaugaa

SEQ ID NO: 2841472 - RNA, 20 nt, Human
uuggaacuaacacgugaugu

SEQ ID NO: 2841473 - RNA, 22 nt, Human
uuggaacuaacacgugauguga

SEQ ID NO: 2841474 - RNA, 13 nt, Human
uuggaaggagaca

SEQ ID NO: 2841475 - RNA, 18 nt, Human
uuggaaggagacacagau

SEQ ID NO: 2841476 - RNA, 19 nt, Human
uuggaaggagacacagaug

SEQ ID NO: 2841477 - RNA, 21 nt, Human
uuggaaggagacacagauguu

SEQ ID NO: 2841478 - RNA, 19 nt, Human
uuggaagaaaaaaaucuuc

SEQ ID NO: 2841479 - RNA, 22 nt, Human
uuggaagaaaaaaaucuucucc

SEQ ID NO: 2841480 - RNA, 18 nt, Human
uuggauuguauauugugu

SEQ ID NO: 2841481 - RNA, 14 nt, Human
uuggauuguauauu

SEQ ID NO: 2841482 - RNA, 20 nt, Human
uuggauuauuuaauaacauu

SEQ ID NO: 2841483 - RNA, 15 nt, Human
uuggauucuuaugua

SEQ ID NO: 2841484 - RNA, 18 nt, Human
uuggauuauuuaauaaca

SEQ ID NO: 2841485 - RNA, 19 nt, Human
uuggauuauuuaauaacau

SEQ ID NO: 2841486 - RNA, 21 nt, Human
uuggauuauuuaauaacauua

SEQ ID NO: 2841487 - RNA, 23 nt, Human
uuggauuccaugcuaagcaagcu

SEQ ID NO: 2841488 - RNA, 22 nt, Human
uuggauucccuuaaacaaaagu

SEQ ID NO: 2841489 - RNA, 15 nt, Human
uugcugccucaugcu

SEQ ID NO: 2841490 - RNA, 12 nt, Human
uugcugccucau

SEQ ID NO: 2841491 - RNA, 11 nt, Human
uugcugccuca

SEQ ID NO: 2841492 - RNA, 17 nt, Human
uugcugauuuccccucu

SEQ ID NO: 2841493 - RNA, 14 nt, Human
uugcugauuuuaau

SEQ ID NO: 2841494 - RNA, 16 nt, Human
uugcugauuuuaaugg

SEQ ID NO: 2841495 - RNA, 18 nt, Human
uugcugauuuuaauggau

SEQ ID NO: 2841496 - RNA, 19 nt, Human
uugcugauuuuaauggauu

SEQ ID NO: 2841497 - RNA, 16 nt, Human
uugccugguuuugucu

SEQ ID NO: 2841498 - RNA, 23 nt, Human
uugcggcgucagucuuuuucugu

SEQ ID NO: 2841499 - RNA, 14 nt, Human
uugcgugacacucu

SEQ ID NO: 2841500 - RNA, 20 nt, Human
uugcgugacacucuccuugc

SEQ ID NO: 2841501 - RNA, 15 nt, Human
uugcguggacucugc

SEQ ID NO: 2841502 - RNA, 18 nt, Human
uugcguggacucugcaca

SEQ ID NO: 2841503 - RNA, 16 nt, Human
uugcguuacacccuuu

SEQ ID NO: 2841504 - RNA, 22 nt, Human
uugcguuccaugaugcugggau

SEQ ID NO: 2841505 - RNA, 20 nt, Human
uugcguuggucucugcauuu

SEQ ID NO: 2841506 - RNA, 13 nt, Human
uugcuaaacacug

SEQ ID NO: 2841507 - RNA, 14 nt, Human
uugcuaaacacugc

SEQ ID NO: 2841508 - RNA, 17 nt, Human
uugcuaaacacugcgcu

SEQ ID NO: 2841509 - RNA, 22 nt, Human
uugccugcguuuuggaagcucu

SEQ ID NO: 2841510 - RNA, 12 nt, Human
uugccuggccuu

SEQ ID NO: 2841511 - RNA, 12 nt, Human
uugccugcaggc

SEQ ID NO: 2841512 - RNA, 18 nt, Human
uugccucugccucugaca

SEQ ID NO: 2841513 - RNA, 16 nt, Human
uugccucugccucuga

SEQ ID NO: 2841514 - RNA, 12 nt, Human
uugccucuacuu

SEQ ID NO: 2841515 - RNA, 19 nt, Human
uugccucucgguugaaacc

SEQ ID NO: 2841516 - RNA, 20 nt, Human
uugccucucgguugaaaccu

SEQ ID NO: 2841517 - RNA, 14 nt, Human
uugccucugccucu

SEQ ID NO: 2841518 - RNA, 11 nt, Human
uugccucugcc

SEQ ID NO: 2841519 - RNA, 14 nt, Human
uugccuccguguca

SEQ ID NO: 2841520 - RNA, 19 nt, Human
uugccuccuguguacugug

SEQ ID NO: 2841521 - RNA, 21 nt, Human
uugccuccuguguacuguguc

SEQ ID NO: 2841522 - RNA, 18 nt, Human
uugccacugccucuuccu

SEQ ID NO: 2841523 - RNA, 22 nt, Human
uugccauacuuugucugaaaaa

SEQ ID NO: 2841524 - RNA, 18 nt, Human
uugccauacuuugucuga

SEQ ID NO: 2841525 - RNA, 15 nt, Human
uugccacuuugcacg

SEQ ID NO: 2841526 - RNA, 16 nt, Human
uugccacuuugcacga

SEQ ID NO: 2841527 - RNA, 11 nt, Human
uugcccaggca

SEQ ID NO: 2841528 - RNA, 22 nt, Human
uugcccagcauuuuacugauuc

SEQ ID NO: 2841529 - RNA, 23 nt, Human
uugcccacgcuggagugcaguga

SEQ ID NO: 2841530 - RNA, 12 nt, Human
uucugagaaaac

SEQ ID NO: 2841531 - RNA, 13 nt, Human
uucugagaaaaca

SEQ ID NO: 2841532 - RNA, 13 nt, Human
uucugacugcuga

SEQ ID NO: 2841533 - RNA, 21 nt, Human
uucugagaaaacaagcaaguu

SEQ ID NO: 2841534 - RNA, 12 nt, Human
uucugagaaaag

SEQ ID NO: 2841535 - RNA, 14 nt, Human
uucugagaaaacaa

SEQ ID NO: 2841536 - RNA, 12 nt, Human
uucuguggcuca

SEQ ID NO: 2841537 - RNA, 16 nt, Human
uucuguggcucacaga

SEQ ID NO: 2841538 - RNA, 17 nt, Human
uucuguccuacucugug

SEQ ID NO: 2841539 - RNA, 13 nt, Human
uucuguuaaaauc

SEQ ID NO: 2841540 - RNA, 14 nt, Human
uucuguuaaaaucu

SEQ ID NO: 2841541 - RNA, 15 nt, Human
uucuguuaaaaucua

SEQ ID NO: 2841542 - RNA, 17 nt, Human
uucuguuaaaaucuauu

SEQ ID NO: 2841543 - RNA, 21 nt, Human
uucuguuaaaaucuauucugu

SEQ ID NO: 2841544 - RNA, 22 nt, Human
uucuguggguccgauaauaucu

SEQ ID NO: 2841545 - RNA, 19 nt, Human
uucuguuauauccccugcu

SEQ ID NO: 2841546 - RNA, 21 nt, Human
uucuguuauauccccugcuac

SEQ ID NO: 2841547 - RNA, 14 nt, Human
uucuucaacucccu

SEQ ID NO: 2841548 - RNA, 13 nt, Human
uucuuauuuugug

SEQ ID NO: 2841549 - RNA, 22 nt, Human
uucuuauuuuuccuaacaaaag

SEQ ID NO: 2841550 - RNA, 14 nt, Human
uucuucaaaaugua

SEQ ID NO: 2841551 - RNA, 15 nt, Human
uucuucaaaauguau

SEQ ID NO: 2841552 - RNA, 19 nt, Human
uucuucaaaauguauauau

SEQ ID NO: 2841553 - RNA, 20 nt, Human
uucuucaaaauguauauauu

SEQ ID NO: 2841554 - RNA, 21 nt, Human
uucuucaaaauguauauauuu

SEQ ID NO: 2841555 - RNA, 23 nt, Human
uucuucaaaauguauauauuuag

SEQ ID NO: 2841556 - RNA, 15 nt, Human
uucuuauugcuuuua

SEQ ID NO: 2841557 - RNA, 23 nt, Human
uucuguuccucucuuuuccuguu

SEQ ID NO: 2841558 - RNA, 16 nt, Human
uucuugguuggcuggc

SEQ ID NO: 2841559 - RNA, 15 nt, Human
uucuuguaaaugugu

SEQ ID NO: 2841560 - RNA, 16 nt, Human
uucuuguaaauguguu

SEQ ID NO: 2841561 - RNA, 18 nt, Human
uucuuguaaauguguugg

SEQ ID NO: 2841562 - RNA, 22 nt, Human
uucuuguaaauguguuggacaa

SEQ ID NO: 2841563 - RNA, 19 nt, Human
uucuuguaaggcuuugauu

SEQ ID NO: 2841564 - RNA, 20 nt, Human
uucuugguuggcuggccuuc

SEQ ID NO: 2841565 - RNA, 21 nt, Human
uucuucaccuaagucucugug

SEQ ID NO: 2841566 - RNA, 22 nt, Human
uucuucaccuaagucucuguga

SEQ ID NO: 2841567 - RNA, 22 nt, Human
uucuucacuguccuccaagcca

SEQ ID NO: 2841568 - RNA, 14 nt, Human
uucuucacuuuugc

SEQ ID NO: 2841569 - RNA, 18 nt, Human
uucuucacuuuugcaagg

SEQ ID NO: 2841570 - RNA, 19 nt, Human
uucuucaaauccuuccaaa

SEQ ID NO: 2841571 - RNA, 18 nt, Human
uugaaacuacuacaauga

SEQ ID NO: 2841572 - RNA, 15 nt, Human
uucuuuauacuguaa

SEQ ID NO: 2841573 - RNA, 16 nt, Human
uucuuuauacuguaau

SEQ ID NO: 2841574 - RNA, 18 nt, Human
uucuuuauauacaauaau

SEQ ID NO: 2841575 - RNA, 21 nt, Human
uucuuuauauacaauaaugga

SEQ ID NO: 2841576 - RNA, 23 nt, Human
uucuuuauauacaauaauggaaa

SEQ ID NO: 2841577 - RNA, 20 nt, Human
uucuuuauauuuauccacua

SEQ ID NO: 2841578 - RNA, 12 nt, Human
uucuuguacagu

SEQ ID NO: 2841579 - RNA, 12 nt, Human
uugaagacaauu

SEQ ID NO: 2841580 - RNA, 13 nt, Human
uugaagacaauuu

SEQ ID NO: 2841581 - RNA, 15 nt, Human
uugaagacaauuuga

SEQ ID NO: 2841582 - RNA, 16 nt, Human
uugaagacaauuugau

SEQ ID NO: 2841583 - RNA, 19 nt, Human
uugaagacaauuugauaca

SEQ ID NO: 2841584 - RNA, 22 nt, Human
uugaagacaauuugauacauaa

SEQ ID NO: 2841585 - RNA, 23 nt, Human
uugaagacaauuugauacauaau

SEQ ID NO: 2841586 - RNA, 20 nt, Human
uugaagacccgcuacaaaac

SEQ ID NO: 2841587 - RNA, 18 nt, Human
uugaagagagauauaucu

SEQ ID NO: 2841588 - RNA, 20 nt, Human
uugaagagagauauaucuga

SEQ ID NO: 2841589 - RNA, 21 nt, Human
uugaagagagauauaucugaa

SEQ ID NO: 2841590 - RNA, 20 nt, Human
uugaaucuauuuaaguaaaa

SEQ ID NO: 2841591 - RNA, 14 nt, Human
uugaaucuauuuca

SEQ ID NO: 2841592 - RNA, 18 nt, Human
uugaaucuauuucacuua

SEQ ID NO: 2841593 - RNA, 14 nt, Human
uugaagaaggugga

SEQ ID NO: 2841594 - RNA, 18 nt, Human
uugaagaagguggaccuu

SEQ ID NO: 2841595 - RNA, 19 nt, Human
uugaagaagguggaccuuu

SEQ ID NO: 2841596 - RNA, 22 nt, Human
uugaagaagguggaccuuuuaa

SEQ ID NO: 2841597 - RNA, 22 nt, Human
uugaacuuuuuuccacugaagu

SEQ ID NO: 2841598 - RNA, 14 nt, Human
uugaagaaacagau

SEQ ID NO: 2841599 - RNA, 19 nt, Human
uugaagaaacagauaccau

SEQ ID NO: 2841600 - RNA, 20 nt, Human
uugaagaaauuauaaagaua

SEQ ID NO: 2841601 - RNA, 22 nt, Human
uugaagaaauuauaaagauaaa

SEQ ID NO: 2841602 - RNA, 16 nt, Human
uugaacuuuuuuccac

SEQ ID NO: 2841603 - RNA, 13 nt, Human
uugaggcuuugug

SEQ ID NO: 2841604 - RNA, 14 nt, Human
uugaggcuuugugu

SEQ ID NO: 2841605 - RNA, 15 nt, Human
uugaggcuuuguguu

SEQ ID NO: 2841606 - RNA, 17 nt, Human
uugaggcuuuguguugu

SEQ ID NO: 2841607 - RNA, 20 nt, Human
uugagggacgcuuugucugu

SEQ ID NO: 2841608 - RNA, 21 nt, Human
uugagggacgcuuugucuguc

SEQ ID NO: 2841609 - RNA, 17 nt, Human
uugagggacugccucug

SEQ ID NO: 2841610 - RNA, 18 nt, Human
uugagggacugccucugc

SEQ ID NO: 2841611 - RNA, 20 nt, Human
uugagggacugccucugcca

SEQ ID NO: 2841612 - RNA, 14 nt, Human
uugagggcccagag

SEQ ID NO: 2841613 - RNA, 15 nt, Human
uugagggcccagagc

SEQ ID NO: 2841614 - RNA, 16 nt, Human
uugagggcccagagca

SEQ ID NO: 2841615 - RNA, 19 nt, Human
uugagggcccagagcagga

SEQ ID NO: 2841616 - RNA, 21 nt, Human
uugagggcccagagcaggaag

SEQ ID NO: 2841617 - RNA, 23 nt, Human
uugagggcccagagcaggaagca

SEQ ID NO: 2841618 - RNA, 15 nt, Human
uugaggggcuccugg

SEQ ID NO: 2841619 - RNA, 16 nt, Human
uugaggggcuccugga

SEQ ID NO: 2841620 - RNA, 21 nt, Human
uugacuagggauucaggcugc

SEQ ID NO: 2841621 - RNA, 19 nt, Human
uugacuagggauucaggcu

SEQ ID NO: 2841622 - RNA, 15 nt, Human
uugacgauuccuucu

SEQ ID NO: 2841623 - RNA, 17 nt, Human
uugacgauuccuucucu

SEQ ID NO: 2841624 - RNA, 18 nt, Human
uugacgagucaccuucca

SEQ ID NO: 2841625 - RNA, 23 nt, Human
uugacgguuuuuuauuauugugg

SEQ ID NO: 2841626 - RNA, 23 nt, Human
uugacuagaugauggaugccaau

SEQ ID NO: 2841627 - RNA, 11 nt, Human
uugagcuggcc

SEQ ID NO: 2841628 - RNA, 13 nt, Human
uugagcuggccuc

SEQ ID NO: 2841629 - RNA, 12 nt, Human
uugagcuggccu

SEQ ID NO: 2841630 - RNA, 18 nt, Human
uugaggaaacaacagcuu

SEQ ID NO: 2841631 - RNA, 14 nt, Human
uugaggaacuguac

SEQ ID NO: 2841632 - RNA, 15 nt, Human
uugaggaacuguaca

SEQ ID NO: 2841633 - RNA, 19 nt, Human
uugaggaacuguacagaaa

SEQ ID NO: 2841634 - RNA, 15 nt, Human
uugaccucaggugau

SEQ ID NO: 2841635 - RNA, 12 nt, Human
uugaaugucuuu

SEQ ID NO: 2841636 - RNA, 16 nt, Human
uugaaugucuuuugaa

SEQ ID NO: 2841637 - RNA, 23 nt, Human
uugaaugccauagucaaagagag

SEQ ID NO: 2841638 - RNA, 13 nt, Human
uugaaugcugcca

SEQ ID NO: 2841639 - RNA, 14 nt, Human
uugaaugcugccag

SEQ ID NO: 2841640 - RNA, 15 nt, Human
uugaaugcugccagu

SEQ ID NO: 2841641 - RNA, 23 nt, Human
uugaaugcugccaguguggagug

SEQ ID NO: 2841642 - RNA, 18 nt, Human
uugaauggccugccuuga

SEQ ID NO: 2841643 - RNA, 15 nt, Human
uugaaugcuuuuuga

SEQ ID NO: 2841644 - RNA, 17 nt, Human
uugaaugcuuuuugaau

SEQ ID NO: 2841645 - RNA, 20 nt, Human
uugaaugcuuuuugaauguu

SEQ ID NO: 2841646 - RNA, 23 nt, Human
uugaaugcuuuuugaauguuauu

SEQ ID NO: 2841647 - RNA, 20 nt, Human
uugaccuucauuucauguau

SEQ ID NO: 2841648 - RNA, 13 nt, Human
uugaccuuuguac

SEQ ID NO: 2841649 - RNA, 14 nt, Human
uugaccuuuguaca

SEQ ID NO: 2841650 - RNA, 15 nt, Human
uugaccuuuguacag

SEQ ID NO: 2841651 - RNA, 16 nt, Human
uugaccugcuccgcug

SEQ ID NO: 2841652 - RNA, 21 nt, Human
uugaccugcuccgcugcuccu

SEQ ID NO: 2841653 - RNA, 21 nt, Human
uugaccuuuuauguaguaauu

SEQ ID NO: 2841654 - RNA, 22 nt, Human
uugaccucacagugacccuucc

SEQ ID NO: 2841655 - RNA, 23 nt, Human
uugaccucacagugacccuuccc

SEQ ID NO: 2841656 - RNA, 19 nt, Human
uugccaccccacccucccu

SEQ ID NO: 2841657 - RNA, 21 nt, Human
uugccaccccacccucccugg

SEQ ID NO: 2841658 - RNA, 22 nt, Human
uugccaccccacccucccugga

SEQ ID NO: 2841659 - RNA, 23 nt, Human
uugccaccccacccucccuggag

SEQ ID NO: 2841660 - RNA, 14 nt, Human
uugccacugauauu

SEQ ID NO: 2841661 - RNA, 18 nt, Human
uugccacugauauucaga

SEQ ID NO: 2841662 - RNA, 19 nt, Human
uugccacugauauucagaa

SEQ ID NO: 2841663 - RNA, 20 nt, Human
uugccacugauauucagaau

SEQ ID NO: 2841664 - RNA, 12 nt, Human
uugccacuaauu

SEQ ID NO: 2841665 - RNA, 16 nt, Human
uugccacuaauuuuag

SEQ ID NO: 2841666 - RNA, 21 nt, Human
uugccacuaauuuuaguauuc

SEQ ID NO: 2841667 - RNA, 14 nt, Human
uugccacugccucu

SEQ ID NO: 2841668 - RNA, 15 nt, Human
uugccacugccucuu

SEQ ID NO: 2841669 - RNA, 23 nt, Human
uugcaguccuuuuacuacagcua

SEQ ID NO: 2841670 - RNA, 14 nt, Human
uugcagucauagaa

SEQ ID NO: 2841671 - RNA, 17 nt, Human
uugcagucaucagaagu

SEQ ID NO: 2841672 - RNA, 16 nt, Human
uugcauacugagccaa

SEQ ID NO: 2841673 - RNA, 22 nt, Human
uugcagacaggcaagcaccucc

SEQ ID NO: 2841674 - RNA, 14 nt, Human
uugcagcuuuaugu

SEQ ID NO: 2841675 - RNA, 18 nt, Human
uugcagcuuuauguucau

SEQ ID NO: 2841676 - RNA, 21 nt, Human
uugcagcuuuauguucauuug

SEQ ID NO: 2841677 - RNA, 18 nt, Human
uugcagguggaacucagu

SEQ ID NO: 2841678 - RNA, 12 nt, Human
uugcagggcagc

SEQ ID NO: 2841679 - RNA, 13 nt, Human
uugcagggcagcc

SEQ ID NO: 2841680 - RNA, 14 nt, Human
uugcagggcagccc

SEQ ID NO: 2841681 - RNA, 21 nt, Human
uugcagggcagccccacaacu

SEQ ID NO: 2841682 - RNA, 19 nt, Human
uugcagguggaacucaguc

SEQ ID NO: 2841683 - RNA, 20 nt, Human
uugcagguggaacucaguca

SEQ ID NO: 2841684 - RNA, 16 nt, Human
uugcagacaggcaagc

SEQ ID NO: 2841685 - RNA, 13 nt, Human
uugcagaaguucu

SEQ ID NO: 2841686 - RNA, 19 nt, Human
uugcagaaguucuuagugu

SEQ ID NO: 2841687 - RNA, 13 nt, Human
uugcagaagaggg

SEQ ID NO: 2841688 - RNA, 15 nt, Human
uugcagaagagggug

SEQ ID NO: 2841689 - RNA, 16 nt, Human
uugcagaagagggugu

SEQ ID NO: 2841690 - RNA, 20 nt, Human
uugcagaagaggguguguuu

SEQ ID NO: 2841691 - RNA, 21 nt, Human
uugcagaagaggguguguuug

SEQ ID NO: 2841692 - RNA, 11 nt, Human
uugcagaacug

SEQ ID NO: 2841693 - RNA, 14 nt, Human
uugcagaacugcca

SEQ ID NO: 2841694 - RNA, 16 nt, Human
uugcagaacugccauu

SEQ ID NO: 2841695 - RNA, 14 nt, Human
uugcaacguuuaca

SEQ ID NO: 2841696 - RNA, 11 nt, Human
uugaugaaaag

SEQ ID NO: 2841697 - RNA, 19 nt, Human
uugaugaaaagauuuaagc

SEQ ID NO: 2841698 - RNA, 20 nt, Human
uugaugaaaagauuuaagca

SEQ ID NO: 2841699 - RNA, 19 nt, Human
uugauuuaugcauggaaac

SEQ ID NO: 2841700 - RNA, 12 nt, Human
uugauuuaugca

SEQ ID NO: 2841701 - RNA, 11 nt, Human
uugauuuacag

SEQ ID NO: 2841702 - RNA, 22 nt, Human
uugauuuacagcaaguagauaa

SEQ ID NO: 2841703 - RNA, 17 nt, Human
uugauuuaaacacacag

SEQ ID NO: 2841704 - RNA, 18 nt, Human
uugauuuaaacacacaga

SEQ ID NO: 2841705 - RNA, 16 nt, Human
uugauuuccuguguca

SEQ ID NO: 2841706 - RNA, 21 nt, Human
uugauuggggaauuaaaaguc

SEQ ID NO: 2841707 - RNA, 17 nt, Human
uugauuuuuacuguguu

SEQ ID NO: 2841708 - RNA, 17 nt, Human
uugcaaaagacuaauuu

SEQ ID NO: 2841709 - RNA, 16 nt, Human
uugauuuuuacugugu

SEQ ID NO: 2841710 - RNA, 15 nt, Human
uugauuuuugucuca

SEQ ID NO: 2841711 - RNA, 17 nt, Human
uugcaacaggcugggcu

SEQ ID NO: 2841712 - RNA, 14 nt, Human
uugcaacaggcugg

SEQ ID NO: 2841713 - RNA, 19 nt, Human
uugcaaaauagcauuuguu

SEQ ID NO: 2841714 - RNA, 23 nt, Human
uucagacuugccaugugacucug

SEQ ID NO: 2841715 - RNA, 14 nt, Human
uucagacuugucaa

SEQ ID NO: 2841716 - RNA, 15 nt, Human
uucagacuugucaag

SEQ ID NO: 2841717 - RNA, 22 nt, Human
uucagcuccagcucaccagccc

SEQ ID NO: 2841718 - RNA, 19 nt, Human
uucacugaaguucuccuga

SEQ ID NO: 2841719 - RNA, 13 nt, Human
uucacugaagacg

SEQ ID NO: 2841720 - RNA, 14 nt, Human
uucagagaaaggca

SEQ ID NO: 2841721 - RNA, 13 nt, Human
uucagagaauauc

SEQ ID NO: 2841722 - RNA, 21 nt, Human
uucagagacagcugauacuuc

SEQ ID NO: 2841723 - RNA, 22 nt, Human
uucaccccccacucaccagugu

SEQ ID NO: 2841724 - RNA, 21 nt, Human
uucacucugggcacacucugc

SEQ ID NO: 2841725 - RNA, 13 nt, Human
uucacucuuaggc

SEQ ID NO: 2841726 - RNA, 23 nt, Human
uucacucuuaggcacuuuggggg

SEQ ID NO: 2841727 - RNA, 16 nt, Human
uucacccccuuuccug

SEQ ID NO: 2841728 - RNA, 17 nt, Human
uucaccccaaucccagc

SEQ ID NO: 2841729 - RNA, 18 nt, Human
uucacccaggccuauguu

SEQ ID NO: 2841730 - RNA, 21 nt, Human
uucacccaggccuauguugau

SEQ ID NO: 2841731 - RNA, 16 nt, Human
uucacccaucuuauca

SEQ ID NO: 2841732 - RNA, 18 nt, Human
uucacccaucuuaucaag

SEQ ID NO: 2841733 - RNA, 14 nt, Human
uucaccccacccuu

SEQ ID NO: 2841734 - RNA, 13 nt, Human
uucaccccacccu

SEQ ID NO: 2841735 - RNA, 13 nt, Human
uucaauucucaaa

SEQ ID NO: 2841736 - RNA, 16 nt, Human
uucaauuccugggccc

SEQ ID NO: 2841737 - RNA, 14 nt, Human
uucaauuccugggc

SEQ ID NO: 2841738 - RNA, 22 nt, Human
uucaccccagggccugagccug

SEQ ID NO: 2841739 - RNA, 22 nt, Human
uucaccccaguggccacucagc

SEQ ID NO: 2841740 - RNA, 20 nt, Human
uucaccccagggccugagcc

SEQ ID NO: 2841741 - RNA, 17 nt, Human
uucaccccagggccuga

SEQ ID NO: 2841742 - RNA, 19 nt, Human
uucacccccuuuccuggac

SEQ ID NO: 2841743 - RNA, 18 nt, Human
uucaccccggcaggcccu

SEQ ID NO: 2841744 - RNA, 20 nt, Human
uucaccccggcaggcccugc

SEQ ID NO: 2841745 - RNA, 21 nt, Human
uucaccccggcaggcccugca

SEQ ID NO: 2841746 - RNA, 22 nt, Human
uucaccccggcaggcccugcag

SEQ ID NO: 2841747 - RNA, 21 nt, Human
uucaccccaguggccacucag

SEQ ID NO: 2841748 - RNA, 17 nt, Human
uucaccccccacucacc

SEQ ID NO: 2841749 - RNA, 23 nt, Human
uucaccccccacucaccaguguc

SEQ ID NO: 2841750 - RNA, 21 nt, Human
uucacccccugagauccccug

SEQ ID NO: 2841751 - RNA, 19 nt, Human
uucaggaauguguggccug

SEQ ID NO: 2841752 - RNA, 16 nt, Human
uucaggagcagccuca

SEQ ID NO: 2841753 - RNA, 20 nt, Human
uucaggagcagccucagaac

SEQ ID NO: 2841754 - RNA, 22 nt, Human
uucaggagcagccucagaacaa

SEQ ID NO: 2841755 - RNA, 14 nt, Human
uucaggagcgcaag

SEQ ID NO: 2841756 - RNA, 17 nt, Human
uucaggagcgcaagaua

SEQ ID NO: 2841757 - RNA, 18 nt, Human
uucaggagcgcaagauag

SEQ ID NO: 2841758 - RNA, 19 nt, Human
uucaggagcgcaagauaga

SEQ ID NO: 2841759 - RNA, 17 nt, Human
uucaggagucccaagga

SEQ ID NO: 2841760 - RNA, 15 nt, Human
uucaggcucuucucc

SEQ ID NO: 2841761 - RNA, 22 nt, Human
uucaggcuccccagaucauguu

SEQ ID NO: 2841762 - RNA, 17 nt, Human
uucaggcaauucuccug

SEQ ID NO: 2841763 - RNA, 13 nt, Human
uucagcucuuuuu

SEQ ID NO: 2841764 - RNA, 23 nt, Human
uucagcuccagcucaccagcccc

SEQ ID NO: 2841765 - RNA, 15 nt, Human
uucagcucucuguau

SEQ ID NO: 2841766 - RNA, 16 nt, Human
uucagcucucuguaua

SEQ ID NO: 2841767 - RNA, 17 nt, Human
uucagcucucuguauaa

SEQ ID NO: 2841768 - RNA, 18 nt, Human
uucagcucucuguauaaa

SEQ ID NO: 2841769 - RNA, 21 nt, Human
uucagcucucuguauaaacau

SEQ ID NO: 2841770 - RNA, 14 nt, Human
uuacuaaaauauau

SEQ ID NO: 2841771 - RNA, 17 nt, Human
uuacuaaaauauauaua

SEQ ID NO: 2841772 - RNA, 17 nt, Human
uuacguguuuaaaaaaa

SEQ ID NO: 2841773 - RNA, 18 nt, Human
uuacuaaacauaugauuu

SEQ ID NO: 2841774 - RNA, 22 nt, Human
uuacuaaacauaugauuucacu

SEQ ID NO: 2841775 - RNA, 18 nt, Human
uuauuuuccccuaucauu

SEQ ID NO: 2841776 - RNA, 22 nt, Human
uuauuuuccccuaucauuuauu

SEQ ID NO: 2841777 - RNA, 12 nt, Human
uuauuuucacug

SEQ ID NO: 2841778 - RNA, 18 nt, Human
uuacuaaagaaaauaucu

SEQ ID NO: 2841779 - RNA, 12 nt, Human
uuauuuucagua

SEQ ID NO: 2841780 - RNA, 14 nt, Human
uuauuuucaguauu

SEQ ID NO: 2841781 - RNA, 14 nt, Human
uuauuuucagugau

SEQ ID NO: 2841782 - RNA, 15 nt, Human
uuauuuucagugaua

SEQ ID NO: 2841783 - RNA, 12 nt, Human
uuauuuucauua

SEQ ID NO: 2841784 - RNA, 14 nt, Human
uuauuuucauuaca

SEQ ID NO: 2841785 - RNA, 15 nt, Human
uucaaagcaaauguc

SEQ ID NO: 2841786 - RNA, 12 nt, Human
uucaaagaugcu

SEQ ID NO: 2841787 - RNA, 18 nt, Human
uuauuuucuuuugaauug

SEQ ID NO: 2841788 - RNA, 20 nt, Human
uuauuuucuuuugaauuguu

SEQ ID NO: 2841789 - RNA, 21 nt, Human
uuauuuugaaaagcuucuuaa

SEQ ID NO: 2841790 - RNA, 22 nt, Human
uuauuuugaaaagcuucuuaau

SEQ ID NO: 2841791 - RNA, 13 nt, Human
uuauuuucuguca

SEQ ID NO: 2841792 - RNA, 14 nt, Human
uuauuuucugucag

SEQ ID NO: 2841793 - RNA, 15 nt, Human
uuauuuucugucaga

SEQ ID NO: 2841794 - RNA, 13 nt, Human
uucaaauuucaca

SEQ ID NO: 2841795 - RNA, 21 nt, Human
uucaaauuuuuuaaaagagac

SEQ ID NO: 2841796 - RNA, 13 nt, Human
uucaaagccacau

SEQ ID NO: 2841797 - RNA, 16 nt, Human
uucaaauugucuuuug

SEQ ID NO: 2841798 - RNA, 11 nt, Human
uucaaauuuag

SEQ ID NO: 2841799 - RNA, 13 nt, Human
uucaaagaugcug

SEQ ID NO: 2841800 - RNA, 18 nt, Human
uucaaagaugcugugagu

SEQ ID NO: 2841801 - RNA, 16 nt, Human
uucaaugauaguaaga

SEQ ID NO: 2841802 - RNA, 21 nt, Human
uucaaugugauucuaaugucu

SEQ ID NO: 2841803 - RNA, 17 nt, Human
uucaaugggcucuucca

SEQ ID NO: 2841804 - RNA, 16 nt, Human
uucaaugguucugaaa

SEQ ID NO: 2841805 - RNA, 18 nt, Human
uucaauucucauuuguca

SEQ ID NO: 2841806 - RNA, 19 nt, Human
uucaauucagugcuguacu

SEQ ID NO: 2841807 - RNA, 13 nt, Human
uucaauuccuggg

SEQ ID NO: 2841808 - RNA, 13 nt, Human
uucaauucagugc

SEQ ID NO: 2841809 - RNA, 17 nt, Human
uucaauucaacacuccc

SEQ ID NO: 2841810 - RNA, 21 nt, Human
uucaauuaauauuaauuuucu

SEQ ID NO: 2841811 - RNA, 15 nt, Human
uucaaccauucccca

SEQ ID NO: 2841812 - RNA, 19 nt, Human
uucaacaaauaucuugugu

SEQ ID NO: 2841813 - RNA, 20 nt, Human
uucaacaaauaucuuguguu

SEQ ID NO: 2841814 - RNA, 17 nt, Human
uucaaccauuccccaug

SEQ ID NO: 2841815 - RNA, 20 nt, Human
uucaaccauuccccauggga

SEQ ID NO: 2841816 - RNA, 13 nt, Human
uucaacgcagccc

SEQ ID NO: 2841817 - RNA, 17 nt, Human
uucaacccacagcuacu

SEQ ID NO: 2841818 - RNA, 14 nt, Human
uucaaccccacccu

SEQ ID NO: 2841819 - RNA, 20 nt, Human
uucaaccccacccuguuugg

SEQ ID NO: 2841820 - RNA, 21 nt, Human
uucaaccccacccuguuugga

SEQ ID NO: 2841821 - RNA, 14 nt, Human
uucaacgcagcccu

SEQ ID NO: 2841822 - RNA, 16 nt, Human
uucaaucccaggaugu

SEQ ID NO: 2841823 - RNA, 20 nt, Human
uucaaucucccgcugcugcu

SEQ ID NO: 2841824 - RNA, 12 nt, Human
uucaaucacugu

SEQ ID NO: 2841825 - RNA, 14 nt, Human
uuccacuucuuccu

SEQ ID NO: 2841826 - RNA, 15 nt, Human
uuccacuucuuccuu

SEQ ID NO: 2841827 - RNA, 18 nt, Human
uuccacuucuuccuuucu

SEQ ID NO: 2841828 - RNA, 19 nt, Human
uuccacuucuuccuuucuc

SEQ ID NO: 2841829 - RNA, 20 nt, Human
uuccacuucuuccuuucucu

SEQ ID NO: 2841830 - RNA, 21 nt, Human
uuccacuucuuccuuucucuu

SEQ ID NO: 2841831 - RNA, 22 nt, Human
uuccacuggacuugagcuuggc

SEQ ID NO: 2841832 - RNA, 12 nt, Human
uuccacuggacu

SEQ ID NO: 2841833 - RNA, 20 nt, Human
uuccacugucaagaaagagc

SEQ ID NO: 2841834 - RNA, 21 nt, Human
uuccacuuagaaauugcauuu

SEQ ID NO: 2841835 - RNA, 11 nt, Human
uucauuuucca

SEQ ID NO: 2841836 - RNA, 13 nt, Human
uucauuuuccaau

SEQ ID NO: 2841837 - RNA, 14 nt, Human
uucauuuuccaaua

SEQ ID NO: 2841838 - RNA, 18 nt, Human
uucauuuuauauugaaaa

SEQ ID NO: 2841839 - RNA, 19 nt, Human
uucauuuuauauugaaaaa

SEQ ID NO: 2841840 - RNA, 22 nt, Human
uucauuuuauauugaaaaaaau

SEQ ID NO: 2841841 - RNA, 13 nt, Human
uuccacugcaaaa

SEQ ID NO: 2841842 - RNA, 13 nt, Human
uuccacugccucu

SEQ ID NO: 2841843 - RNA, 14 nt, Human
uuccacugccucug

SEQ ID NO: 2841844 - RNA, 15 nt, Human
uuccacugccucugc

SEQ ID NO: 2841845 - RNA, 16 nt, Human
uuccacugccucugcc

SEQ ID NO: 2841846 - RNA, 17 nt, Human
uuccacugccucugccu

SEQ ID NO: 2841847 - RNA, 14 nt, Human
uuccaucucugacu

SEQ ID NO: 2841848 - RNA, 12 nt, Human
uuccaucugaaa

SEQ ID NO: 2841849 - RNA, 21 nt, Human
uuccaucccuacccccuaaga

SEQ ID NO: 2841850 - RNA, 15 nt, Human
uuccaucccuacccc

SEQ ID NO: 2841851 - RNA, 15 nt, Human
uuccagccagggcug

SEQ ID NO: 2841852 - RNA, 16 nt, Human
uuccagccagggcugc

SEQ ID NO: 2841853 - RNA, 12 nt, Human
uuccagccaggg

SEQ ID NO: 2841854 - RNA, 23 nt, Human
uuccagcaauucuccugccucag

SEQ ID NO: 2841855 - RNA, 16 nt, Human
uuccagcagaagacaa

SEQ ID NO: 2841856 - RNA, 22 nt, Human
uuccagcagaagacaaaaagac

SEQ ID NO: 2841857 - RNA, 16 nt, Human
uuccagaagaagagaa

SEQ ID NO: 2841858 - RNA, 18 nt, Human
uuccagaagaagagaagc

SEQ ID NO: 2841859 - RNA, 20 nt, Human
uuccagaagaagagaagcug

SEQ ID NO: 2841860 - RNA, 21 nt, Human
uuccagaagaagagaagcugc

SEQ ID NO: 2841861 - RNA, 22 nt, Human
uuccagaagaagagaagcugcu

SEQ ID NO: 2841862 - RNA, 21 nt, Human
uuccagaaaaccccagcaucc

SEQ ID NO: 2841863 - RNA, 18 nt, Human
uuccagaaaaccccagca

SEQ ID NO: 2841864 - RNA, 20 nt, Human
uuccacuuuuuuuuguaugu

SEQ ID NO: 2841865 - RNA, 17 nt, Human
uuccagaaaaccccagc

SEQ ID NO: 2841866 - RNA, 12 nt, Human
uuccacuuggcu

SEQ ID NO: 2841867 - RNA, 19 nt, Human
uuccacuuggcuacacagg

SEQ ID NO: 2841868 - RNA, 18 nt, Human
uuccaugauucuauuuau

SEQ ID NO: 2841869 - RNA, 18 nt, Human
uuccaugaugcugggauu

SEQ ID NO: 2841870 - RNA, 17 nt, Human
uuccaugauucuauuua

SEQ ID NO: 2841871 - RNA, 13 nt, Human
uuccaugaugcug

SEQ ID NO: 2841872 - RNA, 17 nt, Human
uuccaugucgccucugc

SEQ ID NO: 2841873 - RNA, 16 nt, Human
uuccaugucgccucug

SEQ ID NO: 2841874 - RNA, 18 nt, Human
uuccaugucgccucugca

SEQ ID NO: 2841875 - RNA, 19 nt, Human
uuccaugucgccucugcau

SEQ ID NO: 2841876 - RNA, 20 nt, Human
uuccaugaaguuugaacuuc

SEQ ID NO: 2841877 - RNA, 18 nt, Human
uuccauccuuuacguguu

SEQ ID NO: 2841878 - RNA, 22 nt, Human
uuccaucuccuauaaucuguca

SEQ ID NO: 2841879 - RNA, 23 nt, Human
uuccaucuccuauaaucugucaa

SEQ ID NO: 2841880 - RNA, 18 nt, Human
uuccaucuuuacaaaacu

SEQ ID NO: 2841881 - RNA, 13 nt, Human
uuccaucuuuaca

SEQ ID NO: 2841882 - RNA, 16 nt, Human
uucccaaacgccuccc

SEQ ID NO: 2841883 - RNA, 17 nt, Human
uucccauuuguaauuug

SEQ ID NO: 2841884 - RNA, 20 nt, Human
uucccauuugugccagagga

SEQ ID NO: 2841885 - RNA, 17 nt, Human
uucccauuugugccaga

SEQ ID NO: 2841886 - RNA, 13 nt, Human
uuccccaauuaau

SEQ ID NO: 2841887 - RNA, 14 nt, Human
uuccccaagacauu

SEQ ID NO: 2841888 - RNA, 23 nt, Human
uuccauuuuggcgcuauuacaaa

SEQ ID NO: 2841889 - RNA, 22 nt, Human
uuccauuugaggauuuagaagu

SEQ ID NO: 2841890 - RNA, 12 nt, Human
uuccauuuccaa

SEQ ID NO: 2841891 - RNA, 20 nt, Human
uuccauugguccaagauucc

SEQ ID NO: 2841892 - RNA, 20 nt, Human
uuccaugucgccucugcauu

SEQ ID NO: 2841893 - RNA, 21 nt, Human
uuccaugucgccucugcauuc

SEQ ID NO: 2841894 - RNA, 14 nt, Human
uucauuucauguau

SEQ ID NO: 2841895 - RNA, 12 nt, Human
uucauuucauug

SEQ ID NO: 2841896 - RNA, 13 nt, Human
uucauuucauugu

SEQ ID NO: 2841897 - RNA, 15 nt, Human
uucauuucauuguau

SEQ ID NO: 2841898 - RNA, 13 nt, Human
uucauuuccacuc

SEQ ID NO: 2841899 - RNA, 13 nt, Human
uucauuuguguca

SEQ ID NO: 2841900 - RNA, 15 nt, Human
uucauuugugucaau

SEQ ID NO: 2841901 - RNA, 22 nt, Human
uucauuuguuuguuuguuuguc

SEQ ID NO: 2841902 - RNA, 22 nt, Human
uucauuuguggugauauagaau

SEQ ID NO: 2841903 - RNA, 23 nt, Human
uucauuuguggugauauagaauu

SEQ ID NO: 2841904 - RNA, 22 nt, Human
uucauuugguucauuaauucua

SEQ ID NO: 2841905 - RNA, 18 nt, Human
uucauuuagugaguuauu

SEQ ID NO: 2841906 - RNA, 12 nt, Human
uucaugaugcag

SEQ ID NO: 2841907 - RNA, 13 nt, Human
uucaugaugcagu

SEQ ID NO: 2841908 - RNA, 14 nt, Human
uucaugaugcaguc

SEQ ID NO: 2841909 - RNA, 16 nt, Human
uucaugaugcagucuc

SEQ ID NO: 2841910 - RNA, 17 nt, Human
uucaugaugcagucucc

SEQ ID NO: 2841911 - RNA, 23 nt, Human
uucaucgaaucuacuaauuccac

SEQ ID NO: 2841912 - RNA, 17 nt, Human
uucaguuucuucugcgc

SEQ ID NO: 2841913 - RNA, 11 nt, Human
uucauaauggc

SEQ ID NO: 2841914 - RNA, 21 nt, Human
uucaguuuucauuugguucau

SEQ ID NO: 2841915 - RNA, 19 nt, Human
uucaguuucaauucagugc

SEQ ID NO: 2841916 - RNA, 16 nt, Human
uucaggcugcuuggga

SEQ ID NO: 2841917 - RNA, 19 nt, Human
uucaggcuuccugcaauuu

SEQ ID NO: 2841918 - RNA, 21 nt, Human
uucaggcuuccugcaauuuuc

SEQ ID NO: 2841919 - RNA, 22 nt, Human
uucaggcuuccugcaauuuucu

SEQ ID NO: 2841920 - RNA, 13 nt, Human
uucaggcugcuug

SEQ ID NO: 2841921 - RNA, 16 nt, Human
uucaggcucuucuccu

SEQ ID NO: 2841922 - RNA, 18 nt, Human
uucaguugguugugucuu

SEQ ID NO: 2841923 - RNA, 19 nt, Human
uucaguugguugugucuuu

SEQ ID NO: 2841924 - RNA, 17 nt, Human
uucaguuguguuuguug

SEQ ID NO: 2841925 - RNA, 20 nt, Human
uucaguuguguuuguugcug

SEQ ID NO: 2841926 - RNA, 22 nt, Human
uucaguuguguuuguugcuggc

SEQ ID NO: 2841927 - RNA, 23 nt, Human
uucaguuguuuguuuuugcuugu

SEQ ID NO: 2841928 - RNA, 19 nt, Human
uucaguuggcugacuucca

SEQ ID NO: 2841929 - RNA, 12 nt, Human
uucaguggagaa

SEQ ID NO: 2841930 - RNA, 13 nt, Human
uucagugcugugg

SEQ ID NO: 2841931 - RNA, 18 nt, Human
uucagggaauuucaggaa

SEQ ID NO: 2841932 - RNA, 21 nt, Human
uucagugcuguggccugggca

SEQ ID NO: 2841933 - RNA, 19 nt, Human
uucagugcuguggccuggg

SEQ ID NO: 2841934 - RNA, 20 nt, Human
uucuaaaaucuuauaguucu

SEQ ID NO: 2841935 - RNA, 21 nt, Human
uucuaaaaucuuauaguucua

SEQ ID NO: 2841936 - RNA, 22 nt, Human
uucuaaaaucuuauaguucuag

SEQ ID NO: 2841937 - RNA, 15 nt, Human
uuccuuugcucuuuc

SEQ ID NO: 2841938 - RNA, 13 nt, Human
uuccuuugaagau

SEQ ID NO: 2841939 - RNA, 14 nt, Human
uuccuuugaagaua

SEQ ID NO: 2841940 - RNA, 12 nt, Human
uuccuuucucag

SEQ ID NO: 2841941 - RNA, 14 nt, Human
uuccuuucuccagg

SEQ ID NO: 2841942 - RNA, 19 nt, Human
uuccuuucuccaggaccaa

SEQ ID NO: 2841943 - RNA, 13 nt, Human
uuccuuucucuuu

SEQ ID NO: 2841944 - RNA, 15 nt, Human
uuccuuucucuuucu

SEQ ID NO: 2841945 - RNA, 17 nt, Human
uuccuuucucuuucucu

SEQ ID NO: 2841946 - RNA, 22 nt, Human
uuccuuucucuuucucucuucc

SEQ ID NO: 2841947 - RNA, 14 nt, Human
uuccuuucccaagc

SEQ ID NO: 2841948 - RNA, 14 nt, Human
uuccuuuccccagc

SEQ ID NO: 2841949 - RNA, 17 nt, Human
uuccuuuccccagccca

SEQ ID NO: 2841950 - RNA, 12 nt, Human
uuccuuucccuu

SEQ ID NO: 2841951 - RNA, 13 nt, Human
uuccuuucccuuc

SEQ ID NO: 2841952 - RNA, 14 nt, Human
uuccuuucccuucc

SEQ ID NO: 2841953 - RNA, 15 nt, Human
uuccuuucccuuccu

SEQ ID NO: 2841954 - RNA, 17 nt, Human
uuccuuucccuuccucu

SEQ ID NO: 2841955 - RNA, 18 nt, Human
uuccuuucccuuccucuu

SEQ ID NO: 2841956 - RNA, 14 nt, Human
uuccuuuccuuuuc

SEQ ID NO: 2841957 - RNA, 15 nt, Human
uuccuuuccccagcc

SEQ ID NO: 2841958 - RNA, 16 nt, Human
uuccuuuccccagccc

SEQ ID NO: 2841959 - RNA, 20 nt, Human
uucuaaagagcacuuacugu

SEQ ID NO: 2841960 - RNA, 13 nt, Human
uucuaaagauaau

SEQ ID NO: 2841961 - RNA, 23 nt, Human
uucuaaagauaauauuacuguuu

SEQ ID NO: 2841962 - RNA, 23 nt, Human
uucuaaacccaauccaaauggcg

SEQ ID NO: 2841963 - RNA, 21 nt, Human
uucuaaacguaagcacuguuu

SEQ ID NO: 2841964 - RNA, 19 nt, Human
uucuaaacccaauccaaau

SEQ ID NO: 2841965 - RNA, 18 nt, Human
uucuaaacccaauccaaa

SEQ ID NO: 2841966 - RNA, 15 nt, Human
uucuaaaaugugaug

SEQ ID NO: 2841967 - RNA, 19 nt, Human
uucuaaaaugugauguucu

SEQ ID NO: 2841968 - RNA, 20 nt, Human
uucuaaaaugugauguucua

SEQ ID NO: 2841969 - RNA, 23 nt, Human
uucuaaaaugugauguucuaagg

SEQ ID NO: 2841970 - RNA, 21 nt, Human
uucuaaguuucuaagauucua

SEQ ID NO: 2841971 - RNA, 15 nt, Human
uucuaauaauuucua

SEQ ID NO: 2841972 - RNA, 16 nt, Human
uucuaauaauuucuaa

SEQ ID NO: 2841973 - RNA, 18 nt, Human
uucuaauaauuucuaaug

SEQ ID NO: 2841974 - RNA, 13 nt, Human
uucuaauaaauua

SEQ ID NO: 2841975 - RNA, 16 nt, Human
uucuaauaaauuauac

SEQ ID NO: 2841976 - RNA, 18 nt, Human
uucuaauaaauuauacaa

SEQ ID NO: 2841977 - RNA, 20 nt, Human
uucuaaguuucuaagauucu

SEQ ID NO: 2841978 - RNA, 20 nt, Human
uuccuucugugaaaguacau

SEQ ID NO: 2841979 - RNA, 22 nt, Human
uuccuuuccaacguuuggaaga

SEQ ID NO: 2841980 - RNA, 23 nt, Human
uuccuuuccaacguuuggaagau

SEQ ID NO: 2841981 - RNA, 13 nt, Human
uuccuucuggccu

SEQ ID NO: 2841982 - RNA, 14 nt, Human
uuccuucuggccuu

SEQ ID NO: 2841983 - RNA, 13 nt, Human
uuccuucuguaaa

SEQ ID NO: 2841984 - RNA, 17 nt, Human
uuccuucugugaaagua

SEQ ID NO: 2841985 - RNA, 15 nt, Human
uuccuucucugaaca

SEQ ID NO: 2841986 - RNA, 16 nt, Human
uuccuucucugaacac

SEQ ID NO: 2841987 - RNA, 17 nt, Human
uuccuucucugaacaca

SEQ ID NO: 2841988 - RNA, 22 nt, Human
uuccuucucugaacacaggcag

SEQ ID NO: 2841989 - RNA, 11 nt, Human
uuccuuccuaa

SEQ ID NO: 2841990 - RNA, 12 nt, Human
uuccuuccuaaa

SEQ ID NO: 2841991 - RNA, 17 nt, Human
uuccuuccuaaaauaau

SEQ ID NO: 2841992 - RNA, 17 nt, Human
uuccuuccucugagccu

SEQ ID NO: 2841993 - RNA, 13 nt, Human
uuccuuccucuga

SEQ ID NO: 2841994 - RNA, 15 nt, Human
uuccuuccacuaacu

SEQ ID NO: 2841995 - RNA, 20 nt, Human
uuccuuccaucccuaccccc

SEQ ID NO: 2841996 - RNA, 22 nt, Human
uuccuucccgccagagggcuug

SEQ ID NO: 2841997 - RNA, 11 nt, Human
uuccuccugga

SEQ ID NO: 2841998 - RNA, 11 nt, Human
uuccugcccug

SEQ ID NO: 2841999 - RNA, 13 nt, Human
uuccugccccucu

SEQ ID NO: 2842000 - RNA, 14 nt, Human
uuccugccccucuu

SEQ ID NO: 2842001 - RNA, 15 nt, Human
uuccugccccucuuu

SEQ ID NO: 2842002 - RNA, 17 nt, Human
uuccugccccucuuucu

SEQ ID NO: 2842003 - RNA, 18 nt, Human
uuccugccccucuuucuc

SEQ ID NO: 2842004 - RNA, 20 nt, Human
uuccugccccucuuucucuu

SEQ ID NO: 2842005 - RNA, 21 nt, Human
uuccugccccucuuucucuuu

SEQ ID NO: 2842006 - RNA, 22 nt, Human
uuccugccccucuuucucuuuc

SEQ ID NO: 2842007 - RNA, 22 nt, Human
uuccugcccugggaggcaguga

SEQ ID NO: 2842008 - RNA, 16 nt, Human
uuccugcccugggagg

SEQ ID NO: 2842009 - RNA, 13 nt, Human
uuccugcccuggg

SEQ ID NO: 2842010 - RNA, 18 nt, Human
uuccuagcccucucacau

SEQ ID NO: 2842011 - RNA, 13 nt, Human
uuccuagccuguu

SEQ ID NO: 2842012 - RNA, 16 nt, Human
uuccuagccuguuucu

SEQ ID NO: 2842013 - RNA, 14 nt, Human
uuccuagcccucuc

SEQ ID NO: 2842014 - RNA, 23 nt, Human
uuccucauaguaugguggcuggg

SEQ ID NO: 2842015 - RNA, 12 nt, Human
uuccucagcuua

SEQ ID NO: 2842016 - RNA, 16 nt, Human
uuccucagcuuaucuc

SEQ ID NO: 2842017 - RNA, 19 nt, Human
uuccucagcuuaucucuuu

SEQ ID NO: 2842018 - RNA, 18 nt, Human
uuccuaguuuucuccucc

SEQ ID NO: 2842019 - RNA, 15 nt, Human
uuccuaguuuucucc

SEQ ID NO: 2842020 - RNA, 17 nt, Human
uuccuauaacuugaugc

SEQ ID NO: 2842021 - RNA, 19 nt, Human
uuccuauaacuugaugcau

SEQ ID NO: 2842022 - RNA, 14 nt, Human
uuccuagggguuug

SEQ ID NO: 2842023 - RNA, 13 nt, Human
uuccuaguuggug

SEQ ID NO: 2842024 - RNA, 21 nt, Human
uuccuaguuggugagaaaccu

SEQ ID NO: 2842025 - RNA, 22 nt, Human
uuccuaguuggugagaaaccug

SEQ ID NO: 2842026 - RNA, 23 nt, Human
uuccuccccauuagagucagccu

SEQ ID NO: 2842027 - RNA, 16 nt, Human
uuccuccuccccacuu

SEQ ID NO: 2842028 - RNA, 14 nt, Human
uuccuccuccccac

SEQ ID NO: 2842029 - RNA, 14 nt, Human
uuccuccuccacca

SEQ ID NO: 2842030 - RNA, 15 nt, Human
uuccuccuccaccac

SEQ ID NO: 2842031 - RNA, 18 nt, Human
uuccuccuccaccaccgc

SEQ ID NO: 2842032 - RNA, 19 nt, Human
uuccuccuccaccaccgcc

SEQ ID NO: 2842033 - RNA, 18 nt, Human
uuccucauccaccccauc

SEQ ID NO: 2842034 - RNA, 19 nt, Human
uuccucauccaccccaucc

SEQ ID NO: 2842035 - RNA, 14 nt, Human
uuccucauccucag

SEQ ID NO: 2842036 - RNA, 16 nt, Human
uuccucauccucagau

SEQ ID NO: 2842037 - RNA, 19 nt, Human
uuccucauccucagaugcu

SEQ ID NO: 2842038 - RNA, 22 nt, Human
uuccucauccucagaugcucaa

SEQ ID NO: 2842039 - RNA, 19 nt, Human
uucccuugccacuuugcac

SEQ ID NO: 2842040 - RNA, 17 nt, Human
uucccuugcuuuucccu

SEQ ID NO: 2842041 - RNA, 18 nt, Human
uucccuugcuuuucccuc

SEQ ID NO: 2842042 - RNA, 19 nt, Human
uucccuugcuuuucccucu

SEQ ID NO: 2842043 - RNA, 20 nt, Human
uucccuugcuuuucccucuu

SEQ ID NO: 2842044 - RNA, 13 nt, Human
uucccuuccacug

SEQ ID NO: 2842045 - RNA, 15 nt, Human
uucccuuccacugcc

SEQ ID NO: 2842046 - RNA, 19 nt, Human
uucccuuccacugccucug

SEQ ID NO: 2842047 - RNA, 15 nt, Human
uucccuuggccucag

SEQ ID NO: 2842048 - RNA, 14 nt, Human
uucccuuggccuca

SEQ ID NO: 2842049 - RNA, 12 nt, Human
uucccuuggccu

SEQ ID NO: 2842050 - RNA, 11 nt, Human
uucccuuggcc

SEQ ID NO: 2842051 - RNA, 16 nt, Human
uucccuuggccucaga

SEQ ID NO: 2842052 - RNA, 18 nt, Human
uucccuucccuaaaguga

SEQ ID NO: 2842053 - RNA, 15 nt, Human
uucccuuuccccagc

SEQ ID NO: 2842054 - RNA, 15 nt, Human
uucccuuuccuucca

SEQ ID NO: 2842055 - RNA, 17 nt, Human
uuccccacugacagccu

SEQ ID NO: 2842056 - RNA, 23 nt, Human
uuccccacugacagccucccacc

SEQ ID NO: 2842057 - RNA, 21 nt, Human
uuccccacugacagccuccca

SEQ ID NO: 2842058 - RNA, 19 nt, Human
uucccuucaguacccucuc

SEQ ID NO: 2842059 - RNA, 22 nt, Human
uucccuucaguacccucucagc

SEQ ID NO: 2842060 - RNA, 23 nt, Human
uucccuucaguacccucucagcu

SEQ ID NO: 2842061 - RNA, 20 nt, Human
uucccugucucuugaaaaau

SEQ ID NO: 2842062 - RNA, 12 nt, Human
uucccuguucuu

SEQ ID NO: 2842063 - RNA, 15 nt, Human
uucccuguucuuccu

SEQ ID NO: 2842064 - RNA, 16 nt, Human
uucccuguucuuccuc

SEQ ID NO: 2842065 - RNA, 17 nt, Human
uucccuguucuuccucc

SEQ ID NO: 2842066 - RNA, 18 nt, Human
uucccuguucuuccucca

SEQ ID NO: 2842067 - RNA, 19 nt, Human
uucccuguucuuccuccag

SEQ ID NO: 2842068 - RNA, 12 nt, Human
uuccccagccca

SEQ ID NO: 2842069 - RNA, 12 nt, Human
uuccccagcauc

SEQ ID NO: 2842070 - RNA, 18 nt, Human
uuccccagcaucacuccc

SEQ ID NO: 2842071 - RNA, 20 nt, Human
uuccccagcaucacucccca

SEQ ID NO: 2842072 - RNA, 13 nt, Human
uuccccagcccag

SEQ ID NO: 2842073 - RNA, 14 nt, Human
uuccccagcccagg

SEQ ID NO: 2842074 - RNA, 20 nt, Human
uucuauaugaauuuaaauau

SEQ ID NO: 2842075 - RNA, 23 nt, Human
uucuauaugaauuuaaauauaau

SEQ ID NO: 2842076 - RNA, 20 nt, Human
uucuauaugcgaguuagcca

SEQ ID NO: 2842077 - RNA, 13 nt, Human
uucuaaugaugau

SEQ ID NO: 2842078 - RNA, 16 nt, Human
uucuaaugcugauaug

SEQ ID NO: 2842079 - RNA, 16 nt, Human
uucuaauggaaugguu

SEQ ID NO: 2842080 - RNA, 17 nt, Human
uucuaauggaaugguuu

SEQ ID NO: 2842081 - RNA, 13 nt, Human
uucuaaucaaaag

SEQ ID NO: 2842082 - RNA, 21 nt, Human
uucuaaugaggagagaaaaua

SEQ ID NO: 2842083 - RNA, 23 nt, Human
uucuaaugaggagagaaaauaua

SEQ ID NO: 2842084 - RNA, 19 nt, Human
uucuaauaauuucuaaugu

SEQ ID NO: 2842085 - RNA, 22 nt, Human
uucuaauauauuuuuauauuua

SEQ ID NO: 2842086 - RNA, 13 nt, Human
uucuaauaucauu

SEQ ID NO: 2842087 - RNA, 14 nt, Human
uucuaugcaguggc

SEQ ID NO: 2842088 - RNA, 15 nt, Human
uucuaugcugcuuuu

SEQ ID NO: 2842089 - RNA, 16 nt, Human
uucuaugcugcuuuua

SEQ ID NO: 2842090 - RNA, 18 nt, Human
uucuaugcugcuuuuaua

SEQ ID NO: 2842091 - RNA, 21 nt, Human
uucuaugcugcuuuuauaucu

SEQ ID NO: 2842092 - RNA, 23 nt, Human
uucuaugcugcuuuuauaucugu

SEQ ID NO: 2842093 - RNA, 14 nt, Human
uucuaucaagccca

SEQ ID NO: 2842094 - RNA, 19 nt, Human
uucuaugaguggaaaaagc

SEQ ID NO: 2842095 - RNA, 13 nt, Human
uucuauguuuacu

SEQ ID NO: 2842096 - RNA, 14 nt, Human
uucuauguuuacuu

SEQ ID NO: 2842097 - RNA, 16 nt, Human
uucuaugguuaugaaa

SEQ ID NO: 2842098 - RNA, 19 nt, Human
uucuaugguuaugaaagaa

SEQ ID NO: 2842099 - RNA, 23 nt, Human
uucuaugguuaugaaagaauaua

SEQ ID NO: 2842100 - RNA, 13 nt, Human
uucuauguacuag

SEQ ID NO: 2842101 - RNA, 15 nt, Human
uucuauguacuagua

SEQ ID NO: 2842102 - RNA, 18 nt, Human
uucuauguacuaguacug

SEQ ID NO: 2842103 - RNA, 21 nt, Human
uucuauguacuaguacugugu

SEQ ID NO: 2842104 - RNA, 24 nt, Human
uucuauguacuaguacuguguacu

SEQ ID NO: 2842105 - RNA, 22 nt, Human
uucuauucaagguggccaaauu

SEQ ID NO: 2842106 - RNA, 14 nt, Human
uucuauuccuucug

SEQ ID NO: 2842107 - RNA, 18 nt, Human
uucuauuccuucuggccu

SEQ ID NO: 2842108 - RNA, 17 nt, Human
uucuauuaacuuuaauu

SEQ ID NO: 2842109 - RNA, 15 nt, Human
uucuauuaaagugcu

SEQ ID NO: 2842110 - RNA, 21 nt, Human
uucuauuaaagugcuaagguu

SEQ ID NO: 2842111 - RNA, 15 nt, Human
uucuauuaaauaguu

SEQ ID NO: 2842112 - RNA, 12 nt, Human
uucuauuaaagu

SEQ ID NO: 2842113 - RNA, 17 nt, Human
uucuauugacuucaaug

SEQ ID NO: 2842114 - RNA, 23 nt, Human
uucuauugacuucaaugauagua

SEQ ID NO: 2842115 - RNA, 12 nt, Human
uucuauugccuu

SEQ ID NO: 2842116 - RNA, 17 nt, Human
uucuauugccuucuuug

SEQ ID NO: 2842117 - RNA, 18 nt, Human
uucuauugccuucuuuga

SEQ ID NO: 2842118 - RNA, 19 nt, Human
uucuauugccuucuuugaa

SEQ ID NO: 2842119 - RNA, 20 nt, Human
uucuauugccuucuuugaag

SEQ ID NO: 2842120 - RNA, 21 nt, Human
uucuauugccuucuuugaaga

SEQ ID NO: 2842121 - RNA, 23 nt, Human
uucuauugccuucuuugaagaag

SEQ ID NO: 2842122 - RNA, 19 nt, Human
uucuauuuauauguacaug

SEQ ID NO: 2842123 - RNA, 17 nt, Human
uucuauuuauuaugcuu

SEQ ID NO: 2842124 - RNA, 18 nt, Human
uucuauuuauauguacau

SEQ ID NO: 2842125 - RNA, 16 nt, Human
uucucaaaagaacuua

SEQ ID NO: 2842126 - RNA, 15 nt, Human
uucucaaaagcauuu

SEQ ID NO: 2842127 - RNA, 16 nt, Human
uucucaaaagcauuua

SEQ ID NO: 2842128 - RNA, 18 nt, Human
uucucaaaagcauuuauc

SEQ ID NO: 2842129 - RNA, 20 nt, Human
uucucaaaagcauuuaucau

SEQ ID NO: 2842130 - RNA, 21 nt, Human
uucucaaaagcauuuaucauu

SEQ ID NO: 2842131 - RNA, 16 nt, Human
uucuauuuuguaaacu

SEQ ID NO: 2842132 - RNA, 13 nt, Human
uucuauuuuguaa

SEQ ID NO: 2842133 - RNA, 15 nt, Human
uucucaaaguuuuga

SEQ ID NO: 2842134 - RNA, 17 nt, Human
uucucaaaguuuugaaa

SEQ ID NO: 2842135 - RNA, 18 nt, Human
uucucaaaguuuugaaaa

SEQ ID NO: 2842136 - RNA, 15 nt, Human
uucucauccugcagg

SEQ ID NO: 2842137 - RNA, 14 nt, Human
uucucaucugcacc

SEQ ID NO: 2842138 - RNA, 17 nt, Human
uucucaucugcacccuu

SEQ ID NO: 2842139 - RNA, 19 nt, Human
uucucaucugcacccuucu

SEQ ID NO: 2842140 - RNA, 20 nt, Human
uucucaucugcacccuucuu

SEQ ID NO: 2842141 - RNA, 21 nt, Human
uucucaaaguuuugaaaagcu

SEQ ID NO: 2842142 - RNA, 22 nt, Human
uucucaaaguuuugaaaagcua

SEQ ID NO: 2842143 - RNA, 12 nt, Human
uucucaaaucuu

SEQ ID NO: 2842144 - RNA, 14 nt, Human
uucucaugccucag

SEQ ID NO: 2842145 - RNA, 12 nt, Human
uucucaugccuc

SEQ ID NO: 2842146 - RNA, 11 nt, Human
uucucaugccu

SEQ ID NO: 2842147 - RNA, 15 nt, Human
uucucaucuugugaa

SEQ ID NO: 2842148 - RNA, 18 nt, Human
uucucaucuugugaaaug

SEQ ID NO: 2842149 - RNA, 14 nt, Human
uucucuccccaacc

SEQ ID NO: 2842150 - RNA, 15 nt, Human
uucucuccccaaccc

SEQ ID NO: 2842151 - RNA, 22 nt, Human
uucucuccccaacccccauucu

SEQ ID NO: 2842152 - RNA, 23 nt, Human
uucucuccccaacccccauucuc

SEQ ID NO: 2842153 - RNA, 18 nt, Human
uucucucccugccagagg

SEQ ID NO: 2842154 - RNA, 15 nt, Human
uucuccaaggaaacc

SEQ ID NO: 2842155 - RNA, 17 nt, Human
uucucucggcuccccau

SEQ ID NO: 2842156 - RNA, 17 nt, Human
uucucucuacagugcca

SEQ ID NO: 2842157 - RNA, 20 nt, Human
uucuccccaaugagacuugc

SEQ ID NO: 2842158 - RNA, 22 nt, Human
uucuccccaaugagacuugccu

SEQ ID NO: 2842159 - RNA, 12 nt, Human
uucuccccagaa

SEQ ID NO: 2842160 - RNA, 13 nt, Human
uucuccccagaau

SEQ ID NO: 2842161 - RNA, 18 nt, Human
uucucccccugggcucug

SEQ ID NO: 2842162 - RNA, 19 nt, Human
uucuccccgcuaaggaaga

SEQ ID NO: 2842163 - RNA, 17 nt, Human
uucucccccugggcucu

SEQ ID NO: 2842164 - RNA, 14 nt, Human
uucucccccugggc

SEQ ID NO: 2842165 - RNA, 13 nt, Human
uucuccacccugc

SEQ ID NO: 2842166 - RNA, 11 nt, Human
uucuccaggcu

SEQ ID NO: 2842167 - RNA, 14 nt, Human
uucuccaccccagc

SEQ ID NO: 2842168 - RNA, 12 nt, Human
uucuccaucccu

SEQ ID NO: 2842169 - RNA, 20 nt, Human
uucuccaggucucacgggca

SEQ ID NO: 2842170 - RNA, 17 nt, Human
uucucccagaaucccag

SEQ ID NO: 2842171 - RNA, 20 nt, Human
uucucccagaaucccagccg

SEQ ID NO: 2842172 - RNA, 18 nt, Human
uucucugaacacaggcag

SEQ ID NO: 2842173 - RNA, 19 nt, Human
uucucugaacacaggcagc

SEQ ID NO: 2842174 - RNA, 20 nt, Human
uucucugaacacaggcagcu

SEQ ID NO: 2842175 - RNA, 24 nt, Human
uucucugaacacaggcagcuuucu

SEQ ID NO: 2842176 - RNA, 16 nt, Human
uucucucuucccucag

SEQ ID NO: 2842177 - RNA, 20 nt, Human
uucucuggcuguaaggcucu

SEQ ID NO: 2842178 - RNA, 15 nt, Human
uucucugcuccacca

SEQ ID NO: 2842179 - RNA, 14 nt, Human
uucucugcuccacc

SEQ ID NO: 2842180 - RNA, 13 nt, Human
uucucugcuccac

SEQ ID NO: 2842181 - RNA, 11 nt, Human
uucucugcucc

SEQ ID NO: 2842182 - RNA, 21 nt, Human
uucucugccgcuaccucccuc

SEQ ID NO: 2842183 - RNA, 22 nt, Human
uucucugccgcuaccucccucc

SEQ ID NO: 2842184 - RNA, 23 nt, Human
uucucugccgcuaccucccuccc

SEQ ID NO: 2842185 - RNA, 19 nt, Human
uucucugccuuugacauuu

SEQ ID NO: 2842186 - RNA, 20 nt, Human
uucucugccuuugacauuua

SEQ ID NO: 2842187 - RNA, 21 nt, Human
uucucugccuuugacauuuaa

SEQ ID NO: 2842188 - RNA, 14 nt, Human
uucucuguauagua

SEQ ID NO: 2842189 - RNA, 11 nt, Human
uucucugucca

SEQ ID NO: 2842190 - RNA, 17 nt, Human
uucucugucucagacuu

SEQ ID NO: 2842191 - RNA, 22 nt, Human
uucucugucucagacuuuugua

SEQ ID NO: 2842192 - RNA, 16 nt, Human
uucugaccuucagcuc

SEQ ID NO: 2842193 - RNA, 18 nt, Human
uucugaccuucagcucac

SEQ ID NO: 2842194 - RNA, 13 nt, Human
uucugacggcccu

SEQ ID NO: 2842195 - RNA, 14 nt, Human
uucugacggcccug

SEQ ID NO: 2842196 - RNA, 15 nt, Human
uucugacggcccugc

SEQ ID NO: 2842197 - RNA, 17 nt, Human
uucugacggcccugcaa

SEQ ID NO: 2842198 - RNA, 12 nt, Human
uuucagagauuu

SEQ ID NO: 2842199 - RNA, 15 nt, Human
uuucagacuugucaa

SEQ ID NO: 2842200 - RNA, 23 nt, Human
uuucagagacagcugauacuuca

SEQ ID NO: 2842201 - RNA, 14 nt, Human
uuucaaucacuguc

SEQ ID NO: 2842202 - RNA, 21 nt, Human
uuucaaucacuguccuccaca

SEQ ID NO: 2842203 - RNA, 23 nt, Human
uuucaaucacuguccuccacaca

SEQ ID NO: 2842204 - RNA, 14 nt, Human
uuucaaugacauuu

SEQ ID NO: 2842205 - RNA, 14 nt, Human
uuuauuuguuuuuc

SEQ ID NO: 2842206 - RNA, 16 nt, Human
uuuauuugcaacauuu

SEQ ID NO: 2842207 - RNA, 16 nt, Human
uuuauuucugcauaug

SEQ ID NO: 2842208 - RNA, 13 nt, Human
uuuauuuccagug

SEQ ID NO: 2842209 - RNA, 14 nt, Human
uuuauuuauuuaca

SEQ ID NO: 2842210 - RNA, 14 nt, Human
uuuauuuauguacu

SEQ ID NO: 2842211 - RNA, 15 nt, Human
uuuauuuauguacuu

SEQ ID NO: 2842212 - RNA, 11 nt, Human
uuuauuucacu

SEQ ID NO: 2842213 - RNA, 15 nt, Human
uuuauuucagauuuu

SEQ ID NO: 2842214 - RNA, 13 nt, Human
uuuauuuauuuau

SEQ ID NO: 2842215 - RNA, 11 nt, Human
uuuauuucauu

SEQ ID NO: 2842216 - RNA, 17 nt, Human
uuuauuucauugguuaa

SEQ ID NO: 2842217 - RNA, 15 nt, Human
uuucauucuccugcc

SEQ ID NO: 2842218 - RNA, 13 nt, Human
uuucauucucauu

SEQ ID NO: 2842219 - RNA, 16 nt, Human
uuucaggguuuucuga

SEQ ID NO: 2842220 - RNA, 22 nt, Human
uuucaggguuuucugagggaaa

SEQ ID NO: 2842221 - RNA, 15 nt, Human
uuucauucaucccau

SEQ ID NO: 2842222 - RNA, 14 nt, Human
uuucauuccaaagg

SEQ ID NO: 2842223 - RNA, 17 nt, Human
uuucauuccaaagggga

SEQ ID NO: 2842224 - RNA, 11 nt, Human
uuucauuccau

SEQ ID NO: 2842225 - RNA, 12 nt, Human
uuucauuccauu

SEQ ID NO: 2842226 - RNA, 16 nt, Human
uuucauuccauugccu

SEQ ID NO: 2842227 - RNA, 17 nt, Human
uuucauuccauugccua

SEQ ID NO: 2842228 - RNA, 22 nt, Human
uuucaggcaggcaccuagcaau

SEQ ID NO: 2842229 - RNA, 13 nt, Human
uuucagcuuaaaa

SEQ ID NO: 2842230 - RNA, 14 nt, Human
uuucagcuuacaca

SEQ ID NO: 2842231 - RNA, 16 nt, Human
uuucaggaccuuuuga

SEQ ID NO: 2842232 - RNA, 17 nt, Human
uuucaggagcagccuca

SEQ ID NO: 2842233 - RNA, 14 nt, Human
uuuccaaaauaauu

SEQ ID NO: 2842234 - RNA, 17 nt, Human
uuucauuguaugaugug

SEQ ID NO: 2842235 - RNA, 19 nt, Human
uuuccaaaauaaaacaaag

SEQ ID NO: 2842236 - RNA, 17 nt, Human
uuucauugguuaauuuu

SEQ ID NO: 2842237 - RNA, 15 nt, Human
uuucauuguaugaug

SEQ ID NO: 2842238 - RNA, 16 nt, Human
uuucauuguaugaugu

SEQ ID NO: 2842239 - RNA, 17 nt, Human
uuucauugccuguguau

SEQ ID NO: 2842240 - RNA, 23 nt, Human
uuucauugccuguguauggaaaa

SEQ ID NO: 2842241 - RNA, 19 nt, Human
uuuccagaggcuauuauuu

SEQ ID NO: 2842242 - RNA, 16 nt, Human
uuuccagcagaagaca

SEQ ID NO: 2842243 - RNA, 21 nt, Human
uuuccagcagaagacaaaaag

SEQ ID NO: 2842244 - RNA, 23 nt, Human
uuuccagcagaagacaaaaagac

SEQ ID NO: 2842245 - RNA, 16 nt, Human
uuuccagcuuucuccc

SEQ ID NO: 2842246 - RNA, 18 nt, Human
uuuccagacuuccuugag

SEQ ID NO: 2842247 - RNA, 19 nt, Human
uuuccagacuuccuugaga

SEQ ID NO: 2842248 - RNA, 16 nt, Human
uuuccaaacugacuca

SEQ ID NO: 2842249 - RNA, 15 nt, Human
uuuccaaaauuuuuc

SEQ ID NO: 2842250 - RNA, 16 nt, Human
uuuccaaaauuuuuca

SEQ ID NO: 2842251 - RNA, 18 nt, Human
uuuccaaaauuuuucaac

SEQ ID NO: 2842252 - RNA, 16 nt, Human
uuuccaaacaacagaa

SEQ ID NO: 2842253 - RNA, 15 nt, Human
uuuccaaauaaaaug

SEQ ID NO: 2842254 - RNA, 12 nt, Human
uuucucuuucuu

SEQ ID NO: 2842255 - RNA, 15 nt, Human
uuucucuuucuuccu

SEQ ID NO: 2842256 - RNA, 20 nt, Human
uuucucuuucuuccuuuacu

SEQ ID NO: 2842257 - RNA, 13 nt, Human
uuucucuuucucu

SEQ ID NO: 2842258 - RNA, 16 nt, Human
uuucugagcacacuuu

SEQ ID NO: 2842259 - RNA, 15 nt, Human
uuucucuugagcugg

SEQ ID NO: 2842260 - RNA, 16 nt, Human
uuucucuucauacuuu

SEQ ID NO: 2842261 - RNA, 17 nt, Human
uuucucuugagcuggcc

SEQ ID NO: 2842262 - RNA, 16 nt, Human
uuucucuugagcuggc

SEQ ID NO: 2842263 - RNA, 18 nt, Human
uuucucuugagcuggccu

SEQ ID NO: 2842264 - RNA, 17 nt, Human
uuucucuguauaguacu

SEQ ID NO: 2842265 - RNA, 14 nt, Human
uuucucuguuguaa

SEQ ID NO: 2842266 - RNA, 21 nt, Human
uuucuccuguuuauucccauc

SEQ ID NO: 2842267 - RNA, 23 nt, Human
uuucuccuugaauaucuuucgau

SEQ ID NO: 2842268 - RNA, 15 nt, Human
uuucuccucccagga

SEQ ID NO: 2842269 - RNA, 17 nt, Human
uuucucccuaaacugua

SEQ ID NO: 2842270 - RNA, 19 nt, Human
uuucuaaugaggagagaaa

SEQ ID NO: 2842271 - RNA, 23 nt, Human
uuucuaaugaggagagaaaauau

SEQ ID NO: 2842272 - RNA, 20 nt, Human
uuucuaauggaaugguuugg

SEQ ID NO: 2842273 - RNA, 13 nt, Human
uuucuaaucaaaa

SEQ ID NO: 2842274 - RNA, 15 nt, Human
uuuccucuuccaaag

SEQ ID NO: 2842275 - RNA, 20 nt, Human
uuuccugagaccacagagag

SEQ ID NO: 2842276 - RNA, 14 nt, Human
uuucuaagagagcu

SEQ ID NO: 2842277 - RNA, 13 nt, Human
uuucuaagauucu

SEQ ID NO: 2842278 - RNA, 14 nt, Human
uuucuaagauucua

SEQ ID NO: 2842279 - RNA, 15 nt, Human
uuucuaagauucuaa

SEQ ID NO: 2842280 - RNA, 17 nt, Human
uuucuaagauucuaaag

SEQ ID NO: 2842281 - RNA, 18 nt, Human
uuucuaagauucuaaagg

SEQ ID NO: 2842282 - RNA, 13 nt, Human
uuucuaaccuuga

SEQ ID NO: 2842283 - RNA, 14 nt, Human
uuucuaaccuugaa

SEQ ID NO: 2842284 - RNA, 15 nt, Human
uuucuaaccuugaau

SEQ ID NO: 2842285 - RNA, 17 nt, Human
uuucuaaccuugaaugc

SEQ ID NO: 2842286 - RNA, 19 nt, Human
uuucuaaccuugaaugcug

SEQ ID NO: 2842287 - RNA, 20 nt, Human
uuucuaaccuugaaugcugc

SEQ ID NO: 2842288 - RNA, 22 nt, Human
uuucuaaccuugaaugcugcca

SEQ ID NO: 2842289 - RNA, 23 nt, Human
uuucuaaccuugaaugcugccag

SEQ ID NO: 2842290 - RNA, 15 nt, Human
uuuccugaaaucaag

SEQ ID NO: 2842291 - RNA, 23 nt, Human
uuuccugacagaaggacucaggu

SEQ ID NO: 2842292 - RNA, 22 nt, Human
uuuccucuucuauuuuguaaac

SEQ ID NO: 2842293 - RNA, 21 nt, Human
uuuccucuucuauuuuguaaa

SEQ ID NO: 2842294 - RNA, 23 nt, Human
uuuccuagcccucucacauuuau

SEQ ID NO: 2842295 - RNA, 15 nt, Human
uuuccuagccuguuu

SEQ ID NO: 2842296 - RNA, 17 nt, Human
uuuccuagcccucucac

SEQ ID NO: 2842297 - RNA, 15 nt, Human
uuuacaaugucauau

SEQ ID NO: 2842298 - RNA, 23 nt, Human
uuuagaaaaaaguuuacaacaua

SEQ ID NO: 2842299 - RNA, 12 nt, Human
uuuacuuuggcc

SEQ ID NO: 2842300 - RNA, 15 nt, Human
uuuacuuuuaaacag

SEQ ID NO: 2842301 - RNA, 18 nt, Human
uuuacuuuuaaacaguga

SEQ ID NO: 2842302 - RNA, 13 nt, Human
uuuacauuguaaa

SEQ ID NO: 2842303 - RNA, 21 nt, Human
uuuacaugugauguuuuagug

SEQ ID NO: 2842304 - RNA, 19 nt, Human
uuuacauguguagccuaug

SEQ ID NO: 2842305 - RNA, 20 nt, Human
uuuacauguguagccuaugu

SEQ ID NO: 2842306 - RNA, 21 nt, Human
uuuacauguguagccuauguu

SEQ ID NO: 2842307 - RNA, 15 nt, Human
uuuacuuuguguuca

SEQ ID NO: 2842308 - RNA, 15 nt, Human
uuuacauuguaaaua

SEQ ID NO: 2842309 - RNA, 11 nt, Human
uuuacuuucaa

SEQ ID NO: 2842310 - RNA, 16 nt, Human
uuuacuuucccuugcu

SEQ ID NO: 2842311 - RNA, 17 nt, Human
uuuacuuucccuugcuu

SEQ ID NO: 2842312 - RNA, 20 nt, Human
uuuacuuucccuugcuuuuc

SEQ ID NO: 2842313 - RNA, 17 nt, Human
uuuagaacaauuuucuu

SEQ ID NO: 2842314 - RNA, 19 nt, Human
uuuagaacaauuuucuugu

SEQ ID NO: 2842315 - RNA, 15 nt, Human
uuuagaagugcauuu

SEQ ID NO: 2842316 - RNA, 19 nt, Human
uuuagaagugcauuucuga

SEQ ID NO: 2842317 - RNA, 14 nt, Human
uuuagaagugucau

SEQ ID NO: 2842318 - RNA, 15 nt, Human
uuuagaagugucaug

SEQ ID NO: 2842319 - RNA, 18 nt, Human
uuuagaagugucauguuu

SEQ ID NO: 2842320 - RNA, 23 nt, Human
uuuagaauaaauucccaacuucu

SEQ ID NO: 2842321 - RNA, 20 nt, Human
uuuagacuuaauagaaacau

SEQ ID NO: 2842322 - RNA, 18 nt, Human
uuuagagaacuguggccg

SEQ ID NO: 2842323 - RNA, 14 nt, Human
uuuagagaacugaa

SEQ ID NO: 2842324 - RNA, 15 nt, Human
uuuagagaacugaaa

SEQ ID NO: 2842325 - RNA, 18 nt, Human
uuuagagaacugaaaaga

SEQ ID NO: 2842326 - RNA, 20 nt, Human
uuuagagaacugaaaagaga

SEQ ID NO: 2842327 - RNA, 21 nt, Human
uuuacaaucagccacauucua

SEQ ID NO: 2842328 - RNA, 21 nt, Human
uuuacaaguguauaucagaaa

SEQ ID NO: 2842329 - RNA, 15 nt, Human
uuuacaaguguauau

SEQ ID NO: 2842330 - RNA, 15 nt, Human
uuuacaagccccccc

SEQ ID NO: 2842331 - RNA, 21 nt, Human
uuuacaagcccccccuuccac

SEQ ID NO: 2842332 - RNA, 13 nt, Human
uuuaaucaugaaa

SEQ ID NO: 2842333 - RNA, 14 nt, Human
uuuaaucaugaaau

SEQ ID NO: 2842334 - RNA, 19 nt, Human
uuuaaucaugaaauuacuu

SEQ ID NO: 2842335 - RNA, 24 nt, Human
uuuaaucaugaaauuacuuaucau

SEQ ID NO: 2842336 - RNA, 16 nt, Human
uuuacaagaaguuuau

SEQ ID NO: 2842337 - RNA, 19 nt, Human
uuuacaagaaguuuauucu

SEQ ID NO: 2842338 - RNA, 21 nt, Human
uuuacaagaaguuuauucuca

SEQ ID NO: 2842339 - RNA, 17 nt, Human
uuuaaucugaaauucua

SEQ ID NO: 2842340 - RNA, 18 nt, Human
uuuaaucuguuauguacu

SEQ ID NO: 2842341 - RNA, 13 nt, Human
uuguauuguuuuc

SEQ ID NO: 2842342 - RNA, 14 nt, Human
uuguauuguuuucu

SEQ ID NO: 2842343 - RNA, 15 nt, Human
uuguauuuauuuagu

SEQ ID NO: 2842344 - RNA, 12 nt, Human
uuuaaucaugaa

SEQ ID NO: 2842345 - RNA, 14 nt, Human
uuguauugugguau

SEQ ID NO: 2842346 - RNA, 19 nt, Human
uuguauugugguauugaau

SEQ ID NO: 2842347 - RNA, 15 nt, Human
uuguauugcuguccu

SEQ ID NO: 2842348 - RNA, 14 nt, Human
uuuaugaucagugu

SEQ ID NO: 2842349 - RNA, 15 nt, Human
uuuaugaucaguguu

SEQ ID NO: 2842350 - RNA, 21 nt, Human
uuuaugaucaguguuguugcu

SEQ ID NO: 2842351 - RNA, 22 nt, Human
uuuaucuacccaagggcagaaa

SEQ ID NO: 2842352 - RNA, 16 nt, Human
uuuaugauaucccuga

SEQ ID NO: 2842353 - RNA, 14 nt, Human
uuuaugaugaugaa

SEQ ID NO: 2842354 - RNA, 17 nt, Human
uuuaugaugaugaaaau

SEQ ID NO: 2842355 - RNA, 14 nt, Human
uuuaugauuuucau

SEQ ID NO: 2842356 - RNA, 17 nt, Human
uuuaugauuuucauaac

SEQ ID NO: 2842357 - RNA, 19 nt, Human
uuuaugauuuucauaacuu

SEQ ID NO: 2842358 - RNA, 22 nt, Human
uuuaugauuuucauaacuuauu

SEQ ID NO: 2842359 - RNA, 12 nt, Human
uuuaugauuuaa

SEQ ID NO: 2842360 - RNA, 14 nt, Human
uuuaugauuuaaua

SEQ ID NO: 2842361 - RNA, 18 nt, Human
uuuaugauuuaauaaaau

SEQ ID NO: 2842362 - RNA, 12 nt, Human
uuuaugaaguuu

SEQ ID NO: 2842363 - RNA, 15 nt, Human
uuuaugaaguuuaaa

SEQ ID NO: 2842364 - RNA, 23 nt, Human
uuuaugaaguuuaaaacaguauu

SEQ ID NO: 2842365 - RNA, 12 nt, Human
uuuaugaaauga

SEQ ID NO: 2842366 - RNA, 20 nt, Human
uuuaucuauucugagaaaac

SEQ ID NO: 2842367 - RNA, 11 nt, Human
uuuaugaaaau

SEQ ID NO: 2842368 - RNA, 16 nt, Human
uuuaugaaaauaaaua

SEQ ID NO: 2842369 - RNA, 18 nt, Human
uuuaugaaaauaaauagc

SEQ ID NO: 2842370 - RNA, 19 nt, Human
uuuaugaaaauaaauagcu

SEQ ID NO: 2842371 - RNA, 18 nt, Human
uuuaugaaagguuuacau

SEQ ID NO: 2842372 - RNA, 19 nt, Human
uuuaugaaagguuuacauu

SEQ ID NO: 2842373 - RNA, 18 nt, Human
uuuauaaacagacaauau

SEQ ID NO: 2842374 - RNA, 22 nt, Human
uuuauaaacagacaauauguga

SEQ ID NO: 2842375 - RNA, 23 nt, Human
uuuauaaacagacaauaugugag

SEQ ID NO: 2842376 - RNA, 17 nt, Human
uuuauaaaauauaaaca

SEQ ID NO: 2842377 - RNA, 14 nt, Human
uuuauaaaauuaga

SEQ ID NO: 2842378 - RNA, 16 nt, Human
uuuauaaaauuagaaa

SEQ ID NO: 2842379 - RNA, 22 nt, Human
uuuauaaaauuagaaagcaacu

SEQ ID NO: 2842380 - RNA, 17 nt, Human
uuuauaaaauuuugcuu

SEQ ID NO: 2842381 - RNA, 12 nt, Human
uuuauaaacaga

SEQ ID NO: 2842382 - RNA, 21 nt, Human
uuuauaaaauagaguguaguu

SEQ ID NO: 2842383 - RNA, 19 nt, Human
uuuagaguaagaaauuuca

SEQ ID NO: 2842384 - RNA, 22 nt, Human
uuuagaguaagaaauuucaggu

SEQ ID NO: 2842385 - RNA, 12 nt, Human
uuuaucuaaauu

SEQ ID NO: 2842386 - RNA, 15 nt, Human
uuuaucuaaauuaaa

SEQ ID NO: 2842387 - RNA, 20 nt, Human
uuuaucuaauaccucugugu

SEQ ID NO: 2842388 - RNA, 13 nt, Human
uuuauuguauaaa

SEQ ID NO: 2842389 - RNA, 13 nt, Human
uuuauuuaugaag

SEQ ID NO: 2842390 - RNA, 14 nt, Human
uuuauuuaugaagu

SEQ ID NO: 2842391 - RNA, 19 nt, Human
uuuauuuauauguacuguu

SEQ ID NO: 2842392 - RNA, 15 nt, Human
uuuauuuauacuauu

SEQ ID NO: 2842393 - RNA, 20 nt, Human
uuuauuguuaacucuugucu

SEQ ID NO: 2842394 - RNA, 17 nt, Human
uuuauucaaguuauugu

SEQ ID NO: 2842395 - RNA, 16 nt, Human
uuuauuauuuauuuau

SEQ ID NO: 2842396 - RNA, 17 nt, Human
uuuauucagcuucauuu

SEQ ID NO: 2842397 - RNA, 19 nt, Human
uuuauucagcuucauuugu

SEQ ID NO: 2842398 - RNA, 21 nt, Human
uuuauucagcuucauuugugu

SEQ ID NO: 2842399 - RNA, 22 nt, Human
uuuauucagcuucauuuguguc

SEQ ID NO: 2842400 - RNA, 18 nt, Human
uuuaugcaaggaaggaaa

SEQ ID NO: 2842401 - RNA, 19 nt, Human
uuuaugcacuuauaaggug

SEQ ID NO: 2842402 - RNA, 14 nt, Human
uuuaugcagauaga

SEQ ID NO: 2842403 - RNA, 17 nt, Human
uuuaugcaaggaaggaa

SEQ ID NO: 2842404 - RNA, 15 nt, Human
uuuaugcaaggaagg

SEQ ID NO: 2842405 - RNA, 17 nt, Human
uuuauugcuaguauuug

SEQ ID NO: 2842406 - RNA, 19 nt, Human
uuuauugcuaguauuugaa

SEQ ID NO: 2842407 - RNA, 20 nt, Human
uuuauugcuaguauuugaau

SEQ ID NO: 2842408 - RNA, 23 nt, Human
uuuauugcuaguauuugaauuaa

SEQ ID NO: 2842409 - RNA, 13 nt, Human
uuuauuauuucua

SEQ ID NO: 2842410 - RNA, 23 nt, Human
uuuauuccagaaugcuguacauc

SEQ ID NO: 2842411 - RNA, 22 nt, Human
uuuauuccagaaugcuguacau

SEQ ID NO: 2842412 - RNA, 19 nt, Human
uuuauuccagaaugcugua

SEQ ID NO: 2842413 - RNA, 18 nt, Human
uuuauuccagaaugcugu

SEQ ID NO: 2842414 - RNA, 16 nt, Human
uuuauucauuagcugu

SEQ ID NO: 2842415 - RNA, 18 nt, Human
uuuauucauuagcuguga

SEQ ID NO: 2842416 - RNA, 22 nt, Human
uuuauucauuggucuaauuuau

SEQ ID NO: 2842417 - RNA, 14 nt, Human
uuuguauacaaaua

SEQ ID NO: 2842418 - RNA, 19 nt, Human
uuuguauacaaauauauug

SEQ ID NO: 2842419 - RNA, 22 nt, Human
uuuguauacaaauauauuguua

SEQ ID NO: 2842420 - RNA, 19 nt, Human
uuuguauaacuucuuaaaa

SEQ ID NO: 2842421 - RNA, 18 nt, Human
uuuguauaacuucuuaaa

SEQ ID NO: 2842422 - RNA, 17 nt, Human
uuuguauacauccuggg

SEQ ID NO: 2842423 - RNA, 19 nt, Human
uuuguauacauccugggua

SEQ ID NO: 2842424 - RNA, 20 nt, Human
uuuguauacauccuggguaa

SEQ ID NO: 2842425 - RNA, 14 nt, Human
uuuguauacuuuaa

SEQ ID NO: 2842426 - RNA, 20 nt, Human
uuuguauacuuuaaauaauu

SEQ ID NO: 2842427 - RNA, 22 nt, Human
uuuguauacuuuaaauaauuua

SEQ ID NO: 2842428 - RNA, 16 nt, Human
uuugucaacauuguga

SEQ ID NO: 2842429 - RNA, 17 nt, Human
uuugucaccagaacaca

SEQ ID NO: 2842430 - RNA, 17 nt, Human
uuuggaauacuuuuugu

SEQ ID NO: 2842431 - RNA, 15 nt, Human
uuuggaauacuuuuu

SEQ ID NO: 2842432 - RNA, 13 nt, Human
uuuggaauaaagu

SEQ ID NO: 2842433 - RNA, 13 nt, Human
uuuggaauacuuu

SEQ ID NO: 2842434 - RNA, 15 nt, Human
uuugguguacagacu

SEQ ID NO: 2842435 - RNA, 21 nt, Human
uuuggugucaacaugaaacac

SEQ ID NO: 2842436 - RNA, 12 nt, Human
uuuguucauguu

SEQ ID NO: 2842437 - RNA, 14 nt, Human
uuuguucauguuug

SEQ ID NO: 2842438 - RNA, 15 nt, Human
uuuguucauguuugg

SEQ ID NO: 2842439 - RNA, 19 nt, Human
uuuguucauccuauuguug

SEQ ID NO: 2842440 - RNA, 17 nt, Human
uuuguucaaguuuuggg

SEQ ID NO: 2842441 - RNA, 23 nt, Human
uuuguucaaguuuuggguauguu

SEQ ID NO: 2842442 - RNA, 17 nt, Human
uuuguucacugaaggug

SEQ ID NO: 2842443 - RNA, 19 nt, Human
uuuguucacugaaggugau

SEQ ID NO: 2842444 - RNA, 22 nt, Human
uuuguuaaaauuaucaauaucu

SEQ ID NO: 2842445 - RNA, 13 nt, Human
uuuguuaaauaau

SEQ ID NO: 2842446 - RNA, 24 nt, Human
uuuguuaaaauacaguucugucau

SEQ ID NO: 2842447 - RNA, 18 nt, Human
uuuguuaagguccugaaa

SEQ ID NO: 2842448 - RNA, 19 nt, Human
uuuguguguugucuugaaa

SEQ ID NO: 2842449 - RNA, 12 nt, Human
uuugucccaggu

SEQ ID NO: 2842450 - RNA, 12 nt, Human
uuuguccucaaa

SEQ ID NO: 2842451 - RNA, 14 nt, Human
uuugucccccaacu

SEQ ID NO: 2842452 - RNA, 15 nt, Human
uuugucccccaacuu

SEQ ID NO: 2842453 - RNA, 16 nt, Human
uuugucccccaacuug

SEQ ID NO: 2842454 - RNA, 17 nt, Human
uuugucccccaacuuga

SEQ ID NO: 2842455 - RNA, 18 nt, Human
uuugucccccaacuugag

SEQ ID NO: 2842456 - RNA, 21 nt, Human
uuugucccccaacuugagaug

SEQ ID NO: 2842457 - RNA, 14 nt, Human
uuuguccccugcuu

SEQ ID NO: 2842458 - RNA, 20 nt, Human
uuuguguuguuggaaaaagu

SEQ ID NO: 2842459 - RNA, 21 nt, Human
uuuguguuguuggaaaaaguc

SEQ ID NO: 2842460 - RNA, 13 nt, Human
uuuguguuguaau

SEQ ID NO: 2842461 - RNA, 14 nt, Human
uuuguguuguaauu

SEQ ID NO: 2842462 - RNA, 17 nt, Human
uuuguguuguaauucuu

SEQ ID NO: 2842463 - RNA, 22 nt, Human
uuuguguuguaauucuucaguu

SEQ ID NO: 2842464 - RNA, 23 nt, Human
uuuguguuguaauucuucaguug

SEQ ID NO: 2842465 - RNA, 14 nt, Human
uuuguguucuucuu

SEQ ID NO: 2842466 - RNA, 17 nt, Human
uuuguguuugguuuaca

SEQ ID NO: 2842467 - RNA, 18 nt, Human
uuuguguuugguuuacau

SEQ ID NO: 2842468 - RNA, 21 nt, Human
uuuguguuugguuuacauuua

SEQ ID NO: 2842469 - RNA, 14 nt, Human
uuuguuaaaaauaa

SEQ ID NO: 2842470 - RNA, 19 nt, Human
uuugucaucagauggaaau

SEQ ID NO: 2842471 - RNA, 22 nt, Human
uuugucaucagauggaaauauu

SEQ ID NO: 2842472 - RNA, 17 nt, Human
uuugucaucagccacca

SEQ ID NO: 2842473 - RNA, 21 nt, Human
uuugucaugaauucuuaugcu

SEQ ID NO: 2842474 - RNA, 13 nt, Human
uuuguccauuugu

SEQ ID NO: 2842475 - RNA, 15 nt, Human
uuuguccauuuguaa

SEQ ID NO: 2842476 - RNA, 16 nt, Human
uuuguccauuuguaaa

SEQ ID NO: 2842477 - RNA, 20 nt, Human
uuugccaugggcuucacugu

SEQ ID NO: 2842478 - RNA, 14 nt, Human
uuugccaugggcuu

SEQ ID NO: 2842479 - RNA, 15 nt, Human
uuugccagugggaac

SEQ ID NO: 2842480 - RNA, 16 nt, Human
uuugccagugggaacu

SEQ ID NO: 2842481 - RNA, 18 nt, Human
uuugccauguuggccagg

SEQ ID NO: 2842482 - RNA, 13 nt, Human
uuugccauacauc

SEQ ID NO: 2842483 - RNA, 20 nt, Human
uuuggaagauccugugagga

SEQ ID NO: 2842484 - RNA, 13 nt, Human
uuuggaagcaggg

SEQ ID NO: 2842485 - RNA, 20 nt, Human
uuuggaagaaaaaaaucuuc

SEQ ID NO: 2842486 - RNA, 22 nt, Human
uuuggaagaaaaaaaucuucuc

SEQ ID NO: 2842487 - RNA, 14 nt, Human
uuugcagacaggca

SEQ ID NO: 2842488 - RNA, 21 nt, Human
uuugcacuugugauuauuuau

SEQ ID NO: 2842489 - RNA, 17 nt, Human
uuugcacuguaugcugg

SEQ ID NO: 2842490 - RNA, 12 nt, Human
uuugauacuuau

SEQ ID NO: 2842491 - RNA, 13 nt, Human
uuugauacuuaua

SEQ ID NO: 2842492 - RNA, 14 nt, Human
uuugauacuuauau

SEQ ID NO: 2842493 - RNA, 15 nt, Human
uuugauacuuauauu

SEQ ID NO: 2842494 - RNA, 17 nt, Human
uuugauacuuauauuuu

SEQ ID NO: 2842495 - RNA, 18 nt, Human
uuugauacuuauauuuuc

SEQ ID NO: 2842496 - RNA, 17 nt, Human
uuugcagaagagggugu

SEQ ID NO: 2842497 - RNA, 16 nt, Human
uuucuuaaggugaggc

SEQ ID NO: 2842498 - RNA, 23 nt, Human
uuucuuaaggugaggccugucug

SEQ ID NO: 2842499 - RNA, 17 nt, Human
uuucuuacauaauuuuu

SEQ ID NO: 2842500 - RNA, 18 nt, Human
uuucuuacccaauuuccc

SEQ ID NO: 2842501 - RNA, 15 nt, Human
uuucuuacuccuccu

SEQ ID NO: 2842502 - RNA, 17 nt, Human
uuucuuacuccuccucu

SEQ ID NO: 2842503 - RNA, 17 nt, Human
uuucugaggcuuuauga

SEQ ID NO: 2842504 - RNA, 18 nt, Human
uuucugaggagaaacaaa

SEQ ID NO: 2842505 - RNA, 16 nt, Human
uuucugaggagaaaca

SEQ ID NO: 2842506 - RNA, 15 nt, Human
uuugagcagggcuca

SEQ ID NO: 2842507 - RNA, 15 nt, Human
uuugagcaauuuucg

SEQ ID NO: 2842508 - RNA, 12 nt, Human
uuucuuagcuuu

SEQ ID NO: 2842509 - RNA, 13 nt, Human
uuucuuagcuuuu

SEQ ID NO: 2842510 - RNA, 23 nt, Human
uuugagauuaagaaugccaggaa

SEQ ID NO: 2842511 - RNA, 20 nt, Human
uuugagauugccccaggucu

SEQ ID NO: 2842512 - RNA, 14 nt, Human
uuugagcucagccc

SEQ ID NO: 2842513 - RNA, 13 nt, Human
uuugauacauaau

SEQ ID NO: 2842514 - RNA, 14 nt, Human
uuugauacauaaua

SEQ ID NO: 2842515 - RNA, 15 nt, Human
uuugauacauaauaa

SEQ ID NO: 2842516 - RNA, 17 nt, Human
uuugauacauaauaaaa

SEQ ID NO: 2842517 - RNA, 23 nt, Human
uuugauacauaauaaaaaauuau

SEQ ID NO: 2842518 - RNA, 16 nt, Human
uuugauacauauguga

SEQ ID NO: 2842519 - RNA, 23 nt, Human
uuugauaauguuaaauuuguaag

SEQ ID NO: 2842520 - RNA, 22 nt, Human
uuugauacagucaacaagccug

SEQ ID NO: 2842521 - RNA, 15 nt, Human
uuugauaccccuggg

SEQ ID NO: 2842522 - RNA, 16 nt, Human
uuugauaccccugggg

SEQ ID NO: 2842523 - RNA, 17 nt, Human
uuugauaccccugggga

SEQ ID NO: 2842524 - RNA, 19 nt, Human
uuugauacauaugugaaua

SEQ ID NO: 2842525 - RNA, 19 nt, Human
uuugauaauguuaaauuug

SEQ ID NO: 2842526 - RNA, 17 nt, Human
uuugauaauguuaaauu

SEQ ID NO: 2842527 - RNA, 21 nt, Human
uuucucuuagaacauuguauu

SEQ ID NO: 2842528 - RNA, 19 nt, Human
uuugaguagauauuacuuu

SEQ ID NO: 2842529 - RNA, 20 nt, Human
uuugaguagauauuacuuua

SEQ ID NO: 2842530 - RNA, 21 nt, Human
uuugaguagauauuacuuuau

SEQ ID NO: 2842531 - RNA, 17 nt, Human
uuuuauauuaauguacu

SEQ ID NO: 2842532 - RNA, 13 nt, Human
uuuuauauugaaa

SEQ ID NO: 2842533 - RNA, 14 nt, Human
uuuuauauugaaaa

SEQ ID NO: 2842534 - RNA, 15 nt, Human
uuuuaucaugacaug

SEQ ID NO: 2842535 - RNA, 17 nt, Human
uuuuaucaugacauguu

SEQ ID NO: 2842536 - RNA, 19 nt, Human
uuuuaucaugacauguuau

SEQ ID NO: 2842537 - RNA, 12 nt, Human
uuuuauauuugu

SEQ ID NO: 2842538 - RNA, 13 nt, Human
uuuuauauuugua

SEQ ID NO: 2842539 - RNA, 14 nt, Human
uuuuauauuuguag

SEQ ID NO: 2842540 - RNA, 16 nt, Human
uuuuauauuuguaucg

SEQ ID NO: 2842541 - RNA, 17 nt, Human
uuuuauauuuguaucga

SEQ ID NO: 2842542 - RNA, 21 nt, Human
uuuuaugagauggaucacaua

SEQ ID NO: 2842543 - RNA, 21 nt, Human
uuuuauaucuggaaugagccu

SEQ ID NO: 2842544 - RNA, 14 nt, Human
uuuuauaucuguau

SEQ ID NO: 2842545 - RNA, 15 nt, Human
uuuuauaucuguaug

SEQ ID NO: 2842546 - RNA, 16 nt, Human
uuuuauaucuguaugu

SEQ ID NO: 2842547 - RNA, 17 nt, Human
uuuuauaucuguaugua

SEQ ID NO: 2842548 - RNA, 18 nt, Human
uuuuauaucuguauguau

SEQ ID NO: 2842549 - RNA, 15 nt, Human
uuuuacuguguuuua

SEQ ID NO: 2842550 - RNA, 15 nt, Human
uuuuauauauacagu

SEQ ID NO: 2842551 - RNA, 15 nt, Human
uuuguugugugugca

SEQ ID NO: 2842552 - RNA, 14 nt, Human
uuuguuuaaaagga

SEQ ID NO: 2842553 - RNA, 19 nt, Human
uuuguuuaauggacacuuu

SEQ ID NO: 2842554 - RNA, 17 nt, Human
uuuguuuaaugugaacu

SEQ ID NO: 2842555 - RNA, 21 nt, Human
uuuuaaaauggugcuuaaguu

SEQ ID NO: 2842556 - RNA, 12 nt, Human
uuuuaauuuagu

SEQ ID NO: 2842557 - RNA, 14 nt, Human
uuuuaauuuaguaa

SEQ ID NO: 2842558 - RNA, 18 nt, Human
uuuuaauuuaguaaaugu

SEQ ID NO: 2842559 - RNA, 20 nt, Human
uuuuaauuuaguaaauguua

SEQ ID NO: 2842560 - RNA, 21 nt, Human
uuuuaauuuauuuauacuauu

SEQ ID NO: 2842561 - RNA, 23 nt, Human
uuuuaauuuaugaguuuuugaua

SEQ ID NO: 2842562 - RNA, 16 nt, Human
uuuuaaacaaaauaga

SEQ ID NO: 2842563 - RNA, 13 nt, Human
uuuuacauaacug

SEQ ID NO: 2842564 - RNA, 18 nt, Human
uuuuacauaacugccuug

SEQ ID NO: 2842565 - RNA, 16 nt, Human
uuuuacagcugccugc

SEQ ID NO: 2842566 - RNA, 19 nt, Human
uuuuacagcuuuacacaca

SEQ ID NO: 2842567 - RNA, 13 nt, Human
uuuuacauuaaau

SEQ ID NO: 2842568 - RNA, 15 nt, Human
uuuuacauggagaaa

SEQ ID NO: 2842569 - RNA, 22 nt, Human
uuuuacucuaugccccaaauau

SEQ ID NO: 2842570 - RNA, 16 nt, Human
uuuuacucauugaaau

SEQ ID NO: 2842571 - RNA, 17 nt, Human
uuuuacucauugaaaug

SEQ ID NO: 2842572 - RNA, 20 nt, Human
uuuuacucauugaaauguca

SEQ ID NO: 2842573 - RNA, 13 nt, Human
uuuuaccagcuuu

SEQ ID NO: 2842574 - RNA, 15 nt, Human
uuuuaccagcuuuua

SEQ ID NO: 2842575 - RNA, 16 nt, Human
uuuuaccagcuuuuaa

SEQ ID NO: 2842576 - RNA, 16 nt, Human
uuuuaugagcuuccaa

SEQ ID NO: 2842577 - RNA, 18 nt, Human
uuuuaugagcuuccaagg

SEQ ID NO: 2842578 - RNA, 15 nt, Human
uuuuaugaugaugaa

SEQ ID NO: 2842579 - RNA, 16 nt, Human
uuuuaugaugaugaaa

SEQ ID NO: 2842580 - RNA, 15 nt, Human
uuuuaugauaucccu

SEQ ID NO: 2842581 - RNA, 13 nt, Human
uuuuaugaucagu

SEQ ID NO: 2842582 - RNA, 17 nt, Human
uuuucaacgcagcccug

SEQ ID NO: 2842583 - RNA, 13 nt, Human
uuuuaugcagaua

SEQ ID NO: 2842584 - RNA, 21 nt, Human
uuuucaacgcagcccugcuuu

SEQ ID NO: 2842585 - RNA, 22 nt, Human
uuuucaacgcagcccugcuuug

SEQ ID NO: 2842586 - RNA, 15 nt, Human
uuuucaagcagcauc

SEQ ID NO: 2842587 - RNA, 22 nt, Human
uuuucaagcagcaucuucuggu

SEQ ID NO: 2842588 - RNA, 13 nt, Human
uuuucaaggaagg

SEQ ID NO: 2842589 - RNA, 18 nt, Human
uuuucaaggcuuauauuc

SEQ ID NO: 2842590 - RNA, 15 nt, Human
uuuucaagaaacuga

SEQ ID NO: 2842591 - RNA, 14 nt, Human
uuuucaagaaacug

SEQ ID NO: 2842592 - RNA, 11 nt, Human
uuuucaaugug

SEQ ID NO: 2842593 - RNA, 15 nt, Human
uuuucacauaaaugc

SEQ ID NO: 2842594 - RNA, 22 nt, Human
uuuucacauaaaugcagcccau

SEQ ID NO: 2842595 - RNA, 19 nt, Human
uuuucacugcuggcugccu

SEQ ID NO: 2842596 - RNA, 23 nt, Human
uuuucacaggugugguguaauuu

SEQ ID NO: 2842597 - RNA, 17 nt, Human
uuuucacaaugucagua

SEQ ID NO: 2842598 - RNA, 20 nt, Human
uuuucacaaugucaguauuu

SEQ ID NO: 2842599 - RNA, 15 nt, Human
uuuucagaaaauauu

SEQ ID NO: 2842600 - RNA, 16 nt, Human
uuuucacuguagaaug

SEQ ID NO: 2842601 - RNA, 20 nt, Human
uuuucacugcuggcugccuu

SEQ ID NO: 2842602 - RNA, 17 nt, Human
uuuuccuagcccucuca

SEQ ID NO: 2842603 - RNA, 13 nt, Human
uuuuccucccuca

SEQ ID NO: 2842604 - RNA, 13 nt, Human
uuuuccuauuugu

SEQ ID NO: 2842605 - RNA, 16 nt, Human
uuuucagaaaauauua

SEQ ID NO: 2842606 - RNA, 21 nt, Human
uuuucggaggccccacugaug

SEQ ID NO: 2842607 - RNA, 19 nt, Human
uuuucguaugaaaaugagu

SEQ ID NO: 2842608 - RNA, 18 nt, Human
uuuucuaaacguaagcac

SEQ ID NO: 2842609 - RNA, 20 nt, Human
uuuucuaaacguaagcacug

SEQ ID NO: 2842610 - RNA, 21 nt, Human
uuuucuaaacguaagcacugu

SEQ ID NO: 2842611 - RNA, 14 nt, Human
uuuucuugauuuga

SEQ ID NO: 2842612 - RNA, 14 nt, Human
uuuucuugcauuga

SEQ ID NO: 2842613 - RNA, 18 nt, Human
uuuuccucuucuauuuug

SEQ ID NO: 2842614 - RNA, 12 nt, Human
uuuuccuuuaaa

SEQ ID NO: 2842615 - RNA, 13 nt, Human
uuuuccuuugugg

SEQ ID NO: 2842616 - RNA, 21 nt, Human
uuuuccuuuaaaaaaauuuaa

SEQ ID NO: 2842617 - RNA, 23 nt, Human
uuuucgaacauucuuugccuggu

SEQ ID NO: 2842618 - RNA, 13 nt, Human
uuuuucugcagaa

SEQ ID NO: 2842619 - RNA, 11 nt, Human
uuuugaaauga

SEQ ID NO: 2842620 - RNA, 12 nt, Human
uuuugaaaugaa

SEQ ID NO: 2842621 - RNA, 16 nt, Human
uuuugaaaugaaauuu

SEQ ID NO: 2842622 - RNA, 17 nt, Human
uuuugaaaugaaauuua

SEQ ID NO: 2842623 - RNA, 21 nt, Human
uuuugaaaugaaauuuaaaca

SEQ ID NO: 2842624 - RNA, 22 nt, Human
uuuugaaaugaaauuuaaacau

SEQ ID NO: 2842625 - RNA, 11 nt, Human
uuuuucugauu

SEQ ID NO: 2842626 - RNA, 16 nt, Human
uuuuucugauuagcuu

SEQ ID NO: 2842627 - RNA, 15 nt, Human
uuuugaaaagcuauu

SEQ ID NO: 2842628 - RNA, 16 nt, Human
uuuugaaaagcuauua

SEQ ID NO: 2842629 - RNA, 23 nt, Human
uuuugaaaagcuauuagccagga

SEQ ID NO: 2842630 - RNA, 17 nt, Human
uuuugaaaagcuucuua

SEQ ID NO: 2842631 - RNA, 21 nt, Human
uuuugaaaagcuucuuaauua

SEQ ID NO: 2842632 - RNA, 23 nt, Human
uuuugaaaucaaugcaagaguga

SEQ ID NO: 2842633 - RNA, 13 nt, Human
uuuucuugccuga

SEQ ID NO: 2842634 - RNA, 20 nt, Human
uuuucuugcuuaccuugacu

SEQ ID NO: 2842635 - RNA, 19 nt, Human
uuuucuuggcaaaagccuu

SEQ ID NO: 2842636 - RNA, 21 nt, Human
uuuucuuggcaaaagccuugu

SEQ ID NO: 2842637 - RNA, 24 nt, Human
uuuucuuggcaaaagccuugugua

SEQ ID NO: 2842638 - RNA, 17 nt, Human
uuuuucuguuguaacuu

SEQ ID NO: 2842639 - RNA, 18 nt, Human
uuuuucuguuguaacuua

SEQ ID NO: 2842640 - RNA, 23 nt, Human
uuuuucuuguaaauguguuggac

SEQ ID NO: 2842641 - RNA, 21 nt, Human
uuuuuuaguauuuauuuaugu

SEQ ID NO: 2842642 - RNA, 10 nt, Human
uuuuuugaag

SEQ ID NO: 2842643 - RNA, 22 nt, Human
uuuuuuacucauugaaauguca

SEQ ID NO: 2842644 - RNA, 12 nt, Human
uuuuuucuucua

SEQ ID NO: 2842645 - RNA, 20 nt, Human
caaggagggugagugcaagg

SEQ ID NO: 2842646 - RNA, 19 nt, Human
caaggagggugagugcaag

SEQ ID NO: 2842647 - RNA, 14 nt, Human
caaggagccaaaca

SEQ ID NO: 2842648 - RNA, 22 nt, Human
caaggacugcagggacugccag

SEQ ID NO: 2842649 - RNA, 22 nt, Human
caaggacacgcgccccccuccc

SEQ ID NO: 2842650 - RNA, 15 nt, Human
caaggacugcaggga

SEQ ID NO: 2842651 - RNA, 22 nt, Human
caaggacugagggacucugaag

SEQ ID NO: 2842652 - RNA, 23 nt, Human
caaggaaggaaagaaagaaggaa

SEQ ID NO: 2842653 - RNA, 18 nt, Human
caaggaaggaaagaaaga

SEQ ID NO: 2842654 - RNA, 19 nt, Human
caagcuggucccacucagu

SEQ ID NO: 2842655 - RNA, 17 nt, Human
caaggaaggaaagaaag

SEQ ID NO: 2842656 - RNA, 16 nt, Human
caaggaaggaaagaaa

SEQ ID NO: 2842657 - RNA, 13 nt, Human
caaggaaggaaag

SEQ ID NO: 2842658 - RNA, 12 nt, Human
caaggaaggaaa

SEQ ID NO: 2842659 - RNA, 17 nt, Human
caagcuggucccacuca

SEQ ID NO: 2842660 - RNA, 22 nt, Human
caagccagcgggaauggcagcu

SEQ ID NO: 2842661 - RNA, 22 nt, Human
caagccagcaacacagagcacu

SEQ ID NO: 2842662 - RNA, 17 nt, Human
caagccguggcuucccg

SEQ ID NO: 2842663 - RNA, 15 nt, Human
caagcagguuagaga

SEQ ID NO: 2842664 - RNA, 16 nt, Human
caagcagguuagagaa

SEQ ID NO: 2842665 - RNA, 19 nt, Human
caagcaggcgcugugcuau

SEQ ID NO: 2842666 - RNA, 16 nt, Human
caagcaggaaguucaa

SEQ ID NO: 2842667 - RNA, 13 nt, Human
caagcaggagacg

SEQ ID NO: 2842668 - RNA, 14 nt, Human
caagcaggagacga

SEQ ID NO: 2842669 - RNA, 19 nt, Human
caagcaggagacgacaggc

SEQ ID NO: 2842670 - RNA, 19 nt, Human
caagcgauucuucugcuuc

SEQ ID NO: 2842671 - RNA, 13 nt, Human
caagccuccacag

SEQ ID NO: 2842672 - RNA, 14 nt, Human
caagccuccacagc

SEQ ID NO: 2842673 - RNA, 18 nt, Human
caagccguggcuucccgc

SEQ ID NO: 2842674 - RNA, 17 nt, Human
caagccuccacagcgag

SEQ ID NO: 2842675 - RNA, 19 nt, Human
caagccucgaggugccuuc

SEQ ID NO: 2842676 - RNA, 16 nt, Human
caagccuccacagcga

SEQ ID NO: 2842677 - RNA, 15 nt, Human
caagccuccacagcg

SEQ ID NO: 2842678 - RNA, 22 nt, Human
caagcgauucuucugcuucagc

SEQ ID NO: 2842679 - RNA, 20 nt, Human
caagcgauucuucugcuuca

SEQ ID NO: 2842680 - RNA, 11 nt, Human
caagcuggccu

SEQ ID NO: 2842681 - RNA, 12 nt, Human
caagcuggccuc

SEQ ID NO: 2842682 - RNA, 13 nt, Human
caagcuggccucu

SEQ ID NO: 2842683 - RNA, 12 nt, Human
caagcuggcugg

SEQ ID NO: 2842684 - RNA, 14 nt, Human
caagcuggcugggg

SEQ ID NO: 2842685 - RNA, 22 nt, Human
caagcuggcugggguggccugu

SEQ ID NO: 2842686 - RNA, 23 nt, Human
caagcuggcugggguggccugug

SEQ ID NO: 2842687 - RNA, 14 nt, Human
caagccuggcaagg

SEQ ID NO: 2842688 - RNA, 20 nt, Human
caagcgauuuuccugcuuca

SEQ ID NO: 2842689 - RNA, 16 nt, Human
caagcgcauccaaucu

SEQ ID NO: 2842690 - RNA, 23 nt, Human
caagcgcauccaaucucaaggaa

SEQ ID NO: 2842691 - RNA, 16 nt, Human
caagcaguagacaagc

SEQ ID NO: 2842692 - RNA, 18 nt, Human
caaggcugugcucccugg

SEQ ID NO: 2842693 - RNA, 17 nt, Human
caaggcugugcucccug

SEQ ID NO: 2842694 - RNA, 23 nt, Human
caaggaagguucauguagagaaa

SEQ ID NO: 2842695 - RNA, 19 nt, Human
caaggcugaugcaggauuu

SEQ ID NO: 2842696 - RNA, 14 nt, Human
caaguccucuuuuc

SEQ ID NO: 2842697 - RNA, 19 nt, Human
caaguccgcagaagcccug

SEQ ID NO: 2842698 - RNA, 16 nt, Human
caaguccgcagaagcc

SEQ ID NO: 2842699 - RNA, 23 nt, Human
caagucccugacucucugugacc

SEQ ID NO: 2842700 - RNA, 16 nt, Human
caaggucgguaaguug

SEQ ID NO: 2842701 - RNA, 15 nt, Human
caaggucugagccac

SEQ ID NO: 2842702 - RNA, 20 nt, Human
caaggucugagccacagcag

SEQ ID NO: 2842703 - RNA, 21 nt, Human
caaggucugagccacagcagc

SEQ ID NO: 2842704 - RNA, 18 nt, Human
caaggguagggugggccu

SEQ ID NO: 2842705 - RNA, 17 nt, Human
caagugagagcugggug

SEQ ID NO: 2842706 - RNA, 15 nt, Human
caagugagagcuggg

SEQ ID NO: 2842707 - RNA, 14 nt, Human
caagugagagcugg

SEQ ID NO: 2842708 - RNA, 21 nt, Human
caaguccucuuuucugagagg

SEQ ID NO: 2842709 - RNA, 18 nt, Human
caagugagagcugggugu

SEQ ID NO: 2842710 - RNA, 21 nt, Human
caagugauucucaugccucag

SEQ ID NO: 2842711 - RNA, 20 nt, Human
caagugauucucaugccuca

SEQ ID NO: 2842712 - RNA, 18 nt, Human
caagugauucucaugccu

SEQ ID NO: 2842713 - RNA, 17 nt, Human
caagugauucucaugcc

SEQ ID NO: 2842714 - RNA, 19 nt, Human
caagugugaacaaaagaug

SEQ ID NO: 2842715 - RNA, 14 nt, Human
caagugugaacaaa

SEQ ID NO: 2842716 - RNA, 14 nt, Human
caaguguauaucag

SEQ ID NO: 2842717 - RNA, 18 nt, Human
caaguguauaucagaaaa

SEQ ID NO: 2842718 - RNA, 16 nt, Human
caaguguauaucagaa

SEQ ID NO: 2842719 - RNA, 12 nt, Human
caaguggaccuu

SEQ ID NO: 2842720 - RNA, 19 nt, Human
caagugaucugcccaccuc

SEQ ID NO: 2842721 - RNA, 21 nt, Human
caaguggaccuuaggccuucc

SEQ ID NO: 2842722 - RNA, 22 nt, Human
caaguggaccuuaggccuuccu

SEQ ID NO: 2842723 - RNA, 23 nt, Human
caaguggaccuuaggccuuccuc

SEQ ID NO: 2842724 - RNA, 19 nt, Human
caaguggcucccacacccu

SEQ ID NO: 2842725 - RNA, 18 nt, Human
caaguggcagagcuugga

SEQ ID NO: 2842726 - RNA, 23 nt, Human
caaguggcagagcuuggacugga

SEQ ID NO: 2842727 - RNA, 22 nt, Human
caacacuggugugaccugaggg

SEQ ID NO: 2842728 - RNA, 23 nt, Human
caacacuggugugaccugagggc

SEQ ID NO: 2842729 - RNA, 19 nt, Human
caacccuaucuccugacag

SEQ ID NO: 2842730 - RNA, 16 nt, Human
caacccuaucuccuga

SEQ ID NO: 2842731 - RNA, 18 nt, Human
caacccuagguucccugu

SEQ ID NO: 2842732 - RNA, 19 nt, Human
caacccuagguucccuguu

SEQ ID NO: 2842733 - RNA, 21 nt, Human
caacccuagguucccuguucu

SEQ ID NO: 2842734 - RNA, 22 nt, Human
caacccuagguucccuguucuu

SEQ ID NO: 2842735 - RNA, 22 nt, Human
caacccuaucuccugacagaag

SEQ ID NO: 2842736 - RNA, 20 nt, Human
caacccuaucuccugacaga

SEQ ID NO: 2842737 - RNA, 13 nt, Human
caacccucagagc

SEQ ID NO: 2842738 - RNA, 17 nt, Human
caacccuggcacccagg

SEQ ID NO: 2842739 - RNA, 22 nt, Human
caaccgagagaaugcugaccug

SEQ ID NO: 2842740 - RNA, 23 nt, Human
caaccgagagaaugcugaccuga

SEQ ID NO: 2842741 - RNA, 19 nt, Human
caacccuggcauuaugucc

SEQ ID NO: 2842742 - RNA, 22 nt, Human
caacacucacauuuauucugcu

SEQ ID NO: 2842743 - RNA, 22 nt, Human
caaccccuucgcuccugugucu

SEQ ID NO: 2842744 - RNA, 20 nt, Human
caacacugggaaacagaggc

SEQ ID NO: 2842745 - RNA, 13 nt, Human
caacacuggugug

SEQ ID NO: 2842746 - RNA, 18 nt, Human
caacacuggugugaccug

SEQ ID NO: 2842747 - RNA, 11 nt, Human
caaauuucaca

SEQ ID NO: 2842748 - RNA, 15 nt, Human
caaauuucacuuaua

SEQ ID NO: 2842749 - RNA, 14 nt, Human
caaccuccugggcu

SEQ ID NO: 2842750 - RNA, 21 nt, Human
caaccgguggauccucaaaca

SEQ ID NO: 2842751 - RNA, 17 nt, Human
caaccgccucaaaaugu

SEQ ID NO: 2842752 - RNA, 21 nt, Human
caaccgcuucccuauuuauuu

SEQ ID NO: 2842753 - RNA, 15 nt, Human
caaccuccugggcua

SEQ ID NO: 2842754 - RNA, 12 nt, Human
caaccuccugug

SEQ ID NO: 2842755 - RNA, 16 nt, Human
caaccuccuguggaac

SEQ ID NO: 2842756 - RNA, 23 nt, Human
caaccuccuguggaacccagcag

SEQ ID NO: 2842757 - RNA, 20 nt, Human
caaccucugccuccuggguu

SEQ ID NO: 2842758 - RNA, 16 nt, Human
caaccucugcuuccca

SEQ ID NO: 2842759 - RNA, 17 nt, Human
caaccucugcuucccag

SEQ ID NO: 2842760 - RNA, 20 nt, Human
caaccucugcuucccagguu

SEQ ID NO: 2842761 - RNA, 13 nt, Human
caaccucucacuc

SEQ ID NO: 2842762 - RNA, 14 nt, Human
caaccucucacucc

SEQ ID NO: 2842763 - RNA, 17 nt, Human
caaccucucacucccca

SEQ ID NO: 2842764 - RNA, 15 nt, Human
caacguagcuucuac

SEQ ID NO: 2842765 - RNA, 22 nt, Human
caacugacacucccacccaguc

SEQ ID NO: 2842766 - RNA, 15 nt, Human
caacugaccagccuc

SEQ ID NO: 2842767 - RNA, 17 nt, Human
caacugaccagccucca

SEQ ID NO: 2842768 - RNA, 18 nt, Human
caacggcccugcagccag

SEQ ID NO: 2842769 - RNA, 19 nt, Human
caacggcccugcagccagc

SEQ ID NO: 2842770 - RNA, 20 nt, Human
caacggcccugcagccagcu

SEQ ID NO: 2842771 - RNA, 17 nt, Human
caacgggaagcaaccuc

SEQ ID NO: 2842772 - RNA, 19 nt, Human
caaccuucgccaccugggu

SEQ ID NO: 2842773 - RNA, 20 nt, Human
caaccuguucugcuuuccuc

SEQ ID NO: 2842774 - RNA, 19 nt, Human
caacugaccagccuccaug

SEQ ID NO: 2842775 - RNA, 13 nt, Human
caacgugcaacug

SEQ ID NO: 2842776 - RNA, 14 nt, Human
caacuuuuguguaa

SEQ ID NO: 2842777 - RNA, 20 nt, Human
caacuuuuguguaaugaaaa

SEQ ID NO: 2842778 - RNA, 21 nt, Human
caacuuuuaaccaaacaauua

SEQ ID NO: 2842779 - RNA, 21 nt, Human
caacuuuuguguaaugaaaau

SEQ ID NO: 2842780 - RNA, 15 nt, Human
caagaaaacaacuuc

SEQ ID NO: 2842781 - RNA, 15 nt, Human
caagaaaaaaaaaug

SEQ ID NO: 2842782 - RNA, 16 nt, Human
caagaaaaaaaaaugc

SEQ ID NO: 2842783 - RNA, 17 nt, Human
caagaaaaaaaaaugcc

SEQ ID NO: 2842784 - RNA, 18 nt, Human
caagaaaaaaaaaugcca

SEQ ID NO: 2842785 - RNA, 19 nt, Human
caagaaaaaaaaaugccau

SEQ ID NO: 2842786 - RNA, 15 nt, Human
caagaaaaaauaaau

SEQ ID NO: 2842787 - RNA, 17 nt, Human
caagaaaaaauaaaugg

SEQ ID NO: 2842788 - RNA, 13 nt, Human
caagaaauuugau

SEQ ID NO: 2842789 - RNA, 10 nt, Human
caagaaccug

SEQ ID NO: 2842790 - RNA, 15 nt, Human
caagaaccuggaaaa

SEQ ID NO: 2842791 - RNA, 16 nt, Human
caagaacucaucacug

SEQ ID NO: 2842792 - RNA, 19 nt, Human
caagaacucaucacugugg

SEQ ID NO: 2842793 - RNA, 20 nt, Human
caagaacucaucacuguggc

SEQ ID NO: 2842794 - RNA, 21 nt, Human
caagaacucaucacuguggcu

SEQ ID NO: 2842795 - RNA, 13 nt, Human
caagaagaaaaag

SEQ ID NO: 2842796 - RNA, 14 nt, Human
caagaacucugggc

SEQ ID NO: 2842797 - RNA, 16 nt, Human
caagaaauuugauuuc

SEQ ID NO: 2842798 - RNA, 17 nt, Human
caagcaccuccugccuc

SEQ ID NO: 2842799 - RNA, 16 nt, Human
caagcaccuccugccu

SEQ ID NO: 2842800 - RNA, 15 nt, Human
caagcaccuccugcc

SEQ ID NO: 2842801 - RNA, 14 nt, Human
caagagggcacugg

SEQ ID NO: 2842802 - RNA, 15 nt, Human
caagagggcacuggu

SEQ ID NO: 2842803 - RNA, 16 nt, Human
caagagggaauccccg

SEQ ID NO: 2842804 - RNA, 13 nt, Human
caagagggcacug

SEQ ID NO: 2842805 - RNA, 21 nt, Human
caagacucuagaguccaaggu

SEQ ID NO: 2842806 - RNA, 14 nt, Human
caagacucuagagu

SEQ ID NO: 2842807 - RNA, 17 nt, Human
caagacucuagagucca

SEQ ID NO: 2842808 - RNA, 19 nt, Human
caagaagaagggcacccua

SEQ ID NO: 2842809 - RNA, 14 nt, Human
caaugucaggaaca

SEQ ID NO: 2842810 - RNA, 18 nt, Human
caauguauuuauuuaaaa

SEQ ID NO: 2842811 - RNA, 20 nt, Human
caauguauuuauuuaaaaga

SEQ ID NO: 2842812 - RNA, 22 nt, Human
caauguauuuauuuaaaagauu

SEQ ID NO: 2842813 - RNA, 23 nt, Human
caauguauuuauuuaaaagauuc

SEQ ID NO: 2842814 - RNA, 20 nt, Human
caauguauugauaagagggc

SEQ ID NO: 2842815 - RNA, 15 nt, Human
caauguauuuauuua

SEQ ID NO: 2842816 - RNA, 17 nt, Human
caauguaucccuucuca

SEQ ID NO: 2842817 - RNA, 23 nt, Human
caauguaucccuucucacagcac

SEQ ID NO: 2842818 - RNA, 22 nt, Human
caauggggauguuguguuucug

SEQ ID NO: 2842819 - RNA, 18 nt, Human
caaugggcacugggauga

SEQ ID NO: 2842820 - RNA, 15 nt, Human
caaugggcaaugaca

SEQ ID NO: 2842821 - RNA, 15 nt, Human
caaugggcacuggga

SEQ ID NO: 2842822 - RNA, 17 nt, Human
caaugggcacugggaug

SEQ ID NO: 2842823 - RNA, 19 nt, Human
caaugggcacugggaugag

SEQ ID NO: 2842824 - RNA, 16 nt, Human
caaugggcucuuccaa

SEQ ID NO: 2842825 - RNA, 16 nt, Human
caaugguccugacuuu

SEQ ID NO: 2842826 - RNA, 21 nt, Human
caauggugucaguauccaggc

SEQ ID NO: 2842827 - RNA, 20 nt, Human
caaugguguuauuugaaacu

SEQ ID NO: 2842828 - RNA, 21 nt, Human
caaugguguuauuugaaacuu

SEQ ID NO: 2842829 - RNA, 20 nt, Human
caaugggauguaugaauaca

SEQ ID NO: 2842830 - RNA, 21 nt, Human
caaugggauguaugaauacag

SEQ ID NO: 2842831 - RNA, 23 nt, Human
caaugggauguaugaauacagca

SEQ ID NO: 2842832 - RNA, 11 nt, Human
caaugacuacu

SEQ ID NO: 2842833 - RNA, 17 nt, Human
caaugacugugcuacug

SEQ ID NO: 2842834 - RNA, 20 nt, Human
caaugacugugcuacugucu

SEQ ID NO: 2842835 - RNA, 21 nt, Human
caaugacugugcuacugucuu

SEQ ID NO: 2842836 - RNA, 21 nt, Human
caaugagacucuaggguccag

SEQ ID NO: 2842837 - RNA, 17 nt, Human
caaugagacuugccuuc

SEQ ID NO: 2842838 - RNA, 19 nt, Human
caaugagacuugccuuccu

SEQ ID NO: 2842839 - RNA, 15 nt, Human
caauuaauaaaaaau

SEQ ID NO: 2842840 - RNA, 23 nt, Human
caauucucauuugucacacacuu

SEQ ID NO: 2842841 - RNA, 16 nt, Human
caauuccugggcccca

SEQ ID NO: 2842842 - RNA, 13 nt, Human
caauucuccugcc

SEQ ID NO: 2842843 - RNA, 14 nt, Human
caauuugauacaua

SEQ ID NO: 2842844 - RNA, 15 nt, Human
caauuugauacauaa

SEQ ID NO: 2842845 - RNA, 16 nt, Human
caauuugauacauaau

SEQ ID NO: 2842846 - RNA, 19 nt, Human
caauuugauacauaauaaa

SEQ ID NO: 2842847 - RNA, 20 nt, Human
caauuugauacauaauaaaa

SEQ ID NO: 2842848 - RNA, 22 nt, Human
caauuugauacauaauaaaaaa

SEQ ID NO: 2842849 - RNA, 15 nt, Human
caauucuccugccuc

SEQ ID NO: 2842850 - RNA, 14 nt, Human
caauucuccugccu

SEQ ID NO: 2842851 - RNA, 20 nt, Human
caauuugcacuaaaucagag

SEQ ID NO: 2842852 - RNA, 21 nt, Human
caauuugcacuaaaucagaga

SEQ ID NO: 2842853 - RNA, 23 nt, Human
caauuugcacaucuuggcuaugu

SEQ ID NO: 2842854 - RNA, 16 nt, Human
caaugucaggaacaga

SEQ ID NO: 2842855 - RNA, 15 nt, Human
caaugugaucuaugu

SEQ ID NO: 2842856 - RNA, 16 nt, Human
caaugugaucuauguu

SEQ ID NO: 2842857 - RNA, 22 nt, Human
caaugugaucuauguuucaucu

SEQ ID NO: 2842858 - RNA, 11 nt, Human
caauguuaagg

SEQ ID NO: 2842859 - RNA, 15 nt, Human
caaugugauucuaau

SEQ ID NO: 2842860 - RNA, 14 nt, Human
caauguuaaggaaa

SEQ ID NO: 2842861 - RNA, 16 nt, Human
caauguuaaggaaacu

SEQ ID NO: 2842862 - RNA, 18 nt, Human
caauguuaaggaaacucu

SEQ ID NO: 2842863 - RNA, 18 nt, Human
caauuaauaaaaaaugga

SEQ ID NO: 2842864 - RNA, 15 nt, Human
caauuaauaguuugu

SEQ ID NO: 2842865 - RNA, 18 nt, Human
caauuaauaguuugucua

SEQ ID NO: 2842866 - RNA, 19 nt, Human
caauuaauaguuugucuau

SEQ ID NO: 2842867 - RNA, 22 nt, Human
caauuaauaguuugucuauuuu

SEQ ID NO: 2842868 - RNA, 20 nt, Human
caauuaauauuaauuuucua

SEQ ID NO: 2842869 - RNA, 13 nt, Human
caauuaaugcuuu

SEQ ID NO: 2842870 - RNA, 19 nt, Human
caauuaauugcuauugugu

SEQ ID NO: 2842871 - RNA, 22 nt, Human
caauuaauugcuauuguguuau

SEQ ID NO: 2842872 - RNA, 23 nt, Human
caauuaauugcuauuguguuauu

SEQ ID NO: 2842873 - RNA, 16 nt, Human
caauguuagagacuuu

SEQ ID NO: 2842874 - RNA, 17 nt, Human
caauguuagagacuuuu

SEQ ID NO: 2842875 - RNA, 19 nt, Human
caauguuaaggaaacucuu

SEQ ID NO: 2842876 - RNA, 20 nt, Human
caauguuaaggaaacucuua

SEQ ID NO: 2842877 - RNA, 24 nt, Human
caauguuaaggaaacucuuaucuc

SEQ ID NO: 2842878 - RNA, 23 nt, Human
caauacaucugagguccugugau

SEQ ID NO: 2842879 - RNA, 18 nt, Human
caauacagauaacauuag

SEQ ID NO: 2842880 - RNA, 19 nt, Human
caauacaaacaaucucuua

SEQ ID NO: 2842881 - RNA, 12 nt, Human
caauagcugccc

SEQ ID NO: 2842882 - RNA, 18 nt, Human
caauagcugcccauuucg

SEQ ID NO: 2842883 - RNA, 22 nt, Human
caauauaaaaggcaaaugugua

SEQ ID NO: 2842884 - RNA, 21 nt, Human
caauaauauuguuguauaauu

SEQ ID NO: 2842885 - RNA, 22 nt, Human
caauaauauuguuguauaauuu

SEQ ID NO: 2842886 - RNA, 23 nt, Human
caauaauauuguuguauaauuuc

SEQ ID NO: 2842887 - RNA, 15 nt, Human
caauaauggaaaaaa

SEQ ID NO: 2842888 - RNA, 16 nt, Human
caauaauggaaaaaaa

SEQ ID NO: 2842889 - RNA, 23 nt, Human
caauaauggaaaaaaaaaaaaga

SEQ ID NO: 2842890 - RNA, 14 nt, Human
caauaauuucaggu

SEQ ID NO: 2842891 - RNA, 16 nt, Human
caauaauucauauucu

SEQ ID NO: 2842892 - RNA, 19 nt, Human
caauaauucauauucuuca

SEQ ID NO: 2842893 - RNA, 22 nt, Human
caauaauuucagguuuuguaaa

SEQ ID NO: 2842894 - RNA, 13 nt, Human
caaguuagcucag

SEQ ID NO: 2842895 - RNA, 13 nt, Human
caaguuaagagaa

SEQ ID NO: 2842896 - RNA, 14 nt, Human
caaguuaagagaaa

SEQ ID NO: 2842897 - RNA, 17 nt, Human
caaguuaagagaaacuu

SEQ ID NO: 2842898 - RNA, 18 nt, Human
caaguuaagagaaacuuu

SEQ ID NO: 2842899 - RNA, 21 nt, Human
caaguuaagagaaacuuuaua

SEQ ID NO: 2842900 - RNA, 22 nt, Human
caaguuaagagaaacuuuauac

SEQ ID NO: 2842901 - RNA, 21 nt, Human
caagugugggccacuguggug

SEQ ID NO: 2842902 - RNA, 19 nt, Human
caaguuagcucaggaggcu

SEQ ID NO: 2842903 - RNA, 17 nt, Human
caaguuagcucaggagg

SEQ ID NO: 2842904 - RNA, 16 nt, Human
caaguuagcucaggag

SEQ ID NO: 2842905 - RNA, 14 nt, Human
caaguuagcucagg

SEQ ID NO: 2842906 - RNA, 18 nt, Human
caauaauaauaccucccu

SEQ ID NO: 2842907 - RNA, 16 nt, Human
caaucuggaagaaaaa

SEQ ID NO: 2842908 - RNA, 17 nt, Human
caaucuggaagaaaaaa

SEQ ID NO: 2842909 - RNA, 16 nt, Human
caauauauuaccagca

SEQ ID NO: 2842910 - RNA, 18 nt, Human
caauauauuaccagcaag

SEQ ID NO: 2842911 - RNA, 23 nt, Human
caauauaaaaggcaaauguguac

SEQ ID NO: 2842912 - RNA, 12 nt, Human
caauauagcaag

SEQ ID NO: 2842913 - RNA, 13 nt, Human
caauauagcaaga

SEQ ID NO: 2842914 - RNA, 16 nt, Human
caauauauaaaaauau

SEQ ID NO: 2842915 - RNA, 17 nt, Human
caauauauaaaaauaua

SEQ ID NO: 2842916 - RNA, 18 nt, Human
caauauauaaaaauauau

SEQ ID NO: 2842917 - RNA, 20 nt, Human
caauauauaaaaauauauau

SEQ ID NO: 2842918 - RNA, 21 nt, Human
caauauauaaaaauauauaua

SEQ ID NO: 2842919 - RNA, 20 nt, Human
caauauauagcuggcaagaa

SEQ ID NO: 2842920 - RNA, 18 nt, Human
caaucucuuaaauugggu

SEQ ID NO: 2842921 - RNA, 21 nt, Human
caaucucuuaaauuggguuca

SEQ ID NO: 2842922 - RNA, 16 nt, Human
caauauugacauuugu

SEQ ID NO: 2842923 - RNA, 17 nt, Human
caauauugacauuugua

SEQ ID NO: 2842924 - RNA, 15 nt, Human
caauauugaacuuuu

SEQ ID NO: 2842925 - RNA, 13 nt, Human
caauauuccuuag

SEQ ID NO: 2842926 - RNA, 14 nt, Human
caauauuccuuagu

SEQ ID NO: 2842927 - RNA, 21 nt, Human
caaaagaaaaaaaaaagcacc

SEQ ID NO: 2842928 - RNA, 13 nt, Human
caaaacuuaacau

SEQ ID NO: 2842929 - RNA, 14 nt, Human
caaaacuuuuaaac

SEQ ID NO: 2842930 - RNA, 15 nt, Human
caaaacuuuuaaacu

SEQ ID NO: 2842931 - RNA, 11 nt, Human
caaaacuucuu

SEQ ID NO: 2842932 - RNA, 15 nt, Human
caaaacuucuuguca

SEQ ID NO: 2842933 - RNA, 17 nt, Human
caaaacuucuugucaga

SEQ ID NO: 2842934 - RNA, 19 nt, Human
caaaacuucuugucagaca

SEQ ID NO: 2842935 - RNA, 20 nt, Human
caaaacuucuugucagacau

SEQ ID NO: 2842936 - RNA, 21 nt, Human
caaaacuucuugucagacaua

SEQ ID NO: 2842937 - RNA, 20 nt, Human
caaaacuugguauuuuucag

SEQ ID NO: 2842938 - RNA, 19 nt, Human
caaaagaacaagaauuucu

SEQ ID NO: 2842939 - RNA, 12 nt, Human
caaaagaacuua

SEQ ID NO: 2842940 - RNA, 16 nt, Human
caaaagaacuuacccc

SEQ ID NO: 2842941 - RNA, 19 nt, Human
caaaauaaaaagugacaca

SEQ ID NO: 2842942 - RNA, 21 nt, Human
caaaauaaaaagugacacagc

SEQ ID NO: 2842943 - RNA, 15 nt, Human
caaaauaaaaacuau

SEQ ID NO: 2842944 - RNA, 14 nt, Human
caaaacugugcaga

SEQ ID NO: 2842945 - RNA, 20 nt, Human
caaaacaaguuuuucuguca

SEQ ID NO: 2842946 - RNA, 15 nt, Human
caaaacaacauuuug

SEQ ID NO: 2842947 - RNA, 16 nt, Human
caaaacaagccuggua

SEQ ID NO: 2842948 - RNA, 15 nt, Human
caaaacaaagucuuu

SEQ ID NO: 2842949 - RNA, 16 nt, Human
caaaacaaagucuuug

SEQ ID NO: 2842950 - RNA, 19 nt, Human
caaaacacucggcauuuca

SEQ ID NO: 2842951 - RNA, 12 nt, Human
caaaacacugug

SEQ ID NO: 2842952 - RNA, 13 nt, Human
caaaacacugugg

SEQ ID NO: 2842953 - RNA, 14 nt, Human
caaaacacugugga

SEQ ID NO: 2842954 - RNA, 15 nt, Human
caaaacacuguggaa

SEQ ID NO: 2842955 - RNA, 16 nt, Human
caaaacacuguggaac

SEQ ID NO: 2842956 - RNA, 23 nt, Human
caaaacacacgcgcgcacacaca

SEQ ID NO: 2842957 - RNA, 22 nt, Human
caaaacacacgcgcgcacacac

SEQ ID NO: 2842958 - RNA, 15 nt, Human
caaaaccuguccuau

SEQ ID NO: 2842959 - RNA, 14 nt, Human
caaaaccuaacuug

SEQ ID NO: 2842960 - RNA, 16 nt, Human
caaaacccaugcauuu

SEQ ID NO: 2842961 - RNA, 14 nt, Human
caaaacccaugugg

SEQ ID NO: 2842962 - RNA, 23 nt, Human
caaaaccccuaagagacugcguu

SEQ ID NO: 2842963 - RNA, 17 nt, Human
caaaaaggauacauaau

SEQ ID NO: 2842964 - RNA, 13 nt, Human
caaaaagcuuccc

SEQ ID NO: 2842965 - RNA, 14 nt, Human
caaaaagcuucccc

SEQ ID NO: 2842966 - RNA, 13 nt, Human
caaaaagguugcu

SEQ ID NO: 2842967 - RNA, 21 nt, Human
caaaaaguggggcagagccuc

SEQ ID NO: 2842968 - RNA, 11 nt, Human
caaaaaguguu

SEQ ID NO: 2842969 - RNA, 12 nt, Human
caaaaaguguuu

SEQ ID NO: 2842970 - RNA, 15 nt, Human
caaaaaguuuccaua

SEQ ID NO: 2842971 - RNA, 10 nt, Human
caaaaauaaa

SEQ ID NO: 2842972 - RNA, 13 nt, Human
caaaaauacaaaa

SEQ ID NO: 2842973 - RNA, 17 nt, Human
caaaaaguguuuauuuu

SEQ ID NO: 2842974 - RNA, 12 nt, Human
caaaaauaaauu

SEQ ID NO: 2842975 - RNA, 14 nt, Human
caaaaauaaauuua

SEQ ID NO: 2842976 - RNA, 11 nt, Human
caaaaauauaa

SEQ ID NO: 2842977 - RNA, 15 nt, Human
caaaaauauaacuua

SEQ ID NO: 2842978 - RNA, 17 nt, Human
caaaaauaucccuuccg

SEQ ID NO: 2842979 - RNA, 15 nt, Human
caaaaauauaaaaua

SEQ ID NO: 2842980 - RNA, 15 nt, Human
caaaaauuagccggg

SEQ ID NO: 2842981 - RNA, 17 nt, Human
caaaaauuagccgggcg

SEQ ID NO: 2842982 - RNA, 20 nt, Human
caaaaauuagccgggcgugg

SEQ ID NO: 2842983 - RNA, 11 nt, Human
caaaaauguug

SEQ ID NO: 2842984 - RNA, 13 nt, Human
caaaaauguugaa

SEQ ID NO: 2842985 - RNA, 14 nt, Human
caaaaauguugaac

SEQ ID NO: 2842986 - RNA, 12 nt, Human
caaaaauuauua

SEQ ID NO: 2842987 - RNA, 19 nt, Human
caaaaauuaucuauagcua

SEQ ID NO: 2842988 - RNA, 13 nt, Human
caaaaaugcuaau

SEQ ID NO: 2842989 - RNA, 14 nt, Human
caaaaaugcuaaua

SEQ ID NO: 2842990 - RNA, 15 nt, Human
caaaaaugcuaauau

SEQ ID NO: 2842991 - RNA, 21 nt, Human
caaaaaugcuaauauuaaaag

SEQ ID NO: 2842992 - RNA, 14 nt, Human
caaaaaucagccag

SEQ ID NO: 2842993 - RNA, 15 nt, Human
caaaaaucagccaga

SEQ ID NO: 2842994 - RNA, 16 nt, Human
caaaaaucagccagac

SEQ ID NO: 2842995 - RNA, 17 nt, Human
caaaaaucagccagaca

SEQ ID NO: 2842996 - RNA, 17 nt, Human
caaaaauuaucuauagc

SEQ ID NO: 2842997 - RNA, 10 nt, Human
caaaacaaaa

SEQ ID NO: 2842998 - RNA, 11 nt, Human
caaaacaaaac

SEQ ID NO: 2842999 - RNA, 13 nt, Human
caaaacaaaacaa

SEQ ID NO: 2843000 - RNA, 14 nt, Human
caaaacaaaacaaa

SEQ ID NO: 2843001 - RNA, 15 nt, Human
caaaacaaaacaaaa

SEQ ID NO: 2843002 - RNA, 16 nt, Human
caaaacaaaacaaaac

SEQ ID NO: 2843003 - RNA, 17 nt, Human
caaaacaaaacaaaacu

SEQ ID NO: 2843004 - RNA, 16 nt, Human
caaaacaaaacaacau

SEQ ID NO: 2843005 - RNA, 14 nt, Human
caaaacaaaacuau

SEQ ID NO: 2843006 - RNA, 15 nt, Human
auuuucguaugaaaa

SEQ ID NO: 2843007 - RNA, 16 nt, Human
auuuucguaugaaaau

SEQ ID NO: 2843008 - RNA, 17 nt, Human
auuuucguaugaaaaug

SEQ ID NO: 2843009 - RNA, 18 nt, Human
auuuucguaugaaaauga

SEQ ID NO: 2843010 - RNA, 16 nt, Human
auuuucguucauuacu

SEQ ID NO: 2843011 - RNA, 21 nt, Human
auuuugggguacccacugcuc

SEQ ID NO: 2843012 - RNA, 16 nt, Human
auuuucuagacuuucu

SEQ ID NO: 2843013 - RNA, 18 nt, Human
auuuucuagacuuucugu

SEQ ID NO: 2843014 - RNA, 15 nt, Human
auuuucuacaauuaa

SEQ ID NO: 2843015 - RNA, 18 nt, Human
auuuucuaagcaauuucu

SEQ ID NO: 2843016 - RNA, 22 nt, Human
auuuucuaagcaauuucuugcu

SEQ ID NO: 2843017 - RNA, 19 nt, Human
auuuucuacaaauaauuuu

SEQ ID NO: 2843018 - RNA, 21 nt, Human
auuuuggagaaauuauuuaau

SEQ ID NO: 2843019 - RNA, 14 nt, Human
auuuuggagaaauu

SEQ ID NO: 2843020 - RNA, 16 nt, Human
auuuugguucuucuca

SEQ ID NO: 2843021 - RNA, 17 nt, Human
auuuugguucuucucaa

SEQ ID NO: 2843022 - RNA, 23 nt, Human
auuuugggguacccacugcucug

SEQ ID NO: 2843023 - RNA, 22 nt, Human
auuuugggguacccacugcucu

SEQ ID NO: 2843024 - RNA, 19 nt, Human
auuuuggguuuugggucuu

SEQ ID NO: 2843025 - RNA, 21 nt, Human
auuuugguaagagacagaaug

SEQ ID NO: 2843026 - RNA, 20 nt, Human
auuuugguauuacacuguau

SEQ ID NO: 2843027 - RNA, 21 nt, Human
auuuugguauuacacuguauu

SEQ ID NO: 2843028 - RNA, 21 nt, Human
auuuuggucauagcauucacu

SEQ ID NO: 2843029 - RNA, 21 nt, Human
auuuugggacaauuguuuuaa

SEQ ID NO: 2843030 - RNA, 22 nt, Human
auuuugggacaauuguuuuaau

SEQ ID NO: 2843031 - RNA, 14 nt, Human
auuuugggcaugug

SEQ ID NO: 2843032 - RNA, 23 nt, Human
auuuuggggaaggguuugaauug

SEQ ID NO: 2843033 - RNA, 19 nt, Human
auuuuggcgcuauuacaaa

SEQ ID NO: 2843034 - RNA, 20 nt, Human
auuuuggcgcuauuacaaau

SEQ ID NO: 2843035 - RNA, 21 nt, Human
auuuuggcgcuauuacaaaua

SEQ ID NO: 2843036 - RNA, 20 nt, Human
auuuugggguuguguuguca

SEQ ID NO: 2843037 - RNA, 11 nt, Human
auuuugggguc

SEQ ID NO: 2843038 - RNA, 13 nt, Human
auuuuggggucuc

SEQ ID NO: 2843039 - RNA, 14 nt, Human
auuuuggggucucu

SEQ ID NO: 2843040 - RNA, 16 nt, Human
auuuuggggucucuuu

SEQ ID NO: 2843041 - RNA, 17 nt, Human
auuuuggggucucuuuu

SEQ ID NO: 2843042 - RNA, 14 nt, Human
caaaaacaaaaaga

SEQ ID NO: 2843043 - RNA, 17 nt, Human
auuuuguaaacucaaaa

SEQ ID NO: 2843044 - RNA, 10 nt, Human
auuuuguaaa

SEQ ID NO: 2843045 - RNA, 18 nt, Human
caaaaaauuagccgggcg

SEQ ID NO: 2843046 - RNA, 16 nt, Human
caaaaaauuagccggg

SEQ ID NO: 2843047 - RNA, 23 nt, Human
caaaaacuuuggaguccccucac

SEQ ID NO: 2843048 - RNA, 20 nt, Human
caaaaagaaaagaaaauuuu

SEQ ID NO: 2843049 - RNA, 22 nt, Human
caaaaacugucuuuaaaagaga

SEQ ID NO: 2843050 - RNA, 13 nt, Human
caaaaacuguuuu

SEQ ID NO: 2843051 - RNA, 13 nt, Human
caaaaacuuguua

SEQ ID NO: 2843052 - RNA, 22 nt, Human
caaaaagcucuuacacuacauu

SEQ ID NO: 2843053 - RNA, 13 nt, Human
caaaaagaaauga

SEQ ID NO: 2843054 - RNA, 14 nt, Human
caaaaagaaaugac

SEQ ID NO: 2843055 - RNA, 16 nt, Human
caaaaagaaaugacua

SEQ ID NO: 2843056 - RNA, 15 nt, Human
caaaaagaaaugaug

SEQ ID NO: 2843057 - RNA, 14 nt, Human
caaaaagacaaaca

SEQ ID NO: 2843058 - RNA, 18 nt, Human
caaacuccaagguucccu

SEQ ID NO: 2843059 - RNA, 17 nt, Human
caaauaugcuaauuugg

SEQ ID NO: 2843060 - RNA, 18 nt, Human
caaaugggugauauccug

SEQ ID NO: 2843061 - RNA, 22 nt, Human
caaaugggugauauccugaaaa

SEQ ID NO: 2843062 - RNA, 18 nt, Human
caaauggguuuuccacgc

SEQ ID NO: 2843063 - RNA, 20 nt, Human
caaaugguaggcauuuccua

SEQ ID NO: 2843064 - RNA, 23 nt, Human
caaaugguuaccuuguuauuuaa

SEQ ID NO: 2843065 - RNA, 15 nt, Human
caaaugguaggcauu

SEQ ID NO: 2843066 - RNA, 13 nt, Human
caaaugguaggca

SEQ ID NO: 2843067 - RNA, 19 nt, Human
caaaggguaucaggugcug

SEQ ID NO: 2843068 - RNA, 19 nt, Human
caaagugcugggauuacag

SEQ ID NO: 2843069 - RNA, 23 nt, Human
caaagugcugggauuacaggugu

SEQ ID NO: 2843070 - RNA, 12 nt, Human
caaaggcuggga

SEQ ID NO: 2843071 - RNA, 23 nt, Human
caaaggggaucauaaaguuagaa

SEQ ID NO: 2843072 - RNA, 20 nt, Human
caaagugcugggauuacagg

SEQ ID NO: 2843073 - RNA, 14 nt, Human
caaauugugcuucu

SEQ ID NO: 2843074 - RNA, 18 nt, Human
caaauugugcuucucccc

SEQ ID NO: 2843075 - RNA, 19 nt, Human
caaauugugcuucucccca

SEQ ID NO: 2843076 - RNA, 21 nt, Human
caaauugugcuucuccccaga

SEQ ID NO: 2843077 - RNA, 22 nt, Human
caaauugugcuucuccccagaa

SEQ ID NO: 2843078 - RNA, 23 nt, Human
caaauugugcuucuccccagaau

SEQ ID NO: 2843079 - RNA, 14 nt, Human
caaauuguggagcc

SEQ ID NO: 2843080 - RNA, 13 nt, Human
caaauuuaucaaa

SEQ ID NO: 2843081 - RNA, 16 nt, Human
caaauuuaucaaagca

SEQ ID NO: 2843082 - RNA, 17 nt, Human
caaauuuaucaaagcau

SEQ ID NO: 2843083 - RNA, 19 nt, Human
caaauuuaucaaagcauag

SEQ ID NO: 2843084 - RNA, 16 nt, Human
caaauuucaaaagaca

SEQ ID NO: 2843085 - RNA, 17 nt, Human
caaauuucaaaagacau

SEQ ID NO: 2843086 - RNA, 14 nt, Human
caaauugucagcaa

SEQ ID NO: 2843087 - RNA, 22 nt, Human
caaauugucuuuugucaugugg

SEQ ID NO: 2843088 - RNA, 18 nt, Human
caaauguccuccagaagc

SEQ ID NO: 2843089 - RNA, 19 nt, Human
caaauguccuccagaagcc

SEQ ID NO: 2843090 - RNA, 19 nt, Human
caaauuauaaaaagccacu

SEQ ID NO: 2843091 - RNA, 16 nt, Human
caaaugucagauacaa

SEQ ID NO: 2843092 - RNA, 19 nt, Human
caaaugucagauacaaugu

SEQ ID NO: 2843093 - RNA, 20 nt, Human
caaaugucagauacaaugua

SEQ ID NO: 2843094 - RNA, 14 nt, Human
caaauguaaacauu

SEQ ID NO: 2843095 - RNA, 17 nt, Human
caaauguaaacauuuuc

SEQ ID NO: 2843096 - RNA, 12 nt, Human
caaauuauuugu

SEQ ID NO: 2843097 - RNA, 14 nt, Human
caaauuauuugugu

SEQ ID NO: 2843098 - RNA, 15 nt, Human
caaauuauuugugua

SEQ ID NO: 2843099 - RNA, 16 nt, Human
caaauuauuuguguaa

SEQ ID NO: 2843100 - RNA, 20 nt, Human
caaauuauuuguguaauaga

SEQ ID NO: 2843101 - RNA, 17 nt, Human
caaauuauuuguguaau

SEQ ID NO: 2843102 - RNA, 18 nt, Human
caaauuauuuguguaaua

SEQ ID NO: 2843103 - RNA, 22 nt, Human
caaaauugcaaaucuugaaauu

SEQ ID NO: 2843104 - RNA, 14 nt, Human
caaacacauuguua

SEQ ID NO: 2843105 - RNA, 16 nt, Human
caaacacauuguuauu

SEQ ID NO: 2843106 - RNA, 17 nt, Human
caaacacauuguuauuu

SEQ ID NO: 2843107 - RNA, 24 nt, Human
caaacaauaguaauucucaggcca

SEQ ID NO: 2843108 - RNA, 20 nt, Human
caaacaaucucuuaaauugg

SEQ ID NO: 2843109 - RNA, 21 nt, Human
caaacaaucucuuaaauuggg

SEQ ID NO: 2843110 - RNA, 14 nt, Human
caaacacaaaugca

SEQ ID NO: 2843111 - RNA, 14 nt, Human
caaacaauuuaaaa

SEQ ID NO: 2843112 - RNA, 16 nt, Human
caaacaauuuaaaaau

SEQ ID NO: 2843113 - RNA, 15 nt, Human
caaacacaaaugcag

SEQ ID NO: 2843114 - RNA, 14 nt, Human
caaacacaagguca

SEQ ID NO: 2843115 - RNA, 20 nt, Human
caaacacaaggucauggcca

SEQ ID NO: 2843116 - RNA, 23 nt, Human
caaacacaaggucauggccacac

SEQ ID NO: 2843117 - RNA, 17 nt, Human
caaaccuaccaaaaugg

SEQ ID NO: 2843118 - RNA, 15 nt, Human
caaaccuaccaaaau

SEQ ID NO: 2843119 - RNA, 14 nt, Human
caaacgccuccccu

SEQ ID NO: 2843120 - RNA, 17 nt, Human
caaacgccuccccugcc

SEQ ID NO: 2843121 - RNA, 22 nt, Human
caaaauuacagacugucugaaa

SEQ ID NO: 2843122 - RNA, 17 nt, Human
caaacgccuagauugcu

SEQ ID NO: 2843123 - RNA, 17 nt, Human
caaacgcugccugccca

SEQ ID NO: 2843124 - RNA, 16 nt, Human
caaacgcugccugccc

SEQ ID NO: 2843125 - RNA, 16 nt, Human
caaacuaaaagacauu

SEQ ID NO: 2843126 - RNA, 20 nt, Human
caaacuaaaagacauuuguu

SEQ ID NO: 2843127 - RNA, 16 nt, Human
caaacuaaaggugcac

SEQ ID NO: 2843128 - RNA, 15 nt, Human
caaacgcugccugcc

SEQ ID NO: 2843129 - RNA, 14 nt, Human
caaacgcugccugc

SEQ ID NO: 2843130 - RNA, 13 nt, Human
caaacgcugccug

SEQ ID NO: 2843131 - RNA, 12 nt, Human
caaacgcugccu

SEQ ID NO: 2843132 - RNA, 12 nt, Human
caaaauguauau

SEQ ID NO: 2843133 - RNA, 15 nt, Human
caaaauguauauauu

SEQ ID NO: 2843134 - RNA, 16 nt, Human
caaaauguauauauuu

SEQ ID NO: 2843135 - RNA, 17 nt, Human
caaaauguauauauuua

SEQ ID NO: 2843136 - RNA, 18 nt, Human
caaaauguauauauuuag

SEQ ID NO: 2843137 - RNA, 14 nt, Human
caaaauguguauuu

SEQ ID NO: 2843138 - RNA, 16 nt, Human
caaaauguguauuucu

SEQ ID NO: 2843139 - RNA, 20 nt, Human
caaaauguguauuucuuaua

SEQ ID NO: 2843140 - RNA, 15 nt, Human
caaaagaaauaccuu

SEQ ID NO: 2843141 - RNA, 13 nt, Human
caaaauaaaacaa

SEQ ID NO: 2843142 - RNA, 14 nt, Human
caaaauaaaacaaa

SEQ ID NO: 2843143 - RNA, 15 nt, Human
caaaauaaaacaaag

SEQ ID NO: 2843144 - RNA, 17 nt, Human
caaaauaaaacaaaggg

SEQ ID NO: 2843145 - RNA, 22 nt, Human
caaaauaaaaagugacacagca

SEQ ID NO: 2843146 - RNA, 23 nt, Human
caaaauaaaaagugacacagcag

SEQ ID NO: 2843147 - RNA, 18 nt, Human
caaaaugcuuuuuauuuc

SEQ ID NO: 2843148 - RNA, 17 nt, Human
caaaauggaauaaaagg

SEQ ID NO: 2843149 - RNA, 16 nt, Human
caaaauggaauaaaag

SEQ ID NO: 2843150 - RNA, 16 nt, Human
caaaauggacauggug

SEQ ID NO: 2843151 - RNA, 23 nt, Human
caaaaugcuuuuuauuucugcau

SEQ ID NO: 2843152 - RNA, 14 nt, Human
caaaauggaacgcu

SEQ ID NO: 2843153 - RNA, 20 nt, Human
caaaaugcuuuuuauuucug

SEQ ID NO: 2843154 - RNA, 16 nt, Human
caaaauugauguguuu

SEQ ID NO: 2843155 - RNA, 15 nt, Human
caaaauugauguguu

SEQ ID NO: 2843156 - RNA, 20 nt, Human
caaaauucuuauuuuuccua

SEQ ID NO: 2843157 - RNA, 22 nt, Human
caaaauugauguguuuauuuau

SEQ ID NO: 2843158 - RNA, 17 nt, Human
caaaauugcaaaucuug

SEQ ID NO: 2843159 - RNA, 16 nt, Human
caaaauugcaaaucuu

SEQ ID NO: 2843160 - RNA, 15 nt, Human
caaaauuaaaucugu

SEQ ID NO: 2843161 - RNA, 19 nt, Human
caaaauguuaucuucucaa

SEQ ID NO: 2843162 - RNA, 20 nt, Human
caaaauguuaucuucucaag

SEQ ID NO: 2843163 - RNA, 21 nt, Human
caaaauguuaucuucucaagu

SEQ ID NO: 2843164 - RNA, 22 nt, Human
caaaauguuaucuucucaaguu

SEQ ID NO: 2843165 - RNA, 18 nt, Human
caaaggguaucaggugcu

SEQ ID NO: 2843166 - RNA, 16 nt, Human
caaaggguaucaggug

SEQ ID NO: 2843167 - RNA, 13 nt, Human
caaaggccaugga

SEQ ID NO: 2843168 - RNA, 19 nt, Human
caaaggccauggagagcug

SEQ ID NO: 2843169 - RNA, 20 nt, Human
caaaggccauggagagcugg

SEQ ID NO: 2843170 - RNA, 21 nt, Human
caaaggccauggagagcugga

SEQ ID NO: 2843171 - RNA, 23 nt, Human
caaaggccauggagagcuggagc

SEQ ID NO: 2843172 - RNA, 14 nt, Human
caaaggcugagaac

SEQ ID NO: 2843173 - RNA, 23 nt, Human
caaaggcugagaacacugugaaa

SEQ ID NO: 2843174 - RNA, 11 nt, Human
caaaggcuggg

SEQ ID NO: 2843175 - RNA, 13 nt, Human
caaaggcccccua

SEQ ID NO: 2843176 - RNA, 15 nt, Human
caaagcugcccacug

SEQ ID NO: 2843177 - RNA, 14 nt, Human
caaagcugcccacu

SEQ ID NO: 2843178 - RNA, 20 nt, Human
caaagcugcccacuguuucu

SEQ ID NO: 2843179 - RNA, 19 nt, Human
caaaggaagucuaaauauu

SEQ ID NO: 2843180 - RNA, 13 nt, Human
caaaggccaaacu

SEQ ID NO: 2843181 - RNA, 14 nt, Human
caaaggccaaacug

SEQ ID NO: 2843182 - RNA, 15 nt, Human
caaaggccaaacugc

SEQ ID NO: 2843183 - RNA, 16 nt, Human
caaaggccaaacugcu

SEQ ID NO: 2843184 - RNA, 19 nt, Human
caaaggccaaacugcugga

SEQ ID NO: 2843185 - RNA, 19 nt, Human
caaaggaagugcccccucc

SEQ ID NO: 2843186 - RNA, 20 nt, Human
caaaggaagugcccccuccc

SEQ ID NO: 2843187 - RNA, 20 nt, Human
caaaggcaaguuaagagaaa

SEQ ID NO: 2843188 - RNA, 23 nt, Human
caaaggcaaguuaagagaaacuu

SEQ ID NO: 2843189 - RNA, 19 nt, Human
caaagcuaggccuggccag

SEQ ID NO: 2843190 - RNA, 14 nt, Human
caaagcuaggccug

SEQ ID NO: 2843191 - RNA, 13 nt, Human
caaagcuaggccu

SEQ ID NO: 2843192 - RNA, 19 nt, Human
caaagcugaugacaacuuc

SEQ ID NO: 2843193 - RNA, 19 nt, Human
caaagcucuguggccacau

SEQ ID NO: 2843194 - RNA, 22 nt, Human
caaagcuaggguggcccuugca

SEQ ID NO: 2843195 - RNA, 18 nt, Human
caaagcucaaauaaaaau

SEQ ID NO: 2843196 - RNA, 20 nt, Human
caaagcucaaauaaaaauaa

SEQ ID NO: 2843197 - RNA, 21 nt, Human
caaagcuaggguggcccuugc

SEQ ID NO: 2843198 - RNA, 18 nt, Human
caaacgcugccugcccac

SEQ ID NO: 2843199 - RNA, 14 nt, Human
caaacuacuugauu

SEQ ID NO: 2843200 - RNA, 16 nt, Human
caaacuacuugauuuu

SEQ ID NO: 2843201 - RNA, 18 nt, Human
caaacuaaggugcuaaau

SEQ ID NO: 2843202 - RNA, 20 nt, Human
caaacuaaggugcuaaaucu

SEQ ID NO: 2843203 - RNA, 20 nt, Human
caaacuacagaccugcuuuu

SEQ ID NO: 2843204 - RNA, 22 nt, Human
caaacuacagaccugcuuuuug

SEQ ID NO: 2843205 - RNA, 15 nt, Human
caaacuggggccucc

SEQ ID NO: 2843206 - RNA, 16 nt, Human
caaacuggggccucca

SEQ ID NO: 2843207 - RNA, 19 nt, Human
caaacuggggccuccagaa

SEQ ID NO: 2843208 - RNA, 21 nt, Human
caaacuggggccuccagaacu

SEQ ID NO: 2843209 - RNA, 12 nt, Human
caaacuguaaau

SEQ ID NO: 2843210 - RNA, 21 nt, Human
caaacuuaauguucuuaugca

SEQ ID NO: 2843211 - RNA, 13 nt, Human
caaacuuacuauu

SEQ ID NO: 2843212 - RNA, 14 nt, Human
caaacuuacuauuu

SEQ ID NO: 2843213 - RNA, 16 nt, Human
caaacuguucaagaaa

SEQ ID NO: 2843214 - RNA, 20 nt, Human
caaacuguucaagaaauaau

SEQ ID NO: 2843215 - RNA, 14 nt, Human
caaacugugaagca

SEQ ID NO: 2843216 - RNA, 22 nt, Human
caaacugugaagcauuuacaga

SEQ ID NO: 2843217 - RNA, 20 nt, Human
caaacuguaaauaaaaagaa

SEQ ID NO: 2843218 - RNA, 14 nt, Human
caaacuguaaauaa

SEQ ID NO: 2843219 - RNA, 21 nt, Human
caaacuguaaauaaaaagaaa

SEQ ID NO: 2843220 - RNA, 12 nt, Human
caaacuguaaaa

SEQ ID NO: 2843221 - RNA, 21 nt, Human
caaacuguaaaaaaugugugu

SEQ ID NO: 2843222 - RNA, 22 nt, Human
caaagccaaagcuaggccuggc

SEQ ID NO: 2843223 - RNA, 20 nt, Human
caaagccaccucugucauuu

SEQ ID NO: 2843224 - RNA, 23 nt, Human
caaagccaccucugucauuuguu

SEQ ID NO: 2843225 - RNA, 18 nt, Human
caaagcccuuccaugucg

SEQ ID NO: 2843226 - RNA, 14 nt, Human
caaagccagggucu

SEQ ID NO: 2843227 - RNA, 15 nt, Human
caaagccagggucuc

SEQ ID NO: 2843228 - RNA, 22 nt, Human
caaagccagggucucucccuca

SEQ ID NO: 2843229 - RNA, 23 nt, Human
caaagccagggucucucccucag

SEQ ID NO: 2843230 - RNA, 16 nt, Human
cacauacaguuuuaug

SEQ ID NO: 2843231 - RNA, 17 nt, Human
cacauacaguuuuaugc

SEQ ID NO: 2843232 - RNA, 23 nt, Human
cacauacaguuuuaugcucuuuu

SEQ ID NO: 2843233 - RNA, 14 nt, Human
cacauaucugucau

SEQ ID NO: 2843234 - RNA, 13 nt, Human
cacauagauuaau

SEQ ID NO: 2843235 - RNA, 18 nt, Human
cacauagauuaauggcac

SEQ ID NO: 2843236 - RNA, 20 nt, Human
cacauagauuaauggcacug

SEQ ID NO: 2843237 - RNA, 21 nt, Human
cacauagauuaauggcacuga

SEQ ID NO: 2843238 - RNA, 22 nt, Human
cacauagauuaauggcacugau

SEQ ID NO: 2843239 - RNA, 16 nt, Human
cacauagcugucuaga

SEQ ID NO: 2843240 - RNA, 18 nt, Human
cacauaugcaccuugugu

SEQ ID NO: 2843241 - RNA, 13 nt, Human
cacauagcugucu

SEQ ID NO: 2843242 - RNA, 22 nt, Human
cacauagcuacccaaaagagaa

SEQ ID NO: 2843243 - RNA, 23 nt, Human
cacauagcuacccaaaagagaaa

SEQ ID NO: 2843244 - RNA, 19 nt, Human
cacauaugcaccuuguguc

SEQ ID NO: 2843245 - RNA, 20 nt, Human
cacauaugcaccuugugucu

SEQ ID NO: 2843246 - RNA, 21 nt, Human
cacauaugcaccuugugucug

SEQ ID NO: 2843247 - RNA, 22 nt, Human
cacauaugcaccuugugucugu

SEQ ID NO: 2843248 - RNA, 21 nt, Human
cacagugagucgaggacaggg

SEQ ID NO: 2843249 - RNA, 22 nt, Human
cacagugagucgaggacaggga

SEQ ID NO: 2843250 - RNA, 14 nt, Human
cacagugcaucuca

SEQ ID NO: 2843251 - RNA, 13 nt, Human
cacagugggaacu

SEQ ID NO: 2843252 - RNA, 14 nt, Human
cacagugggaacuc

SEQ ID NO: 2843253 - RNA, 19 nt, Human
cacagugggaacucugaca

SEQ ID NO: 2843254 - RNA, 22 nt, Human
cacagcuucauuuccugugucu

SEQ ID NO: 2843255 - RNA, 21 nt, Human
cacagcuucauuuccuguguc

SEQ ID NO: 2843256 - RNA, 17 nt, Human
cacagcuguucuucugu

SEQ ID NO: 2843257 - RNA, 22 nt, Human
cacagcuguucuucuguucugc

SEQ ID NO: 2843258 - RNA, 14 nt, Human
cacagcuguagugg

SEQ ID NO: 2843259 - RNA, 20 nt, Human
cacagcugcuggagacuccu

SEQ ID NO: 2843260 - RNA, 21 nt, Human
cacagcuggagcucucaaacu

SEQ ID NO: 2843261 - RNA, 12 nt, Human
cacagcugcugg

SEQ ID NO: 2843262 - RNA, 14 nt, Human
cacagcugcuggag

SEQ ID NO: 2843263 - RNA, 15 nt, Human
cacagcugcuggaga

SEQ ID NO: 2843264 - RNA, 17 nt, Human
caauuugggcuuccugu

SEQ ID NO: 2843265 - RNA, 18 nt, Human
caauuugggcuuccuguu

SEQ ID NO: 2843266 - RNA, 21 nt, Human
caauuugggcuuccuguuugu

SEQ ID NO: 2843267 - RNA, 22 nt, Human
caauuuguucauccuauuguug

SEQ ID NO: 2843268 - RNA, 15 nt, Human
cacaggcagguccag

SEQ ID NO: 2843269 - RNA, 14 nt, Human
cacaggcaggucca

SEQ ID NO: 2843270 - RNA, 11 nt, Human
cacaggcaggu

SEQ ID NO: 2843271 - RNA, 18 nt, Human
cacaggagugggaaaaca

SEQ ID NO: 2843272 - RNA, 15 nt, Human
cacaggaggcaagca

SEQ ID NO: 2843273 - RNA, 19 nt, Human
cacaggaggcaagcaagcu

SEQ ID NO: 2843274 - RNA, 20 nt, Human
cacaggaggcaagcaagcuc

SEQ ID NO: 2843275 - RNA, 14 nt, Human
cacaggagggaggg

SEQ ID NO: 2843276 - RNA, 21 nt, Human
cacaggagggagggggaaggc

SEQ ID NO: 2843277 - RNA, 19 nt, Human
cacaggagggagggggaag

SEQ ID NO: 2843278 - RNA, 21 nt, Human
cacaggacugauucugggaug

SEQ ID NO: 2843279 - RNA, 15 nt, Human
cacaggagacacugu

SEQ ID NO: 2843280 - RNA, 21 nt, Human
cacaggagacacugugcuaua

SEQ ID NO: 2843281 - RNA, 13 nt, Human
cucuuauugccca

SEQ ID NO: 2843282 - RNA, 20 nt, Human
cucuuauugcccacgcugga

SEQ ID NO: 2843283 - RNA, 19 nt, Human
cucuuauugcccacgcugg

SEQ ID NO: 2843284 - RNA, 15 nt, Human
cucuuauugcccacg

SEQ ID NO: 2843285 - RNA, 14 nt, Human
cucuuauugcccac

SEQ ID NO: 2843286 - RNA, 16 nt, Human
cucuucaccccccacu

SEQ ID NO: 2843287 - RNA, 17 nt, Human
cucuucaccccccacuc

SEQ ID NO: 2843288 - RNA, 18 nt, Human
cucuucaccccccacuca

SEQ ID NO: 2843289 - RNA, 16 nt, Human
cucuucaccccggcag

SEQ ID NO: 2843290 - RNA, 18 nt, Human
cucuucaccccggcaggc

SEQ ID NO: 2843291 - RNA, 19 nt, Human
cucuucaccccggcaggcc

SEQ ID NO: 2843292 - RNA, 21 nt, Human
cucuucaccccggcaggcccu

SEQ ID NO: 2843293 - RNA, 22 nt, Human
cucuucaccccggcaggcccug

SEQ ID NO: 2843294 - RNA, 23 nt, Human
cucuucaccccggcaggcccugc

SEQ ID NO: 2843295 - RNA, 15 nt, Human
cucuuauuuuacaau

SEQ ID NO: 2843296 - RNA, 16 nt, Human
cucuucaaaaacuguu

SEQ ID NO: 2843297 - RNA, 17 nt, Human
cucuucaaaaacuguuu

SEQ ID NO: 2843298 - RNA, 20 nt, Human
cucuucaacugaccagccuc

SEQ ID NO: 2843299 - RNA, 16 nt, Human
cucuucaacugaccag

SEQ ID NO: 2843300 - RNA, 17 nt, Human
cucuucaacugaccagc

SEQ ID NO: 2843301 - RNA, 15 nt, Human
cucuucagacucuca

SEQ ID NO: 2843302 - RNA, 17 nt, Human
cucuucagacucucagc

SEQ ID NO: 2843303 - RNA, 20 nt, Human
cucuucagacucucagccca

SEQ ID NO: 2843304 - RNA, 23 nt, Human
cucuucagacucucagcccagaa

SEQ ID NO: 2843305 - RNA, 16 nt, Human
cucuucaggccucccu

SEQ ID NO: 2843306 - RNA, 15 nt, Human
cucuucaggccuccc

SEQ ID NO: 2843307 - RNA, 14 nt, Human
cucuucaggccucc

SEQ ID NO: 2843308 - RNA, 13 nt, Human
cucuucaggccuc

SEQ ID NO: 2843309 - RNA, 18 nt, Human
cucuccccugcccugcug

SEQ ID NO: 2843310 - RNA, 17 nt, Human
cucuccccugcccugcu

SEQ ID NO: 2843311 - RNA, 16 nt, Human
cucuccccugcccugc

SEQ ID NO: 2843312 - RNA, 15 nt, Human
cucuccccugcccug

SEQ ID NO: 2843313 - RNA, 21 nt, Human
cucuccccucagagugcaagc

SEQ ID NO: 2843314 - RNA, 13 nt, Human
cucuccccuccag

SEQ ID NO: 2843315 - RNA, 14 nt, Human
cucuccccuccagc

SEQ ID NO: 2843316 - RNA, 15 nt, Human
cucuccccuccagcc

SEQ ID NO: 2843317 - RNA, 16 nt, Human
cucuccccuccagccu

SEQ ID NO: 2843318 - RNA, 17 nt, Human
cucuccccuccagccuu

SEQ ID NO: 2843319 - RNA, 18 nt, Human
cucuccccuccagccuuu

SEQ ID NO: 2843320 - RNA, 23 nt, Human
cucucccggagguugggugggcc

SEQ ID NO: 2843321 - RNA, 20 nt, Human
cucugcuccucuccccagca

SEQ ID NO: 2843322 - RNA, 18 nt, Human
cucugcuccucuccccag

SEQ ID NO: 2843323 - RNA, 13 nt, Human
cucugcuccucuc

SEQ ID NO: 2843324 - RNA, 19 nt, Human
cucugcuccaccacauccu

SEQ ID NO: 2843325 - RNA, 13 nt, Human
cucugcuccaccu

SEQ ID NO: 2843326 - RNA, 14 nt, Human
cucugcuccaccuu

SEQ ID NO: 2843327 - RNA, 18 nt, Human
cucugcuccaccuuucag

SEQ ID NO: 2843328 - RNA, 19 nt, Human
cucugcuccaccuuucagc

SEQ ID NO: 2843329 - RNA, 16 nt, Human
cucugcagacugcuag

SEQ ID NO: 2843330 - RNA, 18 nt, Human
cucugcagacugcuagug

SEQ ID NO: 2843331 - RNA, 12 nt, Human
cucuguccaggc

SEQ ID NO: 2843332 - RNA, 16 nt, Human
cucuggucuuggaauu

SEQ ID NO: 2843333 - RNA, 13 nt, Human
cucuggugccucc

SEQ ID NO: 2843334 - RNA, 16 nt, Human
cucuggugauaaggac

SEQ ID NO: 2843335 - RNA, 17 nt, Human
cucuggugauaaggaca

SEQ ID NO: 2843336 - RNA, 19 nt, Human
cucuggugauaaggacaug

SEQ ID NO: 2843337 - RNA, 18 nt, Human
cucuggugccuccagagg

SEQ ID NO: 2843338 - RNA, 14 nt, Human
cucuggugccucca

SEQ ID NO: 2843339 - RNA, 16 nt, Human
cucuggugccuccaga

SEQ ID NO: 2843340 - RNA, 22 nt, Human
cucugguccggacacuccuaga

SEQ ID NO: 2843341 - RNA, 17 nt, Human
cucugggucaguggucc

SEQ ID NO: 2843342 - RNA, 20 nt, Human
cucugggucagugguccaca

SEQ ID NO: 2843343 - RNA, 12 nt, Human
cucugcugaaga

SEQ ID NO: 2843344 - RNA, 13 nt, Human
cucugcugaagac

SEQ ID NO: 2843345 - RNA, 16 nt, Human
cucugcugaagacuug

SEQ ID NO: 2843346 - RNA, 18 nt, Human
cucuggggugcugccuga

SEQ ID NO: 2843347 - RNA, 16 nt, Human
cucugcugacagacac

SEQ ID NO: 2843348 - RNA, 14 nt, Human
cucugcugacagac

SEQ ID NO: 2843349 - RNA, 13 nt, Human
cucugcugacaga

SEQ ID NO: 2843350 - RNA, 13 nt, Human
cucugcuccccag

SEQ ID NO: 2843351 - RNA, 19 nt, Human
cucuuuuugguuguccuca

SEQ ID NO: 2843352 - RNA, 13 nt, Human
cugaaacuucccu

SEQ ID NO: 2843353 - RNA, 21 nt, Human
cugaaacuugcugagcuguuu

SEQ ID NO: 2843354 - RNA, 16 nt, Human
cugaaacccuggacca

SEQ ID NO: 2843355 - RNA, 20 nt, Human
cugaaaccuaguacugcccc

SEQ ID NO: 2843356 - RNA, 17 nt, Human
cugaaaccuuuaagaaa

SEQ ID NO: 2843357 - RNA, 18 nt, Human
cugaaaccuuuaagaaaa

SEQ ID NO: 2843358 - RNA, 18 nt, Human
cugaaacacgaaacuugu

SEQ ID NO: 2843359 - RNA, 19 nt, Human
cugaaacacgaaacuuguu

SEQ ID NO: 2843360 - RNA, 20 nt, Human
cugaaacacgaaacuuguua

SEQ ID NO: 2843361 - RNA, 21 nt, Human
cugaaacacgaaacuuguuau

SEQ ID NO: 2843362 - RNA, 13 nt, Human
cugaaacagauuu

SEQ ID NO: 2843363 - RNA, 17 nt, Human
cugaaacagauuucaua

SEQ ID NO: 2843364 - RNA, 14 nt, Human
cucuuuucucugug

SEQ ID NO: 2843365 - RNA, 17 nt, Human
cucuuuucuaaaagacu

SEQ ID NO: 2843366 - RNA, 15 nt, Human
cucuuuucuguacuu

SEQ ID NO: 2843367 - RNA, 10 nt, Human
cucuuuucuu

SEQ ID NO: 2843368 - RNA, 16 nt, Human
cucuuuucuuacuccu

SEQ ID NO: 2843369 - RNA, 18 nt, Human
cucuuuucuuacuccucc

SEQ ID NO: 2843370 - RNA, 20 nt, Human
cucuuuucuuacuccuccuc

SEQ ID NO: 2843371 - RNA, 21 nt, Human
cucuuuucuuacuccuccucu

SEQ ID NO: 2843372 - RNA, 22 nt, Human
cucuuuucuuacuccuccucuu

SEQ ID NO: 2843373 - RNA, 21 nt, Human
cucuugauuauccauauugag

SEQ ID NO: 2843374 - RNA, 23 nt, Human
cucuugauaccccccucugucuu

SEQ ID NO: 2843375 - RNA, 20 nt, Human
cucuuuuuagggccaggcag

SEQ ID NO: 2843376 - RNA, 22 nt, Human
cucuuuuuagggccaggcaggu

SEQ ID NO: 2843377 - RNA, 11 nt, Human
cucuuuuuaag

SEQ ID NO: 2843378 - RNA, 18 nt, Human
cucuuuuuagggccaggc

SEQ ID NO: 2843379 - RNA, 21 nt, Human
cucuuuugcuuuauuccagaa

SEQ ID NO: 2843380 - RNA, 10 nt, Human
cucuuuugua

SEQ ID NO: 2843381 - RNA, 14 nt, Human
cucuuuuguaaauu

SEQ ID NO: 2843382 - RNA, 15 nt, Human
cucuuuuguaaauua

SEQ ID NO: 2843383 - RNA, 18 nt, Human
cucuuuuguuaaauaaua

SEQ ID NO: 2843384 - RNA, 19 nt, Human
cucuuuuguuaaauaauau

SEQ ID NO: 2843385 - RNA, 23 nt, Human
cugaaggacauugcggacagcca

SEQ ID NO: 2843386 - RNA, 13 nt, Human
cugaagccucugg

SEQ ID NO: 2843387 - RNA, 14 nt, Human
cugaagccucuggg

SEQ ID NO: 2843388 - RNA, 15 nt, Human
cugaagccucuggga

SEQ ID NO: 2843389 - RNA, 12 nt, Human
cugaagccucug

SEQ ID NO: 2843390 - RNA, 21 nt, Human
cugaagcccucccagguguua

SEQ ID NO: 2843391 - RNA, 18 nt, Human
cugacaaaaaguuuccau

SEQ ID NO: 2843392 - RNA, 20 nt, Human
cugagucaaugcgcaaaaug

SEQ ID NO: 2843393 - RNA, 18 nt, Human
cugaguauguggaaggca

SEQ ID NO: 2843394 - RNA, 13 nt, Human
cugaguaugugga

SEQ ID NO: 2843395 - RNA, 20 nt, Human
cugaguagcuggauuacagg

SEQ ID NO: 2843396 - RNA, 14 nt, Human
cugaguagcuggga

SEQ ID NO: 2843397 - RNA, 20 nt, Human
cugaguagcugggauuacag

SEQ ID NO: 2843398 - RNA, 15 nt, Human
cugaguagcugggau

SEQ ID NO: 2843399 - RNA, 19 nt, Human
cugaguagcuggauuacag

SEQ ID NO: 2843400 - RNA, 18 nt, Human
cugaguagaugcgcagcc

SEQ ID NO: 2843401 - RNA, 22 nt, Human
cugaguagaugcgcagccccau

SEQ ID NO: 2843402 - RNA, 17 nt, Human
cugaguagcucuccuga

SEQ ID NO: 2843403 - RNA, 19 nt, Human
cugaguagcucuccugacu

SEQ ID NO: 2843404 - RNA, 11 nt, Human
cugaggagaaa

SEQ ID NO: 2843405 - RNA, 13 nt, Human
cugaggaggccuc

SEQ ID NO: 2843406 - RNA, 14 nt, Human
cugaggaggccucc

SEQ ID NO: 2843407 - RNA, 15 nt, Human
cugaggaggccucca

SEQ ID NO: 2843408 - RNA, 16 nt, Human
cugaggaggccuccau

SEQ ID NO: 2843409 - RNA, 19 nt, Human
cugaggaggccuccaucuc

SEQ ID NO: 2843410 - RNA, 13 nt, Human
cugaggaggggag

SEQ ID NO: 2843411 - RNA, 22 nt, Human
cugaggacuuaaaauauuccug

SEQ ID NO: 2843412 - RNA, 14 nt, Human
cugaggaccagcca

SEQ ID NO: 2843413 - RNA, 17 nt, Human
cugaggugaaagggagc

SEQ ID NO: 2843414 - RNA, 19 nt, Human
cugaggugaaagggagcua

SEQ ID NO: 2843415 - RNA, 17 nt, Human
cugaggugccuguccca

SEQ ID NO: 2843416 - RNA, 19 nt, Human
cugaggugccugucccacc

SEQ ID NO: 2843417 - RNA, 22 nt, Human
cugaggugccugucccaccccc

SEQ ID NO: 2843418 - RNA, 14 nt, Human
cugaggaauccaga

SEQ ID NO: 2843419 - RNA, 20 nt, Human
cugaggaauccagacccggc

SEQ ID NO: 2843420 - RNA, 17 nt, Human
cugaggaauccagaccc

SEQ ID NO: 2843421 - RNA, 20 nt, Human
cugaggacacuaaccacgcu

SEQ ID NO: 2843422 - RNA, 21 nt, Human
cugaggaauccagacccggcu

SEQ ID NO: 2843423 - RNA, 23 nt, Human
cugaggacacuaaccacgcugga

SEQ ID NO: 2843424 - RNA, 16 nt, Human
cugaggaauuuucuuu

SEQ ID NO: 2843425 - RNA, 14 nt, Human
cugaggacaaagug

SEQ ID NO: 2843426 - RNA, 15 nt, Human
cugaggacaaagugg

SEQ ID NO: 2843427 - RNA, 20 nt, Human
cugaggacaaaguggaggag

SEQ ID NO: 2843428 - RNA, 23 nt, Human
cugaggacaaaguggaggagggc

SEQ ID NO: 2843429 - RNA, 11 nt, Human
cugagcuuuau

SEQ ID NO: 2843430 - RNA, 14 nt, Human
cugagauccccuga

SEQ ID NO: 2843431 - RNA, 17 nt, Human
cugagauccccugagcc

SEQ ID NO: 2843432 - RNA, 18 nt, Human
cugagauccccugagccc

SEQ ID NO: 2843433 - RNA, 21 nt, Human
cugagauccccugagccccag

SEQ ID NO: 2843434 - RNA, 14 nt, Human
cugagaucgugcca

SEQ ID NO: 2843435 - RNA, 19 nt, Human
cugagaucgugccacugca

SEQ ID NO: 2843436 - RNA, 12 nt, Human
cugagacucaca

SEQ ID NO: 2843437 - RNA, 19 nt, Human
cugagacucacaggaagga

SEQ ID NO: 2843438 - RNA, 16 nt, Human
cugagaccauuuaaca

SEQ ID NO: 2843439 - RNA, 22 nt, Human
cugagaccauuuaacaugcaac

SEQ ID NO: 2843440 - RNA, 13 nt, Human
cugagacccagga

SEQ ID NO: 2843441 - RNA, 14 nt, Human
cugagacccaggac

SEQ ID NO: 2843442 - RNA, 17 nt, Human
cugagacccaggacucc

SEQ ID NO: 2843443 - RNA, 21 nt, Human
cugagacccaggacuccuccc

SEQ ID NO: 2843444 - RNA, 20 nt, Human
cugaccccaaacaccuucca

SEQ ID NO: 2843445 - RNA, 21 nt, Human
cugaccccaaacaccuuccag

SEQ ID NO: 2843446 - RNA, 22 nt, Human
cugaccccaaacaccuuccagc

SEQ ID NO: 2843447 - RNA, 19 nt, Human
cugaccucuugcugucucu

SEQ ID NO: 2843448 - RNA, 20 nt, Human
cugaccucuugcugucucug

SEQ ID NO: 2843449 - RNA, 21 nt, Human
cugaccucuugcugucucugc

SEQ ID NO: 2843450 - RNA, 22 nt, Human
cugaccucuugcugucucugcu

SEQ ID NO: 2843451 - RNA, 23 nt, Human
cugaccucuugcugucucugcuc

SEQ ID NO: 2843452 - RNA, 13 nt, Human
cugaccugcaggc

SEQ ID NO: 2843453 - RNA, 14 nt, Human
cugaccugccucuc

SEQ ID NO: 2843454 - RNA, 18 nt, Human
cugaccugccucucacac

SEQ ID NO: 2843455 - RNA, 22 nt, Human
cugaccugccucucacacacau

SEQ ID NO: 2843456 - RNA, 12 nt, Human
cugaccugcagg

SEQ ID NO: 2843457 - RNA, 14 nt, Human
cugaccugcacugg

SEQ ID NO: 2843458 - RNA, 19 nt, Human
cugagacuuucuuucugua

SEQ ID NO: 2843459 - RNA, 14 nt, Human
cugagacugcggga

SEQ ID NO: 2843460 - RNA, 18 nt, Human
cugagagaauuggcucaa

SEQ ID NO: 2843461 - RNA, 20 nt, Human
cugagagaauuggcucaaua

SEQ ID NO: 2843462 - RNA, 16 nt, Human
cugagagacauggcuu

SEQ ID NO: 2843463 - RNA, 13 nt, Human
cugagagacuuuu

SEQ ID NO: 2843464 - RNA, 16 nt, Human
cugagagacuuuuaau

SEQ ID NO: 2843465 - RNA, 18 nt, Human
cugagagacuuuuaauca

SEQ ID NO: 2843466 - RNA, 12 nt, Human
cugagagccagg

SEQ ID NO: 2843467 - RNA, 17 nt, Human
cugagagcaaagugacc

SEQ ID NO: 2843468 - RNA, 14 nt, Human
cugagagucuagau

SEQ ID NO: 2843469 - RNA, 14 nt, Human
cugagaggggaagc

SEQ ID NO: 2843470 - RNA, 15 nt, Human
cugagagugucucug

SEQ ID NO: 2843471 - RNA, 22 nt, Human
cugagagucuagauucucuggc

SEQ ID NO: 2843472 - RNA, 15 nt, Human
cugagagucuagauu

SEQ ID NO: 2843473 - RNA, 17 nt, Human
cugagagucuagauucu

SEQ ID NO: 2843474 - RNA, 22 nt, Human
cugagaggacuuuucuuugugg

SEQ ID NO: 2843475 - RNA, 21 nt, Human
cugagaggacuuuucuuugug

SEQ ID NO: 2843476 - RNA, 12 nt, Human
cugacaagggcu

SEQ ID NO: 2843477 - RNA, 13 nt, Human
cugacaagggcug

SEQ ID NO: 2843478 - RNA, 14 nt, Human
cugacaagggcuga

SEQ ID NO: 2843479 - RNA, 19 nt, Human
cugacaagggcugaccugc

SEQ ID NO: 2843480 - RNA, 20 nt, Human
cugacaagggcugaccugcc

SEQ ID NO: 2843481 - RNA, 22 nt, Human
cugacaagggcugaccugccuc

SEQ ID NO: 2843482 - RNA, 19 nt, Human
cugacaacagacuucugaa

SEQ ID NO: 2843483 - RNA, 18 nt, Human
cugacaacagacuucuga

SEQ ID NO: 2843484 - RNA, 15 nt, Human
cugacaacagacuuc

SEQ ID NO: 2843485 - RNA, 14 nt, Human
cucguuccuuucuc

SEQ ID NO: 2843486 - RNA, 15 nt, Human
cucguuccuuucucc

SEQ ID NO: 2843487 - RNA, 17 nt, Human
cucguuccuuucuccug

SEQ ID NO: 2843488 - RNA, 16 nt, Human
cucgugguccccaaca

SEQ ID NO: 2843489 - RNA, 22 nt, Human
cucucacacugguucucaauga

SEQ ID NO: 2843490 - RNA, 20 nt, Human
cucucacacugguucucaau

SEQ ID NO: 2843491 - RNA, 19 nt, Human
cucucacacugguucucaa

SEQ ID NO: 2843492 - RNA, 12 nt, Human
cucucacacaca

SEQ ID NO: 2843493 - RNA, 14 nt, Human
cucucacacacaua

SEQ ID NO: 2843494 - RNA, 21 nt, Human
cucucacacacauagauuaau

SEQ ID NO: 2843495 - RNA, 15 nt, Human
cucucaccucagccu

SEQ ID NO: 2843496 - RNA, 13 nt, Human
cucucaggagcca

SEQ ID NO: 2843497 - RNA, 14 nt, Human
cucucaggagccau

SEQ ID NO: 2843498 - RNA, 21 nt, Human
cucucaggagccaucaucggc

SEQ ID NO: 2843499 - RNA, 16 nt, Human
cucucaggauccaagc

SEQ ID NO: 2843500 - RNA, 13 nt, Human
cucucaggaucca

SEQ ID NO: 2843501 - RNA, 14 nt, Human
cucucaggauccaa

SEQ ID NO: 2843502 - RNA, 17 nt, Human
cucucagcucagcgcca

SEQ ID NO: 2843503 - RNA, 13 nt, Human
cucucagcuccag

SEQ ID NO: 2843504 - RNA, 15 nt, Human
cucucagcuccaggu

SEQ ID NO: 2843505 - RNA, 15 nt, Human
cucucacuaaacuuu

SEQ ID NO: 2843506 - RNA, 12 nt, Human
cucucagcucca

SEQ ID NO: 2843507 - RNA, 19 nt, Human
cucucagccuuacauuugu

SEQ ID NO: 2843508 - RNA, 16 nt, Human
cucucagcucagcgcc

SEQ ID NO: 2843509 - RNA, 21 nt, Human
cucuaaagaguuuauuuuaag

SEQ ID NO: 2843510 - RNA, 14 nt, Human
cucuaaagaccaaa

SEQ ID NO: 2843511 - RNA, 15 nt, Human
cucuaaagaccaaac

SEQ ID NO: 2843512 - RNA, 17 nt, Human
cucuaaagaccaaacuu

SEQ ID NO: 2843513 - RNA, 19 nt, Human
cucuaaagaccaaacuuca

SEQ ID NO: 2843514 - RNA, 20 nt, Human
cucuaaagaccaaacuucac

SEQ ID NO: 2843515 - RNA, 18 nt, Human
cucguuggaagaggaaca

SEQ ID NO: 2843516 - RNA, 21 nt, Human
cucguuuuucuucuuaagacu

SEQ ID NO: 2843517 - RNA, 12 nt, Human
cucguuugugau

SEQ ID NO: 2843518 - RNA, 13 nt, Human
cucguuugugauu

SEQ ID NO: 2843519 - RNA, 13 nt, Human
cucuaaaagcacc

SEQ ID NO: 2843520 - RNA, 23 nt, Human
cucuaaaagcguuggauguagca

SEQ ID NO: 2843521 - RNA, 22 nt, Human
cucuauauuuagauuguuaaaa

SEQ ID NO: 2843522 - RNA, 11 nt, Human
cucuauauuua

SEQ ID NO: 2843523 - RNA, 17 nt, Human
cucuauauaaaaacaaa

SEQ ID NO: 2843524 - RNA, 18 nt, Human
cucuauacugcccugagu

SEQ ID NO: 2843525 - RNA, 21 nt, Human
cucuauacugcccugaguugg

SEQ ID NO: 2843526 - RNA, 15 nt, Human
cucuaucaccaagga

SEQ ID NO: 2843527 - RNA, 14 nt, Human
cucuaucucucaaa

SEQ ID NO: 2843528 - RNA, 14 nt, Human
cucuaucugggccu

SEQ ID NO: 2843529 - RNA, 15 nt, Human
cucuaucugggccug

SEQ ID NO: 2843530 - RNA, 16 nt, Human
cucuaucugggccugg

SEQ ID NO: 2843531 - RNA, 17 nt, Human
cucuaucugggccuggg

SEQ ID NO: 2843532 - RNA, 20 nt, Human
cucuaucugggccugggcua

SEQ ID NO: 2843533 - RNA, 14 nt, Human
cucgaacuggcugc

SEQ ID NO: 2843534 - RNA, 13 nt, Human
cucgaacuggcug

SEQ ID NO: 2843535 - RNA, 15 nt, Human
cucgaacuggcugca

SEQ ID NO: 2843536 - RNA, 23 nt, Human
cuccuggggguucuuucuuccuc

SEQ ID NO: 2843537 - RNA, 14 nt, Human
cuccuggggguucu

SEQ ID NO: 2843538 - RNA, 19 nt, Human
cuccuggguucaagcgauu

SEQ ID NO: 2843539 - RNA, 18 nt, Human
cuccuggggguucuuucu

SEQ ID NO: 2843540 - RNA, 20 nt, Human
cuccuggggguucuuucuuc

SEQ ID NO: 2843541 - RNA, 22 nt, Human
cuccuggggguucuuucuuccu

SEQ ID NO: 2843542 - RNA, 19 nt, Human
cuccucucugcccuaaugc

SEQ ID NO: 2843543 - RNA, 19 nt, Human
cuccuaaccucaagugauc

SEQ ID NO: 2843544 - RNA, 20 nt, Human
cuccuacaagauuuagaaaa

SEQ ID NO: 2843545 - RNA, 15 nt, Human
cuccucucugcccua

SEQ ID NO: 2843546 - RNA, 14 nt, Human
cuccucucugcccu

SEQ ID NO: 2843547 - RNA, 13 nt, Human
cuccucucugccc

SEQ ID NO: 2843548 - RNA, 13 nt, Human
cuccucuccugga

SEQ ID NO: 2843549 - RNA, 14 nt, Human
cuccucuccuggag

SEQ ID NO: 2843550 - RNA, 15 nt, Human
cuccucuccuggagg

SEQ ID NO: 2843551 - RNA, 16 nt, Human
cuccucuccuggagga

SEQ ID NO: 2843552 - RNA, 22 nt, Human
cuccguuuauuauaaacuguau

SEQ ID NO: 2843553 - RNA, 18 nt, Human
cuccucuguccugcuucu

SEQ ID NO: 2843554 - RNA, 20 nt, Human
cuccucuguccugcuucuga

SEQ ID NO: 2843555 - RNA, 20 nt, Human
cuccucuccuggaggauugc

SEQ ID NO: 2843556 - RNA, 16 nt, Human
cuccucugucugcccu

SEQ ID NO: 2843557 - RNA, 18 nt, Human
cuccucuucaccccggca

SEQ ID NO: 2843558 - RNA, 19 nt, Human
cuccucuucaccccggcag

SEQ ID NO: 2843559 - RNA, 20 nt, Human
cuccucuucaccccggcagg

SEQ ID NO: 2843560 - RNA, 22 nt, Human
cuccucuucaccccggcaggcc

SEQ ID NO: 2843561 - RNA, 15 nt, Human
cuccuggacuccugc

SEQ ID NO: 2843562 - RNA, 12 nt, Human
cuccuggacucc

SEQ ID NO: 2843563 - RNA, 10 nt, Human
cuccuggagg

SEQ ID NO: 2843564 - RNA, 15 nt, Human
cuccuggaguugcau

SEQ ID NO: 2843565 - RNA, 13 nt, Human
cuccucuguggug

SEQ ID NO: 2843566 - RNA, 18 nt, Human
cuccucuguggugucugc

SEQ ID NO: 2843567 - RNA, 19 nt, Human
cuccucuguggugucugcc

SEQ ID NO: 2843568 - RNA, 18 nt, Human
cuccucuucaacugacca

SEQ ID NO: 2843569 - RNA, 23 nt, Human
cuccucuucaacugaccagccuc

SEQ ID NO: 2843570 - RNA, 20 nt, Human
cuccuggcagaagggagcag

SEQ ID NO: 2843571 - RNA, 16 nt, Human
cucccccaccccugcu

SEQ ID NO: 2843572 - RNA, 23 nt, Human
cucccccaacccccaccccacac

SEQ ID NO: 2843573 - RNA, 21 nt, Human
cucccccaacccccaccccac

SEQ ID NO: 2843574 - RNA, 16 nt, Human
cucccccaucucccac

SEQ ID NO: 2843575 - RNA, 19 nt, Human
cucccccaucucccacccu

SEQ ID NO: 2843576 - RNA, 13 nt, Human
cucccccaucucu

SEQ ID NO: 2843577 - RNA, 17 nt, Human
cuccacugugccuuugc

SEQ ID NO: 2843578 - RNA, 22 nt, Human
cuccacugugccuuugcaaauc

SEQ ID NO: 2843579 - RNA, 23 nt, Human
cuccacugugccuuugcaaauca

SEQ ID NO: 2843580 - RNA, 13 nt, Human
cuccacugucacc

SEQ ID NO: 2843581 - RNA, 18 nt, Human
cuccacugucacccucca

SEQ ID NO: 2843582 - RNA, 21 nt, Human
cuccacuucuuguuccccacu

SEQ ID NO: 2843583 - RNA, 15 nt, Human
cuccccaugccacgu

SEQ ID NO: 2843584 - RNA, 14 nt, Human
cucccacgugggag

SEQ ID NO: 2843585 - RNA, 15 nt, Human
cucccacgugggaga

SEQ ID NO: 2843586 - RNA, 12 nt, Human
cuccccauggag

SEQ ID NO: 2843587 - RNA, 17 nt, Human
cuccccauggagccagc

SEQ ID NO: 2843588 - RNA, 14 nt, Human
cuccccaugugucc

SEQ ID NO: 2843589 - RNA, 21 nt, Human
cuccccauuagagucagccuu

SEQ ID NO: 2843590 - RNA, 21 nt, Human
cuccccauguguccugguucc

SEQ ID NO: 2843591 - RNA, 18 nt, Human
cuccccauguguccuggu

SEQ ID NO: 2843592 - RNA, 20 nt, Human
cuccccauguguccugguuc

SEQ ID NO: 2843593 - RNA, 13 nt, Human
cucccacgggacc

SEQ ID NO: 2843594 - RNA, 22 nt, Human
cucccacgggaccuggggcuuu

SEQ ID NO: 2843595 - RNA, 20 nt, Human
cucccaccucugugaccuca

SEQ ID NO: 2843596 - RNA, 21 nt, Human
cucccaccucugugaccucag

SEQ ID NO: 2843597 - RNA, 23 nt, Human
cucccacccccuucucugcucca

SEQ ID NO: 2843598 - RNA, 13 nt, Human
cucccaccuccag

SEQ ID NO: 2843599 - RNA, 15 nt, Human
cucccaccuccaguc

SEQ ID NO: 2843600 - RNA, 12 nt, Human
cucccaccucug

SEQ ID NO: 2843601 - RNA, 13 nt, Human
cucccaccucugu

SEQ ID NO: 2843602 - RNA, 14 nt, Human
cucccaccucugug

SEQ ID NO: 2843603 - RNA, 15 nt, Human
cucccaccucuguga

SEQ ID NO: 2843604 - RNA, 17 nt, Human
cucccaccucugugacc

SEQ ID NO: 2843605 - RNA, 18 nt, Human
cucccaccucugugaccu

SEQ ID NO: 2843606 - RNA, 19 nt, Human
cucccaccucugugaccuc

SEQ ID NO: 2843607 - RNA, 12 nt, Human
cucccacccagu

SEQ ID NO: 2843608 - RNA, 18 nt, Human
cucccacccagucucugc

SEQ ID NO: 2843609 - RNA, 21 nt, Human
cucccacccagucucugcucc

SEQ ID NO: 2843610 - RNA, 22 nt, Human
cucccacccagucucugcucca

SEQ ID NO: 2843611 - RNA, 18 nt, Human
cucccaccccaugcauua

SEQ ID NO: 2843612 - RNA, 19 nt, Human
cucccacccccaucucucc

SEQ ID NO: 2843613 - RNA, 15 nt, Human
cucccacccccaucu

SEQ ID NO: 2843614 - RNA, 22 nt, Human
cucccacccccuucucugcucc

SEQ ID NO: 2843615 - RNA, 18 nt, Human
cucccacccccuucucug

SEQ ID NO: 2843616 - RNA, 22 nt, Human
cucccacccccaucucucccuc

SEQ ID NO: 2843617 - RNA, 20 nt, Human
cucccacccccaucucuccc

SEQ ID NO: 2843618 - RNA, 16 nt, Human
cuccacuggauggagg

SEQ ID NO: 2843619 - RNA, 9 nt, Human
cuccacugu

SEQ ID NO: 2843620 - RNA, 11 nt, Human
cuccacuguca

SEQ ID NO: 2843621 - RNA, 12 nt, Human
cuccacugucac

SEQ ID NO: 2843622 - RNA, 13 nt, Human
cuccacugucaca

SEQ ID NO: 2843623 - RNA, 16 nt, Human
cuccacugucacauug

SEQ ID NO: 2843624 - RNA, 14 nt, Human
cuccaagcuccauc

SEQ ID NO: 2843625 - RNA, 18 nt, Human
cuccaagcuccaucucca

SEQ ID NO: 2843626 - RNA, 19 nt, Human
cuccaagcuccaucuccac

SEQ ID NO: 2843627 - RNA, 13 nt, Human
cuccaagccagcg

SEQ ID NO: 2843628 - RNA, 18 nt, Human
cuccaagauucuagauga

SEQ ID NO: 2843629 - RNA, 12 nt, Human
cuccaagauucu

SEQ ID NO: 2843630 - RNA, 13 nt, Human
cuccaagauucua

SEQ ID NO: 2843631 - RNA, 14 nt, Human
cuccaagauucuag

SEQ ID NO: 2843632 - RNA, 15 nt, Human
cuccaagauucuaga

SEQ ID NO: 2843633 - RNA, 16 nt, Human
cuccaagauucuagau

SEQ ID NO: 2843634 - RNA, 17 nt, Human
cuccaagauucuagaug

SEQ ID NO: 2843635 - RNA, 14 nt, Human
cuccaagaccuagg

SEQ ID NO: 2843636 - RNA, 16 nt, Human
cuccaagaccuaggcu

SEQ ID NO: 2843637 - RNA, 15 nt, Human
cucauguguuugcau

SEQ ID NO: 2843638 - RNA, 15 nt, Human
cucauguucugcuuu

SEQ ID NO: 2843639 - RNA, 16 nt, Human
cucauguucugcuuuc

SEQ ID NO: 2843640 - RNA, 16 nt, Human
cucaugccucagccuc

SEQ ID NO: 2843641 - RNA, 12 nt, Human
cucaugccucag

SEQ ID NO: 2843642 - RNA, 21 nt, Human
cucaguaagacgacaaggaaa

SEQ ID NO: 2843643 - RNA, 21 nt, Human
cucaguccuccccucacagcc

SEQ ID NO: 2843644 - RNA, 13 nt, Human
cucagucucagga

SEQ ID NO: 2843645 - RNA, 22 nt, Human
cucaguccuccccucacagccu

SEQ ID NO: 2843646 - RNA, 23 nt, Human
cucaguccuccccucacagccuc

SEQ ID NO: 2843647 - RNA, 15 nt, Human
cucagucucaggagc

SEQ ID NO: 2843648 - RNA, 14 nt, Human
cucagucucaggag

SEQ ID NO: 2843649 - RNA, 13 nt, Human
cucagucucccuc

SEQ ID NO: 2843650 - RNA, 20 nt, Human
cucaguaaauguacaacugc

SEQ ID NO: 2843651 - RNA, 19 nt, Human
cucaguaagacgacaagga

SEQ ID NO: 2843652 - RNA, 22 nt, Human
cucagguugucugaagucacug

SEQ ID NO: 2843653 - RNA, 16 nt, Human
cucagucucaggagca

SEQ ID NO: 2843654 - RNA, 17 nt, Human
cucagucucccucccuu

SEQ ID NO: 2843655 - RNA, 16 nt, Human
cucagucucccucccu

SEQ ID NO: 2843656 - RNA, 15 nt, Human
cucagucucccuccc

SEQ ID NO: 2843657 - RNA, 13 nt, Human
cucaucuuacugu

SEQ ID NO: 2843658 - RNA, 20 nt, Human
cgccuguaaucccagcuacu

SEQ ID NO: 2843659 - RNA, 20 nt, Human
cgccuguaaucccagcacuu

SEQ ID NO: 2843660 - RNA, 17 nt, Human
cgccuggguccagggga

SEQ ID NO: 2843661 - RNA, 18 nt, Human
cgcugauacauaacuaaa

SEQ ID NO: 2843662 - RNA, 20 nt, Human
cgcugauacauaacuaaauu

SEQ ID NO: 2843663 - RNA, 16 nt, Human
cgcugauucucagggu

SEQ ID NO: 2843664 - RNA, 23 nt, Human
cgcugauucucagggucucugcu

SEQ ID NO: 2843665 - RNA, 14 nt, Human
cgcugauucucagg

SEQ ID NO: 2843666 - RNA, 16 nt, Human
cggagucccaccuugg

SEQ ID NO: 2843667 - RNA, 22 nt, Human
cggaggcauccuacccuuuucu

SEQ ID NO: 2843668 - RNA, 19 nt, Human
cggaggcaaagcuggcuca

SEQ ID NO: 2843669 - RNA, 16 nt, Human
cggaggcaaagcuggc

SEQ ID NO: 2843670 - RNA, 17 nt, Human
cggaggauaguaugagc

SEQ ID NO: 2843671 - RNA, 18 nt, Human
cggaggauaguaugagcc

SEQ ID NO: 2843672 - RNA, 13 nt, Human
cggagcuggcccc

SEQ ID NO: 2843673 - RNA, 16 nt, Human
cggagcuggccccgcc

SEQ ID NO: 2843674 - RNA, 21 nt, Human
cggagcuggccccgccgccug

SEQ ID NO: 2843675 - RNA, 18 nt, Human
cggaggaaagacaacaca

SEQ ID NO: 2843676 - RNA, 19 nt, Human
cggaggaaagacaacacaa

SEQ ID NO: 2843677 - RNA, 12 nt, Human
cggaggaaaucu

SEQ ID NO: 2843678 - RNA, 17 nt, Human
cggagcugccccucucu

SEQ ID NO: 2843679 - RNA, 19 nt, Human
cggagcugccccucucugg

SEQ ID NO: 2843680 - RNA, 20 nt, Human
cggagcugccccucucuggg

SEQ ID NO: 2843681 - RNA, 22 nt, Human
cggagcugccccucucugggcc

SEQ ID NO: 2843682 - RNA, 23 nt, Human
cggagcugccccucucugggccu

SEQ ID NO: 2843683 - RNA, 17 nt, Human
cgggccacagagaaagu

SEQ ID NO: 2843684 - RNA, 20 nt, Human
cgggcgcgaucccacacagg

SEQ ID NO: 2843685 - RNA, 16 nt, Human
cgggcgcggccagccc

SEQ ID NO: 2843686 - RNA, 14 nt, Human
cgggcugcccugcc

SEQ ID NO: 2843687 - RNA, 14 nt, Human
cggggacagcuccu

SEQ ID NO: 2843688 - RNA, 14 nt, Human
cggggaagccagac

SEQ ID NO: 2843689 - RNA, 14 nt, Human
cggggacagaggcc

SEQ ID NO: 2843690 - RNA, 16 nt, Human
cggggacagaggccug

SEQ ID NO: 2843691 - RNA, 17 nt, Human
cggggacagaggccugc

SEQ ID NO: 2843692 - RNA, 18 nt, Human
cggggacagaggccugcc

SEQ ID NO: 2843693 - RNA, 16 nt, Human
cggugugggcuguguc

SEQ ID NO: 2843694 - RNA, 21 nt, Human
cggggacagaggccugcccgg

SEQ ID NO: 2843695 - RNA, 15 nt, Human
cggggacagcuccuu

SEQ ID NO: 2843696 - RNA, 14 nt, Human
cggcucacugcagc

SEQ ID NO: 2843697 - RNA, 15 nt, Human
cggcucacugcagcc

SEQ ID NO: 2843698 - RNA, 20 nt, Human
cggagucccaccuuggcugc

SEQ ID NO: 2843699 - RNA, 18 nt, Human
cggagucccaccuuggcu

SEQ ID NO: 2843700 - RNA, 17 nt, Human
cggcucacugcagccuc

SEQ ID NO: 2843701 - RNA, 21 nt, Human
cggcucacugcauccuccgcc

SEQ ID NO: 2843702 - RNA, 16 nt, Human
cggcucacugcagccu

SEQ ID NO: 2843703 - RNA, 12 nt, Human
cggcuccaggcu

SEQ ID NO: 2843704 - RNA, 16 nt, Human
cggcuccaggcuccuu

SEQ ID NO: 2843705 - RNA, 15 nt, Human
cggcuccaggcuccu

SEQ ID NO: 2843706 - RNA, 14 nt, Human
cggcuccaggcucc

SEQ ID NO: 2843707 - RNA, 13 nt, Human
cggcuccaggcuc

SEQ ID NO: 2843708 - RNA, 14 nt, Human
cgggccacagagaa

SEQ ID NO: 2843709 - RNA, 12 nt, Human
cgggccacagag

SEQ ID NO: 2843710 - RNA, 19 nt, Human
cggcucagugcaaccucug

SEQ ID NO: 2843711 - RNA, 20 nt, Human
cggcucagugcaaccucugc

SEQ ID NO: 2843712 - RNA, 21 nt, Human
cggcucagugcaaccucugcu

SEQ ID NO: 2843713 - RNA, 17 nt, Human
cgggcaugggcacuccc

SEQ ID NO: 2843714 - RNA, 20 nt, Human
cggcuccccauguguccugg

SEQ ID NO: 2843715 - RNA, 15 nt, Human
cggcuccccaugugu

SEQ ID NO: 2843716 - RNA, 17 nt, Human
cggcuccccaugugucc

SEQ ID NO: 2843717 - RNA, 10 nt, Human
cguguacaua

SEQ ID NO: 2843718 - RNA, 20 nt, Human
cguguacauagugcauuguu

SEQ ID NO: 2843719 - RNA, 18 nt, Human
cguguacuggcuccucug

SEQ ID NO: 2843720 - RNA, 22 nt, Human
cguguagcuauggaaguugcau

SEQ ID NO: 2843721 - RNA, 14 nt, Human
cgugcacacaccag

SEQ ID NO: 2843722 - RNA, 13 nt, Human
cgugcaacugaca

SEQ ID NO: 2843723 - RNA, 16 nt, Human
cgugcaacugacacuc

SEQ ID NO: 2843724 - RNA, 22 nt, Human
cgugaucaaagccacacucugg

SEQ ID NO: 2843725 - RNA, 18 nt, Human
cgugauccacccaccucg

SEQ ID NO: 2843726 - RNA, 13 nt, Human
cgugaucuuggcu

SEQ ID NO: 2843727 - RNA, 21 nt, Human
cgugaucaaagccacacucug

SEQ ID NO: 2843728 - RNA, 15 nt, Human
cgugaggucccagga

SEQ ID NO: 2843729 - RNA, 16 nt, Human
cgugaggucccaggaa

SEQ ID NO: 2843730 - RNA, 16 nt, Human
cgugagucauuuaaau

SEQ ID NO: 2843731 - RNA, 18 nt, Human
cgguuuuuuauuauugug

SEQ ID NO: 2843732 - RNA, 15 nt, Human
cgguuuuuuuccugu

SEQ ID NO: 2843733 - RNA, 15 nt, Human
cgguuugaagccugg

SEQ ID NO: 2843734 - RNA, 20 nt, Human
cgguuugccauguugccaga

SEQ ID NO: 2843735 - RNA, 13 nt, Human
cgguuucuuuuua

SEQ ID NO: 2843736 - RNA, 16 nt, Human
cgguuucuuuuuaagu

SEQ ID NO: 2843737 - RNA, 19 nt, Human
cgguuucuuuuuaaguaau

SEQ ID NO: 2843738 - RNA, 23 nt, Human
cgguguuuaagacauuuuuggaa

SEQ ID NO: 2843739 - RNA, 13 nt, Human
cgguguucuaaga

SEQ ID NO: 2843740 - RNA, 12 nt, Human
cguaaaauggug

SEQ ID NO: 2843741 - RNA, 17 nt, Human
cgaucaggcacagguca

SEQ ID NO: 2843742 - RNA, 18 nt, Human
cgaucaggcacaggucag

SEQ ID NO: 2843743 - RNA, 17 nt, Human
cgcaggauucagccgga

SEQ ID NO: 2843744 - RNA, 15 nt, Human
cgauccaccugucuc

SEQ ID NO: 2843745 - RNA, 19 nt, Human
cgcauggucacacacugau

SEQ ID NO: 2843746 - RNA, 16 nt, Human
cgcauggucacacacu

SEQ ID NO: 2843747 - RNA, 13 nt, Human
cgcaggcuggccc

SEQ ID NO: 2843748 - RNA, 15 nt, Human
cgauauacucuagau

SEQ ID NO: 2843749 - RNA, 16 nt, Human
cgauauuuuuaaagau

SEQ ID NO: 2843750 - RNA, 22 nt, Human
cgauauuuuuaaagaucuguaa

SEQ ID NO: 2843751 - RNA, 13 nt, Human
cgauauacagaug

SEQ ID NO: 2843752 - RNA, 15 nt, Human
cgauauacagaugaa

SEQ ID NO: 2843753 - RNA, 18 nt, Human
cgauauacagaugaaaau

SEQ ID NO: 2843754 - RNA, 12 nt, Human
cgauagagucuc

SEQ ID NO: 2843755 - RNA, 14 nt, Human
cgagucaccuucca

SEQ ID NO: 2843756 - RNA, 15 nt, Human
cgagucaccuuccag

SEQ ID NO: 2843757 - RNA, 16 nt, Human
cgagucaccuuccagg

SEQ ID NO: 2843758 - RNA, 18 nt, Human
cgagucaccuuccaggac

SEQ ID NO: 2843759 - RNA, 16 nt, Human
cgccugagcucacucg

SEQ ID NO: 2843760 - RNA, 18 nt, Human
cgccugcaaacgcugccu

SEQ ID NO: 2843761 - RNA, 12 nt, Human
cgccuggagccc

SEQ ID NO: 2843762 - RNA, 13 nt, Human
cgccuggagcccu

SEQ ID NO: 2843763 - RNA, 14 nt, Human
cgccuggagcccuc

SEQ ID NO: 2843764 - RNA, 15 nt, Human
cgccuggauuucugg

SEQ ID NO: 2843765 - RNA, 16 nt, Human
cgccuggauuucuggu

SEQ ID NO: 2843766 - RNA, 20 nt, Human
cgccuggauuucugguucug

SEQ ID NO: 2843767 - RNA, 23 nt, Human
cgccuggauuucugguucugaug

SEQ ID NO: 2843768 - RNA, 11 nt, Human
cgccuggccuc

SEQ ID NO: 2843769 - RNA, 12 nt, Human
cgccuggccucc

SEQ ID NO: 2843770 - RNA, 13 nt, Human
cgccuggccucca

SEQ ID NO: 2843771 - RNA, 14 nt, Human
cgccuggccuccag

SEQ ID NO: 2843772 - RNA, 15 nt, Human
cgccuggccuccagg

SEQ ID NO: 2843773 - RNA, 16 nt, Human
cgccuggccuccaggc

SEQ ID NO: 2843774 - RNA, 17 nt, Human
cgccuggccuccaggcc

SEQ ID NO: 2843775 - RNA, 20 nt, Human
cgccuggccuccaggcccgu

SEQ ID NO: 2843776 - RNA, 16 nt, Human
cgccugacagaaacca

SEQ ID NO: 2843777 - RNA, 13 nt, Human
cgccucccacugg

SEQ ID NO: 2843778 - RNA, 14 nt, Human
cgccucccacuggg

SEQ ID NO: 2843779 - RNA, 13 nt, Human
cgccucugcauuc

SEQ ID NO: 2843780 - RNA, 23 nt, Human
cgccacugcacuccagccugggc

SEQ ID NO: 2843781 - RNA, 22 nt, Human
cgccacugcacuccagccuggg

SEQ ID NO: 2843782 - RNA, 21 nt, Human
cgccacugcacuccagccugg

SEQ ID NO: 2843783 - RNA, 23 nt, Human
cgccacucgcuucccccauagcc

SEQ ID NO: 2843784 - RNA, 22 nt, Human
cgccacuacacuccagccugag

SEQ ID NO: 2843785 - RNA, 15 nt, Human
cgccacucgcuuccc

SEQ ID NO: 2843786 - RNA, 15 nt, Human
cgccacuccugaacc

SEQ ID NO: 2843787 - RNA, 21 nt, Human
cgccacuacacuccagccuga

SEQ ID NO: 2843788 - RNA, 14 nt, Human
cgccagagggcuug

SEQ ID NO: 2843789 - RNA, 17 nt, Human
cgccagaggugcuucac

SEQ ID NO: 2843790 - RNA, 16 nt, Human
cgccuaugaucccagc

SEQ ID NO: 2843791 - RNA, 13 nt, Human
cgccucaaaaugu

SEQ ID NO: 2843792 - RNA, 21 nt, Human
cgccucacugcaaccuucacc

SEQ ID NO: 2843793 - RNA, 15 nt, Human
cgccucaguaagacg

SEQ ID NO: 2843794 - RNA, 13 nt, Human
ccuuuuuuaagau

SEQ ID NO: 2843795 - RNA, 14 nt, Human
ccuuuuuuaagauu

SEQ ID NO: 2843796 - RNA, 18 nt, Human
ccuuuuuuaagauuuuuc

SEQ ID NO: 2843797 - RNA, 19 nt, Human
ccuuuuuuaagauuuuucu

SEQ ID NO: 2843798 - RNA, 20 nt, Human
ccuuuuuuaagauuuuucuc

SEQ ID NO: 2843799 - RNA, 22 nt, Human
cgaauuaauagcuuuuauugua

SEQ ID NO: 2843800 - RNA, 14 nt, Human
cgaauugagcacaa

SEQ ID NO: 2843801 - RNA, 21 nt, Human
ccuuuuuuaagauuuuucuca

SEQ ID NO: 2843802 - RNA, 13 nt, Human
ccuuuuuauuuau

SEQ ID NO: 2843803 - RNA, 18 nt, Human
cgacacucaccaugaagc

SEQ ID NO: 2843804 - RNA, 17 nt, Human
cgacacucucuggaagc

SEQ ID NO: 2843805 - RNA, 18 nt, Human
cgaccccccgugggcucc

SEQ ID NO: 2843806 - RNA, 16 nt, Human
cgaccccccgugggcu

SEQ ID NO: 2843807 - RNA, 19 nt, Human
cgaccccuaguucccucug

SEQ ID NO: 2843808 - RNA, 14 nt, Human
cgacccucugggaa

SEQ ID NO: 2843809 - RNA, 15 nt, Human
cgacccucugggaac

SEQ ID NO: 2843810 - RNA, 16 nt, Human
cgacccucugggaacc

SEQ ID NO: 2843811 - RNA, 17 nt, Human
cgacccucugggaaccu

SEQ ID NO: 2843812 - RNA, 18 nt, Human
cgacccucugggaaccuc

SEQ ID NO: 2843813 - RNA, 21 nt, Human
cgacccucugggaaccuccca

SEQ ID NO: 2843814 - RNA, 22 nt, Human
cgacccucugggaaccucccag

SEQ ID NO: 2843815 - RNA, 23 nt, Human
cgacccucugggaaccucccaga

SEQ ID NO: 2843816 - RNA, 16 nt, Human
ccuuuuuaugaggcaa

SEQ ID NO: 2843817 - RNA, 16 nt, Human
cgacaggaguauuuuu

SEQ ID NO: 2843818 - RNA, 14 nt, Human
cgacaggcccuggc

SEQ ID NO: 2843819 - RNA, 17 nt, Human
cgacaggcgagagagga

SEQ ID NO: 2843820 - RNA, 21 nt, Human
cgacaggcgagagaggagcca

SEQ ID NO: 2843821 - RNA, 14 nt, Human
cgacagccuggcac

SEQ ID NO: 2843822 - RNA, 14 nt, Human
cgacacuguucucc

SEQ ID NO: 2843823 - RNA, 12 nt, Human
cgacagccuggc

SEQ ID NO: 2843824 - RNA, 13 nt, Human
cgacagccuggca

SEQ ID NO: 2843825 - RNA, 12 nt, Human
cgacgcccaccc

SEQ ID NO: 2843826 - RNA, 15 nt, Human
cgacgcgucuccugu

SEQ ID NO: 2843827 - RNA, 13 nt, Human
cgacgcugcagag

SEQ ID NO: 2843828 - RNA, 19 nt, Human
cgaccccccgugggcuccc

SEQ ID NO: 2843829 - RNA, 14 nt, Human
cgacgcccacccaa

SEQ ID NO: 2843830 - RNA, 14 nt, Human
cgacuaauuucaaa

SEQ ID NO: 2843831 - RNA, 13 nt, Human
cgacuagccagga

SEQ ID NO: 2843832 - RNA, 16 nt, Human
cgacugcacagcggcc

SEQ ID NO: 2843833 - RNA, 20 nt, Human
cgacugcacagcggccccug

SEQ ID NO: 2843834 - RNA, 19 nt, Human
ccuugcccggauucuggga

SEQ ID NO: 2843835 - RNA, 18 nt, Human
ccuugcccggauucuggg

SEQ ID NO: 2843836 - RNA, 16 nt, Human
ccuugcuguccuaggc

SEQ ID NO: 2843837 - RNA, 13 nt, Human
ccuugcuguccug

SEQ ID NO: 2843838 - RNA, 14 nt, Human
ccuugcuguccuga

SEQ ID NO: 2843839 - RNA, 16 nt, Human
ccuugcuguccugauc

SEQ ID NO: 2843840 - RNA, 17 nt, Human
ccuugcuguccugaucu

SEQ ID NO: 2843841 - RNA, 17 nt, Human
ccuugcuggaaaaccca

SEQ ID NO: 2843842 - RNA, 20 nt, Human
ccuugcuguaugcugaucau

SEQ ID NO: 2843843 - RNA, 21 nt, Human
ccuugcuguaugcugaucauc

SEQ ID NO: 2843844 - RNA, 22 nt, Human
ccuugcuggacggggacugggg

SEQ ID NO: 2843845 - RNA, 20 nt, Human
ccuugcuguuggucaugugg

SEQ ID NO: 2843846 - RNA, 18 nt, Human
ccuugcuuaugacaucac

SEQ ID NO: 2843847 - RNA, 20 nt, Human
ccuugcuucuuacugauaau

SEQ ID NO: 2843848 - RNA, 22 nt, Human
ccuugcucuccccugcccugcu

SEQ ID NO: 2843849 - RNA, 20 nt, Human
ccuugcucuccccugcccug

SEQ ID NO: 2843850 - RNA, 16 nt, Human
ccuuuccaaggcuucu

SEQ ID NO: 2843851 - RNA, 15 nt, Human
ccuuuccaaaauuuu

SEQ ID NO: 2843852 - RNA, 20 nt, Human
ccuuucagggaauuucagga

SEQ ID NO: 2843853 - RNA, 12 nt, Human
ccuuucagggaa

SEQ ID NO: 2843854 - RNA, 12 nt, Human
ccuuucagccca

SEQ ID NO: 2843855 - RNA, 15 nt, Human
ccuuucagcccacgu

SEQ ID NO: 2843856 - RNA, 16 nt, Human
ccuuucagcccacguc

SEQ ID NO: 2843857 - RNA, 22 nt, Human
ccuuucagcccacgucacgugu

SEQ ID NO: 2843858 - RNA, 16 nt, Human
ccuuuugaggagcccc

SEQ ID NO: 2843859 - RNA, 21 nt, Human
ccuuuugaggagccccagcua

SEQ ID NO: 2843860 - RNA, 23 nt, Human
ccuuuugaggagccccagcuacc

SEQ ID NO: 2843861 - RNA, 17 nt, Human
ccuuuuuaaaacacaug

SEQ ID NO: 2843862 - RNA, 16 nt, Human
ccuuuacugacccugg

SEQ ID NO: 2843863 - RNA, 17 nt, Human
ccuuuacugacccuggg

SEQ ID NO: 2843864 - RNA, 20 nt, Human
ccuuuacugacccuggggcu

SEQ ID NO: 2843865 - RNA, 13 nt, Human
ccuuuacuuuccc

SEQ ID NO: 2843866 - RNA, 14 nt, Human
ccuuuacuuucccu

SEQ ID NO: 2843867 - RNA, 20 nt, Human
ccuuuacuuucccuugcuuu

SEQ ID NO: 2843868 - RNA, 23 nt, Human
ccuuuacuuucccuugcuuuucc

SEQ ID NO: 2843869 - RNA, 16 nt, Human
ccuuuacaaaagaaau

SEQ ID NO: 2843870 - RNA, 22 nt, Human
ccuuuacaaaagaaauaccuug

SEQ ID NO: 2843871 - RNA, 19 nt, Human
ccuuuaauuaagacugaaa

SEQ ID NO: 2843872 - RNA, 14 nt, Human
ccuuuacggacacc

SEQ ID NO: 2843873 - RNA, 19 nt, Human
ccuuuacggacacccccuc

SEQ ID NO: 2843874 - RNA, 15 nt, Human
ccuuuacguguuuaa

SEQ ID NO: 2843875 - RNA, 19 nt, Human
ccuuuacguguuuaaaaaa

SEQ ID NO: 2843876 - RNA, 18 nt, Human
ccuuuacauggacagaau

SEQ ID NO: 2843877 - RNA, 19 nt, Human
ccuuuacauggacagaauu

SEQ ID NO: 2843878 - RNA, 14 nt, Human
ccuuuaccccaucc

SEQ ID NO: 2843879 - RNA, 15 nt, Human
ccuuuaccccauccc

SEQ ID NO: 2843880 - RNA, 20 nt, Human
ccuuuagaaacucaaaaacu

SEQ ID NO: 2843881 - RNA, 22 nt, Human
ccuuucacaaaauuuuauuccu

SEQ ID NO: 2843882 - RNA, 21 nt, Human
ccuuucacaaaauuuuauucc

SEQ ID NO: 2843883 - RNA, 17 nt, Human
ccuuucaccccagggcc

SEQ ID NO: 2843884 - RNA, 19 nt, Human
ccuuuaaguagauaagcag

SEQ ID NO: 2843885 - RNA, 15 nt, Human
ccuuucacaaccuuc

SEQ ID NO: 2843886 - RNA, 21 nt, Human
ccuuucaccccagggccugag

SEQ ID NO: 2843887 - RNA, 22 nt, Human
ccuuucaccuuuguguauuuuu

SEQ ID NO: 2843888 - RNA, 19 nt, Human
ccuuucaccccagggccug

SEQ ID NO: 2843889 - RNA, 23 nt, Human
cucaaaaaaaaaauuuuuuuccu

SEQ ID NO: 2843890 - RNA, 20 nt, Human
cucaaaacuggacagucacu

SEQ ID NO: 2843891 - RNA, 16 nt, Human
cucaaacaacacuggu

SEQ ID NO: 2843892 - RNA, 17 nt, Human
cucaaacaacacuggug

SEQ ID NO: 2843893 - RNA, 12 nt, Human
cucaaaaugugu

SEQ ID NO: 2843894 - RNA, 14 nt, Human
cucaaaauguguaa

SEQ ID NO: 2843895 - RNA, 18 nt, Human
cucaaaauauuuguacau

SEQ ID NO: 2843896 - RNA, 12 nt, Human
cucaaaagcauu

SEQ ID NO: 2843897 - RNA, 14 nt, Human
cucaaaagcauuua

SEQ ID NO: 2843898 - RNA, 21 nt, Human
cucaaaagcauuuaucauucu

SEQ ID NO: 2843899 - RNA, 22 nt, Human
cucaaaagcauuuaucauucuu

SEQ ID NO: 2843900 - RNA, 13 nt, Human
cucaaaauauuug

SEQ ID NO: 2843901 - RNA, 16 nt, Human
cucaaaacuuaacaua

SEQ ID NO: 2843902 - RNA, 20 nt, Human
cucaaaacuuaacauauuua

SEQ ID NO: 2843903 - RNA, 12 nt, Human
cucaaaagaacu

SEQ ID NO: 2843904 - RNA, 19 nt, Human
cucaaaagaacuuaccccc

SEQ ID NO: 2843905 - RNA, 20 nt, Human
cucaaaagagaaaaacaaaa

SEQ ID NO: 2843906 - RNA, 12 nt, Human
cucaaacacugc

SEQ ID NO: 2843907 - RNA, 13 nt, Human
cucaaacacugca

SEQ ID NO: 2843908 - RNA, 14 nt, Human
cucaaacacugcag

SEQ ID NO: 2843909 - RNA, 16 nt, Human
cucaaacacugcaggc

SEQ ID NO: 2843910 - RNA, 19 nt, Human
cuauuaaagugcuaagguu

SEQ ID NO: 2843911 - RNA, 23 nt, Human
cuauuaaagugcuaagguucuaa

SEQ ID NO: 2843912 - RNA, 22 nt, Human
cuauuaaaguggagaagcacac

SEQ ID NO: 2843913 - RNA, 23 nt, Human
cuauuaaaguggagaagcacacu

SEQ ID NO: 2843914 - RNA, 22 nt, Human
cuauuaaauaguuauauaauuc

SEQ ID NO: 2843915 - RNA, 21 nt, Human
cuauuaauauauguauuauuu

SEQ ID NO: 2843916 - RNA, 15 nt, Human
cuauuuuuguaaacu

SEQ ID NO: 2843917 - RNA, 21 nt, Human
cuauuuuuguaaacuggaauu

SEQ ID NO: 2843918 - RNA, 17 nt, Human
cuauuaauauauguauu

SEQ ID NO: 2843919 - RNA, 12 nt, Human
cuauuuuuguac

SEQ ID NO: 2843920 - RNA, 22 nt, Human
cuauuuuugucuuauauauauu

SEQ ID NO: 2843921 - RNA, 15 nt, Human
cuauuuuuguuuuua

SEQ ID NO: 2843922 - RNA, 12 nt, Human
cuauuaauauau

SEQ ID NO: 2843923 - RNA, 14 nt, Human
cuauuaauauaugu

SEQ ID NO: 2843924 - RNA, 15 nt, Human
cuauuaauauaugua

SEQ ID NO: 2843925 - RNA, 11 nt, Human
cuauuaauaua

SEQ ID NO: 2843926 - RNA, 19 nt, Human
cuauuaaggauguagcuuu

SEQ ID NO: 2843927 - RNA, 22 nt, Human
cuauuaaggauguagcuuuuca

SEQ ID NO: 2843928 - RNA, 23 nt, Human
cuauuaagaggcagaaaauugca

SEQ ID NO: 2843929 - RNA, 22 nt, Human
cuauuaaagugcuaagguucua

SEQ ID NO: 2843930 - RNA, 20 nt, Human
cuauuaaagugcuaagguuc

SEQ ID NO: 2843931 - RNA, 21 nt, Human
cuauuaaagugcuaagguucu

SEQ ID NO: 2843932 - RNA, 20 nt, Human
cucaaacucuugaccucagg

SEQ ID NO: 2843933 - RNA, 14 nt, Human
cucaaacuccugac

SEQ ID NO: 2843934 - RNA, 13 nt, Human
cucaaacuccuga

SEQ ID NO: 2843935 - RNA, 18 nt, Human
cucaaacacugcaggcau

SEQ ID NO: 2843936 - RNA, 20 nt, Human
cucaaacuaaaagacauuug

SEQ ID NO: 2843937 - RNA, 22 nt, Human
cucaaacuaaaagacauuuguu

SEQ ID NO: 2843938 - RNA, 12 nt, Human
cucaaacuauga

SEQ ID NO: 2843939 - RNA, 13 nt, Human
cucaauaaagauu

SEQ ID NO: 2843940 - RNA, 16 nt, Human
cucaauaaaugauucu

SEQ ID NO: 2843941 - RNA, 14 nt, Human
cucaauaaaguaca

SEQ ID NO: 2843942 - RNA, 21 nt, Human
cucaauaggaccaggauccag

SEQ ID NO: 2843943 - RNA, 15 nt, Human
cucaauaugcuuaca

SEQ ID NO: 2843944 - RNA, 15 nt, Human
cucaaugcacugaca

SEQ ID NO: 2843945 - RNA, 13 nt, Human
cucaaugcacuga

SEQ ID NO: 2843946 - RNA, 13 nt, Human
cucaauggacugg

SEQ ID NO: 2843947 - RNA, 16 nt, Human
cucaauuuuugucuca

SEQ ID NO: 2843948 - RNA, 17 nt, Human
cucaauuuuugucucag

SEQ ID NO: 2843949 - RNA, 18 nt, Human
cucaauuuuugucucaga

SEQ ID NO: 2843950 - RNA, 20 nt, Human
cucaauuuuugucucagaag

SEQ ID NO: 2843951 - RNA, 11 nt, Human
cucacaaaaga

SEQ ID NO: 2843952 - RNA, 22 nt, Human
cucacaaaccaugcaaaugcua

SEQ ID NO: 2843953 - RNA, 13 nt, Human
cuaucuaaugaca

SEQ ID NO: 2843954 - RNA, 15 nt, Human
cuaucuaaugacaug

SEQ ID NO: 2843955 - RNA, 13 nt, Human
cuaucuaaaguuu

SEQ ID NO: 2843956 - RNA, 14 nt, Human
cuaucuaaaguuug

SEQ ID NO: 2843957 - RNA, 15 nt, Human
cuaucuaucuuccaa

SEQ ID NO: 2843958 - RNA, 19 nt, Human
cuaucauugcuuccuccuc

SEQ ID NO: 2843959 - RNA, 20 nt, Human
cuaucauugcuuccuccucc

SEQ ID NO: 2843960 - RNA, 12 nt, Human
cuaucauuuauu

SEQ ID NO: 2843961 - RNA, 23 nt, Human
cuaucauuuauuggauggguggg

SEQ ID NO: 2843962 - RNA, 14 nt, Human
cuauccaaacaugu

SEQ ID NO: 2843963 - RNA, 18 nt, Human
cuauccaaacauguauuu

SEQ ID NO: 2843964 - RNA, 19 nt, Human
cuauccaaacauguauuua

SEQ ID NO: 2843965 - RNA, 20 nt, Human
cuauccaaacauguauuuau

SEQ ID NO: 2843966 - RNA, 18 nt, Human
cuaucaugucaaacguga

SEQ ID NO: 2843967 - RNA, 18 nt, Human
cuaucauugcuuccuccu

SEQ ID NO: 2843968 - RNA, 18 nt, Human
cuaguuugggaggagcag

SEQ ID NO: 2843969 - RNA, 13 nt, Human
cuaguuugcauuc

SEQ ID NO: 2843970 - RNA, 14 nt, Human
cuaguuuacagaaa

SEQ ID NO: 2843971 - RNA, 21 nt, Human
cuaguuuacagaaaaaucuug

SEQ ID NO: 2843972 - RNA, 16 nt, Human
cuaguuuacuguuuug

SEQ ID NO: 2843973 - RNA, 17 nt, Human
cuaguuuacuguuuuga

SEQ ID NO: 2843974 - RNA, 15 nt, Human
cuaguuuccucuccu

SEQ ID NO: 2843975 - RNA, 18 nt, Human
cuaguuuccucuccuucg

SEQ ID NO: 2843976 - RNA, 22 nt, Human
cuaguuugaccucacagugacc

SEQ ID NO: 2843977 - RNA, 20 nt, Human
cuaguuuuaguuuucucuua

SEQ ID NO: 2843978 - RNA, 17 nt, Human
cuaguuuucuccuccca

SEQ ID NO: 2843979 - RNA, 16 nt, Human
cuaguuuucuccuccc

SEQ ID NO: 2843980 - RNA, 19 nt, Human
cuaguuuucuccucccagg

SEQ ID NO: 2843981 - RNA, 18 nt, Human
cuaguuuucuccucccag

SEQ ID NO: 2843982 - RNA, 13 nt, Human
cuagacacagaua

SEQ ID NO: 2843983 - RNA, 16 nt, Human
cuagcaucucaugagu

SEQ ID NO: 2843984 - RNA, 22 nt, Human
cuaauuucaaaaugcuuuuuau

SEQ ID NO: 2843985 - RNA, 15 nt, Human
cuaauuucccuucuu

SEQ ID NO: 2843986 - RNA, 16 nt, Human
cuaauuucccuucuug

SEQ ID NO: 2843987 - RNA, 19 nt, Human
cuaauuucaaaaugcuuuu

SEQ ID NO: 2843988 - RNA, 18 nt, Human
cuaauuucaaaaugcuuu

SEQ ID NO: 2843989 - RNA, 21 nt, Human
cuaauuuauccugaaauuuca

SEQ ID NO: 2843990 - RNA, 23 nt, Human
cuaauuuauccugaaauuucaga

SEQ ID NO: 2843991 - RNA, 17 nt, Human
cuaauuucaaaaugcuu

SEQ ID NO: 2843992 - RNA, 19 nt, Human
cuaauuucaaaaauauaac

SEQ ID NO: 2843993 - RNA, 21 nt, Human
cuaauuucaaaaauauaacuu

SEQ ID NO: 2843994 - RNA, 11 nt, Human
cuacagugcca

SEQ ID NO: 2843995 - RNA, 12 nt, Human
cuacagugccaa

SEQ ID NO: 2843996 - RNA, 18 nt, Human
cuacagugccaacuccuc

SEQ ID NO: 2843997 - RNA, 19 nt, Human
cuacagugccaacuccuca

SEQ ID NO: 2843998 - RNA, 20 nt, Human
cuacagugccaacuccucac

SEQ ID NO: 2843999 - RNA, 23 nt, Human
cuacauacuuucauccugacucu

SEQ ID NO: 2844000 - RNA, 10 nt, Human
cuacaugaaa

SEQ ID NO: 2844001 - RNA, 16 nt, Human
cuacaucuucugccuu

SEQ ID NO: 2844002 - RNA, 14 nt, Human
cuacaucuucugcc

SEQ ID NO: 2844003 - RNA, 15 nt, Human
cuacaucuucugccu

SEQ ID NO: 2844004 - RNA, 14 nt, Human
cuaccugcccugga

SEQ ID NO: 2844005 - RNA, 17 nt, Human
cuaccugcccuggaaca

SEQ ID NO: 2844006 - RNA, 18 nt, Human
cuaccugcccuggaacau

SEQ ID NO: 2844007 - RNA, 20 nt, Human
cuaccugauuggugcaaccc

SEQ ID NO: 2844008 - RNA, 19 nt, Human
cuaccugcucuccaagucu

SEQ ID NO: 2844009 - RNA, 12 nt, Human
cuaccugcucuc

SEQ ID NO: 2844010 - RNA, 23 nt, Human
cuacaugcagcccaugcccaccu

SEQ ID NO: 2844011 - RNA, 21 nt, Human
cuacaugcagcccaugcccac

SEQ ID NO: 2844012 - RNA, 17 nt, Human
cuacaugcagcccaugc

SEQ ID NO: 2844013 - RNA, 15 nt, Human
cuacaugcagcccau

SEQ ID NO: 2844014 - RNA, 14 nt, Human
cuacaugcagccca

SEQ ID NO: 2844015 - RNA, 18 nt, Human
cuacaucuuuuuucacaa

SEQ ID NO: 2844016 - RNA, 22 nt, Human
cuacaugcaaggcacuguacua

SEQ ID NO: 2844017 - RNA, 13 nt, Human
cuacaugaaacag

SEQ ID NO: 2844018 - RNA, 14 nt, Human
cuacgcucuccuuu

SEQ ID NO: 2844019 - RNA, 14 nt, Human
cuacgccugcaugu

SEQ ID NO: 2844020 - RNA, 15 nt, Human
cuacgccaaucaagg

SEQ ID NO: 2844021 - RNA, 13 nt, Human
cuacgaaucuucc

SEQ ID NO: 2844022 - RNA, 12 nt, Human
cuaccugugccu

SEQ ID NO: 2844023 - RNA, 13 nt, Human
cuaccugugccug

SEQ ID NO: 2844024 - RNA, 15 nt, Human
cuaccugcucuccaa

SEQ ID NO: 2844025 - RNA, 22 nt, Human
cuaccuuaucacugcauuauuc

SEQ ID NO: 2844026 - RNA, 15 nt, Human
cuaccugugugguac

SEQ ID NO: 2844027 - RNA, 18 nt, Human
cuaccugugugguacucu

SEQ ID NO: 2844028 - RNA, 21 nt, Human
cuacgcucuccuuucuuucua

SEQ ID NO: 2844029 - RNA, 14 nt, Human
cuacggaccaggua

SEQ ID NO: 2844030 - RNA, 17 nt, Human
cuacguuaccaggcagg

SEQ ID NO: 2844031 - RNA, 21 nt, Human
cuacucagaagccugaggcug

SEQ ID NO: 2844032 - RNA, 19 nt, Human
cuacucagaagccugaggc

SEQ ID NO: 2844033 - RNA, 17 nt, Human
cuacucagaagccugag

SEQ ID NO: 2844034 - RNA, 16 nt, Human
cuacucagaagccuga

SEQ ID NO: 2844035 - RNA, 13 nt, Human
cuacucagaagcc

SEQ ID NO: 2844036 - RNA, 18 nt, Human
cguguguagaguuaagaa

SEQ ID NO: 2844037 - RNA, 12 nt, Human
cguguguagagu

SEQ ID NO: 2844038 - RNA, 15 nt, Human
cguguguagaguuaa

SEQ ID NO: 2844039 - RNA, 22 nt, Human
cguguguagaguuaagaagcug

SEQ ID NO: 2844040 - RNA, 16 nt, Human
cguguguguugucuga

SEQ ID NO: 2844041 - RNA, 15 nt, Human
cguguguucuaucca

SEQ ID NO: 2844042 - RNA, 11 nt, Human
cgugugugugu

SEQ ID NO: 2844043 - RNA, 23 nt, Human
cuaagugauccucccaccucagc

SEQ ID NO: 2844044 - RNA, 14 nt, Human
cuaaguucacauua

SEQ ID NO: 2844045 - RNA, 18 nt, Human
cuaaguucacauuagaau

SEQ ID NO: 2844046 - RNA, 17 nt, Human
cuaaguuauaagacucu

SEQ ID NO: 2844047 - RNA, 21 nt, Human
cuaaguuauaagacucucaca

SEQ ID NO: 2844048 - RNA, 14 nt, Human
cuaauugcuguuga

SEQ ID NO: 2844049 - RNA, 12 nt, Human
cuaauugacuuu

SEQ ID NO: 2844050 - RNA, 13 nt, Human
cuaauugacuuua

SEQ ID NO: 2844051 - RNA, 17 nt, Human
cuaauugacuuuagaaa

SEQ ID NO: 2844052 - RNA, 20 nt, Human
cuaauugacuuuagaaagcu

SEQ ID NO: 2844053 - RNA, 16 nt, Human
cuaauugcaucucaaa

SEQ ID NO: 2844054 - RNA, 19 nt, Human
cuaauugcaucucaaaauu

SEQ ID NO: 2844055 - RNA, 20 nt, Human
cuaauugcaucucaaaauua

SEQ ID NO: 2844056 - RNA, 16 nt, Human
cuaauucuauuaaagu

SEQ ID NO: 2844057 - RNA, 20 nt, Human
cuaauucuauuaaagugcua

SEQ ID NO: 2844058 - RNA, 18 nt, Human
cuaauucuuacacugccu

SEQ ID NO: 2844059 - RNA, 16 nt, Human
cuaauucuucuguccu

SEQ ID NO: 2844060 - RNA, 18 nt, Human
cuaauucuucuguccuga

SEQ ID NO: 2844061 - RNA, 20 nt, Human
cuagaacacuaacucaccag

SEQ ID NO: 2844062 - RNA, 19 nt, Human
cuagaacacuaacucacca

SEQ ID NO: 2844063 - RNA, 16 nt, Human
cuagaacacuaacuca

SEQ ID NO: 2844064 - RNA, 22 nt, Human
cuagaacacuaacucaccagcc

SEQ ID NO: 2844065 - RNA, 23 nt, Human
cuagaagggccaguccugccugg

SEQ ID NO: 2844066 - RNA, 20 nt, Human
cuagaagggccaguccugcc

SEQ ID NO: 2844067 - RNA, 13 nt, Human
cuagcaucccuga

SEQ ID NO: 2844068 - RNA, 15 nt, Human
cuagacaagauauug

SEQ ID NO: 2844069 - RNA, 18 nt, Human
cuagacaagauauuguac

SEQ ID NO: 2844070 - RNA, 20 nt, Human
cuagacaagauauuguacau

SEQ ID NO: 2844071 - RNA, 23 nt, Human
cuagacaagauauuguacauaaa

SEQ ID NO: 2844072 - RNA, 17 nt, Human
ccugucuuuaaggaaaa

SEQ ID NO: 2844073 - RNA, 13 nt, Human
ccugucuuuccua

SEQ ID NO: 2844074 - RNA, 19 nt, Human
ccugucuuuccuaagaccu

SEQ ID NO: 2844075 - RNA, 20 nt, Human
ccugucuuuccuaagaccug

SEQ ID NO: 2844076 - RNA, 21 nt, Human
ccugucuuuccuaagaccugg

SEQ ID NO: 2844077 - RNA, 14 nt, Human
ccugucuuuaagga

SEQ ID NO: 2844078 - RNA, 17 nt, Human
ccugucugacuacuuug

SEQ ID NO: 2844079 - RNA, 20 nt, Human
ccugucugagacucacagga

SEQ ID NO: 2844080 - RNA, 23 nt, Human
ccugucugagacucacaggaagg

SEQ ID NO: 2844081 - RNA, 13 nt, Human
ccugucugugacc

SEQ ID NO: 2844082 - RNA, 22 nt, Human
ccugucugugaccugcaucuaa

SEQ ID NO: 2844083 - RNA, 11 nt, Human
ccugucuguga

SEQ ID NO: 2844084 - RNA, 16 nt, Human
ccugucucagccuccc

SEQ ID NO: 2844085 - RNA, 15 nt, Human
ccugucucagccucc

SEQ ID NO: 2844086 - RNA, 14 nt, Human
ccugucucagccuc

SEQ ID NO: 2844087 - RNA, 13 nt, Human
ccugucucagccu

SEQ ID NO: 2844088 - RNA, 17 nt, Human
ccugucucauccccagg

SEQ ID NO: 2844089 - RNA, 13 nt, Human
ccugucucugccc

SEQ ID NO: 2844090 - RNA, 16 nt, Human
ccugucgggcuuugug

SEQ ID NO: 2844091 - RNA, 22 nt, Human
ccugucgggcuuugugugaagg

SEQ ID NO: 2844092 - RNA, 16 nt, Human
ccugucuagucucucc

SEQ ID NO: 2844093 - RNA, 18 nt, Human
ccugucuagucucuccug

SEQ ID NO: 2844094 - RNA, 21 nt, Human
ccugucuagucucuccuguaa

SEQ ID NO: 2844095 - RNA, 22 nt, Human
ccugucuagucucuccuguaag

SEQ ID NO: 2844096 - RNA, 23 nt, Human
ccugucuagucucuccuguaagc

SEQ ID NO: 2844097 - RNA, 14 nt, Human
ccugugacaaaauu

SEQ ID NO: 2844098 - RNA, 18 nt, Human
ccugugaaguaaggaugu

SEQ ID NO: 2844099 - RNA, 17 nt, Human
ccugugaacugaacucu

SEQ ID NO: 2844100 - RNA, 16 nt, Human
ccugugaacugaacuc

SEQ ID NO: 2844101 - RNA, 16 nt, Human
ccugugacugucucac

SEQ ID NO: 2844102 - RNA, 19 nt, Human
ccuguaaucccagcacacu

SEQ ID NO: 2844103 - RNA, 17 nt, Human
ccuguccugccuaaggc

SEQ ID NO: 2844104 - RNA, 18 nt, Human
ccuguccugccaugcaag

SEQ ID NO: 2844105 - RNA, 21 nt, Human
ccugucgaguucggcucuggg

SEQ ID NO: 2844106 - RNA, 23 nt, Human
ccugucgaguucggcucugggug

SEQ ID NO: 2844107 - RNA, 19 nt, Human
ccuguccugccuaaggcug

SEQ ID NO: 2844108 - RNA, 15 nt, Human
ccugguucugaugau

SEQ ID NO: 2844109 - RNA, 21 nt, Human
ccugguucugaugaugugccu

SEQ ID NO: 2844110 - RNA, 14 nt, Human
ccugguugaagaag

SEQ ID NO: 2844111 - RNA, 15 nt, Human
ccugguuggguggca

SEQ ID NO: 2844112 - RNA, 18 nt, Human
ccugguuucacuggccca

SEQ ID NO: 2844113 - RNA, 21 nt, Human
ccugguuucauaacuuccugu

SEQ ID NO: 2844114 - RNA, 17 nt, Human
ccugguuucacuggccc

SEQ ID NO: 2844115 - RNA, 14 nt, Human
ccugguuuccugcc

SEQ ID NO: 2844116 - RNA, 13 nt, Human
ccugguuuccugc

SEQ ID NO: 2844117 - RNA, 16 nt, Human
ccuguaagaaacagag

SEQ ID NO: 2844118 - RNA, 15 nt, Human
ccuguaagccaaaga

SEQ ID NO: 2844119 - RNA, 16 nt, Human
ccuguaagccaaagaa

SEQ ID NO: 2844120 - RNA, 17 nt, Human
ccuguaagccaaagaaa

SEQ ID NO: 2844121 - RNA, 18 nt, Human
ccuguaagccaaagaaau

SEQ ID NO: 2844122 - RNA, 23 nt, Human
ccuguaagccaaagaaaugaaca

SEQ ID NO: 2844123 - RNA, 14 nt, Human
ccuguaagccugca

SEQ ID NO: 2844124 - RNA, 16 nt, Human
ccuguaagccugcaag

SEQ ID NO: 2844125 - RNA, 19 nt, Human
ccuguaagccugcaagccu

SEQ ID NO: 2844126 - RNA, 15 nt, Human
ccugguuuccugccc

SEQ ID NO: 2844127 - RNA, 13 nt, Human
ccuggggccugag

SEQ ID NO: 2844128 - RNA, 14 nt, Human
ccuggggccugaga

SEQ ID NO: 2844129 - RNA, 15 nt, Human
ccuggggccugagag

SEQ ID NO: 2844130 - RNA, 16 nt, Human
ccuggggccugagaga

SEQ ID NO: 2844131 - RNA, 17 nt, Human
ccuggggccugagagaa

SEQ ID NO: 2844132 - RNA, 12 nt, Human
ccuggggccugg

SEQ ID NO: 2844133 - RNA, 16 nt, Human
ccuggggccuggaccu

SEQ ID NO: 2844134 - RNA, 17 nt, Human
ccuggggccuggaccug

SEQ ID NO: 2844135 - RNA, 18 nt, Human
ccuggggccuggaccugc

SEQ ID NO: 2844136 - RNA, 19 nt, Human
ccuggggccuggaccugcc

SEQ ID NO: 2844137 - RNA, 21 nt, Human
ccuggggccuggaccugccuc

SEQ ID NO: 2844138 - RNA, 13 nt, Human
ccuggggccuggc

SEQ ID NO: 2844139 - RNA, 14 nt, Human
ccuggggccuggca

SEQ ID NO: 2844140 - RNA, 15 nt, Human
ccuggggccuggcag

SEQ ID NO: 2844141 - RNA, 16 nt, Human
ccuggggccuggcagg

SEQ ID NO: 2844142 - RNA, 14 nt, Human
ccuggggcuggcuu

SEQ ID NO: 2844143 - RNA, 15 nt, Human
ccuggggcuggcuuu

SEQ ID NO: 2844144 - RNA, 12 nt, Human
ccuggggcuggg

SEQ ID NO: 2844145 - RNA, 13 nt, Human
ccuggggcugggc

SEQ ID NO: 2844146 - RNA, 14 nt, Human
ccuggggcugggcc

SEQ ID NO: 2844147 - RNA, 15 nt, Human
ccuggggcugggccc

SEQ ID NO: 2844148 - RNA, 17 nt, Human
ccuggggcugggccccc

SEQ ID NO: 2844149 - RNA, 21 nt, Human
ccugguggcagugggagcugc

SEQ ID NO: 2844150 - RNA, 18 nt, Human
ccugggggaguuuuccuc

SEQ ID NO: 2844151 - RNA, 19 nt, Human
ccugggggaguuuuccucu

SEQ ID NO: 2844152 - RNA, 20 nt, Human
ccugggggaguuuuccucua

SEQ ID NO: 2844153 - RNA, 12 nt, Human
ccuggggccagg

SEQ ID NO: 2844154 - RNA, 13 nt, Human
ccuggggccaggc

SEQ ID NO: 2844155 - RNA, 14 nt, Human
ccuggggccaggcc

SEQ ID NO: 2844156 - RNA, 15 nt, Human
ccuggggccaggccg

SEQ ID NO: 2844157 - RNA, 16 nt, Human
ccuggggccaggccgg

SEQ ID NO: 2844158 - RNA, 13 nt, Human
ccuggccucugug

SEQ ID NO: 2844159 - RNA, 14 nt, Human
ccugggccccagcu

SEQ ID NO: 2844160 - RNA, 20 nt, Human
ccugggccccaguuguauuu

SEQ ID NO: 2844161 - RNA, 21 nt, Human
ccuggccgcguuuagaccaag

SEQ ID NO: 2844162 - RNA, 21 nt, Human
ccuggccgcccccugcccccc

SEQ ID NO: 2844163 - RNA, 22 nt, Human
ccuggccgcccccugcccccca

SEQ ID NO: 2844164 - RNA, 12 nt, Human
ccuggccggcca

SEQ ID NO: 2844165 - RNA, 13 nt, Human
ccuggccggccag

SEQ ID NO: 2844166 - RNA, 14 nt, Human
ccuggccggccagc

SEQ ID NO: 2844167 - RNA, 15 nt, Human
ccuggccggccagcc

SEQ ID NO: 2844168 - RNA, 16 nt, Human
ccuggccggccagcca

SEQ ID NO: 2844169 - RNA, 18 nt, Human
ccuggccggccagccagc

SEQ ID NO: 2844170 - RNA, 22 nt, Human
ccuggccggccagccagccacu

SEQ ID NO: 2844171 - RNA, 23 nt, Human
ccuggccggccagccagccacuc

SEQ ID NO: 2844172 - RNA, 20 nt, Human
ccugaccaacaguuccuuca

SEQ ID NO: 2844173 - RNA, 18 nt, Human
ccugagucacccaugaag

SEQ ID NO: 2844174 - RNA, 15 nt, Human
ccugagucacccaug

SEQ ID NO: 2844175 - RNA, 21 nt, Human
ccugaguagcugggauuacag

SEQ ID NO: 2844176 - RNA, 17 nt, Human
ccugcacuugcagacuc

SEQ ID NO: 2844177 - RNA, 16 nt, Human
ccugcacuugcagacu

SEQ ID NO: 2844178 - RNA, 23 nt, Human
ccugaguccaagaggguccuuua

SEQ ID NO: 2844179 - RNA, 23 nt, Human
ccugagucacccuaccugugccu

SEQ ID NO: 2844180 - RNA, 16 nt, Human
ccugagucagggccca

SEQ ID NO: 2844181 - RNA, 17 nt, Human
ccugagucagggcccag

SEQ ID NO: 2844182 - RNA, 18 nt, Human
ccugagucagggcccaga

SEQ ID NO: 2844183 - RNA, 20 nt, Human
ccugagucagggcccagagg

SEQ ID NO: 2844184 - RNA, 21 nt, Human
ccugagucagggcccagaggc

SEQ ID NO: 2844185 - RNA, 23 nt, Human
ccugagucagggcccagaggcug

SEQ ID NO: 2844186 - RNA, 18 nt, Human
ccugcacuugcagacucu

SEQ ID NO: 2844187 - RNA, 20 nt, Human
ccugcagaugccacccuagc

SEQ ID NO: 2844188 - RNA, 15 nt, Human
ccugcagaugccacc

SEQ ID NO: 2844189 - RNA, 14 nt, Human
ccugcagaugccac

SEQ ID NO: 2844190 - RNA, 13 nt, Human
ccugcagaugcca

SEQ ID NO: 2844191 - RNA, 16 nt, Human
ccugcagaguuuggau

SEQ ID NO: 2844192 - RNA, 19 nt, Human
ccugcagaggggaaaccag

SEQ ID NO: 2844193 - RNA, 21 nt, Human
ccugcagaugccacccuagcc

SEQ ID NO: 2844194 - RNA, 22 nt, Human
ccugcagccuccuccaccucac

SEQ ID NO: 2844195 - RNA, 22 nt, Human
ccugcagccccgcgccuccuuc

SEQ ID NO: 2844196 - RNA, 15 nt, Human
ccugcagcacggaca

SEQ ID NO: 2844197 - RNA, 16 nt, Human
ccugcagcacggacaa

SEQ ID NO: 2844198 - RNA, 21 nt, Human
ccugcagcacggacaauaaac

SEQ ID NO: 2844199 - RNA, 23 nt, Human
ccugcagcacggacaauaaaccu

SEQ ID NO: 2844200 - RNA, 16 nt, Human
ccugcagcaugguccc

SEQ ID NO: 2844201 - RNA, 17 nt, Human
ccugcagcauggucccu

SEQ ID NO: 2844202 - RNA, 18 nt, Human
ccugcagcauggucccug

SEQ ID NO: 2844203 - RNA, 19 nt, Human
ccugcagcauggucccugc

SEQ ID NO: 2844204 - RNA, 22 nt, Human
ccugcagcauggucccugccuu

SEQ ID NO: 2844205 - RNA, 23 nt, Human
ccugcagcauggucccugccuua

SEQ ID NO: 2844206 - RNA, 13 nt, Human
ccugcagccagcu

SEQ ID NO: 2844207 - RNA, 23 nt, Human
ccugccucgaacuggcugcaaag

SEQ ID NO: 2844208 - RNA, 21 nt, Human
ccugccucgaacuggcugcaa

SEQ ID NO: 2844209 - RNA, 19 nt, Human
ccugccucgaacuggcugc

SEQ ID NO: 2844210 - RNA, 12 nt, Human
ccugccuccugc

SEQ ID NO: 2844211 - RNA, 22 nt, Human
ccugcugccuucugacggcccu

SEQ ID NO: 2844212 - RNA, 22 nt, Human
ccugcugccgccucccagccug

SEQ ID NO: 2844213 - RNA, 17 nt, Human
ccugccucucacacaca

SEQ ID NO: 2844214 - RNA, 23 nt, Human
ccugcugccgccucccagccugg

SEQ ID NO: 2844215 - RNA, 12 nt, Human
ccugcccaccug

SEQ ID NO: 2844216 - RNA, 13 nt, Human
ccugcccaccugc

SEQ ID NO: 2844217 - RNA, 14 nt, Human
ccugcccaccugcc

SEQ ID NO: 2844218 - RNA, 15 nt, Human
ccugcccaccugccu

SEQ ID NO: 2844219 - RNA, 16 nt, Human
ccugcccaccugccug

SEQ ID NO: 2844220 - RNA, 17 nt, Human
ccugcccaccugccugg

SEQ ID NO: 2844221 - RNA, 18 nt, Human
ccugcccaccugccuggc

SEQ ID NO: 2844222 - RNA, 19 nt, Human
ccugcccaccugccuggcc

SEQ ID NO: 2844223 - RNA, 13 nt, Human
ccugcccaggccc

SEQ ID NO: 2844224 - RNA, 20 nt, Human
ccugccccaaucccuuuauu

SEQ ID NO: 2844225 - RNA, 17 nt, Human
ccugcccacugcugcag

SEQ ID NO: 2844226 - RNA, 17 nt, Human
ccugccccagggcuccc

SEQ ID NO: 2844227 - RNA, 15 nt, Human
ccucauggccccucu

SEQ ID NO: 2844228 - RNA, 16 nt, Human
ccucauggccccucug

SEQ ID NO: 2844229 - RNA, 19 nt, Human
ccucagcugccucacuucc

SEQ ID NO: 2844230 - RNA, 20 nt, Human
ccucagcugccucacuuccu

SEQ ID NO: 2844231 - RNA, 13 nt, Human
ccucaggacugca

SEQ ID NO: 2844232 - RNA, 18 nt, Human
ccucaggacugcaacagg

SEQ ID NO: 2844233 - RNA, 12 nt, Human
ccucaggaaaga

SEQ ID NO: 2844234 - RNA, 13 nt, Human
ccucaggaaagaa

SEQ ID NO: 2844235 - RNA, 16 nt, Human
ccucaggaaagaauag

SEQ ID NO: 2844236 - RNA, 18 nt, Human
ccucaggaaagaauagaa

SEQ ID NO: 2844237 - RNA, 19 nt, Human
ccucaggaaagaauagaaa

SEQ ID NO: 2844238 - RNA, 21 nt, Human
ccucaggaaagaauagaaaga

SEQ ID NO: 2844239 - RNA, 16 nt, Human
ccucaaaggcccgcuc

SEQ ID NO: 2844240 - RNA, 13 nt, Human
ccucaaacacugc

SEQ ID NO: 2844241 - RNA, 15 nt, Human
ccucaaacacugcag

SEQ ID NO: 2844242 - RNA, 14 nt, Human
ccuauuuuuguaaa

SEQ ID NO: 2844243 - RNA, 13 nt, Human
ccuauuuuuguag

SEQ ID NO: 2844244 - RNA, 17 nt, Human
ccucaaacacugcaggc

SEQ ID NO: 2844245 - RNA, 18 nt, Human
ccucaaacacugcaggca

SEQ ID NO: 2844246 - RNA, 21 nt, Human
ccucaaacacugcaggcauca

SEQ ID NO: 2844247 - RNA, 23 nt, Human
ccucauuuuugaauacaggcaua

SEQ ID NO: 2844248 - RNA, 19 nt, Human
ccucaugguggguucaggg

SEQ ID NO: 2844249 - RNA, 21 nt, Human
ccucauguacauacccuggcc

SEQ ID NO: 2844250 - RNA, 18 nt, Human
ccucauggccccucugac

SEQ ID NO: 2844251 - RNA, 22 nt, Human
ccucauggccccucugaccugc

SEQ ID NO: 2844252 - RNA, 23 nt, Human
ccuccaacacaaggcuccaagac

SEQ ID NO: 2844253 - RNA, 16 nt, Human
ccuccaaaggcccccu

SEQ ID NO: 2844254 - RNA, 17 nt, Human
ccuccaaaggcccccua

SEQ ID NO: 2844255 - RNA, 17 nt, Human
ccucccaccucagccuc

SEQ ID NO: 2844256 - RNA, 15 nt, Human
ccucccaccucagcc

SEQ ID NO: 2844257 - RNA, 12 nt, Human
ccucccaccccc

SEQ ID NO: 2844258 - RNA, 13 nt, Human
ccucccaccccca

SEQ ID NO: 2844259 - RNA, 13 nt, Human
ccucccacccccu

SEQ ID NO: 2844260 - RNA, 17 nt, Human
ccucccacccccaucuc

SEQ ID NO: 2844261 - RNA, 21 nt, Human
ccucccacccccuucucugcu

SEQ ID NO: 2844262 - RNA, 20 nt, Human
ccucccacccccuucucugc

SEQ ID NO: 2844263 - RNA, 14 nt, Human
ccucccauccccug

SEQ ID NO: 2844264 - RNA, 17 nt, Human
ccucccauccccuggac

SEQ ID NO: 2844265 - RNA, 14 nt, Human
ccggccccugcugg

SEQ ID NO: 2844266 - RNA, 17 nt, Human
ccggcgagcccugugga

SEQ ID NO: 2844267 - RNA, 20 nt, Human
ccggcgccuggccuccaggc

SEQ ID NO: 2844268 - RNA, 15 nt, Human
ccggcgagcccugug

SEQ ID NO: 2844269 - RNA, 16 nt, Human
cccugucuugcuguca

SEQ ID NO: 2844270 - RNA, 13 nt, Human
cccugucuugucc

SEQ ID NO: 2844271 - RNA, 19 nt, Human
cccugucuuuacuccucac

SEQ ID NO: 2844272 - RNA, 20 nt, Human
cccugucuuuacuccucaca

SEQ ID NO: 2844273 - RNA, 14 nt, Human
cccugucuuuccua

SEQ ID NO: 2844274 - RNA, 23 nt, Human
cccugucuuuccuaagaccuggg

SEQ ID NO: 2844275 - RNA, 14 nt, Human
cccugugacaaaau

SEQ ID NO: 2844276 - RNA, 13 nt, Human
cccuucgcuccug

SEQ ID NO: 2844277 - RNA, 16 nt, Human
cccuucucugcuccac

SEQ ID NO: 2844278 - RNA, 15 nt, Human
cccuucucugcucca

SEQ ID NO: 2844279 - RNA, 14 nt, Human
cccuucucugcucc

SEQ ID NO: 2844280 - RNA, 13 nt, Human
cccuucucugcuc

SEQ ID NO: 2844281 - RNA, 14 nt, Human
ccgcagcccuggca

SEQ ID NO: 2844282 - RNA, 14 nt, Human
ccgcagccucccuc

SEQ ID NO: 2844283 - RNA, 23 nt, Human
cccuucucugcuccaccacaucc

SEQ ID NO: 2844284 - RNA, 20 nt, Human
cccuucucugcuccaccaca

SEQ ID NO: 2844285 - RNA, 17 nt, Human
cccuucucugcuccacc

SEQ ID NO: 2844286 - RNA, 15 nt, Human
cccuucgcuccugug

SEQ ID NO: 2844287 - RNA, 14 nt, Human
cccuucgcuccugu

SEQ ID NO: 2844288 - RNA, 21 nt, Human
cccuucucucccugccagagg

SEQ ID NO: 2844289 - RNA, 22 nt, Human
ccgcaggcagacuacacaggau

SEQ ID NO: 2844290 - RNA, 13 nt, Human
ccggccccugcug

SEQ ID NO: 2844291 - RNA, 14 nt, Human
ccggcccccugccc

SEQ ID NO: 2844292 - RNA, 13 nt, Human
ccggcccccuggu

SEQ ID NO: 2844293 - RNA, 15 nt, Human
ccggcccccuggucu

SEQ ID NO: 2844294 - RNA, 19 nt, Human
ccggcccccuggucucugg

SEQ ID NO: 2844295 - RNA, 20 nt, Human
ccggcccccuggucucuggu

SEQ ID NO: 2844296 - RNA, 18 nt, Human
ccauugaucauaaacuga

SEQ ID NO: 2844297 - RNA, 18 nt, Human
ccauuuacgugucugaau

SEQ ID NO: 2844298 - RNA, 16 nt, Human
ccauuuauauaugaaa

SEQ ID NO: 2844299 - RNA, 18 nt, Human
ccauuuauauaugaaaac

SEQ ID NO: 2844300 - RNA, 21 nt, Human
ccauuucgugagccccaucuu

SEQ ID NO: 2844301 - RNA, 22 nt, Human
ccauuucgugagccccaucuuc

SEQ ID NO: 2844302 - RNA, 13 nt, Human
ccauuuccugaga

SEQ ID NO: 2844303 - RNA, 21 nt, Human
ccauuucuaccaaggcauauc

SEQ ID NO: 2844304 - RNA, 19 nt, Human
ccauucuuuuuuucuuggc

SEQ ID NO: 2844305 - RNA, 15 nt, Human
ccaugggccuccugu

SEQ ID NO: 2844306 - RNA, 14 nt, Human
ccaugggccuccug

SEQ ID NO: 2844307 - RNA, 20 nt, Human
ccauaauuuuuuuuuuccuu

SEQ ID NO: 2844308 - RNA, 16 nt, Human
ccauaaccgcugauuc

SEQ ID NO: 2844309 - RNA, 17 nt, Human
ccauaaccgcugauucu

SEQ ID NO: 2844310 - RNA, 22 nt, Human
ccauaaccgcugauucucaggg

SEQ ID NO: 2844311 - RNA, 19 nt, Human
ccauacacccccucuucug

SEQ ID NO: 2844312 - RNA, 14 nt, Human
ccauacacccccuc

SEQ ID NO: 2844313 - RNA, 16 nt, Human
ccaucccacacccugg

SEQ ID NO: 2844314 - RNA, 16 nt, Human
ccaucccaaccagugc

SEQ ID NO: 2844315 - RNA, 17 nt, Human
ccaucccaaccagugcc

SEQ ID NO: 2844316 - RNA, 18 nt, Human
ccaucccaaccagugcca

SEQ ID NO: 2844317 - RNA, 20 nt, Human
ccaucccaaccagugccaag

SEQ ID NO: 2844318 - RNA, 21 nt, Human
ccaucccaaccagugccaagg

SEQ ID NO: 2844319 - RNA, 22 nt, Human
ccaucccaaccagugccaagga

SEQ ID NO: 2844320 - RNA, 23 nt, Human
ccaucccaaccagugccaaggac

SEQ ID NO: 2844321 - RNA, 14 nt, Human
ccaucccacacccu

SEQ ID NO: 2844322 - RNA, 12 nt, Human
ccaucccacacc

SEQ ID NO: 2844323 - RNA, 17 nt, Human
ccauaaauccaguucua

SEQ ID NO: 2844324 - RNA, 15 nt, Human
ccauaaccacugaag

SEQ ID NO: 2844325 - RNA, 13 nt, Human
ccaugggccuccu

SEQ ID NO: 2844326 - RNA, 19 nt, Human
ccaugagccucagcauccu

SEQ ID NO: 2844327 - RNA, 18 nt, Human
ccaugagccucagcaucc

SEQ ID NO: 2844328 - RNA, 14 nt, Human
ccaugagccucagc

SEQ ID NO: 2844329 - RNA, 13 nt, Human
ccaugagccucag

SEQ ID NO: 2844330 - RNA, 20 nt, Human
ccauccgguuugccauguug

SEQ ID NO: 2844331 - RNA, 23 nt, Human
ccauccgguuugccauguugcca

SEQ ID NO: 2844332 - RNA, 15 nt, Human
ccauccuaaaagcca

SEQ ID NO: 2844333 - RNA, 15 nt, Human
ccaucccugccuggu

SEQ ID NO: 2844334 - RNA, 16 nt, Human
ccaucccugccugguc

SEQ ID NO: 2844335 - RNA, 15 nt, Human
ccauccccuggacug

SEQ ID NO: 2844336 - RNA, 12 nt, Human
ccaucccugccu

SEQ ID NO: 2844337 - RNA, 13 nt, Human
ccaucccugccug

SEQ ID NO: 2844338 - RNA, 14 nt, Human
ccaucccugccugg

SEQ ID NO: 2844339 - RNA, 12 nt, Human
ccaucccuguga

SEQ ID NO: 2844340 - RNA, 13 nt, Human
ccaucccugugag

SEQ ID NO: 2844341 - RNA, 17 nt, Human
ccaucccugccugguca

SEQ ID NO: 2844342 - RNA, 13 nt, Human
ccauccccuggac

SEQ ID NO: 2844343 - RNA, 16 nt, Human
ccagucaagaagaaaa

SEQ ID NO: 2844344 - RNA, 13 nt, Human
ccagucacaugac

SEQ ID NO: 2844345 - RNA, 14 nt, Human
ccagucacaugacc

SEQ ID NO: 2844346 - RNA, 21 nt, Human
ccagucacaugaccugaucac

SEQ ID NO: 2844347 - RNA, 20 nt, Human
ccagggggacuagccccugu

SEQ ID NO: 2844348 - RNA, 23 nt, Human
ccagggggacuagccccugugga

SEQ ID NO: 2844349 - RNA, 18 nt, Human
ccagggggaaggccaagg

SEQ ID NO: 2844350 - RNA, 19 nt, Human
ccagggggaaggccaaggg

SEQ ID NO: 2844351 - RNA, 17 nt, Human
ccagggggacuagcccc

SEQ ID NO: 2844352 - RNA, 18 nt, Human
ccagggggacuagccccu

SEQ ID NO: 2844353 - RNA, 19 nt, Human
ccagggggacuagccccug

SEQ ID NO: 2844354 - RNA, 18 nt, Human
ccagggggaugccacucc

SEQ ID NO: 2844355 - RNA, 14 nt, Human
ccagucccccugcc

SEQ ID NO: 2844356 - RNA, 14 nt, Human
ccagucccccuauc

SEQ ID NO: 2844357 - RNA, 15 nt, Human
ccagucccccuaucc

SEQ ID NO: 2844358 - RNA, 18 nt, Human
ccagucccccuauccuug

SEQ ID NO: 2844359 - RNA, 15 nt, Human
ccaguccccagcccu

SEQ ID NO: 2844360 - RNA, 13 nt, Human
ccaggauuucuaa

SEQ ID NO: 2844361 - RNA, 17 nt, Human
ccaggauuugcacagaa

SEQ ID NO: 2844362 - RNA, 18 nt, Human
ccaggauuugcugggaga

SEQ ID NO: 2844363 - RNA, 17 nt, Human
ccaggcaacuugggaac

SEQ ID NO: 2844364 - RNA, 21 nt, Human
ccaggcaacuucaguccuggg

SEQ ID NO: 2844365 - RNA, 20 nt, Human
ccaggaguucgaggcugcag

SEQ ID NO: 2844366 - RNA, 22 nt, Human
ccaggauguacaaggacagccc

SEQ ID NO: 2844367 - RNA, 18 nt, Human
ccaggaggucgaccccaa

SEQ ID NO: 2844368 - RNA, 22 nt, Human
ccaggaggugggagugaggagc

SEQ ID NO: 2844369 - RNA, 21 nt, Human
ccaggagguuuuuuugucaac

SEQ ID NO: 2844370 - RNA, 17 nt, Human
ccaggagggcauccaua

SEQ ID NO: 2844371 - RNA, 18 nt, Human
ccaggagggcauccauac

SEQ ID NO: 2844372 - RNA, 20 nt, Human
ccaggagggcauccauacca

SEQ ID NO: 2844373 - RNA, 17 nt, Human
ccaggaggggaacacug

SEQ ID NO: 2844374 - RNA, 20 nt, Human
ccaggaggggaacacugccc

SEQ ID NO: 2844375 - RNA, 21 nt, Human
ccaggaggggaacacugcccu

SEQ ID NO: 2844376 - RNA, 22 nt, Human
ccaggaggggaacacugcccuc

SEQ ID NO: 2844377 - RNA, 14 nt, Human
ccagcucagaaccc

SEQ ID NO: 2844378 - RNA, 15 nt, Human
ccagcucagaaccca

SEQ ID NO: 2844379 - RNA, 16 nt, Human
ccagcucagaacccag

SEQ ID NO: 2844380 - RNA, 17 nt, Human
ccagcucagaacccagg

SEQ ID NO: 2844381 - RNA, 18 nt, Human
ccagcucagaacccaggg

SEQ ID NO: 2844382 - RNA, 19 nt, Human
ccagcucagaacccagggc

SEQ ID NO: 2844383 - RNA, 20 nt, Human
ccagcucagaacccagggcu

SEQ ID NO: 2844384 - RNA, 21 nt, Human
ccagcucagaacccagggcuc

SEQ ID NO: 2844385 - RNA, 15 nt, Human
ccagcucagucccau

SEQ ID NO: 2844386 - RNA, 11 nt, Human
ccagcucaggg

SEQ ID NO: 2844387 - RNA, 14 nt, Human
ccagcucaggggca

SEQ ID NO: 2844388 - RNA, 15 nt, Human
ccagcucaggggcag

SEQ ID NO: 2844389 - RNA, 18 nt, Human
ccagcucaggggcagcuc

SEQ ID NO: 2844390 - RNA, 19 nt, Human
ccagcucaggggcagcuca

SEQ ID NO: 2844391 - RNA, 14 nt, Human
ccagcuaaauaauc

SEQ ID NO: 2844392 - RNA, 18 nt, Human
ccagcuugaaaccuucac

SEQ ID NO: 2844393 - RNA, 22 nt, Human
ccagcucagucccaucagagag

SEQ ID NO: 2844394 - RNA, 12 nt, Human
ccagcucauuca

SEQ ID NO: 2844395 - RNA, 13 nt, Human
ccaggaacaagcu

SEQ ID NO: 2844396 - RNA, 21 nt, Human
ccacucugcucgccuuagcac

SEQ ID NO: 2844397 - RNA, 17 nt, Human
ccacucuccccacacua

SEQ ID NO: 2844398 - RNA, 13 nt, Human
ccacucucuuccc

SEQ ID NO: 2844399 - RNA, 14 nt, Human
ccacucucuucccu

SEQ ID NO: 2844400 - RNA, 15 nt, Human
ccacucucuucccuu

SEQ ID NO: 2844401 - RNA, 23 nt, Human
ccacucucuucccuuuccccagc

SEQ ID NO: 2844402 - RNA, 15 nt, Human
ccacucugauagaau

SEQ ID NO: 2844403 - RNA, 17 nt, Human
ccacucucuaccagaua

SEQ ID NO: 2844404 - RNA, 16 nt, Human
ccccugcaaagcccag

SEQ ID NO: 2844405 - RNA, 13 nt, Human
ccccugcagcacg

SEQ ID NO: 2844406 - RNA, 14 nt, Human
ccccugcagcacgg

SEQ ID NO: 2844407 - RNA, 16 nt, Human
ccccugcagcacggac

SEQ ID NO: 2844408 - RNA, 20 nt, Human
ccccugcagcacggacaaua

SEQ ID NO: 2844409 - RNA, 22 nt, Human
ccccugcagcacggacaauaaa

SEQ ID NO: 2844410 - RNA, 13 nt, Human
ccccugagcccca

SEQ ID NO: 2844411 - RNA, 11 nt, Human
ccccugcagcu

SEQ ID NO: 2844412 - RNA, 18 nt, Human
ccccugaccucacuguga

SEQ ID NO: 2844413 - RNA, 17 nt, Human
ccccugagauccccuga

SEQ ID NO: 2844414 - RNA, 19 nt, Human
ccccugagauccccugagc

SEQ ID NO: 2844415 - RNA, 20 nt, Human
ccccugagauccccugagcc

SEQ ID NO: 2844416 - RNA, 14 nt, Human
ccccugacucauca

SEQ ID NO: 2844417 - RNA, 15 nt, Human
ccccugcaaagccca

SEQ ID NO: 2844418 - RNA, 17 nt, Human
ccccuucgcuccugugu

SEQ ID NO: 2844419 - RNA, 15 nt, Human
ccccuucgcuccugu

SEQ ID NO: 2844420 - RNA, 14 nt, Human
ccccuucgcuccug

SEQ ID NO: 2844421 - RNA, 19 nt, Human
ccccuucgcuccugugucu

SEQ ID NO: 2844422 - RNA, 21 nt, Human
ccccuucuacauuucuuagac

SEQ ID NO: 2844423 - RNA, 16 nt, Human
ccccuucucucccugc

SEQ ID NO: 2844424 - RNA, 21 nt, Human
ccccuucucucccugccagag

SEQ ID NO: 2844425 - RNA, 13 nt, Human
ccccuuccuuuua

SEQ ID NO: 2844426 - RNA, 22 nt, Human
ccccuucuagguggcaaggcug

SEQ ID NO: 2844427 - RNA, 14 nt, Human
ccccauucugccug

SEQ ID NO: 2844428 - RNA, 13 nt, Human
ccccauucugccu

SEQ ID NO: 2844429 - RNA, 15 nt, Human
ccccauucugccugc

SEQ ID NO: 2844430 - RNA, 15 nt, Human
ccccaugaggaagga

SEQ ID NO: 2844431 - RNA, 19 nt, Human
ccccaucuucgggaccagg

SEQ ID NO: 2844432 - RNA, 18 nt, Human
ccccaucuucgggaccag

SEQ ID NO: 2844433 - RNA, 16 nt, Human
ccccaucuucgggacc

SEQ ID NO: 2844434 - RNA, 13 nt, Human
ccccaucugugca

SEQ ID NO: 2844435 - RNA, 21 nt, Human
ccccaucugugcauucuccug

SEQ ID NO: 2844436 - RNA, 16 nt, Human
ccccaucuucacccag

SEQ ID NO: 2844437 - RNA, 17 nt, Human
ccccaucuucacccagg

SEQ ID NO: 2844438 - RNA, 22 nt, Human
ccccaugccaaagcuagggugg

SEQ ID NO: 2844439 - RNA, 16 nt, Human
ccccaugccacguucc

SEQ ID NO: 2844440 - RNA, 13 nt, Human
ccccaugccaaag

SEQ ID NO: 2844441 - RNA, 22 nt, Human
ccccauucgcgcucugcucagu

SEQ ID NO: 2844442 - RNA, 13 nt, Human
ccccauucucauc

SEQ ID NO: 2844443 - RNA, 16 nt, Human
ccccauucucaucugc

SEQ ID NO: 2844444 - RNA, 18 nt, Human
ccccaugaggaaggaaca

SEQ ID NO: 2844445 - RNA, 13 nt, Human
ccccaugcagucu

SEQ ID NO: 2844446 - RNA, 20 nt, Human
cccuaugaaguaaagaacug

SEQ ID NO: 2844447 - RNA, 22 nt, Human
cccuaugaaguaaagaacugca

SEQ ID NO: 2844448 - RNA, 17 nt, Human
cccuaucuccugacaga

SEQ ID NO: 2844449 - RNA, 16 nt, Human
cccuaucuccugacag

SEQ ID NO: 2844450 - RNA, 15 nt, Human
cccuaucuccugaca

SEQ ID NO: 2844451 - RNA, 14 nt, Human
cccuaucuccugac

SEQ ID NO: 2844452 - RNA, 13 nt, Human
cccuaucuccuga

SEQ ID NO: 2844453 - RNA, 14 nt, Human
cccuauccuuggca

SEQ ID NO: 2844454 - RNA, 16 nt, Human
cccuauccuuggcacc

SEQ ID NO: 2844455 - RNA, 19 nt, Human
cccuauccuuggcaccaaa

SEQ ID NO: 2844456 - RNA, 22 nt, Human
cccuaucuccugacagaaggug

SEQ ID NO: 2844457 - RNA, 20 nt, Human
cccuaucuccugacagaagg

SEQ ID NO: 2844458 - RNA, 12 nt, Human
cccucacagccu

SEQ ID NO: 2844459 - RNA, 17 nt, Human
cccucacacauccagac

SEQ ID NO: 2844460 - RNA, 17 nt, Human
cccucacucugccaggg

SEQ ID NO: 2844461 - RNA, 18 nt, Human
cccucacucugccagggc

SEQ ID NO: 2844462 - RNA, 20 nt, Human
cccucacucugccagggcag

SEQ ID NO: 2844463 - RNA, 21 nt, Human
cccucacucugccagggcagu

SEQ ID NO: 2844464 - RNA, 14 nt, Human
cccucacucuggcc

SEQ ID NO: 2844465 - RNA, 16 nt, Human
cccucacucuggccuc

SEQ ID NO: 2844466 - RNA, 12 nt, Human
cccggcugcgga

SEQ ID NO: 2844467 - RNA, 13 nt, Human
cccggcugcccuu

SEQ ID NO: 2844468 - RNA, 12 nt, Human
cccggcugcccu

SEQ ID NO: 2844469 - RNA, 22 nt, Human
cccuauccuacuuccccuuccu

SEQ ID NO: 2844470 - RNA, 20 nt, Human
cccggcuuccuuucccaagc

SEQ ID NO: 2844471 - RNA, 20 nt, Human
ccccuugccaccccacccuc

SEQ ID NO: 2844472 - RNA, 14 nt, Human
ccccuugccacccc

SEQ ID NO: 2844473 - RNA, 21 nt, Human
ccccuugauuuaaacacacag

SEQ ID NO: 2844474 - RNA, 15 nt, Human
cccucagagugcaag

SEQ ID NO: 2844475 - RNA, 14 nt, Human
cccucagauguccc

SEQ ID NO: 2844476 - RNA, 16 nt, Human
cccucagaugucccuu

SEQ ID NO: 2844477 - RNA, 13 nt, Human
cccucagagccac

SEQ ID NO: 2844478 - RNA, 9 nt, Human
cccucagaa

SEQ ID NO: 2844479 - RNA, 18 nt, Human
cccucagaacccuuggcu

SEQ ID NO: 2844480 - RNA, 17 nt, Human
cccucagaacccuuggc

SEQ ID NO: 2844481 - RNA, 23 nt, Human
cccucagaacccuuggcuugccc

SEQ ID NO: 2844482 - RNA, 22 nt, Human
cccucagaacccuuggcuugcc

SEQ ID NO: 2844483 - RNA, 21 nt, Human
cccucagaacccuuggcuugc

SEQ ID NO: 2844484 - RNA, 21 nt, Human
cccaggcuggcgugcaguggu

SEQ ID NO: 2844485 - RNA, 23 nt, Human
cccaggaauuugggacccugcuu

SEQ ID NO: 2844486 - RNA, 19 nt, Human
cccaggacaccacacccag

SEQ ID NO: 2844487 - RNA, 21 nt, Human
cccagggcuacccucccccag

SEQ ID NO: 2844488 - RNA, 13 nt, Human
cccaggcugggca

SEQ ID NO: 2844489 - RNA, 19 nt, Human
cccaggcugggcaaggagg

SEQ ID NO: 2844490 - RNA, 15 nt, Human
cccagggcuacccuc

SEQ ID NO: 2844491 - RNA, 16 nt, Human
cccaggcuggucucaa

SEQ ID NO: 2844492 - RNA, 16 nt, Human
cccaggcuggucuuga

SEQ ID NO: 2844493 - RNA, 23 nt, Human
cccaggcuggucuugaaguccug

SEQ ID NO: 2844494 - RNA, 21 nt, Human
cccaggcugugcagcgcagcu

SEQ ID NO: 2844495 - RNA, 22 nt, Human
cccaggcugugcagcgcagcug

SEQ ID NO: 2844496 - RNA, 23 nt, Human
cccaggcugugcagcgcagcugg

SEQ ID NO: 2844497 - RNA, 12 nt, Human
cccaggcugggc

SEQ ID NO: 2844498 - RNA, 23 nt, Human
cccagcugugcucuggacaggca

SEQ ID NO: 2844499 - RNA, 21 nt, Human
cccagcugugcucuggacagg

SEQ ID NO: 2844500 - RNA, 21 nt, Human
cccaggaagcccaggagggca

SEQ ID NO: 2844501 - RNA, 15 nt, Human
cccaggaacugggcc

SEQ ID NO: 2844502 - RNA, 19 nt, Human
cccagcugugagccuuggc

SEQ ID NO: 2844503 - RNA, 14 nt, Human
cccagcccacuucu

SEQ ID NO: 2844504 - RNA, 18 nt, Human
cccagcugugagccuugg

SEQ ID NO: 2844505 - RNA, 13 nt, Human
cccagcccaaagg

SEQ ID NO: 2844506 - RNA, 19 nt, Human
cccagcccaaaggggacag

SEQ ID NO: 2844507 - RNA, 22 nt, Human
cccagccauuaccauggagaca

SEQ ID NO: 2844508 - RNA, 20 nt, Human
cccagccauuaccauggaga

SEQ ID NO: 2844509 - RNA, 19 nt, Human
cccagccauuaccauggag

SEQ ID NO: 2844510 - RNA, 12 nt, Human
cccagcccaauc

SEQ ID NO: 2844511 - RNA, 19 nt, Human
cccagcccaauccagguac

SEQ ID NO: 2844512 - RNA, 12 nt, Human
cccagcacuuug

SEQ ID NO: 2844513 - RNA, 18 nt, Human
cccagcacuuguguuguc

SEQ ID NO: 2844514 - RNA, 18 nt, Human
cccagccauuaccaugga

SEQ ID NO: 2844515 - RNA, 13 nt, Human
ccauuucuccaga

SEQ ID NO: 2844516 - RNA, 14 nt, Human
ccauuucuccagaa

SEQ ID NO: 2844517 - RNA, 13 nt, Human
ccauuucuccguu

SEQ ID NO: 2844518 - RNA, 19 nt, Human
ccauuuccucagcuuaucu

SEQ ID NO: 2844519 - RNA, 16 nt, Human
cccagggcucugcccc

SEQ ID NO: 2844520 - RNA, 17 nt, Human
cccagggcucugcccca

SEQ ID NO: 2844521 - RNA, 18 nt, Human
cccagggcucugccccag

SEQ ID NO: 2844522 - RNA, 19 nt, Human
cccagggcucugccccagu

SEQ ID NO: 2844523 - RNA, 17 nt, Human
cccagggcugucaucug

SEQ ID NO: 2844524 - RNA, 13 nt, Human
cccaguuguauuu

SEQ ID NO: 2844525 - RNA, 21 nt, Human
cccaguuuuuugaacauggaa

SEQ ID NO: 2844526 - RNA, 18 nt, Human
cccauaaaaauuuuuccu

SEQ ID NO: 2844527 - RNA, 14 nt, Human
cccauaacucaaug

SEQ ID NO: 2844528 - RNA, 22 nt, Human
cccauaauuuuuuuuuuccuuu

SEQ ID NO: 2844529 - RNA, 23 nt, Human
cccauaauuuuuuuuuuccuuuu

SEQ ID NO: 2844530 - RNA, 13 nt, Human
cccauacucagcc

SEQ ID NO: 2844531 - RNA, 14 nt, Human
cccauacucagccu

SEQ ID NO: 2844532 - RNA, 15 nt, Human
cccauacucagccug

SEQ ID NO: 2844533 - RNA, 22 nt, Human
cccauucugccugcccaggccc

SEQ ID NO: 2844534 - RNA, 21 nt, Human
cccauucugccugcccaggcc

SEQ ID NO: 2844535 - RNA, 20 nt, Human
cccauucugccugcccaggc

SEQ ID NO: 2844536 - RNA, 14 nt, Human
ccccaucugggucc

SEQ ID NO: 2844537 - RNA, 19 nt, Human
ccccaucuggguccuugca

SEQ ID NO: 2844538 - RNA, 20 nt, Human
ccccagcaagugagagcugg

SEQ ID NO: 2844539 - RNA, 19 nt, Human
ccccagcaagugagagcug

SEQ ID NO: 2844540 - RNA, 17 nt, Human
ccccagcaagugagagc

SEQ ID NO: 2844541 - RNA, 23 nt, Human
ccccagauugcaacaggcugggc

SEQ ID NO: 2844542 - RNA, 22 nt, Human
ccccagauugcaacaggcuggg

SEQ ID NO: 2844543 - RNA, 21 nt, Human
ccccagauugcaacaggcugg

SEQ ID NO: 2844544 - RNA, 19 nt, Human
cccauuucgugagccccau

SEQ ID NO: 2844545 - RNA, 20 nt, Human
cccauuucgugagccccauc

SEQ ID NO: 2844546 - RNA, 21 nt, Human
cccauuucgugagccccaucu

SEQ ID NO: 2844547 - RNA, 17 nt, Human
ccaacugggcccaagac

SEQ ID NO: 2844548 - RNA, 18 nt, Human
ccaacuguguucauuaga

SEQ ID NO: 2844549 - RNA, 13 nt, Human
ccaacuguguugu

SEQ ID NO: 2844550 - RNA, 20 nt, Human
ccaacuguguuguauuaaca

SEQ ID NO: 2844551 - RNA, 13 nt, Human
ccaacuguauaua

SEQ ID NO: 2844552 - RNA, 13 nt, Human
ccaacugugagca

SEQ ID NO: 2844553 - RNA, 14 nt, Human
ccaacuguggcugg

SEQ ID NO: 2844554 - RNA, 16 nt, Human
ccaacuguggcugguc

SEQ ID NO: 2844555 - RNA, 10 nt, Human
ccaacugugu

SEQ ID NO: 2844556 - RNA, 15 nt, Human
ccaacuguguagcau

SEQ ID NO: 2844557 - RNA, 11 nt, Human
ccaacuguguu

SEQ ID NO: 2844558 - RNA, 16 nt, Human
ccaacugggcccaaga

SEQ ID NO: 2844559 - RNA, 14 nt, Human
ccaacucugagccc

SEQ ID NO: 2844560 - RNA, 15 nt, Human
ccaacucugagccca

SEQ ID NO: 2844561 - RNA, 16 nt, Human
ccaacucugagcccau

SEQ ID NO: 2844562 - RNA, 22 nt, Human
ccaacucugagcccauguucug

SEQ ID NO: 2844563 - RNA, 13 nt, Human
ccaagcucugcuc

SEQ ID NO: 2844564 - RNA, 17 nt, Human
ccaagcucugcuccucu

SEQ ID NO: 2844565 - RNA, 12 nt, Human
ccaagcucugcu

SEQ ID NO: 2844566 - RNA, 11 nt, Human
ccaagcucccu

SEQ ID NO: 2844567 - RNA, 13 nt, Human
ccaagcucccugc

SEQ ID NO: 2844568 - RNA, 15 nt, Human
ccaagcucccugccc

SEQ ID NO: 2844569 - RNA, 17 nt, Human
ccaagcucccugcccca

SEQ ID NO: 2844570 - RNA, 19 nt, Human
ccaagcucccugccccaaa

SEQ ID NO: 2844571 - RNA, 21 nt, Human
ccaagcucccugccccaaaua

SEQ ID NO: 2844572 - RNA, 22 nt, Human
ccaagcucccugccccaaauaa

SEQ ID NO: 2844573 - RNA, 13 nt, Human
ccaagcuccuccu

SEQ ID NO: 2844574 - RNA, 20 nt, Human
ccaagcuccuccucggaacc

SEQ ID NO: 2844575 - RNA, 22 nt, Human
ccaagcuccuccucggaaccgc

SEQ ID NO: 2844576 - RNA, 18 nt, Human
ccaagcucugcuccucuc

SEQ ID NO: 2844577 - RNA, 19 nt, Human
ccaaugcacauccauuccc

SEQ ID NO: 2844578 - RNA, 13 nt, Human
ccaauccagguac

SEQ ID NO: 2844579 - RNA, 21 nt, Human
ccaaugagacucuagggucca

SEQ ID NO: 2844580 - RNA, 23 nt, Human
ccaaugagacucuaggguccagu

SEQ ID NO: 2844581 - RNA, 16 nt, Human
ccaaugagacuugccu

SEQ ID NO: 2844582 - RNA, 17 nt, Human
ccaaugagacuugccuu

SEQ ID NO: 2844583 - RNA, 18 nt, Human
ccaaugagacuugccuuc

SEQ ID NO: 2844584 - RNA, 21 nt, Human
ccaaugagacuugccuuccua

SEQ ID NO: 2844585 - RNA, 12 nt, Human
ccaauauuucug

SEQ ID NO: 2844586 - RNA, 18 nt, Human
ccaauauuucugcuuucu

SEQ ID NO: 2844587 - RNA, 19 nt, Human
ccaauauuucugcuuucuu

SEQ ID NO: 2844588 - RNA, 13 nt, Human
ccaagcuggcugg

SEQ ID NO: 2844589 - RNA, 14 nt, Human
ccaagcuggcuggg

SEQ ID NO: 2844590 - RNA, 17 nt, Human
ccaagcuggcuggggug

SEQ ID NO: 2844591 - RNA, 23 nt, Human
ccaagcuggcugggguggccugu

SEQ ID NO: 2844592 - RNA, 15 nt, Human
ccaaucagagaccag

SEQ ID NO: 2844593 - RNA, 21 nt, Human
ccaaucagagaccaggcccug

SEQ ID NO: 2844594 - RNA, 22 nt, Human
ccaaucagagaccaggcccugg

SEQ ID NO: 2844595 - RNA, 13 nt, Human
ccaaucagcacug

SEQ ID NO: 2844596 - RNA, 14 nt, Human
ccaaucagcacuga

SEQ ID NO: 2844597 - RNA, 15 nt, Human
ccaaucagcacugaa

SEQ ID NO: 2844598 - RNA, 16 nt, Human
ccaaucagcacugaaa

SEQ ID NO: 2844599 - RNA, 17 nt, Human
ccaaucagcacugaaaa

SEQ ID NO: 2844600 - RNA, 18 nt, Human
ccaaucagcacugaaaau

SEQ ID NO: 2844601 - RNA, 16 nt, Human
ccaaugguguuuuucu

SEQ ID NO: 2844602 - RNA, 15 nt, Human
ccaauguaggagcug

SEQ ID NO: 2844603 - RNA, 17 nt, Human
ccaauguaggagcugcc

SEQ ID NO: 2844604 - RNA, 20 nt, Human
ccaauguaggagcugccuug

SEQ ID NO: 2844605 - RNA, 21 nt, Human
ccaauguauugauaagagggc

SEQ ID NO: 2844606 - RNA, 15 nt, Human
cauuugugucaaugg

SEQ ID NO: 2844607 - RNA, 18 nt, Human
cauuuguggcagucccuu

SEQ ID NO: 2844608 - RNA, 23 nt, Human
cauuuguggcagucccuuauaau

SEQ ID NO: 2844609 - RNA, 16 nt, Human
cauuugugccagagga

SEQ ID NO: 2844610 - RNA, 14 nt, Human
cauuugugucaaug

SEQ ID NO: 2844611 - RNA, 22 nt, Human
cauuuguggugauauagaauua

SEQ ID NO: 2844612 - RNA, 15 nt, Human
cauuugugccagagg

SEQ ID NO: 2844613 - RNA, 12 nt, Human
cauuugugauau

SEQ ID NO: 2844614 - RNA, 18 nt, Human
cauuugugauauauguau

SEQ ID NO: 2844615 - RNA, 19 nt, Human
cauuugugauauauguauu

SEQ ID NO: 2844616 - RNA, 22 nt, Human
cauuugugauauauguauuaau

SEQ ID NO: 2844617 - RNA, 11 nt, Human
cauuuguauuu

SEQ ID NO: 2844618 - RNA, 14 nt, Human
cauuuguauuuugu

SEQ ID NO: 2844619 - RNA, 15 nt, Human
cauuuguauuuugug

SEQ ID NO: 2844620 - RNA, 17 nt, Human
cauuuguauuuugugug

SEQ ID NO: 2844621 - RNA, 16 nt, Human
cauuugugaaaugaug

SEQ ID NO: 2844622 - RNA, 18 nt, Human
cauuuuuuaaggaaacaa

SEQ ID NO: 2844623 - RNA, 21 nt, Human
cauuuuuuaugggcauugaca

SEQ ID NO: 2844624 - RNA, 17 nt, Human
cauuuuuuuaauuuauu

SEQ ID NO: 2844625 - RNA, 20 nt, Human
cauuuuuuuaauuuauuauu

SEQ ID NO: 2844626 - RNA, 22 nt, Human
cauuuuuugggcagcaauuuaa

SEQ ID NO: 2844627 - RNA, 19 nt, Human
cauuuuuugggcagcaauu

SEQ ID NO: 2844628 - RNA, 18 nt, Human
cauuuuuugggcagcaau

SEQ ID NO: 2844629 - RNA, 16 nt, Human
ccaaaacugugcagag

SEQ ID NO: 2844630 - RNA, 11 nt, Human
ccaaaacugug

SEQ ID NO: 2844631 - RNA, 18 nt, Human
ccaaaagauugcugaaaa

SEQ ID NO: 2844632 - RNA, 20 nt, Human
ccacagcacagcucccugcc

SEQ ID NO: 2844633 - RNA, 22 nt, Human
ccacagcacagcucccugccaa

SEQ ID NO: 2844634 - RNA, 14 nt, Human
ccacagcagcauuu

SEQ ID NO: 2844635 - RNA, 15 nt, Human
ccacagcagcauuuu

SEQ ID NO: 2844636 - RNA, 18 nt, Human
ccacagcagcauuuuuau

SEQ ID NO: 2844637 - RNA, 19 nt, Human
ccacagauuguuucuauac

SEQ ID NO: 2844638 - RNA, 22 nt, Human
ccacagauuguuucuauacaaa

SEQ ID NO: 2844639 - RNA, 14 nt, Human
ccacagcagguccu

SEQ ID NO: 2844640 - RNA, 21 nt, Human
ccacagcgagggcagcugcua

SEQ ID NO: 2844641 - RNA, 20 nt, Human
ccacagcgagggcagcugcu

SEQ ID NO: 2844642 - RNA, 19 nt, Human
ccacagcgagggcagcugc

SEQ ID NO: 2844643 - RNA, 18 nt, Human
ccacagcgagggcagcug

SEQ ID NO: 2844644 - RNA, 17 nt, Human
ccacagcgagggcagcu

SEQ ID NO: 2844645 - RNA, 15 nt, Human
ccacagcgagggcag

SEQ ID NO: 2844646 - RNA, 16 nt, Human
ccacagcugagaaugu

SEQ ID NO: 2844647 - RNA, 17 nt, Human
ccaccacacccagccca

SEQ ID NO: 2844648 - RNA, 15 nt, Human
ccaccacaccuggcu

SEQ ID NO: 2844649 - RNA, 23 nt, Human
ccaccauauucagugcuguggcc

SEQ ID NO: 2844650 - RNA, 22 nt, Human
ccaccauauucagugcuguggc

SEQ ID NO: 2844651 - RNA, 18 nt, Human
ccaccauauucagugcug

SEQ ID NO: 2844652 - RNA, 21 nt, Human
ccacccuguaccucaucccau

SEQ ID NO: 2844653 - RNA, 14 nt, Human
ccacccuuccccuc

SEQ ID NO: 2844654 - RNA, 15 nt, Human
ccacccuuggccugu

SEQ ID NO: 2844655 - RNA, 14 nt, Human
ccacccuuggccug

SEQ ID NO: 2844656 - RNA, 13 nt, Human
ccacccuuggccu

SEQ ID NO: 2844657 - RNA, 12 nt, Human
ccacccuuggcc

SEQ ID NO: 2844658 - RNA, 17 nt, Human
ccacccuuggccugucu

SEQ ID NO: 2844659 - RNA, 16 nt, Human
ccacccuuggccuguc

SEQ ID NO: 2844660 - RNA, 19 nt, Human
ccacccuuggccugucuca

SEQ ID NO: 2844661 - RNA, 23 nt, Human
ccaccgaaguggacuggccccug

SEQ ID NO: 2844662 - RNA, 22 nt, Human
ccaccgaaguggacuggccccu

SEQ ID NO: 2844663 - RNA, 17 nt, Human
ccaccuuucagcccacg

SEQ ID NO: 2844664 - RNA, 23 nt, Human
ccaccuuuccucaaauguugaca

SEQ ID NO: 2844665 - RNA, 23 nt, Human
ccacgaauuugcuggggaaucuc

SEQ ID NO: 2844666 - RNA, 15 nt, Human
ccacgaauuugcugg

SEQ ID NO: 2844667 - RNA, 19 nt, Human
ccacgaauuugcuggggaa

SEQ ID NO: 2844668 - RNA, 13 nt, Human
ccacgcccggcua

SEQ ID NO: 2844669 - RNA, 14 nt, Human
ccacgcccuccccu

SEQ ID NO: 2844670 - RNA, 15 nt, Human
ccacgcccuccccuc

SEQ ID NO: 2844671 - RNA, 17 nt, Human
ccacgcccuccccuccc

SEQ ID NO: 2844672 - RNA, 11 nt, Human
ccacuccuccc

SEQ ID NO: 2844673 - RNA, 13 nt, Human
ccacuccucccuc

SEQ ID NO: 2844674 - RNA, 14 nt, Human
ccacuccucccucc

SEQ ID NO: 2844675 - RNA, 15 nt, Human
ccacuccucccuccg

SEQ ID NO: 2844676 - RNA, 18 nt, Human
ccacucuacccucccacc

SEQ ID NO: 2844677 - RNA, 20 nt, Human
ccacucuacccucccacccc

SEQ ID NO: 2844678 - RNA, 19 nt, Human
ccacucuacccucccaccc

SEQ ID NO: 2844679 - RNA, 21 nt, Human
ccacucuacccucccaccccc

SEQ ID NO: 2844680 - RNA, 16 nt, Human
ccacucuacccuccca

SEQ ID NO: 2844681 - RNA, 16 nt, Human
ccacucuccccacacu

SEQ ID NO: 2844682 - RNA, 15 nt, Human
ccacucuccccacac

SEQ ID NO: 2844683 - RNA, 14 nt, Human
ccacucuccccaca

SEQ ID NO: 2844684 - RNA, 13 nt, Human
ccacucuccccac

SEQ ID NO: 2844685 - RNA, 12 nt, Human
ccacucucccca

SEQ ID NO: 2844686 - RNA, 17 nt, Human
caugauguuucuuccac

SEQ ID NO: 2844687 - RNA, 22 nt, Human
caugaugguuauuuucuuuucu

SEQ ID NO: 2844688 - RNA, 23 nt, Human
caugaugguuauuuucuuuucuu

SEQ ID NO: 2844689 - RNA, 13 nt, Human
caugauggccagg

SEQ ID NO: 2844690 - RNA, 21 nt, Human
caugauggccaggcugaucuc

SEQ ID NO: 2844691 - RNA, 18 nt, Human
caugauggucacuuaaaa

SEQ ID NO: 2844692 - RNA, 18 nt, Human
caugauuuccuugaaugu

SEQ ID NO: 2844693 - RNA, 16 nt, Human
caugcaaaaagaaaug

SEQ ID NO: 2844694 - RNA, 17 nt, Human
caugcaaaaagaaauga

SEQ ID NO: 2844695 - RNA, 17 nt, Human
caugauuuccuugaaug

SEQ ID NO: 2844696 - RNA, 16 nt, Human
caugauuuccuugaau

SEQ ID NO: 2844697 - RNA, 14 nt, Human
caugauuuccuuga

SEQ ID NO: 2844698 - RNA, 12 nt, Human
caugauuuccuu

SEQ ID NO: 2844699 - RNA, 16 nt, Human
caugcuaucucugugu

SEQ ID NO: 2844700 - RNA, 14 nt, Human
caugcuaggaugcg

SEQ ID NO: 2844701 - RNA, 21 nt, Human
caugcucugagaagaggagcc

SEQ ID NO: 2844702 - RNA, 22 nt, Human
caugcucugagaagaggagccc

SEQ ID NO: 2844703 - RNA, 16 nt, Human
caugcucugcaaaagg

SEQ ID NO: 2844704 - RNA, 21 nt, Human
caugcucuugaccuuguagag

SEQ ID NO: 2844705 - RNA, 15 nt, Human
caugcugaagccaaa

SEQ ID NO: 2844706 - RNA, 16 nt, Human
caugcugaagccaaag

SEQ ID NO: 2844707 - RNA, 20 nt, Human
caugcugaagccaaagccaa

SEQ ID NO: 2844708 - RNA, 20 nt, Human
caugcugggaagacgccuga

SEQ ID NO: 2844709 - RNA, 23 nt, Human
caugcugggaagacgccugagcu

SEQ ID NO: 2844710 - RNA, 20 nt, Human
caugcuggggcaagucccug

SEQ ID NO: 2844711 - RNA, 13 nt, Human
caugcuggccagc

SEQ ID NO: 2844712 - RNA, 15 nt, Human
caugcuggccagccu

SEQ ID NO: 2844713 - RNA, 16 nt, Human
caugcuggccagccug

SEQ ID NO: 2844714 - RNA, 17 nt, Human
caugcuggccagccugg

SEQ ID NO: 2844715 - RNA, 19 nt, Human
caugcugacuguccucucc

SEQ ID NO: 2844716 - RNA, 18 nt, Human
caugcuggaaccugcaaa

SEQ ID NO: 2844717 - RNA, 22 nt, Human
caugcuggaaccugcaaaaaau

SEQ ID NO: 2844718 - RNA, 23 nt, Human
caugcuggaaccugcaaaaaaua

SEQ ID NO: 2844719 - RNA, 21 nt, Human
cauggcucuggacucuaaaga

SEQ ID NO: 2844720 - RNA, 17 nt, Human
cauggcuccagaaaugu

SEQ ID NO: 2844721 - RNA, 16 nt, Human
cauggcugcacaguug

SEQ ID NO: 2844722 - RNA, 18 nt, Human
cauguccuaauucuucug

SEQ ID NO: 2844723 - RNA, 19 nt, Human
cauguccuaauucuucugu

SEQ ID NO: 2844724 - RNA, 14 nt, Human
cauguccuaugugu

SEQ ID NO: 2844725 - RNA, 15 nt, Human
cauguccuaugugug

SEQ ID NO: 2844726 - RNA, 16 nt, Human
cauguccuauguguga

SEQ ID NO: 2844727 - RNA, 18 nt, Human
cauguccuaugugugacu

SEQ ID NO: 2844728 - RNA, 23 nt, Human
caugucccuaccgagucucuucu

SEQ ID NO: 2844729 - RNA, 19 nt, Human
cauguuaggaaaauuucac

SEQ ID NO: 2844730 - RNA, 18 nt, Human
cauguuaggaaaauuuca

SEQ ID NO: 2844731 - RNA, 14 nt, Human
cauguuaggaaaau

SEQ ID NO: 2844732 - RNA, 13 nt, Human
caugucaaacaug

SEQ ID NO: 2844733 - RNA, 14 nt, Human
caugucaaacguga

SEQ ID NO: 2844734 - RNA, 19 nt, Human
caugucaaacgugaaaaug

SEQ ID NO: 2844735 - RNA, 21 nt, Human
caugucaaacaugagaugugu

SEQ ID NO: 2844736 - RNA, 20 nt, Human
caugucaaacaugagaugug

SEQ ID NO: 2844737 - RNA, 18 nt, Human
cauguccccucccagagc

SEQ ID NO: 2844738 - RNA, 16 nt, Human
cauguccccucccaga

SEQ ID NO: 2844739 - RNA, 15 nt, Human
cauguccccucccag

SEQ ID NO: 2844740 - RNA, 16 nt, Human
caugucccuaccgagu

SEQ ID NO: 2844741 - RNA, 22 nt, Human
caugucccuaccgagucucuuc

SEQ ID NO: 2844742 - RNA, 13 nt, Human
cauguuauauauu

SEQ ID NO: 2844743 - RNA, 14 nt, Human
cauguuauauauuu

SEQ ID NO: 2844744 - RNA, 22 nt, Human
cauguuauauauuuuuuguagg

SEQ ID NO: 2844745 - RNA, 20 nt, Human
cauguuauauuuaaugcauu

SEQ ID NO: 2844746 - RNA, 15 nt, Human
cauguuggccaggcu

SEQ ID NO: 2844747 - RNA, 14 nt, Human
cauguuggccaggc

SEQ ID NO: 2844748 - RNA, 16 nt, Human
cauguuggccaggcug

SEQ ID NO: 2844749 - RNA, 21 nt, Human
cauguuggccaggcuggucua

SEQ ID NO: 2844750 - RNA, 20 nt, Human
cauguuauauauuuuuugua

SEQ ID NO: 2844751 - RNA, 20 nt, Human
cauguuggccaggcuggucu

SEQ ID NO: 2844752 - RNA, 22 nt, Human
cauguuggucaaaagcuggauu

SEQ ID NO: 2844753 - RNA, 17 nt, Human
cauguuggucaggcugg

SEQ ID NO: 2844754 - RNA, 18 nt, Human
cauguuggucaggcuggu

SEQ ID NO: 2844755 - RNA, 16 nt, Human
cauguugguugcacuu

SEQ ID NO: 2844756 - RNA, 20 nt, Human
cauguugguugcacuuugua

SEQ ID NO: 2844757 - RNA, 21 nt, Human
cauguugguugcacuuuguag

SEQ ID NO: 2844758 - RNA, 22 nt, Human
cauguugguugcacuuuguagu

SEQ ID NO: 2844759 - RNA, 12 nt, Human
cauguuguaaug

SEQ ID NO: 2844760 - RNA, 15 nt, Human
cauguuguaaugcug

SEQ ID NO: 2844761 - RNA, 16 nt, Human
cauguuguaaugcugc

SEQ ID NO: 2844762 - RNA, 17 nt, Human
cauguuguaaugcugca

SEQ ID NO: 2844763 - RNA, 19 nt, Human
cauguuguaaugcugcacu

SEQ ID NO: 2844764 - RNA, 20 nt, Human
cauguuguaaugcugcacuu

SEQ ID NO: 2844765 - RNA, 20 nt, Human
cauguauuuaucucuauuua

SEQ ID NO: 2844766 - RNA, 23 nt, Human
cauguauuuaucucuauuuaaua

SEQ ID NO: 2844767 - RNA, 15 nt, Human
cauguauuuauguaa

SEQ ID NO: 2844768 - RNA, 15 nt, Human
cauguauuuaucucu

SEQ ID NO: 2844769 - RNA, 16 nt, Human
cauguaggacccugca

SEQ ID NO: 2844770 - RNA, 15 nt, Human
cauguagaagcugca

SEQ ID NO: 2844771 - RNA, 14 nt, Human
cauguagcugaguu

SEQ ID NO: 2844772 - RNA, 15 nt, Human
cauguagcugaguuu

SEQ ID NO: 2844773 - RNA, 18 nt, Human
cauguagcccccuggccu

SEQ ID NO: 2844774 - RNA, 20 nt, Human
cauguagcccccuggccucu

SEQ ID NO: 2844775 - RNA, 21 nt, Human
cauguagcccccuggccucug

SEQ ID NO: 2844776 - RNA, 22 nt, Human
cauguagcccccuggccucugu

SEQ ID NO: 2844777 - RNA, 13 nt, Human
cauguagcccccu

SEQ ID NO: 2844778 - RNA, 17 nt, Human
cauguagcccccuggcc

SEQ ID NO: 2844779 - RNA, 13 nt, Human
cauguagaagcug

SEQ ID NO: 2844780 - RNA, 19 nt, Human
cauguagaagcugcaucuu

SEQ ID NO: 2844781 - RNA, 12 nt, Human
cauguagagaaa

SEQ ID NO: 2844782 - RNA, 13 nt, Human
cauguagagaaaa

SEQ ID NO: 2844783 - RNA, 16 nt, Human
cauguagagaaaagca

SEQ ID NO: 2844784 - RNA, 19 nt, Human
cauguagagaaaagcacac

SEQ ID NO: 2844785 - RNA, 13 nt, Human
cauguacuuguuu

SEQ ID NO: 2844786 - RNA, 21 nt, Human
cauguacuuguuugcaagcag

SEQ ID NO: 2844787 - RNA, 23 nt, Human
cauucuagguaggggcccacuuc

SEQ ID NO: 2844788 - RNA, 13 nt, Human
cauuauaaacgcu

SEQ ID NO: 2844789 - RNA, 19 nt, Human
cauuauagauuuucauguu

SEQ ID NO: 2844790 - RNA, 14 nt, Human
cauguuguuaaaau

SEQ ID NO: 2844791 - RNA, 18 nt, Human
cauguuguuaaaauuaug

SEQ ID NO: 2844792 - RNA, 14 nt, Human
cauguuuaaaccug

SEQ ID NO: 2844793 - RNA, 18 nt, Human
cauauucuguuggccagu

SEQ ID NO: 2844794 - RNA, 17 nt, Human
cauauucuguuggccag

SEQ ID NO: 2844795 - RNA, 17 nt, Human
cauauuccauauuuauu

SEQ ID NO: 2844796 - RNA, 14 nt, Human
cauauucauucaug

SEQ ID NO: 2844797 - RNA, 16 nt, Human
cauauuccauauuuau

SEQ ID NO: 2844798 - RNA, 17 nt, Human
cauauggguuagauguu

SEQ ID NO: 2844799 - RNA, 18 nt, Human
cauauggguuagauguug

SEQ ID NO: 2844800 - RNA, 19 nt, Human
cauauguugaauacuuuuu

SEQ ID NO: 2844801 - RNA, 23 nt, Human
cauaugcuguauauccuuucuaa

SEQ ID NO: 2844802 - RNA, 15 nt, Human
cagugggcuccuggc

SEQ ID NO: 2844803 - RNA, 18 nt, Human
cauauggacucugcacau

SEQ ID NO: 2844804 - RNA, 15 nt, Human
cauauggacucugca

SEQ ID NO: 2844805 - RNA, 17 nt, Human
cauauggacucugcaca

SEQ ID NO: 2844806 - RNA, 20 nt, Human
cauauggacucugcacauga

SEQ ID NO: 2844807 - RNA, 15 nt, Human
cauauucuaaaacca

SEQ ID NO: 2844808 - RNA, 17 nt, Human
cauauucuaaaaccauu

SEQ ID NO: 2844809 - RNA, 13 nt, Human
cauauucugucug

SEQ ID NO: 2844810 - RNA, 15 nt, Human
cauauucuguuggaa

SEQ ID NO: 2844811 - RNA, 16 nt, Human
cauauucuguuggaag

SEQ ID NO: 2844812 - RNA, 12 nt, Human
caucacuguggc

SEQ ID NO: 2844813 - RNA, 13 nt, Human
caucacuguggcu

SEQ ID NO: 2844814 - RNA, 17 nt, Human
caucacuguggcugucu

SEQ ID NO: 2844815 - RNA, 14 nt, Human
caucacuguucaug

SEQ ID NO: 2844816 - RNA, 20 nt, Human
caucacuguucaugcuggcg

SEQ ID NO: 2844817 - RNA, 20 nt, Human
caucacugcuugaugaagca

SEQ ID NO: 2844818 - RNA, 15 nt, Human
cauccuggcacccgg

SEQ ID NO: 2844819 - RNA, 18 nt, Human
caucccuaaugcugcaga

SEQ ID NO: 2844820 - RNA, 12 nt, Human
caucccuacccc

SEQ ID NO: 2844821 - RNA, 17 nt, Human
caucccguguucuccuu

SEQ ID NO: 2844822 - RNA, 21 nt, Human
caucccguguucuccuuuucc

SEQ ID NO: 2844823 - RNA, 14 nt, Human
caucccguguucuc

SEQ ID NO: 2844824 - RNA, 16 nt, Human
caucccguguucuccu

SEQ ID NO: 2844825 - RNA, 21 nt, Human
caucccgggacgcagcaggag

SEQ ID NO: 2844826 - RNA, 15 nt, Human
caucccggaggaaau

SEQ ID NO: 2844827 - RNA, 16 nt, Human
caucccggaggaaauc

SEQ ID NO: 2844828 - RNA, 17 nt, Human
caucccggaggaaaucu

SEQ ID NO: 2844829 - RNA, 18 nt, Human
caucccggaggaaaucug

SEQ ID NO: 2844830 - RNA, 19 nt, Human
caucccggaggaaaucugc

SEQ ID NO: 2844831 - RNA, 20 nt, Human
cauccccuuacccuuagaau

SEQ ID NO: 2844832 - RNA, 22 nt, Human
cauccccuuacccuuagaaucc

SEQ ID NO: 2844833 - RNA, 14 nt, Human
caucacuuguacaa

SEQ ID NO: 2844834 - RNA, 22 nt, Human
cauccuggcacccggccccugc

SEQ ID NO: 2844835 - RNA, 16 nt, Human
cauccugccuucaugg

SEQ ID NO: 2844836 - RNA, 22 nt, Human
cauccugccuucauggaacuca

SEQ ID NO: 2844837 - RNA, 22 nt, Human
cauccugcugcccuuaggccac

SEQ ID NO: 2844838 - RNA, 21 nt, Human
caucgccaacuaagcgaggca

SEQ ID NO: 2844839 - RNA, 20 nt, Human
caucgccagaggugcuucac

SEQ ID NO: 2844840 - RNA, 16 nt, Human
caucgcucguguguuc

SEQ ID NO: 2844841 - RNA, 15 nt, Human
caucgcuggccccuu

SEQ ID NO: 2844842 - RNA, 16 nt, Human
caucgucauuugcugu

SEQ ID NO: 2844843 - RNA, 16 nt, Human
caucuggaaucuggag

SEQ ID NO: 2844844 - RNA, 21 nt, Human
caucuggaaucuggagaccag

SEQ ID NO: 2844845 - RNA, 16 nt, Human
caucugcuuuuauuaa

SEQ ID NO: 2844846 - RNA, 14 nt, Human
caucugugauggga

SEQ ID NO: 2844847 - RNA, 15 nt, Human
caucugugcacgcag

SEQ ID NO: 2844848 - RNA, 11 nt, Human
caucugugcau

SEQ ID NO: 2844849 - RNA, 20 nt, Human
caucuguuguuuuguuuuaa

SEQ ID NO: 2844850 - RNA, 15 nt, Human
caucugugugaaaau

SEQ ID NO: 2844851 - RNA, 14 nt, Human
caucuguguccugg

SEQ ID NO: 2844852 - RNA, 12 nt, Human
caucuguuguuu

SEQ ID NO: 2844853 - RNA, 15 nt, Human
cagcucccuaggaga

SEQ ID NO: 2844854 - RNA, 19 nt, Human
cagcucccuaggagaccaa

SEQ ID NO: 2844855 - RNA, 18 nt, Human
cagcucccuaggagacca

SEQ ID NO: 2844856 - RNA, 20 nt, Human
cagcucccuaggagaccaag

SEQ ID NO: 2844857 - RNA, 13 nt, Human
cagcucccugcca

SEQ ID NO: 2844858 - RNA, 14 nt, Human
cagcucccugccaa

SEQ ID NO: 2844859 - RNA, 19 nt, Human
cagcucccugccaaacuga

SEQ ID NO: 2844860 - RNA, 17 nt, Human
cagcuccgccucugucc

SEQ ID NO: 2844861 - RNA, 14 nt, Human
cagcuccucccaca

SEQ ID NO: 2844862 - RNA, 20 nt, Human
cagcuccucauccagggcuc

SEQ ID NO: 2844863 - RNA, 15 nt, Human
cagcuccucauccag

SEQ ID NO: 2844864 - RNA, 19 nt, Human
cagcuccucauccagggcu

SEQ ID NO: 2844865 - RNA, 23 nt, Human
cagcucccauaaccgcugauucu

SEQ ID NO: 2844866 - RNA, 12 nt, Human
cagcuccccaag

SEQ ID NO: 2844867 - RNA, 13 nt, Human
cagcuccccagag

SEQ ID NO: 2844868 - RNA, 15 nt, Human
cagcuccccagaguc

SEQ ID NO: 2844869 - RNA, 24 nt, Human
cagcuccccagaguccucuaugaa

SEQ ID NO: 2844870 - RNA, 14 nt, Human
cagcuguuuaagau

SEQ ID NO: 2844871 - RNA, 18 nt, Human
cagcuuacacaaaucuau

SEQ ID NO: 2844872 - RNA, 21 nt, Human
cagcuuacacaaaucuauuua

SEQ ID NO: 2844873 - RNA, 24 nt, Human
cagcugugcucuggacaggcaugu

SEQ ID NO: 2844874 - RNA, 20 nt, Human
cagcugugcucuggacaggc

SEQ ID NO: 2844875 - RNA, 19 nt, Human
cagcugugcucuggacagg

SEQ ID NO: 2844876 - RNA, 12 nt, Human
cagcugccugca

SEQ ID NO: 2844877 - RNA, 14 nt, Human
cagcugaguuauga

SEQ ID NO: 2844878 - RNA, 18 nt, Human
cagcugaguuaugaugua

SEQ ID NO: 2844879 - RNA, 15 nt, Human
cagcugauacaaauu

SEQ ID NO: 2844880 - RNA, 23 nt, Human
cagcugauacaaauugcagacug

SEQ ID NO: 2844881 - RNA, 16 nt, Human
cagcugauacuucauu

SEQ ID NO: 2844882 - RNA, 20 nt, Human
cagcugauacuucauuuaaa

SEQ ID NO: 2844883 - RNA, 21 nt, Human
cagcugauacuucauuuaaaa

SEQ ID NO: 2844884 - RNA, 20 nt, Human
cagcugauguuggaagagaa

SEQ ID NO: 2844885 - RNA, 18 nt, Human
cagcugauguuggaagag

SEQ ID NO: 2844886 - RNA, 16 nt, Human
caggaaaagcugcuga

SEQ ID NO: 2844887 - RNA, 15 nt, Human
caggaaaagcugcug

SEQ ID NO: 2844888 - RNA, 18 nt, Human
caggaaaagcugcugaca

SEQ ID NO: 2844889 - RNA, 16 nt, Human
cagccgcucuccugcc

SEQ ID NO: 2844890 - RNA, 17 nt, Human
cagccgcucuccugcca

SEQ ID NO: 2844891 - RNA, 20 nt, Human
cagccgcucuccugccacau

SEQ ID NO: 2844892 - RNA, 13 nt, Human
cagccucugaccc

SEQ ID NO: 2844893 - RNA, 23 nt, Human
cagcccuuuuguugagccaggcc

SEQ ID NO: 2844894 - RNA, 20 nt, Human
cagcccuugagggagaacuu

SEQ ID NO: 2844895 - RNA, 19 nt, Human
cagccugcuaauuccccag

SEQ ID NO: 2844896 - RNA, 22 nt, Human
cagccucugaccccuccucacu

SEQ ID NO: 2844897 - RNA, 23 nt, Human
cagccucugaccccuccucacug

SEQ ID NO: 2844898 - RNA, 13 nt, Human
cagccucuggcau

SEQ ID NO: 2844899 - RNA, 14 nt, Human
cagccucugacccc

SEQ ID NO: 2844900 - RNA, 15 nt, Human
cagccucugaccccu

SEQ ID NO: 2844901 - RNA, 16 nt, Human
cagccucugaccccuc

SEQ ID NO: 2844902 - RNA, 17 nt, Human
cagccucugaccccucc

SEQ ID NO: 2844903 - RNA, 18 nt, Human
cagccucugaccccuccu

SEQ ID NO: 2844904 - RNA, 19 nt, Human
cagccucugaccccuccuc

SEQ ID NO: 2844905 - RNA, 20 nt, Human
cagccucugaccccuccuca

SEQ ID NO: 2844906 - RNA, 21 nt, Human
cagccucugaccccuccucac

SEQ ID NO: 2844907 - RNA, 21 nt, Human
cagcggggacagcuccuucug

SEQ ID NO: 2844908 - RNA, 18 nt, Human
cagcggggccccagggcu

SEQ ID NO: 2844909 - RNA, 16 nt, Human
cagcggggaggggagg

SEQ ID NO: 2844910 - RNA, 19 nt, Human
cagcggggacagcuccuuc

SEQ ID NO: 2844911 - RNA, 18 nt, Human
cagcggggacagcuccuu

SEQ ID NO: 2844912 - RNA, 19 nt, Human
cagcgccuggccuacccag

SEQ ID NO: 2844913 - RNA, 14 nt, Human
cagauccucuuggu

SEQ ID NO: 2844914 - RNA, 22 nt, Human
cagauccugaucuuaagaggcu

SEQ ID NO: 2844915 - RNA, 16 nt, Human
cagaucacugccacac

SEQ ID NO: 2844916 - RNA, 15 nt, Human
cagaucacugccaca

SEQ ID NO: 2844917 - RNA, 16 nt, Human
cagaucaguguaccau

SEQ ID NO: 2844918 - RNA, 17 nt, Human
cagaucagucagagccc

SEQ ID NO: 2844919 - RNA, 15 nt, Human
cagaucauccagaag

SEQ ID NO: 2844920 - RNA, 17 nt, Human
cagaucauguuuuggug

SEQ ID NO: 2844921 - RNA, 19 nt, Human
cagaucauguuuuggugaa

SEQ ID NO: 2844922 - RNA, 13 nt, Human
cagauccucuugg

SEQ ID NO: 2844923 - RNA, 15 nt, Human
cagauccccaagccu

SEQ ID NO: 2844924 - RNA, 19 nt, Human
cagauccccaagccuggca

SEQ ID NO: 2844925 - RNA, 20 nt, Human
cagagguaacagaacagcuu

SEQ ID NO: 2844926 - RNA, 22 nt, Human
cagagguaacagaacagcuuca

SEQ ID NO: 2844927 - RNA, 19 nt, Human
cagaggucagacuaagaaa

SEQ ID NO: 2844928 - RNA, 18 nt, Human
cagagguagggcugccac

SEQ ID NO: 2844929 - RNA, 20 nt, Human
cagagguccacaacacacag

SEQ ID NO: 2844930 - RNA, 15 nt, Human
cagagguccacaaca

SEQ ID NO: 2844931 - RNA, 14 nt, Human
cagaucacugccac

SEQ ID NO: 2844932 - RNA, 13 nt, Human
cagaucacugcca

SEQ ID NO: 2844933 - RNA, 18 nt, Human
cagaucacugaauuuaua

SEQ ID NO: 2844934 - RNA, 19 nt, Human
cagaucacugaauuuauaa

SEQ ID NO: 2844935 - RNA, 13 nt, Human
cagaucaccugag

SEQ ID NO: 2844936 - RNA, 14 nt, Human
cagaucacaguguc

SEQ ID NO: 2844937 - RNA, 13 nt, Human
cagaguaagacau

SEQ ID NO: 2844938 - RNA, 14 nt, Human
cagaguaagacauu

SEQ ID NO: 2844939 - RNA, 15 nt, Human
cagaguaagacauug

SEQ ID NO: 2844940 - RNA, 23 nt, Human
cagagguaacagaacagcuucag

SEQ ID NO: 2844941 - RNA, 13 nt, Human
cagaguagaaaua

SEQ ID NO: 2844942 - RNA, 13 nt, Human
cagaaucccagcc

SEQ ID NO: 2844943 - RNA, 14 nt, Human
cagaaucccagccg

SEQ ID NO: 2844944 - RNA, 18 nt, Human
cagaaucccagccggcca

SEQ ID NO: 2844945 - RNA, 20 nt, Human
cagaaucccucuacauggac

SEQ ID NO: 2844946 - RNA, 16 nt, Human
cagaaucagcacagau

SEQ ID NO: 2844947 - RNA, 18 nt, Human
cagaaucagcacagauaa

SEQ ID NO: 2844948 - RNA, 19 nt, Human
cagagggguaagagaggau

SEQ ID NO: 2844949 - RNA, 23 nt, Human
cagagggguggguuccucuuccc

SEQ ID NO: 2844950 - RNA, 13 nt, Human
cagagggucacag

SEQ ID NO: 2844951 - RNA, 15 nt, Human
cagagggucacagug

SEQ ID NO: 2844952 - RNA, 16 nt, Human
cagagggucacagugu

SEQ ID NO: 2844953 - RNA, 20 nt, Human
cagagggucacaguguuuac

SEQ ID NO: 2844954 - RNA, 16 nt, Human
cagaggguuaggagug

SEQ ID NO: 2844955 - RNA, 17 nt, Human
cagaggguugugauuuu

SEQ ID NO: 2844956 - RNA, 13 nt, Human
cagagguaacaga

SEQ ID NO: 2844957 - RNA, 14 nt, Human
cagagguaacagaa

SEQ ID NO: 2844958 - RNA, 15 nt, Human
cagagguaacagaac

SEQ ID NO: 2844959 - RNA, 16 nt, Human
cagagguaacagaaca

SEQ ID NO: 2844960 - RNA, 17 nt, Human
cagagguaacagaacag

SEQ ID NO: 2844961 - RNA, 18 nt, Human
cagagguaacagaacagc

SEQ ID NO: 2844962 - RNA, 19 nt, Human
cagagguaacagaacagcu

SEQ ID NO: 2844963 - RNA, 23 nt, Human
cagcaguugaaugacaacagaag

SEQ ID NO: 2844964 - RNA, 22 nt, Human
cagcaguguuccccaucugggu

SEQ ID NO: 2844965 - RNA, 23 nt, Human
cagcaguguuccccaucuggguc

SEQ ID NO: 2844966 - RNA, 14 nt, Human
cagcaguguucccc

SEQ ID NO: 2844967 - RNA, 17 nt, Human
cagcaguguuccccauc

SEQ ID NO: 2844968 - RNA, 19 nt, Human
cagcaguguuccccaucug

SEQ ID NO: 2844969 - RNA, 21 nt, Human
cagcaguguuccccaucuggg

SEQ ID NO: 2844970 - RNA, 16 nt, Human
cagcagugcagccggg

SEQ ID NO: 2844971 - RNA, 12 nt, Human
cagcaguguucc

SEQ ID NO: 2844972 - RNA, 13 nt, Human
cagcaguguuccc

SEQ ID NO: 2844973 - RNA, 19 nt, Human
cagcaucaccugccuguua

SEQ ID NO: 2844974 - RNA, 13 nt, Human
cagcaucacuccc

SEQ ID NO: 2844975 - RNA, 14 nt, Human
cagcaucacucccc

SEQ ID NO: 2844976 - RNA, 15 nt, Human
cagcaucacucccca

SEQ ID NO: 2844977 - RNA, 17 nt, Human
cagcaucacuccccaag

SEQ ID NO: 2844978 - RNA, 19 nt, Human
cagcaucacuccccaagga

SEQ ID NO: 2844979 - RNA, 20 nt, Human
cagcaucacuccccaaggaa

SEQ ID NO: 2844980 - RNA, 22 nt, Human
cagcaucacuccccaaggaaga

SEQ ID NO: 2844981 - RNA, 15 nt, Human
cagcaucaccugccu

SEQ ID NO: 2844982 - RNA, 17 nt, Human
cagauugcaacaggcug

SEQ ID NO: 2844983 - RNA, 22 nt, Human
cagauugaguuuucuucuguga

SEQ ID NO: 2844984 - RNA, 12 nt, Human
cagccagcugcc

SEQ ID NO: 2844985 - RNA, 15 nt, Human
cagccagcugcccua

SEQ ID NO: 2844986 - RNA, 22 nt, Human
cagccaggacagucagcucucu

SEQ ID NO: 2844987 - RNA, 22 nt, Human
cagccaggcugccaaggccaga

SEQ ID NO: 2844988 - RNA, 17 nt, Human
cagcaucaccugccugu

SEQ ID NO: 2844989 - RNA, 16 nt, Human
cagcaucaccugccug

SEQ ID NO: 2844990 - RNA, 19 nt, Human
cagcaucccuugaccaggc

SEQ ID NO: 2844991 - RNA, 22 nt, Human
cagcaucccuugaccaggccug

SEQ ID NO: 2844992 - RNA, 23 nt, Human
cagcaucccuugaccaggccugg

SEQ ID NO: 2844993 - RNA, 18 nt, Human
cagcaucccuugaccagg

SEQ ID NO: 2844994 - RNA, 13 nt, Human
cagccagggcugc

SEQ ID NO: 2844995 - RNA, 12 nt, Human
cagccagggcug

SEQ ID NO: 2844996 - RNA, 23 nt, Human
cagccagggcugcuagacggagg

SEQ ID NO: 2844997 - RNA, 15 nt, Human
cagccagggcugcua

SEQ ID NO: 2844998 - RNA, 16 nt, Human
cagccagggcugcuag

SEQ ID NO: 2844999 - RNA, 20 nt, Human
cagccagggaggacaagcag

SEQ ID NO: 2845000 - RNA, 16 nt, Human
cagucugaaugcugcc

SEQ ID NO: 2845001 - RNA, 18 nt, Human
cagucugaaugcugccac

SEQ ID NO: 2845002 - RNA, 20 nt, Human
cagucugaaugcugccacaa

SEQ ID NO: 2845003 - RNA, 12 nt, Human
cagucucugccu

SEQ ID NO: 2845004 - RNA, 13 nt, Human
cagucucugccuu

SEQ ID NO: 2845005 - RNA, 14 nt, Human
cagucucugccuug

SEQ ID NO: 2845006 - RNA, 17 nt, Human
cagucucugccuugccu

SEQ ID NO: 2845007 - RNA, 18 nt, Human
cagucucugccuugccuu

SEQ ID NO: 2845008 - RNA, 19 nt, Human
cagucucugccuugccuuu

SEQ ID NO: 2845009 - RNA, 18 nt, Human
cagucucugcuccaccuu

SEQ ID NO: 2845010 - RNA, 23 nt, Human
cagucucugcuccaccuuucagc

SEQ ID NO: 2845011 - RNA, 17 nt, Human
cagucuggaaugcagug

SEQ ID NO: 2845012 - RNA, 12 nt, Human
cagugcaucuca

SEQ ID NO: 2845013 - RNA, 15 nt, Human
cagucuggaaugcag

SEQ ID NO: 2845014 - RNA, 15 nt, Human
cagugcaucucagcc

SEQ ID NO: 2845015 - RNA, 16 nt, Human
cagugcaucucagccc

SEQ ID NO: 2845016 - RNA, 17 nt, Human
cagugcaucucagccca

SEQ ID NO: 2845017 - RNA, 18 nt, Human
cagugcaucucagcccac

SEQ ID NO: 2845018 - RNA, 23 nt, Human
cagugggagcugccuguucagcu

SEQ ID NO: 2845019 - RNA, 20 nt, Human
cagugggagcugccuguuca

SEQ ID NO: 2845020 - RNA, 17 nt, Human
cagugcccacaggauca

SEQ ID NO: 2845021 - RNA, 15 nt, Human
cagugcccacaggau

SEQ ID NO: 2845022 - RNA, 13 nt, Human
cagugcccacagg

SEQ ID NO: 2845023 - RNA, 15 nt, Human
cagugggauuuggua

SEQ ID NO: 2845024 - RNA, 18 nt, Human
cagugggauuugguaaug

SEQ ID NO: 2845025 - RNA, 21 nt, Human
caguggugcgaucuggguuca

SEQ ID NO: 2845026 - RNA, 20 nt, Human
caguggugcgaucuggguuc

SEQ ID NO: 2845027 - RNA, 20 nt, Human
caguggggaggggcuguggg

SEQ ID NO: 2845028 - RNA, 17 nt, Human
cagucaccccaggacuc

SEQ ID NO: 2845029 - RNA, 12 nt, Human
cagucaccccag

SEQ ID NO: 2845030 - RNA, 15 nt, Human
cagucaauauuuuua

SEQ ID NO: 2845031 - RNA, 17 nt, Human
cagucacaugaccugau

SEQ ID NO: 2845032 - RNA, 18 nt, Human
cagucacguggaggagca

SEQ ID NO: 2845033 - RNA, 23 nt, Human
cagucacguggaggagcagugca

SEQ ID NO: 2845034 - RNA, 17 nt, Human
cagguuugucaucagau

SEQ ID NO: 2845035 - RNA, 15 nt, Human
caggugcaguggcuc

SEQ ID NO: 2845036 - RNA, 16 nt, Human
caggugccagccugag

SEQ ID NO: 2845037 - RNA, 18 nt, Human
caggugccagccugaggc

SEQ ID NO: 2845038 - RNA, 23 nt, Human
caggugccagccugaggcagcca

SEQ ID NO: 2845039 - RNA, 22 nt, Human
caggugcccagcuauaccugug

SEQ ID NO: 2845040 - RNA, 23 nt, Human
caggugcccagcuauaccugugc

SEQ ID NO: 2845041 - RNA, 22 nt, Human
cagguugucugaagucacugca

SEQ ID NO: 2845042 - RNA, 12 nt, Human
caggugccugga

SEQ ID NO: 2845043 - RNA, 15 nt, Human
caggugccuggacau

SEQ ID NO: 2845044 - RNA, 13 nt, Human
cagguuguuggug

SEQ ID NO: 2845045 - RNA, 16 nt, Human
cagguuguuggugacu

SEQ ID NO: 2845046 - RNA, 12 nt, Human
cagguuuaacau

SEQ ID NO: 2845047 - RNA, 15 nt, Human
cagguuuaacauuug

SEQ ID NO: 2845048 - RNA, 16 nt, Human
cagguuuaacauuugc

SEQ ID NO: 2845049 - RNA, 17 nt, Human
cagguuuaacauuugcc

SEQ ID NO: 2845050 - RNA, 18 nt, Human
cagguuuaacauuugccu

SEQ ID NO: 2845051 - RNA, 23 nt, Human
cagguugucugaagucacugcac

SEQ ID NO: 2845052 - RNA, 15 nt, Human
cagguuuuguaaaga

SEQ ID NO: 2845053 - RNA, 19 nt, Human
cagguuuucacauaaaugc

SEQ ID NO: 2845054 - RNA, 20 nt, Human
cagguuuucacauaaaugca

SEQ ID NO: 2845055 - RNA, 16 nt, Human
caguaaacagaggagu

SEQ ID NO: 2845056 - RNA, 20 nt, Human
caggugauccacccaccuca

SEQ ID NO: 2845057 - RNA, 21 nt, Human
caggugauccacccaccucag

SEQ ID NO: 2845058 - RNA, 23 nt, Human
caggugauccacccaccucagcc

SEQ ID NO: 2845059 - RNA, 22 nt, Human
caggugauccacccaccucagc

SEQ ID NO: 2845060 - RNA, 20 nt, Human
caggugauuggaccaggcca

SEQ ID NO: 2845061 - RNA, 20 nt, Human
caggugauguuaguguuuua

SEQ ID NO: 2845062 - RNA, 21 nt, Human
caggugauuggaccaggccau

SEQ ID NO: 2845063 - RNA, 13 nt, Human
caggcacagcuga

SEQ ID NO: 2845064 - RNA, 15 nt, Human
caggcacagcugagu

SEQ ID NO: 2845065 - RNA, 16 nt, Human
caggcacagcugaguu

SEQ ID NO: 2845066 - RNA, 12 nt, Human
caggcacaggau

SEQ ID NO: 2845067 - RNA, 13 nt, Human
caggcacaggaug

SEQ ID NO: 2845068 - RNA, 20 nt, Human
caggcacaggaugcuguguu

SEQ ID NO: 2845069 - RNA, 12 nt, Human
caggcaauuccg

SEQ ID NO: 2845070 - RNA, 24 nt, Human
caggcaauucuccugccuuugccu

SEQ ID NO: 2845071 - RNA, 15 nt, Human
caggccagagggagu

SEQ ID NO: 2845072 - RNA, 13 nt, Human
caggccagaggga

SEQ ID NO: 2845073 - RNA, 18 nt, Human
caggcagauacaggaaaa

SEQ ID NO: 2845074 - RNA, 15 nt, Human
caggccacuugauga

SEQ ID NO: 2845075 - RNA, 16 nt, Human
caggcagaucaccuga

SEQ ID NO: 2845076 - RNA, 23 nt, Human
caggcagagaaucauacuuagca

SEQ ID NO: 2845077 - RNA, 15 nt, Human
caggcagagaaucau

SEQ ID NO: 2845078 - RNA, 14 nt, Human
caggcagagaauca

SEQ ID NO: 2845079 - RNA, 16 nt, Human
caggcagacuacacag

SEQ ID NO: 2845080 - RNA, 21 nt, Human
caggcagacuacacaggauga

SEQ ID NO: 2845081 - RNA, 18 nt, Human
caggcaccagucccuguc

SEQ ID NO: 2845082 - RNA, 12 nt, Human
caggcacagguc

SEQ ID NO: 2845083 - RNA, 13 nt, Human
caggcacagguca

SEQ ID NO: 2845084 - RNA, 15 nt, Human
caggcacaggucagg

SEQ ID NO: 2845085 - RNA, 16 nt, Human
caggcaccagucccug

SEQ ID NO: 2845086 - RNA, 23 nt, Human
cagggcucagcggggacagcucc

SEQ ID NO: 2845087 - RNA, 21 nt, Human
cagggcucagcggggacagcu

SEQ ID NO: 2845088 - RNA, 12 nt, Human
cagggaugagca

SEQ ID NO: 2845089 - RNA, 20 nt, Human
cagggaguguaguaaagccg

SEQ ID NO: 2845090 - RNA, 22 nt, Human
cagggaugagcauggagcuggc

SEQ ID NO: 2845091 - RNA, 23 nt, Human
cagggaugagcauggagcuggcc

SEQ ID NO: 2845092 - RNA, 16 nt, Human
cagggaugagcaugga

SEQ ID NO: 2845093 - RNA, 19 nt, Human
cagggaugagcauggagcu

SEQ ID NO: 2845094 - RNA, 20 nt, Human
cagggaugagcauggagcug

SEQ ID NO: 2845095 - RNA, 21 nt, Human
cagggaugagcauggagcugg

SEQ ID NO: 2845096 - RNA, 23 nt, Human
cagggcugcugggggcaacuggc

SEQ ID NO: 2845097 - RNA, 13 nt, Human
cagggcuccuccc

SEQ ID NO: 2845098 - RNA, 14 nt, Human
cagggcuccuccca

SEQ ID NO: 2845099 - RNA, 15 nt, Human
cagggcuccucccag

SEQ ID NO: 2845100 - RNA, 16 nt, Human
cagggcuccucccagc

SEQ ID NO: 2845101 - RNA, 17 nt, Human
cagggcucugccccagu

SEQ ID NO: 2845102 - RNA, 19 nt, Human
cagggcucugccccagucg

SEQ ID NO: 2845103 - RNA, 21 nt, Human
cagggcugcugggggcaacug

SEQ ID NO: 2845104 - RNA, 18 nt, Human
cagggcugcuagacggag

SEQ ID NO: 2845105 - RNA, 14 nt, Human
cagggcugcuagac

SEQ ID NO: 2845106 - RNA, 15 nt, Human
cagggcugcccugag

SEQ ID NO: 2845107 - RNA, 16 nt, Human
cagggcugcccugaga

SEQ ID NO: 2845108 - RNA, 17 nt, Human
cagggcugcccugagaa

SEQ ID NO: 2845109 - RNA, 22 nt, Human
cagggcugcccugagaagcugc

SEQ ID NO: 2845110 - RNA, 23 nt, Human
cagggcugcccugagaagcugcu

SEQ ID NO: 2845111 - RNA, 20 nt, Human
caggcugggcuucaguggca

SEQ ID NO: 2845112 - RNA, 22 nt, Human
caggcugggcuucaguggcagc

SEQ ID NO: 2845113 - RNA, 21 nt, Human
caggcugggcuucaguggcag

SEQ ID NO: 2845114 - RNA, 22 nt, Human
cagggagccuuugguucuggcc

SEQ ID NO: 2845115 - RNA, 19 nt, Human
cagggagccuagaagcugg

SEQ ID NO: 2845116 - RNA, 16 nt, Human
caggggaaccugccau

SEQ ID NO: 2845117 - RNA, 15 nt, Human
caggggaaccugcca

SEQ ID NO: 2845118 - RNA, 14 nt, Human
caggggaaccugcc

SEQ ID NO: 2845119 - RNA, 19 nt, Human
auuucucaacaaagcacag

SEQ ID NO: 2845120 - RNA, 22 nt, Human
auuucucaacaaagcacagugu

SEQ ID NO: 2845121 - RNA, 20 nt, Human
auuucucaacaaagcacagu

SEQ ID NO: 2845122 - RNA, 12 nt, Human
auuucuccagaa

SEQ ID NO: 2845123 - RNA, 16 nt, Human
auuucuccagaaccca

SEQ ID NO: 2845124 - RNA, 17 nt, Human
auuucuccagaacccau

SEQ ID NO: 2845125 - RNA, 14 nt, Human
auuucucaucacag

SEQ ID NO: 2845126 - RNA, 22 nt, Human
auuuaaugauaaguaaaugcua

SEQ ID NO: 2845127 - RNA, 13 nt, Human
auuuaaugcauua

SEQ ID NO: 2845128 - RNA, 17 nt, Human
auuuaaugcauuaaacc

SEQ ID NO: 2845129 - RNA, 18 nt, Human
auuuaaugcauuaaaccu

SEQ ID NO: 2845130 - RNA, 19 nt, Human
auuuaaugcauuaaaccug

SEQ ID NO: 2845131 - RNA, 20 nt, Human
auuuaaugcauuaaaccugu

SEQ ID NO: 2845132 - RNA, 12 nt, Human
auuuaaugcugc

SEQ ID NO: 2845133 - RNA, 13 nt, Human
auuuaaugcugcc

SEQ ID NO: 2845134 - RNA, 14 nt, Human
auuuaaugcugccu

SEQ ID NO: 2845135 - RNA, 15 nt, Human
auuuaauauuuugca

SEQ ID NO: 2845136 - RNA, 21 nt, Human
auuuaauauggauuuguuaca

SEQ ID NO: 2845137 - RNA, 14 nt, Human
auuuauaauuccua

SEQ ID NO: 2845138 - RNA, 11 nt, Human
auuuauaauug

SEQ ID NO: 2845139 - RNA, 17 nt, Human
auuuauaauugcaucua

SEQ ID NO: 2845140 - RNA, 13 nt, Human
auuuauacaagau

SEQ ID NO: 2845141 - RNA, 15 nt, Human
auuuauacaagauug

SEQ ID NO: 2845142 - RNA, 22 nt, Human
auuuauacaagauugaaaaucu

SEQ ID NO: 2845143 - RNA, 17 nt, Human
auuuauaauucaguaug

SEQ ID NO: 2845144 - RNA, 19 nt, Human
auuuauaauucaguauguu

SEQ ID NO: 2845145 - RNA, 20 nt, Human
auuuauaauucaguauguuu

SEQ ID NO: 2845146 - RNA, 21 nt, Human
auuuaauuaggaaaaaaacua

SEQ ID NO: 2845147 - RNA, 12 nt, Human
auuuaauguuuu

SEQ ID NO: 2845148 - RNA, 17 nt, Human
auuuaauguuuuaaaug

SEQ ID NO: 2845149 - RNA, 18 nt, Human
auuuaauguuuuaaaugu

SEQ ID NO: 2845150 - RNA, 19 nt, Human
auuuaauguuuuaaaugua

SEQ ID NO: 2845151 - RNA, 20 nt, Human
auuuaauguuuuaaauguac

SEQ ID NO: 2845152 - RNA, 21 nt, Human
auuuaauguuuuaaauguaca

SEQ ID NO: 2845153 - RNA, 23 nt, Human
auuuaauguuuuaaauguacaga

SEQ ID NO: 2845154 - RNA, 14 nt, Human
auuuaaugugaguu

SEQ ID NO: 2845155 - RNA, 15 nt, Human
auuuaaugugaguuu

SEQ ID NO: 2845156 - RNA, 16 nt, Human
auuuaaugugaguuug

SEQ ID NO: 2845157 - RNA, 15 nt, Human
auuuaauaucuucag

SEQ ID NO: 2845158 - RNA, 13 nt, Human
auuuaauauuuau

SEQ ID NO: 2845159 - RNA, 14 nt, Human
auuuauacuauuua

SEQ ID NO: 2845160 - RNA, 13 nt, Human
auuuauaccucaa

SEQ ID NO: 2845161 - RNA, 18 nt, Human
auuuauaccucaaacuau

SEQ ID NO: 2845162 - RNA, 22 nt, Human
auuuauaccucaaacuaucugg

SEQ ID NO: 2845163 - RNA, 19 nt, Human
auuuauauuuuuaaaauau

SEQ ID NO: 2845164 - RNA, 14 nt, Human
auuuauaguuugua

SEQ ID NO: 2845165 - RNA, 12 nt, Human
auuuauaguuug

SEQ ID NO: 2845166 - RNA, 16 nt, Human
auuuaucacacuucug

SEQ ID NO: 2845167 - RNA, 12 nt, Human
auuuaucaaauc

SEQ ID NO: 2845168 - RNA, 13 nt, Human
auuuaucaaauca

SEQ ID NO: 2845169 - RNA, 13 nt, Human
auuuaucaaagca

SEQ ID NO: 2845170 - RNA, 14 nt, Human
auuuaucaaagcau

SEQ ID NO: 2845171 - RNA, 20 nt, Human
auuuaucaaagcauagaugu

SEQ ID NO: 2845172 - RNA, 22 nt, Human
auuuaucaaagcauagauguuu

SEQ ID NO: 2845173 - RNA, 14 nt, Human
auuuaucaaaucag

SEQ ID NO: 2845174 - RNA, 17 nt, Human
auuuaucaaaucaguca

SEQ ID NO: 2845175 - RNA, 12 nt, Human
auuucaagguuc

SEQ ID NO: 2845176 - RNA, 13 nt, Human
auuucaagguucu

SEQ ID NO: 2845177 - RNA, 18 nt, Human
auuucagauucccagagc

SEQ ID NO: 2845178 - RNA, 15 nt, Human
auuucagauuuugau

SEQ ID NO: 2845179 - RNA, 16 nt, Human
auuucagauuuugaua

SEQ ID NO: 2845180 - RNA, 17 nt, Human
auuucagauuuugauaa

SEQ ID NO: 2845181 - RNA, 18 nt, Human
auuucagauuuugauaac

SEQ ID NO: 2845182 - RNA, 22 nt, Human
auuucagauuuugauaacuguu

SEQ ID NO: 2845183 - RNA, 14 nt, Human
auuucaucauuguu

SEQ ID NO: 2845184 - RNA, 17 nt, Human
auuucaucauuguuucu

SEQ ID NO: 2845185 - RNA, 18 nt, Human
auuucaucauuguuucug

SEQ ID NO: 2845186 - RNA, 22 nt, Human
auuucagagaggccuuuuggaa

SEQ ID NO: 2845187 - RNA, 13 nt, Human
auuucagauguaa

SEQ ID NO: 2845188 - RNA, 14 nt, Human
auuucagauguaau

SEQ ID NO: 2845189 - RNA, 15 nt, Human
auuucagauguaaug

SEQ ID NO: 2845190 - RNA, 16 nt, Human
auuucagauguaaugu

SEQ ID NO: 2845191 - RNA, 17 nt, Human
auuucagauguaauguu

SEQ ID NO: 2845192 - RNA, 18 nt, Human
auuucagauguaauguuu

SEQ ID NO: 2845193 - RNA, 19 nt, Human
auuucagauguaauguuuu

SEQ ID NO: 2845194 - RNA, 20 nt, Human
auuucagauguaauguuuuc

SEQ ID NO: 2845195 - RNA, 14 nt, Human
auuucaauucucaa

SEQ ID NO: 2845196 - RNA, 16 nt, Human
auuucagagaggccuu

SEQ ID NO: 2845197 - RNA, 17 nt, Human
auuucaagguucuaacc

SEQ ID NO: 2845198 - RNA, 14 nt, Human
auuucaagguucua

SEQ ID NO: 2845199 - RNA, 15 nt, Human
auuucaagguucuaa

SEQ ID NO: 2845200 - RNA, 19 nt, Human
auuguugacaacugugacu

SEQ ID NO: 2845201 - RNA, 12 nt, Human
auuguuuaugua

SEQ ID NO: 2845202 - RNA, 13 nt, Human
auuguuuauguaa

SEQ ID NO: 2845203 - RNA, 14 nt, Human
auuguacagcuguu

SEQ ID NO: 2845204 - RNA, 16 nt, Human
auuguacagcuguuua

SEQ ID NO: 2845205 - RNA, 17 nt, Human
auuguacagcuguuuaa

SEQ ID NO: 2845206 - RNA, 20 nt, Human
auuguacagcuguuuaagau

SEQ ID NO: 2845207 - RNA, 18 nt, Human
auuguugacaacugugac

SEQ ID NO: 2845208 - RNA, 20 nt, Human
auuguugacaacugugacug

SEQ ID NO: 2845209 - RNA, 15 nt, Human
auuguugaaauuuug

SEQ ID NO: 2845210 - RNA, 16 nt, Human
auuguugaaauuuugc

SEQ ID NO: 2845211 - RNA, 17 nt, Human
auuguugaaucuauuuc

SEQ ID NO: 2845212 - RNA, 15 nt, Human
auuguaaaauagcuu

SEQ ID NO: 2845213 - RNA, 19 nt, Human
auuguaaaauagcuuguau

SEQ ID NO: 2845214 - RNA, 21 nt, Human
auuguaaaauagcuuguauag

SEQ ID NO: 2845215 - RNA, 22 nt, Human
auuguaaaauagcuuguauagu

SEQ ID NO: 2845216 - RNA, 15 nt, Human
auuguaaauuauauu

SEQ ID NO: 2845217 - RNA, 21 nt, Human
auuguaaauuauauuugugcu

SEQ ID NO: 2845218 - RNA, 20 nt, Human
auuguaaaaccugucaauga

SEQ ID NO: 2845219 - RNA, 21 nt, Human
auuguaaaaccugucaaugau

SEQ ID NO: 2845220 - RNA, 20 nt, Human
auugaucauuuuccccccac

SEQ ID NO: 2845221 - RNA, 19 nt, Human
auugaucauuuucccccca

SEQ ID NO: 2845222 - RNA, 21 nt, Human
auugaucauuuuccccccacu

SEQ ID NO: 2845223 - RNA, 17 nt, Human
auugaugaaaagauuua

SEQ ID NO: 2845224 - RNA, 18 nt, Human
auugaugaaaagauuuaa

SEQ ID NO: 2845225 - RNA, 21 nt, Human
auugaugaaaagauuuaagca

SEQ ID NO: 2845226 - RNA, 22 nt, Human
auugaugaaaagauuuaagcac

SEQ ID NO: 2845227 - RNA, 14 nt, Human
auucacaaacuuuu

SEQ ID NO: 2845228 - RNA, 22 nt, Human
auucacaaacuuuuauacucuu

SEQ ID NO: 2845229 - RNA, 13 nt, Human
auucacaaacuuu

SEQ ID NO: 2845230 - RNA, 21 nt, Human
auucaagaaugccaguagaaa

SEQ ID NO: 2845231 - RNA, 22 nt, Human
auucaagaaaacaacuucaaua

SEQ ID NO: 2845232 - RNA, 17 nt, Human
auuaugugguuuuagau

SEQ ID NO: 2845233 - RNA, 11 nt, Human
auuaugugugc

SEQ ID NO: 2845234 - RNA, 13 nt, Human
auuaugugugcau

SEQ ID NO: 2845235 - RNA, 19 nt, Human
auuaugugugcaugugugu

SEQ ID NO: 2845236 - RNA, 21 nt, Human
auuaugugugcauguguguau

SEQ ID NO: 2845237 - RNA, 19 nt, Human
auucaaccauggacuuuau

SEQ ID NO: 2845238 - RNA, 20 nt, Human
auucaaccauggacuuuaua

SEQ ID NO: 2845239 - RNA, 21 nt, Human
auucaaccauggacuuuauaa

SEQ ID NO: 2845240 - RNA, 18 nt, Human
auuaaauuuugaguucua

SEQ ID NO: 2845241 - RNA, 17 nt, Human
auuaaauaagauucuaa

SEQ ID NO: 2845242 - RNA, 12 nt, Human
auuaaauuuaau

SEQ ID NO: 2845243 - RNA, 13 nt, Human
auuaaauuuaauu

SEQ ID NO: 2845244 - RNA, 18 nt, Human
auuaaauuuaauucuuca

SEQ ID NO: 2845245 - RNA, 17 nt, Human
auuaaauuugcaacaau

SEQ ID NO: 2845246 - RNA, 21 nt, Human
auuaaauuuguugacaaaauu

SEQ ID NO: 2845247 - RNA, 14 nt, Human
auuaugugguuuua

SEQ ID NO: 2845248 - RNA, 16 nt, Human
auuaugugguuuuaga

SEQ ID NO: 2845249 - RNA, 17 nt, Human
auucacaaacuuuuaua

SEQ ID NO: 2845250 - RNA, 13 nt, Human
auucauuuuuaau

SEQ ID NO: 2845251 - RNA, 14 nt, Human
auucauuuuauauu

SEQ ID NO: 2845252 - RNA, 18 nt, Human
auucauuuuauauugaaa

SEQ ID NO: 2845253 - RNA, 20 nt, Human
auucauuuuauauugaaaaa

SEQ ID NO: 2845254 - RNA, 22 nt, Human
auucauuuuauauugaaaaaaa

SEQ ID NO: 2845255 - RNA, 13 nt, Human
auuccucuguauu

SEQ ID NO: 2845256 - RNA, 20 nt, Human
auuccaaagaguagaauugc

SEQ ID NO: 2845257 - RNA, 12 nt, Human
auucauuucaca

SEQ ID NO: 2845258 - RNA, 13 nt, Human
auucauuucacau

SEQ ID NO: 2845259 - RNA, 20 nt, Human
auucauuucacauuaauggu

SEQ ID NO: 2845260 - RNA, 22 nt, Human
auucauuucacauuaauggucu

SEQ ID NO: 2845261 - RNA, 18 nt, Human
auucauggaccacuguuu

SEQ ID NO: 2845262 - RNA, 20 nt, Human
auucauggaccacuguuucu

SEQ ID NO: 2845263 - RNA, 22 nt, Human
auucauggaccacuguuucuug

SEQ ID NO: 2845264 - RNA, 14 nt, Human
auucaugccuggcu

SEQ ID NO: 2845265 - RNA, 14 nt, Human
auucaugcuaccca

SEQ ID NO: 2845266 - RNA, 13 nt, Human
auucaugccuggc

SEQ ID NO: 2845267 - RNA, 20 nt, Human
auucaucuguuuuucuuuuu

SEQ ID NO: 2845268 - RNA, 16 nt, Human
auucaucuucuucuuu

SEQ ID NO: 2845269 - RNA, 17 nt, Human
auucaucuuguguuuua

SEQ ID NO: 2845270 - RNA, 19 nt, Human
auucaucaaauggaagaca

SEQ ID NO: 2845271 - RNA, 14 nt, Human
auucaucagcauuu

SEQ ID NO: 2845272 - RNA, 20 nt, Human
auugagaaaaauauauacua

SEQ ID NO: 2845273 - RNA, 17 nt, Human
auugagaaggagagaaa

SEQ ID NO: 2845274 - RNA, 14 nt, Human
auugagaaguucau

SEQ ID NO: 2845275 - RNA, 16 nt, Human
auugagaaguucauug

SEQ ID NO: 2845276 - RNA, 14 nt, Human
auugagaaggagag

SEQ ID NO: 2845277 - RNA, 15 nt, Human
auugagaaggagaga

SEQ ID NO: 2845278 - RNA, 16 nt, Human
auugagaaggagagaa

SEQ ID NO: 2845279 - RNA, 13 nt, Human
auugagaaggaga

SEQ ID NO: 2845280 - RNA, 14 nt, Human
auugagacagugca

SEQ ID NO: 2845281 - RNA, 19 nt, Human
auugagacagugcacauga

SEQ ID NO: 2845282 - RNA, 14 nt, Human
auugagaguuuugu

SEQ ID NO: 2845283 - RNA, 19 nt, Human
auugagauuaugaugaaaa

SEQ ID NO: 2845284 - RNA, 22 nt, Human
auugagauuguccucauuucuc

SEQ ID NO: 2845285 - RNA, 12 nt, Human
auugagauuucu

SEQ ID NO: 2845286 - RNA, 16 nt, Human
auugagaguuuugucu

SEQ ID NO: 2845287 - RNA, 20 nt, Human
auugagaguuuugucuugaa

SEQ ID NO: 2845288 - RNA, 16 nt, Human
auugagauacuuuuuc

SEQ ID NO: 2845289 - RNA, 22 nt, Human
auugagauacuuuuucuuuugu

SEQ ID NO: 2845290 - RNA, 17 nt, Human
auugagaugauuaaaau

SEQ ID NO: 2845291 - RNA, 15 nt, Human
auugaucauaaacug

SEQ ID NO: 2845292 - RNA, 18 nt, Human
auugaucauuuucccccc

SEQ ID NO: 2845293 - RNA, 13 nt, Human
auugauauuguga

SEQ ID NO: 2845294 - RNA, 14 nt, Human
auugauauugugaa

SEQ ID NO: 2845295 - RNA, 15 nt, Human
auugauauugugaac

SEQ ID NO: 2845296 - RNA, 19 nt, Human
auugauauugugaacauuu

SEQ ID NO: 2845297 - RNA, 15 nt, Human
auugagcugauauaa

SEQ ID NO: 2845298 - RNA, 19 nt, Human
auugagcugauauaaauuc

SEQ ID NO: 2845299 - RNA, 20 nt, Human
auugagcugauauaaauucu

SEQ ID NO: 2845300 - RNA, 22 nt, Human
auugagcugauauaaauucugu

SEQ ID NO: 2845301 - RNA, 19 nt, Human
auucugagcauacucaaca

SEQ ID NO: 2845302 - RNA, 17 nt, Human
auucugaggcccugccc

SEQ ID NO: 2845303 - RNA, 15 nt, Human
auucugaggcccugc

SEQ ID NO: 2845304 - RNA, 18 nt, Human
auucugaggcccugccca

SEQ ID NO: 2845305 - RNA, 24 nt, Human
auuccugaacuauaacaccugcca

SEQ ID NO: 2845306 - RNA, 15 nt, Human
auucugagaaaacaa

SEQ ID NO: 2845307 - RNA, 19 nt, Human
auucugagacaugugucaa

SEQ ID NO: 2845308 - RNA, 14 nt, Human
auucugagaccaaa

SEQ ID NO: 2845309 - RNA, 14 nt, Human
auucugagaaaaca

SEQ ID NO: 2845310 - RNA, 23 nt, Human
auuccugauaugauuuaaaacau

SEQ ID NO: 2845311 - RNA, 20 nt, Human
auuccugauaugauuuaaaa

SEQ ID NO: 2845312 - RNA, 22 nt, Human
auuccugauaugauuuaaaaca

SEQ ID NO: 2845313 - RNA, 16 nt, Human
auuccugauaugauuu

SEQ ID NO: 2845314 - RNA, 19 nt, Human
auuccugauaugauuuaaa

SEQ ID NO: 2845315 - RNA, 20 nt, Human
auuccugagauuuccuccug

SEQ ID NO: 2845316 - RNA, 22 nt, Human
auuccugagauuuccuccuggc

SEQ ID NO: 2845317 - RNA, 17 nt, Human
auucuugguuggcuggc

SEQ ID NO: 2845318 - RNA, 20 nt, Human
auucuugguuggcuggccuu

SEQ ID NO: 2845319 - RNA, 18 nt, Human
auucuuguaaggcuuuga

SEQ ID NO: 2845320 - RNA, 13 nt, Human
auucuuguacagu

SEQ ID NO: 2845321 - RNA, 12 nt, Human
auucuugugcuu

SEQ ID NO: 2845322 - RNA, 18 nt, Human
auucuugugcuuuuccug

SEQ ID NO: 2845323 - RNA, 18 nt, Human
auucuuguuuucuuucuu

SEQ ID NO: 2845324 - RNA, 21 nt, Human
auucuuguuuucuuucuuuaa

SEQ ID NO: 2845325 - RNA, 23 nt, Human
auucuuguuuucuuucuuuaaau

SEQ ID NO: 2845326 - RNA, 14 nt, Human
auucuugucaaaaa

SEQ ID NO: 2845327 - RNA, 16 nt, Human
caaaucaguuaguuuu

SEQ ID NO: 2845328 - RNA, 13 nt, Human
caaaucagucagu

SEQ ID NO: 2845329 - RNA, 23 nt, Human
caaaucagucagugcaaauguca

SEQ ID NO: 2845330 - RNA, 14 nt, Human
caaaguauuguaaa

SEQ ID NO: 2845331 - RNA, 15 nt, Human
caaaguauuguaaau

SEQ ID NO: 2845332 - RNA, 16 nt, Human
caaaguauuguaaauu

SEQ ID NO: 2845333 - RNA, 17 nt, Human
caaaguauuguaaauua

SEQ ID NO: 2845334 - RNA, 18 nt, Human
caaaguauuguaaauuau

SEQ ID NO: 2845335 - RNA, 19 nt, Human
caaaguauuguaaauuaua

SEQ ID NO: 2845336 - RNA, 20 nt, Human
caaaguauuguaaauuauau

SEQ ID NO: 2845337 - RNA, 22 nt, Human
caaaguauuguaaauuauauuu

SEQ ID NO: 2845338 - RNA, 21 nt, Human
caaaguaaaacuugcugccug

SEQ ID NO: 2845339 - RNA, 13 nt, Human
caaaguaaaagaa

SEQ ID NO: 2845340 - RNA, 14 nt, Human
caaaguaaaagaaa

SEQ ID NO: 2845341 - RNA, 15 nt, Human
caaaguaaaagaaac

SEQ ID NO: 2845342 - RNA, 23 nt, Human
caaaguaaaagaaaccacuucug

SEQ ID NO: 2845343 - RNA, 13 nt, Human
caaagaugaccau

SEQ ID NO: 2845344 - RNA, 19 nt, Human
caaagaugaccauaaccac

SEQ ID NO: 2845345 - RNA, 17 nt, Human
caacaaaaagcuucccc

SEQ ID NO: 2845346 - RNA, 16 nt, Human
caacaaaaagcuuccc

SEQ ID NO: 2845347 - RNA, 17 nt, Human
caaauuuuuuaaaagag

SEQ ID NO: 2845348 - RNA, 19 nt, Human
caaauuuuuuaaaagagac

SEQ ID NO: 2845349 - RNA, 19 nt, Human
caaauuuuuauuuuuuagu

SEQ ID NO: 2845350 - RNA, 23 nt, Human
caaauuuuuauuuuuuagugcau

SEQ ID NO: 2845351 - RNA, 20 nt, Human
caaauuuuucucaguuugua

SEQ ID NO: 2845352 - RNA, 21 nt, Human
caacaauuugggcuuccuguu

SEQ ID NO: 2845353 - RNA, 17 nt, Human
caaaucuauuuaauuag

SEQ ID NO: 2845354 - RNA, 23 nt, Human
caaaucuauuuaauuaggaaaaa

SEQ ID NO: 2845355 - RNA, 21 nt, Human
caaaucucaaugaagccagcu

SEQ ID NO: 2845356 - RNA, 14 nt, Human
caaaucugaagauu

SEQ ID NO: 2845357 - RNA, 19 nt, Human
caaaucguccagcgaccuu

SEQ ID NO: 2845358 - RNA, 21 nt, Human
caaaucguccagcgaccuucc

SEQ ID NO: 2845359 - RNA, 16 nt, Human
caaaucguuuauuuca

SEQ ID NO: 2845360 - RNA, 20 nt, Human
caaaguacaauguguuuuuc

SEQ ID NO: 2845361 - RNA, 19 nt, Human
caaaugcagggauugcugc

SEQ ID NO: 2845362 - RNA, 20 nt, Human
caaaugcagggauugcugcc

SEQ ID NO: 2845363 - RNA, 22 nt, Human
caaaugcagggauugcugccac

SEQ ID NO: 2845364 - RNA, 21 nt, Human
caaauuuugaugccaagaaag

SEQ ID NO: 2845365 - RNA, 23 nt, Human
caaaugcagggauugcugccacu

SEQ ID NO: 2845366 - RNA, 16 nt, Human
caaaugcaguauauuu

SEQ ID NO: 2845367 - RNA, 18 nt, Human
caaaugcaguauauuucu

SEQ ID NO: 2845368 - RNA, 15 nt, Human
caaaugcaauuugau

SEQ ID NO: 2845369 - RNA, 13 nt, Human
caaaugcagcuuu

SEQ ID NO: 2845370 - RNA, 14 nt, Human
caaccauuccccau

SEQ ID NO: 2845371 - RNA, 15 nt, Human
caacccaaggacuga

SEQ ID NO: 2845372 - RNA, 19 nt, Human
caacccaaggacugaggga

SEQ ID NO: 2845373 - RNA, 22 nt, Human
caacccaaggacugagggacuc

SEQ ID NO: 2845374 - RNA, 21 nt, Human
caaccacuaagaauucaaacu

SEQ ID NO: 2845375 - RNA, 12 nt, Human
caaccagacaga

SEQ ID NO: 2845376 - RNA, 13 nt, Human
caaccagacagag

SEQ ID NO: 2845377 - RNA, 15 nt, Human
caaccagacagaggg

SEQ ID NO: 2845378 - RNA, 17 nt, Human
caaccauggacuuuaua

SEQ ID NO: 2845379 - RNA, 18 nt, Human
caaccauggacuuuauaa

SEQ ID NO: 2845380 - RNA, 22 nt, Human
caaccauuccagacugcuucca

SEQ ID NO: 2845381 - RNA, 16 nt, Human
caaccauuccagacug

SEQ ID NO: 2845382 - RNA, 14 nt, Human
caaccauuccagac

SEQ ID NO: 2845383 - RNA, 13 nt, Human
caaccauuccaga

SEQ ID NO: 2845384 - RNA, 17 nt, Human
caacuaugauuuggaaa

SEQ ID NO: 2845385 - RNA, 16 nt, Human
caaccccacccuguuu

SEQ ID NO: 2845386 - RNA, 20 nt, Human
caacuauuuuuccaaaauaa

SEQ ID NO: 2845387 - RNA, 18 nt, Human
caacuaugauuuggaaaa

SEQ ID NO: 2845388 - RNA, 19 nt, Human
caacuaugauuuggaaaau

SEQ ID NO: 2845389 - RNA, 17 nt, Human
caacccccagccugcua

SEQ ID NO: 2845390 - RNA, 16 nt, Human
caacccccagccugcu

SEQ ID NO: 2845391 - RNA, 15 nt, Human
caacccccagccugc

SEQ ID NO: 2845392 - RNA, 17 nt, Human
caaccccaagccagccc

SEQ ID NO: 2845393 - RNA, 22 nt, Human
caacccaugaugagcuccucuu

SEQ ID NO: 2845394 - RNA, 14 nt, Human
caagaaguuuauuc

SEQ ID NO: 2845395 - RNA, 17 nt, Human
caagaaguuuauucuca

SEQ ID NO: 2845396 - RNA, 12 nt, Human
caagaauaaaaa

SEQ ID NO: 2845397 - RNA, 19 nt, Human
caagaagucaaaguaaaac

SEQ ID NO: 2845398 - RNA, 23 nt, Human
caagaaggguuuuccacccugga

SEQ ID NO: 2845399 - RNA, 16 nt, Human
caagaaguagcagugu

SEQ ID NO: 2845400 - RNA, 20 nt, Human
caagaaguagcagugucugu

SEQ ID NO: 2845401 - RNA, 22 nt, Human
caagaaggguuuuccacccugg

SEQ ID NO: 2845402 - RNA, 23 nt, Human
caagaauuucuugguaagaagcc

SEQ ID NO: 2845403 - RNA, 22 nt, Human
caagaauuucuugguaagaagc

SEQ ID NO: 2845404 - RNA, 14 nt, Human
caagacaaaccaag

SEQ ID NO: 2845405 - RNA, 12 nt, Human
caagacaaauca

SEQ ID NO: 2845406 - RNA, 13 nt, Human
caagacaaaucaa

SEQ ID NO: 2845407 - RNA, 14 nt, Human
caagacaaaucaac

SEQ ID NO: 2845408 - RNA, 15 nt, Human
caagacaaaucaaca

SEQ ID NO: 2845409 - RNA, 18 nt, Human
caagacaaaucaacagaa

SEQ ID NO: 2845410 - RNA, 20 nt, Human
caagacaaaucaacagaagc

SEQ ID NO: 2845411 - RNA, 21 nt, Human
caagacaaaucaacagaagca

SEQ ID NO: 2845412 - RNA, 13 nt, Human
caagacacaguga

SEQ ID NO: 2845413 - RNA, 21 nt, Human
caagacagaugccccagagcu

SEQ ID NO: 2845414 - RNA, 16 nt, Human
caagacagaugcccca

SEQ ID NO: 2845415 - RNA, 13 nt, Human
caagacagaugcc

SEQ ID NO: 2845416 - RNA, 15 nt, Human
caagacacaucccua

SEQ ID NO: 2845417 - RNA, 19 nt, Human
caagauguugauuuuuacu

SEQ ID NO: 2845418 - RNA, 14 nt, Human
caagauuaaaugua

SEQ ID NO: 2845419 - RNA, 20 nt, Human
caaaaaaaaaaaaagaagac

SEQ ID NO: 2845420 - RNA, 21 nt, Human
caaaaaaaaaaaaagaagacc

SEQ ID NO: 2845421 - RNA, 17 nt, Human
auuuuuuuuuccuagcc

SEQ ID NO: 2845422 - RNA, 13 nt, Human
caaaaaaaccaca

SEQ ID NO: 2845423 - RNA, 17 nt, Human
caaaaaaaccacaaagg

SEQ ID NO: 2845424 - RNA, 18 nt, Human
caaaaaaaccacaaaggc

SEQ ID NO: 2845425 - RNA, 22 nt, Human
caaaaaaaccacaaaggccaaa

SEQ ID NO: 2845426 - RNA, 15 nt, Human
caaaaaaaagucuau

SEQ ID NO: 2845427 - RNA, 18 nt, Human
caaaaaaauauauuuaau

SEQ ID NO: 2845428 - RNA, 15 nt, Human
auuuuuaaucaugaa

SEQ ID NO: 2845429 - RNA, 12 nt, Human
caaaagcugcuc

SEQ ID NO: 2845430 - RNA, 19 nt, Human
caaaagcuagacagauccc

SEQ ID NO: 2845431 - RNA, 13 nt, Human
caaaagccuugug

SEQ ID NO: 2845432 - RNA, 14 nt, Human
caaaagccuugugu

SEQ ID NO: 2845433 - RNA, 18 nt, Human
caaaagccuuguguauau

SEQ ID NO: 2845434 - RNA, 19 nt, Human
caaaagccuuguguauauu

SEQ ID NO: 2845435 - RNA, 20 nt, Human
caaaagccuuguguauauuu

SEQ ID NO: 2845436 - RNA, 22 nt, Human
caaaagccuuguguauauuugu

SEQ ID NO: 2845437 - RNA, 23 nt, Human
caaaagccuuguguauauuugua

SEQ ID NO: 2845438 - RNA, 17 nt, Human
auuuuuacccuaauguc

SEQ ID NO: 2845439 - RNA, 19 nt, Human
auuuuuacccuaaugucuu

SEQ ID NO: 2845440 - RNA, 21 nt, Human
auuuuuacccuaaugucuuca

SEQ ID NO: 2845441 - RNA, 22 nt, Human
auuuuuacccuaaugucuucau

SEQ ID NO: 2845442 - RNA, 19 nt, Human
auuuuuacauggagaaaac

SEQ ID NO: 2845443 - RNA, 16 nt, Human
auuuuuaaucaugaaa

SEQ ID NO: 2845444 - RNA, 17 nt, Human
auuuuuaaucaugaaau

SEQ ID NO: 2845445 - RNA, 16 nt, Human
auuuuuaauggcagca

SEQ ID NO: 2845446 - RNA, 12 nt, Human
auuuuuaauuaa

SEQ ID NO: 2845447 - RNA, 15 nt, Human
auuuuuaauuaaaaa

SEQ ID NO: 2845448 - RNA, 18 nt, Human
auuuuuaauuaaaaacua

SEQ ID NO: 2845449 - RNA, 19 nt, Human
auuuuuacaagaaguuuau

SEQ ID NO: 2845450 - RNA, 20 nt, Human
auuuuuacaagaaguuuauu

SEQ ID NO: 2845451 - RNA, 22 nt, Human
auuuuuacaagaaguuuauucu

SEQ ID NO: 2845452 - RNA, 14 nt, Human
caaaagcugcucag

SEQ ID NO: 2845453 - RNA, 20 nt, Human
caaaagguucacuaaagcag

SEQ ID NO: 2845454 - RNA, 19 nt, Human
caaaagguucacuaaagca

SEQ ID NO: 2845455 - RNA, 14 nt, Human
caaaaguaaugccu

SEQ ID NO: 2845456 - RNA, 15 nt, Human
caaaaguaaugccuc

SEQ ID NO: 2845457 - RNA, 17 nt, Human
caaaaguaaugccucug

SEQ ID NO: 2845458 - RNA, 22 nt, Human
caaaaguaaugccucugucuag

SEQ ID NO: 2845459 - RNA, 14 nt, Human
caaaccacacugga

SEQ ID NO: 2845460 - RNA, 21 nt, Human
caaaccaagagauugcuaauu

SEQ ID NO: 2845461 - RNA, 17 nt, Human
caaaccaagucggaaca

SEQ ID NO: 2845462 - RNA, 22 nt, Human
caaaccaagucggaacagcaga

SEQ ID NO: 2845463 - RNA, 14 nt, Human
caaaccacaacuga

SEQ ID NO: 2845464 - RNA, 15 nt, Human
caaaccacaacugac

SEQ ID NO: 2845465 - RNA, 21 nt, Human
caaaccacaacugacacagga

SEQ ID NO: 2845466 - RNA, 15 nt, Human
caaaccacacuggac

SEQ ID NO: 2845467 - RNA, 14 nt, Human
caaagaucaaaaua

SEQ ID NO: 2845468 - RNA, 15 nt, Human
caaagaucaaaauaa

SEQ ID NO: 2845469 - RNA, 13 nt, Human
caaagaucaaaau

SEQ ID NO: 2845470 - RNA, 16 nt, Human
caaagaucaaaauaaa

SEQ ID NO: 2845471 - RNA, 17 nt, Human
caaagaucaaaauaaaa

SEQ ID NO: 2845472 - RNA, 18 nt, Human
caaagaucaaaauaaaaa

SEQ ID NO: 2845473 - RNA, 20 nt, Human
caaagaucaaaauaaaaagu

SEQ ID NO: 2845474 - RNA, 15 nt, Human
auuuuauaaagugcu

SEQ ID NO: 2845475 - RNA, 21 nt, Human
auuuuauaaagugcuugugua

SEQ ID NO: 2845476 - RNA, 13 nt, Human
auuuuauauugaa

SEQ ID NO: 2845477 - RNA, 14 nt, Human
auuuuauauugaaa

SEQ ID NO: 2845478 - RNA, 15 nt, Human
auuuuauauugaaaa

SEQ ID NO: 2845479 - RNA, 16 nt, Human
auuuuauauugaaaaa

SEQ ID NO: 2845480 - RNA, 22 nt, Human
auuuuauauugaaaaaaauaau

SEQ ID NO: 2845481 - RNA, 19 nt, Human
auuuuauagacacccuggc

SEQ ID NO: 2845482 - RNA, 19 nt, Human
auuuuauaagcaaauuuca

SEQ ID NO: 2845483 - RNA, 18 nt, Human
auuuugauccaagcuggu

SEQ ID NO: 2845484 - RNA, 18 nt, Human
auuuugaguaaagcuccu

SEQ ID NO: 2845485 - RNA, 17 nt, Human
auuuugagguaaagaua

SEQ ID NO: 2845486 - RNA, 18 nt, Human
auuuugagguaaagauau

SEQ ID NO: 2845487 - RNA, 13 nt, Human
auuuugauaauaa

SEQ ID NO: 2845488 - RNA, 15 nt, Human
auuuugauaauaaau

SEQ ID NO: 2845489 - RNA, 17 nt, Human
auuuugauaauaaauug

SEQ ID NO: 2845490 - RNA, 18 nt, Human
auuuugauaauaaauuga

SEQ ID NO: 2845491 - RNA, 16 nt, Human
auuuugauaauaauau

SEQ ID NO: 2845492 - RNA, 21 nt, Human
auuuugauaauaauauuguuu

SEQ ID NO: 2845493 - RNA, 17 nt, Human
auuuugauaccagaagg

SEQ ID NO: 2845494 - RNA, 19 nt, Human
auuuugauaccagaaggga

SEQ ID NO: 2845495 - RNA, 15 nt, Human
auuuugagaacaaag

SEQ ID NO: 2845496 - RNA, 19 nt, Human
auuuugagaacaaagauga

SEQ ID NO: 2845497 - RNA, 19 nt, Human
auuuugacuuaaugugauu

SEQ ID NO: 2845498 - RNA, 13 nt, Human
auuuucuuuucuu

SEQ ID NO: 2845499 - RNA, 19 nt, Human
auuuucuuuuguaaauguu

SEQ ID NO: 2845500 - RNA, 24 nt, Human
auuuugacaguuauuuugauaaca

SEQ ID NO: 2845501 - RNA, 17 nt, Human
auuuucuuuuguaaaug

SEQ ID NO: 2845502 - RNA, 16 nt, Human
auuuucuuuuguaaau

SEQ ID NO: 2845503 - RNA, 23 nt, Human
auuuucuuuguguagcuuugcuc

SEQ ID NO: 2845504 - RNA, 20 nt, Human
auuuucuuuucuuucaacuu

SEQ ID NO: 2845505 - RNA, 18 nt, Human
auuuucuuuugaauuguu

SEQ ID NO: 2845506 - RNA, 20 nt, Human
auuuucuuuugaauuguuuu

SEQ ID NO: 2845507 - RNA, 16 nt, Human
auuuucuuucuguaac

SEQ ID NO: 2845508 - RNA, 12 nt, Human
auuuucuucuaa

SEQ ID NO: 2845509 - RNA, 13 nt, Human
auuuucuucuaag

SEQ ID NO: 2845510 - RNA, 14 nt, Human
auuuucuucuaagu

SEQ ID NO: 2845511 - RNA, 16 nt, Human
auuuucuucuaaguga

SEQ ID NO: 2845512 - RNA, 20 nt, Human
auuuucuucuaagugaaauu

SEQ ID NO: 2845513 - RNA, 21 nt, Human
auuuuuaagcaaaauauuauu

SEQ ID NO: 2845514 - RNA, 12 nt, Human
auuuuuaaauug

SEQ ID NO: 2845515 - RNA, 13 nt, Human
auuuuuaaauugu

SEQ ID NO: 2845516 - RNA, 14 nt, Human
auuuuuaaauuguu

SEQ ID NO: 2845517 - RNA, 19 nt, Human
auuuuuaaauguaaaacau

SEQ ID NO: 2845518 - RNA, 14 nt, Human
auuuuuaaaguaga

SEQ ID NO: 2845519 - RNA, 19 nt, Human
auuuuuaaaguagaagagg

SEQ ID NO: 2845520 - RNA, 12 nt, Human
auuuuuaaagau

SEQ ID NO: 2845521 - RNA, 15 nt, Human
auuuuuaaagauaga

SEQ ID NO: 2845522 - RNA, 13 nt, Human
auuuuuaaagauc

SEQ ID NO: 2845523 - RNA, 14 nt, Human
auuuuuaaagcaug

SEQ ID NO: 2845524 - RNA, 15 nt, Human
auuuuuaaagcaugg

SEQ ID NO: 2845525 - RNA, 12 nt, Human
cacuuguacaaa

SEQ ID NO: 2845526 - RNA, 15 nt, Human
cacuuggugcuggga

SEQ ID NO: 2845527 - RNA, 17 nt, Human
cacuuggugcugggaac

SEQ ID NO: 2845528 - RNA, 20 nt, Human
cacuuagaaauugcauuucc

SEQ ID NO: 2845529 - RNA, 19 nt, Human
cacuugugauuauaaaauu

SEQ ID NO: 2845530 - RNA, 17 nt, Human
cacuugugauuauuuau

SEQ ID NO: 2845531 - RNA, 18 nt, Human
cacuugugccaacacuca

SEQ ID NO: 2845532 - RNA, 24 nt, Human
cacuugugccaacacucaagaagc

SEQ ID NO: 2845533 - RNA, 15 nt, Human
cacuugugcuuugcu

SEQ ID NO: 2845534 - RNA, 20 nt, Human
cacuuuauaagucauuguau

SEQ ID NO: 2845535 - RNA, 22 nt, Human
cacuuuauaagucauuguaugu

SEQ ID NO: 2845536 - RNA, 16 nt, Human
cacuugucucauuuua

SEQ ID NO: 2845537 - RNA, 19 nt, Human
cacuugucucauuuuaaug

SEQ ID NO: 2845538 - RNA, 22 nt, Human
cacuugucucauuuuaauguaa

SEQ ID NO: 2845539 - RNA, 17 nt, Human
cacuguugcccaggcug

SEQ ID NO: 2845540 - RNA, 21 nt, Human
cacuguuuaaguacuguuuac

SEQ ID NO: 2845541 - RNA, 17 nt, Human
cacuuagaaauugcauu

SEQ ID NO: 2845542 - RNA, 19 nt, Human
cacuuagaaauugcauuuc

SEQ ID NO: 2845543 - RNA, 20 nt, Human
cacuguuucucuugagcugg

SEQ ID NO: 2845544 - RNA, 19 nt, Human
cacuguuucucuugagcug

SEQ ID NO: 2845545 - RNA, 17 nt, Human
cacuuacuguaagacau

SEQ ID NO: 2845546 - RNA, 19 nt, Human
cacuuacuguaagacauua

SEQ ID NO: 2845547 - RNA, 18 nt, Human
cacuguuucucuugagcu

SEQ ID NO: 2845548 - RNA, 17 nt, Human
cacuguuucucuugagc

SEQ ID NO: 2845549 - RNA, 16 nt, Human
cacuggggaaaacucc

SEQ ID NO: 2845550 - RNA, 21 nt, Human
cacuggggagcccgucucagu

SEQ ID NO: 2845551 - RNA, 16 nt, Human
cacuguugcccaggcu

SEQ ID NO: 2845552 - RNA, 15 nt, Human
cacuguugcccaggc

SEQ ID NO: 2845553 - RNA, 14 nt, Human
cacuguugcccagg

SEQ ID NO: 2845554 - RNA, 22 nt, Human
cacugguggcccgacagccugg

SEQ ID NO: 2845555 - RNA, 13 nt, Human
cacugguggcccg

SEQ ID NO: 2845556 - RNA, 21 nt, Human
cacugguggcccgacagccug

SEQ ID NO: 2845557 - RNA, 22 nt, Human
cacuggggagcccgucucagug

SEQ ID NO: 2845558 - RNA, 13 nt, Human
cacuuucccaccc

SEQ ID NO: 2845559 - RNA, 16 nt, Human
cacuuucuaauguuuc

SEQ ID NO: 2845560 - RNA, 12 nt, Human
cacuuuccacuu

SEQ ID NO: 2845561 - RNA, 13 nt, Human
cacuuuccacuuc

SEQ ID NO: 2845562 - RNA, 17 nt, Human
cacuuuccacuucuucc

SEQ ID NO: 2845563 - RNA, 18 nt, Human
cacuuuccacuucuuccu

SEQ ID NO: 2845564 - RNA, 19 nt, Human
cacuuuccacuucuuccuu

SEQ ID NO: 2845565 - RNA, 22 nt, Human
cacuuuccacuucuuccuuucu

SEQ ID NO: 2845566 - RNA, 12 nt, Human
cacuuucaaaac

SEQ ID NO: 2845567 - RNA, 22 nt, Human
cacuugugccaacacucaagaa

SEQ ID NO: 2845568 - RNA, 20 nt, Human
cagaaauuggaacagaaugu

SEQ ID NO: 2845569 - RNA, 21 nt, Human
cagaaauuggaacagaauguu

SEQ ID NO: 2845570 - RNA, 11 nt, Human
cagaaauugga

SEQ ID NO: 2845571 - RNA, 23 nt, Human
cagaaauuagaaaccuuaauaug

SEQ ID NO: 2845572 - RNA, 16 nt, Human
cagaaauuagccgggc

SEQ ID NO: 2845573 - RNA, 21 nt, Human
cagaaguuguggauuucaguu

SEQ ID NO: 2845574 - RNA, 15 nt, Human
cagaaguggagcugg

SEQ ID NO: 2845575 - RNA, 16 nt, Human
cagaaguggagcuggg

SEQ ID NO: 2845576 - RNA, 13 nt, Human
cagaaguggagcu

SEQ ID NO: 2845577 - RNA, 14 nt, Human
cagaaguggagcug

SEQ ID NO: 2845578 - RNA, 12 nt, Human
cagaaguccugu

SEQ ID NO: 2845579 - RNA, 19 nt, Human
cagaaguccuguaugucug

SEQ ID NO: 2845580 - RNA, 20 nt, Human
cagaaguccuguaugucugu

SEQ ID NO: 2845581 - RNA, 21 nt, Human
cagaaguccuguaugucuguc

SEQ ID NO: 2845582 - RNA, 22 nt, Human
cagaaguccuguaugucuguca

SEQ ID NO: 2845583 - RNA, 14 nt, Human
cagaagucuccuca

SEQ ID NO: 2845584 - RNA, 15 nt, Human
cagaagucuccucaa

SEQ ID NO: 2845585 - RNA, 13 nt, Human
cagaagugaaaau

SEQ ID NO: 2845586 - RNA, 15 nt, Human
cagaacaacaacuau

SEQ ID NO: 2845587 - RNA, 19 nt, Human
cagaacacggcucacgcuu

SEQ ID NO: 2845588 - RNA, 15 nt, Human
cagaacacauaauuc

SEQ ID NO: 2845589 - RNA, 19 nt, Human
cagaagucaugaagcccaa

SEQ ID NO: 2845590 - RNA, 18 nt, Human
cagaagucaugaagccca

SEQ ID NO: 2845591 - RNA, 13 nt, Human
cagaauauugcuu

SEQ ID NO: 2845592 - RNA, 22 nt, Human
cagaauauuagugaccucagcu

SEQ ID NO: 2845593 - RNA, 15 nt, Human
cagaauagccacauu

SEQ ID NO: 2845594 - RNA, 22 nt, Human
cagaauagccacauuuggaaua

SEQ ID NO: 2845595 - RNA, 21 nt, Human
cagaauagccacauuuggaau

SEQ ID NO: 2845596 - RNA, 17 nt, Human
cagaauaaucuuugggu

SEQ ID NO: 2845597 - RNA, 15 nt, Human
cagaauaauguucua

SEQ ID NO: 2845598 - RNA, 18 nt, Human
cagaauaauguucuauug

SEQ ID NO: 2845599 - RNA, 18 nt, Human
cagaauaaggcaggcauu

SEQ ID NO: 2845600 - RNA, 20 nt, Human
cagaauaaggcaggcauuga

SEQ ID NO: 2845601 - RNA, 16 nt, Human
cagaaguuuggcaaua

SEQ ID NO: 2845602 - RNA, 17 nt, Human
caccuaagucucuguga

SEQ ID NO: 2845603 - RNA, 16 nt, Human
caccuaagucucugug

SEQ ID NO: 2845604 - RNA, 15 nt, Human
caccuaagucucugu

SEQ ID NO: 2845605 - RNA, 18 nt, Human
caccuaagagauucugau

SEQ ID NO: 2845606 - RNA, 20 nt, Human
caccuaaagguguauuuaaa

SEQ ID NO: 2845607 - RNA, 21 nt, Human
caccuaaagguguauuuaaac

SEQ ID NO: 2845608 - RNA, 18 nt, Human
caccuaccacucacauga

SEQ ID NO: 2845609 - RNA, 13 nt, Human
caccuauuuccau

SEQ ID NO: 2845610 - RNA, 21 nt, Human
caccuaugugccaacuguugu

SEQ ID NO: 2845611 - RNA, 12 nt, Human
caccuaugugcc

SEQ ID NO: 2845612 - RNA, 14 nt, Human
caccuaugugccaa

SEQ ID NO: 2845613 - RNA, 17 nt, Human
caccuaugugccaacug

SEQ ID NO: 2845614 - RNA, 18 nt, Human
caccuaccgaguucaagu

SEQ ID NO: 2845615 - RNA, 20 nt, Human
caccuaccaccacgcccggc

SEQ ID NO: 2845616 - RNA, 22 nt, Human
caccuaccaucagggacaggau

SEQ ID NO: 2845617 - RNA, 23 nt, Human
caccuacccauacacccccucuu

SEQ ID NO: 2845618 - RNA, 17 nt, Human
caccuaccaucagggac

SEQ ID NO: 2845619 - RNA, 18 nt, Human
caccuaccaucagggaca

SEQ ID NO: 2845620 - RNA, 17 nt, Human
caccugccauuugcacc

SEQ ID NO: 2845621 - RNA, 19 nt, Human
caccuugacagggcacacc

SEQ ID NO: 2845622 - RNA, 14 nt, Human
caccuugcggggau

SEQ ID NO: 2845623 - RNA, 13 nt, Human
caccuuggcucaa

SEQ ID NO: 2845624 - RNA, 13 nt, Human
caccuuuguagca

SEQ ID NO: 2845625 - RNA, 14 nt, Human
caccuuuguagcac

SEQ ID NO: 2845626 - RNA, 20 nt, Human
caccuuuguagcacucaggc

SEQ ID NO: 2845627 - RNA, 21 nt, Human
caccuuuguagcacucaggcu

SEQ ID NO: 2845628 - RNA, 18 nt, Human
caccuuugcacaggaugc

SEQ ID NO: 2845629 - RNA, 15 nt, Human
caccuuuagguucuu

SEQ ID NO: 2845630 - RNA, 20 nt, Human
caccuuuaaguagauaagca

SEQ ID NO: 2845631 - RNA, 14 nt, Human
caccuuuacuuuag

SEQ ID NO: 2845632 - RNA, 14 nt, Human
caccuuuagguucu

SEQ ID NO: 2845633 - RNA, 15 nt, Human
caccuugugucugua

SEQ ID NO: 2845634 - RNA, 17 nt, Human
caccuugugucuguaca

SEQ ID NO: 2845635 - RNA, 21 nt, Human
caccuugugucuguacacgug

SEQ ID NO: 2845636 - RNA, 22 nt, Human
caccuuguguguuccaaguuuc

SEQ ID NO: 2845637 - RNA, 14 nt, Human
cacuccccaccuuc

SEQ ID NO: 2845638 - RNA, 13 nt, Human
cacuccccaagga

SEQ ID NO: 2845639 - RNA, 14 nt, Human
cacuccccaaggaa

SEQ ID NO: 2845640 - RNA, 20 nt, Human
cacuccccaaggaagagcca

SEQ ID NO: 2845641 - RNA, 13 nt, Human
cacucccaggcag

SEQ ID NO: 2845642 - RNA, 14 nt, Human
cacucccaggcagc

SEQ ID NO: 2845643 - RNA, 15 nt, Human
cacucccaggcagcc

SEQ ID NO: 2845644 - RNA, 15 nt, Human
cacuccccaccuuca

SEQ ID NO: 2845645 - RNA, 16 nt, Human
cacuccccaugccacg

SEQ ID NO: 2845646 - RNA, 18 nt, Human
cacuccccaugccacguu

SEQ ID NO: 2845647 - RNA, 19 nt, Human
cacuccccaugccacguuc

SEQ ID NO: 2845648 - RNA, 21 nt, Human
cacucccccuaaaccccuguc

SEQ ID NO: 2845649 - RNA, 22 nt, Human
cacucccccuaaaccccugucc

SEQ ID NO: 2845650 - RNA, 18 nt, Human
cacuaggacucugaggcu

SEQ ID NO: 2845651 - RNA, 16 nt, Human
cacuaggcacccagcu

SEQ ID NO: 2845652 - RNA, 19 nt, Human
cacuaggcacccagcugcc

SEQ ID NO: 2845653 - RNA, 20 nt, Human
cacuaggcacccagcugcca

SEQ ID NO: 2845654 - RNA, 17 nt, Human
cacuaggacucugaggc

SEQ ID NO: 2845655 - RNA, 17 nt, Human
cacuagccuuuggcucu

SEQ ID NO: 2845656 - RNA, 18 nt, Human
cacuagccuuuggcucug

SEQ ID NO: 2845657 - RNA, 20 nt, Human
cacuagccuuuggcucugga

SEQ ID NO: 2845658 - RNA, 16 nt, Human
cacuaggacucugagg

SEQ ID NO: 2845659 - RNA, 21 nt, Human
cacuagccuuuggcucuggag

SEQ ID NO: 2845660 - RNA, 22 nt, Human
cacuagccuuuggcucuggaga

SEQ ID NO: 2845661 - RNA, 19 nt, Human
cacucuuauugcccacgcu

SEQ ID NO: 2845662 - RNA, 18 nt, Human
cacucuuauugcccacgc

SEQ ID NO: 2845663 - RNA, 17 nt, Human
cacucuuauugcccacg

SEQ ID NO: 2845664 - RNA, 16 nt, Human
cacuccccuccacucu

SEQ ID NO: 2845665 - RNA, 19 nt, Human
cacuccccgaagucuuuug

SEQ ID NO: 2845666 - RNA, 18 nt, Human
cacuccccgaagucuuuu

SEQ ID NO: 2845667 - RNA, 11 nt, Human
cacucuuaggc

SEQ ID NO: 2845668 - RNA, 19 nt, Human
cacucuuaggcacuuuggg

SEQ ID NO: 2845669 - RNA, 23 nt, Human
cacuacggaauaguuggcuagga

SEQ ID NO: 2845670 - RNA, 13 nt, Human
cacuacaccacac

SEQ ID NO: 2845671 - RNA, 15 nt, Human
cacuacaccacacac

SEQ ID NO: 2845672 - RNA, 16 nt, Human
cacuacaccacacaca

SEQ ID NO: 2845673 - RNA, 17 nt, Human
cacuacaccacacacaa

SEQ ID NO: 2845674 - RNA, 20 nt, Human
cacuacaccacacacaacag

SEQ ID NO: 2845675 - RNA, 21 nt, Human
cacuacaccacacacaacagc

SEQ ID NO: 2845676 - RNA, 23 nt, Human
cacuacaccacacacaacagcca

SEQ ID NO: 2845677 - RNA, 17 nt, Human
cacuaauuugauguuua

SEQ ID NO: 2845678 - RNA, 21 nt, Human
cacuaauuuuaguauucauuc

SEQ ID NO: 2845679 - RNA, 16 nt, Human
cacggccaggccagag

SEQ ID NO: 2845680 - RNA, 15 nt, Human
cacggccaggccaga

SEQ ID NO: 2845681 - RNA, 14 nt, Human
cacggccaggccag

SEQ ID NO: 2845682 - RNA, 19 nt, Human
cacggaucacgauguaaau

SEQ ID NO: 2845683 - RNA, 23 nt, Human
cacggaggcauccuacccuuuuc

SEQ ID NO: 2845684 - RNA, 19 nt, Human
cacggagcccagcccuccc

SEQ ID NO: 2845685 - RNA, 21 nt, Human
cacugaaaagguucuucaucc

SEQ ID NO: 2845686 - RNA, 22 nt, Human
cacugaaaagguucuucauccc

SEQ ID NO: 2845687 - RNA, 22 nt, Human
cacugaaaauaccaucaggccu

SEQ ID NO: 2845688 - RNA, 14 nt, Human
cacugaaaccuuua

SEQ ID NO: 2845689 - RNA, 20 nt, Human
cacugaaaccuuuaagaaaa

SEQ ID NO: 2845690 - RNA, 16 nt, Human
cacugaaauaugugaa

SEQ ID NO: 2845691 - RNA, 17 nt, Human
cacugaaaucugucaag

SEQ ID NO: 2845692 - RNA, 15 nt, Human
cacugaacaaacuaa

SEQ ID NO: 2845693 - RNA, 22 nt, Human
cacugaacaaacuaaaggugca

SEQ ID NO: 2845694 - RNA, 14 nt, Human
cacugaaaaauuau

SEQ ID NO: 2845695 - RNA, 14 nt, Human
cacugaaaaacaac

SEQ ID NO: 2845696 - RNA, 11 nt, Human
cacugaaaaau

SEQ ID NO: 2845697 - RNA, 20 nt, Human
cacugaaagcucuguugcaa

SEQ ID NO: 2845698 - RNA, 13 nt, Human
cacugaaaggaaa

SEQ ID NO: 2845699 - RNA, 13 nt, Human
caaguagauaaau

SEQ ID NO: 2845700 - RNA, 17 nt, Human
caaguagauaaauauuu

SEQ ID NO: 2845701 - RNA, 18 nt, Human
caaguagauaaauauuug

SEQ ID NO: 2845702 - RNA, 19 nt, Human
caaguagcugggauuuuaa

SEQ ID NO: 2845703 - RNA, 21 nt, Human
caaguagcugggauuuuaaac

SEQ ID NO: 2845704 - RNA, 13 nt, Human
caaguagucugcu

SEQ ID NO: 2845705 - RNA, 15 nt, Human
caaguagucugcuca

SEQ ID NO: 2845706 - RNA, 16 nt, Human
caaguagucugcucac

SEQ ID NO: 2845707 - RNA, 16 nt, Human
caaguaccaaaguuuu

SEQ ID NO: 2845708 - RNA, 12 nt, Human
caagauuagaag

SEQ ID NO: 2845709 - RNA, 20 nt, Human
caagauuagaagcugaaaac

SEQ ID NO: 2845710 - RNA, 22 nt, Human
caaguaauccaccugccucggc

SEQ ID NO: 2845711 - RNA, 19 nt, Human
caagauuccggauccuaag

SEQ ID NO: 2845712 - RNA, 22 nt, Human
caagauuccggauccuaagcau

SEQ ID NO: 2845713 - RNA, 10 nt, Human
caagauuccg

SEQ ID NO: 2845714 - RNA, 18 nt, Human
caagauuccggauccuaa

SEQ ID NO: 2845715 - RNA, 17 nt, Human
caaguugaagacuuugu

SEQ ID NO: 2845716 - RNA, 19 nt, Human
caaguugaagacuuuguuu

SEQ ID NO: 2845717 - RNA, 15 nt, Human
caaguucuaagauuc

SEQ ID NO: 2845718 - RNA, 17 nt, Human
caaguucuaagauucua

SEQ ID NO: 2845719 - RNA, 18 nt, Human
caaguucuaagauucuaa

SEQ ID NO: 2845720 - RNA, 20 nt, Human
caaguucuaagauucuaaug

SEQ ID NO: 2845721 - RNA, 21 nt, Human
caaguucuaagauucuaauga

SEQ ID NO: 2845722 - RNA, 18 nt, Human
caaguuggaugcggccau

SEQ ID NO: 2845723 - RNA, 13 nt, Human
caaguuuugugua

SEQ ID NO: 2845724 - RNA, 17 nt, Human
caauaaaauuucuaaga

SEQ ID NO: 2845725 - RNA, 18 nt, Human
caauaaaauuucuaagag

SEQ ID NO: 2845726 - RNA, 17 nt, Human
caauaaaauuauuugca

SEQ ID NO: 2845727 - RNA, 18 nt, Human
caauaaaauuauuugcag

SEQ ID NO: 2845728 - RNA, 19 nt, Human
caauaaaauuauuugcagg

SEQ ID NO: 2845729 - RNA, 22 nt, Human
caauaaaauuauuugcaggucu

SEQ ID NO: 2845730 - RNA, 20 nt, Human
caauaaaauuuuuuuggucu

SEQ ID NO: 2845731 - RNA, 23 nt, Human
caauaaaccuccgccaaugcacg

SEQ ID NO: 2845732 - RNA, 12 nt, Human
caauaaagaaaa

SEQ ID NO: 2845733 - RNA, 19 nt, Human
caauaaagaaaacuuccau

SEQ ID NO: 2845734 - RNA, 20 nt, Human
caauaaaaacauugccuuug

SEQ ID NO: 2845735 - RNA, 18 nt, Human
caauaaacgcauuaucag

SEQ ID NO: 2845736 - RNA, 22 nt, Human
caauaaagaguuagaaugaaaa

SEQ ID NO: 2845737 - RNA, 12 nt, Human
caauaaagagau

SEQ ID NO: 2845738 - RNA, 23 nt, Human
caaugcuggcuguuggcuggggg

SEQ ID NO: 2845739 - RNA, 22 nt, Human
caaugcuggcuguuggcugggg

SEQ ID NO: 2845740 - RNA, 13 nt, Human
caauggaaacaau

SEQ ID NO: 2845741 - RNA, 15 nt, Human
caauggaaaccucac

SEQ ID NO: 2845742 - RNA, 16 nt, Human
caauggaaaccucacg

SEQ ID NO: 2845743 - RNA, 17 nt, Human
caauggaaaccucacgc

SEQ ID NO: 2845744 - RNA, 16 nt, Human
caauucuccugccuca

SEQ ID NO: 2845745 - RNA, 17 nt, Human
caauucuccugccucag

SEQ ID NO: 2845746 - RNA, 14 nt, Human
caauugugcugcca

SEQ ID NO: 2845747 - RNA, 15 nt, Human
caauugugcugccau

SEQ ID NO: 2845748 - RNA, 16 nt, Human
caauugugcugccauu

SEQ ID NO: 2845749 - RNA, 21 nt, Human
caauugugggcauaaacuguu

SEQ ID NO: 2845750 - RNA, 14 nt, Human
caauuguugacagu

SEQ ID NO: 2845751 - RNA, 21 nt, Human
caauuguugacaguucugaag

SEQ ID NO: 2845752 - RNA, 23 nt, Human
caauuguugacaguucugaagaa

SEQ ID NO: 2845753 - RNA, 24 nt, Human
caauuguugacaguucugaagaau

SEQ ID NO: 2845754 - RNA, 14 nt, Human
caauucuguuuuag

SEQ ID NO: 2845755 - RNA, 22 nt, Human
caauucuguuuuagguuaaaaa

SEQ ID NO: 2845756 - RNA, 19 nt, Human
caauucuguagguuaaaaa

SEQ ID NO: 2845757 - RNA, 15 nt, Human
caauucuccugccuu

SEQ ID NO: 2845758 - RNA, 16 nt, Human
caauucuccugccuuu

SEQ ID NO: 2845759 - RNA, 17 nt, Human
caauucuccugccuuug

SEQ ID NO: 2845760 - RNA, 19 nt, Human
caauucuccugccuuugcc

SEQ ID NO: 2845761 - RNA, 20 nt, Human
caauucuccugccuuugccu

SEQ ID NO: 2845762 - RNA, 21 nt, Human
caauucuccugccuuugccuc

SEQ ID NO: 2845763 - RNA, 19 nt, Human
caauucuccugccucagcc

SEQ ID NO: 2845764 - RNA, 22 nt, Human
caauuguuugggguugaaaauu

SEQ ID NO: 2845765 - RNA, 22 nt, Human
caauuguuugggugauuccuaa

SEQ ID NO: 2845766 - RNA, 17 nt, Human
caauucucgagcuuggg

SEQ ID NO: 2845767 - RNA, 21 nt, Human
caauuguuuuaaucugaaauu

SEQ ID NO: 2845768 - RNA, 21 nt, Human
cacaagcagagugcacagcug

SEQ ID NO: 2845769 - RNA, 22 nt, Human
cacaagcagagugcacagcugu

SEQ ID NO: 2845770 - RNA, 23 nt, Human
cacaagcagagugcacagcuguc

SEQ ID NO: 2845771 - RNA, 21 nt, Human
cacaagccacaagucuuccag

SEQ ID NO: 2845772 - RNA, 15 nt, Human
cacaagcccacagca

SEQ ID NO: 2845773 - RNA, 21 nt, Human
cacaagccucgaggugccuuc

SEQ ID NO: 2845774 - RNA, 17 nt, Human
cacccagcccacuucug

SEQ ID NO: 2845775 - RNA, 16 nt, Human
cacccagcccacuucu

SEQ ID NO: 2845776 - RNA, 22 nt, Human
caccagcucugccgucucugga

SEQ ID NO: 2845777 - RNA, 21 nt, Human
caccagcccuuagcagggaaa

SEQ ID NO: 2845778 - RNA, 20 nt, Human
caccagcaucaccugccugu

SEQ ID NO: 2845779 - RNA, 19 nt, Human
caccagcaucaccugccug

SEQ ID NO: 2845780 - RNA, 18 nt, Human
caccagcaucaccugccu

SEQ ID NO: 2845781 - RNA, 15 nt, Human
caccagcaucaccug

SEQ ID NO: 2845782 - RNA, 11 nt, Human
caccagccagc

SEQ ID NO: 2845783 - RNA, 12 nt, Human
caccagccagcg

SEQ ID NO: 2845784 - RNA, 23 nt, Human
cacccaggagccccgaggccuuc

SEQ ID NO: 2845785 - RNA, 20 nt, Human
cacccaggagccccgaggcc

SEQ ID NO: 2845786 - RNA, 19 nt, Human
cacccagcccacuucugcc

SEQ ID NO: 2845787 - RNA, 12 nt, Human
cacccagcccag

SEQ ID NO: 2845788 - RNA, 13 nt, Human
cacccagcccaga

SEQ ID NO: 2845789 - RNA, 16 nt, Human
cacccagcccagauug

SEQ ID NO: 2845790 - RNA, 24 nt, Human
cacccaggagccccgaggccuucu

SEQ ID NO: 2845791 - RNA, 11 nt, Human
cacccaggagg

SEQ ID NO: 2845792 - RNA, 17 nt, Human
cacaucuugcucugcug

SEQ ID NO: 2845793 - RNA, 16 nt, Human
cacaucuugcucugcu

SEQ ID NO: 2845794 - RNA, 18 nt, Human
cacauccuccguccagcc

SEQ ID NO: 2845795 - RNA, 14 nt, Human
cacauccuccgucc

SEQ ID NO: 2845796 - RNA, 17 nt, Human
cacauccgccuuuugua

SEQ ID NO: 2845797 - RNA, 21 nt, Human
cacauccgccuuuuguauaca

SEQ ID NO: 2845798 - RNA, 12 nt, Human
cacauuuuuuau

SEQ ID NO: 2845799 - RNA, 18 nt, Human
cacaucuugcucugcuga

SEQ ID NO: 2845800 - RNA, 13 nt, Human
cacauuucuaaaa

SEQ ID NO: 2845801 - RNA, 17 nt, Human
cacauuucuaaaaucuu

SEQ ID NO: 2845802 - RNA, 16 nt, Human
cacauuuggaauacuu

SEQ ID NO: 2845803 - RNA, 19 nt, Human
cacauuuggaauacuuuuu

SEQ ID NO: 2845804 - RNA, 17 nt, Human
cacauuuggaauacuuu

SEQ ID NO: 2845805 - RNA, 22 nt, Human
cacauuugguucuaagaaaccc

SEQ ID NO: 2845806 - RNA, 11 nt, Human
cacauuuguac

SEQ ID NO: 2845807 - RNA, 12 nt, Human
cacauuuguaca

SEQ ID NO: 2845808 - RNA, 20 nt, Human
cacauuugugccgacacugu

SEQ ID NO: 2845809 - RNA, 18 nt, Human
cacauuuuaguccagaga

SEQ ID NO: 2845810 - RNA, 16 nt, Human
cacauuuucagccaaa

SEQ ID NO: 2845811 - RNA, 12 nt, Human
cacauuuugauu

SEQ ID NO: 2845812 - RNA, 19 nt, Human
cacauuuugguucuucuca

SEQ ID NO: 2845813 - RNA, 16 nt, Human
cacauuuuuaaauugu

SEQ ID NO: 2845814 - RNA, 19 nt, Human
cacaguauuacuucugcua

SEQ ID NO: 2845815 - RNA, 18 nt, Human
cacaguauuacuucugcu

SEQ ID NO: 2845816 - RNA, 16 nt, Human
cacaguauuacuucug

SEQ ID NO: 2845817 - RNA, 16 nt, Human
cacaguagucuugaug

SEQ ID NO: 2845818 - RNA, 14 nt, Human
cacaggucuagacu

SEQ ID NO: 2845819 - RNA, 13 nt, Human
cacaggucuagac

SEQ ID NO: 2845820 - RNA, 13 nt, Human
cacaguagucuug

SEQ ID NO: 2845821 - RNA, 19 nt, Human
cacagcucuguccugggag

SEQ ID NO: 2845822 - RNA, 14 nt, Human
cacagcucuguguu

SEQ ID NO: 2845823 - RNA, 10 nt, Human
cacagcucuu

SEQ ID NO: 2845824 - RNA, 23 nt, Human
cacagcucuguccugggagugag

SEQ ID NO: 2845825 - RNA, 20 nt, Human
cacagcucuguccugggagu

SEQ ID NO: 2845826 - RNA, 15 nt, Human
cacagcuaccucuuc

SEQ ID NO: 2845827 - RNA, 20 nt, Human
cacagcuaacacacagcucc

SEQ ID NO: 2845828 - RNA, 21 nt, Human
cacagcuaacacacagcuccc

SEQ ID NO: 2845829 - RNA, 20 nt, Human
cacagcuaacaauugugaag

SEQ ID NO: 2845830 - RNA, 21 nt, Human
cacagcuaacaauugugaagu

SEQ ID NO: 2845831 - RNA, 15 nt, Human
cacagcucaggaggc

SEQ ID NO: 2845832 - RNA, 13 nt, Human
cacagcucaggag

SEQ ID NO: 2845833 - RNA, 16 nt, Human
cacagcucaggaacua

SEQ ID NO: 2845834 - RNA, 20 nt, Human
cacagcuacuugguuugugu

SEQ ID NO: 2845835 - RNA, 14 nt, Human
cacagcucccugcc

SEQ ID NO: 2845836 - RNA, 15 nt, Human
cacagcucccugcca

SEQ ID NO: 2845837 - RNA, 16 nt, Human
cacagcucccugccaa

SEQ ID NO: 2845838 - RNA, 16 nt, Human
cacaggguugggccca

SEQ ID NO: 2845839 - RNA, 14 nt, Human
cacaggguugggcc

SEQ ID NO: 2845840 - RNA, 23 nt, Human
cacaggguugggcccagaucugg

SEQ ID NO: 2845841 - RNA, 22 nt, Human
cacaggguugggcccagaucug

SEQ ID NO: 2845842 - RNA, 18 nt, Human
cacaggguugggcccaga

SEQ ID NO: 2845843 - RNA, 19 nt, Human
cacaggucaggggugacac

SEQ ID NO: 2845844 - RNA, 20 nt, Human
cacaggucaggggugacaca

SEQ ID NO: 2845845 - RNA, 21 nt, Human
cacaggucaggggugacacag

SEQ ID NO: 2845846 - RNA, 22 nt, Human
cacaggucaggggugacacaga

SEQ ID NO: 2845847 - RNA, 23 nt, Human
cacaggucaggggugacacagac

SEQ ID NO: 2845848 - RNA, 12 nt, Human
cacaggucccac

SEQ ID NO: 2845849 - RNA, 14 nt, Human
cacaggucccaccu

SEQ ID NO: 2845850 - RNA, 15 nt, Human
cacaggucccaccuc

SEQ ID NO: 2845851 - RNA, 19 nt, Human
cacaggucccaccuccagc

SEQ ID NO: 2845852 - RNA, 21 nt, Human
cacaggucccaccuccagccc

SEQ ID NO: 2845853 - RNA, 22 nt, Human
cacaggucccaccuccagcccg

SEQ ID NO: 2845854 - RNA, 18 nt, Human
cacaggucgggcgcagga

SEQ ID NO: 2845855 - RNA, 17 nt, Human
cacagggcagagccggg

SEQ ID NO: 2845856 - RNA, 14 nt, Human
cacagggcagagcc

SEQ ID NO: 2845857 - RNA, 13 nt, Human
cacagggcagagc

SEQ ID NO: 2845858 - RNA, 23 nt, Human
cacagggcaugccccggccaccu

SEQ ID NO: 2845859 - RNA, 20 nt, Human
cacagggcaugccccggcca

SEQ ID NO: 2845860 - RNA, 13 nt, Human
cacagacagguuu

SEQ ID NO: 2845861 - RNA, 21 nt, Human
cacagacagguuuucacauaa

SEQ ID NO: 2845862 - RNA, 22 nt, Human
cacagacagguuuucacauaaa

SEQ ID NO: 2845863 - RNA, 21 nt, Human
cacagcggagucuguccugug

SEQ ID NO: 2845864 - RNA, 23 nt, Human
cacagcggagucuguccugugac

SEQ ID NO: 2845865 - RNA, 14 nt, Human
cacagcggccccug

SEQ ID NO: 2845866 - RNA, 16 nt, Human
cacagcggccccugca

SEQ ID NO: 2845867 - RNA, 20 nt, Human
cacagcggggccccagggcu

SEQ ID NO: 2845868 - RNA, 15 nt, Human
cacagcgucccuagc

SEQ ID NO: 2845869 - RNA, 20 nt, Human
cacagcgucccuagcaguga

SEQ ID NO: 2845870 - RNA, 22 nt, Human
cacagcgucccuagcagugaac

SEQ ID NO: 2845871 - RNA, 12 nt, Human
cacagaaguccu

SEQ ID NO: 2845872 - RNA, 13 nt, Human
cacagaaguccug

SEQ ID NO: 2845873 - RNA, 14 nt, Human
cacagaaguccugu

SEQ ID NO: 2845874 - RNA, 22 nt, Human
cacagaaguccuguaugucugu

SEQ ID NO: 2845875 - RNA, 12 nt, Human
cacagacacaca

SEQ ID NO: 2845876 - RNA, 13 nt, Human
cacagacacacac

SEQ ID NO: 2845877 - RNA, 14 nt, Human
cacagacacacaca

SEQ ID NO: 2845878 - RNA, 17 nt, Human
cacagacacacacacgc

SEQ ID NO: 2845879 - RNA, 18 nt, Human
cacagacacacacacgca

SEQ ID NO: 2845880 - RNA, 20 nt, Human
cacagacacacacacgcacg

SEQ ID NO: 2845881 - RNA, 22 nt, Human
cacagacacacacacgcacgca

SEQ ID NO: 2845882 - RNA, 16 nt, Human
ggcgagagaggagcca

SEQ ID NO: 2845883 - RNA, 18 nt, Human
ggcgagagaggagccaga

SEQ ID NO: 2845884 - RNA, 21 nt, Human
ggcgagcccuguggaugagcc

SEQ ID NO: 2845885 - RNA, 22 nt, Human
ggcgauccaccugucucagccu

SEQ ID NO: 2845886 - RNA, 18 nt, Human
ggcgauccaccugucuca

SEQ ID NO: 2845887 - RNA, 17 nt, Human
ggcgauccaccugucuc

SEQ ID NO: 2845888 - RNA, 23 nt, Human
ggcgagugaaugccagugugcug

SEQ ID NO: 2845889 - RNA, 23 nt, Human
ggcguugggagggggagaaaagg

SEQ ID NO: 2845890 - RNA, 20 nt, Human
ggcuaaaugccuaauaaaca

SEQ ID NO: 2845891 - RNA, 17 nt, Human
ggcuaacuauauuugcu

SEQ ID NO: 2845892 - RNA, 21 nt, Human
ggcgaucgcggcggagcuggc

SEQ ID NO: 2845893 - RNA, 16 nt, Human
ggcgugagaccugccc

SEQ ID NO: 2845894 - RNA, 14 nt, Human
ggcgugagaccugc

SEQ ID NO: 2845895 - RNA, 12 nt, Human
ggcgugaucucg

SEQ ID NO: 2845896 - RNA, 18 nt, Human
ggcgugagaccugccccu

SEQ ID NO: 2845897 - RNA, 17 nt, Human
ggcgugagaccugcccc

SEQ ID NO: 2845898 - RNA, 12 nt, Human
ggcuacccuccc

SEQ ID NO: 2845899 - RNA, 15 nt, Human
ggcuacugcagcuuu

SEQ ID NO: 2845900 - RNA, 20 nt, Human
ggcuagaggccagccccacc

SEQ ID NO: 2845901 - RNA, 18 nt, Human
ggcuagaggccagcccca

SEQ ID NO: 2845902 - RNA, 16 nt, Human
ggcuagaggccagccc

SEQ ID NO: 2845903 - RNA, 18 nt, Human
ggcuacugcagcuuuaca

SEQ ID NO: 2845904 - RNA, 23 nt, Human
ggcuacugcagcuuuacaugcaa

SEQ ID NO: 2845905 - RNA, 14 nt, Human
ggcuacauuauaaa

SEQ ID NO: 2845906 - RNA, 23 nt, Human
ggcuacaccuuagccugcccucc

SEQ ID NO: 2845907 - RNA, 15 nt, Human
ggcuacacagggaug

SEQ ID NO: 2845908 - RNA, 22 nt, Human
ggcuacaccuuagccugcccuc

SEQ ID NO: 2845909 - RNA, 13 nt, Human
ggcuaauuuuugu

SEQ ID NO: 2845910 - RNA, 12 nt, Human
ggcuacacaggg

SEQ ID NO: 2845911 - RNA, 20 nt, Human
ggcuaagugauccucccacc

SEQ ID NO: 2845912 - RNA, 18 nt, Human
ggcuaauuuuuguuuugu

SEQ ID NO: 2845913 - RNA, 19 nt, Human
ggcuaaggcguggagcugc

SEQ ID NO: 2845914 - RNA, 22 nt, Human
ggcuaaggcguggagcugccug

SEQ ID NO: 2845915 - RNA, 15 nt, Human
ggcuaauuaaauaaa

SEQ ID NO: 2845916 - RNA, 14 nt, Human
ggcuaagaggcugc

SEQ ID NO: 2845917 - RNA, 16 nt, Human
ggcuaagaggcugcug

SEQ ID NO: 2845918 - RNA, 14 nt, Human
ggccugaugcuccc

SEQ ID NO: 2845919 - RNA, 20 nt, Human
ggccugaugcucccuccccu

SEQ ID NO: 2845920 - RNA, 18 nt, Human
ggccugaugcucccuccc

SEQ ID NO: 2845921 - RNA, 17 nt, Human
ggccugaugcucccucc

SEQ ID NO: 2845922 - RNA, 15 nt, Human
ggccugaugcucccu

SEQ ID NO: 2845923 - RNA, 23 nt, Human
ggccugaugcucccuccccugcc

SEQ ID NO: 2845924 - RNA, 22 nt, Human
ggccugaugcucccuccccugc

SEQ ID NO: 2845925 - RNA, 14 nt, Human
ggccugcacaguga

SEQ ID NO: 2845926 - RNA, 12 nt, Human
ggccugcacaca

SEQ ID NO: 2845927 - RNA, 13 nt, Human
ggccugcacacaa

SEQ ID NO: 2845928 - RNA, 14 nt, Human
ggccugcacacaag

SEQ ID NO: 2845929 - RNA, 13 nt, Human
ggccugcacuaau

SEQ ID NO: 2845930 - RNA, 19 nt, Human
ggccugcagcaggaguggu

SEQ ID NO: 2845931 - RNA, 20 nt, Human
ggccugcagcaggaguggug

SEQ ID NO: 2845932 - RNA, 17 nt, Human
ggccugcaggaccugcc

SEQ ID NO: 2845933 - RNA, 21 nt, Human
ggccugcaggaccugccugua

SEQ ID NO: 2845934 - RNA, 20 nt, Human
ggccugcaggaccugccugu

SEQ ID NO: 2845935 - RNA, 15 nt, Human
ggccuggccagaugc

SEQ ID NO: 2845936 - RNA, 12 nt, Human
ggccuggccaga

SEQ ID NO: 2845937 - RNA, 15 nt, Human
ggccuggcagggagg

SEQ ID NO: 2845938 - RNA, 21 nt, Human
ggccuggcagggaggucaggc

SEQ ID NO: 2845939 - RNA, 13 nt, Human
ggccuggcauucu

SEQ ID NO: 2845940 - RNA, 15 nt, Human
ggccuggcauucuug

SEQ ID NO: 2845941 - RNA, 19 nt, Human
ggccuggcauucuuguaca

SEQ ID NO: 2845942 - RNA, 14 nt, Human
ggccuggcagccgu

SEQ ID NO: 2845943 - RNA, 15 nt, Human
ggccuggcagccgug

SEQ ID NO: 2845944 - RNA, 16 nt, Human
ggccuggccagaugca

SEQ ID NO: 2845945 - RNA, 21 nt, Human
ggccuguuuuagaagguucuc

SEQ ID NO: 2845946 - RNA, 12 nt, Human
ggccuuaagcuu

SEQ ID NO: 2845947 - RNA, 14 nt, Human
ggccuggccaccuc

SEQ ID NO: 2845948 - RNA, 16 nt, Human
ggccuggccaccucuc

SEQ ID NO: 2845949 - RNA, 17 nt, Human
ggccuggccaccucucu

SEQ ID NO: 2845950 - RNA, 14 nt, Human
ggccuuaccccugc

SEQ ID NO: 2845951 - RNA, 15 nt, Human
ggccuuaccccugcc

SEQ ID NO: 2845952 - RNA, 16 nt, Human
ggccuuagugggccag

SEQ ID NO: 2845953 - RNA, 21 nt, Human
ggccuuagugggccagggcug

SEQ ID NO: 2845954 - RNA, 22 nt, Human
ggccuuagugggccagggcugc

SEQ ID NO: 2845955 - RNA, 17 nt, Human
ggccuucagggagugag

SEQ ID NO: 2845956 - RNA, 14 nt, Human
ggccuucauaaugg

SEQ ID NO: 2845957 - RNA, 14 nt, Human
ggccuuccagcugc

SEQ ID NO: 2845958 - RNA, 15 nt, Human
ggccuuccagcugcu

SEQ ID NO: 2845959 - RNA, 16 nt, Human
ggccuuccagcugcug

SEQ ID NO: 2845960 - RNA, 17 nt, Human
ggccuuccagcugcugu

SEQ ID NO: 2845961 - RNA, 12 nt, Human
ggccugccuggc

SEQ ID NO: 2845962 - RNA, 14 nt, Human
ggccugccuggccc

SEQ ID NO: 2845963 - RNA, 23 nt, Human
ggccugccuggccccucgccugu

SEQ ID NO: 2845964 - RNA, 18 nt, Human
ggccugccuugaagccac

SEQ ID NO: 2845965 - RNA, 11 nt, Human
ggccugccugu

SEQ ID NO: 2845966 - RNA, 17 nt, Human
ggccucccacagacuca

SEQ ID NO: 2845967 - RNA, 20 nt, Human
ggccccagcaccucagccug

SEQ ID NO: 2845968 - RNA, 17 nt, Human
ggccccagcaccucagc

SEQ ID NO: 2845969 - RNA, 16 nt, Human
ggccagaugcaccagc

SEQ ID NO: 2845970 - RNA, 15 nt, Human
ggccagaugcaccag

SEQ ID NO: 2845971 - RNA, 21 nt, Human
ggcccuagcccagcgcucugc

SEQ ID NO: 2845972 - RNA, 23 nt, Human
ggcccuagcccagcgcucugccu

SEQ ID NO: 2845973 - RNA, 21 nt, Human
ggcccuaggggucacuguacu

SEQ ID NO: 2845974 - RNA, 16 nt, Human
ggcccuaauucagcca

SEQ ID NO: 2845975 - RNA, 21 nt, Human
ggcccuaauucagccauguac

SEQ ID NO: 2845976 - RNA, 14 nt, Human
ggcccgucugucca

SEQ ID NO: 2845977 - RNA, 18 nt, Human
ggcccgucuguccaucug

SEQ ID NO: 2845978 - RNA, 19 nt, Human
ggcccgucuguccaucugc

SEQ ID NO: 2845979 - RNA, 20 nt, Human
ggcccgucuguccaucugcc

SEQ ID NO: 2845980 - RNA, 21 nt, Human
ggcccgucuguccaucugccc

SEQ ID NO: 2845981 - RNA, 13 nt, Human
ggccucagugcca

SEQ ID NO: 2845982 - RNA, 16 nt, Human
ggccucccacagacuc

SEQ ID NO: 2845983 - RNA, 14 nt, Human
ggccucccacagac

SEQ ID NO: 2845984 - RNA, 16 nt, Human
ggccgcgcccuuuccc

SEQ ID NO: 2845985 - RNA, 16 nt, Human
ggccgcccccugcccc

SEQ ID NO: 2845986 - RNA, 18 nt, Human
ggccgcccccugcccccc

SEQ ID NO: 2845987 - RNA, 19 nt, Human
ggccgcccccugcccccca

SEQ ID NO: 2845988 - RNA, 22 nt, Human
ggccgcccccugccccccagcc

SEQ ID NO: 2845989 - RNA, 13 nt, Human
ggccucagcugcc

SEQ ID NO: 2845990 - RNA, 16 nt, Human
ggccucagcugccuca

SEQ ID NO: 2845991 - RNA, 15 nt, Human
ggccucagcugccuc

SEQ ID NO: 2845992 - RNA, 22 nt, Human
ggccucagcugccucacuuccu

SEQ ID NO: 2845993 - RNA, 17 nt, Human
ggccucagcugccucac

SEQ ID NO: 2845994 - RNA, 23 nt, Human
aaaaauaccucaggaaagaauag

SEQ ID NO: 2845995 - RNA, 17 nt, Human
aaaaauacaaaaauuug

SEQ ID NO: 2845996 - RNA, 13 nt, Human
aaaaauacaaaau

SEQ ID NO: 2845997 - RNA, 14 nt, Human
aaaaauacaugcau

SEQ ID NO: 2845998 - RNA, 14 nt, Human
aaaaauacauguuc

SEQ ID NO: 2845999 - RNA, 14 nt, Human
ggcuggguuggagg

SEQ ID NO: 2846000 - RNA, 18 nt, Human
aaaaauagaugucuuuua

SEQ ID NO: 2846001 - RNA, 18 nt, Human
aaaaauacuuuuucuaau

SEQ ID NO: 2846002 - RNA, 21 nt, Human
aaaaauacuuuuucuaaugag

SEQ ID NO: 2846003 - RNA, 19 nt, Human
ggcugguaacaguucaugu

SEQ ID NO: 2846004 - RNA, 19 nt, Human
ggcugguauugguggcuuu

SEQ ID NO: 2846005 - RNA, 20 nt, Human
aaaaagccugcaauuucaua

SEQ ID NO: 2846006 - RNA, 17 nt, Human
aaaaagccuccagucca

SEQ ID NO: 2846007 - RNA, 14 nt, Human
aaaaaguuuccaua

SEQ ID NO: 2846008 - RNA, 17 nt, Human
aaaaaguuuacaagugu

SEQ ID NO: 2846009 - RNA, 13 nt, Human
aaaaaguuguuca

SEQ ID NO: 2846010 - RNA, 14 nt, Human
aaaaaguuguucaa

SEQ ID NO: 2846011 - RNA, 17 nt, Human
aaaaaggcauuguuuga

SEQ ID NO: 2846012 - RNA, 21 nt, Human
aaaaaggccaguggaaauuca

SEQ ID NO: 2846013 - RNA, 15 nt, Human
aaaaaggauacauaa

SEQ ID NO: 2846014 - RNA, 17 nt, Human
aaaaaggauacauaaug

SEQ ID NO: 2846015 - RNA, 16 nt, Human
aaaaaggacaucagca

SEQ ID NO: 2846016 - RNA, 11 nt, Human
aaaaaaauuua

SEQ ID NO: 2846017 - RNA, 13 nt, Human
aaaaaaauguugu

SEQ ID NO: 2846018 - RNA, 11 nt, Human
aaaaaaaugcc

SEQ ID NO: 2846019 - RNA, 14 nt, Human
aaaaaaaugccaua

SEQ ID NO: 2846020 - RNA, 11 nt, Human
aaaaaaauagu

SEQ ID NO: 2846021 - RNA, 12 nt, Human
aaaaaaaucaca

SEQ ID NO: 2846022 - RNA, 12 nt, Human
aaaaaaaucuuc

SEQ ID NO: 2846023 - RNA, 13 nt, Human
aaaaaaaugaaug

SEQ ID NO: 2846024 - RNA, 12 nt, Human
aaaaaaagcaua

SEQ ID NO: 2846025 - RNA, 12 nt, Human
aaaaaaagcaug

SEQ ID NO: 2846026 - RNA, 13 nt, Human
aaaaaaagcaugu

SEQ ID NO: 2846027 - RNA, 11 nt, Human
aaaaaaagcuu

SEQ ID NO: 2846028 - RNA, 12 nt, Human
aaaaaaagcuuu

SEQ ID NO: 2846029 - RNA, 23 nt, Human
aaaaagauuuucagaaaauauua

SEQ ID NO: 2846030 - RNA, 14 nt, Human
aaaaagauuagcaa

SEQ ID NO: 2846031 - RNA, 13 nt, Human
aaaaagauucuuu

SEQ ID NO: 2846032 - RNA, 15 nt, Human
aaaaagauucuuuuu

SEQ ID NO: 2846033 - RNA, 18 nt, Human
aaaaagauuguauugcug

SEQ ID NO: 2846034 - RNA, 10 nt, Human
aaaaaagaaa

SEQ ID NO: 2846035 - RNA, 15 nt, Human
aaaaaacagaggcca

SEQ ID NO: 2846036 - RNA, 16 nt, Human
aaaaaaccacaaaggc

SEQ ID NO: 2846037 - RNA, 17 nt, Human
aaaaagcauaaaaacau

SEQ ID NO: 2846038 - RNA, 20 nt, Human
aaaaagcauaaaaacauuuu

SEQ ID NO: 2846039 - RNA, 15 nt, Human
aaaaagcauguguca

SEQ ID NO: 2846040 - RNA, 10 nt, Human
aaaaaaacug

SEQ ID NO: 2846041 - RNA, 11 nt, Human
aaaaaaagaaa

SEQ ID NO: 2846042 - RNA, 13 nt, Human
aaaaaaagaaaau

SEQ ID NO: 2846043 - RNA, 13 nt, Human
aaaaaaagaagaa

SEQ ID NO: 2846044 - RNA, 10 nt, Human
aaaaaaagaa

SEQ ID NO: 2846045 - RNA, 11 nt, Human
aaaaaaagaca

SEQ ID NO: 2846046 - RNA, 13 nt, Human
aaaaaaagacaag

SEQ ID NO: 2846047 - RNA, 14 nt, Human
aaaaaaagaucugu

SEQ ID NO: 2846048 - RNA, 10 nt, Human
aaaaaaagac

SEQ ID NO: 2846049 - RNA, 17 nt, Human
ggcuggcccugcccugg

SEQ ID NO: 2846050 - RNA, 19 nt, Human
ggcuggccucuggcucuca

SEQ ID NO: 2846051 - RNA, 15 nt, Human
ggcucacugcagccu

SEQ ID NO: 2846052 - RNA, 14 nt, Human
ggcucacugcagcc

SEQ ID NO: 2846053 - RNA, 13 nt, Human
ggcucacugcagc

SEQ ID NO: 2846054 - RNA, 15 nt, Human
ggcuacgaaucuucc

SEQ ID NO: 2846055 - RNA, 17 nt, Human
ggcucggaggcugcccc

SEQ ID NO: 2846056 - RNA, 16 nt, Human
ggcucggaggcugccc

SEQ ID NO: 2846057 - RNA, 13 nt, Human
ggcucgccaggcc

SEQ ID NO: 2846058 - RNA, 16 nt, Human
ggcucccucuucuuuc

SEQ ID NO: 2846059 - RNA, 20 nt, Human
ggcuccccuuuuucuuccuc

SEQ ID NO: 2846060 - RNA, 16 nt, Human
ggcucccguggccugu

SEQ ID NO: 2846061 - RNA, 23 nt, Human
ggcucuucuccuuucacaaccuu

SEQ ID NO: 2846062 - RNA, 19 nt, Human
ggcucuugauaccccccuc

SEQ ID NO: 2846063 - RNA, 20 nt, Human
ggcucuugauaccccccucu

SEQ ID NO: 2846064 - RNA, 21 nt, Human
ggcucuugauaccccccucug

SEQ ID NO: 2846065 - RNA, 20 nt, Human
ggcucuugugcuggauggag

SEQ ID NO: 2846066 - RNA, 23 nt, Human
ggcucuugugcuggauggagccc

SEQ ID NO: 2846067 - RNA, 15 nt, Human
ggcucuuugggcugg

SEQ ID NO: 2846068 - RNA, 15 nt, Human
ggcugacgugugagg

SEQ ID NO: 2846069 - RNA, 23 nt, Human
ggcugacgugugagggaggacag

SEQ ID NO: 2846070 - RNA, 17 nt, Human
ggcugaccugccucuca

SEQ ID NO: 2846071 - RNA, 23 nt, Human
ggcugaccugccucucacacaca

SEQ ID NO: 2846072 - RNA, 22 nt, Human
ggcugacuagaagggccagucc

SEQ ID NO: 2846073 - RNA, 19 nt, Human
ggcugacuagaagggccag

SEQ ID NO: 2846074 - RNA, 24 nt, Human
ggcugacuagaagggccaguccug

SEQ ID NO: 2846075 - RNA, 15 nt, Human
ggcugccccucucac

SEQ ID NO: 2846076 - RNA, 21 nt, Human
ggcugagacugcgggaugguc

SEQ ID NO: 2846077 - RNA, 13 nt, Human
ggcugccccucuc

SEQ ID NO: 2846078 - RNA, 14 nt, Human
ggcugagaacacug

SEQ ID NO: 2846079 - RNA, 17 nt, Human
ggcugagacaggagaaa

SEQ ID NO: 2846080 - RNA, 13 nt, Human
ggcugcccugcca

SEQ ID NO: 2846081 - RNA, 12 nt, Human
ggcugcccugcc

SEQ ID NO: 2846082 - RNA, 13 nt, Human
ggcugcccugaga

SEQ ID NO: 2846083 - RNA, 14 nt, Human
ggcugcccugagaa

SEQ ID NO: 2846084 - RNA, 18 nt, Human
ggcugcccugagaagcug

SEQ ID NO: 2846085 - RNA, 21 nt, Human
ggcugcccugagaagcugcuc

SEQ ID NO: 2846086 - RNA, 24 nt, Human
ggcugcccugagaagcugcuccag

SEQ ID NO: 2846087 - RNA, 18 nt, Human
ggcugcccuugggccacc

SEQ ID NO: 2846088 - RNA, 16 nt, Human
ggcugcccuugggcca

SEQ ID NO: 2846089 - RNA, 18 nt, Human
ggcugcccuuucugggca

SEQ ID NO: 2846090 - RNA, 14 nt, Human
ggcugcccuuucug

SEQ ID NO: 2846091 - RNA, 12 nt, Human
ggcugcccuggu

SEQ ID NO: 2846092 - RNA, 22 nt, Human
ggcugcccuggugcugccacac

SEQ ID NO: 2846093 - RNA, 11 nt, Human
ggcugcccuuu

SEQ ID NO: 2846094 - RNA, 10 nt, Human
ggcugcccuu

SEQ ID NO: 2846095 - RNA, 13 nt, Human
ggcuggccagccg

SEQ ID NO: 2846096 - RNA, 15 nt, Human
ggcuggccagccgcu

SEQ ID NO: 2846097 - RNA, 16 nt, Human
ggcuggccagccgcuc

SEQ ID NO: 2846098 - RNA, 23 nt, Human
ggcuggccagccgcucuccugcc

SEQ ID NO: 2846099 - RNA, 12 nt, Human
ggcuggccagcc

SEQ ID NO: 2846100 - RNA, 14 nt, Human
ggcuggcagguaug

SEQ ID NO: 2846101 - RNA, 13 nt, Human
ggcuggcagggcu

SEQ ID NO: 2846102 - RNA, 15 nt, Human
ggcuggcagggcugg

SEQ ID NO: 2846103 - RNA, 18 nt, Human
ggcacaccgggcacucag

SEQ ID NO: 2846104 - RNA, 18 nt, Human
ggcacauuuaagagacag

SEQ ID NO: 2846105 - RNA, 10 nt, Human
ggcaccaaag

SEQ ID NO: 2846106 - RNA, 15 nt, Human
ggcaccaaagaugca

SEQ ID NO: 2846107 - RNA, 16 nt, Human
ggcaccaaagaugcag

SEQ ID NO: 2846108 - RNA, 17 nt, Human
ggcaccaaagaugcagc

SEQ ID NO: 2846109 - RNA, 18 nt, Human
ggcaccaaagaugcagcc

SEQ ID NO: 2846110 - RNA, 20 nt, Human
ggcaccaaagaugcagccgc

SEQ ID NO: 2846111 - RNA, 22 nt, Human
ggcaccacugcacuccagccug

SEQ ID NO: 2846112 - RNA, 16 nt, Human
ggcaccaaagccacca

SEQ ID NO: 2846113 - RNA, 12 nt, Human
ggcacugccuga

SEQ ID NO: 2846114 - RNA, 18 nt, Human
ggcacauugagcugugca

SEQ ID NO: 2846115 - RNA, 12 nt, Human
ggcacacgccuc

SEQ ID NO: 2846116 - RNA, 15 nt, Human
ggcacacgccuccca

SEQ ID NO: 2846117 - RNA, 17 nt, Human
ggcacacgccucccacu

SEQ ID NO: 2846118 - RNA, 18 nt, Human
ggcacacgccucccacug

SEQ ID NO: 2846119 - RNA, 19 nt, Human
ggcacacgccucccacugg

SEQ ID NO: 2846120 - RNA, 15 nt, Human
ggcacacucugccag

SEQ ID NO: 2846121 - RNA, 21 nt, Human
ggcacacucugccagcaaaga

SEQ ID NO: 2846122 - RNA, 12 nt, Human
ggauuucuuagg

SEQ ID NO: 2846123 - RNA, 13 nt, Human
ggauuucuuaggg

SEQ ID NO: 2846124 - RNA, 16 nt, Human
ggauuuugucaagcag

SEQ ID NO: 2846125 - RNA, 15 nt, Human
ggauuuuuaauuaaa

SEQ ID NO: 2846126 - RNA, 19 nt, Human
ggauuuccagccagggcug

SEQ ID NO: 2846127 - RNA, 15 nt, Human
ggcaaaaccuugcua

SEQ ID NO: 2846128 - RNA, 15 nt, Human
ggcaaaagccuugug

SEQ ID NO: 2846129 - RNA, 16 nt, Human
ggcaaaagccuugugu

SEQ ID NO: 2846130 - RNA, 20 nt, Human
ggcaaaagccuuguguauau

SEQ ID NO: 2846131 - RNA, 24 nt, Human
ggcaggaggauugcuugagcccag

SEQ ID NO: 2846132 - RNA, 18 nt, Human
ggcagcgccaagugcgug

SEQ ID NO: 2846133 - RNA, 20 nt, Human
ggcagcgccaagugcgugcc

SEQ ID NO: 2846134 - RNA, 22 nt, Human
ggcagcgccaagugcgugccgu

SEQ ID NO: 2846135 - RNA, 22 nt, Human
ggcaggcugggccauguccaaa

SEQ ID NO: 2846136 - RNA, 16 nt, Human
ggcaggcugggccaug

SEQ ID NO: 2846137 - RNA, 15 nt, Human
ggcaggcugggccau

SEQ ID NO: 2846138 - RNA, 14 nt, Human
ggcaggcugggcca

SEQ ID NO: 2846139 - RNA, 14 nt, Human
ggcagggaccacac

SEQ ID NO: 2846140 - RNA, 15 nt, Human
ggcaggaugacccug

SEQ ID NO: 2846141 - RNA, 14 nt, Human
ggcaggagggcccu

SEQ ID NO: 2846142 - RNA, 19 nt, Human
ggcaggauggccuggccag

SEQ ID NO: 2846143 - RNA, 15 nt, Human
ggcaggauggccugg

SEQ ID NO: 2846144 - RNA, 16 nt, Human
ggcaggauggccuggc

SEQ ID NO: 2846145 - RNA, 10 nt, Human
ggcagggagg

SEQ ID NO: 2846146 - RNA, 18 nt, Human
ggcagggagggccugggc

SEQ ID NO: 2846147 - RNA, 17 nt, Human
ggcagggagggccuggg

SEQ ID NO: 2846148 - RNA, 15 nt, Human
ggcagggaggucagg

SEQ ID NO: 2846149 - RNA, 17 nt, Human
ggcagggaggucaggcc

SEQ ID NO: 2846150 - RNA, 19 nt, Human
ggcagggaggucaggcccu

SEQ ID NO: 2846151 - RNA, 22 nt, Human
ggcagggaggucaggcccugga

SEQ ID NO: 2846152 - RNA, 23 nt, Human
ggcagggcaaaugacaugcacug

SEQ ID NO: 2846153 - RNA, 20 nt, Human
ggcagggagggccugggccc

SEQ ID NO: 2846154 - RNA, 19 nt, Human
ggcagggagggccugggcc

SEQ ID NO: 2846155 - RNA, 19 nt, Human
ggcagcauagcaagacaca

SEQ ID NO: 2846156 - RNA, 17 nt, Human
ggcagcauagcaagaca

SEQ ID NO: 2846157 - RNA, 18 nt, Human
ggcagccaaacccaugag

SEQ ID NO: 2846158 - RNA, 16 nt, Human
ggcagccaaacccaug

SEQ ID NO: 2846159 - RNA, 20 nt, Human
ggcagccaaacccaugaggc

SEQ ID NO: 2846160 - RNA, 19 nt, Human
ggcagccaaacccaugagg

SEQ ID NO: 2846161 - RNA, 23 nt, Human
ggcagccacuucggccaggucac

SEQ ID NO: 2846162 - RNA, 22 nt, Human
ggcagcccagagacuuuguaga

SEQ ID NO: 2846163 - RNA, 21 nt, Human
ggcagcccagagacuuuguag

SEQ ID NO: 2846164 - RNA, 15 nt, Human
ggcagcccagagacu

SEQ ID NO: 2846165 - RNA, 13 nt, Human
ggcagccagggcu

SEQ ID NO: 2846166 - RNA, 14 nt, Human
ggcagccagugaga

SEQ ID NO: 2846167 - RNA, 22 nt, Human
ggcagccagugagaugagggau

SEQ ID NO: 2846168 - RNA, 22 nt, Human
ggcagccccauucugccugccc

SEQ ID NO: 2846169 - RNA, 16 nt, Human
ggcagccucuucaaaa

SEQ ID NO: 2846170 - RNA, 21 nt, Human
ggcagccccauucugccugcc

SEQ ID NO: 2846171 - RNA, 20 nt, Human
ggcagccccauucugccugc

SEQ ID NO: 2846172 - RNA, 16 nt, Human
ggcagccccauucugc

SEQ ID NO: 2846173 - RNA, 16 nt, Human
ggcaggggcuggaggg

SEQ ID NO: 2846174 - RNA, 11 nt, Human
ggcauuuccua

SEQ ID NO: 2846175 - RNA, 13 nt, Human
ggcaucaugcaug

SEQ ID NO: 2846176 - RNA, 20 nt, Human
ggcaucgcaauguaagacuc

SEQ ID NO: 2846177 - RNA, 23 nt, Human
ggcaucacagggcagagccggga

SEQ ID NO: 2846178 - RNA, 22 nt, Human
ggcaucacagggcagagccggg

SEQ ID NO: 2846179 - RNA, 13 nt, Human
ggcaucagcuggc

SEQ ID NO: 2846180 - RNA, 16 nt, Human
ggcaucagcuggcguc

SEQ ID NO: 2846181 - RNA, 18 nt, Human
ggcaucagucccuaugua

SEQ ID NO: 2846182 - RNA, 17 nt, Human
ggcaucacagggcagag

SEQ ID NO: 2846183 - RNA, 11 nt, Human
ggccagacucg

SEQ ID NO: 2846184 - RNA, 17 nt, Human
ggccaagauaggaccuu

SEQ ID NO: 2846185 - RNA, 19 nt, Human
ggccaagauaggaccuugg

SEQ ID NO: 2846186 - RNA, 19 nt, Human
ggccagagggagugacaga

SEQ ID NO: 2846187 - RNA, 17 nt, Human
ggccagagggagugaca

SEQ ID NO: 2846188 - RNA, 15 nt, Human
ggccaagacuuggca

SEQ ID NO: 2846189 - RNA, 23 nt, Human
ggccaagacuuggcaacagaagc

SEQ ID NO: 2846190 - RNA, 21 nt, Human
ggccaacuugagggcccagag

SEQ ID NO: 2846191 - RNA, 20 nt, Human
ggcauccuuccucacaccag

SEQ ID NO: 2846192 - RNA, 12 nt, Human
ggcauuuguuca

SEQ ID NO: 2846193 - RNA, 22 nt, Human
ggccaacuugagggcccagagc

SEQ ID NO: 2846194 - RNA, 23 nt, Human
ggccaacuugagggcccagagca

SEQ ID NO: 2846195 - RNA, 23 nt, Human
ggccaagagaaaggccugcacac

SEQ ID NO: 2846196 - RNA, 14 nt, Human
ggagugggcagagc

SEQ ID NO: 2846197 - RNA, 17 nt, Human
ggaguggcucgccaggc

SEQ ID NO: 2846198 - RNA, 18 nt, Human
ggaguggcucgccaggcc

SEQ ID NO: 2846199 - RNA, 22 nt, Human
ggaguguggcugaggaggccuc

SEQ ID NO: 2846200 - RNA, 15 nt, Human
ggaguggugcagaca

SEQ ID NO: 2846201 - RNA, 16 nt, Human
ggaguggugcagacag

SEQ ID NO: 2846202 - RNA, 19 nt, Human
ggagugggugacaagagcc

SEQ ID NO: 2846203 - RNA, 20 nt, Human
ggagugggugacaagagccu

SEQ ID NO: 2846204 - RNA, 17 nt, Human
ggaguggguggaggcag

SEQ ID NO: 2846205 - RNA, 14 nt, Human
ggaguguuauguau

SEQ ID NO: 2846206 - RNA, 16 nt, Human
ggaguguuauguauuu

SEQ ID NO: 2846207 - RNA, 15 nt, Human
ggaguguuucauggg

SEQ ID NO: 2846208 - RNA, 16 nt, Human
ggaugguccuggggcu

SEQ ID NO: 2846209 - RNA, 14 nt, Human
ggaugguccugggg

SEQ ID NO: 2846210 - RNA, 14 nt, Human
ggauggguuuuaug

SEQ ID NO: 2846211 - RNA, 22 nt, Human
ggaugguccuggggcucugugc

SEQ ID NO: 2846212 - RNA, 20 nt, Human
ggaugguccuggggcucugu

SEQ ID NO: 2846213 - RNA, 13 nt, Human
ggauggugcccug

SEQ ID NO: 2846214 - RNA, 15 nt, Human
ggauggugggcuuca

SEQ ID NO: 2846215 - RNA, 17 nt, Human
ggauggugggcuucagg

SEQ ID NO: 2846216 - RNA, 21 nt, Human
ggaugguguuacugcaguuga

SEQ ID NO: 2846217 - RNA, 22 nt, Human
ggaugggggcuggccucuggcu

SEQ ID NO: 2846218 - RNA, 13 nt, Human
ggauuguuuauac

SEQ ID NO: 2846219 - RNA, 17 nt, Human
ggauuuaaaaacuggaa

SEQ ID NO: 2846220 - RNA, 18 nt, Human
ggauuuaaaaacuggaac

SEQ ID NO: 2846221 - RNA, 16 nt, Human
ggauuguuaauuucag

SEQ ID NO: 2846222 - RNA, 19 nt, Human
ggauuguuaauuucagucc

SEQ ID NO: 2846223 - RNA, 14 nt, Human
ggauuuaauuucca

SEQ ID NO: 2846224 - RNA, 14 nt, Human
ggauuuagaagugu

SEQ ID NO: 2846225 - RNA, 23 nt, Human
ggauuuagaagugucauguuuau

SEQ ID NO: 2846226 - RNA, 14 nt, Human
ggaucuugaaugug

SEQ ID NO: 2846227 - RNA, 15 nt, Human
ggaucuugaaugugg

SEQ ID NO: 2846228 - RNA, 20 nt, Human
ggaucuugaauguggucuca

SEQ ID NO: 2846229 - RNA, 21 nt, Human
ggaucuugaauguggucucag

SEQ ID NO: 2846230 - RNA, 22 nt, Human
ggaucuugaauguggucucagg

SEQ ID NO: 2846231 - RNA, 15 nt, Human
ggaucggccuccucu

SEQ ID NO: 2846232 - RNA, 14 nt, Human
ggaguuccacagau

SEQ ID NO: 2846233 - RNA, 17 nt, Human
ggaguuccagcaaacaa

SEQ ID NO: 2846234 - RNA, 15 nt, Human
ggaucucagcuuuga

SEQ ID NO: 2846235 - RNA, 17 nt, Human
ggaucucagcuuugaga

SEQ ID NO: 2846236 - RNA, 16 nt, Human
ggaucucagcuuugag

SEQ ID NO: 2846237 - RNA, 22 nt, Human
ggaucucagcuuugagaagccu

SEQ ID NO: 2846238 - RNA, 19 nt, Human
ggagguggggcgaggcagg

SEQ ID NO: 2846239 - RNA, 22 nt, Human
ggaggugucacauggugccccu

SEQ ID NO: 2846240 - RNA, 16 nt, Human
ggaggugggagcagga

SEQ ID NO: 2846241 - RNA, 19 nt, Human
ggaggugggagcaggagau

SEQ ID NO: 2846242 - RNA, 17 nt, Human
ggagguggcagcccugu

SEQ ID NO: 2846243 - RNA, 15 nt, Human
ggagguggcagcccu

SEQ ID NO: 2846244 - RNA, 19 nt, Human
ggagggugggagagcccag

SEQ ID NO: 2846245 - RNA, 20 nt, Human
ggagggugggggccaccugc

SEQ ID NO: 2846246 - RNA, 22 nt, Human
ggagggugggggccaccugccu

SEQ ID NO: 2846247 - RNA, 20 nt, Human
ggaggguuggccugaguuag

SEQ ID NO: 2846248 - RNA, 19 nt, Human
ggagggaaaagggaaguag

SEQ ID NO: 2846249 - RNA, 15 nt, Human
ggagggggagaaaag

SEQ ID NO: 2846250 - RNA, 23 nt, Human
ggagggggagaaaaggaaaagaa

SEQ ID NO: 2846251 - RNA, 13 nt, Human
ggaggcuggcagg

SEQ ID NO: 2846252 - RNA, 22 nt, Human
ggaggcugcccccggcccccug

SEQ ID NO: 2846253 - RNA, 10 nt, Human
ggaggcugcg

SEQ ID NO: 2846254 - RNA, 17 nt, Human
ggaggcugcgugccagu

SEQ ID NO: 2846255 - RNA, 12 nt, Human
ggaggcugcccc

SEQ ID NO: 2846256 - RNA, 13 nt, Human
ggaggcugccccc

SEQ ID NO: 2846257 - RNA, 17 nt, Human
ggaggcugcccccggcc

SEQ ID NO: 2846258 - RNA, 21 nt, Human
ggaggcugcccccggcccccu

SEQ ID NO: 2846259 - RNA, 21 nt, Human
ggaggcuccuguuagcuccuc

SEQ ID NO: 2846260 - RNA, 20 nt, Human
ggaggcucccgaggggaagg

SEQ ID NO: 2846261 - RNA, 10 nt, Human
ggaggcugcc

SEQ ID NO: 2846262 - RNA, 20 nt, Human
ggaggcggagcuugcaguga

SEQ ID NO: 2846263 - RNA, 20 nt, Human
ggaggcggcacuccaaccua

SEQ ID NO: 2846264 - RNA, 20 nt, Human
ggaggcgggggcugcccuug

SEQ ID NO: 2846265 - RNA, 18 nt, Human
ggaggcgucucgggagag

SEQ ID NO: 2846266 - RNA, 15 nt, Human
gguuuuauauuuuua

SEQ ID NO: 2846267 - RNA, 15 nt, Human
gguuuuagguucuaa

SEQ ID NO: 2846268 - RNA, 16 nt, Human
gguuuuagguucuaaa

SEQ ID NO: 2846269 - RNA, 19 nt, Human
aaaguaaguaccacucagg

SEQ ID NO: 2846270 - RNA, 22 nt, Human
aaaguaacucauuuguuaaaau

SEQ ID NO: 2846271 - RNA, 21 nt, Human
gguuuucacauaaaugcagcc

SEQ ID NO: 2846272 - RNA, 22 nt, Human
gguuuucacauaaaugcagccc

SEQ ID NO: 2846273 - RNA, 17 nt, Human
gguuucguuucuguaua

SEQ ID NO: 2846274 - RNA, 17 nt, Human
gguuugguuccucucug

SEQ ID NO: 2846275 - RNA, 23 nt, Human
gguuugucgggcaccagccagcg

SEQ ID NO: 2846276 - RNA, 15 nt, Human
gguuugguuugcuuu

SEQ ID NO: 2846277 - RNA, 14 nt, Human
gguuuguguucuuc

SEQ ID NO: 2846278 - RNA, 17 nt, Human
gguuuuagguagaaaaa

SEQ ID NO: 2846279 - RNA, 18 nt, Human
gguuuuagguagaaaaac

SEQ ID NO: 2846280 - RNA, 17 nt, Human
gguuuuaaguuguuugc

SEQ ID NO: 2846281 - RNA, 14 nt, Human
gguucucaaugaaa

SEQ ID NO: 2846282 - RNA, 13 nt, Human
gguucucaaugaa

SEQ ID NO: 2846283 - RNA, 15 nt, Human
gguuucccaauggug

SEQ ID NO: 2846284 - RNA, 18 nt, Human
gguuucccaaugguguuu

SEQ ID NO: 2846285 - RNA, 20 nt, Human
gguuucccaaugguguuuuu

SEQ ID NO: 2846286 - RNA, 14 nt, Human
gguuuccacaugcu

SEQ ID NO: 2846287 - RNA, 12 nt, Human
gguuuccugccc

SEQ ID NO: 2846288 - RNA, 15 nt, Human
gguuuccugcccugg

SEQ ID NO: 2846289 - RNA, 13 nt, Human
gguuuccugcccu

SEQ ID NO: 2846290 - RNA, 19 nt, Human
gguuuccugcccugggagg

SEQ ID NO: 2846291 - RNA, 16 nt, Human
gguuuccugcccuggg

SEQ ID NO: 2846292 - RNA, 16 nt, Human
gguuucgcagccugag

SEQ ID NO: 2846293 - RNA, 17 nt, Human
aaaguaaugaucucaaa

SEQ ID NO: 2846294 - RNA, 12 nt, Human
aaaguaauguaa

SEQ ID NO: 2846295 - RNA, 13 nt, Human
aaaguaauguaaa

SEQ ID NO: 2846296 - RNA, 16 nt, Human
aaaguacaauguguuu

SEQ ID NO: 2846297 - RNA, 17 nt, Human
aaaguacaauguguuuu

SEQ ID NO: 2846298 - RNA, 18 nt, Human
aaaguacuugaguguaau

SEQ ID NO: 2846299 - RNA, 20 nt, Human
aaaguagaagaggguuuuag

SEQ ID NO: 2846300 - RNA, 20 nt, Human
aaaguagacaaucauuguuu

SEQ ID NO: 2846301 - RNA, 11 nt, Human
aaaguagaggu

SEQ ID NO: 2846302 - RNA, 21 nt, Human
aaaguggguuauucuggaguu

SEQ ID NO: 2846303 - RNA, 21 nt, Human
aaagugggaggucaggaaacu

SEQ ID NO: 2846304 - RNA, 17 nt, Human
aaagugggcuugauucu

SEQ ID NO: 2846305 - RNA, 20 nt, Human
aaaguauguaaaguauguaa

SEQ ID NO: 2846306 - RNA, 19 nt, Human
aaaguauguaaaguaugua

SEQ ID NO: 2846307 - RNA, 21 nt, Human
aaaguauccugcuucugauau

SEQ ID NO: 2846308 - RNA, 13 nt, Human
gguguuuauacag

SEQ ID NO: 2846309 - RNA, 17 nt, Human
gguguuuuaaaaaaucu

SEQ ID NO: 2846310 - RNA, 12 nt, Human
gguuccccaccg

SEQ ID NO: 2846311 - RNA, 17 nt, Human
gguucuaaaguucuaag

SEQ ID NO: 2846312 - RNA, 22 nt, Human
gguucuaaaguucuaagauucu

SEQ ID NO: 2846313 - RNA, 11 nt, Human
gguucuaaggc

SEQ ID NO: 2846314 - RNA, 12 nt, Human
gguucuaaggcc

SEQ ID NO: 2846315 - RNA, 12 nt, Human
gguucucaauga

SEQ ID NO: 2846316 - RNA, 21 nt, Human
gguuccgcacuuuccacuucu

SEQ ID NO: 2846317 - RNA, 23 nt, Human
gguucuaaggccuaggauucuaa

SEQ ID NO: 2846318 - RNA, 15 nt, Human
gguucuagguuucaa

SEQ ID NO: 2846319 - RNA, 18 nt, Human
gguucuaggcaucucugu

SEQ ID NO: 2846320 - RNA, 21 nt, Human
gguucuaggcaucucuguacu

SEQ ID NO: 2846321 - RNA, 23 nt, Human
gguucuaggcaucucuguacuuu

SEQ ID NO: 2846322 - RNA, 11 nt, Human
gguucuaaagu

SEQ ID NO: 2846323 - RNA, 12 nt, Human
gguucuaaaguu

SEQ ID NO: 2846324 - RNA, 13 nt, Human
gguucuaaaguuc

SEQ ID NO: 2846325 - RNA, 14 nt, Human
gguucuaaaguucu

SEQ ID NO: 2846326 - RNA, 15 nt, Human
gguucuaaaguucua

SEQ ID NO: 2846327 - RNA, 20 nt, Human
gguuccuuccucugagccuu

SEQ ID NO: 2846328 - RNA, 12 nt, Human
gguguggcuccu

SEQ ID NO: 2846329 - RNA, 13 nt, Human
gguguucuaagau

SEQ ID NO: 2846330 - RNA, 11 nt, Human
gguguucuaag

SEQ ID NO: 2846331 - RNA, 17 nt, Human
gguguuacugcaguuga

SEQ ID NO: 2846332 - RNA, 14 nt, Human
gguguguguagcca

SEQ ID NO: 2846333 - RNA, 21 nt, Human
gguguguuggacagagaaggg

SEQ ID NO: 2846334 - RNA, 12 nt, Human
ggugugucugcu

SEQ ID NO: 2846335 - RNA, 20 nt, Human
ggugggggccaccugccugc

SEQ ID NO: 2846336 - RNA, 19 nt, Human
aaagguuugcauucucaca

SEQ ID NO: 2846337 - RNA, 14 nt, Human
ggugggcuucccag

SEQ ID NO: 2846338 - RNA, 20 nt, Human
ggugggcuucccaguggcug

SEQ ID NO: 2846339 - RNA, 12 nt, Human
ggugggggagga

SEQ ID NO: 2846340 - RNA, 20 nt, Human
aaagggcccagagagggugg

SEQ ID NO: 2846341 - RNA, 20 nt, Human
aaagcuuauccauaaaaaaa

SEQ ID NO: 2846342 - RNA, 23 nt, Human
aaagcuuauccauaaaaaaaaau

SEQ ID NO: 2846343 - RNA, 17 nt, Human
aaaggggaaagaacaua

SEQ ID NO: 2846344 - RNA, 15 nt, Human
aaaggggacaggccu

SEQ ID NO: 2846345 - RNA, 16 nt, Human
aaaggggacaggccuc

SEQ ID NO: 2846346 - RNA, 19 nt, Human
aaaggggaucauaaaguua

SEQ ID NO: 2846347 - RNA, 17 nt, Human
aaaggggguccguggaa

SEQ ID NO: 2846348 - RNA, 13 nt, Human
aaagguguauuua

SEQ ID NO: 2846349 - RNA, 14 nt, Human
aaagguguauuuaa

SEQ ID NO: 2846350 - RNA, 15 nt, Human
aaagguguauuuaaa

SEQ ID NO: 2846351 - RNA, 19 nt, Human
aaagguggauuuuguuuaa

SEQ ID NO: 2846352 - RNA, 13 nt, Human
aaagguggccaca

SEQ ID NO: 2846353 - RNA, 21 nt, Human
aaagguggccacaaauucuuu

SEQ ID NO: 2846354 - RNA, 17 nt, Human
aaagguucacuaaagca

SEQ ID NO: 2846355 - RNA, 13 nt, Human
aaagguucuaggu

SEQ ID NO: 2846356 - RNA, 20 nt, Human
aaagguucuagguuucaaag

SEQ ID NO: 2846357 - RNA, 21 nt, Human
aaagguucuagguuucaaaga

SEQ ID NO: 2846358 - RNA, 14 nt, Human
aaagguucuucauc

SEQ ID NO: 2846359 - RNA, 15 nt, Human
aaagguucuucaucc

SEQ ID NO: 2846360 - RNA, 21 nt, Human
aaagguucuucaucccuuucc

SEQ ID NO: 2846361 - RNA, 22 nt, Human
aaagguucuucaucccuuucca

SEQ ID NO: 2846362 - RNA, 18 nt, Human
aaagggcacagcaucugu

SEQ ID NO: 2846363 - RNA, 19 nt, Human
aaagguugcuguuucacaa

SEQ ID NO: 2846364 - RNA, 12 nt, Human
gguggcuggguu

SEQ ID NO: 2846365 - RNA, 18 nt, Human
gguggcuggguuggaggg

SEQ ID NO: 2846366 - RNA, 23 nt, Human
ggugggaaggggagcacaauuuc

SEQ ID NO: 2846367 - RNA, 15 nt, Human
ggugggaaggggagc

SEQ ID NO: 2846368 - RNA, 21 nt, Human
ggugggaaccaugaagacagg

SEQ ID NO: 2846369 - RNA, 18 nt, Human
aaaguaacucauuuguua

SEQ ID NO: 2846370 - RNA, 20 nt, Human
aaaguaacucauuuguuaaa

SEQ ID NO: 2846371 - RNA, 14 nt, Human
aaaguaacucauuu

SEQ ID NO: 2846372 - RNA, 15 nt, Human
aaaguaacucauuug

SEQ ID NO: 2846373 - RNA, 13 nt, Human
gguggcuucagcu

SEQ ID NO: 2846374 - RNA, 14 nt, Human
gguggcuucagcuc

SEQ ID NO: 2846375 - RNA, 15 nt, Human
gguggcuucagcucc

SEQ ID NO: 2846376 - RNA, 16 nt, Human
gguggcuucagcucca

SEQ ID NO: 2846377 - RNA, 17 nt, Human
gguggcuucagcuccag

SEQ ID NO: 2846378 - RNA, 21 nt, Human
gguggcuucuuuucuuuguau

SEQ ID NO: 2846379 - RNA, 21 nt, Human
gguggcuuuccuuguggcaga

SEQ ID NO: 2846380 - RNA, 22 nt, Human
gguggcuuuccuuguggcagag

SEQ ID NO: 2846381 - RNA, 23 nt, Human
gguggcuuuccuuguggcagagg

SEQ ID NO: 2846382 - RNA, 14 nt, Human
aaaguaaaccacaa

SEQ ID NO: 2846383 - RNA, 21 nt, Human
aaaguaaaccacaaaaaaaua

SEQ ID NO: 2846384 - RNA, 14 nt, Human
aaagguuuuccucu

SEQ ID NO: 2846385 - RNA, 23 nt, Human
aaagguuuuggaucuugaaugug

SEQ ID NO: 2846386 - RNA, 17 nt, Human
ggugggcugagcccugg

SEQ ID NO: 2846387 - RNA, 15 nt, Human
ggugggcugagcccu

SEQ ID NO: 2846388 - RNA, 18 nt, Human
ggugggcugagcccuggc

SEQ ID NO: 2846389 - RNA, 16 nt, Human
ggugggcuucagggca

SEQ ID NO: 2846390 - RNA, 17 nt, Human
ggugggcuucagggcag

SEQ ID NO: 2846391 - RNA, 13 nt, Human
ggugggagcagga

SEQ ID NO: 2846392 - RNA, 16 nt, Human
ggugggagagcccagc

SEQ ID NO: 2846393 - RNA, 15 nt, Human
ggugggagagcccag

SEQ ID NO: 2846394 - RNA, 13 nt, Human
ggugggcugagcc

SEQ ID NO: 2846395 - RNA, 16 nt, Human
ggugggagcaggagau

SEQ ID NO: 2846396 - RNA, 16 nt, Human
ggugcugccugaaucc

SEQ ID NO: 2846397 - RNA, 13 nt, Human
gguggacacacaa

SEQ ID NO: 2846398 - RNA, 15 nt, Human
gguggacauggcccc

SEQ ID NO: 2846399 - RNA, 18 nt, Human
gguggacaguccugggag

SEQ ID NO: 2846400 - RNA, 17 nt, Human
gguggacaguccuggga

SEQ ID NO: 2846401 - RNA, 16 nt, Human
gguggacaguccuggg

SEQ ID NO: 2846402 - RNA, 15 nt, Human
gguggacaguccugg

SEQ ID NO: 2846403 - RNA, 14 nt, Human
gguggacaguccug

SEQ ID NO: 2846404 - RNA, 16 nt, Human
ggugcuggagguggga

SEQ ID NO: 2846405 - RNA, 21 nt, Human
ggugcuggaggugggagcagg

SEQ ID NO: 2846406 - RNA, 22 nt, Human
ggugcuggaggugggagcagga

SEQ ID NO: 2846407 - RNA, 22 nt, Human
aaagcagauaccucacccugcu

SEQ ID NO: 2846408 - RNA, 15 nt, Human
gguggcagcccugua

SEQ ID NO: 2846409 - RNA, 18 nt, Human
gguggcagcccuguaggg

SEQ ID NO: 2846410 - RNA, 18 nt, Human
gguggcacaggcccccuu

SEQ ID NO: 2846411 - RNA, 13 nt, Human
gguggcacugcca

SEQ ID NO: 2846412 - RNA, 18 nt, Human
gguggacccagggaacag

SEQ ID NO: 2846413 - RNA, 22 nt, Human
gguggaccuuuuaaaguguuuc

SEQ ID NO: 2846414 - RNA, 13 nt, Human
gguggacccaggg

SEQ ID NO: 2846415 - RNA, 17 nt, Human
gguggacuuagaaagca

SEQ ID NO: 2846416 - RNA, 18 nt, Human
gguggacuuagaaagcag

SEQ ID NO: 2846417 - RNA, 21 nt, Human
gguggacuuagaaagcagggg

SEQ ID NO: 2846418 - RNA, 19 nt, Human
gguggacuuagaaagcagg

SEQ ID NO: 2846419 - RNA, 20 nt, Human
gguggacuuagaaagcaggg

SEQ ID NO: 2846420 - RNA, 23 nt, Human
gguggacuuagaaagcaggggcu

SEQ ID NO: 2846421 - RNA, 21 nt, Human
gguggacuugaacuuuccugg

SEQ ID NO: 2846422 - RNA, 14 nt, Human
aaagcuguuaaacu

SEQ ID NO: 2846423 - RNA, 15 nt, Human
aaagcuguuaaacug

SEQ ID NO: 2846424 - RNA, 16 nt, Human
aaagcuguuaaacugu

SEQ ID NO: 2846425 - RNA, 18 nt, Human
aaagcuguuaaacuguua

SEQ ID NO: 2846426 - RNA, 23 nt, Human
aaagcuguuaaacuguuagcacu

SEQ ID NO: 2846427 - RNA, 21 nt, Human
aaagcuguguuguugcuucuu

SEQ ID NO: 2846428 - RNA, 15 nt, Human
aaagcugacauugcc

SEQ ID NO: 2846429 - RNA, 18 nt, Human
aaagcugacauugccaaa

SEQ ID NO: 2846430 - RNA, 19 nt, Human
aaagcugacauugccaaaa

SEQ ID NO: 2846431 - RNA, 17 nt, Human
aaagcugagaacuccug

SEQ ID NO: 2846432 - RNA, 18 nt, Human
aaagcugagaacuccuga

SEQ ID NO: 2846433 - RNA, 20 nt, Human
aaagcugagaacuccugacu

SEQ ID NO: 2846434 - RNA, 16 nt, Human
aaagcuaggccuggcc

SEQ ID NO: 2846435 - RNA, 14 nt, Human
aaagcuaggccugg

SEQ ID NO: 2846436 - RNA, 22 nt, Human
aaagcaguagaaauaauaugca

SEQ ID NO: 2846437 - RNA, 18 nt, Human
aaagcaggggcuacaaga

SEQ ID NO: 2846438 - RNA, 21 nt, Human
aaagcaggggcuacaagaggg

SEQ ID NO: 2846439 - RNA, 22 nt, Human
aaagcaggggcuacaagaggga

SEQ ID NO: 2846440 - RNA, 20 nt, Human
guacaaaauccagcuaugaa

SEQ ID NO: 2846441 - RNA, 16 nt, Human
guacaaaauaaacaaa

SEQ ID NO: 2846442 - RNA, 14 nt, Human
guacaaaauaaaca

SEQ ID NO: 2846443 - RNA, 12 nt, Human
guacaaaauaaa

SEQ ID NO: 2846444 - RNA, 12 nt, Human
guacaaaaauaa

SEQ ID NO: 2846445 - RNA, 18 nt, Human
guacaaaaauaaauuuau

SEQ ID NO: 2846446 - RNA, 15 nt, Human
guaauuuuuuucacc

SEQ ID NO: 2846447 - RNA, 17 nt, Human
guacaaggcgaucccau

SEQ ID NO: 2846448 - RNA, 17 nt, Human
guacaagucaguuucua

SEQ ID NO: 2846449 - RNA, 11 nt, Human
guacaauaaaa

SEQ ID NO: 2846450 - RNA, 16 nt, Human
guacaauaaaaguaaa

SEQ ID NO: 2846451 - RNA, 22 nt, Human
guacaauaaguguuuuuguauu

SEQ ID NO: 2846452 - RNA, 16 nt, Human
guacaauaauucauau

SEQ ID NO: 2846453 - RNA, 19 nt, Human
guacaauaauucauauucu

SEQ ID NO: 2846454 - RNA, 22 nt, Human
guacaaccuguucugcuuuccu

SEQ ID NO: 2846455 - RNA, 18 nt, Human
guacaaacuaaggugcua

SEQ ID NO: 2846456 - RNA, 22 nt, Human
guacaaaugccuuaaaauggaa

SEQ ID NO: 2846457 - RNA, 22 nt, Human
guacaaauuauaaaaagccacu

SEQ ID NO: 2846458 - RNA, 15 nt, Human
guaaucgaccugccu

SEQ ID NO: 2846459 - RNA, 16 nt, Human
guaaucaauaaagaaa

SEQ ID NO: 2846460 - RNA, 19 nt, Human
guaaucaauaaagaaaacu

SEQ ID NO: 2846461 - RNA, 19 nt, Human
guaaucccccaggagaaca

SEQ ID NO: 2846462 - RNA, 17 nt, Human
guaaguucagcacuugu

SEQ ID NO: 2846463 - RNA, 18 nt, Human
guaaguuaauaagcaaaa

SEQ ID NO: 2846464 - RNA, 17 nt, Human
guaacuaggcucagaga

SEQ ID NO: 2846465 - RNA, 22 nt, Human
guaacuauagacuggaaaaaau

SEQ ID NO: 2846466 - RNA, 23 nt, Human
guaaguugaauggccugccuuga

SEQ ID NO: 2846467 - RNA, 21 nt, Human
guaaguuuaaaggauguuggu

SEQ ID NO: 2846468 - RNA, 16 nt, Human
guaaguuucaggugac

SEQ ID NO: 2846469 - RNA, 22 nt, Human
guaaguuucaggugacauguga

SEQ ID NO: 2846470 - RNA, 13 nt, Human
guaaguuuuuuga

SEQ ID NO: 2846471 - RNA, 13 nt, Human
guaaguuucaggu

SEQ ID NO: 2846472 - RNA, 14 nt, Human
guaaguuucaggug

SEQ ID NO: 2846473 - RNA, 12 nt, Human
guaaccagccag

SEQ ID NO: 2846474 - RNA, 13 nt, Human
guaaccagccaga

SEQ ID NO: 2846475 - RNA, 20 nt, Human
guaaccagccagauccucuu

SEQ ID NO: 2846476 - RNA, 20 nt, Human
guaaccauuuuauaaagugc

SEQ ID NO: 2846477 - RNA, 12 nt, Human
guaauaaacuau

SEQ ID NO: 2846478 - RNA, 14 nt, Human
guaauaaacuauuu

SEQ ID NO: 2846479 - RNA, 23 nt, Human
guaauaagacauaacguuuuucc

SEQ ID NO: 2846480 - RNA, 16 nt, Human
guaauaaacuguguuu

SEQ ID NO: 2846481 - RNA, 13 nt, Human
guaauaauaccuc

SEQ ID NO: 2846482 - RNA, 14 nt, Human
guaauaauaccuca

SEQ ID NO: 2846483 - RNA, 15 nt, Human
guaauaauaccucaa

SEQ ID NO: 2846484 - RNA, 21 nt, Human
guaauaauaccucaauguuug

SEQ ID NO: 2846485 - RNA, 22 nt, Human
guaauaauaccucaauguuuga

SEQ ID NO: 2846486 - RNA, 15 nt, Human
guaauagagcaaaau

SEQ ID NO: 2846487 - RNA, 15 nt, Human
guaauagaaaacuga

SEQ ID NO: 2846488 - RNA, 19 nt, Human
guaauagaaaacugaaaau

SEQ ID NO: 2846489 - RNA, 18 nt, Human
guaauauuuauauauuua

SEQ ID NO: 2846490 - RNA, 12 nt, Human
guaaucaaugaa

SEQ ID NO: 2846491 - RNA, 18 nt, Human
guaaucaaugaauauuga

SEQ ID NO: 2846492 - RNA, 19 nt, Human
guaaucaaugaauauugaa

SEQ ID NO: 2846493 - RNA, 21 nt, Human
guaaucaaugaauauugaagu

SEQ ID NO: 2846494 - RNA, 13 nt, Human
guaauauuuugua

SEQ ID NO: 2846495 - RNA, 19 nt, Human
guaauauuuuguauuauug

SEQ ID NO: 2846496 - RNA, 13 nt, Human
guaauauuuuuau

SEQ ID NO: 2846497 - RNA, 18 nt, Human
guaauauuuuuauauaca

SEQ ID NO: 2846498 - RNA, 18 nt, Human
aaagugucaccuuuucuu

SEQ ID NO: 2846499 - RNA, 20 nt, Human
aaagugucaccuuuucuugc

SEQ ID NO: 2846500 - RNA, 21 nt, Human
aaagugucaccuuuucuugcc

SEQ ID NO: 2846501 - RNA, 23 nt, Human
aaagugguagguacuuuuuguga

SEQ ID NO: 2846502 - RNA, 17 nt, Human
aaaguguuuauuuuuca

SEQ ID NO: 2846503 - RNA, 18 nt, Human
aaaguguuuauuuuucau

SEQ ID NO: 2846504 - RNA, 20 nt, Human
aaaguguuuauuuuucauau

SEQ ID NO: 2846505 - RNA, 15 nt, Human
aaaguguuucuguua

SEQ ID NO: 2846506 - RNA, 21 nt, Human
aaaguguuuauuuuucauauu

SEQ ID NO: 2846507 - RNA, 12 nt, Human
aaaguguuucag

SEQ ID NO: 2846508 - RNA, 13 nt, Human
aaaguguuucagc

SEQ ID NO: 2846509 - RNA, 15 nt, Human
aaaguguuucagcua

SEQ ID NO: 2846510 - RNA, 21 nt, Human
aaaguguuucagcuaagggaa

SEQ ID NO: 2846511 - RNA, 13 nt, Human
aaaguguuugccu

SEQ ID NO: 2846512 - RNA, 14 nt, Human
aaaguuacagaaau

SEQ ID NO: 2846513 - RNA, 17 nt, Human
aaaguuacagaaauacu

SEQ ID NO: 2846514 - RNA, 16 nt, Human
aaaguuaacagauuuu

SEQ ID NO: 2846515 - RNA, 16 nt, Human
aaaguuaaucuucaug

SEQ ID NO: 2846516 - RNA, 15 nt, Human
aaaguuaaugcuuaa

SEQ ID NO: 2846517 - RNA, 22 nt, Human
aaaguuaaugcuuaagagggaa

SEQ ID NO: 2846518 - RNA, 15 nt, Human
aaauaauucuaaagg

SEQ ID NO: 2846519 - RNA, 13 nt, Human
aaauaauucuaaa

SEQ ID NO: 2846520 - RNA, 14 nt, Human
aaauaauucuaaag

SEQ ID NO: 2846521 - RNA, 16 nt, Human
guaaaauguugaauaa

SEQ ID NO: 2846522 - RNA, 15 nt, Human
guaaaauguugaaua

SEQ ID NO: 2846523 - RNA, 16 nt, Human
guaaacgcugucccua

SEQ ID NO: 2846524 - RNA, 20 nt, Human
guaaacgcugucccuaguaa

SEQ ID NO: 2846525 - RNA, 14 nt, Human
guaaacaaacucuu

SEQ ID NO: 2846526 - RNA, 19 nt, Human
guaaacaaacucuugaaga

SEQ ID NO: 2846527 - RNA, 22 nt, Human
guaaacacgccugcaaacgcug

SEQ ID NO: 2846528 - RNA, 19 nt, Human
guaaacacagucaaaauaa

SEQ ID NO: 2846529 - RNA, 13 nt, Human
guaaaauuuauuu

SEQ ID NO: 2846530 - RNA, 19 nt, Human
guaaaauugcugugcuuua

SEQ ID NO: 2846531 - RNA, 16 nt, Human
guaacaagccacccca

SEQ ID NO: 2846532 - RNA, 15 nt, Human
guaacagaacagcuu

SEQ ID NO: 2846533 - RNA, 18 nt, Human
guaacagaacagcuucag

SEQ ID NO: 2846534 - RNA, 21 nt, Human
guaacagaacagcuucagguu

SEQ ID NO: 2846535 - RNA, 22 nt, Human
guaacagaacagcuucagguua

SEQ ID NO: 2846536 - RNA, 15 nt, Human
guaacaucaaagauu

SEQ ID NO: 2846537 - RNA, 19 nt, Human
guaacaucacuauccaugc

SEQ ID NO: 2846538 - RNA, 20 nt, Human
guaacaucacuauccaugca

SEQ ID NO: 2846539 - RNA, 22 nt, Human
guaacaguucauguuugcuuca

SEQ ID NO: 2846540 - RNA, 14 nt, Human
guaacauaauaaau

SEQ ID NO: 2846541 - RNA, 11 nt, Human
guaaccagcca

SEQ ID NO: 2846542 - RNA, 11 nt, Human
guaaacugcca

SEQ ID NO: 2846543 - RNA, 17 nt, Human
guaaacuggaauuaaaa

SEQ ID NO: 2846544 - RNA, 18 nt, Human
guaaacuggaauuaaaag

SEQ ID NO: 2846545 - RNA, 23 nt, Human
guaaacucaaaauauuuguacau

SEQ ID NO: 2846546 - RNA, 16 nt, Human
guaaacucaaaauauu

SEQ ID NO: 2846547 - RNA, 14 nt, Human
guaaacgacacucu

SEQ ID NO: 2846548 - RNA, 22 nt, Human
guaaacuaucuuggugaauuuu

SEQ ID NO: 2846549 - RNA, 15 nt, Human
guaaacucaaaacuu

SEQ ID NO: 2846550 - RNA, 21 nt, Human
guaaacucaaaacuuaacaua

SEQ ID NO: 2846551 - RNA, 15 nt, Human
guaaagccauuaaau

SEQ ID NO: 2846552 - RNA, 12 nt, Human
guaaagcuccua

SEQ ID NO: 2846553 - RNA, 16 nt, Human
guaaaguauguaaaca

SEQ ID NO: 2846554 - RNA, 21 nt, Human
guaaaguauguaaacaggaga

SEQ ID NO: 2846555 - RNA, 15 nt, Human
guaaagguuuuuauu

SEQ ID NO: 2846556 - RNA, 18 nt, Human
aaauaucauuuauuuuuu

SEQ ID NO: 2846557 - RNA, 20 nt, Human
aaauaucccaaacugugaug

SEQ ID NO: 2846558 - RNA, 14 nt, Human
aaauaucccuuccg

SEQ ID NO: 2846559 - RNA, 15 nt, Human
aaauauauuuaauga

SEQ ID NO: 2846560 - RNA, 11 nt, Human
aaauauaugua

SEQ ID NO: 2846561 - RNA, 23 nt, Human
aaauauauuuuaccauacauuua

SEQ ID NO: 2846562 - RNA, 14 nt, Human
aaauauauuuaaug

SEQ ID NO: 2846563 - RNA, 22 nt, Human
aaauauauuguuaaucucuguu

SEQ ID NO: 2846564 - RNA, 15 nt, Human
aaauauaugaacauu

SEQ ID NO: 2846565 - RNA, 13 nt, Human
aaauauauauagu

SEQ ID NO: 2846566 - RNA, 14 nt, Human
aaauauauguauuu

SEQ ID NO: 2846567 - RNA, 22 nt, Human
aaauauauguauuuuuauauaa

SEQ ID NO: 2846568 - RNA, 16 nt, Human
guacaauguacacacu

SEQ ID NO: 2846569 - RNA, 16 nt, Human
aaauaccaggauuuuu

SEQ ID NO: 2846570 - RNA, 16 nt, Human
guacacacacauacac

SEQ ID NO: 2846571 - RNA, 13 nt, Human
guacaauguguuu

SEQ ID NO: 2846572 - RNA, 17 nt, Human
guacaauguguuuuucu

SEQ ID NO: 2846573 - RNA, 21 nt, Human
guacaauugugggcauaaacu

SEQ ID NO: 2846574 - RNA, 21 nt, Human
guacacaacuaguuuuguuua

SEQ ID NO: 2846575 - RNA, 20 nt, Human
guacacaauaagcaaaaaca

SEQ ID NO: 2846576 - RNA, 18 nt, Human
guacacaauaagcaaaaa

SEQ ID NO: 2846577 - RNA, 21 nt, Human
aaauacccguuaccauauuua

SEQ ID NO: 2846578 - RNA, 21 nt, Human
aaauacccuucuuuuaugagc

SEQ ID NO: 2846579 - RNA, 14 nt, Human
aaauaccucaggaa

SEQ ID NO: 2846580 - RNA, 15 nt, Human
aaauaccucaggaaa

SEQ ID NO: 2846581 - RNA, 17 nt, Human
aaauaccucaggaaaga

SEQ ID NO: 2846582 - RNA, 18 nt, Human
aaauaccucaggaaagaa

SEQ ID NO: 2846583 - RNA, 21 nt, Human
aaauaccucaggaaagaauag

SEQ ID NO: 2846584 - RNA, 14 nt, Human
aaauaccucauguu

SEQ ID NO: 2846585 - RNA, 15 nt, Human
aaauaccucauguuu

SEQ ID NO: 2846586 - RNA, 16 nt, Human
aaauaccucauguuua

SEQ ID NO: 2846587 - RNA, 17 nt, Human
aaauaccucauguuuau

SEQ ID NO: 2846588 - RNA, 22 nt, Human
aaauaccucauguuuaugaaaa

SEQ ID NO: 2846589 - RNA, 16 nt, Human
aaauaccauugacaca

SEQ ID NO: 2846590 - RNA, 18 nt, Human
aaauauagaucaguuaua

SEQ ID NO: 2846591 - RNA, 12 nt, Human
aaauauagauua

SEQ ID NO: 2846592 - RNA, 13 nt, Human
aaauauagauuag

SEQ ID NO: 2846593 - RNA, 16 nt, Human
aaauauagauuagaaa

SEQ ID NO: 2846594 - RNA, 17 nt, Human
aaauauagauuagaaaa

SEQ ID NO: 2846595 - RNA, 18 nt, Human
aaauauagauuagaaaaa

SEQ ID NO: 2846596 - RNA, 19 nt, Human
aaauauagauuagaaaaau

SEQ ID NO: 2846597 - RNA, 10 nt, Human
aaauauagcg

SEQ ID NO: 2846598 - RNA, 14 nt, Human
aaauauaguuccua

SEQ ID NO: 2846599 - RNA, 18 nt, Human
aaauauaguuccuaagaa

SEQ ID NO: 2846600 - RNA, 23 nt, Human
aaauauauacccccccaugcagu

SEQ ID NO: 2846601 - RNA, 18 nt, Human
aaauauauacgaacaaaa

SEQ ID NO: 2846602 - RNA, 12 nt, Human
aaauauauacua

SEQ ID NO: 2846603 - RNA, 13 nt, Human
aaauauauauaaa

SEQ ID NO: 2846604 - RNA, 16 nt, Human
aaauauauacuaaaca

SEQ ID NO: 2846605 - RNA, 21 nt, Human
aaauauauauaaagaauauau

SEQ ID NO: 2846606 - RNA, 14 nt, Human
aaauauauauacau

SEQ ID NO: 2846607 - RNA, 15 nt, Human
aaauauauauacaua

SEQ ID NO: 2846608 - RNA, 16 nt, Human
aaauauauauacauau

SEQ ID NO: 2846609 - RNA, 18 nt, Human
aaauauauauacauaugu

SEQ ID NO: 2846610 - RNA, 19 nt, Human
aaauauauauacauaugua

SEQ ID NO: 2846611 - RNA, 14 nt, Human
aaauauauauagaa

SEQ ID NO: 2846612 - RNA, 20 nt, Human
aaauaucuuguguuguccuu

SEQ ID NO: 2846613 - RNA, 21 nt, Human
aaauaucuuguguuguccuuu

SEQ ID NO: 2846614 - RNA, 13 nt, Human
aaauaucuuuuau

SEQ ID NO: 2846615 - RNA, 14 nt, Human
aaauaucuuuuaug

SEQ ID NO: 2846616 - RNA, 15 nt, Human
aaauaucuuuuaugu

SEQ ID NO: 2846617 - RNA, 19 nt, Human
aaauaucuuuuauguuuga

SEQ ID NO: 2846618 - RNA, 20 nt, Human
aaauaucuuuuauguuugaa

SEQ ID NO: 2846619 - RNA, 21 nt, Human
aaauaucuuuuauguuugaau

SEQ ID NO: 2846620 - RNA, 22 nt, Human
aaauaucuuuuauguuugaaua

SEQ ID NO: 2846621 - RNA, 23 nt, Human
aaauaucuuuuauguuugaauau

SEQ ID NO: 2846622 - RNA, 14 nt, Human
aaauaucugcucaa

SEQ ID NO: 2846623 - RNA, 16 nt, Human
aaauaucugaacauuu

SEQ ID NO: 2846624 - RNA, 17 nt, Human
aaauaucugaacauuua

SEQ ID NO: 2846625 - RNA, 19 nt, Human
aaauaucugaacauuuacu

SEQ ID NO: 2846626 - RNA, 10 nt, Human
aaauaucuga

SEQ ID NO: 2846627 - RNA, 23 nt, Human
aaauaugagugguuauugaaaau

SEQ ID NO: 2846628 - RNA, 18 nt, Human
aaauaugaacccuuuguu

SEQ ID NO: 2846629 - RNA, 19 nt, Human
aaauaugaacccuuuguuu

SEQ ID NO: 2846630 - RNA, 21 nt, Human
aaauaugaacccuuuguuucu

SEQ ID NO: 2846631 - RNA, 18 nt, Human
aaauaugucucgcuagug

SEQ ID NO: 2846632 - RNA, 13 nt, Human
aaauauguuuuua

SEQ ID NO: 2846633 - RNA, 21 nt, Human
aaauaugugagauuuuuuauu

SEQ ID NO: 2846634 - RNA, 23 nt, Human
aaauaugugagauuuuuuauugc

SEQ ID NO: 2846635 - RNA, 24 nt, Human
aaauaugugagauuuuuuauugcu

SEQ ID NO: 2846636 - RNA, 12 nt, Human
aaauauguacaa

SEQ ID NO: 2846637 - RNA, 20 nt, Human
aaauauggacacuuaauacu

SEQ ID NO: 2846638 - RNA, 16 nt, Human
aaauauggacacuuaa

SEQ ID NO: 2846639 - RNA, 15 nt, Human
aaauauggacacuua

SEQ ID NO: 2846640 - RNA, 23 nt, Human
aaauaugcagugauauggcagaa

SEQ ID NO: 2846641 - RNA, 18 nt, Human
aaauaugcagugauaugg

SEQ ID NO: 2846642 - RNA, 22 nt, Human
aaauaugcagugauauggcaga

SEQ ID NO: 2846643 - RNA, 10 nt, Human
aaauaugcaa

SEQ ID NO: 2846644 - RNA, 14 nt, Human
aaauaugcagugau

SEQ ID NO: 2846645 - RNA, 16 nt, Human
aaauauggaacuucua

SEQ ID NO: 2846646 - RNA, 17 nt, Human
aaauauggaacuucuaa

SEQ ID NO: 2846647 - RNA, 18 nt, Human
aaauauggaacuucuaau

SEQ ID NO: 2846648 - RNA, 19 nt, Human
aaauauggaacuucuaaua

SEQ ID NO: 2846649 - RNA, 20 nt, Human
aaauauggaacuucuaauau

SEQ ID NO: 2846650 - RNA, 15 nt, Human
aaauaugcuaauuug

SEQ ID NO: 2846651 - RNA, 19 nt, Human
aaauaugcuaauuugggga

SEQ ID NO: 2846652 - RNA, 13 nt, Human
aaauaugcucuuu

SEQ ID NO: 2846653 - RNA, 18 nt, Human
aaauaugcucuuuuguuu

SEQ ID NO: 2846654 - RNA, 20 nt, Human
aaauauuguguugugaaugu

SEQ ID NO: 2846655 - RNA, 13 nt, Human
aaaucauauugau

SEQ ID NO: 2846656 - RNA, 13 nt, Human
aaauauucuauau

SEQ ID NO: 2846657 - RNA, 20 nt, Human
aaauauuccugcauuuguga

SEQ ID NO: 2846658 - RNA, 13 nt, Human
aaauauugcuggg

SEQ ID NO: 2846659 - RNA, 15 nt, Human
aaauauugcuguaua

SEQ ID NO: 2846660 - RNA, 15 nt, Human
aaauauugaggcuuu

SEQ ID NO: 2846661 - RNA, 17 nt, Human
aaauauugaggcuuugu

SEQ ID NO: 2846662 - RNA, 18 nt, Human
aaauauugaggcuuugug

SEQ ID NO: 2846663 - RNA, 19 nt, Human
aaauauugaggcuuugugu

SEQ ID NO: 2846664 - RNA, 20 nt, Human
aaauauugaggcuuuguguu

SEQ ID NO: 2846665 - RNA, 21 nt, Human
aaauauugaggcuuuguguug

SEQ ID NO: 2846666 - RNA, 23 nt, Human
aaauauugaggcuuuguguugua

SEQ ID NO: 2846667 - RNA, 14 nt, Human
aaauauucuauaug

SEQ ID NO: 2846668 - RNA, 18 nt, Human
aaauauucuauaugaauu

SEQ ID NO: 2846669 - RNA, 20 nt, Human
aaauauucuauaugaauuua

SEQ ID NO: 2846670 - RNA, 17 nt, Human
ggguuuuccacccugga

SEQ ID NO: 2846671 - RNA, 16 nt, Human
ggguuuuccacccugg

SEQ ID NO: 2846672 - RNA, 20 nt, Human
ggguuuugccauguuggcca

SEQ ID NO: 2846673 - RNA, 23 nt, Human
ggguuuugccauguuggccaggc

SEQ ID NO: 2846674 - RNA, 17 nt, Human
aaacuuagugacaaaau

SEQ ID NO: 2846675 - RNA, 18 nt, Human
gggugucauuucauucca

SEQ ID NO: 2846676 - RNA, 13 nt, Human
ggguguagccagg

SEQ ID NO: 2846677 - RNA, 15 nt, Human
gggugguggugauag

SEQ ID NO: 2846678 - RNA, 14 nt, Human
gguaacagaacagc

SEQ ID NO: 2846679 - RNA, 15 nt, Human
gguaacagaacagcu

SEQ ID NO: 2846680 - RNA, 16 nt, Human
gguaacagaacagcuu

SEQ ID NO: 2846681 - RNA, 18 nt, Human
gguaacagaacagcuuca

SEQ ID NO: 2846682 - RNA, 17 nt, Human
gguaaaugcaaaguucu

SEQ ID NO: 2846683 - RNA, 13 nt, Human
gguaaaugccaca

SEQ ID NO: 2846684 - RNA, 20 nt, Human
gguaaaugccacacaccuuu

SEQ ID NO: 2846685 - RNA, 20 nt, Human
gguaaauaccaaguauuuau

SEQ ID NO: 2846686 - RNA, 15 nt, Human
gguaaauuaagacau

SEQ ID NO: 2846687 - RNA, 16 nt, Human
gguaaacacgccugca

SEQ ID NO: 2846688 - RNA, 13 nt, Human
gguaaaauguauu

SEQ ID NO: 2846689 - RNA, 15 nt, Human
gguaaaauguauuuu

SEQ ID NO: 2846690 - RNA, 17 nt, Human
gguaaaauguauuuuuc

SEQ ID NO: 2846691 - RNA, 16 nt, Human
gguaaaauuagaugca

SEQ ID NO: 2846692 - RNA, 22 nt, Human
gguaaaauuagaugcauguuga

SEQ ID NO: 2846693 - RNA, 14 nt, Human
gguaaaacaaaaca

SEQ ID NO: 2846694 - RNA, 19 nt, Human
aaacuguuaauaguucagg

SEQ ID NO: 2846695 - RNA, 20 nt, Human
aaacuguucccaccugcugg

SEQ ID NO: 2846696 - RNA, 21 nt, Human
aaacuguuaccuaaaguauuu

SEQ ID NO: 2846697 - RNA, 12 nt, Human
aaacuguuagca

SEQ ID NO: 2846698 - RNA, 16 nt, Human
aaacuguuagcacugu

SEQ ID NO: 2846699 - RNA, 19 nt, Human
aaacuguuagcacuguuga

SEQ ID NO: 2846700 - RNA, 21 nt, Human
aaacuguuagcacuguugaug

SEQ ID NO: 2846701 - RNA, 22 nt, Human
aaacuguuagcacuguugaugu

SEQ ID NO: 2846702 - RNA, 22 nt, Human
aaacuguucaagaaauaauaaa

SEQ ID NO: 2846703 - RNA, 13 nt, Human
aaacuaaaucucu

SEQ ID NO: 2846704 - RNA, 17 nt, Human
aaacuaaaucucuaaua

SEQ ID NO: 2846705 - RNA, 20 nt, Human
aaacuguuuuggguagcugc

SEQ ID NO: 2846706 - RNA, 23 nt, Human
aaacuguuuuggguagcugccac

SEQ ID NO: 2846707 - RNA, 17 nt, Human
aaacuuaacauauuuac

SEQ ID NO: 2846708 - RNA, 23 nt, Human
aaacuuaacuuuaacugaacaau

SEQ ID NO: 2846709 - RNA, 23 nt, Human
aaacuguuucagauuuuuuauuu

SEQ ID NO: 2846710 - RNA, 21 nt, Human
aaacuguucccaccugcugga

SEQ ID NO: 2846711 - RNA, 12 nt, Human
aaacgcuaccuc

SEQ ID NO: 2846712 - RNA, 13 nt, Human
aaacgcuaccucu

SEQ ID NO: 2846713 - RNA, 14 nt, Human
aaacgcgcagaugu

SEQ ID NO: 2846714 - RNA, 15 nt, Human
aaacgcgcagaugug

SEQ ID NO: 2846715 - RNA, 18 nt, Human
aaacgcgcagaugugcag

SEQ ID NO: 2846716 - RNA, 21 nt, Human
aaacgcgcagaugugcagcag

SEQ ID NO: 2846717 - RNA, 23 nt, Human
aaacgcgcagaugugcagcagau

SEQ ID NO: 2846718 - RNA, 24 nt, Human
aaacgcgcagaugugcagcagauu

SEQ ID NO: 2846719 - RNA, 15 nt, Human
aaacuaaaagacauu

SEQ ID NO: 2846720 - RNA, 18 nt, Human
aaacuaaaagacauuugu

SEQ ID NO: 2846721 - RNA, 21 nt, Human
aaacgacacucucuggaagcc

SEQ ID NO: 2846722 - RNA, 20 nt, Human
aaacuuaccuaagugacauu

SEQ ID NO: 2846723 - RNA, 23 nt, Human
aaacuuaccuaagugacauuugu

SEQ ID NO: 2846724 - RNA, 14 nt, Human
aaacuuacuauuuu

SEQ ID NO: 2846725 - RNA, 15 nt, Human
aaacuuacuauuuug

SEQ ID NO: 2846726 - RNA, 12 nt, Human
aaacuuaugaau

SEQ ID NO: 2846727 - RNA, 13 nt, Human
aaacuuaugaaug

SEQ ID NO: 2846728 - RNA, 14 nt, Human
aaacuuaugaaugu

SEQ ID NO: 2846729 - RNA, 16 nt, Human
aaacuuaugaauguuu

SEQ ID NO: 2846730 - RNA, 17 nt, Human
aaacuuaugaauguuuc

SEQ ID NO: 2846731 - RNA, 15 nt, Human
aaacuuauaaaucau

SEQ ID NO: 2846732 - RNA, 20 nt, Human
aaacuuauaaaucauauuga

SEQ ID NO: 2846733 - RNA, 21 nt, Human
aaacuuauaaaucauauugau

SEQ ID NO: 2846734 - RNA, 18 nt, Human
aaacuuauuuuauauuuu

SEQ ID NO: 2846735 - RNA, 22 nt, Human
aaacuuauuuuauauuuucccu

SEQ ID NO: 2846736 - RNA, 11 nt, Human
ggguggccucg

SEQ ID NO: 2846737 - RNA, 11 nt, Human
ggguggccugu

SEQ ID NO: 2846738 - RNA, 24 nt, Human
ggucaguguccaaagcagggucug

SEQ ID NO: 2846739 - RNA, 22 nt, Human
ggucauaaagaggcguugcuuu

SEQ ID NO: 2846740 - RNA, 16 nt, Human
ggucagucugguggga

SEQ ID NO: 2846741 - RNA, 19 nt, Human
gguaucaggugcugccauc

SEQ ID NO: 2846742 - RNA, 18 nt, Human
ggucagguuuaacauuug

SEQ ID NO: 2846743 - RNA, 19 nt, Human
ggucagguuuaacauuugc

SEQ ID NO: 2846744 - RNA, 18 nt, Human
aaacuuuaggguaaaaau

SEQ ID NO: 2846745 - RNA, 19 nt, Human
aaacuuuaggguaaaaauu

SEQ ID NO: 2846746 - RNA, 13 nt, Human
aaacuuuauacau

SEQ ID NO: 2846747 - RNA, 16 nt, Human
aaacuuuauacauuag

SEQ ID NO: 2846748 - RNA, 23 nt, Human
aaacuuuauacauuaguaaaugu

SEQ ID NO: 2846749 - RNA, 21 nt, Human
aaacuucccuuucugcuugug

SEQ ID NO: 2846750 - RNA, 17 nt, Human
aaacuuccccaucuucu

SEQ ID NO: 2846751 - RNA, 19 nt, Human
aaacuugacuccauuucau

SEQ ID NO: 2846752 - RNA, 17 nt, Human
aaacuucuggcucccuc

SEQ ID NO: 2846753 - RNA, 13 nt, Human
aaacuucuuaaau

SEQ ID NO: 2846754 - RNA, 15 nt, Human
aaacuucuuaaauau

SEQ ID NO: 2846755 - RNA, 16 nt, Human
aaacuucuuaaauauc

SEQ ID NO: 2846756 - RNA, 17 nt, Human
aaacuucuuaaauaucu

SEQ ID NO: 2846757 - RNA, 19 nt, Human
aaacuucuuaaauaucuuu

SEQ ID NO: 2846758 - RNA, 20 nt, Human
aaacuucuuaaauaucuuuu

SEQ ID NO: 2846759 - RNA, 21 nt, Human
aaacuucuuaaauaucuuuua

SEQ ID NO: 2846760 - RNA, 15 nt, Human
aaacuucuugucaga

SEQ ID NO: 2846761 - RNA, 17 nt, Human
aaacuucuugucagaca

SEQ ID NO: 2846762 - RNA, 23 nt, Human
aaacuucuugucagacauaaagc

SEQ ID NO: 2846763 - RNA, 13 nt, Human
aaacuugaaaaua

SEQ ID NO: 2846764 - RNA, 14 nt, Human
aaacuugaaaauau

SEQ ID NO: 2846765 - RNA, 15 nt, Human
gguccagcuggccug

SEQ ID NO: 2846766 - RNA, 22 nt, Human
gguccagccucguuggaagagg

SEQ ID NO: 2846767 - RNA, 13 nt, Human
gguccagcuggcc

SEQ ID NO: 2846768 - RNA, 20 nt, Human
gguccagcuggccuggacag

SEQ ID NO: 2846769 - RNA, 18 nt, Human
gguccagcuggccuggac

SEQ ID NO: 2846770 - RNA, 21 nt, Human
gguaacagaacagcuucaggu

SEQ ID NO: 2846771 - RNA, 23 nt, Human
gguaagaagccgggaacagacaa

SEQ ID NO: 2846772 - RNA, 23 nt, Human
gguaagagacagaauguaucugu

SEQ ID NO: 2846773 - RNA, 20 nt, Human
gguaagcacuuaaugaauga

SEQ ID NO: 2846774 - RNA, 20 nt, Human
gguaggccuuuuaacauuuu

SEQ ID NO: 2846775 - RNA, 14 nt, Human
gguagggaggcagc

SEQ ID NO: 2846776 - RNA, 15 nt, Human
gguagggaggcagcc

SEQ ID NO: 2846777 - RNA, 17 nt, Human
gguagggaggcagccuc

SEQ ID NO: 2846778 - RNA, 14 nt, Human
gguaucaggugcug

SEQ ID NO: 2846779 - RNA, 15 nt, Human
gguauaucugggcug

SEQ ID NO: 2846780 - RNA, 23 nt, Human
gguauaucugggcuggccaguug

SEQ ID NO: 2846781 - RNA, 18 nt, Human
gguauauauccgccuggc

SEQ ID NO: 2846782 - RNA, 20 nt, Human
gguauaaugguugacugggu

SEQ ID NO: 2846783 - RNA, 23 nt, Human
gguagggugggccuucagggagu

SEQ ID NO: 2846784 - RNA, 11 nt, Human
gguaggguggg

SEQ ID NO: 2846785 - RNA, 14 nt, Human
gggguaugaagagc

SEQ ID NO: 2846786 - RNA, 17 nt, Human
gggguccagggagcagg

SEQ ID NO: 2846787 - RNA, 13 nt, Human
ggggucaggcagc

SEQ ID NO: 2846788 - RNA, 14 nt, Human
gggggccaaaagga

SEQ ID NO: 2846789 - RNA, 19 nt, Human
gggggcucccguggccugu

SEQ ID NO: 2846790 - RNA, 22 nt, Human
gggggcagaucuuggacucaug

SEQ ID NO: 2846791 - RNA, 12 nt, Human
gggggccaccug

SEQ ID NO: 2846792 - RNA, 13 nt, Human
gggggccaccugc

SEQ ID NO: 2846793 - RNA, 22 nt, Human
gggggcuauagcuacaggaagc

SEQ ID NO: 2846794 - RNA, 20 nt, Human
gggggcaagaaguagcagug

SEQ ID NO: 2846795 - RNA, 14 nt, Human
ggggcccugcccug

SEQ ID NO: 2846796 - RNA, 21 nt, Human
gggggaugccacuccucccuc

SEQ ID NO: 2846797 - RNA, 22 nt, Human
gggggaugccacuccucccucc

SEQ ID NO: 2846798 - RNA, 12 nt, Human
ggggcccagggg

SEQ ID NO: 2846799 - RNA, 17 nt, Human
ggggcccaggggaggcg

SEQ ID NO: 2846800 - RNA, 19 nt, Human
ggggcccaaggcggccccu

SEQ ID NO: 2846801 - RNA, 22 nt, Human
ggggcccaaggcggccccuccc

SEQ ID NO: 2846802 - RNA, 14 nt, Human
ggggccccagggcu

SEQ ID NO: 2846803 - RNA, 15 nt, Human
ggggccccccugccc

SEQ ID NO: 2846804 - RNA, 12 nt, Human
aaaauguauuuu

SEQ ID NO: 2846805 - RNA, 19 nt, Human
aaaauguaaaggagucaaa

SEQ ID NO: 2846806 - RNA, 11 nt, Human
aaaauguaaau

SEQ ID NO: 2846807 - RNA, 20 nt, Human
aaaauguaaauauucuauau

SEQ ID NO: 2846808 - RNA, 14 nt, Human
aaaaugguuuauuu

SEQ ID NO: 2846809 - RNA, 18 nt, Human
aaaaugguuuauuuugua

SEQ ID NO: 2846810 - RNA, 22 nt, Human
aaaaugguuuauuuuguauugu

SEQ ID NO: 2846811 - RNA, 22 nt, Human
aaaauguaagauuauagauucu

SEQ ID NO: 2846812 - RNA, 13 nt, Human
aaaauguauuuuu

SEQ ID NO: 2846813 - RNA, 16 nt, Human
aaaauguauuuuucua

SEQ ID NO: 2846814 - RNA, 22 nt, Human
aaaaugucaaagagaaaacuua

SEQ ID NO: 2846815 - RNA, 11 nt, Human
aaaaugucugu

SEQ ID NO: 2846816 - RNA, 16 nt, Human
aaaauguccugccuuu

SEQ ID NO: 2846817 - RNA, 17 nt, Human
aaaauguccugccuuuu

SEQ ID NO: 2846818 - RNA, 18 nt, Human
aaaauguccugccuuuua

SEQ ID NO: 2846819 - RNA, 12 nt, Human
aaaaugucugua

SEQ ID NO: 2846820 - RNA, 18 nt, Human
gggguccugccggagagg

SEQ ID NO: 2846821 - RNA, 19 nt, Human
gggguccuggagcagacca

SEQ ID NO: 2846822 - RNA, 21 nt, Human
ggguaugaagagcuugcuuug

SEQ ID NO: 2846823 - RNA, 22 nt, Human
ggguauguuuaaucuguuaugu

SEQ ID NO: 2846824 - RNA, 16 nt, Human
ggguauugcuugccac

SEQ ID NO: 2846825 - RNA, 12 nt, Human
ggguauuggaaa

SEQ ID NO: 2846826 - RNA, 10 nt, Human
ggguauuuuu

SEQ ID NO: 2846827 - RNA, 17 nt, Human
gggucacccucuccagc

SEQ ID NO: 2846828 - RNA, 21 nt, Human
gggucauccugugcucggagg

SEQ ID NO: 2846829 - RNA, 21 nt, Human
gggucagucuggugggaggac

SEQ ID NO: 2846830 - RNA, 19 nt, Human
aaacauuuucagaaauauu

SEQ ID NO: 2846831 - RNA, 18 nt, Human
ggguccuggcuccugagg

SEQ ID NO: 2846832 - RNA, 20 nt, Human
aaacauuucauuaugagguc

SEQ ID NO: 2846833 - RNA, 14 nt, Human
aaacauuuuaaaaa

SEQ ID NO: 2846834 - RNA, 13 nt, Human
ggguccuggcucc

SEQ ID NO: 2846835 - RNA, 20 nt, Human
gggucauguuugcaggggug

SEQ ID NO: 2846836 - RNA, 21 nt, Human
gggucauguuugcagggguga

SEQ ID NO: 2846837 - RNA, 20 nt, Human
ggguccuaauuaccagucuu

SEQ ID NO: 2846838 - RNA, 18 nt, Human
aaaccugucaaugauaca

SEQ ID NO: 2846839 - RNA, 18 nt, Human
aaaccugucuccacugug

SEQ ID NO: 2846840 - RNA, 18 nt, Human
aaaccugugaagcugaaa

SEQ ID NO: 2846841 - RNA, 17 nt, Human
aaaccuucacuuaggaa

SEQ ID NO: 2846842 - RNA, 20 nt, Human
aaaccuguuuuuuuuucauu

SEQ ID NO: 2846843 - RNA, 20 nt, Human
aaaccuugcuaauuuucuca

SEQ ID NO: 2846844 - RNA, 14 nt, Human
aaaccuucugccuu

SEQ ID NO: 2846845 - RNA, 18 nt, Human
aaaccuuuuuuaagauuu

SEQ ID NO: 2846846 - RNA, 19 nt, Human
aaaccuuuuuuaagauuuu

SEQ ID NO: 2846847 - RNA, 20 nt, Human
aaaccuuuuuuaagauuuuu

SEQ ID NO: 2846848 - RNA, 21 nt, Human
aaaccuuuuuuaagauuuuuc

SEQ ID NO: 2846849 - RNA, 22 nt, Human
aaaccuuuuuuaagauuuuucu

SEQ ID NO: 2846850 - RNA, 23 nt, Human
aaaccuuuuuuaagauuuuucuc

SEQ ID NO: 2846851 - RNA, 15 nt, Human
aaaccuuuaagaaaa

SEQ ID NO: 2846852 - RNA, 23 nt, Human
aaaccaccagugcccaaagucug

SEQ ID NO: 2846853 - RNA, 16 nt, Human
aaaccacuagaacucu

SEQ ID NO: 2846854 - RNA, 16 nt, Human
aaaccagacaaggaaa

SEQ ID NO: 2846855 - RNA, 21 nt, Human
aaaccugggauucaggaaugu

SEQ ID NO: 2846856 - RNA, 18 nt, Human
aaaccugggcucugguuu

SEQ ID NO: 2846857 - RNA, 12 nt, Human
aaaccuguaucu

SEQ ID NO: 2846858 - RNA, 13 nt, Human
aaaccuguaucuu

SEQ ID NO: 2846859 - RNA, 16 nt, Human
aaaccuguaucuuucu

SEQ ID NO: 2846860 - RNA, 17 nt, Human
aaaccuguaucuuucua

SEQ ID NO: 2846861 - RNA, 18 nt, Human
aaaccugggauucaggaa

SEQ ID NO: 2846862 - RNA, 15 nt, Human
aaaccuggaugucac

SEQ ID NO: 2846863 - RNA, 12 nt, Human
aaaccugccugg

SEQ ID NO: 2846864 - RNA, 16 nt, Human
aaaccugccuggguuu

SEQ ID NO: 2846865 - RNA, 12 nt, Human
aaaauacauuua

SEQ ID NO: 2846866 - RNA, 18 nt, Human
aaaauacauuuaaaacuu

SEQ ID NO: 2846867 - RNA, 21 nt, Human
aaaauacaguuugucacauga

SEQ ID NO: 2846868 - RNA, 18 nt, Human
aaaauaauuuuaaaaaug

SEQ ID NO: 2846869 - RNA, 19 nt, Human
aaaauaauuuuaaaaaugg

SEQ ID NO: 2846870 - RNA, 17 nt, Human
aaaauaauuucucuaca

SEQ ID NO: 2846871 - RNA, 20 nt, Human
aaaauaauuuuaaacaaagg

SEQ ID NO: 2846872 - RNA, 19 nt, Human
aaaauaauuuuaaacaaag

SEQ ID NO: 2846873 - RNA, 14 nt, Human
aaaauaaugcugca

SEQ ID NO: 2846874 - RNA, 12 nt, Human
aaaauaauguaa

SEQ ID NO: 2846875 - RNA, 13 nt, Human
aaaauaauucuaa

SEQ ID NO: 2846876 - RNA, 14 nt, Human
aaaauaauucuaaa

SEQ ID NO: 2846877 - RNA, 12 nt, Human
aaaauaauaauu

SEQ ID NO: 2846878 - RNA, 22 nt, Human
aaaauaauaauuuuuauauuua

SEQ ID NO: 2846879 - RNA, 13 nt, Human
aaaauaagugaau

SEQ ID NO: 2846880 - RNA, 21 nt, Human
aaaauaagugaauaauaauua

SEQ ID NO: 2846881 - RNA, 16 nt, Human
aaaauaagaauagaaa

SEQ ID NO: 2846882 - RNA, 16 nt, Human
aaaauaacuucaagca

SEQ ID NO: 2846883 - RNA, 22 nt, Human
aaaaggagccaauuuaaagaaa

SEQ ID NO: 2846884 - RNA, 19 nt, Human
aaaaggacaucagcaaaca

SEQ ID NO: 2846885 - RNA, 22 nt, Human
aaaaggagagacucccaugaag

SEQ ID NO: 2846886 - RNA, 17 nt, Human
aaaaggacaucagcaaa

SEQ ID NO: 2846887 - RNA, 23 nt, Human
ggcuggucuugaaguccuggcuu

SEQ ID NO: 2846888 - RNA, 18 nt, Human
aaaagguauuuugaauac

SEQ ID NO: 2846889 - RNA, 19 nt, Human
aaaagguauuuugaauacc

SEQ ID NO: 2846890 - RNA, 21 nt, Human
aaaagguauuuugaauaccau

SEQ ID NO: 2846891 - RNA, 15 nt, Human
aaaagguauuaaauu

SEQ ID NO: 2846892 - RNA, 14 nt, Human
aaaauaacacacau

SEQ ID NO: 2846893 - RNA, 19 nt, Human
aaaagguucacuaaagcag

SEQ ID NO: 2846894 - RNA, 20 nt, Human
aaaagguucuucaucccuuu

SEQ ID NO: 2846895 - RNA, 15 nt, Human
aaaaggauacauaau

SEQ ID NO: 2846896 - RNA, 15 nt, Human
aaaaggauaguauuu

SEQ ID NO: 2846897 - RNA, 16 nt, Human
aaaaggauaguauuuu

SEQ ID NO: 2846898 - RNA, 17 nt, Human
aaaaggauaguauuuuu

SEQ ID NO: 2846899 - RNA, 22 nt, Human
aaaaggauaguauuuuuaucca

SEQ ID NO: 2846900 - RNA, 18 nt, Human
aaaaggauuuuuaucuuu

SEQ ID NO: 2846901 - RNA, 18 nt, Human
aaaaggccaguggaaauu

SEQ ID NO: 2846902 - RNA, 14 nt, Human
aaaaggcauuguuu

SEQ ID NO: 2846903 - RNA, 16 nt, Human
aaaaggcaaaugugua

SEQ ID NO: 2846904 - RNA, 17 nt, Human
aaaaggcauuguuugag

SEQ ID NO: 2846905 - RNA, 15 nt, Human
aaaauauuuguacau

SEQ ID NO: 2846906 - RNA, 23 nt, Human
aaaauauuuauuaaauaaaauca

SEQ ID NO: 2846907 - RNA, 21 nt, Human
aaaauauuugacuauucugua

SEQ ID NO: 2846908 - RNA, 11 nt, Human
aaaauauuuau

SEQ ID NO: 2846909 - RNA, 12 nt, Human
aaaauauuuaaa

SEQ ID NO: 2846910 - RNA, 16 nt, Human
aaaauauuuaaaaaug

SEQ ID NO: 2846911 - RNA, 19 nt, Human
aaaauauuuaaaaaugucu

SEQ ID NO: 2846912 - RNA, 20 nt, Human
aaaauauuuaaaaaugucuu

SEQ ID NO: 2846913 - RNA, 16 nt, Human
aaaauauggaacuucu

SEQ ID NO: 2846914 - RNA, 15 nt, Human
aaaauauauuuaaug

SEQ ID NO: 2846915 - RNA, 13 nt, Human
aaaauagacacuc

SEQ ID NO: 2846916 - RNA, 15 nt, Human
aaaauagaagcugua

SEQ ID NO: 2846917 - RNA, 15 nt, Human
aaaauacuuuuccuu

SEQ ID NO: 2846918 - RNA, 16 nt, Human
aaaauacuuuuccuua

SEQ ID NO: 2846919 - RNA, 19 nt, Human
aaaauacuuuuucuaauga

SEQ ID NO: 2846920 - RNA, 12 nt, Human
aaaauagaaaag

SEQ ID NO: 2846921 - RNA, 15 nt, Human
aaaauagaaaaguua

SEQ ID NO: 2846922 - RNA, 16 nt, Human
aaaauagaaaaguuau

SEQ ID NO: 2846923 - RNA, 16 nt, Human
aaaauauauuuaauga

SEQ ID NO: 2846924 - RNA, 20 nt, Human
aaaauagaguguaguuuaca

SEQ ID NO: 2846925 - RNA, 16 nt, Human
aaaauagagcuuuuaa

SEQ ID NO: 2846926 - RNA, 21 nt, Human
aaaauagagcuuuuaaaaaug

SEQ ID NO: 2846927 - RNA, 18 nt, Human
aaaauaucugaaauguga

SEQ ID NO: 2846928 - RNA, 22 nt, Human
aaaauaugaccacacuccagcu

SEQ ID NO: 2846929 - RNA, 15 nt, Human
aaaauauuccugcau

SEQ ID NO: 2846930 - RNA, 13 nt, Human
aaaauggaaagaa

SEQ ID NO: 2846931 - RNA, 14 nt, Human
aaaauggaaagaau

SEQ ID NO: 2846932 - RNA, 14 nt, Human
aaaauggaacugug

SEQ ID NO: 2846933 - RNA, 22 nt, Human
aaaaugcuuuuuauuucugcau

SEQ ID NO: 2846934 - RNA, 12 nt, Human
aaaauggaaaga

SEQ ID NO: 2846935 - RNA, 14 nt, Human
aaaaugcuucaaag

SEQ ID NO: 2846936 - RNA, 13 nt, Human
aaaaugcuuuuua

SEQ ID NO: 2846937 - RNA, 19 nt, Human
aaaaugcuuuuuauuucug

SEQ ID NO: 2846938 - RNA, 18 nt, Human
aaaaugcuuuuuauuucu

SEQ ID NO: 2846939 - RNA, 23 nt, Human
aaaaugcuguauuagucacagag

SEQ ID NO: 2846940 - RNA, 21 nt, Human
aaaaugcuguauuagucacag

SEQ ID NO: 2846941 - RNA, 11 nt, Human
aaaaugcaaua

SEQ ID NO: 2846942 - RNA, 12 nt, Human
aaaaugcaauau

SEQ ID NO: 2846943 - RNA, 15 nt, Human
aaaaugcaauauuug

SEQ ID NO: 2846944 - RNA, 17 nt, Human
aaaaugcaauauuugua

SEQ ID NO: 2846945 - RNA, 15 nt, Human
aaaaugccauaauac

SEQ ID NO: 2846946 - RNA, 17 nt, Human
aaaaugccauaauacaa

SEQ ID NO: 2846947 - RNA, 18 nt, Human
aaaaugccauaauacaaa

SEQ ID NO: 2846948 - RNA, 21 nt, Human
aaaaugccauaauacaaaagg

SEQ ID NO: 2846949 - RNA, 15 nt, Human
aaaaugcccauuugc

SEQ ID NO: 2846950 - RNA, 18 nt, Human
aaaaugagcauacaucuu

SEQ ID NO: 2846951 - RNA, 16 nt, Human
aaaaugauguucauuu

SEQ ID NO: 2846952 - RNA, 16 nt, Human
aaaaugauuguaaaau

SEQ ID NO: 2846953 - RNA, 19 nt, Human
aaaaugauuguaaaauagc

SEQ ID NO: 2846954 - RNA, 20 nt, Human
aaaaugauuguaaaauagcu

SEQ ID NO: 2846955 - RNA, 22 nt, Human
aaaaugauuuguaguggaaaca

SEQ ID NO: 2846956 - RNA, 15 nt, Human
aaaaucugcuaggga

SEQ ID NO: 2846957 - RNA, 14 nt, Human
aaaaugacuacuua

SEQ ID NO: 2846958 - RNA, 18 nt, Human
aaaaugacuacuuagcau

SEQ ID NO: 2846959 - RNA, 19 nt, Human
aaaaugacuacuuagcauc

SEQ ID NO: 2846960 - RNA, 15 nt, Human
aaaaugacaucuuuu

SEQ ID NO: 2846961 - RNA, 16 nt, Human
aaaaugacaucuuuuu

SEQ ID NO: 2846962 - RNA, 17 nt, Human
aaaaugacaucuuuuua

SEQ ID NO: 2846963 - RNA, 15 nt, Human
aaaaugguauaagua

SEQ ID NO: 2846964 - RNA, 18 nt, Human
aaaaugguauaaguaacu

SEQ ID NO: 2846965 - RNA, 23 nt, Human
aaaaugguauaaguaacuuuauu

SEQ ID NO: 2846966 - RNA, 15 nt, Human
aaaaugguggcuuca

SEQ ID NO: 2846967 - RNA, 18 nt, Human
aaaaugguggcuucagcu

SEQ ID NO: 2846968 - RNA, 19 nt, Human
aaaaugguggcuucagcuc

SEQ ID NO: 2846969 - RNA, 21 nt, Human
aaaaugguggcuucagcucca

SEQ ID NO: 2846970 - RNA, 12 nt, Human
gggcuggggagg

SEQ ID NO: 2846971 - RNA, 23 nt, Human
aaaauggccauuugcuuuuucac

SEQ ID NO: 2846972 - RNA, 19 nt, Human
aaaauggccauuugcuuuu

SEQ ID NO: 2846973 - RNA, 14 nt, Human
gggcugcuccucau

SEQ ID NO: 2846974 - RNA, 11 nt, Human
gggcugcuccu

SEQ ID NO: 2846975 - RNA, 21 nt, Human
gggcugcccuggugcugccac

SEQ ID NO: 2846976 - RNA, 17 nt, Human
gggcuagguagaaaaag

SEQ ID NO: 2846977 - RNA, 19 nt, Human
gggcucagcggggacagcu

SEQ ID NO: 2846978 - RNA, 17 nt, Human
gggcucagcggggacag

SEQ ID NO: 2846979 - RNA, 15 nt, Human
gggcuaguugggcuu

SEQ ID NO: 2846980 - RNA, 20 nt, Human
gggcuaggaaauccagggug

SEQ ID NO: 2846981 - RNA, 18 nt, Human
gggcuaguugggcuuccu

SEQ ID NO: 2846982 - RNA, 21 nt, Human
gggcucagcggggacagcucc

SEQ ID NO: 2846983 - RNA, 22 nt, Human
gggcucaggucacauaaaacuu

SEQ ID NO: 2846984 - RNA, 14 nt, Human
gggccucgggaccu

SEQ ID NO: 2846985 - RNA, 22 nt, Human
gggccucggacuuagcugggag

SEQ ID NO: 2846986 - RNA, 16 nt, Human
gggccucgggaccuca

SEQ ID NO: 2846987 - RNA, 21 nt, Human
gggccugcaggaccugccugu

SEQ ID NO: 2846988 - RNA, 24 nt, Human
gggccugcaggaccugccuguagc

SEQ ID NO: 2846989 - RNA, 20 nt, Human
gggccucaccgagugggggc

SEQ ID NO: 2846990 - RNA, 20 nt, Human
gggccucaaaggcccgcucu

SEQ ID NO: 2846991 - RNA, 15 nt, Human
gggccucagugccac

SEQ ID NO: 2846992 - RNA, 14 nt, Human
gggccucagugcca

SEQ ID NO: 2846993 - RNA, 13 nt, Human
gggccucagugcc

SEQ ID NO: 2846994 - RNA, 21 nt, Human
gggcggugagaggggaacaga

SEQ ID NO: 2846995 - RNA, 19 nt, Human
gggcgugagaccugccccu

SEQ ID NO: 2846996 - RNA, 18 nt, Human
gggcgugagaccugcccc

SEQ ID NO: 2846997 - RNA, 14 nt, Human
gggcgugagguccc

SEQ ID NO: 2846998 - RNA, 16 nt, Human
gggcgugaggucccag

SEQ ID NO: 2846999 - RNA, 20 nt, Human
gggcuacugcagcuuuacau

SEQ ID NO: 2847000 - RNA, 13 nt, Human
gggccugccuggc

SEQ ID NO: 2847001 - RNA, 14 nt, Human
gggccugccuggcc

SEQ ID NO: 2847002 - RNA, 20 nt, Human
gggccacugugguggcagug

SEQ ID NO: 2847003 - RNA, 22 nt, Human
gggccagaggaacuguccagag

SEQ ID NO: 2847004 - RNA, 23 nt, Human
gggccagaggaacuguccagaga

SEQ ID NO: 2847005 - RNA, 14 nt, Human
gggccaggccgggc

SEQ ID NO: 2847006 - RNA, 22 nt, Human
gggccaggccgggccuguacag

SEQ ID NO: 2847007 - RNA, 23 nt, Human
gggccaggccgggccuguacagu

SEQ ID NO: 2847008 - RNA, 20 nt, Human
gggccagaguauuggucucc

SEQ ID NO: 2847009 - RNA, 11 nt, Human
gggccaggcag

SEQ ID NO: 2847010 - RNA, 12 nt, Human
gggccaggcagg

SEQ ID NO: 2847011 - RNA, 13 nt, Human
gggccaggcaggu

SEQ ID NO: 2847012 - RNA, 20 nt, Human
gggccaggcaggugccugga

SEQ ID NO: 2847013 - RNA, 23 nt, Human
gggccaggcaggugccuggacau

SEQ ID NO: 2847014 - RNA, 21 nt, Human
gggccauguccaaagaggcug

SEQ ID NO: 2847015 - RNA, 17 nt, Human
gggccauguccaaagag

SEQ ID NO: 2847016 - RNA, 16 nt, Human
gggccauguccaaaga

SEQ ID NO: 2847017 - RNA, 15 nt, Human
gggccauguccaaag

SEQ ID NO: 2847018 - RNA, 14 nt, Human
gggccauguccaaa

SEQ ID NO: 2847019 - RNA, 23 nt, Human
gggccauguccaaagaggcugcc

SEQ ID NO: 2847020 - RNA, 22 nt, Human
gggccauguccaaagaggcugc

SEQ ID NO: 2847021 - RNA, 18 nt, Human
gggcccaagacagaugcc

SEQ ID NO: 2847022 - RNA, 23 nt, Human
gggccgcguggugccauccccag

SEQ ID NO: 2847023 - RNA, 15 nt, Human
gggccggagggucag

SEQ ID NO: 2847024 - RNA, 20 nt, Human
gggccgcguggugccauccc

SEQ ID NO: 2847025 - RNA, 21 nt, Human
gcuauuauuuucacuguagaa

SEQ ID NO: 2847026 - RNA, 18 nt, Human
gcuauuauuuucacugua

SEQ ID NO: 2847027 - RNA, 17 nt, Human
gcuauuauuuucacugu

SEQ ID NO: 2847028 - RNA, 18 nt, Human
gcuauuagccaggaucau

SEQ ID NO: 2847029 - RNA, 19 nt, Human
gcuauuagccaggaucaug

SEQ ID NO: 2847030 - RNA, 15 nt, Human
gcuauuacugucugg

SEQ ID NO: 2847031 - RNA, 13 nt, Human
gcuauuagccagg

SEQ ID NO: 2847032 - RNA, 17 nt, Human
gcuauuagccaggauca

SEQ ID NO: 2847033 - RNA, 21 nt, Human
gcuauuagccaggaucauggu

SEQ ID NO: 2847034 - RNA, 14 nt, Human
gcucaaauaaaaau

SEQ ID NO: 2847035 - RNA, 16 nt, Human
gcuaguugggcuuccu

SEQ ID NO: 2847036 - RNA, 14 nt, Human
gcuaguugggcuuc

SEQ ID NO: 2847037 - RNA, 12 nt, Human
gcuauuacaaau

SEQ ID NO: 2847038 - RNA, 13 nt, Human
gcuauuacaaaua

SEQ ID NO: 2847039 - RNA, 15 nt, Human
gcuauuaaaacucag

SEQ ID NO: 2847040 - RNA, 16 nt, Human
gcuauuaaaacucagc

SEQ ID NO: 2847041 - RNA, 20 nt, Human
gcuauuaaaacucagccugg

SEQ ID NO: 2847042 - RNA, 20 nt, Human
gcuagguagaaaaaggguca

SEQ ID NO: 2847043 - RNA, 14 nt, Human
gcuaguguucuguc

SEQ ID NO: 2847044 - RNA, 15 nt, Human
gcuaguguucugucu

SEQ ID NO: 2847045 - RNA, 14 nt, Human
gcuaggguggcccu

SEQ ID NO: 2847046 - RNA, 17 nt, Human
gcuaggggacaucagag

SEQ ID NO: 2847047 - RNA, 15 nt, Human
gcuaggguggcccuu

SEQ ID NO: 2847048 - RNA, 20 nt, Human
gcuaggaccccuccaugugg

SEQ ID NO: 2847049 - RNA, 18 nt, Human
gcuaggaaugaaauccug

SEQ ID NO: 2847050 - RNA, 13 nt, Human
gcuaggaaugaaa

SEQ ID NO: 2847051 - RNA, 12 nt, Human
gcuaggaaugaa

SEQ ID NO: 2847052 - RNA, 22 nt, Human
gcuaagugauccucccaccuca

SEQ ID NO: 2847053 - RNA, 18 nt, Human
gcuaagugauccucccac

SEQ ID NO: 2847054 - RNA, 22 nt, Human
gcuaaggcguggagcugccuga

SEQ ID NO: 2847055 - RNA, 20 nt, Human
gcuaaggcguggagcugccu

SEQ ID NO: 2847056 - RNA, 21 nt, Human
gcuaaggcguggagcugccug

SEQ ID NO: 2847057 - RNA, 19 nt, Human
gcuaagggugggugcucag

SEQ ID NO: 2847058 - RNA, 20 nt, Human
gcuaagggugggugcucaga

SEQ ID NO: 2847059 - RNA, 21 nt, Human
gcuaagggugggugcucagaa

SEQ ID NO: 2847060 - RNA, 22 nt, Human
gcuaagggugggugcucagaau

SEQ ID NO: 2847061 - RNA, 14 nt, Human
gcuaagguucuaag

SEQ ID NO: 2847062 - RNA, 15 nt, Human
gcuaagguucuaagg

SEQ ID NO: 2847063 - RNA, 16 nt, Human
gcuaagguucuaaggc

SEQ ID NO: 2847064 - RNA, 17 nt, Human
gcuaagguucuaaggcc

SEQ ID NO: 2847065 - RNA, 21 nt, Human
gcuaaguacacaauaagcaaa

SEQ ID NO: 2847066 - RNA, 20 nt, Human
gcuaaguacacaauaagcaa

SEQ ID NO: 2847067 - RNA, 22 nt, Human
gcuaaguacacaauaagcaaaa

SEQ ID NO: 2847068 - RNA, 15 nt, Human
gcucaggggcagcuc

SEQ ID NO: 2847069 - RNA, 16 nt, Human
gcucaggggcagcuca

SEQ ID NO: 2847070 - RNA, 19 nt, Human
gcucaggggcagcucauag

SEQ ID NO: 2847071 - RNA, 17 nt, Human
gcucaggaggcuuggaa

SEQ ID NO: 2847072 - RNA, 16 nt, Human
gcucaggaggcuugga

SEQ ID NO: 2847073 - RNA, 15 nt, Human
gcucaggaggcgccc

SEQ ID NO: 2847074 - RNA, 18 nt, Human
gcucagagaugugcaccc

SEQ ID NO: 2847075 - RNA, 15 nt, Human
gcucaggaggcuugg

SEQ ID NO: 2847076 - RNA, 13 nt, Human
gcucaggaggcuu

SEQ ID NO: 2847077 - RNA, 16 nt, Human
gcucaacaauaaaaca

SEQ ID NO: 2847078 - RNA, 15 nt, Human
gcucagaauaaggca

SEQ ID NO: 2847079 - RNA, 20 nt, Human
gcucagaauaaggcaggcau

SEQ ID NO: 2847080 - RNA, 17 nt, Human
gcucagaacaguaucuu

SEQ ID NO: 2847081 - RNA, 14 nt, Human
gcucagaacccagg

SEQ ID NO: 2847082 - RNA, 15 nt, Human
gcucagaacccaggg

SEQ ID NO: 2847083 - RNA, 16 nt, Human
gcucagaacccagggc

SEQ ID NO: 2847084 - RNA, 17 nt, Human
gcucagaacccagggcu

SEQ ID NO: 2847085 - RNA, 18 nt, Human
gcucagaacccagggcuc

SEQ ID NO: 2847086 - RNA, 22 nt, Human
gcucagaacccagggcucugcc

SEQ ID NO: 2847087 - RNA, 23 nt, Human
gcucagaacccagggcucugccc

SEQ ID NO: 2847088 - RNA, 19 nt, Human
gcucagagggggacugcug

SEQ ID NO: 2847089 - RNA, 20 nt, Human
gcucagagggggacugcugc

SEQ ID NO: 2847090 - RNA, 23 nt, Human
gcucaagcagcgaccgcccccuc

SEQ ID NO: 2847091 - RNA, 21 nt, Human
gcucaagcagcgaccgccccc

SEQ ID NO: 2847092 - RNA, 22 nt, Human
gcucaagcagcgaccgcccccu

SEQ ID NO: 2847093 - RNA, 14 nt, Human
gcucaacuuucugu

SEQ ID NO: 2847094 - RNA, 15 nt, Human
gcucaagcagcgacc

SEQ ID NO: 2847095 - RNA, 21 nt, Human
gcucaagcaauccucucaccu

SEQ ID NO: 2847096 - RNA, 14 nt, Human
gccuucgugccccc

SEQ ID NO: 2847097 - RNA, 19 nt, Human
gccuucgugcccccccuuc

SEQ ID NO: 2847098 - RNA, 16 nt, Human
gccuucucugaaggac

SEQ ID NO: 2847099 - RNA, 15 nt, Human
gccuucucugaagga

SEQ ID NO: 2847100 - RNA, 17 nt, Human
gccuguucagcuccagc

SEQ ID NO: 2847101 - RNA, 16 nt, Human
gccuguucagcuccag

SEQ ID NO: 2847102 - RNA, 14 nt, Human
gccuguucagcucc

SEQ ID NO: 2847103 - RNA, 14 nt, Human
gccuguggcccugu

SEQ ID NO: 2847104 - RNA, 15 nt, Human
gccuguggcccuguc

SEQ ID NO: 2847105 - RNA, 17 nt, Human
gccuguggcccuguccu

SEQ ID NO: 2847106 - RNA, 15 nt, Human
gccuguucagcucca

SEQ ID NO: 2847107 - RNA, 22 nt, Human
gccuucuuuugauuauguuuuu

SEQ ID NO: 2847108 - RNA, 15 nt, Human
gccuucuuuugauua

SEQ ID NO: 2847109 - RNA, 11 nt, Human
gccuucuuuga

SEQ ID NO: 2847110 - RNA, 13 nt, Human
gccuucuuugaag

SEQ ID NO: 2847111 - RNA, 14 nt, Human
gccuucuuugaaga

SEQ ID NO: 2847112 - RNA, 15 nt, Human
gccuucuuugaagaa

SEQ ID NO: 2847113 - RNA, 20 nt, Human
gccuucuuccaucccaggac

SEQ ID NO: 2847114 - RNA, 22 nt, Human
gccuucuuccaucccaggacac

SEQ ID NO: 2847115 - RNA, 14 nt, Human
gccuucuucagggc

SEQ ID NO: 2847116 - RNA, 15 nt, Human
gccuucuucagggcc

SEQ ID NO: 2847117 - RNA, 17 nt, Human
gccuucuucagggccug

SEQ ID NO: 2847118 - RNA, 18 nt, Human
gccuucuucagggccugg

SEQ ID NO: 2847119 - RNA, 19 nt, Human
gccuucuucagggccuggu

SEQ ID NO: 2847120 - RNA, 14 nt, Human
gccuucuuccaucc

SEQ ID NO: 2847121 - RNA, 17 nt, Human
gccuucuuccaucccag

SEQ ID NO: 2847122 - RNA, 13 nt, Human
gccuucuccuccc

SEQ ID NO: 2847123 - RNA, 14 nt, Human
gccuucuccucccc

SEQ ID NO: 2847124 - RNA, 17 nt, Human
gccuucugacggcccug

SEQ ID NO: 2847125 - RNA, 18 nt, Human
gccuucugacggcccugc

SEQ ID NO: 2847126 - RNA, 19 nt, Human
gccuucugacggcccugca

SEQ ID NO: 2847127 - RNA, 20 nt, Human
gccuucugacggcccugcaa

SEQ ID NO: 2847128 - RNA, 14 nt, Human
gccuucugaugucu

SEQ ID NO: 2847129 - RNA, 23 nt, Human
gccuucugaugucucuaaagcac

SEQ ID NO: 2847130 - RNA, 16 nt, Human
gccuguggaaugagug

SEQ ID NO: 2847131 - RNA, 17 nt, Human
gccuguggaaugagugu

SEQ ID NO: 2847132 - RNA, 18 nt, Human
gccuguggaaugagugug

SEQ ID NO: 2847133 - RNA, 19 nt, Human
gccuguggaaugagugugc

SEQ ID NO: 2847134 - RNA, 17 nt, Human
gccuguggagcucagcc

SEQ ID NO: 2847135 - RNA, 18 nt, Human
gccuguggagcucagccc

SEQ ID NO: 2847136 - RNA, 19 nt, Human
gccuguggagcucagcccc

SEQ ID NO: 2847137 - RNA, 22 nt, Human
gccuguggaugaucaauccuuu

SEQ ID NO: 2847138 - RNA, 22 nt, Human
gccuguggcaucuuugccuugg

SEQ ID NO: 2847139 - RNA, 10 nt, Human
gccuguggcc

SEQ ID NO: 2847140 - RNA, 14 nt, Human
gccugugcugugac

SEQ ID NO: 2847141 - RNA, 13 nt, Human
gccugugcuguga

SEQ ID NO: 2847142 - RNA, 12 nt, Human
gccugggcaaga

SEQ ID NO: 2847143 - RNA, 21 nt, Human
gccugggauuucuaugcagug

SEQ ID NO: 2847144 - RNA, 23 nt, Human
gccugggcaacaaagugagacuc

SEQ ID NO: 2847145 - RNA, 20 nt, Human
gccugggcaacagagcaaga

SEQ ID NO: 2847146 - RNA, 19 nt, Human
gccugggcaacagagcaag

SEQ ID NO: 2847147 - RNA, 16 nt, Human
gccugggcaacagagc

SEQ ID NO: 2847148 - RNA, 22 nt, Human
gccucugggucagugguccaca

SEQ ID NO: 2847149 - RNA, 13 nt, Human
gccucugggucag

SEQ ID NO: 2847150 - RNA, 12 nt, Human
gccucuggguca

SEQ ID NO: 2847151 - RNA, 22 nt, Human
gccucugucccggaagagucau

SEQ ID NO: 2847152 - RNA, 15 nt, Human
gccucuguccucgcu

SEQ ID NO: 2847153 - RNA, 15 nt, Human
gccucugucuagcau

SEQ ID NO: 2847154 - RNA, 16 nt, Human
gccucugucuagcaug

SEQ ID NO: 2847155 - RNA, 17 nt, Human
gccucugucuagcaugc

SEQ ID NO: 2847156 - RNA, 16 nt, Human
gccuggcuccguccag

SEQ ID NO: 2847157 - RNA, 10 nt, Human
gccuggcucu

SEQ ID NO: 2847158 - RNA, 19 nt, Human
gccuggcucuugugcugga

SEQ ID NO: 2847159 - RNA, 21 nt, Human
gccuggcucuugugcuggaug

SEQ ID NO: 2847160 - RNA, 23 nt, Human
gccuggcucuuucgucacccuug

SEQ ID NO: 2847161 - RNA, 23 nt, Human
gcgauucuucugcuucagccucc

SEQ ID NO: 2847162 - RNA, 20 nt, Human
gcgcaagauagauuuggaau

SEQ ID NO: 2847163 - RNA, 14 nt, Human
gcgcagccccaucu

SEQ ID NO: 2847164 - RNA, 15 nt, Human
gcgcagccccaucug

SEQ ID NO: 2847165 - RNA, 19 nt, Human
gcgcagccccaucugugca

SEQ ID NO: 2847166 - RNA, 14 nt, Human
gcgcaggcuggccc

SEQ ID NO: 2847167 - RNA, 16 nt, Human
gcgcaggcuggcccug

SEQ ID NO: 2847168 - RNA, 15 nt, Human
gcgcaggcuggcccu

SEQ ID NO: 2847169 - RNA, 15 nt, Human
gcgauuuuauuacug

SEQ ID NO: 2847170 - RNA, 18 nt, Human
gcgcagcuggacucugca

SEQ ID NO: 2847171 - RNA, 15 nt, Human
gccuugaagccacug

SEQ ID NO: 2847172 - RNA, 14 nt, Human
gccuugaauaauaa

SEQ ID NO: 2847173 - RNA, 14 nt, Human
gccuugaagccacu

SEQ ID NO: 2847174 - RNA, 14 nt, Human
gccuugaaccugug

SEQ ID NO: 2847175 - RNA, 17 nt, Human
gccuugaaccugugagu

SEQ ID NO: 2847176 - RNA, 16 nt, Human
gccuugaacucugggc

SEQ ID NO: 2847177 - RNA, 17 nt, Human
gcgauucuucugcuuca

SEQ ID NO: 2847178 - RNA, 22 nt, Human
gcgauucuucugcuucagccuc

SEQ ID NO: 2847179 - RNA, 15 nt, Human
gccuugaguuccagu

SEQ ID NO: 2847180 - RNA, 16 nt, Human
gccuugacaucaguuc

SEQ ID NO: 2847181 - RNA, 18 nt, Human
gccuugacaucaguuccu

SEQ ID NO: 2847182 - RNA, 21 nt, Human
gccuugacaucaguuccuuug

SEQ ID NO: 2847183 - RNA, 13 nt, Human
gccuugcagaacu

SEQ ID NO: 2847184 - RNA, 15 nt, Human
gccuugcagaacugc

SEQ ID NO: 2847185 - RNA, 17 nt, Human
gccuugcagaacugcca

SEQ ID NO: 2847186 - RNA, 18 nt, Human
gccuugcagaacugccau

SEQ ID NO: 2847187 - RNA, 20 nt, Human
gccuugcagaacugccauua

SEQ ID NO: 2847188 - RNA, 23 nt, Human
gcguucuuaggcugcugggaugg

SEQ ID NO: 2847189 - RNA, 22 nt, Human
gcuaaggaggggaaaaaaaugu

SEQ ID NO: 2847190 - RNA, 16 nt, Human
gcuaaggcguggagcu

SEQ ID NO: 2847191 - RNA, 17 nt, Human
gcuaaggcguggagcug

SEQ ID NO: 2847192 - RNA, 18 nt, Human
gcuaaggcguggagcugc

SEQ ID NO: 2847193 - RNA, 11 nt, Human
gcuaaggcucu

SEQ ID NO: 2847194 - RNA, 16 nt, Human
gcuaagggaagacauu

SEQ ID NO: 2847195 - RNA, 18 nt, Human
gcuaagggaagacauuuc

SEQ ID NO: 2847196 - RNA, 19 nt, Human
gcuaagggaagacauuucu

SEQ ID NO: 2847197 - RNA, 20 nt, Human
gcuaagggaagacauuucuu

SEQ ID NO: 2847198 - RNA, 22 nt, Human
gcuaagggaagacauuucuuuu

SEQ ID NO: 2847199 - RNA, 23 nt, Human
gcuaagggaagacauuucuuuuc

SEQ ID NO: 2847200 - RNA, 17 nt, Human
gcguuccaugaugcugg

SEQ ID NO: 2847201 - RNA, 18 nt, Human
gcguuccaugaugcuggg

SEQ ID NO: 2847202 - RNA, 18 nt, Human
gcguuauaguaacuccca

SEQ ID NO: 2847203 - RNA, 19 nt, Human
gcguuauaguaacucccau

SEQ ID NO: 2847204 - RNA, 16 nt, Human
gcguuacuaauuggcc

SEQ ID NO: 2847205 - RNA, 22 nt, Human
gcguuauuggucggcagccuuc

SEQ ID NO: 2847206 - RNA, 12 nt, Human
gcguggagcugc

SEQ ID NO: 2847207 - RNA, 15 nt, Human
gcguggagcugccug

SEQ ID NO: 2847208 - RNA, 17 nt, Human
gcguggacucugcacau

SEQ ID NO: 2847209 - RNA, 18 nt, Human
gcguggacucugcacaug

SEQ ID NO: 2847210 - RNA, 16 nt, Human
gcguggagcugccuga

SEQ ID NO: 2847211 - RNA, 14 nt, Human
gcguggagcaggcg

SEQ ID NO: 2847212 - RNA, 17 nt, Human
gcguuacacccuuucuu

SEQ ID NO: 2847213 - RNA, 14 nt, Human
gcgugccgugugag

SEQ ID NO: 2847214 - RNA, 17 nt, Human
gcgugccgugugagugu

SEQ ID NO: 2847215 - RNA, 20 nt, Human
gcgugccgugugagugugac

SEQ ID NO: 2847216 - RNA, 21 nt, Human
gcgugccgugugagugugaca

SEQ ID NO: 2847217 - RNA, 22 nt, Human
gcgugccgugugagugugacag

SEQ ID NO: 2847218 - RNA, 24 nt, Human
gcgugccgugugagugugacaggg

SEQ ID NO: 2847219 - RNA, 19 nt, Human
gcgggaauauuguuucuuu

SEQ ID NO: 2847220 - RNA, 19 nt, Human
gcgggaauggcagcugcca

SEQ ID NO: 2847221 - RNA, 21 nt, Human
gcgggagcgguggcccugucc

SEQ ID NO: 2847222 - RNA, 18 nt, Human
gcgggagcgguggcccug

SEQ ID NO: 2847223 - RNA, 13 nt, Human
gcguggacucugc

SEQ ID NO: 2847224 - RNA, 14 nt, Human
gcguggacucugca

SEQ ID NO: 2847225 - RNA, 21 nt, Human
gcgugcucaguucagaaucac

SEQ ID NO: 2847226 - RNA, 14 nt, Human
gcguggacaggugu

SEQ ID NO: 2847227 - RNA, 19 nt, Human
gcggauuaauuugcaucug

SEQ ID NO: 2847228 - RNA, 18 nt, Human
gcggauuaauuugcaucu

SEQ ID NO: 2847229 - RNA, 20 nt, Human
gcggauuaauuugcaucuga

SEQ ID NO: 2847230 - RNA, 15 nt, Human
gcggcacuccaaccu

SEQ ID NO: 2847231 - RNA, 18 nt, Human
gcggcggagcuggccccg

SEQ ID NO: 2847232 - RNA, 20 nt, Human
gcggcggagcuggccccgcc

SEQ ID NO: 2847233 - RNA, 14 nt, Human
gcggcgggcggcug

SEQ ID NO: 2847234 - RNA, 16 nt, Human
gcggcggagcuggccc

SEQ ID NO: 2847235 - RNA, 20 nt, Human
gcggccagccccggcccugg

SEQ ID NO: 2847236 - RNA, 16 nt, Human
gcggcgaccgcccucc

SEQ ID NO: 2847237 - RNA, 18 nt, Human
gcggcgaccgcccuccgc

SEQ ID NO: 2847238 - RNA, 16 nt, Human
gcggcauuaaagccau

SEQ ID NO: 2847239 - RNA, 21 nt, Human
gcggccaagauaggaccuugg

SEQ ID NO: 2847240 - RNA, 11 nt, Human
gcggccagccc

SEQ ID NO: 2847241 - RNA, 13 nt, Human
gcggccagccccg

SEQ ID NO: 2847242 - RNA, 17 nt, Human
gcggccagccccggccc

SEQ ID NO: 2847243 - RNA, 18 nt, Human
gcggccagccccggcccu

SEQ ID NO: 2847244 - RNA, 19 nt, Human
gcggccagccccggcccug

SEQ ID NO: 2847245 - RNA, 21 nt, Human
gcggccagccccggcccuggg

SEQ ID NO: 2847246 - RNA, 19 nt, Human
gcggccaguauuagacugg

SEQ ID NO: 2847247 - RNA, 19 nt, Human
gccucaugcuaagacucag

SEQ ID NO: 2847248 - RNA, 12 nt, Human
gccuccagaacu

SEQ ID NO: 2847249 - RNA, 23 nt, Human
gccuccacagcgagggcagcugc

SEQ ID NO: 2847250 - RNA, 22 nt, Human
gccuccacagcgagggcagcug

SEQ ID NO: 2847251 - RNA, 21 nt, Human
gccuccacagcgagggcagcu

SEQ ID NO: 2847252 - RNA, 20 nt, Human
gccuccacagcgagggcagc

SEQ ID NO: 2847253 - RNA, 14 nt, Human
gccuccacagcgag

SEQ ID NO: 2847254 - RNA, 15 nt, Human
gccuccacagcgagg

SEQ ID NO: 2847255 - RNA, 21 nt, Human
gccuccucugucugcccuuca

SEQ ID NO: 2847256 - RNA, 13 nt, Human
gccuccucuucac

SEQ ID NO: 2847257 - RNA, 17 nt, Human
gccuccucuucaccccg

SEQ ID NO: 2847258 - RNA, 20 nt, Human
gccuccucuucaccccggca

SEQ ID NO: 2847259 - RNA, 21 nt, Human
gccuccucuucaccccggcag

SEQ ID NO: 2847260 - RNA, 17 nt, Human
gccuccucugucugccc

SEQ ID NO: 2847261 - RNA, 19 nt, Human
gccuccucugucugcccuu

SEQ ID NO: 2847262 - RNA, 19 nt, Human
gccuccugaguagcuggga

SEQ ID NO: 2847263 - RNA, 13 nt, Human
gccucgaacuggc

SEQ ID NO: 2847264 - RNA, 16 nt, Human
gccucgaacuggcugc

SEQ ID NO: 2847265 - RNA, 16 nt, Human
gccucgaaacacagaa

SEQ ID NO: 2847266 - RNA, 17 nt, Human
gccuacaggagugagca

SEQ ID NO: 2847267 - RNA, 23 nt, Human
gccuacagcuuugaucccugaca

SEQ ID NO: 2847268 - RNA, 22 nt, Human
gccuacagcuuugaucccugac

SEQ ID NO: 2847269 - RNA, 12 nt, Human
gccuagcaagcu

SEQ ID NO: 2847270 - RNA, 15 nt, Human
gccuagcaagcuggc

SEQ ID NO: 2847271 - RNA, 16 nt, Human
gccuagcaagcuggcc

SEQ ID NO: 2847272 - RNA, 17 nt, Human
gccuagcaagcuggccu

SEQ ID NO: 2847273 - RNA, 18 nt, Human
gccuagcaagcuggccuc

SEQ ID NO: 2847274 - RNA, 19 nt, Human
gccuagcaagcuggccucu

SEQ ID NO: 2847275 - RNA, 13 nt, Human
gccuagaagcugg

SEQ ID NO: 2847276 - RNA, 17 nt, Human
gccuagaagcugguggc

SEQ ID NO: 2847277 - RNA, 14 nt, Human
gcccgucucagugu

SEQ ID NO: 2847278 - RNA, 14 nt, Human
gcccgucuguccau

SEQ ID NO: 2847279 - RNA, 18 nt, Human
gcccgucuguccaucugc

SEQ ID NO: 2847280 - RNA, 19 nt, Human
gcccgucuguccaucugcc

SEQ ID NO: 2847281 - RNA, 21 nt, Human
gcccgucuguccaucugcccg

SEQ ID NO: 2847282 - RNA, 22 nt, Human
gcccgucugugugugaccccuc

SEQ ID NO: 2847283 - RNA, 23 nt, Human
gcccgucugugugugaccccucc

SEQ ID NO: 2847284 - RNA, 13 nt, Human
gcccgucucagug

SEQ ID NO: 2847285 - RNA, 13 nt, Human
gccggagaggaag

SEQ ID NO: 2847286 - RNA, 14 nt, Human
gccggagaggaaga

SEQ ID NO: 2847287 - RNA, 18 nt, Human
gccggagaggaagagaca

SEQ ID NO: 2847288 - RNA, 16 nt, Human
gccuacaggagugagc

SEQ ID NO: 2847289 - RNA, 22 nt, Human
gccuaaucucauaccucugacc

SEQ ID NO: 2847290 - RNA, 23 nt, Human
gccuaauuacgauaaggaagaaa

SEQ ID NO: 2847291 - RNA, 18 nt, Human
gcccuuccuccuccacca

SEQ ID NO: 2847292 - RNA, 19 nt, Human
gcccuuccuccuccaccac

SEQ ID NO: 2847293 - RNA, 20 nt, Human
gcccuuccuccuccaccacc

SEQ ID NO: 2847294 - RNA, 12 nt, Human
gcccuuccucuc

SEQ ID NO: 2847295 - RNA, 22 nt, Human
gcccuuccaugucgccucugca

SEQ ID NO: 2847296 - RNA, 22 nt, Human
gcccuucacauuuuuuaugggc

SEQ ID NO: 2847297 - RNA, 15 nt, Human
gcccuucaccccagu

SEQ ID NO: 2847298 - RNA, 21 nt, Human
gcccuucaccccaguggccac

SEQ ID NO: 2847299 - RNA, 12 nt, Human
gcccuuccaugu

SEQ ID NO: 2847300 - RNA, 21 nt, Human
gcccuuccaugucgccucugc

SEQ ID NO: 2847301 - RNA, 21 nt, Human
gccgcguggugccauccccag

SEQ ID NO: 2847302 - RNA, 17 nt, Human
gccgcguuuagaccaag

SEQ ID NO: 2847303 - RNA, 19 nt, Human
gccgcguuuagaccaagga

SEQ ID NO: 2847304 - RNA, 20 nt, Human
gccgcguuuagaccaaggaa

SEQ ID NO: 2847305 - RNA, 11 nt, Human
gccgcuaccuc

SEQ ID NO: 2847306 - RNA, 15 nt, Human
gccgcuaccucccuc

SEQ ID NO: 2847307 - RNA, 16 nt, Human
gccgcuaccucccucc

SEQ ID NO: 2847308 - RNA, 17 nt, Human
gccgcuaccucccuccc

SEQ ID NO: 2847309 - RNA, 15 nt, Human
gccgcuccaccagca

SEQ ID NO: 2847310 - RNA, 20 nt, Human
gccgcguggugccaucccca

SEQ ID NO: 2847311 - RNA, 16 nt, Human
gccgcguggugccauc

SEQ ID NO: 2847312 - RNA, 17 nt, Human
gccgcgucgcccuccca

SEQ ID NO: 2847313 - RNA, 14 nt, Human
gcccuuccucucca

SEQ ID NO: 2847314 - RNA, 15 nt, Human
gcccuuccucuccac

SEQ ID NO: 2847315 - RNA, 22 nt, Human
gcccuguggaugagcccucaga

SEQ ID NO: 2847316 - RNA, 18 nt, Human
gcccugugggaccccagg

SEQ ID NO: 2847317 - RNA, 19 nt, Human
gcccugugggaccccaggc

SEQ ID NO: 2847318 - RNA, 20 nt, Human
gcccugugggaccccaggcc

SEQ ID NO: 2847319 - RNA, 14 nt, Human
gcccuuaccuuccc

SEQ ID NO: 2847320 - RNA, 18 nt, Human
gcccuuacuucuugcccu

SEQ ID NO: 2847321 - RNA, 19 nt, Human
gcccuuacuucuugcccug

SEQ ID NO: 2847322 - RNA, 20 nt, Human
gcccuuaucugugcucagga

SEQ ID NO: 2847323 - RNA, 19 nt, Human
gcccuuaucugugcucagg

SEQ ID NO: 2847324 - RNA, 18 nt, Human
gcccuuaucugugcucag

SEQ ID NO: 2847325 - RNA, 20 nt, Human
gcccuuauuuucaagaaacu

SEQ ID NO: 2847326 - RNA, 18 nt, Human
gcccuuauuuucaagaaa

SEQ ID NO: 2847327 - RNA, 17 nt, Human
gcccuuauuuucaagaa

SEQ ID NO: 2847328 - RNA, 13 nt, Human
gcccuuaccuucc

SEQ ID NO: 2847329 - RNA, 21 nt, Human
gcccuguggaugagcccucag

SEQ ID NO: 2847330 - RNA, 14 nt, Human
gcccugcuccugca

SEQ ID NO: 2847331 - RNA, 15 nt, Human
gcccugcuccugcag

SEQ ID NO: 2847332 - RNA, 16 nt, Human
gcccugcuccugcagc

SEQ ID NO: 2847333 - RNA, 17 nt, Human
gcccugcuccugcagca

SEQ ID NO: 2847334 - RNA, 20 nt, Human
gcccugcgggucacaggagg

SEQ ID NO: 2847335 - RNA, 12 nt, Human
gcccugcucccu

SEQ ID NO: 2847336 - RNA, 13 nt, Human
gcccugcucccuc

SEQ ID NO: 2847337 - RNA, 20 nt, Human
gcccugcucccucucccccu

SEQ ID NO: 2847338 - RNA, 20 nt, Human
gccccaaacgggcugcccug

SEQ ID NO: 2847339 - RNA, 18 nt, Human
gccccaaacaaauaugca

SEQ ID NO: 2847340 - RNA, 19 nt, Human
gccccaaacaaauaugcaa

SEQ ID NO: 2847341 - RNA, 17 nt, Human
gccccaaacaaauaugc

SEQ ID NO: 2847342 - RNA, 14 nt, Human
gccccaaccugcug

SEQ ID NO: 2847343 - RNA, 15 nt, Human
gccccaaccugcuga

SEQ ID NO: 2847344 - RNA, 22 nt, Human
gccccaaaguaaaagaaaccac

SEQ ID NO: 2847345 - RNA, 20 nt, Human
gccccaaauaacuucagucc

SEQ ID NO: 2847346 - RNA, 22 nt, Human
gccccaaauaacuucaguccug

SEQ ID NO: 2847347 - RNA, 12 nt, Human
gccccaaauaua

SEQ ID NO: 2847348 - RNA, 21 nt, Human
gccccaaauauagcguuccca

SEQ ID NO: 2847349 - RNA, 13 nt, Human
gccccaaccugcu

SEQ ID NO: 2847350 - RNA, 15 nt, Human
gccccacccaggagg

SEQ ID NO: 2847351 - RNA, 12 nt, Human
gccccacccagg

SEQ ID NO: 2847352 - RNA, 22 nt, Human
gccccacccagaugggggaaag

SEQ ID NO: 2847353 - RNA, 11 nt, Human
gccccacccag

SEQ ID NO: 2847354 - RNA, 12 nt, Human
gccccacccaga

SEQ ID NO: 2847355 - RNA, 13 nt, Human
gccccacccagau

SEQ ID NO: 2847356 - RNA, 16 nt, Human
gccccugcugguucag

SEQ ID NO: 2847357 - RNA, 15 nt, Human
gccccugcugguuca

SEQ ID NO: 2847358 - RNA, 12 nt, Human
gccccugcuggu

SEQ ID NO: 2847359 - RNA, 11 nt, Human
gcccccugccc

SEQ ID NO: 2847360 - RNA, 17 nt, Human
gcccccucugcccugcg

SEQ ID NO: 2847361 - RNA, 14 nt, Human
gcccccucugcccu

SEQ ID NO: 2847362 - RNA, 13 nt, Human
gcccccagcccaa

SEQ ID NO: 2847363 - RNA, 14 nt, Human
gcccccagcccaaa

SEQ ID NO: 2847364 - RNA, 15 nt, Human
gcccccagcccaaag

SEQ ID NO: 2847365 - RNA, 15 nt, Human
gcccccagccccucc

SEQ ID NO: 2847366 - RNA, 19 nt, Human
gcccccagccccuccccca

SEQ ID NO: 2847367 - RNA, 20 nt, Human
gcccccagccccucccccau

SEQ ID NO: 2847368 - RNA, 12 nt, Human
gcccccagccua

SEQ ID NO: 2847369 - RNA, 14 nt, Human
gcccccagccuaug

SEQ ID NO: 2847370 - RNA, 23 nt, Human
gcccccagccuaugagcauccug

SEQ ID NO: 2847371 - RNA, 16 nt, Human
gcccccucugcccugc

SEQ ID NO: 2847372 - RNA, 15 nt, Human
gcccccucugcccug

SEQ ID NO: 2847373 - RNA, 18 nt, Human
gcauuuacuuuguguuca

SEQ ID NO: 2847374 - RNA, 16 nt, Human
gccauuaccauggaga

SEQ ID NO: 2847375 - RNA, 13 nt, Human
gccauuaccaugg

SEQ ID NO: 2847376 - RNA, 15 nt, Human
gccauuaaaugaaua

SEQ ID NO: 2847377 - RNA, 21 nt, Human
gccauuaaaugaauauuuuga

SEQ ID NO: 2847378 - RNA, 23 nt, Human
gccauuaaaugaauauuuugaua

SEQ ID NO: 2847379 - RNA, 18 nt, Human
gccauuaccauggagaca

SEQ ID NO: 2847380 - RNA, 18 nt, Human
gccauuacccagcuaaau

SEQ ID NO: 2847381 - RNA, 19 nt, Human
gccauuacccagcuaaaua

SEQ ID NO: 2847382 - RNA, 22 nt, Human
gccauuaucccugaaucccccu

SEQ ID NO: 2847383 - RNA, 12 nt, Human
gccauuauuuuc

SEQ ID NO: 2847384 - RNA, 16 nt, Human
gccauuauuuucuguc

SEQ ID NO: 2847385 - RNA, 17 nt, Human
gccauuauuuucuguca

SEQ ID NO: 2847386 - RNA, 18 nt, Human
gccauuauuuucugucag

SEQ ID NO: 2847387 - RNA, 19 nt, Human
gccauuauuuucugucaga

SEQ ID NO: 2847388 - RNA, 19 nt, Human
gccauugccaccaggagaa

SEQ ID NO: 2847389 - RNA, 18 nt, Human
gccauugccaccaggaga

SEQ ID NO: 2847390 - RNA, 17 nt, Human
gccauugccaccaggag

SEQ ID NO: 2847391 - RNA, 19 nt, Human
gccauugaucauaaacuga

SEQ ID NO: 2847392 - RNA, 21 nt, Human
gccauugcacccagcccagau

SEQ ID NO: 2847393 - RNA, 17 nt, Human
gccauugacuucuuccc

SEQ ID NO: 2847394 - RNA, 13 nt, Human
gcccacuucugcc

SEQ ID NO: 2847395 - RNA, 21 nt, Human
gcccacgcuggagugcaguga

SEQ ID NO: 2847396 - RNA, 19 nt, Human
gcccacgcuggagugcagu

SEQ ID NO: 2847397 - RNA, 23 nt, Human
gcccacgcuggagugcagugagc

SEQ ID NO: 2847398 - RNA, 20 nt, Human
gccauucuuuuuuucuuggc

SEQ ID NO: 2847399 - RNA, 12 nt, Human
gccauuggaguc

SEQ ID NO: 2847400 - RNA, 15 nt, Human
gcccacggcuaagag

SEQ ID NO: 2847401 - RNA, 18 nt, Human
gcccacggcuaagaggcu

SEQ ID NO: 2847402 - RNA, 19 nt, Human
gcccacggcuaagaggcug

SEQ ID NO: 2847403 - RNA, 20 nt, Human
gcccacggcuaagaggcugc

SEQ ID NO: 2847404 - RNA, 21 nt, Human
gcccacggcuaagaggcugcu

SEQ ID NO: 2847405 - RNA, 23 nt, Human
gcccacggcuaagaggcugcuga

SEQ ID NO: 2847406 - RNA, 21 nt, Human
gcccacugcugcaguagggga

SEQ ID NO: 2847407 - RNA, 11 nt, Human
gcccaggcagg

SEQ ID NO: 2847408 - RNA, 22 nt, Human
gcccaggaccaucuucccgaga

SEQ ID NO: 2847409 - RNA, 22 nt, Human
gcccaggagagagaaagccagg

SEQ ID NO: 2847410 - RNA, 23 nt, Human
gcccaggagagagaaagccaggc

SEQ ID NO: 2847411 - RNA, 15 nt, Human
gcccaggagagagaa

SEQ ID NO: 2847412 - RNA, 16 nt, Human
gcccaggagagagaaa

SEQ ID NO: 2847413 - RNA, 17 nt, Human
gcccaggagagagaaag

SEQ ID NO: 2847414 - RNA, 20 nt, Human
gcccaggagagagaaagcca

SEQ ID NO: 2847415 - RNA, 11 nt, Human
gcccaggagac

SEQ ID NO: 2847416 - RNA, 12 nt, Human
gcccaggagaga

SEQ ID NO: 2847417 - RNA, 13 nt, Human
gcccaggagagag

SEQ ID NO: 2847418 - RNA, 14 nt, Human
gcccaggagagaga

SEQ ID NO: 2847419 - RNA, 22 nt, Human
gcccaggccccugccacccugg

SEQ ID NO: 2847420 - RNA, 18 nt, Human
gcccaggccccugccacc

SEQ ID NO: 2847421 - RNA, 21 nt, Human
gcccaggccccugccacccug

SEQ ID NO: 2847422 - RNA, 20 nt, Human
gcccaggccccugccacccu

SEQ ID NO: 2847423 - RNA, 12 nt, Human
gcccaggccccu

SEQ ID NO: 2847424 - RNA, 11 nt, Human
gcccaggcccc

SEQ ID NO: 2847425 - RNA, 14 nt, Human
gcccaggcaggcca

SEQ ID NO: 2847426 - RNA, 15 nt, Human
gcuuuuuuuuuucca

SEQ ID NO: 2847427 - RNA, 16 nt, Human
gcuuuuuuuuuuccag

SEQ ID NO: 2847428 - RNA, 17 nt, Human
gcuuuuuuuuuuccagc

SEQ ID NO: 2847429 - RNA, 21 nt, Human
gcuuuuuuuuuuccagcaagu

SEQ ID NO: 2847430 - RNA, 12 nt, Human
ggaaaaaaagac

SEQ ID NO: 2847431 - RNA, 17 nt, Human
ggaaaaaaagacucuuu

SEQ ID NO: 2847432 - RNA, 19 nt, Human
ggaaaaaaaucaucuauuu

SEQ ID NO: 2847433 - RNA, 21 nt, Human
ggaaaaaaaucaucuauuuug

SEQ ID NO: 2847434 - RNA, 17 nt, Human
ggaaaaaaaaaaaagag

SEQ ID NO: 2847435 - RNA, 18 nt, Human
ggaaaaaaaaaaaagagg

SEQ ID NO: 2847436 - RNA, 17 nt, Human
gcuuuuuaaaacauuag

SEQ ID NO: 2847437 - RNA, 18 nt, Human
gcuuuuguuccaauguca

SEQ ID NO: 2847438 - RNA, 17 nt, Human
ggaaacucuuaucucag

SEQ ID NO: 2847439 - RNA, 15 nt, Human
ggaaacucuugcuau

SEQ ID NO: 2847440 - RNA, 20 nt, Human
ggaaacucuugcuauugaau

SEQ ID NO: 2847441 - RNA, 18 nt, Human
ggaaaccacagcugcugg

SEQ ID NO: 2847442 - RNA, 19 nt, Human
ggaaaccacagcugcugga

SEQ ID NO: 2847443 - RNA, 21 nt, Human
ggaaaccacagcugcuggaga

SEQ ID NO: 2847444 - RNA, 15 nt, Human
ggaaaccacagcugc

SEQ ID NO: 2847445 - RNA, 16 nt, Human
ggaaaccacagcugcu

SEQ ID NO: 2847446 - RNA, 20 nt, Human
ggaaacagcuaaugggacac

SEQ ID NO: 2847447 - RNA, 13 nt, Human
ggaaacagaggcu

SEQ ID NO: 2847448 - RNA, 17 nt, Human
ggaaaaaaaugaaugag

SEQ ID NO: 2847449 - RNA, 12 nt, Human
ggaaaaaaaugu

SEQ ID NO: 2847450 - RNA, 13 nt, Human
ggaaaaaaauguu

SEQ ID NO: 2847451 - RNA, 16 nt, Human
ggaaagacacugccug

SEQ ID NO: 2847452 - RNA, 15 nt, Human
ggaaagacacugccu

SEQ ID NO: 2847453 - RNA, 20 nt, Human
ggaaagacacugccugggcu

SEQ ID NO: 2847454 - RNA, 14 nt, Human
ggaaagacacugcc

SEQ ID NO: 2847455 - RNA, 16 nt, Human
ggaaagaaagaaggaa

SEQ ID NO: 2847456 - RNA, 15 nt, Human
ggaaagaaaguugca

SEQ ID NO: 2847457 - RNA, 17 nt, Human
ggaaacuugucacuugc

SEQ ID NO: 2847458 - RNA, 19 nt, Human
ggaaacuugucacuugcau

SEQ ID NO: 2847459 - RNA, 20 nt, Human
ggaaacuugucacuugcaug

SEQ ID NO: 2847460 - RNA, 21 nt, Human
ggaaaggaugaucaaaaauaa

SEQ ID NO: 2847461 - RNA, 18 nt, Human
ggaaaggcaaaugcccaa

SEQ ID NO: 2847462 - RNA, 20 nt, Human
ggaaaggcaaaugcccaagg

SEQ ID NO: 2847463 - RNA, 16 nt, Human
ggaaagccucugcugc

SEQ ID NO: 2847464 - RNA, 14 nt, Human
ggaaagccucugcu

SEQ ID NO: 2847465 - RNA, 23 nt, Human
ggaaagcucagcuacugauuuuu

SEQ ID NO: 2847466 - RNA, 13 nt, Human
ggaaagccucugc

SEQ ID NO: 2847467 - RNA, 19 nt, Human
ggaaagcaucaccucaggc

SEQ ID NO: 2847468 - RNA, 18 nt, Human
ggaaagcaucaccucagg

SEQ ID NO: 2847469 - RNA, 16 nt, Human
ggaaagcacagguggg

SEQ ID NO: 2847470 - RNA, 17 nt, Human
ggaaagcacaggugggc

SEQ ID NO: 2847471 - RNA, 12 nt, Human
gcuuuucuguuu

SEQ ID NO: 2847472 - RNA, 17 nt, Human
gcuuuucuguuuccugu

SEQ ID NO: 2847473 - RNA, 18 nt, Human
gcuuuucuguuuccugua

SEQ ID NO: 2847474 - RNA, 12 nt, Human
gcuuuucccucu

SEQ ID NO: 2847475 - RNA, 14 nt, Human
gcuuuucccucuuu

SEQ ID NO: 2847476 - RNA, 15 nt, Human
gcuuuucccucuuuu

SEQ ID NO: 2847477 - RNA, 17 nt, Human
gcuuuucccucuuuucu

SEQ ID NO: 2847478 - RNA, 22 nt, Human
gcuuuuccuauuuguuuucaug

SEQ ID NO: 2847479 - RNA, 14 nt, Human
gcuuugcuuugucu

SEQ ID NO: 2847480 - RNA, 16 nt, Human
gcuuugcuuugucugg

SEQ ID NO: 2847481 - RNA, 12 nt, Human
gcuuugcccagc

SEQ ID NO: 2847482 - RNA, 20 nt, Human
gcuuugccugguuuugucuu

SEQ ID NO: 2847483 - RNA, 12 nt, Human
gcuuugcucugc

SEQ ID NO: 2847484 - RNA, 16 nt, Human
gcuuugcuaccaaagc

SEQ ID NO: 2847485 - RNA, 13 nt, Human
gcuuugcucugcc

SEQ ID NO: 2847486 - RNA, 21 nt, Human
gcuuugcucuugucccacgug

SEQ ID NO: 2847487 - RNA, 23 nt, Human
gcuguuuauggccucagcugccu

SEQ ID NO: 2847488 - RNA, 17 nt, Human
gcuguuuauguuuuuau

SEQ ID NO: 2847489 - RNA, 22 nt, Human
gcuguuuauggccucagcugcc

SEQ ID NO: 2847490 - RNA, 17 nt, Human
gcuguuuauggccucag

SEQ ID NO: 2847491 - RNA, 16 nt, Human
gcuguuuauggccuca

SEQ ID NO: 2847492 - RNA, 15 nt, Human
gcuguuuauggccuc

SEQ ID NO: 2847493 - RNA, 14 nt, Human
gcuguuuauggccu

SEQ ID NO: 2847494 - RNA, 11 nt, Human
gcuguuuccuu

SEQ ID NO: 2847495 - RNA, 14 nt, Human
gcuguuugcuucac

SEQ ID NO: 2847496 - RNA, 20 nt, Human
gcuguuugcuucaccgugga

SEQ ID NO: 2847497 - RNA, 16 nt, Human
gcuuaagggaguuuaa

SEQ ID NO: 2847498 - RNA, 17 nt, Human
gcuuaagggaguuuaau

SEQ ID NO: 2847499 - RNA, 11 nt, Human
gcuuaaguucc

SEQ ID NO: 2847500 - RNA, 13 nt, Human
gcuuaaguuccag

SEQ ID NO: 2847501 - RNA, 17 nt, Human
gcuuaauaaaaaugaca

SEQ ID NO: 2847502 - RNA, 19 nt, Human
gcuuaauaaaaaugacaga

SEQ ID NO: 2847503 - RNA, 21 nt, Human
gcuuaauaaaaaugacagacu

SEQ ID NO: 2847504 - RNA, 20 nt, Human
gcuuaagaaaucuaguauuu

SEQ ID NO: 2847505 - RNA, 22 nt, Human
gcuuucuacccagcgagcccug

SEQ ID NO: 2847506 - RNA, 19 nt, Human
gcuuucuacccagcgagcc

SEQ ID NO: 2847507 - RNA, 13 nt, Human
gcuuucuacccag

SEQ ID NO: 2847508 - RNA, 13 nt, Human
gcuuucguccaca

SEQ ID NO: 2847509 - RNA, 19 nt, Human
gcuuucguccacagcuucc

SEQ ID NO: 2847510 - RNA, 20 nt, Human
gcuuucguccacagcuuccu

SEQ ID NO: 2847511 - RNA, 21 nt, Human
gcuuucguccacagcuuccug

SEQ ID NO: 2847512 - RNA, 23 nt, Human
gcuuucuacccagcgagcccugg

SEQ ID NO: 2847513 - RNA, 12 nt, Human
gcuuugauucau

SEQ ID NO: 2847514 - RNA, 19 nt, Human
gcuuucguguaaauuaugu

SEQ ID NO: 2847515 - RNA, 18 nt, Human
gcuuuccuuguggcagag

SEQ ID NO: 2847516 - RNA, 19 nt, Human
gcuuuccuuguggcagagg

SEQ ID NO: 2847517 - RNA, 22 nt, Human
gcuuuccuuguggcagaggaug

SEQ ID NO: 2847518 - RNA, 21 nt, Human
gcuuugauuaguuuucuuguu

SEQ ID NO: 2847519 - RNA, 20 nt, Human
gcuuugauucauaguaacuu

SEQ ID NO: 2847520 - RNA, 15 nt, Human
gcuuugauucauagu

SEQ ID NO: 2847521 - RNA, 16 nt, Human
gcuuuccucuuccuga

SEQ ID NO: 2847522 - RNA, 20 nt, Human
ggaaauccuaguuuccucuc

SEQ ID NO: 2847523 - RNA, 22 nt, Human
ggaaauccuaguuuccucuccu

SEQ ID NO: 2847524 - RNA, 18 nt, Human
ggaaaucucaccccaucc

SEQ ID NO: 2847525 - RNA, 18 nt, Human
ggaaaucuguaacaggua

SEQ ID NO: 2847526 - RNA, 12 nt, Human
ggaaaggcucag

SEQ ID NO: 2847527 - RNA, 16 nt, Human
ggaaauccaggguggu

SEQ ID NO: 2847528 - RNA, 19 nt, Human
ggaaaucaucgaaaauuca

SEQ ID NO: 2847529 - RNA, 18 nt, Human
ggacaguaucccacaucc

SEQ ID NO: 2847530 - RNA, 12 nt, Human
ggacagucacug

SEQ ID NO: 2847531 - RNA, 15 nt, Human
ggacagucagcucuu

SEQ ID NO: 2847532 - RNA, 20 nt, Human
ggacaggugugccgacagaa

SEQ ID NO: 2847533 - RNA, 20 nt, Human
ggacaguaauaagaauggaa

SEQ ID NO: 2847534 - RNA, 15 nt, Human
ggacagggcauggcc

SEQ ID NO: 2847535 - RNA, 22 nt, Human
ggacagggcauggccagguggc

SEQ ID NO: 2847536 - RNA, 22 nt, Human
ggacagggaugagcauggagcu

SEQ ID NO: 2847537 - RNA, 17 nt, Human
ggacagggaggugaccc

SEQ ID NO: 2847538 - RNA, 16 nt, Human
ggacaggccgcagcuc

SEQ ID NO: 2847539 - RNA, 11 nt, Human
ggacaggccuc

SEQ ID NO: 2847540 - RNA, 16 nt, Human
ggacaggccucaccuc

SEQ ID NO: 2847541 - RNA, 23 nt, Human
ggacaggccucaccucuacccaa

SEQ ID NO: 2847542 - RNA, 13 nt, Human
ggacaggcucugc

SEQ ID NO: 2847543 - RNA, 14 nt, Human
ggacaggcucugcu

SEQ ID NO: 2847544 - RNA, 23 nt, Human
ggacaggcauguucucugaggac

SEQ ID NO: 2847545 - RNA, 15 nt, Human
ggacaccugcccugc

SEQ ID NO: 2847546 - RNA, 14 nt, Human
ggacaccugcccug

SEQ ID NO: 2847547 - RNA, 15 nt, Human
ggacacccccucgcu

SEQ ID NO: 2847548 - RNA, 15 nt, Human
ggacaccgggccagu

SEQ ID NO: 2847549 - RNA, 18 nt, Human
ggaaugauaugcauuuga

SEQ ID NO: 2847550 - RNA, 18 nt, Human
ggacauccuguauaagca

SEQ ID NO: 2847551 - RNA, 16 nt, Human
ggacaugcugaagcca

SEQ ID NO: 2847552 - RNA, 19 nt, Human
ggacaugcugaagccaaag

SEQ ID NO: 2847553 - RNA, 12 nt, Human
ggacaucagcaa

SEQ ID NO: 2847554 - RNA, 15 nt, Human
ggacaucagcaaaca

SEQ ID NO: 2847555 - RNA, 14 nt, Human
ggacaucagcaaac

SEQ ID NO: 2847556 - RNA, 23 nt, Human
ggacauagagguauauuggaaga

SEQ ID NO: 2847557 - RNA, 20 nt, Human
ggacauccccccgccaaaag

SEQ ID NO: 2847558 - RNA, 14 nt, Human
ggacaucagcuggu

SEQ ID NO: 2847559 - RNA, 15 nt, Human
ggacaguucacaccc

SEQ ID NO: 2847560 - RNA, 16 nt, Human
ggacaguucacacccu

SEQ ID NO: 2847561 - RNA, 17 nt, Human
ggacaguucacacccug

SEQ ID NO: 2847562 - RNA, 18 nt, Human
ggacaguucacacccugc

SEQ ID NO: 2847563 - RNA, 19 nt, Human
ggacaguucacacccugca

SEQ ID NO: 2847564 - RNA, 20 nt, Human
ggacaguucacacccugcaa

SEQ ID NO: 2847565 - RNA, 19 nt, Human
ggacaguuuaucaugaagc

SEQ ID NO: 2847566 - RNA, 20 nt, Human
ggacaguuuaucaugaagcc

SEQ ID NO: 2847567 - RNA, 21 nt, Human
ggacaguuuaucaugaagccu

SEQ ID NO: 2847568 - RNA, 22 nt, Human
ggacaguuuaucaugaagccug

SEQ ID NO: 2847569 - RNA, 23 nt, Human
ggacagugcuucagccugaggcu

SEQ ID NO: 2847570 - RNA, 22 nt, Human
ggacagugcuucagccugaggc

SEQ ID NO: 2847571 - RNA, 21 nt, Human
ggacagugcuucagccugagg

SEQ ID NO: 2847572 - RNA, 20 nt, Human
ggacagugcuucagccugag

SEQ ID NO: 2847573 - RNA, 19 nt, Human
ggacagugcuucagccuga

SEQ ID NO: 2847574 - RNA, 18 nt, Human
ggacagugcuucagccug

SEQ ID NO: 2847575 - RNA, 16 nt, Human
ggacaguccugggaga

SEQ ID NO: 2847576 - RNA, 15 nt, Human
ggacaguccugggag

SEQ ID NO: 2847577 - RNA, 14 nt, Human
ggacaguccuggga

SEQ ID NO: 2847578 - RNA, 13 nt, Human
ggacaguccuggg

SEQ ID NO: 2847579 - RNA, 17 nt, Human
ggacagugcuucagccu

SEQ ID NO: 2847580 - RNA, 16 nt, Human
ggacagugcuucagcc

SEQ ID NO: 2847581 - RNA, 19 nt, Human
ggacaguccugggagaacc

SEQ ID NO: 2847582 - RNA, 19 nt, Human
ggacagucugcucuagaug

SEQ ID NO: 2847583 - RNA, 14 nt, Human
ggacagugcuucag

SEQ ID NO: 2847584 - RNA, 23 nt, Human
ggaagcgaugaauuuggagacuc

SEQ ID NO: 2847585 - RNA, 14 nt, Human
ggaagccugcaguc

SEQ ID NO: 2847586 - RNA, 20 nt, Human
ggaagccuuuacugacccug

SEQ ID NO: 2847587 - RNA, 20 nt, Human
ggaagcggagguugcaggga

SEQ ID NO: 2847588 - RNA, 20 nt, Human
ggaagcgcgagggccucaaa

SEQ ID NO: 2847589 - RNA, 16 nt, Human
ggaagcgcucagaaca

SEQ ID NO: 2847590 - RNA, 17 nt, Human
ggaagcgcucagaacag

SEQ ID NO: 2847591 - RNA, 22 nt, Human
ggaauaaugggcuuagagcagu

SEQ ID NO: 2847592 - RNA, 21 nt, Human
ggaauaauuauuuauuuaaua

SEQ ID NO: 2847593 - RNA, 14 nt, Human
ggaauaauugcuuu

SEQ ID NO: 2847594 - RNA, 13 nt, Human
ggaauaauuauuu

SEQ ID NO: 2847595 - RNA, 12 nt, Human
ggaauacuuuuu

SEQ ID NO: 2847596 - RNA, 17 nt, Human
ggaauacuuuuuguuau

SEQ ID NO: 2847597 - RNA, 16 nt, Human
ggaauagaagcaaauu

SEQ ID NO: 2847598 - RNA, 15 nt, Human
ggaauauuuauaaau

SEQ ID NO: 2847599 - RNA, 17 nt, Human
ggacaccacacccagcc

SEQ ID NO: 2847600 - RNA, 18 nt, Human
ggacaccacacccagccu

SEQ ID NO: 2847601 - RNA, 19 nt, Human
ggacaccacacccagccuc

SEQ ID NO: 2847602 - RNA, 20 nt, Human
ggacaccacacccagccuca

SEQ ID NO: 2847603 - RNA, 21 nt, Human
ggacaccacacccagccucag

SEQ ID NO: 2847604 - RNA, 22 nt, Human
ggacaccacacccagccucagu

SEQ ID NO: 2847605 - RNA, 13 nt, Human
ggacacagcucuu

SEQ ID NO: 2847606 - RNA, 16 nt, Human
ggacacagaugaaaca

SEQ ID NO: 2847607 - RNA, 16 nt, Human
ggaaucaagagcugcc

SEQ ID NO: 2847608 - RNA, 14 nt, Human
ggaaucaaaaauug

SEQ ID NO: 2847609 - RNA, 22 nt, Human
ggaaucaagaugucagacuggc

SEQ ID NO: 2847610 - RNA, 18 nt, Human
ggaaucacaucuuuuaag

SEQ ID NO: 2847611 - RNA, 17 nt, Human
ggaaucaagagcugccc

SEQ ID NO: 2847612 - RNA, 19 nt, Human
ggaaucaagagcugcccuc

SEQ ID NO: 2847613 - RNA, 23 nt, Human
ggaaucaagagcugcccuccuug

SEQ ID NO: 2847614 - RNA, 12 nt, Human
ggacacagcucu

SEQ ID NO: 2847615 - RNA, 21 nt, Human
ggacacacaaggugcaaauca

SEQ ID NO: 2847616 - RNA, 13 nt, Human
ggacacacaaggu

SEQ ID NO: 2847617 - RNA, 15 nt, Human
ggaaugagugugcau

SEQ ID NO: 2847618 - RNA, 15 nt, Human
ggacaauuguuuuaa

SEQ ID NO: 2847619 - RNA, 17 nt, Human
ggacacaaaacuccgcc

SEQ ID NO: 2847620 - RNA, 18 nt, Human
ggacacaaaacuccgccc

SEQ ID NO: 2847621 - RNA, 20 nt, Human
ggacacaaaacuccgccccc

SEQ ID NO: 2847622 - RNA, 21 nt, Human
ggacacaaaacuccgccccca

SEQ ID NO: 2847623 - RNA, 22 nt, Human
ggacacaaaacuccgcccccag

SEQ ID NO: 2847624 - RNA, 23 nt, Human
ggacacaaaacuccgcccccagc

SEQ ID NO: 2847625 - RNA, 20 nt, Human
ggaaugagaaguagccacag

SEQ ID NO: 2847626 - RNA, 13 nt, Human
ggaaugagcccag

SEQ ID NO: 2847627 - RNA, 17 nt, Human
ggaaugagcccagagaa

SEQ ID NO: 2847628 - RNA, 20 nt, Human
ggaaugagcccagagaacag

SEQ ID NO: 2847629 - RNA, 21 nt, Human
ggaaugagcccagagaacagc

SEQ ID NO: 2847630 - RNA, 14 nt, Human
gcugugagccuugg

SEQ ID NO: 2847631 - RNA, 13 nt, Human
gcugugagccuug

SEQ ID NO: 2847632 - RNA, 23 nt, Human
gcugugcaacgccgugggcugcg

SEQ ID NO: 2847633 - RNA, 20 nt, Human
gcugugcaacgccgugggcu

SEQ ID NO: 2847634 - RNA, 19 nt, Human
gcugugcaacgccgugggc

SEQ ID NO: 2847635 - RNA, 13 nt, Human
gcugugcaacgcc

SEQ ID NO: 2847636 - RNA, 22 nt, Human
gcugugauuuuuguugauuaaa

SEQ ID NO: 2847637 - RNA, 20 nt, Human
gcugugagucuuugguucua

SEQ ID NO: 2847638 - RNA, 22 nt, Human
gcugugagucuuugguucuaag

SEQ ID NO: 2847639 - RNA, 17 nt, Human
gcugugagccuuggcug

SEQ ID NO: 2847640 - RNA, 16 nt, Human
gcugugaggccccugg

SEQ ID NO: 2847641 - RNA, 18 nt, Human
gcugugaggccccuggac

SEQ ID NO: 2847642 - RNA, 22 nt, Human
gcugugaggccccuggacaagc

SEQ ID NO: 2847643 - RNA, 19 nt, Human
gcuguaucccaugagccuc

SEQ ID NO: 2847644 - RNA, 17 nt, Human
gcuguaucccaugagcc

SEQ ID NO: 2847645 - RNA, 20 nt, Human
gcuguaguagcccuuucugu

SEQ ID NO: 2847646 - RNA, 21 nt, Human
gcuguaguagcccuuucugug

SEQ ID NO: 2847647 - RNA, 15 nt, Human
gcuguuggcuggggg

SEQ ID NO: 2847648 - RNA, 20 nt, Human
gcuguuggcugggggccuca

SEQ ID NO: 2847649 - RNA, 16 nt, Human
gcuguuggcugggggc

SEQ ID NO: 2847650 - RNA, 17 nt, Human
gcugugcugcccugaag

SEQ ID NO: 2847651 - RNA, 16 nt, Human
gcugugcugcccugaa

SEQ ID NO: 2847652 - RNA, 19 nt, Human
gcugugcugcccugaagaa

SEQ ID NO: 2847653 - RNA, 14 nt, Human
gcuguuggcugggg

SEQ ID NO: 2847654 - RNA, 16 nt, Human
gcugugcucuggacag

SEQ ID NO: 2847655 - RNA, 15 nt, Human
gcugugcucuggaca

SEQ ID NO: 2847656 - RNA, 12 nt, Human
gcugugcucaga

SEQ ID NO: 2847657 - RNA, 14 nt, Human
gcugugcucagaga

SEQ ID NO: 2847658 - RNA, 19 nt, Human
gcugugcucucaccagcug

SEQ ID NO: 2847659 - RNA, 13 nt, Human
gcugugcucugga

SEQ ID NO: 2847660 - RNA, 16 nt, Human
gcugugccucugccug

SEQ ID NO: 2847661 - RNA, 14 nt, Human
gcugugccucugcc

SEQ ID NO: 2847662 - RNA, 15 nt, Human
gcugugccucugccu

SEQ ID NO: 2847663 - RNA, 22 nt, Human
gcugcugaaaaccaucuggccu

SEQ ID NO: 2847664 - RNA, 14 nt, Human
gcuggcgugcagug

SEQ ID NO: 2847665 - RNA, 18 nt, Human
gcuggagacuccuaggca

SEQ ID NO: 2847666 - RNA, 20 nt, Human
gcuggagacuccuaggcagg

SEQ ID NO: 2847667 - RNA, 13 nt, Human
gcuggagacuccu

SEQ ID NO: 2847668 - RNA, 12 nt, Human
gcuggagaagag

SEQ ID NO: 2847669 - RNA, 13 nt, Human
gcuggagaagaga

SEQ ID NO: 2847670 - RNA, 14 nt, Human
gcuggagaagagag

SEQ ID NO: 2847671 - RNA, 15 nt, Human
gcuggagaagagagg

SEQ ID NO: 2847672 - RNA, 16 nt, Human
gcuggagaagagagga

SEQ ID NO: 2847673 - RNA, 17 nt, Human
gcuggagaagagaggag

SEQ ID NO: 2847674 - RNA, 18 nt, Human
gcuggagaagagaggaga

SEQ ID NO: 2847675 - RNA, 20 nt, Human
gcuggagaagagaggagagg

SEQ ID NO: 2847676 - RNA, 21 nt, Human
gcuggagaagagaggagagga

SEQ ID NO: 2847677 - RNA, 19 nt, Human
gcuggcuguuggcuggggg

SEQ ID NO: 2847678 - RNA, 18 nt, Human
gcuggcuguuggcugggg

SEQ ID NO: 2847679 - RNA, 14 nt, Human
gcuggcugccuuag

SEQ ID NO: 2847680 - RNA, 20 nt, Human
gcuggcugccuuagaaccuu

SEQ ID NO: 2847681 - RNA, 14 nt, Human
gcuggcugcaguga

SEQ ID NO: 2847682 - RNA, 13 nt, Human
gcuggcugcagug

SEQ ID NO: 2847683 - RNA, 11 nt, Human
gcuggcugccu

SEQ ID NO: 2847684 - RNA, 18 nt, Human
gcuggcgugcaguggugc

SEQ ID NO: 2847685 - RNA, 15 nt, Human
gcuggcgugcagugg

SEQ ID NO: 2847686 - RNA, 21 nt, Human
gcuggagacuccuaggcagga

SEQ ID NO: 2847687 - RNA, 13 nt, Human
gcuggcucuucug

SEQ ID NO: 2847688 - RNA, 14 nt, Human
gcuggcucuucugc

SEQ ID NO: 2847689 - RNA, 16 nt, Human
gcuggcucuucugccc

SEQ ID NO: 2847690 - RNA, 18 nt, Human
gcuggcucuucugcccaa

SEQ ID NO: 2847691 - RNA, 17 nt, Human
gcugggccccccagcuc

SEQ ID NO: 2847692 - RNA, 18 nt, Human
gcugggccccccagcuca

SEQ ID NO: 2847693 - RNA, 19 nt, Human
gcugggccccccagcucag

SEQ ID NO: 2847694 - RNA, 20 nt, Human
gcugggccccccagcucagg

SEQ ID NO: 2847695 - RNA, 21 nt, Human
gcugggccccccagcucaggg

SEQ ID NO: 2847696 - RNA, 22 nt, Human
gcugggccccccagcucagggg

SEQ ID NO: 2847697 - RNA, 23 nt, Human
gcuggcuguuggcugggggccuc

SEQ ID NO: 2847698 - RNA, 20 nt, Human
gcuggcuguuggcugggggc

SEQ ID NO: 2847699 - RNA, 17 nt, Human
gcuggcuguuggcuggg

SEQ ID NO: 2847700 - RNA, 14 nt, Human
gcuggcuuuucugu

SEQ ID NO: 2847701 - RNA, 15 nt, Human
gcuggcuuuucuguu

SEQ ID NO: 2847702 - RNA, 18 nt, Human
gcuggcuuuucuguuucc

SEQ ID NO: 2847703 - RNA, 21 nt, Human
gcuggcuuuucuguuuccugu

SEQ ID NO: 2847704 - RNA, 11 nt, Human
gcugggaaaca

SEQ ID NO: 2847705 - RNA, 20 nt, Human
gcugggaaacacuccuugca

SEQ ID NO: 2847706 - RNA, 16 nt, Human
gcugggaacucaccug

SEQ ID NO: 2847707 - RNA, 18 nt, Human
gcugggaacucaccuggg

SEQ ID NO: 2847708 - RNA, 21 nt, Human
gcugggaacucaccuggggcu

SEQ ID NO: 2847709 - RNA, 23 nt, Human
gcugggaacucaccuggggcugc

SEQ ID NO: 2847710 - RNA, 20 nt, Human
gcugggccauguccaaagag

SEQ ID NO: 2847711 - RNA, 19 nt, Human
gcugggccauguccaaaga

SEQ ID NO: 2847712 - RNA, 17 nt, Human
gcugggccauguccaaa

SEQ ID NO: 2847713 - RNA, 19 nt, Human
gcugggcaugguaccagcc

SEQ ID NO: 2847714 - RNA, 22 nt, Human
gcugggcaugguaccagcccug

SEQ ID NO: 2847715 - RNA, 23 nt, Human
gcugggcaugguaccagcccugg

SEQ ID NO: 2847716 - RNA, 14 nt, Human
gcugguaaacuauu

SEQ ID NO: 2847717 - RNA, 15 nt, Human
gcugguaaacuauuu

SEQ ID NO: 2847718 - RNA, 13 nt, Human
gcugguaacaguu

SEQ ID NO: 2847719 - RNA, 16 nt, Human
gcugguaacaguucau

SEQ ID NO: 2847720 - RNA, 22 nt, Human
gcugguaacaguucauguuugc

SEQ ID NO: 2847721 - RNA, 19 nt, Human
gcugguaggcuccugccag

SEQ ID NO: 2847722 - RNA, 13 nt, Human
gcugccucaugcu

SEQ ID NO: 2847723 - RNA, 13 nt, Human
gcugccugaaucc

SEQ ID NO: 2847724 - RNA, 13 nt, Human
gcugccuguucag

SEQ ID NO: 2847725 - RNA, 12 nt, Human
gcugccuguuca

SEQ ID NO: 2847726 - RNA, 17 nt, Human
gcugccuguucagcucc

SEQ ID NO: 2847727 - RNA, 20 nt, Human
gcugccuguaguuaggaaau

SEQ ID NO: 2847728 - RNA, 23 nt, Human
gcugcucuugaacuccugaccuc

SEQ ID NO: 2847729 - RNA, 19 nt, Human
gcugccuguaguuaggaaa

SEQ ID NO: 2847730 - RNA, 16 nt, Human
gcugccuguaguuagg

SEQ ID NO: 2847731 - RNA, 15 nt, Human
gcugccuguaguuag

SEQ ID NO: 2847732 - RNA, 13 nt, Human
gcugccuguaguu

SEQ ID NO: 2847733 - RNA, 12 nt, Human
gcugccuguagu

SEQ ID NO: 2847734 - RNA, 21 nt, Human
gcugcccuaaauaacccuuca

SEQ ID NO: 2847735 - RNA, 12 nt, Human
gcugccucacuu

SEQ ID NO: 2847736 - RNA, 22 nt, Human
gcugccuagcaagcuggccucu

SEQ ID NO: 2847737 - RNA, 21 nt, Human
gcugcagauuugggcuggaac

SEQ ID NO: 2847738 - RNA, 17 nt, Human
gcugcagauuugggcug

SEQ ID NO: 2847739 - RNA, 18 nt, Human
gcugcagauuugggcugg

SEQ ID NO: 2847740 - RNA, 18 nt, Human
gcugccccucucaccaaa

SEQ ID NO: 2847741 - RNA, 14 nt, Human
gcugccccucucug

SEQ ID NO: 2847742 - RNA, 15 nt, Human
gcugccccucucugg

SEQ ID NO: 2847743 - RNA, 16 nt, Human
gcugccccucucuggg

SEQ ID NO: 2847744 - RNA, 17 nt, Human
gcugccccucucugggc

SEQ ID NO: 2847745 - RNA, 19 nt, Human
gcugccccucucugggccu

SEQ ID NO: 2847746 - RNA, 23 nt, Human
gcugccccucucugggccucaga

SEQ ID NO: 2847747 - RNA, 16 nt, Human
gcugccccucucacca

SEQ ID NO: 2847748 - RNA, 15 nt, Human
gcugccccucucacc

SEQ ID NO: 2847749 - RNA, 14 nt, Human
gcugccccucucac

SEQ ID NO: 2847750 - RNA, 13 nt, Human
gcugccccucuca

SEQ ID NO: 2847751 - RNA, 12 nt, Human
gcugccccucuc

SEQ ID NO: 2847752 - RNA, 14 nt, Human
gcugcccccggccc

SEQ ID NO: 2847753 - RNA, 18 nt, Human
gcugcccccggcccccug

SEQ ID NO: 2847754 - RNA, 19 nt, Human
gcugcccccggcccccugg

SEQ ID NO: 2847755 - RNA, 20 nt, Human
gcugcccccggcccccuggu

SEQ ID NO: 2847756 - RNA, 23 nt, Human
gcugcccccggcccccuggucuc

SEQ ID NO: 2847757 - RNA, 20 nt, Human
gcugcaaggacauucuugua

SEQ ID NO: 2847758 - RNA, 20 nt, Human
gcugcaagugacaucucuuu

SEQ ID NO: 2847759 - RNA, 15 nt, Human
gcugcagagucacaa

SEQ ID NO: 2847760 - RNA, 23 nt, Human
gcugcagagucacaagccucgag

SEQ ID NO: 2847761 - RNA, 23 nt, Human
gcugcagauaacagaaaggcuuu

SEQ ID NO: 2847762 - RNA, 22 nt, Human
gcugaggccccuucuagguggc

SEQ ID NO: 2847763 - RNA, 20 nt, Human
gcugagaucgugccacugca

SEQ ID NO: 2847764 - RNA, 19 nt, Human
gcugaggguguuucuuccu

SEQ ID NO: 2847765 - RNA, 21 nt, Human
gcugaggaggccuccaucuca

SEQ ID NO: 2847766 - RNA, 12 nt, Human
gcugagcccugg

SEQ ID NO: 2847767 - RNA, 16 nt, Human
gcugaggaggccucca

SEQ ID NO: 2847768 - RNA, 11 nt, Human
gcugagcccug

SEQ ID NO: 2847769 - RNA, 12 nt, Human
gcugaggcacaa

SEQ ID NO: 2847770 - RNA, 19 nt, Human
gcugaggcacaagaaucac

SEQ ID NO: 2847771 - RNA, 15 nt, Human
gcugaggcaggagga

SEQ ID NO: 2847772 - RNA, 16 nt, Human
gcugagaggagagaga

SEQ ID NO: 2847773 - RNA, 22 nt, Human
gcugagaggcagacuucccuga

SEQ ID NO: 2847774 - RNA, 11 nt, Human
gcugagccagg

SEQ ID NO: 2847775 - RNA, 12 nt, Human
gcugagccaggc

SEQ ID NO: 2847776 - RNA, 13 nt, Human
gcugagccaggcu

SEQ ID NO: 2847777 - RNA, 18 nt, Human
gcagaaaauaaaggaagc

SEQ ID NO: 2847778 - RNA, 14 nt, Human
gcagaaaauugcac

SEQ ID NO: 2847779 - RNA, 12 nt, Human
gcacuccagccu

SEQ ID NO: 2847780 - RNA, 17 nt, Human
gcagaaaaaggcugugc

SEQ ID NO: 2847781 - RNA, 19 nt, Human
gcagaaaaaggcugugcug

SEQ ID NO: 2847782 - RNA, 18 nt, Human
gcagaaaaaugucauuga

SEQ ID NO: 2847783 - RNA, 14 nt, Human
gcacucaggcucuc

SEQ ID NO: 2847784 - RNA, 17 nt, Human
gcacucaggcucuccau

SEQ ID NO: 2847785 - RNA, 17 nt, Human
gcacucauuuucuauaa

SEQ ID NO: 2847786 - RNA, 20 nt, Human
gcacucauuuucuauaacag

SEQ ID NO: 2847787 - RNA, 18 nt, Human
gcacuccaaccuaaccug

SEQ ID NO: 2847788 - RNA, 20 nt, Human
gcacuccaaccuaaccugug

SEQ ID NO: 2847789 - RNA, 23 nt, Human
gcacuccaaccuaaccugugucu

SEQ ID NO: 2847790 - RNA, 14 nt, Human
gcacuccagccugg

SEQ ID NO: 2847791 - RNA, 18 nt, Human
gcaagugagagcugggug

SEQ ID NO: 2847792 - RNA, 17 nt, Human
gcacucagaagacacug

SEQ ID NO: 2847793 - RNA, 20 nt, Human
gcacucagaagacacugaug

SEQ ID NO: 2847794 - RNA, 13 nt, Human
gcagaacggagcc

SEQ ID NO: 2847795 - RNA, 24 nt, Human
gcagaacggagccccaggccucug

SEQ ID NO: 2847796 - RNA, 12 nt, Human
gcagaacugcca

SEQ ID NO: 2847797 - RNA, 19 nt, Human
gcagaacugccauuauuuu

SEQ ID NO: 2847798 - RNA, 21 nt, Human
gcagaacugccauuauuuucu

SEQ ID NO: 2847799 - RNA, 17 nt, Human
gcagagcuuggacugga

SEQ ID NO: 2847800 - RNA, 22 nt, Human
gcagagcuucuuccaggugccc

SEQ ID NO: 2847801 - RNA, 16 nt, Human
gcagagcuucuuccag

SEQ ID NO: 2847802 - RNA, 12 nt, Human
gcagaggcagcg

SEQ ID NO: 2847803 - RNA, 16 nt, Human
gcagaggauguucaua

SEQ ID NO: 2847804 - RNA, 14 nt, Human
gcagccaaccuaag

SEQ ID NO: 2847805 - RNA, 15 nt, Human
gcagcauugacuggu

SEQ ID NO: 2847806 - RNA, 12 nt, Human
gcagccaaggga

SEQ ID NO: 2847807 - RNA, 15 nt, Human
gcagcauggucccug

SEQ ID NO: 2847808 - RNA, 20 nt, Human
gcagcauggucccugccuua

SEQ ID NO: 2847809 - RNA, 13 nt, Human
gcagcauguauag

SEQ ID NO: 2847810 - RNA, 21 nt, Human
gcagccaaacccaugaggcaa

SEQ ID NO: 2847811 - RNA, 11 nt, Human
gcagcauuuga

SEQ ID NO: 2847812 - RNA, 15 nt, Human
gcagcauuugauaau

SEQ ID NO: 2847813 - RNA, 18 nt, Human
gcagcauuugauaaugau

SEQ ID NO: 2847814 - RNA, 12 nt, Human
gcagcaucuucu

SEQ ID NO: 2847815 - RNA, 14 nt, Human
gcagcaucuucugg

SEQ ID NO: 2847816 - RNA, 23 nt, Human
gcagccagggcuuaccuguacac

SEQ ID NO: 2847817 - RNA, 13 nt, Human
gcagccagugaga

SEQ ID NO: 2847818 - RNA, 17 nt, Human
gcagccaggcugccaag

SEQ ID NO: 2847819 - RNA, 14 nt, Human
gcagccaggcugcc

SEQ ID NO: 2847820 - RNA, 13 nt, Human
gcagccaggcugc

SEQ ID NO: 2847821 - RNA, 12 nt, Human
gcagccaggcug

SEQ ID NO: 2847822 - RNA, 19 nt, Human
gcagcucaucucuguccca

SEQ ID NO: 2847823 - RNA, 21 nt, Human
gcagcucaucucugucccacu

SEQ ID NO: 2847824 - RNA, 15 nt, Human
gcagcucccauucua

SEQ ID NO: 2847825 - RNA, 14 nt, Human
gcagcucaucucug

SEQ ID NO: 2847826 - RNA, 23 nt, Human
gcagcucauagaguccccccucc

SEQ ID NO: 2847827 - RNA, 22 nt, Human
gcagugauauggcagaagacac

SEQ ID NO: 2847828 - RNA, 16 nt, Human
gcagugauauggcaga

SEQ ID NO: 2847829 - RNA, 19 nt, Human
gcagugauauggcagaaga

SEQ ID NO: 2847830 - RNA, 21 nt, Human
gcagugauauggcagaagaca

SEQ ID NO: 2847831 - RNA, 13 nt, Human
gcaguugugucag

SEQ ID NO: 2847832 - RNA, 16 nt, Human
gcagucuccucuuuaa

SEQ ID NO: 2847833 - RNA, 17 nt, Human
gcagucuccucuuuaaa

SEQ ID NO: 2847834 - RNA, 18 nt, Human
gcagucuccucuuuaaaa

SEQ ID NO: 2847835 - RNA, 20 nt, Human
gcagucuccucuuuaaaaca

SEQ ID NO: 2847836 - RNA, 21 nt, Human
gcagucuccucuuuaaaacaa

SEQ ID NO: 2847837 - RNA, 22 nt, Human
gcagucuccucuuuaaaacaaa

SEQ ID NO: 2847838 - RNA, 23 nt, Human
gcagucuccucuuuaaaacaaaa

SEQ ID NO: 2847839 - RNA, 16 nt, Human
gcagcugauacaaauu

SEQ ID NO: 2847840 - RNA, 21 nt, Human
gcagcugauguuggaagagaa

SEQ ID NO: 2847841 - RNA, 12 nt, Human
gcagcucucccc

SEQ ID NO: 2847842 - RNA, 20 nt, Human
gcagcugagaaaaugaguga

SEQ ID NO: 2847843 - RNA, 13 nt, Human
gcagucucugccu

SEQ ID NO: 2847844 - RNA, 13 nt, Human
gcagugagcagaa

SEQ ID NO: 2847845 - RNA, 22 nt, Human
gcagugagggguauaucugggc

SEQ ID NO: 2847846 - RNA, 15 nt, Human
gcagugagugagccu

SEQ ID NO: 2847847 - RNA, 17 nt, Human
gcagugagugagccugg

SEQ ID NO: 2847848 - RNA, 18 nt, Human
gcagugagugagccuggc

SEQ ID NO: 2847849 - RNA, 19 nt, Human
gcagugagugagccuggcu

SEQ ID NO: 2847850 - RNA, 20 nt, Human
gcagugagugagccuggcuc

SEQ ID NO: 2847851 - RNA, 21 nt, Human
gcagugagugagccuggcucu

SEQ ID NO: 2847852 - RNA, 20 nt, Human
gcagugagaaaaagcuccug

SEQ ID NO: 2847853 - RNA, 18 nt, Human
gcagugacgugcaccugu

SEQ ID NO: 2847854 - RNA, 14 nt, Human
gcagugaacuauuu

SEQ ID NO: 2847855 - RNA, 21 nt, Human
gcagugagaaaaagcuccugu

SEQ ID NO: 2847856 - RNA, 23 nt, Human
gcagugagaaaaagcuccugucc

SEQ ID NO: 2847857 - RNA, 22 nt, Human
gcagugagaaaaagcuccuguc

SEQ ID NO: 2847858 - RNA, 18 nt, Human
gcauccagcagucucugc

SEQ ID NO: 2847859 - RNA, 19 nt, Human
gcauccagcagucucugcc

SEQ ID NO: 2847860 - RNA, 20 nt, Human
gcauccagcagucucugccu

SEQ ID NO: 2847861 - RNA, 15 nt, Human
gcauccaguuaacca

SEQ ID NO: 2847862 - RNA, 12 nt, Human
gcauccauacca

SEQ ID NO: 2847863 - RNA, 17 nt, Human
gcauccauaccagcucg

SEQ ID NO: 2847864 - RNA, 19 nt, Human
gcauccauaccagcucgca

SEQ ID NO: 2847865 - RNA, 15 nt, Human
gcaucccagcaccug

SEQ ID NO: 2847866 - RNA, 20 nt, Human
gcaucccagcaccugccucc

SEQ ID NO: 2847867 - RNA, 21 nt, Human
gcaucccagcaccugccuccu

SEQ ID NO: 2847868 - RNA, 22 nt, Human
gcaucccagcaccugccuccuc

SEQ ID NO: 2847869 - RNA, 20 nt, Human
gcaucccaggaugcugggug

SEQ ID NO: 2847870 - RNA, 18 nt, Human
gcaucccugaggagccag

SEQ ID NO: 2847871 - RNA, 20 nt, Human
gcauccccuuggcugugagg

SEQ ID NO: 2847872 - RNA, 19 nt, Human
gcauccccuuggcugugag

SEQ ID NO: 2847873 - RNA, 21 nt, Human
gcauccccuuggcugugaggc

SEQ ID NO: 2847874 - RNA, 13 nt, Human
gcaucccggagga

SEQ ID NO: 2847875 - RNA, 16 nt, Human
gcaucccggaggaaau

SEQ ID NO: 2847876 - RNA, 18 nt, Human
gcaucccggaggaaaucu

SEQ ID NO: 2847877 - RNA, 19 nt, Human
gcaucccggaggaaaucug

SEQ ID NO: 2847878 - RNA, 22 nt, Human
gcaucccggaggaaaucugcag

SEQ ID NO: 2847879 - RNA, 12 nt, Human
gcaucccccaaa

SEQ ID NO: 2847880 - RNA, 16 nt, Human
gcaucccccaaaguuc

SEQ ID NO: 2847881 - RNA, 20 nt, Human
gcaucccccaaaguucacaa

SEQ ID NO: 2847882 - RNA, 13 nt, Human
gcauccuaagaaa

SEQ ID NO: 2847883 - RNA, 14 nt, Human
gcauccuaagaaau

SEQ ID NO: 2847884 - RNA, 15 nt, Human
gcauccuaagaaaua

SEQ ID NO: 2847885 - RNA, 21 nt, Human
gcauccuaagaaauaugugag

SEQ ID NO: 2847886 - RNA, 24 nt, Human
gcauccuaagaaauaugugagauu

SEQ ID NO: 2847887 - RNA, 22 nt, Human
gcaucccuugaccaggccuggg

SEQ ID NO: 2847888 - RNA, 20 nt, Human
gcaucccuugaccaggccug

SEQ ID NO: 2847889 - RNA, 18 nt, Human
gcaucccuugaccaggcc

SEQ ID NO: 2847890 - RNA, 15 nt, Human
gcauuuacuuugugu

SEQ ID NO: 2847891 - RNA, 17 nt, Human
gcauguaaaagcggaaa

SEQ ID NO: 2847892 - RNA, 14 nt, Human
gcaugugcccuccu

SEQ ID NO: 2847893 - RNA, 19 nt, Human
gcaugugcccuccugaggg

SEQ ID NO: 2847894 - RNA, 17 nt, Human
gcauguggcuuuuuuaa

SEQ ID NO: 2847895 - RNA, 13 nt, Human
gcaugugggcuuc

SEQ ID NO: 2847896 - RNA, 15 nt, Human
gcaugugggcuucaa

SEQ ID NO: 2847897 - RNA, 19 nt, Human
gcaugugguuugguuccuc

SEQ ID NO: 2847898 - RNA, 20 nt, Human
gcaugugguuugguuccucu

SEQ ID NO: 2847899 - RNA, 23 nt, Human
gcaugugguuugguuccucucug

SEQ ID NO: 2847900 - RNA, 15 nt, Human
gcauguaaacacgcc

SEQ ID NO: 2847901 - RNA, 19 nt, Human
gcauguaaacacgccugca

SEQ ID NO: 2847902 - RNA, 17 nt, Human
gcauguaaacacgccug

SEQ ID NO: 2847903 - RNA, 17 nt, Human
gcauggcuuuauuuguu

SEQ ID NO: 2847904 - RNA, 23 nt, Human
gcauggggauaaaggagaaggca

SEQ ID NO: 2847905 - RNA, 18 nt, Human
gcauggggggugggggga

SEQ ID NO: 2847906 - RNA, 17 nt, Human
gcaugguaccagcccug

SEQ ID NO: 2847907 - RNA, 18 nt, Human
gcaugguaccagcccugg

SEQ ID NO: 2847908 - RNA, 19 nt, Human
gcaugguaccagcccuggg

SEQ ID NO: 2847909 - RNA, 20 nt, Human
gcaugguaccagcccugggg

SEQ ID NO: 2847910 - RNA, 22 nt, Human
gcaugguaccagcccuggggcu

SEQ ID NO: 2847911 - RNA, 23 nt, Human
gcaugguaccagcccuggggcug

SEQ ID NO: 2847912 - RNA, 15 nt, Human
gcauggucacacacu

SEQ ID NO: 2847913 - RNA, 18 nt, Human
gcauggucacacacugau

SEQ ID NO: 2847914 - RNA, 22 nt, Human
gcauggucaacccucaggggaa

SEQ ID NO: 2847915 - RNA, 18 nt, Human
gcauggugcgggcaccug

SEQ ID NO: 2847916 - RNA, 18 nt, Human
gcauggucccugccuuag

SEQ ID NO: 2847917 - RNA, 13 nt, Human
gcauccuggcacc

SEQ ID NO: 2847918 - RNA, 17 nt, Human
gcauccuccgccucccg

SEQ ID NO: 2847919 - RNA, 14 nt, Human
gcauccugagcccc

SEQ ID NO: 2847920 - RNA, 21 nt, Human
gcauccugagccccgcccucu

SEQ ID NO: 2847921 - RNA, 22 nt, Human
gcauccugagccccgcccucuu

SEQ ID NO: 2847922 - RNA, 17 nt, Human
gcaucguccccuccccc

SEQ ID NO: 2847923 - RNA, 15 nt, Human
gcaucuaagcccaug

SEQ ID NO: 2847924 - RNA, 19 nt, Human
gcaucuaaguuauaagacu

SEQ ID NO: 2847925 - RNA, 22 nt, Human
gcaucuaaguuauaagacucuc

SEQ ID NO: 2847926 - RNA, 13 nt, Human
gcauggcccuggg

SEQ ID NO: 2847927 - RNA, 16 nt, Human
gcauggcccugggguc

SEQ ID NO: 2847928 - RNA, 17 nt, Human
gcauggcccuggggucc

SEQ ID NO: 2847929 - RNA, 18 nt, Human
gcauggcuccagaaaugu

SEQ ID NO: 2847930 - RNA, 19 nt, Human
gcauggcuccagaaauguc

SEQ ID NO: 2847931 - RNA, 22 nt, Human
gcauggcccuggggucccacga

SEQ ID NO: 2847932 - RNA, 17 nt, Human
gcauggcuccagaaaug

SEQ ID NO: 2847933 - RNA, 18 nt, Human
gauacugcagggccagga

SEQ ID NO: 2847934 - RNA, 21 nt, Human
gauacugcagggccaggacug

SEQ ID NO: 2847935 - RNA, 20 nt, Human
gauacucuuucuaaugcuga

SEQ ID NO: 2847936 - RNA, 15 nt, Human
gauacugcuguguaa

SEQ ID NO: 2847937 - RNA, 11 nt, Human
gauacauaaaa

SEQ ID NO: 2847938 - RNA, 20 nt, Human
gauacauaacuaaauuugau

SEQ ID NO: 2847939 - RNA, 21 nt, Human
gauacauaacuaaauuugaua

SEQ ID NO: 2847940 - RNA, 23 nt, Human
gauacauaacuaaauuugauacu

SEQ ID NO: 2847941 - RNA, 13 nt, Human
gauacauaauaaa

SEQ ID NO: 2847942 - RNA, 14 nt, Human
gauacauaauaaaa

SEQ ID NO: 2847943 - RNA, 15 nt, Human
gauacauaauaaaaa

SEQ ID NO: 2847944 - RNA, 17 nt, Human
gauacagucaacaagcc

SEQ ID NO: 2847945 - RNA, 18 nt, Human
gauacagucaacaagccu

SEQ ID NO: 2847946 - RNA, 19 nt, Human
gauacagucaacaagccug

SEQ ID NO: 2847947 - RNA, 13 nt, Human
gauacaucacugc

SEQ ID NO: 2847948 - RNA, 14 nt, Human
gauacaucacugcu

SEQ ID NO: 2847949 - RNA, 16 nt, Human
gauacaucacugcuug

SEQ ID NO: 2847950 - RNA, 17 nt, Human
gauacaucacugcuuga

SEQ ID NO: 2847951 - RNA, 21 nt, Human
gauacaucacugcuugaugaa

SEQ ID NO: 2847952 - RNA, 18 nt, Human
gauacagucccuaaagaa

SEQ ID NO: 2847953 - RNA, 19 nt, Human
gauacagucccuaaagaaa

SEQ ID NO: 2847954 - RNA, 19 nt, Human
gauaccaagaugccaucug

SEQ ID NO: 2847955 - RNA, 14 nt, Human
gauaccagaaggga

SEQ ID NO: 2847956 - RNA, 21 nt, Human
gauauuuucaacgcagcccug

SEQ ID NO: 2847957 - RNA, 22 nt, Human
gauauuuucaacgcagcccugc

SEQ ID NO: 2847958 - RNA, 23 nt, Human
gauauuuucaacgcagcccugcu

SEQ ID NO: 2847959 - RNA, 17 nt, Human
gaucaaaauaaaaagug

SEQ ID NO: 2847960 - RNA, 20 nt, Human
gaucaaaauaaaaagugaca

SEQ ID NO: 2847961 - RNA, 22 nt, Human
gaucaaaauaaaaagugacaca

SEQ ID NO: 2847962 - RNA, 22 nt, Human
gaucaaaccccgaccaccugcc

SEQ ID NO: 2847963 - RNA, 20 nt, Human
gauacuuuuucuuuuguaag

SEQ ID NO: 2847964 - RNA, 21 nt, Human
gauacuuuuucuuuuguaagu

SEQ ID NO: 2847965 - RNA, 23 nt, Human
gauacuuuuucuuuuguaagugc

SEQ ID NO: 2847966 - RNA, 16 nt, Human
gauagaaagcauuaca

SEQ ID NO: 2847967 - RNA, 13 nt, Human
gauauugugaaca

SEQ ID NO: 2847968 - RNA, 20 nt, Human
gauauugugaacauuuguga

SEQ ID NO: 2847969 - RNA, 21 nt, Human
gauauugugaacauuugugau

SEQ ID NO: 2847970 - RNA, 13 nt, Human
gauacuuuacaug

SEQ ID NO: 2847971 - RNA, 18 nt, Human
gauacuuugauauuuuca

SEQ ID NO: 2847972 - RNA, 21 nt, Human
gauauuuuaccucuuauugca

SEQ ID NO: 2847973 - RNA, 22 nt, Human
gauauuucccuccccuggggac

SEQ ID NO: 2847974 - RNA, 13 nt, Human
gauauuuggcuua

SEQ ID NO: 2847975 - RNA, 14 nt, Human
gauauuuggcuuaa

SEQ ID NO: 2847976 - RNA, 18 nt, Human
gauauuuggcuuaaauau

SEQ ID NO: 2847977 - RNA, 19 nt, Human
gauauuuggcuuaaauaua

SEQ ID NO: 2847978 - RNA, 19 nt, Human
gauauuuucaacgcagccc

SEQ ID NO: 2847979 - RNA, 13 nt, Human
gauauuguucaaa

SEQ ID NO: 2847980 - RNA, 22 nt, Human
gauauuguucaaacaauaucau

SEQ ID NO: 2847981 - RNA, 22 nt, Human
gauauuuaggagugugugacau

SEQ ID NO: 2847982 - RNA, 17 nt, Human
gauauuucucuaguagu

SEQ ID NO: 2847983 - RNA, 22 nt, Human
gauauuucucuaguaguuaaaa

SEQ ID NO: 2847984 - RNA, 19 nt, Human
gauccacccaccucagccu

SEQ ID NO: 2847985 - RNA, 18 nt, Human
gauccacccaccucagcc

SEQ ID NO: 2847986 - RNA, 21 nt, Human
gauccaagcuggucccacuca

SEQ ID NO: 2847987 - RNA, 16 nt, Human
gauccaauguuagaga

SEQ ID NO: 2847988 - RNA, 22 nt, Human
gauccaauguuagagacuuuuu

SEQ ID NO: 2847989 - RNA, 15 nt, Human
gauccaagcuaagca

SEQ ID NO: 2847990 - RNA, 17 nt, Human
gauccaagcuaagcacu

SEQ ID NO: 2847991 - RNA, 22 nt, Human
gauccaagcuaagcacugccac

SEQ ID NO: 2847992 - RNA, 21 nt, Human
gauccacccaccucagccucc

SEQ ID NO: 2847993 - RNA, 20 nt, Human
gauccacccaccucagccuc

SEQ ID NO: 2847994 - RNA, 22 nt, Human
gauccacccaccucagccuccc

SEQ ID NO: 2847995 - RNA, 17 nt, Human
gauccacccaacccuau

SEQ ID NO: 2847996 - RNA, 16 nt, Human
gauccacccaacccua

SEQ ID NO: 2847997 - RNA, 19 nt, Human
gauccaagcuggucccacu

SEQ ID NO: 2847998 - RNA, 17 nt, Human
gauccaagcugguccca

SEQ ID NO: 2847999 - RNA, 16 nt, Human
gauccaagcugguccc

SEQ ID NO: 2848000 - RNA, 12 nt, Human
gauccaagcugg

SEQ ID NO: 2848001 - RNA, 19 nt, Human
gauccaaauugugcuucuc

SEQ ID NO: 2848002 - RNA, 20 nt, Human
gauccaaauugugcuucucc

SEQ ID NO: 2848003 - RNA, 22 nt, Human
gauggaaaaaccacccccaaau

SEQ ID NO: 2848004 - RNA, 23 nt, Human
gauggaaaggauuguaggugcaa

SEQ ID NO: 2848005 - RNA, 22 nt, Human
gaugauuucuugaaaagggugu

SEQ ID NO: 2848006 - RNA, 13 nt, Human
gaugauuugcaau

SEQ ID NO: 2848007 - RNA, 18 nt, Human
gaugauuugcaaugggau

SEQ ID NO: 2848008 - RNA, 18 nt, Human
gaugauagaggauuuuau

SEQ ID NO: 2848009 - RNA, 18 nt, Human
gaugaucaauccuuuauu

SEQ ID NO: 2848010 - RNA, 19 nt, Human
gaugaucaauccuuuauua

SEQ ID NO: 2848011 - RNA, 22 nt, Human
gaugaucaauuauaguuucuga

SEQ ID NO: 2848012 - RNA, 13 nt, Human
gaugaucaauuau

SEQ ID NO: 2848013 - RNA, 20 nt, Human
gaugaucaauuauaguuucu

SEQ ID NO: 2848014 - RNA, 23 nt, Human
gaugauccaugaguuugcccugg

SEQ ID NO: 2848015 - RNA, 22 nt, Human
gaugauccaugaguuugcccug

SEQ ID NO: 2848016 - RNA, 19 nt, Human
gauccaccugucucagccu

SEQ ID NO: 2848017 - RNA, 18 nt, Human
gauccaccugucucagcc

SEQ ID NO: 2848018 - RNA, 14 nt, Human
gauccaccugucuc

SEQ ID NO: 2848019 - RNA, 24 nt, Human
gaucccaucuugauaagaccacca

SEQ ID NO: 2848020 - RNA, 23 nt, Human
gaucccaggggcccaaggcggcc

SEQ ID NO: 2848021 - RNA, 15 nt, Human
gaucccacacaggcu

SEQ ID NO: 2848022 - RNA, 22 nt, Human
gaucucugggauuuaugcucau

SEQ ID NO: 2848023 - RNA, 12 nt, Human
gaucucuuccug

SEQ ID NO: 2848024 - RNA, 13 nt, Human
gaucucuuccugu

SEQ ID NO: 2848025 - RNA, 17 nt, Human
gaucugaugcaagcaag

SEQ ID NO: 2848026 - RNA, 20 nt, Human
gaucugcagggggugugucu

SEQ ID NO: 2848027 - RNA, 15 nt, Human
gcaagugagagcugg

SEQ ID NO: 2848028 - RNA, 16 nt, Human
gcaagugagagcuggg

SEQ ID NO: 2848029 - RNA, 14 nt, Human
gcaacauuccaaga

SEQ ID NO: 2848030 - RNA, 21 nt, Human
gcaacauuguucaccuuugua

SEQ ID NO: 2848031 - RNA, 22 nt, Human
gcaacauuguucaccuuuguag

SEQ ID NO: 2848032 - RNA, 23 nt, Human
gcaacauuuacaguccuucaaaa

SEQ ID NO: 2848033 - RNA, 19 nt, Human
gcaacaggcugggcuucag

SEQ ID NO: 2848034 - RNA, 16 nt, Human
gcaacaggcugggcuu

SEQ ID NO: 2848035 - RNA, 18 nt, Human
gcaacaggaaucaagagc

SEQ ID NO: 2848036 - RNA, 21 nt, Human
gcaacaggaaucaagagcugc

SEQ ID NO: 2848037 - RNA, 19 nt, Human
gcaaaaucaagcaagccuc

SEQ ID NO: 2848038 - RNA, 17 nt, Human
gcaacauccaaaauagu

SEQ ID NO: 2848039 - RNA, 13 nt, Human
gcaacauccaaaa

SEQ ID NO: 2848040 - RNA, 13 nt, Human
gcaacaggcuggg

SEQ ID NO: 2848041 - RNA, 15 nt, Human
gcaacaggcugggcu

SEQ ID NO: 2848042 - RNA, 14 nt, Human
gcaacaggcugggc

SEQ ID NO: 2848043 - RNA, 20 nt, Human
gcaaaauaauuuuaaacaaa

SEQ ID NO: 2848044 - RNA, 20 nt, Human
gcaaaauauucacugggcca

SEQ ID NO: 2848045 - RNA, 13 nt, Human
gcaaaauagcauu

SEQ ID NO: 2848046 - RNA, 22 nt, Human
gcaaaauggaacgcuaaugaaa

SEQ ID NO: 2848047 - RNA, 20 nt, Human
gcaaaagguucacuaaagca

SEQ ID NO: 2848048 - RNA, 21 nt, Human
gcaaaagguucacuaaagcag

SEQ ID NO: 2848049 - RNA, 15 nt, Human
gcaaaauaaaaacua

SEQ ID NO: 2848050 - RNA, 16 nt, Human
gcaaaauaaaaacuau

SEQ ID NO: 2848051 - RNA, 15 nt, Human
gcaaaauaauuuuaa

SEQ ID NO: 2848052 - RNA, 13 nt, Human
gcaaaauaauuuu

SEQ ID NO: 2848053 - RNA, 19 nt, Human
gcaaccuccgccucuuggg

SEQ ID NO: 2848054 - RNA, 16 nt, Human
gcaacccccagccugc

SEQ ID NO: 2848055 - RNA, 15 nt, Human
gcaacccccagccug

SEQ ID NO: 2848056 - RNA, 14 nt, Human
gcaacccccagccu

SEQ ID NO: 2848057 - RNA, 16 nt, Human
gcaacccaaggacuga

SEQ ID NO: 2848058 - RNA, 20 nt, Human
gcaacccaaggacugaggga

SEQ ID NO: 2848059 - RNA, 13 nt, Human
gcaaccacacacc

SEQ ID NO: 2848060 - RNA, 15 nt, Human
gcaaccacacaccuc

SEQ ID NO: 2848061 - RNA, 14 nt, Human
gcaaccacuaagaa

SEQ ID NO: 2848062 - RNA, 20 nt, Human
gcaaccuccgccucuugggu

SEQ ID NO: 2848063 - RNA, 17 nt, Human
gcaaccugauuguaaac

SEQ ID NO: 2848064 - RNA, 18 nt, Human
gcaaccugauuguaaacu

SEQ ID NO: 2848065 - RNA, 23 nt, Human
gcaaccucugccuccuggguuca

SEQ ID NO: 2848066 - RNA, 20 nt, Human
gcaaccucugcuucccaggu

SEQ ID NO: 2848067 - RNA, 13 nt, Human
gcaacaucuuuuu

SEQ ID NO: 2848068 - RNA, 20 nt, Human
gcaaccuucgccaccugggu

SEQ ID NO: 2848069 - RNA, 17 nt, Human
gauggaaguaaagccuc

SEQ ID NO: 2848070 - RNA, 15 nt, Human
gauggaauucuuccu

SEQ ID NO: 2848071 - RNA, 15 nt, Human
gauucuucugcuuca

SEQ ID NO: 2848072 - RNA, 13 nt, Human
gauucuucugcuu

SEQ ID NO: 2848073 - RNA, 12 nt, Human
gauucuucugcu

SEQ ID NO: 2848074 - RNA, 20 nt, Human
gauucuucugcuucagccuc

SEQ ID NO: 2848075 - RNA, 17 nt, Human
gauuuaauaaaauaauu

SEQ ID NO: 2848076 - RNA, 19 nt, Human
gauuuaauaaaauaauucu

SEQ ID NO: 2848077 - RNA, 22 nt, Human
gauuuaauaaaauaauucuaaa

SEQ ID NO: 2848078 - RNA, 23 nt, Human
gauuuaauaaaauaauucuaaag

SEQ ID NO: 2848079 - RNA, 16 nt, Human
gcaaaaaaguccaauu

SEQ ID NO: 2848080 - RNA, 21 nt, Human
gcaaaaaaguccaauuuuaau

SEQ ID NO: 2848081 - RNA, 11 nt, Human
gcaaaaaauac

SEQ ID NO: 2848082 - RNA, 12 nt, Human
gcaaaaaauacu

SEQ ID NO: 2848083 - RNA, 18 nt, Human
gcaaaaaauacuuuuucu

SEQ ID NO: 2848084 - RNA, 20 nt, Human
gcaaaaaauacuuuuucuaa

SEQ ID NO: 2848085 - RNA, 21 nt, Human
gcaaaaaauacuuuuucuaau

SEQ ID NO: 2848086 - RNA, 15 nt, Human
gcaaaaacaaaaaga

SEQ ID NO: 2848087 - RNA, 18 nt, Human
gcaaaagcagugggcucc

SEQ ID NO: 2848088 - RNA, 14 nt, Human
gcaaaagccuugug

SEQ ID NO: 2848089 - RNA, 23 nt, Human
gcaaaagccuuguguauauuugu

SEQ ID NO: 2848090 - RNA, 14 nt, Human
gauuuaauauggau

SEQ ID NO: 2848091 - RNA, 12 nt, Human
gcaaaaggagag

SEQ ID NO: 2848092 - RNA, 21 nt, Human
gcaaaaggagagacucccaug

SEQ ID NO: 2848093 - RNA, 11 nt, Human
gcaaaaauaua

SEQ ID NO: 2848094 - RNA, 13 nt, Human
gcaaaaauauaaa

SEQ ID NO: 2848095 - RNA, 14 nt, Human
gcaaaaauauaaaa

SEQ ID NO: 2848096 - RNA, 16 nt, Human
gcaaaaauauaaaaua

SEQ ID NO: 2848097 - RNA, 21 nt, Human
gcaaaaacaaaaagaaaagaa

SEQ ID NO: 2848098 - RNA, 20 nt, Human
gcaaaaacaaaaagaaaaga

SEQ ID NO: 2848099 - RNA, 17 nt, Human
gauuuauuuuucaguuc

SEQ ID NO: 2848100 - RNA, 20 nt, Human
gauuuauuuuucaguuccaa

SEQ ID NO: 2848101 - RNA, 12 nt, Human
gauuucaagaaa

SEQ ID NO: 2848102 - RNA, 19 nt, Human
gauuucaagaaaaaauaaa

SEQ ID NO: 2848103 - RNA, 22 nt, Human
gauuucaagaaaaaauaaaugg

SEQ ID NO: 2848104 - RNA, 15 nt, Human
gauuucaagauccuc

SEQ ID NO: 2848105 - RNA, 21 nt, Human
gauuuacagcaaguagauaaa

SEQ ID NO: 2848106 - RNA, 13 nt, Human
gauuuaauuucca

SEQ ID NO: 2848107 - RNA, 14 nt, Human
gauuuaauuuccag

SEQ ID NO: 2848108 - RNA, 19 nt, Human
gaggcugacgugugaggga

SEQ ID NO: 2848109 - RNA, 16 nt, Human
gagggcccaggcaggc

SEQ ID NO: 2848110 - RNA, 13 nt, Human
gagggcccaggca

SEQ ID NO: 2848111 - RNA, 15 nt, Human
gagggcccagagcag

SEQ ID NO: 2848112 - RNA, 16 nt, Human
gagggcccagagcagg

SEQ ID NO: 2848113 - RNA, 18 nt, Human
gagggcccagagcaggaa

SEQ ID NO: 2848114 - RNA, 20 nt, Human
gagggcccagagcaggaagc

SEQ ID NO: 2848115 - RNA, 22 nt, Human
gagggcccagagcaggaagcau

SEQ ID NO: 2848116 - RNA, 13 nt, Human
gagggcccagagc

SEQ ID NO: 2848117 - RNA, 14 nt, Human
gagggcccagagca

SEQ ID NO: 2848118 - RNA, 13 nt, Human
gaggcugaggcag

SEQ ID NO: 2848119 - RNA, 16 nt, Human
gaggcucuuucugggc

SEQ ID NO: 2848120 - RNA, 14 nt, Human
gaggcugagacagg

SEQ ID NO: 2848121 - RNA, 16 nt, Human
gaggcugaggcaagag

SEQ ID NO: 2848122 - RNA, 13 nt, Human
gaggcugaggcac

SEQ ID NO: 2848123 - RNA, 14 nt, Human
gaggcugaggcaca

SEQ ID NO: 2848124 - RNA, 15 nt, Human
gaggcugaggcacaa

SEQ ID NO: 2848125 - RNA, 17 nt, Human
gaggccaaaggcuggug

SEQ ID NO: 2848126 - RNA, 18 nt, Human
gaggccaaaggcuggugg

SEQ ID NO: 2848127 - RNA, 19 nt, Human
gaggccaaaggcugguggc

SEQ ID NO: 2848128 - RNA, 17 nt, Human
gaggccaacacuguggg

SEQ ID NO: 2848129 - RNA, 18 nt, Human
gaggccaacacugugggu

SEQ ID NO: 2848130 - RNA, 15 nt, Human
gagggcccuaccuga

SEQ ID NO: 2848131 - RNA, 21 nt, Human
gaggggaggaucacuggagcc

SEQ ID NO: 2848132 - RNA, 15 nt, Human
gaggggaggaacagg

SEQ ID NO: 2848133 - RNA, 12 nt, Human
gaggggagaagc

SEQ ID NO: 2848134 - RNA, 12 nt, Human
gaggggacucug

SEQ ID NO: 2848135 - RNA, 13 nt, Human
gaggggacucugg

SEQ ID NO: 2848136 - RNA, 15 nt, Human
gaggggacucugggc

SEQ ID NO: 2848137 - RNA, 19 nt, Human
gaggggacucugggcuaug

SEQ ID NO: 2848138 - RNA, 23 nt, Human
gaggggacucugggcuauggaca

SEQ ID NO: 2848139 - RNA, 12 nt, Human
gagggccugggc

SEQ ID NO: 2848140 - RNA, 22 nt, Human
gagggccucaaaggcccgcucu

SEQ ID NO: 2848141 - RNA, 18 nt, Human
gaggacaugauggagcgc

SEQ ID NO: 2848142 - RNA, 21 nt, Human
gaggacauguuuuuguuuucu

SEQ ID NO: 2848143 - RNA, 21 nt, Human
gaggaccacaggugugagcca

SEQ ID NO: 2848144 - RNA, 23 nt, Human
gaggacuuuucuuuguggcuucc

SEQ ID NO: 2848145 - RNA, 20 nt, Human
gaggacuuuucuuuguggcu

SEQ ID NO: 2848146 - RNA, 16 nt, Human
gaggacuuuucuuugu

SEQ ID NO: 2848147 - RNA, 14 nt, Human
gaggacuugugucu

SEQ ID NO: 2848148 - RNA, 17 nt, Human
gaggacuugugucucug

SEQ ID NO: 2848149 - RNA, 16 nt, Human
gaggacuugugucucu

SEQ ID NO: 2848150 - RNA, 16 nt, Human
gaggacggugcaaccc

SEQ ID NO: 2848151 - RNA, 17 nt, Human
gaggacggugcaaccca

SEQ ID NO: 2848152 - RNA, 20 nt, Human
gaggacggugcaacccaagg

SEQ ID NO: 2848153 - RNA, 19 nt, Human
gaggacucgcuuguaaaua

SEQ ID NO: 2848154 - RNA, 20 nt, Human
gaggacucgcuuguaaauac

SEQ ID NO: 2848155 - RNA, 21 nt, Human
gaggacucgcuuguaaauacc

SEQ ID NO: 2848156 - RNA, 22 nt, Human
gaggacucgcuuguaaauacca

SEQ ID NO: 2848157 - RNA, 16 nt, Human
gaggagagaaaauaua

SEQ ID NO: 2848158 - RNA, 9 nt, Human
gaggagaaa

SEQ ID NO: 2848159 - RNA, 22 nt, Human
gaggacuugugucucugugcuu

SEQ ID NO: 2848160 - RNA, 23 nt, Human
gaggacuuugauugcacauuguu

SEQ ID NO: 2848161 - RNA, 18 nt, Human
gaggacuugugucucugu

SEQ ID NO: 2848162 - RNA, 11 nt, Human
gaggagagagg

SEQ ID NO: 2848163 - RNA, 18 nt, Human
gaggcagggucucacucu

SEQ ID NO: 2848164 - RNA, 16 nt, Human
gaggagcaaaggcuga

SEQ ID NO: 2848165 - RNA, 13 nt, Human
gaggagaggagag

SEQ ID NO: 2848166 - RNA, 14 nt, Human
gaggagaggagaga

SEQ ID NO: 2848167 - RNA, 16 nt, Human
gaggagaggagagagg

SEQ ID NO: 2848168 - RNA, 17 nt, Human
gaggagaggagagaggc

SEQ ID NO: 2848169 - RNA, 12 nt, Human
gaggagagaggc

SEQ ID NO: 2848170 - RNA, 13 nt, Human
gaggagagaggca

SEQ ID NO: 2848171 - RNA, 14 nt, Human
gaggagagaggcag

SEQ ID NO: 2848172 - RNA, 15 nt, Human
gaggagagaggcaga

SEQ ID NO: 2848173 - RNA, 17 nt, Human
gaggagagaggcagaga

SEQ ID NO: 2848174 - RNA, 20 nt, Human
gaggagagauagccuguggc

SEQ ID NO: 2848175 - RNA, 24 nt, Human
gaggagagauagccuguggcccug

SEQ ID NO: 2848176 - RNA, 16 nt, Human
gaggagagaggcagag

SEQ ID NO: 2848177 - RNA, 20 nt, Human
gaggcagggucucacucugu

SEQ ID NO: 2848178 - RNA, 19 nt, Human
gaggcagggucucacucug

SEQ ID NO: 2848179 - RNA, 17 nt, Human
gaggcaucgcaauguaa

SEQ ID NO: 2848180 - RNA, 13 nt, Human
gaggcauggcccu

SEQ ID NO: 2848181 - RNA, 14 nt, Human
gaggcauggcccug

SEQ ID NO: 2848182 - RNA, 15 nt, Human
gaggcauggcccugg

SEQ ID NO: 2848183 - RNA, 17 nt, Human
gaggcauggcccugggg

SEQ ID NO: 2848184 - RNA, 18 nt, Human
gaggcauggcccuggggu

SEQ ID NO: 2848185 - RNA, 16 nt, Human
gagcaggggcagggug

SEQ ID NO: 2848186 - RNA, 16 nt, Human
gagcaggguguuggga

SEQ ID NO: 2848187 - RNA, 20 nt, Human
gagcaguccugccucagccu

SEQ ID NO: 2848188 - RNA, 16 nt, Human
gagcaguccaugcaug

SEQ ID NO: 2848189 - RNA, 18 nt, Human
gagcaguccaugcaugac

SEQ ID NO: 2848190 - RNA, 16 nt, Human
gagcaguccugccuca

SEQ ID NO: 2848191 - RNA, 21 nt, Human
gagcagggcucagcggggaca

SEQ ID NO: 2848192 - RNA, 13 nt, Human
gagcaggggcagg

SEQ ID NO: 2848193 - RNA, 17 nt, Human
gagcaugaaauuuuuaa

SEQ ID NO: 2848194 - RNA, 13 nt, Human
gagcccauacuca

SEQ ID NO: 2848195 - RNA, 16 nt, Human
gagcccauacucagcc

SEQ ID NO: 2848196 - RNA, 17 nt, Human
gagcccauacucagccu

SEQ ID NO: 2848197 - RNA, 18 nt, Human
gagcccauacucagccug

SEQ ID NO: 2848198 - RNA, 19 nt, Human
gagcccauacucagccugc

SEQ ID NO: 2848199 - RNA, 20 nt, Human
gagcccauacucagccugcu

SEQ ID NO: 2848200 - RNA, 22 nt, Human
gagcccauacucagccugcugc

SEQ ID NO: 2848201 - RNA, 18 nt, Human
gagcccauguucugcccc

SEQ ID NO: 2848202 - RNA, 20 nt, Human
gagcccauguucugccccca

SEQ ID NO: 2848203 - RNA, 21 nt, Human
gagcccauguucugcccccag

SEQ ID NO: 2848204 - RNA, 22 nt, Human
gagcccauguucugcccccagc

SEQ ID NO: 2848205 - RNA, 23 nt, Human
gagcccauguucugcccccagcc

SEQ ID NO: 2848206 - RNA, 23 nt, Human
gagcaucucuugaggccaggagu

SEQ ID NO: 2848207 - RNA, 22 nt, Human
gagcaucucuugaggccaggag

SEQ ID NO: 2848208 - RNA, 20 nt, Human
gagcaucucuugaggccagg

SEQ ID NO: 2848209 - RNA, 19 nt, Human
gagcaucucuugaggccag

SEQ ID NO: 2848210 - RNA, 18 nt, Human
gagcaucucuugaggcca

SEQ ID NO: 2848211 - RNA, 19 nt, Human
gagcaucccccaaaguuca

SEQ ID NO: 2848212 - RNA, 13 nt, Human
gagcaucccggag

SEQ ID NO: 2848213 - RNA, 19 nt, Human
gagcaucccggaggaaauc

SEQ ID NO: 2848214 - RNA, 20 nt, Human
gagcaucccggaggaaaucu

SEQ ID NO: 2848215 - RNA, 14 nt, Human
gagcauccugagcc

SEQ ID NO: 2848216 - RNA, 15 nt, Human
gagcauccugagccc

SEQ ID NO: 2848217 - RNA, 16 nt, Human
gagcauccugagcccc

SEQ ID NO: 2848218 - RNA, 18 nt, Human
gagcauccugagccccgc

SEQ ID NO: 2848219 - RNA, 22 nt, Human
gagcauccugagccccgcccuc

SEQ ID NO: 2848220 - RNA, 14 nt, Human
gagccccgaggccu

SEQ ID NO: 2848221 - RNA, 13 nt, Human
gagccccgaggcc

SEQ ID NO: 2848222 - RNA, 13 nt, Human
gagccccgcagac

SEQ ID NO: 2848223 - RNA, 18 nt, Human
gagccccgcagaccuccc

SEQ ID NO: 2848224 - RNA, 22 nt, Human
gagccccgcagaccuccccagc

SEQ ID NO: 2848225 - RNA, 17 nt, Human
gagccccgaggccuucu

SEQ ID NO: 2848226 - RNA, 23 nt, Human
gagccccgcagaccuccccagcc

SEQ ID NO: 2848227 - RNA, 13 nt, Human
gagccccgcccuc

SEQ ID NO: 2848228 - RNA, 14 nt, Human
gagccccgcccucu

SEQ ID NO: 2848229 - RNA, 15 nt, Human
gagccccgcccucuu

SEQ ID NO: 2848230 - RNA, 16 nt, Human
gagccccgcccucuuc

SEQ ID NO: 2848231 - RNA, 17 nt, Human
gagccccgcccucuucc

SEQ ID NO: 2848232 - RNA, 18 nt, Human
gagccccgcccucuuccu

SEQ ID NO: 2848233 - RNA, 19 nt, Human
gagccccgcccucuuccug

SEQ ID NO: 2848234 - RNA, 20 nt, Human
gagccccgcccucuuccuga

SEQ ID NO: 2848235 - RNA, 21 nt, Human
gagccccgcccucuuccugac

SEQ ID NO: 2848236 - RNA, 12 nt, Human
gagccccugguc

SEQ ID NO: 2848237 - RNA, 15 nt, Human
gagcccucagaaccc

SEQ ID NO: 2848238 - RNA, 12 nt, Human
gagcccucccca

SEQ ID NO: 2848239 - RNA, 13 nt, Human
gagcccuccccag

SEQ ID NO: 2848240 - RNA, 14 nt, Human
gagcccuccccagg

SEQ ID NO: 2848241 - RNA, 15 nt, Human
gagcccuccgccuuc

SEQ ID NO: 2848242 - RNA, 17 nt, Human
gagcccuccgccuucac

SEQ ID NO: 2848243 - RNA, 18 nt, Human
gagcccuccgccuucaca

SEQ ID NO: 2848244 - RNA, 23 nt, Human
gagcccuccgccuucacauuccc

SEQ ID NO: 2848245 - RNA, 20 nt, Human
gagccccugguccugagggu

SEQ ID NO: 2848246 - RNA, 13 nt, Human
gagccccuggucc

SEQ ID NO: 2848247 - RNA, 14 nt, Human
gagccccugguccu

SEQ ID NO: 2848248 - RNA, 17 nt, Human
gagcuguuuauggccuc

SEQ ID NO: 2848249 - RNA, 16 nt, Human
gagcuguuuauggccu

SEQ ID NO: 2848250 - RNA, 18 nt, Human
gagcuguuuauggccuca

SEQ ID NO: 2848251 - RNA, 16 nt, Human
gagcuggccucucuag

SEQ ID NO: 2848252 - RNA, 11 nt, Human
gagcuggccuc

SEQ ID NO: 2848253 - RNA, 19 nt, Human
gagcuggccgugggccugg

SEQ ID NO: 2848254 - RNA, 20 nt, Human
gagcuggccgugggccuggg

SEQ ID NO: 2848255 - RNA, 17 nt, Human
gagcuggccgugggccu

SEQ ID NO: 2848256 - RNA, 13 nt, Human
gagcuggccccgc

SEQ ID NO: 2848257 - RNA, 14 nt, Human
gagcuggccccgcc

SEQ ID NO: 2848258 - RNA, 16 nt, Human
gagcuggccccgccgc

SEQ ID NO: 2848259 - RNA, 17 nt, Human
gagcuggccccgccgcc

SEQ ID NO: 2848260 - RNA, 14 nt, Human
gagcccugguggca

SEQ ID NO: 2848261 - RNA, 13 nt, Human
gagcccugguggc

SEQ ID NO: 2848262 - RNA, 23 nt, Human
gagcccuggcaggaugacccugc

SEQ ID NO: 2848263 - RNA, 13 nt, Human
gagcccuggcagg

SEQ ID NO: 2848264 - RNA, 14 nt, Human
gagcuggagccugg

SEQ ID NO: 2848265 - RNA, 15 nt, Human
gagcuggagccuggu

SEQ ID NO: 2848266 - RNA, 20 nt, Human
gagcuggagccuggugcccu

SEQ ID NO: 2848267 - RNA, 12 nt, Human
gagcuggagccu

SEQ ID NO: 2848268 - RNA, 21 nt, Human
gagauugugccacuucacucc

SEQ ID NO: 2848269 - RNA, 16 nt, Human
gagauuggcauggcuu

SEQ ID NO: 2848270 - RNA, 17 nt, Human
gagauuggacggccuga

SEQ ID NO: 2848271 - RNA, 19 nt, Human
gagagggagagcagagaaa

SEQ ID NO: 2848272 - RNA, 15 nt, Human
gagaugcuggagaag

SEQ ID NO: 2848273 - RNA, 16 nt, Human
gagaugcuggagaaga

SEQ ID NO: 2848274 - RNA, 14 nt, Human
gagaugcggccaag

SEQ ID NO: 2848275 - RNA, 21 nt, Human
gagaugcguuguuacaggaag

SEQ ID NO: 2848276 - RNA, 14 nt, Human
gagaugugcaccca

SEQ ID NO: 2848277 - RNA, 16 nt, Human
gagaugcugagggugu

SEQ ID NO: 2848278 - RNA, 12 nt, Human
gagauugcuaau

SEQ ID NO: 2848279 - RNA, 13 nt, Human
gagauugcuaauu

SEQ ID NO: 2848280 - RNA, 14 nt, Human
gagauuacaggcau

SEQ ID NO: 2848281 - RNA, 15 nt, Human
gagauuauguucuuu

SEQ ID NO: 2848282 - RNA, 20 nt, Human
gagauguguggacuguggca

SEQ ID NO: 2848283 - RNA, 16 nt, Human
gagauguguggacugu

SEQ ID NO: 2848284 - RNA, 14 nt, Human
gagauguuuuuaaa

SEQ ID NO: 2848285 - RNA, 17 nt, Human
gagauguuuuuaaaagu

SEQ ID NO: 2848286 - RNA, 18 nt, Human
gagauguuuuuaaaaguu

SEQ ID NO: 2848287 - RNA, 19 nt, Human
gagauguuuuuaaaaguuu

SEQ ID NO: 2848288 - RNA, 21 nt, Human
gagauguuuuuaaaaguuuca

SEQ ID NO: 2848289 - RNA, 16 nt, Human
gagacucccaugaagc

SEQ ID NO: 2848290 - RNA, 17 nt, Human
gagacucccaugaagcc

SEQ ID NO: 2848291 - RNA, 18 nt, Human
gagacucccaugaagccu

SEQ ID NO: 2848292 - RNA, 19 nt, Human
gagacucccaugaagccuu

SEQ ID NO: 2848293 - RNA, 20 nt, Human
gagacucccaugaagccuuu

SEQ ID NO: 2848294 - RNA, 18 nt, Human
gagacguggaaccucugu

SEQ ID NO: 2848295 - RNA, 20 nt, Human
gagacguggaaccucugucu

SEQ ID NO: 2848296 - RNA, 21 nt, Human
gagacguggaaccucugucuc

SEQ ID NO: 2848297 - RNA, 22 nt, Human
gagacguggaaccucugucuca

SEQ ID NO: 2848298 - RNA, 12 nt, Human
gagacucagccu

SEQ ID NO: 2848299 - RNA, 13 nt, Human
gagacucagccug

SEQ ID NO: 2848300 - RNA, 14 nt, Human
gagacucagccugc

SEQ ID NO: 2848301 - RNA, 15 nt, Human
gagacucagccugca

SEQ ID NO: 2848302 - RNA, 17 nt, Human
gagacucagccugcagu

SEQ ID NO: 2848303 - RNA, 19 nt, Human
gagacggugucuuguucug

SEQ ID NO: 2848304 - RNA, 22 nt, Human
gagacggugucuuguucuguca

SEQ ID NO: 2848305 - RNA, 16 nt, Human
gagacuccuaggcagg

SEQ ID NO: 2848306 - RNA, 14 nt, Human
gagagcggucucag

SEQ ID NO: 2848307 - RNA, 21 nt, Human
gagagcggucucaggcuggug

SEQ ID NO: 2848308 - RNA, 13 nt, Human
gagagcugggugu

SEQ ID NO: 2848309 - RNA, 13 nt, Human
gagagcuggagcc

SEQ ID NO: 2848310 - RNA, 20 nt, Human
gagagcugggugucaagagg

SEQ ID NO: 2848311 - RNA, 14 nt, Human
gagagcuggugccc

SEQ ID NO: 2848312 - RNA, 13 nt, Human
gagagcuggugcc

SEQ ID NO: 2848313 - RNA, 21 nt, Human
gagagcuggagccuggugccc

SEQ ID NO: 2848314 - RNA, 14 nt, Human
gagagcuggagccu

SEQ ID NO: 2848315 - RNA, 16 nt, Human
gagagcuggagccugg

SEQ ID NO: 2848316 - RNA, 17 nt, Human
gagagcuggugcccgga

SEQ ID NO: 2848317 - RNA, 22 nt, Human
gagagcuucuguugcugccuca

SEQ ID NO: 2848318 - RNA, 22 nt, Human
gagaggaacuccuuggccuagc

SEQ ID NO: 2848319 - RNA, 23 nt, Human
gagaggaacuccuuggccuagcc

SEQ ID NO: 2848320 - RNA, 20 nt, Human
gagaggaaauauugcugggg

SEQ ID NO: 2848321 - RNA, 21 nt, Human
gagaggaaauauugcuggggu

SEQ ID NO: 2848322 - RNA, 16 nt, Human
gagagcuuaaugauaa

SEQ ID NO: 2848323 - RNA, 18 nt, Human
gagagcuuagccuggagc

SEQ ID NO: 2848324 - RNA, 11 nt, Human
gagaggagaga

SEQ ID NO: 2848325 - RNA, 12 nt, Human
gagaggagagag

SEQ ID NO: 2848326 - RNA, 15 nt, Human
gagaggagagaggca

SEQ ID NO: 2848327 - RNA, 15 nt, Human
gagaggcaauggcca

SEQ ID NO: 2848328 - RNA, 18 nt, Human
gagaggaugagagcccag

SEQ ID NO: 2848329 - RNA, 19 nt, Human
gagaggaugagagcccaga

SEQ ID NO: 2848330 - RNA, 21 nt, Human
gagaggaugagagcccagagg

SEQ ID NO: 2848331 - RNA, 14 nt, Human
gagaggaugugcaa

SEQ ID NO: 2848332 - RNA, 14 nt, Human
gagaggaugagagc

SEQ ID NO: 2848333 - RNA, 16 nt, Human
gagaggaugagagccc

SEQ ID NO: 2848334 - RNA, 13 nt, Human
gagaggaggcaac

SEQ ID NO: 2848335 - RNA, 18 nt, Human
gagaggagagaggcagag

SEQ ID NO: 2848336 - RNA, 19 nt, Human
gagaggagagaggcagaga

SEQ ID NO: 2848337 - RNA, 18 nt, Human
gagaggagaggagagagg

SEQ ID NO: 2848338 - RNA, 13 nt, Human
gagaggagccaga

SEQ ID NO: 2848339 - RNA, 17 nt, Human
gagaggagccagacaga

SEQ ID NO: 2848340 - RNA, 19 nt, Human
gagaggagccagacagacc

SEQ ID NO: 2848341 - RNA, 18 nt, Human
gagaggccuuuuggaaug

SEQ ID NO: 2848342 - RNA, 20 nt, Human
gagaggaugagagcccagag

SEQ ID NO: 2848343 - RNA, 17 nt, Human
gagaggccaaaggcugg

SEQ ID NO: 2848344 - RNA, 18 nt, Human
gagaggccaaaggcuggu

SEQ ID NO: 2848345 - RNA, 15 nt, Human
gagaggccuuuugga

SEQ ID NO: 2848346 - RNA, 17 nt, Human
gacuuuguuuuuaaaau

SEQ ID NO: 2848347 - RNA, 21 nt, Human
gacuuuuaaugucauuuguua

SEQ ID NO: 2848348 - RNA, 18 nt, Human
gacuuuuauuuccaguga

SEQ ID NO: 2848349 - RNA, 18 nt, Human
gacuuuuuucuaguacac

SEQ ID NO: 2848350 - RNA, 10 nt, Human
gagaaaaaaa

SEQ ID NO: 2848351 - RNA, 16 nt, Human
gagaaaaaaaaaauag

SEQ ID NO: 2848352 - RNA, 13 nt, Human
gagaaaaaaacaa

SEQ ID NO: 2848353 - RNA, 13 nt, Human
gagaaaaaugcuu

SEQ ID NO: 2848354 - RNA, 19 nt, Human
gagaaaaagcuccuguccu

SEQ ID NO: 2848355 - RNA, 17 nt, Human
gagaaaaagcuccuguc

SEQ ID NO: 2848356 - RNA, 23 nt, Human
gagaagguggguuuucaucaaga

SEQ ID NO: 2848357 - RNA, 16 nt, Human
gagaaggggugugcau

SEQ ID NO: 2848358 - RNA, 17 nt, Human
gagaaggggaagcacuc

SEQ ID NO: 2848359 - RNA, 12 nt, Human
gagaaggcagcc

SEQ ID NO: 2848360 - RNA, 16 nt, Human
gagaaggcagccacca

SEQ ID NO: 2848361 - RNA, 15 nt, Human
gagaaggagagaaag

SEQ ID NO: 2848362 - RNA, 11 nt, Human
gagaaggcagc

SEQ ID NO: 2848363 - RNA, 15 nt, Human
gagaagggauggagg

SEQ ID NO: 2848364 - RNA, 20 nt, Human
gagaagggaauccuccucca

SEQ ID NO: 2848365 - RNA, 20 nt, Human
gagaagggauaacccuacac

SEQ ID NO: 2848366 - RNA, 23 nt, Human
gagaaggggcgggaauauuguuu

SEQ ID NO: 2848367 - RNA, 17 nt, Human
gagaagggcauaaaaca

SEQ ID NO: 2848368 - RNA, 23 nt, Human
gagaaggacccggaggggccugg

SEQ ID NO: 2848369 - RNA, 12 nt, Human
gagaaggagaga

SEQ ID NO: 2848370 - RNA, 14 nt, Human
gagaaggagagaaa

SEQ ID NO: 2848371 - RNA, 14 nt, Human
gagacggaguccca

SEQ ID NO: 2848372 - RNA, 13 nt, Human
gagaccugccccu

SEQ ID NO: 2848373 - RNA, 20 nt, Human
gagaccgggguauccugggg

SEQ ID NO: 2848374 - RNA, 13 nt, Human
gagaccguccuca

SEQ ID NO: 2848375 - RNA, 14 nt, Human
gagaccguccucac

SEQ ID NO: 2848376 - RNA, 15 nt, Human
gagaccguccucacc

SEQ ID NO: 2848377 - RNA, 16 nt, Human
gagaccguccucaccc

SEQ ID NO: 2848378 - RNA, 22 nt, Human
gagaccguccucaccccugucc

SEQ ID NO: 2848379 - RNA, 19 nt, Human
gagacggagucccaccuug

SEQ ID NO: 2848380 - RNA, 16 nt, Human
gagacggagucccacc

SEQ ID NO: 2848381 - RNA, 23 nt, Human
gagaccuguuuuaaaaaggaacu

SEQ ID NO: 2848382 - RNA, 12 nt, Human
gagaccuuaccc

SEQ ID NO: 2848383 - RNA, 13 nt, Human
gagaccuuacccc

SEQ ID NO: 2848384 - RNA, 18 nt, Human
gagaccuuaccccuggcu

SEQ ID NO: 2848385 - RNA, 22 nt, Human
gagaccuuaccccuggcuguuu

SEQ ID NO: 2848386 - RNA, 15 nt, Human
gagacgacaggcgag

SEQ ID NO: 2848387 - RNA, 23 nt, Human
gagaaugaaagggcccagagagg

SEQ ID NO: 2848388 - RNA, 15 nt, Human
gagaaugaaagggcc

SEQ ID NO: 2848389 - RNA, 18 nt, Human
gagaauaggcagccccca

SEQ ID NO: 2848390 - RNA, 20 nt, Human
gagaauauaacaugaaauga

SEQ ID NO: 2848391 - RNA, 18 nt, Human
gagaauaagagaaagaaa

SEQ ID NO: 2848392 - RNA, 16 nt, Human
gagaaguuuuguuuuu

SEQ ID NO: 2848393 - RNA, 22 nt, Human
gagaauaagagaaagaaaauga

SEQ ID NO: 2848394 - RNA, 21 nt, Human
gagaaucuacccccagaucca

SEQ ID NO: 2848395 - RNA, 22 nt, Human
gagaaucuauauuuaacaagau

SEQ ID NO: 2848396 - RNA, 15 nt, Human
gagaaucuauauuua

SEQ ID NO: 2848397 - RNA, 22 nt, Human
gaauauugcuuuggucauauga

SEQ ID NO: 2848398 - RNA, 22 nt, Human
gaauauacagcaggugcucaau

SEQ ID NO: 2848399 - RNA, 16 nt, Human
gaauauauuuaagcaa

SEQ ID NO: 2848400 - RNA, 13 nt, Human
gaauauauuuauu

SEQ ID NO: 2848401 - RNA, 16 nt, Human
gaauauauuuauuuaa

SEQ ID NO: 2848402 - RNA, 17 nt, Human
gaauauauuuauuuaaa

SEQ ID NO: 2848403 - RNA, 21 nt, Human
gaauauauuuauuuaaagcau

SEQ ID NO: 2848404 - RNA, 14 nt, Human
gaauauauggcauu

SEQ ID NO: 2848405 - RNA, 19 nt, Human
gaauauauggcauuugcag

SEQ ID NO: 2848406 - RNA, 23 nt, Human
gaauauauggcauuugcagauuu

SEQ ID NO: 2848407 - RNA, 15 nt, Human
gaauauauauauaua

SEQ ID NO: 2848408 - RNA, 14 nt, Human
gaauauaggucucu

SEQ ID NO: 2848409 - RNA, 20 nt, Human
gaauauaggucucuucuccc

SEQ ID NO: 2848410 - RNA, 22 nt, Human
gaauauaggucucuucucccag

SEQ ID NO: 2848411 - RNA, 23 nt, Human
gaauauaggucucuucucccaga

SEQ ID NO: 2848412 - RNA, 16 nt, Human
gaauauccauguacuu

SEQ ID NO: 2848413 - RNA, 19 nt, Human
gaauauccauguacuuguu

SEQ ID NO: 2848414 - RNA, 17 nt, Human
gaauaucuauuaauaua

SEQ ID NO: 2848415 - RNA, 14 nt, Human
gaauaucuuucgau

SEQ ID NO: 2848416 - RNA, 13 nt, Human
gaauaugccugua

SEQ ID NO: 2848417 - RNA, 16 nt, Human
gaauaugccuguaauu

SEQ ID NO: 2848418 - RNA, 18 nt, Human
gaauaugccuguaauuca

SEQ ID NO: 2848419 - RNA, 20 nt, Human
gaauaugccuguaauucagu

SEQ ID NO: 2848420 - RNA, 18 nt, Human
gaauauucccaagcccau

SEQ ID NO: 2848421 - RNA, 16 nt, Human
gaauauucauauugga

SEQ ID NO: 2848422 - RNA, 21 nt, Human
gaaugagucuguuguguguca

SEQ ID NO: 2848423 - RNA, 14 nt, Human
gaaugagugugcau

SEQ ID NO: 2848424 - RNA, 16 nt, Human
gaaugaucucuucuuu

SEQ ID NO: 2848425 - RNA, 15 nt, Human
gaaugauaugcauuu

SEQ ID NO: 2848426 - RNA, 15 nt, Human
gaaugauucauguua

SEQ ID NO: 2848427 - RNA, 19 nt, Human
gaaugauucauguuauauu

SEQ ID NO: 2848428 - RNA, 20 nt, Human
gaaugauucauguuauauuu

SEQ ID NO: 2848429 - RNA, 17 nt, Human
gaaugaucucuucuuuu

SEQ ID NO: 2848430 - RNA, 14 nt, Human
gaaugauuucaugc

SEQ ID NO: 2848431 - RNA, 23 nt, Human
gaaugauucuaauuuuuaagcaa

SEQ ID NO: 2848432 - RNA, 17 nt, Human
gaauguuugccucugcc

SEQ ID NO: 2848433 - RNA, 16 nt, Human
gaauguuugccucugc

SEQ ID NO: 2848434 - RNA, 15 nt, Human
gaauguuugccucug

SEQ ID NO: 2848435 - RNA, 14 nt, Human
gaaugauuuuuaga

SEQ ID NO: 2848436 - RNA, 16 nt, Human
gaaugauuuuuagaug

SEQ ID NO: 2848437 - RNA, 20 nt, Human
gaauuaaauaaacccuuccu

SEQ ID NO: 2848438 - RNA, 12 nt, Human
gaauuaaauaaa

SEQ ID NO: 2848439 - RNA, 19 nt, Human
gaauguuugccucugccuc

SEQ ID NO: 2848440 - RNA, 18 nt, Human
gaauguuugccucugccu

SEQ ID NO: 2848441 - RNA, 11 nt, Human
gaauuaaaacu

SEQ ID NO: 2848442 - RNA, 12 nt, Human
gaauuaaaacuu

SEQ ID NO: 2848443 - RNA, 14 nt, Human
gaauuaaaacuucu

SEQ ID NO: 2848444 - RNA, 16 nt, Human
gaauuaaaacuucuua

SEQ ID NO: 2848445 - RNA, 17 nt, Human
gaauuaaaacuucuuaa

SEQ ID NO: 2848446 - RNA, 18 nt, Human
gaauuaaaacuucuuaaa

SEQ ID NO: 2848447 - RNA, 19 nt, Human
gaauuaaaacuucuuaaau

SEQ ID NO: 2848448 - RNA, 22 nt, Human
gaauuaaaacuucuuaaauauc

SEQ ID NO: 2848449 - RNA, 19 nt, Human
gaauuaaaaggauaguauu

SEQ ID NO: 2848450 - RNA, 20 nt, Human
gaauuaaaaggauaguauuu

SEQ ID NO: 2848451 - RNA, 21 nt, Human
gaauuaaaaggauaguauuuu

SEQ ID NO: 2848452 - RNA, 11 nt, Human
gaauuaaaagu

SEQ ID NO: 2848453 - RNA, 18 nt, Human
gaauuaaaagucauuuaa

SEQ ID NO: 2848454 - RNA, 21 nt, Human
gaauuacauguaaaacauuau

SEQ ID NO: 2848455 - RNA, 15 nt, Human
gaauuaauagcuuuu

SEQ ID NO: 2848456 - RNA, 21 nt, Human
gaauuaaucaucuauaaagaa

SEQ ID NO: 2848457 - RNA, 15 nt, Human
gaauuaaguuaucuu

SEQ ID NO: 2848458 - RNA, 20 nt, Human
gaauuaaguuaucuuuaaaa

SEQ ID NO: 2848459 - RNA, 13 nt, Human
gaauuaagaauau

SEQ ID NO: 2848460 - RNA, 17 nt, Human
gaauuaagauacaaauu

SEQ ID NO: 2848461 - RNA, 22 nt, Human
gaauuacauguaaaacauuauc

SEQ ID NO: 2848462 - RNA, 15 nt, Human
gaauuagauuauauu

SEQ ID NO: 2848463 - RNA, 16 nt, Human
gaauuacuuuuuucca

SEQ ID NO: 2848464 - RNA, 16 nt, Human
gaauuaguaaaguuag

SEQ ID NO: 2848465 - RNA, 16 nt, Human
gaauucaaacuggggc

SEQ ID NO: 2848466 - RNA, 18 nt, Human
gaauucaaacuggggccu

SEQ ID NO: 2848467 - RNA, 21 nt, Human
gaauucaaacuggggccucca

SEQ ID NO: 2848468 - RNA, 22 nt, Human
gaauucaaacuggggccuccag

SEQ ID NO: 2848469 - RNA, 23 nt, Human
gaauuuuugcuugacuucaguua

SEQ ID NO: 2848470 - RNA, 17 nt, Human
gaauuuuuuugucuuua

SEQ ID NO: 2848471 - RNA, 22 nt, Human
gaauuuuuuuuuccuagcccuc

SEQ ID NO: 2848472 - RNA, 21 nt, Human
gaauuuuuuuuguuguuucag

SEQ ID NO: 2848473 - RNA, 22 nt, Human
gaauuuuuuuuguuguuucagu

SEQ ID NO: 2848474 - RNA, 23 nt, Human
gaauuuuuuuuguuguuucagug

SEQ ID NO: 2848475 - RNA, 22 nt, Human
gacaaacaccucccaggagaca

SEQ ID NO: 2848476 - RNA, 17 nt, Human
gacaaacaccucccagg

SEQ ID NO: 2848477 - RNA, 19 nt, Human
gacaaacaccucccaggag

SEQ ID NO: 2848478 - RNA, 17 nt, Human
gacaaacuggagucugg

SEQ ID NO: 2848479 - RNA, 18 nt, Human
gacaaacuggagucugga

SEQ ID NO: 2848480 - RNA, 14 nt, Human
gacaaacuguaaaa

SEQ ID NO: 2848481 - RNA, 19 nt, Human
gacaaacuguaaaaaaugu

SEQ ID NO: 2848482 - RNA, 20 nt, Human
gacaaagccaaacucugcca

SEQ ID NO: 2848483 - RNA, 17 nt, Human
gacaaagauggcucaga

SEQ ID NO: 2848484 - RNA, 17 nt, Human
gacaaaggacauuuguu

SEQ ID NO: 2848485 - RNA, 20 nt, Human
gacacagcucuucuccaggc

SEQ ID NO: 2848486 - RNA, 19 nt, Human
gacacagcucuucuccagg

SEQ ID NO: 2848487 - RNA, 12 nt, Human
gacacagcucuu

SEQ ID NO: 2848488 - RNA, 15 nt, Human
gacacagaugaaaca

SEQ ID NO: 2848489 - RNA, 11 nt, Human
gacacagcagc

SEQ ID NO: 2848490 - RNA, 15 nt, Human
gacacagcagcuuca

SEQ ID NO: 2848491 - RNA, 18 nt, Human
gacacagcagcuucacca

SEQ ID NO: 2848492 - RNA, 19 nt, Human
gacacagcagcuucaccag

SEQ ID NO: 2848493 - RNA, 20 nt, Human
gacacagcagcuucaccaga

SEQ ID NO: 2848494 - RNA, 21 nt, Human
gacacagcagcuucaccagag

SEQ ID NO: 2848495 - RNA, 21 nt, Human
gacacagaaaauguugagaau

SEQ ID NO: 2848496 - RNA, 12 nt, Human
gacacagacuca

SEQ ID NO: 2848497 - RNA, 20 nt, Human
gacacagacucauccugaac

SEQ ID NO: 2848498 - RNA, 12 nt, Human
gacacagauaau

SEQ ID NO: 2848499 - RNA, 19 nt, Human
gacacagaaaauguugaga

SEQ ID NO: 2848500 - RNA, 15 nt, Human
gacaaaucaaagcag

SEQ ID NO: 2848501 - RNA, 13 nt, Human
gacaaaucaacag

SEQ ID NO: 2848502 - RNA, 17 nt, Human
gacaaaucaacagaagc

SEQ ID NO: 2848503 - RNA, 18 nt, Human
gacaaaucaacagaagca

SEQ ID NO: 2848504 - RNA, 19 nt, Human
gacaaaucaacagaagcau

SEQ ID NO: 2848505 - RNA, 19 nt, Human
gacaaaguggaggagggcc

SEQ ID NO: 2848506 - RNA, 23 nt, Human
gacaaaguuacugauucacugca

SEQ ID NO: 2848507 - RNA, 18 nt, Human
gacaaagguuuuccucuu

SEQ ID NO: 2848508 - RNA, 21 nt, Human
gacacagcucuucuccaggcu

SEQ ID NO: 2848509 - RNA, 22 nt, Human
gacacagcagcuucaccagagc

SEQ ID NO: 2848510 - RNA, 23 nt, Human
gacacagcagcuucaccagagca

SEQ ID NO: 2848511 - RNA, 13 nt, Human
gacacagcguccc

SEQ ID NO: 2848512 - RNA, 21 nt, Human
gacacagcgucccuagcagug

SEQ ID NO: 2848513 - RNA, 22 nt, Human
gacacagcgucccuagcaguga

SEQ ID NO: 2848514 - RNA, 19 nt, Human
gacagcuccuucuguccua

SEQ ID NO: 2848515 - RNA, 20 nt, Human
gacagccccagagcagggug

SEQ ID NO: 2848516 - RNA, 18 nt, Human
gacagccccagagcaggg

SEQ ID NO: 2848517 - RNA, 19 nt, Human
gacagccccagagcagggu

SEQ ID NO: 2848518 - RNA, 15 nt, Human
gacaguccagccugg

SEQ ID NO: 2848519 - RNA, 16 nt, Human
gacaguccagccugga

SEQ ID NO: 2848520 - RNA, 16 nt, Human
gacagcucuuuuugug

SEQ ID NO: 2848521 - RNA, 20 nt, Human
gacagcucuuuuugugaagu

SEQ ID NO: 2848522 - RNA, 17 nt, Human
gacagcugauacuucau

SEQ ID NO: 2848523 - RNA, 22 nt, Human
gacagucacugccacuuugcac

SEQ ID NO: 2848524 - RNA, 23 nt, Human
gacagucacugccacuuugcaca

SEQ ID NO: 2848525 - RNA, 17 nt, Human
gacagucaucaucaggg

SEQ ID NO: 2848526 - RNA, 18 nt, Human
gacagucaucaucagggc

SEQ ID NO: 2848527 - RNA, 19 nt, Human
gacagucaucaucagggcc

SEQ ID NO: 2848528 - RNA, 20 nt, Human
gacagucaucaucagggccu

SEQ ID NO: 2848529 - RNA, 21 nt, Human
gacagucaucaucagggccug

SEQ ID NO: 2848530 - RNA, 22 nt, Human
gacagucaucaucagggccugg

SEQ ID NO: 2848531 - RNA, 23 nt, Human
gacagucaucaucagggccuggg

SEQ ID NO: 2848532 - RNA, 17 nt, Human
gacauguuuuccgugaa

SEQ ID NO: 2848533 - RNA, 15 nt, Human
gacauguuguaaauu

SEQ ID NO: 2848534 - RNA, 15 nt, Human
gacauguuauauauu

SEQ ID NO: 2848535 - RNA, 18 nt, Human
gacauguuauauauuuuu

SEQ ID NO: 2848536 - RNA, 17 nt, Human
gacaguccagccuggag

SEQ ID NO: 2848537 - RNA, 19 nt, Human
gacaguccagccuggagau

SEQ ID NO: 2848538 - RNA, 23 nt, Human
gacaugugaaaccuuuuuuaaga

SEQ ID NO: 2848539 - RNA, 13 nt, Human
gacacuggccccu

SEQ ID NO: 2848540 - RNA, 14 nt, Human
gacacuggccccuc

SEQ ID NO: 2848541 - RNA, 19 nt, Human
gacacugguauuccugccu

SEQ ID NO: 2848542 - RNA, 20 nt, Human
gacacugguauuccugccuc

SEQ ID NO: 2848543 - RNA, 15 nt, Human
gacacuggccccuca

SEQ ID NO: 2848544 - RNA, 14 nt, Human
gacagccccagagc

SEQ ID NO: 2848545 - RNA, 16 nt, Human
gacagccccagagcag

SEQ ID NO: 2848546 - RNA, 17 nt, Human
gacagccccagagcagg

SEQ ID NO: 2848547 - RNA, 18 nt, Human
gacagcuccuucuguccu

SEQ ID NO: 2848548 - RNA, 17 nt, Human
gacagcuccuucugucc

SEQ ID NO: 2848549 - RNA, 16 nt, Human
gacagcuccuucuguc

SEQ ID NO: 2848550 - RNA, 23 nt, Human
gacauugcggacagccacggcca

SEQ ID NO: 2848551 - RNA, 17 nt, Human
gacauugcggacagcca

SEQ ID NO: 2848552 - RNA, 21 nt, Human
gacauugcguuugaccuuuua

SEQ ID NO: 2848553 - RNA, 14 nt, Human
gacauugcguuuga

SEQ ID NO: 2848554 - RNA, 14 nt, Human
gacauguuuuuguu

SEQ ID NO: 2848555 - RNA, 21 nt, Human
gacauugggucuauuccagcu

SEQ ID NO: 2848556 - RNA, 23 nt, Human
gacauugggucuauuccagcuca

SEQ ID NO: 2848557 - RNA, 14 nt, Human
gacauuuuaacaag

SEQ ID NO: 2848558 - RNA, 15 nt, Human
gacauuuuaacaaga

SEQ ID NO: 2848559 - RNA, 16 nt, Human
gacauuuuaacaagaa

SEQ ID NO: 2848560 - RNA, 19 nt, Human
gacauuuuaacaagaagau

SEQ ID NO: 2848561 - RNA, 20 nt, Human
gacauuuuaacaagaagaug

SEQ ID NO: 2848562 - RNA, 22 nt, Human
gacauuuuaacaagaagaugaa

SEQ ID NO: 2848563 - RNA, 13 nt, Human
gacauuggagaug

SEQ ID NO: 2848564 - RNA, 20 nt, Human
gacauuuucuuucaugggca

SEQ ID NO: 2848565 - RNA, 21 nt, Human
gacauuuuacauuaaauuuuu

SEQ ID NO: 2848566 - RNA, 15 nt, Human
gacauuuuacauuaa

SEQ ID NO: 2848567 - RNA, 14 nt, Human
gacauuuuacauua

SEQ ID NO: 2848568 - RNA, 13 nt, Human
gacauuuuacauu

SEQ ID NO: 2848569 - RNA, 19 nt, Human
gaccuccucccuguuauuu

SEQ ID NO: 2848570 - RNA, 20 nt, Human
gaccuccucuucccccuucc

SEQ ID NO: 2848571 - RNA, 13 nt, Human
gaccuccccagcc

SEQ ID NO: 2848572 - RNA, 14 nt, Human
gaccuccccagccc

SEQ ID NO: 2848573 - RNA, 16 nt, Human
gaccuccccagccccu

SEQ ID NO: 2848574 - RNA, 12 nt, Human
gaccuccugccu

SEQ ID NO: 2848575 - RNA, 14 nt, Human
gaccuccugccucc

SEQ ID NO: 2848576 - RNA, 14 nt, Human
gaccucauccaaac

SEQ ID NO: 2848577 - RNA, 12 nt, Human
gaccucccuucc

SEQ ID NO: 2848578 - RNA, 14 nt, Human
gaccucccuuccga

SEQ ID NO: 2848579 - RNA, 19 nt, Human
gaccucccuuccgacccuc

SEQ ID NO: 2848580 - RNA, 20 nt, Human
gaccucccuuccgacccucu

SEQ ID NO: 2848581 - RNA, 21 nt, Human
gaccucccuuccgacccucug

SEQ ID NO: 2848582 - RNA, 22 nt, Human
gaccucccuuccgacccucugg

SEQ ID NO: 2848583 - RNA, 23 nt, Human
gaccucccuuccgacccucuggg

SEQ ID NO: 2848584 - RNA, 13 nt, Human
gaccucugccuga

SEQ ID NO: 2848585 - RNA, 19 nt, Human
gaccucaggugauccgccc

SEQ ID NO: 2848586 - RNA, 12 nt, Human
gacgccacccag

SEQ ID NO: 2848587 - RNA, 11 nt, Human
gacgcccaccc

SEQ ID NO: 2848588 - RNA, 15 nt, Human
gacgcccucucccca

SEQ ID NO: 2848589 - RNA, 18 nt, Human
gacgcccucuccccaccc

SEQ ID NO: 2848590 - RNA, 23 nt, Human
gacgcccucuccccaccccuacc

SEQ ID NO: 2848591 - RNA, 21 nt, Human
gacgccggggacagaggccug

SEQ ID NO: 2848592 - RNA, 17 nt, Human
gacgccugagcucacuc

SEQ ID NO: 2848593 - RNA, 22 nt, Human
gacgccggggacagaggccugc

SEQ ID NO: 2848594 - RNA, 13 nt, Human
gacgccugagcuc

SEQ ID NO: 2848595 - RNA, 13 nt, Human
gacgccacccagc

SEQ ID NO: 2848596 - RNA, 14 nt, Human
gacgccacccagca

SEQ ID NO: 2848597 - RNA, 20 nt, Human
gacccggaggggccuggcag

SEQ ID NO: 2848598 - RNA, 18 nt, Human
gacccggaggggccuggc

SEQ ID NO: 2848599 - RNA, 19 nt, Human
gacccggaggggccuggca

SEQ ID NO: 2848600 - RNA, 16 nt, Human
gaccccugagcuugca

SEQ ID NO: 2848601 - RNA, 17 nt, Human
gaccccuccucacuggc

SEQ ID NO: 2848602 - RNA, 19 nt, Human
gaccccuccucacuggcca

SEQ ID NO: 2848603 - RNA, 23 nt, Human
gaccccuccucacuggccauccc

SEQ ID NO: 2848604 - RNA, 11 nt, Human
gaccccuccug

SEQ ID NO: 2848605 - RNA, 12 nt, Human
gaccccuccugg

SEQ ID NO: 2848606 - RNA, 13 nt, Human
gaccccuccuggg

SEQ ID NO: 2848607 - RNA, 14 nt, Human
gaccccuccugggg

SEQ ID NO: 2848608 - RNA, 16 nt, Human
gaccccuccuggggcc

SEQ ID NO: 2848609 - RNA, 17 nt, Human
gaccccuccuggggcca

SEQ ID NO: 2848610 - RNA, 19 nt, Human
gaccccuccuggggccagg

SEQ ID NO: 2848611 - RNA, 20 nt, Human
gaccccuccuggggccaggc

SEQ ID NO: 2848612 - RNA, 22 nt, Human
gaccccuccuggggccaggccg

SEQ ID NO: 2848613 - RNA, 23 nt, Human
gaccccuccuggggccaggccgg

SEQ ID NO: 2848614 - RNA, 17 nt, Human
gacccggaggggccugg

SEQ ID NO: 2848615 - RNA, 12 nt, Human
gaccccuccuca

SEQ ID NO: 2848616 - RNA, 13 nt, Human
gaccccuccucac

SEQ ID NO: 2848617 - RNA, 14 nt, Human
gaccccuccucacu

SEQ ID NO: 2848618 - RNA, 15 nt, Human
gaccccuccucacug

SEQ ID NO: 2848619 - RNA, 14 nt, Human
gacccucugccacc

SEQ ID NO: 2848620 - RNA, 20 nt, Human
gacccucugacccuagcucu

SEQ ID NO: 2848621 - RNA, 21 nt, Human
gacccugaaaagaaggacggg

SEQ ID NO: 2848622 - RNA, 15 nt, Human
gacccucugccacca

SEQ ID NO: 2848623 - RNA, 16 nt, Human
gacccucugccaccag

SEQ ID NO: 2848624 - RNA, 20 nt, Human
gacccucugccaccagagac

SEQ ID NO: 2848625 - RNA, 11 nt, Human
gacccucugcu

SEQ ID NO: 2848626 - RNA, 16 nt, Human
gacccucugcugaaga

SEQ ID NO: 2848627 - RNA, 17 nt, Human
gacccucugcugaagac

SEQ ID NO: 2848628 - RNA, 13 nt, Human
gacccucugggaa

SEQ ID NO: 2848629 - RNA, 14 nt, Human
gacccucugggaac

SEQ ID NO: 2848630 - RNA, 20 nt, Human
gacccucugggaaccuccca

SEQ ID NO: 2848631 - RNA, 21 nt, Human
gacccucugggaaccucccag

SEQ ID NO: 2848632 - RNA, 22 nt, Human
gacccucugggaaccucccaga

SEQ ID NO: 2848633 - RNA, 23 nt, Human
gacccucugggaaccucccagag

SEQ ID NO: 2848634 - RNA, 23 nt, Human
gaccucagguaaucgaccugccu

SEQ ID NO: 2848635 - RNA, 22 nt, Human
gaccucagguaaucgaccugcc

SEQ ID NO: 2848636 - RNA, 21 nt, Human
gaccucaggugauccacccac

SEQ ID NO: 2848637 - RNA, 20 nt, Human
gaccucaggugauccaccca

SEQ ID NO: 2848638 - RNA, 19 nt, Human
gaccucaggugauccaccc

SEQ ID NO: 2848639 - RNA, 12 nt, Human
cuggucucuggu

SEQ ID NO: 2848640 - RNA, 20 nt, Human
cuggucucuaggcuggggaa

SEQ ID NO: 2848641 - RNA, 14 nt, Human
cuggucucuaggcu

SEQ ID NO: 2848642 - RNA, 16 nt, Human
cuggucucuaggcugg

SEQ ID NO: 2848643 - RNA, 17 nt, Human
cuggucucuaggcuggg

SEQ ID NO: 2848644 - RNA, 18 nt, Human
cuggucucuaggcugggg

SEQ ID NO: 2848645 - RNA, 21 nt, Human
cuggucucgaacuccugaccu

SEQ ID NO: 2848646 - RNA, 15 nt, Human
cuguaacacagcuga

SEQ ID NO: 2848647 - RNA, 21 nt, Human
cuguaacacagcugagagacu

SEQ ID NO: 2848648 - RNA, 21 nt, Human
cuguaagacucauucccuaga

SEQ ID NO: 2848649 - RNA, 12 nt, Human
cuguaagacauu

SEQ ID NO: 2848650 - RNA, 16 nt, Human
cuguaagacauuagua

SEQ ID NO: 2848651 - RNA, 15 nt, Human
cuguaagaugucugu

SEQ ID NO: 2848652 - RNA, 16 nt, Human
cuguaagaugucuguu

SEQ ID NO: 2848653 - RNA, 18 nt, Human
cuguaagaugucuguuug

SEQ ID NO: 2848654 - RNA, 21 nt, Human
cuguaagaugucuguuugcug

SEQ ID NO: 2848655 - RNA, 22 nt, Human
cuguaagaugucuguuugcuga

SEQ ID NO: 2848656 - RNA, 14 nt, Human
cuguaagccaaaga

SEQ ID NO: 2848657 - RNA, 15 nt, Human
cuguaagccaaagaa

SEQ ID NO: 2848658 - RNA, 19 nt, Human
cuguaagccaaagaaauga

SEQ ID NO: 2848659 - RNA, 21 nt, Human
cuguaagccaaagaaaugaac

SEQ ID NO: 2848660 - RNA, 22 nt, Human
cuguaagccaaagaaaugaaca

SEQ ID NO: 2848661 - RNA, 23 nt, Human
cuguaagccaaagaaaugaacau

SEQ ID NO: 2848662 - RNA, 13 nt, Human
cuguaagccugca

SEQ ID NO: 2848663 - RNA, 16 nt, Human
cuguaagccugcaagc

SEQ ID NO: 2848664 - RNA, 17 nt, Human
cuguaagccugcaagcc

SEQ ID NO: 2848665 - RNA, 18 nt, Human
cuguaagccugcaagccu

SEQ ID NO: 2848666 - RNA, 13 nt, Human
cuguaagcuccuu

SEQ ID NO: 2848667 - RNA, 14 nt, Human
cuguaaauauguuu

SEQ ID NO: 2848668 - RNA, 12 nt, Human
cuguaaauacca

SEQ ID NO: 2848669 - RNA, 13 nt, Human
cuguaaauaccau

SEQ ID NO: 2848670 - RNA, 15 nt, Human
cuguaaauaccauug

SEQ ID NO: 2848671 - RNA, 16 nt, Human
cuguaaauaccauuga

SEQ ID NO: 2848672 - RNA, 16 nt, Human
cuguaaagcgcagaua

SEQ ID NO: 2848673 - RNA, 15 nt, Human
cuguaaagugccuua

SEQ ID NO: 2848674 - RNA, 19 nt, Human
cuguaaaaacacugaaaaa

SEQ ID NO: 2848675 - RNA, 20 nt, Human
cuguaaaaacacugaaaaau

SEQ ID NO: 2848676 - RNA, 22 nt, Human
cuguaaaaacacugaaaaauua

SEQ ID NO: 2848677 - RNA, 22 nt, Human
cuguacuugaagucuaaaagca

SEQ ID NO: 2848678 - RNA, 13 nt, Human
cuguagaugaugu

SEQ ID NO: 2848679 - RNA, 16 nt, Human
cuguagaugauguauu

SEQ ID NO: 2848680 - RNA, 18 nt, Human
cuguagauggaaaaacuu

SEQ ID NO: 2848681 - RNA, 13 nt, Human
cuguagauucugu

SEQ ID NO: 2848682 - RNA, 15 nt, Human
cuguagauucugugg

SEQ ID NO: 2848683 - RNA, 20 nt, Human
cuguagauucuguggaacaa

SEQ ID NO: 2848684 - RNA, 20 nt, Human
cuguagcagugagaaaaagc

SEQ ID NO: 2848685 - RNA, 21 nt, Human
cuguagcagugagaaaaagcu

SEQ ID NO: 2848686 - RNA, 17 nt, Human
cuguacuugaugacaga

SEQ ID NO: 2848687 - RNA, 13 nt, Human
cugguuuuaacaa

SEQ ID NO: 2848688 - RNA, 13 nt, Human
cugucggaggaaa

SEQ ID NO: 2848689 - RNA, 15 nt, Human
cugucggaggaaaga

SEQ ID NO: 2848690 - RNA, 17 nt, Human
cugucggaggaaagaca

SEQ ID NO: 2848691 - RNA, 15 nt, Human
cugucgggcuuugug

SEQ ID NO: 2848692 - RNA, 19 nt, Human
cugucgggcuuugugugaa

SEQ ID NO: 2848693 - RNA, 15 nt, Human
cugucgugauggggc

SEQ ID NO: 2848694 - RNA, 21 nt, Human
cugucgugauggggcaagggc

SEQ ID NO: 2848695 - RNA, 13 nt, Human
cugucuaaaaaac

SEQ ID NO: 2848696 - RNA, 16 nt, Human
cugucuaaaaaccaga

SEQ ID NO: 2848697 - RNA, 13 nt, Human
cugucuacaaaua

SEQ ID NO: 2848698 - RNA, 13 nt, Human
cugucuaacuuua

SEQ ID NO: 2848699 - RNA, 12 nt, Human
cuguccugugac

SEQ ID NO: 2848700 - RNA, 14 nt, Human
cuguccugugaggu

SEQ ID NO: 2848701 - RNA, 16 nt, Human
cuguccugugagguuu

SEQ ID NO: 2848702 - RNA, 20 nt, Human
cuguccugugagguuuccca

SEQ ID NO: 2848703 - RNA, 21 nt, Human
cuguccugugagguuucccaa

SEQ ID NO: 2848704 - RNA, 22 nt, Human
cuguccugugagguuucccaau

SEQ ID NO: 2848705 - RNA, 13 nt, Human
cuguccuugcccu

SEQ ID NO: 2848706 - RNA, 19 nt, Human
cuguccuugaaugccauag

SEQ ID NO: 2848707 - RNA, 16 nt, Human
cuguagcccacucugc

SEQ ID NO: 2848708 - RNA, 21 nt, Human
cuguagcccacucugcucgcc

SEQ ID NO: 2848709 - RNA, 20 nt, Human
cuguagcccacucugcucgc

SEQ ID NO: 2848710 - RNA, 15 nt, Human
cuguagccagcaccu

SEQ ID NO: 2848711 - RNA, 18 nt, Human
cuguagcuuguucccugu

SEQ ID NO: 2848712 - RNA, 14 nt, Human
cugucauuugagca

SEQ ID NO: 2848713 - RNA, 14 nt, Human
cugucaugcuucau

SEQ ID NO: 2848714 - RNA, 14 nt, Human
cugucauucaaaug

SEQ ID NO: 2848715 - RNA, 17 nt, Human
cugucauucaaaugggu

SEQ ID NO: 2848716 - RNA, 19 nt, Human
cugucauucaaauggguga

SEQ ID NO: 2848717 - RNA, 14 nt, Human
cugucaucuuucuu

SEQ ID NO: 2848718 - RNA, 18 nt, Human
cugucaugaaaucagcaa

SEQ ID NO: 2848719 - RNA, 20 nt, Human
cugucaugaaaucagcaaga

SEQ ID NO: 2848720 - RNA, 21 nt, Human
cugucaugaaaucagcaagag

SEQ ID NO: 2848721 - RNA, 14 nt, Human
cuguccugggagug

SEQ ID NO: 2848722 - RNA, 13 nt, Human
cuguccugggagu

SEQ ID NO: 2848723 - RNA, 20 nt, Human
cuguccugggagugagcugg

SEQ ID NO: 2848724 - RNA, 13 nt, Human
cuguccugcuucu

SEQ ID NO: 2848725 - RNA, 14 nt, Human
cuguccugcuucug

SEQ ID NO: 2848726 - RNA, 15 nt, Human
cuguccugcuucuga

SEQ ID NO: 2848727 - RNA, 13 nt, Human
cugugacacacua

SEQ ID NO: 2848728 - RNA, 14 nt, Human
cugugacacacuac

SEQ ID NO: 2848729 - RNA, 17 nt, Human
cugugacacacuacacc

SEQ ID NO: 2848730 - RNA, 21 nt, Human
cugugacacacuacaccacac

SEQ ID NO: 2848731 - RNA, 22 nt, Human
cugugacacacuacaccacaca

SEQ ID NO: 2848732 - RNA, 15 nt, Human
cugugaacugaaauu

SEQ ID NO: 2848733 - RNA, 22 nt, Human
cugugaacugaaauuaaaacua

SEQ ID NO: 2848734 - RNA, 15 nt, Human
cugugagcaagaagu

SEQ ID NO: 2848735 - RNA, 23 nt, Human
cugugagcaaggagcacaagcca

SEQ ID NO: 2848736 - RNA, 22 nt, Human
cugugagauggcuggcugguga

SEQ ID NO: 2848737 - RNA, 15 nt, Human
cugugcucuggacag

SEQ ID NO: 2848738 - RNA, 17 nt, Human
cugugcucuggacaggc

SEQ ID NO: 2848739 - RNA, 23 nt, Human
cugugaaguuuacauuguaaaua

SEQ ID NO: 2848740 - RNA, 18 nt, Human
cugugaaguuuacauugu

SEQ ID NO: 2848741 - RNA, 16 nt, Human
cugugaacugaacucu

SEQ ID NO: 2848742 - RNA, 15 nt, Human
cugugaacugaacuc

SEQ ID NO: 2848743 - RNA, 13 nt, Human
cugugaacugaac

SEQ ID NO: 2848744 - RNA, 19 nt, Human
cuguuagcuuuuuaaaaca

SEQ ID NO: 2848745 - RNA, 21 nt, Human
cuguuagcuuuuuaaaacauu

SEQ ID NO: 2848746 - RNA, 13 nt, Human
cuguuagcacugu

SEQ ID NO: 2848747 - RNA, 14 nt, Human
cuguuagcacuguu

SEQ ID NO: 2848748 - RNA, 15 nt, Human
cuguuagcacuguug

SEQ ID NO: 2848749 - RNA, 16 nt, Human
cuguuagcacuguuga

SEQ ID NO: 2848750 - RNA, 17 nt, Human
cuguuagcacuguugau

SEQ ID NO: 2848751 - RNA, 18 nt, Human
cuguuagcacuguugaug

SEQ ID NO: 2848752 - RNA, 20 nt, Human
cuguuagcacuguugaugua

SEQ ID NO: 2848753 - RNA, 15 nt, Human
cugugucauaaacag

SEQ ID NO: 2848754 - RNA, 23 nt, Human
cugugucauaaacagaugaauaa

SEQ ID NO: 2848755 - RNA, 17 nt, Human
cuguguccaccuguggg

SEQ ID NO: 2848756 - RNA, 22 nt, Human
cugugucagguggggcagcuug

SEQ ID NO: 2848757 - RNA, 15 nt, Human
cuguguauggaaaaa

SEQ ID NO: 2848758 - RNA, 19 nt, Human
cuguguauggaaaaaccau

SEQ ID NO: 2848759 - RNA, 19 nt, Human
cugugcucuggacaggcau

SEQ ID NO: 2848760 - RNA, 18 nt, Human
cugugcucuggacaggca

SEQ ID NO: 2848761 - RNA, 12 nt, Human
cuguguauauua

SEQ ID NO: 2848762 - RNA, 13 nt, Human
cuguguauauuau

SEQ ID NO: 2848763 - RNA, 15 nt, Human
cuguguauauuauuu

SEQ ID NO: 2848764 - RNA, 17 nt, Human
cuguguauauuauuugg

SEQ ID NO: 2848765 - RNA, 18 nt, Human
cuguguauauuauuuggc

SEQ ID NO: 2848766 - RNA, 19 nt, Human
cuguguauauuauuuggca

SEQ ID NO: 2848767 - RNA, 20 nt, Human
cuguguauauuauuuggcag

SEQ ID NO: 2848768 - RNA, 16 nt, Human
cuguuauauccccugc

SEQ ID NO: 2848769 - RNA, 18 nt, Human
cuguuauauccccugcua

SEQ ID NO: 2848770 - RNA, 15 nt, Human
cuguucagcuccagc

SEQ ID NO: 2848771 - RNA, 13 nt, Human
cuguucacucuac

SEQ ID NO: 2848772 - RNA, 14 nt, Human
cuguucagcuccag

SEQ ID NO: 2848773 - RNA, 22 nt, Human
cuguucagcuccagcucaccag

SEQ ID NO: 2848774 - RNA, 19 nt, Human
cuguucagcuccagcucac

SEQ ID NO: 2848775 - RNA, 18 nt, Human
cuguucagcuccagcuca

SEQ ID NO: 2848776 - RNA, 16 nt, Human
cuguucagcuccagcu

SEQ ID NO: 2848777 - RNA, 18 nt, Human
cuguuacuguuaaccauu

SEQ ID NO: 2848778 - RNA, 17 nt, Human
cuuaaaauaaacaguug

SEQ ID NO: 2848779 - RNA, 20 nt, Human
cuuaaaauaaacaguuguga

SEQ ID NO: 2848780 - RNA, 21 nt, Human
cuuaaaauaaacaguugugaa

SEQ ID NO: 2848781 - RNA, 23 nt, Human
cuuaaaauaaacaguugugaacc

SEQ ID NO: 2848782 - RNA, 15 nt, Human
cuuaaacaccccuca

SEQ ID NO: 2848783 - RNA, 13 nt, Human
cuuaaaauagaaa

SEQ ID NO: 2848784 - RNA, 22 nt, Human
cuuaaaauagcaacacucuaua

SEQ ID NO: 2848785 - RNA, 22 nt, Human
cuuaaaauaggggauauuuaag

SEQ ID NO: 2848786 - RNA, 18 nt, Human
cuuaaaauagaaauaagu

SEQ ID NO: 2848787 - RNA, 14 nt, Human
cuuaaacuugugaa

SEQ ID NO: 2848788 - RNA, 15 nt, Human
cuuaaacuugugaau

SEQ ID NO: 2848789 - RNA, 13 nt, Human
cuuaaagaaacag

SEQ ID NO: 2848790 - RNA, 16 nt, Human
cuuaaagaaacagcuu

SEQ ID NO: 2848791 - RNA, 17 nt, Human
cuuaaagaaacagcuuu

SEQ ID NO: 2848792 - RNA, 22 nt, Human
cuuaaagaaacagcuuucaagu

SEQ ID NO: 2848793 - RNA, 23 nt, Human
cuuaaagaaacagcuuucaagug

SEQ ID NO: 2848794 - RNA, 12 nt, Human
cuuaaagaaagu

SEQ ID NO: 2848795 - RNA, 21 nt, Human
cuuaaagaaagucgaauuaau

SEQ ID NO: 2848796 - RNA, 15 nt, Human
cuguuggccagugug

SEQ ID NO: 2848797 - RNA, 14 nt, Human
cuguuggcagugag

SEQ ID NO: 2848798 - RNA, 21 nt, Human
cuguuggcagugagugagccu

SEQ ID NO: 2848799 - RNA, 22 nt, Human
cuguuggcagugagugagccug

SEQ ID NO: 2848800 - RNA, 13 nt, Human
cuguugugccaca

SEQ ID NO: 2848801 - RNA, 15 nt, Human
cuguugugccacaga

SEQ ID NO: 2848802 - RNA, 16 nt, Human
cuguugugccacagag

SEQ ID NO: 2848803 - RNA, 23 nt, Human
cuguugugccacagaguguagcc

SEQ ID NO: 2848804 - RNA, 12 nt, Human
cuguuggccagu

SEQ ID NO: 2848805 - RNA, 18 nt, Human
cuguugcccaggcuggcg

SEQ ID NO: 2848806 - RNA, 20 nt, Human
cuguugcccuuucuguacca

SEQ ID NO: 2848807 - RNA, 18 nt, Human
cuguugcccuuucuguac

SEQ ID NO: 2848808 - RNA, 22 nt, Human
cuguugccuuuuucauuuucca

SEQ ID NO: 2848809 - RNA, 21 nt, Human
cuguugcccuuucuguaccau

SEQ ID NO: 2848810 - RNA, 18 nt, Human
cuguugcgugacacucuc

SEQ ID NO: 2848811 - RNA, 23 nt, Human
cuguugcgugacacucuccuugc

SEQ ID NO: 2848812 - RNA, 15 nt, Human
cuggaaaaaaugagc

SEQ ID NO: 2848813 - RNA, 24 nt, Human
cugcuuccaauuuucuggaauaca

SEQ ID NO: 2848814 - RNA, 23 nt, Human
cugcuucagccucccgaguagcu

SEQ ID NO: 2848815 - RNA, 19 nt, Human
cugcuucaguguauggaaa

SEQ ID NO: 2848816 - RNA, 21 nt, Human
cugcuucaguguauggaaaua

SEQ ID NO: 2848817 - RNA, 12 nt, Human
cugcuucagugg

SEQ ID NO: 2848818 - RNA, 22 nt, Human
cuggacuccucuguccaggcac

SEQ ID NO: 2848819 - RNA, 23 nt, Human
cuggacuccucuguccaggcacu

SEQ ID NO: 2848820 - RNA, 14 nt, Human
cuggacucuaaaga

SEQ ID NO: 2848821 - RNA, 18 nt, Human
cuggacucuaaagaccaa

SEQ ID NO: 2848822 - RNA, 19 nt, Human
cuggacucuaaagaccaaa

SEQ ID NO: 2848823 - RNA, 21 nt, Human
cuggacucuaaagaccaaacu

SEQ ID NO: 2848824 - RNA, 20 nt, Human
cuggacuccucuguccaggc

SEQ ID NO: 2848825 - RNA, 23 nt, Human
cuggaaaggcucagucucaggag

SEQ ID NO: 2848826 - RNA, 22 nt, Human
cuggaaaggcucagucucagga

SEQ ID NO: 2848827 - RNA, 21 nt, Human
cuggaaaggcucagucucagg

SEQ ID NO: 2848828 - RNA, 20 nt, Human
cuggaaaggcucagucucag

SEQ ID NO: 2848829 - RNA, 17 nt, Human
cuggaaaggcucagucu

SEQ ID NO: 2848830 - RNA, 15 nt, Human
cuggaaaggcucagu

SEQ ID NO: 2848831 - RNA, 14 nt, Human
cuggaaaggcucag

SEQ ID NO: 2848832 - RNA, 13 nt, Human
cuggaaaggcuca

SEQ ID NO: 2848833 - RNA, 19 nt, Human
cuggaaagcccccccuuau

SEQ ID NO: 2848834 - RNA, 14 nt, Human
cuggagaacuagag

SEQ ID NO: 2848835 - RNA, 15 nt, Human
cuggagaacuagaga

SEQ ID NO: 2848836 - RNA, 18 nt, Human
cuggaguggcucgccagg

SEQ ID NO: 2848837 - RNA, 20 nt, Human
cuggaguggcucgccaggcc

SEQ ID NO: 2848838 - RNA, 21 nt, Human
cuggaguggcucgccaggcca

SEQ ID NO: 2848839 - RNA, 13 nt, Human
cuggagugggcag

SEQ ID NO: 2848840 - RNA, 16 nt, Human
cuggagugggcagagc

SEQ ID NO: 2848841 - RNA, 19 nt, Human
cuggagaagacccuccccg

SEQ ID NO: 2848842 - RNA, 12 nt, Human
cuggagaagaga

SEQ ID NO: 2848843 - RNA, 14 nt, Human
cuggagaagagagg

SEQ ID NO: 2848844 - RNA, 17 nt, Human
cuggauccaucaggcca

SEQ ID NO: 2848845 - RNA, 18 nt, Human
cuggaguguggcugagga

SEQ ID NO: 2848846 - RNA, 19 nt, Human
cuggaguguggcugaggag

SEQ ID NO: 2848847 - RNA, 20 nt, Human
cuggaguguggcugaggagg

SEQ ID NO: 2848848 - RNA, 21 nt, Human
cuggaguguggcugaggaggc

SEQ ID NO: 2848849 - RNA, 22 nt, Human
cuggaguguggcugaggaggcc

SEQ ID NO: 2848850 - RNA, 19 nt, Human
cuggauccaucaggccacu

SEQ ID NO: 2848851 - RNA, 18 nt, Human
cuggauccccucugucua

SEQ ID NO: 2848852 - RNA, 23 nt, Human
cuggauccccucugucuacaaau

SEQ ID NO: 2848853 - RNA, 20 nt, Human
cuggaucuccauucucucag

SEQ ID NO: 2848854 - RNA, 13 nt, Human
cuggcagccgugc

SEQ ID NO: 2848855 - RNA, 15 nt, Human
cuggcucuguggcuu

SEQ ID NO: 2848856 - RNA, 14 nt, Human
cuggcucuguggcu

SEQ ID NO: 2848857 - RNA, 18 nt, Human
cuggcucuguggcuugcu

SEQ ID NO: 2848858 - RNA, 17 nt, Human
cugggacuacaggugug

SEQ ID NO: 2848859 - RNA, 21 nt, Human
cugggacuacaggcacccacc

SEQ ID NO: 2848860 - RNA, 17 nt, Human
cugggacuacaggcacc

SEQ ID NO: 2848861 - RNA, 15 nt, Human
cuggcagauucaaau

SEQ ID NO: 2848862 - RNA, 12 nt, Human
cuggcucccucu

SEQ ID NO: 2848863 - RNA, 17 nt, Human
cuggcagccgugccuuc

SEQ ID NO: 2848864 - RNA, 18 nt, Human
cuggcagccgugccuuca

SEQ ID NO: 2848865 - RNA, 22 nt, Human
cuggccgcguuuagaccaagga

SEQ ID NO: 2848866 - RNA, 13 nt, Human
cuggccgcccccu

SEQ ID NO: 2848867 - RNA, 14 nt, Human
cuggccgcccccug

SEQ ID NO: 2848868 - RNA, 22 nt, Human
cuggccgcccccugccccccag

SEQ ID NO: 2848869 - RNA, 19 nt, Human
cuggcccucgacacucacc

SEQ ID NO: 2848870 - RNA, 22 nt, Human
cuggcucccacaggcccuuccu

SEQ ID NO: 2848871 - RNA, 19 nt, Human
cuggcucccacaggcccuu

SEQ ID NO: 2848872 - RNA, 18 nt, Human
cuggcucccacaggcccu

SEQ ID NO: 2848873 - RNA, 13 nt, Human
cuggccggccagc

SEQ ID NO: 2848874 - RNA, 14 nt, Human
cuggccggccagcc

SEQ ID NO: 2848875 - RNA, 15 nt, Human
cuggccggccagcca

SEQ ID NO: 2848876 - RNA, 21 nt, Human
cuggccggccagccagccacu

SEQ ID NO: 2848877 - RNA, 22 nt, Human
cuggccggccagccagccacuc

SEQ ID NO: 2848878 - RNA, 23 nt, Human
cuggccggccagccagccacucu

SEQ ID NO: 2848879 - RNA, 24 nt, Human
cugccuccucuucaacugaccagc

SEQ ID NO: 2848880 - RNA, 13 nt, Human
cugccuccugccu

SEQ ID NO: 2848881 - RNA, 12 nt, Human
cugccuccugcc

SEQ ID NO: 2848882 - RNA, 19 nt, Human
cugccuccugccugccccu

SEQ ID NO: 2848883 - RNA, 15 nt, Human
cugccuccuggguuc

SEQ ID NO: 2848884 - RNA, 15 nt, Human
cugccuccugccugc

SEQ ID NO: 2848885 - RNA, 16 nt, Human
cugccuccugccugcc

SEQ ID NO: 2848886 - RNA, 17 nt, Human
cugccuccugccugccc

SEQ ID NO: 2848887 - RNA, 14 nt, Human
cugccucgaacugg

SEQ ID NO: 2848888 - RNA, 20 nt, Human
cugccucgaacuggcugcaa

SEQ ID NO: 2848889 - RNA, 19 nt, Human
cugccucgaacuggcugca

SEQ ID NO: 2848890 - RNA, 18 nt, Human
cugccucgaaacacagaa

SEQ ID NO: 2848891 - RNA, 15 nt, Human
cugccucgaaacaca

SEQ ID NO: 2848892 - RNA, 13 nt, Human
cugccucucacac

SEQ ID NO: 2848893 - RNA, 16 nt, Human
cugccucucacacaca

SEQ ID NO: 2848894 - RNA, 21 nt, Human
cugccucucacacacauagau

SEQ ID NO: 2848895 - RNA, 19 nt, Human
cugccucgaaacacagaaa

SEQ ID NO: 2848896 - RNA, 21 nt, Human
cugccuguaguuaggaaauaa

SEQ ID NO: 2848897 - RNA, 20 nt, Human
cugccuguaguuaggaaaua

SEQ ID NO: 2848898 - RNA, 19 nt, Human
cugccuguaguuaggaaau

SEQ ID NO: 2848899 - RNA, 18 nt, Human
cugccuguaguuaggaaa

SEQ ID NO: 2848900 - RNA, 16 nt, Human
cugccuguaguuagga

SEQ ID NO: 2848901 - RNA, 17 nt, Human
cugccuguaguuaggaa

SEQ ID NO: 2848902 - RNA, 22 nt, Human
cugccuguaguuaggaaauaaa

SEQ ID NO: 2848903 - RNA, 13 nt, Human
cugccuguauacu

SEQ ID NO: 2848904 - RNA, 17 nt, Human
cugccuguauacuuuag

SEQ ID NO: 2848905 - RNA, 19 nt, Human
cugccuguauacuuuagua

SEQ ID NO: 2848906 - RNA, 20 nt, Human
cugccuguauacuuuaguau

SEQ ID NO: 2848907 - RNA, 16 nt, Human
cugcuagcaaauggca

SEQ ID NO: 2848908 - RNA, 12 nt, Human
cugcuagaacuu

SEQ ID NO: 2848909 - RNA, 13 nt, Human
cugcuagaacuuu

SEQ ID NO: 2848910 - RNA, 14 nt, Human
cugcuagaacuuuu

SEQ ID NO: 2848911 - RNA, 15 nt, Human
cugcuagaacuuuuu

SEQ ID NO: 2848912 - RNA, 17 nt, Human
cugcuagaacuuuuuua

SEQ ID NO: 2848913 - RNA, 20 nt, Human
cugcuagaacuuuuuuaaau

SEQ ID NO: 2848914 - RNA, 21 nt, Human
cugcuagaacuuuuuuaaaua

SEQ ID NO: 2848915 - RNA, 22 nt, Human
cugcuagaacuuuuuuaaauaa

SEQ ID NO: 2848916 - RNA, 23 nt, Human
cugcuagaacuuuuuuaaauaaa

SEQ ID NO: 2848917 - RNA, 21 nt, Human
cugccuguugcgugacacucu

SEQ ID NO: 2848918 - RNA, 23 nt, Human
cugccuguugcgugacacucucc

SEQ ID NO: 2848919 - RNA, 19 nt, Human
cugccuguucccauucuug

SEQ ID NO: 2848920 - RNA, 15 nt, Human
cugccuguucccauu

SEQ ID NO: 2848921 - RNA, 23 nt, Human
cugccuguucagcuccagcucac

SEQ ID NO: 2848922 - RNA, 20 nt, Human
cugccuguucagcuccagcu

SEQ ID NO: 2848923 - RNA, 17 nt, Human
cugcuauuuauuuuccu

SEQ ID NO: 2848924 - RNA, 16 nt, Human
cugcuauccugccaaa

SEQ ID NO: 2848925 - RNA, 21 nt, Human
cugcuauuuauuuuccuaaag

SEQ ID NO: 2848926 - RNA, 20 nt, Human
cugcuauuuauuuuccuaaa

SEQ ID NO: 2848927 - RNA, 19 nt, Human
cugcuauuuauuuuccuaa

SEQ ID NO: 2848928 - RNA, 23 nt, Human
cugcccuggugcugccacacuuc

SEQ ID NO: 2848929 - RNA, 17 nt, Human
cugcccugguuuccugc

SEQ ID NO: 2848930 - RNA, 19 nt, Human
cugcccugguuuccugccc

SEQ ID NO: 2848931 - RNA, 18 nt, Human
cugcccugguuuccugcc

SEQ ID NO: 2848932 - RNA, 15 nt, Human
cugcccugguccagg

SEQ ID NO: 2848933 - RNA, 14 nt, Human
cugcccugguccag

SEQ ID NO: 2848934 - RNA, 21 nt, Human
cugcccugguccagggaagcu

SEQ ID NO: 2848935 - RNA, 20 nt, Human
cugcccugguccagggaagc

SEQ ID NO: 2848936 - RNA, 12 nt, Human
cugcccuggugc

SEQ ID NO: 2848937 - RNA, 13 nt, Human
cugcccuggugcu

SEQ ID NO: 2848938 - RNA, 14 nt, Human
cugcccuggugcug

SEQ ID NO: 2848939 - RNA, 23 nt, Human
cugcccugguccagggaagcugg

SEQ ID NO: 2848940 - RNA, 15 nt, Human
cugcccuggugcugc

SEQ ID NO: 2848941 - RNA, 22 nt, Human
cugcccccugguggacaguccu

SEQ ID NO: 2848942 - RNA, 14 nt, Human
cugcccccuggugg

SEQ ID NO: 2848943 - RNA, 13 nt, Human
cugcccccuggug

SEQ ID NO: 2848944 - RNA, 12 nt, Human
cugcccccuggu

SEQ ID NO: 2848945 - RNA, 15 nt, Human
cugcccccugcuggc

SEQ ID NO: 2848946 - RNA, 17 nt, Human
cugcccccugcuggcuc

SEQ ID NO: 2848947 - RNA, 19 nt, Human
cugcccccugcuggcucuu

SEQ ID NO: 2848948 - RNA, 19 nt, Human
cugcccccucugcccugcg

SEQ ID NO: 2848949 - RNA, 14 nt, Human
cugcccccugcugg

SEQ ID NO: 2848950 - RNA, 20 nt, Human
cugcccugguuuccugcccu

SEQ ID NO: 2848951 - RNA, 11 nt, Human
cugcccugugg

SEQ ID NO: 2848952 - RNA, 21 nt, Human
cugcccuucaccccaguggcc

SEQ ID NO: 2848953 - RNA, 16 nt, Human
cugcccuucaccccag

SEQ ID NO: 2848954 - RNA, 17 nt, Human
cugcccuucaccccagu

SEQ ID NO: 2848955 - RNA, 15 nt, Human
cugcccuuaggccac

SEQ ID NO: 2848956 - RNA, 20 nt, Human
cugcccugugggaccccagg

SEQ ID NO: 2848957 - RNA, 21 nt, Human
cugcccugugggaccccaggc

SEQ ID NO: 2848958 - RNA, 22 nt, Human
cugcccugugggaccccaggcc

SEQ ID NO: 2848959 - RNA, 16 nt, Human
cuugguguuaaaacac

SEQ ID NO: 2848960 - RNA, 17 nt, Human
cuugguguuaaaacacu

SEQ ID NO: 2848961 - RNA, 21 nt, Human
cuugguguuaaaacacuucug

SEQ ID NO: 2848962 - RNA, 21 nt, Human
cuugguuauuuguuuaccacu

SEQ ID NO: 2848963 - RNA, 15 nt, Human
cuugucucauuuuaa

SEQ ID NO: 2848964 - RNA, 18 nt, Human
cuugucucauuuuaaugu

SEQ ID NO: 2848965 - RNA, 19 nt, Human
cuugucucauuuuaaugua

SEQ ID NO: 2848966 - RNA, 23 nt, Human
cuugucucauuuuaauguaaaga

SEQ ID NO: 2848967 - RNA, 14 nt, Human
cuugguuggcuggc

SEQ ID NO: 2848968 - RNA, 17 nt, Human
cuugguucccuugugug

SEQ ID NO: 2848969 - RNA, 20 nt, Human
cuugucuggcaaaagaaaaa

SEQ ID NO: 2848970 - RNA, 18 nt, Human
cuugucuccuacuccuga

SEQ ID NO: 2848971 - RNA, 19 nt, Human
cuugucuccuacuccugac

SEQ ID NO: 2848972 - RNA, 20 nt, Human
cuugucuccuacuccugacu

SEQ ID NO: 2848973 - RNA, 22 nt, Human
cuuucacauuguuugcugcuau

SEQ ID NO: 2848974 - RNA, 24 nt, Human
cuuucacauuguuugcugcuauug

SEQ ID NO: 2848975 - RNA, 15 nt, Human
cuuucaccccagggc

SEQ ID NO: 2848976 - RNA, 21 nt, Human
cuuucaccccagggccugagc

SEQ ID NO: 2848977 - RNA, 16 nt, Human
cuuucaccccagggcc

SEQ ID NO: 2848978 - RNA, 16 nt, Human
cuuucacaaccuucug

SEQ ID NO: 2848979 - RNA, 15 nt, Human
cuuucacagcuccuc

SEQ ID NO: 2848980 - RNA, 18 nt, Human
cuuucacagcuccuccca

SEQ ID NO: 2848981 - RNA, 13 nt, Human
cuuucacagcucc

SEQ ID NO: 2848982 - RNA, 14 nt, Human
cuuucacagcuccu

SEQ ID NO: 2848983 - RNA, 20 nt, Human
cuuuaaugucacaggcaggu

SEQ ID NO: 2848984 - RNA, 19 nt, Human
cuuuaaugucacaggcagg

SEQ ID NO: 2848985 - RNA, 18 nt, Human
cuuuaaugucacaggcag

SEQ ID NO: 2848986 - RNA, 17 nt, Human
cuuuaaugucacaggca

SEQ ID NO: 2848987 - RNA, 22 nt, Human
cuuuaaugucacaggcaggucc

SEQ ID NO: 2848988 - RNA, 19 nt, Human
cuuuaauggacuuauuucu

SEQ ID NO: 2848989 - RNA, 22 nt, Human
cuuuaauggacuuauuucuuca

SEQ ID NO: 2848990 - RNA, 17 nt, Human
cuugucuuuucaaaaua

SEQ ID NO: 2848991 - RNA, 18 nt, Human
cuugucuuuucaaaauau

SEQ ID NO: 2848992 - RNA, 15 nt, Human
cuuuaagagagaaau

SEQ ID NO: 2848993 - RNA, 17 nt, Human
cuuuaagagagaaaucu

SEQ ID NO: 2848994 - RNA, 11 nt, Human
cuuuaagaaaa

SEQ ID NO: 2848995 - RNA, 12 nt, Human
cuuuaagaaaaa

SEQ ID NO: 2848996 - RNA, 15 nt, Human
cuuuaagcagagaag

SEQ ID NO: 2848997 - RNA, 12 nt, Human
cuuuaaggaaaa

SEQ ID NO: 2848998 - RNA, 17 nt, Human
cuuuaagggcaugccuu

SEQ ID NO: 2848999 - RNA, 14 nt, Human
cuuggcccuuuccu

SEQ ID NO: 2849000 - RNA, 20 nt, Human
cuuggcccuuuccuuccaga

SEQ ID NO: 2849001 - RNA, 15 nt, Human
cuuggcccuuuccuu

SEQ ID NO: 2849002 - RNA, 19 nt, Human
cuuggccggcugugcucag

SEQ ID NO: 2849003 - RNA, 20 nt, Human
cuuggccggcugugcucaga

SEQ ID NO: 2849004 - RNA, 21 nt, Human
cuuggccggcugugcucagag

SEQ ID NO: 2849005 - RNA, 22 nt, Human
cuuggccggcugugcucagaga

SEQ ID NO: 2849006 - RNA, 15 nt, Human
cuugccuccguguca

SEQ ID NO: 2849007 - RNA, 21 nt, Human
cuugccgcgucgcccucccag

SEQ ID NO: 2849008 - RNA, 18 nt, Human
cuugccgcgucgcccucc

SEQ ID NO: 2849009 - RNA, 13 nt, Human
cuugccgaggagc

SEQ ID NO: 2849010 - RNA, 15 nt, Human
cuugccgaggagcca

SEQ ID NO: 2849011 - RNA, 17 nt, Human
cuugccgaggagccagg

SEQ ID NO: 2849012 - RNA, 18 nt, Human
cuugccgaggagccaggc

SEQ ID NO: 2849013 - RNA, 20 nt, Human
cuugccgaggagccaggcaa

SEQ ID NO: 2849014 - RNA, 23 nt, Human
cuugccgcgucgcccucccaggc

SEQ ID NO: 2849015 - RNA, 13 nt, Human
cuugauucugcag

SEQ ID NO: 2849016 - RNA, 20 nt, Human
cuugauucugcaguaaaucu

SEQ ID NO: 2849017 - RNA, 17 nt, Human
cuugauucugcaguaaa

SEQ ID NO: 2849018 - RNA, 23 nt, Human
cuugauuggggaauuaaaaguca

SEQ ID NO: 2849019 - RNA, 17 nt, Human
cuugcccuuucccccca

SEQ ID NO: 2849020 - RNA, 22 nt, Human
cuugcccuuuccccccauguug

SEQ ID NO: 2849021 - RNA, 22 nt, Human
cuugauucugcaguaaaucuuu

SEQ ID NO: 2849022 - RNA, 21 nt, Human
cuugauucugcaguaaaucuu

SEQ ID NO: 2849023 - RNA, 18 nt, Human
cuugauuuaaacacacag

SEQ ID NO: 2849024 - RNA, 19 nt, Human
cuugauuuaaacacacaga

SEQ ID NO: 2849025 - RNA, 21 nt, Human
cuugauggcuccgaacacccu

SEQ ID NO: 2849026 - RNA, 14 nt, Human
cuuacagcugggug

SEQ ID NO: 2849027 - RNA, 22 nt, Human
cuuacagcuggguggcacugcc

SEQ ID NO: 2849028 - RNA, 22 nt, Human
cuuaaagaaagucgaauuaaua

SEQ ID NO: 2849029 - RNA, 23 nt, Human
cuuacagcuggguggcacugcca

SEQ ID NO: 2849030 - RNA, 16 nt, Human
cuuacauaauuuuuua

SEQ ID NO: 2849031 - RNA, 22 nt, Human
cuuacauaauuuuuuauucaag

SEQ ID NO: 2849032 - RNA, 22 nt, Human
cuuacauaguuuuaaacucauu

SEQ ID NO: 2849033 - RNA, 15 nt, Human
cuuccauauuuggaa

SEQ ID NO: 2849034 - RNA, 16 nt, Human
cuuccauauuuggaag

SEQ ID NO: 2849035 - RNA, 19 nt, Human
cuuccauauuuggaagaaa

SEQ ID NO: 2849036 - RNA, 20 nt, Human
cuuacauuagcaguuugcuu

SEQ ID NO: 2849037 - RNA, 17 nt, Human
cuuccaucccaaccagu

SEQ ID NO: 2849038 - RNA, 19 nt, Human
cuuccaucccaaccagugc

SEQ ID NO: 2849039 - RNA, 21 nt, Human
cuuccaucccaaccagugcca

SEQ ID NO: 2849040 - RNA, 22 nt, Human
cuuccaucccaaccagugccaa

SEQ ID NO: 2849041 - RNA, 14 nt, Human
cuuccaucccagga

SEQ ID NO: 2849042 - RNA, 17 nt, Human
cuuccaucccaggacac

SEQ ID NO: 2849043 - RNA, 16 nt, Human
cuuccaucccuacccc

SEQ ID NO: 2849044 - RNA, 15 nt, Human
cuuccaucccuaccc

SEQ ID NO: 2849045 - RNA, 14 nt, Human
cuuccaucccuacc

SEQ ID NO: 2849046 - RNA, 12 nt, Human
cuuccaucccua

SEQ ID NO: 2849047 - RNA, 19 nt, Human
cuuccaucccuacccccua

SEQ ID NO: 2849048 - RNA, 17 nt, Human
cuuccaucccuaccccc

SEQ ID NO: 2849049 - RNA, 16 nt, Human
cuuccaucucugacuu

SEQ ID NO: 2849050 - RNA, 22 nt, Human
cuuccaucccaggacaccacac

SEQ ID NO: 2849051 - RNA, 18 nt, Human
cuuccaucuuuccugaug

SEQ ID NO: 2849052 - RNA, 22 nt, Human
cuuccaucuuuccugauggcag

SEQ ID NO: 2849053 - RNA, 12 nt, Human
cuuccauuuaua

SEQ ID NO: 2849054 - RNA, 17 nt, Human
cuuccauuuuccuacag

SEQ ID NO: 2849055 - RNA, 18 nt, Human
cuucccaaggccuuaagc

SEQ ID NO: 2849056 - RNA, 17 nt, Human
cuucccaaguaagaggc

SEQ ID NO: 2849057 - RNA, 21 nt, Human
cuucccaaguaagaggcugga

SEQ ID NO: 2849058 - RNA, 23 nt, Human
cuucccaaguaagaggcuggagu

SEQ ID NO: 2849059 - RNA, 15 nt, Human
cuucccaaucagcac

SEQ ID NO: 2849060 - RNA, 17 nt, Human
cuucccaaucagcacug

SEQ ID NO: 2849061 - RNA, 18 nt, Human
cuucccaaucagcacuga

SEQ ID NO: 2849062 - RNA, 19 nt, Human
cuucccaaucagcacugaa

SEQ ID NO: 2849063 - RNA, 20 nt, Human
cuucccaaucagcacugaaa

SEQ ID NO: 2849064 - RNA, 21 nt, Human
cuucccaaucagcacugaaaa

SEQ ID NO: 2849065 - RNA, 22 nt, Human
cuucccaaucagcacugaaaau

SEQ ID NO: 2849066 - RNA, 13 nt, Human
cuucuugcauccu

SEQ ID NO: 2849067 - RNA, 18 nt, Human
cuucuugcauccuuccua

SEQ ID NO: 2849068 - RNA, 20 nt, Human
cuucuugcauccuuccuaua

SEQ ID NO: 2849069 - RNA, 22 nt, Human
cuucuugcauccuuccuauaac

SEQ ID NO: 2849070 - RNA, 12 nt, Human
cuucuugcccug

SEQ ID NO: 2849071 - RNA, 14 nt, Human
cuucuugcccuggg

SEQ ID NO: 2849072 - RNA, 12 nt, Human
cuucuucuccau

SEQ ID NO: 2849073 - RNA, 22 nt, Human
cuucuuagcuaucauugcuucc

SEQ ID NO: 2849074 - RNA, 22 nt, Human
cuucuuauggaauugauuugca

SEQ ID NO: 2849075 - RNA, 23 nt, Human
cuucuuauggaauugauuugcau

SEQ ID NO: 2849076 - RNA, 16 nt, Human
cuucuuauuauauaua

SEQ ID NO: 2849077 - RNA, 19 nt, Human
cuucuuauuauauauauaa

SEQ ID NO: 2849078 - RNA, 19 nt, Human
cuucuuauggaauugauuu

SEQ ID NO: 2849079 - RNA, 22 nt, Human
cuucucugcuccaccacauccu

SEQ ID NO: 2849080 - RNA, 21 nt, Human
cuucucugcuccaccacaucc

SEQ ID NO: 2849081 - RNA, 16 nt, Human
cuucucugcuccacca

SEQ ID NO: 2849082 - RNA, 15 nt, Human
cuucucugcuccacc

SEQ ID NO: 2849083 - RNA, 14 nt, Human
cuucucugcuccac

SEQ ID NO: 2849084 - RNA, 13 nt, Human
cuucucugcucca

SEQ ID NO: 2849085 - RNA, 12 nt, Human
cuucucugcucc

SEQ ID NO: 2849086 - RNA, 11 nt, Human
cuucucugcuc

SEQ ID NO: 2849087 - RNA, 19 nt, Human
cuucucugccuuugacauu

SEQ ID NO: 2849088 - RNA, 23 nt, Human
cuucucugccuuugacauuuaau

SEQ ID NO: 2849089 - RNA, 15 nt, Human
cuucugaaaugaaac

SEQ ID NO: 2849090 - RNA, 23 nt, Human
cuucugaaaugaaacaaauaauc

SEQ ID NO: 2849091 - RNA, 17 nt, Human
cuucuaccaugaacaga

SEQ ID NO: 2849092 - RNA, 18 nt, Human
cuucuacugagccuucag

SEQ ID NO: 2849093 - RNA, 13 nt, Human
cuucuaugaccca

SEQ ID NO: 2849094 - RNA, 20 nt, Human
cuucuaugacccagcauggg

SEQ ID NO: 2849095 - RNA, 23 nt, Human
cuucuauggacugguuguugcca

SEQ ID NO: 2849096 - RNA, 18 nt, Human
cuucuauguaggaaaaaa

SEQ ID NO: 2849097 - RNA, 22 nt, Human
cuucuauguaggaaaaaaauag

SEQ ID NO: 2849098 - RNA, 20 nt, Human
cuucuaauauauuuuuauau

SEQ ID NO: 2849099 - RNA, 16 nt, Human
cuucuaauaucauuca

SEQ ID NO: 2849100 - RNA, 15 nt, Human
cuuccucuucggccc

SEQ ID NO: 2849101 - RNA, 19 nt, Human
cuuccucuucggcccucag

SEQ ID NO: 2849102 - RNA, 20 nt, Human
cuuccucuucggcccucaga

SEQ ID NO: 2849103 - RNA, 14 nt, Human
cuuccucuggggcu

SEQ ID NO: 2849104 - RNA, 15 nt, Human
cuuccucuggggcuc

SEQ ID NO: 2849105 - RNA, 20 nt, Human
cuuccucuggggcucuaggg

SEQ ID NO: 2849106 - RNA, 12 nt, Human
cuuccucugcug

SEQ ID NO: 2849107 - RNA, 13 nt, Human
cuuccucugcuga

SEQ ID NO: 2849108 - RNA, 16 nt, Human
cuuccucuccacugcc

SEQ ID NO: 2849109 - RNA, 17 nt, Human
cuuccucuccacugccu

SEQ ID NO: 2849110 - RNA, 19 nt, Human
cuuccucuccacugccuuc

SEQ ID NO: 2849111 - RNA, 21 nt, Human
cuuccucuccacugccuucga

SEQ ID NO: 2849112 - RNA, 11 nt, Human
cuuccucugcu

SEQ ID NO: 2849113 - RNA, 15 nt, Human
cuuccucccucauuc

SEQ ID NO: 2849114 - RNA, 22 nt, Human
gaaacuguucccaccugcugga

SEQ ID NO: 2849115 - RNA, 21 nt, Human
gaaacuguucccaccugcugg

SEQ ID NO: 2849116 - RNA, 21 nt, Human
gaaacugucgguuugcuuuga

SEQ ID NO: 2849117 - RNA, 20 nt, Human
gaaacuguucccaccugcug

SEQ ID NO: 2849118 - RNA, 16 nt, Human
gaaacuugucacuugc

SEQ ID NO: 2849119 - RNA, 17 nt, Human
gaaacuugucacuugca

SEQ ID NO: 2849120 - RNA, 19 nt, Human
gaaacuugucacuugcaug

SEQ ID NO: 2849121 - RNA, 20 nt, Human
gaaacuugucacuugcaugu

SEQ ID NO: 2849122 - RNA, 21 nt, Human
gaaacuugucacuugcauguc

SEQ ID NO: 2849123 - RNA, 13 nt, Human
gaaacuuguuauu

SEQ ID NO: 2849124 - RNA, 15 nt, Human
gaaacuuguuauugu

SEQ ID NO: 2849125 - RNA, 16 nt, Human
gaaacuuguuauugug

SEQ ID NO: 2849126 - RNA, 17 nt, Human
gaaacuuguuauuguga

SEQ ID NO: 2849127 - RNA, 19 nt, Human
gaaacuuguuauugugaau

SEQ ID NO: 2849128 - RNA, 20 nt, Human
gaaacuuguuauugugaaug

SEQ ID NO: 2849129 - RNA, 12 nt, Human
gaaacuuuauac

SEQ ID NO: 2849130 - RNA, 19 nt, Human
gaaagacacugccugggcu

SEQ ID NO: 2849131 - RNA, 18 nt, Human
gaaagacacugccugggc

SEQ ID NO: 2849132 - RNA, 15 nt, Human
gaaagacacugccug

SEQ ID NO: 2849133 - RNA, 14 nt, Human
gaaagacacugccu

SEQ ID NO: 2849134 - RNA, 13 nt, Human
gaaagacacugcc

SEQ ID NO: 2849135 - RNA, 14 nt, Human
gaaagacaacacaa

SEQ ID NO: 2849136 - RNA, 18 nt, Human
gaaagacaccauuuaucu

SEQ ID NO: 2849137 - RNA, 13 nt, Human
gaaagaauauauu

SEQ ID NO: 2849138 - RNA, 15 nt, Human
gaaagaauauauuua

SEQ ID NO: 2849139 - RNA, 16 nt, Human
gaaagaauauauuuau

SEQ ID NO: 2849140 - RNA, 18 nt, Human
gaaagaauauauuuauuu

SEQ ID NO: 2849141 - RNA, 12 nt, Human
gaaagaauagaa

SEQ ID NO: 2849142 - RNA, 13 nt, Human
gaaagaauagaaa

SEQ ID NO: 2849143 - RNA, 14 nt, Human
gaaagaauagaaag

SEQ ID NO: 2849144 - RNA, 15 nt, Human
gaaagaauagaaaga

SEQ ID NO: 2849145 - RNA, 19 nt, Human
gaaagaauagaaagaaagu

SEQ ID NO: 2849146 - RNA, 18 nt, Human
gaaagaaguggggacaga

SEQ ID NO: 2849147 - RNA, 11 nt, Human
gaaagaaggaa

SEQ ID NO: 2849148 - RNA, 22 nt, Human
gaaagaacugucauguaaacau

SEQ ID NO: 2849149 - RNA, 19 nt, Human
gaaaucaaagagagaaaau

SEQ ID NO: 2849150 - RNA, 13 nt, Human
gaaauauuuugau

SEQ ID NO: 2849151 - RNA, 19 nt, Human
gaaauauuuugauaauaaa

SEQ ID NO: 2849152 - RNA, 20 nt, Human
gaaauauuuugauaauaaau

SEQ ID NO: 2849153 - RNA, 21 nt, Human
gaaauauuuugauaauaaauu

SEQ ID NO: 2849154 - RNA, 22 nt, Human
gaaauauuuugauaauaaauug

SEQ ID NO: 2849155 - RNA, 23 nt, Human
gaaauauuuugauaauaaauuga

SEQ ID NO: 2849156 - RNA, 21 nt, Human
gaaauauuuuuuaauuuaaag

SEQ ID NO: 2849157 - RNA, 21 nt, Human
gaaaguacuucuccacccugc

SEQ ID NO: 2849158 - RNA, 16 nt, Human
gaaagguuuacauugu

SEQ ID NO: 2849159 - RNA, 13 nt, Human
gaaagguuuugga

SEQ ID NO: 2849160 - RNA, 14 nt, Human
gaaagguuuacauu

SEQ ID NO: 2849161 - RNA, 14 nt, Human
gaaagguucugccc

SEQ ID NO: 2849162 - RNA, 15 nt, Human
gaaagguucugcccg

SEQ ID NO: 2849163 - RNA, 13 nt, Human
gaaagguucugcc

SEQ ID NO: 2849164 - RNA, 20 nt, Human
gaaagacacugccugggcug

SEQ ID NO: 2849165 - RNA, 14 nt, Human
gaaagacaucuuuc

SEQ ID NO: 2849166 - RNA, 17 nt, Human
gaaagacaucuuucucu

SEQ ID NO: 2849167 - RNA, 16 nt, Human
gaaagacagcuucuca

SEQ ID NO: 2849168 - RNA, 17 nt, Human
gaaagacagcuucucau

SEQ ID NO: 2849169 - RNA, 23 nt, Human
gaaaucaagucaucuauaguuga

SEQ ID NO: 2849170 - RNA, 13 nt, Human
gaaaugaaauuua

SEQ ID NO: 2849171 - RNA, 17 nt, Human
gaaaugaaauuuaaaca

SEQ ID NO: 2849172 - RNA, 19 nt, Human
gaaaugaaauuuaaacauu

SEQ ID NO: 2849173 - RNA, 12 nt, Human
gaaaugaacauu

SEQ ID NO: 2849174 - RNA, 13 nt, Human
gaaaugaacauuc

SEQ ID NO: 2849175 - RNA, 14 nt, Human
gaaaugaacauucc

SEQ ID NO: 2849176 - RNA, 15 nt, Human
gaaaugaacauucca

SEQ ID NO: 2849177 - RNA, 16 nt, Human
gaaaugaacauuccaa

SEQ ID NO: 2849178 - RNA, 13 nt, Human
gaaauuuuuauca

SEQ ID NO: 2849179 - RNA, 24 nt, Human
gaaauuuugcaaauauaaacaucu

SEQ ID NO: 2849180 - RNA, 13 nt, Human
gaacaacugauac

SEQ ID NO: 2849181 - RNA, 16 nt, Human
gaaaucaaugcaagag

SEQ ID NO: 2849182 - RNA, 18 nt, Human
gaaaagacuuguaauauu

SEQ ID NO: 2849183 - RNA, 14 nt, Human
gaaaagagaagaag

SEQ ID NO: 2849184 - RNA, 15 nt, Human
gaaaagagaagaaga

SEQ ID NO: 2849185 - RNA, 16 nt, Human
gaaaagagaagaagaa

SEQ ID NO: 2849186 - RNA, 19 nt, Human
gaaaagagaagaagaaaaa

SEQ ID NO: 2849187 - RNA, 13 nt, Human
gaaaacuuauuuu

SEQ ID NO: 2849188 - RNA, 11 nt, Human
gaaaacuguua

SEQ ID NO: 2849189 - RNA, 23 nt, Human
gaaaacuguuaccuaaaguauuu

SEQ ID NO: 2849190 - RNA, 17 nt, Human
gaaaacuggaauaagaa

SEQ ID NO: 2849191 - RNA, 19 nt, Human
gaaaacugcaacuuguaaa

SEQ ID NO: 2849192 - RNA, 20 nt, Human
gaaaacugaaaaucuaauau

SEQ ID NO: 2849193 - RNA, 18 nt, Human
gaaaacugaaaaucuaau

SEQ ID NO: 2849194 - RNA, 16 nt, Human
gaaaacugaaaaucua

SEQ ID NO: 2849195 - RNA, 17 nt, Human
gaaaacucauuacuuuu

SEQ ID NO: 2849196 - RNA, 13 nt, Human
gaaaacuauacaa

SEQ ID NO: 2849197 - RNA, 14 nt, Human
gaaaacuauacaac

SEQ ID NO: 2849198 - RNA, 18 nt, Human
gaaaacuccaccuuccca

SEQ ID NO: 2849199 - RNA, 18 nt, Human
gaaaacucccauuuacgu

SEQ ID NO: 2849200 - RNA, 19 nt, Human
gaaaaaaugauguucauuu

SEQ ID NO: 2849201 - RNA, 18 nt, Human
gaaaagagagcagagaau

SEQ ID NO: 2849202 - RNA, 21 nt, Human
gaaaagagagcagagaauaua

SEQ ID NO: 2849203 - RNA, 17 nt, Human
gaaaagcagcucucccc

SEQ ID NO: 2849204 - RNA, 14 nt, Human
gaaaagcagcucuc

SEQ ID NO: 2849205 - RNA, 10 nt, Human
gaaaagcaua

SEQ ID NO: 2849206 - RNA, 19 nt, Human
gaaaagcauacaugcaaaa

SEQ ID NO: 2849207 - RNA, 18 nt, Human
gaaaagcggacaucagcu

SEQ ID NO: 2849208 - RNA, 20 nt, Human
gaaaauguuuuucugccagg

SEQ ID NO: 2849209 - RNA, 18 nt, Human
gaaaauuaggauuucaug

SEQ ID NO: 2849210 - RNA, 20 nt, Human
gaaaagcggacaucagcugg

SEQ ID NO: 2849211 - RNA, 21 nt, Human
gaaaauguugagaaucccaaa

SEQ ID NO: 2849212 - RNA, 20 nt, Human
gaaaauguugagaaucccaa

SEQ ID NO: 2849213 - RNA, 12 nt, Human
gaaacaaacuuu

SEQ ID NO: 2849214 - RNA, 23 nt, Human
gaaacaaaaacacuaaaaauaaa

SEQ ID NO: 2849215 - RNA, 19 nt, Human
gaaacaaaaacacuaaaaa

SEQ ID NO: 2849216 - RNA, 14 nt, Human
gaaacaaaaacacu

SEQ ID NO: 2849217 - RNA, 16 nt, Human
gaaaauuuuuguagua

SEQ ID NO: 2849218 - RNA, 13 nt, Human
gaaaauuuuugua

SEQ ID NO: 2849219 - RNA, 19 nt, Human
gaaaauuuuaaaaauacau

SEQ ID NO: 2849220 - RNA, 20 nt, Human
gaaaauuuuaaaaauacaua

SEQ ID NO: 2849221 - RNA, 21 nt, Human
gaaaauuuuaaaaauacauau

SEQ ID NO: 2849222 - RNA, 19 nt, Human
gaaaauuuuaccagcagaa

SEQ ID NO: 2849223 - RNA, 20 nt, Human
gaaaauuuuaccagcagaag

SEQ ID NO: 2849224 - RNA, 12 nt, Human
cuuuuguuacug

SEQ ID NO: 2849225 - RNA, 13 nt, Human
cuuuuguuacugu

SEQ ID NO: 2849226 - RNA, 14 nt, Human
cuuuuguuacuguu

SEQ ID NO: 2849227 - RNA, 15 nt, Human
cuuuuguuacuguuc

SEQ ID NO: 2849228 - RNA, 16 nt, Human
cuuuuguuacuguucu

SEQ ID NO: 2849229 - RNA, 17 nt, Human
cuuuuguuacuguucuu

SEQ ID NO: 2849230 - RNA, 18 nt, Human
cuuuuguuacuguucuug

SEQ ID NO: 2849231 - RNA, 21 nt, Human
cuuuuuuuggugauucaaaug

SEQ ID NO: 2849232 - RNA, 15 nt, Human
cuuuuuuuucuuuaa

SEQ ID NO: 2849233 - RNA, 14 nt, Human
cuuuuuuuucuuua

SEQ ID NO: 2849234 - RNA, 17 nt, Human
cuuuuguguaaugaaaa

SEQ ID NO: 2849235 - RNA, 17 nt, Human
cuuuugugugaauugac

SEQ ID NO: 2849236 - RNA, 19 nt, Human
cuuuugugugaauugacua

SEQ ID NO: 2849237 - RNA, 15 nt, Human
cuuuuguuaaauaau

SEQ ID NO: 2849238 - RNA, 18 nt, Human
cuuuuguuaaauaauaug

SEQ ID NO: 2849239 - RNA, 10 nt, Human
cuuuuguuac

SEQ ID NO: 2849240 - RNA, 11 nt, Human
cuuuuguuacu

SEQ ID NO: 2849241 - RNA, 16 nt, Human
cuuuuguguaaugaaa

SEQ ID NO: 2849242 - RNA, 16 nt, Human
cuuuugucuaauuaaa

SEQ ID NO: 2849243 - RNA, 17 nt, Human
cuuuugucauguggcua

SEQ ID NO: 2849244 - RNA, 17 nt, Human
gaaaaaaaaaaaagagg

SEQ ID NO: 2849245 - RNA, 18 nt, Human
gaaaaaaaaaaaagagga

SEQ ID NO: 2849246 - RNA, 21 nt, Human
gaaaaaaaaaaaagaggaaaa

SEQ ID NO: 2849247 - RNA, 22 nt, Human
gaaaaaaaaaaaagaggaaaac

SEQ ID NO: 2849248 - RNA, 18 nt, Human
cuuuuuuuuuuuuuuggu

SEQ ID NO: 2849249 - RNA, 19 nt, Human
cuuuuuuuuuuuuuuggua

SEQ ID NO: 2849250 - RNA, 15 nt, Human
cuuuuuuuuguaugu

SEQ ID NO: 2849251 - RNA, 18 nt, Human
cuuuugugccuggcuucu

SEQ ID NO: 2849252 - RNA, 15 nt, Human
gaaaaaaaaacagcu

SEQ ID NO: 2849253 - RNA, 23 nt, Human
cuuuuuuuuuuuuuaaagacaga

SEQ ID NO: 2849254 - RNA, 16 nt, Human
gaaaaaaaaaagaaga

SEQ ID NO: 2849255 - RNA, 17 nt, Human
gaaaaaaaaaagaagaa

SEQ ID NO: 2849256 - RNA, 18 nt, Human
gaaaaaaaaaagaagaag

SEQ ID NO: 2849257 - RNA, 19 nt, Human
gaaaaaaaaaagaagaaga

SEQ ID NO: 2849258 - RNA, 12 nt, Human
cuuuuguauaca

SEQ ID NO: 2849259 - RNA, 19 nt, Human
cuuuuguauacauccuggg

SEQ ID NO: 2849260 - RNA, 23 nt, Human
cuuuuguauacauccuggguaau

SEQ ID NO: 2849261 - RNA, 15 nt, Human
cuuuugguguguugg

SEQ ID NO: 2849262 - RNA, 17 nt, Human
cuuuugguguguuggac

SEQ ID NO: 2849263 - RNA, 18 nt, Human
cuuuugguguguuggaca

SEQ ID NO: 2849264 - RNA, 19 nt, Human
cuuuugguguguuggacag

SEQ ID NO: 2849265 - RNA, 20 nt, Human
cuuuugguguguuggacaga

SEQ ID NO: 2849266 - RNA, 17 nt, Human
cuuuugucuaugggacu

SEQ ID NO: 2849267 - RNA, 16 nt, Human
cuuuuggucuguguga

SEQ ID NO: 2849268 - RNA, 15 nt, Human
cuuuuggucugugug

SEQ ID NO: 2849269 - RNA, 14 nt, Human
cuuuuggucucccu

SEQ ID NO: 2849270 - RNA, 15 nt, Human
cuuuugcuacuaagu

SEQ ID NO: 2849271 - RNA, 23 nt, Human
cuuuugcuacuaaguucacauua

SEQ ID NO: 2849272 - RNA, 14 nt, Human
cuuuugcuuuauuc

SEQ ID NO: 2849273 - RNA, 22 nt, Human
cuuuugcucuuagcugucugcu

SEQ ID NO: 2849274 - RNA, 16 nt, Human
cuuuuauuguauaaac

SEQ ID NO: 2849275 - RNA, 13 nt, Human
cuuuuauuguaua

SEQ ID NO: 2849276 - RNA, 19 nt, Human
cuuuuauuguauaaacuau

SEQ ID NO: 2849277 - RNA, 13 nt, Human
cuuuuauguuuga

SEQ ID NO: 2849278 - RNA, 14 nt, Human
cuuuuauguuugaa

SEQ ID NO: 2849279 - RNA, 15 nt, Human
cuuuuauguuugaau

SEQ ID NO: 2849280 - RNA, 16 nt, Human
cuuuuauguuugaaua

SEQ ID NO: 2849281 - RNA, 17 nt, Human
cuuuuauguuugaauau

SEQ ID NO: 2849282 - RNA, 18 nt, Human
cuuuuauguuugaauaug

SEQ ID NO: 2849283 - RNA, 22 nt, Human
cuuuuauguuugaauauggaca

SEQ ID NO: 2849284 - RNA, 23 nt, Human
cuuuuauguuugaauauggacaa

SEQ ID NO: 2849285 - RNA, 18 nt, Human
cuuuuauucauuagcugu

SEQ ID NO: 2849286 - RNA, 18 nt, Human
cuuuuauugacacagaaa

SEQ ID NO: 2849287 - RNA, 17 nt, Human
cuuuuauugacacagaa

SEQ ID NO: 2849288 - RNA, 16 nt, Human
aaggggacccccgccc

SEQ ID NO: 2849289 - RNA, 20 nt, Human
aaggggacccccgcccccug

SEQ ID NO: 2849290 - RNA, 16 nt, Human
aaggggagaagggaau

SEQ ID NO: 2849291 - RNA, 14 nt, Human
aagggcuuacuauu

SEQ ID NO: 2849292 - RNA, 15 nt, Human
aagggcuuacuauuu

SEQ ID NO: 2849293 - RNA, 12 nt, Human
aaggggacaggc

SEQ ID NO: 2849294 - RNA, 15 nt, Human
aaggggacaggccuc

SEQ ID NO: 2849295 - RNA, 16 nt, Human
aaggggacaggccuca

SEQ ID NO: 2849296 - RNA, 16 nt, Human
aagggcuauguaaaua

SEQ ID NO: 2849297 - RNA, 17 nt, Human
aagggcugaccugccuc

SEQ ID NO: 2849298 - RNA, 18 nt, Human
aagggcugaccugccucu

SEQ ID NO: 2849299 - RNA, 21 nt, Human
aaggcugugcugcccugaaga

SEQ ID NO: 2849300 - RNA, 17 nt, Human
aaggcugugcugcccug

SEQ ID NO: 2849301 - RNA, 22 nt, Human
aaggcugugcucccugguucug

SEQ ID NO: 2849302 - RNA, 13 nt, Human
aaggcuguuugcu

SEQ ID NO: 2849303 - RNA, 16 nt, Human
aaggcugugcucccug

SEQ ID NO: 2849304 - RNA, 12 nt, Human
aaguaaaugcua

SEQ ID NO: 2849305 - RNA, 23 nt, Human
aagguuuuagguucuaaaguucu

SEQ ID NO: 2849306 - RNA, 15 nt, Human
aagguuuuagguucu

SEQ ID NO: 2849307 - RNA, 16 nt, Human
aagguuuuagguucua

SEQ ID NO: 2849308 - RNA, 17 nt, Human
aagguuuuagguucuaa

SEQ ID NO: 2849309 - RNA, 19 nt, Human
aagguuuuagguucuaaag

SEQ ID NO: 2849310 - RNA, 20 nt, Human
aagguuuuagguucuaaagu

SEQ ID NO: 2849311 - RNA, 15 nt, Human
aaguaacuuuauucu

SEQ ID NO: 2849312 - RNA, 19 nt, Human
aaguaacuuuauucuugaa

SEQ ID NO: 2849313 - RNA, 21 nt, Human
aaguaacuuuauucuugaaag

SEQ ID NO: 2849314 - RNA, 21 nt, Human
aaguaacucauuuguuaaaau

SEQ ID NO: 2849315 - RNA, 14 nt, Human
aaguaacucauuug

SEQ ID NO: 2849316 - RNA, 12 nt, Human
aaguaacucauu

SEQ ID NO: 2849317 - RNA, 16 nt, Human
aaguaacucauuuguu

SEQ ID NO: 2849318 - RNA, 15 nt, Human
aaguaacauaacuag

SEQ ID NO: 2849319 - RNA, 15 nt, Human
aaguaacgcaauaaa

SEQ ID NO: 2849320 - RNA, 22 nt, Human
aagguauuaaauugauguugcu

SEQ ID NO: 2849321 - RNA, 18 nt, Human
aagguauuaaauugaugu

SEQ ID NO: 2849322 - RNA, 12 nt, Human
aagguuuuaagu

SEQ ID NO: 2849323 - RNA, 21 nt, Human
aagguuucguuucuguauaca

SEQ ID NO: 2849324 - RNA, 22 nt, Human
aagguuucguuucuguauacaa

SEQ ID NO: 2849325 - RNA, 23 nt, Human
aagguuucagaaagaagugggga

SEQ ID NO: 2849326 - RNA, 16 nt, Human
aagguuucguuucugu

SEQ ID NO: 2849327 - RNA, 15 nt, Human
aagggggaggggaag

SEQ ID NO: 2849328 - RNA, 18 nt, Human
aagggggaggggaagucc

SEQ ID NO: 2849329 - RNA, 18 nt, Human
aagguagcuuaccugaca

SEQ ID NO: 2849330 - RNA, 20 nt, Human
aagguagcuuaccugacaca

SEQ ID NO: 2849331 - RNA, 18 nt, Human
aagggggggcuacauuau

SEQ ID NO: 2849332 - RNA, 19 nt, Human
aagggggggcuacauuaua

SEQ ID NO: 2849333 - RNA, 20 nt, Human
aagggggggcuacauuauaa

SEQ ID NO: 2849334 - RNA, 18 nt, Human
guuuaugagaugcugguu

SEQ ID NO: 2849335 - RNA, 21 nt, Human
guuuaugagaugcugguuuuc

SEQ ID NO: 2849336 - RNA, 17 nt, Human
guuuaauagagaaggaa

SEQ ID NO: 2849337 - RNA, 14 nt, Human
guuuauuagaugaa

SEQ ID NO: 2849338 - RNA, 18 nt, Human
guuuauuauaaacuguau

SEQ ID NO: 2849339 - RNA, 23 nt, Human
guuuauggccucagcugccucac

SEQ ID NO: 2849340 - RNA, 22 nt, Human
guuuauggccucagcugccuca

SEQ ID NO: 2849341 - RNA, 18 nt, Human
guuuauggccucagcugc

SEQ ID NO: 2849342 - RNA, 15 nt, Human
guuuauggccucagc

SEQ ID NO: 2849343 - RNA, 14 nt, Human
guuuauggccucag

SEQ ID NO: 2849344 - RNA, 13 nt, Human
guuuauggccuca

SEQ ID NO: 2849345 - RNA, 17 nt, Human
guuuaugcaaggaagga

SEQ ID NO: 2849346 - RNA, 21 nt, Human
guuuaugauaauaaaggcacc

SEQ ID NO: 2849347 - RNA, 18 nt, Human
guuuauggccacauuuaa

SEQ ID NO: 2849348 - RNA, 23 nt, Human
guuuauggccacauuuaauaucu

SEQ ID NO: 2849349 - RNA, 21 nt, Human
guuuauugaguuuguagguaa

SEQ ID NO: 2849350 - RNA, 18 nt, Human
guuucaaggcacucuaga

SEQ ID NO: 2849351 - RNA, 23 nt, Human
guuucaaccaagucaugugcauu

SEQ ID NO: 2849352 - RNA, 19 nt, Human
guuucaaagaugcugugag

SEQ ID NO: 2849353 - RNA, 20 nt, Human
guuucaaagaugcugugagu

SEQ ID NO: 2849354 - RNA, 15 nt, Human
guuuauucuucuaga

SEQ ID NO: 2849355 - RNA, 16 nt, Human
guuuauucuucuagag

SEQ ID NO: 2849356 - RNA, 19 nt, Human
guuuauucuucuagaguuc

SEQ ID NO: 2849357 - RNA, 20 nt, Human
guuuauucuucuagaguuca

SEQ ID NO: 2849358 - RNA, 20 nt, Human
guuguuuuuuccuuugcucu

SEQ ID NO: 2849359 - RNA, 15 nt, Human
guuucaauucagugc

SEQ ID NO: 2849360 - RNA, 13 nt, Human
guuucaaugugau

SEQ ID NO: 2849361 - RNA, 14 nt, Human
guuucaaucacugu

SEQ ID NO: 2849362 - RNA, 15 nt, Human
guuucaaucacuguc

SEQ ID NO: 2849363 - RNA, 19 nt, Human
guuucaaugugauucuaau

SEQ ID NO: 2849364 - RNA, 21 nt, Human
guuucaaugugauucuaaugu

SEQ ID NO: 2849365 - RNA, 19 nt, Human
guuucaaggcacucuagau

SEQ ID NO: 2849366 - RNA, 23 nt, Human
guuucaaggcacucuagauucca

SEQ ID NO: 2849367 - RNA, 16 nt, Human
guuucacccuuaaccc

SEQ ID NO: 2849368 - RNA, 21 nt, Human
guuucacccuuaacccaagga

SEQ ID NO: 2849369 - RNA, 22 nt, Human
guuucacccuuaacccaaggag

SEQ ID NO: 2849370 - RNA, 22 nt, Human
guuucaccaugauggccaggcu

SEQ ID NO: 2849371 - RNA, 14 nt, Human
guuuaaagagucua

SEQ ID NO: 2849372 - RNA, 17 nt, Human
guuuaaagagucuagau

SEQ ID NO: 2849373 - RNA, 18 nt, Human
guuuaaagagucuagauu

SEQ ID NO: 2849374 - RNA, 19 nt, Human
guuuaaagagucuagauuc

SEQ ID NO: 2849375 - RNA, 14 nt, Human
aaggaaaacugcau

SEQ ID NO: 2849376 - RNA, 16 nt, Human
aaggaaaacugcaugg

SEQ ID NO: 2849377 - RNA, 17 nt, Human
aaggaaaacugcaugga

SEQ ID NO: 2849378 - RNA, 13 nt, Human
aaggaaaagaaaa

SEQ ID NO: 2849379 - RNA, 14 nt, Human
aaggaaaagaaaaa

SEQ ID NO: 2849380 - RNA, 15 nt, Human
aaggaaaagaaaaaa

SEQ ID NO: 2849381 - RNA, 16 nt, Human
aaggaaaagaaaaaaa

SEQ ID NO: 2849382 - RNA, 12 nt, Human
aaggaaaaagcu

SEQ ID NO: 2849383 - RNA, 13 nt, Human
aaggaaaaagcuc

SEQ ID NO: 2849384 - RNA, 14 nt, Human
aaggaaaaagcucc

SEQ ID NO: 2849385 - RNA, 15 nt, Human
aaggaaaaagcucca

SEQ ID NO: 2849386 - RNA, 23 nt, Human
aaggaaaaagcuccaugugccuc

SEQ ID NO: 2849387 - RNA, 17 nt, Human
aaggaaaaauaaauauu

SEQ ID NO: 2849388 - RNA, 12 nt, Human
guuguuugcaug

SEQ ID NO: 2849389 - RNA, 21 nt, Human
aaggaaaccgccuaguuuacu

SEQ ID NO: 2849390 - RNA, 12 nt, Human
aaggaaacucuu

SEQ ID NO: 2849391 - RNA, 13 nt, Human
aaggaaacucuua

SEQ ID NO: 2849392 - RNA, 18 nt, Human
aaggaaaaccugaagacu

SEQ ID NO: 2849393 - RNA, 16 nt, Human
aaggaaacgcuaccuc

SEQ ID NO: 2849394 - RNA, 16 nt, Human
aaggaaacucuuaucu

SEQ ID NO: 2849395 - RNA, 19 nt, Human
aaggaaacucuuaucucag

SEQ ID NO: 2849396 - RNA, 19 nt, Human
aaguauguguaaaauguga

SEQ ID NO: 2849397 - RNA, 18 nt, Human
aaguacuacacauuuuua

SEQ ID NO: 2849398 - RNA, 14 nt, Human
aaguacuguaauaa

SEQ ID NO: 2849399 - RNA, 19 nt, Human
aaguacuguaauaauaccu

SEQ ID NO: 2849400 - RNA, 20 nt, Human
aaguacuguaauaauaccuc

SEQ ID NO: 2849401 - RNA, 21 nt, Human
aaguacuguaauaauaccuca

SEQ ID NO: 2849402 - RNA, 22 nt, Human
aaguacuguaauaauaccucaa

SEQ ID NO: 2849403 - RNA, 18 nt, Human
aaguacuucuccacccug

SEQ ID NO: 2849404 - RNA, 20 nt, Human
aaguacuucuccacccugcu

SEQ ID NO: 2849405 - RNA, 19 nt, Human
aaguacuucuccacccugc

SEQ ID NO: 2849406 - RNA, 19 nt, Human
guuuugauuuguacugaaa

SEQ ID NO: 2849407 - RNA, 13 nt, Human
aaguaauuaugca

SEQ ID NO: 2849408 - RNA, 16 nt, Human
aaguaauuaugcacua

SEQ ID NO: 2849409 - RNA, 19 nt, Human
aaguaauuaugcacuaaau

SEQ ID NO: 2849410 - RNA, 14 nt, Human
aaguaaugccucug

SEQ ID NO: 2849411 - RNA, 15 nt, Human
aaguaaugccucugu

SEQ ID NO: 2849412 - RNA, 17 nt, Human
aaguaaugccucugucu

SEQ ID NO: 2849413 - RNA, 13 nt, Human
aaguaauguggaa

SEQ ID NO: 2849414 - RNA, 14 nt, Human
aaguaauguggaag

SEQ ID NO: 2849415 - RNA, 14 nt, Human
aaguaauuccucuc

SEQ ID NO: 2849416 - RNA, 18 nt, Human
aaguacacaauaagcaaa

SEQ ID NO: 2849417 - RNA, 17 nt, Human
aaguacacaauaagcaa

SEQ ID NO: 2849418 - RNA, 16 nt, Human
aaguacacaauaagca

SEQ ID NO: 2849419 - RNA, 19 nt, Human
aaguacaaacuaaggugcu

SEQ ID NO: 2849420 - RNA, 21 nt, Human
aaguacaauaauucauauucu

SEQ ID NO: 2849421 - RNA, 18 nt, Human
aaguacaauguguuuuuc

SEQ ID NO: 2849422 - RNA, 19 nt, Human
aaguacaauguguuuuucu

SEQ ID NO: 2849423 - RNA, 19 nt, Human
aaguacacaauaagcaaaa

SEQ ID NO: 2849424 - RNA, 20 nt, Human
aagucacuuacuauuguugc

SEQ ID NO: 2849425 - RNA, 14 nt, Human
aagucacugcacag

SEQ ID NO: 2849426 - RNA, 20 nt, Human
aagucagacugcugggacug

SEQ ID NO: 2849427 - RNA, 17 nt, Human
aagucagacugcuggga

SEQ ID NO: 2849428 - RNA, 16 nt, Human
aagucagacugcuggg

SEQ ID NO: 2849429 - RNA, 19 nt, Human
aaguauuuuuauaaauaua

SEQ ID NO: 2849430 - RNA, 21 nt, Human
aaguauuuuuauaaauauaag

SEQ ID NO: 2849431 - RNA, 18 nt, Human
aagucaaaauauuuuuaa

SEQ ID NO: 2849432 - RNA, 21 nt, Human
aagucaaaauauuuuuaaaag

SEQ ID NO: 2849433 - RNA, 22 nt, Human
aagucaaaauauuuuuaaaaga

SEQ ID NO: 2849434 - RNA, 14 nt, Human
aagucaaaguaaaa

SEQ ID NO: 2849435 - RNA, 22 nt, Human
aagucaaaguaaaacuugcugc

SEQ ID NO: 2849436 - RNA, 22 nt, Human
aagucacugcacagugcaucuc

SEQ ID NO: 2849437 - RNA, 14 nt, Human
aaguacuguuuacc

SEQ ID NO: 2849438 - RNA, 19 nt, Human
aaguacuguuuaccauuuu

SEQ ID NO: 2849439 - RNA, 20 nt, Human
aaguacuguuuaccauuuuu

SEQ ID NO: 2849440 - RNA, 11 nt, Human
aaguauuuuga

SEQ ID NO: 2849441 - RNA, 14 nt, Human
aaguauuuugaagu

SEQ ID NO: 2849442 - RNA, 15 nt, Human
aaguauuuugaaguu

SEQ ID NO: 2849443 - RNA, 16 nt, Human
aaguauuuugaaguuu

SEQ ID NO: 2849444 - RNA, 19 nt, Human
aaguauuuugaaguuuaca

SEQ ID NO: 2849445 - RNA, 20 nt, Human
aaguauuuugaaguuuacau

SEQ ID NO: 2849446 - RNA, 21 nt, Human
aaguauuuugaaguuuacauu

SEQ ID NO: 2849447 - RNA, 22 nt, Human
aaguauuuugaaguuuacauuu

SEQ ID NO: 2849448 - RNA, 23 nt, Human
aaguauuuugaaguuuacauuuu

SEQ ID NO: 2849449 - RNA, 18 nt, Human
aaguauuuuguguuugga

SEQ ID NO: 2849450 - RNA, 12 nt, Human
aaguauuguaaa

SEQ ID NO: 2849451 - RNA, 13 nt, Human
aaguauuguaaau

SEQ ID NO: 2849452 - RNA, 14 nt, Human
aaguauuguaaauu

SEQ ID NO: 2849453 - RNA, 15 nt, Human
aaguauuguaaauua

SEQ ID NO: 2849454 - RNA, 17 nt, Human
aaguauuguaaauuaua

SEQ ID NO: 2849455 - RNA, 20 nt, Human
aaguauuguaaauuauauuu

SEQ ID NO: 2849456 - RNA, 21 nt, Human
aaguauuguaaauuauauuug

SEQ ID NO: 2849457 - RNA, 22 nt, Human
aaguauuguaaauuauauuugu

SEQ ID NO: 2849458 - RNA, 13 nt, Human
guuuggagacaga

SEQ ID NO: 2849459 - RNA, 21 nt, Human
guuuggacugcagaagcaagg

SEQ ID NO: 2849460 - RNA, 23 nt, Human
guuuggacuuuguauacuuuaaa

SEQ ID NO: 2849461 - RNA, 20 nt, Human
guuugcuuuguaugcacuuu

SEQ ID NO: 2849462 - RNA, 17 nt, Human
guuuggaagauccugug

SEQ ID NO: 2849463 - RNA, 14 nt, Human
guuuuaaacucauu

SEQ ID NO: 2849464 - RNA, 12 nt, Human
guuuuaaauucu

SEQ ID NO: 2849465 - RNA, 13 nt, Human
guuuuaaauucug

SEQ ID NO: 2849466 - RNA, 14 nt, Human
guuuuaaauucuga

SEQ ID NO: 2849467 - RNA, 16 nt, Human
guuuuaaauucugaga

SEQ ID NO: 2849468 - RNA, 22 nt, Human
guuuuaaauacgcacuacaugu

SEQ ID NO: 2849469 - RNA, 13 nt, Human
guuuuaaauguac

SEQ ID NO: 2849470 - RNA, 14 nt, Human
guuuuaaauguaca

SEQ ID NO: 2849471 - RNA, 15 nt, Human
guuuuaaauguacag

SEQ ID NO: 2849472 - RNA, 22 nt, Human
guuuuaaauguacagacauauu

SEQ ID NO: 2849473 - RNA, 16 nt, Human
guuuuaaauguacagu

SEQ ID NO: 2849474 - RNA, 18 nt, Human
guuuggauucuuauguag

SEQ ID NO: 2849475 - RNA, 16 nt, Human
guuuggauguaauuua

SEQ ID NO: 2849476 - RNA, 21 nt, Human
guuuggaggagcaaaggcuga

SEQ ID NO: 2849477 - RNA, 16 nt, Human
guuugcugauggucug

SEQ ID NO: 2849478 - RNA, 12 nt, Human
guuugcugcuau

SEQ ID NO: 2849479 - RNA, 17 nt, Human
guuugcuucauaaauga

SEQ ID NO: 2849480 - RNA, 16 nt, Human
guuugcuucauaaaug

SEQ ID NO: 2849481 - RNA, 14 nt, Human
guuugcuuguuucu

SEQ ID NO: 2849482 - RNA, 17 nt, Human
guuugcuuguuucuugg

SEQ ID NO: 2849483 - RNA, 13 nt, Human
guuugcugugaac

SEQ ID NO: 2849484 - RNA, 21 nt, Human
guuuuaacaaaugcuauuaaa

SEQ ID NO: 2849485 - RNA, 22 nt, Human
guuuuaacaauuuccuuuauau

SEQ ID NO: 2849486 - RNA, 20 nt, Human
guuuuaaccgcacaugcaca

SEQ ID NO: 2849487 - RNA, 18 nt, Human
guuuuaaguuguuugcau

SEQ ID NO: 2849488 - RNA, 14 nt, Human
guuuuaaucugaaa

SEQ ID NO: 2849489 - RNA, 16 nt, Human
guuuuaaucugaaauu

SEQ ID NO: 2849490 - RNA, 18 nt, Human
guuuuaaucugaaauucu

SEQ ID NO: 2849491 - RNA, 19 nt, Human
guuuuaaucugaaauucua

SEQ ID NO: 2849492 - RNA, 20 nt, Human
guuuuaaucugaaauucuaa

SEQ ID NO: 2849493 - RNA, 21 nt, Human
guuuuaaucugaaauucuaaa

SEQ ID NO: 2849494 - RNA, 12 nt, Human
guuuuaauguau

SEQ ID NO: 2849495 - RNA, 17 nt, Human
guuuuaaguuguuugca

SEQ ID NO: 2849496 - RNA, 16 nt, Human
guuuuaaguacuacac

SEQ ID NO: 2849497 - RNA, 22 nt, Human
guuuuaagugaaagugaggaaa

SEQ ID NO: 2849498 - RNA, 20 nt, Human
guuuuaauuccaauaugaug

SEQ ID NO: 2849499 - RNA, 23 nt, Human
guuuuaauuccaauaugaugacu

SEQ ID NO: 2849500 - RNA, 20 nt, Human
guuuuauuccuguauguugu

SEQ ID NO: 2849501 - RNA, 14 nt, Human
guuuuauuccugua

SEQ ID NO: 2849502 - RNA, 21 nt, Human
guuuuauuauuucuauuaaau

SEQ ID NO: 2849503 - RNA, 14 nt, Human
guuuuauucauugg

SEQ ID NO: 2849504 - RNA, 19 nt, Human
guuuuaugagauggaucac

SEQ ID NO: 2849505 - RNA, 22 nt, Human
guuuuaugagauggaucacaua

SEQ ID NO: 2849506 - RNA, 21 nt, Human
guuuuaauuuaaacaccuccu

SEQ ID NO: 2849507 - RNA, 14 nt, Human
guuuuaauuuaaac

SEQ ID NO: 2849508 - RNA, 19 nt, Human
guuuuauauuuuuauagac

SEQ ID NO: 2849509 - RNA, 11 nt, Human
guuuuaucaag

SEQ ID NO: 2849510 - RNA, 14 nt, Human
guuuuaucaugaca

SEQ ID NO: 2849511 - RNA, 22 nt, Human
guuuuaucaugacauguuauau

SEQ ID NO: 2849512 - RNA, 14 nt, Human
guuuuauuuuaugu

SEQ ID NO: 2849513 - RNA, 17 nt, Human
guuuuauuuuauguuua

SEQ ID NO: 2849514 - RNA, 21 nt, Human
guuuugauguuuguggccuca

SEQ ID NO: 2849515 - RNA, 14 nt, Human
guuuugauaugagu

SEQ ID NO: 2849516 - RNA, 15 nt, Human
guuuugauaugagua

SEQ ID NO: 2849517 - RNA, 16 nt, Human
guuuugauaugaguau

SEQ ID NO: 2849518 - RNA, 19 nt, Human
guuuugaugacuggcauuu

SEQ ID NO: 2849519 - RNA, 22 nt, Human
guuuugaguagauauuacuuua

SEQ ID NO: 2849520 - RNA, 23 nt, Human
guuuugauguuuguggccucaga

SEQ ID NO: 2849521 - RNA, 22 nt, Human
guuuugauguuuguggccucag

SEQ ID NO: 2849522 - RNA, 16 nt, Human
guuuugagaguaaugc

SEQ ID NO: 2849523 - RNA, 15 nt, Human
guuuugaaggcaaaa

SEQ ID NO: 2849524 - RNA, 21 nt, Human
guuuugaaggcaaaauugcaa

SEQ ID NO: 2849525 - RNA, 18 nt, Human
guuuugaauauuacuccu

SEQ ID NO: 2849526 - RNA, 17 nt, Human
guuuugacaucagccag

SEQ ID NO: 2849527 - RNA, 18 nt, Human
guuuugacaucagccagc

SEQ ID NO: 2849528 - RNA, 21 nt, Human
uaaaauggugaagaacuagca

SEQ ID NO: 2849529 - RNA, 16 nt, Human
uaaaaugguuuguccu

SEQ ID NO: 2849530 - RNA, 18 nt, Human
uaaaaugguuuguccuga

SEQ ID NO: 2849531 - RNA, 17 nt, Human
aaguuugaaggaaacag

SEQ ID NO: 2849532 - RNA, 11 nt, Human
uaaaaugugaa

SEQ ID NO: 2849533 - RNA, 14 nt, Human
uaaaaugucuucaa

SEQ ID NO: 2849534 - RNA, 13 nt, Human
uaaaauguauuuu

SEQ ID NO: 2849535 - RNA, 14 nt, Human
uaaaauguauuuuu

SEQ ID NO: 2849536 - RNA, 17 nt, Human
uaaaauguauuuuucua

SEQ ID NO: 2849537 - RNA, 14 nt, Human
uaaaauguaagauu

SEQ ID NO: 2849538 - RNA, 13 nt, Human
uaaaaugugaagu

SEQ ID NO: 2849539 - RNA, 17 nt, Human
uaaaaugugauguucua

SEQ ID NO: 2849540 - RNA, 19 nt, Human
uaaaaugugauguucuaag

SEQ ID NO: 2849541 - RNA, 20 nt, Human
uaaaaugugauguucuaagg

SEQ ID NO: 2849542 - RNA, 21 nt, Human
uaaaaugugauguucuaaggc

SEQ ID NO: 2849543 - RNA, 13 nt, Human
uaaaaugugcagu

SEQ ID NO: 2849544 - RNA, 22 nt, Human
uaaaaugugauguucuaaggcu

SEQ ID NO: 2849545 - RNA, 14 nt, Human
uaaaauguguugaa

SEQ ID NO: 2849546 - RNA, 15 nt, Human
uaaaauguguugaaa

SEQ ID NO: 2849547 - RNA, 18 nt, Human
uaaaauguguugaaacug

SEQ ID NO: 2849548 - RNA, 19 nt, Human
uaaaauguguugaaacugc

SEQ ID NO: 2849549 - RNA, 14 nt, Human
uaaaauuauuugca

SEQ ID NO: 2849550 - RNA, 18 nt, Human
uaaaauugcuauguuacu

SEQ ID NO: 2849551 - RNA, 23 nt, Human
uaaaauugcuauguuacuauuuu

SEQ ID NO: 2849552 - RNA, 16 nt, Human
aaguuuccuuggcugg

SEQ ID NO: 2849553 - RNA, 20 nt, Human
aaguuuccuuggcuggugca

SEQ ID NO: 2849554 - RNA, 11 nt, Human
aaguuucuaag

SEQ ID NO: 2849555 - RNA, 17 nt, Human
aaguuuccuuggcuggu

SEQ ID NO: 2849556 - RNA, 18 nt, Human
aaguuuccuuggcuggug

SEQ ID NO: 2849557 - RNA, 12 nt, Human
aaguuucuaaga

SEQ ID NO: 2849558 - RNA, 13 nt, Human
aaguuucuaagau

SEQ ID NO: 2849559 - RNA, 15 nt, Human
aaguuucuaagauuc

SEQ ID NO: 2849560 - RNA, 16 nt, Human
aaguuucuaagauucu

SEQ ID NO: 2849561 - RNA, 21 nt, Human
aaguuucuaagauucuaaagg

SEQ ID NO: 2849562 - RNA, 17 nt, Human
aaguuucuaagauucua

SEQ ID NO: 2849563 - RNA, 18 nt, Human
aaguuucuaagauucuaa

SEQ ID NO: 2849564 - RNA, 19 nt, Human
aaguuucuaagauucuaaa

SEQ ID NO: 2849565 - RNA, 20 nt, Human
aaguuucuaagauucuaaag

SEQ ID NO: 2849566 - RNA, 13 nt, Human
aaguuucucagau

SEQ ID NO: 2849567 - RNA, 22 nt, Human
aaguuucucagauccuuguuuc

SEQ ID NO: 2849568 - RNA, 23 nt, Human
aaguuucucagauccuuguuuca

SEQ ID NO: 2849569 - RNA, 11 nt, Human
aaguucacaaa

SEQ ID NO: 2849570 - RNA, 17 nt, Human
aaguucacaaaauggug

SEQ ID NO: 2849571 - RNA, 14 nt, Human
aaguucagaguuuu

SEQ ID NO: 2849572 - RNA, 16 nt, Human
aaguucagaguuuucu

SEQ ID NO: 2849573 - RNA, 19 nt, Human
aaguuccaguguucucucu

SEQ ID NO: 2849574 - RNA, 19 nt, Human
aaguuccaugggauacaac

SEQ ID NO: 2849575 - RNA, 12 nt, Human
aaguuucccuuc

SEQ ID NO: 2849576 - RNA, 14 nt, Human
aaguuucccuuccu

SEQ ID NO: 2849577 - RNA, 21 nt, Human
aaguuuccuaaucagaaauuu

SEQ ID NO: 2849578 - RNA, 12 nt, Human
aaguuuccauau

SEQ ID NO: 2849579 - RNA, 18 nt, Human
aaguuuccauauguuaua

SEQ ID NO: 2849580 - RNA, 20 nt, Human
aaguuuccauagcaacagga

SEQ ID NO: 2849581 - RNA, 11 nt, Human
aaguuccuucc

SEQ ID NO: 2849582 - RNA, 14 nt, Human
aaguuccuuugggu

SEQ ID NO: 2849583 - RNA, 14 nt, Human
aaguucccuacuuc

SEQ ID NO: 2849584 - RNA, 17 nt, Human
aaguucccuacuuccug

SEQ ID NO: 2849585 - RNA, 14 nt, Human
aaguuccucuagug

SEQ ID NO: 2849586 - RNA, 20 nt, Human
aaguucccuacuuccuguga

SEQ ID NO: 2849587 - RNA, 15 nt, Human
aagugccaaaugcuc

SEQ ID NO: 2849588 - RNA, 17 nt, Human
aagugccaaaugcucuc

SEQ ID NO: 2849589 - RNA, 13 nt, Human
aagugcauuucug

SEQ ID NO: 2849590 - RNA, 14 nt, Human
aagugcauuucuga

SEQ ID NO: 2849591 - RNA, 22 nt, Human
aagugcauuucugaauagaaau

SEQ ID NO: 2849592 - RNA, 23 nt, Human
aagugcauuucugaauagaaaug

SEQ ID NO: 2849593 - RNA, 21 nt, Human
aagugccacucauuccuguag

SEQ ID NO: 2849594 - RNA, 20 nt, Human
aagugccacucauuccugua

SEQ ID NO: 2849595 - RNA, 17 nt, Human
aagugugaacaaaagau

SEQ ID NO: 2849596 - RNA, 16 nt, Human
aagugucucugccuug

SEQ ID NO: 2849597 - RNA, 17 nt, Human
aagugucucugccuuga

SEQ ID NO: 2849598 - RNA, 21 nt, Human
aagugccagucuugugucugc

SEQ ID NO: 2849599 - RNA, 12 nt, Human
aagugcccccuc

SEQ ID NO: 2849600 - RNA, 14 nt, Human
aagugcccccuccc

SEQ ID NO: 2849601 - RNA, 12 nt, Human
aagugucauguu

SEQ ID NO: 2849602 - RNA, 13 nt, Human
aagugucauguuu

SEQ ID NO: 2849603 - RNA, 16 nt, Human
aagugucaccuuuucu

SEQ ID NO: 2849604 - RNA, 23 nt, Human
aagugucaccuuuucuugccuga

SEQ ID NO: 2849605 - RNA, 23 nt, Human
aaguguguggucccaaguuggaa

SEQ ID NO: 2849606 - RNA, 20 nt, Human
aagugugucaaaucaauaaa

SEQ ID NO: 2849607 - RNA, 20 nt, Human
aagugugcacguugcuucag

SEQ ID NO: 2849608 - RNA, 11 nt, Human
aaguguuacuu

SEQ ID NO: 2849609 - RNA, 11 nt, Human
aaguuaagaau

SEQ ID NO: 2849610 - RNA, 21 nt, Human
aaguguguuuccuucagugca

SEQ ID NO: 2849611 - RNA, 17 nt, Human
aaguguguuuccuucag

SEQ ID NO: 2849612 - RNA, 17 nt, Human
aaguguguguggcagca

SEQ ID NO: 2849613 - RNA, 13 nt, Human
aaguuagcucagg

SEQ ID NO: 2849614 - RNA, 14 nt, Human
aaguuaauaagcaa

SEQ ID NO: 2849615 - RNA, 12 nt, Human
aaguuaauagau

SEQ ID NO: 2849616 - RNA, 18 nt, Human
aaguuaagagaaacuuua

SEQ ID NO: 2849617 - RNA, 19 nt, Human
aaguuaagagaaacuuuau

SEQ ID NO: 2849618 - RNA, 20 nt, Human
aaguuaagagaaacuuuaua

SEQ ID NO: 2849619 - RNA, 21 nt, Human
aaguuaagagaaacuuuauac

SEQ ID NO: 2849620 - RNA, 22 nt, Human
aaguuaagagaaacuuuauaca

SEQ ID NO: 2849621 - RNA, 23 nt, Human
aaguuaagaauguucuuauguug

SEQ ID NO: 2849622 - RNA, 16 nt, Human
aaguuaaugcuuaaga

SEQ ID NO: 2849623 - RNA, 21 nt, Human
aaguuaaugcuuaagagggaa

SEQ ID NO: 2849624 - RNA, 23 nt, Human
aaguuagugcuuguucuaagauu

SEQ ID NO: 2849625 - RNA, 15 nt, Human
aaguuauaagacucu

SEQ ID NO: 2849626 - RNA, 15 nt, Human
aaguuagcucaggag

SEQ ID NO: 2849627 - RNA, 14 nt, Human
aaguuagcucagga

SEQ ID NO: 2849628 - RNA, 11 nt, Human
aaguuauugua

SEQ ID NO: 2849629 - RNA, 12 nt, Human
aaguuauuguac

SEQ ID NO: 2849630 - RNA, 20 nt, Human
aaguuauuguacagcuguuu

SEQ ID NO: 2849631 - RNA, 12 nt, Human
aaguuauauuuc

SEQ ID NO: 2849632 - RNA, 13 nt, Human
aaguuauauuuca

SEQ ID NO: 2849633 - RNA, 14 nt, Human
aaguuauauuucag

SEQ ID NO: 2849634 - RNA, 17 nt, Human
aaguuauauuucagaug

SEQ ID NO: 2849635 - RNA, 23 nt, Human
aaguuauauuucagauguaaugu

SEQ ID NO: 2849636 - RNA, 14 nt, Human
aaguuauaagacuc

SEQ ID NO: 2849637 - RNA, 24 nt, Human
uaaaauaacuaguguugcuuggac

SEQ ID NO: 2849638 - RNA, 15 nt, Human
uaaaagugaucuaca

SEQ ID NO: 2849639 - RNA, 17 nt, Human
uaaaagugcacaccuua

SEQ ID NO: 2849640 - RNA, 18 nt, Human
uaaaagugaaugaaagau

SEQ ID NO: 2849641 - RNA, 19 nt, Human
uaaaagugaaugaaagauu

SEQ ID NO: 2849642 - RNA, 23 nt, Human
uaaaagugaaugaaagauuaaac

SEQ ID NO: 2849643 - RNA, 15 nt, Human
uaaaagucacaaugu

SEQ ID NO: 2849644 - RNA, 22 nt, Human
uaaaagucacaauguucuuuau

SEQ ID NO: 2849645 - RNA, 23 nt, Human
uaaaagucacaauguucuuuaua

SEQ ID NO: 2849646 - RNA, 21 nt, Human
uaaaagucauuuaacugaaga

SEQ ID NO: 2849647 - RNA, 19 nt, Human
uaaaagugggcuugauucu

SEQ ID NO: 2849648 - RNA, 16 nt, Human
uaaaauaaacaguugu

SEQ ID NO: 2849649 - RNA, 17 nt, Human
uaaaauaaacaguugug

SEQ ID NO: 2849650 - RNA, 21 nt, Human
uaaaauaacuaguguugcuug

SEQ ID NO: 2849651 - RNA, 17 nt, Human
uaaaauaaaguauauau

SEQ ID NO: 2849652 - RNA, 13 nt, Human
uaaaauaaaguau

SEQ ID NO: 2849653 - RNA, 17 nt, Human
uaaaagaauauucagag

SEQ ID NO: 2849654 - RNA, 15 nt, Human
uaaaagaaaccacuu

SEQ ID NO: 2849655 - RNA, 16 nt, Human
uaaaacuuugcugcca

SEQ ID NO: 2849656 - RNA, 16 nt, Human
uaaaacuuuucugcug

SEQ ID NO: 2849657 - RNA, 15 nt, Human
uaaaagaaauuuauu

SEQ ID NO: 2849658 - RNA, 18 nt, Human
uaaaagaacuuacugauu

SEQ ID NO: 2849659 - RNA, 19 nt, Human
uaaaagaacuuacugauua

SEQ ID NO: 2849660 - RNA, 20 nt, Human
aagugauucuccugccucag

SEQ ID NO: 2849661 - RNA, 16 nt, Human
aagugauucucaugcc

SEQ ID NO: 2849662 - RNA, 13 nt, Human
aagugauucucau

SEQ ID NO: 2849663 - RNA, 23 nt, Human
aagugauccucccaccucagccu

SEQ ID NO: 2849664 - RNA, 22 nt, Human
aagugaucuacaugaggaacug

SEQ ID NO: 2849665 - RNA, 13 nt, Human
aagugaugacaua

SEQ ID NO: 2849666 - RNA, 14 nt, Human
aagugaugacauau

SEQ ID NO: 2849667 - RNA, 14 nt, Human
aagugcaguucuua

SEQ ID NO: 2849668 - RNA, 22 nt, Human
aagugcaguucuuagcccucua

SEQ ID NO: 2849669 - RNA, 18 nt, Human
aagugcauaugaaauccu

SEQ ID NO: 2849670 - RNA, 17 nt, Human
aagugcacacagaaaua

SEQ ID NO: 2849671 - RNA, 18 nt, Human
aagugcacacagaaauau

SEQ ID NO: 2849672 - RNA, 20 nt, Human
aagugcacacagaaauauau

SEQ ID NO: 2849673 - RNA, 21 nt, Human
aagugcacacagaaauauaua

SEQ ID NO: 2849674 - RNA, 22 nt, Human
aagugcacacagaaauauauau

SEQ ID NO: 2849675 - RNA, 23 nt, Human
aagugcacacagaaauauauaua

SEQ ID NO: 2849676 - RNA, 15 nt, Human
aagugcacuuucuaa

SEQ ID NO: 2849677 - RNA, 16 nt, Human
aagugcacuuucuaau

SEQ ID NO: 2849678 - RNA, 18 nt, Human
aagugauugggacagagg

SEQ ID NO: 2849679 - RNA, 21 nt, Human
aagugauucuccugccucagc

SEQ ID NO: 2849680 - RNA, 17 nt, Human
aagugauucucaugccu

SEQ ID NO: 2849681 - RNA, 18 nt, Human
aagugaugggcuuucucu

SEQ ID NO: 2849682 - RNA, 20 nt, Human
aagugauccucccaccucag

SEQ ID NO: 2849683 - RNA, 19 nt, Human
aagugauccucccaccuca

SEQ ID NO: 2849684 - RNA, 13 nt, Human
aagugauccuccc

SEQ ID NO: 2849685 - RNA, 14 nt, Human
uaaaauauaaacaa

SEQ ID NO: 2849686 - RNA, 18 nt, Human
uaaaauagcuuguauagu

SEQ ID NO: 2849687 - RNA, 19 nt, Human
uaaaauaggggauauuuaa

SEQ ID NO: 2849688 - RNA, 13 nt, Human
uaaaauacauuua

SEQ ID NO: 2849689 - RNA, 14 nt, Human
uaaaauacauuuaa

SEQ ID NO: 2849690 - RNA, 15 nt, Human
uaaaauacauuuaaa

SEQ ID NO: 2849691 - RNA, 16 nt, Human
uaaaauacauuuaaaa

SEQ ID NO: 2849692 - RNA, 18 nt, Human
uaaaauacauuuaaaacu

SEQ ID NO: 2849693 - RNA, 14 nt, Human
uaaaauaaauuagu

SEQ ID NO: 2849694 - RNA, 18 nt, Human
uaaaauaaugcaaagaau

SEQ ID NO: 2849695 - RNA, 17 nt, Human
uaaaauaguuguccaua

SEQ ID NO: 2849696 - RNA, 23 nt, Human
uaaaauaguuguccauauuuuca

SEQ ID NO: 2849697 - RNA, 14 nt, Human
uaaaauagcuugua

SEQ ID NO: 2849698 - RNA, 21 nt, Human
uaaaauagcaacacucuauau

SEQ ID NO: 2849699 - RNA, 22 nt, Human
uaaaaagccugcaauuucauau

SEQ ID NO: 2849700 - RNA, 19 nt, Human
uaaaaagccugcaauuuca

SEQ ID NO: 2849701 - RNA, 22 nt, Human
uaaaaagcuccaaaugcagcuu

SEQ ID NO: 2849702 - RNA, 20 nt, Human
uaaaaagcuuccaugauucu

SEQ ID NO: 2849703 - RNA, 16 nt, Human
aagucaguauggucua

SEQ ID NO: 2849704 - RNA, 21 nt, Human
aagucaggcccuuauuuucaa

SEQ ID NO: 2849705 - RNA, 22 nt, Human
uaaaaaaaaaaaaaagcuuuau

SEQ ID NO: 2849706 - RNA, 18 nt, Human
uaaaaaaaaaaaaaggaa

SEQ ID NO: 2849707 - RNA, 19 nt, Human
uaaaaaaaaaaaaaggaaa

SEQ ID NO: 2849708 - RNA, 20 nt, Human
uaaaaaaaaaaaaaggaaaa

SEQ ID NO: 2849709 - RNA, 22 nt, Human
uaaaaaaaaaaaaaggaaaaaa

SEQ ID NO: 2849710 - RNA, 23 nt, Human
uaaaaaaaaaaaaaggaaaaaaa

SEQ ID NO: 2849711 - RNA, 22 nt, Human
uaaaaaaaaaaaccaaaacugu

SEQ ID NO: 2849712 - RNA, 18 nt, Human
uaaaaaaaaaaagauugu

SEQ ID NO: 2849713 - RNA, 19 nt, Human
uaaaaaaaaaaagauugua

SEQ ID NO: 2849714 - RNA, 17 nt, Human
uaaaaaaaaaaguuaca

SEQ ID NO: 2849715 - RNA, 21 nt, Human
uaaaaaaaaaaguuacagaaa

SEQ ID NO: 2849716 - RNA, 21 nt, Human
uaaaaaggacaucagcaaaca

SEQ ID NO: 2849717 - RNA, 20 nt, Human
uaaaaaggagaauuuuuccu

SEQ ID NO: 2849718 - RNA, 19 nt, Human
uaaaaaggacaucagcaaa

SEQ ID NO: 2849719 - RNA, 20 nt, Human
uaaaaaggaauccacuccca

SEQ ID NO: 2849720 - RNA, 15 nt, Human
uaaaaaggaacugca

SEQ ID NO: 2849721 - RNA, 17 nt, Human
uaaaaaggaacugcagc

SEQ ID NO: 2849722 - RNA, 18 nt, Human
uaaaaaggaacugcagca

SEQ ID NO: 2849723 - RNA, 18 nt, Human
uaaaaaggacaucagcaa

SEQ ID NO: 2849724 - RNA, 11 nt, Human
uaaaaaggaca

SEQ ID NO: 2849725 - RNA, 14 nt, Human
uaaaaauauugugu

SEQ ID NO: 2849726 - RNA, 19 nt, Human
uaaaaauauggaacuucua

SEQ ID NO: 2849727 - RNA, 13 nt, Human
uaaaaauauauau

SEQ ID NO: 2849728 - RNA, 22 nt, Human
uaaaaauauauauagugcuaua

SEQ ID NO: 2849729 - RNA, 14 nt, Human
uaaaaauacauauc

SEQ ID NO: 2849730 - RNA, 15 nt, Human
uaaaaagugacacag

SEQ ID NO: 2849731 - RNA, 17 nt, Human
uaaaaagugacacagca

SEQ ID NO: 2849732 - RNA, 18 nt, Human
uaaaaagugacacagcag

SEQ ID NO: 2849733 - RNA, 13 nt, Human
uaaaaaugacaga

SEQ ID NO: 2849734 - RNA, 22 nt, Human
uaaaaauauuguguugugaaug

SEQ ID NO: 2849735 - RNA, 21 nt, Human
uaaaaauauuguguugugaau

SEQ ID NO: 2849736 - RNA, 23 nt, Human
uaaaaauauggaacuucuaauau

SEQ ID NO: 2849737 - RNA, 15 nt, Human
uaaaaauauguacaa

SEQ ID NO: 2849738 - RNA, 15 nt, Human
uaaaacuuugcugcc

SEQ ID NO: 2849739 - RNA, 14 nt, Human
uaaaacuuugcugc

SEQ ID NO: 2849740 - RNA, 20 nt, Human
uaaaacuuaccuaagugaca

SEQ ID NO: 2849741 - RNA, 13 nt, Human
uaaaacuucuuaa

SEQ ID NO: 2849742 - RNA, 19 nt, Human
aagucagcccaacaggcag

SEQ ID NO: 2849743 - RNA, 22 nt, Human
uaaaacuauauucauuuccacu

SEQ ID NO: 2849744 - RNA, 12 nt, Human
uaaaacugcuuu

SEQ ID NO: 2849745 - RNA, 13 nt, Human
uaaaacugcuuuu

SEQ ID NO: 2849746 - RNA, 21 nt, Human
uaaaacugcuuuuuuuuuucc

SEQ ID NO: 2849747 - RNA, 16 nt, Human
uaaaacuggccugacu

SEQ ID NO: 2849748 - RNA, 20 nt, Human
uaaaacugggccuguagcuc

SEQ ID NO: 2849749 - RNA, 17 nt, Human
aagcaccuccugccucg

SEQ ID NO: 2849750 - RNA, 19 nt, Human
aagcaccgccuccaaaugc

SEQ ID NO: 2849751 - RNA, 14 nt, Human
aagcaccccaugcc

SEQ ID NO: 2849752 - RNA, 12 nt, Human
aagcacucgugu

SEQ ID NO: 2849753 - RNA, 13 nt, Human
aagcacuagagaa

SEQ ID NO: 2849754 - RNA, 20 nt, Human
aagcacuagagaaugcacag

SEQ ID NO: 2849755 - RNA, 16 nt, Human
aagcaccuuagcuggc

SEQ ID NO: 2849756 - RNA, 19 nt, Human
aagcaccuuagcuggcauu

SEQ ID NO: 2849757 - RNA, 16 nt, Human
aagcaccuccugccuc

SEQ ID NO: 2849758 - RNA, 15 nt, Human
aagcaccuccugccu

SEQ ID NO: 2849759 - RNA, 14 nt, Human
aagcaccuccugcc

SEQ ID NO: 2849760 - RNA, 13 nt, Human
aagcaccuccugc

SEQ ID NO: 2849761 - RNA, 16 nt, Human
aagcacaucugcauuu

SEQ ID NO: 2849762 - RNA, 18 nt, Human
aagcacaguuugaacaaa

SEQ ID NO: 2849763 - RNA, 16 nt, Human
aagcacaguuugaaca

SEQ ID NO: 2849764 - RNA, 17 nt, Human
aagcacaguuugaacaa

SEQ ID NO: 2849765 - RNA, 14 nt, Human
aagcaccaagcuca

SEQ ID NO: 2849766 - RNA, 11 nt, Human
aagcacagcug

SEQ ID NO: 2849767 - RNA, 14 nt, Human
aagcacaggagaca

SEQ ID NO: 2849768 - RNA, 18 nt, Human
aagcacaggagacacugu

SEQ ID NO: 2849769 - RNA, 13 nt, Human
aagcacaguguua

SEQ ID NO: 2849770 - RNA, 18 nt, Human
aagcacaguguuaaauga

SEQ ID NO: 2849771 - RNA, 20 nt, Human
aagcacaguguuaaaugaaa

SEQ ID NO: 2849772 - RNA, 14 nt, Human
aagcacaguuugaa

SEQ ID NO: 2849773 - RNA, 15 nt, Human
aagcacaguuugaac

SEQ ID NO: 2849774 - RNA, 23 nt, Human
aagcacaagcagagugcacagcu

SEQ ID NO: 2849775 - RNA, 15 nt, Human
aagcacaaacuuuag

SEQ ID NO: 2849776 - RNA, 18 nt, Human
aagcacacacaaaauaaa

SEQ ID NO: 2849777 - RNA, 19 nt, Human
aagcacacucauccccuca

SEQ ID NO: 2849778 - RNA, 20 nt, Human
gugugaaguacaauaauuca

SEQ ID NO: 2849779 - RNA, 17 nt, Human
guguuucuauugacuuc

SEQ ID NO: 2849780 - RNA, 12 nt, Human
guguuucuauga

SEQ ID NO: 2849781 - RNA, 19 nt, Human
guguuucuaugaguggaaa

SEQ ID NO: 2849782 - RNA, 15 nt, Human
guguuucuguuauua

SEQ ID NO: 2849783 - RNA, 13 nt, Human
aagcauugugagu

SEQ ID NO: 2849784 - RNA, 14 nt, Human
aagcauugugagua

SEQ ID NO: 2849785 - RNA, 16 nt, Human
aagcauguuucauguu

SEQ ID NO: 2849786 - RNA, 20 nt, Human
aagcauguuucauguuuugu

SEQ ID NO: 2849787 - RNA, 18 nt, Human
aagcauuuacaagugcug

SEQ ID NO: 2849788 - RNA, 19 nt, Human
aagccaaagaaaugaacau

SEQ ID NO: 2849789 - RNA, 20 nt, Human
aagccaaagaaaugaacauu

SEQ ID NO: 2849790 - RNA, 22 nt, Human
aagccaaagaaaugaacauucc

SEQ ID NO: 2849791 - RNA, 23 nt, Human
aagccaaagaaaugaacauucca

SEQ ID NO: 2849792 - RNA, 14 nt, Human
aagcauuuguauuu

SEQ ID NO: 2849793 - RNA, 17 nt, Human
aagcauuuguauuuugu

SEQ ID NO: 2849794 - RNA, 18 nt, Human
aagcauuuguauuuugug

SEQ ID NO: 2849795 - RNA, 19 nt, Human
aagcauuuguauuuugugu

SEQ ID NO: 2849796 - RNA, 21 nt, Human
aagcauuuguauuuuguguga

SEQ ID NO: 2849797 - RNA, 17 nt, Human
aagccaauaacacacag

SEQ ID NO: 2849798 - RNA, 18 nt, Human
aagccaauaacacacagc

SEQ ID NO: 2849799 - RNA, 20 nt, Human
aagccaauaacacacagcua

SEQ ID NO: 2849800 - RNA, 21 nt, Human
aagccaaggugucauuuaugu

SEQ ID NO: 2849801 - RNA, 18 nt, Human
aagccaaagcuaggccug

SEQ ID NO: 2849802 - RNA, 17 nt, Human
aagccaaagcuaggccu

SEQ ID NO: 2849803 - RNA, 20 nt, Human
aagccaaagcuaggccuggc

SEQ ID NO: 2849804 - RNA, 13 nt, Human
aagccaaagccaa

SEQ ID NO: 2849805 - RNA, 17 nt, Human
aagcacucuuaaagcaa

SEQ ID NO: 2849806 - RNA, 13 nt, Human
aagcacugaaaaa

SEQ ID NO: 2849807 - RNA, 11 nt, Human
aagcacugaua

SEQ ID NO: 2849808 - RNA, 12 nt, Human
aagcacugugcu

SEQ ID NO: 2849809 - RNA, 14 nt, Human
aagcacacuuguag

SEQ ID NO: 2849810 - RNA, 21 nt, Human
aagcauauggguuagauguug

SEQ ID NO: 2849811 - RNA, 19 nt, Human
aagcauauggguuagaugu

SEQ ID NO: 2849812 - RNA, 15 nt, Human
aagcauauagagaug

SEQ ID NO: 2849813 - RNA, 16 nt, Human
aagcauauagagauga

SEQ ID NO: 2849814 - RNA, 19 nt, Human
aagcaucaccucaggccag

SEQ ID NO: 2849815 - RNA, 18 nt, Human
aagcaucaccucaggcca

SEQ ID NO: 2849816 - RNA, 16 nt, Human
aagcaucaccucaggc

SEQ ID NO: 2849817 - RNA, 15 nt, Human
aagcaucaccucagg

SEQ ID NO: 2849818 - RNA, 23 nt, Human
aagcaucaccucaggccaggugc

SEQ ID NO: 2849819 - RNA, 18 nt, Human
aagcaucagggggaagaa

SEQ ID NO: 2849820 - RNA, 23 nt, Human
aagcaucagggggaagaagcaga

SEQ ID NO: 2849821 - RNA, 19 nt, Human
aagcaucaguucuacggau

SEQ ID NO: 2849822 - RNA, 12 nt, Human
aagcauguuuca

SEQ ID NO: 2849823 - RNA, 14 nt, Human
aagcauguuucaug

SEQ ID NO: 2849824 - RNA, 15 nt, Human
aagcauguuucaugu

SEQ ID NO: 2849825 - RNA, 13 nt, Human
aagcaugugucau

SEQ ID NO: 2849826 - RNA, 17 nt, Human
aagcaugugucaugcau

SEQ ID NO: 2849827 - RNA, 22 nt, Human
aagcaugcuugugaaaaugugu

SEQ ID NO: 2849828 - RNA, 13 nt, Human
aagcaugcauucu

SEQ ID NO: 2849829 - RNA, 11 nt, Human
aagcauggacu

SEQ ID NO: 2849830 - RNA, 21 nt, Human
aagcaugcuugugaaaaugug

SEQ ID NO: 2849831 - RNA, 13 nt, Human
aagcaaauuucaa

SEQ ID NO: 2849832 - RNA, 20 nt, Human
aagcaaauuucaaaagacau

SEQ ID NO: 2849833 - RNA, 22 nt, Human
aagcaaauuucaaaagacaugu

SEQ ID NO: 2849834 - RNA, 14 nt, Human
aagauuuuuucauu

SEQ ID NO: 2849835 - RNA, 17 nt, Human
aagauuuuuucauuuca

SEQ ID NO: 2849836 - RNA, 13 nt, Human
aagcaaaaaauga

SEQ ID NO: 2849837 - RNA, 20 nt, Human
aagcaaaaaaugaaugucua

SEQ ID NO: 2849838 - RNA, 23 nt, Human
aagcaaaaacaaaccaugacuga

SEQ ID NO: 2849839 - RNA, 12 nt, Human
aagcaaaaaugc

SEQ ID NO: 2849840 - RNA, 13 nt, Human
aagcaaaaaugcu

SEQ ID NO: 2849841 - RNA, 14 nt, Human
aagcaaaaaugcua

SEQ ID NO: 2849842 - RNA, 16 nt, Human
aagcaaaaaugcuaau

SEQ ID NO: 2849843 - RNA, 17 nt, Human
aagcaaaaaugcuaaua

SEQ ID NO: 2849844 - RNA, 11 nt, Human
aagcaaaagaa

SEQ ID NO: 2849845 - RNA, 13 nt, Human
aagcaaaagaaaa

SEQ ID NO: 2849846 - RNA, 14 nt, Human
aagcaaaagaaaaa

SEQ ID NO: 2849847 - RNA, 15 nt, Human
aagcaaaagaaaaag

SEQ ID NO: 2849848 - RNA, 15 nt, Human
aagcaaaauaaaaac

SEQ ID NO: 2849849 - RNA, 16 nt, Human
aagcaaaauaaaaacu

SEQ ID NO: 2849850 - RNA, 18 nt, Human
aagcaaaauaaaaacuau

SEQ ID NO: 2849851 - RNA, 13 nt, Human
aagcaaaauccug

SEQ ID NO: 2849852 - RNA, 13 nt, Human
aagcaaaauauua

SEQ ID NO: 2849853 - RNA, 14 nt, Human
aagcaaaauauuau

SEQ ID NO: 2849854 - RNA, 18 nt, Human
aagauggaguuucuaagg

SEQ ID NO: 2849855 - RNA, 20 nt, Human
aagauggaguuucuaagguc

SEQ ID NO: 2849856 - RNA, 17 nt, Human
aagauggcugacuuugc

SEQ ID NO: 2849857 - RNA, 17 nt, Human
aagauggcucagagggg

SEQ ID NO: 2849858 - RNA, 19 nt, Human
aagauggcucagaggggga

SEQ ID NO: 2849859 - RNA, 21 nt, Human
aagauggcucagagggggacu

SEQ ID NO: 2849860 - RNA, 16 nt, Human
aagauggcugugccuc

SEQ ID NO: 2849861 - RNA, 15 nt, Human
aagauuuuucucaaa

SEQ ID NO: 2849862 - RNA, 19 nt, Human
aagauuuuucucaaaguuu

SEQ ID NO: 2849863 - RNA, 20 nt, Human
aagauuuuucucaaaguuuu

SEQ ID NO: 2849864 - RNA, 21 nt, Human
aagauuuuucucaaaguuuug

SEQ ID NO: 2849865 - RNA, 22 nt, Human
aagaucaaaagcuuauucaucu

SEQ ID NO: 2849866 - RNA, 15 nt, Human
aagauggaguuucua

SEQ ID NO: 2849867 - RNA, 16 nt, Human
aagauggaguuucuaa

SEQ ID NO: 2849868 - RNA, 17 nt, Human
aagauggaguuucuaag

SEQ ID NO: 2849869 - RNA, 13 nt, Human
gugucuguacacg

SEQ ID NO: 2849870 - RNA, 16 nt, Human
gugucuguacacgugu

SEQ ID NO: 2849871 - RNA, 21 nt, Human
gugucuguacacguguccugu

SEQ ID NO: 2849872 - RNA, 22 nt, Human
gugucuguacacguguccugua

SEQ ID NO: 2849873 - RNA, 19 nt, Human
gugucagguggggcagcuu

SEQ ID NO: 2849874 - RNA, 12 nt, Human
gugucuguacac

SEQ ID NO: 2849875 - RNA, 23 nt, Human
gugugaaccaccacacccagccc

SEQ ID NO: 2849876 - RNA, 14 nt, Human
gugucuguauuuau

SEQ ID NO: 2849877 - RNA, 21 nt, Human
gugucuguauuucauguggcu

SEQ ID NO: 2849878 - RNA, 13 nt, Human
gugucuguauuua

SEQ ID NO: 2849879 - RNA, 18 nt, Human
gugucuguaaaagagccu

SEQ ID NO: 2849880 - RNA, 14 nt, Human
gugucuuaauuauu

SEQ ID NO: 2849881 - RNA, 21 nt, Human
gugugaaaggaagcuccacug

SEQ ID NO: 2849882 - RNA, 18 nt, Human
gugugaaagucagaugcc

SEQ ID NO: 2849883 - RNA, 15 nt, Human
gugucuuaauuauua

SEQ ID NO: 2849884 - RNA, 19 nt, Human
gugucuuaauuauuauuug

SEQ ID NO: 2849885 - RNA, 14 nt, Human
gugucaccugaaga

SEQ ID NO: 2849886 - RNA, 21 nt, Human
guguauucuuaaaaugcaaua

SEQ ID NO: 2849887 - RNA, 17 nt, Human
guguauuuaacagggag

SEQ ID NO: 2849888 - RNA, 18 nt, Human
guguauuuaacagggagg

SEQ ID NO: 2849889 - RNA, 12 nt, Human
guguauguguau

SEQ ID NO: 2849890 - RNA, 18 nt, Human
gugucagguggggcagcu

SEQ ID NO: 2849891 - RNA, 14 nt, Human
gugucagguggggc

SEQ ID NO: 2849892 - RNA, 22 nt, Human
gugucaccugaagacucauucu

SEQ ID NO: 2849893 - RNA, 14 nt, Human
gugucaccccagag

SEQ ID NO: 2849894 - RNA, 15 nt, Human
gugucaccccagagc

SEQ ID NO: 2849895 - RNA, 16 nt, Human
gugucaccccagagcc

SEQ ID NO: 2849896 - RNA, 17 nt, Human
gugucaccccagagcca

SEQ ID NO: 2849897 - RNA, 19 nt, Human
gugucaccccagagccaca

SEQ ID NO: 2849898 - RNA, 21 nt, Human
gugucaccccagagccacaca

SEQ ID NO: 2849899 - RNA, 22 nt, Human
gugucaccccagagccacacau

SEQ ID NO: 2849900 - RNA, 24 nt, Human
gugucaccccagagccacacaugg

SEQ ID NO: 2849901 - RNA, 17 nt, Human
gugucaccuuuucuugc

SEQ ID NO: 2849902 - RNA, 18 nt, Human
gugucaccuuuucuugcc

SEQ ID NO: 2849903 - RNA, 13 nt, Human
gugucacaaagaa

SEQ ID NO: 2849904 - RNA, 17 nt, Human
aagauagcuucacccca

SEQ ID NO: 2849905 - RNA, 20 nt, Human
aagauauaacuauugcccag

SEQ ID NO: 2849906 - RNA, 22 nt, Human
aagagggucugaggaauccaga

SEQ ID NO: 2849907 - RNA, 22 nt, Human
aagaggguuuuagguagaaaaa

SEQ ID NO: 2849908 - RNA, 23 nt, Human
aagaggguuuuagguagaaaaac

SEQ ID NO: 2849909 - RNA, 15 nt, Human
aagagguacaggguu

SEQ ID NO: 2849910 - RNA, 16 nt, Human
aagagguacaggguuu

SEQ ID NO: 2849911 - RNA, 17 nt, Human
aagagguacaggguuuu

SEQ ID NO: 2849912 - RNA, 20 nt, Human
aagagguacaggguuuuuac

SEQ ID NO: 2849913 - RNA, 21 nt, Human
aagagguauuuaucuuuacuu

SEQ ID NO: 2849914 - RNA, 16 nt, Human
aagaggugggagggcc

SEQ ID NO: 2849915 - RNA, 15 nt, Human
aagaggugggagggc

SEQ ID NO: 2849916 - RNA, 17 nt, Human
aagaggugggagggccc

SEQ ID NO: 2849917 - RNA, 18 nt, Human
aagagggagauggagacu

SEQ ID NO: 2849918 - RNA, 23 nt, Human
aagaggcccugucuguaccuaac

SEQ ID NO: 2849919 - RNA, 12 nt, Human
aagaggcugcug

SEQ ID NO: 2849920 - RNA, 22 nt, Human
aagagggaauccccgaaggugc

SEQ ID NO: 2849921 - RNA, 11 nt, Human
aagaggcaggg

SEQ ID NO: 2849922 - RNA, 14 nt, Human
aagaggcagggucu

SEQ ID NO: 2849923 - RNA, 16 nt, Human
aagaggcagaaaauug

SEQ ID NO: 2849924 - RNA, 19 nt, Human
aagaggcagaaaauugcac

SEQ ID NO: 2849925 - RNA, 14 nt, Human
guguaaauguuagu

SEQ ID NO: 2849926 - RNA, 13 nt, Human
guguaaauuaugu

SEQ ID NO: 2849927 - RNA, 22 nt, Human
guguaaauuauguaaugcaaaa

SEQ ID NO: 2849928 - RNA, 15 nt, Human
guguaaaaugugaag

SEQ ID NO: 2849929 - RNA, 20 nt, Human
gugguuggggcccugcccug

SEQ ID NO: 2849930 - RNA, 12 nt, Human
gugguuuucuua

SEQ ID NO: 2849931 - RNA, 23 nt, Human
gugguuuucuuaaggugaggccu

SEQ ID NO: 2849932 - RNA, 14 nt, Human
gugguugaagagca

SEQ ID NO: 2849933 - RNA, 13 nt, Human
gugcucauuuaag

SEQ ID NO: 2849934 - RNA, 18 nt, Human
gugguuccccaccgaagu

SEQ ID NO: 2849935 - RNA, 20 nt, Human
guuagagacuuuuuucuagu

SEQ ID NO: 2849936 - RNA, 20 nt, Human
guuagagagggaccaugugu

SEQ ID NO: 2849937 - RNA, 21 nt, Human
guuagagagggaccauguguc

SEQ ID NO: 2849938 - RNA, 22 nt, Human
guuagagagggaccauguguca

SEQ ID NO: 2849939 - RNA, 23 nt, Human
guuagagagggaccaugugucac

SEQ ID NO: 2849940 - RNA, 13 nt, Human
guuacuguaauuc

SEQ ID NO: 2849941 - RNA, 10 nt, Human
guuacuguuc

SEQ ID NO: 2849942 - RNA, 11 nt, Human
guuacuguucu

SEQ ID NO: 2849943 - RNA, 12 nt, Human
guuacuguucuu

SEQ ID NO: 2849944 - RNA, 13 nt, Human
guuacuguucuug

SEQ ID NO: 2849945 - RNA, 14 nt, Human
guuacuguucuugc

SEQ ID NO: 2849946 - RNA, 15 nt, Human
guuacuguucuugcu

SEQ ID NO: 2849947 - RNA, 16 nt, Human
guuacuguucuugcug

SEQ ID NO: 2849948 - RNA, 17 nt, Human
guuacuguucuugcugc

SEQ ID NO: 2849949 - RNA, 18 nt, Human
guuacuguucuugcugcu

SEQ ID NO: 2849950 - RNA, 19 nt, Human
guuacuguucuugcugcua

SEQ ID NO: 2849951 - RNA, 20 nt, Human
guuacuguucuugcugcuag

SEQ ID NO: 2849952 - RNA, 21 nt, Human
guuacuguucuugcugcuaga

SEQ ID NO: 2849953 - RNA, 22 nt, Human
guuacuguucuugcugcuagaa

SEQ ID NO: 2849954 - RNA, 23 nt, Human
guuacuguucuugcugcuagaac

SEQ ID NO: 2849955 - RNA, 24 nt, Human
guuacuguucuugcugcuagaacu

SEQ ID NO: 2849956 - RNA, 22 nt, Human
guuagaccgcucucuuuucugu

SEQ ID NO: 2849957 - RNA, 23 nt, Human
guuagaccgcucucuuuucugua

SEQ ID NO: 2849958 - RNA, 9 nt, Human
guuacuguu

SEQ ID NO: 2849959 - RNA, 18 nt, Human
guuacuguuaaccauuua

SEQ ID NO: 2849960 - RNA, 22 nt, Human
guuagacugacuuguuugucuu

SEQ ID NO: 2849961 - RNA, 23 nt, Human
guuagacugacuuguuugucuuc

SEQ ID NO: 2849962 - RNA, 15 nt, Human
guuaauuuuuacaug

SEQ ID NO: 2849963 - RNA, 10 nt, Human
guuagagcac

SEQ ID NO: 2849964 - RNA, 17 nt, Human
guuauuguacagcuguu

SEQ ID NO: 2849965 - RNA, 12 nt, Human
guuauugugaau

SEQ ID NO: 2849966 - RNA, 14 nt, Human
guuauugugaauga

SEQ ID NO: 2849967 - RNA, 15 nt, Human
guuauugugaaugau

SEQ ID NO: 2849968 - RNA, 14 nt, Human
guuauuguuuuguu

SEQ ID NO: 2849969 - RNA, 17 nt, Human
guuauuuguuuaccacu

SEQ ID NO: 2849970 - RNA, 18 nt, Human
guuauuuguuauuuucag

SEQ ID NO: 2849971 - RNA, 19 nt, Human
guuauuuguuauuuucagu

SEQ ID NO: 2849972 - RNA, 12 nt, Human
guuauuuucagu

SEQ ID NO: 2849973 - RNA, 14 nt, Human
guuauuuucaguau

SEQ ID NO: 2849974 - RNA, 15 nt, Human
guuauuuucaguauu

SEQ ID NO: 2849975 - RNA, 18 nt, Human
aagccauuaaaugaauau

SEQ ID NO: 2849976 - RNA, 22 nt, Human
aagccauuaaaugaauauuuug

SEQ ID NO: 2849977 - RNA, 20 nt, Human
aagccauucuaaggaaauua

SEQ ID NO: 2849978 - RNA, 23 nt, Human
aagcccacagcacagcucccugc

SEQ ID NO: 2849979 - RNA, 18 nt, Human
guuaauacgcaggcaucu

SEQ ID NO: 2849980 - RNA, 19 nt, Human
guuaauaagcaaaauccug

SEQ ID NO: 2849981 - RNA, 21 nt, Human
guuaauauaucccagaaauua

SEQ ID NO: 2849982 - RNA, 13 nt, Human
aagcccagcuuga

SEQ ID NO: 2849983 - RNA, 17 nt, Human
guuaauuuaucuaaauu

SEQ ID NO: 2849984 - RNA, 21 nt, Human
guuaauuuaucuaaauuaaag

SEQ ID NO: 2849985 - RNA, 18 nt, Human
guuaauuuuauucaagaa

SEQ ID NO: 2849986 - RNA, 18 nt, Human
guuaauuuuuugguacaa

SEQ ID NO: 2849987 - RNA, 20 nt, Human
guuaauuuuuugguacaaaa

SEQ ID NO: 2849988 - RNA, 23 nt, Human
guuacucuucaguuaagccuuug

SEQ ID NO: 2849989 - RNA, 19 nt, Human
guuaauauuuauaggucac

SEQ ID NO: 2849990 - RNA, 19 nt, Human
guuaauuccaauuauauga

SEQ ID NO: 2849991 - RNA, 22 nt, Human
aagccuucgggcgucugugugc

SEQ ID NO: 2849992 - RNA, 19 nt, Human
aagccuucagcuccaggga

SEQ ID NO: 2849993 - RNA, 14 nt, Human
aagccuuagggaag

SEQ ID NO: 2849994 - RNA, 15 nt, Human
aagccuucagcucca

SEQ ID NO: 2849995 - RNA, 17 nt, Human
aagccuucagcuccagg

SEQ ID NO: 2849996 - RNA, 16 nt, Human
aagccuucagcuccag

SEQ ID NO: 2849997 - RNA, 20 nt, Human
aagcuaguguaccuccucuc

SEQ ID NO: 2849998 - RNA, 21 nt, Human
aagcuaguguaccuccucuca

SEQ ID NO: 2849999 - RNA, 22 nt, Human
aagcuaggguggcccuugcagu

SEQ ID NO: 2850000 - RNA, 19 nt, Human
aagcuaggguggcccuugc

SEQ ID NO: 2850001 - RNA, 15 nt, Human
aagcuaggguggccc

SEQ ID NO: 2850002 - RNA, 12 nt, Human
aagccuccacag

SEQ ID NO: 2850003 - RNA, 20 nt, Human
aagccucauauuuaaagaca

SEQ ID NO: 2850004 - RNA, 14 nt, Human
aagccucauauuua

SEQ ID NO: 2850005 - RNA, 15 nt, Human
aagccuccacagcga

SEQ ID NO: 2850006 - RNA, 13 nt, Human
aagccuccacagc

SEQ ID NO: 2850007 - RNA, 23 nt, Human
aagccuccacagcgagggcagcu

SEQ ID NO: 2850008 - RNA, 13 nt, Human
aagccugugcaaa

SEQ ID NO: 2850009 - RNA, 16 nt, Human
aagccugugcaaaaaa

SEQ ID NO: 2850010 - RNA, 17 nt, Human
aagccugugcaaaaaaa

SEQ ID NO: 2850011 - RNA, 18 nt, Human
aagccugugcaaaaaaau

SEQ ID NO: 2850012 - RNA, 14 nt, Human
aagccuguggauga

SEQ ID NO: 2850013 - RNA, 15 nt, Human
aagccuguggaugau

SEQ ID NO: 2850014 - RNA, 17 nt, Human
aagccuguggaugauca

SEQ ID NO: 2850015 - RNA, 22 nt, Human
aagccuguggaugaucaauccu

SEQ ID NO: 2850016 - RNA, 12 nt, Human
aagccuguggcu

SEQ ID NO: 2850017 - RNA, 13 nt, Human
aagccuguggcug

SEQ ID NO: 2850018 - RNA, 15 nt, Human
aagccuguggcugug

SEQ ID NO: 2850019 - RNA, 18 nt, Human
guucagguaacaggcaga

SEQ ID NO: 2850020 - RNA, 17 nt, Human
guucagguaacaggcag

SEQ ID NO: 2850021 - RNA, 18 nt, Human
guucaguauuauguaguu

SEQ ID NO: 2850022 - RNA, 23 nt, Human
guucagucugaaugcugccacaa

SEQ ID NO: 2850023 - RNA, 16 nt, Human
guucagggcuuuucuu

SEQ ID NO: 2850024 - RNA, 18 nt, Human
guucaggggacucagccc

SEQ ID NO: 2850025 - RNA, 15 nt, Human
guucaggggacucag

SEQ ID NO: 2850026 - RNA, 22 nt, Human
aagccguuguuuacuuaaagau

SEQ ID NO: 2850027 - RNA, 15 nt, Human
aagccguggcuuccc

SEQ ID NO: 2850028 - RNA, 13 nt, Human
aagccguggcuuc

SEQ ID NO: 2850029 - RNA, 14 nt, Human
aagccguggcuucc

SEQ ID NO: 2850030 - RNA, 22 nt, Human
guucaggguuggccccugcccg

SEQ ID NO: 2850031 - RNA, 21 nt, Human
guucaggguuggccccugccc

SEQ ID NO: 2850032 - RNA, 20 nt, Human
guucaggguuggccccugcc

SEQ ID NO: 2850033 - RNA, 21 nt, Human
guucaggagucccaaggaaag

SEQ ID NO: 2850034 - RNA, 20 nt, Human
guucaggagucccaaggaaa

SEQ ID NO: 2850035 - RNA, 23 nt, Human
guucagcuuguaaauagcucagg

SEQ ID NO: 2850036 - RNA, 18 nt, Human
guucaggagucccaagga

SEQ ID NO: 2850037 - RNA, 15 nt, Human
guucaggagucccaa

SEQ ID NO: 2850038 - RNA, 17 nt, Human
guuauuuucaguauuuu

SEQ ID NO: 2850039 - RNA, 15 nt, Human
guuauuuucuucuaa

SEQ ID NO: 2850040 - RNA, 15 nt, Human
guuauuuugauaaca

SEQ ID NO: 2850041 - RNA, 15 nt, Human
guucagcuguccucc

SEQ ID NO: 2850042 - RNA, 17 nt, Human
guucagcuguccucccu

SEQ ID NO: 2850043 - RNA, 18 nt, Human
guucagcuguccucccuc

SEQ ID NO: 2850044 - RNA, 19 nt, Human
guucagcuguccucccucc

SEQ ID NO: 2850045 - RNA, 21 nt, Human
guucagcuguccucccuccac

SEQ ID NO: 2850046 - RNA, 18 nt, Human
guucccucugcucagcca

SEQ ID NO: 2850047 - RNA, 12 nt, Human
guucccuuggcc

SEQ ID NO: 2850048 - RNA, 15 nt, Human
guucccugaaacacg

SEQ ID NO: 2850049 - RNA, 16 nt, Human
guucccugaaacacga

SEQ ID NO: 2850050 - RNA, 16 nt, Human
guucccugucuugucc

SEQ ID NO: 2850051 - RNA, 15 nt, Human
guucccuguucuucc

SEQ ID NO: 2850052 - RNA, 16 nt, Human
guucccuguucuuccu

SEQ ID NO: 2850053 - RNA, 17 nt, Human
guucccuguucuuccuc

SEQ ID NO: 2850054 - RNA, 18 nt, Human
guucccuguucuuccucc

SEQ ID NO: 2850055 - RNA, 15 nt, Human
guucccuuggccuca

SEQ ID NO: 2850056 - RNA, 14 nt, Human
guucccuuggccuc

SEQ ID NO: 2850057 - RNA, 13 nt, Human
guucccuuggccu

SEQ ID NO: 2850058 - RNA, 14 nt, Human
guuccgcacuuucc

SEQ ID NO: 2850059 - RNA, 18 nt, Human
guuccgcacuuuccacuu

SEQ ID NO: 2850060 - RNA, 23 nt, Human
guuccgcacuuuccacuucuucc

SEQ ID NO: 2850061 - RNA, 16 nt, Human
guucccuuugucuuuc

SEQ ID NO: 2850062 - RNA, 19 nt, Human
guucccuuugucuuucaaa

SEQ ID NO: 2850063 - RNA, 20 nt, Human
guucccuuugucuuucaaac

SEQ ID NO: 2850064 - RNA, 23 nt, Human
guuccccaucuggguccuugcac

SEQ ID NO: 2850065 - RNA, 14 nt, Human
guuccccaugcaga

SEQ ID NO: 2850066 - RNA, 18 nt, Human
guuccccaucuggguccu

SEQ ID NO: 2850067 - RNA, 19 nt, Human
guuccccaucuggguccuu

SEQ ID NO: 2850068 - RNA, 12 nt, Human
guucccccaucu

SEQ ID NO: 2850069 - RNA, 15 nt, Human
guuccccaagacauu

SEQ ID NO: 2850070 - RNA, 16 nt, Human
aagcuuuuuccuccug

SEQ ID NO: 2850071 - RNA, 11 nt, Human
aagcuuagaac

SEQ ID NO: 2850072 - RNA, 10 nt, Human
aagcuuagaa

SEQ ID NO: 2850073 - RNA, 12 nt, Human
aagcuucuuaau

SEQ ID NO: 2850074 - RNA, 19 nt, Human
aagcuucuuaauuaauuug

SEQ ID NO: 2850075 - RNA, 21 nt, Human
aagcuucuuaauuaauuugau

SEQ ID NO: 2850076 - RNA, 12 nt, Human
aagcuugacucc

SEQ ID NO: 2850077 - RNA, 15 nt, Human
aagcuugacucccaa

SEQ ID NO: 2850078 - RNA, 17 nt, Human
aagcuugacucccaagu

SEQ ID NO: 2850079 - RNA, 18 nt, Human
aagcuugacucccaaguu

SEQ ID NO: 2850080 - RNA, 14 nt, Human
aagcuugcucacau

SEQ ID NO: 2850081 - RNA, 20 nt, Human
aagcuuccaugauucuauuu

SEQ ID NO: 2850082 - RNA, 22 nt, Human
aagcuucgaggcccagcgaccu

SEQ ID NO: 2850083 - RNA, 11 nt, Human
aagcuucuaau

SEQ ID NO: 2850084 - RNA, 14 nt, Human
aagcuucuaauaaa

SEQ ID NO: 2850085 - RNA, 16 nt, Human
aagcuucuaauaaauu

SEQ ID NO: 2850086 - RNA, 18 nt, Human
aagcuucuaauaaauuau

SEQ ID NO: 2850087 - RNA, 19 nt, Human
aagcuucuaauaaauuaua

SEQ ID NO: 2850088 - RNA, 21 nt, Human
aagcuuccaugauucuauuua

SEQ ID NO: 2850089 - RNA, 18 nt, Human
aagcuuauccauaaaaaa

SEQ ID NO: 2850090 - RNA, 22 nt, Human
aagcuuauccauaaaaaaaaau

SEQ ID NO: 2850091 - RNA, 17 nt, Human
aagcucugcuccucucc

SEQ ID NO: 2850092 - RNA, 22 nt, Human
aagcucuuacacuacauuagaa

SEQ ID NO: 2850093 - RNA, 12 nt, Human
aagcugaaaaua

SEQ ID NO: 2850094 - RNA, 14 nt, Human
aagcugaaaauaua

SEQ ID NO: 2850095 - RNA, 15 nt, Human
aagcucagauuauuu

SEQ ID NO: 2850096 - RNA, 16 nt, Human
aagcucagauuauuua

SEQ ID NO: 2850097 - RNA, 21 nt, Human
guucuugcagucaucagaagu

SEQ ID NO: 2850098 - RNA, 12 nt, Human
guucuugcugcu

SEQ ID NO: 2850099 - RNA, 13 nt, Human
guucuugcugcua

SEQ ID NO: 2850100 - RNA, 14 nt, Human
guucuugcugcuag

SEQ ID NO: 2850101 - RNA, 15 nt, Human
guucuugcugcuaga

SEQ ID NO: 2850102 - RNA, 16 nt, Human
guucuugcugcuagaa

SEQ ID NO: 2850103 - RNA, 17 nt, Human
guucuugcugcuagaac

SEQ ID NO: 2850104 - RNA, 18 nt, Human
guucuugcugcuagaacu

SEQ ID NO: 2850105 - RNA, 19 nt, Human
guucuugcugcuagaacuu

SEQ ID NO: 2850106 - RNA, 20 nt, Human
guucuugcugcuagaacuuu

SEQ ID NO: 2850107 - RNA, 21 nt, Human
guucuugcugcuagaacuuuu

SEQ ID NO: 2850108 - RNA, 22 nt, Human
guucuugcugcuagaacuuuuu

SEQ ID NO: 2850109 - RNA, 21 nt, Human
guucuuccuccagcugcacca

SEQ ID NO: 2850110 - RNA, 16 nt, Human
guucuucucaaaagaa

SEQ ID NO: 2850111 - RNA, 21 nt, Human
guucuucuguucugcagacac

SEQ ID NO: 2850112 - RNA, 16 nt, Human
guugaccaugucuaug

SEQ ID NO: 2850113 - RNA, 22 nt, Human
guugaccaugucuaugauucgu

SEQ ID NO: 2850114 - RNA, 19 nt, Human
guugacuuauaguacauga

SEQ ID NO: 2850115 - RNA, 10 nt, Human
aaggaaaaag

SEQ ID NO: 2850116 - RNA, 18 nt, Human
aaggaaaaagaaaauaaa

SEQ ID NO: 2850117 - RNA, 24 nt, Human
guugacuuauaguacaugauaaau

SEQ ID NO: 2850118 - RNA, 14 nt, Human
guugacuuucaggu

SEQ ID NO: 2850119 - RNA, 22 nt, Human
guugacuuccaggcacgguuug

SEQ ID NO: 2850120 - RNA, 16 nt, Human
guugagaaucccaaau

SEQ ID NO: 2850121 - RNA, 19 nt, Human
guugagaaucccaaauuug

SEQ ID NO: 2850122 - RNA, 22 nt, Human
guucuaggcacuguaguucuaa

SEQ ID NO: 2850123 - RNA, 23 nt, Human
guucuaggcacuguaguucuaag

SEQ ID NO: 2850124 - RNA, 14 nt, Human
guucuagguuucaa

SEQ ID NO: 2850125 - RNA, 16 nt, Human
guucuagguuucaaag

SEQ ID NO: 2850126 - RNA, 19 nt, Human
guucuagguuucaaagaug

SEQ ID NO: 2850127 - RNA, 22 nt, Human
guucuagguuucaaagaugcug

SEQ ID NO: 2850128 - RNA, 12 nt, Human
guucucugagga

SEQ ID NO: 2850129 - RNA, 13 nt, Human
aaauuaaucacaa

SEQ ID NO: 2850130 - RNA, 15 nt, Human
aaauguggcuccugg

SEQ ID NO: 2850131 - RNA, 14 nt, Human
aaauuaaucugggc

SEQ ID NO: 2850132 - RNA, 14 nt, Human
aaauuaauuuuacu

SEQ ID NO: 2850133 - RNA, 16 nt, Human
aaauuacacccaaaga

SEQ ID NO: 2850134 - RNA, 22 nt, Human
aaauuacacccaaagagguauu

SEQ ID NO: 2850135 - RNA, 15 nt, Human
aaauuagccgggcgu

SEQ ID NO: 2850136 - RNA, 21 nt, Human
aaauucaaaaaguguuuauuu

SEQ ID NO: 2850137 - RNA, 13 nt, Human
aaauuauguaaug

SEQ ID NO: 2850138 - RNA, 17 nt, Human
aaauuaugugacauuuu

SEQ ID NO: 2850139 - RNA, 22 nt, Human
aaauuaugugacauuuuacauu

SEQ ID NO: 2850140 - RNA, 20 nt, Human
aaauuaugugacauuuuaca

SEQ ID NO: 2850141 - RNA, 13 nt, Human
aaauuaugacaau

SEQ ID NO: 2850142 - RNA, 19 nt, Human
aaauuaggauuucaugauu

SEQ ID NO: 2850143 - RNA, 16 nt, Human
aaauuaucuauagcua

SEQ ID NO: 2850144 - RNA, 22 nt, Human
aaauuaggaggcucaacaauaa

SEQ ID NO: 2850145 - RNA, 23 nt, Human
aaauuaggaggcucaacaauaaa

SEQ ID NO: 2850146 - RNA, 18 nt, Human
aaauuaggauuucaugau

SEQ ID NO: 2850147 - RNA, 21 nt, Human
aaauucuauucugaucuuauu

SEQ ID NO: 2850148 - RNA, 13 nt, Human
aaauugucagcaa

SEQ ID NO: 2850149 - RNA, 19 nt, Human
aaauuguuuggcuuccucc

SEQ ID NO: 2850150 - RNA, 21 nt, Human
aaauuguuuggcuuccuccug

SEQ ID NO: 2850151 - RNA, 22 nt, Human
aaauuguuuggcuuccuccuga

SEQ ID NO: 2850152 - RNA, 23 nt, Human
aaauuguccguguucauacauuu

SEQ ID NO: 2850153 - RNA, 13 nt, Human
aaauuuaaacauu

SEQ ID NO: 2850154 - RNA, 14 nt, Human
aaauuuaaacauua

SEQ ID NO: 2850155 - RNA, 18 nt, Human
aaauugucagaugcugug

SEQ ID NO: 2850156 - RNA, 18 nt, Human
aaauucacaaacuuuuau

SEQ ID NO: 2850157 - RNA, 17 nt, Human
aaauucacaaacuuuua

SEQ ID NO: 2850158 - RNA, 15 nt, Human
aaauucacaaacuuu

SEQ ID NO: 2850159 - RNA, 14 nt, Human
aaauucacaaacuu

SEQ ID NO: 2850160 - RNA, 19 nt, Human
aaauucgcccgagcuguuu

SEQ ID NO: 2850161 - RNA, 13 nt, Human
aaauuccacugga

SEQ ID NO: 2850162 - RNA, 21 nt, Human
aaauuccaaagucucuaauuc

SEQ ID NO: 2850163 - RNA, 22 nt, Human
aaauuccaaagucucuaauucu

SEQ ID NO: 2850164 - RNA, 14 nt, Human
aaauuagggcaauu

SEQ ID NO: 2850165 - RNA, 12 nt, Human
aaauuccaaagu

SEQ ID NO: 2850166 - RNA, 14 nt, Human
aaauuccaaagucu

SEQ ID NO: 2850167 - RNA, 17 nt, Human
aaauuccaaagucucua

SEQ ID NO: 2850168 - RNA, 18 nt, Human
aaauuccaaagucucuaa

SEQ ID NO: 2850169 - RNA, 17 nt, Human
guauuguaaacaugugu

SEQ ID NO: 2850170 - RNA, 12 nt, Human
guauuguaaauu

SEQ ID NO: 2850171 - RNA, 13 nt, Human
guauuguaaauua

SEQ ID NO: 2850172 - RNA, 19 nt, Human
guauuguaaauuauauuug

SEQ ID NO: 2850173 - RNA, 20 nt, Human
guauuguaaauuauauuugu

SEQ ID NO: 2850174 - RNA, 14 nt, Human
guauugaauauugu

SEQ ID NO: 2850175 - RNA, 23 nt, Human
guauugaauauuguguuccuuuu

SEQ ID NO: 2850176 - RNA, 19 nt, Human
guauucuagcuaauguaau

SEQ ID NO: 2850177 - RNA, 21 nt, Human
aaaucauugcuuugaagcagu

SEQ ID NO: 2850178 - RNA, 14 nt, Human
guauucuugucaaa

SEQ ID NO: 2850179 - RNA, 19 nt, Human
aaaucauuaauacucuucu

SEQ ID NO: 2850180 - RNA, 17 nt, Human
aaaucaucgaaaauuca

SEQ ID NO: 2850181 - RNA, 12 nt, Human
aaaucaucuauu

SEQ ID NO: 2850182 - RNA, 13 nt, Human
aaaucaucuauuu

SEQ ID NO: 2850183 - RNA, 14 nt, Human
aaaucaucuauuuu

SEQ ID NO: 2850184 - RNA, 16 nt, Human
aaaucaucuauuuuga

SEQ ID NO: 2850185 - RNA, 17 nt, Human
aaaucaucuauuuugau

SEQ ID NO: 2850186 - RNA, 19 nt, Human
aaaucaucuauuuugaugc

SEQ ID NO: 2850187 - RNA, 19 nt, Human
guauuuacgcuuugauuca

SEQ ID NO: 2850188 - RNA, 17 nt, Human
guauuuacgcuuugauu

SEQ ID NO: 2850189 - RNA, 16 nt, Human
guauuuacgcuuugau

SEQ ID NO: 2850190 - RNA, 12 nt, Human
guauuuauaaua

SEQ ID NO: 2850191 - RNA, 13 nt, Human
guauuuauauauu

SEQ ID NO: 2850192 - RNA, 12 nt, Human
guauuuauauau

SEQ ID NO: 2850193 - RNA, 19 nt, Human
guauuuauguaaugaagua

SEQ ID NO: 2850194 - RNA, 22 nt, Human
guauuuauguaaugaaguaaag

SEQ ID NO: 2850195 - RNA, 16 nt, Human
guauuuauauauuuau

SEQ ID NO: 2850196 - RNA, 15 nt, Human
guauuuauauauuua

SEQ ID NO: 2850197 - RNA, 17 nt, Human
guauuuauauauuuaua

SEQ ID NO: 2850198 - RNA, 13 nt, Human
guauuuaucuuua

SEQ ID NO: 2850199 - RNA, 18 nt, Human
guauuuaaacuaucuugu

SEQ ID NO: 2850200 - RNA, 22 nt, Human
guauuuaaacuaucuuguguga

SEQ ID NO: 2850201 - RNA, 9 nt, Human
guauuuaac

SEQ ID NO: 2850202 - RNA, 12 nt, Human
guauugugguau

SEQ ID NO: 2850203 - RNA, 21 nt, Human
aaaugucucuuuaaugucaca

SEQ ID NO: 2850204 - RNA, 14 nt, Human
aaaugucuguaaau

SEQ ID NO: 2850205 - RNA, 20 nt, Human
aaaugucuguaaauauguuu

SEQ ID NO: 2850206 - RNA, 15 nt, Human
aaaugucuuaauuuu

SEQ ID NO: 2850207 - RNA, 18 nt, Human
aaaugucuuaauuuuuga

SEQ ID NO: 2850208 - RNA, 16 nt, Human
aaaugucuuauauagc

SEQ ID NO: 2850209 - RNA, 18 nt, Human
aaaugucuuauauagcag

SEQ ID NO: 2850210 - RNA, 11 nt, Human
aaaugugcagu

SEQ ID NO: 2850211 - RNA, 14 nt, Human
aaaugucuuccugg

SEQ ID NO: 2850212 - RNA, 12 nt, Human
aaaugucuugcu

SEQ ID NO: 2850213 - RNA, 22 nt, Human
aaaugucuugcuguugacauau

SEQ ID NO: 2850214 - RNA, 23 nt, Human
aaaugucuugcuguugacauauu

SEQ ID NO: 2850215 - RNA, 16 nt, Human
aaauguaguugaugua

SEQ ID NO: 2850216 - RNA, 19 nt, Human
aaauguaguugauguaucc

SEQ ID NO: 2850217 - RNA, 11 nt, Human
aaauguauacu

SEQ ID NO: 2850218 - RNA, 13 nt, Human
aaauguauauaca

SEQ ID NO: 2850219 - RNA, 14 nt, Human
aaauguauauacac

SEQ ID NO: 2850220 - RNA, 15 nt, Human
aaauguauauacaca

SEQ ID NO: 2850221 - RNA, 16 nt, Human
aaauguauauacacau

SEQ ID NO: 2850222 - RNA, 17 nt, Human
aaauguauauacacaua

SEQ ID NO: 2850223 - RNA, 18 nt, Human
aaauguauauacacauau

SEQ ID NO: 2850224 - RNA, 19 nt, Human
aaauguauauacacauaua

SEQ ID NO: 2850225 - RNA, 22 nt, Human
aaauguauauacacauauaccu

SEQ ID NO: 2850226 - RNA, 23 nt, Human
aaauguauauacacauauaccua

SEQ ID NO: 2850227 - RNA, 13 nt, Human
aaauguauauauu

SEQ ID NO: 2850228 - RNA, 14 nt, Human
aaauguauauauuu

SEQ ID NO: 2850229 - RNA, 16 nt, Human
aaauguauauauuuag

SEQ ID NO: 2850230 - RNA, 17 nt, Human
aaauguauauauuuagu

SEQ ID NO: 2850231 - RNA, 18 nt, Human
aaauguauauauuuagug

SEQ ID NO: 2850232 - RNA, 21 nt, Human
aaauguauauauuuagugcug

SEQ ID NO: 2850233 - RNA, 17 nt, Human
aaauguaucauagaaau

SEQ ID NO: 2850234 - RNA, 20 nt, Human
aaauguaucauagaaaugua

SEQ ID NO: 2850235 - RNA, 13 nt, Human
gucagaaacuguu

SEQ ID NO: 2850236 - RNA, 13 nt, Human
gucagaaagugua

SEQ ID NO: 2850237 - RNA, 16 nt, Human
gucagaaaguguaaau

SEQ ID NO: 2850238 - RNA, 18 nt, Human
gucagaaaguguaaaugu

SEQ ID NO: 2850239 - RNA, 17 nt, Human
gucacuuuguuuuacug

SEQ ID NO: 2850240 - RNA, 14 nt, Human
gucacuuaaaaugu

SEQ ID NO: 2850241 - RNA, 18 nt, Human
gucacuuaaaaugugcag

SEQ ID NO: 2850242 - RNA, 18 nt, Human
gucacuugugcuuugcuc

SEQ ID NO: 2850243 - RNA, 24 nt, Human
gucacuugugcuuugcucuugucc

SEQ ID NO: 2850244 - RNA, 24 nt, Human
gucacuucgcgugcccucgcugcu

SEQ ID NO: 2850245 - RNA, 18 nt, Human
gucacuucgcgugcccuc

SEQ ID NO: 2850246 - RNA, 19 nt, Human
gucacuggaccacugggca

SEQ ID NO: 2850247 - RNA, 17 nt, Human
gucacugcuuuuggccu

SEQ ID NO: 2850248 - RNA, 19 nt, Human
gucacugcuuuuggccugg

SEQ ID NO: 2850249 - RNA, 17 nt, Human
gucacuguuccuuguca

SEQ ID NO: 2850250 - RNA, 21 nt, Human
gucacugguagaccaaaauaa

SEQ ID NO: 2850251 - RNA, 20 nt, Human
gucacuguacugacuugagg

SEQ ID NO: 2850252 - RNA, 14 nt, Human
gucacugucccucc

SEQ ID NO: 2850253 - RNA, 15 nt, Human
gucacugucccuccu

SEQ ID NO: 2850254 - RNA, 16 nt, Human
gucacugucccuccug

SEQ ID NO: 2850255 - RNA, 17 nt, Human
gucacugucccuccugg

SEQ ID NO: 2850256 - RNA, 18 nt, Human
gucacugucccuccuggu

SEQ ID NO: 2850257 - RNA, 21 nt, Human
gucacugucccuccugguguc

SEQ ID NO: 2850258 - RNA, 17 nt, Human
gucaguguccaaagcag

SEQ ID NO: 2850259 - RNA, 20 nt, Human
gucaguguccaaagcagggu

SEQ ID NO: 2850260 - RNA, 23 nt, Human
gucaguguccaaagcagggucug

SEQ ID NO: 2850261 - RNA, 22 nt, Human
gucagugguccacaucccggga

SEQ ID NO: 2850262 - RNA, 13 nt, Human
gucagguuuaaca

SEQ ID NO: 2850263 - RNA, 15 nt, Human
gucagguuuaacauu

SEQ ID NO: 2850264 - RNA, 16 nt, Human
gucagguuuaacauuu

SEQ ID NO: 2850265 - RNA, 14 nt, Human
gucaggugacccug

SEQ ID NO: 2850266 - RNA, 17 nt, Human
gucaggguuggugugcu

SEQ ID NO: 2850267 - RNA, 18 nt, Human
gucaggguuggugugcug

SEQ ID NO: 2850268 - RNA, 22 nt, Human
gucaggguuggugugcugaggu

SEQ ID NO: 2850269 - RNA, 22 nt, Human
gucagucaugauggcaccacug

SEQ ID NO: 2850270 - RNA, 19 nt, Human
gucagucaugauggcacca

SEQ ID NO: 2850271 - RNA, 18 nt, Human
gucaguggggcucucuga

SEQ ID NO: 2850272 - RNA, 18 nt, Human
gucagugcaaaugucaga

SEQ ID NO: 2850273 - RNA, 16 nt, Human
gucagucuuuuucugu

SEQ ID NO: 2850274 - RNA, 17 nt, Human
gucagucuuuuucuguu

SEQ ID NO: 2850275 - RNA, 21 nt, Human
gucagucuuuuucuguuguaa

SEQ ID NO: 2850276 - RNA, 22 nt, Human
gucagguggggcagcuugaggg

SEQ ID NO: 2850277 - RNA, 18 nt, Human
gucagguggggcagcuug

SEQ ID NO: 2850278 - RNA, 17 nt, Human
gucagguggggcagcuu

SEQ ID NO: 2850279 - RNA, 16 nt, Human
gucagguggggcagcu

SEQ ID NO: 2850280 - RNA, 18 nt, Human
gucaggaguccaagacca

SEQ ID NO: 2850281 - RNA, 19 nt, Human
gucaggaguccaagaccag

SEQ ID NO: 2850282 - RNA, 16 nt, Human
gucaggaacagaagga

SEQ ID NO: 2850283 - RNA, 15 nt, Human
gucaggaacagaagg

SEQ ID NO: 2850284 - RNA, 17 nt, Human
gucaggaacagaaggau

SEQ ID NO: 2850285 - RNA, 13 nt, Human
gucagggagugcu

SEQ ID NO: 2850286 - RNA, 14 nt, Human
gucagggagugcug

SEQ ID NO: 2850287 - RNA, 19 nt, Human
gucagggagugcuggcuca

SEQ ID NO: 2850288 - RNA, 22 nt, Human
gucagggagugcuggcucacag

SEQ ID NO: 2850289 - RNA, 14 nt, Human
gucagggcccagag

SEQ ID NO: 2850290 - RNA, 15 nt, Human
gucagggcccagagg

SEQ ID NO: 2850291 - RNA, 16 nt, Human
gucagggcccagaggc

SEQ ID NO: 2850292 - RNA, 19 nt, Human
gucagggcccagaggcuga

SEQ ID NO: 2850293 - RNA, 20 nt, Human
gucagggcccagaggcugag

SEQ ID NO: 2850294 - RNA, 21 nt, Human
gucagggcccagaggcugagu

SEQ ID NO: 2850295 - RNA, 15 nt, Human
gucaggggugacaca

SEQ ID NO: 2850296 - RNA, 17 nt, Human
gucaggggugacacaga

SEQ ID NO: 2850297 - RNA, 18 nt, Human
gucaggggugacacagac

SEQ ID NO: 2850298 - RNA, 20 nt, Human
gucaggggugacacagacuc

SEQ ID NO: 2850299 - RNA, 21 nt, Human
gucaggggugacacagacuca

SEQ ID NO: 2850300 - RNA, 17 nt, Human
gucacaggacucugccu

SEQ ID NO: 2850301 - RNA, 18 nt, Human
gucacaggacucugccuc

SEQ ID NO: 2850302 - RNA, 12 nt, Human
gucacaggcagg

SEQ ID NO: 2850303 - RNA, 19 nt, Human
gucacaggacucugccucc

SEQ ID NO: 2850304 - RNA, 16 nt, Human
gucacaggagggaggg

SEQ ID NO: 2850305 - RNA, 21 nt, Human
gucacauggccuaugcacaua

SEQ ID NO: 2850306 - RNA, 23 nt, Human
gucacauggccuaugcacauaug

SEQ ID NO: 2850307 - RNA, 20 nt, Human
gucacagggcaugccccggc

SEQ ID NO: 2850308 - RNA, 12 nt, Human
gucacagggcca

SEQ ID NO: 2850309 - RNA, 13 nt, Human
gucacagggccaa

SEQ ID NO: 2850310 - RNA, 15 nt, Human
gucacagggccaacu

SEQ ID NO: 2850311 - RNA, 14 nt, Human
gucacauaaaacuu

SEQ ID NO: 2850312 - RNA, 15 nt, Human
gucacaucacaggac

SEQ ID NO: 2850313 - RNA, 16 nt, Human
gucacaucagauaaga

SEQ ID NO: 2850314 - RNA, 17 nt, Human
gucacaucagauaagac

SEQ ID NO: 2850315 - RNA, 13 nt, Human
gucacaugaaaca

SEQ ID NO: 2850316 - RNA, 17 nt, Human
gucacaaagaauuuaaa

SEQ ID NO: 2850317 - RNA, 14 nt, Human
gucacaaagaguuc

SEQ ID NO: 2850318 - RNA, 13 nt, Human
aaauuuaaugcug

SEQ ID NO: 2850319 - RNA, 15 nt, Human
aaauuuaaugcugcc

SEQ ID NO: 2850320 - RNA, 17 nt, Human
aaauuuaaugcugccuu

SEQ ID NO: 2850321 - RNA, 15 nt, Human
aaauuuaaguaucuu

SEQ ID NO: 2850322 - RNA, 23 nt, Human
aaauuuaaguaucuuuuuucaaa

SEQ ID NO: 2850323 - RNA, 16 nt, Human
aaauuuaagugcgugu

SEQ ID NO: 2850324 - RNA, 21 nt, Human
aaauuuaagugcguguguaga

SEQ ID NO: 2850325 - RNA, 13 nt, Human
aaauuuaaagaua

SEQ ID NO: 2850326 - RNA, 15 nt, Human
aaauuuaaagauauu

SEQ ID NO: 2850327 - RNA, 14 nt, Human
gucacugacacaaa

SEQ ID NO: 2850328 - RNA, 16 nt, Human
gucacugacacaaagg

SEQ ID NO: 2850329 - RNA, 20 nt, Human
gucacugcacagugcaucuc

SEQ ID NO: 2850330 - RNA, 23 nt, Human
gucacugcacagugcaucucagc

SEQ ID NO: 2850331 - RNA, 16 nt, Human
gucacugccacuuugc

SEQ ID NO: 2850332 - RNA, 17 nt, Human
gucacugccacuuugca

SEQ ID NO: 2850333 - RNA, 18 nt, Human
gucacugaggccugagac

SEQ ID NO: 2850334 - RNA, 23 nt, Human
gucacugaggccugagacccagg

SEQ ID NO: 2850335 - RNA, 22 nt, Human
gucacugauguacaauuaaaaa

SEQ ID NO: 2850336 - RNA, 21 nt, Human
gucacaguguuuacacuuugg

SEQ ID NO: 2850337 - RNA, 13 nt, Human
gucacauugcauu

SEQ ID NO: 2850338 - RNA, 17 nt, Human
gucacauugcauucuau

SEQ ID NO: 2850339 - RNA, 18 nt, Human
gucacauugcauucuauu

SEQ ID NO: 2850340 - RNA, 21 nt, Human
gucacauugcauucuauugcc

SEQ ID NO: 2850341 - RNA, 13 nt, Human
gucaccaaggaaa

SEQ ID NO: 2850342 - RNA, 14 nt, Human
gucaccaaggaaac

SEQ ID NO: 2850343 - RNA, 23 nt, Human
gucaccaaggaaacgcuaccucu

SEQ ID NO: 2850344 - RNA, 15 nt, Human
gucaccaagcccagu

SEQ ID NO: 2850345 - RNA, 12 nt, Human
gucaccaagccc

SEQ ID NO: 2850346 - RNA, 11 nt, Human
aacaguauuua

SEQ ID NO: 2850347 - RNA, 12 nt, Human
aacaguauuuau

SEQ ID NO: 2850348 - RNA, 16 nt, Human
aacaguauuuauuuug

SEQ ID NO: 2850349 - RNA, 17 nt, Human
aacaguauuuauuuugu

SEQ ID NO: 2850350 - RNA, 18 nt, Human
aacaguauuuauuuugua

SEQ ID NO: 2850351 - RNA, 19 nt, Human
aacaguauuuauuuuguaa

SEQ ID NO: 2850352 - RNA, 20 nt, Human
aacaguauuuauuuuguaau

SEQ ID NO: 2850353 - RNA, 23 nt, Human
aacaguauuuauuuuguaauuau

SEQ ID NO: 2850354 - RNA, 22 nt, Human
aacaguauuucauugccugugu

SEQ ID NO: 2850355 - RNA, 12 nt, Human
aacagucauguu

SEQ ID NO: 2850356 - RNA, 13 nt, Human
aacagucauguuu

SEQ ID NO: 2850357 - RNA, 14 nt, Human
aacagucauguuuu

SEQ ID NO: 2850358 - RNA, 15 nt, Human
aacagucauguuuua

SEQ ID NO: 2850359 - RNA, 21 nt, Human
aacagucauguuuuaaaugua

SEQ ID NO: 2850360 - RNA, 14 nt, Human
guccgguguucuaa

SEQ ID NO: 2850361 - RNA, 15 nt, Human
guccgguguucuaag

SEQ ID NO: 2850362 - RNA, 16 nt, Human
guccgguguucuaaga

SEQ ID NO: 2850363 - RNA, 17 nt, Human
guccgguguucuaagau

SEQ ID NO: 2850364 - RNA, 22 nt, Human
gucccuuccccucccuggcucc

SEQ ID NO: 2850365 - RNA, 20 nt, Human
gucccuuccccucccuggcu

SEQ ID NO: 2850366 - RNA, 19 nt, Human
gucccuuccccucccuggc

SEQ ID NO: 2850367 - RNA, 22 nt, Human
aacauaaaaaggacaucagcaa

SEQ ID NO: 2850368 - RNA, 20 nt, Human
aacauaaaaaggacaucagc

SEQ ID NO: 2850369 - RNA, 19 nt, Human
aacauaaaaaggacaucag

SEQ ID NO: 2850370 - RNA, 15 nt, Human
aacauaaaaaggaca

SEQ ID NO: 2850371 - RNA, 16 nt, Human
aacauaaaaaaacuuc

SEQ ID NO: 2850372 - RNA, 23 nt, Human
aacaguccccguggccaucccug

SEQ ID NO: 2850373 - RNA, 15 nt, Human
aacauauaaaauaau

SEQ ID NO: 2850374 - RNA, 17 nt, Human
aacauauaaaauaaugc

SEQ ID NO: 2850375 - RNA, 19 nt, Human
aacauaguaaguucagcac

SEQ ID NO: 2850376 - RNA, 20 nt, Human
aacauaguaaguucagcacu

SEQ ID NO: 2850377 - RNA, 21 nt, Human
aacauaguaaguucagcacuu

SEQ ID NO: 2850378 - RNA, 19 nt, Human
aacauaaagguaaaacaaa

SEQ ID NO: 2850379 - RNA, 12 nt, Human
aacauaaaacaa

SEQ ID NO: 2850380 - RNA, 13 nt, Human
aacauguguuuua

SEQ ID NO: 2850381 - RNA, 12 nt, Human
aacauguauuua

SEQ ID NO: 2850382 - RNA, 15 nt, Human
aacauguauuuaugu

SEQ ID NO: 2850383 - RNA, 16 nt, Human
aacauguauuuaugua

SEQ ID NO: 2850384 - RNA, 21 nt, Human
aacauguauuuauguaaugaa

SEQ ID NO: 2850385 - RNA, 12 nt, Human
aacauuauuuau

SEQ ID NO: 2850386 - RNA, 16 nt, Human
aacauuauuuauucag

SEQ ID NO: 2850387 - RNA, 23 nt, Human
aacauuauuuauucagcuucauu

SEQ ID NO: 2850388 - RNA, 12 nt, Human
aacauuccaaga

SEQ ID NO: 2850389 - RNA, 13 nt, Human
aacauuccaagaa

SEQ ID NO: 2850390 - RNA, 17 nt, Human
aacauuccuaaaaugcu

SEQ ID NO: 2850391 - RNA, 18 nt, Human
aacauuccuaaaaugcuu

SEQ ID NO: 2850392 - RNA, 11 nt, Human
aacauuccaag

SEQ ID NO: 2850393 - RNA, 17 nt, Human
aacauuccaagacucua

SEQ ID NO: 2850394 - RNA, 20 nt, Human
aacauuccaaggaguuggaa

SEQ ID NO: 2850395 - RNA, 17 nt, Human
guccucguagccaucuc

SEQ ID NO: 2850396 - RNA, 13 nt, Human
guccucgauggga

SEQ ID NO: 2850397 - RNA, 22 nt, Human
guccucgaugggagggauggcc

SEQ ID NO: 2850398 - RNA, 18 nt, Human
aacauugccuuugaaugu

SEQ ID NO: 2850399 - RNA, 22 nt, Human
aacauugccuuugaauguuaau

SEQ ID NO: 2850400 - RNA, 16 nt, Human
aacauuggauuauccu

SEQ ID NO: 2850401 - RNA, 12 nt, Human
aacauuggauua

SEQ ID NO: 2850402 - RNA, 16 nt, Human
guccuuuucuugcuua

SEQ ID NO: 2850403 - RNA, 18 nt, Human
guccuuugcgccugugac

SEQ ID NO: 2850404 - RNA, 21 nt, Human
guccuuuggggcauagaucag

SEQ ID NO: 2850405 - RNA, 19 nt, Human
guccuuuuacuacagcuau

SEQ ID NO: 2850406 - RNA, 11 nt, Human
guccuuucccu

SEQ ID NO: 2850407 - RNA, 22 nt, Human
guccuuuauguggaaaacagaa

SEQ ID NO: 2850408 - RNA, 18 nt, Human
guccuuuccaaggcuucu

SEQ ID NO: 2850409 - RNA, 20 nt, Human
guccuuuccaaggcuucucc

SEQ ID NO: 2850410 - RNA, 22 nt, Human
guccuuuccaaggcuucuccaa

SEQ ID NO: 2850411 - RNA, 19 nt, Human
guccuggagcagaccaccc

SEQ ID NO: 2850412 - RNA, 17 nt, Human
guccuggauguugugug

SEQ ID NO: 2850413 - RNA, 21 nt, Human
guccuuuauguggaaaacaga

SEQ ID NO: 2850414 - RNA, 16 nt, Human
gucgaggacagggagg

SEQ ID NO: 2850415 - RNA, 14 nt, Human
gucgaggggcucuc

SEQ ID NO: 2850416 - RNA, 15 nt, Human
gucgaggggcucuca

SEQ ID NO: 2850417 - RNA, 16 nt, Human
gucgaggggcucucag

SEQ ID NO: 2850418 - RNA, 19 nt, Human
gucgaggggcucucagcuc

SEQ ID NO: 2850419 - RNA, 21 nt, Human
guccuggaagcgcgagggccu

SEQ ID NO: 2850420 - RNA, 20 nt, Human
guccuggacaccgggccagu

SEQ ID NO: 2850421 - RNA, 17 nt, Human
guccuggagcaaucaca

SEQ ID NO: 2850422 - RNA, 12 nt, Human
guccugcuucug

SEQ ID NO: 2850423 - RNA, 13 nt, Human
guccugcuucuga

SEQ ID NO: 2850424 - RNA, 14 nt, Human
guccucuuuucuga

SEQ ID NO: 2850425 - RNA, 19 nt, Human
guccucucccaaguccaca

SEQ ID NO: 2850426 - RNA, 12 nt, Human
gucgccucugca

SEQ ID NO: 2850427 - RNA, 22 nt, Human
gucuaugggacucaaugcacug

SEQ ID NO: 2850428 - RNA, 15 nt, Human
gucuauguuccgaau

SEQ ID NO: 2850429 - RNA, 22 nt, Human
gucuauguuccgaauugagcac

SEQ ID NO: 2850430 - RNA, 15 nt, Human
gucuaugggacucaa

SEQ ID NO: 2850431 - RNA, 10 nt, Human
gucuauuuaa

SEQ ID NO: 2850432 - RNA, 21 nt, Human
gucuaguugccaaaucuggcu

SEQ ID NO: 2850433 - RNA, 23 nt, Human
gucuaguugccaaaucuggcucc

SEQ ID NO: 2850434 - RNA, 12 nt, Human
gucuauuccagc

SEQ ID NO: 2850435 - RNA, 13 nt, Human
gucuauuccagcu

SEQ ID NO: 2850436 - RNA, 14 nt, Human
gucuauuccagcuc

SEQ ID NO: 2850437 - RNA, 15 nt, Human
gucuauuccagcuca

SEQ ID NO: 2850438 - RNA, 16 nt, Human
gucuauuccagcucau

SEQ ID NO: 2850439 - RNA, 20 nt, Human
gucuauuccagcucauucau

SEQ ID NO: 2850440 - RNA, 21 nt, Human
gucuauuccagcucauucauu

SEQ ID NO: 2850441 - RNA, 19 nt, Human
gucuagcagagcaggggca

SEQ ID NO: 2850442 - RNA, 14 nt, Human
gucuagcaugccaa

SEQ ID NO: 2850443 - RNA, 12 nt, Human
gucuagauucuc

SEQ ID NO: 2850444 - RNA, 14 nt, Human
gucuagucucuccu

SEQ ID NO: 2850445 - RNA, 18 nt, Human
gucuagucucuccuguaa

SEQ ID NO: 2850446 - RNA, 22 nt, Human
gucuagauguuuauucuucuag

SEQ ID NO: 2850447 - RNA, 11 nt, Human
gucuagauuca

SEQ ID NO: 2850448 - RNA, 15 nt, Human
gucuagauucaaagg

SEQ ID NO: 2850449 - RNA, 19 nt, Human
gucuagauucaaagguucu

SEQ ID NO: 2850450 - RNA, 20 nt, Human
gucuagauucaaagguucua

SEQ ID NO: 2850451 - RNA, 21 nt, Human
gucuagauucaaagguucuag

SEQ ID NO: 2850452 - RNA, 22 nt, Human
gucuagauucaaagguucuagg

SEQ ID NO: 2850453 - RNA, 20 nt, Human
aacacacagauacacacaca

SEQ ID NO: 2850454 - RNA, 14 nt, Human
aacacagccugggc

SEQ ID NO: 2850455 - RNA, 13 nt, Human
aacacagccuggg

SEQ ID NO: 2850456 - RNA, 16 nt, Human
aacacaaguccuguga

SEQ ID NO: 2850457 - RNA, 17 nt, Human
aacacaaggucauggcc

SEQ ID NO: 2850458 - RNA, 21 nt, Human
aacacaaggucauggccacac

SEQ ID NO: 2850459 - RNA, 24 nt, Human
gucaguguccaaagcagggucugg

SEQ ID NO: 2850460 - RNA, 16 nt, Human
aaauuucuaagagagc

SEQ ID NO: 2850461 - RNA, 22 nt, Human
aaauuucuagccugcacuuuga

SEQ ID NO: 2850462 - RNA, 23 nt, Human
aaauuucucaucacagggauuua

SEQ ID NO: 2850463 - RNA, 13 nt, Human
aacacaaacugua

SEQ ID NO: 2850464 - RNA, 14 nt, Human
aaauuugagacuau

SEQ ID NO: 2850465 - RNA, 13 nt, Human
aaauuugauacuu

SEQ ID NO: 2850466 - RNA, 15 nt, Human
aaauuugauacuuau

SEQ ID NO: 2850467 - RNA, 19 nt, Human
aacacaaacuguaaauaaa

SEQ ID NO: 2850468 - RNA, 16 nt, Human
aacacaaacuguaaau

SEQ ID NO: 2850469 - RNA, 15 nt, Human
aacacaaacuguaaa

SEQ ID NO: 2850470 - RNA, 21 nt, Human
aacacugggggcaccuuaaga

SEQ ID NO: 2850471 - RNA, 15 nt, Human
aacacuggcagacug

SEQ ID NO: 2850472 - RNA, 21 nt, Human
aacacucacauuuauucugcu

SEQ ID NO: 2850473 - RNA, 16 nt, Human
aacacagccugggccc

SEQ ID NO: 2850474 - RNA, 15 nt, Human
aacacaggcaaaauc

SEQ ID NO: 2850475 - RNA, 19 nt, Human
aacacagcugagagacuuu

SEQ ID NO: 2850476 - RNA, 11 nt, Human
aacacagcugu

SEQ ID NO: 2850477 - RNA, 17 nt, Human
aacacagcuguucuucu

SEQ ID NO: 2850478 - RNA, 18 nt, Human
aacacagcuguucuucug

SEQ ID NO: 2850479 - RNA, 24 nt, Human
aacacagcuguucuucuguucugc

SEQ ID NO: 2850480 - RNA, 20 nt, Human
aacacagcuuacaaucgcaa

SEQ ID NO: 2850481 - RNA, 17 nt, Human
aacacucaagaagcagg

SEQ ID NO: 2850482 - RNA, 16 nt, Human
aacacuauguuuauuu

SEQ ID NO: 2850483 - RNA, 23 nt, Human
aacacugguggaggauggaaagg

SEQ ID NO: 2850484 - RNA, 17 nt, Human
aacacuggugugaccug

SEQ ID NO: 2850485 - RNA, 20 nt, Human
aacacuggugugaccugagg

SEQ ID NO: 2850486 - RNA, 22 nt, Human
aacacuggugugaccugagggc

SEQ ID NO: 2850487 - RNA, 14 nt, Human
gucauuuaaaugug

SEQ ID NO: 2850488 - RNA, 15 nt, Human
gucauuuaaaugugu

SEQ ID NO: 2850489 - RNA, 23 nt, Human
gucauuuaacugaagauguugag

SEQ ID NO: 2850490 - RNA, 16 nt, Human
gucauuuacuaaacau

SEQ ID NO: 2850491 - RNA, 17 nt, Human
gucauuuacuaaacaua

SEQ ID NO: 2850492 - RNA, 21 nt, Human
gucauuuaugugucaguucau

SEQ ID NO: 2850493 - RNA, 16 nt, Human
gucauuuauuuuaaaa

SEQ ID NO: 2850494 - RNA, 21 nt, Human
gucauuuauuuuaaaaaauga

SEQ ID NO: 2850495 - RNA, 12 nt, Human
gucauuucauuc

SEQ ID NO: 2850496 - RNA, 14 nt, Human
gucauuucauucca

SEQ ID NO: 2850497 - RNA, 15 nt, Human
gucauuucauuccau

SEQ ID NO: 2850498 - RNA, 16 nt, Human
gucauuucauuccauu

SEQ ID NO: 2850499 - RNA, 20 nt, Human
gucauuucauuccauugccu

SEQ ID NO: 2850500 - RNA, 21 nt, Human
gucauuucauuccauugccua

SEQ ID NO: 2850501 - RNA, 17 nt, Human
gucauuugagcagggcu

SEQ ID NO: 2850502 - RNA, 20 nt, Human
guccaaauaacaaguaccaa

SEQ ID NO: 2850503 - RNA, 22 nt, Human
guccaaauguccuccagaagcc

SEQ ID NO: 2850504 - RNA, 16 nt, Human
guccauauuuucacag

SEQ ID NO: 2850505 - RNA, 17 nt, Human
guccaucagccaggaca

SEQ ID NO: 2850506 - RNA, 15 nt, Human
guccaucagccccuc

SEQ ID NO: 2850507 - RNA, 19 nt, Human
gucauuugagcagggcuca

SEQ ID NO: 2850508 - RNA, 19 nt, Human
guccaaagaggcugccccu

SEQ ID NO: 2850509 - RNA, 16 nt, Human
guccaaagaggcugcc

SEQ ID NO: 2850510 - RNA, 14 nt, Human
guccaaaggaggcu

SEQ ID NO: 2850511 - RNA, 17 nt, Human
guccaaagcagggucug

SEQ ID NO: 2850512 - RNA, 20 nt, Human
guccaaaggaggcuggcagg

SEQ ID NO: 2850513 - RNA, 16 nt, Human
guccaaaggaggcugg

SEQ ID NO: 2850514 - RNA, 14 nt, Human
guccccaccuggga

SEQ ID NO: 2850515 - RNA, 23 nt, Human
gucccaaugcacauccauuccca

SEQ ID NO: 2850516 - RNA, 20 nt, Human
gucccaaugguccugacuuu

SEQ ID NO: 2850517 - RNA, 23 nt, Human
gucccaaggaaagccccagcacu

SEQ ID NO: 2850518 - RNA, 13 nt, Human
guccaucugcccg

SEQ ID NO: 2850519 - RNA, 14 nt, Human
guccaucugcccgc

SEQ ID NO: 2850520 - RNA, 16 nt, Human
guccaucugcccgccu

SEQ ID NO: 2850521 - RNA, 17 nt, Human
guccaucugcccgccug

SEQ ID NO: 2850522 - RNA, 19 nt, Human
guccaucugcccgccugcc

SEQ ID NO: 2850523 - RNA, 21 nt, Human
guccaucugcccgccugccca

SEQ ID NO: 2850524 - RNA, 22 nt, Human
guccaucugcccgccugcccac

SEQ ID NO: 2850525 - RNA, 17 nt, Human
gucccuaaagaaaaaaa

SEQ ID NO: 2850526 - RNA, 16 nt, Human
gucccugguuuucagu

SEQ ID NO: 2850527 - RNA, 15 nt, Human
gucccuaaagaaaaa

SEQ ID NO: 2850528 - RNA, 18 nt, Human
gucccuuccccucccugg

SEQ ID NO: 2850529 - RNA, 17 nt, Human
gucccuuccccucccug

SEQ ID NO: 2850530 - RNA, 14 nt, Human
gucccuuccccucc

SEQ ID NO: 2850531 - RNA, 13 nt, Human
gucccuuccccuc

SEQ ID NO: 2850532 - RNA, 12 nt, Human
gucccuuccccu

SEQ ID NO: 2850533 - RNA, 15 nt, Human
gucccuucaccuccu

SEQ ID NO: 2850534 - RNA, 18 nt, Human
gucccuucaccuccucgc

SEQ ID NO: 2850535 - RNA, 11 nt, Human
guccccugcuu

SEQ ID NO: 2850536 - RNA, 23 nt, Human
guccccugucgaguucggcucug

SEQ ID NO: 2850537 - RNA, 15 nt, Human
gucccggggcuccac

SEQ ID NO: 2850538 - RNA, 15 nt, Human
guccccaccugggac

SEQ ID NO: 2850539 - RNA, 18 nt, Human
guccccagagaccaggcu

SEQ ID NO: 2850540 - RNA, 14 nt, Human
guccccagcccuuc

SEQ ID NO: 2850541 - RNA, 12 nt, Human
guccccuccccc

SEQ ID NO: 2850542 - RNA, 22 nt, Human
guccccucccccaccccugcug

SEQ ID NO: 2850543 - RNA, 16 nt, Human
aacuucacauuaaaaa

SEQ ID NO: 2850544 - RNA, 17 nt, Human
aacuucacauuaaaaaa

SEQ ID NO: 2850545 - RNA, 21 nt, Human
aacuucagaugggaggaaaga

SEQ ID NO: 2850546 - RNA, 12 nt, Human
aacuucagcacc

SEQ ID NO: 2850547 - RNA, 13 nt, Human
aacuucagcacca

SEQ ID NO: 2850548 - RNA, 14 nt, Human
aacuucuaauauau

SEQ ID NO: 2850549 - RNA, 16 nt, Human
aacuucuaauauauuu

SEQ ID NO: 2850550 - RNA, 12 nt, Human
aacuugaaaaau

SEQ ID NO: 2850551 - RNA, 15 nt, Human
aacuugaaaaauacu

SEQ ID NO: 2850552 - RNA, 14 nt, Human
aacuugaaaauaua

SEQ ID NO: 2850553 - RNA, 22 nt, Human
aacuugaaaauauaugauggcu

SEQ ID NO: 2850554 - RNA, 19 nt, Human
aacuugaaauuauaucugu

SEQ ID NO: 2850555 - RNA, 22 nt, Human
aacuucuuucuauuugacuugu

SEQ ID NO: 2850556 - RNA, 15 nt, Human
aacuucuuugaauuu

SEQ ID NO: 2850557 - RNA, 13 nt, Human
aacuucuugucag

SEQ ID NO: 2850558 - RNA, 14 nt, Human
aacuucuugucaga

SEQ ID NO: 2850559 - RNA, 16 nt, Human
aacuucuugucagaca

SEQ ID NO: 2850560 - RNA, 17 nt, Human
aacuucuugucagacau

SEQ ID NO: 2850561 - RNA, 18 nt, Human
aacuucuugucagacaua

SEQ ID NO: 2850562 - RNA, 20 nt, Human
aacuucuugucagacauaaa

SEQ ID NO: 2850563 - RNA, 21 nt, Human
aacuucuugucagacauaaag

SEQ ID NO: 2850564 - RNA, 22 nt, Human
aacuucuugucagacauaaagc

SEQ ID NO: 2850565 - RNA, 23 nt, Human
aacuucuugucagacauaaagcc

SEQ ID NO: 2850566 - RNA, 13 nt, Human
aacuucacucugg

SEQ ID NO: 2850567 - RNA, 13 nt, Human
aacuugaauaaua

SEQ ID NO: 2850568 - RNA, 16 nt, Human
aacuugaaugugucag

SEQ ID NO: 2850569 - RNA, 16 nt, Human
aacuugacuccauuuc

SEQ ID NO: 2850570 - RNA, 15 nt, Human
aacuugagauguaug

SEQ ID NO: 2850571 - RNA, 20 nt, Human
aacuugagauguaugaaggc

SEQ ID NO: 2850572 - RNA, 22 nt, Human
aacuugagauguaugaaggcuu

SEQ ID NO: 2850573 - RNA, 22 nt, Human
aacuugagcgugaaucuguauc

SEQ ID NO: 2850574 - RNA, 19 nt, Human
aacuugagcgugaaucugu

SEQ ID NO: 2850575 - RNA, 19 nt, Human
aacuugagggcccagagca

SEQ ID NO: 2850576 - RNA, 14 nt, Human
aacuguguguaauu

SEQ ID NO: 2850577 - RNA, 21 nt, Human
aacuguguguaauuguuccuu

SEQ ID NO: 2850578 - RNA, 22 nt, Human
aacuguguguaauuguuccuuu

SEQ ID NO: 2850579 - RNA, 17 nt, Human
aacuguguucauuagaa

SEQ ID NO: 2850580 - RNA, 12 nt, Human
aacuguguugua

SEQ ID NO: 2850581 - RNA, 19 nt, Human
aacugugaaguuuacauug

SEQ ID NO: 2850582 - RNA, 23 nt, Human
aacugugaugaagccgaccuuag

SEQ ID NO: 2850583 - RNA, 22 nt, Human
aacugugcagagucuagaaguu

SEQ ID NO: 2850584 - RNA, 21 nt, Human
aacugugcugaaugcuuuaga

SEQ ID NO: 2850585 - RNA, 17 nt, Human
aacugugaaguuuacau

SEQ ID NO: 2850586 - RNA, 18 nt, Human
aacugucuuuaaaagaga

SEQ ID NO: 2850587 - RNA, 19 nt, Human
aacugucuuuaaaagagag

SEQ ID NO: 2850588 - RNA, 13 nt, Human
aacuguguagcau

SEQ ID NO: 2850589 - RNA, 15 nt, Human
aacuguguagcaucu

SEQ ID NO: 2850590 - RNA, 22 nt, Human
aacuguggauacccuuacccuu

SEQ ID NO: 2850591 - RNA, 11 nt, Human
aacuguggccg

SEQ ID NO: 2850592 - RNA, 20 nt, Human
aacuguggccguuaucugga

SEQ ID NO: 2850593 - RNA, 14 nt, Human
aacuguccagagag

SEQ ID NO: 2850594 - RNA, 16 nt, Human
aacugucggaggaaag

SEQ ID NO: 2850595 - RNA, 17 nt, Human
aacugucggaggaaaga

SEQ ID NO: 2850596 - RNA, 19 nt, Human
aacugucggaggaaagaca

SEQ ID NO: 2850597 - RNA, 14 nt, Human
aacuguaugucaga

SEQ ID NO: 2850598 - RNA, 16 nt, Human
aacuguccagagagca

SEQ ID NO: 2850599 - RNA, 11 nt, Human
aacugccauua

SEQ ID NO: 2850600 - RNA, 12 nt, Human
aacugccauuau

SEQ ID NO: 2850601 - RNA, 18 nt, Human
aacugccauuauuuucug

SEQ ID NO: 2850602 - RNA, 21 nt, Human
aacugccauuauuuucuguca

SEQ ID NO: 2850603 - RNA, 22 nt, Human
aacugccauuauuuucugucag

SEQ ID NO: 2850604 - RNA, 23 nt, Human
aacugccauuauuuucugucaga

SEQ ID NO: 2850605 - RNA, 17 nt, Human
aacugcccccucugccc

SEQ ID NO: 2850606 - RNA, 16 nt, Human
aacugcccccucugcc

SEQ ID NO: 2850607 - RNA, 21 nt, Human
aacugcccccucugcccugcg

SEQ ID NO: 2850608 - RNA, 20 nt, Human
aacugcccccucugcccugc

SEQ ID NO: 2850609 - RNA, 19 nt, Human
aacugcccccucugcccug

SEQ ID NO: 2850610 - RNA, 18 nt, Human
aacugcccccucugcccu

SEQ ID NO: 2850611 - RNA, 14 nt, Human
gugauguuugcucu

SEQ ID NO: 2850612 - RNA, 12 nt, Human
gugauucaaaug

SEQ ID NO: 2850613 - RNA, 22 nt, Human
gugauucaauucaacacucccu

SEQ ID NO: 2850614 - RNA, 22 nt, Human
gugauuagagggaggagaauga

SEQ ID NO: 2850615 - RNA, 23 nt, Human
gugauccucccaccucagccucc

SEQ ID NO: 2850616 - RNA, 14 nt, Human
gugaucucagauca

SEQ ID NO: 2850617 - RNA, 22 nt, Human
gugaucgaugauucaggugcag

SEQ ID NO: 2850618 - RNA, 15 nt, Human
gugaucucagaucag

SEQ ID NO: 2850619 - RNA, 22 nt, Human
gugaucuuggcuuacugcagcc

SEQ ID NO: 2850620 - RNA, 15 nt, Human
gugaucuuuuaaagu

SEQ ID NO: 2850621 - RNA, 13 nt, Human
gugaucugucuug

SEQ ID NO: 2850622 - RNA, 15 nt, Human
gugaucugucuugua

SEQ ID NO: 2850623 - RNA, 19 nt, Human
gugaucugucuuguaauau

SEQ ID NO: 2850624 - RNA, 21 nt, Human
gugaucuuaauauauuugaaa

SEQ ID NO: 2850625 - RNA, 12 nt, Human
gugaucuuauuu

SEQ ID NO: 2850626 - RNA, 19 nt, Human
gugaucuuauuuuucuaaa

SEQ ID NO: 2850627 - RNA, 14 nt, Human
gugaugaacuuucu

SEQ ID NO: 2850628 - RNA, 23 nt, Human
gugaugguuccccuguucacucu

SEQ ID NO: 2850629 - RNA, 15 nt, Human
gugauguuuuuauga

SEQ ID NO: 2850630 - RNA, 16 nt, Human
gugauguuuuuaugau

SEQ ID NO: 2850631 - RNA, 19 nt, Human
gugauguucuaaggcucug

SEQ ID NO: 2850632 - RNA, 22 nt, Human
gugauguucuaaggcucugaga

SEQ ID NO: 2850633 - RNA, 12 nt, Human
gugauguucuaa

SEQ ID NO: 2850634 - RNA, 13 nt, Human
gugauguucuaag

SEQ ID NO: 2850635 - RNA, 16 nt, Human
gugauguucuaaggcu

SEQ ID NO: 2850636 - RNA, 18 nt, Human
gugauguucuaaggcucu

SEQ ID NO: 2850637 - RNA, 18 nt, Human
gugaugucuuuucuuggc

SEQ ID NO: 2850638 - RNA, 13 nt, Human
gugauguuagugu

SEQ ID NO: 2850639 - RNA, 22 nt, Human
gugaugguuccccuguucacuc

SEQ ID NO: 2850640 - RNA, 19 nt, Human
gugauguauauuccuuuga

SEQ ID NO: 2850641 - RNA, 21 nt, Human
gugcaccuguacucaggaggc

SEQ ID NO: 2850642 - RNA, 18 nt, Human
gugcaccuguacucagga

SEQ ID NO: 2850643 - RNA, 20 nt, Human
gugcaccuuaccaacuuucu

SEQ ID NO: 2850644 - RNA, 21 nt, Human
gugcaccuuaccaacuuucug

SEQ ID NO: 2850645 - RNA, 17 nt, Human
gugcauugggauuuuag

SEQ ID NO: 2850646 - RNA, 19 nt, Human
gugcauugggauuuuagaa

SEQ ID NO: 2850647 - RNA, 15 nt, Human
gugcauuguuucugu

SEQ ID NO: 2850648 - RNA, 19 nt, Human
gugcauuguuucugugggc

SEQ ID NO: 2850649 - RNA, 14 nt, Human
gugcauuucugaau

SEQ ID NO: 2850650 - RNA, 15 nt, Human
gugccaaaugcucuc

SEQ ID NO: 2850651 - RNA, 18 nt, Human
gugcaccaccacacccgg

SEQ ID NO: 2850652 - RNA, 21 nt, Human
gugcacaugcacgugugugca

SEQ ID NO: 2850653 - RNA, 15 nt, Human
gugcacccagaagaa

SEQ ID NO: 2850654 - RNA, 19 nt, Human
gugcacccaugggcucuga

SEQ ID NO: 2850655 - RNA, 23 nt, Human
gugcacccaugggcucugacaga

SEQ ID NO: 2850656 - RNA, 20 nt, Human
gugcacaaauauuuauuuuc

SEQ ID NO: 2850657 - RNA, 15 nt, Human
gugcuacugucuuug

SEQ ID NO: 2850658 - RNA, 20 nt, Human
gugcuacugucuuuggaaaa

SEQ ID NO: 2850659 - RNA, 19 nt, Human
gugcuagaauacuuuuuaa

SEQ ID NO: 2850660 - RNA, 14 nt, Human
gugcuagugagcug

SEQ ID NO: 2850661 - RNA, 21 nt, Human
aagaauaauucaauuuuaaag

SEQ ID NO: 2850662 - RNA, 22 nt, Human
aagaauaauucaauuuuaaaga

SEQ ID NO: 2850663 - RNA, 22 nt, Human
aagaagaugcuccagcaacaca

SEQ ID NO: 2850664 - RNA, 17 nt, Human
aagaagauguugaagaa

SEQ ID NO: 2850665 - RNA, 12 nt, Human
aagaagaugcuc

SEQ ID NO: 2850666 - RNA, 16 nt, Human
aagaagcaaggaacca

SEQ ID NO: 2850667 - RNA, 16 nt, Human
aagaagcaaauaaaua

SEQ ID NO: 2850668 - RNA, 12 nt, Human
aagaaguuuauu

SEQ ID NO: 2850669 - RNA, 19 nt, Human
aagaaguuuauucucauuu

SEQ ID NO: 2850670 - RNA, 15 nt, Human
aagaaaggaacauuu

SEQ ID NO: 2850671 - RNA, 14 nt, Human
aagaagagaagcug

SEQ ID NO: 2850672 - RNA, 16 nt, Human
aagaagagaagcugcu

SEQ ID NO: 2850673 - RNA, 17 nt, Human
aagaagagaagcugcug

SEQ ID NO: 2850674 - RNA, 18 nt, Human
aagaagagaagcugcuga

SEQ ID NO: 2850675 - RNA, 19 nt, Human
aagaagagaagcugcugac

SEQ ID NO: 2850676 - RNA, 14 nt, Human
aagaagagccacag

SEQ ID NO: 2850677 - RNA, 15 nt, Human
aagaagagccacagu

SEQ ID NO: 2850678 - RNA, 22 nt, Human
aagaagaugaucaguggacagu

SEQ ID NO: 2850679 - RNA, 19 nt, Human
aagaagauccuaaaacaaa

SEQ ID NO: 2850680 - RNA, 14 nt, Human
aagaagaucuguaa

SEQ ID NO: 2850681 - RNA, 14 nt, Human
aagaagaugaaugg

SEQ ID NO: 2850682 - RNA, 15 nt, Human
aagaagaugaauggc

SEQ ID NO: 2850683 - RNA, 18 nt, Human
aagaagaugaauggcguc

SEQ ID NO: 2850684 - RNA, 14 nt, Human
gugcucuggacagg

SEQ ID NO: 2850685 - RNA, 13 nt, Human
gugcucuggacag

SEQ ID NO: 2850686 - RNA, 16 nt, Human
gugcucugaucaucca

SEQ ID NO: 2850687 - RNA, 15 nt, Human
gugcucucaccagcu

SEQ ID NO: 2850688 - RNA, 13 nt, Human
gugcucagggcua

SEQ ID NO: 2850689 - RNA, 13 nt, Human
gugcuauaguauu

SEQ ID NO: 2850690 - RNA, 14 nt, Human
gugcuauaguauuu

SEQ ID NO: 2850691 - RNA, 15 nt, Human
gugcuauaguauuug

SEQ ID NO: 2850692 - RNA, 13 nt, Human
gugcuauauauau

SEQ ID NO: 2850693 - RNA, 20 nt, Human
gugcuauauauauaaauauu

SEQ ID NO: 2850694 - RNA, 13 nt, Human
gugcuccaggcag

SEQ ID NO: 2850695 - RNA, 16 nt, Human
gugcuccccucugaaa

SEQ ID NO: 2850696 - RNA, 14 nt, Human
gugcuccuccuugg

SEQ ID NO: 2850697 - RNA, 12 nt, Human
aagaaagcaacu

SEQ ID NO: 2850698 - RNA, 14 nt, Human
aagaaagcaacuuu

SEQ ID NO: 2850699 - RNA, 17 nt, Human
aagaaagauguauauag

SEQ ID NO: 2850700 - RNA, 17 nt, Human
aagaaagcugguaaacu

SEQ ID NO: 2850701 - RNA, 22 nt, Human
aagaaagcuucaaacugcauga

SEQ ID NO: 2850702 - RNA, 16 nt, Human
aagaaacagauaccau

SEQ ID NO: 2850703 - RNA, 22 nt, Human
aagaaaauuuuuguaguagcgu

SEQ ID NO: 2850704 - RNA, 22 nt, Human
gugccagaggaauccuggcagc

SEQ ID NO: 2850705 - RNA, 21 nt, Human
gugccagaggaauccuggcag

SEQ ID NO: 2850706 - RNA, 20 nt, Human
gugccagaggaauccuggca

SEQ ID NO: 2850707 - RNA, 13 nt, Human
gugccaacacuca

SEQ ID NO: 2850708 - RNA, 18 nt, Human
gugccaacacucaagaag

SEQ ID NO: 2850709 - RNA, 21 nt, Human
aacuuuagaagugcauuucug

SEQ ID NO: 2850710 - RNA, 22 nt, Human
aacuuuagaagugcauuucuga

SEQ ID NO: 2850711 - RNA, 14 nt, Human
aagaaaacaacuuc

SEQ ID NO: 2850712 - RNA, 16 nt, Human
gucuggaaugcagugg

SEQ ID NO: 2850713 - RNA, 15 nt, Human
gucuggaaugcagug

SEQ ID NO: 2850714 - RNA, 21 nt, Human
gucuucaaggcuucagucuca

SEQ ID NO: 2850715 - RNA, 17 nt, Human
gucuucaaacugugaag

SEQ ID NO: 2850716 - RNA, 17 nt, Human
gucuucaaauugucuuu

SEQ ID NO: 2850717 - RNA, 20 nt, Human
gucuucaaauugucuuuugu

SEQ ID NO: 2850718 - RNA, 22 nt, Human
gucuucaacauaacccacuugu

SEQ ID NO: 2850719 - RNA, 16 nt, Human
gucuucaacauccugc

SEQ ID NO: 2850720 - RNA, 17 nt, Human
gucuucaacauccugcc

SEQ ID NO: 2850721 - RNA, 18 nt, Human
gucuucaacauccugcca

SEQ ID NO: 2850722 - RNA, 19 nt, Human
gucuucaacauccugccag

SEQ ID NO: 2850723 - RNA, 20 nt, Human
gucuucaacauccugccagc

SEQ ID NO: 2850724 - RNA, 21 nt, Human
gucuucaacauccugccagcc

SEQ ID NO: 2850725 - RNA, 22 nt, Human
gucuucaacauccugccagccc

SEQ ID NO: 2850726 - RNA, 15 nt, Human
gucuuaucaagcagc

SEQ ID NO: 2850727 - RNA, 20 nt, Human
gucuuaucugagcugagcca

SEQ ID NO: 2850728 - RNA, 22 nt, Human
gucuuaucugagcugagccagg

SEQ ID NO: 2850729 - RNA, 23 nt, Human
gucuuaucugagcugagccaggc

SEQ ID NO: 2850730 - RNA, 21 nt, Human
gucuuucaggaccuuuugaag

SEQ ID NO: 2850731 - RNA, 13 nt, Human
gucuuguucuguc

SEQ ID NO: 2850732 - RNA, 16 nt, Human
gucuuguucugucacu

SEQ ID NO: 2850733 - RNA, 21 nt, Human
gucuuguucugucacucaggc

SEQ ID NO: 2850734 - RNA, 23 nt, Human
gucuuguucugucacucaggcug

SEQ ID NO: 2850735 - RNA, 13 nt, Human
gucuuguuagaaa

SEQ ID NO: 2850736 - RNA, 16 nt, Human
gucuuguuagaaaaca

SEQ ID NO: 2850737 - RNA, 17 nt, Human
gucuuguuagaaaacaa

SEQ ID NO: 2850738 - RNA, 22 nt, Human
gucuuguuuuuuuuuuccacuu

SEQ ID NO: 2850739 - RNA, 15 nt, Human
gucuuuaaaagagag

SEQ ID NO: 2850740 - RNA, 16 nt, Human
gucuuuaaaggcccag

SEQ ID NO: 2850741 - RNA, 18 nt, Human
gucuuuaaaggcccagcc

SEQ ID NO: 2850742 - RNA, 19 nt, Human
gucuuuaaaggcccagccc

SEQ ID NO: 2850743 - RNA, 20 nt, Human
gucuuuaaaggcccagcccc

SEQ ID NO: 2850744 - RNA, 22 nt, Human
gucuuuaaaggcccagccccua

SEQ ID NO: 2850745 - RNA, 16 nt, Human
gucuuuaaauagauac

SEQ ID NO: 2850746 - RNA, 13 nt, Human
gucuuuaaaucau

SEQ ID NO: 2850747 - RNA, 14 nt, Human
gucugacaggcaau

SEQ ID NO: 2850748 - RNA, 13 nt, Human
gucugacaggcaa

SEQ ID NO: 2850749 - RNA, 12 nt, Human
gucugacaggca

SEQ ID NO: 2850750 - RNA, 18 nt, Human
gucugacaggcaaugcug

SEQ ID NO: 2850751 - RNA, 15 nt, Human
gucugacaggcaaug

SEQ ID NO: 2850752 - RNA, 20 nt, Human
gucugacaggcaaugcuggc

SEQ ID NO: 2850753 - RNA, 14 nt, Human
gucuggaaguccaa

SEQ ID NO: 2850754 - RNA, 22 nt, Human
gucugcuuuaaagggccugccu

SEQ ID NO: 2850755 - RNA, 23 nt, Human
gucugcuuuaaagggccugccug

SEQ ID NO: 2850756 - RNA, 19 nt, Human
gucuggaagaaagauaaaa

SEQ ID NO: 2850757 - RNA, 14 nt, Human
gucucaaaaaaaca

SEQ ID NO: 2850758 - RNA, 12 nt, Human
gucuauuuaagc

SEQ ID NO: 2850759 - RNA, 16 nt, Human
gucuauuuaagccuca

SEQ ID NO: 2850760 - RNA, 16 nt, Human
gucuauuuuugucuua

SEQ ID NO: 2850761 - RNA, 16 nt, Human
gucucuuuauuccuag

SEQ ID NO: 2850762 - RNA, 17 nt, Human
gucucuuuauuccuagu

SEQ ID NO: 2850763 - RNA, 22 nt, Human
gucucuuuauuccuaguuggug

SEQ ID NO: 2850764 - RNA, 11 nt, Human
gucuauuuuaa

SEQ ID NO: 2850765 - RNA, 15 nt, Human
gucuauuuuaaaaua

SEQ ID NO: 2850766 - RNA, 16 nt, Human
gucuauuuuaaaauaa

SEQ ID NO: 2850767 - RNA, 11 nt, Human
gucucuuuugu

SEQ ID NO: 2850768 - RNA, 12 nt, Human
gucucuuuugua

SEQ ID NO: 2850769 - RNA, 17 nt, Human
gucucuuuuguaaauua

SEQ ID NO: 2850770 - RNA, 18 nt, Human
gucucuuuuguaaauuaa

SEQ ID NO: 2850771 - RNA, 19 nt, Human
gucucuuuuguaaauuaaa

SEQ ID NO: 2850772 - RNA, 11 nt, Human
gucugaacuuu

SEQ ID NO: 2850773 - RNA, 16 nt, Human
gucugaacuuugggaa

SEQ ID NO: 2850774 - RNA, 14 nt, Human
gucugaaaauguug

SEQ ID NO: 2850775 - RNA, 19 nt, Human
gucugaaaauguuguuaug

SEQ ID NO: 2850776 - RNA, 15 nt, Human
aacuauguugauaaa

SEQ ID NO: 2850777 - RNA, 22 nt, Human
aacuauuaagaggcagaaaauu

SEQ ID NO: 2850778 - RNA, 21 nt, Human
aacuauuaaggauguagcuuu

SEQ ID NO: 2850779 - RNA, 24 nt, Human
aacuauuaaggauguagcuuuuca

SEQ ID NO: 2850780 - RNA, 23 nt, Human
aacuauucaggagaguagaacag

SEQ ID NO: 2850781 - RNA, 20 nt, Human
aacucauuuuugccauacau

SEQ ID NO: 2850782 - RNA, 12 nt, Human
aacuauucaguu

SEQ ID NO: 2850783 - RNA, 16 nt, Human
aacuauucaguugugu

SEQ ID NO: 2850784 - RNA, 17 nt, Human
aacuauucaguuguguu

SEQ ID NO: 2850785 - RNA, 21 nt, Human
aacuauucaguuguguuuguu

SEQ ID NO: 2850786 - RNA, 14 nt, Human
aacuauucaugcua

SEQ ID NO: 2850787 - RNA, 17 nt, Human
aacuauucgaaugaaaa

SEQ ID NO: 2850788 - RNA, 20 nt, Human
aacuauucgaaugaaaagac

SEQ ID NO: 2850789 - RNA, 15 nt, Human
aacuaguccuuuacu

SEQ ID NO: 2850790 - RNA, 14 nt, Human
aacuaguuuuguuu

SEQ ID NO: 2850791 - RNA, 15 nt, Human
aacuaguuuuguuua

SEQ ID NO: 2850792 - RNA, 14 nt, Human
aacuauaugugaau

SEQ ID NO: 2850793 - RNA, 20 nt, Human
aacuauauucauuuccacuc

SEQ ID NO: 2850794 - RNA, 16 nt, Human
aacuauaaauauguac

SEQ ID NO: 2850795 - RNA, 16 nt, Human
aacuauacuugaacaa

SEQ ID NO: 2850796 - RNA, 17 nt, Human
aacuauacuugaacaaa

SEQ ID NO: 2850797 - RNA, 18 nt, Human
aacuauacuugaacaaaa

SEQ ID NO: 2850798 - RNA, 20 nt, Human
aacuauacuugaacaaaagg

SEQ ID NO: 2850799 - RNA, 22 nt, Human
aacuauacuugaacaaaagggu

SEQ ID NO: 2850800 - RNA, 17 nt, Human
aacuaguaguucucuug

SEQ ID NO: 2850801 - RNA, 18 nt, Human
aacuauggaucagaauag

SEQ ID NO: 2850802 - RNA, 23 nt, Human
aacguuuucuguuuggaggagca

SEQ ID NO: 2850803 - RNA, 23 nt, Human
aacguuuuuccuuuaaaaaaauu

SEQ ID NO: 2850804 - RNA, 14 nt, Human
aacuaaaagacauu

SEQ ID NO: 2850805 - RNA, 12 nt, Human
aacgugaaaaug

SEQ ID NO: 2850806 - RNA, 14 nt, Human
aacgugauacauuu

SEQ ID NO: 2850807 - RNA, 15 nt, Human
aacgugauacauuug

SEQ ID NO: 2850808 - RNA, 16 nt, Human
aacgugauacauuugg

SEQ ID NO: 2850809 - RNA, 11 nt, Human
aacgugcaacu

SEQ ID NO: 2850810 - RNA, 12 nt, Human
aacgugcaacug

SEQ ID NO: 2850811 - RNA, 20 nt, Human
aacgugcaacugacacuccc

SEQ ID NO: 2850812 - RNA, 12 nt, Human
aaccuucuggcc

SEQ ID NO: 2850813 - RNA, 19 nt, Human
aaccuuccuuccugcuuga

SEQ ID NO: 2850814 - RNA, 21 nt, Human
aaccuucgccaccuggguucc

SEQ ID NO: 2850815 - RNA, 22 nt, Human
aaccuuccauacauuuuuuucu

SEQ ID NO: 2850816 - RNA, 14 nt, Human
aaccugggauucag

SEQ ID NO: 2850817 - RNA, 17 nt, Human
aaccugggauucaggaa

SEQ ID NO: 2850818 - RNA, 20 nt, Human
aaccugggauucaggaaugu

SEQ ID NO: 2850819 - RNA, 21 nt, Human
aaccugggauucaggaaugug

SEQ ID NO: 2850820 - RNA, 17 nt, Human
aaccuuauccugcauug

SEQ ID NO: 2850821 - RNA, 18 nt, Human
aaccuuauccugcauugu

SEQ ID NO: 2850822 - RNA, 19 nt, Human
aaccuuauccugcauuguu

SEQ ID NO: 2850823 - RNA, 22 nt, Human
aaccuuauccugcauuguuagc

SEQ ID NO: 2850824 - RNA, 14 nt, Human
gucuuucuccaaag

SEQ ID NO: 2850825 - RNA, 16 nt, Human
gucuuucuccaaaguu

SEQ ID NO: 2850826 - RNA, 16 nt, Human
gucuuuccuggcacua

SEQ ID NO: 2850827 - RNA, 19 nt, Human
aaccuggccgcguuuagac

SEQ ID NO: 2850828 - RNA, 23 nt, Human
aaccuggccgcguuuagaccaag

SEQ ID NO: 2850829 - RNA, 20 nt, Human
gugagacaguccagccugga

SEQ ID NO: 2850830 - RNA, 21 nt, Human
gugacuuccucgccucuccca

SEQ ID NO: 2850831 - RNA, 15 nt, Human
gugacuucuccaggu

SEQ ID NO: 2850832 - RNA, 16 nt, Human
gugacuucagcucugu

SEQ ID NO: 2850833 - RNA, 14 nt, Human
gugacaugugaaac

SEQ ID NO: 2850834 - RNA, 15 nt, Human
gugacaugugaaacc

SEQ ID NO: 2850835 - RNA, 16 nt, Human
gugacaugugaaaccu

SEQ ID NO: 2850836 - RNA, 17 nt, Human
gugacaugugaaaccuu

SEQ ID NO: 2850837 - RNA, 18 nt, Human
gugacaugugaaaccuuu

SEQ ID NO: 2850838 - RNA, 19 nt, Human
gugacaugugaaaccuuuu

SEQ ID NO: 2850839 - RNA, 20 nt, Human
gugacaugugaaaccuuuuu

SEQ ID NO: 2850840 - RNA, 22 nt, Human
gugacaugugaaaccuuuuuua

SEQ ID NO: 2850841 - RNA, 19 nt, Human
gugacuguaucuguguaga

SEQ ID NO: 2850842 - RNA, 15 nt, Human
gugacuguaucugug

SEQ ID NO: 2850843 - RNA, 22 nt, Human
gugacauguguuggcagccucu

SEQ ID NO: 2850844 - RNA, 21 nt, Human
gugacauuuauuuuucucaug

SEQ ID NO: 2850845 - RNA, 16 nt, Human
gugagacucugucuca

SEQ ID NO: 2850846 - RNA, 14 nt, Human
gugagacucugucu

SEQ ID NO: 2850847 - RNA, 16 nt, Human
gugagacccugucucu

SEQ ID NO: 2850848 - RNA, 23 nt, Human
gugagaccugccccuccucucug

SEQ ID NO: 2850849 - RNA, 16 nt, Human
gugagaccugccccuc

SEQ ID NO: 2850850 - RNA, 15 nt, Human
gugagacccccacac

SEQ ID NO: 2850851 - RNA, 14 nt, Human
gugagacccccaca

SEQ ID NO: 2850852 - RNA, 17 nt, Human
gugagacccccacaccu

SEQ ID NO: 2850853 - RNA, 16 nt, Human
gugagacccccacacc

SEQ ID NO: 2850854 - RNA, 13 nt, Human
gugagaccugccc

SEQ ID NO: 2850855 - RNA, 15 nt, Human
gugagaccugccccu

SEQ ID NO: 2850856 - RNA, 14 nt, Human
gugagaccugcccc

SEQ ID NO: 2850857 - RNA, 22 nt, Human
gugacagagugagacucugucu

SEQ ID NO: 2850858 - RNA, 20 nt, Human
gugacagagugagacucugu

SEQ ID NO: 2850859 - RNA, 23 nt, Human
gugacagaggcagccccauucug

SEQ ID NO: 2850860 - RNA, 12 nt, Human
gugaauaauaau

SEQ ID NO: 2850861 - RNA, 18 nt, Human
aacuccaagguucccuug

SEQ ID NO: 2850862 - RNA, 22 nt, Human
gugacaguugcagcccuuguga

SEQ ID NO: 2850863 - RNA, 23 nt, Human
gugacauaauauauucuauuuuu

SEQ ID NO: 2850864 - RNA, 18 nt, Human
gugacaguggauugcauu

SEQ ID NO: 2850865 - RNA, 11 nt, Human
gugacagucau

SEQ ID NO: 2850866 - RNA, 13 nt, Human
gugacagucauca

SEQ ID NO: 2850867 - RNA, 16 nt, Human
gugacagucaucauca

SEQ ID NO: 2850868 - RNA, 18 nt, Human
gugacagucaucaucagg

SEQ ID NO: 2850869 - RNA, 19 nt, Human
gugacagucaucaucaggg

SEQ ID NO: 2850870 - RNA, 20 nt, Human
gugacagucaucaucagggc

SEQ ID NO: 2850871 - RNA, 21 nt, Human
gugacagucaucaucagggcc

SEQ ID NO: 2850872 - RNA, 22 nt, Human
gugacagucaucaucagggccu

SEQ ID NO: 2850873 - RNA, 23 nt, Human
gugacagucaucaucagggccug

SEQ ID NO: 2850874 - RNA, 22 nt, Human
gugacagcucuuuuugugaagu

SEQ ID NO: 2850875 - RNA, 12 nt, Human
gugacagggcca

SEQ ID NO: 2850876 - RNA, 13 nt, Human
gugacagggccag

SEQ ID NO: 2850877 - RNA, 14 nt, Human
gugacagggccagu

SEQ ID NO: 2850878 - RNA, 19 nt, Human
gugacagggccaguggggc

SEQ ID NO: 2850879 - RNA, 20 nt, Human
gugacagggccaguggggcc

SEQ ID NO: 2850880 - RNA, 21 nt, Human
gugacagggccaguggggccu

SEQ ID NO: 2850881 - RNA, 23 nt, Human
gugacagggccaguggggccugu

SEQ ID NO: 2850882 - RNA, 14 nt, Human
gugaaguuuacauu

SEQ ID NO: 2850883 - RNA, 18 nt, Human
gugaauaaacuucagcac

SEQ ID NO: 2850884 - RNA, 20 nt, Human
gugaauaaacuucagcacca

SEQ ID NO: 2850885 - RNA, 23 nt, Human
aacuccugacgucugaagcuuga

SEQ ID NO: 2850886 - RNA, 18 nt, Human
aacuccugagaaauguua

SEQ ID NO: 2850887 - RNA, 19 nt, Human
aacuccaccuugcggggau

SEQ ID NO: 2850888 - RNA, 15 nt, Human
aacuccaccuuccca

SEQ ID NO: 2850889 - RNA, 14 nt, Human
aacuccgcccccag

SEQ ID NO: 2850890 - RNA, 15 nt, Human
aacuccgcccccagc

SEQ ID NO: 2850891 - RNA, 18 nt, Human
aacuccgcccccagccua

SEQ ID NO: 2850892 - RNA, 19 nt, Human
aacuccgcccccagccuau

SEQ ID NO: 2850893 - RNA, 12 nt, Human
aacuccggauug

SEQ ID NO: 2850894 - RNA, 21 nt, Human
aacuccggauugcguuccucc

SEQ ID NO: 2850895 - RNA, 21 nt, Human
aacuccuagggccacugaaga

SEQ ID NO: 2850896 - RNA, 16 nt, Human
aacuccugacagucuu

SEQ ID NO: 2850897 - RNA, 19 nt, Human
aacuccucgacaucacugu

SEQ ID NO: 2850898 - RNA, 22 nt, Human
aacuccucgacaucacuguuca

SEQ ID NO: 2850899 - RNA, 23 nt, Human
aacuccucgacaucacuguucau

SEQ ID NO: 2850900 - RNA, 21 nt, Human
aacuccucacacacccugagg

SEQ ID NO: 2850901 - RNA, 22 nt, Human
aacuccucacacacccugaggu

SEQ ID NO: 2850902 - RNA, 14 nt, Human
aacuccugaccuca

SEQ ID NO: 2850903 - RNA, 12 nt, Human
aacuccugaccu

SEQ ID NO: 2850904 - RNA, 18 nt, Human
gugagacucugucucaaa

SEQ ID NO: 2850905 - RNA, 17 nt, Human
gugagagagaugggagc

SEQ ID NO: 2850906 - RNA, 19 nt, Human
gugagucaccaagcccagu

SEQ ID NO: 2850907 - RNA, 17 nt, Human
gugagucaccaagccca

SEQ ID NO: 2850908 - RNA, 16 nt, Human
gugaggccugucugug

SEQ ID NO: 2850909 - RNA, 19 nt, Human
gugaggccugucugugacc

SEQ ID NO: 2850910 - RNA, 21 nt, Human
gugaggccugucugugaccug

SEQ ID NO: 2850911 - RNA, 14 nt, Human
gugagagauucugu

SEQ ID NO: 2850912 - RNA, 16 nt, Human
gugaguaucagaauug

SEQ ID NO: 2850913 - RNA, 22 nt, Human
aacugcauugacuuucaguaaa

SEQ ID NO: 2850914 - RNA, 12 nt, Human
aacucucugaac

SEQ ID NO: 2850915 - RNA, 22 nt, Human
aacucucuccacccuauaugua

SEQ ID NO: 2850916 - RNA, 12 nt, Human
aacucucuccac

SEQ ID NO: 2850917 - RNA, 14 nt, Human
aacucugaacuuug

SEQ ID NO: 2850918 - RNA, 16 nt, Human
aacucugaacuuugga

SEQ ID NO: 2850919 - RNA, 17 nt, Human
aacucugaacuuuggag

SEQ ID NO: 2850920 - RNA, 18 nt, Human
aacucugaacuuuggaga

SEQ ID NO: 2850921 - RNA, 11 nt, Human
aacucuugauu

SEQ ID NO: 2850922 - RNA, 17 nt, Human
aacucuugauuauccau

SEQ ID NO: 2850923 - RNA, 16 nt, Human
aacucugacaacagac

SEQ ID NO: 2850924 - RNA, 18 nt, Human
uagggaccucagagguuu

SEQ ID NO: 2850925 - RNA, 12 nt, Human
uaggcauuuccu

SEQ ID NO: 2850926 - RNA, 21 nt, Human
uagggaagggugguggagcca

SEQ ID NO: 2850927 - RNA, 20 nt, Human
uagggaagggugguggagcc

SEQ ID NO: 2850928 - RNA, 21 nt, Human
uaggacuuuggugguuuaaaa

SEQ ID NO: 2850929 - RNA, 14 nt, Human
uagggaaguaacag

SEQ ID NO: 2850930 - RNA, 22 nt, Human
uagggaauaaaauccuaagaca

SEQ ID NO: 2850931 - RNA, 18 nt, Human
uaggcaaccuuuauuuuu

SEQ ID NO: 2850932 - RNA, 14 nt, Human
uaggagggagacac

SEQ ID NO: 2850933 - RNA, 18 nt, Human
uaggcacucuuaaaugau

SEQ ID NO: 2850934 - RNA, 19 nt, Human
uaggcaaggcuaugugauu

SEQ ID NO: 2850935 - RNA, 18 nt, Human
uaggcacuguaguucuaa

SEQ ID NO: 2850936 - RNA, 19 nt, Human
uaggcacuguaguucuaag

SEQ ID NO: 2850937 - RNA, 20 nt, Human
uaggcacuguaguucuaaga

SEQ ID NO: 2850938 - RNA, 22 nt, Human
uaggcacuguaguucuaagacu

SEQ ID NO: 2850939 - RNA, 21 nt, Human
uaggcacuguaguucuaagac

SEQ ID NO: 2850940 - RNA, 19 nt, Human
uaggaaauaaaaccuuuca

SEQ ID NO: 2850941 - RNA, 13 nt, Human
uagcugugggggu

SEQ ID NO: 2850942 - RNA, 14 nt, Human
uagcugugggggug

SEQ ID NO: 2850943 - RNA, 20 nt, Human
uaggaaauaaaaccuuucaa

SEQ ID NO: 2850944 - RNA, 16 nt, Human
uaggaaauccagggug

SEQ ID NO: 2850945 - RNA, 15 nt, Human
uaggacgccacccag

SEQ ID NO: 2850946 - RNA, 16 nt, Human
uaggacucugaggcuc

SEQ ID NO: 2850947 - RNA, 15 nt, Human
uaggacucugaggcu

SEQ ID NO: 2850948 - RNA, 14 nt, Human
uaggacucugaggc

SEQ ID NO: 2850949 - RNA, 16 nt, Human
uaggacgccacccagc

SEQ ID NO: 2850950 - RNA, 11 nt, Human
uaggagccugc

SEQ ID NO: 2850951 - RNA, 23 nt, Human
uaggagacuugccagagccgggc

SEQ ID NO: 2850952 - RNA, 14 nt, Human
uaggagaggaugag

SEQ ID NO: 2850953 - RNA, 18 nt, Human
uaggagaggaugagagcc

SEQ ID NO: 2850954 - RNA, 15 nt, Human
uaggagaucagaaaa

SEQ ID NO: 2850955 - RNA, 22 nt, Human
uaggagaggaugagagcccaga

SEQ ID NO: 2850956 - RNA, 18 nt, Human
uaggagcugccuuggcuc

SEQ ID NO: 2850957 - RNA, 17 nt, Human
uaggagcuaaggcucua

SEQ ID NO: 2850958 - RNA, 16 nt, Human
uaggagcugagguuuc

SEQ ID NO: 2850959 - RNA, 15 nt, Human
uaggagccugcuggu

SEQ ID NO: 2850960 - RNA, 23 nt, Human
uaggagccugcuggucacagccu

SEQ ID NO: 2850961 - RNA, 13 nt, Human
uaggagcuaaggc

SEQ ID NO: 2850962 - RNA, 14 nt, Human
uaggagcuaaggcu

SEQ ID NO: 2850963 - RNA, 23 nt, Human
uaggagcugccuuggcucagaca

SEQ ID NO: 2850964 - RNA, 16 nt, Human
uaggagcuaaggcucu

SEQ ID NO: 2850965 - RNA, 20 nt, Human
uaggagacuugccagagccg

SEQ ID NO: 2850966 - RNA, 17 nt, Human
uaggagacuugccagag

SEQ ID NO: 2850967 - RNA, 21 nt, Human
uaggagaccaaggcgggagca

SEQ ID NO: 2850968 - RNA, 14 nt, Human
uaggagaccaaggc

SEQ ID NO: 2850969 - RNA, 18 nt, Human
uaggacucugaggcucuu

SEQ ID NO: 2850970 - RNA, 13 nt, Human
acaauaauuucag

SEQ ID NO: 2850971 - RNA, 12 nt, Human
acaauaauuuca

SEQ ID NO: 2850972 - RNA, 12 nt, Human
acaauacagaua

SEQ ID NO: 2850973 - RNA, 14 nt, Human
acaauacagauaac

SEQ ID NO: 2850974 - RNA, 17 nt, Human
acaauacagauaacauu

SEQ ID NO: 2850975 - RNA, 18 nt, Human
acaauaauauuguuguau

SEQ ID NO: 2850976 - RNA, 21 nt, Human
acaauaauauuguuguauaau

SEQ ID NO: 2850977 - RNA, 22 nt, Human
acaauaauauuguuguauaauu

SEQ ID NO: 2850978 - RNA, 23 nt, Human
acaauaauauuguuguauaauuu

SEQ ID NO: 2850979 - RNA, 13 nt, Human
acaauaauggaaa

SEQ ID NO: 2850980 - RNA, 21 nt, Human
acaauaauucuggagauacug

SEQ ID NO: 2850981 - RNA, 16 nt, Human
acaauaagcaaaaaca

SEQ ID NO: 2850982 - RNA, 15 nt, Human
acaauaagcaaaaac

SEQ ID NO: 2850983 - RNA, 14 nt, Human
acaauaaaugugca

SEQ ID NO: 2850984 - RNA, 21 nt, Human
acaauaacacuaaaauuuuag

SEQ ID NO: 2850985 - RNA, 14 nt, Human
acaauaaagagauu

SEQ ID NO: 2850986 - RNA, 19 nt, Human
acaagaccccgucucaaaa

SEQ ID NO: 2850987 - RNA, 12 nt, Human
acaauaaaccuc

SEQ ID NO: 2850988 - RNA, 12 nt, Human
acaauaaagaga

SEQ ID NO: 2850989 - RNA, 19 nt, Human
acaaggacuaggguccugg

SEQ ID NO: 2850990 - RNA, 18 nt, Human
acaaggacuaggguccug

SEQ ID NO: 2850991 - RNA, 21 nt, Human
acaaggacagccccuccucca

SEQ ID NO: 2850992 - RNA, 22 nt, Human
acaaggacagccccuccuccau

SEQ ID NO: 2850993 - RNA, 20 nt, Human
uagcuacaggaagcacccca

SEQ ID NO: 2850994 - RNA, 15 nt, Human
uagcuacaggaagca

SEQ ID NO: 2850995 - RNA, 19 nt, Human
uagcuaauguaauaacugu

SEQ ID NO: 2850996 - RNA, 12 nt, Human
uagcuaauguaa

SEQ ID NO: 2850997 - RNA, 13 nt, Human
acaauacaucuga

SEQ ID NO: 2850998 - RNA, 24 nt, Human
uagcuaauaaugagcuauuaaaac

SEQ ID NO: 2850999 - RNA, 15 nt, Human
uagcuaauaauguua

SEQ ID NO: 2851000 - RNA, 16 nt, Human
uagcuaggauuugaac

SEQ ID NO: 2851001 - RNA, 17 nt, Human
uagcuaucaagaggcug

SEQ ID NO: 2851002 - RNA, 14 nt, Human
uagcuaucagaaga

SEQ ID NO: 2851003 - RNA, 15 nt, Human
uagcuaucagaagac

SEQ ID NO: 2851004 - RNA, 10 nt, Human
uagcuguggg

SEQ ID NO: 2851005 - RNA, 22 nt, Human
uagcuaaguacacaauaagcaa

SEQ ID NO: 2851006 - RNA, 15 nt, Human
uagcuaaguacacaa

SEQ ID NO: 2851007 - RNA, 18 nt, Human
acaaucauuugcuuuuug

SEQ ID NO: 2851008 - RNA, 16 nt, Human
acaaucauuguuuuga

SEQ ID NO: 2851009 - RNA, 17 nt, Human
acaaucauuguuuugaa

SEQ ID NO: 2851010 - RNA, 20 nt, Human
acaaucauuguuuugaauau

SEQ ID NO: 2851011 - RNA, 21 nt, Human
acaaucauuguuuugaauauu

SEQ ID NO: 2851012 - RNA, 18 nt, Human
acaaucaugaaauaugca

SEQ ID NO: 2851013 - RNA, 19 nt, Human
acaaucaugaaauaugcau

SEQ ID NO: 2851014 - RNA, 16 nt, Human
aauuguugaaauuuug

SEQ ID NO: 2851015 - RNA, 18 nt, Human
aauuguugaaauuuugca

SEQ ID NO: 2851016 - RNA, 20 nt, Human
aauuguugaaauuuugcaaa

SEQ ID NO: 2851017 - RNA, 23 nt, Human
aauuguugaaauuuugcaaauau

SEQ ID NO: 2851018 - RNA, 20 nt, Human
aauuguugaacagguguuuu

SEQ ID NO: 2851019 - RNA, 21 nt, Human
aauuguugaacagguguuuuu

SEQ ID NO: 2851020 - RNA, 22 nt, Human
aauuguugaacagguguuuuuc

SEQ ID NO: 2851021 - RNA, 14 nt, Human
aauuguugacaaau

SEQ ID NO: 2851022 - RNA, 13 nt, Human
aauuguugacagu

SEQ ID NO: 2851023 - RNA, 18 nt, Human
aauuguugacaguucuga

SEQ ID NO: 2851024 - RNA, 20 nt, Human
acaaaggauuaauugcugca

SEQ ID NO: 2851025 - RNA, 14 nt, Human
acaaagggcccaga

SEQ ID NO: 2851026 - RNA, 15 nt, Human
acaaaggggaaagaa

SEQ ID NO: 2851027 - RNA, 17 nt, Human
acaaaggggaaagaaca

SEQ ID NO: 2851028 - RNA, 18 nt, Human
acaaaggggaaagaacau

SEQ ID NO: 2851029 - RNA, 19 nt, Human
acaaaggggaucauaaagu

SEQ ID NO: 2851030 - RNA, 21 nt, Human
acaaaggggaucauaaaguua

SEQ ID NO: 2851031 - RNA, 19 nt, Human
acaaaggcaaguuaagaga

SEQ ID NO: 2851032 - RNA, 23 nt, Human
acaaaggcaaguuaagagaaacu

SEQ ID NO: 2851033 - RNA, 14 nt, Human
acaaaggccaaacu

SEQ ID NO: 2851034 - RNA, 15 nt, Human
acaaaggccaaacug

SEQ ID NO: 2851035 - RNA, 17 nt, Human
acaaaggccaaacugcu

SEQ ID NO: 2851036 - RNA, 20 nt, Human
acaaagggcacagcaucugu

SEQ ID NO: 2851037 - RNA, 22 nt, Human
acaaagggcacagcaucuguag

SEQ ID NO: 2851038 - RNA, 20 nt, Human
aauuguugacaguucugaag

SEQ ID NO: 2851039 - RNA, 23 nt, Human
acaaagaguucuggaaaagaacu

SEQ ID NO: 2851040 - RNA, 14 nt, Human
acaaagauaucuuu

SEQ ID NO: 2851041 - RNA, 17 nt, Human
acaaagauaucuuuucu

SEQ ID NO: 2851042 - RNA, 20 nt, Human
acaaagauaucuuuucuuua

SEQ ID NO: 2851043 - RNA, 21 nt, Human
acaaagauaucuuuucuuuag

SEQ ID NO: 2851044 - RNA, 20 nt, Human
acaaagauggcucagagggg

SEQ ID NO: 2851045 - RNA, 15 nt, Human
acaaagcacaguguu

SEQ ID NO: 2851046 - RNA, 14 nt, Human
acaaagcacagugu

SEQ ID NO: 2851047 - RNA, 19 nt, Human
acaaagcacaguuugaaca

SEQ ID NO: 2851048 - RNA, 15 nt, Human
acaaagcacuagaga

SEQ ID NO: 2851049 - RNA, 17 nt, Human
acaaagcacuagagaau

SEQ ID NO: 2851050 - RNA, 23 nt, Human
acaaagcacuagagaaugcacag

SEQ ID NO: 2851051 - RNA, 16 nt, Human
acaaagcacaguguua

SEQ ID NO: 2851052 - RNA, 16 nt, Human
acaaagcacaguuuga

SEQ ID NO: 2851053 - RNA, 17 nt, Human
acaaagcacaguuugaa

SEQ ID NO: 2851054 - RNA, 18 nt, Human
acaaagcacaguuugaac

SEQ ID NO: 2851055 - RNA, 22 nt, Human
uagagcaaaauugauguguuua

SEQ ID NO: 2851056 - RNA, 15 nt, Human
uagagauuugucuaa

SEQ ID NO: 2851057 - RNA, 16 nt, Human
uagagauuugucuaau

SEQ ID NO: 2851058 - RNA, 20 nt, Human
uagagauuugucuaauugca

SEQ ID NO: 2851059 - RNA, 21 nt, Human
uagagcaaaauugauguguuu

SEQ ID NO: 2851060 - RNA, 14 nt, Human
uagagcaaaauuga

SEQ ID NO: 2851061 - RNA, 17 nt, Human
uagagaugacugagucc

SEQ ID NO: 2851062 - RNA, 20 nt, Human
uagagauauauauacuugug

SEQ ID NO: 2851063 - RNA, 12 nt, Human
uagagauguuuu

SEQ ID NO: 2851064 - RNA, 13 nt, Human
uagagaugugcaa

SEQ ID NO: 2851065 - RNA, 21 nt, Human
uagagaugugcaauugauuuc

SEQ ID NO: 2851066 - RNA, 17 nt, Human
uagagauggagucuugc

SEQ ID NO: 2851067 - RNA, 23 nt, Human
uagagaugaaguuuguaguuguu

SEQ ID NO: 2851068 - RNA, 23 nt, Human
uagagaugcuguaacuuaaaaua

SEQ ID NO: 2851069 - RNA, 19 nt, Human
uagagauguuuuuaaaagu

SEQ ID NO: 2851070 - RNA, 20 nt, Human
uagagauguuuuuaaaaguu

SEQ ID NO: 2851071 - RNA, 23 nt, Human
uagagauguuuuuaaaaguuuca

SEQ ID NO: 2851072 - RNA, 20 nt, Human
uagagcaccuaguccaguga

SEQ ID NO: 2851073 - RNA, 18 nt, Human
uagaggccagccccaccc

SEQ ID NO: 2851074 - RNA, 20 nt, Human
uagaggaucccucucuggau

SEQ ID NO: 2851075 - RNA, 20 nt, Human
uagaggccagccccacccag

SEQ ID NO: 2851076 - RNA, 14 nt, Human
uagaugauguauuu

SEQ ID NO: 2851077 - RNA, 23 nt, Human
uagaugagcccagcccuguucug

SEQ ID NO: 2851078 - RNA, 17 nt, Human
uagaugagcugggccgg

SEQ ID NO: 2851079 - RNA, 21 nt, Human
uagaugagauuguuuuaucau

SEQ ID NO: 2851080 - RNA, 15 nt, Human
uagagaugagguuuc

SEQ ID NO: 2851081 - RNA, 14 nt, Human
uagauauuacuuua

SEQ ID NO: 2851082 - RNA, 15 nt, Human
uagauauuacuuuau

SEQ ID NO: 2851083 - RNA, 17 nt, Human
uagauauuacuuuauca

SEQ ID NO: 2851084 - RNA, 22 nt, Human
uagauauuacuuuaucacuuuu

SEQ ID NO: 2851085 - RNA, 16 nt, Human
uagaugcacuuaugca

SEQ ID NO: 2851086 - RNA, 19 nt, Human
uagaugauuaaauaagauu

SEQ ID NO: 2851087 - RNA, 20 nt, Human
uagaugauuaaauaagauuc

SEQ ID NO: 2851088 - RNA, 21 nt, Human
uagaugauuaaauaagauucu

SEQ ID NO: 2851089 - RNA, 23 nt, Human
uagaugauuaaauaagauucuaa

SEQ ID NO: 2851090 - RNA, 23 nt, Human
uagaugcugacuguacuccuccc

SEQ ID NO: 2851091 - RNA, 14 nt, Human
uagaugcugacugu

SEQ ID NO: 2851092 - RNA, 18 nt, Human
uagauggccucuuacuaa

SEQ ID NO: 2851093 - RNA, 20 nt, Human
uagaugcuuuccuaaaucag

SEQ ID NO: 2851094 - RNA, 17 nt, Human
uagauggaaaaacuugu

SEQ ID NO: 2851095 - RNA, 22 nt, Human
uagaugaccucauuaaccgaug

SEQ ID NO: 2851096 - RNA, 23 nt, Human
uagccaaggugggcugagcccug

SEQ ID NO: 2851097 - RNA, 21 nt, Human
uagccaaggugggcugagccc

SEQ ID NO: 2851098 - RNA, 20 nt, Human
uagccaaggugggcugagcc

SEQ ID NO: 2851099 - RNA, 14 nt, Human
uagcauuuuugauu

SEQ ID NO: 2851100 - RNA, 20 nt, Human
uagcauuuuugauuuaugca

SEQ ID NO: 2851101 - RNA, 17 nt, Human
acaacaaaaagcuuccc

SEQ ID NO: 2851102 - RNA, 13 nt, Human
acaacagaaguca

SEQ ID NO: 2851103 - RNA, 11 nt, Human
acaacagaagu

SEQ ID NO: 2851104 - RNA, 13 nt, Human
acaacagaagcuu

SEQ ID NO: 2851105 - RNA, 19 nt, Human
acaacagaagcuucagaag

SEQ ID NO: 2851106 - RNA, 21 nt, Human
uagccaaugucuccuccccuu

SEQ ID NO: 2851107 - RNA, 17 nt, Human
uagugaaccucaccccg

SEQ ID NO: 2851108 - RNA, 15 nt, Human
uaguccuagugaacc

SEQ ID NO: 2851109 - RNA, 16 nt, Human
uaguccuagugaaccu

SEQ ID NO: 2851110 - RNA, 23 nt, Human
uagucccuuccccucccuggcuc

SEQ ID NO: 2851111 - RNA, 22 nt, Human
uagucccuuccccucccuggcu

SEQ ID NO: 2851112 - RNA, 20 nt, Human
uagucccuuccccucccugg

SEQ ID NO: 2851113 - RNA, 16 nt, Human
uagucccuuccccucc

SEQ ID NO: 2851114 - RNA, 15 nt, Human
uagucccuuccccuc

SEQ ID NO: 2851115 - RNA, 14 nt, Human
uagucccuuccccu

SEQ ID NO: 2851116 - RNA, 21 nt, Human
uagucccccaacucugagccc

SEQ ID NO: 2851117 - RNA, 22 nt, Human
uagucccccaacucugagccca

SEQ ID NO: 2851118 - RNA, 21 nt, Human
uagucccagcuacucagaagc

SEQ ID NO: 2851119 - RNA, 15 nt, Human
uaguaccugaaaagu

SEQ ID NO: 2851120 - RNA, 18 nt, Human
uaguaccugaaaaguaac

SEQ ID NO: 2851121 - RNA, 16 nt, Human
uaguaccugaaaagua

SEQ ID NO: 2851122 - RNA, 14 nt, Human
uaguacuaagcauu

SEQ ID NO: 2851123 - RNA, 15 nt, Human
uaguacuaagcauuu

SEQ ID NO: 2851124 - RNA, 16 nt, Human
uaguguuuuaaaacac

SEQ ID NO: 2851125 - RNA, 18 nt, Human
uaguguuuuaagaaaugu

SEQ ID NO: 2851126 - RNA, 19 nt, Human
uaguguuuuaagaaaugua

SEQ ID NO: 2851127 - RNA, 20 nt, Human
uaguguuuuaagaaauguag

SEQ ID NO: 2851128 - RNA, 21 nt, Human
uaguuaaaaaaaaaaaaagga

SEQ ID NO: 2851129 - RNA, 22 nt, Human
uagugaccccuucccuguccuu

SEQ ID NO: 2851130 - RNA, 12 nt, Human
uaguuaauuuau

SEQ ID NO: 2851131 - RNA, 14 nt, Human
uaguuaauuuaucu

SEQ ID NO: 2851132 - RNA, 15 nt, Human
uaguuaauuuaucua

SEQ ID NO: 2851133 - RNA, 16 nt, Human
uaguuaauuuaucuaa

SEQ ID NO: 2851134 - RNA, 18 nt, Human
uaguuaauuuaucuaaau

SEQ ID NO: 2851135 - RNA, 13 nt, Human
uaguuaauggauu

SEQ ID NO: 2851136 - RNA, 19 nt, Human
uaguuaauggauuaaauuu

SEQ ID NO: 2851137 - RNA, 23 nt, Human
uaguuaauauugugaagaaaaau

SEQ ID NO: 2851138 - RNA, 23 nt, Human
uaguuaagacaugauuuccuuga

SEQ ID NO: 2851139 - RNA, 20 nt, Human
uaguuaacauaguaaguuca

SEQ ID NO: 2851140 - RNA, 21 nt, Human
uaguuaagacaugauuuccuu

SEQ ID NO: 2851141 - RNA, 19 nt, Human
uaguuaagacaugauuucc

SEQ ID NO: 2851142 - RNA, 14 nt, Human
uaguuaagacauga

SEQ ID NO: 2851143 - RNA, 16 nt, Human
acacaguauuacuucu

SEQ ID NO: 2851144 - RNA, 18 nt, Human
acacaguauuacuucugc

SEQ ID NO: 2851145 - RNA, 17 nt, Human
acacacugaugcuuaga

SEQ ID NO: 2851146 - RNA, 15 nt, Human
acacacugaugcuua

SEQ ID NO: 2851147 - RNA, 16 nt, Human
acacacugguacuuag

SEQ ID NO: 2851148 - RNA, 17 nt, Human
acacacugguacuuaga

SEQ ID NO: 2851149 - RNA, 19 nt, Human
acacacugucaugcuucau

SEQ ID NO: 2851150 - RNA, 22 nt, Human
acacacugucaugcuucaucau

SEQ ID NO: 2851151 - RNA, 22 nt, Human
acacaguauuacuucugcuaca

SEQ ID NO: 2851152 - RNA, 19 nt, Human
acacaguauuacuucugcu

SEQ ID NO: 2851153 - RNA, 13 nt, Human
acacagugagucg

SEQ ID NO: 2851154 - RNA, 13 nt, Human
acacacuguuguu

SEQ ID NO: 2851155 - RNA, 19 nt, Human
acacagugggaacucugac

SEQ ID NO: 2851156 - RNA, 20 nt, Human
acacagugggaacucugaca

SEQ ID NO: 2851157 - RNA, 22 nt, Human
acacagugggaacucugacaag

SEQ ID NO: 2851158 - RNA, 15 nt, Human
uaguaaaauuuauuu

SEQ ID NO: 2851159 - RNA, 18 nt, Human
uaguaaaauuuauuucau

SEQ ID NO: 2851160 - RNA, 13 nt, Human
acacauacaguuu

SEQ ID NO: 2851161 - RNA, 17 nt, Human
acacauacaguuuuaug

SEQ ID NO: 2851162 - RNA, 22 nt, Human
acacauacaguuuuaugcucuu

SEQ ID NO: 2851163 - RNA, 15 nt, Human
uaguacaaauuauaa

SEQ ID NO: 2851164 - RNA, 16 nt, Human
uaguacaaauuauaaa

SEQ ID NO: 2851165 - RNA, 13 nt, Human
uaguacacuuuua

SEQ ID NO: 2851166 - RNA, 19 nt, Human
uaguacacuuuuaugagcu

SEQ ID NO: 2851167 - RNA, 18 nt, Human
uaguaacuucuuauggaa

SEQ ID NO: 2851168 - RNA, 20 nt, Human
uaguaacucccaucaccucu

SEQ ID NO: 2851169 - RNA, 12 nt, Human
uaguaacugaca

SEQ ID NO: 2851170 - RNA, 13 nt, Human
uaguaacugacau

SEQ ID NO: 2851171 - RNA, 15 nt, Human
uaguaacugacauga

SEQ ID NO: 2851172 - RNA, 11 nt, Human
uaguaaauguc

SEQ ID NO: 2851173 - RNA, 12 nt, Human
uaguaaaugucu

SEQ ID NO: 2851174 - RNA, 13 nt, Human
uaguaaaugucuu

SEQ ID NO: 2851175 - RNA, 14 nt, Human
uaguaaaugucuuu

SEQ ID NO: 2851176 - RNA, 15 nt, Human
uaguaaaugucuuug

SEQ ID NO: 2851177 - RNA, 16 nt, Human
uaguaaaugucuuugu

SEQ ID NO: 2851178 - RNA, 17 nt, Human
uaguaaaugucuuugua

SEQ ID NO: 2851179 - RNA, 18 nt, Human
uaguaaaugucuuuguaa

SEQ ID NO: 2851180 - RNA, 19 nt, Human
uaguaaaugucuuuguaag

SEQ ID NO: 2851181 - RNA, 20 nt, Human
uaguaaaugucuuuguaagu

SEQ ID NO: 2851182 - RNA, 22 nt, Human
uaguaaaugucuuuguaaguca

SEQ ID NO: 2851183 - RNA, 23 nt, Human
uaguaaaugucuuuguaagucag

SEQ ID NO: 2851184 - RNA, 11 nt, Human
uaguaaauguu

SEQ ID NO: 2851185 - RNA, 13 nt, Human
uaguaaauguuau

SEQ ID NO: 2851186 - RNA, 15 nt, Human
acacacgcgcgcaca

SEQ ID NO: 2851187 - RNA, 16 nt, Human
acacacgcgcgcacac

SEQ ID NO: 2851188 - RNA, 13 nt, Human
acacacugaugcu

SEQ ID NO: 2851189 - RNA, 13 nt, Human
acacacuacacca

SEQ ID NO: 2851190 - RNA, 16 nt, Human
acacacuacaccacac

SEQ ID NO: 2851191 - RNA, 17 nt, Human
acacacuacaccacaca

SEQ ID NO: 2851192 - RNA, 18 nt, Human
acacacuacaccacacac

SEQ ID NO: 2851193 - RNA, 19 nt, Human
acacacuacaccacacaca

SEQ ID NO: 2851194 - RNA, 21 nt, Human
acacacgcgugcacacaccag

SEQ ID NO: 2851195 - RNA, 20 nt, Human
acacaccagagcccaccuug

SEQ ID NO: 2851196 - RNA, 15 nt, Human
acacaccagagccca

SEQ ID NO: 2851197 - RNA, 14 nt, Human
acacaccagagccc

SEQ ID NO: 2851198 - RNA, 14 nt, Human
acacacagcucugu

SEQ ID NO: 2851199 - RNA, 13 nt, Human
acacacagcucug

SEQ ID NO: 2851200 - RNA, 17 nt, Human
acacacagcucuguccu

SEQ ID NO: 2851201 - RNA, 22 nt, Human
acacacacgcgugcacacacca

SEQ ID NO: 2851202 - RNA, 14 nt, Human
acacacacgcacgc

SEQ ID NO: 2851203 - RNA, 19 nt, Human
acacacacgcacgcacaca

SEQ ID NO: 2851204 - RNA, 21 nt, Human
acacacacgcacgcacacaca

SEQ ID NO: 2851205 - RNA, 12 nt, Human
acacacacgcac

SEQ ID NO: 2851206 - RNA, 15 nt, Human
acacacacgcacaua

SEQ ID NO: 2851207 - RNA, 11 nt, Human
acacacacauc

SEQ ID NO: 2851208 - RNA, 14 nt, Human
acacacacauccac

SEQ ID NO: 2851209 - RNA, 14 nt, Human
acacacacaugcac

SEQ ID NO: 2851210 - RNA, 15 nt, Human
acacacacaugcaca

SEQ ID NO: 2851211 - RNA, 15 nt, Human
acacacacacacaca

SEQ ID NO: 2851212 - RNA, 16 nt, Human
acacacacacacacac

SEQ ID NO: 2851213 - RNA, 17 nt, Human
acacacacauacacgaa

SEQ ID NO: 2851214 - RNA, 13 nt, Human
uagggaggcagcc

SEQ ID NO: 2851215 - RNA, 16 nt, Human
uagggaggcagccucc

SEQ ID NO: 2851216 - RNA, 17 nt, Human
uagggaggcagccucca

SEQ ID NO: 2851217 - RNA, 13 nt, Human
uagggagauauuu

SEQ ID NO: 2851218 - RNA, 13 nt, Human
uagggaggaccac

SEQ ID NO: 2851219 - RNA, 23 nt, Human
uagggaggaccacaggugugagc

SEQ ID NO: 2851220 - RNA, 14 nt, Human
acacacacauacac

SEQ ID NO: 2851221 - RNA, 14 nt, Human
acacacacacacac

SEQ ID NO: 2851222 - RNA, 14 nt, Human
acacacacacacaa

SEQ ID NO: 2851223 - RNA, 15 nt, Human
acacacacacacaaa

SEQ ID NO: 2851224 - RNA, 15 nt, Human
acacacacacacaag

SEQ ID NO: 2851225 - RNA, 13 nt, Human
acacacacacaca

SEQ ID NO: 2851226 - RNA, 12 nt, Human
acacacacacac

SEQ ID NO: 2851227 - RNA, 14 nt, Human
acacacacaaguaa

SEQ ID NO: 2851228 - RNA, 10 nt, Human
acacacacac

SEQ ID NO: 2851229 - RNA, 11 nt, Human
acacacacaca

SEQ ID NO: 2851230 - RNA, 15 nt, Human
acacacacacaaacc

SEQ ID NO: 2851231 - RNA, 16 nt, Human
acacaaugguuuuuaa

SEQ ID NO: 2851232 - RNA, 22 nt, Human
acacaaugguuuuuaaauuuug

SEQ ID NO: 2851233 - RNA, 23 nt, Human
acacaaugguuuuuaaauuuugu

SEQ ID NO: 2851234 - RNA, 21 nt, Human
acacaauuggaauugucuuua

SEQ ID NO: 2851235 - RNA, 14 nt, Human
acacacaacaauua

SEQ ID NO: 2851236 - RNA, 14 nt, Human
acacacaacagcca

SEQ ID NO: 2851237 - RNA, 15 nt, Human
acacacaacagccaa

SEQ ID NO: 2851238 - RNA, 17 nt, Human
acacacaacagccaaca

SEQ ID NO: 2851239 - RNA, 14 nt, Human
acacacaaguaaga

SEQ ID NO: 2851240 - RNA, 9 nt, Human
acacacaca

SEQ ID NO: 2851241 - RNA, 10 nt, Human
acacacacaa

SEQ ID NO: 2851242 - RNA, 13 nt, Human
acacacacaaacc

SEQ ID NO: 2851243 - RNA, 11 nt, Human
acaaugucugc

SEQ ID NO: 2851244 - RNA, 16 nt, Human
acaaugucugcagccc

SEQ ID NO: 2851245 - RNA, 19 nt, Human
acaaugucugcagcccuga

SEQ ID NO: 2851246 - RNA, 15 nt, Human
acaaugucaguauuu

SEQ ID NO: 2851247 - RNA, 18 nt, Human
acaaugucaguauuucag

SEQ ID NO: 2851248 - RNA, 22 nt, Human
acaaugucaguauuucagugua

SEQ ID NO: 2851249 - RNA, 23 nt, Human
acaaugucaguauuucaguguag

SEQ ID NO: 2851250 - RNA, 22 nt, Human
acaaugucauauacugccaugu

SEQ ID NO: 2851251 - RNA, 20 nt, Human
acaauguauuuauuuaaaag

SEQ ID NO: 2851252 - RNA, 21 nt, Human
acaauguauuuauuuaaaaga

SEQ ID NO: 2851253 - RNA, 23 nt, Human
acaauguauuuauuuaaaagauu

SEQ ID NO: 2851254 - RNA, 18 nt, Human
acacuaucauaguuaaca

SEQ ID NO: 2851255 - RNA, 19 nt, Human
acacuaucauaguuaacau

SEQ ID NO: 2851256 - RNA, 11 nt, Human
acacuauuuua

SEQ ID NO: 2851257 - RNA, 20 nt, Human
acacuaacucaccagcccca

SEQ ID NO: 2851258 - RNA, 19 nt, Human
acacuaacucaccagcccc

SEQ ID NO: 2851259 - RNA, 17 nt, Human
acacuaacucaccagcc

SEQ ID NO: 2851260 - RNA, 15 nt, Human
acacuaaccuggguu

SEQ ID NO: 2851261 - RNA, 15 nt, Human
acacucaagaagcag

SEQ ID NO: 2851262 - RNA, 16 nt, Human
acacucaagaagcagg

SEQ ID NO: 2851263 - RNA, 20 nt, Human
acacucacauuuauucugcu

SEQ ID NO: 2851264 - RNA, 22 nt, Human
acacucacauuuauucugcuca

SEQ ID NO: 2851265 - RNA, 17 nt, Human
acacucaagaagcaggc

SEQ ID NO: 2851266 - RNA, 16 nt, Human
uauaacuucaaauuuu

SEQ ID NO: 2851267 - RNA, 15 nt, Human
uauaacuucuuaaaa

SEQ ID NO: 2851268 - RNA, 16 nt, Human
uauaacuucuuaaaag

SEQ ID NO: 2851269 - RNA, 12 nt, Human
uauaacuugaug

SEQ ID NO: 2851270 - RNA, 17 nt, Human
uauaacuugaugcaugu

SEQ ID NO: 2851271 - RNA, 20 nt, Human
acacuaaccacgcuggaccu

SEQ ID NO: 2851272 - RNA, 21 nt, Human
acaccuuuuauugacacagaa

SEQ ID NO: 2851273 - RNA, 14 nt, Human
acacgaaagagaga

SEQ ID NO: 2851274 - RNA, 15 nt, Human
acacgaaagagagag

SEQ ID NO: 2851275 - RNA, 23 nt, Human
acaccuuuuauugacacagaaaa

SEQ ID NO: 2851276 - RNA, 13 nt, Human
acacgaaacuugu

SEQ ID NO: 2851277 - RNA, 14 nt, Human
acacgaaacuuguu

SEQ ID NO: 2851278 - RNA, 17 nt, Human
acacgaaacuuguuauu

SEQ ID NO: 2851279 - RNA, 23 nt, Human
acacgaaacuuguuauugugaau

SEQ ID NO: 2851280 - RNA, 14 nt, Human
acacgaaagaaaug

SEQ ID NO: 2851281 - RNA, 15 nt, Human
acacgaaagaaaugu

SEQ ID NO: 2851282 - RNA, 13 nt, Human
acacgaaagagag

SEQ ID NO: 2851283 - RNA, 15 nt, Human
acaccuuuagguucu

SEQ ID NO: 2851284 - RNA, 16 nt, Human
acaccuuuagguucuu

SEQ ID NO: 2851285 - RNA, 17 nt, Human
acaccugggcuuaagaa

SEQ ID NO: 2851286 - RNA, 21 nt, Human
acaccuuagccugcccuccuu

SEQ ID NO: 2851287 - RNA, 21 nt, Human
acaccuugugaccuucucuau

SEQ ID NO: 2851288 - RNA, 22 nt, Human
acaccuugugaccuucucuaua

SEQ ID NO: 2851289 - RNA, 23 nt, Human
acaccuugugaccuucucuauau

SEQ ID NO: 2851290 - RNA, 20 nt, Human
acaccuuccagcuccuguaa

SEQ ID NO: 2851291 - RNA, 14 nt, Human
acaccuucauuuug

SEQ ID NO: 2851292 - RNA, 15 nt, Human
acaccuucauuuuga

SEQ ID NO: 2851293 - RNA, 14 nt, Human
acaccuuccagcuc

SEQ ID NO: 2851294 - RNA, 16 nt, Human
acaccuuccagcuccu

SEQ ID NO: 2851295 - RNA, 11 nt, Human
acacccugcaa

SEQ ID NO: 2851296 - RNA, 13 nt, Human
acacccugcaagg

SEQ ID NO: 2851297 - RNA, 20 nt, Human
acacccugcaaggcccacag

SEQ ID NO: 2851298 - RNA, 23 nt, Human
acacccugcaaggcccacaggag

SEQ ID NO: 2851299 - RNA, 11 nt, Human
acacccuuccu

SEQ ID NO: 2851300 - RNA, 13 nt, Human
acacccuuagaaa

SEQ ID NO: 2851301 - RNA, 15 nt, Human
acacccuuagaaaau

SEQ ID NO: 2851302 - RNA, 16 nt, Human
acaccgggcacucaga

SEQ ID NO: 2851303 - RNA, 14 nt, Human
acaccgggccugga

SEQ ID NO: 2851304 - RNA, 20 nt, Human
acaccggcuggcagggcugg

SEQ ID NO: 2851305 - RNA, 13 nt, Human
acaccgacuagcc

SEQ ID NO: 2851306 - RNA, 16 nt, Human
acaccgacuagccagg

SEQ ID NO: 2851307 - RNA, 19 nt, Human
acaccugagaaacaucuag

SEQ ID NO: 2851308 - RNA, 12 nt, Human
acaccucugcca

SEQ ID NO: 2851309 - RNA, 13 nt, Human
acaccucugccag

SEQ ID NO: 2851310 - RNA, 14 nt, Human
acaccucugccaga

SEQ ID NO: 2851311 - RNA, 15 nt, Human
acaccucugcuuucu

SEQ ID NO: 2851312 - RNA, 21 nt, Human
acaccucugcuuucugauguu

SEQ ID NO: 2851313 - RNA, 18 nt, Human
acaccaucgcuggccccu

SEQ ID NO: 2851314 - RNA, 19 nt, Human
acaccaucgcuggccccuu

SEQ ID NO: 2851315 - RNA, 19 nt, Human
acacccaaagagguauuua

SEQ ID NO: 2851316 - RNA, 20 nt, Human
acacccaaagagguauuuau

SEQ ID NO: 2851317 - RNA, 20 nt, Human
acacccaaagcauggacuaa

SEQ ID NO: 2851318 - RNA, 22 nt, Human
acacccaaagcauggacuaacc

SEQ ID NO: 2851319 - RNA, 17 nt, Human
acacccucaaccucuuc

SEQ ID NO: 2851320 - RNA, 18 nt, Human
acacccucaaccucuucu

SEQ ID NO: 2851321 - RNA, 18 nt, Human
acacccgugagcgccugu

SEQ ID NO: 2851322 - RNA, 21 nt, Human
acacccgugagcgccugugca

SEQ ID NO: 2851323 - RNA, 19 nt, Human
acacccucccccgccacuc

SEQ ID NO: 2851324 - RNA, 22 nt, Human
acacccucgaagcgcgccacuc

SEQ ID NO: 2851325 - RNA, 14 nt, Human
acacccucccccgc

SEQ ID NO: 2851326 - RNA, 16 nt, Human
acacccucccccgcca

SEQ ID NO: 2851327 - RNA, 13 nt, Human
acacccucccccg

SEQ ID NO: 2851328 - RNA, 17 nt, Human
acacccucacucugcca

SEQ ID NO: 2851329 - RNA, 19 nt, Human
acacccucacucugccagg

SEQ ID NO: 2851330 - RNA, 20 nt, Human
acacccucacucugccaggg

SEQ ID NO: 2851331 - RNA, 18 nt, Human
uaguucagguaacaggca

SEQ ID NO: 2851332 - RNA, 18 nt, Human
uauaaaaagcuuccauga

SEQ ID NO: 2851333 - RNA, 13 nt, Human
uauaaaaacaaaa

SEQ ID NO: 2851334 - RNA, 17 nt, Human
uaguuuuuucuuuuaac

SEQ ID NO: 2851335 - RNA, 23 nt, Human
uaguuuuuuuuuuuuuuauguga

SEQ ID NO: 2851336 - RNA, 18 nt, Human
acacauagauuaauggca

SEQ ID NO: 2851337 - RNA, 20 nt, Human
acacauagauuaauggcacu

SEQ ID NO: 2851338 - RNA, 21 nt, Human
acacauagauuaauggcacug

SEQ ID NO: 2851339 - RNA, 22 nt, Human
acacauagauuaauggcacuga

SEQ ID NO: 2851340 - RNA, 23 nt, Human
acacauagauuaauggcacugau

SEQ ID NO: 2851341 - RNA, 20 nt, Human
uauaaaaggcaaauguguac

SEQ ID NO: 2851342 - RNA, 16 nt, Human
acacauauauauuaca

SEQ ID NO: 2851343 - RNA, 21 nt, Human
acacauauaccuauaaugugu

SEQ ID NO: 2851344 - RNA, 23 nt, Human
acacauauaccuauaaugugugu

SEQ ID NO: 2851345 - RNA, 22 nt, Human
acacauauaaacaucacacaca

SEQ ID NO: 2851346 - RNA, 14 nt, Human
acacauauaaacau

SEQ ID NO: 2851347 - RNA, 19 nt, Human
uauaaaaggcaaaugugua

SEQ ID NO: 2851348 - RNA, 12 nt, Human
uauaaaaagcca

SEQ ID NO: 2851349 - RNA, 14 nt, Human
uauaaaaagccacu

SEQ ID NO: 2851350 - RNA, 19 nt, Human
uauauuguguuuguguauu

SEQ ID NO: 2851351 - RNA, 18 nt, Human
uauauuguguuuguguau

SEQ ID NO: 2851352 - RNA, 14 nt, Human
uauauuuagugcug

SEQ ID NO: 2851353 - RNA, 16 nt, Human
uauauuuaguuauagu

SEQ ID NO: 2851354 - RNA, 18 nt, Human
uauauuuaguuauaguuu

SEQ ID NO: 2851355 - RNA, 21 nt, Human
uauauuuagauuguuaaaaua

SEQ ID NO: 2851356 - RNA, 16 nt, Human
uauauuuauaacucau

SEQ ID NO: 2851357 - RNA, 15 nt, Human
uauauuuauaacuca

SEQ ID NO: 2851358 - RNA, 14 nt, Human
uauauuuauaacuc

SEQ ID NO: 2851359 - RNA, 12 nt, Human
uauauuuauaac

SEQ ID NO: 2851360 - RNA, 20 nt, Human
acagaccacaucuuuaucug

SEQ ID NO: 2851361 - RNA, 21 nt, Human
acagaccacaucuuuaucugu

SEQ ID NO: 2851362 - RNA, 11 nt, Human
uauauuacaag

SEQ ID NO: 2851363 - RNA, 18 nt, Human
uauauuaccagcaagaau

SEQ ID NO: 2851364 - RNA, 21 nt, Human
uauauuaccagcaagaauaaa

SEQ ID NO: 2851365 - RNA, 17 nt, Human
uauauuacacauuugua

SEQ ID NO: 2851366 - RNA, 20 nt, Human
uauauuacacauuuguacag

SEQ ID NO: 2851367 - RNA, 21 nt, Human
uauauuacacauuuguacaga

SEQ ID NO: 2851368 - RNA, 22 nt, Human
acagaccacaucuuuaucuguu

SEQ ID NO: 2851369 - RNA, 13 nt, Human
uauauuaagcaga

SEQ ID NO: 2851370 - RNA, 14 nt, Human
uauauuaagcagaa

SEQ ID NO: 2851371 - RNA, 15 nt, Human
uauauuaagcagaaa

SEQ ID NO: 2851372 - RNA, 15 nt, Human
uauauuaauguacuu

SEQ ID NO: 2851373 - RNA, 17 nt, Human
uauauuaauguacuugu

SEQ ID NO: 2851374 - RNA, 14 nt, Human
uauauuaguugcuu

SEQ ID NO: 2851375 - RNA, 18 nt, Human
uauauuaguugcuuuguu

SEQ ID NO: 2851376 - RNA, 14 nt, Human
uauauuauaaauau

SEQ ID NO: 2851377 - RNA, 20 nt, Human
uauauuauaaauauauauaa

SEQ ID NO: 2851378 - RNA, 21 nt, Human
uauauuauaaauauauauaaa

SEQ ID NO: 2851379 - RNA, 22 nt, Human
uauauuauaaauauauauaaag

SEQ ID NO: 2851380 - RNA, 13 nt, Human
uauaaguuugaag

SEQ ID NO: 2851381 - RNA, 17 nt, Human
uauaaguucacaaaaug

SEQ ID NO: 2851382 - RNA, 13 nt, Human
uauaagaaagaca

SEQ ID NO: 2851383 - RNA, 14 nt, Human
uauaagaaagacau

SEQ ID NO: 2851384 - RNA, 15 nt, Human
uauaagaaagacauc

SEQ ID NO: 2851385 - RNA, 17 nt, Human
uauaagaaagacaucuu

SEQ ID NO: 2851386 - RNA, 21 nt, Human
uauaagaaagacaucuuucuc

SEQ ID NO: 2851387 - RNA, 22 nt, Human
uauaagaaagacaucuuucucu

SEQ ID NO: 2851388 - RNA, 21 nt, Human
uauacaaaauaagaacgagga

SEQ ID NO: 2851389 - RNA, 16 nt, Human
uauacaacaaaggcaa

SEQ ID NO: 2851390 - RNA, 22 nt, Human
uauacaaaccuaccaaaaugga

SEQ ID NO: 2851391 - RNA, 12 nt, Human
uauacaaauaua

SEQ ID NO: 2851392 - RNA, 14 nt, Human
uauacaaauauauu

SEQ ID NO: 2851393 - RNA, 16 nt, Human
uauacaaauauauugu

SEQ ID NO: 2851394 - RNA, 20 nt, Human
uauacaaauauauuguuaau

SEQ ID NO: 2851395 - RNA, 16 nt, Human
uauacaaauuaaaaag

SEQ ID NO: 2851396 - RNA, 17 nt, Human
uauacaaauuaaaaaga

SEQ ID NO: 2851397 - RNA, 18 nt, Human
uauacaaauuaaaaagau

SEQ ID NO: 2851398 - RNA, 23 nt, Human
uauacaaauuaaaaagauucuuu

SEQ ID NO: 2851399 - RNA, 14 nt, Human
uauacaaaauaaga

SEQ ID NO: 2851400 - RNA, 19 nt, Human
uauaauuuuuuguaaugug

SEQ ID NO: 2851401 - RNA, 16 nt, Human
uauaaguuugaaggaa

SEQ ID NO: 2851402 - RNA, 17 nt, Human
acagaaauuagccgggc

SEQ ID NO: 2851403 - RNA, 19 nt, Human
uaucuauucugagaaaaca

SEQ ID NO: 2851404 - RNA, 18 nt, Human
uaucuauucugagaaaac

SEQ ID NO: 2851405 - RNA, 23 nt, Human
uaucuauucugagaaaacaagca

SEQ ID NO: 2851406 - RNA, 22 nt, Human
uaucucagucaugcauaaauau

SEQ ID NO: 2851407 - RNA, 14 nt, Human
uaucucaucaacaa

SEQ ID NO: 2851408 - RNA, 23 nt, Human
uaucucaucaacaaagaaauauu

SEQ ID NO: 2851409 - RNA, 14 nt, Human
uaucuaucuuccaa

SEQ ID NO: 2851410 - RNA, 23 nt, Human
uaucuaucuuccaaaugcaauuu

SEQ ID NO: 2851411 - RNA, 12 nt, Human
uaucuauuaaua

SEQ ID NO: 2851412 - RNA, 13 nt, Human
uaucuauuaauau

SEQ ID NO: 2851413 - RNA, 15 nt, Human
uaucuauuaauauau

SEQ ID NO: 2851414 - RNA, 17 nt, Human
uaucuauuaauauaugu

SEQ ID NO: 2851415 - RNA, 18 nt, Human
uaucuauuaauauaugua

SEQ ID NO: 2851416 - RNA, 16 nt, Human
uaucuauucugagaaa

SEQ ID NO: 2851417 - RNA, 19 nt, Human
uaucuauuaauauauguau

SEQ ID NO: 2851418 - RNA, 15 nt, Human
uaucuccaagaccag

SEQ ID NO: 2851419 - RNA, 18 nt, Human
uaucucagucaugcauaa

SEQ ID NO: 2851420 - RNA, 18 nt, Human
acagagaaaguacuucuc

SEQ ID NO: 2851421 - RNA, 11 nt, Human
acagagaaagu

SEQ ID NO: 2851422 - RNA, 19 nt, Human
acagagaaagaggaagcuu

SEQ ID NO: 2851423 - RNA, 20 nt, Human
acagagaagcggauuuccag

SEQ ID NO: 2851424 - RNA, 14 nt, Human
acagagaagcuggg

SEQ ID NO: 2851425 - RNA, 17 nt, Human
acagagaagcuggggag

SEQ ID NO: 2851426 - RNA, 15 nt, Human
uauccaggucaacag

SEQ ID NO: 2851427 - RNA, 17 nt, Human
uauccaggucaacagaa

SEQ ID NO: 2851428 - RNA, 18 nt, Human
uauccaggucaacagaau

SEQ ID NO: 2851429 - RNA, 19 nt, Human
uauccaggucaacagaaug

SEQ ID NO: 2851430 - RNA, 20 nt, Human
uauccaggucaacagaauga

SEQ ID NO: 2851431 - RNA, 21 nt, Human
uauccaggucaacagaaugaa

SEQ ID NO: 2851432 - RNA, 22 nt, Human
uauccaggucaacagaaugaaa

SEQ ID NO: 2851433 - RNA, 14 nt, Human
uauccaguuacugc

SEQ ID NO: 2851434 - RNA, 14 nt, Human
uauccauaaaaaaa

SEQ ID NO: 2851435 - RNA, 17 nt, Human
uauccauaaaaaaaaau

SEQ ID NO: 2851436 - RNA, 17 nt, Human
uauccauauugagucaa

SEQ ID NO: 2851437 - RNA, 18 nt, Human
uauccagaggacccaacu

SEQ ID NO: 2851438 - RNA, 18 nt, Human
uauccacuuugcacagcu

SEQ ID NO: 2851439 - RNA, 15 nt, Human
uauccacuuugcaca

SEQ ID NO: 2851440 - RNA, 11 nt, Human
uaucccuuccg

SEQ ID NO: 2851441 - RNA, 12 nt, Human
uaucccuuccgg

SEQ ID NO: 2851442 - RNA, 12 nt, Human
uaucccuucuca

SEQ ID NO: 2851443 - RNA, 18 nt, Human
uaucccuucucacagcac

SEQ ID NO: 2851444 - RNA, 19 nt, Human
uauccaaaccaaauaaaaa

SEQ ID NO: 2851445 - RNA, 17 nt, Human
uauccaaaucugaagau

SEQ ID NO: 2851446 - RNA, 20 nt, Human
uauccaaaucugaagauugc

SEQ ID NO: 2851447 - RNA, 18 nt, Human
uauccaaaauguguauuu

SEQ ID NO: 2851448 - RNA, 22 nt, Human
uauccaaaauguguauuucuua

SEQ ID NO: 2851449 - RNA, 23 nt, Human
uauccaaaauguguauuucuuau

SEQ ID NO: 2851450 - RNA, 14 nt, Human
uauccaaacaugua

SEQ ID NO: 2851451 - RNA, 20 nt, Human
uaucauuuauuuuuuacauu

SEQ ID NO: 2851452 - RNA, 14 nt, Human
uaucaagacauagc

SEQ ID NO: 2851453 - RNA, 15 nt, Human
uaucaagacauagca

SEQ ID NO: 2851454 - RNA, 16 nt, Human
uaucaagacauagcau

SEQ ID NO: 2851455 - RNA, 20 nt, Human
uaucaagaggcugagacagg

SEQ ID NO: 2851456 - RNA, 13 nt, Human
uaucaacuuuaau

SEQ ID NO: 2851457 - RNA, 15 nt, Human
uaucaacuuuaauca

SEQ ID NO: 2851458 - RNA, 21 nt, Human
uaucaacacuguuacuuucgu

SEQ ID NO: 2851459 - RNA, 15 nt, Human
uaucaagcagccaag

SEQ ID NO: 2851460 - RNA, 22 nt, Human
uaucaaggaagaaaugguucag

SEQ ID NO: 2851461 - RNA, 22 nt, Human
uaucaaggacucugguuucuca

SEQ ID NO: 2851462 - RNA, 18 nt, Human
acagccucugaccccucc

SEQ ID NO: 2851463 - RNA, 20 nt, Human
acagccucugaccccuccuc

SEQ ID NO: 2851464 - RNA, 21 nt, Human
acagccucugaccccuccuca

SEQ ID NO: 2851465 - RNA, 22 nt, Human
acagccucugaccccuccucac

SEQ ID NO: 2851466 - RNA, 23 nt, Human
acagccucugaccccuccucacu

SEQ ID NO: 2851467 - RNA, 22 nt, Human
uauggguuagauguugccaugu

SEQ ID NO: 2851468 - RNA, 15 nt, Human
uaugcugaucaucgc

SEQ ID NO: 2851469 - RNA, 20 nt, Human
uaugcugaucaucgccagag

SEQ ID NO: 2851470 - RNA, 22 nt, Human
uaugcugaucaucgccagaggu

SEQ ID NO: 2851471 - RNA, 22 nt, Human
uaugcugcuuuuauaucuguau

SEQ ID NO: 2851472 - RNA, 12 nt, Human
uaugcugcuuuu

SEQ ID NO: 2851473 - RNA, 19 nt, Human
uaugccuucuuauugcuuu

SEQ ID NO: 2851474 - RNA, 18 nt, Human
uaugccuuggggaggaca

SEQ ID NO: 2851475 - RNA, 23 nt, Human
uaugccuuggggaggacaaaacu

SEQ ID NO: 2851476 - RNA, 10 nt, Human
uaugccugug

SEQ ID NO: 2851477 - RNA, 14 nt, Human
uaugccuucuuauu

SEQ ID NO: 2851478 - RNA, 22 nt, Human
uaugaacccuuccugagcuuua

SEQ ID NO: 2851479 - RNA, 23 nt, Human
uaugaacccuuccugagcuuuau

SEQ ID NO: 2851480 - RNA, 16 nt, Human
uaugaacccuuuguuu

SEQ ID NO: 2851481 - RNA, 18 nt, Human
uaugaacccuuuguuucu

SEQ ID NO: 2851482 - RNA, 19 nt, Human
uaugaacccuuuguuucuu

SEQ ID NO: 2851483 - RNA, 20 nt, Human
uaugaacccuuuguuucuug

SEQ ID NO: 2851484 - RNA, 21 nt, Human
uaugaacccuuuguuucuugu

SEQ ID NO: 2851485 - RNA, 14 nt, Human
uaugaacaacucca

SEQ ID NO: 2851486 - RNA, 15 nt, Human
uaucuuuuuucaaaa

SEQ ID NO: 2851487 - RNA, 13 nt, Human
uaucuuuucuuua

SEQ ID NO: 2851488 - RNA, 14 nt, Human
uaucuuuucuuuag

SEQ ID NO: 2851489 - RNA, 15 nt, Human
uaucuuuucuuuaga

SEQ ID NO: 2851490 - RNA, 20 nt, Human
uaucuuuucuuuagagaacu

SEQ ID NO: 2851491 - RNA, 22 nt, Human
uaucuuuucuuuagagaacuga

SEQ ID NO: 2851492 - RNA, 18 nt, Human
uaucuuugugauaauuua

SEQ ID NO: 2851493 - RNA, 14 nt, Human
uaucuuuuauguuu

SEQ ID NO: 2851494 - RNA, 16 nt, Human
uaucuuuuauguuuga

SEQ ID NO: 2851495 - RNA, 17 nt, Human
uaucuuuuauguuugaa

SEQ ID NO: 2851496 - RNA, 19 nt, Human
uaucuuuuauguuugaaua

SEQ ID NO: 2851497 - RNA, 18 nt, Human
acagccguuuguucccca

SEQ ID NO: 2851498 - RNA, 17 nt, Human
acagccuauuccugaac

SEQ ID NO: 2851499 - RNA, 12 nt, Human
acagccucacuu

SEQ ID NO: 2851500 - RNA, 23 nt, Human
acagccgcagccucccucugacc

SEQ ID NO: 2851501 - RNA, 22 nt, Human
acagccgcagccucccucugac

SEQ ID NO: 2851502 - RNA, 15 nt, Human
acagauuucauaccu

SEQ ID NO: 2851503 - RNA, 16 nt, Human
acagauuucauaccuc

SEQ ID NO: 2851504 - RNA, 17 nt, Human
acagauuucauaccuca

SEQ ID NO: 2851505 - RNA, 17 nt, Human
acagagaauaugucugc

SEQ ID NO: 2851506 - RNA, 23 nt, Human
acagaucgaaccguuuugaagcu

SEQ ID NO: 2851507 - RNA, 18 nt, Human
acagauccccaagccugg

SEQ ID NO: 2851508 - RNA, 22 nt, Human
acagaucucugcuuuggaaauc

SEQ ID NO: 2851509 - RNA, 13 nt, Human
acagauaguugug

SEQ ID NO: 2851510 - RNA, 15 nt, Human
acagauauacuuugu

SEQ ID NO: 2851511 - RNA, 19 nt, Human
acagauauacuuuguggac

SEQ ID NO: 2851512 - RNA, 17 nt, Human
acagauccccaagccug

SEQ ID NO: 2851513 - RNA, 14 nt, Human
acagauuugagcuc

SEQ ID NO: 2851514 - RNA, 20 nt, Human
acagauuuaauacaguuuau

SEQ ID NO: 2851515 - RNA, 13 nt, Human
acagauuguuucu

SEQ ID NO: 2851516 - RNA, 14 nt, Human
acagauuguuucua

SEQ ID NO: 2851517 - RNA, 15 nt, Human
acagauuguuucuau

SEQ ID NO: 2851518 - RNA, 16 nt, Human
acagauuguuucuaua

SEQ ID NO: 2851519 - RNA, 18 nt, Human
acagauuguuucuauaca

SEQ ID NO: 2851520 - RNA, 21 nt, Human
acagauuguuucuauacaaau

SEQ ID NO: 2851521 - RNA, 23 nt, Human
acagauuguuucuauacaaauau

SEQ ID NO: 2851522 - RNA, 14 nt, Human
acagaugaauguau

SEQ ID NO: 2851523 - RNA, 19 nt, Human
acagaugaaacacaaacaa

SEQ ID NO: 2851524 - RNA, 20 nt, Human
acagaugaaacacaaacaau

SEQ ID NO: 2851525 - RNA, 12 nt, Human
acagaugaaaau

SEQ ID NO: 2851526 - RNA, 13 nt, Human
acagaugaaaauu

SEQ ID NO: 2851527 - RNA, 15 nt, Human
acagaugaaaauuug

SEQ ID NO: 2851528 - RNA, 16 nt, Human
acagaugaaaauuuga

SEQ ID NO: 2851529 - RNA, 23 nt, Human
acagaugaaaauuugagacuauu

SEQ ID NO: 2851530 - RNA, 17 nt, Human
acagaugaauguauuua

SEQ ID NO: 2851531 - RNA, 14 nt, Human
acagaugaauaaac

SEQ ID NO: 2851532 - RNA, 19 nt, Human
acagaugaugagaauuucu

SEQ ID NO: 2851533 - RNA, 20 nt, Human
acagaugaugagaauuucua

SEQ ID NO: 2851534 - RNA, 24 nt, Human
acagauuggagagggcucugugcu

SEQ ID NO: 2851535 - RNA, 22 nt, Human
acagggaaugccugagugccug

SEQ ID NO: 2851536 - RNA, 22 nt, Human
acagggacugaaaaccucuccu

SEQ ID NO: 2851537 - RNA, 15 nt, Human
acagggaagagcaga

SEQ ID NO: 2851538 - RNA, 14 nt, Human
acaggcuggcgggg

SEQ ID NO: 2851539 - RNA, 19 nt, Human
acaggcuguucugcacuga

SEQ ID NO: 2851540 - RNA, 20 nt, Human
acaggcuguucugcacugaa

SEQ ID NO: 2851541 - RNA, 21 nt, Human
acaggcuguucugcacugaaa

SEQ ID NO: 2851542 - RNA, 22 nt, Human
acaggcuguucugcacugaaaa

SEQ ID NO: 2851543 - RNA, 23 nt, Human
acaggcugggcuucaguggcagc

SEQ ID NO: 2851544 - RNA, 22 nt, Human
acaggcugggcuucaguggcag

SEQ ID NO: 2851545 - RNA, 12 nt, Human
acaggcugggcu

SEQ ID NO: 2851546 - RNA, 22 nt, Human
acaggcuccugccaccacgccc

SEQ ID NO: 2851547 - RNA, 21 nt, Human
acaggcuccugccaccacgcc

SEQ ID NO: 2851548 - RNA, 15 nt, Human
acaggcuccugccac

SEQ ID NO: 2851549 - RNA, 13 nt, Human
acaggcuccugcc

SEQ ID NO: 2851550 - RNA, 18 nt, Human
acagucacugauguacaa

SEQ ID NO: 2851551 - RNA, 19 nt, Human
acagucacugccacuuugc

SEQ ID NO: 2851552 - RNA, 20 nt, Human
acagucacugccacuuugca

SEQ ID NO: 2851553 - RNA, 22 nt, Human
acagucacugccacuuugcaca

SEQ ID NO: 2851554 - RNA, 23 nt, Human
acagucacugccacuuugcacau

SEQ ID NO: 2851555 - RNA, 15 nt, Human
acagucagcucuuca

SEQ ID NO: 2851556 - RNA, 16 nt, Human
acagucagcucuucau

SEQ ID NO: 2851557 - RNA, 18 nt, Human
acagucagcucuucaucu

SEQ ID NO: 2851558 - RNA, 14 nt, Human
acagucaucaucag

SEQ ID NO: 2851559 - RNA, 17 nt, Human
acagucaucaucagggc

SEQ ID NO: 2851560 - RNA, 18 nt, Human
acagucaucaucagggcc

SEQ ID NO: 2851561 - RNA, 19 nt, Human
acagucaucaucagggccu

SEQ ID NO: 2851562 - RNA, 20 nt, Human
acagucaucaucagggccug

SEQ ID NO: 2851563 - RNA, 21 nt, Human
acagucaucaucagggccugg

SEQ ID NO: 2851564 - RNA, 17 nt, Human
acagucaucgcucgugu

SEQ ID NO: 2851565 - RNA, 21 nt, Human
acagucaucgcucguguguuc

SEQ ID NO: 2851566 - RNA, 23 nt, Human
acaguaguuagaauuauaucacu

SEQ ID NO: 2851567 - RNA, 16 nt, Human
acaguauaaaaauaga

SEQ ID NO: 2851568 - RNA, 23 nt, Human
acaguagucuugaugaccaaagu

SEQ ID NO: 2851569 - RNA, 16 nt, Human
acaguagagccagcuu

SEQ ID NO: 2851570 - RNA, 14 nt, Human
acaguagucuugau

SEQ ID NO: 2851571 - RNA, 18 nt, Human
acaguaggugacacuaua

SEQ ID NO: 2851572 - RNA, 20 nt, Human
acagggcacaccgggcacuc

SEQ ID NO: 2851573 - RNA, 15 nt, Human
acaguaacuuuaugu

SEQ ID NO: 2851574 - RNA, 16 nt, Human
acaguaacuuuaugug

SEQ ID NO: 2851575 - RNA, 18 nt, Human
acaguaacuuuaugugua

SEQ ID NO: 2851576 - RNA, 21 nt, Human
acagggaugagcauggagcug

SEQ ID NO: 2851577 - RNA, 23 nt, Human
acagggaugagcauggagcuggc

SEQ ID NO: 2851578 - RNA, 12 nt, Human
acagggcacacc

SEQ ID NO: 2851579 - RNA, 13 nt, Human
acagggaugagca

SEQ ID NO: 2851580 - RNA, 14 nt, Human
acagggaugagcau

SEQ ID NO: 2851581 - RNA, 10 nt, Human
acagggaggg

SEQ ID NO: 2851582 - RNA, 12 nt, Human
acagggagggga

SEQ ID NO: 2851583 - RNA, 20 nt, Human
acagggauuuagacuuacua

SEQ ID NO: 2851584 - RNA, 19 nt, Human
acaguaacuuuauguguaa

SEQ ID NO: 2851585 - RNA, 21 nt, Human
acaguaacuuuauguguaaau

SEQ ID NO: 2851586 - RNA, 15 nt, Human
acaguacagcaugug

SEQ ID NO: 2851587 - RNA, 17 nt, Human
acaguacagcaugugcc

SEQ ID NO: 2851588 - RNA, 19 nt, Human
acaguacagcaugugccuu

SEQ ID NO: 2851589 - RNA, 13 nt, Human
acaguagagccag

SEQ ID NO: 2851590 - RNA, 15 nt, Human
acaguagagccagcu

SEQ ID NO: 2851591 - RNA, 14 nt, Human
acaguagagccagc

SEQ ID NO: 2851592 - RNA, 17 nt, Human
uauuaaaaugauuguaa

SEQ ID NO: 2851593 - RNA, 18 nt, Human
uauuaaaaugauuguaaa

SEQ ID NO: 2851594 - RNA, 19 nt, Human
uauuaaaaugauuguaaaa

SEQ ID NO: 2851595 - RNA, 20 nt, Human
uauuaaaaugauuguaaaau

SEQ ID NO: 2851596 - RNA, 22 nt, Human
uauuaaaaugauuguaaaauag

SEQ ID NO: 2851597 - RNA, 14 nt, Human
uauuacuucugcua

SEQ ID NO: 2851598 - RNA, 18 nt, Human
uauuacuguuuauuucug

SEQ ID NO: 2851599 - RNA, 21 nt, Human
uauuacuguuuauuucuguuu

SEQ ID NO: 2851600 - RNA, 23 nt, Human
uauuacuuauuuuugacaguguu

SEQ ID NO: 2851601 - RNA, 13 nt, Human
uauuacuucugcu

SEQ ID NO: 2851602 - RNA, 19 nt, Human
uauuacuggcguggauuaa

SEQ ID NO: 2851603 - RNA, 21 nt, Human
uauuacuggcguggauuaaac

SEQ ID NO: 2851604 - RNA, 22 nt, Human
uauuacuggcguggauuaaacu

SEQ ID NO: 2851605 - RNA, 22 nt, Human
uauuacuaugacugcuccccag

SEQ ID NO: 2851606 - RNA, 14 nt, Human
uauuacucaguuua

SEQ ID NO: 2851607 - RNA, 17 nt, Human
uauuacuccuauuuuug

SEQ ID NO: 2851608 - RNA, 18 nt, Human
uauuacugucugguuuua

SEQ ID NO: 2851609 - RNA, 23 nt, Human
uauuacugucugguuuuaacaau

SEQ ID NO: 2851610 - RNA, 21 nt, Human
uauuacuguugauaauucuua

SEQ ID NO: 2851611 - RNA, 19 nt, Human
uauuagugaccucagcuuu

SEQ ID NO: 2851612 - RNA, 23 nt, Human
uauucaaaaauuaucuauagcua

SEQ ID NO: 2851613 - RNA, 23 nt, Human
uauuagaaauuagaaaaaaauua

SEQ ID NO: 2851614 - RNA, 14 nt, Human
uauuacuuuaucac

SEQ ID NO: 2851615 - RNA, 18 nt, Human
uauuacuuuaucacuuuu

SEQ ID NO: 2851616 - RNA, 23 nt, Human
uauuacuuuaucacuuuuugaac

SEQ ID NO: 2851617 - RNA, 14 nt, Human
uauuacuuguugca

SEQ ID NO: 2851618 - RNA, 21 nt, Human
uauuacuuguugcaaaggucu

SEQ ID NO: 2851619 - RNA, 21 nt, Human
uauuaggugcaauuucaaggu

SEQ ID NO: 2851620 - RNA, 21 nt, Human
uauuaguacugcucuuguuuc

SEQ ID NO: 2851621 - RNA, 17 nt, Human
uauuaggugcaauuuca

SEQ ID NO: 2851622 - RNA, 21 nt, Human
uauucacaucgcuucugugua

SEQ ID NO: 2851623 - RNA, 22 nt, Human
uauucacaucgcuucuguguau

SEQ ID NO: 2851624 - RNA, 21 nt, Human
uauucagcuucauuuguguca

SEQ ID NO: 2851625 - RNA, 17 nt, Human
uauucagcuucauuugu

SEQ ID NO: 2851626 - RNA, 19 nt, Human
uauucagcuucauuugugu

SEQ ID NO: 2851627 - RNA, 14 nt, Human
uauucagcuucauu

SEQ ID NO: 2851628 - RNA, 16 nt, Human
uauucagcuucauuug

SEQ ID NO: 2851629 - RNA, 22 nt, Human
uauucagugcuguggccugggc

SEQ ID NO: 2851630 - RNA, 18 nt, Human
uauucagugcuguggccu

SEQ ID NO: 2851631 - RNA, 15 nt, Human
uauucagugcugugg

SEQ ID NO: 2851632 - RNA, 21 nt, Human
uauucagugcuguggccuggg

SEQ ID NO: 2851633 - RNA, 22 nt, Human
acaggcgugagccaccgugccu

SEQ ID NO: 2851634 - RNA, 17 nt, Human
acaggcgggaggaggug

SEQ ID NO: 2851635 - RNA, 12 nt, Human
acaggcuccugc

SEQ ID NO: 2851636 - RNA, 20 nt, Human
acaggaagguggugcuuaca

SEQ ID NO: 2851637 - RNA, 15 nt, Human
acaggaagugaagaa

SEQ ID NO: 2851638 - RNA, 20 nt, Human
acaggaagcaccccaugcca

SEQ ID NO: 2851639 - RNA, 15 nt, Human
acaggaagcacccca

SEQ ID NO: 2851640 - RNA, 17 nt, Human
acaggaaaagcugcuga

SEQ ID NO: 2851641 - RNA, 16 nt, Human
acaggaaaagcugcug

SEQ ID NO: 2851642 - RNA, 15 nt, Human
acaggaaaagcugcu

SEQ ID NO: 2851643 - RNA, 19 nt, Human
acagcuaacaauugugaag

SEQ ID NO: 2851644 - RNA, 15 nt, Human
acagcuaacacacag

SEQ ID NO: 2851645 - RNA, 16 nt, Human
acagcggggccccagg

SEQ ID NO: 2851646 - RNA, 19 nt, Human
acagcgucccuagcaguga

SEQ ID NO: 2851647 - RNA, 21 nt, Human
acagcgucccuagcagugaac

SEQ ID NO: 2851648 - RNA, 23 nt, Human
acagcgucccuagcagugaacua

SEQ ID NO: 2851649 - RNA, 11 nt, Human
acagccuggca

SEQ ID NO: 2851650 - RNA, 20 nt, Human
acagcuuuccccucauuuuu

SEQ ID NO: 2851651 - RNA, 12 nt, Human
acagcuuucuga

SEQ ID NO: 2851652 - RNA, 14 nt, Human
acagcuuucugacc

SEQ ID NO: 2851653 - RNA, 15 nt, Human
acagcuuucugaccu

SEQ ID NO: 2851654 - RNA, 17 nt, Human
acagcuuucugaccuuc

SEQ ID NO: 2851655 - RNA, 18 nt, Human
acagcuuucugaccuuca

SEQ ID NO: 2851656 - RNA, 19 nt, Human
acagcuuucugaccuucag

SEQ ID NO: 2851657 - RNA, 22 nt, Human
acagcuuucugaccuucagcuc

SEQ ID NO: 2851658 - RNA, 17 nt, Human
acagcuuucuugcuccc

SEQ ID NO: 2851659 - RNA, 21 nt, Human
acagcuuucuugcucccuuca

SEQ ID NO: 2851660 - RNA, 22 nt, Human
acagcuuucuugcucccuucag

SEQ ID NO: 2851661 - RNA, 12 nt, Human
acagcuuugacu

SEQ ID NO: 2851662 - RNA, 15 nt, Human
acagcuuucaagugc

SEQ ID NO: 2851663 - RNA, 15 nt, Human
acagcuuuacacaca

SEQ ID NO: 2851664 - RNA, 16 nt, Human
acagcuuuacacacac

SEQ ID NO: 2851665 - RNA, 18 nt, Human
acagcuaacacacagcuc

SEQ ID NO: 2851666 - RNA, 19 nt, Human
acagcuaacacacagcucc

SEQ ID NO: 2851667 - RNA, 21 nt, Human
acagcuuuggggugucuuuuu

SEQ ID NO: 2851668 - RNA, 22 nt, Human
acagcuuuggggugucuuuuuu

SEQ ID NO: 2851669 - RNA, 17 nt, Human
acaggacagugcuucag

SEQ ID NO: 2851670 - RNA, 19 nt, Human
acaggaaucaagagcugcc

SEQ ID NO: 2851671 - RNA, 15 nt, Human
acaggaauuuuaaaa

SEQ ID NO: 2851672 - RNA, 22 nt, Human
acaggacagugcuucagccuga

SEQ ID NO: 2851673 - RNA, 20 nt, Human
acaggacagugcuucagccu

SEQ ID NO: 2851674 - RNA, 19 nt, Human
acaggaggcaagcaagcuc

SEQ ID NO: 2851675 - RNA, 14 nt, Human
acaggacucugccu

SEQ ID NO: 2851676 - RNA, 13 nt, Human
acaggcaggucca

SEQ ID NO: 2851677 - RNA, 14 nt, Human
acaggaucagucug

SEQ ID NO: 2851678 - RNA, 16 nt, Human
acaggagugagcacua

SEQ ID NO: 2851679 - RNA, 16 nt, Human
acaggcagguccaggg

SEQ ID NO: 2851680 - RNA, 14 nt, Human
acaggcagguccag

SEQ ID NO: 2851681 - RNA, 14 nt, Human
acaggcauguucuc

SEQ ID NO: 2851682 - RNA, 21 nt, Human
acaggcauaaaauagaguaaa

SEQ ID NO: 2851683 - RNA, 18 nt, Human
acaggcagucucucucuu

SEQ ID NO: 2851684 - RNA, 20 nt, Human
acaggcagucucucucuucc

SEQ ID NO: 2851685 - RNA, 22 nt, Human
acaggcagucucucucuuccuc

SEQ ID NO: 2851686 - RNA, 21 nt, Human
uaugugugaggagcugcuggc

SEQ ID NO: 2851687 - RNA, 13 nt, Human
uaugugugcaugu

SEQ ID NO: 2851688 - RNA, 17 nt, Human
uaugugugcaugugugu

SEQ ID NO: 2851689 - RNA, 18 nt, Human
uaugugugcaugugugua

SEQ ID NO: 2851690 - RNA, 20 nt, Human
uaugugugcauguguguaua

SEQ ID NO: 2851691 - RNA, 21 nt, Human
uaugugugcauguguguauaa

SEQ ID NO: 2851692 - RNA, 16 nt, Human
uaugugugaggagcug

SEQ ID NO: 2851693 - RNA, 14 nt, Human
uauguguguagaca

SEQ ID NO: 2851694 - RNA, 16 nt, Human
uauguuuuuauaaaaa

SEQ ID NO: 2851695 - RNA, 13 nt, Human
uauguguauguac

SEQ ID NO: 2851696 - RNA, 12 nt, Human
uauguguaugua

SEQ ID NO: 2851697 - RNA, 15 nt, Human
uaugugugaggagcu

SEQ ID NO: 2851698 - RNA, 18 nt, Human
uauguguaugugccauuu

SEQ ID NO: 2851699 - RNA, 19 nt, Human
uaugugucaguucauuugu

SEQ ID NO: 2851700 - RNA, 13 nt, Human
uauguguaggcag

SEQ ID NO: 2851701 - RNA, 14 nt, Human
uauguguauauaua

SEQ ID NO: 2851702 - RNA, 17 nt, Human
uauguguauauauacau

SEQ ID NO: 2851703 - RNA, 21 nt, Human
uauguguauauauacauacac

SEQ ID NO: 2851704 - RNA, 22 nt, Human
uauguguauauauacauacacu

SEQ ID NO: 2851705 - RNA, 14 nt, Human
uauguguaaauaca

SEQ ID NO: 2851706 - RNA, 23 nt, Human
uaugugaguguguguuugugcug

SEQ ID NO: 2851707 - RNA, 14 nt, Human
uaugugaucugucu

SEQ ID NO: 2851708 - RNA, 15 nt, Human
uaugugcuguaauuu

SEQ ID NO: 2851709 - RNA, 18 nt, Human
uaugugcuuucaucacaa

SEQ ID NO: 2851710 - RNA, 14 nt, Human
uauuaaaagucaca

SEQ ID NO: 2851711 - RNA, 22 nt, Human
uauuaaaagucacaauguucuu

SEQ ID NO: 2851712 - RNA, 12 nt, Human
uauuaaaaauau

SEQ ID NO: 2851713 - RNA, 17 nt, Human
uauguuuuuuaaaauau

SEQ ID NO: 2851714 - RNA, 15 nt, Human
uauguuuuuuuucug

SEQ ID NO: 2851715 - RNA, 22 nt, Human
uauguuuuuuuucugcuggaaa

SEQ ID NO: 2851716 - RNA, 20 nt, Human
uaugugacaccaaagccacc

SEQ ID NO: 2851717 - RNA, 18 nt, Human
uaugugacauuuuacauu

SEQ ID NO: 2851718 - RNA, 14 nt, Human
uaugugacauuuua

SEQ ID NO: 2851719 - RNA, 18 nt, Human
uaugucuguuuaagaaaa

SEQ ID NO: 2851720 - RNA, 20 nt, Human
uaugucuguuuaagaaaagu

SEQ ID NO: 2851721 - RNA, 21 nt, Human
uaugugaauccucuucuuuau

SEQ ID NO: 2851722 - RNA, 22 nt, Human
uaugugaauauggacucaguuu

SEQ ID NO: 2851723 - RNA, 19 nt, Human
uaugugacauuuuacauua

SEQ ID NO: 2851724 - RNA, 21 nt, Human
uaugugacauuuuacauuaaa

SEQ ID NO: 2851725 - RNA, 22 nt, Human
uaugugagagauucugugaucu

SEQ ID NO: 2851726 - RNA, 19 nt, Human
uaugugagauuuuuuauug

SEQ ID NO: 2851727 - RNA, 21 nt, Human
uaugugagauuuuuuauugcu

SEQ ID NO: 2851728 - RNA, 22 nt, Human
uaugugagauuuuuuauugcua

SEQ ID NO: 2851729 - RNA, 16 nt, Human
uaugugagugccuuuu

SEQ ID NO: 2851730 - RNA, 23 nt, Human
uaugugagugccuuuugcagaag

SEQ ID NO: 2851731 - RNA, 20 nt, Human
acaggcauguucucugagga

SEQ ID NO: 2851732 - RNA, 19 nt, Human
acaggcauguucucugagg

SEQ ID NO: 2851733 - RNA, 18 nt, Human
acaggcauguucucugag

SEQ ID NO: 2851734 - RNA, 15 nt, Human
acaggcauguucucu

SEQ ID NO: 2851735 - RNA, 22 nt, Human
acaggcauguucucugaggaca

SEQ ID NO: 2851736 - RNA, 21 nt, Human
acaggcaugggugcaaggaaa

SEQ ID NO: 2851737 - RNA, 22 nt, Human
acaggcaugggugcaaggaaaa

SEQ ID NO: 2851738 - RNA, 17 nt, Human
acaggcauuuguucacu

SEQ ID NO: 2851739 - RNA, 18 nt, Human
acaggcauuuguucacug

SEQ ID NO: 2851740 - RNA, 14 nt, Human
uaugucuuggacac

SEQ ID NO: 2851741 - RNA, 17 nt, Human
uaugucuuggacacugu

SEQ ID NO: 2851742 - RNA, 19 nt, Human
uaugucuuggacacuguac

SEQ ID NO: 2851743 - RNA, 21 nt, Human
uaugucuuggacacuguacaa

SEQ ID NO: 2851744 - RNA, 17 nt, Human
uaugucuuuuauauuug

SEQ ID NO: 2851745 - RNA, 17 nt, Human
uacuguauagacaguuu

SEQ ID NO: 2851746 - RNA, 20 nt, Human
uacuguauagacaguuugua

SEQ ID NO: 2851747 - RNA, 22 nt, Human
uacuguauagacaguuuguaaa

SEQ ID NO: 2851748 - RNA, 15 nt, Human
uacuguacuaauucu

SEQ ID NO: 2851749 - RNA, 21 nt, Human
uacuguacuaauucuuacacu

SEQ ID NO: 2851750 - RNA, 14 nt, Human
uacuguaguauucu

SEQ ID NO: 2851751 - RNA, 14 nt, Human
aauugacugucacu

SEQ ID NO: 2851752 - RNA, 24 nt, Human
aauugacgguuuuuuauuauugug

SEQ ID NO: 2851753 - RNA, 11 nt, Human
aauugacuacc

SEQ ID NO: 2851754 - RNA, 13 nt, Human
uacuguaagacau

SEQ ID NO: 2851755 - RNA, 14 nt, Human
uacuguaagacauu

SEQ ID NO: 2851756 - RNA, 15 nt, Human
uacuguaagacauua

SEQ ID NO: 2851757 - RNA, 16 nt, Human
uacuguaauaauaccu

SEQ ID NO: 2851758 - RNA, 17 nt, Human
uacuguaauaauaccuc

SEQ ID NO: 2851759 - RNA, 18 nt, Human
uacuguaauaauaccuca

SEQ ID NO: 2851760 - RNA, 19 nt, Human
uacuguaauaauaccucaa

SEQ ID NO: 2851761 - RNA, 14 nt, Human
aauugauguguuua

SEQ ID NO: 2851762 - RNA, 12 nt, Human
aauugcauuucc

SEQ ID NO: 2851763 - RNA, 13 nt, Human
aauugauguguuu

SEQ ID NO: 2851764 - RNA, 21 nt, Human
aauugaucauagguauuucaa

SEQ ID NO: 2851765 - RNA, 22 nt, Human
aauugaucauagguauuucaaa

SEQ ID NO: 2851766 - RNA, 15 nt, Human
aauugacucaaaucu

SEQ ID NO: 2851767 - RNA, 22 nt, Human
aauugaucauuuuccccccacu

SEQ ID NO: 2851768 - RNA, 22 nt, Human
aauugccuauccugcuguucua

SEQ ID NO: 2851769 - RNA, 12 nt, Human
uacuggcgugga

SEQ ID NO: 2851770 - RNA, 15 nt, Human
uacuggcguggauua

SEQ ID NO: 2851771 - RNA, 21 nt, Human
uacuggcguggauuaaacuua

SEQ ID NO: 2851772 - RNA, 23 nt, Human
uacuggcguggauuaaacuuaug

SEQ ID NO: 2851773 - RNA, 18 nt, Human
uacuggcuccucuguggu

SEQ ID NO: 2851774 - RNA, 19 nt, Human
uacuggcuccucuguggug

SEQ ID NO: 2851775 - RNA, 17 nt, Human
uacuggcauaguuucau

SEQ ID NO: 2851776 - RNA, 19 nt, Human
uacuggagcuucauuuugg

SEQ ID NO: 2851777 - RNA, 12 nt, Human
uacucuguguca

SEQ ID NO: 2851778 - RNA, 19 nt, Human
uacucuguccauuuaucca

SEQ ID NO: 2851779 - RNA, 17 nt, Human
uacucuggggugcugcc

SEQ ID NO: 2851780 - RNA, 21 nt, Human
uacucuggggugcugccugaa

SEQ ID NO: 2851781 - RNA, 23 nt, Human
uacucuggggugcugccugaauc

SEQ ID NO: 2851782 - RNA, 13 nt, Human
uacucugaaacac

SEQ ID NO: 2851783 - RNA, 20 nt, Human
uacucugaaacacacugaaa

SEQ ID NO: 2851784 - RNA, 21 nt, Human
aauuccuauauccugugacug

SEQ ID NO: 2851785 - RNA, 14 nt, Human
aauucccuggggaa

SEQ ID NO: 2851786 - RNA, 13 nt, Human
aauuccuaacuuu

SEQ ID NO: 2851787 - RNA, 10 nt, Human
aauuccuaca

SEQ ID NO: 2851788 - RNA, 13 nt, Human
aauuccuacagca

SEQ ID NO: 2851789 - RNA, 14 nt, Human
aauuccuacagcac

SEQ ID NO: 2851790 - RNA, 15 nt, Human
aauuccuacagcacu

SEQ ID NO: 2851791 - RNA, 18 nt, Human
aauuccuacagcacuacu

SEQ ID NO: 2851792 - RNA, 19 nt, Human
aauuccuacagcacuacug

SEQ ID NO: 2851793 - RNA, 14 nt, Human
aauuccuagaauua

SEQ ID NO: 2851794 - RNA, 17 nt, Human
aauuccuagaauuaaac

SEQ ID NO: 2851795 - RNA, 13 nt, Human
uacgcacagacag

SEQ ID NO: 2851796 - RNA, 14 nt, Human
uacgcacagacagg

SEQ ID NO: 2851797 - RNA, 17 nt, Human
uacgcacagacagguuu

SEQ ID NO: 2851798 - RNA, 21 nt, Human
uacgcacagacagguuuucac

SEQ ID NO: 2851799 - RNA, 21 nt, Human
uacgagugcuaaguguaggau

SEQ ID NO: 2851800 - RNA, 14 nt, Human
uacgauaaggaaga

SEQ ID NO: 2851801 - RNA, 15 nt, Human
uacgauaaggaagaa

SEQ ID NO: 2851802 - RNA, 16 nt, Human
uacgauaaggaagaaa

SEQ ID NO: 2851803 - RNA, 21 nt, Human
uacgauaaggaagaaacagaa

SEQ ID NO: 2851804 - RNA, 14 nt, Human
uacgauacgcuacu

SEQ ID NO: 2851805 - RNA, 23 nt, Human
uacgauacgcuacuauaaagaga

SEQ ID NO: 2851806 - RNA, 14 nt, Human
uacgaucaggcaca

SEQ ID NO: 2851807 - RNA, 16 nt, Human
uacgaucaggcacagg

SEQ ID NO: 2851808 - RNA, 21 nt, Human
aauuccucauccucagaugcu

SEQ ID NO: 2851809 - RNA, 22 nt, Human
aauuccucauccucagaugcuc

SEQ ID NO: 2851810 - RNA, 17 nt, Human
uacgccugcauguaaac

SEQ ID NO: 2851811 - RNA, 17 nt, Human
uacgcaggcaucugauu

SEQ ID NO: 2851812 - RNA, 21 nt, Human
aauuccucucacuaaacuuua

SEQ ID NO: 2851813 - RNA, 23 nt, Human
uacgcacuacaugugguuuauag

SEQ ID NO: 2851814 - RNA, 16 nt, Human
uacuauggcugaguuc

SEQ ID NO: 2851815 - RNA, 14 nt, Human
uacuaugccugugu

SEQ ID NO: 2851816 - RNA, 13 nt, Human
uacuaugccugug

SEQ ID NO: 2851817 - RNA, 17 nt, Human
uacuauccaguuacugc

SEQ ID NO: 2851818 - RNA, 20 nt, Human
uacggucagguuuaacauuu

SEQ ID NO: 2851819 - RNA, 13 nt, Human
uacguuuguaugu

SEQ ID NO: 2851820 - RNA, 14 nt, Human
uacguuuguaugug

SEQ ID NO: 2851821 - RNA, 20 nt, Human
uacguuuguauguguguaga

SEQ ID NO: 2851822 - RNA, 15 nt, Human
uacuacugaaacaga

SEQ ID NO: 2851823 - RNA, 20 nt, Human
uacuacugaaacagauuuca

SEQ ID NO: 2851824 - RNA, 21 nt, Human
uacuacugaaacagauuucau

SEQ ID NO: 2851825 - RNA, 20 nt, Human
uacuaucaugucaaacguga

SEQ ID NO: 2851826 - RNA, 13 nt, Human
uacuauauuugcu

SEQ ID NO: 2851827 - RNA, 14 nt, Human
uacuauauuugcua

SEQ ID NO: 2851828 - RNA, 15 nt, Human
uacuauauuugcuag

SEQ ID NO: 2851829 - RNA, 21 nt, Human
uacuaucauacuacugaaaca

SEQ ID NO: 2851830 - RNA, 16 nt, Human
uacuauaguaccagua

SEQ ID NO: 2851831 - RNA, 13 nt, Human
uacuauaguacca

SEQ ID NO: 2851832 - RNA, 12 nt, Human
uacuauaguacc

SEQ ID NO: 2851833 - RNA, 21 nt, Human
aauuccacuggacuugagcuu

SEQ ID NO: 2851834 - RNA, 14 nt, Human
aauuccacugucaa

SEQ ID NO: 2851835 - RNA, 22 nt, Human
aauuccacugucaagaaagagc

SEQ ID NO: 2851836 - RNA, 14 nt, Human
aauuccacuggacu

SEQ ID NO: 2851837 - RNA, 13 nt, Human
aauuccacuggac

SEQ ID NO: 2851838 - RNA, 12 nt, Human
aauuccaaaguc

SEQ ID NO: 2851839 - RNA, 13 nt, Human
aauuccaaagucu

SEQ ID NO: 2851840 - RNA, 18 nt, Human
aauuccaaagucucuaau

SEQ ID NO: 2851841 - RNA, 12 nt, Human
aauuccccagau

SEQ ID NO: 2851842 - RNA, 21 nt, Human
aauuccauuugaggauuuaga

SEQ ID NO: 2851843 - RNA, 19 nt, Human
aauuccauauauccuuuuc

SEQ ID NO: 2851844 - RNA, 22 nt, Human
aauuccauauauccuuuucuuc

SEQ ID NO: 2851845 - RNA, 15 nt, Human
aauucauuucacauu

SEQ ID NO: 2851846 - RNA, 21 nt, Human
aauucacccccuuuccuggac

SEQ ID NO: 2851847 - RNA, 20 nt, Human
aauucacucaagcacugaua

SEQ ID NO: 2851848 - RNA, 13 nt, Human
aauucacaaacuu

SEQ ID NO: 2851849 - RNA, 14 nt, Human
aauucacaaacuuu

SEQ ID NO: 2851850 - RNA, 19 nt, Human
aauucacaaacuuuuauac

SEQ ID NO: 2851851 - RNA, 12 nt, Human
aauuauuauuug

SEQ ID NO: 2851852 - RNA, 18 nt, Human
aauuauuauuuguguuuu

SEQ ID NO: 2851853 - RNA, 15 nt, Human
aauuauuauuugugu

SEQ ID NO: 2851854 - RNA, 16 nt, Human
aauuauuauuuguguu

SEQ ID NO: 2851855 - RNA, 16 nt, Human
aauuaggguacauuua

SEQ ID NO: 2851856 - RNA, 17 nt, Human
aauuaggguacauuuau

SEQ ID NO: 2851857 - RNA, 19 nt, Human
aauuaggguacauuuauaa

SEQ ID NO: 2851858 - RNA, 20 nt, Human
aauuaggguacauuuauaau

SEQ ID NO: 2851859 - RNA, 21 nt, Human
aauuaggguacauuuauaauu

SEQ ID NO: 2851860 - RNA, 14 nt, Human
aauuagguuaacau

SEQ ID NO: 2851861 - RNA, 15 nt, Human
aauuagguuaacauu

SEQ ID NO: 2851862 - RNA, 16 nt, Human
aauuagguuaacauug

SEQ ID NO: 2851863 - RNA, 19 nt, Human
aauuacucagcagaauggu

SEQ ID NO: 2851864 - RNA, 17 nt, Human
aauuagguuuuuccuua

SEQ ID NO: 2851865 - RNA, 18 nt, Human
aauuagguuuuuccuuau

SEQ ID NO: 2851866 - RNA, 21 nt, Human
aauuagguuuuuccuuauuug

SEQ ID NO: 2851867 - RNA, 15 nt, Human
aauucaaaaaguguu

SEQ ID NO: 2851868 - RNA, 14 nt, Human
aauucaaaaagugu

SEQ ID NO: 2851869 - RNA, 20 nt, Human
aauucaaacuggggccucca

SEQ ID NO: 2851870 - RNA, 16 nt, Human
aauucaaaaaguguuu

SEQ ID NO: 2851871 - RNA, 16 nt, Human
aauucaaaaguuccaa

SEQ ID NO: 2851872 - RNA, 22 nt, Human
aauucaaaaguuccaagagucu

SEQ ID NO: 2851873 - RNA, 23 nt, Human
aauucaaaaguuccaagagucua

SEQ ID NO: 2851874 - RNA, 13 nt, Human
aauuauugauaua

SEQ ID NO: 2851875 - RNA, 14 nt, Human
aauuauugauauau

SEQ ID NO: 2851876 - RNA, 15 nt, Human
aauuauugauauaua

SEQ ID NO: 2851877 - RNA, 16 nt, Human
aauuauugauauauau

SEQ ID NO: 2851878 - RNA, 17 nt, Human
aauuauugauauauauu

SEQ ID NO: 2851879 - RNA, 18 nt, Human
aauuauugauauauauua

SEQ ID NO: 2851880 - RNA, 20 nt, Human
aauuauugauauauauuaua

SEQ ID NO: 2851881 - RNA, 23 nt, Human
aauuaggcaaggcuaugugauua

SEQ ID NO: 2851882 - RNA, 19 nt, Human
aauuaggaggcucaacaau

SEQ ID NO: 2851883 - RNA, 21 nt, Human
aauuaggaggcucaacaauaa

SEQ ID NO: 2851884 - RNA, 20 nt, Human
aauuaggcaaggcuauguga

SEQ ID NO: 2851885 - RNA, 17 nt, Human
aauuaggaagugauuau

SEQ ID NO: 2851886 - RNA, 17 nt, Human
aauuagcuuggggccag

SEQ ID NO: 2851887 - RNA, 22 nt, Human
aauuagcuuuuucauccccuua

SEQ ID NO: 2851888 - RNA, 13 nt, Human
aauuaggaaaaaa

SEQ ID NO: 2851889 - RNA, 17 nt, Human
aauuaggaaaaaaacua

SEQ ID NO: 2851890 - RNA, 12 nt, Human
aauuacuuaaaa

SEQ ID NO: 2851891 - RNA, 15 nt, Human
aauuacuuaaaaaaa

SEQ ID NO: 2851892 - RNA, 14 nt, Human
aauuagccgggcgu

SEQ ID NO: 2851893 - RNA, 12 nt, Human
aauuagcaauug

SEQ ID NO: 2851894 - RNA, 14 nt, Human
aauuagaugcaugu

SEQ ID NO: 2851895 - RNA, 17 nt, Human
aauuagaugcauguuga

SEQ ID NO: 2851896 - RNA, 21 nt, Human
aauuagaugcauguugaccau

SEQ ID NO: 2851897 - RNA, 22 nt, Human
aauuagaugcauguugaccaug

SEQ ID NO: 2851898 - RNA, 15 nt, Human
uaccuguauucccag

SEQ ID NO: 2851899 - RNA, 13 nt, Human
aauuaauuugauu

SEQ ID NO: 2851900 - RNA, 14 nt, Human
aauuaauuugauua

SEQ ID NO: 2851901 - RNA, 15 nt, Human
aauuaauuugauuaa

SEQ ID NO: 2851902 - RNA, 16 nt, Human
aauuaauuugauuaac

SEQ ID NO: 2851903 - RNA, 21 nt, Human
aauuaauuugauuaacaaaua

SEQ ID NO: 2851904 - RNA, 22 nt, Human
aauuaauuugauuaacaaauau

SEQ ID NO: 2851905 - RNA, 12 nt, Human
aauuaauuuuac

SEQ ID NO: 2851906 - RNA, 13 nt, Human
aauuaauuuuacu

SEQ ID NO: 2851907 - RNA, 13 nt, Human
aauuacuaauuuu

SEQ ID NO: 2851908 - RNA, 15 nt, Human
aauuacuaauuuuac

SEQ ID NO: 2851909 - RNA, 15 nt, Human
aauuacgauaaggaa

SEQ ID NO: 2851910 - RNA, 17 nt, Human
aauuacgauaaggaaga

SEQ ID NO: 2851911 - RNA, 18 nt, Human
aauuacgauaaggaagaa

SEQ ID NO: 2851912 - RNA, 20 nt, Human
aauuacgauaaggaagaaac

SEQ ID NO: 2851913 - RNA, 14 nt, Human
aauuacacccaaag

SEQ ID NO: 2851914 - RNA, 14 nt, Human
uaccugucacauug

SEQ ID NO: 2851915 - RNA, 17 nt, Human
uaccugucacauugcau

SEQ ID NO: 2851916 - RNA, 18 nt, Human
uaccugucacauugcauu

SEQ ID NO: 2851917 - RNA, 19 nt, Human
uaccugucacauugcauuc

SEQ ID NO: 2851918 - RNA, 21 nt, Human
uaccugucacauugcauucua

SEQ ID NO: 2851919 - RNA, 14 nt, Human
uaccuguacacuga

SEQ ID NO: 2851920 - RNA, 19 nt, Human
uaccuguacacugacuuga

SEQ ID NO: 2851921 - RNA, 23 nt, Human
uaccugcucuccaagucucagug

SEQ ID NO: 2851922 - RNA, 14 nt, Human
uaccugcucuccaa

SEQ ID NO: 2851923 - RNA, 13 nt, Human
uaccugcccugga

SEQ ID NO: 2851924 - RNA, 15 nt, Human
uaccugcccuggaac

SEQ ID NO: 2851925 - RNA, 16 nt, Human
uaccugcccuggaaca

SEQ ID NO: 2851926 - RNA, 19 nt, Human
uacauuggcugguaacagu

SEQ ID NO: 2851927 - RNA, 15 nt, Human
uaccacccaaugcug

SEQ ID NO: 2851928 - RNA, 15 nt, Human
uaccacuaacuccug

SEQ ID NO: 2851929 - RNA, 19 nt, Human
uaccacuaacuccugagaa

SEQ ID NO: 2851930 - RNA, 16 nt, Human
uaccacucacaugaca

SEQ ID NO: 2851931 - RNA, 14 nt, Human
uaccacucaggcca

SEQ ID NO: 2851932 - RNA, 13 nt, Human
uaccacuccugcc

SEQ ID NO: 2851933 - RNA, 22 nt, Human
aaugcuguauuagucacagaga

SEQ ID NO: 2851934 - RNA, 13 nt, Human
aaugcuguguuaa

SEQ ID NO: 2851935 - RNA, 23 nt, Human
aaugcuguacaucuauuuuggau

SEQ ID NO: 2851936 - RNA, 20 nt, Human
aaugcuuaucaucuaaagau

SEQ ID NO: 2851937 - RNA, 18 nt, Human
aaugcuucacuguacgua

SEQ ID NO: 2851938 - RNA, 11 nt, Human
aaugcuucaga

SEQ ID NO: 2851939 - RNA, 16 nt, Human
aaugcuucagauauua

SEQ ID NO: 2851940 - RNA, 18 nt, Human
aaugcuucagauauuauu

SEQ ID NO: 2851941 - RNA, 12 nt, Human
aaugcuuaagag

SEQ ID NO: 2851942 - RNA, 21 nt, Human
aaugcuuaagagggaaugaua

SEQ ID NO: 2851943 - RNA, 20 nt, Human
aaugccauuuauuuauugau

SEQ ID NO: 2851944 - RNA, 17 nt, Human
aaugcuguacaucuauu

SEQ ID NO: 2851945 - RNA, 15 nt, Human
aaugcuguacaucua

SEQ ID NO: 2851946 - RNA, 13 nt, Human
aaugcuguacauc

SEQ ID NO: 2851947 - RNA, 12 nt, Human
aaugcuguacau

SEQ ID NO: 2851948 - RNA, 15 nt, Human
aaugcuuaauuucua

SEQ ID NO: 2851949 - RNA, 16 nt, Human
aaugcuuaauuucuaa

SEQ ID NO: 2851950 - RNA, 17 nt, Human
aaugcuuaauuucuaaa

SEQ ID NO: 2851951 - RNA, 20 nt, Human
aaugcuuaauuucuaaagau

SEQ ID NO: 2851952 - RNA, 13 nt, Human
aaugcuucauuca

SEQ ID NO: 2851953 - RNA, 17 nt, Human
aaugcuucauucaauau

SEQ ID NO: 2851954 - RNA, 20 nt, Human
aaugcuucauucaauauuga

SEQ ID NO: 2851955 - RNA, 21 nt, Human
aaugcuucauucaauauugac

SEQ ID NO: 2851956 - RNA, 22 nt, Human
aaugcuucauucaauauugaca

SEQ ID NO: 2851957 - RNA, 19 nt, Human
aauggaaaguaacucauuu

SEQ ID NO: 2851958 - RNA, 22 nt, Human
aauggaaaucaucgaaaauuca

SEQ ID NO: 2851959 - RNA, 13 nt, Human
aaugccagugugc

SEQ ID NO: 2851960 - RNA, 13 nt, Human
aaugccauaauac

SEQ ID NO: 2851961 - RNA, 14 nt, Human
aaugccauaauaca

SEQ ID NO: 2851962 - RNA, 16 nt, Human
aaugccauaauacaaa

SEQ ID NO: 2851963 - RNA, 18 nt, Human
aaugccauaauacaaaag

SEQ ID NO: 2851964 - RNA, 23 nt, Human
aaugccauagucaaagagaguuu

SEQ ID NO: 2851965 - RNA, 17 nt, Human
aaugccauccucaaaca

SEQ ID NO: 2851966 - RNA, 21 nt, Human
aaugccauccucaaacacugc

SEQ ID NO: 2851967 - RNA, 22 nt, Human
aaugccauccucaaacacugca

SEQ ID NO: 2851968 - RNA, 19 nt, Human
aaugccauuuauuuauuga

SEQ ID NO: 2851969 - RNA, 16 nt, Human
aaugccauuaucccug

SEQ ID NO: 2851970 - RNA, 20 nt, Human
aaugcagcaaggcccugcug

SEQ ID NO: 2851971 - RNA, 23 nt, Human
aaugcagcaaggcccugcugccc

SEQ ID NO: 2851972 - RNA, 22 nt, Human
aaugcagggauugcugccacuu

SEQ ID NO: 2851973 - RNA, 23 nt, Human
aaugcagggauugcugccacuuu

SEQ ID NO: 2851974 - RNA, 12 nt, Human
aaugcagcccau

SEQ ID NO: 2851975 - RNA, 17 nt, Human
aaugcagcccauuucuc

SEQ ID NO: 2851976 - RNA, 18 nt, Human
aaugcagcccauuucucc

SEQ ID NO: 2851977 - RNA, 20 nt, Human
aaugcagcccauuucuccag

SEQ ID NO: 2851978 - RNA, 21 nt, Human
aaugcagcccauuucuccaga

SEQ ID NO: 2851979 - RNA, 14 nt, Human
aaugcagcgugaag

SEQ ID NO: 2851980 - RNA, 16 nt, Human
aaugcagcuugugugc

SEQ ID NO: 2851981 - RNA, 22 nt, Human
aaugcagcuugugugcaaaagc

SEQ ID NO: 2851982 - RNA, 22 nt, Human
uacaauguauuuauuuaaaaga

SEQ ID NO: 2851983 - RNA, 17 nt, Human
uacaaugucauauacug

SEQ ID NO: 2851984 - RNA, 12 nt, Human
aaugaaugucua

SEQ ID NO: 2851985 - RNA, 16 nt, Human
aaugacaacagaagcu

SEQ ID NO: 2851986 - RNA, 14 nt, Human
uacaauguauuuau

SEQ ID NO: 2851987 - RNA, 13 nt, Human
uacaauguagaug

SEQ ID NO: 2851988 - RNA, 17 nt, Human
uacaauguauuuauuua

SEQ ID NO: 2851989 - RNA, 18 nt, Human
uacaauguauuuauuuaa

SEQ ID NO: 2851990 - RNA, 19 nt, Human
uacaauguauuuauuuaaa

SEQ ID NO: 2851991 - RNA, 20 nt, Human
uacaauguauuuauuuaaaa

SEQ ID NO: 2851992 - RNA, 15 nt, Human
aauguaacuuuugua

SEQ ID NO: 2851993 - RNA, 15 nt, Human
aauguaacuuagaga

SEQ ID NO: 2851994 - RNA, 22 nt, Human
aauguaacuuuuguaagacaaa

SEQ ID NO: 2851995 - RNA, 16 nt, Human
aauguaacuuuuguaa

SEQ ID NO: 2851996 - RNA, 13 nt, Human
uacacguguccug

SEQ ID NO: 2851997 - RNA, 17 nt, Human
uacacguguccuguagu

SEQ ID NO: 2851998 - RNA, 22 nt, Human
uacagacagagaauaugucugc

SEQ ID NO: 2851999 - RNA, 13 nt, Human
uacagacauauuu

SEQ ID NO: 2852000 - RNA, 14 nt, Human
uacagacauauuua

SEQ ID NO: 2852001 - RNA, 15 nt, Human
uacagacauauuuaa

SEQ ID NO: 2852002 - RNA, 18 nt, Human
uacagacauauuuaacug

SEQ ID NO: 2852003 - RNA, 19 nt, Human
uacagacauauuuaacugg

SEQ ID NO: 2852004 - RNA, 19 nt, Human
uacagaguguggacucugg

SEQ ID NO: 2852005 - RNA, 14 nt, Human
uacagaccugcuuu

SEQ ID NO: 2852006 - RNA, 15 nt, Human
uacagaccugcuuuu

SEQ ID NO: 2852007 - RNA, 16 nt, Human
uacagaccugcuuuuu

SEQ ID NO: 2852008 - RNA, 18 nt, Human
uacagaccugcuuuuuga

SEQ ID NO: 2852009 - RNA, 20 nt, Human
uacagaccugcuuuuugaaa

SEQ ID NO: 2852010 - RNA, 21 nt, Human
uacagaccugcuuuuugaaau

SEQ ID NO: 2852011 - RNA, 22 nt, Human
uacagaccugcuuuuugaaaug

SEQ ID NO: 2852012 - RNA, 23 nt, Human
uacagaccugcuuuuugaaauga

SEQ ID NO: 2852013 - RNA, 12 nt, Human
uacagauaacau

SEQ ID NO: 2852014 - RNA, 13 nt, Human
uacagauaacauu

SEQ ID NO: 2852015 - RNA, 15 nt, Human
uacagauaacauuag

SEQ ID NO: 2852016 - RNA, 19 nt, Human
uacagauagagaguuguug

SEQ ID NO: 2852017 - RNA, 20 nt, Human
uacagauccccaagccuggc

SEQ ID NO: 2852018 - RNA, 12 nt, Human
uacagaugaaaa

SEQ ID NO: 2852019 - RNA, 13 nt, Human
uacagaugaaaau

SEQ ID NO: 2852020 - RNA, 14 nt, Human
uacagaugaaaauu

SEQ ID NO: 2852021 - RNA, 21 nt, Human
aauggauuggauuauuuaaua

SEQ ID NO: 2852022 - RNA, 23 nt, Human
aauggauuggauuauuuaauaac

SEQ ID NO: 2852023 - RNA, 12 nt, Human
aauggauuguua

SEQ ID NO: 2852024 - RNA, 14 nt, Human
aauggauuguuaau

SEQ ID NO: 2852025 - RNA, 18 nt, Human
aauggauuguuaauuuca

SEQ ID NO: 2852026 - RNA, 19 nt, Human
aauggauuguuaauuucag

SEQ ID NO: 2852027 - RNA, 22 nt, Human
aauggauuggauuauuuaauaa

SEQ ID NO: 2852028 - RNA, 21 nt, Human
aauggauuugaugcuguuuga

SEQ ID NO: 2852029 - RNA, 14 nt, Human
uacaauggaaacaa

SEQ ID NO: 2852030 - RNA, 17 nt, Human
aauggacuggaagggga

SEQ ID NO: 2852031 - RNA, 23 nt, Human
aauggacuggaaggggaagggac

SEQ ID NO: 2852032 - RNA, 17 nt, Human
aauggacugguuugaga

SEQ ID NO: 2852033 - RNA, 19 nt, Human
aauggacugguuugagauu

SEQ ID NO: 2852034 - RNA, 23 nt, Human
aauggcacaaucucggcucacug

SEQ ID NO: 2852035 - RNA, 16 nt, Human
aauggcagccuuggca

SEQ ID NO: 2852036 - RNA, 15 nt, Human
aauggcaugagauag

SEQ ID NO: 2852037 - RNA, 12 nt, Human
aauggcagccuu

SEQ ID NO: 2852038 - RNA, 16 nt, Human
aauggcaaguuuugau

SEQ ID NO: 2852039 - RNA, 12 nt, Human
aauggcacugau

SEQ ID NO: 2852040 - RNA, 19 nt, Human
aauggcacuguugcaaacu

SEQ ID NO: 2852041 - RNA, 12 nt, Human
aauggcagcaga

SEQ ID NO: 2852042 - RNA, 16 nt, Human
aauggcagcagaaaac

SEQ ID NO: 2852043 - RNA, 18 nt, Human
aauggcagcagaaaacuu

SEQ ID NO: 2852044 - RNA, 17 nt, Human
aauggccauuugcuuuu

SEQ ID NO: 2852045 - RNA, 20 nt, Human
aauggccugccuugaagcca

SEQ ID NO: 2852046 - RNA, 14 nt, Human
aauggccugccuug

SEQ ID NO: 2852047 - RNA, 19 nt, Human
aauggcgugaacccgggag

SEQ ID NO: 2852048 - RNA, 20 nt, Human
aauggcgucuggaaguccaa

SEQ ID NO: 2852049 - RNA, 23 nt, Human
aauggcguccguggguugcuaac

SEQ ID NO: 2852050 - RNA, 22 nt, Human
aauggccugccuugaagccacu

SEQ ID NO: 2852051 - RNA, 14 nt, Human
aauggccuuccuuc

SEQ ID NO: 2852052 - RNA, 17 nt, Human
uacauauguaaaauaaa

SEQ ID NO: 2852053 - RNA, 18 nt, Human
uacaucaguuauucauuc

SEQ ID NO: 2852054 - RNA, 20 nt, Human
uacaucaguuauucauucug

SEQ ID NO: 2852055 - RNA, 23 nt, Human
uacaucaguuauucauucuguga

SEQ ID NO: 2852056 - RNA, 22 nt, Human
uacaucaugcuggaaccugcaa

SEQ ID NO: 2852057 - RNA, 12 nt, Human
uacauauguaaa

SEQ ID NO: 2852058 - RNA, 20 nt, Human
uacauauguaaaauaaaauu

SEQ ID NO: 2852059 - RNA, 13 nt, Human
uacauauguaaac

SEQ ID NO: 2852060 - RNA, 14 nt, Human
uacauauguaaaca

SEQ ID NO: 2852061 - RNA, 17 nt, Human
uacauauguaaacauaa

SEQ ID NO: 2852062 - RNA, 15 nt, Human
uacauauguagacua

SEQ ID NO: 2852063 - RNA, 12 nt, Human
uacaucacugcu

SEQ ID NO: 2852064 - RNA, 13 nt, Human
uacaucacugcuu

SEQ ID NO: 2852065 - RNA, 15 nt, Human
uacaucacugcuuga

SEQ ID NO: 2852066 - RNA, 19 nt, Human
uacaucacugcuugaugaa

SEQ ID NO: 2852067 - RNA, 22 nt, Human
uacaucacugcuugaugaagca

SEQ ID NO: 2852068 - RNA, 23 nt, Human
uacaucacugcuugaugaagcaa

SEQ ID NO: 2852069 - RNA, 16 nt, Human
uacauauguaaaauaa

SEQ ID NO: 2852070 - RNA, 15 nt, Human
uacauauguaaaaua

SEQ ID NO: 2852071 - RNA, 15 nt, Human
uacauaucgcugacu

SEQ ID NO: 2852072 - RNA, 17 nt, Human
uacauaucgcugacuuc

SEQ ID NO: 2852073 - RNA, 20 nt, Human
uacauaucgcugacuucaug

SEQ ID NO: 2852074 - RNA, 22 nt, Human
uacauaucgcugacuucaugga

SEQ ID NO: 2852075 - RNA, 23 nt, Human
uacauaucgcugacuucauggaa

SEQ ID NO: 2852076 - RNA, 14 nt, Human
uacauauauuuuua

SEQ ID NO: 2852077 - RNA, 15 nt, Human
uacauauauuuuuaa

SEQ ID NO: 2852078 - RNA, 22 nt, Human
uacauauauuuuuaaaaaauga

SEQ ID NO: 2852079 - RNA, 22 nt, Human
uacauaauuuuuuauucaaguu

SEQ ID NO: 2852080 - RNA, 19 nt, Human
uacauaauuuuuuauucaa

SEQ ID NO: 2852081 - RNA, 13 nt, Human
uacauaaugcuua

SEQ ID NO: 2852082 - RNA, 20 nt, Human
uacauaaugcuuaauuucua

SEQ ID NO: 2852083 - RNA, 21 nt, Human
uacauaaugcuuaauuucuaa

SEQ ID NO: 2852084 - RNA, 22 nt, Human
uacauaaugcuuaauuucuaaa

SEQ ID NO: 2852085 - RNA, 19 nt, Human
uacauaaugggccacugaa

SEQ ID NO: 2852086 - RNA, 23 nt, Human
uacauaaugggccacugaaaucu

SEQ ID NO: 2852087 - RNA, 22 nt, Human
uacaggugugugccaccacacc

SEQ ID NO: 2852088 - RNA, 16 nt, Human
uacaggugugagucac

SEQ ID NO: 2852089 - RNA, 18 nt, Human
uacagaugaauguauuua

SEQ ID NO: 2852090 - RNA, 22 nt, Human
uacagaugaauguauuuauuug

SEQ ID NO: 2852091 - RNA, 14 nt, Human
uacagaugccuuuu

SEQ ID NO: 2852092 - RNA, 13 nt, Human
uacagauuuaaua

SEQ ID NO: 2852093 - RNA, 13 nt, Human
aauguauauacac

SEQ ID NO: 2852094 - RNA, 14 nt, Human
aauguauauacaca

SEQ ID NO: 2852095 - RNA, 15 nt, Human
aauguauauacacau

SEQ ID NO: 2852096 - RNA, 16 nt, Human
aauguauauacacaua

SEQ ID NO: 2852097 - RNA, 17 nt, Human
aauguauauacacauau

SEQ ID NO: 2852098 - RNA, 18 nt, Human
aauguauauacacauaua

SEQ ID NO: 2852099 - RNA, 19 nt, Human
aauguauauacacauauac

SEQ ID NO: 2852100 - RNA, 21 nt, Human
aauguauauacacauauaccu

SEQ ID NO: 2852101 - RNA, 12 nt, Human
aauguauauauu

SEQ ID NO: 2852102 - RNA, 13 nt, Human
aauguauauauuu

SEQ ID NO: 2852103 - RNA, 20 nt, Human
aauguauauauuuagugcug

SEQ ID NO: 2852104 - RNA, 19 nt, Human
aauguauacuauaguacca

SEQ ID NO: 2852105 - RNA, 15 nt, Human
aaugugauguucuaa

SEQ ID NO: 2852106 - RNA, 14 nt, Human
aaugugauguucua

SEQ ID NO: 2852107 - RNA, 16 nt, Human
aaugugauguucuaag

SEQ ID NO: 2852108 - RNA, 17 nt, Human
aaugugauguucuaagg

SEQ ID NO: 2852109 - RNA, 22 nt, Human
aaugugauucuaaugucuucau

SEQ ID NO: 2852110 - RNA, 20 nt, Human
aaugugcagaugcaauuguu

SEQ ID NO: 2852111 - RNA, 14 nt, Human
aaugugauucuaau

SEQ ID NO: 2852112 - RNA, 19 nt, Human
aaugugauucuaaugucuu

SEQ ID NO: 2852113 - RNA, 19 nt, Human
aaugugauguucuaaggcu

SEQ ID NO: 2852114 - RNA, 17 nt, Human
aaugugauuacugcucu

SEQ ID NO: 2852115 - RNA, 11 nt, Human
aaugugugugu

SEQ ID NO: 2852116 - RNA, 17 nt, Human
uacauuguaaauaguau

SEQ ID NO: 2852117 - RNA, 22 nt, Human
uacauugaguagacacauuuaa

SEQ ID NO: 2852118 - RNA, 16 nt, Human
uacauguguagccugu

SEQ ID NO: 2852119 - RNA, 14 nt, Human
uacaugugguuuau

SEQ ID NO: 2852120 - RNA, 14 nt, Human
uacauguguagccu

SEQ ID NO: 2852121 - RNA, 19 nt, Human
uacauguguagccugugca

SEQ ID NO: 2852122 - RNA, 12 nt, Human
uacaugugugua

SEQ ID NO: 2852123 - RNA, 13 nt, Human
uacauguguguau

SEQ ID NO: 2852124 - RNA, 14 nt, Human
uacauguguguaua

SEQ ID NO: 2852125 - RNA, 16 nt, Human
uacauguguguauaua

SEQ ID NO: 2852126 - RNA, 19 nt, Human
uacauguguguauauaugu

SEQ ID NO: 2852127 - RNA, 21 nt, Human
uacauguguguauauaugugu

SEQ ID NO: 2852128 - RNA, 18 nt, Human
uacauguguagccugugc

SEQ ID NO: 2852129 - RNA, 16 nt, Human
aauuaauugcuauugu

SEQ ID NO: 2852130 - RNA, 16 nt, Human
aauuaauggaaucuuc

SEQ ID NO: 2852131 - RNA, 12 nt, Human
aauuaagacaag

SEQ ID NO: 2852132 - RNA, 15 nt, Human
aauuaagacugaaaa

SEQ ID NO: 2852133 - RNA, 14 nt, Human
aauuaauagcuuuu

SEQ ID NO: 2852134 - RNA, 14 nt, Human
aauuaauaguuugu

SEQ ID NO: 2852135 - RNA, 20 nt, Human
aauuaauaguuugucuauuu

SEQ ID NO: 2852136 - RNA, 22 nt, Human
aauuaauaguuugucuauuuua

SEQ ID NO: 2852137 - RNA, 22 nt, Human
aauuaaucugggccagaauuuc

SEQ ID NO: 2852138 - RNA, 13 nt, Human
aauuaauagcuuu

SEQ ID NO: 2852139 - RNA, 13 nt, Human
aauuaagaaggca

SEQ ID NO: 2852140 - RNA, 16 nt, Human
aauuaagaaggcaaaa

SEQ ID NO: 2852141 - RNA, 14 nt, Human
aauuaagaaggcaa

SEQ ID NO: 2852142 - RNA, 23 nt, Human
aauuaagaaggcaaaaauguaaa

SEQ ID NO: 2852143 - RNA, 21 nt, Human
aauuaagaauauguuuccuug

SEQ ID NO: 2852144 - RNA, 19 nt, Human
aauuaagaaggcaaaaaug

SEQ ID NO: 2852145 - RNA, 17 nt, Human
aauguguuuuguacaug

SEQ ID NO: 2852146 - RNA, 12 nt, Human
aauguucuguga

SEQ ID NO: 2852147 - RNA, 21 nt, Human
aauguucugugauacagaacu

SEQ ID NO: 2852148 - RNA, 20 nt, Human
aauguucuuaugcaaaaugg

SEQ ID NO: 2852149 - RNA, 21 nt, Human
aauguucuuaugcaaaaugga

SEQ ID NO: 2852150 - RNA, 22 nt, Human
aauguucuuaugcaaaauggaa

SEQ ID NO: 2852151 - RNA, 12 nt, Human
aauguucuuuau

SEQ ID NO: 2852152 - RNA, 16 nt, Human
aauguucuuuauauac

SEQ ID NO: 2852153 - RNA, 23 nt, Human
aauguucuuuauauacaauaaug

SEQ ID NO: 2852154 - RNA, 13 nt, Human
aauguuaagcaga

SEQ ID NO: 2852155 - RNA, 22 nt, Human
aauguuaaauuuguaaguuuca

SEQ ID NO: 2852156 - RNA, 12 nt, Human
aauguuaagaau

SEQ ID NO: 2852157 - RNA, 14 nt, Human
aauguuaagaauug

SEQ ID NO: 2852158 - RNA, 15 nt, Human
aauguuaagaauuga

SEQ ID NO: 2852159 - RNA, 18 nt, Human
aauguuaaggaaacucuu

SEQ ID NO: 2852160 - RNA, 22 nt, Human
aauguuaaggaaacucuuaucu

SEQ ID NO: 2852161 - RNA, 13 nt, Human
aauguuaauuuuu

SEQ ID NO: 2852162 - RNA, 20 nt, Human
aauguuaauuuuuugguaca

SEQ ID NO: 2852163 - RNA, 21 nt, Human
aauguuaauuuuuugguacaa

SEQ ID NO: 2852164 - RNA, 12 nt, Human
aauguuaaauuu

SEQ ID NO: 2852165 - RNA, 13 nt, Human
aauguuaaauuug

SEQ ID NO: 2852166 - RNA, 16 nt, Human
aauguuaaauuuguaa

SEQ ID NO: 2852167 - RNA, 17 nt, Human
aauguuaaauuuguaag

SEQ ID NO: 2852168 - RNA, 18 nt, Human
aauguuaaauuuguaagu

SEQ ID NO: 2852169 - RNA, 21 nt, Human
aauguuaaauuuguaaguuuc

SEQ ID NO: 2852170 - RNA, 22 nt, Human
aauguguucucggaguguguau

SEQ ID NO: 2852171 - RNA, 15 nt, Human
aauguguugaaacug

SEQ ID NO: 2852172 - RNA, 16 nt, Human
aauguguugaaacugc

SEQ ID NO: 2852173 - RNA, 14 nt, Human
aauguguuggacaa

SEQ ID NO: 2852174 - RNA, 19 nt, Human
aauguguuggacaaaugug

SEQ ID NO: 2852175 - RNA, 21 nt, Human
aauguguuggacaaaugugaa

SEQ ID NO: 2852176 - RNA, 23 nt, Human
aauguguuggacaaaugugaaga

SEQ ID NO: 2852177 - RNA, 19 nt, Human
aauguguucucggagugug

SEQ ID NO: 2852178 - RNA, 12 nt, Human
aauguguucucg

SEQ ID NO: 2852179 - RNA, 13 nt, Human
aauguguuucaaa

SEQ ID NO: 2852180 - RNA, 18 nt, Human
aauguguuucaaacugua

SEQ ID NO: 2852181 - RNA, 22 nt, Human
aauguguuuuagaguaagaaau

SEQ ID NO: 2852182 - RNA, 16 nt, Human
aauguguuuuucucca

SEQ ID NO: 2852183 - RNA, 22 nt, Human
aauguguuuuucuccagugcug

SEQ ID NO: 2852184 - RNA, 14 nt, Human
aaucuuacagcugg

SEQ ID NO: 2852185 - RNA, 18 nt, Human
aaucuuacagcugggugg

SEQ ID NO: 2852186 - RNA, 23 nt, Human
aaucuuacagcuggguggcacug

SEQ ID NO: 2852187 - RNA, 14 nt, Human
aaucuuacucuaga

SEQ ID NO: 2852188 - RNA, 11 nt, Human
aaucuguugcc

SEQ ID NO: 2852189 - RNA, 17 nt, Human
aaucugugugugcccug

SEQ ID NO: 2852190 - RNA, 12 nt, Human
aaucuguuaucc

SEQ ID NO: 2852191 - RNA, 14 nt, Human
aaucuguuauccca

SEQ ID NO: 2852192 - RNA, 20 nt, Human
aaucuguuauguacuagugu

SEQ ID NO: 2852193 - RNA, 23 nt, Human
aaucuguuauguacuaguguucu

SEQ ID NO: 2852194 - RNA, 19 nt, Human
aaucuguucugggcucuuu

SEQ ID NO: 2852195 - RNA, 17 nt, Human
aaucuguguauauuauu

SEQ ID NO: 2852196 - RNA, 18 nt, Human
aaucuguguauauuauuu

SEQ ID NO: 2852197 - RNA, 20 nt, Human
aaucuguguauauuauuugg

SEQ ID NO: 2852198 - RNA, 21 nt, Human
aaucuguguauauuauuuggc

SEQ ID NO: 2852199 - RNA, 23 nt, Human
aaucuguuuuuguuuauuucauu

SEQ ID NO: 2852200 - RNA, 15 nt, Human
aaucuuaaaaaguug

SEQ ID NO: 2852201 - RNA, 17 nt, Human
aaucuuaaaaaguuguu

SEQ ID NO: 2852202 - RNA, 21 nt, Human
aaucuuaaaaaguuguucaac

SEQ ID NO: 2852203 - RNA, 20 nt, Human
aaucuaauauuaaaaauaug

SEQ ID NO: 2852204 - RNA, 14 nt, Human
aaucuaauuuuuuc

SEQ ID NO: 2852205 - RNA, 16 nt, Human
aaucuaauauuaaaaa

SEQ ID NO: 2852206 - RNA, 17 nt, Human
aaucuaauauuaaaaau

SEQ ID NO: 2852207 - RNA, 19 nt, Human
aaucuaauauuaaaaauau

SEQ ID NO: 2852208 - RNA, 15 nt, Human
aaucuggagaccagg

SEQ ID NO: 2852209 - RNA, 14 nt, Human
aaucuggagaccag

SEQ ID NO: 2852210 - RNA, 16 nt, Human
aaucugggaagggaag

SEQ ID NO: 2852211 - RNA, 17 nt, Human
aaucugggccagaauuu

SEQ ID NO: 2852212 - RNA, 16 nt, Human
aaucugggccagaauu

SEQ ID NO: 2852213 - RNA, 18 nt, Human
aaucuaauauccccaaau

SEQ ID NO: 2852214 - RNA, 17 nt, Human
aaucgagacugcaaugu

SEQ ID NO: 2852215 - RNA, 19 nt, Human
aaucgagugagacaaaauu

SEQ ID NO: 2852216 - RNA, 20 nt, Human
aaucgagugagacaaaauuu

SEQ ID NO: 2852217 - RNA, 15 nt, Human
aaucgaccugccucg

SEQ ID NO: 2852218 - RNA, 23 nt, Human
aauccuuuguuuucugacuaauu

SEQ ID NO: 2852219 - RNA, 18 nt, Human
aauccuuuuccuguucau

SEQ ID NO: 2852220 - RNA, 12 nt, Human
aauccuuuugua

SEQ ID NO: 2852221 - RNA, 13 nt, Human
aauccuuuuguag

SEQ ID NO: 2852222 - RNA, 22 nt, Human
aauccuuuguuuucugacuaau

SEQ ID NO: 2852223 - RNA, 18 nt, Human
aauccuugcuuaugacau

SEQ ID NO: 2852224 - RNA, 16 nt, Human
aauccuggcagcccag

SEQ ID NO: 2852225 - RNA, 18 nt, Human
aauccuuuauuauuauuu

SEQ ID NO: 2852226 - RNA, 14 nt, Human
aauccuuugccugc

SEQ ID NO: 2852227 - RNA, 12 nt, Human
aauccugucuuu

SEQ ID NO: 2852228 - RNA, 16 nt, Human
aaucaugaaauuacuu

SEQ ID NO: 2852229 - RNA, 23 nt, Human
aaucccuuuauuacccccuccuu

SEQ ID NO: 2852230 - RNA, 19 nt, Human
aaucccuuuauuacccccu

SEQ ID NO: 2852231 - RNA, 17 nt, Human
aaucccuguuuaauauu

SEQ ID NO: 2852232 - RNA, 23 nt, Human
aaucccuguuuaauauuuaaaca

SEQ ID NO: 2852233 - RNA, 21 nt, Human
aauccgaccacuaauugccaa

SEQ ID NO: 2852234 - RNA, 13 nt, Human
aauccgcucucuu

SEQ ID NO: 2852235 - RNA, 14 nt, Human
aauccgcucucuuc

SEQ ID NO: 2852236 - RNA, 15 nt, Human
aauccgcucucuucc

SEQ ID NO: 2852237 - RNA, 17 nt, Human
aauccgcucucuuccug

SEQ ID NO: 2852238 - RNA, 18 nt, Human
aauccgcucucuuccugc

SEQ ID NO: 2852239 - RNA, 19 nt, Human
aauccgcucucuuccugcc

SEQ ID NO: 2852240 - RNA, 20 nt, Human
aauccgcucucuuccugccc

SEQ ID NO: 2852241 - RNA, 23 nt, Human
aauccgcucucuuccugccccuc

SEQ ID NO: 2852242 - RNA, 18 nt, Human
aauccguaguuauuuugc

SEQ ID NO: 2852243 - RNA, 20 nt, Human
uaaguaacuucacauuaaaa

SEQ ID NO: 2852244 - RNA, 13 nt, Human
uaaguaaaugcua

SEQ ID NO: 2852245 - RNA, 17 nt, Human
uaaggaaaaaaagacaa

SEQ ID NO: 2852246 - RNA, 21 nt, Human
uaagcuuuggacccaaggaaa

SEQ ID NO: 2852247 - RNA, 14 nt, Human
uaaguaaucaauaa

SEQ ID NO: 2852248 - RNA, 18 nt, Human
uaaguaaucaauaaagaa

SEQ ID NO: 2852249 - RNA, 20 nt, Human
uaaguaaucaauaaagaaaa

SEQ ID NO: 2852250 - RNA, 18 nt, Human
uaaguaccacucaggcca

SEQ ID NO: 2852251 - RNA, 19 nt, Human
uaaguacuacacauuuuua

SEQ ID NO: 2852252 - RNA, 17 nt, Human
uaaguauuaaaacauug

SEQ ID NO: 2852253 - RNA, 22 nt, Human
uaaguucauauuccauauuuau

SEQ ID NO: 2852254 - RNA, 18 nt, Human
uaaguauuaaaacauugg

SEQ ID NO: 2852255 - RNA, 19 nt, Human
uaaguauuaaaacauugga

SEQ ID NO: 2852256 - RNA, 19 nt, Human
aaucaugaaucuuuguuuc

SEQ ID NO: 2852257 - RNA, 17 nt, Human
aaucaugaaauaugcau

SEQ ID NO: 2852258 - RNA, 18 nt, Human
aaucaucugugugaaaau

SEQ ID NO: 2852259 - RNA, 16 nt, Human
aaucaugaaauaugca

SEQ ID NO: 2852260 - RNA, 13 nt, Human
aaucauaugugau

SEQ ID NO: 2852261 - RNA, 14 nt, Human
aaucauaugugauc

SEQ ID NO: 2852262 - RNA, 17 nt, Human
aaucauaugugaucugu

SEQ ID NO: 2852263 - RNA, 23 nt, Human
aaucauaugugaucugucuugua

SEQ ID NO: 2852264 - RNA, 14 nt, Human
aaucauauugauga

SEQ ID NO: 2852265 - RNA, 16 nt, Human
aaucauauugaugaaa

SEQ ID NO: 2852266 - RNA, 18 nt, Human
aaucauauugaugaaaag

SEQ ID NO: 2852267 - RNA, 19 nt, Human
aaucauauugaugaaaaga

SEQ ID NO: 2852268 - RNA, 15 nt, Human
uaauaaacuguguuu

SEQ ID NO: 2852269 - RNA, 14 nt, Human
uaauaaacuguguu

SEQ ID NO: 2852270 - RNA, 22 nt, Human
uaauaaacauccuucaagaacu

SEQ ID NO: 2852271 - RNA, 22 nt, Human
uaauaaaauguguugaaacugc

SEQ ID NO: 2852272 - RNA, 15 nt, Human
uaauaaacauaauga

SEQ ID NO: 2852273 - RNA, 19 nt, Human
uaauaaacauaaugaaaau

SEQ ID NO: 2852274 - RNA, 17 nt, Human
uaaguugaauggccugc

SEQ ID NO: 2852275 - RNA, 13 nt, Human
uaaguuguuugca

SEQ ID NO: 2852276 - RNA, 15 nt, Human
uaaguuguuugcaug

SEQ ID NO: 2852277 - RNA, 12 nt, Human
uaaucuuugggu

SEQ ID NO: 2852278 - RNA, 22 nt, Human
uaaucuuuggguaacuucaaaa

SEQ ID NO: 2852279 - RNA, 20 nt, Human
uaaugaaucguaaugaaguu

SEQ ID NO: 2852280 - RNA, 18 nt, Human
uaaugaaaaugaauaucu

SEQ ID NO: 2852281 - RNA, 21 nt, Human
uaaucccagcauuuugggaag

SEQ ID NO: 2852282 - RNA, 16 nt, Human
uaaucccagcacuuug

SEQ ID NO: 2852283 - RNA, 13 nt, Human
uaaucagaaauuu

SEQ ID NO: 2852284 - RNA, 15 nt, Human
uaaucagaaauuuuu

SEQ ID NO: 2852285 - RNA, 18 nt, Human
uaaucagaaauuuuuauc

SEQ ID NO: 2852286 - RNA, 20 nt, Human
uaaucagaaauuuuuaucag

SEQ ID NO: 2852287 - RNA, 11 nt, Human
uaaucagccuc

SEQ ID NO: 2852288 - RNA, 18 nt, Human
uaauccaggcacagcuga

SEQ ID NO: 2852289 - RNA, 19 nt, Human
uaauccaggcacagcugag

SEQ ID NO: 2852290 - RNA, 19 nt, Human
uaaucacuuaacauuccua

SEQ ID NO: 2852291 - RNA, 21 nt, Human
uaaucaaaagggaaaagaaga

SEQ ID NO: 2852292 - RNA, 18 nt, Human
uaaucaaagccagggucu

SEQ ID NO: 2852293 - RNA, 13 nt, Human
uaauauuuugcac

SEQ ID NO: 2852294 - RNA, 15 nt, Human
uaauauuuuguauua

SEQ ID NO: 2852295 - RNA, 16 nt, Human
uaauauuuuguauuau

SEQ ID NO: 2852296 - RNA, 20 nt, Human
uaauauuuuguauuauugcu

SEQ ID NO: 2852297 - RNA, 14 nt, Human
aaucuuauaguucu

SEQ ID NO: 2852298 - RNA, 15 nt, Human
aaucuuauaguucua

SEQ ID NO: 2852299 - RNA, 18 nt, Human
aaucuuauaguucuaggc

SEQ ID NO: 2852300 - RNA, 19 nt, Human
aaucuuauaguucuaggca

SEQ ID NO: 2852301 - RNA, 21 nt, Human
uaauagagcaaaauugaugug

SEQ ID NO: 2852302 - RNA, 12 nt, Human
uaauagagcaaa

SEQ ID NO: 2852303 - RNA, 12 nt, Human
uaauagauucuc

SEQ ID NO: 2852304 - RNA, 16 nt, Human
uaauauuuauauauuu

SEQ ID NO: 2852305 - RNA, 21 nt, Human
uaauauuuaugucuauuuaag

SEQ ID NO: 2852306 - RNA, 23 nt, Human
uaauauuuaugucuauuuaagcc

SEQ ID NO: 2852307 - RNA, 14 nt, Human
uaauauuugcugac

SEQ ID NO: 2852308 - RNA, 13 nt, Human
uaauauuuaacau

SEQ ID NO: 2852309 - RNA, 21 nt, Human
uaauauuuaacauuauuuaua

SEQ ID NO: 2852310 - RNA, 22 nt, Human
uaauagcggguuacuuucacau

SEQ ID NO: 2852311 - RNA, 19 nt, Human
uaauagcggguuacuuuca

SEQ ID NO: 2852312 - RNA, 20 nt, Human
uaauagcaacuuuuguguaa

SEQ ID NO: 2852313 - RNA, 22 nt, Human
uaauagauuuuuucagacuugu

SEQ ID NO: 2852314 - RNA, 23 nt, Human
uaauagauuuuuucagacuuguc

SEQ ID NO: 2852315 - RNA, 21 nt, Human
uaauagcaacuuuuguguaau

SEQ ID NO: 2852316 - RNA, 17 nt, Human
aaugaaugcauaaaaug

SEQ ID NO: 2852317 - RNA, 16 nt, Human
aaugaaugaggucugg

SEQ ID NO: 2852318 - RNA, 19 nt, Human
aaugaaugaggucugggcu

SEQ ID NO: 2852319 - RNA, 17 nt, Human
aaugaauuaaauaaacc

SEQ ID NO: 2852320 - RNA, 16 nt, Human
aaugaauuccuagaau

SEQ ID NO: 2852321 - RNA, 17 nt, Human
aaugaauuccuagaauu

SEQ ID NO: 2852322 - RNA, 21 nt, Human
aaugaauuccuagaauuaaac

SEQ ID NO: 2852323 - RNA, 13 nt, Human
aaugacaacagaa

SEQ ID NO: 2852324 - RNA, 14 nt, Human
aaugacaacagaag

SEQ ID NO: 2852325 - RNA, 15 nt, Human
aaugacaacagaagc

SEQ ID NO: 2852326 - RNA, 19 nt, Human
aaugaaacacucaguuguu

SEQ ID NO: 2852327 - RNA, 19 nt, Human
aaugaaacaaauaaucaca

SEQ ID NO: 2852328 - RNA, 20 nt, Human
aaugaaacaaauaaucacau

SEQ ID NO: 2852329 - RNA, 18 nt, Human
uaaugucacaggcagguc

SEQ ID NO: 2852330 - RNA, 13 nt, Human
uaaugucuucauu

SEQ ID NO: 2852331 - RNA, 17 nt, Human
uaaugucuucauuucau

SEQ ID NO: 2852332 - RNA, 14 nt, Human
uaaugucuucauaa

SEQ ID NO: 2852333 - RNA, 15 nt, Human
uaaugucuucauaaa

SEQ ID NO: 2852334 - RNA, 20 nt, Human
uaauguagcguguuuacaug

SEQ ID NO: 2852335 - RNA, 22 nt, Human
uaauguagcguguuuacaugug

SEQ ID NO: 2852336 - RNA, 23 nt, Human
uaauguagcguguuuacaugugu

SEQ ID NO: 2852337 - RNA, 18 nt, Human
uaauguaauaacugugaa

SEQ ID NO: 2852338 - RNA, 15 nt, Human
uaaugaaugcauaaa

SEQ ID NO: 2852339 - RNA, 15 nt, Human
uaauguacaucuggc

SEQ ID NO: 2852340 - RNA, 18 nt, Human
uaaugugugguggccuca

SEQ ID NO: 2852341 - RNA, 19 nt, Human
uaaugugugguggccucag

SEQ ID NO: 2852342 - RNA, 12 nt, Human
uaauguguguau

SEQ ID NO: 2852343 - RNA, 13 nt, Human
uaauguguguaug

SEQ ID NO: 2852344 - RNA, 14 nt, Human
uaauguguguaugu

SEQ ID NO: 2852345 - RNA, 15 nt, Human
uaauguguguaugug

SEQ ID NO: 2852346 - RNA, 16 nt, Human
uaauguguguaugugu

SEQ ID NO: 2852347 - RNA, 17 nt, Human
uaauguguguaugugua

SEQ ID NO: 2852348 - RNA, 18 nt, Human
uaauguguguauguguau

SEQ ID NO: 2852349 - RNA, 19 nt, Human
uaauguguguauguguauu

SEQ ID NO: 2852350 - RNA, 17 nt, Human
uaauguguuuuagagua

SEQ ID NO: 2852351 - RNA, 23 nt, Human
uaauguguuuuagaguaagaaau

SEQ ID NO: 2852352 - RNA, 13 nt, Human
uaauguuaaauuu

SEQ ID NO: 2852353 - RNA, 16 nt, Human
uaauguuaaauuugua

SEQ ID NO: 2852354 - RNA, 17 nt, Human
uaauguuaaauuuguaa

SEQ ID NO: 2852355 - RNA, 18 nt, Human
uaauguuaaauuuguaag

SEQ ID NO: 2852356 - RNA, 20 nt, Human
uaauguuaaauuuguaaguu

SEQ ID NO: 2852357 - RNA, 22 nt, Human
uaauguuaaauuuguaaguuuc

SEQ ID NO: 2852358 - RNA, 14 nt, Human
uaauguuaaccaag

SEQ ID NO: 2852359 - RNA, 17 nt, Human
uaauguuaaccaaggaa

SEQ ID NO: 2852360 - RNA, 19 nt, Human
uaaugucuucauuucauug

SEQ ID NO: 2852361 - RNA, 21 nt, Human
uaaugucuucauuucauugua

SEQ ID NO: 2852362 - RNA, 18 nt, Human
uaaugucccuuucagaga

SEQ ID NO: 2852363 - RNA, 13 nt, Human
uaaugugugaaaa

SEQ ID NO: 2852364 - RNA, 22 nt, Human
aauauuuauaaagaauguuucu

SEQ ID NO: 2852365 - RNA, 19 nt, Human
aauauuuauaaaugagcaa

SEQ ID NO: 2852366 - RNA, 17 nt, Human
aauauuguguugugaau

SEQ ID NO: 2852367 - RNA, 23 nt, Human
aauauugugaagaaaaauaaagu

SEQ ID NO: 2852368 - RNA, 10 nt, Human
aauauugugu

SEQ ID NO: 2852369 - RNA, 16 nt, Human
aauauuguguuccuuu

SEQ ID NO: 2852370 - RNA, 21 nt, Human
aauauuuaacauuauuuauau

SEQ ID NO: 2852371 - RNA, 19 nt, Human
aauauuuaaacagcagugu

SEQ ID NO: 2852372 - RNA, 17 nt, Human
aauauuuaaacagcagu

SEQ ID NO: 2852373 - RNA, 14 nt, Human
aauauugaggcuuu

SEQ ID NO: 2852374 - RNA, 16 nt, Human
aauauugaggcuuugu

SEQ ID NO: 2852375 - RNA, 17 nt, Human
aauauugaggcuuugug

SEQ ID NO: 2852376 - RNA, 18 nt, Human
aauauugaggcuuugugu

SEQ ID NO: 2852377 - RNA, 20 nt, Human
aauauugaggcuuuguguug

SEQ ID NO: 2852378 - RNA, 22 nt, Human
aauauugaggcuuuguguugua

SEQ ID NO: 2852379 - RNA, 12 nt, Human
aauauugacauu

SEQ ID NO: 2852380 - RNA, 15 nt, Human
aauauugacauuugu

SEQ ID NO: 2852381 - RNA, 16 nt, Human
aauauugacauuugua

SEQ ID NO: 2852382 - RNA, 20 nt, Human
aauauugacauuuguaguug

SEQ ID NO: 2852383 - RNA, 15 nt, Human
aauauugaacuuuuu

SEQ ID NO: 2852384 - RNA, 14 nt, Human
aauauugaaguacu

SEQ ID NO: 2852385 - RNA, 22 nt, Human
aauaugcagugauauggcagaa

SEQ ID NO: 2852386 - RNA, 23 nt, Human
aauaugccugcaaucugagccag

SEQ ID NO: 2852387 - RNA, 21 nt, Human
aauaugccuguaauucagugu

SEQ ID NO: 2852388 - RNA, 18 nt, Human
aauauucauauuggaaaa

SEQ ID NO: 2852389 - RNA, 20 nt, Human
aauauucauauuggaaaaau

SEQ ID NO: 2852390 - RNA, 23 nt, Human
aauauucauauuggaaaaaucac

SEQ ID NO: 2852391 - RNA, 13 nt, Human
aauauucccaagc

SEQ ID NO: 2852392 - RNA, 16 nt, Human
aauauucuauaugaau

SEQ ID NO: 2852393 - RNA, 20 nt, Human
aauauucuauaugaauuuaa

SEQ ID NO: 2852394 - RNA, 15 nt, Human
aauauuccugcauuu

SEQ ID NO: 2852395 - RNA, 13 nt, Human
uaagagaaagaaa

SEQ ID NO: 2852396 - RNA, 18 nt, Human
uaagagaaagaaaaugaa

SEQ ID NO: 2852397 - RNA, 12 nt, Human
uaagagaaaugg

SEQ ID NO: 2852398 - RNA, 15 nt, Human
uaagagaaauggcaa

SEQ ID NO: 2852399 - RNA, 15 nt, Human
uaagacuugugcaug

SEQ ID NO: 2852400 - RNA, 13 nt, Human
uaagagaaacuuu

SEQ ID NO: 2852401 - RNA, 14 nt, Human
uaagagaaacuuua

SEQ ID NO: 2852402 - RNA, 15 nt, Human
uaagagaaacuuuau

SEQ ID NO: 2852403 - RNA, 16 nt, Human
uaagagaaacuuuaua

SEQ ID NO: 2852404 - RNA, 20 nt, Human
uaagagaaacuuuauacauu

SEQ ID NO: 2852405 - RNA, 21 nt, Human
uaagagaaacuuuauacauua

SEQ ID NO: 2852406 - RNA, 22 nt, Human
uaagagaaacuuuauacauuag

SEQ ID NO: 2852407 - RNA, 23 nt, Human
uaagagaaacuuuauacauuagu

SEQ ID NO: 2852408 - RNA, 17 nt, Human
uaagacaugauuuccuu

SEQ ID NO: 2852409 - RNA, 22 nt, Human
uaagacauaacguuuuuccuuu

SEQ ID NO: 2852410 - RNA, 20 nt, Human
uaagacuuacucuaagaucu

SEQ ID NO: 2852411 - RNA, 20 nt, Human
uaagagacagaauguaucug

SEQ ID NO: 2852412 - RNA, 23 nt, Human
uaagagacagaauguaucuguga

SEQ ID NO: 2852413 - RNA, 19 nt, Human
aauauuuuuuauauauaca

SEQ ID NO: 2852414 - RNA, 21 nt, Human
aauauuuuuuauauauacagu

SEQ ID NO: 2852415 - RNA, 18 nt, Human
uaagaugggcagcuaguu

SEQ ID NO: 2852416 - RNA, 12 nt, Human
uaagaugucugu

SEQ ID NO: 2852417 - RNA, 19 nt, Human
uaagaugucuguuugcuga

SEQ ID NO: 2852418 - RNA, 14 nt, Human
uaagaugugauauu

SEQ ID NO: 2852419 - RNA, 18 nt, Human
uaagaugugauauucuaa

SEQ ID NO: 2852420 - RNA, 19 nt, Human
uaagaugugauauucuaag

SEQ ID NO: 2852421 - RNA, 20 nt, Human
uaagaugugauauucuaaga

SEQ ID NO: 2852422 - RNA, 21 nt, Human
uaagaugugauauucuaagac

SEQ ID NO: 2852423 - RNA, 14 nt, Human
uaagauuccagaga

SEQ ID NO: 2852424 - RNA, 22 nt, Human
uaagaugugauauucuaagacu

SEQ ID NO: 2852425 - RNA, 23 nt, Human
uaagaugugauauucuaagacuu

SEQ ID NO: 2852426 - RNA, 21 nt, Human
uaagauuccagagaguggcuc

SEQ ID NO: 2852427 - RNA, 10 nt, Human
uaagauucua

SEQ ID NO: 2852428 - RNA, 11 nt, Human
uaagauucuaa

SEQ ID NO: 2852429 - RNA, 12 nt, Human
uaagauucuaaa

SEQ ID NO: 2852430 - RNA, 13 nt, Human
uaagauucuaaag

SEQ ID NO: 2852431 - RNA, 14 nt, Human
uaagauucuaaagg

SEQ ID NO: 2852432 - RNA, 16 nt, Human
uaagauucuaaagguc

SEQ ID NO: 2852433 - RNA, 17 nt, Human
uaagauucuaaaggucc

SEQ ID NO: 2852434 - RNA, 12 nt, Human
uaagauucuaac

SEQ ID NO: 2852435 - RNA, 13 nt, Human
uaagauucuaacg

SEQ ID NO: 2852436 - RNA, 17 nt, Human
uaagauucuaacggucu

SEQ ID NO: 2852437 - RNA, 12 nt, Human
uaagauucuaau

SEQ ID NO: 2852438 - RNA, 16 nt, Human
aauauuuuuauauaca

SEQ ID NO: 2852439 - RNA, 18 nt, Human
aauauuuuuauauacaga

SEQ ID NO: 2852440 - RNA, 23 nt, Human
aauauuuuuauauacagaggaaa

SEQ ID NO: 2852441 - RNA, 23 nt, Human
aauauuuuugaaaggcauguucc

SEQ ID NO: 2852442 - RNA, 17 nt, Human
aauauuuuuuauauaua

SEQ ID NO: 2852443 - RNA, 14 nt, Human
aauauuuuuagaua

SEQ ID NO: 2852444 - RNA, 15 nt, Human
aauauuuuuaaaaga

SEQ ID NO: 2852445 - RNA, 21 nt, Human
aauauuuggucucuauuucau

SEQ ID NO: 2852446 - RNA, 12 nt, Human
aauauuugcuga

SEQ ID NO: 2852447 - RNA, 18 nt, Human
aauauuugacuauucugu

SEQ ID NO: 2852448 - RNA, 16 nt, Human
aauauuugacuugcau

SEQ ID NO: 2852449 - RNA, 21 nt, Human
aauauuugacuugcaugaaga

SEQ ID NO: 2852450 - RNA, 22 nt, Human
aauauuugacuugcaugaagag

SEQ ID NO: 2852451 - RNA, 23 nt, Human
aauauuugacuugcaugaagaga

SEQ ID NO: 2852452 - RNA, 14 nt, Human
aauauuuguacaua

SEQ ID NO: 2852453 - RNA, 12 nt, Human
aauauuuguaca

SEQ ID NO: 2852454 - RNA, 12 nt, Human
aauauuuuguau

SEQ ID NO: 2852455 - RNA, 15 nt, Human
aauauuuuguauuau

SEQ ID NO: 2852456 - RNA, 16 nt, Human
aauauuuuguauuauu

SEQ ID NO: 2852457 - RNA, 19 nt, Human
aauauuuuguauuauugcu

SEQ ID NO: 2852458 - RNA, 20 nt, Human
aauauuuuguauuauugcug

SEQ ID NO: 2852459 - RNA, 21 nt, Human
aauauuuuguauuauugcugu

SEQ ID NO: 2852460 - RNA, 22 nt, Human
aauauuuugauaauaauauugu

SEQ ID NO: 2852461 - RNA, 13 nt, Human
uaagcaaauuuca

SEQ ID NO: 2852462 - RNA, 16 nt, Human
uaagcaaauuucaaaa

SEQ ID NO: 2852463 - RNA, 18 nt, Human
uaagcaaauuucaaaaga

SEQ ID NO: 2852464 - RNA, 20 nt, Human
uaagcaaauuucaaaagaca

SEQ ID NO: 2852465 - RNA, 21 nt, Human
uaagcaaauuucaaaagacau

SEQ ID NO: 2852466 - RNA, 23 nt, Human
uaagcaaauuucaaaagacaugu

SEQ ID NO: 2852467 - RNA, 23 nt, Human
uaagcaaagggagcacuggguug

SEQ ID NO: 2852468 - RNA, 12 nt, Human
uaagcaaauacu

SEQ ID NO: 2852469 - RNA, 14 nt, Human
uaagcaaauacuua

SEQ ID NO: 2852470 - RNA, 16 nt, Human
uaagcaaauacuuagc

SEQ ID NO: 2852471 - RNA, 22 nt, Human
uaagcaaauacuuagcaaaaag

SEQ ID NO: 2852472 - RNA, 16 nt, Human
uaagauuuuucucaaa

SEQ ID NO: 2852473 - RNA, 18 nt, Human
uaagauuuuucucaaagu

SEQ ID NO: 2852474 - RNA, 20 nt, Human
uaagauuuuucucaaaguuu

SEQ ID NO: 2852475 - RNA, 21 nt, Human
uaagauuuuucucaaaguuuu

SEQ ID NO: 2852476 - RNA, 23 nt, Human
uaagcaaaaacaaaaagaaaaga

SEQ ID NO: 2852477 - RNA, 13 nt, Human
uaagauucugauu

SEQ ID NO: 2852478 - RNA, 14 nt, Human
uaagauucugauuu

SEQ ID NO: 2852479 - RNA, 17 nt, Human
uaagauucugauuuuag

SEQ ID NO: 2852480 - RNA, 13 nt, Human
uaagauucuaaug

SEQ ID NO: 2852481 - RNA, 14 nt, Human
uaagauucuaauga

SEQ ID NO: 2852482 - RNA, 15 nt, Human
uaagauucuaaugau

SEQ ID NO: 2852483 - RNA, 11 nt, Human
uaagauucuag

SEQ ID NO: 2852484 - RNA, 12 nt, Human
uaagauucuaga

SEQ ID NO: 2852485 - RNA, 13 nt, Human
uaagauucuagau

SEQ ID NO: 2852486 - RNA, 14 nt, Human
uaagauucuagauc

SEQ ID NO: 2852487 - RNA, 21 nt, Human
uaagauucuagaucagaugcu

SEQ ID NO: 2852488 - RNA, 15 nt, Human
uaagauuuuucucaa

SEQ ID NO: 2852489 - RNA, 12 nt, Human
uaagauuuuaca

SEQ ID NO: 2852490 - RNA, 14 nt, Human
uaagauuuuacaaa

SEQ ID NO: 2852491 - RNA, 16 nt, Human
uaagauuuuacaaaag

SEQ ID NO: 2852492 - RNA, 12 nt, Human
uaagcugcagcu

SEQ ID NO: 2852493 - RNA, 14 nt, Human
uaagcugcagcuuc

SEQ ID NO: 2852494 - RNA, 15 nt, Human
uaagcugcagcuucc

SEQ ID NO: 2852495 - RNA, 16 nt, Human
uaagcugcagcuuccu

SEQ ID NO: 2852496 - RNA, 18 nt, Human
uaagcugcagcuuccugu

SEQ ID NO: 2852497 - RNA, 14 nt, Human
uaagcaacaucuuu

SEQ ID NO: 2852498 - RNA, 18 nt, Human
uaagcugauccugcggag

SEQ ID NO: 2852499 - RNA, 13 nt, Human
uaagcacucuuaa

SEQ ID NO: 2852500 - RNA, 17 nt, Human
uaagcacucuuaaagca

SEQ ID NO: 2852501 - RNA, 18 nt, Human
uaagcacucuuaaagcaa

SEQ ID NO: 2852502 - RNA, 14 nt, Human
uaagcacugaaaaa

SEQ ID NO: 2852503 - RNA, 20 nt, Human
uaagcacugaaaaacaacaa

SEQ ID NO: 2852504 - RNA, 16 nt, Human
uaagcacuguuuuucc

SEQ ID NO: 2852505 - RNA, 17 nt, Human
uaagcacuguuuuucca

SEQ ID NO: 2852506 - RNA, 13 nt, Human
uaagcagagaagg

SEQ ID NO: 2852507 - RNA, 24 nt, Human
uaagcagagaagggcauaaaacag

SEQ ID NO: 2852508 - RNA, 15 nt, Human
uaagcagaaauccug

SEQ ID NO: 2852509 - RNA, 19 nt, Human
aauauauuuguguauuuaa

SEQ ID NO: 2852510 - RNA, 21 nt, Human
aauauauuuguguauuuaaca

SEQ ID NO: 2852511 - RNA, 24 nt, Human
aauauauuuguguauuuaacaggg

SEQ ID NO: 2852512 - RNA, 18 nt, Human
uaacaguucauguuugcu

SEQ ID NO: 2852513 - RNA, 14 nt, Human
uaacaguucauguu

SEQ ID NO: 2852514 - RNA, 22 nt, Human
aauaucauaucaucacauugag

SEQ ID NO: 2852515 - RNA, 21 nt, Human
uaacagugcagggcaaaauau

SEQ ID NO: 2852516 - RNA, 13 nt, Human
uaacauauuuacu

SEQ ID NO: 2852517 - RNA, 17 nt, Human
uaacauauguacauaaa

SEQ ID NO: 2852518 - RNA, 20 nt, Human
uaacauauguacauaaauug

SEQ ID NO: 2852519 - RNA, 20 nt, Human
uaacauauucuguaugaacu

SEQ ID NO: 2852520 - RNA, 14 nt, Human
uaacauauuuacua

SEQ ID NO: 2852521 - RNA, 22 nt, Human
uaacauauuuacuaagccacaa

SEQ ID NO: 2852522 - RNA, 23 nt, Human
uaacauauuuacuaagccacaag

SEQ ID NO: 2852523 - RNA, 14 nt, Human
uaacaucaaagauu

SEQ ID NO: 2852524 - RNA, 19 nt, Human
uaacaucacuauccaugca

SEQ ID NO: 2852525 - RNA, 20 nt, Human
uaacaucacuauccaugcac

SEQ ID NO: 2852526 - RNA, 21 nt, Human
uaacaucacuauccaugcacc

SEQ ID NO: 2852527 - RNA, 20 nt, Human
uaacaucauuuuguuuucca

SEQ ID NO: 2852528 - RNA, 16 nt, Human
uaacaucuucaacaug

SEQ ID NO: 2852529 - RNA, 13 nt, Human
uaaccugugucug

SEQ ID NO: 2852530 - RNA, 14 nt, Human
uaaccugugucugc

SEQ ID NO: 2852531 - RNA, 22 nt, Human
uaaccugugucugcgaaguccu

SEQ ID NO: 2852532 - RNA, 23 nt, Human
uaaccugugucugcgaaguccua

SEQ ID NO: 2852533 - RNA, 19 nt, Human
uaacauaguaaguucagca

SEQ ID NO: 2852534 - RNA, 11 nt, Human
uaacaugaaau

SEQ ID NO: 2852535 - RNA, 13 nt, Human
uaacaugaaauga

SEQ ID NO: 2852536 - RNA, 14 nt, Human
uaacaugaaaugau

SEQ ID NO: 2852537 - RNA, 15 nt, Human
uaacaugaaaugaua

SEQ ID NO: 2852538 - RNA, 18 nt, Human
uaacaugaaaugauagau

SEQ ID NO: 2852539 - RNA, 19 nt, Human
uaacaugaaaugauagauu

SEQ ID NO: 2852540 - RNA, 21 nt, Human
uaacaugaacacccuuagaaa

SEQ ID NO: 2852541 - RNA, 22 nt, Human
aauaguauuugagaguucuaaa

SEQ ID NO: 2852542 - RNA, 20 nt, Human
aauaguauuugagaguucua

SEQ ID NO: 2852543 - RNA, 15 nt, Human
uaaaauuuauuucau

SEQ ID NO: 2852544 - RNA, 17 nt, Human
uaaaauuuaaguaucuu

SEQ ID NO: 2852545 - RNA, 9 nt, Human
uaaaauuug

SEQ ID NO: 2852546 - RNA, 23 nt, Human
aauaguauuugagaguucuaaau

SEQ ID NO: 2852547 - RNA, 14 nt, Human
aauaguguccuaug

SEQ ID NO: 2852548 - RNA, 19 nt, Human
aauaguguccuaugcaaua

SEQ ID NO: 2852549 - RNA, 20 nt, Human
aauaguguccuaugcaauaa

SEQ ID NO: 2852550 - RNA, 21 nt, Human
aauaguguccuaugcaauaaa

SEQ ID NO: 2852551 - RNA, 22 nt, Human
aauaguguccuaugcaauaaaa

SEQ ID NO: 2852552 - RNA, 23 nt, Human
aauaguguccuaugcaauaaaau

SEQ ID NO: 2852553 - RNA, 13 nt, Human
aauaguuggcuag

SEQ ID NO: 2852554 - RNA, 12 nt, Human
uaaaauuugugg

SEQ ID NO: 2852555 - RNA, 13 nt, Human
aauauauuugugu

SEQ ID NO: 2852556 - RNA, 14 nt, Human
aauauauuugugua

SEQ ID NO: 2852557 - RNA, 14 nt, Human
aauaguuguugauu

SEQ ID NO: 2852558 - RNA, 18 nt, Human
aauaguuguccauauuuu

SEQ ID NO: 2852559 - RNA, 21 nt, Human
aauaguuguccauauuuucac

SEQ ID NO: 2852560 - RNA, 22 nt, Human
uaacuuugcuuucaugaccauc

SEQ ID NO: 2852561 - RNA, 22 nt, Human
uaacuuuagaagugcauuucug

SEQ ID NO: 2852562 - RNA, 14 nt, Human
uaagaauacagcuu

SEQ ID NO: 2852563 - RNA, 16 nt, Human
uaagaauacagcuuuc

SEQ ID NO: 2852564 - RNA, 14 nt, Human
uaagacacaaaugc

SEQ ID NO: 2852565 - RNA, 23 nt, Human
uaagacacaaaugcaugaacaag

SEQ ID NO: 2852566 - RNA, 19 nt, Human
uaagaauauguuuccuugu

SEQ ID NO: 2852567 - RNA, 21 nt, Human
uaagaauauguuuccuuguuu

SEQ ID NO: 2852568 - RNA, 12 nt, Human
uaagacauaacg

SEQ ID NO: 2852569 - RNA, 19 nt, Human
uaagacagucccaucaaaa

SEQ ID NO: 2852570 - RNA, 16 nt, Human
uaagacauaucucuaa

SEQ ID NO: 2852571 - RNA, 16 nt, Human
uaagacaugauuuccu

SEQ ID NO: 2852572 - RNA, 16 nt, Human
uaagacauaacguuuu

SEQ ID NO: 2852573 - RNA, 17 nt, Human
uaagacauaacguuuuu

SEQ ID NO: 2852574 - RNA, 20 nt, Human
uaagacauaacguuuuuccu

SEQ ID NO: 2852575 - RNA, 21 nt, Human
uaagacauaacguuuuuccuu

SEQ ID NO: 2852576 - RNA, 12 nt, Human
uaacuucuuucu

SEQ ID NO: 2852577 - RNA, 13 nt, Human
uaacuucuuucua

SEQ ID NO: 2852578 - RNA, 23 nt, Human
uaacuucuuucuauuugacuugu

SEQ ID NO: 2852579 - RNA, 22 nt, Human
uaacuugaaccuaugaagcaau

SEQ ID NO: 2852580 - RNA, 23 nt, Human
uaacuucuuauggaauugauuug

SEQ ID NO: 2852581 - RNA, 13 nt, Human
uaacuucaguccu

SEQ ID NO: 2852582 - RNA, 15 nt, Human
uaacuugcgcagaaa

SEQ ID NO: 2852583 - RNA, 12 nt, Human
uaacuugaugca

SEQ ID NO: 2852584 - RNA, 13 nt, Human
uaacuugaugcau

SEQ ID NO: 2852585 - RNA, 15 nt, Human
uaacuugaugcaugu

SEQ ID NO: 2852586 - RNA, 16 nt, Human
uaacuugaugcaugug

SEQ ID NO: 2852587 - RNA, 22 nt, Human
uaacuuuaauucucuuucaaag

SEQ ID NO: 2852588 - RNA, 14 nt, Human
uaacuuuaugugua

SEQ ID NO: 2852589 - RNA, 15 nt, Human
uaacuuuauguguaa

SEQ ID NO: 2852590 - RNA, 16 nt, Human
uaacuuuauguguaaa

SEQ ID NO: 2852591 - RNA, 18 nt, Human
uaacuuuauguguaaaua

SEQ ID NO: 2852592 - RNA, 15 nt, Human
uaacuuuauucuuga

SEQ ID NO: 2852593 - RNA, 18 nt, Human
uaacuuuauucuugaaag

SEQ ID NO: 2852594 - RNA, 20 nt, Human
uaacuuuauucuugaaagaa

SEQ ID NO: 2852595 - RNA, 23 nt, Human
uaacuuuauucuugaaagaagaa

SEQ ID NO: 2852596 - RNA, 17 nt, Human
uaaccuuauccugcauu

SEQ ID NO: 2852597 - RNA, 18 nt, Human
uaaccuuauccugcauug

SEQ ID NO: 2852598 - RNA, 21 nt, Human
uaaccuuauccugcauuguua

SEQ ID NO: 2852599 - RNA, 15 nt, Human
uaaccuugaaugcug

SEQ ID NO: 2852600 - RNA, 17 nt, Human
uaaccuugaaugcugcc

SEQ ID NO: 2852601 - RNA, 18 nt, Human
uaaccuugaaugcugcca

SEQ ID NO: 2852602 - RNA, 19 nt, Human
uaaccuugaaugcugccag

SEQ ID NO: 2852603 - RNA, 20 nt, Human
uaaccuugaaugcugccagu

SEQ ID NO: 2852604 - RNA, 22 nt, Human
uaaccuugaaugcugccagugu

SEQ ID NO: 2852605 - RNA, 11 nt, Human
uaacaugggcu

SEQ ID NO: 2852606 - RNA, 18 nt, Human
uaacaugggcucuucacu

SEQ ID NO: 2852607 - RNA, 21 nt, Human
uaacaugggcucuucacuagu

SEQ ID NO: 2852608 - RNA, 21 nt, Human
uaacuagacacagauaauaau

SEQ ID NO: 2852609 - RNA, 17 nt, Human
uaacuagacaccaaagu

SEQ ID NO: 2852610 - RNA, 18 nt, Human
uaacuagacaccaaaguu

SEQ ID NO: 2852611 - RNA, 20 nt, Human
uaacuagacaccaaaguucu

SEQ ID NO: 2852612 - RNA, 21 nt, Human
uaacuagacaccaaaguucua

SEQ ID NO: 2852613 - RNA, 22 nt, Human
uaacuagacaccaaaguucuaa

SEQ ID NO: 2852614 - RNA, 17 nt, Human
uaacuuaaaaauguaaa

SEQ ID NO: 2852615 - RNA, 19 nt, Human
uaacuuaaaaauguaaaua

SEQ ID NO: 2852616 - RNA, 15 nt, Human
uaacuguuuauaugu

SEQ ID NO: 2852617 - RNA, 19 nt, Human
uaacuguuuauauguguug

SEQ ID NO: 2852618 - RNA, 22 nt, Human
uaacuguuuauauguguugaaa

SEQ ID NO: 2852619 - RNA, 23 nt, Human
uaacuuaaaaauguaaauauucu

SEQ ID NO: 2852620 - RNA, 20 nt, Human
uaacuuaaaaauguaaauau

SEQ ID NO: 2852621 - RNA, 21 nt, Human
uaacuuaaaaauguaaauauu

SEQ ID NO: 2852622 - RNA, 18 nt, Human
uaacuucacauuaaaaaa

SEQ ID NO: 2852623 - RNA, 22 nt, Human
uaacuucacauuaaaaaaugaa

SEQ ID NO: 2852624 - RNA, 14 nt, Human
accagucacaugac

SEQ ID NO: 2852625 - RNA, 19 nt, Human
accagucuuuaaaggccca

SEQ ID NO: 2852626 - RNA, 20 nt, Human
accagucuuuaaaggcccag

SEQ ID NO: 2852627 - RNA, 21 nt, Human
accagucuuuaaaggcccagc

SEQ ID NO: 2852628 - RNA, 22 nt, Human
accagucuuuaaaggcccagcc

SEQ ID NO: 2852629 - RNA, 23 nt, Human
accagucuuuaaaggcccagccc

SEQ ID NO: 2852630 - RNA, 13 nt, Human
accagucccuguc

SEQ ID NO: 2852631 - RNA, 12 nt, Human
accagucccugu

SEQ ID NO: 2852632 - RNA, 13 nt, Human
accaguguccccu

SEQ ID NO: 2852633 - RNA, 18 nt, Human
accaguguccccuccacu

SEQ ID NO: 2852634 - RNA, 14 nt, Human
ucacuugaugauac

SEQ ID NO: 2852635 - RNA, 20 nt, Human
ucacuugaugauacaaugaa

SEQ ID NO: 2852636 - RNA, 20 nt, Human
accaguaggggcuuauaaua

SEQ ID NO: 2852637 - RNA, 14 nt, Human
ucacugcagccuca

SEQ ID NO: 2852638 - RNA, 20 nt, Human
ucacuagugaccccuucccu

SEQ ID NO: 2852639 - RNA, 22 nt, Human
ucacuagugaccccuucccugu

SEQ ID NO: 2852640 - RNA, 19 nt, Human
ucacuaucccggcugcccu

SEQ ID NO: 2852641 - RNA, 14 nt, Human
ucacuauccaugca

SEQ ID NO: 2852642 - RNA, 20 nt, Human
ucacuaucccggcugcccuu

SEQ ID NO: 2852643 - RNA, 13 nt, Human
ucacugcagccuc

SEQ ID NO: 2852644 - RNA, 15 nt, Human
ucacugcagccucaa

SEQ ID NO: 2852645 - RNA, 19 nt, Human
ucacuguugcccaggcugg

SEQ ID NO: 2852646 - RNA, 17 nt, Human
ucacugugucacccagg

SEQ ID NO: 2852647 - RNA, 22 nt, Human
ucacuguuagcuuuuuaaaaca

SEQ ID NO: 2852648 - RNA, 23 nt, Human
ucacuguuagcuuuuuaaaacau

SEQ ID NO: 2852649 - RNA, 23 nt, Human
ucacuguugcccaggcuggcgug

SEQ ID NO: 2852650 - RNA, 15 nt, Human
ucacuguguacauaa

SEQ ID NO: 2852651 - RNA, 16 nt, Human
ucacuguguacauaau

SEQ ID NO: 2852652 - RNA, 17 nt, Human
ucacuguguacauaaug

SEQ ID NO: 2852653 - RNA, 20 nt, Human
ucacugugguaaaugccaca

SEQ ID NO: 2852654 - RNA, 21 nt, Human
ucacugugguaaaugccacac

SEQ ID NO: 2852655 - RNA, 22 nt, Human
ucacugugguaaaugccacaca

SEQ ID NO: 2852656 - RNA, 12 nt, Human
ucacuguggcug

SEQ ID NO: 2852657 - RNA, 15 nt, Human
ucacuguggcugucu

SEQ ID NO: 2852658 - RNA, 18 nt, Human
ucacuguggcugucugga

SEQ ID NO: 2852659 - RNA, 15 nt, Human
accaggacucccucc

SEQ ID NO: 2852660 - RNA, 14 nt, Human
accaggacucccuc

SEQ ID NO: 2852661 - RNA, 22 nt, Human
ucaccuggggcugcuggccuga

SEQ ID NO: 2852662 - RNA, 16 nt, Human
ucaccuggggcugcug

SEQ ID NO: 2852663 - RNA, 17 nt, Human
ucaccuggggcugcugg

SEQ ID NO: 2852664 - RNA, 18 nt, Human
ucaccuggggcugcuggc

SEQ ID NO: 2852665 - RNA, 20 nt, Human
ucaccuggggcugcuggccu

SEQ ID NO: 2852666 - RNA, 16 nt, Human
ucacguguacuggcuc

SEQ ID NO: 2852667 - RNA, 17 nt, Human
ucacguguacuggcucc

SEQ ID NO: 2852668 - RNA, 18 nt, Human
ucacguguacuggcuccu

SEQ ID NO: 2852669 - RNA, 17 nt, Human
ucacguguaguguccau

SEQ ID NO: 2852670 - RNA, 21 nt, Human
ucacguggaggagcagugcag

SEQ ID NO: 2852671 - RNA, 16 nt, Human
ucacguggaggagcag

SEQ ID NO: 2852672 - RNA, 17 nt, Human
ucacguacugucugauu

SEQ ID NO: 2852673 - RNA, 17 nt, Human
ucacgugcagcucaagg

SEQ ID NO: 2852674 - RNA, 16 nt, Human
ucacgugcgcugggca

SEQ ID NO: 2852675 - RNA, 17 nt, Human
ucacgugcgcugggcac

SEQ ID NO: 2852676 - RNA, 22 nt, Human
ucacgugcgcugggcacuuccc

SEQ ID NO: 2852677 - RNA, 23 nt, Human
ucacgugcgcugggcacuucccu

SEQ ID NO: 2852678 - RNA, 15 nt, Human
ucacuaauacacagu

SEQ ID NO: 2852679 - RNA, 19 nt, Human
ucacuaauacuaauucauu

SEQ ID NO: 2852680 - RNA, 13 nt, Human
ucacuaaacuuua

SEQ ID NO: 2852681 - RNA, 19 nt, Human
ucacuacccuauucucucu

SEQ ID NO: 2852682 - RNA, 16 nt, Human
ucacuaggcuucuggu

SEQ ID NO: 2852683 - RNA, 20 nt, Human
accacuagaacucuccaucu

SEQ ID NO: 2852684 - RNA, 13 nt, Human
accacuagaacuc

SEQ ID NO: 2852685 - RNA, 17 nt, Human
accacuaggacucugag

SEQ ID NO: 2852686 - RNA, 14 nt, Human
accacuauaaaaug

SEQ ID NO: 2852687 - RNA, 15 nt, Human
accacuauaaaaugu

SEQ ID NO: 2852688 - RNA, 16 nt, Human
accagcuacccugugu

SEQ ID NO: 2852689 - RNA, 19 nt, Human
accagcgcucuaaaagcac

SEQ ID NO: 2852690 - RNA, 21 nt, Human
accagcguauauauaagaaag

SEQ ID NO: 2852691 - RNA, 23 nt, Human
accagcguauauauaagaaagac

SEQ ID NO: 2852692 - RNA, 21 nt, Human
accaggaaaggauuuuauaau

SEQ ID NO: 2852693 - RNA, 13 nt, Human
accagcuuuuaac

SEQ ID NO: 2852694 - RNA, 15 nt, Human
accagcuuuuaacca

SEQ ID NO: 2852695 - RNA, 19 nt, Human
accagcuuuuaaccaucug

SEQ ID NO: 2852696 - RNA, 19 nt, Human
accaggaaaggauuuuaua

SEQ ID NO: 2852697 - RNA, 18 nt, Human
accagcuugcgaauaaca

SEQ ID NO: 2852698 - RNA, 21 nt, Human
accagcuuguaugcaauggau

SEQ ID NO: 2852699 - RNA, 22 nt, Human
accagcuuguaugcaauggauu

SEQ ID NO: 2852700 - RNA, 17 nt, Human
accagcugcugcucuga

SEQ ID NO: 2852701 - RNA, 16 nt, Human
accagcuuagauuuua

SEQ ID NO: 2852702 - RNA, 17 nt, Human
accagcuguaacacagc

SEQ ID NO: 2852703 - RNA, 22 nt, Human
accagcucugccgucucuggag

SEQ ID NO: 2852704 - RNA, 21 nt, Human
ucacaaacuuuuauacucuuu

SEQ ID NO: 2852705 - RNA, 18 nt, Human
ucacaaagaguucuggaa

SEQ ID NO: 2852706 - RNA, 22 nt, Human
ucacaaaauuuuauuccuauau

SEQ ID NO: 2852707 - RNA, 17 nt, Human
ucacaaacuuuuauacu

SEQ ID NO: 2852708 - RNA, 15 nt, Human
ucacaaacuuuuaua

SEQ ID NO: 2852709 - RNA, 14 nt, Human
ucacaaaauuuuau

SEQ ID NO: 2852710 - RNA, 16 nt, Human
ucacaaaaauuugaac

SEQ ID NO: 2852711 - RNA, 20 nt, Human
ucacaaaaauuugaacacug

SEQ ID NO: 2852712 - RNA, 21 nt, Human
ucacaaaaauuugaacacugg

SEQ ID NO: 2852713 - RNA, 23 nt, Human
ucacaaaaauuugaacacuggcu

SEQ ID NO: 2852714 - RNA, 16 nt, Human
ucacaaaacagccuuu

SEQ ID NO: 2852715 - RNA, 22 nt, Human
ucacaaaacagccuuugggaaa

SEQ ID NO: 2852716 - RNA, 13 nt, Human
ucaauuucaggcu

SEQ ID NO: 2852717 - RNA, 19 nt, Human
accaaagcugcccacuguu

SEQ ID NO: 2852718 - RNA, 21 nt, Human
accaaagggagaguuccagag

SEQ ID NO: 2852719 - RNA, 21 nt, Human
accaaaguccuuuuuuuccau

SEQ ID NO: 2852720 - RNA, 11 nt, Human
accaaaguucu

SEQ ID NO: 2852721 - RNA, 17 nt, Human
accaaaggacauuaugu

SEQ ID NO: 2852722 - RNA, 19 nt, Human
accaaaggacauuaugugu

SEQ ID NO: 2852723 - RNA, 20 nt, Human
accaaaggacauuaugugug

SEQ ID NO: 2852724 - RNA, 21 nt, Human
accaaaggacauuaugugugc

SEQ ID NO: 2852725 - RNA, 18 nt, Human
accaaagcugcccacugu

SEQ ID NO: 2852726 - RNA, 14 nt, Human
accaaagcugccca

SEQ ID NO: 2852727 - RNA, 13 nt, Human
accaaagcugccc

SEQ ID NO: 2852728 - RNA, 12 nt, Human
accaaagcugcc

SEQ ID NO: 2852729 - RNA, 14 nt, Human
accaaagccaccag

SEQ ID NO: 2852730 - RNA, 20 nt, Human
accaaagcaccuuagcuggc

SEQ ID NO: 2852731 - RNA, 12 nt, Human
accaaagccacc

SEQ ID NO: 2852732 - RNA, 20 nt, Human
ucacacugguucucaaugaa

SEQ ID NO: 2852733 - RNA, 19 nt, Human
ucacacugguucucaauga

SEQ ID NO: 2852734 - RNA, 20 nt, Human
ucacacuuacuguaagacau

SEQ ID NO: 2852735 - RNA, 21 nt, Human
ucacacuuacuguaagacauu

SEQ ID NO: 2852736 - RNA, 22 nt, Human
ucacacuuacuguaagacauua

SEQ ID NO: 2852737 - RNA, 23 nt, Human
ucacacuuacuguaagacauuag

SEQ ID NO: 2852738 - RNA, 16 nt, Human
ucacacuucugugaga

SEQ ID NO: 2852739 - RNA, 21 nt, Human
ucacacugguucucaaugaaa

SEQ ID NO: 2852740 - RNA, 17 nt, Human
ucacacugguucucaau

SEQ ID NO: 2852741 - RNA, 16 nt, Human
ucacacugguucucaa

SEQ ID NO: 2852742 - RNA, 15 nt, Human
ucacacugguucuca

SEQ ID NO: 2852743 - RNA, 16 nt, Human
ucacacuggcuaucaa

SEQ ID NO: 2852744 - RNA, 14 nt, Human
ucacaaccuucugu

SEQ ID NO: 2852745 - RNA, 13 nt, Human
ucaauuuuaaaga

SEQ ID NO: 2852746 - RNA, 19 nt, Human
ucacaaccaccguuacaag

SEQ ID NO: 2852747 - RNA, 13 nt, Human
ucacagccucuga

SEQ ID NO: 2852748 - RNA, 11 nt, Human
ucacagccucu

SEQ ID NO: 2852749 - RNA, 12 nt, Human
ucacagccucug

SEQ ID NO: 2852750 - RNA, 16 nt, Human
ucacagccucugaccc

SEQ ID NO: 2852751 - RNA, 17 nt, Human
ucacagccucugacccc

SEQ ID NO: 2852752 - RNA, 18 nt, Human
ucacagccucugaccccu

SEQ ID NO: 2852753 - RNA, 19 nt, Human
ucacagccucugaccccuc

SEQ ID NO: 2852754 - RNA, 20 nt, Human
ucacagccucugaccccucc

SEQ ID NO: 2852755 - RNA, 21 nt, Human
ucacagccucugaccccuccu

SEQ ID NO: 2852756 - RNA, 17 nt, Human
ucacagcacaugcuggc

SEQ ID NO: 2852757 - RNA, 19 nt, Human
ucacagcacaugcuggcca

SEQ ID NO: 2852758 - RNA, 20 nt, Human
ucacagcacaugcuggccag

SEQ ID NO: 2852759 - RNA, 21 nt, Human
ucacagcacaugcuggccagc

SEQ ID NO: 2852760 - RNA, 13 nt, Human
ucacagcagccuc

SEQ ID NO: 2852761 - RNA, 14 nt, Human
ucacagcagccucc

SEQ ID NO: 2852762 - RNA, 17 nt, Human
ucacagcagccuccaac

SEQ ID NO: 2852763 - RNA, 13 nt, Human
ucacagccuccuc

SEQ ID NO: 2852764 - RNA, 14 nt, Human
ucacagccuccucu

SEQ ID NO: 2852765 - RNA, 15 nt, Human
ucacagccuccucug

SEQ ID NO: 2852766 - RNA, 17 nt, Human
ucacagccuccucuguc

SEQ ID NO: 2852767 - RNA, 19 nt, Human
ucacagccuccucugucug

SEQ ID NO: 2852768 - RNA, 20 nt, Human
ucacagccuccucugucugc

SEQ ID NO: 2852769 - RNA, 22 nt, Human
ucacagccuccucugucugccc

SEQ ID NO: 2852770 - RNA, 23 nt, Human
ucacagaugugugauucacagug

SEQ ID NO: 2852771 - RNA, 23 nt, Human
ucacacuucugugagacccccac

SEQ ID NO: 2852772 - RNA, 22 nt, Human
ucacacuucugugagaccccca

SEQ ID NO: 2852773 - RNA, 21 nt, Human
ucacagaugugugauucacag

SEQ ID NO: 2852774 - RNA, 17 nt, Human
ucacauagagugaucuu

SEQ ID NO: 2852775 - RNA, 13 nt, Human
ucaccauguauuu

SEQ ID NO: 2852776 - RNA, 19 nt, Human
ucaccauguauuuuguaaa

SEQ ID NO: 2852777 - RNA, 15 nt, Human
ucaccauguuggcca

SEQ ID NO: 2852778 - RNA, 14 nt, Human
ucaccaucugugca

SEQ ID NO: 2852779 - RNA, 17 nt, Human
ucacauagcuacccaaa

SEQ ID NO: 2852780 - RNA, 21 nt, Human
ucacauagcuacccaaaagag

SEQ ID NO: 2852781 - RNA, 22 nt, Human
ucacagccucugaccccuccuc

SEQ ID NO: 2852782 - RNA, 13 nt, Human
ucacaguugacaa

SEQ ID NO: 2852783 - RNA, 17 nt, Human
ucacaguuggccuucag

SEQ ID NO: 2852784 - RNA, 22 nt, Human
ucacaguuggcuggaugaaauu

SEQ ID NO: 2852785 - RNA, 13 nt, Human
ucacauaaaugca

SEQ ID NO: 2852786 - RNA, 17 nt, Human
ucacauaaaugcagccc

SEQ ID NO: 2852787 - RNA, 18 nt, Human
ucacauaaaugcagccca

SEQ ID NO: 2852788 - RNA, 19 nt, Human
ucacauaaaugcagcccau

SEQ ID NO: 2852789 - RNA, 17 nt, Human
ucacauaaaaccucauu

SEQ ID NO: 2852790 - RNA, 13 nt, Human
ucaccccccacuc

SEQ ID NO: 2852791 - RNA, 14 nt, Human
ucaccccccacuca

SEQ ID NO: 2852792 - RNA, 18 nt, Human
ucaccccccacucaccag

SEQ ID NO: 2852793 - RNA, 14 nt, Human
ucacccccugagau

SEQ ID NO: 2852794 - RNA, 13 nt, Human
ucaccccauccca

SEQ ID NO: 2852795 - RNA, 13 nt, Human
ucacccccagcuu

SEQ ID NO: 2852796 - RNA, 18 nt, Human
ucacccccagcuuugcua

SEQ ID NO: 2852797 - RNA, 19 nt, Human
ucaccccaucccacacccu

SEQ ID NO: 2852798 - RNA, 22 nt, Human
ucaccauguuggccaggcuggu

SEQ ID NO: 2852799 - RNA, 21 nt, Human
ucaccauguuggccaggcugg

SEQ ID NO: 2852800 - RNA, 21 nt, Human
ucaccaugauggccaggcuga

SEQ ID NO: 2852801 - RNA, 14 nt, Human
ucaccaugaugggg

SEQ ID NO: 2852802 - RNA, 19 nt, Human
ucaccaugauggggcccua

SEQ ID NO: 2852803 - RNA, 16 nt, Human
ucaccaugcuuccagc

SEQ ID NO: 2852804 - RNA, 19 nt, Human
ucacccaagagauuguugu

SEQ ID NO: 2852805 - RNA, 20 nt, Human
accaccacacccagcccacu

SEQ ID NO: 2852806 - RNA, 15 nt, Human
accaccacacccagc

SEQ ID NO: 2852807 - RNA, 16 nt, Human
accaccacacccggcu

SEQ ID NO: 2852808 - RNA, 16 nt, Human
accacaucuugcucug

SEQ ID NO: 2852809 - RNA, 22 nt, Human
accacagguucaugccaccaug

SEQ ID NO: 2852810 - RNA, 20 nt, Human
accacaugccaagcacugug

SEQ ID NO: 2852811 - RNA, 22 nt, Human
accacaugccaagcacugugcu

SEQ ID NO: 2852812 - RNA, 18 nt, Human
accacaugugcacaugca

SEQ ID NO: 2852813 - RNA, 18 nt, Human
accacaugcggagaacaa

SEQ ID NO: 2852814 - RNA, 19 nt, Human
accacaucuugcucugcug

SEQ ID NO: 2852815 - RNA, 18 nt, Human
accacaucuugcucugcu

SEQ ID NO: 2852816 - RNA, 17 nt, Human
accacaucuugcucugc

SEQ ID NO: 2852817 - RNA, 16 nt, Human
accacaggugugagcc

SEQ ID NO: 2852818 - RNA, 16 nt, Human
ucaccccgaggcccug

SEQ ID NO: 2852819 - RNA, 17 nt, Human
ucaccccgaggcccugc

SEQ ID NO: 2852820 - RNA, 18 nt, Human
ucaccccgaggcccugca

SEQ ID NO: 2852821 - RNA, 19 nt, Human
ucaccccgaggcccugcau

SEQ ID NO: 2852822 - RNA, 20 nt, Human
ucaccccgaggcccugcaug

SEQ ID NO: 2852823 - RNA, 21 nt, Human
ucaccccgcuguaagcuccuu

SEQ ID NO: 2852824 - RNA, 23 nt, Human
ucaccccgcuguaagcuccuuug

SEQ ID NO: 2852825 - RNA, 15 nt, Human
ucaccccggcaggcc

SEQ ID NO: 2852826 - RNA, 16 nt, Human
ucaccccggcaggccc

SEQ ID NO: 2852827 - RNA, 12 nt, Human
accacagcugcu

SEQ ID NO: 2852828 - RNA, 13 nt, Human
accacagcugcug

SEQ ID NO: 2852829 - RNA, 14 nt, Human
accacagcugcugg

SEQ ID NO: 2852830 - RNA, 15 nt, Human
accacagcugcugga

SEQ ID NO: 2852831 - RNA, 16 nt, Human
accacagcugcuggag

SEQ ID NO: 2852832 - RNA, 22 nt, Human
accacaggaauuuuaaaaacaa

SEQ ID NO: 2852833 - RNA, 13 nt, Human
ucaauaugcuuac

SEQ ID NO: 2852834 - RNA, 13 nt, Human
ucaauauugacau

SEQ ID NO: 2852835 - RNA, 16 nt, Human
ucaauauugacauuug

SEQ ID NO: 2852836 - RNA, 17 nt, Human
ucaauauugacauuugu

SEQ ID NO: 2852837 - RNA, 18 nt, Human
ucaauauugacauuugua

SEQ ID NO: 2852838 - RNA, 19 nt, Human
ucaauauugacauuuguag

SEQ ID NO: 2852839 - RNA, 18 nt, Human
ucaauauccaaaccaaau

SEQ ID NO: 2852840 - RNA, 13 nt, Human
ucaauaucuaaua

SEQ ID NO: 2852841 - RNA, 15 nt, Human
ucaauaucuaauaua

SEQ ID NO: 2852842 - RNA, 19 nt, Human
ucaauaucuaauauauaug

SEQ ID NO: 2852843 - RNA, 21 nt, Human
ucaauaucuaauauauaugaa

SEQ ID NO: 2852844 - RNA, 13 nt, Human
ucaauaguguccu

SEQ ID NO: 2852845 - RNA, 19 nt, Human
ucaauaguguccuaugcaa

SEQ ID NO: 2852846 - RNA, 20 nt, Human
ucaauaguguccuaugcaau

SEQ ID NO: 2852847 - RNA, 21 nt, Human
ucaauaguguccuaugcaaua

SEQ ID NO: 2852848 - RNA, 14 nt, Human
ucaauaguucaagg

SEQ ID NO: 2852849 - RNA, 17 nt, Human
ucaauaguucaaggaac

SEQ ID NO: 2852850 - RNA, 18 nt, Human
ucaauaguucaaggaacu

SEQ ID NO: 2852851 - RNA, 17 nt, Human
ucaagaaaacaacuuca

SEQ ID NO: 2852852 - RNA, 22 nt, Human
ucaaguccucuuuucugagagg

SEQ ID NO: 2852853 - RNA, 19 nt, Human
ucaagucucugcuggccca

SEQ ID NO: 2852854 - RNA, 17 nt, Human
ucaagucucugcuggcc

SEQ ID NO: 2852855 - RNA, 16 nt, Human
ucaagucucugcuggc

SEQ ID NO: 2852856 - RNA, 14 nt, Human
ucaagucucugcug

SEQ ID NO: 2852857 - RNA, 12 nt, Human
ucaacuuaacau

SEQ ID NO: 2852858 - RNA, 13 nt, Human
ucaacuuaacaug

SEQ ID NO: 2852859 - RNA, 19 nt, Human
ucaacuugcauccaacucc

SEQ ID NO: 2852860 - RNA, 23 nt, Human
ucaacuuucuguuggauuccaug

SEQ ID NO: 2852861 - RNA, 16 nt, Human
ucaagaaaaaauaaau

SEQ ID NO: 2852862 - RNA, 18 nt, Human
ucaagaaaaaauaaaugg

SEQ ID NO: 2852863 - RNA, 23 nt, Human
ucaagaaaaaauaaauggaaauc

SEQ ID NO: 2852864 - RNA, 22 nt, Human
ucaaugaaaaauagugucuuug

SEQ ID NO: 2852865 - RNA, 15 nt, Human
ucaaugaagccagcu

SEQ ID NO: 2852866 - RNA, 16 nt, Human
ucaaugaagccagcuc

SEQ ID NO: 2852867 - RNA, 21 nt, Human
ucaaugaagccagcucacagu

SEQ ID NO: 2852868 - RNA, 15 nt, Human
ucaaugaauauugaa

SEQ ID NO: 2852869 - RNA, 19 nt, Human
acauucuuccaaaaagauu

SEQ ID NO: 2852870 - RNA, 11 nt, Human
acauucuugua

SEQ ID NO: 2852871 - RNA, 19 nt, Human
acauucuuuuaacuucuuu

SEQ ID NO: 2852872 - RNA, 20 nt, Human
acauucuuuuaacuucuuuc

SEQ ID NO: 2852873 - RNA, 21 nt, Human
acauucuuuuaacuucuuucu

SEQ ID NO: 2852874 - RNA, 14 nt, Human
ucaauccucuaagc

SEQ ID NO: 2852875 - RNA, 18 nt, Human
ucaaucucaauccugcag

SEQ ID NO: 2852876 - RNA, 20 nt, Human
ucaaucucccgcugcugcug

SEQ ID NO: 2852877 - RNA, 18 nt, Human
ucaaucucccgcugcugc

SEQ ID NO: 2852878 - RNA, 13 nt, Human
accaaagaugcag

SEQ ID NO: 2852879 - RNA, 16 nt, Human
accaaaaugacaucuu

SEQ ID NO: 2852880 - RNA, 22 nt, Human
accaaaaugacaucuuuuuaaa

SEQ ID NO: 2852881 - RNA, 21 nt, Human
accaaaaugauacuuacugaa

SEQ ID NO: 2852882 - RNA, 13 nt, Human
accaaacaauuau

SEQ ID NO: 2852883 - RNA, 14 nt, Human
accaaacaauuauu

SEQ ID NO: 2852884 - RNA, 16 nt, Human
accaaacaauuauuua

SEQ ID NO: 2852885 - RNA, 21 nt, Human
accaaacagcaaaccaagaga

SEQ ID NO: 2852886 - RNA, 12 nt, Human
accaaaacugug

SEQ ID NO: 2852887 - RNA, 15 nt, Human
accaaaagaacaaga

SEQ ID NO: 2852888 - RNA, 17 nt, Human
accaaaacugugcagag

SEQ ID NO: 2852889 - RNA, 18 nt, Human
accaaaacugugcagagu

SEQ ID NO: 2852890 - RNA, 17 nt, Human
accaaaagaauuugcac

SEQ ID NO: 2852891 - RNA, 12 nt, Human
acauuuuuuaaa

SEQ ID NO: 2852892 - RNA, 22 nt, Human
acauuuucagaaauauucauga

SEQ ID NO: 2852893 - RNA, 14 nt, Human
acauuuucagccaa

SEQ ID NO: 2852894 - RNA, 14 nt, Human
acauuguugagcua

SEQ ID NO: 2852895 - RNA, 12 nt, Human
acauuuugagaa

SEQ ID NO: 2852896 - RNA, 15 nt, Human
acauuuugagaacaa

SEQ ID NO: 2852897 - RNA, 19 nt, Human
acauuuugagaacaaagau

SEQ ID NO: 2852898 - RNA, 17 nt, Human
acauugacgauuccuuc

SEQ ID NO: 2852899 - RNA, 19 nt, Human
acauugacgauuccuucuc

SEQ ID NO: 2852900 - RNA, 20 nt, Human
acauugacgauuccuucucu

SEQ ID NO: 2852901 - RNA, 22 nt, Human
acauugacgauuccuucucuga

SEQ ID NO: 2852902 - RNA, 16 nt, Human
acauugagcugauaua

SEQ ID NO: 2852903 - RNA, 20 nt, Human
acauugagcugauauaaauu

SEQ ID NO: 2852904 - RNA, 23 nt, Human
acauugagcugauauaaauucug

SEQ ID NO: 2852905 - RNA, 14 nt, Human
acauugaguagaca

SEQ ID NO: 2852906 - RNA, 22 nt, Human
acauugaguagacacauuuaag

SEQ ID NO: 2852907 - RNA, 16 nt, Human
acauugauucagccug

SEQ ID NO: 2852908 - RNA, 11 nt, Human
acauugcauuc

SEQ ID NO: 2852909 - RNA, 14 nt, Human
acauugcauucuau

SEQ ID NO: 2852910 - RNA, 15 nt, Human
acauugcauucuauu

SEQ ID NO: 2852911 - RNA, 16 nt, Human
acauugcauucuauug

SEQ ID NO: 2852912 - RNA, 17 nt, Human
acauugcauucuauugc

SEQ ID NO: 2852913 - RNA, 19 nt, Human
acauugcauucuauugccu

SEQ ID NO: 2852914 - RNA, 22 nt, Human
acauugcauucuauugccuucu

SEQ ID NO: 2852915 - RNA, 14 nt, Human
acauugccaaaaag

SEQ ID NO: 2852916 - RNA, 17 nt, Human
acauugccaaaaaggau

SEQ ID NO: 2852917 - RNA, 23 nt, Human
acauugccaaaaaggauacauaa

SEQ ID NO: 2852918 - RNA, 12 nt, Human
acauugccuuug

SEQ ID NO: 2852919 - RNA, 16 nt, Human
acauugccuuugaaug

SEQ ID NO: 2852920 - RNA, 17 nt, Human
acauugccuuugaaugu

SEQ ID NO: 2852921 - RNA, 18 nt, Human
acauugccuuugaauguu

SEQ ID NO: 2852922 - RNA, 23 nt, Human
acauugccuuugaauguuaauuu

SEQ ID NO: 2852923 - RNA, 16 nt, Human
acauuguguugacauu

SEQ ID NO: 2852924 - RNA, 15 nt, Human
acauuguuauuuuca

SEQ ID NO: 2852925 - RNA, 17 nt, Human
acauuguuauuuucagu

SEQ ID NO: 2852926 - RNA, 12 nt, Human
acauugucugcg

SEQ ID NO: 2852927 - RNA, 22 nt, Human
acauugugauguauauuccuuu

SEQ ID NO: 2852928 - RNA, 13 nt, Human
acauuguucaccu

SEQ ID NO: 2852929 - RNA, 21 nt, Human
acauuguucaccuuuguagca

SEQ ID NO: 2852930 - RNA, 17 nt, Human
acauuguugagcuauug

SEQ ID NO: 2852931 - RNA, 15 nt, Human
acauuguugcucccu

SEQ ID NO: 2852932 - RNA, 21 nt, Human
acauuguugcucccugugaca

SEQ ID NO: 2852933 - RNA, 14 nt, Human
acauuguuguuuuu

SEQ ID NO: 2852934 - RNA, 20 nt, Human
acauuguuguuuuuuuaaua

SEQ ID NO: 2852935 - RNA, 15 nt, Human
acauucugaugagca

SEQ ID NO: 2852936 - RNA, 16 nt, Human
acauucugaugagcaa

SEQ ID NO: 2852937 - RNA, 16 nt, Human
acauucugauuuggaa

SEQ ID NO: 2852938 - RNA, 22 nt, Human
ucaaauuuagaaacuaauugac

SEQ ID NO: 2852939 - RNA, 23 nt, Human
ucaaauuuagaaacuaauugacu

SEQ ID NO: 2852940 - RNA, 14 nt, Human
acauucucuaauaa

SEQ ID NO: 2852941 - RNA, 16 nt, Human
acauucucuaauaaga

SEQ ID NO: 2852942 - RNA, 18 nt, Human
acauucucuaauaagaaa

SEQ ID NO: 2852943 - RNA, 19 nt, Human
acauucucuaauaagaaaa

SEQ ID NO: 2852944 - RNA, 20 nt, Human
acauucucuaauaagaaaac

SEQ ID NO: 2852945 - RNA, 17 nt, Human
acauuccuugccugcac

SEQ ID NO: 2852946 - RNA, 18 nt, Human
acauuccuugccugcaca

SEQ ID NO: 2852947 - RNA, 14 nt, Human
acauuccuaaaaug

SEQ ID NO: 2852948 - RNA, 17 nt, Human
acauucccaucugucac

SEQ ID NO: 2852949 - RNA, 17 nt, Human
acauuccccuggggacc

SEQ ID NO: 2852950 - RNA, 19 nt, Human
acauuccccuggggaccca

SEQ ID NO: 2852951 - RNA, 22 nt, Human
acauuccccuggggacccacgu

SEQ ID NO: 2852952 - RNA, 18 nt, Human
acauggugccccuagcuu

SEQ ID NO: 2852953 - RNA, 19 nt, Human
acauggugccccuagcuuu

SEQ ID NO: 2852954 - RNA, 18 nt, Human
acauguaauauaaagaug

SEQ ID NO: 2852955 - RNA, 12 nt, Human
ucaaauuucaca

SEQ ID NO: 2852956 - RNA, 14 nt, Human
ucaacaaagaaaua

SEQ ID NO: 2852957 - RNA, 15 nt, Human
ucaacaaagaaauau

SEQ ID NO: 2852958 - RNA, 16 nt, Human
ucaacaaagaaauauu

SEQ ID NO: 2852959 - RNA, 18 nt, Human
ucaacaaagaaauauuau

SEQ ID NO: 2852960 - RNA, 21 nt, Human
ucaacaaagaaauauuauuug

SEQ ID NO: 2852961 - RNA, 20 nt, Human
ucaaauuuuuuaaaagagac

SEQ ID NO: 2852962 - RNA, 21 nt, Human
ucaaauuuuuuaaaagagaca

SEQ ID NO: 2852963 - RNA, 20 nt, Human
ucaacaagauuuccuugugc

SEQ ID NO: 2852964 - RNA, 22 nt, Human
ucaacaagauuuccuugugcaa

SEQ ID NO: 2852965 - RNA, 13 nt, Human
ucaacaagccuga

SEQ ID NO: 2852966 - RNA, 14 nt, Human
ucaacauuuacaug

SEQ ID NO: 2852967 - RNA, 14 nt, Human
ucaacaaagcacag

SEQ ID NO: 2852968 - RNA, 15 nt, Human
ucaacaaagcacagu

SEQ ID NO: 2852969 - RNA, 18 nt, Human
ucaacaaagcacaguguu

SEQ ID NO: 2852970 - RNA, 23 nt, Human
ucaacaaagcacaguguuaaaug

SEQ ID NO: 2852971 - RNA, 17 nt, Human
ucaaccaaugccaaaaa

SEQ ID NO: 2852972 - RNA, 17 nt, Human
ucaacauuuacauguau

SEQ ID NO: 2852973 - RNA, 16 nt, Human
ucaacauuuacaugua

SEQ ID NO: 2852974 - RNA, 12 nt, Human
ucaaccagacag

SEQ ID NO: 2852975 - RNA, 13 nt, Human
ucaaccagacaga

SEQ ID NO: 2852976 - RNA, 14 nt, Human
ucaaccagacagag

SEQ ID NO: 2852977 - RNA, 19 nt, Human
ucaaccagacagaggguca

SEQ ID NO: 2852978 - RNA, 22 nt, Human
ucaaccagacagagggucacag

SEQ ID NO: 2852979 - RNA, 13 nt, Human
ucaaccagauaac

SEQ ID NO: 2852980 - RNA, 15 nt, Human
ucaaccauuccccau

SEQ ID NO: 2852981 - RNA, 13 nt, Human
ucaaccauccugg

SEQ ID NO: 2852982 - RNA, 15 nt, Human
ucaaccauggacuuu

SEQ ID NO: 2852983 - RNA, 18 nt, Human
ucaaccauuccccauggg

SEQ ID NO: 2852984 - RNA, 20 nt, Human
ucaaccccaccacuucuuuu

SEQ ID NO: 2852985 - RNA, 17 nt, Human
ucaaccauggacuuuau

SEQ ID NO: 2852986 - RNA, 13 nt, Human
ucaaccccacccu

SEQ ID NO: 2852987 - RNA, 18 nt, Human
ucaaccccacccuguuug

SEQ ID NO: 2852988 - RNA, 18 nt, Human
ucaacugggcucuguccc

SEQ ID NO: 2852989 - RNA, 24 nt, Human
ucaacugaccagccuccaugcugc

SEQ ID NO: 2852990 - RNA, 15 nt, Human
acaugcuucaauagu

SEQ ID NO: 2852991 - RNA, 23 nt, Human
acaugcuucaauaguucaaggaa

SEQ ID NO: 2852992 - RNA, 20 nt, Human
acaugaaucccacccacaug

SEQ ID NO: 2852993 - RNA, 21 nt, Human
acaugaaucccacccacaugu

SEQ ID NO: 2852994 - RNA, 23 nt, Human
acaugaaucccacccacauguga

SEQ ID NO: 2852995 - RNA, 14 nt, Human
acaguccagccugg

SEQ ID NO: 2852996 - RNA, 15 nt, Human
acaguccagccugga

SEQ ID NO: 2852997 - RNA, 21 nt, Human
acaugaaguguguuuccuuca

SEQ ID NO: 2852998 - RNA, 15 nt, Human
acaugaauacaaauu

SEQ ID NO: 2852999 - RNA, 19 nt, Human
acaugaaguguguuuccuu

SEQ ID NO: 2853000 - RNA, 18 nt, Human
acaguccagccuggagau

SEQ ID NO: 2853001 - RNA, 18 nt, Human
acaguccaggaacaagcu

SEQ ID NO: 2853002 - RNA, 15 nt, Human
acagucccacugugc

SEQ ID NO: 2853003 - RNA, 19 nt, Human
acagucccacugugcaggu

SEQ ID NO: 2853004 - RNA, 16 nt, Human
acaguccagccuggag

SEQ ID NO: 2853005 - RNA, 17 nt, Human
acagucccuaaagaaaa

SEQ ID NO: 2853006 - RNA, 18 nt, Human
acauggcuuucagaaaac

SEQ ID NO: 2853007 - RNA, 22 nt, Human
acaugggaaaggaggcaugccu

SEQ ID NO: 2853008 - RNA, 15 nt, Human
acauggaaacccaua

SEQ ID NO: 2853009 - RNA, 21 nt, Human
acauggaaacccauaggccca

SEQ ID NO: 2853010 - RNA, 21 nt, Human
acaugguaaacgcugucccua

SEQ ID NO: 2853011 - RNA, 14 nt, Human
acaugguacucuug

SEQ ID NO: 2853012 - RNA, 20 nt, Human
acaugguacucuuguugagu

SEQ ID NO: 2853013 - RNA, 23 nt, Human
acaugguacucuuguugaguucu

SEQ ID NO: 2853014 - RNA, 20 nt, Human
acauggggaguguuucaugg

SEQ ID NO: 2853015 - RNA, 18 nt, Human
acauggggaaaaaaauca

SEQ ID NO: 2853016 - RNA, 13 nt, Human
acaugggagcagu

SEQ ID NO: 2853017 - RNA, 20 nt, Human
acaugggagcaguccaugca

SEQ ID NO: 2853018 - RNA, 23 nt, Human
acaugggagcaguccaugcauga

SEQ ID NO: 2853019 - RNA, 22 nt, Human
ucauaaaaagccugcaauuuca

SEQ ID NO: 2853020 - RNA, 17 nt, Human
ucaguuuuuuguuuuac

SEQ ID NO: 2853021 - RNA, 18 nt, Human
ucaguuuuuuguuuuaca

SEQ ID NO: 2853022 - RNA, 20 nt, Human
ucaguuuuuuguuuuacaau

SEQ ID NO: 2853023 - RNA, 13 nt, Human
ucaguuuucauuu

SEQ ID NO: 2853024 - RNA, 12 nt, Human
ucaguuuucauu

SEQ ID NO: 2853025 - RNA, 17 nt, Human
ucagugggcaggauaaa

SEQ ID NO: 2853026 - RNA, 19 nt, Human
ucagugggcaggauaaacu

SEQ ID NO: 2853027 - RNA, 15 nt, Human
ucagugcuucgcaga

SEQ ID NO: 2853028 - RNA, 11 nt, Human
ucaguggcagc

SEQ ID NO: 2853029 - RNA, 12 nt, Human
ucaguggagcca

SEQ ID NO: 2853030 - RNA, 12 nt, Human
ucaguggcagcu

SEQ ID NO: 2853031 - RNA, 17 nt, Human
ucaguggcgagaaauaa

SEQ ID NO: 2853032 - RNA, 17 nt, Human
ucaguggcuucaucugu

SEQ ID NO: 2853033 - RNA, 20 nt, Human
ucaguggcuucaucugucaa

SEQ ID NO: 2853034 - RNA, 16 nt, Human
ucaguggggaggggcu

SEQ ID NO: 2853035 - RNA, 12 nt, Human
ucagugccacua

SEQ ID NO: 2853036 - RNA, 23 nt, Human
ucaguaugcugccccugucuugc

SEQ ID NO: 2853037 - RNA, 15 nt, Human
ucaguauguauucuu

SEQ ID NO: 2853038 - RNA, 16 nt, Human
ucaguauguauucuuu

SEQ ID NO: 2853039 - RNA, 13 nt, Human
ucaguauccaggc

SEQ ID NO: 2853040 - RNA, 17 nt, Human
ucaguauccaggcuuug

SEQ ID NO: 2853041 - RNA, 17 nt, Human
ucaguauccaugcucuu

SEQ ID NO: 2853042 - RNA, 20 nt, Human
ucaguauccaugcucuugac

SEQ ID NO: 2853043 - RNA, 20 nt, Human
ucagugcccuccaggauaga

SEQ ID NO: 2853044 - RNA, 18 nt, Human
ucagugccaacuguggcu

SEQ ID NO: 2853045 - RNA, 19 nt, Human
ucagugccaacuguggcug

SEQ ID NO: 2853046 - RNA, 20 nt, Human
ucagugccaacuguggcugg

SEQ ID NO: 2853047 - RNA, 21 nt, Human
ucagugccaacuguggcuggu

SEQ ID NO: 2853048 - RNA, 21 nt, Human
ucauaguaugguggcuggguu

SEQ ID NO: 2853049 - RNA, 13 nt, Human
ucauaguuaacau

SEQ ID NO: 2853050 - RNA, 14 nt, Human
ucauaguuaacaua

SEQ ID NO: 2853051 - RNA, 15 nt, Human
ucauauacugccaug

SEQ ID NO: 2853052 - RNA, 14 nt, Human
ucauaaccuagccu

SEQ ID NO: 2853053 - RNA, 20 nt, Human
acccugcccuugacaucugg

SEQ ID NO: 2853054 - RNA, 12 nt, Human
ucauaaaauaaa

SEQ ID NO: 2853055 - RNA, 15 nt, Human
ucauaaaaacugcuu

SEQ ID NO: 2853056 - RNA, 19 nt, Human
ucauaguaugguggcuggg

SEQ ID NO: 2853057 - RNA, 18 nt, Human
ucauaguaugguggcugg

SEQ ID NO: 2853058 - RNA, 15 nt, Human
ucauaguaugguggc

SEQ ID NO: 2853059 - RNA, 14 nt, Human
ucauaguaguuuuu

SEQ ID NO: 2853060 - RNA, 16 nt, Human
ucauaguaguuuuuac

SEQ ID NO: 2853061 - RNA, 18 nt, Human
ucauaguaguuuuuacag

SEQ ID NO: 2853062 - RNA, 22 nt, Human
ucauaguaguuuuuacagcugu

SEQ ID NO: 2853063 - RNA, 12 nt, Human
ucauauuuaaag

SEQ ID NO: 2853064 - RNA, 19 nt, Human
ucauauuuaaagacaggga

SEQ ID NO: 2853065 - RNA, 14 nt, Human
ucauauugugccaa

SEQ ID NO: 2853066 - RNA, 15 nt, Human
ucauauugugccaau

SEQ ID NO: 2853067 - RNA, 20 nt, Human
ucauauugugccaauaugua

SEQ ID NO: 2853068 - RNA, 22 nt, Human
ucauauugugccaauauguauu

SEQ ID NO: 2853069 - RNA, 19 nt, Human
ucauauugaauguuuccaa

SEQ ID NO: 2853070 - RNA, 13 nt, Human
ucauauugaugaa

SEQ ID NO: 2853071 - RNA, 14 nt, Human
ucauauugaugaaa

SEQ ID NO: 2853072 - RNA, 15 nt, Human
ucauauugaugaaaa

SEQ ID NO: 2853073 - RNA, 16 nt, Human
ucauauugaugaaaag

SEQ ID NO: 2853074 - RNA, 18 nt, Human
ucauauugaugaaaagau

SEQ ID NO: 2853075 - RNA, 19 nt, Human
ucauauugaugaaaagauu

SEQ ID NO: 2853076 - RNA, 21 nt, Human
ucauauugaugaaaagauuua

SEQ ID NO: 2853077 - RNA, 18 nt, Human
ucauauuggaaaaaucac

SEQ ID NO: 2853078 - RNA, 21 nt, Human
ucauaucaucacauugagcug

SEQ ID NO: 2853079 - RNA, 20 nt, Human
ucauaugacauucaugccug

SEQ ID NO: 2853080 - RNA, 16 nt, Human
ucauaaauuuacuuua

SEQ ID NO: 2853081 - RNA, 22 nt, Human
ucauauccuucuuacacgacua

SEQ ID NO: 2853082 - RNA, 14 nt, Human
ucauauugaauaua

SEQ ID NO: 2853083 - RNA, 12 nt, Human
ucauauugaaua

SEQ ID NO: 2853084 - RNA, 22 nt, Human
ucauauuuaguauugaauacuu

SEQ ID NO: 2853085 - RNA, 18 nt, Human
accgcacagcucaggagg

SEQ ID NO: 2853086 - RNA, 17 nt, Human
accgcacaugcacacac

SEQ ID NO: 2853087 - RNA, 14 nt, Human
accgcacagcucag

SEQ ID NO: 2853088 - RNA, 17 nt, Human
accgagucucuucucca

SEQ ID NO: 2853089 - RNA, 15 nt, Human
accgaggacaugaaa

SEQ ID NO: 2853090 - RNA, 16 nt, Human
accgagucucuucucc

SEQ ID NO: 2853091 - RNA, 14 nt, Human
ucaugcauaaauau

SEQ ID NO: 2853092 - RNA, 15 nt, Human
ucaugcauaaauaug

SEQ ID NO: 2853093 - RNA, 19 nt, Human
ucaugcauaaauaugcagu

SEQ ID NO: 2853094 - RNA, 19 nt, Human
ucaugcagcucaacuuucu

SEQ ID NO: 2853095 - RNA, 17 nt, Human
ucaugcaaaggcuggga

SEQ ID NO: 2853096 - RNA, 20 nt, Human
ucaugcauaaauaugcagug

SEQ ID NO: 2853097 - RNA, 22 nt, Human
ucaugaaaguagacaguuuuga

SEQ ID NO: 2853098 - RNA, 19 nt, Human
ucauguggaauauaaagau

SEQ ID NO: 2853099 - RNA, 18 nt, Human
ucauguggaauauaaaga

SEQ ID NO: 2853100 - RNA, 15 nt, Human
ucauguuuauaacua

SEQ ID NO: 2853101 - RNA, 23 nt, Human
ucauguuuauaacuauucaguug

SEQ ID NO: 2853102 - RNA, 14 nt, Human
ucauguuuaugaaa

SEQ ID NO: 2853103 - RNA, 15 nt, Human
ucauguuuaugaaaa

SEQ ID NO: 2853104 - RNA, 16 nt, Human
ucauguuuaugaaaau

SEQ ID NO: 2853105 - RNA, 17 nt, Human
ucauguuuaugaaaaua

SEQ ID NO: 2853106 - RNA, 22 nt, Human
ucauguuuaugaaaauaaauag

SEQ ID NO: 2853107 - RNA, 14 nt, Human
ucauguuugcuuca

SEQ ID NO: 2853108 - RNA, 20 nt, Human
ucauguuugcuucauaaaug

SEQ ID NO: 2853109 - RNA, 21 nt, Human
ucauguuuuaaagcuugcuca

SEQ ID NO: 2853110 - RNA, 22 nt, Human
ucauguuuuaaauguacaguuu

SEQ ID NO: 2853111 - RNA, 15 nt, Human
ucauguuugcuucau

SEQ ID NO: 2853112 - RNA, 17 nt, Human
ucauguuugcuucauaa

SEQ ID NO: 2853113 - RNA, 21 nt, Human
ucauguuugcuucauaaauga

SEQ ID NO: 2853114 - RNA, 11 nt, Human
ucauguuuggu

SEQ ID NO: 2853115 - RNA, 19 nt, Human
ucauguuuggugcauagaa

SEQ ID NO: 2853116 - RNA, 21 nt, Human
ucauguuuggugcauagaacu

SEQ ID NO: 2853117 - RNA, 22 nt, Human
ucauguuuggugcauagaacug

SEQ ID NO: 2853118 - RNA, 18 nt, Human
ucaucuagcgcaauugaa

SEQ ID NO: 2853119 - RNA, 14 nt, Human
ucaugaaauaugca

SEQ ID NO: 2853120 - RNA, 15 nt, Human
ucaugaaauaugcau

SEQ ID NO: 2853121 - RNA, 11 nt, Human
ucaugauuuuu

SEQ ID NO: 2853122 - RNA, 16 nt, Human
ucaugauuuauaaaug

SEQ ID NO: 2853123 - RNA, 13 nt, Human
ucaugauuuauaa

SEQ ID NO: 2853124 - RNA, 22 nt, Human
ucaugauucacccccaaacagu

SEQ ID NO: 2853125 - RNA, 20 nt, Human
ucauccaggcccaacuguga

SEQ ID NO: 2853126 - RNA, 11 nt, Human
accuccugccu

SEQ ID NO: 2853127 - RNA, 14 nt, Human
ucauccagggcucu

SEQ ID NO: 2853128 - RNA, 21 nt, Human
ucauccagggcucugaccagu

SEQ ID NO: 2853129 - RNA, 13 nt, Human
ucauccauccagg

SEQ ID NO: 2853130 - RNA, 17 nt, Human
ucaucgcucguguguuc

SEQ ID NO: 2853131 - RNA, 23 nt, Human
ucaucgcucguguguucuaucca

SEQ ID NO: 2853132 - RNA, 22 nt, Human
ucaucggagucagccaggagcu

SEQ ID NO: 2853133 - RNA, 15 nt, Human
ucaucggcuuucccc

SEQ ID NO: 2853134 - RNA, 14 nt, Human
ucaucgccagaggu

SEQ ID NO: 2853135 - RNA, 15 nt, Human
ucaucgccagaggug

SEQ ID NO: 2853136 - RNA, 21 nt, Human
ucaucgccagaggugcuucac

SEQ ID NO: 2853137 - RNA, 21 nt, Human
ucaucgaaucuacuaauucca

SEQ ID NO: 2853138 - RNA, 14 nt, Human
ucaucgaaucuacu

SEQ ID NO: 2853139 - RNA, 18 nt, Human
ucaucgaaaauucauuuc

SEQ ID NO: 2853140 - RNA, 19 nt, Human
ucaucgaaaauucauuuca

SEQ ID NO: 2853141 - RNA, 21 nt, Human
ucaucgaaaauucauuucaca

SEQ ID NO: 2853142 - RNA, 22 nt, Human
ucaucgaaaauucauuucacau

SEQ ID NO: 2853143 - RNA, 13 nt, Human
ucaucccagcccc

SEQ ID NO: 2853144 - RNA, 14 nt, Human
ucaucccagcccca

SEQ ID NO: 2853145 - RNA, 21 nt, Human
ucaucccaucuaagcugcagc

SEQ ID NO: 2853146 - RNA, 13 nt, Human
accuccaugacag

SEQ ID NO: 2853147 - RNA, 16 nt, Human
accuccauuaaagucu

SEQ ID NO: 2853148 - RNA, 18 nt, Human
accuccauuaaagucuga

SEQ ID NO: 2853149 - RNA, 19 nt, Human
accuccauuaaagucugaa

SEQ ID NO: 2853150 - RNA, 20 nt, Human
accuccauuaaagucugaau

SEQ ID NO: 2853151 - RNA, 21 nt, Human
accuccauucuauuuuagaau

SEQ ID NO: 2853152 - RNA, 12 nt, Human
accucccagagg

SEQ ID NO: 2853153 - RNA, 13 nt, Human
accucccagaggu

SEQ ID NO: 2853154 - RNA, 14 nt, Human
accucccagagguc

SEQ ID NO: 2853155 - RNA, 16 nt, Human
accucccagaggucca

SEQ ID NO: 2853156 - RNA, 17 nt, Human
accucccagagguccag

SEQ ID NO: 2853157 - RNA, 19 nt, Human
accucccagagguccagcc

SEQ ID NO: 2853158 - RNA, 20 nt, Human
accucccagagguccagccc

SEQ ID NO: 2853159 - RNA, 21 nt, Human
accucccagagguccagccca

SEQ ID NO: 2853160 - RNA, 22 nt, Human
accucccagagguccagcccau

SEQ ID NO: 2853161 - RNA, 23 nt, Human
accucccagagguccagcccauc

SEQ ID NO: 2853162 - RNA, 11 nt, Human
accuccccacg

SEQ ID NO: 2853163 - RNA, 14 nt, Human
accuccccacgccc

SEQ ID NO: 2853164 - RNA, 19 nt, Human
accuccccacgcccucccc

SEQ ID NO: 2853165 - RNA, 20 nt, Human
accuccccacgcccuccccu

SEQ ID NO: 2853166 - RNA, 21 nt, Human
accuccccacgcccuccccuc

SEQ ID NO: 2853167 - RNA, 22 nt, Human
accuccccacgcccuccccucc

SEQ ID NO: 2853168 - RNA, 18 nt, Human
accuccagucccccuauc

SEQ ID NO: 2853169 - RNA, 16 nt, Human
accuccagcccgggag

SEQ ID NO: 2853170 - RNA, 17 nt, Human
accuccagcccgggagc

SEQ ID NO: 2853171 - RNA, 19 nt, Human
accuccagcccgggagccu

SEQ ID NO: 2853172 - RNA, 21 nt, Human
accuccagcccgggagccuag

SEQ ID NO: 2853173 - RNA, 22 nt, Human
accuccagcccgggagccuagg

SEQ ID NO: 2853174 - RNA, 14 nt, Human
accucacucuuuau

SEQ ID NO: 2853175 - RNA, 16 nt, Human
accucacucuuuauag

SEQ ID NO: 2853176 - RNA, 17 nt, Human
accucacucuuuauagu

SEQ ID NO: 2853177 - RNA, 12 nt, Human
accuccccagcc

SEQ ID NO: 2853178 - RNA, 13 nt, Human
accuccccagccc

SEQ ID NO: 2853179 - RNA, 13 nt, Human
accuccccugccu

SEQ ID NO: 2853180 - RNA, 14 nt, Human
accuccccugccuu

SEQ ID NO: 2853181 - RNA, 15 nt, Human
accuccccugccuug

SEQ ID NO: 2853182 - RNA, 16 nt, Human
accuccccugccuugc

SEQ ID NO: 2853183 - RNA, 17 nt, Human
accuccccugccuugcu

SEQ ID NO: 2853184 - RNA, 20 nt, Human
accuccccugccuugcuguu

SEQ ID NO: 2853185 - RNA, 14 nt, Human
accuccucuucccc

SEQ ID NO: 2853186 - RNA, 15 nt, Human
accuccucuuccccc

SEQ ID NO: 2853187 - RNA, 12 nt, Human
accuccucucag

SEQ ID NO: 2853188 - RNA, 16 nt, Human
accuccucucaguguu

SEQ ID NO: 2853189 - RNA, 17 nt, Human
accuccucucaguguuu

SEQ ID NO: 2853190 - RNA, 22 nt, Human
accuagaaauugacacaagugg

SEQ ID NO: 2853191 - RNA, 20 nt, Human
accuagaagaagcuauguca

SEQ ID NO: 2853192 - RNA, 23 nt, Human
accuacuguucuaaagcucugac

SEQ ID NO: 2853193 - RNA, 15 nt, Human
accuacuguucuaaa

SEQ ID NO: 2853194 - RNA, 16 nt, Human
accuacuguucuaaag

SEQ ID NO: 2853195 - RNA, 17 nt, Human
accuacuguucuaaagc

SEQ ID NO: 2853196 - RNA, 18 nt, Human
accuacuguucuaaagcu

SEQ ID NO: 2853197 - RNA, 20 nt, Human
accuacuguucuaaagcucu

SEQ ID NO: 2853198 - RNA, 21 nt, Human
accuacuguucuaaagcucug

SEQ ID NO: 2853199 - RNA, 19 nt, Human
accuaggcaguaggccggu

SEQ ID NO: 2853200 - RNA, 22 nt, Human
accuagagaacaggugguuuuu

SEQ ID NO: 2853201 - RNA, 13 nt, Human
accuagagaagau

SEQ ID NO: 2853202 - RNA, 17 nt, Human
accuagagaagauaauu

SEQ ID NO: 2853203 - RNA, 20 nt, Human
accuagagacuucacccggg

SEQ ID NO: 2853204 - RNA, 13 nt, Human
accuagagccaga

SEQ ID NO: 2853205 - RNA, 15 nt, Human
accuagagccagacc

SEQ ID NO: 2853206 - RNA, 16 nt, Human
accucaaaaugucuaa

SEQ ID NO: 2853207 - RNA, 22 nt, Human
accucaccccgaggcccugcau

SEQ ID NO: 2853208 - RNA, 23 nt, Human
accucaccccgaggcccugcaug

SEQ ID NO: 2853209 - RNA, 20 nt, Human
accucaccccguuacagcuc

SEQ ID NO: 2853210 - RNA, 22 nt, Human
accucaccccguuacagcuccc

SEQ ID NO: 2853211 - RNA, 17 nt, Human
accuauuugacuuacca

SEQ ID NO: 2853212 - RNA, 12 nt, Human
accuauuuccau

SEQ ID NO: 2853213 - RNA, 14 nt, Human
accucaccuagaaa

SEQ ID NO: 2853214 - RNA, 15 nt, Human
accucaccuagaaau

SEQ ID NO: 2853215 - RNA, 12 nt, Human
accucacccugc

SEQ ID NO: 2853216 - RNA, 14 nt, Human
accucacccugcua

SEQ ID NO: 2853217 - RNA, 15 nt, Human
accuaggggcgccgc

SEQ ID NO: 2853218 - RNA, 20 nt, Human
accuaggcucauggacgaga

SEQ ID NO: 2853219 - RNA, 20 nt, Human
acccggccccugcugguuca

SEQ ID NO: 2853220 - RNA, 17 nt, Human
acccggccccugcuggu

SEQ ID NO: 2853221 - RNA, 22 nt, Human
acccggccccugcugguucagg

SEQ ID NO: 2853222 - RNA, 13 nt, Human
acccggcuaauuu

SEQ ID NO: 2853223 - RNA, 16 nt, Human
acccggccccugcugg

SEQ ID NO: 2853224 - RNA, 15 nt, Human
acccggccccugcug

SEQ ID NO: 2853225 - RNA, 14 nt, Human
acccggccccugcu

SEQ ID NO: 2853226 - RNA, 18 nt, Human
acccggaggggccuggca

SEQ ID NO: 2853227 - RNA, 21 nt, Human
acccggaggggccuggcagcc

SEQ ID NO: 2853228 - RNA, 22 nt, Human
ucagguaacaggcagauacagg

SEQ ID NO: 2853229 - RNA, 21 nt, Human
ucagguaacaggcagauacag

SEQ ID NO: 2853230 - RNA, 23 nt, Human
ucagguaacaggcagauacagga

SEQ ID NO: 2853231 - RNA, 15 nt, Human
acccggaggggccug

SEQ ID NO: 2853232 - RNA, 16 nt, Human
ucagggggaagaagca

SEQ ID NO: 2853233 - RNA, 17 nt, Human
ucagggggaagaagcag

SEQ ID NO: 2853234 - RNA, 19 nt, Human
ucagggggaagaagcagag

SEQ ID NO: 2853235 - RNA, 22 nt, Human
ucagggggaagaagcagagaga

SEQ ID NO: 2853236 - RNA, 16 nt, Human
ucaggguuggccccug

SEQ ID NO: 2853237 - RNA, 18 nt, Human
ucagggucucugcugccg

SEQ ID NO: 2853238 - RNA, 12 nt, Human
ucagggucucug

SEQ ID NO: 2853239 - RNA, 16 nt, Human
ucagggucucugcugc

SEQ ID NO: 2853240 - RNA, 17 nt, Human
ucagggucucugcugcc

SEQ ID NO: 2853241 - RNA, 16 nt, Human
ucaggggacucagccc

SEQ ID NO: 2853242 - RNA, 15 nt, Human
accccaucgccaacu

SEQ ID NO: 2853243 - RNA, 17 nt, Human
ucaggggaaaacuguua

SEQ ID NO: 2853244 - RNA, 18 nt, Human
ucaggggacucagcccug

SEQ ID NO: 2853245 - RNA, 12 nt, Human
ucaggggccaga

SEQ ID NO: 2853246 - RNA, 14 nt, Human
ucaggggccagagg

SEQ ID NO: 2853247 - RNA, 15 nt, Human
ucaggggccagagga

SEQ ID NO: 2853248 - RNA, 16 nt, Human
ucaggggccagaggaa

SEQ ID NO: 2853249 - RNA, 17 nt, Human
ucaggggcugacacuuc

SEQ ID NO: 2853250 - RNA, 22 nt, Human
ucagcuuguaaauagcucaggu

SEQ ID NO: 2853251 - RNA, 21 nt, Human
ucagcuuguaaauagcucagg

SEQ ID NO: 2853252 - RNA, 14 nt, Human
ucagcuccagcuca

SEQ ID NO: 2853253 - RNA, 15 nt, Human
ucagcuuugagaagc

SEQ ID NO: 2853254 - RNA, 22 nt, Human
ucagcuuugagaagccuucagc

SEQ ID NO: 2853255 - RNA, 15 nt, Human
ucagcuacugauuuu

SEQ ID NO: 2853256 - RNA, 12 nt, Human
ucagcuccagcc

SEQ ID NO: 2853257 - RNA, 13 nt, Human
ucagcuccagccc

SEQ ID NO: 2853258 - RNA, 16 nt, Human
ucagcuccagccccuu

SEQ ID NO: 2853259 - RNA, 21 nt, Human
ucagcuccagccccuuuccaa

SEQ ID NO: 2853260 - RNA, 22 nt, Human
ucagcuccagccccuuuccaaa

SEQ ID NO: 2853261 - RNA, 16 nt, Human
ucagcuugugcacaau

SEQ ID NO: 2853262 - RNA, 16 nt, Human
ucagcuuucaaagcau

SEQ ID NO: 2853263 - RNA, 17 nt, Human
ucagcuuucaaagcauu

SEQ ID NO: 2853264 - RNA, 15 nt, Human
ucagcuuucagggcc

SEQ ID NO: 2853265 - RNA, 23 nt, Human
acccuugaauguagcagccccgg

SEQ ID NO: 2853266 - RNA, 13 nt, Human
acccuugagcccu

SEQ ID NO: 2853267 - RNA, 15 nt, Human
acccuugagcccucc

SEQ ID NO: 2853268 - RNA, 13 nt, Human
acccuucuuuucu

SEQ ID NO: 2853269 - RNA, 14 nt, Human
acccuucuuuucuc

SEQ ID NO: 2853270 - RNA, 20 nt, Human
acccuucuuuucucaugugu

SEQ ID NO: 2853271 - RNA, 17 nt, Human
acccuuuuucuccagcu

SEQ ID NO: 2853272 - RNA, 20 nt, Human
acccuuuccuccuuuaucac

SEQ ID NO: 2853273 - RNA, 18 nt, Human
acccuucuggaaacugug

SEQ ID NO: 2853274 - RNA, 14 nt, Human
acccucugccacca

SEQ ID NO: 2853275 - RNA, 17 nt, Human
acccucugccaccagag

SEQ ID NO: 2853276 - RNA, 13 nt, Human
acccucugccacc

SEQ ID NO: 2853277 - RNA, 15 nt, Human
acccucugacccuag

SEQ ID NO: 2853278 - RNA, 15 nt, Human
acccucucagcucca

SEQ ID NO: 2853279 - RNA, 16 nt, Human
acccucucagcuccag

SEQ ID NO: 2853280 - RNA, 16 nt, Human
acccgguuucuuuuua

SEQ ID NO: 2853281 - RNA, 18 nt, Human
acccgguuucuuuuuaag

SEQ ID NO: 2853282 - RNA, 19 nt, Human
acccgguuucuuuuuaagu

SEQ ID NO: 2853283 - RNA, 21 nt, Human
acccgggaggcggagcuugca

SEQ ID NO: 2853284 - RNA, 12 nt, Human
ucagauuuugau

SEQ ID NO: 2853285 - RNA, 21 nt, Human
ucagauuuugauaacuguuua

SEQ ID NO: 2853286 - RNA, 15 nt, Human
ucagccacacccagg

SEQ ID NO: 2853287 - RNA, 17 nt, Human
ucagccacacccaggca

SEQ ID NO: 2853288 - RNA, 23 nt, Human
ucagccaccauccuauugcaaag

SEQ ID NO: 2853289 - RNA, 20 nt, Human
accaguguccccuccacugu

SEQ ID NO: 2853290 - RNA, 18 nt, Human
accauaaaugaaucauca

SEQ ID NO: 2853291 - RNA, 21 nt, Human
accaguuuaaccugaugcagu

SEQ ID NO: 2853292 - RNA, 21 nt, Human
accaguuuagauuucaagaaa

SEQ ID NO: 2853293 - RNA, 19 nt, Human
accaguuuaaccugaugca

SEQ ID NO: 2853294 - RNA, 20 nt, Human
accaguuuaaccugaugcag

SEQ ID NO: 2853295 - RNA, 22 nt, Human
accauaagguuucguuucugua

SEQ ID NO: 2853296 - RNA, 14 nt, Human
accauacauuuaaa

SEQ ID NO: 2853297 - RNA, 12 nt, Human
ucagccagcugc

SEQ ID NO: 2853298 - RNA, 22 nt, Human
ucagccagcugcccuaaauaac

SEQ ID NO: 2853299 - RNA, 13 nt, Human
ucagcccucccug

SEQ ID NO: 2853300 - RNA, 14 nt, Human
ucagcccucccugc

SEQ ID NO: 2853301 - RNA, 15 nt, Human
ucagcccucccugcc

SEQ ID NO: 2853302 - RNA, 16 nt, Human
ucagcccucccugccc

SEQ ID NO: 2853303 - RNA, 23 nt, Human
acccaggagccccgaggccuucu

SEQ ID NO: 2853304 - RNA, 19 nt, Human
acccaggagccccgaggcc

SEQ ID NO: 2853305 - RNA, 10 nt, Human
ucagccagac

SEQ ID NO: 2853306 - RNA, 23 nt, Human
acccaggaggcagagguugcagu

SEQ ID NO: 2853307 - RNA, 19 nt, Human
acccaggagggagggggcu

SEQ ID NO: 2853308 - RNA, 18 nt, Human
acccaggaggggaacacu

SEQ ID NO: 2853309 - RNA, 19 nt, Human
acccaggaggggaacacug

SEQ ID NO: 2853310 - RNA, 20 nt, Human
acccaggaggggaacacugc

SEQ ID NO: 2853311 - RNA, 21 nt, Human
acccaggaggggaacacugcc

SEQ ID NO: 2853312 - RNA, 17 nt, Human
accccagagauucccaa

SEQ ID NO: 2853313 - RNA, 10 nt, Human
accccagagc

SEQ ID NO: 2853314 - RNA, 13 nt, Human
accccagagccac

SEQ ID NO: 2853315 - RNA, 15 nt, Human
accccagagccacac

SEQ ID NO: 2853316 - RNA, 16 nt, Human
accccagagccacaca

SEQ ID NO: 2853317 - RNA, 17 nt, Human
accccagagccacacau

SEQ ID NO: 2853318 - RNA, 18 nt, Human
accccagagccacacaug

SEQ ID NO: 2853319 - RNA, 19 nt, Human
accccagagccacacaugg

SEQ ID NO: 2853320 - RNA, 13 nt, Human
accccagcauccu

SEQ ID NO: 2853321 - RNA, 22 nt, Human
accccagcauucucaggcacca

SEQ ID NO: 2853322 - RNA, 23 nt, Human
accccagcauucucaggcaccag

SEQ ID NO: 2853323 - RNA, 11 nt, Human
accccacacuu

SEQ ID NO: 2853324 - RNA, 21 nt, Human
accccacccuaguuucccuga

SEQ ID NO: 2853325 - RNA, 13 nt, Human
accccacccuccc

SEQ ID NO: 2853326 - RNA, 21 nt, Human
accccacacuuguuccagcuc

SEQ ID NO: 2853327 - RNA, 17 nt, Human
accccuggcuuuucacu

SEQ ID NO: 2853328 - RNA, 18 nt, Human
accccuggcuuuucacug

SEQ ID NO: 2853329 - RNA, 19 nt, Human
accccuggcuuuucacugc

SEQ ID NO: 2853330 - RNA, 20 nt, Human
accccuggcuuuucacugcu

SEQ ID NO: 2853331 - RNA, 21 nt, Human
accccuggcuuuucacugcug

SEQ ID NO: 2853332 - RNA, 15 nt, Human
ucagccuuacauuug

SEQ ID NO: 2853333 - RNA, 16 nt, Human
ucagccuuacauuugu

SEQ ID NO: 2853334 - RNA, 18 nt, Human
ucagccuuacauuuguga

SEQ ID NO: 2853335 - RNA, 22 nt, Human
ucagccuucccccucccagggc

SEQ ID NO: 2853336 - RNA, 21 nt, Human
ucagccuucccccucccaggg

SEQ ID NO: 2853337 - RNA, 24 nt, Human
ucagccuucccccucccagggcca

SEQ ID NO: 2853338 - RNA, 18 nt, Human
ucagcggggacagcuccu

SEQ ID NO: 2853339 - RNA, 23 nt, Human
ucagcggggacagcuccuucugu

SEQ ID NO: 2853340 - RNA, 21 nt, Human
ucagcggggacagcuccuucu

SEQ ID NO: 2853341 - RNA, 20 nt, Human
ucagcggggacagcuccuuc

SEQ ID NO: 2853342 - RNA, 19 nt, Human
ucagcggggacagcuccuu

SEQ ID NO: 2853343 - RNA, 12 nt, Human
ucagcuccagcu

SEQ ID NO: 2853344 - RNA, 14 nt, Human
ucagcuacugauuu

SEQ ID NO: 2853345 - RNA, 19 nt, Human
ucagcuaagggaagacauu

SEQ ID NO: 2853346 - RNA, 22 nt, Human
ucagcuaagggaagacauuucu

SEQ ID NO: 2853347 - RNA, 23 nt, Human
ucagcuaagggaagacauuucuu

SEQ ID NO: 2853348 - RNA, 19 nt, Human
ucagcuacccacuauccuu

SEQ ID NO: 2853349 - RNA, 15 nt, Human
ucagcguaaaauggu

SEQ ID NO: 2853350 - RNA, 16 nt, Human
ucagcguaaaauggug

SEQ ID NO: 2853351 - RNA, 15 nt, Human
accccaucccacacc

SEQ ID NO: 2853352 - RNA, 17 nt, Human
accccaucccuccccag

SEQ ID NO: 2853353 - RNA, 17 nt, Human
accccaucccugucuuu

SEQ ID NO: 2853354 - RNA, 15 nt, Human
accccaguuuuuuga

SEQ ID NO: 2853355 - RNA, 17 nt, Human
accccauccaguucaug

SEQ ID NO: 2853356 - RNA, 11 nt, Human
acccccuccuu

SEQ ID NO: 2853357 - RNA, 12 nt, Human
acccccuccuuc

SEQ ID NO: 2853358 - RNA, 15 nt, Human
acccccuccuucaga

SEQ ID NO: 2853359 - RNA, 16 nt, Human
acccccuccuucagac

SEQ ID NO: 2853360 - RNA, 17 nt, Human
acccccuccuucagaca

SEQ ID NO: 2853361 - RNA, 19 nt, Human
acccccuccuucagacacc

SEQ ID NO: 2853362 - RNA, 16 nt, Human
acccccucgcuuggac

SEQ ID NO: 2853363 - RNA, 20 nt, Human
acccccucuucugagcacag

SEQ ID NO: 2853364 - RNA, 14 nt, Human
accccugcuucuga

SEQ ID NO: 2853365 - RNA, 20 nt, Human
accccugccuuugggagcag

SEQ ID NO: 2853366 - RNA, 9 nt, Human
accccugcu

SEQ ID NO: 2853367 - RNA, 13 nt, Human
accccucuguagc

SEQ ID NO: 2853368 - RNA, 16 nt, Human
accccugacucaucau

SEQ ID NO: 2853369 - RNA, 15 nt, Human
accccugagcuugca

SEQ ID NO: 2853370 - RNA, 15 nt, Human
acuccagcaacuucu

SEQ ID NO: 2853371 - RNA, 20 nt, Human
acuccagcaacuucuucucc

SEQ ID NO: 2853372 - RNA, 13 nt, Human
acucacaugacac

SEQ ID NO: 2853373 - RNA, 21 nt, Human
acuccagaccccuggcuuuuc

SEQ ID NO: 2853374 - RNA, 18 nt, Human
acuccagaccccuggcuu

SEQ ID NO: 2853375 - RNA, 19 nt, Human
acuccagaccccuggcuuu

SEQ ID NO: 2853376 - RNA, 11 nt, Human
acuccaucucu

SEQ ID NO: 2853377 - RNA, 16 nt, Human
acuccaucucucaucc

SEQ ID NO: 2853378 - RNA, 21 nt, Human
acuccaucucucauccuccag

SEQ ID NO: 2853379 - RNA, 14 nt, Human
acuccagugccagc

SEQ ID NO: 2853380 - RNA, 15 nt, Human
acuccagugccagca

SEQ ID NO: 2853381 - RNA, 19 nt, Human
acuccagugccagcaauga

SEQ ID NO: 2853382 - RNA, 14 nt, Human
acuccaguguacau

SEQ ID NO: 2853383 - RNA, 21 nt, Human
acuccuaggcaggacaugcug

SEQ ID NO: 2853384 - RNA, 19 nt, Human
acuccaucaguuagagcug

SEQ ID NO: 2853385 - RNA, 13 nt, Human
acuccucacacuu

SEQ ID NO: 2853386 - RNA, 20 nt, Human
acuccucacacuuacuguaa

SEQ ID NO: 2853387 - RNA, 14 nt, Human
acuccuauuuuugu

SEQ ID NO: 2853388 - RNA, 16 nt, Human
acuccuauuuuuguaa

SEQ ID NO: 2853389 - RNA, 17 nt, Human
acuccuauuuuuguaaa

SEQ ID NO: 2853390 - RNA, 20 nt, Human
acuccuauuuuuguaaacug

SEQ ID NO: 2853391 - RNA, 13 nt, Human
acuccagaccccu

SEQ ID NO: 2853392 - RNA, 15 nt, Human
acuccagaccccugg

SEQ ID NO: 2853393 - RNA, 15 nt, Human
acucacaggaaggag

SEQ ID NO: 2853394 - RNA, 23 nt, Human
acucacagguuggaagagaauca

SEQ ID NO: 2853395 - RNA, 11 nt, Human
acuccuggccu

SEQ ID NO: 2853396 - RNA, 17 nt, Human
acuccugccaaggagga

SEQ ID NO: 2853397 - RNA, 21 nt, Human
acuccucccuuuccuuccuaa

SEQ ID NO: 2853398 - RNA, 18 nt, Human
acuccucagggcagccuc

SEQ ID NO: 2853399 - RNA, 12 nt, Human
acuccucccagg

SEQ ID NO: 2853400 - RNA, 15 nt, Human
acuccuccccacccu

SEQ ID NO: 2853401 - RNA, 18 nt, Human
acuccuccccacccuccu

SEQ ID NO: 2853402 - RNA, 19 nt, Human
acuccuccccacccuccug

SEQ ID NO: 2853403 - RNA, 20 nt, Human
acuccuccccacccuccugg

SEQ ID NO: 2853404 - RNA, 21 nt, Human
acuccuccccacccuccuggc

SEQ ID NO: 2853405 - RNA, 23 nt, Human
acuccuccccacccuccuggccu

SEQ ID NO: 2853406 - RNA, 11 nt, Human
acuccucccuc

SEQ ID NO: 2853407 - RNA, 12 nt, Human
acuccucccucc

SEQ ID NO: 2853408 - RNA, 13 nt, Human
acuccucccuccg

SEQ ID NO: 2853409 - RNA, 14 nt, Human
uccuacucuguguc

SEQ ID NO: 2853410 - RNA, 13 nt, Human
uccuacucugugu

SEQ ID NO: 2853411 - RNA, 22 nt, Human
uccguagguagauguguaaccu

SEQ ID NO: 2853412 - RNA, 20 nt, Human
uccguaauaacacccuuccu

SEQ ID NO: 2853413 - RNA, 12 nt, Human
uccuacucugug

SEQ ID NO: 2853414 - RNA, 14 nt, Human
uccgguguucuaag

SEQ ID NO: 2853415 - RNA, 15 nt, Human
uccgguguucuaaga

SEQ ID NO: 2853416 - RNA, 16 nt, Human
uccgguguucuaagau

SEQ ID NO: 2853417 - RNA, 14 nt, Human
uccgguugcauacu

SEQ ID NO: 2853418 - RNA, 18 nt, Human
uccgguugcauacuggac

SEQ ID NO: 2853419 - RNA, 19 nt, Human
uccgguugcauacuggacu

SEQ ID NO: 2853420 - RNA, 17 nt, Human
uccggugugccugcagc

SEQ ID NO: 2853421 - RNA, 15 nt, Human
uccggugugccugca

SEQ ID NO: 2853422 - RNA, 12 nt, Human
uccggugugccu

SEQ ID NO: 2853423 - RNA, 19 nt, Human
uccggugugccugcagccc

SEQ ID NO: 2853424 - RNA, 18 nt, Human
uccggugugccugcagcc

SEQ ID NO: 2853425 - RNA, 18 nt, Human
uccgguguuuaagacauu

SEQ ID NO: 2853426 - RNA, 15 nt, Human
uccuacucuguguca

SEQ ID NO: 2853427 - RNA, 21 nt, Human
uccuagcuugggaggcuuccc

SEQ ID NO: 2853428 - RNA, 22 nt, Human
uccuagcuugggaggcuucccc

SEQ ID NO: 2853429 - RNA, 14 nt, Human
acuccuggccucaa

SEQ ID NO: 2853430 - RNA, 13 nt, Human
acuccuggccuca

SEQ ID NO: 2853431 - RNA, 12 nt, Human
acuccuggccuc

SEQ ID NO: 2853432 - RNA, 14 nt, Human
ucccuuggccucag

SEQ ID NO: 2853433 - RNA, 13 nt, Human
ucccuuggccuca

SEQ ID NO: 2853434 - RNA, 12 nt, Human
ucccuuggccuc

SEQ ID NO: 2853435 - RNA, 16 nt, Human
ucccuuggccucagaa

SEQ ID NO: 2853436 - RNA, 14 nt, Human
acucuuagaaauga

SEQ ID NO: 2853437 - RNA, 22 nt, Human
acucuuacgaauauuuucagua

SEQ ID NO: 2853438 - RNA, 14 nt, Human
acucuugaccucag

SEQ ID NO: 2853439 - RNA, 10 nt, Human
acucuuaggc

SEQ ID NO: 2853440 - RNA, 19 nt, Human
acucuuaggcacuuugggg

SEQ ID NO: 2853441 - RNA, 21 nt, Human
acucuuaggcacuuugggggu

SEQ ID NO: 2853442 - RNA, 16 nt, Human
acucuugaccucaggu

SEQ ID NO: 2853443 - RNA, 15 nt, Human
acucuugaccucagg

SEQ ID NO: 2853444 - RNA, 16 nt, Human
acucuugauuauccau

SEQ ID NO: 2853445 - RNA, 22 nt, Human
uccucacccugauuucuugcuu

SEQ ID NO: 2853446 - RNA, 20 nt, Human
uccucaccccuguccucacu

SEQ ID NO: 2853447 - RNA, 21 nt, Human
uccucaccccuguccucacug

SEQ ID NO: 2853448 - RNA, 19 nt, Human
acucuugcuauugaauuga

SEQ ID NO: 2853449 - RNA, 22 nt, Human
uccucauaguaugguggcuggg

SEQ ID NO: 2853450 - RNA, 13 nt, Human
uccucccaggcgc

SEQ ID NO: 2853451 - RNA, 22 nt, Human
uccucccagcuuguaggagcug

SEQ ID NO: 2853452 - RNA, 14 nt, Human
uccucauccacccc

SEQ ID NO: 2853453 - RNA, 15 nt, Human
uccucauccacccca

SEQ ID NO: 2853454 - RNA, 17 nt, Human
uccucauccaccccauc

SEQ ID NO: 2853455 - RNA, 18 nt, Human
uccucauccaccccaucc

SEQ ID NO: 2853456 - RNA, 13 nt, Human
uccucccaucccc

SEQ ID NO: 2853457 - RNA, 15 nt, Human
uccucccauccccug

SEQ ID NO: 2853458 - RNA, 18 nt, Human
uccucccauccccuggac

SEQ ID NO: 2853459 - RNA, 19 nt, Human
uccucccaggcgccccuuc

SEQ ID NO: 2853460 - RNA, 21 nt, Human
uccucccaggcgccccuuccc

SEQ ID NO: 2853461 - RNA, 15 nt, Human
uccucccucagugcc

SEQ ID NO: 2853462 - RNA, 12 nt, Human
uccucccuccac

SEQ ID NO: 2853463 - RNA, 23 nt, Human
uccucccauccccuggacuggga

SEQ ID NO: 2853464 - RNA, 19 nt, Human
uccucccauccccuggacu

SEQ ID NO: 2853465 - RNA, 17 nt, Human
uccucagggcagccucc

SEQ ID NO: 2853466 - RNA, 12 nt, Human
uccucagggcag

SEQ ID NO: 2853467 - RNA, 21 nt, Human
uccucagggagcagggaaggc

SEQ ID NO: 2853468 - RNA, 14 nt, Human
uccucagcuuaucu

SEQ ID NO: 2853469 - RNA, 23 nt, Human
uccucaccucuggacuggcuaga

SEQ ID NO: 2853470 - RNA, 22 nt, Human
uccucaccucuggacuggcuag

SEQ ID NO: 2853471 - RNA, 21 nt, Human
uccucaccucuggacuggcua

SEQ ID NO: 2853472 - RNA, 20 nt, Human
uccucaccucuggacuggcu

SEQ ID NO: 2853473 - RNA, 16 nt, Human
uccucaccucuggacu

SEQ ID NO: 2853474 - RNA, 15 nt, Human
uccucaccucuggac

SEQ ID NO: 2853475 - RNA, 13 nt, Human
uccucaccucugg

SEQ ID NO: 2853476 - RNA, 12 nt, Human
uccucaccucug

SEQ ID NO: 2853477 - RNA, 14 nt, Human
uccucacucccagu

SEQ ID NO: 2853478 - RNA, 13 nt, Human
uccucacucccag

SEQ ID NO: 2853479 - RNA, 12 nt, Human
uccucacuccca

SEQ ID NO: 2853480 - RNA, 17 nt, Human
uccucacucccagucca

SEQ ID NO: 2853481 - RNA, 19 nt, Human
uccuaggcaggacaugcug

SEQ ID NO: 2853482 - RNA, 14 nt, Human
uccgguuugccaug

SEQ ID NO: 2853483 - RNA, 17 nt, Human
acuccuugagagaccag

SEQ ID NO: 2853484 - RNA, 18 nt, Human
acuccuugagagaccagg

SEQ ID NO: 2853485 - RNA, 21 nt, Human
acuccuugagagaccaggcaa

SEQ ID NO: 2853486 - RNA, 23 nt, Human
acuccuugagagaccaggcaaag

SEQ ID NO: 2853487 - RNA, 15 nt, Human
acucuccuaugccuu

SEQ ID NO: 2853488 - RNA, 16 nt, Human
acucuccuaugccuuu

SEQ ID NO: 2853489 - RNA, 21 nt, Human
acucucugaaccccucccucc

SEQ ID NO: 2853490 - RNA, 19 nt, Human
acucucugaaccccucccu

SEQ ID NO: 2853491 - RNA, 11 nt, Human
acucugagccc

SEQ ID NO: 2853492 - RNA, 12 nt, Human
acucugagccca

SEQ ID NO: 2853493 - RNA, 13 nt, Human
acucugagcccau

SEQ ID NO: 2853494 - RNA, 14 nt, Human
acucugagcccaug

SEQ ID NO: 2853495 - RNA, 18 nt, Human
acucugagcgggaggcag

SEQ ID NO: 2853496 - RNA, 21 nt, Human
acucugagcgggaggcagagu

SEQ ID NO: 2853497 - RNA, 22 nt, Human
acucugagcgggaggcagaguu

SEQ ID NO: 2853498 - RNA, 23 nt, Human
acucugaggcucuuucugggcca

SEQ ID NO: 2853499 - RNA, 21 nt, Human
acucugaggcucuuucugggc

SEQ ID NO: 2853500 - RNA, 18 nt, Human
acucucugaaccccuccc

SEQ ID NO: 2853501 - RNA, 21 nt, Human
acucucuccacccuauaugua

SEQ ID NO: 2853502 - RNA, 20 nt, Human
acucucuccacccuauaugu

SEQ ID NO: 2853503 - RNA, 13 nt, Human
acucucuccaccc

SEQ ID NO: 2853504 - RNA, 14 nt, Human
acucucuaccagau

SEQ ID NO: 2853505 - RNA, 17 nt, Human
acucucgcaucuuccca

SEQ ID NO: 2853506 - RNA, 18 nt, Human
acucucgcaucuucccaa

SEQ ID NO: 2853507 - RNA, 13 nt, Human
acucuccuugcag

SEQ ID NO: 2853508 - RNA, 15 nt, Human
acucuccuugcaguu

SEQ ID NO: 2853509 - RNA, 16 nt, Human
acucuccuugcaguuc

SEQ ID NO: 2853510 - RNA, 13 nt, Human
acucuccugcccc

SEQ ID NO: 2853511 - RNA, 16 nt, Human
acucugccagccacau

SEQ ID NO: 2853512 - RNA, 11 nt, Human
acucugccagg

SEQ ID NO: 2853513 - RNA, 18 nt, Human
acucugccagggcagugc

SEQ ID NO: 2853514 - RNA, 20 nt, Human
acucugccagggcagugcua

SEQ ID NO: 2853515 - RNA, 13 nt, Human
acucugccagcca

SEQ ID NO: 2853516 - RNA, 14 nt, Human
acucugauagaauu

SEQ ID NO: 2853517 - RNA, 22 nt, Human
acucugauagaauuauuucaca

SEQ ID NO: 2853518 - RNA, 12 nt, Human
acucugccuccu

SEQ ID NO: 2853519 - RNA, 19 nt, Human
acucugcccccugcuggcu

SEQ ID NO: 2853520 - RNA, 21 nt, Human
acucugcccccugcuggcucu

SEQ ID NO: 2853521 - RNA, 12 nt, Human
acucugcccccu

SEQ ID NO: 2853522 - RNA, 20 nt, Human
acucugccccccccccccau

SEQ ID NO: 2853523 - RNA, 13 nt, Human
acucugccccccc

SEQ ID NO: 2853524 - RNA, 14 nt, Human
acucugccagcaaa

SEQ ID NO: 2853525 - RNA, 16 nt, Human
acucugccagcaaaga

SEQ ID NO: 2853526 - RNA, 13 nt, Human
acucugcccccug

SEQ ID NO: 2853527 - RNA, 15 nt, Human
acucugcccccugcu

SEQ ID NO: 2853528 - RNA, 17 nt, Human
acucugcccccugcugg

SEQ ID NO: 2853529 - RNA, 18 nt, Human
acucugcccccugcuggc

SEQ ID NO: 2853530 - RNA, 17 nt, Human
uccuggaaccuugcugu

SEQ ID NO: 2853531 - RNA, 18 nt, Human
uccuggaaccuugcuguc

SEQ ID NO: 2853532 - RNA, 19 nt, Human
uccuggaaccuugcugucc

SEQ ID NO: 2853533 - RNA, 20 nt, Human
uccuggaaccuugcuguccu

SEQ ID NO: 2853534 - RNA, 21 nt, Human
uccuggaaccuugcuguccug

SEQ ID NO: 2853535 - RNA, 22 nt, Human
uccuggaaccuugcuguccuga

SEQ ID NO: 2853536 - RNA, 17 nt, Human
uccuggacacucagacc

SEQ ID NO: 2853537 - RNA, 19 nt, Human
uccuggaaaggcucagucu

SEQ ID NO: 2853538 - RNA, 16 nt, Human
uccuggaaaggcucag

SEQ ID NO: 2853539 - RNA, 22 nt, Human
uccuggaaaggcucagucucag

SEQ ID NO: 2853540 - RNA, 22 nt, Human
uccuggaagcgcgagggccuca

SEQ ID NO: 2853541 - RNA, 17 nt, Human
uccugggagugagcugg

SEQ ID NO: 2853542 - RNA, 14 nt, Human
uccugggagugagc

SEQ ID NO: 2853543 - RNA, 12 nt, Human
uccugggaguga

SEQ ID NO: 2853544 - RNA, 20 nt, Human
uccugggagaaccucaggcu

SEQ ID NO: 2853545 - RNA, 19 nt, Human
uccugggagaaccucaggc

SEQ ID NO: 2853546 - RNA, 19 nt, Human
uccuggacacucagaccug

SEQ ID NO: 2853547 - RNA, 16 nt, Human
uccuggcuccugaggg

SEQ ID NO: 2853548 - RNA, 13 nt, Human
uccuggcuccuga

SEQ ID NO: 2853549 - RNA, 23 nt, Human
uccuggcucuugauaccccccuc

SEQ ID NO: 2853550 - RNA, 12 nt, Human
uccuggcugcgg

SEQ ID NO: 2853551 - RNA, 22 nt, Human
uccuggcugcggcgucugucug

SEQ ID NO: 2853552 - RNA, 13 nt, Human
uccuggcuucagg

SEQ ID NO: 2853553 - RNA, 14 nt, Human
uccuggcuucaggc

SEQ ID NO: 2853554 - RNA, 23 nt, Human
uccuggcuuuuuaacuccccugu

SEQ ID NO: 2853555 - RNA, 18 nt, Human
uccugggagaaccucagg

SEQ ID NO: 2853556 - RNA, 17 nt, Human
uccugggagaaccucag

SEQ ID NO: 2853557 - RNA, 14 nt, Human
uccugccugugcug

SEQ ID NO: 2853558 - RNA, 19 nt, Human
uccugccuuggccucccaa

SEQ ID NO: 2853559 - RNA, 21 nt, Human
uccugccuuggccucccaagu

SEQ ID NO: 2853560 - RNA, 14 nt, Human
uccugccuuugccu

SEQ ID NO: 2853561 - RNA, 15 nt, Human
uccugccuuugccuc

SEQ ID NO: 2853562 - RNA, 18 nt, Human
uccugccuuugccuccag

SEQ ID NO: 2853563 - RNA, 12 nt, Human
uccugccuuuua

SEQ ID NO: 2853564 - RNA, 21 nt, Human
uccugccucgaacuggcugca

SEQ ID NO: 2853565 - RNA, 20 nt, Human
uccugccugccccucucccg

SEQ ID NO: 2853566 - RNA, 12 nt, Human
uccugccugugc

SEQ ID NO: 2853567 - RNA, 16 nt, Human
uccugccuggccaggc

SEQ ID NO: 2853568 - RNA, 14 nt, Human
uccugccuggccag

SEQ ID NO: 2853569 - RNA, 13 nt, Human
uccugccuggcca

SEQ ID NO: 2853570 - RNA, 12 nt, Human
uccugccuggcc

SEQ ID NO: 2853571 - RNA, 14 nt, Human
uccugccugccccu

SEQ ID NO: 2853572 - RNA, 14 nt, Human
acugagccccgcag

SEQ ID NO: 2853573 - RNA, 18 nt, Human
acugagccccgcagaccu

SEQ ID NO: 2853574 - RNA, 20 nt, Human
acugagccccgcagaccucc

SEQ ID NO: 2853575 - RNA, 16 nt, Human
acugcaacuucugccu

SEQ ID NO: 2853576 - RNA, 20 nt, Human
acugcaacuuguaaaugugg

SEQ ID NO: 2853577 - RNA, 14 nt, Human
acugcaacuucugc

SEQ ID NO: 2853578 - RNA, 23 nt, Human
acugcaaccuucgccaccugggu

SEQ ID NO: 2853579 - RNA, 21 nt, Human
acugagccccgcagaccuccc

SEQ ID NO: 2853580 - RNA, 23 nt, Human
acugagccccgcagaccucccca

SEQ ID NO: 2853581 - RNA, 16 nt, Human
acugauaguguccaaa

SEQ ID NO: 2853582 - RNA, 17 nt, Human
acugauaguguccaaau

SEQ ID NO: 2853583 - RNA, 20 nt, Human
acugcacuauagccuaggug

SEQ ID NO: 2853584 - RNA, 16 nt, Human
acugcaccgggccaca

SEQ ID NO: 2853585 - RNA, 14 nt, Human
acugcaccgggcca

SEQ ID NO: 2853586 - RNA, 12 nt, Human
acugcacccagg

SEQ ID NO: 2853587 - RNA, 13 nt, Human
acugcacccagga

SEQ ID NO: 2853588 - RNA, 14 nt, Human
acugcacccaggag

SEQ ID NO: 2853589 - RNA, 19 nt, Human
acugcaaguccuuuuguaa

SEQ ID NO: 2853590 - RNA, 20 nt, Human
acugcaaguccuuuuguaaa

SEQ ID NO: 2853591 - RNA, 22 nt, Human
acugcaaguccuuuuguaaagu

SEQ ID NO: 2853592 - RNA, 17 nt, Human
acugcaagaggcuccug

SEQ ID NO: 2853593 - RNA, 18 nt, Human
acugcaagaggcuccugu

SEQ ID NO: 2853594 - RNA, 16 nt, Human
acugcaauaacuucug

SEQ ID NO: 2853595 - RNA, 17 nt, Human
acugcaauaacuucuga

SEQ ID NO: 2853596 - RNA, 18 nt, Human
acugcaauaacuucugac

SEQ ID NO: 2853597 - RNA, 20 nt, Human
acugcaauaacuucugaccu

SEQ ID NO: 2853598 - RNA, 22 nt, Human
acugcacagugcaucucagccc

SEQ ID NO: 2853599 - RNA, 23 nt, Human
acugcacagugcaucucagccca

SEQ ID NO: 2853600 - RNA, 16 nt, Human
acugcacaugaagaaa

SEQ ID NO: 2853601 - RNA, 17 nt, Human
acugcacaugaagaaau

SEQ ID NO: 2853602 - RNA, 18 nt, Human
acugcacaugaagaaaua

SEQ ID NO: 2853603 - RNA, 18 nt, Human
acugcacuccagccuggg

SEQ ID NO: 2853604 - RNA, 21 nt, Human
acugcacuccagccugggcga

SEQ ID NO: 2853605 - RNA, 20 nt, Human
acugcacuccagccugggcg

SEQ ID NO: 2853606 - RNA, 20 nt, Human
acugcacuccagccugggca

SEQ ID NO: 2853607 - RNA, 19 nt, Human
acugcacuccagccugggc

SEQ ID NO: 2853608 - RNA, 17 nt, Human
acugcacuccagccugg

SEQ ID NO: 2853609 - RNA, 15 nt, Human
acugcacuccagccu

SEQ ID NO: 2853610 - RNA, 21 nt, Human
acugcacuauagccuagguga

SEQ ID NO: 2853611 - RNA, 14 nt, Human
uccugaucugugau

SEQ ID NO: 2853612 - RNA, 15 nt, Human
uccugcaauuuucua

SEQ ID NO: 2853613 - RNA, 16 nt, Human
uccugcaauuuucuaa

SEQ ID NO: 2853614 - RNA, 21 nt, Human
uccugcacacgcuccuuccuc

SEQ ID NO: 2853615 - RNA, 14 nt, Human
uccugcacacgcuc

SEQ ID NO: 2853616 - RNA, 22 nt, Human
uccugcacacgcuccuuccucu

SEQ ID NO: 2853617 - RNA, 17 nt, Human
acugagauuuugguauu

SEQ ID NO: 2853618 - RNA, 21 nt, Human
acugacuggauucauucucau

SEQ ID NO: 2853619 - RNA, 13 nt, Human
acugacuugagac

SEQ ID NO: 2853620 - RNA, 20 nt, Human
acugacuuguuugucuucca

SEQ ID NO: 2853621 - RNA, 24 nt, Human
acugacuuguuugucuuccauucc

SEQ ID NO: 2853622 - RNA, 23 nt, Human
acugaccauccacucuacccucc

SEQ ID NO: 2853623 - RNA, 13 nt, Human
acugacccugggg

SEQ ID NO: 2853624 - RNA, 15 nt, Human
acugacccuggggcu

SEQ ID NO: 2853625 - RNA, 17 nt, Human
acugacccuggggcugg

SEQ ID NO: 2853626 - RNA, 12 nt, Human
acugacccuucc

SEQ ID NO: 2853627 - RNA, 13 nt, Human
acugacccuucca

SEQ ID NO: 2853628 - RNA, 15 nt, Human
acugacccuuccaga

SEQ ID NO: 2853629 - RNA, 17 nt, Human
acugacccuuccagaca

SEQ ID NO: 2853630 - RNA, 19 nt, Human
acugacccuuccagacaua

SEQ ID NO: 2853631 - RNA, 18 nt, Human
acugacuaucauaaaauc

SEQ ID NO: 2853632 - RNA, 21 nt, Human
acugacuaucauaaaaucaaa

SEQ ID NO: 2853633 - RNA, 13 nt, Human
acugaacuucagg

SEQ ID NO: 2853634 - RNA, 20 nt, Human
acugaccuuggagagacaca

SEQ ID NO: 2853635 - RNA, 21 nt, Human
acugaccuuggagagacacag

SEQ ID NO: 2853636 - RNA, 22 nt, Human
acugaccuuggagagacacagc

SEQ ID NO: 2853637 - RNA, 12 nt, Human
uccugaaaucaa

SEQ ID NO: 2853638 - RNA, 16 nt, Human
uccugaaccgcacagc

SEQ ID NO: 2853639 - RNA, 14 nt, Human
uccugaaauuucag

SEQ ID NO: 2853640 - RNA, 15 nt, Human
uccugaaauuucaga

SEQ ID NO: 2853641 - RNA, 13 nt, Human
uccugaacagcau

SEQ ID NO: 2853642 - RNA, 15 nt, Human
uccugaacagcaugg

SEQ ID NO: 2853643 - RNA, 18 nt, Human
uccugaacagcauggcac

SEQ ID NO: 2853644 - RNA, 20 nt, Human
uccugaacagcauggcacuc

SEQ ID NO: 2853645 - RNA, 22 nt, Human
uccugaacagcauggcacuccc

SEQ ID NO: 2853646 - RNA, 23 nt, Human
uccugaacagcauggcacucccu

SEQ ID NO: 2853647 - RNA, 20 nt, Human
uccugaaccgcacagcucag

SEQ ID NO: 2853648 - RNA, 19 nt, Human
uccugaaccgcacagcuca

SEQ ID NO: 2853649 - RNA, 18 nt, Human
uccugaaccgcacagcuc

SEQ ID NO: 2853650 - RNA, 17 nt, Human
uccugaaccgcacagcu

SEQ ID NO: 2853651 - RNA, 22 nt, Human
uccugaaccgcacagcucagga

SEQ ID NO: 2853652 - RNA, 21 nt, Human
uccugaaccgcacagcucagg

SEQ ID NO: 2853653 - RNA, 21 nt, Human
uccugaauuuuauuuuuuggg

SEQ ID NO: 2853654 - RNA, 13 nt, Human
uccucuuucucuc

SEQ ID NO: 2853655 - RNA, 15 nt, Human
uccucuuucucuccc

SEQ ID NO: 2853656 - RNA, 16 nt, Human
uccucuuucucucccc

SEQ ID NO: 2853657 - RNA, 17 nt, Human
uccucuuucucucccca

SEQ ID NO: 2853658 - RNA, 17 nt, Human
uccugacagaaggugcc

SEQ ID NO: 2853659 - RNA, 16 nt, Human
uccugacaucacagca

SEQ ID NO: 2853660 - RNA, 18 nt, Human
uccugacaucacagcagc

SEQ ID NO: 2853661 - RNA, 19 nt, Human
uccugacaucacagcagcc

SEQ ID NO: 2853662 - RNA, 20 nt, Human
uccugacaucacagcagccu

SEQ ID NO: 2853663 - RNA, 21 nt, Human
uccugacaucacagcagccuc

SEQ ID NO: 2853664 - RNA, 16 nt, Human
uccugacagaaggugc

SEQ ID NO: 2853665 - RNA, 15 nt, Human
uccugacagaaggug

SEQ ID NO: 2853666 - RNA, 14 nt, Human
uccugacagaaggu

SEQ ID NO: 2853667 - RNA, 16 nt, Human
acucuuguugaguucu

SEQ ID NO: 2853668 - RNA, 21 nt, Human
acucuuguugaguucuguaga

SEQ ID NO: 2853669 - RNA, 16 nt, Human
acucuuucuaaugcug

SEQ ID NO: 2853670 - RNA, 17 nt, Human
acucuuucuaaugcuga

SEQ ID NO: 2853671 - RNA, 20 nt, Human
acucuuuugcuuuauuccag

SEQ ID NO: 2853672 - RNA, 14 nt, Human
acucuuuugcuuua

SEQ ID NO: 2853673 - RNA, 12 nt, Human
acucuuuugcuu

SEQ ID NO: 2853674 - RNA, 17 nt, Human
acucuuuacccuugagc

SEQ ID NO: 2853675 - RNA, 19 nt, Human
acucuuuacccuugagccc

SEQ ID NO: 2853676 - RNA, 18 nt, Human
acucuuuauagugcacaa

SEQ ID NO: 2853677 - RNA, 20 nt, Human
acugaacucugacaacagac

SEQ ID NO: 2853678 - RNA, 18 nt, Human
acugaacucacuuuccuc

SEQ ID NO: 2853679 - RNA, 21 nt, Human
acugaacuguguguaauuguu

SEQ ID NO: 2853680 - RNA, 22 nt, Human
acugaacuguguguaauuguuc

SEQ ID NO: 2853681 - RNA, 21 nt, Human
acugaacuucaggauaauaaa

SEQ ID NO: 2853682 - RNA, 13 nt, Human
acugaacuuucuu

SEQ ID NO: 2853683 - RNA, 16 nt, Human
acugaacuuucuuauc

SEQ ID NO: 2853684 - RNA, 13 nt, Human
acugaacuuugaa

SEQ ID NO: 2853685 - RNA, 15 nt, Human
acugaacuuugaaga

SEQ ID NO: 2853686 - RNA, 16 nt, Human
acugaacuuugaagac

SEQ ID NO: 2853687 - RNA, 19 nt, Human
acugaacuuugaagacccg

SEQ ID NO: 2853688 - RNA, 21 nt, Human
acucuuuugcuuuauuccaga

SEQ ID NO: 2853689 - RNA, 14 nt, Human
acucuuuuuagggc

SEQ ID NO: 2853690 - RNA, 19 nt, Human
acucuuuuuagggccaggc

SEQ ID NO: 2853691 - RNA, 20 nt, Human
acucuuuuuagggccaggca

SEQ ID NO: 2853692 - RNA, 20 nt, Human
accuugaaaauaagaauaga

SEQ ID NO: 2853693 - RNA, 20 nt, Human
accuugaacuggguacuugu

SEQ ID NO: 2853694 - RNA, 16 nt, Human
ucauuccguugucugu

SEQ ID NO: 2853695 - RNA, 17 nt, Human
ucauuccguugucugug

SEQ ID NO: 2853696 - RNA, 17 nt, Human
ucauucccucucaucuc

SEQ ID NO: 2853697 - RNA, 18 nt, Human
ucauucccucucaucuca

SEQ ID NO: 2853698 - RNA, 13 nt, Human
ucauuccauugcc

SEQ ID NO: 2853699 - RNA, 14 nt, Human
ucauuccauugccu

SEQ ID NO: 2853700 - RNA, 15 nt, Human
ucauuccauugccua

SEQ ID NO: 2853701 - RNA, 20 nt, Human
ucauuccauugccuagcucu

SEQ ID NO: 2853702 - RNA, 23 nt, Human
accuuugcacaggaugcuggccu

SEQ ID NO: 2853703 - RNA, 18 nt, Human
accuuuggagcaaagcug

SEQ ID NO: 2853704 - RNA, 15 nt, Human
accuuuguguauuuu

SEQ ID NO: 2853705 - RNA, 16 nt, Human
accuuuguguauuuuu

SEQ ID NO: 2853706 - RNA, 13 nt, Human
accuuuuaaagug

SEQ ID NO: 2853707 - RNA, 14 nt, Human
accuuuuaaagugu

SEQ ID NO: 2853708 - RNA, 19 nt, Human
accuuuuaaaguguuucag

SEQ ID NO: 2853709 - RNA, 21 nt, Human
accuuuuaaaguguuucagcu

SEQ ID NO: 2853710 - RNA, 22 nt, Human
accuuuuaaaguguuucagcua

SEQ ID NO: 2853711 - RNA, 18 nt, Human
uccacucuacccucccac

SEQ ID NO: 2853712 - RNA, 17 nt, Human
uccacucuacccuccca

SEQ ID NO: 2853713 - RNA, 21 nt, Human
uccacucuacccucccacccc

SEQ ID NO: 2853714 - RNA, 20 nt, Human
uccacucuacccucccaccc

SEQ ID NO: 2853715 - RNA, 23 nt, Human
uccacucuacccucccacccccu

SEQ ID NO: 2853716 - RNA, 21 nt, Human
uccacugugccaugugccagg

SEQ ID NO: 2853717 - RNA, 12 nt, Human
uccacugucacc

SEQ ID NO: 2853718 - RNA, 17 nt, Human
uccacugucacccucca

SEQ ID NO: 2853719 - RNA, 19 nt, Human
uccacugucacccuccacc

SEQ ID NO: 2853720 - RNA, 18 nt, Human
uccagaaugcuguacauc

SEQ ID NO: 2853721 - RNA, 17 nt, Human
uccagaaugcuguacau

SEQ ID NO: 2853722 - RNA, 21 nt, Human
uccagaaugcuguacaucuau

SEQ ID NO: 2853723 - RNA, 18 nt, Human
uccagaauggucuuucua

SEQ ID NO: 2853724 - RNA, 16 nt, Human
accuuuuauugacaca

SEQ ID NO: 2853725 - RNA, 12 nt, Human
accuuuucuugc

SEQ ID NO: 2853726 - RNA, 14 nt, Human
accuuuucuugccu

SEQ ID NO: 2853727 - RNA, 17 nt, Human
accuuuugaggagcccc

SEQ ID NO: 2853728 - RNA, 21 nt, Human
accuuuugaggagccccagcu

SEQ ID NO: 2853729 - RNA, 15 nt, Human
accuuuuaccagcuu

SEQ ID NO: 2853730 - RNA, 19 nt, Human
accuuuuaccagcuuuuaa

SEQ ID NO: 2853731 - RNA, 20 nt, Human
accuuuuaccagcuuuuaac

SEQ ID NO: 2853732 - RNA, 15 nt, Human
accuuuuauccacuu

SEQ ID NO: 2853733 - RNA, 15 nt, Human
accuuuuauguagca

SEQ ID NO: 2853734 - RNA, 15 nt, Human
accuuuuauguagua

SEQ ID NO: 2853735 - RNA, 14 nt, Human
accuuuuauuacau

SEQ ID NO: 2853736 - RNA, 20 nt, Human
accuuuuauguaguaauuga

SEQ ID NO: 2853737 - RNA, 20 nt, Human
accuuuuauugacacagaaa

SEQ ID NO: 2853738 - RNA, 19 nt, Human
accuuuugaaguaguuugu

SEQ ID NO: 2853739 - RNA, 20 nt, Human
accuuuuuuaagauuuuucu

SEQ ID NO: 2853740 - RNA, 22 nt, Human
accuuuuuuaagauuuuucuca

SEQ ID NO: 2853741 - RNA, 15 nt, Human
accuuuuuuaagauu

SEQ ID NO: 2853742 - RNA, 16 nt, Human
accuuuuuuaagauuu

SEQ ID NO: 2853743 - RNA, 22 nt, Human
uccaggcuccuuuagcgcccag

SEQ ID NO: 2853744 - RNA, 12 nt, Human
uccaggcuccuu

SEQ ID NO: 2853745 - RNA, 10 nt, Human
uccaggcucc

SEQ ID NO: 2853746 - RNA, 15 nt, Human
uccaggcacagcuga

SEQ ID NO: 2853747 - RNA, 16 nt, Human
uccaggcacagcugag

SEQ ID NO: 2853748 - RNA, 17 nt, Human
uccaggcacagcugagu

SEQ ID NO: 2853749 - RNA, 12 nt, Human
uccaggcacagg

SEQ ID NO: 2853750 - RNA, 13 nt, Human
uccaggcacagga

SEQ ID NO: 2853751 - RNA, 20 nt, Human
uccaggaugguguuacugca

SEQ ID NO: 2853752 - RNA, 22 nt, Human
uccaggaugguguuacugcagu

SEQ ID NO: 2853753 - RNA, 23 nt, Human
uccaggaugguguuacugcaguu

SEQ ID NO: 2853754 - RNA, 18 nt, Human
uccaggagccugugccuc

SEQ ID NO: 2853755 - RNA, 18 nt, Human
uccaggcugggugacaga

SEQ ID NO: 2853756 - RNA, 13 nt, Human
uccaggcuagucc

SEQ ID NO: 2853757 - RNA, 19 nt, Human
uccaggcuaguccggaccc

SEQ ID NO: 2853758 - RNA, 20 nt, Human
uccaggcuaguccggaccca

SEQ ID NO: 2853759 - RNA, 18 nt, Human
acgaaacuuguuauugug

SEQ ID NO: 2853760 - RNA, 19 nt, Human
acgaaacuuguuauuguga

SEQ ID NO: 2853761 - RNA, 21 nt, Human
acgaaacuuguuauugugaau

SEQ ID NO: 2853762 - RNA, 14 nt, Human
acgaaagaaaugua

SEQ ID NO: 2853763 - RNA, 19 nt, Human
acgaaacacaaaccacaac

SEQ ID NO: 2853764 - RNA, 12 nt, Human
acgaaagagaga

SEQ ID NO: 2853765 - RNA, 14 nt, Human
acgaaagagagaga

SEQ ID NO: 2853766 - RNA, 20 nt, Human
accuuuuuuguuuuuucaaa

SEQ ID NO: 2853767 - RNA, 23 nt, Human
acgaaagagagagaaacaaacuu

SEQ ID NO: 2853768 - RNA, 13 nt, Human
acgaacaaaacac

SEQ ID NO: 2853769 - RNA, 12 nt, Human
acgaacaaaaca

SEQ ID NO: 2853770 - RNA, 22 nt, Human
uccagacagugugcuguuugaa

SEQ ID NO: 2853771 - RNA, 19 nt, Human
uccagacauacgaaacaca

SEQ ID NO: 2853772 - RNA, 20 nt, Human
uccagacauacgaaacacaa

SEQ ID NO: 2853773 - RNA, 13 nt, Human
uccagacaucaug

SEQ ID NO: 2853774 - RNA, 21 nt, Human
uccagacaucaugaauuuuac

SEQ ID NO: 2853775 - RNA, 16 nt, Human
uccagccgccauugcc

SEQ ID NO: 2853776 - RNA, 15 nt, Human
uccagcccgggagcc

SEQ ID NO: 2853777 - RNA, 18 nt, Human
uccagcccgggagccuag

SEQ ID NO: 2853778 - RNA, 20 nt, Human
uccagcccgggagccuagga

SEQ ID NO: 2853779 - RNA, 21 nt, Human
uccagcccgggagccuaggac

SEQ ID NO: 2853780 - RNA, 23 nt, Human
uccagcccgggagccuaggacca

SEQ ID NO: 2853781 - RNA, 19 nt, Human
uccagcccuauucugccac

SEQ ID NO: 2853782 - RNA, 11 nt, Human
uccagccucac

SEQ ID NO: 2853783 - RNA, 23 nt, Human
uccagccgccauugccaccagga

SEQ ID NO: 2853784 - RNA, 22 nt, Human
uccagccgccauugccaccagg

SEQ ID NO: 2853785 - RNA, 21 nt, Human
uccagccgccauugccaccag

SEQ ID NO: 2853786 - RNA, 20 nt, Human
uccagccgccauugccacca

SEQ ID NO: 2853787 - RNA, 19 nt, Human
uccagccgccauugccacc

SEQ ID NO: 2853788 - RNA, 18 nt, Human
uccagccgccauugccac

SEQ ID NO: 2853789 - RNA, 20 nt, Human
uccagccugcccaagcccag

SEQ ID NO: 2853790 - RNA, 14 nt, Human
uccagccuggagau

SEQ ID NO: 2853791 - RNA, 15 nt, Human
uccaggagccugugc

SEQ ID NO: 2853792 - RNA, 23 nt, Human
uccaggagccuggcuccguccag

SEQ ID NO: 2853793 - RNA, 14 nt, Human
uccaggagccuggc

SEQ ID NO: 2853794 - RNA, 13 nt, Human
uccaggagccugg

SEQ ID NO: 2853795 - RNA, 13 nt, Human
acgcuggaccuug

SEQ ID NO: 2853796 - RNA, 22 nt, Human
acgcucuccuuucuuucuaacu

SEQ ID NO: 2853797 - RNA, 13 nt, Human
acgcuccgcugcc

SEQ ID NO: 2853798 - RNA, 20 nt, Human
acgcuccgcugccgugccgc

SEQ ID NO: 2853799 - RNA, 14 nt, Human
acgcuccuuccucu

SEQ ID NO: 2853800 - RNA, 15 nt, Human
acgcuccuuccucug

SEQ ID NO: 2853801 - RNA, 15 nt, Human
acgcgucuccuguuu

SEQ ID NO: 2853802 - RNA, 16 nt, Human
acgcuggagugcagug

SEQ ID NO: 2853803 - RNA, 15 nt, Human
acgcuggagugcagu

SEQ ID NO: 2853804 - RNA, 23 nt, Human
acgcuggaccuugaacuggguac

SEQ ID NO: 2853805 - RNA, 20 nt, Human
acgcuggaccuugaacuggg

SEQ ID NO: 2853806 - RNA, 17 nt, Human
acgcuggagugcaguga

SEQ ID NO: 2853807 - RNA, 23 nt, Human
acggagucccaccuuggcugcag

SEQ ID NO: 2853808 - RNA, 17 nt, Human
acgccugcaaacgcugc

SEQ ID NO: 2853809 - RNA, 14 nt, Human
acgccugcaaacgc

SEQ ID NO: 2853810 - RNA, 21 nt, Human
acgccugcaaacgcugccugc

SEQ ID NO: 2853811 - RNA, 20 nt, Human
acgccugcaaacgcugccug

SEQ ID NO: 2853812 - RNA, 19 nt, Human
acgccugcaaacgcugccu

SEQ ID NO: 2853813 - RNA, 18 nt, Human
acgccugcaaacgcugcc

SEQ ID NO: 2853814 - RNA, 14 nt, Human
acgaauauuuucag

SEQ ID NO: 2853815 - RNA, 23 nt, Human
acgccggggacagaggccugccc

SEQ ID NO: 2853816 - RNA, 18 nt, Human
acgccgucuccauggcau

SEQ ID NO: 2853817 - RNA, 16 nt, Human
acgccuaugaucccag

SEQ ID NO: 2853818 - RNA, 18 nt, Human
acgccuaugaucccagca

SEQ ID NO: 2853819 - RNA, 17 nt, Human
acgccuaugaucccagc

SEQ ID NO: 2853820 - RNA, 15 nt, Human
acgccucccacuggg

SEQ ID NO: 2853821 - RNA, 23 nt, Human
acgccucucccuaggagaagagu

SEQ ID NO: 2853822 - RNA, 14 nt, Human
acgccucccacugg

SEQ ID NO: 2853823 - RNA, 15 nt, Human
acgcuaccucucugu

SEQ ID NO: 2853824 - RNA, 20 nt, Human
acgcuaccucucugucccuu

SEQ ID NO: 2853825 - RNA, 18 nt, Human
acgcuacuauaaagagaa

SEQ ID NO: 2853826 - RNA, 19 nt, Human
acgcuacuauaaagagaag

SEQ ID NO: 2853827 - RNA, 20 nt, Human
acgcgccuugucuccuacuc

SEQ ID NO: 2853828 - RNA, 14 nt, Human
acgcgcgcacacac

SEQ ID NO: 2853829 - RNA, 18 nt, Human
acgcgcuucgacuuuucu

SEQ ID NO: 2853830 - RNA, 16 nt, Human
acgcgcgcgcacacac

SEQ ID NO: 2853831 - RNA, 15 nt, Human
acgcgcgcacacaca

SEQ ID NO: 2853832 - RNA, 12 nt, Human
acgcguauuuac

SEQ ID NO: 2853833 - RNA, 12 nt, Human
acgcgucuccug

SEQ ID NO: 2853834 - RNA, 21 nt, Human
acgccuguaaucccagcacuu

SEQ ID NO: 2853835 - RNA, 16 nt, Human
acgccuguaguccuag

SEQ ID NO: 2853836 - RNA, 14 nt, Human
acgccuuccccuca

SEQ ID NO: 2853837 - RNA, 17 nt, Human
acgccuuccccucagcc

SEQ ID NO: 2853838 - RNA, 13 nt, Human
acgcgaaaccaau

SEQ ID NO: 2853839 - RNA, 19 nt, Human
acgcgaaaccaauuccuca

SEQ ID NO: 2853840 - RNA, 20 nt, Human
acgcgaaaccaauuccucau

SEQ ID NO: 2853841 - RNA, 13 nt, Human
acgcgcagaugug

SEQ ID NO: 2853842 - RNA, 19 nt, Human
acgcgcagaugugcagcag

SEQ ID NO: 2853843 - RNA, 20 nt, Human
acgcgcagaugugcagcaga

SEQ ID NO: 2853844 - RNA, 21 nt, Human
acgcgcagaugugcagcagau

SEQ ID NO: 2853845 - RNA, 22 nt, Human
acgcgcagaugugcagcagauu

SEQ ID NO: 2853846 - RNA, 15 nt, Human
acgcgccccccuccc

SEQ ID NO: 2853847 - RNA, 17 nt, Human
acgcgccccccucccag

SEQ ID NO: 2853848 - RNA, 18 nt, Human
acgcgccccccucccaga

SEQ ID NO: 2853849 - RNA, 20 nt, Human
acgcgccccccucccagagg

SEQ ID NO: 2853850 - RNA, 11 nt, Human
acgccuggcua

SEQ ID NO: 2853851 - RNA, 23 nt, Human
acgccugcaaacgcugccugccc

SEQ ID NO: 2853852 - RNA, 22 nt, Human
acgccugcaaacgcugccugcc

SEQ ID NO: 2853853 - RNA, 14 nt, Human
uccagucucuugua

SEQ ID NO: 2853854 - RNA, 16 nt, Human
uccagucucuuguaca

SEQ ID NO: 2853855 - RNA, 22 nt, Human
uccagucucuuguacagcguuu

SEQ ID NO: 2853856 - RNA, 15 nt, Human
uccagugcaaccaca

SEQ ID NO: 2853857 - RNA, 17 nt, Human
uccagugcaaccacaca

SEQ ID NO: 2853858 - RNA, 14 nt, Human
uccagugccagcaa

SEQ ID NO: 2853859 - RNA, 17 nt, Human
uccagugccagcaauga

SEQ ID NO: 2853860 - RNA, 17 nt, Human
uccaguggagguuuguc

SEQ ID NO: 2853861 - RNA, 22 nt, Human
uccaguggagguuugucgggca

SEQ ID NO: 2853862 - RNA, 13 nt, Human
uccaguauucuug

SEQ ID NO: 2853863 - RNA, 19 nt, Human
uccaguauucuugucaaaa

SEQ ID NO: 2853864 - RNA, 17 nt, Human
uccagucccccuauccu

SEQ ID NO: 2853865 - RNA, 18 nt, Human
uccagucccccuauccuu

SEQ ID NO: 2853866 - RNA, 21 nt, Human
uccagucccccuauccuuggc

SEQ ID NO: 2853867 - RNA, 22 nt, Human
uccagucccccuauccuuggca

SEQ ID NO: 2853868 - RNA, 23 nt, Human
uccagucccccuauccuuggcac

SEQ ID NO: 2853869 - RNA, 16 nt, Human
uccaguccaaggaaac

SEQ ID NO: 2853870 - RNA, 23 nt, Human
uccaguccaaggaaaccacagcu

SEQ ID NO: 2853871 - RNA, 12 nt, Human
acggccaggcca

SEQ ID NO: 2853872 - RNA, 21 nt, Human
acggcauuagcuuccugcccc

SEQ ID NO: 2853873 - RNA, 18 nt, Human
acggcucacugcagccuc

SEQ ID NO: 2853874 - RNA, 17 nt, Human
acggcucacugcagccu

SEQ ID NO: 2853875 - RNA, 16 nt, Human
acggcucacugcagcc

SEQ ID NO: 2853876 - RNA, 11 nt, Human
acggcugggca

SEQ ID NO: 2853877 - RNA, 22 nt, Human
acggcugggcacacgccuccca

SEQ ID NO: 2853878 - RNA, 15 nt, Human
acgggaagcaaccuc

SEQ ID NO: 2853879 - RNA, 19 nt, Human
acgggaagcaaccucccaa

SEQ ID NO: 2853880 - RNA, 21 nt, Human
acgggaagcgcucagaacagu

SEQ ID NO: 2853881 - RNA, 15 nt, Human
uccaguaaucuaaua

SEQ ID NO: 2853882 - RNA, 19 nt, Human
uccaguaaucuaauauggc

SEQ ID NO: 2853883 - RNA, 15 nt, Human
uccaguaccuugcuu

SEQ ID NO: 2853884 - RNA, 22 nt, Human
uccaguaccuugcuucuuacug

SEQ ID NO: 2853885 - RNA, 13 nt, Human
uccagugguucug

SEQ ID NO: 2853886 - RNA, 13 nt, Human
uccaguguacaua

SEQ ID NO: 2853887 - RNA, 20 nt, Human
uccaguguacauaguguaau

SEQ ID NO: 2853888 - RNA, 17 nt, Human
uccaguguucuaugaac

SEQ ID NO: 2853889 - RNA, 16 nt, Human
acggugaaggugacag

SEQ ID NO: 2853890 - RNA, 19 nt, Human
acggugaaggugacagcag

SEQ ID NO: 2853891 - RNA, 22 nt, Human
acggugcuccaggcaggcuaag

SEQ ID NO: 2853892 - RNA, 15 nt, Human
acggugcuccaggca

SEQ ID NO: 2853893 - RNA, 18 nt, Human
acggugcuccaggcaggc

SEQ ID NO: 2853894 - RNA, 14 nt, Human
acguauuuuaaaag

SEQ ID NO: 2853895 - RNA, 21 nt, Human
acgucacguguaguguccauu

SEQ ID NO: 2853896 - RNA, 17 nt, Human
acgucaaacaugaagug

SEQ ID NO: 2853897 - RNA, 16 nt, Human
acgucaaacaugaagu

SEQ ID NO: 2853898 - RNA, 14 nt, Human
acgucaaacaugaa

SEQ ID NO: 2853899 - RNA, 18 nt, Human
acguaaccacggaaaaga

SEQ ID NO: 2853900 - RNA, 13 nt, Human
acguaagcacugu

SEQ ID NO: 2853901 - RNA, 15 nt, Human
acguaagcacuguuu

SEQ ID NO: 2853902 - RNA, 17 nt, Human
acguaagcacuguuuuu

SEQ ID NO: 2853903 - RNA, 21 nt, Human
acgguuuuuuauuauuguggu

SEQ ID NO: 2853904 - RNA, 12 nt, Human
acguaaagaacu

SEQ ID NO: 2853905 - RNA, 15 nt, Human
acguaaagaacuuuu

SEQ ID NO: 2853906 - RNA, 17 nt, Human
acggugacaaagauggc

SEQ ID NO: 2853907 - RNA, 22 nt, Human
acguguuuuauuccuguauguu

SEQ ID NO: 2853908 - RNA, 11 nt, Human
acguguuuaaa

SEQ ID NO: 2853909 - RNA, 18 nt, Human
acgucagacuuggcucag

SEQ ID NO: 2853910 - RNA, 17 nt, Human
acgucagacuuggcuca

SEQ ID NO: 2853911 - RNA, 21 nt, Human
acgucacuggaccacugggca

SEQ ID NO: 2853912 - RNA, 21 nt, Human
acguccagguucaacccacag

SEQ ID NO: 2853913 - RNA, 18 nt, Human
acguucacccaucuuauc

SEQ ID NO: 2853914 - RNA, 21 nt, Human
acguucacccaucuuaucaag

SEQ ID NO: 2853915 - RNA, 15 nt, Human
acguuaccaggcagg

SEQ ID NO: 2853916 - RNA, 15 nt, Human
acguuacucagggcu

SEQ ID NO: 2853917 - RNA, 19 nt, Human
acguuacucagggcuccuc

SEQ ID NO: 2853918 - RNA, 23 nt, Human
acguuacucagggcuccucccag

SEQ ID NO: 2853919 - RNA, 14 nt, Human
acuaacacaaggac

SEQ ID NO: 2853920 - RNA, 15 nt, Human
acuaacacaaggaca

SEQ ID NO: 2853921 - RNA, 13 nt, Human
acuaaauguucua

SEQ ID NO: 2853922 - RNA, 14 nt, Human
acuaaauguucuau

SEQ ID NO: 2853923 - RNA, 20 nt, Human
acuaaauucgugauuuucaa

SEQ ID NO: 2853924 - RNA, 12 nt, Human
acuaaauuuaaa

SEQ ID NO: 2853925 - RNA, 19 nt, Human
acuaaauuuaaauuuaaag

SEQ ID NO: 2853926 - RNA, 22 nt, Human
acuaaauuuaaauuuaaagaua

SEQ ID NO: 2853927 - RNA, 13 nt, Human
acuaaauuugaua

SEQ ID NO: 2853928 - RNA, 15 nt, Human
acuaaauuugauacu

SEQ ID NO: 2853929 - RNA, 17 nt, Human
acuaaauuugauacuua

SEQ ID NO: 2853930 - RNA, 18 nt, Human
acuaaauuugauacuuau

SEQ ID NO: 2853931 - RNA, 20 nt, Human
acuaaauuugauacuuauau

SEQ ID NO: 2853932 - RNA, 21 nt, Human
acuaaauuugauacuuauauu

SEQ ID NO: 2853933 - RNA, 22 nt, Human
acuaaauuugauacuuauauuu

SEQ ID NO: 2853934 - RNA, 14 nt, Human
acuaaauuugggga

SEQ ID NO: 2853935 - RNA, 19 nt, Human
acuaaauuuggggacagau

SEQ ID NO: 2853936 - RNA, 20 nt, Human
acuaaauuuggggacagauu

SEQ ID NO: 2853937 - RNA, 21 nt, Human
acuaaauuuggggacagauuc

SEQ ID NO: 2853938 - RNA, 24 nt, Human
acuaaauuuggggacagauucagu

SEQ ID NO: 2853939 - RNA, 21 nt, Human
acuaauuuuaguauucauucu

SEQ ID NO: 2853940 - RNA, 17 nt, Human
acuaauuugauguuuac

SEQ ID NO: 2853941 - RNA, 13 nt, Human
acuacacauuuuu

SEQ ID NO: 2853942 - RNA, 15 nt, Human
acuacacauuuuuaa

SEQ ID NO: 2853943 - RNA, 16 nt, Human
acuacacauuuuuaaa

SEQ ID NO: 2853944 - RNA, 18 nt, Human
acuacacauuuuuaaauu

SEQ ID NO: 2853945 - RNA, 20 nt, Human
acuacacauuuuuaaauugu

SEQ ID NO: 2853946 - RNA, 21 nt, Human
acuacacauuuuuaaauuguu

SEQ ID NO: 2853947 - RNA, 22 nt, Human
acuacacauuuuuaaauuguua

SEQ ID NO: 2853948 - RNA, 13 nt, Human
acuacaccacaca

SEQ ID NO: 2853949 - RNA, 14 nt, Human
acuacaccacacac

SEQ ID NO: 2853950 - RNA, 15 nt, Human
acuacaccacacaca

SEQ ID NO: 2853951 - RNA, 16 nt, Human
acuacaccacacacaa

SEQ ID NO: 2853952 - RNA, 23 nt, Human
acuacaccacacacaacagccaa

SEQ ID NO: 2853953 - RNA, 20 nt, Human
acuacacaucccuaaugugu

SEQ ID NO: 2853954 - RNA, 23 nt, Human
acuacacaucccuaaugugugcc

SEQ ID NO: 2853955 - RNA, 13 nt, Human
acuaaacuuuacc

SEQ ID NO: 2853956 - RNA, 21 nt, Human
acuaaagaaaauaucugaaau

SEQ ID NO: 2853957 - RNA, 16 nt, Human
acuaaagauccaagaa

SEQ ID NO: 2853958 - RNA, 18 nt, Human
acuaaagaagaucuguaa

SEQ ID NO: 2853959 - RNA, 20 nt, Human
acuaaagaagaucuguaauu

SEQ ID NO: 2853960 - RNA, 15 nt, Human
acuaaaugccuaguu

SEQ ID NO: 2853961 - RNA, 17 nt, Human
acuaaaugccuaguuuu

SEQ ID NO: 2853962 - RNA, 19 nt, Human
acuaaaugccuaguuuuua

SEQ ID NO: 2853963 - RNA, 20 nt, Human
acuaaaugccuaguuuuuag

SEQ ID NO: 2853964 - RNA, 13 nt, Human
acguuuguaugug

SEQ ID NO: 2853965 - RNA, 20 nt, Human
acguuuggaagauccuguga

SEQ ID NO: 2853966 - RNA, 23 nt, Human
acguuuggaagauccugugagga

SEQ ID NO: 2853967 - RNA, 12 nt, Human
acguuggugacg

SEQ ID NO: 2853968 - RNA, 10 nt, Human
acguuucuca

SEQ ID NO: 2853969 - RNA, 12 nt, Human
acguuucucauu

SEQ ID NO: 2853970 - RNA, 12 nt, Human
acguuucuucac

SEQ ID NO: 2853971 - RNA, 22 nt, Human
ucccagagcugguggacccagg

SEQ ID NO: 2853972 - RNA, 21 nt, Human
ucccagagcugguggacccag

SEQ ID NO: 2853973 - RNA, 19 nt, Human
ucccagagcugguggaccc

SEQ ID NO: 2853974 - RNA, 13 nt, Human
ucccagaggucca

SEQ ID NO: 2853975 - RNA, 14 nt, Human
ucccagagguccag

SEQ ID NO: 2853976 - RNA, 16 nt, Human
ucccagagguccagcc

SEQ ID NO: 2853977 - RNA, 17 nt, Human
ucccagagguccagccc

SEQ ID NO: 2853978 - RNA, 18 nt, Human
ucccagagguccagccca

SEQ ID NO: 2853979 - RNA, 19 nt, Human
ucccagagguccagcccau

SEQ ID NO: 2853980 - RNA, 22 nt, Human
ucccagagguccagcccaucuc

SEQ ID NO: 2853981 - RNA, 23 nt, Human
ucccagagguccagcccaucucg

SEQ ID NO: 2853982 - RNA, 15 nt, Human
ucccagagugcuggg

SEQ ID NO: 2853983 - RNA, 12 nt, Human
ucccagaguuug

SEQ ID NO: 2853984 - RNA, 23 nt, Human
acuaauuuuacacauuagauuuu

SEQ ID NO: 2853985 - RNA, 12 nt, Human
ucccagaaauua

SEQ ID NO: 2853986 - RNA, 16 nt, Human
ucccagacuacuauuu

SEQ ID NO: 2853987 - RNA, 20 nt, Human
ucccagacuacuauuuucuu

SEQ ID NO: 2853988 - RNA, 23 nt, Human
ucccagacuacuauuuucuuuuu

SEQ ID NO: 2853989 - RNA, 14 nt, Human
ucccagaaucccag

SEQ ID NO: 2853990 - RNA, 16 nt, Human
ucccagaaucccagcc

SEQ ID NO: 2853991 - RNA, 18 nt, Human
ucccagaaucccagccgg

SEQ ID NO: 2853992 - RNA, 19 nt, Human
ucccagaaucccagccggc

SEQ ID NO: 2853993 - RNA, 16 nt, Human
ucccagagcaaaauaa

SEQ ID NO: 2853994 - RNA, 15 nt, Human
acuacacuccagccu

SEQ ID NO: 2853995 - RNA, 21 nt, Human
ucccacuuggcaucagcuggc

SEQ ID NO: 2853996 - RNA, 23 nt, Human
ucccacuuggcaucagcuggcgu

SEQ ID NO: 2853997 - RNA, 12 nt, Human
ucccacuuguca

SEQ ID NO: 2853998 - RNA, 20 nt, Human
acuacacuccagccugagca

SEQ ID NO: 2853999 - RNA, 14 nt, Human
acuacacugaggag

SEQ ID NO: 2854000 - RNA, 16 nt, Human
acuacacugaggagag

SEQ ID NO: 2854001 - RNA, 19 nt, Human
acuacacuccagccugagc

SEQ ID NO: 2854002 - RNA, 18 nt, Human
acuacacuccagccugag

SEQ ID NO: 2854003 - RNA, 17 nt, Human
acuacacuccagccuga

SEQ ID NO: 2854004 - RNA, 16 nt, Human
acuaugccugugucuu

SEQ ID NO: 2854005 - RNA, 13 nt, Human
acuaucucagaga

SEQ ID NO: 2854006 - RNA, 13 nt, Human
acuauauuugcua

SEQ ID NO: 2854007 - RNA, 18 nt, Human
acuauagccuaggugaca

SEQ ID NO: 2854008 - RNA, 22 nt, Human
acuauagccuaggugacagagu

SEQ ID NO: 2854009 - RNA, 20 nt, Human
acuauagccuaggugacaga

SEQ ID NO: 2854010 - RNA, 18 nt, Human
acuagagggaccucuccc

SEQ ID NO: 2854011 - RNA, 11 nt, Human
acuagacucuu

SEQ ID NO: 2854012 - RNA, 17 nt, Human
acuagacucuucacugu

SEQ ID NO: 2854013 - RNA, 19 nt, Human
acuagacucuucacuguua

SEQ ID NO: 2854014 - RNA, 16 nt, Human
acuagacguucauuug

SEQ ID NO: 2854015 - RNA, 16 nt, Human
acuagagaugugcaau

SEQ ID NO: 2854016 - RNA, 16 nt, Human
acucaauggauuugau

SEQ ID NO: 2854017 - RNA, 16 nt, Human
acuauggcugaguucu

SEQ ID NO: 2854018 - RNA, 13 nt, Human
acucacaaaugau

SEQ ID NO: 2854019 - RNA, 22 nt, Human
acucacaagugcucaucuguug

SEQ ID NO: 2854020 - RNA, 16 nt, Human
acucaaugcacugaca

SEQ ID NO: 2854021 - RNA, 19 nt, Human
acucaauggaguaugucug

SEQ ID NO: 2854022 - RNA, 23 nt, Human
acucaauggaguaugucugaugg

SEQ ID NO: 2854023 - RNA, 24 nt, Human
acucaauggaguaugucugaugga

SEQ ID NO: 2854024 - RNA, 14 nt, Human
acucaagcccgcgg

SEQ ID NO: 2854025 - RNA, 12 nt, Human
acucaagcacug

SEQ ID NO: 2854026 - RNA, 15 nt, Human
acucaagcacugaua

SEQ ID NO: 2854027 - RNA, 16 nt, Human
acuauguugcccaggc

SEQ ID NO: 2854028 - RNA, 15 nt, Human
acuauguugcccagg

SEQ ID NO: 2854029 - RNA, 14 nt, Human
acuauguugcccag

SEQ ID NO: 2854030 - RNA, 12 nt, Human
acuaugccugug

SEQ ID NO: 2854031 - RNA, 19 nt, Human
acuaugccugugucuucuc

SEQ ID NO: 2854032 - RNA, 18 nt, Human
acuaugccugugucuucu

SEQ ID NO: 2854033 - RNA, 13 nt, Human
acuauggaaaauc

SEQ ID NO: 2854034 - RNA, 14 nt, Human
acuauggaaaauca

SEQ ID NO: 2854035 - RNA, 17 nt, Human
acuauggaaaaucagcu

SEQ ID NO: 2854036 - RNA, 20 nt, Human
acuauggaaaaucagcugcu

SEQ ID NO: 2854037 - RNA, 21 nt, Human
acuauggaaaaucagcugcuc

SEQ ID NO: 2854038 - RNA, 22 nt, Human
acuauggaaaaucagcugcuca

SEQ ID NO: 2854039 - RNA, 19 nt, Human
acuauggagccuggcacag

SEQ ID NO: 2854040 - RNA, 23 nt, Human
acuauggagccuggcacaggacu

SEQ ID NO: 2854041 - RNA, 14 nt, Human
acuacucuuugauu

SEQ ID NO: 2854042 - RNA, 15 nt, Human
acuacucuuugauuu

SEQ ID NO: 2854043 - RNA, 17 nt, Human
acuacugaaacagauuu

SEQ ID NO: 2854044 - RNA, 19 nt, Human
acuagacucccaagcugga

SEQ ID NO: 2854045 - RNA, 12 nt, Human
acuagagaaugc

SEQ ID NO: 2854046 - RNA, 16 nt, Human
acuagagaaugcacag

SEQ ID NO: 2854047 - RNA, 20 nt, Human
acuagagaaugcacagauau

SEQ ID NO: 2854048 - RNA, 23 nt, Human
acuagagaaugcacagauauacu

SEQ ID NO: 2854049 - RNA, 15 nt, Human
acuacuuaccauuug

SEQ ID NO: 2854050 - RNA, 20 nt, Human
acuagacaccaaaguucuaa

SEQ ID NO: 2854051 - RNA, 12 nt, Human
acuacugggugu

SEQ ID NO: 2854052 - RNA, 13 nt, Human
acuacuggguguc

SEQ ID NO: 2854053 - RNA, 14 nt, Human
acuacuggguguca

SEQ ID NO: 2854054 - RNA, 16 nt, Human
acuacugggugucauu

SEQ ID NO: 2854055 - RNA, 17 nt, Human
acuacugggugucauuu

SEQ ID NO: 2854056 - RNA, 18 nt, Human
acuacugggugucauuuc

SEQ ID NO: 2854057 - RNA, 19 nt, Human
acuacugggugucauuuca

SEQ ID NO: 2854058 - RNA, 20 nt, Human
acuacugggugucauuucau

SEQ ID NO: 2854059 - RNA, 21 nt, Human
acuacugggugucauuucauu

SEQ ID NO: 2854060 - RNA, 23 nt, Human
acuacugggugucauuucauucc

SEQ ID NO: 2854061 - RNA, 15 nt, Human
uccccaggggaguug

SEQ ID NO: 2854062 - RNA, 17 nt, Human
uccccaggggucccagc

SEQ ID NO: 2854063 - RNA, 20 nt, Human
uccccaggggucccagccac

SEQ ID NO: 2854064 - RNA, 18 nt, Human
uccccaggggucccagcc

SEQ ID NO: 2854065 - RNA, 23 nt, Human
uccccaggggucccagccacccc

SEQ ID NO: 2854066 - RNA, 22 nt, Human
uccccaggggucccagccaccc

SEQ ID NO: 2854067 - RNA, 19 nt, Human
ucccauuugugccagagga

SEQ ID NO: 2854068 - RNA, 17 nt, Human
ucccauuugugccagag

SEQ ID NO: 2854069 - RNA, 16 nt, Human
ucccauuugugccaga

SEQ ID NO: 2854070 - RNA, 14 nt, Human
ucccauuuguaauu

SEQ ID NO: 2854071 - RNA, 15 nt, Human
ucccauuuguaauuu

SEQ ID NO: 2854072 - RNA, 23 nt, Human
ucccauuucuaccuaagucagcu

SEQ ID NO: 2854073 - RNA, 16 nt, Human
ucccagcuacucggga

SEQ ID NO: 2854074 - RNA, 10 nt, Human
ucccagccug

SEQ ID NO: 2854075 - RNA, 13 nt, Human
ucccagccggcca

SEQ ID NO: 2854076 - RNA, 19 nt, Human
ucccagccggccaauggaa

SEQ ID NO: 2854077 - RNA, 21 nt, Human
ucccagccggccaauggaaac

SEQ ID NO: 2854078 - RNA, 22 nt, Human
ucccagccggccaauggaaacc

SEQ ID NO: 2854079 - RNA, 23 nt, Human
ucccagccggccaauggaaaccu

SEQ ID NO: 2854080 - RNA, 16 nt, Human
ucccagcuaccucaac

SEQ ID NO: 2854081 - RNA, 23 nt, Human
ucccagcuacucagaagccugag

SEQ ID NO: 2854082 - RNA, 21 nt, Human
ucccagcuacucagaagccug

SEQ ID NO: 2854083 - RNA, 19 nt, Human
ucccagcuacucagaagcc

SEQ ID NO: 2854084 - RNA, 16 nt, Human
ucccagcuacucagaa

SEQ ID NO: 2854085 - RNA, 11 nt, Human
ucucagccucc

SEQ ID NO: 2854086 - RNA, 21 nt, Human
ucucagccgcuucugacugcu

SEQ ID NO: 2854087 - RNA, 13 nt, Human
ucucagcccagaa

SEQ ID NO: 2854088 - RNA, 14 nt, Human
ucucagcccagaag

SEQ ID NO: 2854089 - RNA, 15 nt, Human
ucucagcccagaaga

SEQ ID NO: 2854090 - RNA, 16 nt, Human
ucucagcccagaagaa

SEQ ID NO: 2854091 - RNA, 18 nt, Human
ucucagcccagaagaaaa

SEQ ID NO: 2854092 - RNA, 20 nt, Human
ucucagcccagaagaaaauu

SEQ ID NO: 2854093 - RNA, 22 nt, Human
ucucagcccagaagaaaauucu

SEQ ID NO: 2854094 - RNA, 20 nt, Human
ucucaggcaccagucccugu

SEQ ID NO: 2854095 - RNA, 23 nt, Human
ucucaggauauccuuaucagagc

SEQ ID NO: 2854096 - RNA, 13 nt, Human
ucucaggauccaa

SEQ ID NO: 2854097 - RNA, 14 nt, Human
ucucaggauccaag

SEQ ID NO: 2854098 - RNA, 13 nt, Human
ucucaggcaccag

SEQ ID NO: 2854099 - RNA, 15 nt, Human
ucucaggauccaagc

SEQ ID NO: 2854100 - RNA, 16 nt, Human
ucucaggauccaagcu

SEQ ID NO: 2854101 - RNA, 16 nt, Human
ucucaggagauuucau

SEQ ID NO: 2854102 - RNA, 15 nt, Human
ucucaggagcauggg

SEQ ID NO: 2854103 - RNA, 13 nt, Human
ucucaggagccau

SEQ ID NO: 2854104 - RNA, 18 nt, Human
ucucauuuagaacuugca

SEQ ID NO: 2854105 - RNA, 14 nt, Human
ucucauuugucaca

SEQ ID NO: 2854106 - RNA, 19 nt, Human
ucucauuugccaauaauaa

SEQ ID NO: 2854107 - RNA, 16 nt, Human
ucucauuugucacaca

SEQ ID NO: 2854108 - RNA, 14 nt, Human
ucucagcaagagaa

SEQ ID NO: 2854109 - RNA, 23 nt, Human
ucucauuugguuugauuuucccu

SEQ ID NO: 2854110 - RNA, 16 nt, Human
ucucauuuuaauguaa

SEQ ID NO: 2854111 - RNA, 18 nt, Human
ucucauuuuaauguaaag

SEQ ID NO: 2854112 - RNA, 19 nt, Human
ucucauuuuaauguaaaga

SEQ ID NO: 2854113 - RNA, 20 nt, Human
ucucauuuuaauguaaagau

SEQ ID NO: 2854114 - RNA, 22 nt, Human
ucucauuuuaauguaaagauuu

SEQ ID NO: 2854115 - RNA, 18 nt, Human
ucucauguaucaucugga

SEQ ID NO: 2854116 - RNA, 21 nt, Human
ucucaugccucagccuccuga

SEQ ID NO: 2854117 - RNA, 15 nt, Human
ucucauguguuugca

SEQ ID NO: 2854118 - RNA, 17 nt, Human
ucucauguguuugcaua

SEQ ID NO: 2854119 - RNA, 16 nt, Human
ucucaggccaucauca

SEQ ID NO: 2854120 - RNA, 20 nt, Human
ucucaugccucagccuccug

SEQ ID NO: 2854121 - RNA, 22 nt, Human
acuugcuuuaugccuucuuauu

SEQ ID NO: 2854122 - RNA, 19 nt, Human
acuugcugucccuuggaac

SEQ ID NO: 2854123 - RNA, 23 nt, Human
acuugcugccugaagaacaguaa

SEQ ID NO: 2854124 - RNA, 17 nt, Human
acuugcugccugaagaa

SEQ ID NO: 2854125 - RNA, 16 nt, Human
acuugugguugaauua

SEQ ID NO: 2854126 - RNA, 16 nt, Human
acuugugguuuucaaa

SEQ ID NO: 2854127 - RNA, 17 nt, Human
acuugugguuuucaaau

SEQ ID NO: 2854128 - RNA, 11 nt, Human
acuugugaaug

SEQ ID NO: 2854129 - RNA, 22 nt, Human
acuuguggacacagcucuucuc

SEQ ID NO: 2854130 - RNA, 19 nt, Human
acuuguggacacagcucuu

SEQ ID NO: 2854131 - RNA, 17 nt, Human
acuugugaaacacagcu

SEQ ID NO: 2854132 - RNA, 18 nt, Human
acuugugaaacacagcug

SEQ ID NO: 2854133 - RNA, 19 nt, Human
acuugugaaacacagcugu

SEQ ID NO: 2854134 - RNA, 20 nt, Human
acuugugaaacacagcuguu

SEQ ID NO: 2854135 - RNA, 10 nt, Human
acuugugaau

SEQ ID NO: 2854136 - RNA, 18 nt, Human
acuugucaagccugugca

SEQ ID NO: 2854137 - RNA, 20 nt, Human
acuugucaagccugugcaaa

SEQ ID NO: 2854138 - RNA, 22 nt, Human
acuugcagacucuacagaggcc

SEQ ID NO: 2854139 - RNA, 19 nt, Human
acuugcagacucuacagag

SEQ ID NO: 2854140 - RNA, 23 nt, Human
acuugcagacucuacagaggcca

SEQ ID NO: 2854141 - RNA, 23 nt, Human
acuugcagcugauguuggaagag

SEQ ID NO: 2854142 - RNA, 20 nt, Human
acuugcagcugauguuggaa

SEQ ID NO: 2854143 - RNA, 23 nt, Human
ucucacuauguugcccaggcagg

SEQ ID NO: 2854144 - RNA, 22 nt, Human
ucucacuauguugcccaggcag

SEQ ID NO: 2854145 - RNA, 21 nt, Human
ucucacuauguugcccaggca

SEQ ID NO: 2854146 - RNA, 20 nt, Human
ucucacuauguugcccaggc

SEQ ID NO: 2854147 - RNA, 13 nt, Human
ucucaccucagcc

SEQ ID NO: 2854148 - RNA, 13 nt, Human
acuugaugcaugu

SEQ ID NO: 2854149 - RNA, 14 nt, Human
acuugaugcaugug

SEQ ID NO: 2854150 - RNA, 14 nt, Human
acuugauuaagauu

SEQ ID NO: 2854151 - RNA, 16 nt, Human
acuugauuaagauuuu

SEQ ID NO: 2854152 - RNA, 17 nt, Human
acuugauuaagauuuua

SEQ ID NO: 2854153 - RNA, 19 nt, Human
acuugauuaagauuuuaca

SEQ ID NO: 2854154 - RNA, 21 nt, Human
acuugauuaagauuuuacaaa

SEQ ID NO: 2854155 - RNA, 23 nt, Human
acuugauuaagauuuuacaaaag

SEQ ID NO: 2854156 - RNA, 18 nt, Human
acuuuggaguccccucac

SEQ ID NO: 2854157 - RNA, 22 nt, Human
acuuuggaguccccucaccucc

SEQ ID NO: 2854158 - RNA, 23 nt, Human
acuuuggagagugagcuacagag

SEQ ID NO: 2854159 - RNA, 23 nt, Human
acuuuggaguccccucaccuccu

SEQ ID NO: 2854160 - RNA, 12 nt, Human
acuuuguagugu

SEQ ID NO: 2854161 - RNA, 15 nt, Human
acuuuguaguguuug

SEQ ID NO: 2854162 - RNA, 20 nt, Human
acuuuguaguguuuggugcu

SEQ ID NO: 2854163 - RNA, 12 nt, Human
acuuuguaaauu

SEQ ID NO: 2854164 - RNA, 13 nt, Human
acuuuguaaauuc

SEQ ID NO: 2854165 - RNA, 18 nt, Human
acuuugguuucugucugu

SEQ ID NO: 2854166 - RNA, 11 nt, Human
acuuuuuacaa

SEQ ID NO: 2854167 - RNA, 19 nt, Human
acuuuuuaacuauuaagag

SEQ ID NO: 2854168 - RNA, 19 nt, Human
acuuuuguguaaugaaaau

SEQ ID NO: 2854169 - RNA, 13 nt, Human
agaaaaaauaaau

SEQ ID NO: 2854170 - RNA, 14 nt, Human
agaaaaaauaaaug

SEQ ID NO: 2854171 - RNA, 15 nt, Human
agaaaaaauaaaugg

SEQ ID NO: 2854172 - RNA, 16 nt, Human
agaaaaaauaaaugga

SEQ ID NO: 2854173 - RNA, 19 nt, Human
ucuccuuguggccugggcc

SEQ ID NO: 2854174 - RNA, 18 nt, Human
agaaaaaauaacacacau

SEQ ID NO: 2854175 - RNA, 16 nt, Human
ucuccucauguucugc

SEQ ID NO: 2854176 - RNA, 23 nt, Human
ucuccgaccagacaccuugacag

SEQ ID NO: 2854177 - RNA, 17 nt, Human
ucuccgaccagacaccu

SEQ ID NO: 2854178 - RNA, 12 nt, Human
ucuccccagagu

SEQ ID NO: 2854179 - RNA, 23 nt, Human
ucuccccagcaagugagagcugg

SEQ ID NO: 2854180 - RNA, 22 nt, Human
ucuccccacacuaaccuggguu

SEQ ID NO: 2854181 - RNA, 14 nt, Human
ucuccccaccccua

SEQ ID NO: 2854182 - RNA, 17 nt, Human
ucuccccaccccuaccc

SEQ ID NO: 2854183 - RNA, 12 nt, Human
ucuccccagaau

SEQ ID NO: 2854184 - RNA, 12 nt, Human
ucuccacccugc

SEQ ID NO: 2854185 - RNA, 17 nt, Human
ucuccaagucucagugg

SEQ ID NO: 2854186 - RNA, 17 nt, Human
acuuuacccaaaaacua

SEQ ID NO: 2854187 - RNA, 17 nt, Human
acuuuacccaccuagaa

SEQ ID NO: 2854188 - RNA, 13 nt, Human
acuuuacccaccu

SEQ ID NO: 2854189 - RNA, 14 nt, Human
acuuucuguaaacu

SEQ ID NO: 2854190 - RNA, 18 nt, Human
acuuucuguaaacucaaa

SEQ ID NO: 2854191 - RNA, 18 nt, Human
acuuuacccaccuagaac

SEQ ID NO: 2854192 - RNA, 19 nt, Human
acuuucuguaaacucaaaa

SEQ ID NO: 2854193 - RNA, 22 nt, Human
acuuucuguuggauuccaugcu

SEQ ID NO: 2854194 - RNA, 23 nt, Human
acuuucuguuggauuccaugcua

SEQ ID NO: 2854195 - RNA, 14 nt, Human
acuuucuuauccua

SEQ ID NO: 2854196 - RNA, 15 nt, Human
acuuuacacucggcu

SEQ ID NO: 2854197 - RNA, 18 nt, Human
acuuuacacucggcuuug

SEQ ID NO: 2854198 - RNA, 20 nt, Human
acuuuacacucggcuuugga

SEQ ID NO: 2854199 - RNA, 10 nt, Human
acuuuaauuu

SEQ ID NO: 2854200 - RNA, 14 nt, Human
acuuuaauuuaugu

SEQ ID NO: 2854201 - RNA, 22 nt, Human
acuuuaauuuauguaacuugaa

SEQ ID NO: 2854202 - RNA, 15 nt, Human
ucuaggaagacauuu

SEQ ID NO: 2854203 - RNA, 14 nt, Human
ucuaguuucuugug

SEQ ID NO: 2854204 - RNA, 14 nt, Human
ucuaguuuacagaa

SEQ ID NO: 2854205 - RNA, 15 nt, Human
ucuaguuuacagaaa

SEQ ID NO: 2854206 - RNA, 21 nt, Human
ucuaguuuacagaaaaaucuu

SEQ ID NO: 2854207 - RNA, 21 nt, Human
ucuaguugccaaaucuggcuc

SEQ ID NO: 2854208 - RNA, 20 nt, Human
ucuauaaagaagaacuugca

SEQ ID NO: 2854209 - RNA, 20 nt, Human
ucuauaaagcgauauacaga

SEQ ID NO: 2854210 - RNA, 22 nt, Human
ucuauaaagcgauauacagaug

SEQ ID NO: 2854211 - RNA, 16 nt, Human
ucuauaaauuguccgu

SEQ ID NO: 2854212 - RNA, 16 nt, Human
ucuauaaggccauaaa

SEQ ID NO: 2854213 - RNA, 18 nt, Human
ucuauacaucucucccca

SEQ ID NO: 2854214 - RNA, 14 nt, Human
ucuauaaggccaua

SEQ ID NO: 2854215 - RNA, 13 nt, Human
ucuauaaggccau

SEQ ID NO: 2854216 - RNA, 14 nt, Human
acuuccccuaugga

SEQ ID NO: 2854217 - RNA, 18 nt, Human
acuucauauaugaggacu

SEQ ID NO: 2854218 - RNA, 19 nt, Human
acuuccccuuccuaauucc

SEQ ID NO: 2854219 - RNA, 13 nt, Human
acuuccccuuccu

SEQ ID NO: 2854220 - RNA, 17 nt, Human
acuucccuaacacuuac

SEQ ID NO: 2854221 - RNA, 13 nt, Human
ucuagacaagaua

SEQ ID NO: 2854222 - RNA, 14 nt, Human
ucuagacaagauau

SEQ ID NO: 2854223 - RNA, 17 nt, Human
ucuagacaagauauugu

SEQ ID NO: 2854224 - RNA, 18 nt, Human
ucuagacaagauauugua

SEQ ID NO: 2854225 - RNA, 20 nt, Human
ucuagacaagauauuguaca

SEQ ID NO: 2854226 - RNA, 21 nt, Human
ucuagacaagauauuguacau

SEQ ID NO: 2854227 - RNA, 23 nt, Human
ucuagacaagauauuguacauaa

SEQ ID NO: 2854228 - RNA, 23 nt, Human
ucuagacaauauacaagccaaag

SEQ ID NO: 2854229 - RNA, 14 nt, Human
ucuagacacugcca

SEQ ID NO: 2854230 - RNA, 22 nt, Human
ucuagacauggagguucuaagg

SEQ ID NO: 2854231 - RNA, 18 nt, Human
ucuagacauggagguucu

SEQ ID NO: 2854232 - RNA, 19 nt, Human
ucuagacauggagguucua

SEQ ID NO: 2854233 - RNA, 20 nt, Human
ucuagacauggagguucuaa

SEQ ID NO: 2854234 - RNA, 21 nt, Human
acuucccugauugaccugcuc

SEQ ID NO: 2854235 - RNA, 22 nt, Human
acuucccugauugaccugcucc

SEQ ID NO: 2854236 - RNA, 11 nt, Human
acuucccugcu

SEQ ID NO: 2854237 - RNA, 14 nt, Human
acuucccugcugcc

SEQ ID NO: 2854238 - RNA, 16 nt, Human
acuucccugcugccug

SEQ ID NO: 2854239 - RNA, 15 nt, Human
ucuagauaccuaaaa

SEQ ID NO: 2854240 - RNA, 17 nt, Human
ucuagauaccuaaaaca

SEQ ID NO: 2854241 - RNA, 18 nt, Human
ucuagauaccuaaaacau

SEQ ID NO: 2854242 - RNA, 19 nt, Human
ucuagauaccuaaaacaua

SEQ ID NO: 2854243 - RNA, 22 nt, Human
ucuagauaccuaaaacauaaga

SEQ ID NO: 2854244 - RNA, 13 nt, Human
ucuagaguccaag

SEQ ID NO: 2854245 - RNA, 15 nt, Human
ucuagaguccaaggu

SEQ ID NO: 2854246 - RNA, 20 nt, Human
ucuagaguccaagguuuaaa

SEQ ID NO: 2854247 - RNA, 14 nt, Human
ucuagaguucagag

SEQ ID NO: 2854248 - RNA, 18 nt, Human
ucuagaguucagaguccu

SEQ ID NO: 2854249 - RNA, 16 nt, Human
ucuagagauauauaua

SEQ ID NO: 2854250 - RNA, 18 nt, Human
ucuagagauauauauacu

SEQ ID NO: 2854251 - RNA, 13 nt, Human
ucuagacuuucug

SEQ ID NO: 2854252 - RNA, 14 nt, Human
ucuagacuuucugu

SEQ ID NO: 2854253 - RNA, 15 nt, Human
ucuagacuuucuguu

SEQ ID NO: 2854254 - RNA, 16 nt, Human
ucucacuauguugccc

SEQ ID NO: 2854255 - RNA, 19 nt, Human
ucucacuauguugcccagg

SEQ ID NO: 2854256 - RNA, 17 nt, Human
ucucacuauguugccca

SEQ ID NO: 2854257 - RNA, 15 nt, Human
ucucaccccauccca

SEQ ID NO: 2854258 - RNA, 18 nt, Human
ucuauuuuggauuguaua

SEQ ID NO: 2854259 - RNA, 17 nt, Human
ucuauuuuguaaacuca

SEQ ID NO: 2854260 - RNA, 19 nt, Human
ucucaccccaucccacacc

SEQ ID NO: 2854261 - RNA, 17 nt, Human
ucucaccccaucccaca

SEQ ID NO: 2854262 - RNA, 21 nt, Human
ucucaccccaucccacacccu

SEQ ID NO: 2854263 - RNA, 19 nt, Human
ucucaccuaaaaaaagaga

SEQ ID NO: 2854264 - RNA, 13 nt, Human
ucuauugccuucu

SEQ ID NO: 2854265 - RNA, 16 nt, Human
ucuauugccuucuuug

SEQ ID NO: 2854266 - RNA, 17 nt, Human
ucuauugccuucuuuga

SEQ ID NO: 2854267 - RNA, 18 nt, Human
ucuauugccuucuuugaa

SEQ ID NO: 2854268 - RNA, 19 nt, Human
ucuauugccuucuuugaag

SEQ ID NO: 2854269 - RNA, 20 nt, Human
ucuauugccuucuuugaaga

SEQ ID NO: 2854270 - RNA, 21 nt, Human
ucuauugccuucuuugaagaa

SEQ ID NO: 2854271 - RNA, 15 nt, Human
ucuauuuaaguaaaa

SEQ ID NO: 2854272 - RNA, 12 nt, Human
ucuauuuaagcc

SEQ ID NO: 2854273 - RNA, 12 nt, Human
ucuauuuaauau

SEQ ID NO: 2854274 - RNA, 13 nt, Human
ucuauuuaauauu

SEQ ID NO: 2854275 - RNA, 18 nt, Human
ucuauuuaauuaggaaaa

SEQ ID NO: 2854276 - RNA, 20 nt, Human
ucuauuuaauuaggaaaaaa

SEQ ID NO: 2854277 - RNA, 13 nt, Human
ucuauuuauguuu

SEQ ID NO: 2854278 - RNA, 15 nt, Human
ucuauuuauguuugc

SEQ ID NO: 2854279 - RNA, 14 nt, Human
ucuauuuauuaagu

SEQ ID NO: 2854280 - RNA, 18 nt, Human
ucuauuuauauguacaug

SEQ ID NO: 2854281 - RNA, 14 nt, Human
ucuauuuaugccuu

SEQ ID NO: 2854282 - RNA, 13 nt, Human
ucuauuuauaugu

SEQ ID NO: 2854283 - RNA, 15 nt, Human
ucuauuuuaaaauaa

SEQ ID NO: 2854284 - RNA, 16 nt, Human
ucuauuuauuaauauu

SEQ ID NO: 2854285 - RNA, 14 nt, Human
ucuauuugacuugu

SEQ ID NO: 2854286 - RNA, 18 nt, Human
ucuauuugacuugugguu

SEQ ID NO: 2854287 - RNA, 15 nt, Human
ucuauuuuggauugu

SEQ ID NO: 2854288 - RNA, 13 nt, Human
ucuauuuugaugc

SEQ ID NO: 2854289 - RNA, 15 nt, Human
ucuauuuugaugcag

SEQ ID NO: 2854290 - RNA, 20 nt, Human
ucuauuuugaugcagcauuu

SEQ ID NO: 2854291 - RNA, 21 nt, Human
ucuauuuugaugcagcauuug

SEQ ID NO: 2854292 - RNA, 23 nt, Human
ucuauuuugaugcagcauuugau

SEQ ID NO: 2854293 - RNA, 14 nt, Human
ucuauuuuagaaua

SEQ ID NO: 2854294 - RNA, 11 nt, Human
ucuauuuucua

SEQ ID NO: 2854295 - RNA, 14 nt, Human
ucuauuuucuaugu

SEQ ID NO: 2854296 - RNA, 15 nt, Human
ucuauuuucuaugua

SEQ ID NO: 2854297 - RNA, 16 nt, Human
ucuauuuucuauguac

SEQ ID NO: 2854298 - RNA, 18 nt, Human
ucuauuuucuauguacua

SEQ ID NO: 2854299 - RNA, 23 nt, Human
ucuaugggacucaaugcacugac

SEQ ID NO: 2854300 - RNA, 14 nt, Human
ucuaugguuaugaa

SEQ ID NO: 2854301 - RNA, 16 nt, Human
ucuaugguuaugaaag

SEQ ID NO: 2854302 - RNA, 18 nt, Human
ucuaugguuaugaaagaa

SEQ ID NO: 2854303 - RNA, 20 nt, Human
ucuaugguuaugaaagaaua

SEQ ID NO: 2854304 - RNA, 22 nt, Human
ucuaugguuaugaaagaauaua

SEQ ID NO: 2854305 - RNA, 13 nt, Human
ucuauaacagaua

SEQ ID NO: 2854306 - RNA, 19 nt, Human
ucuauggggagaggaacuc

SEQ ID NO: 2854307 - RNA, 12 nt, Human
ucuauguacuag

SEQ ID NO: 2854308 - RNA, 18 nt, Human
ucuauguacuaguacugu

SEQ ID NO: 2854309 - RNA, 20 nt, Human
ucuauguacuaguacugugu

SEQ ID NO: 2854310 - RNA, 21 nt, Human
ucuauguacuaguacugugua

SEQ ID NO: 2854311 - RNA, 22 nt, Human
ucuauguacuaguacuguguac

SEQ ID NO: 2854312 - RNA, 14 nt, Human
ucuauguaggaaaa

SEQ ID NO: 2854313 - RNA, 15 nt, Human
ucuauguaggaaaaa

SEQ ID NO: 2854314 - RNA, 18 nt, Human
ucuauguaggaaaaaaau

SEQ ID NO: 2854315 - RNA, 19 nt, Human
ucuauguaggaaaaaaaua

SEQ ID NO: 2854316 - RNA, 12 nt, Human
ucuauguuuacu

SEQ ID NO: 2854317 - RNA, 20 nt, Human
ucuauaccugucuccuuucu

SEQ ID NO: 2854318 - RNA, 12 nt, Human
ucuauuccagcu

SEQ ID NO: 2854319 - RNA, 13 nt, Human
ucuauuccagcuc

SEQ ID NO: 2854320 - RNA, 14 nt, Human
ucuauuccagcuca

SEQ ID NO: 2854321 - RNA, 15 nt, Human
ucuauuccagcucau

SEQ ID NO: 2854322 - RNA, 18 nt, Human
ucuauuccagcucauuca

SEQ ID NO: 2854323 - RNA, 19 nt, Human
ucuauuccagcucauucau

SEQ ID NO: 2854324 - RNA, 20 nt, Human
ucuauuccagcucauucauu

SEQ ID NO: 2854325 - RNA, 23 nt, Human
ucuauuccagcucauucauuuua

SEQ ID NO: 2854326 - RNA, 16 nt, Human
ucuauuccuucuggcc

SEQ ID NO: 2854327 - RNA, 17 nt, Human
ucuauuccuucuggccu

SEQ ID NO: 2854328 - RNA, 18 nt, Human
ucuauuccuucuggccuu

SEQ ID NO: 2854329 - RNA, 19 nt, Human
ucuauucugagaaaacaag

SEQ ID NO: 2854330 - RNA, 12 nt, Human
ucuauucugugu

SEQ ID NO: 2854331 - RNA, 17 nt, Human
ucuauucuguguugcau

SEQ ID NO: 2854332 - RNA, 18 nt, Human
ucuauucugagaaaacaa

SEQ ID NO: 2854333 - RNA, 17 nt, Human
ucuauucucaaaguuuc

SEQ ID NO: 2854334 - RNA, 22 nt, Human
ucuauugacuucaaugauagua

SEQ ID NO: 2854335 - RNA, 22 nt, Human
ucuauuaauauauguauuauuu

SEQ ID NO: 2854336 - RNA, 10 nt, Human
ucuauuaaua

SEQ ID NO: 2854337 - RNA, 12 nt, Human
ucuauuaauaua

SEQ ID NO: 2854338 - RNA, 13 nt, Human
ucuauuaauauau

SEQ ID NO: 2854339 - RNA, 16 nt, Human
ucuauuaauauaugua

SEQ ID NO: 2854340 - RNA, 21 nt, Human
ucuauuaauauauguauuauu

SEQ ID NO: 2854341 - RNA, 22 nt, Human
ucuauuaaagugcuaagguucu

SEQ ID NO: 2854342 - RNA, 23 nt, Human
ucuauuaaagugcuaagguucua

SEQ ID NO: 2854343 - RNA, 23 nt, Human
ucuauuaaauaguuauauaauuc

SEQ ID NO: 2854344 - RNA, 15 nt, Human
ucuaaggucuaucaa

SEQ ID NO: 2854345 - RNA, 18 nt, Human
uccugggagugagcuggu

SEQ ID NO: 2854346 - RNA, 23 nt, Human
uccugggagaaccucaggcuucc

SEQ ID NO: 2854347 - RNA, 15 nt, Human
uccugggagacccau

SEQ ID NO: 2854348 - RNA, 13 nt, Human
ucuaaguuucuaa

SEQ ID NO: 2854349 - RNA, 19 nt, Human
ucuacccagcgagcccugg

SEQ ID NO: 2854350 - RNA, 23 nt, Human
ucuacagcuaaucagcauucuca

SEQ ID NO: 2854351 - RNA, 20 nt, Human
ucuaauaccucugugugcuc

SEQ ID NO: 2854352 - RNA, 18 nt, Human
ucuaauaauuucuaaugu

SEQ ID NO: 2854353 - RNA, 22 nt, Human
ucuaauaaaacagcugucucua

SEQ ID NO: 2854354 - RNA, 21 nt, Human
ucuacagauagagaguuguug

SEQ ID NO: 2854355 - RNA, 20 nt, Human
ucuacagcuaaucagcauuc

SEQ ID NO: 2854356 - RNA, 21 nt, Human
ucuacagaggccaugggccuc

SEQ ID NO: 2854357 - RNA, 14 nt, Human
ucuaauaccucugu

SEQ ID NO: 2854358 - RNA, 16 nt, Human
ucuaauaauuucuaau

SEQ ID NO: 2854359 - RNA, 17 nt, Human
ucuaauaauuucuaaug

SEQ ID NO: 2854360 - RNA, 16 nt, Human
ucuaauaccucugugu

SEQ ID NO: 2854361 - RNA, 17 nt, Human
ucuaauaccucugugug

SEQ ID NO: 2854362 - RNA, 15 nt, Human
ucuaauaauuucuaa

SEQ ID NO: 2854363 - RNA, 13 nt, Human
ucuaauaaauuau

SEQ ID NO: 2854364 - RNA, 14 nt, Human
ucuaauaaauuaua

SEQ ID NO: 2854365 - RNA, 14 nt, Human
ucuaaguuucuaag

SEQ ID NO: 2854366 - RNA, 15 nt, Human
ucuaaguuucuaaga

SEQ ID NO: 2854367 - RNA, 16 nt, Human
ucuaaguuucuaagau

SEQ ID NO: 2854368 - RNA, 17 nt, Human
ucuaaguuucuaagauu

SEQ ID NO: 2854369 - RNA, 18 nt, Human
ucuaaguuucuaagauuc

SEQ ID NO: 2854370 - RNA, 20 nt, Human
ucuaaguuucuaagauucua

SEQ ID NO: 2854371 - RNA, 22 nt, Human
ucuaaguuucuaagauucuaaa

SEQ ID NO: 2854372 - RNA, 23 nt, Human
ucuaaguuucuaagauucuaaag

SEQ ID NO: 2854373 - RNA, 20 nt, Human
ucuacccagcgagcccuggu

SEQ ID NO: 2854374 - RNA, 16 nt, Human
ucuacccagggccugc

SEQ ID NO: 2854375 - RNA, 13 nt, Human
ucuacccagggcc

SEQ ID NO: 2854376 - RNA, 17 nt, Human
acuguucagcuguccuc

SEQ ID NO: 2854377 - RNA, 22 nt, Human
acuguucagcuguccucccucc

SEQ ID NO: 2854378 - RNA, 18 nt, Human
acuguucccaccugcugg

SEQ ID NO: 2854379 - RNA, 13 nt, Human
acuguucaagagc

SEQ ID NO: 2854380 - RNA, 15 nt, Human
acuguucaagagcac

SEQ ID NO: 2854381 - RNA, 16 nt, Human
acuguucaagagcaca

SEQ ID NO: 2854382 - RNA, 20 nt, Human
acuguucaaugguucugaaa

SEQ ID NO: 2854383 - RNA, 23 nt, Human
acuguucaaugguucugaaauaa

SEQ ID NO: 2854384 - RNA, 18 nt, Human
acuguucuucauuuuauu

SEQ ID NO: 2854385 - RNA, 10 nt, Human
acuguucuug

SEQ ID NO: 2854386 - RNA, 11 nt, Human
acuguucuugc

SEQ ID NO: 2854387 - RNA, 12 nt, Human
acuguucuugcu

SEQ ID NO: 2854388 - RNA, 13 nt, Human
acuguucuugcug

SEQ ID NO: 2854389 - RNA, 14 nt, Human
acuguucuugcugc

SEQ ID NO: 2854390 - RNA, 15 nt, Human
acuguucuugcugcu

SEQ ID NO: 2854391 - RNA, 16 nt, Human
acuguucuugcugcua

SEQ ID NO: 2854392 - RNA, 17 nt, Human
acuguucuugcugcuag

SEQ ID NO: 2854393 - RNA, 18 nt, Human
acuguucuugcugcuaga

SEQ ID NO: 2854394 - RNA, 19 nt, Human
acuguucuugcugcuagaa

SEQ ID NO: 2854395 - RNA, 20 nt, Human
acuguucuugcugcuagaac

SEQ ID NO: 2854396 - RNA, 21 nt, Human
acuguucuugcugcuagaacu

SEQ ID NO: 2854397 - RNA, 22 nt, Human
acuguucuugcugcuagaacuu

SEQ ID NO: 2854398 - RNA, 23 nt, Human
acuguucuugcugcuagaacuuu

SEQ ID NO: 2854399 - RNA, 13 nt, Human
acuuaaugaauga

SEQ ID NO: 2854400 - RNA, 14 nt, Human
acuuaagcaaaaga

SEQ ID NO: 2854401 - RNA, 15 nt, Human
acuuaagcaaaagaa

SEQ ID NO: 2854402 - RNA, 16 nt, Human
acuuaagcaaaagaaa

SEQ ID NO: 2854403 - RNA, 19 nt, Human
acuuaagcaaaagaaaaag

SEQ ID NO: 2854404 - RNA, 20 nt, Human
acuuaagcaaaagaaaaaga

SEQ ID NO: 2854405 - RNA, 15 nt, Human
acuuaagcacaagca

SEQ ID NO: 2854406 - RNA, 19 nt, Human
acuuaaauggaaaaaauga

SEQ ID NO: 2854407 - RNA, 14 nt, Human
acuguugauaauuc

SEQ ID NO: 2854408 - RNA, 16 nt, Human
acuguugauaauucuu

SEQ ID NO: 2854409 - RNA, 17 nt, Human
acuguugauaauucuua

SEQ ID NO: 2854410 - RNA, 18 nt, Human
acuguugauaauucuuau

SEQ ID NO: 2854411 - RNA, 19 nt, Human
acuguugauaauucuuauu

SEQ ID NO: 2854412 - RNA, 20 nt, Human
acuguugauaauucuuauuu

SEQ ID NO: 2854413 - RNA, 22 nt, Human
acuguugauaauucuuauuuug

SEQ ID NO: 2854414 - RNA, 23 nt, Human
acuguugauaauucuuauuuugu

SEQ ID NO: 2854415 - RNA, 15 nt, Human
acuguugauguacug

SEQ ID NO: 2854416 - RNA, 13 nt, Human
acuguugauguau

SEQ ID NO: 2854417 - RNA, 15 nt, Human
acuguugauguaucu

SEQ ID NO: 2854418 - RNA, 16 nt, Human
acuguugauguaucug

SEQ ID NO: 2854419 - RNA, 17 nt, Human
acuguugauguaucuga

SEQ ID NO: 2854420 - RNA, 20 nt, Human
acuguugauguaucugaguu

SEQ ID NO: 2854421 - RNA, 13 nt, Human
acuguugaaaauu

SEQ ID NO: 2854422 - RNA, 14 nt, Human
acuguugaaaauua

SEQ ID NO: 2854423 - RNA, 21 nt, Human
acuguugaaaauuauuuuaaa

SEQ ID NO: 2854424 - RNA, 23 nt, Human
acuguugaaaauuauuuuaaaca

SEQ ID NO: 2854425 - RNA, 23 nt, Human
acuuaacuauucaggagaguaga

SEQ ID NO: 2854426 - RNA, 15 nt, Human
acuuaacauuccuaa

SEQ ID NO: 2854427 - RNA, 21 nt, Human
acuuaacauuccuaaaaugcu

SEQ ID NO: 2854428 - RNA, 16 nt, Human
acuuaacuuuaacuga

SEQ ID NO: 2854429 - RNA, 19 nt, Human
acuuaacuuuaacugaaca

SEQ ID NO: 2854430 - RNA, 12 nt, Human
acuuaagagaaa

SEQ ID NO: 2854431 - RNA, 13 nt, Human
acuuaagagaaau

SEQ ID NO: 2854432 - RNA, 14 nt, Human
acuuaagagaaaug

SEQ ID NO: 2854433 - RNA, 15 nt, Human
acuuaagagaaaugg

SEQ ID NO: 2854434 - RNA, 17 nt, Human
acuuaagagaaauggca

SEQ ID NO: 2854435 - RNA, 14 nt, Human
acuuaacauauuua

SEQ ID NO: 2854436 - RNA, 17 nt, Human
acuuaaauuuuaauuua

SEQ ID NO: 2854437 - RNA, 17 nt, Human
acuuacagcucuggcca

SEQ ID NO: 2854438 - RNA, 19 nt, Human
acuuacauauauuuuuaaa

SEQ ID NO: 2854439 - RNA, 22 nt, Human
acuuacagagcguggcugugcu

SEQ ID NO: 2854440 - RNA, 16 nt, Human
acuuagcuaucagaag

SEQ ID NO: 2854441 - RNA, 14 nt, Human
acuuagcugggaga

SEQ ID NO: 2854442 - RNA, 18 nt, Human
acuuaggcccuagcggca

SEQ ID NO: 2854443 - RNA, 14 nt, Human
acuuaggcuuugua

SEQ ID NO: 2854444 - RNA, 16 nt, Human
acuuaggcuuuguagc

SEQ ID NO: 2854445 - RNA, 12 nt, Human
acuuaugaaugu

SEQ ID NO: 2854446 - RNA, 13 nt, Human
acuuaugaauguu

SEQ ID NO: 2854447 - RNA, 14 nt, Human
acuuaugaauguuu

SEQ ID NO: 2854448 - RNA, 15 nt, Human
acuuaugaauguuuc

SEQ ID NO: 2854449 - RNA, 17 nt, Human
acuuaugaauguuuccg

SEQ ID NO: 2854450 - RNA, 14 nt, Human
acuuauguuuuuaa

SEQ ID NO: 2854451 - RNA, 15 nt, Human
acuuauguuuuuaaa

SEQ ID NO: 2854452 - RNA, 16 nt, Human
acuuauguuuuuaaau

SEQ ID NO: 2854453 - RNA, 13 nt, Human
acuuauguagaua

SEQ ID NO: 2854454 - RNA, 15 nt, Human
acuuauguagauauu

SEQ ID NO: 2854455 - RNA, 19 nt, Human
acuuauguagauauuuggc

SEQ ID NO: 2854456 - RNA, 20 nt, Human
acuuauguagauauuuggcu

SEQ ID NO: 2854457 - RNA, 21 nt, Human
acuuauguagauauuuggcuu

SEQ ID NO: 2854458 - RNA, 15 nt, Human
acuuauugcugauuu

SEQ ID NO: 2854459 - RNA, 18 nt, Human
acuuauugcugauuuuaa

SEQ ID NO: 2854460 - RNA, 19 nt, Human
acuuauugcugauuuuaau

SEQ ID NO: 2854461 - RNA, 20 nt, Human
acuuauugcugauuuuaaug

SEQ ID NO: 2854462 - RNA, 21 nt, Human
acuuauugcugauuuuaaugg

SEQ ID NO: 2854463 - RNA, 13 nt, Human
acuuauuacaauu

SEQ ID NO: 2854464 - RNA, 16 nt, Human
acuuauuacaauuugu

SEQ ID NO: 2854465 - RNA, 20 nt, Human
acuuauuacaauuuguucau

SEQ ID NO: 2854466 - RNA, 15 nt, Human
acuucaguccugcuc

SEQ ID NO: 2854467 - RNA, 19 nt, Human
acuucaguccugcuccaga

SEQ ID NO: 2854468 - RNA, 15 nt, Human
acuucaguccuggga

SEQ ID NO: 2854469 - RNA, 16 nt, Human
acuucaguccugggag

SEQ ID NO: 2854470 - RNA, 13 nt, Human
agaauuauauagg

SEQ ID NO: 2854471 - RNA, 22 nt, Human
agaauuauauagguugugcaaa

SEQ ID NO: 2854472 - RNA, 15 nt, Human
agaauguaucuguga

SEQ ID NO: 2854473 - RNA, 16 nt, Human
agaauguaucugugaa

SEQ ID NO: 2854474 - RNA, 17 nt, Human
agaauguaucugugaag

SEQ ID NO: 2854475 - RNA, 22 nt, Human
agaauguaucugugaaguaguu

SEQ ID NO: 2854476 - RNA, 23 nt, Human
ucugggaggaauggacagacaga

SEQ ID NO: 2854477 - RNA, 19 nt, Human
ucugggaggaauggacaga

SEQ ID NO: 2854478 - RNA, 18 nt, Human
agaauuauuuuuaaaaag

SEQ ID NO: 2854479 - RNA, 19 nt, Human
agaauuauuuuuaaaaaga

SEQ ID NO: 2854480 - RNA, 23 nt, Human
agaauuauuuuuaaaaagaaauc

SEQ ID NO: 2854481 - RNA, 20 nt, Human
agaauucaaacuggggccuc

SEQ ID NO: 2854482 - RNA, 18 nt, Human
agaauucagaagaccccu

SEQ ID NO: 2854483 - RNA, 11 nt, Human
agaauuauuua

SEQ ID NO: 2854484 - RNA, 21 nt, Human
agaauuauuucacaaauaaua

SEQ ID NO: 2854485 - RNA, 18 nt, Human
ucugggcacacucugcca

SEQ ID NO: 2854486 - RNA, 20 nt, Human
ucugggcacacucugccagc

SEQ ID NO: 2854487 - RNA, 19 nt, Human
ucugggccaaguuccucua

SEQ ID NO: 2854488 - RNA, 16 nt, Human
ucugggccaaguuccu

SEQ ID NO: 2854489 - RNA, 12 nt, Human
ucugggccaagu

SEQ ID NO: 2854490 - RNA, 14 nt, Human
ucugggcaggacuc

SEQ ID NO: 2854491 - RNA, 20 nt, Human
ucugggcaggacucagcucc

SEQ ID NO: 2854492 - RNA, 21 nt, Human
ucugggcaggacucagcuccc

SEQ ID NO: 2854493 - RNA, 13 nt, Human
agaaugguggcuu

SEQ ID NO: 2854494 - RNA, 17 nt, Human
agaaugguggcuucuuu

SEQ ID NO: 2854495 - RNA, 21 nt, Human
agaaugguugccuuaaagaaa

SEQ ID NO: 2854496 - RNA, 23 nt, Human
agaaugguugccuuaaagaaagu

SEQ ID NO: 2854497 - RNA, 16 nt, Human
agaauguaaaagaacu

SEQ ID NO: 2854498 - RNA, 17 nt, Human
agaauguaaaagaacuu

SEQ ID NO: 2854499 - RNA, 23 nt, Human
agaaucccagccggccaauggaa

SEQ ID NO: 2854500 - RNA, 16 nt, Human
agaaucccuagacuuu

SEQ ID NO: 2854501 - RNA, 19 nt, Human
agaaucccuagacuuuagg

SEQ ID NO: 2854502 - RNA, 16 nt, Human
agaaucccucuacaug

SEQ ID NO: 2854503 - RNA, 19 nt, Human
agaaucccucuacauggac

SEQ ID NO: 2854504 - RNA, 19 nt, Human
agaaucccaaauuugauug

SEQ ID NO: 2854505 - RNA, 20 nt, Human
agaauccacguauuccccuu

SEQ ID NO: 2854506 - RNA, 12 nt, Human
agaaucccagcc

SEQ ID NO: 2854507 - RNA, 18 nt, Human
agaaucccaaauuugauu

SEQ ID NO: 2854508 - RNA, 17 nt, Human
agaaucccaaauuugau

SEQ ID NO: 2854509 - RNA, 15 nt, Human
agaaucccaaauuug

SEQ ID NO: 2854510 - RNA, 18 nt, Human
agaauccacauuucuaaa

SEQ ID NO: 2854511 - RNA, 19 nt, Human
agaauccacauuucuaaaa

SEQ ID NO: 2854512 - RNA, 20 nt, Human
agaauccacauuucuaaaau

SEQ ID NO: 2854513 - RNA, 22 nt, Human
agaauccacauuucuaaaaucu

SEQ ID NO: 2854514 - RNA, 18 nt, Human
agaauauucagagaauau

SEQ ID NO: 2854515 - RNA, 21 nt, Human
agaauauugaaguacuugcca

SEQ ID NO: 2854516 - RNA, 22 nt, Human
agaauauugaaguacuugccag

SEQ ID NO: 2854517 - RNA, 12 nt, Human
agaauauugucc

SEQ ID NO: 2854518 - RNA, 14 nt, Human
agaaucauacuuag

SEQ ID NO: 2854519 - RNA, 16 nt, Human
agaauccacauuucua

SEQ ID NO: 2854520 - RNA, 17 nt, Human
agaauccacauuucuaa

SEQ ID NO: 2854521 - RNA, 22 nt, Human
agaaucagcacagauaaaaagu

SEQ ID NO: 2854522 - RNA, 13 nt, Human
agaaucauuaccu

SEQ ID NO: 2854523 - RNA, 13 nt, Human
agaauaugucugc

SEQ ID NO: 2854524 - RNA, 13 nt, Human
agaauauguuucc

SEQ ID NO: 2854525 - RNA, 15 nt, Human
agaauauguuuccuu

SEQ ID NO: 2854526 - RNA, 18 nt, Human
agaauauguuuccuuguu

SEQ ID NO: 2854527 - RNA, 18 nt, Human
agaauauauuuauuuaaa

SEQ ID NO: 2854528 - RNA, 20 nt, Human
agaauauauuuauuuaaagc

SEQ ID NO: 2854529 - RNA, 21 nt, Human
agaauauauuuauuuaaagca

SEQ ID NO: 2854530 - RNA, 23 nt, Human
agaauauauuuauuuaaagcauu

SEQ ID NO: 2854531 - RNA, 20 nt, Human
agaauaucaagaugauucug

SEQ ID NO: 2854532 - RNA, 16 nt, Human
agaauagaugcugacu

SEQ ID NO: 2854533 - RNA, 17 nt, Human
agaauagccacauuugg

SEQ ID NO: 2854534 - RNA, 13 nt, Human
agaauagcaucug

SEQ ID NO: 2854535 - RNA, 18 nt, Human
agaauagcaucuguacaa

SEQ ID NO: 2854536 - RNA, 19 nt, Human
agaauagcaucuguacaaa

SEQ ID NO: 2854537 - RNA, 21 nt, Human
agaauagcaucuguacaaagg

SEQ ID NO: 2854538 - RNA, 22 nt, Human
agaauagcaucuguacaaaggg

SEQ ID NO: 2854539 - RNA, 13 nt, Human
agaauagaaagaa

SEQ ID NO: 2854540 - RNA, 14 nt, Human
agaauagaaagaaa

SEQ ID NO: 2854541 - RNA, 14 nt, Human
agaauacuuuuuaa

SEQ ID NO: 2854542 - RNA, 22 nt, Human
agaauagaaauaaaggauguga

SEQ ID NO: 2854543 - RNA, 14 nt, Human
agaauaagagaaag

SEQ ID NO: 2854544 - RNA, 15 nt, Human
agaauaagaaaacaa

SEQ ID NO: 2854545 - RNA, 20 nt, Human
agaauaagaaaacaaucaca

SEQ ID NO: 2854546 - RNA, 16 nt, Human
agaauaagagaaagaa

SEQ ID NO: 2854547 - RNA, 21 nt, Human
agaauaagagaaagaaaauga

SEQ ID NO: 2854548 - RNA, 15 nt, Human
agaauaaggcaggca

SEQ ID NO: 2854549 - RNA, 16 nt, Human
agaauaaggcaggcau

SEQ ID NO: 2854550 - RNA, 15 nt, Human
agaauaaaagaaauu

SEQ ID NO: 2854551 - RNA, 15 nt, Human
agaauaaaagguagu

SEQ ID NO: 2854552 - RNA, 17 nt, Human
agaaguuuauucucauu

SEQ ID NO: 2854553 - RNA, 14 nt, Human
agaaguuucccuuc

SEQ ID NO: 2854554 - RNA, 16 nt, Human
agaaguuucccuuccu

SEQ ID NO: 2854555 - RNA, 18 nt, Human
agaaguuucccuuccucc

SEQ ID NO: 2854556 - RNA, 14 nt, Human
agaagugucauguu

SEQ ID NO: 2854557 - RNA, 15 nt, Human
agaagugucauguuu

SEQ ID NO: 2854558 - RNA, 18 nt, Human
agaagugucauguuuaua

SEQ ID NO: 2854559 - RNA, 20 nt, Human
agaaguggggacagagcaga

SEQ ID NO: 2854560 - RNA, 14 nt, Human
ucugcuuguguuaa

SEQ ID NO: 2854561 - RNA, 18 nt, Human
ucugcuuuaaagggccug

SEQ ID NO: 2854562 - RNA, 21 nt, Human
ucugcuuuaaagggccugccu

SEQ ID NO: 2854563 - RNA, 22 nt, Human
ucugcuuuaaagggccugccug

SEQ ID NO: 2854564 - RNA, 19 nt, Human
ucugcuuucuuugauucuc

SEQ ID NO: 2854565 - RNA, 22 nt, Human
ucugcuuucuuugauucuccuu

SEQ ID NO: 2854566 - RNA, 18 nt, Human
ucugcuuuccucuuccug

SEQ ID NO: 2854567 - RNA, 13 nt, Human
ucugcuuuccucu

SEQ ID NO: 2854568 - RNA, 12 nt, Human
ucugcuuuccuc

SEQ ID NO: 2854569 - RNA, 13 nt, Human
agaaggcagccac

SEQ ID NO: 2854570 - RNA, 15 nt, Human
agaaggcaaaaaugu

SEQ ID NO: 2854571 - RNA, 23 nt, Human
agaaggccuucauggccccagca

SEQ ID NO: 2854572 - RNA, 16 nt, Human
agaagggaauccuccu

SEQ ID NO: 2854573 - RNA, 18 nt, Human
agaagggaauccuccucc

SEQ ID NO: 2854574 - RNA, 23 nt, Human
ucugugaccucaggcacuagccu

SEQ ID NO: 2854575 - RNA, 16 nt, Human
ucugugaccugcaucu

SEQ ID NO: 2854576 - RNA, 20 nt, Human
ucugugaaaugcuggcauuu

SEQ ID NO: 2854577 - RNA, 17 nt, Human
ucugugaaaugcuggca

SEQ ID NO: 2854578 - RNA, 18 nt, Human
ucugucagaaugcuauug

SEQ ID NO: 2854579 - RNA, 15 nt, Human
ucugucagaugagaa

SEQ ID NO: 2854580 - RNA, 18 nt, Human
ucugucagaugagaacaa

SEQ ID NO: 2854581 - RNA, 19 nt, Human
ucugucagaugagaacaaa

SEQ ID NO: 2854582 - RNA, 20 nt, Human
ucugucagaugagaacaaag

SEQ ID NO: 2854583 - RNA, 21 nt, Human
ucugucagaugagaacaaagc

SEQ ID NO: 2854584 - RNA, 22 nt, Human
ucugucagaugagaacaaagcu

SEQ ID NO: 2854585 - RNA, 23 nt, Human
ucugucagaugagaacaaagcug

SEQ ID NO: 2854586 - RNA, 24 nt, Human
ucugucagaugagaacaaagcugu

SEQ ID NO: 2854587 - RNA, 16 nt, Human
ucugugaaaguacauu

SEQ ID NO: 2854588 - RNA, 13 nt, Human
ucugucaagaaga

SEQ ID NO: 2854589 - RNA, 17 nt, Human
ucugucaagaguaguua

SEQ ID NO: 2854590 - RNA, 20 nt, Human
ucugucaagaguaguuauau

SEQ ID NO: 2854591 - RNA, 22 nt, Human
ucugucaagaguaguuauauaa

SEQ ID NO: 2854592 - RNA, 14 nt, Human
ucugucaaugaaaa

SEQ ID NO: 2854593 - RNA, 15 nt, Human
ucugucacaccagcc

SEQ ID NO: 2854594 - RNA, 19 nt, Human
ucugucaccaauugguuaa

SEQ ID NO: 2854595 - RNA, 12 nt, Human
ucugucacucag

SEQ ID NO: 2854596 - RNA, 14 nt, Human
ucugucacucaggc

SEQ ID NO: 2854597 - RNA, 21 nt, Human
ucuguauuuuuucuugcauug

SEQ ID NO: 2854598 - RNA, 22 nt, Human
ucuguauuuuuucuugcauuga

SEQ ID NO: 2854599 - RNA, 23 nt, Human
ucuguauuuuuucuugcauugac

SEQ ID NO: 2854600 - RNA, 15 nt, Human
ucugucaaaacacug

SEQ ID NO: 2854601 - RNA, 16 nt, Human
ucugucaaaacacugu

SEQ ID NO: 2854602 - RNA, 17 nt, Human
ucugucaaaacacugug

SEQ ID NO: 2854603 - RNA, 18 nt, Human
ucugucaaaacacugugg

SEQ ID NO: 2854604 - RNA, 19 nt, Human
ucugucaaaacacugugga

SEQ ID NO: 2854605 - RNA, 20 nt, Human
ucugucaaaacacuguggaa

SEQ ID NO: 2854606 - RNA, 20 nt, Human
ucugggcggcgggcggcugg

SEQ ID NO: 2854607 - RNA, 17 nt, Human
ucugggcuagguagaaa

SEQ ID NO: 2854608 - RNA, 18 nt, Human
ucugggcccccuccuccc

SEQ ID NO: 2854609 - RNA, 12 nt, Human
ucugggccuggg

SEQ ID NO: 2854610 - RNA, 13 nt, Human
ucugggccugggc

SEQ ID NO: 2854611 - RNA, 17 nt, Human
ucugggccugggcuagg

SEQ ID NO: 2854612 - RNA, 18 nt, Human
ucugggccugggcuaggg

SEQ ID NO: 2854613 - RNA, 23 nt, Human
ucugggccaaguuccucuagugc

SEQ ID NO: 2854614 - RNA, 19 nt, Human
ucugggccaccaggaucag

SEQ ID NO: 2854615 - RNA, 15 nt, Human
ucugggccagaauuu

SEQ ID NO: 2854616 - RNA, 14 nt, Human
ucugggccagaauu

SEQ ID NO: 2854617 - RNA, 14 nt, Human
agaauugaaacacu

SEQ ID NO: 2854618 - RNA, 15 nt, Human
agaauugaaacacuu

SEQ ID NO: 2854619 - RNA, 17 nt, Human
agaauugaaacacuuuu

SEQ ID NO: 2854620 - RNA, 14 nt, Human
ucuguuguguguca

SEQ ID NO: 2854621 - RNA, 18 nt, Human
ucuguugugugucaugcc

SEQ ID NO: 2854622 - RNA, 13 nt, Human
ucuguuuaaagug

SEQ ID NO: 2854623 - RNA, 14 nt, Human
ucuguuuaaagugg

SEQ ID NO: 2854624 - RNA, 13 nt, Human
ucuguuuaagaaa

SEQ ID NO: 2854625 - RNA, 14 nt, Human
ucuguuuaagaaaa

SEQ ID NO: 2854626 - RNA, 19 nt, Human
ucuguuuaagaaaaguauu

SEQ ID NO: 2854627 - RNA, 20 nt, Human
ucuguuuaagaaaaguauuu

SEQ ID NO: 2854628 - RNA, 19 nt, Human
ucuguuuaaagcauauaga

SEQ ID NO: 2854629 - RNA, 22 nt, Human
ucuguuuaaagcauauagagau

SEQ ID NO: 2854630 - RNA, 15 nt, Human
ucuguuguaagaaua

SEQ ID NO: 2854631 - RNA, 17 nt, Human
ucuguuguacuauggaa

SEQ ID NO: 2854632 - RNA, 17 nt, Human
ucuguuggccaguguga

SEQ ID NO: 2854633 - RNA, 12 nt, Human
ucuguuggccag

SEQ ID NO: 2854634 - RNA, 22 nt, Human
ucuguuggaagcuuguuuucca

SEQ ID NO: 2854635 - RNA, 16 nt, Human
ucuguuggauuccaug

SEQ ID NO: 2854636 - RNA, 18 nt, Human
ucuguuggauuccaugcu

SEQ ID NO: 2854637 - RNA, 15 nt, Human
ucuguugcugccuca

SEQ ID NO: 2854638 - RNA, 16 nt, Human
ucuguugcccaggcug

SEQ ID NO: 2854639 - RNA, 22 nt, Human
ucuguugccacccaggugaugu

SEQ ID NO: 2854640 - RNA, 17 nt, Human
ucuguucuuuugacuua

SEQ ID NO: 2854641 - RNA, 17 nt, Human
ucugugaggaaagcaca

SEQ ID NO: 2854642 - RNA, 20 nt, Human
ucugugaggaaagcacacag

SEQ ID NO: 2854643 - RNA, 17 nt, Human
ucugugauacagaacuc

SEQ ID NO: 2854644 - RNA, 14 nt, Human
ucugugaucauuua

SEQ ID NO: 2854645 - RNA, 15 nt, Human
ucugugaucuuuuaa

SEQ ID NO: 2854646 - RNA, 20 nt, Human
ucugugaucuuuuaaagugu

SEQ ID NO: 2854647 - RNA, 19 nt, Human
ucugugagauggcuggcug

SEQ ID NO: 2854648 - RNA, 15 nt, Human
ucuguugcaauuagg

SEQ ID NO: 2854649 - RNA, 16 nt, Human
ucuguugcaauuagga

SEQ ID NO: 2854650 - RNA, 19 nt, Human
ucuguugcaauuaggauuu

SEQ ID NO: 2854651 - RNA, 22 nt, Human
ucuguugcaauuaggauuuuga

SEQ ID NO: 2854652 - RNA, 12 nt, Human
agacacacacac

SEQ ID NO: 2854653 - RNA, 13 nt, Human
agacacacacaca

SEQ ID NO: 2854654 - RNA, 14 nt, Human
agacacacacacgc

SEQ ID NO: 2854655 - RNA, 15 nt, Human
agacacacacacgca

SEQ ID NO: 2854656 - RNA, 12 nt, Human
agacacagacug

SEQ ID NO: 2854657 - RNA, 14 nt, Human
agacacagauaaua

SEQ ID NO: 2854658 - RNA, 15 nt, Human
agacacagauaauaa

SEQ ID NO: 2854659 - RNA, 12 nt, Human
agacacagaugu

SEQ ID NO: 2854660 - RNA, 13 nt, Human
agacacagauguu

SEQ ID NO: 2854661 - RNA, 14 nt, Human
agacacagauguuc

SEQ ID NO: 2854662 - RNA, 18 nt, Human
agacacagcgucccuagc

SEQ ID NO: 2854663 - RNA, 16 nt, Human
agacacacacacgcac

SEQ ID NO: 2854664 - RNA, 18 nt, Human
agacacacacacgcacgc

SEQ ID NO: 2854665 - RNA, 20 nt, Human
agacacacacacgcacgcac

SEQ ID NO: 2854666 - RNA, 21 nt, Human
agacacacacacgcacgcaca

SEQ ID NO: 2854667 - RNA, 13 nt, Human
agacacaggcccg

SEQ ID NO: 2854668 - RNA, 12 nt, Human
agacacaggccc

SEQ ID NO: 2854669 - RNA, 16 nt, Human
agacacaggcccggcu

SEQ ID NO: 2854670 - RNA, 22 nt, Human
agacacacacacgcacgcacac

SEQ ID NO: 2854671 - RNA, 23 nt, Human
agacacacacacgcacgcacaca

SEQ ID NO: 2854672 - RNA, 15 nt, Human
agaauuuggaaaucc

SEQ ID NO: 2854673 - RNA, 16 nt, Human
agaauuuggaaauccu

SEQ ID NO: 2854674 - RNA, 22 nt, Human
agaauuuggaaauccuaguuuc

SEQ ID NO: 2854675 - RNA, 21 nt, Human
agaauugaucauuuucccccc

SEQ ID NO: 2854676 - RNA, 18 nt, Human
agaauucuguauuggaua

SEQ ID NO: 2854677 - RNA, 21 nt, Human
agaauugaccaucugcuuuua

SEQ ID NO: 2854678 - RNA, 22 nt, Human
agaauugaucauuuucccccca

SEQ ID NO: 2854679 - RNA, 19 nt, Human
agacagagaccuccugccu

SEQ ID NO: 2854680 - RNA, 16 nt, Human
agacagagccucgcuc

SEQ ID NO: 2854681 - RNA, 16 nt, Human
agacacugccugggcu

SEQ ID NO: 2854682 - RNA, 15 nt, Human
agacacugccugggc

SEQ ID NO: 2854683 - RNA, 14 nt, Human
agacacugccuggg

SEQ ID NO: 2854684 - RNA, 13 nt, Human
agacacugccugg

SEQ ID NO: 2854685 - RNA, 12 nt, Human
agacacugccug

SEQ ID NO: 2854686 - RNA, 11 nt, Human
agacacugccu

SEQ ID NO: 2854687 - RNA, 20 nt, Human
agacacugccacacaggguc

SEQ ID NO: 2854688 - RNA, 13 nt, Human
agacacuggcccc

SEQ ID NO: 2854689 - RNA, 15 nt, Human
agacacuggccccuc

SEQ ID NO: 2854690 - RNA, 16 nt, Human
agacacuggccccuca

SEQ ID NO: 2854691 - RNA, 16 nt, Human
agacagagaccuccug

SEQ ID NO: 2854692 - RNA, 21 nt, Human
agacagagaccuccugccucc

SEQ ID NO: 2854693 - RNA, 20 nt, Human
agacacuucuaaaugaagug

SEQ ID NO: 2854694 - RNA, 18 nt, Human
agacaccuugacagggca

SEQ ID NO: 2854695 - RNA, 19 nt, Human
agacacugaccauccacuc

SEQ ID NO: 2854696 - RNA, 17 nt, Human
agacaccuugacagggc

SEQ ID NO: 2854697 - RNA, 12 nt, Human
agacaccuucau

SEQ ID NO: 2854698 - RNA, 21 nt, Human
agacaccuucauuuugagggg

SEQ ID NO: 2854699 - RNA, 14 nt, Human
ucugcaggcuuaau

SEQ ID NO: 2854700 - RNA, 19 nt, Human
ucugcaggcuuaauaaaaa

SEQ ID NO: 2854701 - RNA, 19 nt, Human
ucugcagauagaaagcauu

SEQ ID NO: 2854702 - RNA, 20 nt, Human
ucugcagauagaaagcauua

SEQ ID NO: 2854703 - RNA, 21 nt, Human
ucugaugcaagcaagaaacac

SEQ ID NO: 2854704 - RNA, 13 nt, Human
agaaauguaaacu

SEQ ID NO: 2854705 - RNA, 15 nt, Human
agaaauguaaacugc

SEQ ID NO: 2854706 - RNA, 16 nt, Human
agaaauguaaacugcc

SEQ ID NO: 2854707 - RNA, 17 nt, Human
agaaauguaaacugcca

SEQ ID NO: 2854708 - RNA, 18 nt, Human
agaaauguaaacugccau

SEQ ID NO: 2854709 - RNA, 12 nt, Human
agaaauguaaug

SEQ ID NO: 2854710 - RNA, 13 nt, Human
agaaauguaaugc

SEQ ID NO: 2854711 - RNA, 21 nt, Human
agaaauguaaugcgauuuuau

SEQ ID NO: 2854712 - RNA, 22 nt, Human
agaaauguaaugcgauuuuauu

SEQ ID NO: 2854713 - RNA, 19 nt, Human
ucugcagggggugugucug

SEQ ID NO: 2854714 - RNA, 16 nt, Human
ucugaugaugugccug

SEQ ID NO: 2854715 - RNA, 16 nt, Human
ucugaugcaagcaaga

SEQ ID NO: 2854716 - RNA, 21 nt, Human
ucugaucauccacugugccau

SEQ ID NO: 2854717 - RNA, 17 nt, Human
ucugaucauccacugug

SEQ ID NO: 2854718 - RNA, 16 nt, Human
ucugaguccuggccca

SEQ ID NO: 2854719 - RNA, 21 nt, Human
ucugaggugccugucccaccc

SEQ ID NO: 2854720 - RNA, 13 nt, Human
ucugaguacagag

SEQ ID NO: 2854721 - RNA, 13 nt, Human
ucugagacucaca

SEQ ID NO: 2854722 - RNA, 14 nt, Human
ucugagacucacag

SEQ ID NO: 2854723 - RNA, 13 nt, Human
ucugagaacucau

SEQ ID NO: 2854724 - RNA, 14 nt, Human
ucugagaagaggag

SEQ ID NO: 2854725 - RNA, 15 nt, Human
ucugagaagaggagc

SEQ ID NO: 2854726 - RNA, 16 nt, Human
ucugagaagaggagcc

SEQ ID NO: 2854727 - RNA, 19 nt, Human
ucugagaagaggagcccuc

SEQ ID NO: 2854728 - RNA, 23 nt, Human
ucugagaagaggagcccucaucu

SEQ ID NO: 2854729 - RNA, 18 nt, Human
agaaauauuccaaauguc

SEQ ID NO: 2854730 - RNA, 13 nt, Human
agaaauaugugag

SEQ ID NO: 2854731 - RNA, 14 nt, Human
agaaauaugugaga

SEQ ID NO: 2854732 - RNA, 15 nt, Human
agaaauaugugagau

SEQ ID NO: 2854733 - RNA, 16 nt, Human
agaaauaugugagauu

SEQ ID NO: 2854734 - RNA, 18 nt, Human
agaaaugauguuggagaa

SEQ ID NO: 2854735 - RNA, 14 nt, Human
agaaaugacuaauu

SEQ ID NO: 2854736 - RNA, 17 nt, Human
agaaaugacuaauuagg

SEQ ID NO: 2854737 - RNA, 13 nt, Human
agaaaugaacauu

SEQ ID NO: 2854738 - RNA, 15 nt, Human
agaaaugaacauucc

SEQ ID NO: 2854739 - RNA, 16 nt, Human
agaaaugaacauucca

SEQ ID NO: 2854740 - RNA, 17 nt, Human
agaaauauggacacuua

SEQ ID NO: 2854741 - RNA, 14 nt, Human
agaaauauggacac

SEQ ID NO: 2854742 - RNA, 23 nt, Human
ucuccuuucaccccagggccuga

SEQ ID NO: 2854743 - RNA, 15 nt, Human
ucuccuuucuuucua

SEQ ID NO: 2854744 - RNA, 14 nt, Human
ucuccuuucaggga

SEQ ID NO: 2854745 - RNA, 14 nt, Human
ucuccuuucagggc

SEQ ID NO: 2854746 - RNA, 12 nt, Human
ucuccuuugaaa

SEQ ID NO: 2854747 - RNA, 16 nt, Human
ucuccuuucacaaccu

SEQ ID NO: 2854748 - RNA, 20 nt, Human
ucuccuuguggccugggccu

SEQ ID NO: 2854749 - RNA, 22 nt, Human
ucuccuuugcugaggccuccag

SEQ ID NO: 2854750 - RNA, 22 nt, Human
ucuccuuuuacuucacuucaaa

SEQ ID NO: 2854751 - RNA, 17 nt, Human
ucuccuuuuccucucuc

SEQ ID NO: 2854752 - RNA, 15 nt, Human
agaaagccaggcagg

SEQ ID NO: 2854753 - RNA, 21 nt, Human
ucugaaggacauugcggacag

SEQ ID NO: 2854754 - RNA, 20 nt, Human
ucugaagcuucacucacugu

SEQ ID NO: 2854755 - RNA, 14 nt, Human
ucugaagcuugacu

SEQ ID NO: 2854756 - RNA, 16 nt, Human
ucugaagcuugacucc

SEQ ID NO: 2854757 - RNA, 17 nt, Human
ucugaagcuugacuccc

SEQ ID NO: 2854758 - RNA, 18 nt, Human
ucugaagcuugacuccca

SEQ ID NO: 2854759 - RNA, 22 nt, Human
ucugaagcuugacucccaaguu

SEQ ID NO: 2854760 - RNA, 18 nt, Human
ucugaagcccucccaggu

SEQ ID NO: 2854761 - RNA, 12 nt, Human
agaaaugcagaa

SEQ ID NO: 2854762 - RNA, 23 nt, Human
agaaaugcauaugucacuagaau

SEQ ID NO: 2854763 - RNA, 16 nt, Human
ucugaagccucuggga

SEQ ID NO: 2854764 - RNA, 21 nt, Human
ucugaagcgugauuuuaaaau

SEQ ID NO: 2854765 - RNA, 17 nt, Human
ucugaagcccucccagg

SEQ ID NO: 2854766 - RNA, 14 nt, Human
ucugacacacagcu

SEQ ID NO: 2854767 - RNA, 13 nt, Human
ucugacacacagc

SEQ ID NO: 2854768 - RNA, 12 nt, Human
ucugacacacag

SEQ ID NO: 2854769 - RNA, 15 nt, Human
ucugacacacagcuc

SEQ ID NO: 2854770 - RNA, 12 nt, Human
agaagaacagua

SEQ ID NO: 2854771 - RNA, 14 nt, Human
agaagaaaugaaua

SEQ ID NO: 2854772 - RNA, 19 nt, Human
agaagaacuauaugugaau

SEQ ID NO: 2854773 - RNA, 13 nt, Human
agaagacaaaaag

SEQ ID NO: 2854774 - RNA, 15 nt, Human
agaagacaaaaagac

SEQ ID NO: 2854775 - RNA, 19 nt, Human
agaagaauguguuucaaac

SEQ ID NO: 2854776 - RNA, 20 nt, Human
agaagaauguguuucaaacu

SEQ ID NO: 2854777 - RNA, 23 nt, Human
agaaauuccuugauucacaauga

SEQ ID NO: 2854778 - RNA, 13 nt, Human
agaaauucuguua

SEQ ID NO: 2854779 - RNA, 14 nt, Human
agaaauucuguuaa

SEQ ID NO: 2854780 - RNA, 15 nt, Human
agaaauucuguuaaa

SEQ ID NO: 2854781 - RNA, 18 nt, Human
agaaauucuguuaaaauc

SEQ ID NO: 2854782 - RNA, 19 nt, Human
agaaauucuguuaaaaucu

SEQ ID NO: 2854783 - RNA, 20 nt, Human
agaaauucuguuaaaaucua

SEQ ID NO: 2854784 - RNA, 21 nt, Human
agaaauucuguuaaaaucuau

SEQ ID NO: 2854785 - RNA, 22 nt, Human
agaaauucuguuaaaaucuauu

SEQ ID NO: 2854786 - RNA, 11 nt, Human
agaaauucugu

SEQ ID NO: 2854787 - RNA, 17 nt, Human
agaaauugcauuuccug

SEQ ID NO: 2854788 - RNA, 20 nt, Human
agaaauugcauuuccugaca

SEQ ID NO: 2854789 - RNA, 11 nt, Human
agaacugccau

SEQ ID NO: 2854790 - RNA, 14 nt, Human
agaacugccauuau

SEQ ID NO: 2854791 - RNA, 17 nt, Human
agaacugccauuauuuu

SEQ ID NO: 2854792 - RNA, 20 nt, Human
agaacugccauuauuuucug

SEQ ID NO: 2854793 - RNA, 23 nt, Human
agaacugccauuauuuucuguca

SEQ ID NO: 2854794 - RNA, 14 nt, Human
agaaauugccuauc

SEQ ID NO: 2854795 - RNA, 19 nt, Human
agaacuguaugucagacau

SEQ ID NO: 2854796 - RNA, 22 nt, Human
agaacugucauguaaacauacc

SEQ ID NO: 2854797 - RNA, 16 nt, Human
agaacugucggaggaa

SEQ ID NO: 2854798 - RNA, 19 nt, Human
agaacugucggaggaaaga

SEQ ID NO: 2854799 - RNA, 21 nt, Human
agaacugucggaggaaagaca

SEQ ID NO: 2854800 - RNA, 23 nt, Human
agaacugucggaggaaagacaac

SEQ ID NO: 2854801 - RNA, 21 nt, Human
agaacuuacugauuauuuucu

SEQ ID NO: 2854802 - RNA, 12 nt, Human
agaacuggguaa

SEQ ID NO: 2854803 - RNA, 15 nt, Human
agaacuggguaaaug

SEQ ID NO: 2854804 - RNA, 18 nt, Human
agaacuggguaaaugcaa

SEQ ID NO: 2854805 - RNA, 19 nt, Human
agaacuggguaaaugcaaa

SEQ ID NO: 2854806 - RNA, 20 nt, Human
agaacuggguaaaugcaaag

SEQ ID NO: 2854807 - RNA, 13 nt, Human
agaacuucccuga

SEQ ID NO: 2854808 - RNA, 21 nt, Human
agaacuucccugauugaccug

SEQ ID NO: 2854809 - RNA, 23 nt, Human
agaacuucccugauugaccugcu

SEQ ID NO: 2854810 - RNA, 15 nt, Human
agaagaaagacucua

SEQ ID NO: 2854811 - RNA, 24 nt, Human
agaagcauuccuucuuugauaaug

SEQ ID NO: 2854812 - RNA, 22 nt, Human
agaagauguugaagaauacagu

SEQ ID NO: 2854813 - RNA, 23 nt, Human
agaagauguugaagaauacaguu

SEQ ID NO: 2854814 - RNA, 14 nt, Human
agaagcauuccuuc

SEQ ID NO: 2854815 - RNA, 15 nt, Human
agaagcauuccuucu

SEQ ID NO: 2854816 - RNA, 17 nt, Human
agaagcauuccuucuuu

SEQ ID NO: 2854817 - RNA, 19 nt, Human
agaagcauuccuucuuuga

SEQ ID NO: 2854818 - RNA, 20 nt, Human
agaagcauuccuucuuugau

SEQ ID NO: 2854819 - RNA, 22 nt, Human
agaagcauuccuucuuugauaa

SEQ ID NO: 2854820 - RNA, 23 nt, Human
agaagcauuccuucuuugauaau

SEQ ID NO: 2854821 - RNA, 10 nt, Human
agaagcauuu

SEQ ID NO: 2854822 - RNA, 13 nt, Human
agaagcauuugua

SEQ ID NO: 2854823 - RNA, 15 nt, Human
agaagcauuuguauu

SEQ ID NO: 2854824 - RNA, 16 nt, Human
agaagcauuuguauuu

SEQ ID NO: 2854825 - RNA, 19 nt, Human
agaagcauuuguauuuugu

SEQ ID NO: 2854826 - RNA, 23 nt, Human
agaagcauuuguauuuuguguga

SEQ ID NO: 2854827 - RNA, 14 nt, Human
ucugcuucagugga

SEQ ID NO: 2854828 - RNA, 12 nt, Human
ucugcuucccag

SEQ ID NO: 2854829 - RNA, 13 nt, Human
ucugcuucccagg

SEQ ID NO: 2854830 - RNA, 14 nt, Human
ucugcuucccaggu

SEQ ID NO: 2854831 - RNA, 22 nt, Human
ucugcuucccagguucaagcga

SEQ ID NO: 2854832 - RNA, 13 nt, Human
ucugcuucucuca

SEQ ID NO: 2854833 - RNA, 14 nt, Human
ucugcuucucucac

SEQ ID NO: 2854834 - RNA, 16 nt, Human
ucugcuucucucaccu

SEQ ID NO: 2854835 - RNA, 13 nt, Human
ucugcuucagugg

SEQ ID NO: 2854836 - RNA, 18 nt, Human
ucugcuugcucuuguccu

SEQ ID NO: 2854837 - RNA, 15 nt, Human
ucugcuucagccucc

SEQ ID NO: 2854838 - RNA, 14 nt, Human
ucugcuucagccuc

SEQ ID NO: 2854839 - RNA, 13 nt, Human
ucugcuucagccu

SEQ ID NO: 2854840 - RNA, 23 nt, Human
ucugcuccacccuuggccugucu

SEQ ID NO: 2854841 - RNA, 21 nt, Human
ucugcuccaccuuucagccca

SEQ ID NO: 2854842 - RNA, 23 nt, Human
ucugcuccaccuuucagcccacg

SEQ ID NO: 2854843 - RNA, 21 nt, Human
ucugcuccacccuuggccugu

SEQ ID NO: 2854844 - RNA, 20 nt, Human
ucugcuccacccuuggccug

SEQ ID NO: 2854845 - RNA, 20 nt, Human
ucugcucacauaucugucau

SEQ ID NO: 2854846 - RNA, 19 nt, Human
ucugcucacauaucuguca

SEQ ID NO: 2854847 - RNA, 17 nt, Human
ucugcucacauaucugu

SEQ ID NO: 2854848 - RNA, 13 nt, Human
ucugcucacuuua

SEQ ID NO: 2854849 - RNA, 19 nt, Human
ucugcucacuuuaaaccug

SEQ ID NO: 2854850 - RNA, 22 nt, Human
ucugcucagacagaaccccuac

SEQ ID NO: 2854851 - RNA, 14 nt, Human
ucugcuccaccaca

SEQ ID NO: 2854852 - RNA, 12 nt, Human
ucugcuccacca

SEQ ID NO: 2854853 - RNA, 10 nt, Human
ucugcuccac

SEQ ID NO: 2854854 - RNA, 19 nt, Human
ucugcuccacccuuggccu

SEQ ID NO: 2854855 - RNA, 18 nt, Human
ucugcuccacccuuggcc

SEQ ID NO: 2854856 - RNA, 17 nt, Human
ucugcuccacccuuggc

SEQ ID NO: 2854857 - RNA, 16 nt, Human
ucugcuccacccuugg

SEQ ID NO: 2854858 - RNA, 15 nt, Human
ucugcuccacccuug

SEQ ID NO: 2854859 - RNA, 14 nt, Human
ucugcuccacccuu

SEQ ID NO: 2854860 - RNA, 12 nt, Human
ucugcuccaccc

SEQ ID NO: 2854861 - RNA, 20 nt, Human
ucugcuccaccacauccucc

SEQ ID NO: 2854862 - RNA, 22 nt, Human
ucugccugcccaggccccugcc

SEQ ID NO: 2854863 - RNA, 21 nt, Human
ucugccugcccaggccccugc

SEQ ID NO: 2854864 - RNA, 17 nt, Human
ucugcggaucucagcuu

SEQ ID NO: 2854865 - RNA, 19 nt, Human
ucugcggaucucagcuuug

SEQ ID NO: 2854866 - RNA, 22 nt, Human
ucugcgugguuccuuucucagc

SEQ ID NO: 2854867 - RNA, 16 nt, Human
ucugcgugggucagaa

SEQ ID NO: 2854868 - RNA, 17 nt, Human
ucugcgugggucagaag

SEQ ID NO: 2854869 - RNA, 15 nt, Human
ucugcgucuguguug

SEQ ID NO: 2854870 - RNA, 10 nt, Human
ucugcccugc

SEQ ID NO: 2854871 - RNA, 12 nt, Human
ucugcccugcgg

SEQ ID NO: 2854872 - RNA, 11 nt, Human
ucugcccugcg

SEQ ID NO: 2854873 - RNA, 20 nt, Human
agauccugaucuuaagaggc

SEQ ID NO: 2854874 - RNA, 21 nt, Human
agauccugaucuuaagaggcu

SEQ ID NO: 2854875 - RNA, 22 nt, Human
agauccugaucuuaagaggcug

SEQ ID NO: 2854876 - RNA, 14 nt, Human
agaucguguauuga

SEQ ID NO: 2854877 - RNA, 23 nt, Human
agaucguguauugagauuucuua

SEQ ID NO: 2854878 - RNA, 16 nt, Human
agaucguucucugccu

SEQ ID NO: 2854879 - RNA, 15 nt, Human
agaugcaaggaccag

SEQ ID NO: 2854880 - RNA, 16 nt, Human
agaucucacucugccc

SEQ ID NO: 2854881 - RNA, 14 nt, Human
agaucuauaaagcg

SEQ ID NO: 2854882 - RNA, 16 nt, Human
agaucuauaaagcgau

SEQ ID NO: 2854883 - RNA, 22 nt, Human
agaucuaaggaugucacagggc

SEQ ID NO: 2854884 - RNA, 11 nt, Human
agaucuacaug

SEQ ID NO: 2854885 - RNA, 14 nt, Human
agaucuacaugaau

SEQ ID NO: 2854886 - RNA, 23 nt, Human
agaucccauggguuguguguuua

SEQ ID NO: 2854887 - RNA, 18 nt, Human
agauccccaagccuggca

SEQ ID NO: 2854888 - RNA, 11 nt, Human
agauccccuca

SEQ ID NO: 2854889 - RNA, 17 nt, Human
agauccccguuccugac

SEQ ID NO: 2854890 - RNA, 13 nt, Human
agauccuaaaaca

SEQ ID NO: 2854891 - RNA, 22 nt, Human
agauccuaaaacaaaagcucau

SEQ ID NO: 2854892 - RNA, 15 nt, Human
agauccccucaggac

SEQ ID NO: 2854893 - RNA, 14 nt, Human
agauccccugagcc

SEQ ID NO: 2854894 - RNA, 16 nt, Human
agauccuagauccuaa

SEQ ID NO: 2854895 - RNA, 18 nt, Human
agauccuagauccuaagg

SEQ ID NO: 2854896 - RNA, 16 nt, Human
agauccuaaaacaaaa

SEQ ID NO: 2854897 - RNA, 14 nt, Human
agauccuaaggguc

SEQ ID NO: 2854898 - RNA, 21 nt, Human
agauccuaagggucgaaagcu

SEQ ID NO: 2854899 - RNA, 23 nt, Human
agauccuaagggucgaaagcucu

SEQ ID NO: 2854900 - RNA, 12 nt, Human
ugaccaacugug

SEQ ID NO: 2854901 - RNA, 13 nt, Human
ugaccaacugugu

SEQ ID NO: 2854902 - RNA, 15 nt, Human
ugaccaacuguguug

SEQ ID NO: 2854903 - RNA, 18 nt, Human
ugaccaacuguguuguau

SEQ ID NO: 2854904 - RNA, 23 nt, Human
ugaccaacuguguuguauuaaca

SEQ ID NO: 2854905 - RNA, 19 nt, Human
agaugcugcagagucacaa

SEQ ID NO: 2854906 - RNA, 11 nt, Human
agaugcuggag

SEQ ID NO: 2854907 - RNA, 13 nt, Human
agaugcuggagaa

SEQ ID NO: 2854908 - RNA, 16 nt, Human
agaugcuggagaagag

SEQ ID NO: 2854909 - RNA, 17 nt, Human
agaugcuggagaagaga

SEQ ID NO: 2854910 - RNA, 18 nt, Human
agaugcuggagaagagag

SEQ ID NO: 2854911 - RNA, 19 nt, Human
agaugcuggagaagagagg

SEQ ID NO: 2854912 - RNA, 20 nt, Human
agaugcuggagaagagagga

SEQ ID NO: 2854913 - RNA, 21 nt, Human
agaugcuggagaagagaggag

SEQ ID NO: 2854914 - RNA, 22 nt, Human
agaugcuggagaagagaggaga

SEQ ID NO: 2854915 - RNA, 15 nt, Human
agauguaugaaggcu

SEQ ID NO: 2854916 - RNA, 17 nt, Human
agauguaugaaggcuuu

SEQ ID NO: 2854917 - RNA, 21 nt, Human
agaugcuggaugucugccaau

SEQ ID NO: 2854918 - RNA, 15 nt, Human
agaugccacccuagc

SEQ ID NO: 2854919 - RNA, 17 nt, Human
agaugccacccuagcca

SEQ ID NO: 2854920 - RNA, 19 nt, Human
agaugccauccucuuucuc

SEQ ID NO: 2854921 - RNA, 22 nt, Human
agaugcauucuugguuggcugg

SEQ ID NO: 2854922 - RNA, 15 nt, Human
agaugcauuguaguu

SEQ ID NO: 2854923 - RNA, 16 nt, Human
agaugcauuguaguuu

SEQ ID NO: 2854924 - RNA, 15 nt, Human
agaugcaguuuggag

SEQ ID NO: 2854925 - RNA, 17 nt, Human
agaugcauguugaccau

SEQ ID NO: 2854926 - RNA, 14 nt, Human
agaugcaauuguuu

SEQ ID NO: 2854927 - RNA, 20 nt, Human
agaugcaaggaccaggacuc

SEQ ID NO: 2854928 - RNA, 20 nt, Human
agaugcaaugacucaggaca

SEQ ID NO: 2854929 - RNA, 18 nt, Human
agaugcaaggaccaggac

SEQ ID NO: 2854930 - RNA, 17 nt, Human
agaugcaaggaccagga

SEQ ID NO: 2854931 - RNA, 22 nt, Human
ugacagagugagacucugucuc

SEQ ID NO: 2854932 - RNA, 20 nt, Human
ugacacugguauuccugccu

SEQ ID NO: 2854933 - RNA, 21 nt, Human
ugacacugguauuccugccuc

SEQ ID NO: 2854934 - RNA, 19 nt, Human
ugacacugguauuccugcc

SEQ ID NO: 2854935 - RNA, 11 nt, Human
ugacacugacc

SEQ ID NO: 2854936 - RNA, 23 nt, Human
ugacacugaccuuggagagacac

SEQ ID NO: 2854937 - RNA, 21 nt, Human
ugacaccgggguggugggaac

SEQ ID NO: 2854938 - RNA, 19 nt, Human
ugaaugcuuauagguggcc

SEQ ID NO: 2854939 - RNA, 13 nt, Human
ugaaugccuccug

SEQ ID NO: 2854940 - RNA, 16 nt, Human
ugaaugccuccugugg

SEQ ID NO: 2854941 - RNA, 17 nt, Human
ugaaugccuccuguggg

SEQ ID NO: 2854942 - RNA, 18 nt, Human
ugaaugccuccugugggg

SEQ ID NO: 2854943 - RNA, 11 nt, Human
ugaaugcugcc

SEQ ID NO: 2854944 - RNA, 12 nt, Human
ugaaugcugcca

SEQ ID NO: 2854945 - RNA, 13 nt, Human
ugaaugcugccac

SEQ ID NO: 2854946 - RNA, 18 nt, Human
ugaaugcugccacaacca

SEQ ID NO: 2854947 - RNA, 13 nt, Human
ugaaugcugccag

SEQ ID NO: 2854948 - RNA, 14 nt, Human
ugaaugcugccagu

SEQ ID NO: 2854949 - RNA, 18 nt, Human
ugaaugcugccagugugg

SEQ ID NO: 2854950 - RNA, 22 nt, Human
ugaaugcugccaguguggagug

SEQ ID NO: 2854951 - RNA, 17 nt, Human
ugacagguaaauuaaga

SEQ ID NO: 2854952 - RNA, 15 nt, Human
ugacauuaagaaugu

SEQ ID NO: 2854953 - RNA, 19 nt, Human
ugacauuaagaauguuggu

SEQ ID NO: 2854954 - RNA, 21 nt, Human
ugacauuaagaauguugguuu

SEQ ID NO: 2854955 - RNA, 15 nt, Human
ugacauuauagacau

SEQ ID NO: 2854956 - RNA, 20 nt, Human
ugacauuaugugguuuuaga

SEQ ID NO: 2854957 - RNA, 17 nt, Human
ugacauucaugccuggc

SEQ ID NO: 2854958 - RNA, 15 nt, Human
ugacauucaugccug

SEQ ID NO: 2854959 - RNA, 21 nt, Human
ugacauuuauuuuucucauga

SEQ ID NO: 2854960 - RNA, 22 nt, Human
ugacauuuauuuuucucaugaa

SEQ ID NO: 2854961 - RNA, 14 nt, Human
ugacauuuguaguu

SEQ ID NO: 2854962 - RNA, 17 nt, Human
ugacauuuguaguugag

SEQ ID NO: 2854963 - RNA, 16 nt, Human
ugacauuuguaguugg

SEQ ID NO: 2854964 - RNA, 19 nt, Human
ugacaggcaaugcuggcug

SEQ ID NO: 2854965 - RNA, 17 nt, Human
ugacaggcaaugcuggc

SEQ ID NO: 2854966 - RNA, 12 nt, Human
ugacagccuccc

SEQ ID NO: 2854967 - RNA, 11 nt, Human
ugacagccucc

SEQ ID NO: 2854968 - RNA, 20 nt, Human
ugacagcagucgguuggagc

SEQ ID NO: 2854969 - RNA, 18 nt, Human
ugacagcaugugcccucc

SEQ ID NO: 2854970 - RNA, 20 nt, Human
ugacagcaugugcccuccug

SEQ ID NO: 2854971 - RNA, 21 nt, Human
ugacagcaugugcccuccuga

SEQ ID NO: 2854972 - RNA, 23 nt, Human
ugacagcaugugcccuccugagg

SEQ ID NO: 2854973 - RNA, 22 nt, Human
ugacagggcacaccgggcacuc

SEQ ID NO: 2854974 - RNA, 21 nt, Human
ugacagggcacaccgggcacu

SEQ ID NO: 2854975 - RNA, 11 nt, Human
ugacagggcca

SEQ ID NO: 2854976 - RNA, 12 nt, Human
ugacagggccag

SEQ ID NO: 2854977 - RNA, 13 nt, Human
ugacagggccagu

SEQ ID NO: 2854978 - RNA, 17 nt, Human
ugacagggccagugggg

SEQ ID NO: 2854979 - RNA, 18 nt, Human
ugacagggccaguggggc

SEQ ID NO: 2854980 - RNA, 20 nt, Human
ugacagggccaguggggccu

SEQ ID NO: 2854981 - RNA, 21 nt, Human
ugacagggccaguggggccug

SEQ ID NO: 2854982 - RNA, 22 nt, Human
ugacagggccaguggggccugu

SEQ ID NO: 2854983 - RNA, 23 nt, Human
ugacagggccaguggggccugug

SEQ ID NO: 2854984 - RNA, 15 nt, Human
ugacagguaaacuau

SEQ ID NO: 2854985 - RNA, 21 nt, Human
agaugugaaaauaucugcuca

SEQ ID NO: 2854986 - RNA, 13 nt, Human
agaugucuuuuau

SEQ ID NO: 2854987 - RNA, 17 nt, Human
agaugucuuuuauagug

SEQ ID NO: 2854988 - RNA, 17 nt, Human
ugaccugcaucuaagcc

SEQ ID NO: 2854989 - RNA, 19 nt, Human
ugaccugccccgcccagcu

SEQ ID NO: 2854990 - RNA, 13 nt, Human
ugaccugccccgc

SEQ ID NO: 2854991 - RNA, 20 nt, Human
ugaccugccccgcccagcug

SEQ ID NO: 2854992 - RNA, 17 nt, Human
ugaccuuggagagacac

SEQ ID NO: 2854993 - RNA, 19 nt, Human
ugaccuuggagagacacag

SEQ ID NO: 2854994 - RNA, 20 nt, Human
ugaccuuggagagacacagc

SEQ ID NO: 2854995 - RNA, 22 nt, Human
ugaccuggauaacuuagguggc

SEQ ID NO: 2854996 - RNA, 20 nt, Human
ugaccugguuaaacaaacca

SEQ ID NO: 2854997 - RNA, 12 nt, Human
ugaccugcuccg

SEQ ID NO: 2854998 - RNA, 15 nt, Human
ugaccugcuccgcug

SEQ ID NO: 2854999 - RNA, 17 nt, Human
ugaccugcuccgcugcu

SEQ ID NO: 2855000 - RNA, 18 nt, Human
ugaccugcuccgcugcuc

SEQ ID NO: 2855001 - RNA, 19 nt, Human
ugaccugcuccgcugcucc

SEQ ID NO: 2855002 - RNA, 23 nt, Human
ugaccugcuccgcugcuccuugg

SEQ ID NO: 2855003 - RNA, 15 nt, Human
ugaccugccucucac

SEQ ID NO: 2855004 - RNA, 18 nt, Human
ugaccugccucucacaca

SEQ ID NO: 2855005 - RNA, 20 nt, Human
ugaccugccucucacacaca

SEQ ID NO: 2855006 - RNA, 21 nt, Human
ugaccugccucucacacacau

SEQ ID NO: 2855007 - RNA, 21 nt, Human
ugaccugcuggguaaacugug

SEQ ID NO: 2855008 - RNA, 13 nt, Human
ugacuauucugua

SEQ ID NO: 2855009 - RNA, 18 nt, Human
ugacuauucuguaucuuu

SEQ ID NO: 2855010 - RNA, 20 nt, Human
ugacuauucuguaucuuuca

SEQ ID NO: 2855011 - RNA, 14 nt, Human
ugacuaucauaaaa

SEQ ID NO: 2855012 - RNA, 21 nt, Human
ugacuaucccaacagucaugu

SEQ ID NO: 2855013 - RNA, 23 nt, Human
ugacuaucccaacagucauguuu

SEQ ID NO: 2855014 - RNA, 12 nt, Human
ugacuauguaaa

SEQ ID NO: 2855015 - RNA, 13 nt, Human
ugacuauguaaac

SEQ ID NO: 2855016 - RNA, 12 nt, Human
ugacuauuaugu

SEQ ID NO: 2855017 - RNA, 16 nt, Human
ugacuauuauguuguu

SEQ ID NO: 2855018 - RNA, 17 nt, Human
ugacuauuauguuguua

SEQ ID NO: 2855019 - RNA, 22 nt, Human
ugacuauuauguuguuagagaa

SEQ ID NO: 2855020 - RNA, 14 nt, Human
ugacuauauagaga

SEQ ID NO: 2855021 - RNA, 16 nt, Human
ugacuauauagagaug

SEQ ID NO: 2855022 - RNA, 17 nt, Human
ugacuauauagagaugu

SEQ ID NO: 2855023 - RNA, 18 nt, Human
ugacuauauagagauguu

SEQ ID NO: 2855024 - RNA, 19 nt, Human
ugacuauauagagauguuu

SEQ ID NO: 2855025 - RNA, 21 nt, Human
ugacuauauagagauguuuuu

SEQ ID NO: 2855026 - RNA, 15 nt, Human
ugacucucugugacc

SEQ ID NO: 2855027 - RNA, 13 nt, Human
ugacucucuguga

SEQ ID NO: 2855028 - RNA, 17 nt, Human
ugacuauuuucguucau

SEQ ID NO: 2855029 - RNA, 21 nt, Human
ugacucguauaugucucaggu

SEQ ID NO: 2855030 - RNA, 15 nt, Human
ugacucgugcugcau

SEQ ID NO: 2855031 - RNA, 12 nt, Human
ugacucuaaauu

SEQ ID NO: 2855032 - RNA, 13 nt, Human
agauucccagagc

SEQ ID NO: 2855033 - RNA, 20 nt, Human
agauuccauugguccaagau

SEQ ID NO: 2855034 - RNA, 21 nt, Human
agauuccauugguccaagauu

SEQ ID NO: 2855035 - RNA, 22 nt, Human
agauuccauugguccaagauuc

SEQ ID NO: 2855036 - RNA, 23 nt, Human
agauuccauugguccaagauucc

SEQ ID NO: 2855037 - RNA, 21 nt, Human
agauuccagagaguggcuccu

SEQ ID NO: 2855038 - RNA, 22 nt, Human
agauuccagagaguggcuccuc

SEQ ID NO: 2855039 - RNA, 19 nt, Human
agauuccagagaguggcuc

SEQ ID NO: 2855040 - RNA, 19 nt, Human
agauucagguauguugccu

SEQ ID NO: 2855041 - RNA, 19 nt, Human
agauuccauugguccaaga

SEQ ID NO: 2855042 - RNA, 15 nt, Human
agauuguuaaaauaa

SEQ ID NO: 2855043 - RNA, 14 nt, Human
agauuguuaaaaua

SEQ ID NO: 2855044 - RNA, 16 nt, Human
agauucccagagcaaa

SEQ ID NO: 2855045 - RNA, 18 nt, Human
agauugugggggaaaaau

SEQ ID NO: 2855046 - RNA, 20 nt, Human
agauugugggggaaaaauaa

SEQ ID NO: 2855047 - RNA, 15 nt, Human
agauuguuguuugcc

SEQ ID NO: 2855048 - RNA, 16 nt, Human
agauuguuguuugcca

SEQ ID NO: 2855049 - RNA, 22 nt, Human
agauuguuguuugccauacuuu

SEQ ID NO: 2855050 - RNA, 23 nt, Human
agauuguuguuugccauacuuug

SEQ ID NO: 2855051 - RNA, 23 nt, Human
agauuguuuuaucaugacauguu

SEQ ID NO: 2855052 - RNA, 19 nt, Human
agauuguuuccucuuccaa

SEQ ID NO: 2855053 - RNA, 14 nt, Human
agauuguuucuaua

SEQ ID NO: 2855054 - RNA, 18 nt, Human
agauuguuucuauacaaa

SEQ ID NO: 2855055 - RNA, 22 nt, Human
agauuguuuuaucaugacaugu

SEQ ID NO: 2855056 - RNA, 22 nt, Human
agauuacccaaaaacugucuuu

SEQ ID NO: 2855057 - RNA, 11 nt, Human
agauuuaagca

SEQ ID NO: 2855058 - RNA, 14 nt, Human
agauuuuaauuguc

SEQ ID NO: 2855059 - RNA, 16 nt, Human
agauuuuaauugucau

SEQ ID NO: 2855060 - RNA, 17 nt, Human
agauuuuaauugucaug

SEQ ID NO: 2855061 - RNA, 13 nt, Human
agauuagaaaaau

SEQ ID NO: 2855062 - RNA, 19 nt, Human
agauuagaaaaauuccuaa

SEQ ID NO: 2855063 - RNA, 16 nt, Human
agauuaagagccauau

SEQ ID NO: 2855064 - RNA, 18 nt, Human
agauuaaggugaugugau

SEQ ID NO: 2855065 - RNA, 14 nt, Human
agauuaauggcacu

SEQ ID NO: 2855066 - RNA, 15 nt, Human
agauuaauggcacug

SEQ ID NO: 2855067 - RNA, 17 nt, Human
agauuaauggcacugau

SEQ ID NO: 2855068 - RNA, 14 nt, Human
ugacuuaugggccc

SEQ ID NO: 2855069 - RNA, 18 nt, Human
ugacuuauuguggauaac

SEQ ID NO: 2855070 - RNA, 19 nt, Human
ugacuuauaguacaugaua

SEQ ID NO: 2855071 - RNA, 17 nt, Human
ugacuuauaguacauga

SEQ ID NO: 2855072 - RNA, 15 nt, Human
ugacuuauaguacau

SEQ ID NO: 2855073 - RNA, 19 nt, Human
ugacuuaagcaaaagaaaa

SEQ ID NO: 2855074 - RNA, 13 nt, Human
ugacuuaauguga

SEQ ID NO: 2855075 - RNA, 16 nt, Human
ugacuuaaugugauua

SEQ ID NO: 2855076 - RNA, 14 nt, Human
ugacuuauaguaca

SEQ ID NO: 2855077 - RNA, 13 nt, Human
ugacuuauaguac

SEQ ID NO: 2855078 - RNA, 15 nt, Human
agauuagaagcugaa

SEQ ID NO: 2855079 - RNA, 21 nt, Human
agauuagcaaggucauuucuu

SEQ ID NO: 2855080 - RNA, 18 nt, Human
agauucagguauguugcc

SEQ ID NO: 2855081 - RNA, 20 nt, Human
agauucagguauguugccuu

SEQ ID NO: 2855082 - RNA, 13 nt, Human
agauucagucuug

SEQ ID NO: 2855083 - RNA, 15 nt, Human
agauucagucuugcc

SEQ ID NO: 2855084 - RNA, 17 nt, Human
agauucagucuugccuu

SEQ ID NO: 2855085 - RNA, 18 nt, Human
agauucagucuugccuua

SEQ ID NO: 2855086 - RNA, 14 nt, Human
agauuauagauucu

SEQ ID NO: 2855087 - RNA, 15 nt, Human
agauuauagauucua

SEQ ID NO: 2855088 - RNA, 16 nt, Human
agauuauagauucuaa

SEQ ID NO: 2855089 - RNA, 17 nt, Human
agauuauagauucuaaa

SEQ ID NO: 2855090 - RNA, 18 nt, Human
agauuauagauucuaaag

SEQ ID NO: 2855091 - RNA, 19 nt, Human
agauuauagauucuaaaga

SEQ ID NO: 2855092 - RNA, 20 nt, Human
agauuauagauucuaaagau

SEQ ID NO: 2855093 - RNA, 12 nt, Human
agcaaggcccug

SEQ ID NO: 2855094 - RNA, 15 nt, Human
agcaaggcccugcug

SEQ ID NO: 2855095 - RNA, 16 nt, Human
agcaaggcccugcugc

SEQ ID NO: 2855096 - RNA, 17 nt, Human
agcaaggcccugcugcc

SEQ ID NO: 2855097 - RNA, 18 nt, Human
agcaaggcccugcugccc

SEQ ID NO: 2855098 - RNA, 19 nt, Human
agcaaggcccugcugccca

SEQ ID NO: 2855099 - RNA, 20 nt, Human
agcaagcucccaagggaugg

SEQ ID NO: 2855100 - RNA, 16 nt, Human
agcaaggaaaacuuau

SEQ ID NO: 2855101 - RNA, 21 nt, Human
agcaaggaagauauacaugaa

SEQ ID NO: 2855102 - RNA, 16 nt, Human
agcaaggucauuucuu

SEQ ID NO: 2855103 - RNA, 20 nt, Human
agcaaggucauuucuucagu

SEQ ID NO: 2855104 - RNA, 18 nt, Human
agcaagggggugauguag

SEQ ID NO: 2855105 - RNA, 16 nt, Human
agcaagugagagcugg

SEQ ID NO: 2855106 - RNA, 15 nt, Human
agcaagugagagcug

SEQ ID NO: 2855107 - RNA, 15 nt, Human
agcaaguagauaaau

SEQ ID NO: 2855108 - RNA, 20 nt, Human
agcaaguagauaaauauuug

SEQ ID NO: 2855109 - RNA, 14 nt, Human
ugagccacugcacc

SEQ ID NO: 2855110 - RNA, 16 nt, Human
ugagccacagcagcau

SEQ ID NO: 2855111 - RNA, 17 nt, Human
ugagccacagcagcauu

SEQ ID NO: 2855112 - RNA, 18 nt, Human
ugagccacagcagcauuu

SEQ ID NO: 2855113 - RNA, 19 nt, Human
ugagccacagcagcauuuu

SEQ ID NO: 2855114 - RNA, 20 nt, Human
ugagccacagcagcauuuuu

SEQ ID NO: 2855115 - RNA, 16 nt, Human
ugagccacucucuucc

SEQ ID NO: 2855116 - RNA, 18 nt, Human
agcaagcaguagcauuug

SEQ ID NO: 2855117 - RNA, 11 nt, Human
ugagccacugc

SEQ ID NO: 2855118 - RNA, 16 nt, Human
agcaagcaacacagag

SEQ ID NO: 2855119 - RNA, 19 nt, Human
agcaagcccuacagagcug

SEQ ID NO: 2855120 - RNA, 20 nt, Human
agcaagcccuacagagcugu

SEQ ID NO: 2855121 - RNA, 11 nt, Human
agcaagcuccc

SEQ ID NO: 2855122 - RNA, 15 nt, Human
agcaagcucccaagg

SEQ ID NO: 2855123 - RNA, 12 nt, Human
agcaagcuggcc

SEQ ID NO: 2855124 - RNA, 13 nt, Human
agcaagcuggccu

SEQ ID NO: 2855125 - RNA, 14 nt, Human
agcaagcuggccuc

SEQ ID NO: 2855126 - RNA, 15 nt, Human
agcaagcuggccucu

SEQ ID NO: 2855127 - RNA, 16 nt, Human
agcaagcuggccucua

SEQ ID NO: 2855128 - RNA, 13 nt, Human
ugagccacugcac

SEQ ID NO: 2855129 - RNA, 12 nt, Human
ugagccacugca

SEQ ID NO: 2855130 - RNA, 19 nt, Human
ugagcauuggauacagcag

SEQ ID NO: 2855131 - RNA, 20 nt, Human
ugagcauuggauacagcagu

SEQ ID NO: 2855132 - RNA, 16 nt, Human
ugagcauuagauuucu

SEQ ID NO: 2855133 - RNA, 14 nt, Human
ugagcauuagauuu

SEQ ID NO: 2855134 - RNA, 15 nt, Human
ugagauuuccuccug

SEQ ID NO: 2855135 - RNA, 17 nt, Human
ugagauuuccuccuggc

SEQ ID NO: 2855136 - RNA, 17 nt, Human
ugagauuucuuaaauaa

SEQ ID NO: 2855137 - RNA, 14 nt, Human
ugagauuuugguau

SEQ ID NO: 2855138 - RNA, 16 nt, Human
ugagauuuuuuauugc

SEQ ID NO: 2855139 - RNA, 17 nt, Human
ugagauuuuuuauugcu

SEQ ID NO: 2855140 - RNA, 18 nt, Human
ugagauuuuuuauugcua

SEQ ID NO: 2855141 - RNA, 19 nt, Human
ugagauuuuuuauugcuag

SEQ ID NO: 2855142 - RNA, 23 nt, Human
ugagauuuuuuauugcuaguauu

SEQ ID NO: 2855143 - RNA, 15 nt, Human
ugagcauggagcugg

SEQ ID NO: 2855144 - RNA, 14 nt, Human
ugagcauggagcug

SEQ ID NO: 2855145 - RNA, 16 nt, Human
ugagcauggagcuggc

SEQ ID NO: 2855146 - RNA, 18 nt, Human
ugagcauggagcuggccg

SEQ ID NO: 2855147 - RNA, 18 nt, Human
ugagcauguaaaagcgga

SEQ ID NO: 2855148 - RNA, 16 nt, Human
agcaccuccugccucg

SEQ ID NO: 2855149 - RNA, 14 nt, Human
agcaccuccugccu

SEQ ID NO: 2855150 - RNA, 13 nt, Human
agcaccuccugcc

SEQ ID NO: 2855151 - RNA, 21 nt, Human
agcaccuccauuaaagucuga

SEQ ID NO: 2855152 - RNA, 16 nt, Human
agcaccucagccugca

SEQ ID NO: 2855153 - RNA, 14 nt, Human
agcaccucagccug

SEQ ID NO: 2855154 - RNA, 18 nt, Human
agcaccuaguccagugac

SEQ ID NO: 2855155 - RNA, 17 nt, Human
agcaccuagccucgcuc

SEQ ID NO: 2855156 - RNA, 15 nt, Human
agcacaugcuggcca

SEQ ID NO: 2855157 - RNA, 16 nt, Human
agcacaugcuggccag

SEQ ID NO: 2855158 - RNA, 19 nt, Human
agcacaugcuggccagccu

SEQ ID NO: 2855159 - RNA, 20 nt, Human
agcacaugcuggccagccug

SEQ ID NO: 2855160 - RNA, 21 nt, Human
agcacaugcuggccagccugg

SEQ ID NO: 2855161 - RNA, 21 nt, Human
agcaccgcuuuuguucucgca

SEQ ID NO: 2855162 - RNA, 19 nt, Human
agcaccccaugccaaagcu

SEQ ID NO: 2855163 - RNA, 21 nt, Human
agcacagcuucauuuccugug

SEQ ID NO: 2855164 - RNA, 21 nt, Human
agcaaggcgguggacuugaac

SEQ ID NO: 2855165 - RNA, 15 nt, Human
agcaauauuuaugga

SEQ ID NO: 2855166 - RNA, 16 nt, Human
agcaauauuuauggau

SEQ ID NO: 2855167 - RNA, 22 nt, Human
agcaauauuuauggaugcaaca

SEQ ID NO: 2855168 - RNA, 15 nt, Human
agcaauauguaaaua

SEQ ID NO: 2855169 - RNA, 17 nt, Human
agcaagugagagcuggg

SEQ ID NO: 2855170 - RNA, 20 nt, Human
agcaagguggguggaaacua

SEQ ID NO: 2855171 - RNA, 16 nt, Human
agcaauauauuaccag

SEQ ID NO: 2855172 - RNA, 22 nt, Human
agcaauauauuaccagcaagaa

SEQ ID NO: 2855173 - RNA, 23 nt, Human
agcaauauauuaccagcaagaau

SEQ ID NO: 2855174 - RNA, 24 nt, Human
agcaauauauuaccagcaagaaua

SEQ ID NO: 2855175 - RNA, 15 nt, Human
agcacaggugggcuu

SEQ ID NO: 2855176 - RNA, 15 nt, Human
agcacaggucccacc

SEQ ID NO: 2855177 - RNA, 16 nt, Human
agcacaggucccaccu

SEQ ID NO: 2855178 - RNA, 20 nt, Human
agcacaggucccaccuccag

SEQ ID NO: 2855179 - RNA, 21 nt, Human
agcacaggucccaccuccagc

SEQ ID NO: 2855180 - RNA, 23 nt, Human
agcacaggucccaccuccagccc

SEQ ID NO: 2855181 - RNA, 13 nt, Human
agcacaggagaca

SEQ ID NO: 2855182 - RNA, 20 nt, Human
ugagaagccuucagcuccag

SEQ ID NO: 2855183 - RNA, 19 nt, Human
ugagaagccuucagcucca

SEQ ID NO: 2855184 - RNA, 13 nt, Human
ugagaagcugcuc

SEQ ID NO: 2855185 - RNA, 15 nt, Human
ugagaagccuucagc

SEQ ID NO: 2855186 - RNA, 14 nt, Human
ugagaagccuucag

SEQ ID NO: 2855187 - RNA, 13 nt, Human
ugagaagccuuca

SEQ ID NO: 2855188 - RNA, 12 nt, Human
ugagaaggagag

SEQ ID NO: 2855189 - RNA, 13 nt, Human
ugagaaggagaga

SEQ ID NO: 2855190 - RNA, 14 nt, Human
ugagaaggagagaa

SEQ ID NO: 2855191 - RNA, 15 nt, Human
ugagaagcugcucca

SEQ ID NO: 2855192 - RNA, 20 nt, Human
ugagaagcugcuccaggccu

SEQ ID NO: 2855193 - RNA, 21 nt, Human
ugagaagcugcuccaggccug

SEQ ID NO: 2855194 - RNA, 22 nt, Human
ugagaagcugcuccaggccugc

SEQ ID NO: 2855195 - RNA, 14 nt, Human
ugagaaggcagcca

SEQ ID NO: 2855196 - RNA, 15 nt, Human
ugagaaggagagaaa

SEQ ID NO: 2855197 - RNA, 16 nt, Human
ugagaaggagagaaag

SEQ ID NO: 2855198 - RNA, 22 nt, Human
ugagaaggagucagaaacuguu

SEQ ID NO: 2855199 - RNA, 13 nt, Human
ugagaaggcagcc

SEQ ID NO: 2855200 - RNA, 21 nt, Human
ugagacagaguuuucacucuu

SEQ ID NO: 2855201 - RNA, 11 nt, Human
ugagacagagu

SEQ ID NO: 2855202 - RNA, 22 nt, Human
ugagacacggagcccagcccuc

SEQ ID NO: 2855203 - RNA, 13 nt, Human
ugagacagaaucu

SEQ ID NO: 2855204 - RNA, 20 nt, Human
ugagacagaaucucgcucug

SEQ ID NO: 2855205 - RNA, 21 nt, Human
ugagacacggagcccagcccu

SEQ ID NO: 2855206 - RNA, 17 nt, Human
ugagacacggagcccag

SEQ ID NO: 2855207 - RNA, 22 nt, Human
ugagaaucccaaauuugauuga

SEQ ID NO: 2855208 - RNA, 21 nt, Human
ugagaaucccaaauuugauug

SEQ ID NO: 2855209 - RNA, 20 nt, Human
ugagaaucccaaauuugauu

SEQ ID NO: 2855210 - RNA, 13 nt, Human
ugagaaucccaaa

SEQ ID NO: 2855211 - RNA, 21 nt, Human
ugagaaucuacccccagaucc

SEQ ID NO: 2855212 - RNA, 12 nt, Human
ugagaaucuacc

SEQ ID NO: 2855213 - RNA, 23 nt, Human
ugagaaucuauauuuaacaagau

SEQ ID NO: 2855214 - RNA, 18 nt, Human
ugagaaucuauauuuaac

SEQ ID NO: 2855215 - RNA, 20 nt, Human
ugagacucugucucaaaaaa

SEQ ID NO: 2855216 - RNA, 13 nt, Human
ugagacuugccuu

SEQ ID NO: 2855217 - RNA, 15 nt, Human
ugagacuugccuucc

SEQ ID NO: 2855218 - RNA, 17 nt, Human
ugagacuugccuuccua

SEQ ID NO: 2855219 - RNA, 19 nt, Human
ugagacuugccuuccuaag

SEQ ID NO: 2855220 - RNA, 18 nt, Human
ugagacugggucucgcuu

SEQ ID NO: 2855221 - RNA, 23 nt, Human
ugagacugcgggaugguccuggg

SEQ ID NO: 2855222 - RNA, 22 nt, Human
ugagacugcgggaugguccugg

SEQ ID NO: 2855223 - RNA, 14 nt, Human
ugagacagaaucuc

SEQ ID NO: 2855224 - RNA, 14 nt, Human
ugagacagagccuc

SEQ ID NO: 2855225 - RNA, 14 nt, Human
ugagacuuucuuuc

SEQ ID NO: 2855226 - RNA, 16 nt, Human
ugagagagaugggagc

SEQ ID NO: 2855227 - RNA, 17 nt, Human
ugagagagaugggagcu

SEQ ID NO: 2855228 - RNA, 21 nt, Human
ugagagagaugggagcuccuc

SEQ ID NO: 2855229 - RNA, 12 nt, Human
ugagagacuuuu

SEQ ID NO: 2855230 - RNA, 18 nt, Human
ugagagacggugucuugu

SEQ ID NO: 2855231 - RNA, 21 nt, Human
ugagagacggugucuuguucu

SEQ ID NO: 2855232 - RNA, 14 nt, Human
ugagagaauuggcu

SEQ ID NO: 2855233 - RNA, 16 nt, Human
ugagagaauuggcuca

SEQ ID NO: 2855234 - RNA, 24 nt, Human
ugagagaccaggcaaagcaaguga

SEQ ID NO: 2855235 - RNA, 14 nt, Human
ugagagaccaggca

SEQ ID NO: 2855236 - RNA, 14 nt, Human
ugagagauucugug

SEQ ID NO: 2855237 - RNA, 21 nt, Human
ugagagauucugugaucuuuu

SEQ ID NO: 2855238 - RNA, 15 nt, Human
ugagagcccagaggu

SEQ ID NO: 2855239 - RNA, 16 nt, Human
ugagagcccagaggua

SEQ ID NO: 2855240 - RNA, 22 nt, Human
ugagagagaugggagcuccucu

SEQ ID NO: 2855241 - RNA, 23 nt, Human
ugagagagaugggagcuccucuc

SEQ ID NO: 2855242 - RNA, 14 nt, Human
ugagagcugggugu

SEQ ID NO: 2855243 - RNA, 19 nt, Human
ugagagcccagagguaaca

SEQ ID NO: 2855244 - RNA, 20 nt, Human
ugagagcccagagguaacag

SEQ ID NO: 2855245 - RNA, 13 nt, Human
ugagaugcugguu

SEQ ID NO: 2855246 - RNA, 17 nt, Human
ugagaugcugguuuucu

SEQ ID NO: 2855247 - RNA, 12 nt, Human
ugagaugcugua

SEQ ID NO: 2855248 - RNA, 23 nt, Human
ugagaggacuuuucuuuguggcu

SEQ ID NO: 2855249 - RNA, 13 nt, Human
ugagaugcuggag

SEQ ID NO: 2855250 - RNA, 15 nt, Human
ugagaugcuggagaa

SEQ ID NO: 2855251 - RNA, 16 nt, Human
ugagaugcuggagaag

SEQ ID NO: 2855252 - RNA, 17 nt, Human
ugagaugcuggagaaga

SEQ ID NO: 2855253 - RNA, 18 nt, Human
ugagaugcuggagaagag

SEQ ID NO: 2855254 - RNA, 19 nt, Human
ugagaugcuggagaagaga

SEQ ID NO: 2855255 - RNA, 20 nt, Human
ugagaugcuggagaagagag

SEQ ID NO: 2855256 - RNA, 23 nt, Human
ugagaugcuggagaagagaggag

SEQ ID NO: 2855257 - RNA, 23 nt, Human
ugagauguaagucucaacucugu

SEQ ID NO: 2855258 - RNA, 12 nt, Human
ugagauguauga

SEQ ID NO: 2855259 - RNA, 17 nt, Human
ugagauguaugaaggcu

SEQ ID NO: 2855260 - RNA, 17 nt, Human
ugagauggggauaaaau

SEQ ID NO: 2855261 - RNA, 21 nt, Human
ugagauggggauaaaaugacu

SEQ ID NO: 2855262 - RNA, 20 nt, Human
ugagauuccucuguauugug

SEQ ID NO: 2855263 - RNA, 18 nt, Human
ugagauugccccaggucu

SEQ ID NO: 2855264 - RNA, 19 nt, Human
ugagauugccccaggucug

SEQ ID NO: 2855265 - RNA, 16 nt, Human
ugagauuggcauggcu

SEQ ID NO: 2855266 - RNA, 17 nt, Human
ugagauuggcauggcuu

SEQ ID NO: 2855267 - RNA, 12 nt, Human
ugagauuguccu

SEQ ID NO: 2855268 - RNA, 16 nt, Human
ugagauuguccucauu

SEQ ID NO: 2855269 - RNA, 22 nt, Human
ugagauuguccucauuucucca

SEQ ID NO: 2855270 - RNA, 23 nt, Human
ugagauuuaccagggauguagau

SEQ ID NO: 2855271 - RNA, 20 nt, Human
ugagauguguggacuguggc

SEQ ID NO: 2855272 - RNA, 15 nt, Human
ugagauuacagagga

SEQ ID NO: 2855273 - RNA, 19 nt, Human
ugagauuacagaggaaguu

SEQ ID NO: 2855274 - RNA, 16 nt, Human
ugagauuacaggcaug

SEQ ID NO: 2855275 - RNA, 13 nt, Human
ugaaaauguuuuu

SEQ ID NO: 2855276 - RNA, 13 nt, Human
ugaaaauguucau

SEQ ID NO: 2855277 - RNA, 16 nt, Human
ugaaaauguuguuaug

SEQ ID NO: 2855278 - RNA, 21 nt, Human
ugaaaauauuuuuuauauaua

SEQ ID NO: 2855279 - RNA, 23 nt, Human
ugaaaauauuuuuuauauauaca

SEQ ID NO: 2855280 - RNA, 18 nt, Human
ugaaaauaccaucaggcc

SEQ ID NO: 2855281 - RNA, 21 nt, Human
ugaaaauggguuggugcuucu

SEQ ID NO: 2855282 - RNA, 21 nt, Human
ugaaaaugaauaucuauuaau

SEQ ID NO: 2855283 - RNA, 23 nt, Human
ugaaaaugaauaucuauuaauau

SEQ ID NO: 2855284 - RNA, 17 nt, Human
ugaaaaugaguugugaa

SEQ ID NO: 2855285 - RNA, 18 nt, Human
ugaaaaugaguugugaaa

SEQ ID NO: 2855286 - RNA, 14 nt, Human
ugaaaaucuuggag

SEQ ID NO: 2855287 - RNA, 19 nt, Human
ugaaaaugaauaucuauua

SEQ ID NO: 2855288 - RNA, 12 nt, Human
ugaaaaucaaau

SEQ ID NO: 2855289 - RNA, 16 nt, Human
ugaaaauaagaauaga

SEQ ID NO: 2855290 - RNA, 14 nt, Human
ucuuuuuuugugau

SEQ ID NO: 2855291 - RNA, 16 nt, Human
ucuuuuuuugugaugu

SEQ ID NO: 2855292 - RNA, 23 nt, Human
ucuuuuuuuuuuuuuaaagacag

SEQ ID NO: 2855293 - RNA, 15 nt, Human
ugaaagacuuccaaa

SEQ ID NO: 2855294 - RNA, 17 nt, Human
ugaaagacuuccaaaga

SEQ ID NO: 2855295 - RNA, 18 nt, Human
ugaaagacuuccaaagaa

SEQ ID NO: 2855296 - RNA, 21 nt, Human
ugaaagacuuccaaagaaugu

SEQ ID NO: 2855297 - RNA, 22 nt, Human
agagaccguccucaccccuguc

SEQ ID NO: 2855298 - RNA, 15 nt, Human
agagaccguccucac

SEQ ID NO: 2855299 - RNA, 19 nt, Human
agagacccucugccaccag

SEQ ID NO: 2855300 - RNA, 21 nt, Human
agagacccucugccaccagag

SEQ ID NO: 2855301 - RNA, 23 nt, Human
agagacccucugccaccagagac

SEQ ID NO: 2855302 - RNA, 19 nt, Human
agagacccuucaaacuugg

SEQ ID NO: 2855303 - RNA, 18 nt, Human
agagaguuguuguguaca

SEQ ID NO: 2855304 - RNA, 22 nt, Human
agagauaccaagaugccaucug

SEQ ID NO: 2855305 - RNA, 20 nt, Human
agagauaccaagaugccauc

SEQ ID NO: 2855306 - RNA, 19 nt, Human
agagauaccaagaugccau

SEQ ID NO: 2855307 - RNA, 14 nt, Human
agagauagccugug

SEQ ID NO: 2855308 - RNA, 15 nt, Human
agagauagccugugg

SEQ ID NO: 2855309 - RNA, 16 nt, Human
agagauagccuguggc

SEQ ID NO: 2855310 - RNA, 17 nt, Human
agagauagccuguggcc

SEQ ID NO: 2855311 - RNA, 17 nt, Human
agagaguggcuccuccc

SEQ ID NO: 2855312 - RNA, 16 nt, Human
agagauccaggaagca

SEQ ID NO: 2855313 - RNA, 13 nt, Human
agagauauauaua

SEQ ID NO: 2855314 - RNA, 14 nt, Human
agagauauaucuga

SEQ ID NO: 2855315 - RNA, 15 nt, Human
agagauauaucugaa

SEQ ID NO: 2855316 - RNA, 16 nt, Human
agagauauaucugaaa

SEQ ID NO: 2855317 - RNA, 19 nt, Human
agagauauaucugaaaacu

SEQ ID NO: 2855318 - RNA, 23 nt, Human
agagauauaucugaaaacuggaa

SEQ ID NO: 2855319 - RNA, 17 nt, Human
agagaugacugaguccu

SEQ ID NO: 2855320 - RNA, 21 nt, Human
agagaugcuguaacuuaaaau

SEQ ID NO: 2855321 - RNA, 23 nt, Human
agagaugcuguaacuuaaaauag

SEQ ID NO: 2855322 - RNA, 22 nt, Human
agagauggacaguucacacccu

SEQ ID NO: 2855323 - RNA, 18 nt, Human
agagaugacugaguccuc

SEQ ID NO: 2855324 - RNA, 23 nt, Human
agagaccguccucaccccugucc

SEQ ID NO: 2855325 - RNA, 15 nt, Human
agagacugcguucug

SEQ ID NO: 2855326 - RNA, 17 nt, Human
agagacugcguucugca

SEQ ID NO: 2855327 - RNA, 18 nt, Human
agagacugcguucugcaa

SEQ ID NO: 2855328 - RNA, 22 nt, Human
agagacugcguucugcaagcau

SEQ ID NO: 2855329 - RNA, 21 nt, Human
agagacuccuugagagaccag

SEQ ID NO: 2855330 - RNA, 22 nt, Human
agagacuccuugagagaccagg

SEQ ID NO: 2855331 - RNA, 17 nt, Human
agagacuuuuaaucaga

SEQ ID NO: 2855332 - RNA, 16 nt, Human
agagacuuuuaaucag

SEQ ID NO: 2855333 - RNA, 19 nt, Human
agagacuuuuaaucagaca

SEQ ID NO: 2855334 - RNA, 17 nt, Human
agagacuuuuuucuagu

SEQ ID NO: 2855335 - RNA, 13 nt, Human
agagagaaaaaaa

SEQ ID NO: 2855336 - RNA, 19 nt, Human
agagagaaaaaaaaaauag

SEQ ID NO: 2855337 - RNA, 13 nt, Human
agagagaaaaaca

SEQ ID NO: 2855338 - RNA, 14 nt, Human
agagagaaaaacaa

SEQ ID NO: 2855339 - RNA, 20 nt, Human
ucuuugucuuaucuggcccu

SEQ ID NO: 2855340 - RNA, 17 nt, Human
ucuuuguaucauucauc

SEQ ID NO: 2855341 - RNA, 12 nt, Human
ucuuuguaucuu

SEQ ID NO: 2855342 - RNA, 16 nt, Human
ucuuuguaucuuccau

SEQ ID NO: 2855343 - RNA, 14 nt, Human
ucuuuguggcuucc

SEQ ID NO: 2855344 - RNA, 14 nt, Human
ucuuugugauaauu

SEQ ID NO: 2855345 - RNA, 16 nt, Human
ucuuugugauaauuua

SEQ ID NO: 2855346 - RNA, 22 nt, Human
ucuuugugauaauuuaagagcu

SEQ ID NO: 2855347 - RNA, 23 nt, Human
ucuuugugauaauuuaagagcua

SEQ ID NO: 2855348 - RNA, 14 nt, Human
ucuuuuuucacaaa

SEQ ID NO: 2855349 - RNA, 22 nt, Human
ucuuuuuuguuuguuucuuugu

SEQ ID NO: 2855350 - RNA, 23 nt, Human
ucuuuuuuguuuguuucuuugug

SEQ ID NO: 2855351 - RNA, 17 nt, Human
ucuuuuuuucccccccu

SEQ ID NO: 2855352 - RNA, 22 nt, Human
ucuuuuuuuggugauucaaaug

SEQ ID NO: 2855353 - RNA, 15 nt, Human
ucuuuuuuucuuggc

SEQ ID NO: 2855354 - RNA, 18 nt, Human
agacuggggggcuugaaa

SEQ ID NO: 2855355 - RNA, 18 nt, Human
agacuuuuaaucagacaa

SEQ ID NO: 2855356 - RNA, 18 nt, Human
agacuuuguuuuuaaaau

SEQ ID NO: 2855357 - RNA, 19 nt, Human
agacuuuguuuuuaaaaug

SEQ ID NO: 2855358 - RNA, 23 nt, Human
ucuuucuacaaagcacuagagaa

SEQ ID NO: 2855359 - RNA, 15 nt, Human
ucuuucuauuccaaa

SEQ ID NO: 2855360 - RNA, 17 nt, Human
ucuuucuccaaaguuau

SEQ ID NO: 2855361 - RNA, 21 nt, Human
ucuuucuccaaaguuauccag

SEQ ID NO: 2855362 - RNA, 21 nt, Human
ucuuucuccuugaauaucuuu

SEQ ID NO: 2855363 - RNA, 24 nt, Human
ucuuucuccuugaauaucuuucga

SEQ ID NO: 2855364 - RNA, 14 nt, Human
ucuuucucucuucc

SEQ ID NO: 2855365 - RNA, 17 nt, Human
ucuuucucucuucccuc

SEQ ID NO: 2855366 - RNA, 10 nt, Human
ucuuucucuc

SEQ ID NO: 2855367 - RNA, 12 nt, Human
ucuuucucucag

SEQ ID NO: 2855368 - RNA, 14 nt, Human
ucuuucucucagcc

SEQ ID NO: 2855369 - RNA, 21 nt, Human
ucuuucucucagccuuacauu

SEQ ID NO: 2855370 - RNA, 12 nt, Human
ucuuucucuccc

SEQ ID NO: 2855371 - RNA, 14 nt, Human
ucuuucucucccca

SEQ ID NO: 2855372 - RNA, 17 nt, Human
ucuuuccuaagaccugg

SEQ ID NO: 2855373 - RNA, 19 nt, Human
ucuuucuaaugugugaauc

SEQ ID NO: 2855374 - RNA, 15 nt, Human
ucuuucuaguggucu

SEQ ID NO: 2855375 - RNA, 16 nt, Human
ucuuucuaguggucuu

SEQ ID NO: 2855376 - RNA, 17 nt, Human
ucuuucuaguggucuuu

SEQ ID NO: 2855377 - RNA, 20 nt, Human
ucuuucuaguggucuuugua

SEQ ID NO: 2855378 - RNA, 21 nt, Human
ucuuucuaguggucuuuguaa

SEQ ID NO: 2855379 - RNA, 22 nt, Human
ucuuucuaguggucuuuguaag

SEQ ID NO: 2855380 - RNA, 15 nt, Human
ucuuucuaugcugcu

SEQ ID NO: 2855381 - RNA, 18 nt, Human
ucuuucuaugcugcuuuu

SEQ ID NO: 2855382 - RNA, 21 nt, Human
ucuuucuaugcugcuuuuaua

SEQ ID NO: 2855383 - RNA, 20 nt, Human
agacaggcaagcaccuccug

SEQ ID NO: 2855384 - RNA, 15 nt, Human
ucuuuaaugucacag

SEQ ID NO: 2855385 - RNA, 19 nt, Human
ucuuuaaugucacaggcag

SEQ ID NO: 2855386 - RNA, 18 nt, Human
ucuuuaaugucacaggca

SEQ ID NO: 2855387 - RNA, 17 nt, Human
agacucuguaacaucac

SEQ ID NO: 2855388 - RNA, 15 nt, Human
agacucuagggucca

SEQ ID NO: 2855389 - RNA, 21 nt, Human
agacucuagaguccaagguuu

SEQ ID NO: 2855390 - RNA, 22 nt, Human
agacuccaucucuauauaaaaa

SEQ ID NO: 2855391 - RNA, 20 nt, Human
agacuggcuggcugcaguga

SEQ ID NO: 2855392 - RNA, 14 nt, Human
agacuggcuggcug

SEQ ID NO: 2855393 - RNA, 23 nt, Human
agacuccuccuccaaaggccccc

SEQ ID NO: 2855394 - RNA, 23 nt, Human
agacuccugacugucucccggga

SEQ ID NO: 2855395 - RNA, 19 nt, Human
agacucuagaguccaaggu

SEQ ID NO: 2855396 - RNA, 20 nt, Human
agacucuagaguccaagguu

SEQ ID NO: 2855397 - RNA, 15 nt, Human
agacucuauucucaa

SEQ ID NO: 2855398 - RNA, 11 nt, Human
agacucucagc

SEQ ID NO: 2855399 - RNA, 16 nt, Human
agacucucagcccaga

SEQ ID NO: 2855400 - RNA, 17 nt, Human
agacucucagcccagaa

SEQ ID NO: 2855401 - RNA, 18 nt, Human
agacucucagcccagaag

SEQ ID NO: 2855402 - RNA, 20 nt, Human
agacucucagcccagaagaa

SEQ ID NO: 2855403 - RNA, 19 nt, Human
agacucucgcaucuuccca

SEQ ID NO: 2855404 - RNA, 20 nt, Human
agacucucgcaucuucccaa

SEQ ID NO: 2855405 - RNA, 23 nt, Human
agacucucgcaucuucccaaccc

SEQ ID NO: 2855406 - RNA, 18 nt, Human
agacucuagacaagauau

SEQ ID NO: 2855407 - RNA, 23 nt, Human
agacucuagacaagauauuguac

SEQ ID NO: 2855408 - RNA, 16 nt, Human
agacucuagaguccaa

SEQ ID NO: 2855409 - RNA, 17 nt, Human
agacucuagaguccaag

SEQ ID NO: 2855410 - RNA, 14 nt, Human
agacuccuccucca

SEQ ID NO: 2855411 - RNA, 14 nt, Human
agacuccuaggcag

SEQ ID NO: 2855412 - RNA, 22 nt, Human
agacuccuaggcaggacaugcu

SEQ ID NO: 2855413 - RNA, 11 nt, Human
agacuccuagg

SEQ ID NO: 2855414 - RNA, 16 nt, Human
agacucccaagcugga

SEQ ID NO: 2855415 - RNA, 15 nt, Human
agacucccaugaagc

SEQ ID NO: 2855416 - RNA, 16 nt, Human
agacucccaugaagcc

SEQ ID NO: 2855417 - RNA, 17 nt, Human
agacucccaugaagccu

SEQ ID NO: 2855418 - RNA, 18 nt, Human
agacucccaugaagccuu

SEQ ID NO: 2855419 - RNA, 19 nt, Human
agacucccaugaagccuuu

SEQ ID NO: 2855420 - RNA, 21 nt, Human
agacucccaugaagccuuuug

SEQ ID NO: 2855421 - RNA, 23 nt, Human
agacucccaugaagccuuuugaa

SEQ ID NO: 2855422 - RNA, 21 nt, Human
agacuccagcuggguuggaaa

SEQ ID NO: 2855423 - RNA, 14 nt, Human
agagcuguggagga

SEQ ID NO: 2855424 - RNA, 20 nt, Human
agagcuguggaggauugcua

SEQ ID NO: 2855425 - RNA, 13 nt, Human
ugaacccuccagg

SEQ ID NO: 2855426 - RNA, 22 nt, Human
agagcuguucaacaucacugaa

SEQ ID NO: 2855427 - RNA, 23 nt, Human
agaggcagccccauucugccugc

SEQ ID NO: 2855428 - RNA, 21 nt, Human
agaggcagggucucacucugu

SEQ ID NO: 2855429 - RNA, 22 nt, Human
agaggcagccccauucugccug

SEQ ID NO: 2855430 - RNA, 21 nt, Human
agaggcagccccauucugccu

SEQ ID NO: 2855431 - RNA, 12 nt, Human
agaggccugccc

SEQ ID NO: 2855432 - RNA, 13 nt, Human
agaggccugcccg

SEQ ID NO: 2855433 - RNA, 18 nt, Human
agaggccaaaggcuggug

SEQ ID NO: 2855434 - RNA, 19 nt, Human
agaggccaacacugugggu

SEQ ID NO: 2855435 - RNA, 21 nt, Human
agaggccagccccacccagga

SEQ ID NO: 2855436 - RNA, 18 nt, Human
agaggccagccccaccca

SEQ ID NO: 2855437 - RNA, 17 nt, Human
agaggccagccccaccc

SEQ ID NO: 2855438 - RNA, 16 nt, Human
agaggccagccccacc

SEQ ID NO: 2855439 - RNA, 23 nt, Human
agaggccagccccacccaggagg

SEQ ID NO: 2855440 - RNA, 19 nt, Human
agaggcugccccucucacc

SEQ ID NO: 2855441 - RNA, 18 nt, Human
agaggcugccccucucac

SEQ ID NO: 2855442 - RNA, 16 nt, Human
agaggcugccccucuc

SEQ ID NO: 2855443 - RNA, 14 nt, Human
agaggcugccccuc

SEQ ID NO: 2855444 - RNA, 12 nt, Human
agaggcugcccc

SEQ ID NO: 2855445 - RNA, 20 nt, Human
agagggagugacagaggcag

SEQ ID NO: 2855446 - RNA, 15 nt, Human
agagggagugacaga

SEQ ID NO: 2855447 - RNA, 20 nt, Human
agaggcugccccucucacca

SEQ ID NO: 2855448 - RNA, 16 nt, Human
agagguuuuguuguuu

SEQ ID NO: 2855449 - RNA, 19 nt, Human
agagguuuuguuguuuuau

SEQ ID NO: 2855450 - RNA, 16 nt, Human
agaguaagaaauuuca

SEQ ID NO: 2855451 - RNA, 20 nt, Human
agaguaagaaauuucagguu

SEQ ID NO: 2855452 - RNA, 13 nt, Human
agaguaagacauu

SEQ ID NO: 2855453 - RNA, 14 nt, Human
agaguaagacauug

SEQ ID NO: 2855454 - RNA, 9 nt, Human
ugaagggag

SEQ ID NO: 2855455 - RNA, 12 nt, Human
agagguuuuguu

SEQ ID NO: 2855456 - RNA, 20 nt, Human
ugaaggcuuuuggucucccu

SEQ ID NO: 2855457 - RNA, 18 nt, Human
ugaagguuuuaagugguu

SEQ ID NO: 2855458 - RNA, 24 nt, Human
ugaagggauuuuagucacacgugg

SEQ ID NO: 2855459 - RNA, 17 nt, Human
ugaagggcauucuuucc

SEQ ID NO: 2855460 - RNA, 13 nt, Human
ugaaguaagcaaa

SEQ ID NO: 2855461 - RNA, 14 nt, Human
ugaaguaagcaaag

SEQ ID NO: 2855462 - RNA, 19 nt, Human
ugaaguaaagccauuaaau

SEQ ID NO: 2855463 - RNA, 15 nt, Human
ugaaguaagcaaaga

SEQ ID NO: 2855464 - RNA, 15 nt, Human
ugaaguaaacugcag

SEQ ID NO: 2855465 - RNA, 21 nt, Human
ugaaguacuugccagaaguug

SEQ ID NO: 2855466 - RNA, 14 nt, Human
ugaaguaguuugua

SEQ ID NO: 2855467 - RNA, 15 nt, Human
ugaaguaguuuguau

SEQ ID NO: 2855468 - RNA, 17 nt, Human
ugaaguaucuaaaagug

SEQ ID NO: 2855469 - RNA, 20 nt, Human
ugaaguaucuaaaaguguca

SEQ ID NO: 2855470 - RNA, 13 nt, Human
ugaagucacacag

SEQ ID NO: 2855471 - RNA, 16 nt, Human
ugaauaauaagcagga

SEQ ID NO: 2855472 - RNA, 20 nt, Human
ugaauaauaagcaggauguu

SEQ ID NO: 2855473 - RNA, 14 nt, Human
ugaauacagcagca

SEQ ID NO: 2855474 - RNA, 16 nt, Human
ugaauacagcagcaag

SEQ ID NO: 2855475 - RNA, 17 nt, Human
ugaauacagcagcaaga

SEQ ID NO: 2855476 - RNA, 18 nt, Human
ugaauacagcagcaagaa

SEQ ID NO: 2855477 - RNA, 20 nt, Human
ugaauacagcagcaagaaaa

SEQ ID NO: 2855478 - RNA, 21 nt, Human
ugaauacagcagcaagaaaaa

SEQ ID NO: 2855479 - RNA, 15 nt, Human
ugaauauuuugauaa

SEQ ID NO: 2855480 - RNA, 16 nt, Human
ugaauauuuugauaau

SEQ ID NO: 2855481 - RNA, 20 nt, Human
ugaauauuuuaucuuuccuu

SEQ ID NO: 2855482 - RNA, 20 nt, Human
ugaagaacaguaacugccau

SEQ ID NO: 2855483 - RNA, 15 nt, Human
ugaagaacaguaacu

SEQ ID NO: 2855484 - RNA, 14 nt, Human
ugaagaacauguga

SEQ ID NO: 2855485 - RNA, 13 nt, Human
ugaagaacaugug

SEQ ID NO: 2855486 - RNA, 17 nt, Human
ugaagaacuagcauaua

SEQ ID NO: 2855487 - RNA, 19 nt, Human
ugaagaacuauuuuauucu

SEQ ID NO: 2855488 - RNA, 19 nt, Human
ugaagaaauacugcacuua

SEQ ID NO: 2855489 - RNA, 20 nt, Human
ugaagaaauacugcacuuac

SEQ ID NO: 2855490 - RNA, 17 nt, Human
ugaagaaauuauaaaga

SEQ ID NO: 2855491 - RNA, 20 nt, Human
ugaagaaauuauaaagauaa

SEQ ID NO: 2855492 - RNA, 13 nt, Human
ugaagaacaguaa

SEQ ID NO: 2855493 - RNA, 15 nt, Human
ugaacuccugaccuc

SEQ ID NO: 2855494 - RNA, 20 nt, Human
ugaacucacuuuccuccuga

SEQ ID NO: 2855495 - RNA, 21 nt, Human
ugaacuacgcuugcucauuuu

SEQ ID NO: 2855496 - RNA, 18 nt, Human
ugaacucagaucugucug

SEQ ID NO: 2855497 - RNA, 22 nt, Human
ugaacucagaucugucugauag

SEQ ID NO: 2855498 - RNA, 11 nt, Human
ugaagaauuaa

SEQ ID NO: 2855499 - RNA, 14 nt, Human
ugaagaauuaagau

SEQ ID NO: 2855500 - RNA, 17 nt, Human
ugaagaauuaagauaca

SEQ ID NO: 2855501 - RNA, 15 nt, Human
ugaagaauggcgcca

SEQ ID NO: 2855502 - RNA, 21 nt, Human
ugaagaaucuguuucccagca

SEQ ID NO: 2855503 - RNA, 18 nt, Human
ugaagaagguggaccuuu

SEQ ID NO: 2855504 - RNA, 19 nt, Human
ugaagaagguggaccuuuu

SEQ ID NO: 2855505 - RNA, 21 nt, Human
ugaagaagguggaccuuuuaa

SEQ ID NO: 2855506 - RNA, 23 nt, Human
ugaagaagguggaccuuuuaaag

SEQ ID NO: 2855507 - RNA, 14 nt, Human
ugaagaauacaguu

SEQ ID NO: 2855508 - RNA, 15 nt, Human
ugaagaauacaguua

SEQ ID NO: 2855509 - RNA, 20 nt, Human
ugaagaauacaguuaggcac

SEQ ID NO: 2855510 - RNA, 16 nt, Human
ugaagaauccuuuugu

SEQ ID NO: 2855511 - RNA, 21 nt, Human
ugaagaauccuuuuguagaau

SEQ ID NO: 2855512 - RNA, 11 nt, Human
ugaagaaggug

SEQ ID NO: 2855513 - RNA, 13 nt, Human
ugaagacaauuug

SEQ ID NO: 2855514 - RNA, 20 nt, Human
ugaagacaauuugauacaua

SEQ ID NO: 2855515 - RNA, 21 nt, Human
ugaagacaauuugauacauaa

SEQ ID NO: 2855516 - RNA, 22 nt, Human
ugaagacaauuugauacauaau

SEQ ID NO: 2855517 - RNA, 23 nt, Human
ugaagacaauuugauacauaaua

SEQ ID NO: 2855518 - RNA, 16 nt, Human
agagcuggugcccgga

SEQ ID NO: 2855519 - RNA, 15 nt, Human
ugaacccuugcuugc

SEQ ID NO: 2855520 - RNA, 13 nt, Human
ugaacccuuuguu

SEQ ID NO: 2855521 - RNA, 17 nt, Human
ugaacccuuuguuucuu

SEQ ID NO: 2855522 - RNA, 21 nt, Human
ugaacccuuccugagcuuuau

SEQ ID NO: 2855523 - RNA, 13 nt, Human
ugaacccuugcuu

SEQ ID NO: 2855524 - RNA, 17 nt, Human
ugaacccgggaggcaga

SEQ ID NO: 2855525 - RNA, 14 nt, Human
ugaacuaagaaacu

SEQ ID NO: 2855526 - RNA, 18 nt, Human
ugaacuaagaaacuuuug

SEQ ID NO: 2855527 - RNA, 22 nt, Human
ugaacuaagaaacuuuuguaaa

SEQ ID NO: 2855528 - RNA, 18 nt, Human
ugaacucacuuuccuccu

SEQ ID NO: 2855529 - RNA, 16 nt, Human
ugaacguccacaugaa

SEQ ID NO: 2855530 - RNA, 21 nt, Human
ugaaccaccacacccagccca

SEQ ID NO: 2855531 - RNA, 22 nt, Human
ugaaccaccacacccagcccac

SEQ ID NO: 2855532 - RNA, 16 nt, Human
ugaaccacgcgggggc

SEQ ID NO: 2855533 - RNA, 15 nt, Human
ugaaccacuucauuc

SEQ ID NO: 2855534 - RNA, 16 nt, Human
ugaaccacuucauucu

SEQ ID NO: 2855535 - RNA, 22 nt, Human
ugaaccauccacuuacauauau

SEQ ID NO: 2855536 - RNA, 22 nt, Human
agagauguuuuuaaaaguuuca

SEQ ID NO: 2855537 - RNA, 20 nt, Human
agagauuggaaugggcagcu

SEQ ID NO: 2855538 - RNA, 22 nt, Human
agagauuggaaugggcagcuca

SEQ ID NO: 2855539 - RNA, 21 nt, Human
agagauuggaaugggcagcuc

SEQ ID NO: 2855540 - RNA, 12 nt, Human
agagauucugau

SEQ ID NO: 2855541 - RNA, 19 nt, Human
agagauucugauuugccac

SEQ ID NO: 2855542 - RNA, 20 nt, Human
agagauucugugaucuuuua

SEQ ID NO: 2855543 - RNA, 23 nt, Human
agagauucugugaucuuuuaaag

SEQ ID NO: 2855544 - RNA, 13 nt, Human
agagauugcuaau

SEQ ID NO: 2855545 - RNA, 14 nt, Human
agagauugcuaauu

SEQ ID NO: 2855546 - RNA, 15 nt, Human
agagauugcuucuca

SEQ ID NO: 2855547 - RNA, 12 nt, Human
agagauguuuuu

SEQ ID NO: 2855548 - RNA, 20 nt, Human
agagauguuuuuaaaaguuu

SEQ ID NO: 2855549 - RNA, 21 nt, Human
agagauguuuuuaaaaguuuc

SEQ ID NO: 2855550 - RNA, 20 nt, Human
ugaaauaaagaaauugcaau

SEQ ID NO: 2855551 - RNA, 21 nt, Human
ugaaauaaagacccaggggga

SEQ ID NO: 2855552 - RNA, 16 nt, Human
ugaaauaacaaaaugg

SEQ ID NO: 2855553 - RNA, 17 nt, Human
ugaaauaacaaaaugga

SEQ ID NO: 2855554 - RNA, 18 nt, Human
ugaaauaacaaaauggac

SEQ ID NO: 2855555 - RNA, 20 nt, Human
ugaaauaacaaaauggacau

SEQ ID NO: 2855556 - RNA, 21 nt, Human
ugaaauaaagaaauugcaaua

SEQ ID NO: 2855557 - RNA, 11 nt, Human
ugaaauaccuc

SEQ ID NO: 2855558 - RNA, 12 nt, Human
ugaaauaccuca

SEQ ID NO: 2855559 - RNA, 13 nt, Human
ugaaauaccucau

SEQ ID NO: 2855560 - RNA, 17 nt, Human
ugaaauaccucauguuu

SEQ ID NO: 2855561 - RNA, 19 nt, Human
ugaaauaccucauguuuau

SEQ ID NO: 2855562 - RNA, 21 nt, Human
ugaaauaccucauguuuauga

SEQ ID NO: 2855563 - RNA, 22 nt, Human
ugaaauaccucauguuuaugaa

SEQ ID NO: 2855564 - RNA, 18 nt, Human
ugaaauaggaaacaagug

SEQ ID NO: 2855565 - RNA, 17 nt, Human
ugaaauaggaaacaagu

SEQ ID NO: 2855566 - RNA, 15 nt, Human
ugaaauaggaaacaa

SEQ ID NO: 2855567 - RNA, 23 nt, Human
ugaaauagacccacaagaggcag

SEQ ID NO: 2855568 - RNA, 18 nt, Human
ugaaauagucugugugaa

SEQ ID NO: 2855569 - RNA, 17 nt, Human
ugaaauagucuguguga

SEQ ID NO: 2855570 - RNA, 16 nt, Human
ugaaauagucugugug

SEQ ID NO: 2855571 - RNA, 13 nt, Human
ugaaauagucugu

SEQ ID NO: 2855572 - RNA, 22 nt, Human
ugaaauugauaaugcuuucaca

SEQ ID NO: 2855573 - RNA, 12 nt, Human
ugaaauuguaaa

SEQ ID NO: 2855574 - RNA, 20 nt, Human
ugaaauuuauuaguuaauau

SEQ ID NO: 2855575 - RNA, 21 nt, Human
ugaaauuuauuaguuaauaua

SEQ ID NO: 2855576 - RNA, 22 nt, Human
ugaaauuuauuaguuaauauau

SEQ ID NO: 2855577 - RNA, 12 nt, Human
ugaaauuucaga

SEQ ID NO: 2855578 - RNA, 14 nt, Human
ugaaauuuauuuaa

SEQ ID NO: 2855579 - RNA, 17 nt, Human
ugaaauuuauuuaaugu

SEQ ID NO: 2855580 - RNA, 21 nt, Human
ugaaauuuauuuaaugugagu

SEQ ID NO: 2855581 - RNA, 22 nt, Human
ugaaauuucagauucccagagc

SEQ ID NO: 2855582 - RNA, 18 nt, Human
ugaacaaaaaauaaaaau

SEQ ID NO: 2855583 - RNA, 13 nt, Human
ugaacaaaagggu

SEQ ID NO: 2855584 - RNA, 14 nt, Human
ugaacaaaaggguc

SEQ ID NO: 2855585 - RNA, 15 nt, Human
ugaacaaaaggguca

SEQ ID NO: 2855586 - RNA, 15 nt, Human
ugaaauuuuuguaaa

SEQ ID NO: 2855587 - RNA, 18 nt, Human
ugaaauuuuuguaaauca

SEQ ID NO: 2855588 - RNA, 13 nt, Human
ugaacaaacuaaa

SEQ ID NO: 2855589 - RNA, 14 nt, Human
ugaacaaaaucugu

SEQ ID NO: 2855590 - RNA, 15 nt, Human
ugaacaaaaucuguu

SEQ ID NO: 2855591 - RNA, 18 nt, Human
ugaacaaaaucuguugcc

SEQ ID NO: 2855592 - RNA, 15 nt, Human
uguaagaacuaaaga

SEQ ID NO: 2855593 - RNA, 22 nt, Human
uguaagaacuaaagaagaucug

SEQ ID NO: 2855594 - RNA, 21 nt, Human
agguguugaagaaauuauaaa

SEQ ID NO: 2855595 - RNA, 22 nt, Human
agguguugaagaaauuauaaag

SEQ ID NO: 2855596 - RNA, 15 nt, Human
agguguuggugacaa

SEQ ID NO: 2855597 - RNA, 16 nt, Human
agguguuggugacaau

SEQ ID NO: 2855598 - RNA, 18 nt, Human
agguguuggugacaauug

SEQ ID NO: 2855599 - RNA, 18 nt, Human
agguguugguuuuggggg

SEQ ID NO: 2855600 - RNA, 16 nt, Human
agguguuacuguaauu

SEQ ID NO: 2855601 - RNA, 14 nt, Human
agguguuagagagg

SEQ ID NO: 2855602 - RNA, 15 nt, Human
agguguuacuguaau

SEQ ID NO: 2855603 - RNA, 18 nt, Human
agguguuaacauuccaag

SEQ ID NO: 2855604 - RNA, 23 nt, Human
agguguuaacauuccaagacucu

SEQ ID NO: 2855605 - RNA, 13 nt, Human
aggugugaggagg

SEQ ID NO: 2855606 - RNA, 17 nt, Human
aggugugaggaggaggc

SEQ ID NO: 2855607 - RNA, 16 nt, Human
agguugucugaaguca

SEQ ID NO: 2855608 - RNA, 20 nt, Human
agguugucugaagucacugc

SEQ ID NO: 2855609 - RNA, 17 nt, Human
agguuguagugagccca

SEQ ID NO: 2855610 - RNA, 16 nt, Human
agguuguuccuaaaau

SEQ ID NO: 2855611 - RNA, 13 nt, Human
agguuuaaagagu

SEQ ID NO: 2855612 - RNA, 14 nt, Human
agguuuaaagaguc

SEQ ID NO: 2855613 - RNA, 15 nt, Human
agguuuaacauuugc

SEQ ID NO: 2855614 - RNA, 16 nt, Human
agguuuaacauuugcc

SEQ ID NO: 2855615 - RNA, 15 nt, Human
agguuuaaagagucu

SEQ ID NO: 2855616 - RNA, 16 nt, Human
agguuuaaagagucua

SEQ ID NO: 2855617 - RNA, 20 nt, Human
agguuuaaagagucuagauu

SEQ ID NO: 2855618 - RNA, 20 nt, Human
aggugugagucaccaagccc

SEQ ID NO: 2855619 - RNA, 14 nt, Human
aggugugagucacc

SEQ ID NO: 2855620 - RNA, 20 nt, Human
aggugugagccaccacgccc

SEQ ID NO: 2855621 - RNA, 22 nt, Human
aggugugaaccaccacacccag

SEQ ID NO: 2855622 - RNA, 15 nt, Human
agguggucaguaaau

SEQ ID NO: 2855623 - RNA, 23 nt, Human
aggugugaaccaccacacccagc

SEQ ID NO: 2855624 - RNA, 13 nt, Human
agguggggcagcu

SEQ ID NO: 2855625 - RNA, 22 nt, Human
aggugauccacucgccuucauc

SEQ ID NO: 2855626 - RNA, 14 nt, Human
agguggggcagcuu

SEQ ID NO: 2855627 - RNA, 16 nt, Human
aggugguaggaggagg

SEQ ID NO: 2855628 - RNA, 20 nt, Human
aggugguaguaaaacacaga

SEQ ID NO: 2855629 - RNA, 21 nt, Human
aggugguaguaaaacacagag

SEQ ID NO: 2855630 - RNA, 22 nt, Human
aggugguaguaaaacacagagg

SEQ ID NO: 2855631 - RNA, 23 nt, Human
agguggguuuucaucaagacugg

SEQ ID NO: 2855632 - RNA, 15 nt, Human
agguggggugagaau

SEQ ID NO: 2855633 - RNA, 17 nt, Human
agguguuaacauuccaa

SEQ ID NO: 2855634 - RNA, 14 nt, Human
uguacaaaggggaa

SEQ ID NO: 2855635 - RNA, 22 nt, Human
uguacaaaggggaaagaacaua

SEQ ID NO: 2855636 - RNA, 18 nt, Human
uguacauauguaaaauaa

SEQ ID NO: 2855637 - RNA, 16 nt, Human
uguacauauguaaaau

SEQ ID NO: 2855638 - RNA, 15 nt, Human
uguacauauguaaaa

SEQ ID NO: 2855639 - RNA, 13 nt, Human
uguacauauguaa

SEQ ID NO: 2855640 - RNA, 21 nt, Human
uguacauauguaaaauaaaau

SEQ ID NO: 2855641 - RNA, 19 nt, Human
uguacauauguaaaauaaa

SEQ ID NO: 2855642 - RNA, 20 nt, Human
uguacauauuugagacuagu

SEQ ID NO: 2855643 - RNA, 18 nt, Human
uguacauauuuguggaau

SEQ ID NO: 2855644 - RNA, 19 nt, Human
uguacauauuuguggaaua

SEQ ID NO: 2855645 - RNA, 14 nt, Human
uguacaucuauuuu

SEQ ID NO: 2855646 - RNA, 22 nt, Human
uguacaaaauaaacaaauaaca

SEQ ID NO: 2855647 - RNA, 13 nt, Human
uguagaaggcaca

SEQ ID NO: 2855648 - RNA, 16 nt, Human
uguagaaugauuucau

SEQ ID NO: 2855649 - RNA, 13 nt, Human
uguagaagcauuc

SEQ ID NO: 2855650 - RNA, 15 nt, Human
uguagaagcauuccu

SEQ ID NO: 2855651 - RNA, 16 nt, Human
uguagaagcauuccuu

SEQ ID NO: 2855652 - RNA, 17 nt, Human
uguagaagcauuccuuc

SEQ ID NO: 2855653 - RNA, 22 nt, Human
uguagaagcauuccuucuuuga

SEQ ID NO: 2855654 - RNA, 12 nt, Human
uguagacuauau

SEQ ID NO: 2855655 - RNA, 15 nt, Human
uguagacuauauaca

SEQ ID NO: 2855656 - RNA, 16 nt, Human
uguagacuauauacau

SEQ ID NO: 2855657 - RNA, 17 nt, Human
uguagacuauauacaug

SEQ ID NO: 2855658 - RNA, 18 nt, Human
uguagacuauauacaugu

SEQ ID NO: 2855659 - RNA, 19 nt, Human
uguagacuauauacaugug

SEQ ID NO: 2855660 - RNA, 20 nt, Human
uguagacuauauacaugugu

SEQ ID NO: 2855661 - RNA, 21 nt, Human
uguagacuauauacaugugug

SEQ ID NO: 2855662 - RNA, 22 nt, Human
uguagacuauauacaugugugu

SEQ ID NO: 2855663 - RNA, 23 nt, Human
uguagacuauauacaugugugua

SEQ ID NO: 2855664 - RNA, 18 nt, Human
uguagaauagccuguggc

SEQ ID NO: 2855665 - RNA, 14 nt, Human
uguagaauuguuau

SEQ ID NO: 2855666 - RNA, 16 nt, Human
uguagaauuguuauag

SEQ ID NO: 2855667 - RNA, 18 nt, Human
uguagaaugauuucaugc

SEQ ID NO: 2855668 - RNA, 17 nt, Human
uguagaaugauuucaug

SEQ ID NO: 2855669 - RNA, 16 nt, Human
uguacuugaugacaga

SEQ ID NO: 2855670 - RNA, 23 nt, Human
uguacuugaagucuaaaagcaga

SEQ ID NO: 2855671 - RNA, 21 nt, Human
uguacuucgucuucuaauuuc

SEQ ID NO: 2855672 - RNA, 11 nt, Human
uguacuuccug

SEQ ID NO: 2855673 - RNA, 12 nt, Human
uguacuuccuga

SEQ ID NO: 2855674 - RNA, 17 nt, Human
uguacuuccugaguggc

SEQ ID NO: 2855675 - RNA, 17 nt, Human
uguacauguguagccug

SEQ ID NO: 2855676 - RNA, 20 nt, Human
uguacauguguagccugugc

SEQ ID NO: 2855677 - RNA, 15 nt, Human
uguacuuaacuauuc

SEQ ID NO: 2855678 - RNA, 16 nt, Human
uguacauuuuguugua

SEQ ID NO: 2855679 - RNA, 17 nt, Human
uguacauuuuguuguaa

SEQ ID NO: 2855680 - RNA, 20 nt, Human
uguacauuucacaggcuaau

SEQ ID NO: 2855681 - RNA, 14 nt, Human
uguacauuuaaaau

SEQ ID NO: 2855682 - RNA, 15 nt, Human
uguacauuuaaaauu

SEQ ID NO: 2855683 - RNA, 20 nt, Human
uguacauuuaaaauugcuau

SEQ ID NO: 2855684 - RNA, 20 nt, Human
uguacauuuaugauuuaaua

SEQ ID NO: 2855685 - RNA, 21 nt, Human
uguacauuuaugauuuaauaa

SEQ ID NO: 2855686 - RNA, 21 nt, Human
uguacauguguagccugugca

SEQ ID NO: 2855687 - RNA, 15 nt, Human
uguacauguguagcc

SEQ ID NO: 2855688 - RNA, 18 nt, Human
uguaaagccaacacccug

SEQ ID NO: 2855689 - RNA, 15 nt, Human
uguaaagcaauaaaa

SEQ ID NO: 2855690 - RNA, 19 nt, Human
uguaaagaucuacaugaau

SEQ ID NO: 2855691 - RNA, 13 nt, Human
uguaaagaaaugu

SEQ ID NO: 2855692 - RNA, 13 nt, Human
uguaaauacauaa

SEQ ID NO: 2855693 - RNA, 11 nt, Human
uguaaauacca

SEQ ID NO: 2855694 - RNA, 20 nt, Human
uguaaauaccagacugcagg

SEQ ID NO: 2855695 - RNA, 14 nt, Human
uguaaauaccagga

SEQ ID NO: 2855696 - RNA, 15 nt, Human
uguaaauaccaggau

SEQ ID NO: 2855697 - RNA, 19 nt, Human
uguaaauaccaggauuuuu

SEQ ID NO: 2855698 - RNA, 15 nt, Human
uguaaauaccauuga

SEQ ID NO: 2855699 - RNA, 19 nt, Human
uguaaauaccauugacaca

SEQ ID NO: 2855700 - RNA, 20 nt, Human
uguaaauaccauugacacau

SEQ ID NO: 2855701 - RNA, 15 nt, Human
uguaaauacuguugg

SEQ ID NO: 2855702 - RNA, 17 nt, Human
uguaaauacuguuggug

SEQ ID NO: 2855703 - RNA, 12 nt, Human
uguaaauacaua

SEQ ID NO: 2855704 - RNA, 14 nt, Human
uguaaauauucuau

SEQ ID NO: 2855705 - RNA, 15 nt, Human
uguaaauauucuaua

SEQ ID NO: 2855706 - RNA, 16 nt, Human
uguaaauauucuauau

SEQ ID NO: 2855707 - RNA, 16 nt, Human
uguaaaucacauccuu

SEQ ID NO: 2855708 - RNA, 20 nt, Human
uguaaauauucuauaugaau

SEQ ID NO: 2855709 - RNA, 23 nt, Human
aggugauccacccaccucagccu

SEQ ID NO: 2855710 - RNA, 21 nt, Human
aggugauccacccaccucagc

SEQ ID NO: 2855711 - RNA, 18 nt, Human
ugguuuccagucaugagc

SEQ ID NO: 2855712 - RNA, 18 nt, Human
ugguuuccacaugcucug

SEQ ID NO: 2855713 - RNA, 18 nt, Human
ugguuucacuggcccaag

SEQ ID NO: 2855714 - RNA, 22 nt, Human
ugguuucauaacuuccuguacu

SEQ ID NO: 2855715 - RNA, 15 nt, Human
ugguuucgaacuccu

SEQ ID NO: 2855716 - RNA, 21 nt, Human
ugguuucucucuacagugcca

SEQ ID NO: 2855717 - RNA, 15 nt, Human
ugguuucucauucuu

SEQ ID NO: 2855718 - RNA, 16 nt, Human
ugguuucucauucuug

SEQ ID NO: 2855719 - RNA, 23 nt, Human
ugguuuaaugcaauagaagugcu

SEQ ID NO: 2855720 - RNA, 11 nt, Human
ugguuuauaga

SEQ ID NO: 2855721 - RNA, 13 nt, Human
ugguuuauauuuu

SEQ ID NO: 2855722 - RNA, 20 nt, Human
ugguuuauauuuuuucaguu

SEQ ID NO: 2855723 - RNA, 18 nt, Human
ugguuuaucagcaaaaaa

SEQ ID NO: 2855724 - RNA, 19 nt, Human
ugguuuaucagcaaaaaag

SEQ ID NO: 2855725 - RNA, 16 nt, Human
ugguuucacuggccca

SEQ ID NO: 2855726 - RNA, 16 nt, Human
ugguuuauuuuguauu

SEQ ID NO: 2855727 - RNA, 22 nt, Human
ugguuuauuuuguauuguggua

SEQ ID NO: 2855728 - RNA, 21 nt, Human
ugguuuauagagggccaagac

SEQ ID NO: 2855729 - RNA, 20 nt, Human
ugguuugauggugacuuccu

SEQ ID NO: 2855730 - RNA, 13 nt, Human
ugguuugagauug

SEQ ID NO: 2855731 - RNA, 18 nt, Human
ugguuuuaacaauuuccu

SEQ ID NO: 2855732 - RNA, 12 nt, Human
ugguuuuaacaa

SEQ ID NO: 2855733 - RNA, 13 nt, Human
ugguuuguccuga

SEQ ID NO: 2855734 - RNA, 14 nt, Human
ugguuuuccugaaa

SEQ ID NO: 2855735 - RNA, 13 nt, Human
ugguuuuagauuu

SEQ ID NO: 2855736 - RNA, 14 nt, Human
ugguuuuagauuuu

SEQ ID NO: 2855737 - RNA, 12 nt, Human
ugguggcagcug

SEQ ID NO: 2855738 - RNA, 16 nt, Human
uggugugaccugaggg

SEQ ID NO: 2855739 - RNA, 17 nt, Human
uggugugaccugagggc

SEQ ID NO: 2855740 - RNA, 17 nt, Human
uggugugaguaucagaa

SEQ ID NO: 2855741 - RNA, 19 nt, Human
uggugugaguaucagaauu

SEQ ID NO: 2855742 - RNA, 12 nt, Human
uggugugaucuu

SEQ ID NO: 2855743 - RNA, 22 nt, Human
uggugugaucuuaauauauuug

SEQ ID NO: 2855744 - RNA, 14 nt, Human
uggugugcugaggu

SEQ ID NO: 2855745 - RNA, 17 nt, Human
ugguguuacugcaguug

SEQ ID NO: 2855746 - RNA, 18 nt, Human
ugguguuacugcaguuga

SEQ ID NO: 2855747 - RNA, 19 nt, Human
ugguguuagggugcagcca

SEQ ID NO: 2855748 - RNA, 19 nt, Human
ugguguuauuugaaacuuu

SEQ ID NO: 2855749 - RNA, 15 nt, Human
ugguguguguaugcg

SEQ ID NO: 2855750 - RNA, 14 nt, Human
ugguguguuggaca

SEQ ID NO: 2855751 - RNA, 16 nt, Human
ugguguguuggacaga

SEQ ID NO: 2855752 - RNA, 21 nt, Human
ugguguguuggacagagaagg

SEQ ID NO: 2855753 - RNA, 14 nt, Human
ugguguuaaaacac

SEQ ID NO: 2855754 - RNA, 22 nt, Human
ugguguuaaaacacuucugucc

SEQ ID NO: 2855755 - RNA, 22 nt, Human
uggugugucccauugguguugu

SEQ ID NO: 2855756 - RNA, 15 nt, Human
ugguuuacaggcccu

SEQ ID NO: 2855757 - RNA, 19 nt, Human
ugguuuacaggcccugcuc

SEQ ID NO: 2855758 - RNA, 20 nt, Human
ugguuuacaggcccugcucc

SEQ ID NO: 2855759 - RNA, 22 nt, Human
ugguuuacaggcccugcuccug

SEQ ID NO: 2855760 - RNA, 11 nt, Human
ugguuuacauu

SEQ ID NO: 2855761 - RNA, 13 nt, Human
ugguuuacauuua

SEQ ID NO: 2855762 - RNA, 14 nt, Human
ugguuuacauuuaa

SEQ ID NO: 2855763 - RNA, 15 nt, Human
ugguuuacauuuaaa

SEQ ID NO: 2855764 - RNA, 20 nt, Human
ugguuuacauuuaaagcauu

SEQ ID NO: 2855765 - RNA, 23 nt, Human
ugguuuacauuuaaagcauugcu

SEQ ID NO: 2855766 - RNA, 14 nt, Human
ugguuuacuuucaa

SEQ ID NO: 2855767 - RNA, 15 nt, Human
ugguuuacuuucaaa

SEQ ID NO: 2855768 - RNA, 16 nt, Human
ugguuuacuuucaaau

SEQ ID NO: 2855769 - RNA, 23 nt, Human
ugguucaggguuggccccugccc

SEQ ID NO: 2855770 - RNA, 16 nt, Human
ugguucagcuaagcua

SEQ ID NO: 2855771 - RNA, 20 nt, Human
ugguuuaaaaauacauguuc

SEQ ID NO: 2855772 - RNA, 22 nt, Human
ugguucaggguuggccccugcc

SEQ ID NO: 2855773 - RNA, 20 nt, Human
ugguucaggguuggccccug

SEQ ID NO: 2855774 - RNA, 16 nt, Human
ugguguuuuucuugua

SEQ ID NO: 2855775 - RNA, 18 nt, Human
ugguguuuuucuuguaaa

SEQ ID NO: 2855776 - RNA, 23 nt, Human
ugguguuuuucuuguaaaugugu

SEQ ID NO: 2855777 - RNA, 22 nt, Human
ugguuaaaacuguacauuuaaa

SEQ ID NO: 2855778 - RNA, 17 nt, Human
ugguuaaucuuuccuga

SEQ ID NO: 2855779 - RNA, 16 nt, Human
ugguuaagaguccaag

SEQ ID NO: 2855780 - RNA, 17 nt, Human
ugguuaagaguccaaga

SEQ ID NO: 2855781 - RNA, 13 nt, Human
ugguuaagagucc

SEQ ID NO: 2855782 - RNA, 14 nt, Human
ugguuaagagucca

SEQ ID NO: 2855783 - RNA, 17 nt, Human
agggugcgucugggagg

SEQ ID NO: 2855784 - RNA, 19 nt, Human
agggugcuaguggugggca

SEQ ID NO: 2855785 - RNA, 14 nt, Human
agggugcccagaac

SEQ ID NO: 2855786 - RNA, 23 nt, Human
agggugauuuuaugaucaguguu

SEQ ID NO: 2855787 - RNA, 15 nt, Human
agggugcagccacac

SEQ ID NO: 2855788 - RNA, 23 nt, Human
aggguggacuuagaaagcagggg

SEQ ID NO: 2855789 - RNA, 16 nt, Human
aggguggacuuagaaa

SEQ ID NO: 2855790 - RNA, 20 nt, Human
aggguggacuuagaaagcag

SEQ ID NO: 2855791 - RNA, 21 nt, Human
aggguggacuuagaaagcagg

SEQ ID NO: 2855792 - RNA, 22 nt, Human
aggguggacuuagaaagcaggg

SEQ ID NO: 2855793 - RNA, 14 nt, Human
uggguggaugccug

SEQ ID NO: 2855794 - RNA, 11 nt, Human
ugggucuucca

SEQ ID NO: 2855795 - RNA, 14 nt, Human
ugggucuuccaggg

SEQ ID NO: 2855796 - RNA, 22 nt, Human
ugggucuuguuuuuuuuuucca

SEQ ID NO: 2855797 - RNA, 23 nt, Human
uggguggaugccugguggcagcu

SEQ ID NO: 2855798 - RNA, 17 nt, Human
uggguggaaacuaagac

SEQ ID NO: 2855799 - RNA, 21 nt, Human
uggguuuuuuuuuuuaaaaaa

SEQ ID NO: 2855800 - RNA, 17 nt, Human
ugguccagggaagcugg

SEQ ID NO: 2855801 - RNA, 19 nt, Human
ugguccagggaagcuggcc

SEQ ID NO: 2855802 - RNA, 19 nt, Human
uggucaugugggucuucca

SEQ ID NO: 2855803 - RNA, 20 nt, Human
uggucaugugggucuuccag

SEQ ID NO: 2855804 - RNA, 22 nt, Human
uggucaugugggucuuccaggg

SEQ ID NO: 2855805 - RNA, 15 nt, Human
ugguccaacugcaac

SEQ ID NO: 2855806 - RNA, 16 nt, Human
ugguccaacugcaacu

SEQ ID NO: 2855807 - RNA, 15 nt, Human
ugguccaagauuccg

SEQ ID NO: 2855808 - RNA, 15 nt, Human
ugguacauggccagu

SEQ ID NO: 2855809 - RNA, 16 nt, Human
ugguacauggccagug

SEQ ID NO: 2855810 - RNA, 15 nt, Human
ugguacagguauauu

SEQ ID NO: 2855811 - RNA, 13 nt, Human
ugguacaugucuu

SEQ ID NO: 2855812 - RNA, 14 nt, Human
ugguacaaaaauaa

SEQ ID NO: 2855813 - RNA, 15 nt, Human
ugguacaaaaauaaa

SEQ ID NO: 2855814 - RNA, 18 nt, Human
ugguacaaaaauaaauuu

SEQ ID NO: 2855815 - RNA, 19 nt, Human
ugguacaaaaauaaauuua

SEQ ID NO: 2855816 - RNA, 21 nt, Human
ugguacaaaaauaaauuuaua

SEQ ID NO: 2855817 - RNA, 13 nt, Human
ugguaauuguugc

SEQ ID NO: 2855818 - RNA, 13 nt, Human
ugguaaacuauuu

SEQ ID NO: 2855819 - RNA, 21 nt, Human
ugguaaacuauuugucuuuca

SEQ ID NO: 2855820 - RNA, 19 nt, Human
ugguaaacgcugucccuag

SEQ ID NO: 2855821 - RNA, 22 nt, Human
ugguaauuuaagauuccagaga

SEQ ID NO: 2855822 - RNA, 13 nt, Human
aggggacaggccu

SEQ ID NO: 2855823 - RNA, 14 nt, Human
aggggacaggccuc

SEQ ID NO: 2855824 - RNA, 15 nt, Human
aggggacaggccuca

SEQ ID NO: 2855825 - RNA, 17 nt, Human
aggggacaggccucacc

SEQ ID NO: 2855826 - RNA, 18 nt, Human
aggggacaggccucaccu

SEQ ID NO: 2855827 - RNA, 19 nt, Human
aggggacaggccucaccuc

SEQ ID NO: 2855828 - RNA, 21 nt, Human
aggggacaggccucaccucua

SEQ ID NO: 2855829 - RNA, 15 nt, Human
ugggaauaauugcuu

SEQ ID NO: 2855830 - RNA, 16 nt, Human
ugggaauaauugcuuu

SEQ ID NO: 2855831 - RNA, 15 nt, Human
aggggacccccgccc

SEQ ID NO: 2855832 - RNA, 18 nt, Human
aggggacccccgcccccu

SEQ ID NO: 2855833 - RNA, 19 nt, Human
aggggacccccgcccccug

SEQ ID NO: 2855834 - RNA, 14 nt, Human
aggggacccccgcc

SEQ ID NO: 2855835 - RNA, 22 nt, Human
aggggacccccgcccccugccc

SEQ ID NO: 2855836 - RNA, 19 nt, Human
aggggaggaucacuggagc

SEQ ID NO: 2855837 - RNA, 20 nt, Human
aggggcuuucuggagaggag

SEQ ID NO: 2855838 - RNA, 17 nt, Human
aggggcuuucuggagag

SEQ ID NO: 2855839 - RNA, 16 nt, Human
aggggcuuucuggaga

SEQ ID NO: 2855840 - RNA, 14 nt, Human
aggggcuuucugga

SEQ ID NO: 2855841 - RNA, 23 nt, Human
aggggcuugguguuuguaagaaa

SEQ ID NO: 2855842 - RNA, 21 nt, Human
aggggcuuauaauaaaggacu

SEQ ID NO: 2855843 - RNA, 16 nt, Human
aggggaguugugucug

SEQ ID NO: 2855844 - RNA, 15 nt, Human
aggggaggccuucca

SEQ ID NO: 2855845 - RNA, 16 nt, Human
aggggagucaccuucc

SEQ ID NO: 2855846 - RNA, 18 nt, Human
aggggagucaccuucccu

SEQ ID NO: 2855847 - RNA, 22 nt, Human
aggggagucaccuucccuugcc

SEQ ID NO: 2855848 - RNA, 13 nt, Human
aggguacauuuau

SEQ ID NO: 2855849 - RNA, 18 nt, Human
aggguacauuuauaauug

SEQ ID NO: 2855850 - RNA, 13 nt, Human
aggguacagcugg

SEQ ID NO: 2855851 - RNA, 14 nt, Human
aggguacagcuggg

SEQ ID NO: 2855852 - RNA, 15 nt, Human
aggguacagcugggc

SEQ ID NO: 2855853 - RNA, 13 nt, Human
aggguacuaaauu

SEQ ID NO: 2855854 - RNA, 15 nt, Human
aggguacuaaauuua

SEQ ID NO: 2855855 - RNA, 17 nt, Human
aggguacuaaauuuaaa

SEQ ID NO: 2855856 - RNA, 16 nt, Human
aggguaucaggugcug

SEQ ID NO: 2855857 - RNA, 12 nt, Human
aggguagggugg

SEQ ID NO: 2855858 - RNA, 18 nt, Human
aggguaucaaauaaaauu

SEQ ID NO: 2855859 - RNA, 15 nt, Human
agggggaagaagcag

SEQ ID NO: 2855860 - RNA, 18 nt, Human
agggggaagaagcagaga

SEQ ID NO: 2855861 - RNA, 19 nt, Human
agggggaagaagcagagag

SEQ ID NO: 2855862 - RNA, 18 nt, Human
agggggggcuacauuaua

SEQ ID NO: 2855863 - RNA, 13 nt, Human
aggggguaaggcc

SEQ ID NO: 2855864 - RNA, 15 nt, Human
aggggguccguggaa

SEQ ID NO: 2855865 - RNA, 14 nt, Human
aggggugacacaga

SEQ ID NO: 2855866 - RNA, 15 nt, Human
aggggugacacagac

SEQ ID NO: 2855867 - RNA, 16 nt, Human
aggggugacacagacu

SEQ ID NO: 2855868 - RNA, 18 nt, Human
aggggugacacagacuca

SEQ ID NO: 2855869 - RNA, 19 nt, Human
aggggucccagccaccccg

SEQ ID NO: 2855870 - RNA, 18 nt, Human
aggggucccagccacccc

SEQ ID NO: 2855871 - RNA, 15 nt, Human
aggggucccagccac

SEQ ID NO: 2855872 - RNA, 14 nt, Human
ugguccaugcaggg

SEQ ID NO: 2855873 - RNA, 15 nt, Human
ugguccaugcagggg

SEQ ID NO: 2855874 - RNA, 18 nt, Human
ugguccaugcagggggcu

SEQ ID NO: 2855875 - RNA, 19 nt, Human
uggucucgaacuccugacc

SEQ ID NO: 2855876 - RNA, 15 nt, Human
uggucucgaacuccu

SEQ ID NO: 2855877 - RNA, 21 nt, Human
uggucucgaacuccugaccuu

SEQ ID NO: 2855878 - RNA, 20 nt, Human
uggucucgaacuccugaccu

SEQ ID NO: 2855879 - RNA, 14 nt, Human
uggucucuaggcug

SEQ ID NO: 2855880 - RNA, 12 nt, Human
ugguccagagcg

SEQ ID NO: 2855881 - RNA, 16 nt, Human
uggucucuaggcuggg

SEQ ID NO: 2855882 - RNA, 17 nt, Human
uggucucuaggcugggg

SEQ ID NO: 2855883 - RNA, 18 nt, Human
uggucucuaggcugggga

SEQ ID NO: 2855884 - RNA, 19 nt, Human
uggucucuaggcuggggaa

SEQ ID NO: 2855885 - RNA, 12 nt, Human
uggucuguguga

SEQ ID NO: 2855886 - RNA, 18 nt, Human
uggucugacccacugcuu

SEQ ID NO: 2855887 - RNA, 15 nt, Human
uggucucugcauuuu

SEQ ID NO: 2855888 - RNA, 19 nt, Human
uggucucugcauuuuucug

SEQ ID NO: 2855889 - RNA, 15 nt, Human
uggucugccaggccc

SEQ ID NO: 2855890 - RNA, 18 nt, Human
uggucugccaggccccca

SEQ ID NO: 2855891 - RNA, 16 nt, Human
uggucuggacugacag

SEQ ID NO: 2855892 - RNA, 19 nt, Human
aggguggugaccucugccu

SEQ ID NO: 2855893 - RNA, 18 nt, Human
aggguggugaccucugcc

SEQ ID NO: 2855894 - RNA, 17 nt, Human
aggguggugaccucugc

SEQ ID NO: 2855895 - RNA, 13 nt, Human
uggugaagaguag

SEQ ID NO: 2855896 - RNA, 19 nt, Human
uggucuucaaauugucuuu

SEQ ID NO: 2855897 - RNA, 23 nt, Human
uggucuuuguaagaguguagaag

SEQ ID NO: 2855898 - RNA, 15 nt, Human
uggugaaaauguacu

SEQ ID NO: 2855899 - RNA, 18 nt, Human
uggugaaauuuauuaguu

SEQ ID NO: 2855900 - RNA, 23 nt, Human
uggugaaagcugagaacuccuga

SEQ ID NO: 2855901 - RNA, 17 nt, Human
uggugaauggccuuccu

SEQ ID NO: 2855902 - RNA, 19 nt, Human
uggugaauggccuuccuuc

SEQ ID NO: 2855903 - RNA, 19 nt, Human
uggugaaauuuauuaguua

SEQ ID NO: 2855904 - RNA, 14 nt, Human
aggguucuggcugc

SEQ ID NO: 2855905 - RNA, 15 nt, Human
aggguugggcuggug

SEQ ID NO: 2855906 - RNA, 13 nt, Human
aggguugggcugg

SEQ ID NO: 2855907 - RNA, 14 nt, Human
aggguuggccccug

SEQ ID NO: 2855908 - RNA, 13 nt, Human
aggguuggccccu

SEQ ID NO: 2855909 - RNA, 14 nt, Human
aggguugugauuuu

SEQ ID NO: 2855910 - RNA, 19 nt, Human
aggguugugauuuugucug

SEQ ID NO: 2855911 - RNA, 22 nt, Human
aggguugugauuuugucugcuu

SEQ ID NO: 2855912 - RNA, 17 nt, Human
aggguugggcugguguc

SEQ ID NO: 2855913 - RNA, 15 nt, Human
aggguugauuaaggc

SEQ ID NO: 2855914 - RNA, 18 nt, Human
aggguugauuaaggcagu

SEQ ID NO: 2855915 - RNA, 15 nt, Human
aggguugcuggagcc

SEQ ID NO: 2855916 - RNA, 16 nt, Human
aggguugcuggagccu

SEQ ID NO: 2855917 - RNA, 17 nt, Human
aggguugcuggagccug

SEQ ID NO: 2855918 - RNA, 22 nt, Human
aggguuugaauuguuuucuuua

SEQ ID NO: 2855919 - RNA, 23 nt, Human
aggguuugaauuguuuucuuuaa

SEQ ID NO: 2855920 - RNA, 20 nt, Human
agguagaccaggauuucuaa

SEQ ID NO: 2855921 - RNA, 14 nt, Human
agguauuucaaaac

SEQ ID NO: 2855922 - RNA, 23 nt, Human
agguauuugggaaacuugucacu

SEQ ID NO: 2855923 - RNA, 14 nt, Human
agguauuuugaaua

SEQ ID NO: 2855924 - RNA, 17 nt, Human
agguauuuugaauacca

SEQ ID NO: 2855925 - RNA, 17 nt, Human
agguauuuuguuucuuu

SEQ ID NO: 2855926 - RNA, 19 nt, Human
agguauuuuguuucuuuua

SEQ ID NO: 2855927 - RNA, 20 nt, Human
agguauuuuguuucuuuuaa

SEQ ID NO: 2855928 - RNA, 14 nt, Human
agguauuuaucuuu

SEQ ID NO: 2855929 - RNA, 13 nt, Human
aggucaacagaau

SEQ ID NO: 2855930 - RNA, 14 nt, Human
aggucaacagaaug

SEQ ID NO: 2855931 - RNA, 15 nt, Human
aggucaacagaauga

SEQ ID NO: 2855932 - RNA, 17 nt, Human
aggucaacagaaugaaa

SEQ ID NO: 2855933 - RNA, 19 nt, Human
aggucaacagaaugaaaaa

SEQ ID NO: 2855934 - RNA, 22 nt, Human
aggucaacagaaugaaaaauga

SEQ ID NO: 2855935 - RNA, 18 nt, Human
agguagagccacaaaaga

SEQ ID NO: 2855936 - RNA, 18 nt, Human
agguagcuuaccugacac

SEQ ID NO: 2855937 - RNA, 19 nt, Human
agguagcuuaccugacaca

SEQ ID NO: 2855938 - RNA, 13 nt, Human
agguagcuucagc

SEQ ID NO: 2855939 - RNA, 17 nt, Human
agguauauuggaagagg

SEQ ID NO: 2855940 - RNA, 15 nt, Human
agguagggagauauu

SEQ ID NO: 2855941 - RNA, 15 nt, Human
aggucaggaguucga

SEQ ID NO: 2855942 - RNA, 12 nt, Human
aggucaggcccu

SEQ ID NO: 2855943 - RNA, 13 nt, Human
aggucaggcccug

SEQ ID NO: 2855944 - RNA, 14 nt, Human
aggucaggcccugg

SEQ ID NO: 2855945 - RNA, 15 nt, Human
aggucaggcccugga

SEQ ID NO: 2855946 - RNA, 16 nt, Human
aggucaggcccuggaa

SEQ ID NO: 2855947 - RNA, 16 nt, Human
aggucagggagugcug

SEQ ID NO: 2855948 - RNA, 20 nt, Human
aggucagggagugcuggcuc

SEQ ID NO: 2855949 - RNA, 17 nt, Human
aggucaggggugacaca

SEQ ID NO: 2855950 - RNA, 18 nt, Human
aggucaggggugacacag

SEQ ID NO: 2855951 - RNA, 19 nt, Human
aggucaggggugacacaga

SEQ ID NO: 2855952 - RNA, 20 nt, Human
aggucaggggugacacagac

SEQ ID NO: 2855953 - RNA, 21 nt, Human
aggucaggggugacacagacu

SEQ ID NO: 2855954 - RNA, 22 nt, Human
aggucaggggugacacagacuc

SEQ ID NO: 2855955 - RNA, 20 nt, Human
aggucaagggcuuacuauuu

SEQ ID NO: 2855956 - RNA, 17 nt, Human
agguccacaacacacag

SEQ ID NO: 2855957 - RNA, 14 nt, Human
agguccaauucucg

SEQ ID NO: 2855958 - RNA, 24 nt, Human
agguccaauucucgagcuuggggc

SEQ ID NO: 2855959 - RNA, 21 nt, Human
aggucuugaacuccuggccuc

SEQ ID NO: 2855960 - RNA, 20 nt, Human
aggucuugaacuccuggccu

SEQ ID NO: 2855961 - RNA, 22 nt, Human
aggucuugaacuccuggccuca

SEQ ID NO: 2855962 - RNA, 18 nt, Human
aggucuugaacuccuggc

SEQ ID NO: 2855963 - RNA, 13 nt, Human
aggugaaaauguu

SEQ ID NO: 2855964 - RNA, 21 nt, Human
aggugaaagggagcuaucagg

SEQ ID NO: 2855965 - RNA, 16 nt, Human
aggugaaagggagcua

SEQ ID NO: 2855966 - RNA, 14 nt, Human
aggugaaagggagc

SEQ ID NO: 2855967 - RNA, 15 nt, Human
ugugaagcauuuaca

SEQ ID NO: 2855968 - RNA, 14 nt, Human
ugugaagcccuguu

SEQ ID NO: 2855969 - RNA, 18 nt, Human
ugugagauuuuuuauugc

SEQ ID NO: 2855970 - RNA, 20 nt, Human
ugugagauuuuuuauugcua

SEQ ID NO: 2855971 - RNA, 22 nt, Human
ugugagauuuuuuauugcuagu

SEQ ID NO: 2855972 - RNA, 14 nt, Human
ugugagcaagaagu

SEQ ID NO: 2855973 - RNA, 22 nt, Human
ugugaagaugauauacuauuuu

SEQ ID NO: 2855974 - RNA, 20 nt, Human
ugugaagaugcauuguaguu

SEQ ID NO: 2855975 - RNA, 12 nt, Human
ugugaacucauu

SEQ ID NO: 2855976 - RNA, 14 nt, Human
ugugaacugaaauu

SEQ ID NO: 2855977 - RNA, 18 nt, Human
ugugaacugaaauuaaaa

SEQ ID NO: 2855978 - RNA, 23 nt, Human
ugugaacugaacucugacaacag

SEQ ID NO: 2855979 - RNA, 14 nt, Human
ugugaacugaacuc

SEQ ID NO: 2855980 - RNA, 14 nt, Human
agucucccucccuu

SEQ ID NO: 2855981 - RNA, 13 nt, Human
agucucugccuug

SEQ ID NO: 2855982 - RNA, 17 nt, Human
agucucugccuugccuu

SEQ ID NO: 2855983 - RNA, 12 nt, Human
agucucugcucc

SEQ ID NO: 2855984 - RNA, 13 nt, Human
agucucugcucca

SEQ ID NO: 2855985 - RNA, 15 nt, Human
agucucugcuccacc

SEQ ID NO: 2855986 - RNA, 22 nt, Human
agucuuuuguucgcauggucac

SEQ ID NO: 2855987 - RNA, 13 nt, Human
agucuuuuucugu

SEQ ID NO: 2855988 - RNA, 14 nt, Human
agucuuuuucuguu

SEQ ID NO: 2855989 - RNA, 17 nt, Human
agucuuuuucuguugua

SEQ ID NO: 2855990 - RNA, 18 nt, Human
agucuuuuucuguuguaa

SEQ ID NO: 2855991 - RNA, 19 nt, Human
agucuuuuucuguuguaac

SEQ ID NO: 2855992 - RNA, 20 nt, Human
agucuuuuucuguuguaacu

SEQ ID NO: 2855993 - RNA, 21 nt, Human
agucuuuuucuguuguaacuu

SEQ ID NO: 2855994 - RNA, 17 nt, Human
agucucugcuggcccag

SEQ ID NO: 2855995 - RNA, 16 nt, Human
agucucuggggcaggc

SEQ ID NO: 2855996 - RNA, 18 nt, Human
agucucuggggcaggcug

SEQ ID NO: 2855997 - RNA, 21 nt, Human
agucucuggggcaggcugcuu

SEQ ID NO: 2855998 - RNA, 16 nt, Human
agucucugcuggccca

SEQ ID NO: 2855999 - RNA, 11 nt, Human
agucucuguga

SEQ ID NO: 2856000 - RNA, 12 nt, Human
agucucugugaa

SEQ ID NO: 2856001 - RNA, 22 nt, Human
agugaaaaucuuggagacccug

SEQ ID NO: 2856002 - RNA, 17 nt, Human
agucuuuuguucgcaug

SEQ ID NO: 2856003 - RNA, 17 nt, Human
agugagacucugucuca

SEQ ID NO: 2856004 - RNA, 16 nt, Human
agugagacucugucuc

SEQ ID NO: 2856005 - RNA, 22 nt, Human
agugagacucugucucaaaaaa

SEQ ID NO: 2856006 - RNA, 17 nt, Human
agugagacccugucucu

SEQ ID NO: 2856007 - RNA, 16 nt, Human
agugagacccugucuc

SEQ ID NO: 2856008 - RNA, 21 nt, Human
agugagacaguccagccugga

SEQ ID NO: 2856009 - RNA, 13 nt, Human
agugagacucugu

SEQ ID NO: 2856010 - RNA, 14 nt, Human
agugagagcugggu

SEQ ID NO: 2856011 - RNA, 22 nt, Human
agugagagagaugggagcuccu

SEQ ID NO: 2856012 - RNA, 19 nt, Human
agugagcccagauugugcc

SEQ ID NO: 2856013 - RNA, 21 nt, Human
agugagcccagauugugccac

SEQ ID NO: 2856014 - RNA, 16 nt, Human
ugugauguauucuagc

SEQ ID NO: 2856015 - RNA, 13 nt, Human
ugugauguucuaa

SEQ ID NO: 2856016 - RNA, 14 nt, Human
ugugauguucuaag

SEQ ID NO: 2856017 - RNA, 15 nt, Human
ugugauguucuaagg

SEQ ID NO: 2856018 - RNA, 16 nt, Human
ugugauguucuaaggc

SEQ ID NO: 2856019 - RNA, 17 nt, Human
ugugauguucuaaggcu

SEQ ID NO: 2856020 - RNA, 18 nt, Human
ugugauguucuaaggcuc

SEQ ID NO: 2856021 - RNA, 14 nt, Human
ugugauuaacuuau

SEQ ID NO: 2856022 - RNA, 17 nt, Human
ugugcaaaaaaauuaaa

SEQ ID NO: 2856023 - RNA, 20 nt, Human
ugugcaaaaaaauuaaaaug

SEQ ID NO: 2856024 - RNA, 23 nt, Human
ugugcaaaaaaauuaaaauggau

SEQ ID NO: 2856025 - RNA, 15 nt, Human
ugugauucaaaagau

SEQ ID NO: 2856026 - RNA, 19 nt, Human
ugucuucacagcucugugu

SEQ ID NO: 2856027 - RNA, 22 nt, Human
ugucuucagccucuccaggcac

SEQ ID NO: 2856028 - RNA, 15 nt, Human
ugucuucauaaagua

SEQ ID NO: 2856029 - RNA, 17 nt, Human
ugucuucauaaaguacu

SEQ ID NO: 2856030 - RNA, 16 nt, Human
ugucuuccauguaucu

SEQ ID NO: 2856031 - RNA, 18 nt, Human
ugucuuccauuccauugu

SEQ ID NO: 2856032 - RNA, 21 nt, Human
ugucuucauuucauuguauga

SEQ ID NO: 2856033 - RNA, 23 nt, Human
ugucuucauuucauuguaugaug

SEQ ID NO: 2856034 - RNA, 15 nt, Human
ugucuuccacuuugc

SEQ ID NO: 2856035 - RNA, 12 nt, Human
ugucuucaugua

SEQ ID NO: 2856036 - RNA, 15 nt, Human
ugucuucauguacau

SEQ ID NO: 2856037 - RNA, 16 nt, Human
ugucuucauuucauug

SEQ ID NO: 2856038 - RNA, 17 nt, Human
ugucuucauuucauugu

SEQ ID NO: 2856039 - RNA, 19 nt, Human
ugucuucauuucauuguau

SEQ ID NO: 2856040 - RNA, 20 nt, Human
ugucuucucuaacaccuugu

SEQ ID NO: 2856041 - RNA, 14 nt, Human
ugucuucucugucu

SEQ ID NO: 2856042 - RNA, 16 nt, Human
ugucuucucugucuca

SEQ ID NO: 2856043 - RNA, 22 nt, Human
ugucuucucugucucagacuuu

SEQ ID NO: 2856044 - RNA, 21 nt, Human
ugucuugcaauggcagccuug

SEQ ID NO: 2856045 - RNA, 20 nt, Human
ugucuugcaauggcagccuu

SEQ ID NO: 2856046 - RNA, 18 nt, Human
ugucuugcaauggcagcc

SEQ ID NO: 2856047 - RNA, 17 nt, Human
ugucuugcaauggcagc

SEQ ID NO: 2856048 - RNA, 15 nt, Human
ugucuugcaauggca

SEQ ID NO: 2856049 - RNA, 19 nt, Human
ugucuugaaagauucaggu

SEQ ID NO: 2856050 - RNA, 17 nt, Human
ugucuugaaugucuuuu

SEQ ID NO: 2856051 - RNA, 20 nt, Human
ugucuugaaugucuuuugaa

SEQ ID NO: 2856052 - RNA, 23 nt, Human
ugucuucuggacaggcucugcuu

SEQ ID NO: 2856053 - RNA, 12 nt, Human
ugucuucuguau

SEQ ID NO: 2856054 - RNA, 13 nt, Human
ugucuucuguaua

SEQ ID NO: 2856055 - RNA, 17 nt, Human
ugucuucuguauauaaa

SEQ ID NO: 2856056 - RNA, 22 nt, Human
ugucuucuguauauaaauggga

SEQ ID NO: 2856057 - RNA, 15 nt, Human
ugucuuuaaaagaga

SEQ ID NO: 2856058 - RNA, 16 nt, Human
ugucuuuaaaagagag

SEQ ID NO: 2856059 - RNA, 14 nt, Human
ugucuuuaaauaga

SEQ ID NO: 2856060 - RNA, 19 nt, Human
ugucuuuaaauagauacaa

SEQ ID NO: 2856061 - RNA, 13 nt, Human
ugucuuguucugu

SEQ ID NO: 2856062 - RNA, 14 nt, Human
ugucuuguucuguc

SEQ ID NO: 2856063 - RNA, 15 nt, Human
ugucuuguucuguca

SEQ ID NO: 2856064 - RNA, 18 nt, Human
ugucuuguucugucacuc

SEQ ID NO: 2856065 - RNA, 19 nt, Human
ugucuuguucugucacuca

SEQ ID NO: 2856066 - RNA, 13 nt, Human
ugucuuggacacu

SEQ ID NO: 2856067 - RNA, 15 nt, Human
ugugaaccaccacac

SEQ ID NO: 2856068 - RNA, 11 nt, Human
ugucuuucaaa

SEQ ID NO: 2856069 - RNA, 13 nt, Human
ugucuuucaaacu

SEQ ID NO: 2856070 - RNA, 20 nt, Human
ugucuuucaaacuccaaggu

SEQ ID NO: 2856071 - RNA, 22 nt, Human
ugucuuuaauuucugucagaau

SEQ ID NO: 2856072 - RNA, 12 nt, Human
ugucuuuacucc

SEQ ID NO: 2856073 - RNA, 15 nt, Human
ugucuuuacuccuca

SEQ ID NO: 2856074 - RNA, 15 nt, Human
ugucuuuaaggaaaa

SEQ ID NO: 2856075 - RNA, 19 nt, Human
ugucuugcuguugacauau

SEQ ID NO: 2856076 - RNA, 20 nt, Human
ugucuugcuguugacauauu

SEQ ID NO: 2856077 - RNA, 14 nt, Human
ugucuuuaaggaaa

SEQ ID NO: 2856078 - RNA, 23 nt, Human
ugugaaccaccacacccagccca

SEQ ID NO: 2856079 - RNA, 22 nt, Human
ugugaaccaccacacccagccc

SEQ ID NO: 2856080 - RNA, 16 nt, Human
ugugaaccaccacacc

SEQ ID NO: 2856081 - RNA, 14 nt, Human
ugugaacauuugug

SEQ ID NO: 2856082 - RNA, 16 nt, Human
ugugaaccaagaucua

SEQ ID NO: 2856083 - RNA, 20 nt, Human
ugugaacuagggaagcucag

SEQ ID NO: 2856084 - RNA, 14 nt, Human
ugucucguuuguga

SEQ ID NO: 2856085 - RNA, 18 nt, Human
ugucucguuugugauucu

SEQ ID NO: 2856086 - RNA, 15 nt, Human
ugucucuaacuuauu

SEQ ID NO: 2856087 - RNA, 16 nt, Human
ugucucuaacuuauuu

SEQ ID NO: 2856088 - RNA, 12 nt, Human
ugucucuccuuu

SEQ ID NO: 2856089 - RNA, 13 nt, Human
ugucucuccuuuu

SEQ ID NO: 2856090 - RNA, 15 nt, Human
ugucucuccuuuucu

SEQ ID NO: 2856091 - RNA, 16 nt, Human
ugucucuccuuuucuu

SEQ ID NO: 2856092 - RNA, 20 nt, Human
ugucucuccuuuucuuuugu

SEQ ID NO: 2856093 - RNA, 21 nt, Human
ugucucuccuuuucuuuuguu

SEQ ID NO: 2856094 - RNA, 22 nt, Human
ugucucuccuuuucuuuuguua

SEQ ID NO: 2856095 - RNA, 18 nt, Human
ugucucucuucagacucu

SEQ ID NO: 2856096 - RNA, 19 nt, Human
ugucucucuucagacucuc

SEQ ID NO: 2856097 - RNA, 21 nt, Human
ugucucucuucagacucucag

SEQ ID NO: 2856098 - RNA, 16 nt, Human
ugucucugaagcguga

SEQ ID NO: 2856099 - RNA, 17 nt, Human
ugucuccuuuaagagcu

SEQ ID NO: 2856100 - RNA, 21 nt, Human
ugucuccuuucaccccagggc

SEQ ID NO: 2856101 - RNA, 22 nt, Human
ugucuccuuucaccccagggcc

SEQ ID NO: 2856102 - RNA, 17 nt, Human
ugucuccuuaacacuga

SEQ ID NO: 2856103 - RNA, 18 nt, Human
ugucuccuuaacacugag

SEQ ID NO: 2856104 - RNA, 22 nt, Human
ugucugaaaaauuccuuugugu

SEQ ID NO: 2856105 - RNA, 13 nt, Human
ugucuucaaggcu

SEQ ID NO: 2856106 - RNA, 20 nt, Human
ugucuucaaggcuucagucu

SEQ ID NO: 2856107 - RNA, 16 nt, Human
ugucuucaaacuguga

SEQ ID NO: 2856108 - RNA, 13 nt, Human
ugucuuauauaua

SEQ ID NO: 2856109 - RNA, 22 nt, Human
ugucuuauauauauuucuuugu

SEQ ID NO: 2856110 - RNA, 16 nt, Human
ugucuuaucuggcccu

SEQ ID NO: 2856111 - RNA, 17 nt, Human
ugucuuauggauucauu

SEQ ID NO: 2856112 - RNA, 19 nt, Human
ugucuuauggauucauuua

SEQ ID NO: 2856113 - RNA, 12 nt, Human
ugucugaaaaau

SEQ ID NO: 2856114 - RNA, 19 nt, Human
ugucuuaauuuuugaaaaa

SEQ ID NO: 2856115 - RNA, 14 nt, Human
ugucuuauauagca

SEQ ID NO: 2856116 - RNA, 14 nt, Human
ugucuuaauuauua

SEQ ID NO: 2856117 - RNA, 15 nt, Human
ugucuuaauuauuau

SEQ ID NO: 2856118 - RNA, 20 nt, Human
ugucuuaauuucuaucuugu

SEQ ID NO: 2856119 - RNA, 21 nt, Human
ugucucuuuaaugucacaggc

SEQ ID NO: 2856120 - RNA, 22 nt, Human
ugucucuuuaaugucacaggca

SEQ ID NO: 2856121 - RNA, 17 nt, Human
ugucucuuuaagggcau

SEQ ID NO: 2856122 - RNA, 22 nt, Human
ugucucuuuaagggcaugccuu

SEQ ID NO: 2856123 - RNA, 13 nt, Human
ugucucuugaaaa

SEQ ID NO: 2856124 - RNA, 15 nt, Human
ugucucuugaaaaau

SEQ ID NO: 2856125 - RNA, 13 nt, Human
ugucucuggccug

SEQ ID NO: 2856126 - RNA, 11 nt, Human
ugucucugcuc

SEQ ID NO: 2856127 - RNA, 22 nt, Human
ugucucugcucgcccuccuuuc

SEQ ID NO: 2856128 - RNA, 15 nt, Human
ugucucugauaaaag

SEQ ID NO: 2856129 - RNA, 21 nt, Human
aguagcugggacuacaggcac

SEQ ID NO: 2856130 - RNA, 19 nt, Human
aguagcugggacuacaggc

SEQ ID NO: 2856131 - RNA, 22 nt, Human
aguagcugggacuacaggcacc

SEQ ID NO: 2856132 - RNA, 14 nt, Human
aguauguguaaaau

SEQ ID NO: 2856133 - RNA, 17 nt, Human
aguagcuggauuacagg

SEQ ID NO: 2856134 - RNA, 18 nt, Human
aguauuggggucugaccc

SEQ ID NO: 2856135 - RNA, 12 nt, Human
aguauuguaaau

SEQ ID NO: 2856136 - RNA, 13 nt, Human
aguauuguaaauu

SEQ ID NO: 2856137 - RNA, 14 nt, Human
aguauuguaaauua

SEQ ID NO: 2856138 - RNA, 15 nt, Human
aguauuguaaauuau

SEQ ID NO: 2856139 - RNA, 16 nt, Human
aguauuguaaauuaua

SEQ ID NO: 2856140 - RNA, 17 nt, Human
aguauuguaaauuauau

SEQ ID NO: 2856141 - RNA, 18 nt, Human
aguauuguaaauuauauu

SEQ ID NO: 2856142 - RNA, 22 nt, Human
aguauuguaaauuauauuugug

SEQ ID NO: 2856143 - RNA, 16 nt, Human
aguauugauucugcuu

SEQ ID NO: 2856144 - RNA, 23 nt, Human
aguauugauucugcuugagaaua

SEQ ID NO: 2856145 - RNA, 14 nt, Human
agucacaucacagg

SEQ ID NO: 2856146 - RNA, 15 nt, Human
agucacaucacagga

SEQ ID NO: 2856147 - RNA, 20 nt, Human
aguauuagacuggaaguuca

SEQ ID NO: 2856148 - RNA, 23 nt, Human
agucacauggccuaugcacauau

SEQ ID NO: 2856149 - RNA, 22 nt, Human
agucacagagauaauucuagcu

SEQ ID NO: 2856150 - RNA, 17 nt, Human
uguauguuuuuuuucug

SEQ ID NO: 2856151 - RNA, 12 nt, Human
uguauuaacaaa

SEQ ID NO: 2856152 - RNA, 13 nt, Human
uguauuaacaaaa

SEQ ID NO: 2856153 - RNA, 14 nt, Human
uguauuaacaaaag

SEQ ID NO: 2856154 - RNA, 15 nt, Human
uguauuaacaaaagu

SEQ ID NO: 2856155 - RNA, 19 nt, Human
uguauuaacaaaaguuccc

SEQ ID NO: 2856156 - RNA, 15 nt, Human
uguaucccaugagcc

SEQ ID NO: 2856157 - RNA, 15 nt, Human
uguagagccaggguc

SEQ ID NO: 2856158 - RNA, 12 nt, Human
uguagagccagg

SEQ ID NO: 2856159 - RNA, 22 nt, Human
agguuucuggucucuaggcugg

SEQ ID NO: 2856160 - RNA, 23 nt, Human
uguagagaacacgcguauuuaca

SEQ ID NO: 2856161 - RNA, 23 nt, Human
agguuucuggucucuaggcuggg

SEQ ID NO: 2856162 - RNA, 16 nt, Human
agguuugucaucagau

SEQ ID NO: 2856163 - RNA, 14 nt, Human
aguagcugggacua

SEQ ID NO: 2856164 - RNA, 13 nt, Human
aguagcugggacu

SEQ ID NO: 2856165 - RNA, 20 nt, Human
aguagcguuuuuuaaaugua

SEQ ID NO: 2856166 - RNA, 15 nt, Human
ugucaacuucaacau

SEQ ID NO: 2856167 - RNA, 22 nt, Human
aguagcguuuuuuaaauguaua

SEQ ID NO: 2856168 - RNA, 15 nt, Human
aguagcucuccugac

SEQ ID NO: 2856169 - RNA, 21 nt, Human
aguagcguuuuuuaaauguau

SEQ ID NO: 2856170 - RNA, 22 nt, Human
ugucaacaaaccaagcaucagg

SEQ ID NO: 2856171 - RNA, 23 nt, Human
ugucaacaaaccaagcaucaggg

SEQ ID NO: 2856172 - RNA, 22 nt, Human
ugucaacaccccuguguggaug

SEQ ID NO: 2856173 - RNA, 17 nt, Human
ugucaacaugaaacacc

SEQ ID NO: 2856174 - RNA, 13 nt, Human
ugucaacauugug

SEQ ID NO: 2856175 - RNA, 14 nt, Human
ugucaacauuguga

SEQ ID NO: 2856176 - RNA, 15 nt, Human
ugucaacauugugau

SEQ ID NO: 2856177 - RNA, 14 nt, Human
ugucaaccagacag

SEQ ID NO: 2856178 - RNA, 15 nt, Human
ugucaaccagacaga

SEQ ID NO: 2856179 - RNA, 17 nt, Human
ugucaaccagacagagg

SEQ ID NO: 2856180 - RNA, 20 nt, Human
ugucaaccagacagaggguc

SEQ ID NO: 2856181 - RNA, 22 nt, Human
ugucaaccagacagagggucac

SEQ ID NO: 2856182 - RNA, 23 nt, Human
ugucaaccagacagagggucaca

SEQ ID NO: 2856183 - RNA, 18 nt, Human
uguauuagugauauuucu

SEQ ID NO: 2856184 - RNA, 19 nt, Human
uguauuagugauauuucuc

SEQ ID NO: 2856185 - RNA, 20 nt, Human
uguauuagugauauuucucu

SEQ ID NO: 2856186 - RNA, 22 nt, Human
uguauuagugauauuucucuag

SEQ ID NO: 2856187 - RNA, 16 nt, Human
uguauuaauaaauaga

SEQ ID NO: 2856188 - RNA, 12 nt, Human
uguauguguauu

SEQ ID NO: 2856189 - RNA, 14 nt, Human
uguauuacagaugc

SEQ ID NO: 2856190 - RNA, 18 nt, Human
uguauuaagggauuuagu

SEQ ID NO: 2856191 - RNA, 19 nt, Human
uguauuaagggauuuagua

SEQ ID NO: 2856192 - RNA, 15 nt, Human
uguauuagucacaga

SEQ ID NO: 2856193 - RNA, 23 nt, Human
ugucagcuacugcggaaaaggaa

SEQ ID NO: 2856194 - RNA, 21 nt, Human
uguccacccaccuaugugcca

SEQ ID NO: 2856195 - RNA, 20 nt, Human
ugucagccauugcacccagc

SEQ ID NO: 2856196 - RNA, 23 nt, Human
ugucagcgcagguuuaguuuacu

SEQ ID NO: 2856197 - RNA, 21 nt, Human
ugucagcgccuggccuaccca

SEQ ID NO: 2856198 - RNA, 20 nt, Human
ugucccuaccgagucucuuc

SEQ ID NO: 2856199 - RNA, 21 nt, Human
ugucccuaccgagucucuucu

SEQ ID NO: 2856200 - RNA, 22 nt, Human
ugucccuaccgagucucuucuc

SEQ ID NO: 2856201 - RNA, 19 nt, Human
uguccaggcacugcugccc

SEQ ID NO: 2856202 - RNA, 20 nt, Human
uguccaggcacugcugccca

SEQ ID NO: 2856203 - RNA, 21 nt, Human
uguccaggcacugcugcccag

SEQ ID NO: 2856204 - RNA, 13 nt, Human
uguccacugugua

SEQ ID NO: 2856205 - RNA, 14 nt, Human
uguccaccuguggg

SEQ ID NO: 2856206 - RNA, 15 nt, Human
uguccaccugugggu

SEQ ID NO: 2856207 - RNA, 14 nt, Human
ugucccugcacuug

SEQ ID NO: 2856208 - RNA, 15 nt, Human
ugucccugaaaccua

SEQ ID NO: 2856209 - RNA, 18 nt, Human
ugucccuucugucccuca

SEQ ID NO: 2856210 - RNA, 14 nt, Human
ugucccucuucacu

SEQ ID NO: 2856211 - RNA, 16 nt, Human
ugucccucuucacucc

SEQ ID NO: 2856212 - RNA, 15 nt, Human
ugucccuuucagaga

SEQ ID NO: 2856213 - RNA, 20 nt, Human
ugucccuucugucccucaca

SEQ ID NO: 2856214 - RNA, 17 nt, Human
ugucccuugaugcacag

SEQ ID NO: 2856215 - RNA, 18 nt, Human
ugucccuugaugcacaga

SEQ ID NO: 2856216 - RNA, 19 nt, Human
ugucccuugaugcacagag

SEQ ID NO: 2856217 - RNA, 20 nt, Human
ugucccuugaugcacagaga

SEQ ID NO: 2856218 - RNA, 12 nt, Human
ugucccuugcug

SEQ ID NO: 2856219 - RNA, 14 nt, Human
ugucccuugcugua

SEQ ID NO: 2856220 - RNA, 21 nt, Human
ugucccuaguaaaaauacaaa

SEQ ID NO: 2856221 - RNA, 21 nt, Human
ugucccucacuguugaauuuu

SEQ ID NO: 2856222 - RNA, 12 nt, Human
ugucccucccac

SEQ ID NO: 2856223 - RNA, 13 nt, Human
ugucccucccacc

SEQ ID NO: 2856224 - RNA, 14 nt, Human
ugucccucccaccu

SEQ ID NO: 2856225 - RNA, 15 nt, Human
ugucccucccaccuc

SEQ ID NO: 2856226 - RNA, 16 nt, Human
ugucccucccaccucu

SEQ ID NO: 2856227 - RNA, 21 nt, Human
ugucccucucggaaggcuggc

SEQ ID NO: 2856228 - RNA, 20 nt, Human
ugucccucccaccucuguga

SEQ ID NO: 2856229 - RNA, 13 nt, Human
ugucccuccuggu

SEQ ID NO: 2856230 - RNA, 16 nt, Human
ugucccuccugguguc

SEQ ID NO: 2856231 - RNA, 22 nt, Human
ugucccuccuggugucacccca

SEQ ID NO: 2856232 - RNA, 14 nt, Human
ugucccucccccuu

SEQ ID NO: 2856233 - RNA, 17 nt, Human
ugucccucccaccucug

SEQ ID NO: 2856234 - RNA, 18 nt, Human
ugucccucccaccucugu

SEQ ID NO: 2856235 - RNA, 15 nt, Human
uguccugguucccgu

SEQ ID NO: 2856236 - RNA, 20 nt, Human
uguccuguagagguuuuguu

SEQ ID NO: 2856237 - RNA, 17 nt, Human
uguccugguuagcagag

SEQ ID NO: 2856238 - RNA, 24 nt, Human
uguccuguaguugcguggacucug

SEQ ID NO: 2856239 - RNA, 13 nt, Human
uguccugugaggu

SEQ ID NO: 2856240 - RNA, 19 nt, Human
uguccugugagguuuccca

SEQ ID NO: 2856241 - RNA, 20 nt, Human
uguccugugagguuucccaa

SEQ ID NO: 2856242 - RNA, 21 nt, Human
uguccugugagguuucccaau

SEQ ID NO: 2856243 - RNA, 14 nt, Human
uguccuucccugca

SEQ ID NO: 2856244 - RNA, 16 nt, Human
uguccuucccugcauu

SEQ ID NO: 2856245 - RNA, 22 nt, Human
uguccuucccugcauuucugag

SEQ ID NO: 2856246 - RNA, 14 nt, Human
agucagaugcccag

SEQ ID NO: 2856247 - RNA, 14 nt, Human
ugucuaagauucua

SEQ ID NO: 2856248 - RNA, 15 nt, Human
ugucuaagauucuag

SEQ ID NO: 2856249 - RNA, 23 nt, Human
agucagaugcccagagggcccag

SEQ ID NO: 2856250 - RNA, 16 nt, Human
ugucuaagauucuaga

SEQ ID NO: 2856251 - RNA, 16 nt, Human
agucagugcaaauguc

SEQ ID NO: 2856252 - RNA, 23 nt, Human
agucagugcaaaugucagauaca

SEQ ID NO: 2856253 - RNA, 21 nt, Human
agucagucaugauggcaccac

SEQ ID NO: 2856254 - RNA, 13 nt, Human
agucaucaucagg

SEQ ID NO: 2856255 - RNA, 14 nt, Human
agucaucaucaggg

SEQ ID NO: 2856256 - RNA, 15 nt, Human
agucaucaucagggc

SEQ ID NO: 2856257 - RNA, 16 nt, Human
agucaucaucagggcc

SEQ ID NO: 2856258 - RNA, 17 nt, Human
agucaucaucagggccu

SEQ ID NO: 2856259 - RNA, 18 nt, Human
agucaucaucagggccug

SEQ ID NO: 2856260 - RNA, 19 nt, Human
agucaucaucagggccugg

SEQ ID NO: 2856261 - RNA, 21 nt, Human
agucaucaucagggccugggg

SEQ ID NO: 2856262 - RNA, 22 nt, Human
agucaucaucagggccuggggc

SEQ ID NO: 2856263 - RNA, 14 nt, Human
agucaucuauaguu

SEQ ID NO: 2856264 - RNA, 22 nt, Human
agucaucuauaguugauauguu

SEQ ID NO: 2856265 - RNA, 14 nt, Human
ugucuaagauagua

SEQ ID NO: 2856266 - RNA, 15 nt, Human
ugucuaagauaguaa

SEQ ID NO: 2856267 - RNA, 13 nt, Human
ugucuaagauucu

SEQ ID NO: 2856268 - RNA, 18 nt, Human
ugucuaaauuugaauguu

SEQ ID NO: 2856269 - RNA, 22 nt, Human
ugucuaaacaaugcugauuugg

SEQ ID NO: 2856270 - RNA, 18 nt, Human
ugucuaacucagaauuau

SEQ ID NO: 2856271 - RNA, 20 nt, Human
ugucuaacucagaauuauuu

SEQ ID NO: 2856272 - RNA, 22 nt, Human
ugucuaacuuuagaagugcauu

SEQ ID NO: 2856273 - RNA, 21 nt, Human
ugucuaacuuuugugaagaac

SEQ ID NO: 2856274 - RNA, 16 nt, Human
uguccuugaaugccau

SEQ ID NO: 2856275 - RNA, 17 nt, Human
uguccuugaaugccaua

SEQ ID NO: 2856276 - RNA, 18 nt, Human
uguccuuggaaguuucau

SEQ ID NO: 2856277 - RNA, 16 nt, Human
uguccuuuaaaaaaga

SEQ ID NO: 2856278 - RNA, 18 nt, Human
uguccuuuaaaaaagaaa

SEQ ID NO: 2856279 - RNA, 19 nt, Human
uguccuuuaaaaaagaaaa

SEQ ID NO: 2856280 - RNA, 13 nt, Human
agucaugaagccc

SEQ ID NO: 2856281 - RNA, 21 nt, Human
agucaugaagcccaagugaaa

SEQ ID NO: 2856282 - RNA, 14 nt, Human
agucaugaagccca

SEQ ID NO: 2856283 - RNA, 17 nt, Human
aguccagugaccugcug

SEQ ID NO: 2856284 - RNA, 20 nt, Human
agucccaccuuggcugcagg

SEQ ID NO: 2856285 - RNA, 23 nt, Human
agucccaccuuggcugcagggag

SEQ ID NO: 2856286 - RNA, 21 nt, Human
agucccaccuuggcugcaggg

SEQ ID NO: 2856287 - RNA, 23 nt, Human
aguccccagcccuucacauuuuu

SEQ ID NO: 2856288 - RNA, 19 nt, Human
agucaucuuguaauuucca

SEQ ID NO: 2856289 - RNA, 20 nt, Human
agucccaggcugagccucag

SEQ ID NO: 2856290 - RNA, 22 nt, Human
auaauuccuauauccugugacu

SEQ ID NO: 2856291 - RNA, 13 nt, Human
auaauuccuacag

SEQ ID NO: 2856292 - RNA, 16 nt, Human
auaauuccuacagcac

SEQ ID NO: 2856293 - RNA, 18 nt, Human
auaauuccuacagcacua

SEQ ID NO: 2856294 - RNA, 19 nt, Human
auaauuccuacagcacuac

SEQ ID NO: 2856295 - RNA, 12 nt, Human
auaauucuaaag

SEQ ID NO: 2856296 - RNA, 12 nt, Human
auaauucuaaau

SEQ ID NO: 2856297 - RNA, 16 nt, Human
auaauucuaaaucccu

SEQ ID NO: 2856298 - RNA, 15 nt, Human
auaauucuggagaua

SEQ ID NO: 2856299 - RNA, 13 nt, Human
auaauugcaucua

SEQ ID NO: 2856300 - RNA, 19 nt, Human
auaauugcaucuagguaau

SEQ ID NO: 2856301 - RNA, 13 nt, Human
auaauugcauuca

SEQ ID NO: 2856302 - RNA, 14 nt, Human
auaauugcauucau

SEQ ID NO: 2856303 - RNA, 16 nt, Human
auaauugcuauuuauu

SEQ ID NO: 2856304 - RNA, 20 nt, Human
auaauugcuauuuauuuuua

SEQ ID NO: 2856305 - RNA, 19 nt, Human
auaauugcucauaagcaau

SEQ ID NO: 2856306 - RNA, 21 nt, Human
uuagcacuugggugacggcag

SEQ ID NO: 2856307 - RNA, 17 nt, Human
uuagcagaagaaaggaa

SEQ ID NO: 2856308 - RNA, 12 nt, Human
uuagcacuguug

SEQ ID NO: 2856309 - RNA, 14 nt, Human
uuagcacuguugau

SEQ ID NO: 2856310 - RNA, 18 nt, Human
uuagcacuguugauguau

SEQ ID NO: 2856311 - RNA, 21 nt, Human
uuagcacuguugauguaucug

SEQ ID NO: 2856312 - RNA, 21 nt, Human
uuagauuuucugguucuaaca

SEQ ID NO: 2856313 - RNA, 12 nt, Human
uuagcaccaggg

SEQ ID NO: 2856314 - RNA, 19 nt, Human
uuagauuuucugguucuaa

SEQ ID NO: 2856315 - RNA, 20 nt, Human
uuagauuuucugguucuaac

SEQ ID NO: 2856316 - RNA, 21 nt, Human
uuagauuuuauuuuacuauug

SEQ ID NO: 2856317 - RNA, 18 nt, Human
uuagauuuucugguucua

SEQ ID NO: 2856318 - RNA, 13 nt, Human
uuagauuguaaac

SEQ ID NO: 2856319 - RNA, 22 nt, Human
uuagauucucugugucuaagau

SEQ ID NO: 2856320 - RNA, 19 nt, Human
uuagauuucaagaaaaaau

SEQ ID NO: 2856321 - RNA, 23 nt, Human
uuagauugaaaacuuuucucaga

SEQ ID NO: 2856322 - RNA, 19 nt, Human
uuagauucucugugucuaa

SEQ ID NO: 2856323 - RNA, 20 nt, Human
uuagauucucugugucuaag

SEQ ID NO: 2856324 - RNA, 20 nt, Human
auaauucaggaagcagcuuu

SEQ ID NO: 2856325 - RNA, 17 nt, Human
auaauucaguauguuuu

SEQ ID NO: 2856326 - RNA, 18 nt, Human
auaauucaguauguuuua

SEQ ID NO: 2856327 - RNA, 20 nt, Human
auaauucaguauguuuuaca

SEQ ID NO: 2856328 - RNA, 21 nt, Human
auaauucaguauguuuuacac

SEQ ID NO: 2856329 - RNA, 23 nt, Human
auaauucaguauguuuuacacug

SEQ ID NO: 2856330 - RNA, 13 nt, Human
auaauucauauuc

SEQ ID NO: 2856331 - RNA, 13 nt, Human
auaaucuuugggu

SEQ ID NO: 2856332 - RNA, 17 nt, Human
auaaugaaaauauuuuu

SEQ ID NO: 2856333 - RNA, 13 nt, Human
auaaugaacccau

SEQ ID NO: 2856334 - RNA, 20 nt, Human
auaaucagugugucuaaauu

SEQ ID NO: 2856335 - RNA, 17 nt, Human
auaaucagccucuuaaa

SEQ ID NO: 2856336 - RNA, 16 nt, Human
auaaucagccucuuaa

SEQ ID NO: 2856337 - RNA, 15 nt, Human
auaaucagccucuua

SEQ ID NO: 2856338 - RNA, 14 nt, Human
auaaucagccucuu

SEQ ID NO: 2856339 - RNA, 22 nt, Human
auaauaauuagguuaacauugu

SEQ ID NO: 2856340 - RNA, 15 nt, Human
auaauaauauuguuu

SEQ ID NO: 2856341 - RNA, 18 nt, Human
auaauaauauuguuuuuc

SEQ ID NO: 2856342 - RNA, 19 nt, Human
auaauaaucuaggcaugaa

SEQ ID NO: 2856343 - RNA, 22 nt, Human
auaauacacuaauuccuuucua

SEQ ID NO: 2856344 - RNA, 13 nt, Human
auaauacacuugc

SEQ ID NO: 2856345 - RNA, 16 nt, Human
auaauacacuugcccu

SEQ ID NO: 2856346 - RNA, 19 nt, Human
auaauacacuugcccugcu

SEQ ID NO: 2856347 - RNA, 12 nt, Human
auaauaccucaa

SEQ ID NO: 2856348 - RNA, 21 nt, Human
auaauacacuaauuccuuucu

SEQ ID NO: 2856349 - RNA, 13 nt, Human
auaaucagccucu

SEQ ID NO: 2856350 - RNA, 23 nt, Human
auaauaaauuguuuggcuuccuc

SEQ ID NO: 2856351 - RNA, 17 nt, Human
auaauaagcaggauguu

SEQ ID NO: 2856352 - RNA, 19 nt, Human
auaauaaaaaauuaugaca

SEQ ID NO: 2856353 - RNA, 12 nt, Human
auaauaaauuga

SEQ ID NO: 2856354 - RNA, 15 nt, Human
auaauaaauugaaau

SEQ ID NO: 2856355 - RNA, 20 nt, Human
auaaguuugaaggaaacagu

SEQ ID NO: 2856356 - RNA, 21 nt, Human
auaaguuugaaggaaacaguu

SEQ ID NO: 2856357 - RNA, 13 nt, Human
auaaguuugaagg

SEQ ID NO: 2856358 - RNA, 15 nt, Human
auaaguuugaaggaa

SEQ ID NO: 2856359 - RNA, 19 nt, Human
auaaguuugaaggaaacag

SEQ ID NO: 2856360 - RNA, 16 nt, Human
auaaguuccuuuccuu

SEQ ID NO: 2856361 - RNA, 20 nt, Human
auaaguucuuaugccauguu

SEQ ID NO: 2856362 - RNA, 13 nt, Human
auaaguucacaaa

SEQ ID NO: 2856363 - RNA, 15 nt, Human
auaaguucacaaaau

SEQ ID NO: 2856364 - RNA, 16 nt, Human
auaaguucacaaaaug

SEQ ID NO: 2856365 - RNA, 15 nt, Human
uuaccuaaaguauuu

SEQ ID NO: 2856366 - RNA, 16 nt, Human
uuaccuaaaguauuuu

SEQ ID NO: 2856367 - RNA, 18 nt, Human
uuaccuaagugacauuug

SEQ ID NO: 2856368 - RNA, 20 nt, Human
uuaccuaagugacauuugua

SEQ ID NO: 2856369 - RNA, 21 nt, Human
uuaccuaagugacauuuguag

SEQ ID NO: 2856370 - RNA, 12 nt, Human
uuaccucuuuaa

SEQ ID NO: 2856371 - RNA, 14 nt, Human
uuaccugcaggcug

SEQ ID NO: 2856372 - RNA, 12 nt, Human
uuaccugacaca

SEQ ID NO: 2856373 - RNA, 13 nt, Human
uuaccugacacaa

SEQ ID NO: 2856374 - RNA, 16 nt, Human
uuaccugaccucuugc

SEQ ID NO: 2856375 - RNA, 17 nt, Human
uuaccugaccucuugcu

SEQ ID NO: 2856376 - RNA, 18 nt, Human
uuaccugaccucuugcug

SEQ ID NO: 2856377 - RNA, 19 nt, Human
uuaccugaccucuugcugu

SEQ ID NO: 2856378 - RNA, 20 nt, Human
uuaccugaccucuugcuguc

SEQ ID NO: 2856379 - RNA, 21 nt, Human
uuaccugaccucuugcugucu

SEQ ID NO: 2856380 - RNA, 23 nt, Human
uuaccugaccucuugcugucucu

SEQ ID NO: 2856381 - RNA, 20 nt, Human
auaagcacugaaaaacaaca

SEQ ID NO: 2856382 - RNA, 17 nt, Human
auaagauucuaacgguc

SEQ ID NO: 2856383 - RNA, 17 nt, Human
auaagaaaugcauaugu

SEQ ID NO: 2856384 - RNA, 22 nt, Human
auaagaacaauagguaaagcua

SEQ ID NO: 2856385 - RNA, 15 nt, Human
auaagaaaguuucac

SEQ ID NO: 2856386 - RNA, 23 nt, Human
auaagcaaagggagcacuggguu

SEQ ID NO: 2856387 - RNA, 14 nt, Human
auaagcaaauuuca

SEQ ID NO: 2856388 - RNA, 15 nt, Human
auaagcaaauuucaa

SEQ ID NO: 2856389 - RNA, 19 nt, Human
auaagcaaauuucaaaaga

SEQ ID NO: 2856390 - RNA, 21 nt, Human
auaagcaaauuucaaaagaca

SEQ ID NO: 2856391 - RNA, 22 nt, Human
auaagcaaauuucaaaagacau

SEQ ID NO: 2856392 - RNA, 20 nt, Human
auaagcaaaaacaaaaagaa

SEQ ID NO: 2856393 - RNA, 14 nt, Human
auaagcaaaauccu

SEQ ID NO: 2856394 - RNA, 21 nt, Human
auaagcaaaauccugacuauu

SEQ ID NO: 2856395 - RNA, 14 nt, Human
auaagaagcaaaua

SEQ ID NO: 2856396 - RNA, 12 nt, Human
auaagauucuaa

SEQ ID NO: 2856397 - RNA, 13 nt, Human
auaagauucuaac

SEQ ID NO: 2856398 - RNA, 12 nt, Human
auaacugaggag

SEQ ID NO: 2856399 - RNA, 17 nt, Human
auaacugccuugaaccu

SEQ ID NO: 2856400 - RNA, 23 nt, Human
auaacugccuugaaccugugagu

SEQ ID NO: 2856401 - RNA, 23 nt, Human
auaaccacaaagcacaguuugaa

SEQ ID NO: 2856402 - RNA, 14 nt, Human
auaaccacugaagg

SEQ ID NO: 2856403 - RNA, 19 nt, Human
auaaccagcuguaacacag

SEQ ID NO: 2856404 - RNA, 22 nt, Human
auaacucuguggcauuauugca

SEQ ID NO: 2856405 - RNA, 14 nt, Human
auaaccagcuguaa

SEQ ID NO: 2856406 - RNA, 14 nt, Human
auaaauuaguuguu

SEQ ID NO: 2856407 - RNA, 15 nt, Human
auaaauuauacaaau

SEQ ID NO: 2856408 - RNA, 14 nt, Human
auaacauuaccuua

SEQ ID NO: 2856409 - RNA, 19 nt, Human
auaacauuaccuuacugug

SEQ ID NO: 2856410 - RNA, 20 nt, Human
auaacauuaccuuacugugg

SEQ ID NO: 2856411 - RNA, 19 nt, Human
auaacauuuguguguuaua

SEQ ID NO: 2856412 - RNA, 12 nt, Human
auaaaugucugu

SEQ ID NO: 2856413 - RNA, 15 nt, Human
auaaaugucuguuga

SEQ ID NO: 2856414 - RNA, 23 nt, Human
uuaccauuuugggguacccacug

SEQ ID NO: 2856415 - RNA, 13 nt, Human
uuaccauucacaa

SEQ ID NO: 2856416 - RNA, 14 nt, Human
uuaccauucacaau

SEQ ID NO: 2856417 - RNA, 15 nt, Human
uuaccauucacaaua

SEQ ID NO: 2856418 - RNA, 17 nt, Human
uuaccauucacaauaaa

SEQ ID NO: 2856419 - RNA, 23 nt, Human
uuacaugcaauuuauuaaaauga

SEQ ID NO: 2856420 - RNA, 22 nt, Human
uuacaugcaauuuauuaaaaug

SEQ ID NO: 2856421 - RNA, 22 nt, Human
uuacccaccuagaacacuaacu

SEQ ID NO: 2856422 - RNA, 22 nt, Human
uuacccugcgauuuugccugug

SEQ ID NO: 2856423 - RNA, 12 nt, Human
uuacccugggaa

SEQ ID NO: 2856424 - RNA, 23 nt, Human
uuacccuguacauauguaaacau

SEQ ID NO: 2856425 - RNA, 12 nt, Human
uuacccuuagaa

SEQ ID NO: 2856426 - RNA, 13 nt, Human
uuacccuuagaau

SEQ ID NO: 2856427 - RNA, 13 nt, Human
uuacccuucccug

SEQ ID NO: 2856428 - RNA, 17 nt, Human
uuacccuucccugcacu

SEQ ID NO: 2856429 - RNA, 16 nt, Human
uuacccuuuagacugu

SEQ ID NO: 2856430 - RNA, 13 nt, Human
uuacccuuuagac

SEQ ID NO: 2856431 - RNA, 20 nt, Human
uuacccuugagcccucccca

SEQ ID NO: 2856432 - RNA, 16 nt, Human
uuacccaccuagaaca

SEQ ID NO: 2856433 - RNA, 15 nt, Human
uuacccaccuagaac

SEQ ID NO: 2856434 - RNA, 16 nt, Human
uuacccacacacagau

SEQ ID NO: 2856435 - RNA, 14 nt, Human
uuacccaauuuccc

SEQ ID NO: 2856436 - RNA, 24 nt, Human
uuacccaaaaacuaaaucucuaau

SEQ ID NO: 2856437 - RNA, 21 nt, Human
auaacucuguaaaaacacuga

SEQ ID NO: 2856438 - RNA, 14 nt, Human
uuaccauuuuucau

SEQ ID NO: 2856439 - RNA, 21 nt, Human
uuaccauuugcuacuguacau

SEQ ID NO: 2856440 - RNA, 12 nt, Human
auaacugugaag

SEQ ID NO: 2856441 - RNA, 17 nt, Human
aguuuucuccucccagg

SEQ ID NO: 2856442 - RNA, 13 nt, Human
aguuuucuccuuu

SEQ ID NO: 2856443 - RNA, 17 nt, Human
aguuuucuccuuuuacu

SEQ ID NO: 2856444 - RNA, 12 nt, Human
aguuuucucuua

SEQ ID NO: 2856445 - RNA, 21 nt, Human
aguuuucucuuuguggggcuu

SEQ ID NO: 2856446 - RNA, 22 nt, Human
aguuuuccucuauacaucucuc

SEQ ID NO: 2856447 - RNA, 16 nt, Human
auaaaccucaaaaugu

SEQ ID NO: 2856448 - RNA, 14 nt, Human
auaaaccuccgcca

SEQ ID NO: 2856449 - RNA, 17 nt, Human
auaaaccuccgccaaug

SEQ ID NO: 2856450 - RNA, 14 nt, Human
auaaacagacaaua

SEQ ID NO: 2856451 - RNA, 19 nt, Human
auaaacagacaauauguga

SEQ ID NO: 2856452 - RNA, 20 nt, Human
auaaacagacuguuaauuau

SEQ ID NO: 2856453 - RNA, 15 nt, Human
auaaacagaugaaua

SEQ ID NO: 2856454 - RNA, 17 nt, Human
auaaacagaugaauaaa

SEQ ID NO: 2856455 - RNA, 16 nt, Human
auaaacaucacacaca

SEQ ID NO: 2856456 - RNA, 11 nt, Human
aguuuuccuga

SEQ ID NO: 2856457 - RNA, 15 nt, Human
auaaacauuaaaugu

SEQ ID NO: 2856458 - RNA, 16 nt, Human
auaaacauuaaauguc

SEQ ID NO: 2856459 - RNA, 17 nt, Human
auaaacauuaaaugucu

SEQ ID NO: 2856460 - RNA, 21 nt, Human
auaaacauuaaaugucuuaua

SEQ ID NO: 2856461 - RNA, 21 nt, Human
auaaacauccuucaagaacuc

SEQ ID NO: 2856462 - RNA, 17 nt, Human
auaaacaucacacacac

SEQ ID NO: 2856463 - RNA, 13 nt, Human
auaaaccaaagga

SEQ ID NO: 2856464 - RNA, 15 nt, Human
auaaaccaaaggaca

SEQ ID NO: 2856465 - RNA, 16 nt, Human
auaaaccaaaggacau

SEQ ID NO: 2856466 - RNA, 20 nt, Human
auaaaccaaaggacauuaug

SEQ ID NO: 2856467 - RNA, 21 nt, Human
auaaaccaaaggacauuaugu

SEQ ID NO: 2856468 - RNA, 22 nt, Human
auaaacuaaugguccacaccca

SEQ ID NO: 2856469 - RNA, 16 nt, Human
auaaacuacucuuuga

SEQ ID NO: 2856470 - RNA, 17 nt, Human
auaaacuacucuuugau

SEQ ID NO: 2856471 - RNA, 19 nt, Human
auaaacuacucuuugauuu

SEQ ID NO: 2856472 - RNA, 15 nt, Human
auaaacgcaagcuga

SEQ ID NO: 2856473 - RNA, 14 nt, Human
auaaacuaucaguu

SEQ ID NO: 2856474 - RNA, 15 nt, Human
auaaacucuaaacau

SEQ ID NO: 2856475 - RNA, 12 nt, Human
auaaacugaaaa

SEQ ID NO: 2856476 - RNA, 22 nt, Human
auaaacugacuaucauaaaauc

SEQ ID NO: 2856477 - RNA, 11 nt, Human
auaaacuucag

SEQ ID NO: 2856478 - RNA, 12 nt, Human
auaaacuucagc

SEQ ID NO: 2856479 - RNA, 13 nt, Human
auaaacuucagca

SEQ ID NO: 2856480 - RNA, 15 nt, Human
auaaacuucagcacc

SEQ ID NO: 2856481 - RNA, 16 nt, Human
auaaacuucagcacca

SEQ ID NO: 2856482 - RNA, 16 nt, Human
auaaacuguguuuacu

SEQ ID NO: 2856483 - RNA, 21 nt, Human
auaaacuguuucagauuuuuu

SEQ ID NO: 2856484 - RNA, 16 nt, Human
auaaacuuaacuuuaa

SEQ ID NO: 2856485 - RNA, 11 nt, Human
auaaaguauag

SEQ ID NO: 2856486 - RNA, 20 nt, Human
auaaaguauagagagaaguu

SEQ ID NO: 2856487 - RNA, 12 nt, Human
auaaauaaaagc

SEQ ID NO: 2856488 - RNA, 14 nt, Human
auaaauaaaagccu

SEQ ID NO: 2856489 - RNA, 15 nt, Human
auaaauaaaagccuc

SEQ ID NO: 2856490 - RNA, 15 nt, Human
uuauaguuuguacau

SEQ ID NO: 2856491 - RNA, 16 nt, Human
uuauaguuuguacaug

SEQ ID NO: 2856492 - RNA, 12 nt, Human
uuauaguuugua

SEQ ID NO: 2856493 - RNA, 13 nt, Human
uuauaguuucuga

SEQ ID NO: 2856494 - RNA, 15 nt, Human
uuauaguuucugagg

SEQ ID NO: 2856495 - RNA, 16 nt, Human
uuauaguuugggcuuc

SEQ ID NO: 2856496 - RNA, 12 nt, Human
uuauaguuucug

SEQ ID NO: 2856497 - RNA, 14 nt, Human
uuauaguuucaagc

SEQ ID NO: 2856498 - RNA, 13 nt, Human
uuauauaaaugua

SEQ ID NO: 2856499 - RNA, 18 nt, Human
uuauauaaauguaaaaau

SEQ ID NO: 2856500 - RNA, 23 nt, Human
uuauauaaauguaaaaauaauaa

SEQ ID NO: 2856501 - RNA, 18 nt, Human
uuauauaauaucuaaagu

SEQ ID NO: 2856502 - RNA, 20 nt, Human
uuauauaauaucuaaaguua

SEQ ID NO: 2856503 - RNA, 21 nt, Human
uuauauaauaucuaaaguuau

SEQ ID NO: 2856504 - RNA, 22 nt, Human
uuauauaauucacucaagcacu

SEQ ID NO: 2856505 - RNA, 12 nt, Human
uuauauaauugu

SEQ ID NO: 2856506 - RNA, 16 nt, Human
uuauauaauuguugaa

SEQ ID NO: 2856507 - RNA, 14 nt, Human
uuauauacaauaau

SEQ ID NO: 2856508 - RNA, 17 nt, Human
uuauauacaauaaugga

SEQ ID NO: 2856509 - RNA, 19 nt, Human
uuauauacaauaauggaaa

SEQ ID NO: 2856510 - RNA, 20 nt, Human
uuauauacaauaauggaaaa

SEQ ID NO: 2856511 - RNA, 22 nt, Human
uuauauacaauaauggaaaaaa

SEQ ID NO: 2856512 - RNA, 14 nt, Human
uuauauacagagga

SEQ ID NO: 2856513 - RNA, 21 nt, Human
uuauauacagaggaaaucugu

SEQ ID NO: 2856514 - RNA, 23 nt, Human
uuauauacagaggaaaucuguaa

SEQ ID NO: 2856515 - RNA, 21 nt, Human
auaauuuuaagaaaucaaaga

SEQ ID NO: 2856516 - RNA, 15 nt, Human
auaauuuuaagaaau

SEQ ID NO: 2856517 - RNA, 14 nt, Human
auaauuuuaagaaa

SEQ ID NO: 2856518 - RNA, 21 nt, Human
auaauuuuagugucauuucca

SEQ ID NO: 2856519 - RNA, 13 nt, Human
auaauuuugcugg

SEQ ID NO: 2856520 - RNA, 22 nt, Human
auaauuuugcuggaauuccuaa

SEQ ID NO: 2856521 - RNA, 14 nt, Human
auaauuuucugaaa

SEQ ID NO: 2856522 - RNA, 15 nt, Human
auaauuuucugaaag

SEQ ID NO: 2856523 - RNA, 15 nt, Human
uuauauaugaaaacu

SEQ ID NO: 2856524 - RNA, 16 nt, Human
uuauauaugaaaacua

SEQ ID NO: 2856525 - RNA, 18 nt, Human
uuauauaugaaaacuaua

SEQ ID NO: 2856526 - RNA, 14 nt, Human
uuauauauggacau

SEQ ID NO: 2856527 - RNA, 17 nt, Human
uuauauauggacauggc

SEQ ID NO: 2856528 - RNA, 18 nt, Human
uuauauagguugugcaaa

SEQ ID NO: 2856529 - RNA, 15 nt, Human
uuauauauacaguaa

SEQ ID NO: 2856530 - RNA, 12 nt, Human
uuauauauauaa

SEQ ID NO: 2856531 - RNA, 17 nt, Human
auaauuuuuuauucaag

SEQ ID NO: 2856532 - RNA, 13 nt, Human
auaauuuuuugua

SEQ ID NO: 2856533 - RNA, 22 nt, Human
auaauuuuuuguaaugugugaa

SEQ ID NO: 2856534 - RNA, 15 nt, Human
auaauuuuuuauuca

SEQ ID NO: 2856535 - RNA, 16 nt, Human
auaauuuuuuauucaa

SEQ ID NO: 2856536 - RNA, 17 nt, Human
auaauuuuuauauuuaa

SEQ ID NO: 2856537 - RNA, 19 nt, Human
auaauuuuuauauuuaauu

SEQ ID NO: 2856538 - RNA, 23 nt, Human
auaauuuuuauauuuaauuauua

SEQ ID NO: 2856539 - RNA, 17 nt, Human
uuagccgcccaugcacu

SEQ ID NO: 2856540 - RNA, 13 nt, Human
uuagccgggcgug

SEQ ID NO: 2856541 - RNA, 19 nt, Human
uuagcaggccaaggucuga

SEQ ID NO: 2856542 - RNA, 23 nt, Human
uuagcaggccaaggucugagcca

SEQ ID NO: 2856543 - RNA, 14 nt, Human
uuagccccauaauu

SEQ ID NO: 2856544 - RNA, 15 nt, Human
uuauaaaugagcaaa

SEQ ID NO: 2856545 - RNA, 12 nt, Human
uuauaaaucaua

SEQ ID NO: 2856546 - RNA, 17 nt, Human
uuauaaaucauauugau

SEQ ID NO: 2856547 - RNA, 19 nt, Human
uuauaaaucauauugauga

SEQ ID NO: 2856548 - RNA, 21 nt, Human
uuauaaaucauauugaugaaa

SEQ ID NO: 2856549 - RNA, 23 nt, Human
uuauaaaucauauugaugaaaag

SEQ ID NO: 2856550 - RNA, 15 nt, Human
uuagccucccugaaa

SEQ ID NO: 2856551 - RNA, 16 nt, Human
uuauaacucaucauaa

SEQ ID NO: 2856552 - RNA, 18 nt, Human
uuauaacucaucauaaaa

SEQ ID NO: 2856553 - RNA, 17 nt, Human
uuauaacucaucauaaa

SEQ ID NO: 2856554 - RNA, 16 nt, Human
uuauaacuauucaguu

SEQ ID NO: 2856555 - RNA, 22 nt, Human
uuauaacucaucauaaaauaaa

SEQ ID NO: 2856556 - RNA, 21 nt, Human
uuauaacucaucauaaaauaa

SEQ ID NO: 2856557 - RNA, 20 nt, Human
uuauaacucaucauaaaaua

SEQ ID NO: 2856558 - RNA, 19 nt, Human
uuauaacucaucauaaaau

SEQ ID NO: 2856559 - RNA, 18 nt, Human
uuauacccccugcaaagc

SEQ ID NO: 2856560 - RNA, 14 nt, Human
uuauacauuaguaa

SEQ ID NO: 2856561 - RNA, 16 nt, Human
uuauacauuaguaaau

SEQ ID NO: 2856562 - RNA, 21 nt, Human
uuauacauuaguaaaugucuu

SEQ ID NO: 2856563 - RNA, 23 nt, Human
uuauacauuaguaaaugucuuug

SEQ ID NO: 2856564 - RNA, 23 nt, Human
uuauagaguguacuuaacuauuc

SEQ ID NO: 2856565 - RNA, 19 nt, Human
uuauagagggccaagacuu

SEQ ID NO: 2856566 - RNA, 15 nt, Human
uuauagacaaauaau

SEQ ID NO: 2856567 - RNA, 17 nt, Human
uuauagacacccuggca

SEQ ID NO: 2856568 - RNA, 14 nt, Human
uuauagagaaugau

SEQ ID NO: 2856569 - RNA, 21 nt, Human
uuauagagaaugaugauaaca

SEQ ID NO: 2856570 - RNA, 14 nt, Human
uuauagaaaguuca

SEQ ID NO: 2856571 - RNA, 18 nt, Human
uuauacuccaguguacau

SEQ ID NO: 2856572 - RNA, 19 nt, Human
uuauacucuuccuauuuuu

SEQ ID NO: 2856573 - RNA, 16 nt, Human
uuauacucuuucugua

SEQ ID NO: 2856574 - RNA, 13 nt, Human
uuauacugauuau

SEQ ID NO: 2856575 - RNA, 13 nt, Human
uuauacuguacaa

SEQ ID NO: 2856576 - RNA, 14 nt, Human
uuauacuguacaau

SEQ ID NO: 2856577 - RNA, 15 nt, Human
uuauacuguacaaua

SEQ ID NO: 2856578 - RNA, 17 nt, Human
uuauacuguacaauaaa

SEQ ID NO: 2856579 - RNA, 18 nt, Human
uuauacuguacaauaaaa

SEQ ID NO: 2856580 - RNA, 11 nt, Human
uuauacuaacu

SEQ ID NO: 2856581 - RNA, 18 nt, Human
uuauacuaacuuauuuau

SEQ ID NO: 2856582 - RNA, 14 nt, Human
uuauacgcuuuucu

SEQ ID NO: 2856583 - RNA, 16 nt, Human
uuauaccugcuaucag

SEQ ID NO: 2856584 - RNA, 18 nt, Human
uuauaccccaauaaucaa

SEQ ID NO: 2856585 - RNA, 16 nt, Human
uuauaccauucagauc

SEQ ID NO: 2856586 - RNA, 15 nt, Human
uuauaccuaccugug

SEQ ID NO: 2856587 - RNA, 16 nt, Human
uuauaccuaccugugu

SEQ ID NO: 2856588 - RNA, 19 nt, Human
uuauaccucaaacuaucug

SEQ ID NO: 2856589 - RNA, 22 nt, Human
uuauagucauuuauuuuaaaaa

SEQ ID NO: 2856590 - RNA, 13 nt, Human
uuauaguggaaaa

SEQ ID NO: 2856591 - RNA, 16 nt, Human
uuauaguggaaaaaca

SEQ ID NO: 2856592 - RNA, 17 nt, Human
uuauaguggaaaaacac

SEQ ID NO: 2856593 - RNA, 22 nt, Human
uuauagguaaucaaugaauauu

SEQ ID NO: 2856594 - RNA, 19 nt, Human
uuauagguggccucuccuu

SEQ ID NO: 2856595 - RNA, 22 nt, Human
uuauagguguugguuuuggggg

SEQ ID NO: 2856596 - RNA, 14 nt, Human
uuauaggugagaaa

SEQ ID NO: 2856597 - RNA, 18 nt, Human
uuauaggugagaaaaaaa

SEQ ID NO: 2856598 - RNA, 17 nt, Human
uuauaguacaugauaaa

SEQ ID NO: 2856599 - RNA, 16 nt, Human
uuauaguacaugauaa

SEQ ID NO: 2856600 - RNA, 13 nt, Human
uuauaguacauga

SEQ ID NO: 2856601 - RNA, 17 nt, Human
uuauagcuauuacuguc

SEQ ID NO: 2856602 - RNA, 16 nt, Human
uuauaggaucauuugu

SEQ ID NO: 2856603 - RNA, 14 nt, Human
uuauagcacuuuga

SEQ ID NO: 2856604 - RNA, 22 nt, Human
uuauagcacuuugaaauaccuc

SEQ ID NO: 2856605 - RNA, 23 nt, Human
uuauagcacuuugaaauaccuca

SEQ ID NO: 2856606 - RNA, 21 nt, Human
uuauagauucuaaagauucua

SEQ ID NO: 2856607 - RNA, 19 nt, Human
uuauagauucuaaagauuc

SEQ ID NO: 2856608 - RNA, 20 nt, Human
uuauagauucuaaagauucu

SEQ ID NO: 2856609 - RNA, 15 nt, Human
uuauagaugucuagg

SEQ ID NO: 2856610 - RNA, 12 nt, Human
uuauagauucua

SEQ ID NO: 2856611 - RNA, 13 nt, Human
uuauagauucuaa

SEQ ID NO: 2856612 - RNA, 14 nt, Human
uuauagauucuaaa

SEQ ID NO: 2856613 - RNA, 15 nt, Human
uuauagauucuaaag

SEQ ID NO: 2856614 - RNA, 16 nt, Human
uuauagauucuaaaga

SEQ ID NO: 2856615 - RNA, 12 nt, Human
auacaucacugc

SEQ ID NO: 2856616 - RNA, 13 nt, Human
auacaucacugcu

SEQ ID NO: 2856617 - RNA, 15 nt, Human
auacaucacugcuug

SEQ ID NO: 2856618 - RNA, 18 nt, Human
auacaucacugcuugaug

SEQ ID NO: 2856619 - RNA, 19 nt, Human
auacaucacugcuugauga

SEQ ID NO: 2856620 - RNA, 22 nt, Human
auacaucacugcuugaugaagc

SEQ ID NO: 2856621 - RNA, 14 nt, Human
auacaucaguuauu

SEQ ID NO: 2856622 - RNA, 14 nt, Human
auacauccugggua

SEQ ID NO: 2856623 - RNA, 15 nt, Human
auacauccuggguaa

SEQ ID NO: 2856624 - RNA, 16 nt, Human
auacauccuggguaau

SEQ ID NO: 2856625 - RNA, 18 nt, Human
auacauccuggguaauga

SEQ ID NO: 2856626 - RNA, 15 nt, Human
auacaucucucccca

SEQ ID NO: 2856627 - RNA, 16 nt, Human
auacaucucuccccaa

SEQ ID NO: 2856628 - RNA, 17 nt, Human
auacaugaaaauuuuaa

SEQ ID NO: 2856629 - RNA, 18 nt, Human
auacauuaguaaaugucu

SEQ ID NO: 2856630 - RNA, 19 nt, Human
auacauuaguaaaugucuu

SEQ ID NO: 2856631 - RNA, 21 nt, Human
auacauuaguaaaugucuuug

SEQ ID NO: 2856632 - RNA, 22 nt, Human
auacauuaguaaaugucuuugu

SEQ ID NO: 2856633 - RNA, 23 nt, Human
auacauuaguaaaugucuuugua

SEQ ID NO: 2856634 - RNA, 18 nt, Human
auacauauguagacuaua

SEQ ID NO: 2856635 - RNA, 21 nt, Human
auacauauguagacuauauac

SEQ ID NO: 2856636 - RNA, 22 nt, Human
auacauauguagacuauauaca

SEQ ID NO: 2856637 - RNA, 23 nt, Human
auacauauguagacuauauacau

SEQ ID NO: 2856638 - RNA, 21 nt, Human
auacaguuuauuuuuaaagau

SEQ ID NO: 2856639 - RNA, 22 nt, Human
auacaguuugucacaugaaaca

SEQ ID NO: 2856640 - RNA, 12 nt, Human
auacaguuuuau

SEQ ID NO: 2856641 - RNA, 13 nt, Human
auacaguuuuaug

SEQ ID NO: 2856642 - RNA, 14 nt, Human
auacaguuuuaugc

SEQ ID NO: 2856643 - RNA, 15 nt, Human
auacaguuuuaugcu

SEQ ID NO: 2856644 - RNA, 18 nt, Human
auacaguuuuaugcucuu

SEQ ID NO: 2856645 - RNA, 19 nt, Human
auacaguuuuaugcucuuu

SEQ ID NO: 2856646 - RNA, 20 nt, Human
auacaguuuuaugcucuuuu

SEQ ID NO: 2856647 - RNA, 21 nt, Human
auacaguuuuaugcucuuuuu

SEQ ID NO: 2856648 - RNA, 18 nt, Human
auacaguauaaaaauaga

SEQ ID NO: 2856649 - RNA, 19 nt, Human
auacaguaacuuuaugugu

SEQ ID NO: 2856650 - RNA, 20 nt, Human
auacaguaacuuuaugugua

SEQ ID NO: 2856651 - RNA, 17 nt, Human
auacagucccuaaagaa

SEQ ID NO: 2856652 - RNA, 15 nt, Human
auacagucaacaagc

SEQ ID NO: 2856653 - RNA, 18 nt, Human
auacagucccuaaagaaa

SEQ ID NO: 2856654 - RNA, 20 nt, Human
auacagucccuaaagaaaaa

SEQ ID NO: 2856655 - RNA, 22 nt, Human
auacagucccuaaagaaaaaaa

SEQ ID NO: 2856656 - RNA, 19 nt, Human
auacauuugaggggaaaac

SEQ ID NO: 2856657 - RNA, 14 nt, Human
auaccaaguauuua

SEQ ID NO: 2856658 - RNA, 14 nt, Human
auacauuuaaaacu

SEQ ID NO: 2856659 - RNA, 15 nt, Human
auacauuuaaaacuu

SEQ ID NO: 2856660 - RNA, 12 nt, Human
auacagcuuucu

SEQ ID NO: 2856661 - RNA, 13 nt, Human
auacagcuuucug

SEQ ID NO: 2856662 - RNA, 19 nt, Human
auacagcuuucugaccuuc

SEQ ID NO: 2856663 - RNA, 17 nt, Human
auacaguaacuuuaugu

SEQ ID NO: 2856664 - RNA, 18 nt, Human
auacaguaacuuuaugug

SEQ ID NO: 2856665 - RNA, 20 nt, Human
auacaggaaaagcugcugac

SEQ ID NO: 2856666 - RNA, 19 nt, Human
auacaggaaaagcugcuga

SEQ ID NO: 2856667 - RNA, 14 nt, Human
auacaggaaaagcu

SEQ ID NO: 2856668 - RNA, 16 nt, Human
auacaaauuaaaaaga

SEQ ID NO: 2856669 - RNA, 17 nt, Human
auacaaauuaaaaagau

SEQ ID NO: 2856670 - RNA, 18 nt, Human
auacaaauuaauuuuacu

SEQ ID NO: 2856671 - RNA, 12 nt, Human
auacaacaaagg

SEQ ID NO: 2856672 - RNA, 19 nt, Human
auacaacaaaggcaaguua

SEQ ID NO: 2856673 - RNA, 22 nt, Human
auacaacaaaggcaaguuaaga

SEQ ID NO: 2856674 - RNA, 23 nt, Human
auacaacaaaggcaaguuaagag

SEQ ID NO: 2856675 - RNA, 23 nt, Human
auacaaaaaucagccagacaugg

SEQ ID NO: 2856676 - RNA, 15 nt, Human
auacaaaaauuugcc

SEQ ID NO: 2856677 - RNA, 13 nt, Human
auacaaaaggcuc

SEQ ID NO: 2856678 - RNA, 16 nt, Human
auacaaacaaucucuu

SEQ ID NO: 2856679 - RNA, 17 nt, Human
auacaaauauaaaucuu

SEQ ID NO: 2856680 - RNA, 14 nt, Human
auacaaauauauug

SEQ ID NO: 2856681 - RNA, 16 nt, Human
auacaaauauauuguu

SEQ ID NO: 2856682 - RNA, 18 nt, Human
auacaaaccuaccaaaau

SEQ ID NO: 2856683 - RNA, 18 nt, Human
auacaaagcgugcacaag

SEQ ID NO: 2856684 - RNA, 20 nt, Human
auacagcccucccccagcag

SEQ ID NO: 2856685 - RNA, 13 nt, Human
auacagcagcaag

SEQ ID NO: 2856686 - RNA, 14 nt, Human
auacagcagcaaga

SEQ ID NO: 2856687 - RNA, 15 nt, Human
auacagcagcaagaa

SEQ ID NO: 2856688 - RNA, 16 nt, Human
auacagcagcaagaaa

SEQ ID NO: 2856689 - RNA, 17 nt, Human
auacagcagcaagaaaa

SEQ ID NO: 2856690 - RNA, 19 nt, Human
auacagcagcaagaaaaaa

SEQ ID NO: 2856691 - RNA, 20 nt, Human
auacagcagcaagaaaaaaa

SEQ ID NO: 2856692 - RNA, 15 nt, Human
auacagcaguagaca

SEQ ID NO: 2856693 - RNA, 17 nt, Human
auacagcaguagacauu

SEQ ID NO: 2856694 - RNA, 14 nt, Human
auacagaugaaaau

SEQ ID NO: 2856695 - RNA, 15 nt, Human
auacagaugaaaauu

SEQ ID NO: 2856696 - RNA, 16 nt, Human
auacagaugaaaauuu

SEQ ID NO: 2856697 - RNA, 20 nt, Human
auacagaugaaaauuugaga

SEQ ID NO: 2856698 - RNA, 22 nt, Human
auacagaugaaaauuugagacu

SEQ ID NO: 2856699 - RNA, 17 nt, Human
auaccaaguauuuauua

SEQ ID NO: 2856700 - RNA, 20 nt, Human
auaccaaugcuuuuaucaaa

SEQ ID NO: 2856701 - RNA, 15 nt, Human
auacuaacuuauuua

SEQ ID NO: 2856702 - RNA, 17 nt, Human
auaccauuaaaacugcu

SEQ ID NO: 2856703 - RNA, 18 nt, Human
auaccauuaaaacugcuu

SEQ ID NO: 2856704 - RNA, 17 nt, Human
auaccauacucauuucu

SEQ ID NO: 2856705 - RNA, 19 nt, Human
auaccauacucauuucuaa

SEQ ID NO: 2856706 - RNA, 21 nt, Human
auaccauacucauuucuaaaa

SEQ ID NO: 2856707 - RNA, 18 nt, Human
auaccagcuuagauuuua

SEQ ID NO: 2856708 - RNA, 19 nt, Human
auaccagcuuguaugcaau

SEQ ID NO: 2856709 - RNA, 16 nt, Human
auaccaggauuuuuuu

SEQ ID NO: 2856710 - RNA, 20 nt, Human
auacuauuuaguuuuuguaa

SEQ ID NO: 2856711 - RNA, 21 nt, Human
auacuauuuaaagccuccuca

SEQ ID NO: 2856712 - RNA, 22 nt, Human
auacuauuuaaagccuccucau

SEQ ID NO: 2856713 - RNA, 23 nt, Human
auacuauuuaguuuuuguaauuu

SEQ ID NO: 2856714 - RNA, 14 nt, Human
auacuacugaaaca

SEQ ID NO: 2856715 - RNA, 18 nt, Human
auacuacugaaacagauu

SEQ ID NO: 2856716 - RNA, 19 nt, Human
auacuacugaaacagauuu

SEQ ID NO: 2856717 - RNA, 21 nt, Human
auacuacugaaacagauuuca

SEQ ID NO: 2856718 - RNA, 17 nt, Human
auacuaccuugaaaaua

SEQ ID NO: 2856719 - RNA, 15 nt, Human
auacuaccuugaaaa

SEQ ID NO: 2856720 - RNA, 14 nt, Human
auacuaccuugaaa

SEQ ID NO: 2856721 - RNA, 12 nt, Human
auacuacaucuu

SEQ ID NO: 2856722 - RNA, 14 nt, Human
auacuacaucuuua

SEQ ID NO: 2856723 - RNA, 15 nt, Human
auacuacaucuuuaa

SEQ ID NO: 2856724 - RNA, 16 nt, Human
auacuacaucuuuaaa

SEQ ID NO: 2856725 - RNA, 13 nt, Human
uuaucaaaucagu

SEQ ID NO: 2856726 - RNA, 13 nt, Human
uuaucaaagcaua

SEQ ID NO: 2856727 - RNA, 15 nt, Human
uuaucaaagcauaga

SEQ ID NO: 2856728 - RNA, 12 nt, Human
auacucagccug

SEQ ID NO: 2856729 - RNA, 13 nt, Human
auacucagccugc

SEQ ID NO: 2856730 - RNA, 15 nt, Human
auacucagccugcug

SEQ ID NO: 2856731 - RNA, 16 nt, Human
auacucagccugcugc

SEQ ID NO: 2856732 - RNA, 17 nt, Human
auacucagccugcugcc

SEQ ID NO: 2856733 - RNA, 20 nt, Human
auacucagccugcugcccag

SEQ ID NO: 2856734 - RNA, 20 nt, Human
uuaucaaaucagucagugca

SEQ ID NO: 2856735 - RNA, 17 nt, Human
uuaucaaggacucuggu

SEQ ID NO: 2856736 - RNA, 18 nt, Human
uuaucaccuggcuuguuu

SEQ ID NO: 2856737 - RNA, 19 nt, Human
uuaucaccuggcuuguuua

SEQ ID NO: 2856738 - RNA, 16 nt, Human
uuaucacuuuuugaac

SEQ ID NO: 2856739 - RNA, 17 nt, Human
uuaucacuuuuugaacu

SEQ ID NO: 2856740 - RNA, 20 nt, Human
uuaucacuuuuugaacuaag

SEQ ID NO: 2856741 - RNA, 21 nt, Human
uuaucacuuuuugaacuaaga

SEQ ID NO: 2856742 - RNA, 22 nt, Human
uuaucacuuuuugaacuaagaa

SEQ ID NO: 2856743 - RNA, 20 nt, Human
uuaucaguaagaaaaagaag

SEQ ID NO: 2856744 - RNA, 14 nt, Human
uuaucagcaaaaaa

SEQ ID NO: 2856745 - RNA, 16 nt, Human
uuaucaacucaagaau

SEQ ID NO: 2856746 - RNA, 22 nt, Human
uuaucagcuacuuaagagaaau

SEQ ID NO: 2856747 - RNA, 14 nt, Human
uuaucagauacauc

SEQ ID NO: 2856748 - RNA, 17 nt, Human
uuaucagauacaucacu

SEQ ID NO: 2856749 - RNA, 20 nt, Human
uuaucagauacaucacugcu

SEQ ID NO: 2856750 - RNA, 16 nt, Human
uuaucauccacauugu

SEQ ID NO: 2856751 - RNA, 13 nt, Human
uuaucaguuucca

SEQ ID NO: 2856752 - RNA, 21 nt, Human
uuaucaguuuccagucucaaa

SEQ ID NO: 2856753 - RNA, 21 nt, Human
uuaucaguaagaaaaagaaga

SEQ ID NO: 2856754 - RNA, 15 nt, Human
uuaucagucaauauu

SEQ ID NO: 2856755 - RNA, 14 nt, Human
uuaucagucaauau

SEQ ID NO: 2856756 - RNA, 23 nt, Human
uuaucagucaauauuuuuagaua

SEQ ID NO: 2856757 - RNA, 18 nt, Human
uuaucauccacauuguuu

SEQ ID NO: 2856758 - RNA, 19 nt, Human
uuaucaugacauguuauau

SEQ ID NO: 2856759 - RNA, 20 nt, Human
uuaucauccacauuguuuua

SEQ ID NO: 2856760 - RNA, 12 nt, Human
uuaucaugaagc

SEQ ID NO: 2856761 - RNA, 13 nt, Human
uuaucaugaagcc

SEQ ID NO: 2856762 - RNA, 14 nt, Human
uuaucaugaagccu

SEQ ID NO: 2856763 - RNA, 16 nt, Human
uuaucaugaagccugu

SEQ ID NO: 2856764 - RNA, 22 nt, Human
uuaucaugaagccuguggauga

SEQ ID NO: 2856765 - RNA, 17 nt, Human
aguucgagaccagccug

SEQ ID NO: 2856766 - RNA, 14 nt, Human
aguucgagaccagc

SEQ ID NO: 2856767 - RNA, 19 nt, Human
aguuccuuuccuuuucuuu

SEQ ID NO: 2856768 - RNA, 16 nt, Human
aguuccuuugugugua

SEQ ID NO: 2856769 - RNA, 18 nt, Human
aguuccuuuguguguacu

SEQ ID NO: 2856770 - RNA, 20 nt, Human
aguuccuugaucuguauaua

SEQ ID NO: 2856771 - RNA, 20 nt, Human
aguuccuucagcuuccauuu

SEQ ID NO: 2856772 - RNA, 13 nt, Human
aguucccuuggcc

SEQ ID NO: 2856773 - RNA, 15 nt, Human
aguucccugaaacac

SEQ ID NO: 2856774 - RNA, 17 nt, Human
aguucccugaaacacga

SEQ ID NO: 2856775 - RNA, 20 nt, Human
aguucccugucucuugaaaa

SEQ ID NO: 2856776 - RNA, 21 nt, Human
aguucccugucucuugaaaaa

SEQ ID NO: 2856777 - RNA, 15 nt, Human
aguucccuacuuccu

SEQ ID NO: 2856778 - RNA, 14 nt, Human
aguucccucugcuc

SEQ ID NO: 2856779 - RNA, 17 nt, Human
aguucccucugcucagc

SEQ ID NO: 2856780 - RNA, 18 nt, Human
aguucccucugcucagcc

SEQ ID NO: 2856781 - RNA, 19 nt, Human
aguucccucugcucagcca

SEQ ID NO: 2856782 - RNA, 20 nt, Human
aguucccucugcucagccaa

SEQ ID NO: 2856783 - RNA, 22 nt, Human
aguucccucugcucagccaagc

SEQ ID NO: 2856784 - RNA, 17 nt, Human
aguucccuacuuccugu

SEQ ID NO: 2856785 - RNA, 18 nt, Human
aguucccuuggccucaga

SEQ ID NO: 2856786 - RNA, 17 nt, Human
aguucccuuggccucag

SEQ ID NO: 2856787 - RNA, 16 nt, Human
aguucccuuggccuca

SEQ ID NO: 2856788 - RNA, 15 nt, Human
aguucccuuggccuc

SEQ ID NO: 2856789 - RNA, 16 nt, Human
aguuccuguaugaaag

SEQ ID NO: 2856790 - RNA, 13 nt, Human
aguuccuaagaag

SEQ ID NO: 2856791 - RNA, 15 nt, Human
aguuccuaagaagcu

SEQ ID NO: 2856792 - RNA, 16 nt, Human
aguuccuaagaagcuu

SEQ ID NO: 2856793 - RNA, 20 nt, Human
aguuccuaagaagcuucuaa

SEQ ID NO: 2856794 - RNA, 22 nt, Human
aguuccuaagaagcuucuaaua

SEQ ID NO: 2856795 - RNA, 13 nt, Human
aguucaaacaaga

SEQ ID NO: 2856796 - RNA, 18 nt, Human
aguucaaacauaaggaaa

SEQ ID NO: 2856797 - RNA, 23 nt, Human
aguuauuuugcacccacugaaag

SEQ ID NO: 2856798 - RNA, 21 nt, Human
aguuauuuauuuauuggagau

SEQ ID NO: 2856799 - RNA, 18 nt, Human
aguuauuguacagcuguu

SEQ ID NO: 2856800 - RNA, 19 nt, Human
aguuauuguacagcuguuu

SEQ ID NO: 2856801 - RNA, 21 nt, Human
aguuauuguacagcuguuuaa

SEQ ID NO: 2856802 - RNA, 22 nt, Human
aguuauuguacagcuguuuaag

SEQ ID NO: 2856803 - RNA, 23 nt, Human
uguuguacauuuaugauuuaaua

SEQ ID NO: 2856804 - RNA, 13 nt, Human
uguuguacauuua

SEQ ID NO: 2856805 - RNA, 14 nt, Human
uguuguacauuuau

SEQ ID NO: 2856806 - RNA, 15 nt, Human
uguuguacauuuaug

SEQ ID NO: 2856807 - RNA, 16 nt, Human
uguuguacauuuauga

SEQ ID NO: 2856808 - RNA, 17 nt, Human
uguuguacauuuaugau

SEQ ID NO: 2856809 - RNA, 18 nt, Human
uguuguacauuuaugauu

SEQ ID NO: 2856810 - RNA, 20 nt, Human
uguuguacauuuaugauuua

SEQ ID NO: 2856811 - RNA, 22 nt, Human
uguuguacauuuaugauuuaau

SEQ ID NO: 2856812 - RNA, 13 nt, Human
uguuguaaugcug

SEQ ID NO: 2856813 - RNA, 15 nt, Human
uguuguaaugcugca

SEQ ID NO: 2856814 - RNA, 16 nt, Human
uguuguaaugcugcac

SEQ ID NO: 2856815 - RNA, 22 nt, Human
uguuguaaugcugcacuuccug

SEQ ID NO: 2856816 - RNA, 13 nt, Human
uguuguaauucuu

SEQ ID NO: 2856817 - RNA, 15 nt, Human
uguuguaauucuuca

SEQ ID NO: 2856818 - RNA, 18 nt, Human
uguuguaauucuucaguu

SEQ ID NO: 2856819 - RNA, 19 nt, Human
uguuguaauucuucaguug

SEQ ID NO: 2856820 - RNA, 13 nt, Human
uguuguaaauuag

SEQ ID NO: 2856821 - RNA, 15 nt, Human
uguuguaaauuagga

SEQ ID NO: 2856822 - RNA, 12 nt, Human
uguuguaacuua

SEQ ID NO: 2856823 - RNA, 13 nt, Human
uguuguaacuuau

SEQ ID NO: 2856824 - RNA, 19 nt, Human
uguuguaacuuauguagau

SEQ ID NO: 2856825 - RNA, 24 nt, Human
uguuguaacuuauguagauauuug

SEQ ID NO: 2856826 - RNA, 13 nt, Human
uguuguaaagcaa

SEQ ID NO: 2856827 - RNA, 13 nt, Human
uguuguauuaaca

SEQ ID NO: 2856828 - RNA, 14 nt, Human
uguuguauuaacaa

SEQ ID NO: 2856829 - RNA, 15 nt, Human
uguuguauuaacaaa

SEQ ID NO: 2856830 - RNA, 16 nt, Human
uguuguauuaacaaaa

SEQ ID NO: 2856831 - RNA, 18 nt, Human
uguugggauacugcaggg

SEQ ID NO: 2856832 - RNA, 18 nt, Human
uguugggaucgcauugca

SEQ ID NO: 2856833 - RNA, 14 nt, Human
uguuguaaaaagaa

SEQ ID NO: 2856834 - RNA, 15 nt, Human
uguuguaaaaagaaa

SEQ ID NO: 2856835 - RNA, 17 nt, Human
uguuguaaaaagaaaaa

SEQ ID NO: 2856836 - RNA, 15 nt, Human
aguucuaaauuuugu

SEQ ID NO: 2856837 - RNA, 18 nt, Human
aguucuaagacucaaaug

SEQ ID NO: 2856838 - RNA, 21 nt, Human
aguucgagaccagccuggcca

SEQ ID NO: 2856839 - RNA, 19 nt, Human
aguucgagaccagccuggc

SEQ ID NO: 2856840 - RNA, 18 nt, Human
aguucgagaccagccugg

SEQ ID NO: 2856841 - RNA, 19 nt, Human
aguucuaauaauuucuaau

SEQ ID NO: 2856842 - RNA, 17 nt, Human
aguucuaauaauuucua

SEQ ID NO: 2856843 - RNA, 18 nt, Human
aguucuaauaauuucuaa

SEQ ID NO: 2856844 - RNA, 15 nt, Human
aguucuaagauucug

SEQ ID NO: 2856845 - RNA, 16 nt, Human
aguucuaagauucuga

SEQ ID NO: 2856846 - RNA, 17 nt, Human
aguucuaagauucugau

SEQ ID NO: 2856847 - RNA, 16 nt, Human
aguucuaauaauuucu

SEQ ID NO: 2856848 - RNA, 23 nt, Human
aguucuaagacucaaauguucua

SEQ ID NO: 2856849 - RNA, 13 nt, Human
aguucuaagauuc

SEQ ID NO: 2856850 - RNA, 14 nt, Human
aguucuaagauucu

SEQ ID NO: 2856851 - RNA, 15 nt, Human
aguucuaagauucua

SEQ ID NO: 2856852 - RNA, 16 nt, Human
aguucuaagauucuaa

SEQ ID NO: 2856853 - RNA, 17 nt, Human
aguucuaagauucuaau

SEQ ID NO: 2856854 - RNA, 18 nt, Human
aguucuaagauucuaaug

SEQ ID NO: 2856855 - RNA, 19 nt, Human
aguucuaagauucuaauga

SEQ ID NO: 2856856 - RNA, 12 nt, Human
aguuaugaauca

SEQ ID NO: 2856857 - RNA, 12 nt, Human
aguuaugaugua

SEQ ID NO: 2856858 - RNA, 14 nt, Human
aguuaugauguaau

SEQ ID NO: 2856859 - RNA, 18 nt, Human
aguuaucuguucuuuuga

SEQ ID NO: 2856860 - RNA, 21 nt, Human
aguuaucuguucuuuugacuu

SEQ ID NO: 2856861 - RNA, 21 nt, Human
aguuauaaguagcaggccaag

SEQ ID NO: 2856862 - RNA, 15 nt, Human
aguuauagaugucua

SEQ ID NO: 2856863 - RNA, 17 nt, Human
aguuauagaugucuagg

SEQ ID NO: 2856864 - RNA, 19 nt, Human
aguuauagaugucuaggua

SEQ ID NO: 2856865 - RNA, 14 nt, Human
aguuaucuaagaau

SEQ ID NO: 2856866 - RNA, 17 nt, Human
aguuaucuaagaauaca

SEQ ID NO: 2856867 - RNA, 21 nt, Human
aguuaucuaagaauacagcuu

SEQ ID NO: 2856868 - RNA, 18 nt, Human
aguuauggccuauacacu

SEQ ID NO: 2856869 - RNA, 21 nt, Human
aguuauggccuauacacuauu

SEQ ID NO: 2856870 - RNA, 12 nt, Human
aguuauuggugg

SEQ ID NO: 2856871 - RNA, 19 nt, Human
aguuauugguggaaucuuu

SEQ ID NO: 2856872 - RNA, 12 nt, Human
aguuauuguaca

SEQ ID NO: 2856873 - RNA, 13 nt, Human
aguuauuguacag

SEQ ID NO: 2856874 - RNA, 14 nt, Human
aguuauguuaaaau

SEQ ID NO: 2856875 - RNA, 19 nt, Human
aguuauucauauucuguug

SEQ ID NO: 2856876 - RNA, 22 nt, Human
aguuauucauucugugaucauu

SEQ ID NO: 2856877 - RNA, 18 nt, Human
aguuauuccuugaucauu

SEQ ID NO: 2856878 - RNA, 19 nt, Human
aguuauugagauuguccuc

SEQ ID NO: 2856879 - RNA, 17 nt, Human
aguuaggaaauaaaacc

SEQ ID NO: 2856880 - RNA, 15 nt, Human
aguuaggaaauaaaa

SEQ ID NO: 2856881 - RNA, 16 nt, Human
aguuaggauagcauuu

SEQ ID NO: 2856882 - RNA, 18 nt, Human
aguuaggauagcauuuuu

SEQ ID NO: 2856883 - RNA, 16 nt, Human
aguuaggaugcucagu

SEQ ID NO: 2856884 - RNA, 22 nt, Human
aguuaggaaauaaaaccuuuca

SEQ ID NO: 2856885 - RNA, 15 nt, Human
aguuaggaaugagaa

SEQ ID NO: 2856886 - RNA, 16 nt, Human
aguuaggaaugagaag

SEQ ID NO: 2856887 - RNA, 21 nt, Human
aguuaggaaauaaaaccuuuc

SEQ ID NO: 2856888 - RNA, 20 nt, Human
aguuaggaaauaaaaccuuu

SEQ ID NO: 2856889 - RNA, 18 nt, Human
aguuaggaaauaaaaccu

SEQ ID NO: 2856890 - RNA, 17 nt, Human
aguuaguuuuuagguca

SEQ ID NO: 2856891 - RNA, 17 nt, Human
aguuaguuucuuuggga

SEQ ID NO: 2856892 - RNA, 16 nt, Human
aguuaguuucuuuggg

SEQ ID NO: 2856893 - RNA, 14 nt, Human
aguguuucaugggu

SEQ ID NO: 2856894 - RNA, 22 nt, Human
aguguuuauuuuucauauugug

SEQ ID NO: 2856895 - RNA, 13 nt, Human
aguguuucagcua

SEQ ID NO: 2856896 - RNA, 18 nt, Human
aguguuucagcuaaggga

SEQ ID NO: 2856897 - RNA, 20 nt, Human
aguguuucagcuaagggaag

SEQ ID NO: 2856898 - RNA, 21 nt, Human
aguguuucagcuaagggaaga

SEQ ID NO: 2856899 - RNA, 15 nt, Human
aguguuuauuuuuca

SEQ ID NO: 2856900 - RNA, 17 nt, Human
aguguuuauuuuucaua

SEQ ID NO: 2856901 - RNA, 19 nt, Human
aguguuuauuuuucauauu

SEQ ID NO: 2856902 - RNA, 21 nt, Human
aguguuuauuuuucauauugu

SEQ ID NO: 2856903 - RNA, 13 nt, Human
aguuacccacuga

SEQ ID NO: 2856904 - RNA, 13 nt, Human
aguguuucuauga

SEQ ID NO: 2856905 - RNA, 20 nt, Human
aguguuucuaugaguggaaa

SEQ ID NO: 2856906 - RNA, 17 nt, Human
aguuaccacacaucuau

SEQ ID NO: 2856907 - RNA, 13 nt, Human
aguguuucuguua

SEQ ID NO: 2856908 - RNA, 12 nt, Human
aguguuucuguu

SEQ ID NO: 2856909 - RNA, 20 nt, Human
aguggcagcugcuuuugucu

SEQ ID NO: 2856910 - RNA, 14 nt, Human
aguggcagcugcuu

SEQ ID NO: 2856911 - RNA, 13 nt, Human
aguggcagcugcu

SEQ ID NO: 2856912 - RNA, 12 nt, Human
aguggcagcugc

SEQ ID NO: 2856913 - RNA, 11 nt, Human
aguggcagcug

SEQ ID NO: 2856914 - RNA, 15 nt, Human
ugugcaacagacaag

SEQ ID NO: 2856915 - RNA, 19 nt, Human
ugugcaacgccgugggcug

SEQ ID NO: 2856916 - RNA, 15 nt, Human
ugugcaaauuaacag

SEQ ID NO: 2856917 - RNA, 14 nt, Human
ugugcaacagacaa

SEQ ID NO: 2856918 - RNA, 12 nt, Human
ugugcaaauccu

SEQ ID NO: 2856919 - RNA, 12 nt, Human
aguggggccugu

SEQ ID NO: 2856920 - RNA, 13 nt, Human
aguggggccugug

SEQ ID NO: 2856921 - RNA, 14 nt, Human
aguggggccugugg

SEQ ID NO: 2856922 - RNA, 15 nt, Human
aguggggccugugga

SEQ ID NO: 2856923 - RNA, 13 nt, Human
aguggggcucucu

SEQ ID NO: 2856924 - RNA, 15 nt, Human
aguggggcucucuga

SEQ ID NO: 2856925 - RNA, 20 nt, Human
aguggggcucucugaguccu

SEQ ID NO: 2856926 - RNA, 21 nt, Human
agugggguuaucucuguguua

SEQ ID NO: 2856927 - RNA, 21 nt, Human
agugggguuucgcagccugag

SEQ ID NO: 2856928 - RNA, 15 nt, Human
aguggguaaaauuag

SEQ ID NO: 2856929 - RNA, 19 nt, Human
aguggguaaaauuagaugc

SEQ ID NO: 2856930 - RNA, 20 nt, Human
agugggguuaucucuguguu

SEQ ID NO: 2856931 - RNA, 14 nt, Human
aguggugcagacag

SEQ ID NO: 2856932 - RNA, 23 nt, Human
aguggugccaucauugcugucug

SEQ ID NO: 2856933 - RNA, 21 nt, Human
aguggugcgaucucggcucag

SEQ ID NO: 2856934 - RNA, 19 nt, Human
agugguuguuaguuauaga

SEQ ID NO: 2856935 - RNA, 20 nt, Human
agugguuuccacaugcucug

SEQ ID NO: 2856936 - RNA, 22 nt, Human
agugguuuccacaugcucugag

SEQ ID NO: 2856937 - RNA, 22 nt, Human
agugguuugauggugacuuccu

SEQ ID NO: 2856938 - RNA, 17 nt, Human
aguguaagcuagaagaa

SEQ ID NO: 2856939 - RNA, 13 nt, Human
aguguaauaagac

SEQ ID NO: 2856940 - RNA, 15 nt, Human
aguguaauaauauga

SEQ ID NO: 2856941 - RNA, 19 nt, Human
aguguaaucccccaggaga

SEQ ID NO: 2856942 - RNA, 19 nt, Human
aguguaauguagcguguuu

SEQ ID NO: 2856943 - RNA, 13 nt, Human
aguguaaaauaag

SEQ ID NO: 2856944 - RNA, 11 nt, Human
aguguaaaaua

SEQ ID NO: 2856945 - RNA, 16 nt, Human
agugggugacaagagc

SEQ ID NO: 2856946 - RNA, 18 nt, Human
agugggugacaagagccu

SEQ ID NO: 2856947 - RNA, 19 nt, Human
agugggugacaagagccug

SEQ ID NO: 2856948 - RNA, 21 nt, Human
agugggugacaagagccugau

SEQ ID NO: 2856949 - RNA, 18 nt, Human
aguggguuauucuggagu

SEQ ID NO: 2856950 - RNA, 19 nt, Human
aguggguuauucuggaguu

SEQ ID NO: 2856951 - RNA, 15 nt, Human
aguggguuauucugg

SEQ ID NO: 2856952 - RNA, 16 nt, Human
aguggguuauucugga

SEQ ID NO: 2856953 - RNA, 22 nt, Human
agugggugagaugcuggagaag

SEQ ID NO: 2856954 - RNA, 18 nt, Human
agugggugagaugcugga

SEQ ID NO: 2856955 - RNA, 19 nt, Human
agugggugagaugcuggag

SEQ ID NO: 2856956 - RNA, 20 nt, Human
aguggucuuuguaagagugu

SEQ ID NO: 2856957 - RNA, 21 nt, Human
aguggucuuuguaagagugua

SEQ ID NO: 2856958 - RNA, 22 nt, Human
aguggucuuuguaagaguguag

SEQ ID NO: 2856959 - RNA, 24 nt, Human
aguggucuuuguaagaguguagaa

SEQ ID NO: 2856960 - RNA, 13 nt, Human
aguggucuuugua

SEQ ID NO: 2856961 - RNA, 14 nt, Human
aguggucuuuguaa

SEQ ID NO: 2856962 - RNA, 15 nt, Human
aguggucuuuguaag

SEQ ID NO: 2856963 - RNA, 16 nt, Human
aguggucuuuguaaga

SEQ ID NO: 2856964 - RNA, 17 nt, Human
aguggucuuuguaagag

SEQ ID NO: 2856965 - RNA, 18 nt, Human
aguggucuuuguaagagu

SEQ ID NO: 2856966 - RNA, 19 nt, Human
aguggucuuuguaagagug

SEQ ID NO: 2856967 - RNA, 14 nt, Human
aguguacauagugu

SEQ ID NO: 2856968 - RNA, 16 nt, Human
aguguacauaguguaa

SEQ ID NO: 2856969 - RNA, 15 nt, Human
aguguagccaggucc

SEQ ID NO: 2856970 - RNA, 16 nt, Human
aguguagccagguccc

SEQ ID NO: 2856971 - RNA, 17 nt, Human
aguguagccaggucccc

SEQ ID NO: 2856972 - RNA, 23 nt, Human
aguguagccaggucccccugcag

SEQ ID NO: 2856973 - RNA, 13 nt, Human
aguguagccuugc

SEQ ID NO: 2856974 - RNA, 22 nt, Human
aguguagaagcauuccuucuuu

SEQ ID NO: 2856975 - RNA, 19 nt, Human
aguguaguuuacagaaaaa

SEQ ID NO: 2856976 - RNA, 17 nt, Human
aguguaguuuacagaaa

SEQ ID NO: 2856977 - RNA, 16 nt, Human
aguguaguuuacagaa

SEQ ID NO: 2856978 - RNA, 15 nt, Human
aguguaguuaauuua

SEQ ID NO: 2856979 - RNA, 16 nt, Human
aguguaguuaauuuau

SEQ ID NO: 2856980 - RNA, 17 nt, Human
aguguaguuaauuuauc

SEQ ID NO: 2856981 - RNA, 18 nt, Human
aguguagccuugcccgga

SEQ ID NO: 2856982 - RNA, 17 nt, Human
aguguagccuugcccgg

SEQ ID NO: 2856983 - RNA, 15 nt, Human
aguguagccuugccc

SEQ ID NO: 2856984 - RNA, 14 nt, Human
uguuauuuucagua

SEQ ID NO: 2856985 - RNA, 18 nt, Human
uguuauuuucaaguagcu

SEQ ID NO: 2856986 - RNA, 18 nt, Human
uguuauuuucaguauuuu

SEQ ID NO: 2856987 - RNA, 15 nt, Human
uguuauuuucaguga

SEQ ID NO: 2856988 - RNA, 16 nt, Human
uguuauuuucagugau

SEQ ID NO: 2856989 - RNA, 12 nt, Human
uguuauguauuu

SEQ ID NO: 2856990 - RNA, 13 nt, Human
uguuauguauuuc

SEQ ID NO: 2856991 - RNA, 14 nt, Human
uguuauguauuucc

SEQ ID NO: 2856992 - RNA, 21 nt, Human
uguuaugucuguuuaagaaaa

SEQ ID NO: 2856993 - RNA, 12 nt, Human
uguuaugcuauu

SEQ ID NO: 2856994 - RNA, 20 nt, Human
uguuauguacuaguguucug

SEQ ID NO: 2856995 - RNA, 13 nt, Human
uguuauguacugu

SEQ ID NO: 2856996 - RNA, 14 nt, Human
uguuauguacugua

SEQ ID NO: 2856997 - RNA, 15 nt, Human
uguuauguacuguac

SEQ ID NO: 2856998 - RNA, 16 nt, Human
uguuauguacuguacu

SEQ ID NO: 2856999 - RNA, 20 nt, Human
uguucccauguagcccccug

SEQ ID NO: 2857000 - RNA, 16 nt, Human
uguucccauucuugca

SEQ ID NO: 2857001 - RNA, 17 nt, Human
uguuauuuucuucuaag

SEQ ID NO: 2857002 - RNA, 17 nt, Human
uguuauuuuucaaggaa

SEQ ID NO: 2857003 - RNA, 18 nt, Human
uguuauuuuucaaggaag

SEQ ID NO: 2857004 - RNA, 19 nt, Human
uguuauuuuucaaggaagg

SEQ ID NO: 2857005 - RNA, 13 nt, Human
uguucaaacaaua

SEQ ID NO: 2857006 - RNA, 19 nt, Human
uguucaaacaauaucauau

SEQ ID NO: 2857007 - RNA, 20 nt, Human
uguucaaacaauaucauauc

SEQ ID NO: 2857008 - RNA, 22 nt, Human
uguucaaacaauaucauaucau

SEQ ID NO: 2857009 - RNA, 18 nt, Human
uguucaaagccacauuau

SEQ ID NO: 2857010 - RNA, 20 nt, Human
uguucaaagccacauuauuu

SEQ ID NO: 2857011 - RNA, 22 nt, Human
uguucaaagccacauuauuucu

SEQ ID NO: 2857012 - RNA, 13 nt, Human
uguucugggacac

SEQ ID NO: 2857013 - RNA, 12 nt, Human
uguucugggaca

SEQ ID NO: 2857014 - RNA, 22 nt, Human
uguuccccacugacagccuccc

SEQ ID NO: 2857015 - RNA, 13 nt, Human
uguuccccaucug

SEQ ID NO: 2857016 - RNA, 15 nt, Human
uguucugggacacag

SEQ ID NO: 2857017 - RNA, 14 nt, Human
uguucugggacaca

SEQ ID NO: 2857018 - RNA, 22 nt, Human
uguucuuaccuguaugucucca

SEQ ID NO: 2857019 - RNA, 17 nt, Human
uguucuuaccuguaugu

SEQ ID NO: 2857020 - RNA, 13 nt, Human
uguucuuacacau

SEQ ID NO: 2857021 - RNA, 14 nt, Human
uguucuuacacaua

SEQ ID NO: 2857022 - RNA, 16 nt, Human
uguucuuacacauaca

SEQ ID NO: 2857023 - RNA, 22 nt, Human
uguucuuacacauacaguuuua

SEQ ID NO: 2857024 - RNA, 18 nt, Human
uguucuugcugcuagaac

SEQ ID NO: 2857025 - RNA, 19 nt, Human
uguucuugcugcuagaacu

SEQ ID NO: 2857026 - RNA, 20 nt, Human
uguucuugcugcuagaacuu

SEQ ID NO: 2857027 - RNA, 21 nt, Human
uguucuugcugcuagaacuuu

SEQ ID NO: 2857028 - RNA, 22 nt, Human
uguucuugcugcuagaacuuuu

SEQ ID NO: 2857029 - RNA, 23 nt, Human
uguucuugcugcuagaacuuuuu

SEQ ID NO: 2857030 - RNA, 15 nt, Human
uuaaaccugucucca

SEQ ID NO: 2857031 - RNA, 19 nt, Human
uuaaaccugucuccacugu

SEQ ID NO: 2857032 - RNA, 20 nt, Human
uuaaaccugucuccacugug

SEQ ID NO: 2857033 - RNA, 21 nt, Human
uuaaaccugucuccacugugc

SEQ ID NO: 2857034 - RNA, 21 nt, Human
uuaaaccuguuuuuuuuucau

SEQ ID NO: 2857035 - RNA, 22 nt, Human
uuaaaccuguuuuuuuuucauu

SEQ ID NO: 2857036 - RNA, 19 nt, Human
uuaaaaauugucuucaugu

SEQ ID NO: 2857037 - RNA, 20 nt, Human
uuaaaaauugucuucaugua

SEQ ID NO: 2857038 - RNA, 18 nt, Human
uuaaaauaggggauauuu

SEQ ID NO: 2857039 - RNA, 22 nt, Human
uuaaaauaggggauauuuaagg

SEQ ID NO: 2857040 - RNA, 23 nt, Human
uuaaaauaggggauauuuaaggu

SEQ ID NO: 2857041 - RNA, 12 nt, Human
uuaaaacaaaac

SEQ ID NO: 2857042 - RNA, 18 nt, Human
uuaaaacaaaacaaaaca

SEQ ID NO: 2857043 - RNA, 16 nt, Human
uuaaaauauuccugca

SEQ ID NO: 2857044 - RNA, 19 nt, Human
uuaaaauauuccugcauuu

SEQ ID NO: 2857045 - RNA, 17 nt, Human
uuaaaauauuuauuuau

SEQ ID NO: 2857046 - RNA, 16 nt, Human
uuaaauuauguuuuua

SEQ ID NO: 2857047 - RNA, 21 nt, Human
uuaaauuauguuuuuauuaag

SEQ ID NO: 2857048 - RNA, 12 nt, Human
uuaaauaaacuu

SEQ ID NO: 2857049 - RNA, 13 nt, Human
uuaaauaaacuuu

SEQ ID NO: 2857050 - RNA, 14 nt, Human
uuaaauaaacuuuu

SEQ ID NO: 2857051 - RNA, 15 nt, Human
uuaaauaaacuuuuu

SEQ ID NO: 2857052 - RNA, 19 nt, Human
uuaaauaaacuuuuuuuca

SEQ ID NO: 2857053 - RNA, 20 nt, Human
uuaaauaaacuuuuuuucaa

SEQ ID NO: 2857054 - RNA, 21 nt, Human
uuaaauaaacuuuuuuucaau

SEQ ID NO: 2857055 - RNA, 22 nt, Human
uuaaauaaacuuuuuuucaaug

SEQ ID NO: 2857056 - RNA, 23 nt, Human
uuaaauaaacuuuuuuucaaugu

SEQ ID NO: 2857057 - RNA, 13 nt, Human
uuaaauaaaauca

SEQ ID NO: 2857058 - RNA, 15 nt, Human
uuaaauaaaaucaau

SEQ ID NO: 2857059 - RNA, 13 nt, Human
uuaaauaaaagcu

SEQ ID NO: 2857060 - RNA, 13 nt, Human
aguugccaagaca

SEQ ID NO: 2857061 - RNA, 14 nt, Human
aguugccaagacaa

SEQ ID NO: 2857062 - RNA, 16 nt, Human
aguugccaagacaaau

SEQ ID NO: 2857063 - RNA, 17 nt, Human
aguugccaagacaaauc

SEQ ID NO: 2857064 - RNA, 18 nt, Human
aguugccaagacaaauca

SEQ ID NO: 2857065 - RNA, 19 nt, Human
aguugccaagacaaaucaa

SEQ ID NO: 2857066 - RNA, 14 nt, Human
aguugccaccaccu

SEQ ID NO: 2857067 - RNA, 19 nt, Human
aguugccaccaccucugug

SEQ ID NO: 2857068 - RNA, 20 nt, Human
aguugccaccaccucugugg

SEQ ID NO: 2857069 - RNA, 21 nt, Human
aguugccaccaccucuguggc

SEQ ID NO: 2857070 - RNA, 22 nt, Human
aguugccaccaccucuguggca

SEQ ID NO: 2857071 - RNA, 16 nt, Human
uuaaaaaaauuuaagu

SEQ ID NO: 2857072 - RNA, 20 nt, Human
aguugcauggcaucaccucc

SEQ ID NO: 2857073 - RNA, 21 nt, Human
aguugcauggcaucaccucca

SEQ ID NO: 2857074 - RNA, 14 nt, Human
aguugauugagaag

SEQ ID NO: 2857075 - RNA, 20 nt, Human
uuaaaaauauggaacuucua

SEQ ID NO: 2857076 - RNA, 22 nt, Human
uuaaaaauauggaacuucuaau

SEQ ID NO: 2857077 - RNA, 17 nt, Human
uuaaaacaacacucaca

SEQ ID NO: 2857078 - RNA, 19 nt, Human
uuaaaaauguaaauauucu

SEQ ID NO: 2857079 - RNA, 20 nt, Human
uuaaaaauucuugaaagaau

SEQ ID NO: 2857080 - RNA, 20 nt, Human
uuaaaaauguuuuuucaugu

SEQ ID NO: 2857081 - RNA, 24 nt, Human
uuaaaaauguuuuuucauguguuu

SEQ ID NO: 2857082 - RNA, 13 nt, Human
uuaaaaauguaaa

SEQ ID NO: 2857083 - RNA, 14 nt, Human
uuaaaaauguaaau

SEQ ID NO: 2857084 - RNA, 16 nt, Human
uuaaaaauguaaauau

SEQ ID NO: 2857085 - RNA, 17 nt, Human
uuaaaaauguaaauauu

SEQ ID NO: 2857086 - RNA, 16 nt, Human
uuaaaaaguuguucaa

SEQ ID NO: 2857087 - RNA, 17 nt, Human
uuaaaaaguuguucaac

SEQ ID NO: 2857088 - RNA, 11 nt, Human
uuaaaaauaaa

SEQ ID NO: 2857089 - RNA, 12 nt, Human
uuaaaaauacau

SEQ ID NO: 2857090 - RNA, 14 nt, Human
uuaaaaauacauau

SEQ ID NO: 2857091 - RNA, 20 nt, Human
uuaaaaaguuaaucuucaug

SEQ ID NO: 2857092 - RNA, 16 nt, Human
uuaaaaauaaauccca

SEQ ID NO: 2857093 - RNA, 19 nt, Human
aguuugggaucccugucuu

SEQ ID NO: 2857094 - RNA, 20 nt, Human
aguuugggaucccugucuuu

SEQ ID NO: 2857095 - RNA, 21 nt, Human
aguuugggaucccugucuuuc

SEQ ID NO: 2857096 - RNA, 23 nt, Human
aguuugggaucccugucuuuccu

SEQ ID NO: 2857097 - RNA, 12 nt, Human
aguuugggcuuc

SEQ ID NO: 2857098 - RNA, 14 nt, Human
aguuugggcuucag

SEQ ID NO: 2857099 - RNA, 15 nt, Human
aguuugggcuucagc

SEQ ID NO: 2857100 - RNA, 17 nt, Human
aguuugggcuucagccu

SEQ ID NO: 2857101 - RNA, 20 nt, Human
aguuuggggcaagucaugua

SEQ ID NO: 2857102 - RNA, 21 nt, Human
aguuuggggcaagucauguaa

SEQ ID NO: 2857103 - RNA, 22 nt, Human
aguuuggggcaagucauguaaa

SEQ ID NO: 2857104 - RNA, 20 nt, Human
aguuuggggguuuugcuguu

SEQ ID NO: 2857105 - RNA, 14 nt, Human
aguuuguaaauguu

SEQ ID NO: 2857106 - RNA, 15 nt, Human
aguuuguaaauguua

SEQ ID NO: 2857107 - RNA, 17 nt, Human
aguuuguaaauguuauu

SEQ ID NO: 2857108 - RNA, 20 nt, Human
aguuuguaaauguuauuucu

SEQ ID NO: 2857109 - RNA, 22 nt, Human
aguuuguaaauguuauuucugc

SEQ ID NO: 2857110 - RNA, 23 nt, Human
aguuuguaaauguuauuucugca

SEQ ID NO: 2857111 - RNA, 15 nt, Human
aguuugguauuugcg

SEQ ID NO: 2857112 - RNA, 14 nt, Human
aguuuggucuggac

SEQ ID NO: 2857113 - RNA, 15 nt, Human
aguuuggucuggacu

SEQ ID NO: 2857114 - RNA, 16 nt, Human
aguuuggucuggacug

SEQ ID NO: 2857115 - RNA, 13 nt, Human
aguuugucuauuu

SEQ ID NO: 2857116 - RNA, 14 nt, Human
aguuugucuauuuu

SEQ ID NO: 2857117 - RNA, 15 nt, Human
aguuugucuauuuua

SEQ ID NO: 2857118 - RNA, 16 nt, Human
aguuugucuauuuuaa

SEQ ID NO: 2857119 - RNA, 19 nt, Human
aguuugucuauuuuaaaau

SEQ ID NO: 2857120 - RNA, 21 nt, Human
aguuugucuauuuuaaaauaa

SEQ ID NO: 2857121 - RNA, 14 nt, Human
aguuuuaugcucuu

SEQ ID NO: 2857122 - RNA, 15 nt, Human
aguuuuaugcucuuu

SEQ ID NO: 2857123 - RNA, 21 nt, Human
aguuuuaugcucuuuuuuacu

SEQ ID NO: 2857124 - RNA, 23 nt, Human
aguuuuaugcucuuuuuuacuca

SEQ ID NO: 2857125 - RNA, 24 nt, Human
aguuuuaugcucuuuuuuacucau

SEQ ID NO: 2857126 - RNA, 23 nt, Human
aguuuguauuuuaauuaugggaa

SEQ ID NO: 2857127 - RNA, 14 nt, Human
aguuuguauaacuu

SEQ ID NO: 2857128 - RNA, 15 nt, Human
aguuuguccauuugu

SEQ ID NO: 2857129 - RNA, 16 nt, Human
aguuuguccauuugua

SEQ ID NO: 2857130 - RNA, 18 nt, Human
aguuugucacaugaaaca

SEQ ID NO: 2857131 - RNA, 16 nt, Human
aguuuguccuguagag

SEQ ID NO: 2857132 - RNA, 15 nt, Human
aguuuguacaugcau

SEQ ID NO: 2857133 - RNA, 17 nt, Human
aguuuguauaacuucuu

SEQ ID NO: 2857134 - RNA, 21 nt, Human
aguuuguauagaguucauccc

SEQ ID NO: 2857135 - RNA, 18 nt, Human
aguuuguacaugcauuca

SEQ ID NO: 2857136 - RNA, 14 nt, Human
aguuuguagguaaa

SEQ ID NO: 2857137 - RNA, 17 nt, Human
aguuuguagguaaaaug

SEQ ID NO: 2857138 - RNA, 19 nt, Human
aguuuguagguaaaaugua

SEQ ID NO: 2857139 - RNA, 20 nt, Human
aguuuguagguaaaauguau

SEQ ID NO: 2857140 - RNA, 21 nt, Human
aguuuguagguaaaauguauu

SEQ ID NO: 2857141 - RNA, 22 nt, Human
aguuuguagguaaaauguauuu

SEQ ID NO: 2857142 - RNA, 17 nt, Human
aguuuguaguuguuuua

SEQ ID NO: 2857143 - RNA, 22 nt, Human
aguuuucacucuuauugcccac

SEQ ID NO: 2857144 - RNA, 16 nt, Human
aguuuucagaaccucu

SEQ ID NO: 2857145 - RNA, 16 nt, Human
aguuuuauuuuauguu

SEQ ID NO: 2857146 - RNA, 19 nt, Human
aguuuuauuuuauguuuag

SEQ ID NO: 2857147 - RNA, 22 nt, Human
aguuuucagaaccucuucccca

SEQ ID NO: 2857148 - RNA, 21 nt, Human
aguuuucagaaccucuucccc

SEQ ID NO: 2857149 - RNA, 20 nt, Human
aguuuucagaaccucuuccc

SEQ ID NO: 2857150 - RNA, 18 nt, Human
aguuuucagaaccucuuc

SEQ ID NO: 2857151 - RNA, 17 nt, Human
aguuuucagaaccucuu

SEQ ID NO: 2857152 - RNA, 21 nt, Human
aguuuucauuuagaaaauaga

SEQ ID NO: 2857153 - RNA, 20 nt, Human
aguuuucccuugaggaaaca

SEQ ID NO: 2857154 - RNA, 18 nt, Human
aguuuucccuugaggaaa

SEQ ID NO: 2857155 - RNA, 12 nt, Human
uuaaauucugag

SEQ ID NO: 2857156 - RNA, 14 nt, Human
uuaaauucugagac

SEQ ID NO: 2857157 - RNA, 18 nt, Human
uuaaauucugagacaugu

SEQ ID NO: 2857158 - RNA, 15 nt, Human
aguuuauuuuaagac

SEQ ID NO: 2857159 - RNA, 16 nt, Human
aguuuauuuuuaaaga

SEQ ID NO: 2857160 - RNA, 20 nt, Human
aguuuauuuuuaaagauaga

SEQ ID NO: 2857161 - RNA, 19 nt, Human
aguuucaaacuuacuauuu

SEQ ID NO: 2857162 - RNA, 21 nt, Human
aguuucaaacuuacuauuuug

SEQ ID NO: 2857163 - RNA, 16 nt, Human
aguuucaaugugauuc

SEQ ID NO: 2857164 - RNA, 22 nt, Human
aguuucaaugugauucuaaugu

SEQ ID NO: 2857165 - RNA, 12 nt, Human
aguuucaaugug

SEQ ID NO: 2857166 - RNA, 14 nt, Human
aguuucaaugugau

SEQ ID NO: 2857167 - RNA, 15 nt, Human
aguuucaaugugauu

SEQ ID NO: 2857168 - RNA, 16 nt, Human
aguuucucagcuccca

SEQ ID NO: 2857169 - RNA, 15 nt, Human
aguuuccuuggcugg

SEQ ID NO: 2857170 - RNA, 17 nt, Human
aguuuccuuggcuggug

SEQ ID NO: 2857171 - RNA, 18 nt, Human
aguuuccuuggcuggugc

SEQ ID NO: 2857172 - RNA, 15 nt, Human
aguuucucagcuccc

SEQ ID NO: 2857173 - RNA, 20 nt, Human
aguuucguuucuguuuuuua

SEQ ID NO: 2857174 - RNA, 19 nt, Human
aguuuccuuggcuggugca

SEQ ID NO: 2857175 - RNA, 19 nt, Human
aguuuccuuuucugucucu

SEQ ID NO: 2857176 - RNA, 23 nt, Human
aguuuccuuuucugucucucucu

SEQ ID NO: 2857177 - RNA, 20 nt, Human
aguucucuugguguuaaaac

SEQ ID NO: 2857178 - RNA, 13 nt, Human
aguucuguguuua

SEQ ID NO: 2857179 - RNA, 15 nt, Human
aguucuguguuuaau

SEQ ID NO: 2857180 - RNA, 18 nt, Human
aguucuguguuuaauuuc

SEQ ID NO: 2857181 - RNA, 19 nt, Human
aguucuguguuuaauuucu

SEQ ID NO: 2857182 - RNA, 21 nt, Human
aguucuguagagccuucugau

SEQ ID NO: 2857183 - RNA, 23 nt, Human
aguucuuggucccuccagaacca

SEQ ID NO: 2857184 - RNA, 12 nt, Human
aguucuugugcc

SEQ ID NO: 2857185 - RNA, 13 nt, Human
aguucuugugcca

SEQ ID NO: 2857186 - RNA, 14 nt, Human
aguucuugugccau

SEQ ID NO: 2857187 - RNA, 13 nt, Human
aguucuucuccaa

SEQ ID NO: 2857188 - RNA, 15 nt, Human
aguugauauagaaca

SEQ ID NO: 2857189 - RNA, 17 nt, Human
aguugauauagaacagu

SEQ ID NO: 2857190 - RNA, 19 nt, Human
aguugauauagaacagugc

SEQ ID NO: 2857191 - RNA, 16 nt, Human
aguugauguugcauuu

SEQ ID NO: 2857192 - RNA, 14 nt, Human
aguugauguaucca

SEQ ID NO: 2857193 - RNA, 15 nt, Human
aguugauguugcauu

SEQ ID NO: 2857194 - RNA, 21 nt, Human
aguugauauguuuuauuucau

SEQ ID NO: 2857195 - RNA, 22 nt, Human
aguugauauguuuuauuucauu

SEQ ID NO: 2857196 - RNA, 15 nt, Human
aguugcaauagaaca

SEQ ID NO: 2857197 - RNA, 17 nt, Human
aguugcaauagaacaga

SEQ ID NO: 2857198 - RNA, 18 nt, Human
uguuuuacugugaaacug

SEQ ID NO: 2857199 - RNA, 15 nt, Human
uguuuuacugugaaa

SEQ ID NO: 2857200 - RNA, 13 nt, Human
uguuuuauaaaau

SEQ ID NO: 2857201 - RNA, 19 nt, Human
uguuuuauaaaauuuugcu

SEQ ID NO: 2857202 - RNA, 15 nt, Human
uguuuuauaaguuca

SEQ ID NO: 2857203 - RNA, 22 nt, Human
uguuuuauaaguucacaaaaug

SEQ ID NO: 2857204 - RNA, 23 nt, Human
uguuuuagguuaaaaaaaggcau

SEQ ID NO: 2857205 - RNA, 23 nt, Human
uguuuuauuuuuuauuguuuuca

SEQ ID NO: 2857206 - RNA, 18 nt, Human
uguuuuauuuuuuauugu

SEQ ID NO: 2857207 - RNA, 16 nt, Human
uguuuuccgugaaaac

SEQ ID NO: 2857208 - RNA, 19 nt, Human
uguuuuccgugaaaacgga

SEQ ID NO: 2857209 - RNA, 18 nt, Human
uguuuuagaguaagaaau

SEQ ID NO: 2857210 - RNA, 16 nt, Human
uguuugccucugccuc

SEQ ID NO: 2857211 - RNA, 14 nt, Human
uguuugccucugcc

SEQ ID NO: 2857212 - RNA, 13 nt, Human
uguugucauugua

SEQ ID NO: 2857213 - RNA, 19 nt, Human
uguugucauuguaaacaaa

SEQ ID NO: 2857214 - RNA, 21 nt, Human
uguugucauuguaaacaaacu

SEQ ID NO: 2857215 - RNA, 22 nt, Human
uguuugcauaaacauucuuuua

SEQ ID NO: 2857216 - RNA, 17 nt, Human
uguuguccuuuugucuu

SEQ ID NO: 2857217 - RNA, 22 nt, Human
uguuugcaugugaaaaucaaau

SEQ ID NO: 2857218 - RNA, 15 nt, Human
uguuugccauacuuu

SEQ ID NO: 2857219 - RNA, 22 nt, Human
uguuugccauacuuugucugaa

SEQ ID NO: 2857220 - RNA, 12 nt, Human
uguuuggagagc

SEQ ID NO: 2857221 - RNA, 15 nt, Human
uguuuggaggagcaa

SEQ ID NO: 2857222 - RNA, 17 nt, Human
uguuuggauguaauuua

SEQ ID NO: 2857223 - RNA, 19 nt, Human
uguuuggauguaauuuagg

SEQ ID NO: 2857224 - RNA, 21 nt, Human
uguuuggauguaauuuagggu

SEQ ID NO: 2857225 - RNA, 22 nt, Human
uguuuggauuuuuaauuaaaaa

SEQ ID NO: 2857226 - RNA, 15 nt, Human
uguuuggcaaggaaa

SEQ ID NO: 2857227 - RNA, 16 nt, Human
uguuuggcaaggaaag

SEQ ID NO: 2857228 - RNA, 17 nt, Human
uguuuggcaaggaaagg

SEQ ID NO: 2857229 - RNA, 13 nt, Human
uguuuggagacag

SEQ ID NO: 2857230 - RNA, 15 nt, Human
uguuuggggaugaga

SEQ ID NO: 2857231 - RNA, 13 nt, Human
uguuuuacaaugu

SEQ ID NO: 2857232 - RNA, 15 nt, Human
uguuuuacacuguac

SEQ ID NO: 2857233 - RNA, 17 nt, Human
ugccucagccuccugag

SEQ ID NO: 2857234 - RNA, 15 nt, Human
ugccucagccuccug

SEQ ID NO: 2857235 - RNA, 18 nt, Human
ugccucagccucccgagu

SEQ ID NO: 2857236 - RNA, 16 nt, Human
ugccucagccucccga

SEQ ID NO: 2857237 - RNA, 17 nt, Human
ugccucagccucccgag

SEQ ID NO: 2857238 - RNA, 15 nt, Human
ugccucagccucccg

SEQ ID NO: 2857239 - RNA, 17 nt, Human
ugccucccauucugacc

SEQ ID NO: 2857240 - RNA, 14 nt, Human
ugccucagccuccg

SEQ ID NO: 2857241 - RNA, 18 nt, Human
ugccuccccggcucgagc

SEQ ID NO: 2857242 - RNA, 15 nt, Human
ugccucaccgcuucc

SEQ ID NO: 2857243 - RNA, 16 nt, Human
ugccucaccgcuuccc

SEQ ID NO: 2857244 - RNA, 22 nt, Human
ugccucaccgcuucccuccugc

SEQ ID NO: 2857245 - RNA, 14 nt, Human
ugccgccucccagc

SEQ ID NO: 2857246 - RNA, 13 nt, Human
ugccgccucccag

SEQ ID NO: 2857247 - RNA, 19 nt, Human
ugccgcccccuccugaacc

SEQ ID NO: 2857248 - RNA, 18 nt, Human
ugccgcccccuccugaac

SEQ ID NO: 2857249 - RNA, 17 nt, Human
ugccgcccccuccugaa

SEQ ID NO: 2857250 - RNA, 16 nt, Human
ugccgccccacccaga

SEQ ID NO: 2857251 - RNA, 14 nt, Human
ugccgccccaccca

SEQ ID NO: 2857252 - RNA, 15 nt, Human
ugccgccccacccag

SEQ ID NO: 2857253 - RNA, 14 nt, Human
ugcccuucacccca

SEQ ID NO: 2857254 - RNA, 13 nt, Human
ugcccuuaggcca

SEQ ID NO: 2857255 - RNA, 15 nt, Human
ugcccuucaccccag

SEQ ID NO: 2857256 - RNA, 20 nt, Human
ugcccuucaccccaguggcc

SEQ ID NO: 2857257 - RNA, 16 nt, Human
agcucuucuccaggcu

SEQ ID NO: 2857258 - RNA, 15 nt, Human
agcucuucuccaggc

SEQ ID NO: 2857259 - RNA, 13 nt, Human
ugcccugugggac

SEQ ID NO: 2857260 - RNA, 14 nt, Human
ugcccugugggacc

SEQ ID NO: 2857261 - RNA, 18 nt, Human
ugcccugugggaccccag

SEQ ID NO: 2857262 - RNA, 19 nt, Human
ugcccugugggaccccagg

SEQ ID NO: 2857263 - RNA, 22 nt, Human
ugcccugugggaccccaggccc

SEQ ID NO: 2857264 - RNA, 23 nt, Human
ugcccugugggaccccaggccca

SEQ ID NO: 2857265 - RNA, 10 nt, Human
agcugccugu

SEQ ID NO: 2857266 - RNA, 14 nt, Human
agcugccuguaguu

SEQ ID NO: 2857267 - RNA, 18 nt, Human
agcugccuguaguuagga

SEQ ID NO: 2857268 - RNA, 15 nt, Human
agcugccuguaguua

SEQ ID NO: 2857269 - RNA, 23 nt, Human
agcugccuguaguuaggaaauaa

SEQ ID NO: 2857270 - RNA, 22 nt, Human
agcugccuguaguuaggaaaua

SEQ ID NO: 2857271 - RNA, 20 nt, Human
agcugccuguaguuaggaaa

SEQ ID NO: 2857272 - RNA, 19 nt, Human
agcugccuguaguuaggaa

SEQ ID NO: 2857273 - RNA, 22 nt, Human
agcugcuuuugucuaugggacu

SEQ ID NO: 2857274 - RNA, 13 nt, Human
agcugccuguuca

SEQ ID NO: 2857275 - RNA, 24 nt, Human
agcugcuuuugucuaugggacuca

SEQ ID NO: 2857276 - RNA, 23 nt, Human
agcugcuuuugucuaugggacuc

SEQ ID NO: 2857277 - RNA, 15 nt, Human
agcugggacuacagg

SEQ ID NO: 2857278 - RNA, 14 nt, Human
agcuggagccuggu

SEQ ID NO: 2857279 - RNA, 15 nt, Human
agcuggagccuggug

SEQ ID NO: 2857280 - RNA, 17 nt, Human
agcuggagccuggugcc

SEQ ID NO: 2857281 - RNA, 19 nt, Human
agcuggagccuggugcccu

SEQ ID NO: 2857282 - RNA, 11 nt, Human
ugccucugccu

SEQ ID NO: 2857283 - RNA, 12 nt, Human
ugccucugccac

SEQ ID NO: 2857284 - RNA, 16 nt, Human
ugccucugccacacuc

SEQ ID NO: 2857285 - RNA, 18 nt, Human
ugccucugauaugggacu

SEQ ID NO: 2857286 - RNA, 19 nt, Human
ugccucugauaugggacug

SEQ ID NO: 2857287 - RNA, 20 nt, Human
ugccucugauaugggacuga

SEQ ID NO: 2857288 - RNA, 21 nt, Human
ugccucugauaugggacugag

SEQ ID NO: 2857289 - RNA, 16 nt, Human
ugccucugacacacag

SEQ ID NO: 2857290 - RNA, 14 nt, Human
ugccucugacacac

SEQ ID NO: 2857291 - RNA, 19 nt, Human
ugccugcccaggccccugc

SEQ ID NO: 2857292 - RNA, 18 nt, Human
ugccugcccaggccccug

SEQ ID NO: 2857293 - RNA, 17 nt, Human
ugccugcccaggccccu

SEQ ID NO: 2857294 - RNA, 13 nt, Human
ugccugcgucuuc

SEQ ID NO: 2857295 - RNA, 15 nt, Human
ugccugcgucuuccg

SEQ ID NO: 2857296 - RNA, 16 nt, Human
ugccugcgucuuccgc

SEQ ID NO: 2857297 - RNA, 17 nt, Human
ugccugcgucuuccgcc

SEQ ID NO: 2857298 - RNA, 18 nt, Human
ugccugcgucuuccgccc

SEQ ID NO: 2857299 - RNA, 19 nt, Human
ugccugcgucuuccgcccc

SEQ ID NO: 2857300 - RNA, 21 nt, Human
agcucugcagagcaggaaaca

SEQ ID NO: 2857301 - RNA, 12 nt, Human
agcucugcaggc

SEQ ID NO: 2857302 - RNA, 20 nt, Human
agcucugcaggcuuaauaaa

SEQ ID NO: 2857303 - RNA, 23 nt, Human
agcucugcaggcuuaauaaaaau

SEQ ID NO: 2857304 - RNA, 16 nt, Human
agcucugcaucuccug

SEQ ID NO: 2857305 - RNA, 19 nt, Human
agcucugcaucuccugucu

SEQ ID NO: 2857306 - RNA, 21 nt, Human
agcucuacccagggccugcag

SEQ ID NO: 2857307 - RNA, 13 nt, Human
agcucuagaaucu

SEQ ID NO: 2857308 - RNA, 14 nt, Human
agcucuagaaucug

SEQ ID NO: 2857309 - RNA, 15 nt, Human
agcucuagaaucugc

SEQ ID NO: 2857310 - RNA, 20 nt, Human
agcucuacccagggccugca

SEQ ID NO: 2857311 - RNA, 19 nt, Human
agcucuacccagggccugc

SEQ ID NO: 2857312 - RNA, 17 nt, Human
agcucuacccagggccu

SEQ ID NO: 2857313 - RNA, 15 nt, Human
agcucuacccagggc

SEQ ID NO: 2857314 - RNA, 13 nt, Human
agcucuacccagg

SEQ ID NO: 2857315 - RNA, 22 nt, Human
agcucuaauaaaacagcugucu

SEQ ID NO: 2857316 - RNA, 22 nt, Human
agcucuggccacaacagggcau

SEQ ID NO: 2857317 - RNA, 16 nt, Human
agcucuguguugccau

SEQ ID NO: 2857318 - RNA, 15 nt, Human
agcucuguguugcca

SEQ ID NO: 2857319 - RNA, 23 nt, Human
agcucuguguugccaugugugcu

SEQ ID NO: 2857320 - RNA, 18 nt, Human
agcucuguguugccaugu

SEQ ID NO: 2857321 - RNA, 16 nt, Human
agcucuguggccacau

SEQ ID NO: 2857322 - RNA, 16 nt, Human
agcucuguugcaauua

SEQ ID NO: 2857323 - RNA, 21 nt, Human
agcucuguugcaauuaggauu

SEQ ID NO: 2857324 - RNA, 18 nt, Human
agcucuucaggccucccu

SEQ ID NO: 2857325 - RNA, 14 nt, Human
agcucuucaucugc

SEQ ID NO: 2857326 - RNA, 17 nt, Human
agcucuucaucugccca

SEQ ID NO: 2857327 - RNA, 18 nt, Human
agcucuucaucugcccaa

SEQ ID NO: 2857328 - RNA, 19 nt, Human
agcucuucaucugcccaac

SEQ ID NO: 2857329 - RNA, 23 nt, Human
agcucuucaucugcccaacugug

SEQ ID NO: 2857330 - RNA, 17 nt, Human
agcucuucaggccuccc

SEQ ID NO: 2857331 - RNA, 16 nt, Human
agcucuucaggccucc

SEQ ID NO: 2857332 - RNA, 15 nt, Human
agcucuucaggccuc

SEQ ID NO: 2857333 - RNA, 13 nt, Human
agcucuucaggcc

SEQ ID NO: 2857334 - RNA, 19 nt, Human
agcuccagcucaccagccc

SEQ ID NO: 2857335 - RNA, 18 nt, Human
agcuccagcucaccagcc

SEQ ID NO: 2857336 - RNA, 21 nt, Human
agcuccagcucaccagcccca

SEQ ID NO: 2857337 - RNA, 21 nt, Human
agcuccagggaauccaagccu

SEQ ID NO: 2857338 - RNA, 21 nt, Human
agcuccaucuccacuccagau

SEQ ID NO: 2857339 - RNA, 19 nt, Human
agcuccaugugccucuuug

SEQ ID NO: 2857340 - RNA, 18 nt, Human
agcucccaagggauggug

SEQ ID NO: 2857341 - RNA, 20 nt, Human
agcucccaagggauggugcc

SEQ ID NO: 2857342 - RNA, 13 nt, Human
agcuccauuuucu

SEQ ID NO: 2857343 - RNA, 22 nt, Human
agcucccaagggauggugcccu

SEQ ID NO: 2857344 - RNA, 23 nt, Human
agcucccaagggauggugcccug

SEQ ID NO: 2857345 - RNA, 23 nt, Human
agcuccuucuguccuacucugug

SEQ ID NO: 2857346 - RNA, 22 nt, Human
agcuccuucuguccuacucugu

SEQ ID NO: 2857347 - RNA, 13 nt, Human
agcuccccagagu

SEQ ID NO: 2857348 - RNA, 18 nt, Human
agcuccccagaguccucu

SEQ ID NO: 2857349 - RNA, 15 nt, Human
ugcccucuccuuccu

SEQ ID NO: 2857350 - RNA, 16 nt, Human
ugcccucuccuuccuu

SEQ ID NO: 2857351 - RNA, 17 nt, Human
ugcccucuccuuccuua

SEQ ID NO: 2857352 - RNA, 21 nt, Human
ugcccucuccuuccuuaccca

SEQ ID NO: 2857353 - RNA, 19 nt, Human
ugcccuccuuguccaccca

SEQ ID NO: 2857354 - RNA, 22 nt, Human
ugcccuccuuguccacccaccu

SEQ ID NO: 2857355 - RNA, 13 nt, Human
ugcccucgcugcu

SEQ ID NO: 2857356 - RNA, 14 nt, Human
ugcccucgcugcuu

SEQ ID NO: 2857357 - RNA, 15 nt, Human
ugcccucgcugcuuc

SEQ ID NO: 2857358 - RNA, 17 nt, Human
ugcccucgcugcuucug

SEQ ID NO: 2857359 - RNA, 14 nt, Human
ugcccuccccucuc

SEQ ID NO: 2857360 - RNA, 17 nt, Human
ugcccuccccucucugc

SEQ ID NO: 2857361 - RNA, 21 nt, Human
ugcccuccccucucugcaccg

SEQ ID NO: 2857362 - RNA, 20 nt, Human
ugcccuaaugcgcaggcugg

SEQ ID NO: 2857363 - RNA, 19 nt, Human
ugcccuaaauaacccuuca

SEQ ID NO: 2857364 - RNA, 22 nt, Human
ugcccuaaccucugagucacca

SEQ ID NO: 2857365 - RNA, 23 nt, Human
ugcccuaacuguacauuucacag

SEQ ID NO: 2857366 - RNA, 19 nt, Human
ugcccuacucauugggguu

SEQ ID NO: 2857367 - RNA, 23 nt, Human
ugcccuaaugcgcaggcuggccc

SEQ ID NO: 2857368 - RNA, 14 nt, Human
ugcccugaggaagg

SEQ ID NO: 2857369 - RNA, 11 nt, Human
ugcccugagaa

SEQ ID NO: 2857370 - RNA, 15 nt, Human
ugcccugagaagcug

SEQ ID NO: 2857371 - RNA, 20 nt, Human
ugcccugagaagcugcucca

SEQ ID NO: 2857372 - RNA, 17 nt, Human
agcuccagcucaccagc

SEQ ID NO: 2857373 - RNA, 13 nt, Human
agcuccagcucac

SEQ ID NO: 2857374 - RNA, 18 nt, Human
agcuccacugucacccuc

SEQ ID NO: 2857375 - RNA, 21 nt, Human
agcuccacugucacccuccac

SEQ ID NO: 2857376 - RNA, 23 nt, Human
agcuccacugucacccuccaccu

SEQ ID NO: 2857377 - RNA, 13 nt, Human
agcuccagagcaa

SEQ ID NO: 2857378 - RNA, 11 nt, Human
agcuccagccc

SEQ ID NO: 2857379 - RNA, 14 nt, Human
agcuccagccccuu

SEQ ID NO: 2857380 - RNA, 16 nt, Human
agcuccagccccuuuc

SEQ ID NO: 2857381 - RNA, 18 nt, Human
agcuccagccccuuucca

SEQ ID NO: 2857382 - RNA, 19 nt, Human
agcuccagccccuuuccaa

SEQ ID NO: 2857383 - RNA, 20 nt, Human
agcuccagccccuuuccaaa

SEQ ID NO: 2857384 - RNA, 21 nt, Human
agcuccagccccuuuccaaaa

SEQ ID NO: 2857385 - RNA, 14 nt, Human
ugccauuuaaaaag

SEQ ID NO: 2857386 - RNA, 17 nt, Human
ugccauuuaaaaaguug

SEQ ID NO: 2857387 - RNA, 14 nt, Human
ugccauuuauuuau

SEQ ID NO: 2857388 - RNA, 22 nt, Human
ugccauuugcacccuccgccuu

SEQ ID NO: 2857389 - RNA, 21 nt, Human
ugccauuugcacccuccgccu

SEQ ID NO: 2857390 - RNA, 19 nt, Human
ugccauuugcacccuccgc

SEQ ID NO: 2857391 - RNA, 12 nt, Human
ugccauuuauuu

SEQ ID NO: 2857392 - RNA, 13 nt, Human
ugccauuugauac

SEQ ID NO: 2857393 - RNA, 14 nt, Human
ugccauuugauacc

SEQ ID NO: 2857394 - RNA, 17 nt, Human
ugccauuugauaccccu

SEQ ID NO: 2857395 - RNA, 20 nt, Human
ugccauuugauaccccuggg

SEQ ID NO: 2857396 - RNA, 18 nt, Human
ugccauuugauuuuucua

SEQ ID NO: 2857397 - RNA, 17 nt, Human
ugccauuugcacccucc

SEQ ID NO: 2857398 - RNA, 16 nt, Human
ugccauuugcacccuc

SEQ ID NO: 2857399 - RNA, 17 nt, Human
agcucaggugucccugc

SEQ ID NO: 2857400 - RNA, 14 nt, Human
agcucaggggcagc

SEQ ID NO: 2857401 - RNA, 16 nt, Human
agcucaggggcagcuc

SEQ ID NO: 2857402 - RNA, 17 nt, Human
agcucaggggcagcuca

SEQ ID NO: 2857403 - RNA, 17 nt, Human
agcucaggaggcuugga

SEQ ID NO: 2857404 - RNA, 17 nt, Human
agcucaggaggcgcccu

SEQ ID NO: 2857405 - RNA, 18 nt, Human
agcucaggaccaggcaau

SEQ ID NO: 2857406 - RNA, 15 nt, Human
agcucaggaggcgcc

SEQ ID NO: 2857407 - RNA, 14 nt, Human
agcucaggaccagg

SEQ ID NO: 2857408 - RNA, 13 nt, Human
agcuauuccuuuc

SEQ ID NO: 2857409 - RNA, 20 nt, Human
agcuauuagccaggaucaug

SEQ ID NO: 2857410 - RNA, 22 nt, Human
agcuauuagccaggaucauggu

SEQ ID NO: 2857411 - RNA, 16 nt, Human
agcuauccuggcucuu

SEQ ID NO: 2857412 - RNA, 17 nt, Human
agcuaucgaacuucaca

SEQ ID NO: 2857413 - RNA, 15 nt, Human
agcuauuacugucug

SEQ ID NO: 2857414 - RNA, 20 nt, Human
agcuauuacugucugguuuu

SEQ ID NO: 2857415 - RNA, 21 nt, Human
agcuauuacugucugguuuua

SEQ ID NO: 2857416 - RNA, 14 nt, Human
agcuauuagccagg

SEQ ID NO: 2857417 - RNA, 18 nt, Human
agcuauuagccaggauca

SEQ ID NO: 2857418 - RNA, 13 nt, Human
agcuauuaaaacu

SEQ ID NO: 2857419 - RNA, 14 nt, Human
agcuauuaaaacuc

SEQ ID NO: 2857420 - RNA, 15 nt, Human
agcuaucuaaaguuu

SEQ ID NO: 2857421 - RNA, 16 nt, Human
agcuaucuaaaguuug

SEQ ID NO: 2857422 - RNA, 18 nt, Human
agcuaucuaaaguuuguu

SEQ ID NO: 2857423 - RNA, 17 nt, Human
agcuaugucaagaggcu

SEQ ID NO: 2857424 - RNA, 18 nt, Human
agcuaugucaagaggcug

SEQ ID NO: 2857425 - RNA, 18 nt, Human
agcuaguucguagcuuuc

SEQ ID NO: 2857426 - RNA, 17 nt, Human
agcuaguucguagcuuu

SEQ ID NO: 2857427 - RNA, 16 nt, Human
agcuaguguaccuccu

SEQ ID NO: 2857428 - RNA, 18 nt, Human
agcuaguguaccuccucu

SEQ ID NO: 2857429 - RNA, 19 nt, Human
agcuaguguaccuccucuc

SEQ ID NO: 2857430 - RNA, 21 nt, Human
agcuaguguaccuccucucag

SEQ ID NO: 2857431 - RNA, 22 nt, Human
agcuaguguaccuccucucagu

SEQ ID NO: 2857432 - RNA, 23 nt, Human
agcuaguguaccuccucucagug

SEQ ID NO: 2857433 - RNA, 15 nt, Human
agcuaucaagaggcu

SEQ ID NO: 2857434 - RNA, 16 nt, Human
agcuaucaagaggcug

SEQ ID NO: 2857435 - RNA, 19 nt, Human
agcuaucaagaggcugaga

SEQ ID NO: 2857436 - RNA, 21 nt, Human
agcuaucaagaggcugagaca

SEQ ID NO: 2857437 - RNA, 14 nt, Human
agcuaucaggaaca

SEQ ID NO: 2857438 - RNA, 18 nt, Human
agcuaucaguaggcuaau

SEQ ID NO: 2857439 - RNA, 15 nt, Human
agcuauccuggcucu

SEQ ID NO: 2857440 - RNA, 20 nt, Human
agcuaucagaagaccacaaa

SEQ ID NO: 2857441 - RNA, 20 nt, Human
agcuaucauugcuuccuccu

SEQ ID NO: 2857442 - RNA, 21 nt, Human
agcuaggccuggccagaugca

SEQ ID NO: 2857443 - RNA, 19 nt, Human
agcuaguaauauauucuga

SEQ ID NO: 2857444 - RNA, 18 nt, Human
agcuaguccuagugaacc

SEQ ID NO: 2857445 - RNA, 15 nt, Human
agcuacccuguguau

SEQ ID NO: 2857446 - RNA, 15 nt, Human
agcuacccuuuuccu

SEQ ID NO: 2857447 - RNA, 19 nt, Human
agcuacccuuuuccuuugu

SEQ ID NO: 2857448 - RNA, 21 nt, Human
agcuacccuuuuccuuugugg

SEQ ID NO: 2857449 - RNA, 22 nt, Human
agcuacccuuuuccuuuguggu

SEQ ID NO: 2857450 - RNA, 16 nt, Human
agcuacccaaaagaga

SEQ ID NO: 2857451 - RNA, 17 nt, Human
agcuacccaaaagagaa

SEQ ID NO: 2857452 - RNA, 19 nt, Human
agcuacccaaaagagaaaa

SEQ ID NO: 2857453 - RNA, 20 nt, Human
agcuacccaaaagagaaaaa

SEQ ID NO: 2857454 - RNA, 17 nt, Human
agcuacccacuauccuu

SEQ ID NO: 2857455 - RNA, 21 nt, Human
agcguauauauaagaaagaca

SEQ ID NO: 2857456 - RNA, 22 nt, Human
agcuacaggaagcaccccaugc

SEQ ID NO: 2857457 - RNA, 14 nt, Human
agcuacaggaagca

SEQ ID NO: 2857458 - RNA, 23 nt, Human
agcuacagagccgagcaauauuu

SEQ ID NO: 2857459 - RNA, 20 nt, Human
agcuacagcuuucuugcucc

SEQ ID NO: 2857460 - RNA, 22 nt, Human
agcuacagcuuucuugcucccu

SEQ ID NO: 2857461 - RNA, 12 nt, Human
ugccccaugccu

SEQ ID NO: 2857462 - RNA, 23 nt, Human
ugccccaugccuguccagccugg

SEQ ID NO: 2857463 - RNA, 15 nt, Human
ugccccaugccuguc

SEQ ID NO: 2857464 - RNA, 14 nt, Human
ugcccccggccccc

SEQ ID NO: 2857465 - RNA, 23 nt, Human
ugccccccaugaggaaggaacag

SEQ ID NO: 2857466 - RNA, 15 nt, Human
ugcccccggcccccu

SEQ ID NO: 2857467 - RNA, 17 nt, Human
ugcccccggcccccugg

SEQ ID NO: 2857468 - RNA, 18 nt, Human
ugcccccggcccccuggu

SEQ ID NO: 2857469 - RNA, 21 nt, Human
ugcccccggcccccuggucuc

SEQ ID NO: 2857470 - RNA, 15 nt, Human
ugccccggccaccuc

SEQ ID NO: 2857471 - RNA, 16 nt, Human
ugccccggccaccucu

SEQ ID NO: 2857472 - RNA, 17 nt, Human
ugccccggccaccucug

SEQ ID NO: 2857473 - RNA, 18 nt, Human
ugccccggccaccucugc

SEQ ID NO: 2857474 - RNA, 23 nt, Human
ugccccggccaccucugcggacc

SEQ ID NO: 2857475 - RNA, 13 nt, Human
ugccccgcccagc

SEQ ID NO: 2857476 - RNA, 13 nt, Human
ugccccggccacc

SEQ ID NO: 2857477 - RNA, 14 nt, Human
ugccccggccaccu

SEQ ID NO: 2857478 - RNA, 18 nt, Human
ugcccccucugcccugcg

SEQ ID NO: 2857479 - RNA, 17 nt, Human
ugcccccucugcccugc

SEQ ID NO: 2857480 - RNA, 16 nt, Human
ugcccccucugcccug

SEQ ID NO: 2857481 - RNA, 15 nt, Human
ugcccccucugcccu

SEQ ID NO: 2857482 - RNA, 14 nt, Human
ugcccccucugccc

SEQ ID NO: 2857483 - RNA, 18 nt, Human
ugcccaggccccugccac

SEQ ID NO: 2857484 - RNA, 17 nt, Human
ugcccaggccccugcca

SEQ ID NO: 2857485 - RNA, 15 nt, Human
ugcccaggccccugc

SEQ ID NO: 2857486 - RNA, 14 nt, Human
ugcccaggccccug

SEQ ID NO: 2857487 - RNA, 22 nt, Human
ugcccagcuauaccugugccuc

SEQ ID NO: 2857488 - RNA, 21 nt, Human
ugcccagcuauaccugugccu

SEQ ID NO: 2857489 - RNA, 20 nt, Human
ugcccagcuauaccugugcc

SEQ ID NO: 2857490 - RNA, 18 nt, Human
ugcccagcuauaccugug

SEQ ID NO: 2857491 - RNA, 18 nt, Human
ugcccaaagucuguguga

SEQ ID NO: 2857492 - RNA, 19 nt, Human
ugcccaaaaauaugguuga

SEQ ID NO: 2857493 - RNA, 16 nt, Human
ugcccaaagagcacaa

SEQ ID NO: 2857494 - RNA, 19 nt, Human
ugcccaaagagcacaaaca

SEQ ID NO: 2857495 - RNA, 23 nt, Human
ugcccaaagagcacaaacauuuu

SEQ ID NO: 2857496 - RNA, 19 nt, Human
agccuucccccucccaggg

SEQ ID NO: 2857497 - RNA, 14 nt, Human
agccucacccuugc

SEQ ID NO: 2857498 - RNA, 22 nt, Human
agcgauucuucugcuucagccu

SEQ ID NO: 2857499 - RNA, 21 nt, Human
agccuugcccggauucuggga

SEQ ID NO: 2857500 - RNA, 14 nt, Human
ugcauucugccucu

SEQ ID NO: 2857501 - RNA, 15 nt, Human
ugcauucugccucuc

SEQ ID NO: 2857502 - RNA, 19 nt, Human
ugcauucugccucucuagg

SEQ ID NO: 2857503 - RNA, 20 nt, Human
ugcauucugccucucuagga

SEQ ID NO: 2857504 - RNA, 23 nt, Human
ugcauuccugauaugauuuaaaa

SEQ ID NO: 2857505 - RNA, 15 nt, Human
ugcauuccuuugucu

SEQ ID NO: 2857506 - RNA, 16 nt, Human
ugcauuccuuugucuu

SEQ ID NO: 2857507 - RNA, 18 nt, Human
ugcauuccuuugucuuca

SEQ ID NO: 2857508 - RNA, 20 nt, Human
ugcauuccuuugucuucaaa

SEQ ID NO: 2857509 - RNA, 13 nt, Human
ugcauucuauugc

SEQ ID NO: 2857510 - RNA, 14 nt, Human
ugcauucuauugcc

SEQ ID NO: 2857511 - RNA, 15 nt, Human
ugcauucuauugccu

SEQ ID NO: 2857512 - RNA, 16 nt, Human
ugcauucuauugccuu

SEQ ID NO: 2857513 - RNA, 17 nt, Human
ugcauucuauugccuuc

SEQ ID NO: 2857514 - RNA, 18 nt, Human
ugcauucuauugccuucu

SEQ ID NO: 2857515 - RNA, 19 nt, Human
ugcauucuauugccuucuu

SEQ ID NO: 2857516 - RNA, 20 nt, Human
ugcauucuauugccuucuuu

SEQ ID NO: 2857517 - RNA, 22 nt, Human
ugcauucuauugccuucuuuga

SEQ ID NO: 2857518 - RNA, 16 nt, Human
ugcauuuauauguacc

SEQ ID NO: 2857519 - RNA, 14 nt, Human
ugcauuuauaugua

SEQ ID NO: 2857520 - RNA, 13 nt, Human
ugcauuuauaugu

SEQ ID NO: 2857521 - RNA, 21 nt, Human
agcgcuuugggaggccgaggc

SEQ ID NO: 2857522 - RNA, 17 nt, Human
agcggaacaaggaguca

SEQ ID NO: 2857523 - RNA, 22 nt, Human
agcggaacaaggagucagacau

SEQ ID NO: 2857524 - RNA, 23 nt, Human
ugcauuauucauuuagugaguua

SEQ ID NO: 2857525 - RNA, 15 nt, Human
ugcauuauucucuuu

SEQ ID NO: 2857526 - RNA, 21 nt, Human
agcgcagcuggacucugcauc

SEQ ID NO: 2857527 - RNA, 19 nt, Human
agcgcagguuuaguuuacu

SEQ ID NO: 2857528 - RNA, 15 nt, Human
agcgccaagugcgug

SEQ ID NO: 2857529 - RNA, 20 nt, Human
agcgccaagugcgugccgug

SEQ ID NO: 2857530 - RNA, 19 nt, Human
agcgcaccugcccccuggu

SEQ ID NO: 2857531 - RNA, 18 nt, Human
agcgcaccugcccccugg

SEQ ID NO: 2857532 - RNA, 21 nt, Human
agcgcaccugcccccuggugg

SEQ ID NO: 2857533 - RNA, 19 nt, Human
agcgcagcagcccuccccg

SEQ ID NO: 2857534 - RNA, 17 nt, Human
agcgcaccugcccccug

SEQ ID NO: 2857535 - RNA, 14 nt, Human
agcgcaccugcccc

SEQ ID NO: 2857536 - RNA, 12 nt, Human
agcgcaccugcc

SEQ ID NO: 2857537 - RNA, 11 nt, Human
ugccagccaca

SEQ ID NO: 2857538 - RNA, 18 nt, Human
ugccagcagcagcaggug

SEQ ID NO: 2857539 - RNA, 17 nt, Human
ugccagcagcagcaggu

SEQ ID NO: 2857540 - RNA, 16 nt, Human
ugccagcagcagcagg

SEQ ID NO: 2857541 - RNA, 15 nt, Human
ugccagcagcagcag

SEQ ID NO: 2857542 - RNA, 10 nt, Human
ugccagcagc

SEQ ID NO: 2857543 - RNA, 14 nt, Human
ugccagcagcagca

SEQ ID NO: 2857544 - RNA, 23 nt, Human
ugccagcaaugacaucucagggg

SEQ ID NO: 2857545 - RNA, 15 nt, Human
ugccagaugcugcag

SEQ ID NO: 2857546 - RNA, 22 nt, Human
ugccagcaaugacaucucaggg

SEQ ID NO: 2857547 - RNA, 23 nt, Human
ugccagaggaauccuggcagccc

SEQ ID NO: 2857548 - RNA, 14 nt, Human
ugccagaggggaag

SEQ ID NO: 2857549 - RNA, 13 nt, Human
ugccacugccucu

SEQ ID NO: 2857550 - RNA, 17 nt, Human
ugccacugccucuuccu

SEQ ID NO: 2857551 - RNA, 22 nt, Human
ugccagaggaauccuggcagcc

SEQ ID NO: 2857552 - RNA, 21 nt, Human
ugccagaggaauccuggcagc

SEQ ID NO: 2857553 - RNA, 20 nt, Human
ugccagaggaauccuggcag

SEQ ID NO: 2857554 - RNA, 12 nt, Human
ugccagagccgg

SEQ ID NO: 2857555 - RNA, 20 nt, Human
ugccacugccucuuccuccc

SEQ ID NO: 2857556 - RNA, 18 nt, Human
ugccacugccucuuccuc

SEQ ID NO: 2857557 - RNA, 19 nt, Human
ugccacugccucuuccucc

SEQ ID NO: 2857558 - RNA, 20 nt, Human
agcggggacagcuccuucug

SEQ ID NO: 2857559 - RNA, 19 nt, Human
agcggggacagcuccuucu

SEQ ID NO: 2857560 - RNA, 20 nt, Human
agcgggaauggcagcugcca

SEQ ID NO: 2857561 - RNA, 22 nt, Human
agcggggacagcuccuucuguc

SEQ ID NO: 2857562 - RNA, 12 nt, Human
agcgggaggcag

SEQ ID NO: 2857563 - RNA, 21 nt, Human
agcggggccccagggcuaccc

SEQ ID NO: 2857564 - RNA, 21 nt, Human
agcgucaggguuggugugcug

SEQ ID NO: 2857565 - RNA, 23 nt, Human
agcgucaggguuggugugcugag

SEQ ID NO: 2857566 - RNA, 15 nt, Human
agcguccagaaaugg

SEQ ID NO: 2857567 - RNA, 13 nt, Human
agcgucccagucu

SEQ ID NO: 2857568 - RNA, 16 nt, Human
agcgucccagucucug

SEQ ID NO: 2857569 - RNA, 18 nt, Human
agcgucccagucucuggc

SEQ ID NO: 2857570 - RNA, 19 nt, Human
agcgucccagucucuggca

SEQ ID NO: 2857571 - RNA, 16 nt, Human
agcgucccuagcagug

SEQ ID NO: 2857572 - RNA, 17 nt, Human
agcgucccuagcaguga

SEQ ID NO: 2857573 - RNA, 18 nt, Human
agcgucccuagcagugaa

SEQ ID NO: 2857574 - RNA, 19 nt, Human
ugccaggaaacucuugcua

SEQ ID NO: 2857575 - RNA, 20 nt, Human
ugccaggaaacucuugcuau

SEQ ID NO: 2857576 - RNA, 14 nt, Human
ugccaggaaccugu

SEQ ID NO: 2857577 - RNA, 20 nt, Human
ugccagucccccugccccag

SEQ ID NO: 2857578 - RNA, 22 nt, Human
ugccaggaaccuguccuaagga

SEQ ID NO: 2857579 - RNA, 21 nt, Human
ugccaggaaccuguccuaagg

SEQ ID NO: 2857580 - RNA, 12 nt, Human
ugcagaacugcc

SEQ ID NO: 2857581 - RNA, 13 nt, Human
ugcagaacugcca

SEQ ID NO: 2857582 - RNA, 14 nt, Human
ugcagaacugccau

SEQ ID NO: 2857583 - RNA, 20 nt, Human
ugcagaacugccauuauuuu

SEQ ID NO: 2857584 - RNA, 21 nt, Human
ugcagaacugccauuauuuuc

SEQ ID NO: 2857585 - RNA, 23 nt, Human
ugcagaacugccauuauuuucug

SEQ ID NO: 2857586 - RNA, 22 nt, Human
ugcagacaggcaagcaccuccu

SEQ ID NO: 2857587 - RNA, 15 nt, Human
ugcagacaugagugc

SEQ ID NO: 2857588 - RNA, 16 nt, Human
ugcacuccucagggca

SEQ ID NO: 2857589 - RNA, 12 nt, Human
ugcacuccucag

SEQ ID NO: 2857590 - RNA, 14 nt, Human
agcccugucgggcu

SEQ ID NO: 2857591 - RNA, 18 nt, Human
agcccugucgggcuuugu

SEQ ID NO: 2857592 - RNA, 22 nt, Human
agcccugucgggcuuuguguga

SEQ ID NO: 2857593 - RNA, 16 nt, Human
agcccuuagcagggaa

SEQ ID NO: 2857594 - RNA, 23 nt, Human
agcccuguggaugagcccucaga

SEQ ID NO: 2857595 - RNA, 22 nt, Human
agcccuguggaugagcccucag

SEQ ID NO: 2857596 - RNA, 19 nt, Human
agcccuguggaugagcccu

SEQ ID NO: 2857597 - RNA, 18 nt, Human
agcccuguggaugagccc

SEQ ID NO: 2857598 - RNA, 17 nt, Human
ugcagacucuacagagg

SEQ ID NO: 2857599 - RNA, 16 nt, Human
ugcagacucuacagag

SEQ ID NO: 2857600 - RNA, 12 nt, Human
agcccuuucugu

SEQ ID NO: 2857601 - RNA, 13 nt, Human
agcccuuucugug

SEQ ID NO: 2857602 - RNA, 16 nt, Human
agcccuuucugugugc

SEQ ID NO: 2857603 - RNA, 17 nt, Human
agcccuuucugugugca

SEQ ID NO: 2857604 - RNA, 18 nt, Human
agcccuuucugugugcac

SEQ ID NO: 2857605 - RNA, 17 nt, Human
agccgagaucacgccac

SEQ ID NO: 2857606 - RNA, 21 nt, Human
agcccuuagcagggaaacagc

SEQ ID NO: 2857607 - RNA, 14 nt, Human
agcccuguugugcc

SEQ ID NO: 2857608 - RNA, 17 nt, Human
agcccuguugugccaca

SEQ ID NO: 2857609 - RNA, 19 nt, Human
agcccuguugugccacaga

SEQ ID NO: 2857610 - RNA, 21 nt, Human
agcccuguugugccacagagu

SEQ ID NO: 2857611 - RNA, 15 nt, Human
agcccuuaucugugc

SEQ ID NO: 2857612 - RNA, 12 nt, Human
agcccuuggguu

SEQ ID NO: 2857613 - RNA, 17 nt, Human
agccucauauuuaaaga

SEQ ID NO: 2857614 - RNA, 19 nt, Human
agccucauauuuaaagaca

SEQ ID NO: 2857615 - RNA, 14 nt, Human
agccucauauuuaa

SEQ ID NO: 2857616 - RNA, 20 nt, Human
agccucauaguuauuaucca

SEQ ID NO: 2857617 - RNA, 15 nt, Human
agccucauauuuaaa

SEQ ID NO: 2857618 - RNA, 16 nt, Human
agccucauauuuaaag

SEQ ID NO: 2857619 - RNA, 22 nt, Human
agccucagucucccucccuugg

SEQ ID NO: 2857620 - RNA, 20 nt, Human
agccucaguccuccccucac

SEQ ID NO: 2857621 - RNA, 18 nt, Human
agccucaguccuccccuc

SEQ ID NO: 2857622 - RNA, 19 nt, Human
agccucaguccuccccuca

SEQ ID NO: 2857623 - RNA, 20 nt, Human
agccucagucucccucccuu

SEQ ID NO: 2857624 - RNA, 19 nt, Human
agccucagucucccucccu

SEQ ID NO: 2857625 - RNA, 16 nt, Human
agccucagucucccuc

SEQ ID NO: 2857626 - RNA, 13 nt, Human
agccucagucucc

SEQ ID NO: 2857627 - RNA, 16 nt, Human
agccucagcuacccac

SEQ ID NO: 2857628 - RNA, 11 nt, Human
agccucagucc

SEQ ID NO: 2857629 - RNA, 15 nt, Human
agccucaguccuccc

SEQ ID NO: 2857630 - RNA, 16 nt, Human
agccucaguccucccc

SEQ ID NO: 2857631 - RNA, 17 nt, Human
agccucaguccuccccu

SEQ ID NO: 2857632 - RNA, 20 nt, Human
agccucacuuggucugccag

SEQ ID NO: 2857633 - RNA, 21 nt, Human
agccucacuuggucugccagg

SEQ ID NO: 2857634 - RNA, 22 nt, Human
agccucacuuggucugccaggc

SEQ ID NO: 2857635 - RNA, 18 nt, Human
agccgagaucacgccacu

SEQ ID NO: 2857636 - RNA, 19 nt, Human
agccucaaccuccugggcu

SEQ ID NO: 2857637 - RNA, 20 nt, Human
agccucaaccuccugggcua

SEQ ID NO: 2857638 - RNA, 23 nt, Human
agcccuuuuguugagccaggccu

SEQ ID NO: 2857639 - RNA, 23 nt, Human
agccucaagguuuuagguucuaa

SEQ ID NO: 2857640 - RNA, 21 nt, Human
agccucaagguuuuagguucu

SEQ ID NO: 2857641 - RNA, 22 nt, Human
agccucaagguuuuagguucua

SEQ ID NO: 2857642 - RNA, 21 nt, Human
agccucacuucuaggguaugg

SEQ ID NO: 2857643 - RNA, 13 nt, Human
agccucacugaua

SEQ ID NO: 2857644 - RNA, 17 nt, Human
agccucacugauauauu

SEQ ID NO: 2857645 - RNA, 21 nt, Human
agccuccaagcuccaucucca

SEQ ID NO: 2857646 - RNA, 21 nt, Human
agccuccacagcgagggcagc

SEQ ID NO: 2857647 - RNA, 15 nt, Human
agccuccacagcgag

SEQ ID NO: 2857648 - RNA, 14 nt, Human
agccuccacagcga

SEQ ID NO: 2857649 - RNA, 13 nt, Human
agccuccacagcg

SEQ ID NO: 2857650 - RNA, 12 nt, Human
agccuccacagc

SEQ ID NO: 2857651 - RNA, 20 nt, Human
agccucauauuuaaagacag

SEQ ID NO: 2857652 - RNA, 23 nt, Human
agccuccacagcgagggcagcug

SEQ ID NO: 2857653 - RNA, 22 nt, Human
agccuccacagcgagggcagcu

SEQ ID NO: 2857654 - RNA, 20 nt, Human
agccuccacugccucuggaa

SEQ ID NO: 2857655 - RNA, 12 nt, Human
agccuccagccu

SEQ ID NO: 2857656 - RNA, 17 nt, Human
agccuccaugcugccuc

SEQ ID NO: 2857657 - RNA, 16 nt, Human
agccuccaguccaagg

SEQ ID NO: 2857658 - RNA, 22 nt, Human
agccuccaguccaaggaaacca

SEQ ID NO: 2857659 - RNA, 13 nt, Human
agccucugcuccc

SEQ ID NO: 2857660 - RNA, 22 nt, Human
agccucugaccccuccucacug

SEQ ID NO: 2857661 - RNA, 12 nt, Human
agccucugaccc

SEQ ID NO: 2857662 - RNA, 15 nt, Human
agccucugaccccuc

SEQ ID NO: 2857663 - RNA, 17 nt, Human
agccucugaccccuccu

SEQ ID NO: 2857664 - RNA, 18 nt, Human
agccucugaccccuccuc

SEQ ID NO: 2857665 - RNA, 19 nt, Human
agccucugaccccuccuca

SEQ ID NO: 2857666 - RNA, 20 nt, Human
agccucugaccccuccucac

SEQ ID NO: 2857667 - RNA, 21 nt, Human
agccucugaccccuccucacu

SEQ ID NO: 2857668 - RNA, 21 nt, Human
ugcagccucaaccuccugggc

SEQ ID NO: 2857669 - RNA, 20 nt, Human
ugcagccucaaccuccuggg

SEQ ID NO: 2857670 - RNA, 22 nt, Human
ugcagccucaaccuccugggcu

SEQ ID NO: 2857671 - RNA, 16 nt, Human
ugcagcucacuacccu

SEQ ID NO: 2857672 - RNA, 22 nt, Human
ugcagcucaaggaaaggccuga

SEQ ID NO: 2857673 - RNA, 21 nt, Human
ugcagcucaaggaaaggccug

SEQ ID NO: 2857674 - RNA, 15 nt, Human
agccucugcucccca

SEQ ID NO: 2857675 - RNA, 16 nt, Human
agccucugcuccccag

SEQ ID NO: 2857676 - RNA, 13 nt, Human
agccucugcugcc

SEQ ID NO: 2857677 - RNA, 12 nt, Human
agccucugcugc

SEQ ID NO: 2857678 - RNA, 18 nt, Human
agccucugcugccauggc

SEQ ID NO: 2857679 - RNA, 14 nt, Human
agccucugcugcca

SEQ ID NO: 2857680 - RNA, 22 nt, Human
agccucuggcauuagaauuauu

SEQ ID NO: 2857681 - RNA, 23 nt, Human
agccucuggcauuagaauuauuu

SEQ ID NO: 2857682 - RNA, 15 nt, Human
agccucuggcuagag

SEQ ID NO: 2857683 - RNA, 14 nt, Human
agccucuggcuaga

SEQ ID NO: 2857684 - RNA, 13 nt, Human
agccucuggcuag

SEQ ID NO: 2857685 - RNA, 12 nt, Human
agccucuggcua

SEQ ID NO: 2857686 - RNA, 20 nt, Human
agccucuggcuagaggccag

SEQ ID NO: 2857687 - RNA, 18 nt, Human
ugauuuguacugaaaaau

SEQ ID NO: 2857688 - RNA, 18 nt, Human
ugauuuguaguggaaaca

SEQ ID NO: 2857689 - RNA, 15 nt, Human
ugauuuguacugaaa

SEQ ID NO: 2857690 - RNA, 16 nt, Human
ugcaaacgcugccugc

SEQ ID NO: 2857691 - RNA, 15 nt, Human
ugcaaacgcugccug

SEQ ID NO: 2857692 - RNA, 14 nt, Human
ugcaaacgcugccu

SEQ ID NO: 2857693 - RNA, 21 nt, Human
ugcaaacgcugccugccggua

SEQ ID NO: 2857694 - RNA, 21 nt, Human
ugcaaacgcugccugcccgua

SEQ ID NO: 2857695 - RNA, 19 nt, Human
ugcaaacgcugccugccca

SEQ ID NO: 2857696 - RNA, 17 nt, Human
ugcaaacgcugccugcc

SEQ ID NO: 2857697 - RNA, 14 nt, Human
ugcaauaacuucug

SEQ ID NO: 2857698 - RNA, 15 nt, Human
ugcaauaacuucuga

SEQ ID NO: 2857699 - RNA, 16 nt, Human
ugcaauaacuucugac

SEQ ID NO: 2857700 - RNA, 17 nt, Human
ugcaauaacuucugacc

SEQ ID NO: 2857701 - RNA, 18 nt, Human
ugcaauaacuucugaccu

SEQ ID NO: 2857702 - RNA, 19 nt, Human
ugcaauaacuucugaccuu

SEQ ID NO: 2857703 - RNA, 16 nt, Human
ugcaagugacaucucu

SEQ ID NO: 2857704 - RNA, 16 nt, Human
ugcaaguccuuuugua

SEQ ID NO: 2857705 - RNA, 17 nt, Human
ugcaaguccuuuuguaa

SEQ ID NO: 2857706 - RNA, 18 nt, Human
ugcaaguccuuuuguaaa

SEQ ID NO: 2857707 - RNA, 19 nt, Human
ugcaaguccuuuuguaaag

SEQ ID NO: 2857708 - RNA, 20 nt, Human
ugcaaguccuuuuguaaagu

SEQ ID NO: 2857709 - RNA, 22 nt, Human
agcccaggagagagaaagccag

SEQ ID NO: 2857710 - RNA, 21 nt, Human
ugcaauagaagugcuccccuc

SEQ ID NO: 2857711 - RNA, 20 nt, Human
ugcaauagaacagagaaaga

SEQ ID NO: 2857712 - RNA, 17 nt, Human
agcccaggagagagaaa

SEQ ID NO: 2857713 - RNA, 18 nt, Human
agcccaggagagagaaag

SEQ ID NO: 2857714 - RNA, 19 nt, Human
agcccaggagagagaaagc

SEQ ID NO: 2857715 - RNA, 22 nt, Human
agccccauucugccugcccagg

SEQ ID NO: 2857716 - RNA, 21 nt, Human
agccccauucugccugcccag

SEQ ID NO: 2857717 - RNA, 20 nt, Human
agccccauucugccugccca

SEQ ID NO: 2857718 - RNA, 13 nt, Human
agcccauuucaau

SEQ ID NO: 2857719 - RNA, 14 nt, Human
agcccauuucucca

SEQ ID NO: 2857720 - RNA, 15 nt, Human
agcccauuucuccag

SEQ ID NO: 2857721 - RNA, 16 nt, Human
agcccauuucuccaga

SEQ ID NO: 2857722 - RNA, 17 nt, Human
agcccauuucuccagaa

SEQ ID NO: 2857723 - RNA, 19 nt, Human
agcccauuucuccagaacc

SEQ ID NO: 2857724 - RNA, 21 nt, Human
agcccauuucuccagaaccca

SEQ ID NO: 2857725 - RNA, 21 nt, Human
agcccaggcgggagcgguggc

SEQ ID NO: 2857726 - RNA, 13 nt, Human
agcccaggcugga

SEQ ID NO: 2857727 - RNA, 20 nt, Human
agcccaggcuggagugcaau

SEQ ID NO: 2857728 - RNA, 19 nt, Human
agcccaggaguuugaggcu

SEQ ID NO: 2857729 - RNA, 11 nt, Human
agcccaggagu

SEQ ID NO: 2857730 - RNA, 22 nt, Human
agcccaggagggcauccauacc

SEQ ID NO: 2857731 - RNA, 23 nt, Human
agcccaggagggcauccauacca

SEQ ID NO: 2857732 - RNA, 18 nt, Human
ugauuuggguuggggaag

SEQ ID NO: 2857733 - RNA, 12 nt, Human
agcccaggccac

SEQ ID NO: 2857734 - RNA, 19 nt, Human
agcccauggcccucccagu

SEQ ID NO: 2857735 - RNA, 16 nt, Human
agcccauggcccugug

SEQ ID NO: 2857736 - RNA, 16 nt, Human
agcccauguucugccc

SEQ ID NO: 2857737 - RNA, 17 nt, Human
agcccauguucugcccc

SEQ ID NO: 2857738 - RNA, 19 nt, Human
agcccauguucugccccca

SEQ ID NO: 2857739 - RNA, 20 nt, Human
agcccauguucugcccccag

SEQ ID NO: 2857740 - RNA, 21 nt, Human
agcccauguucugcccccagc

SEQ ID NO: 2857741 - RNA, 22 nt, Human
agcccauguucugcccccagcc

SEQ ID NO: 2857742 - RNA, 23 nt, Human
agcccauguucugcccccagccc

SEQ ID NO: 2857743 - RNA, 18 nt, Human
ugcacacaccagagccca

SEQ ID NO: 2857744 - RNA, 17 nt, Human
ugcacacaccagagccc

SEQ ID NO: 2857745 - RNA, 21 nt, Human
ugcacacaccagagcccaccu

SEQ ID NO: 2857746 - RNA, 16 nt, Human
agcccugguggcagug

SEQ ID NO: 2857747 - RNA, 15 nt, Human
agcccugguggcagu

SEQ ID NO: 2857748 - RNA, 14 nt, Human
agcccugguggcag

SEQ ID NO: 2857749 - RNA, 12 nt, Human
agcccuggcagg

SEQ ID NO: 2857750 - RNA, 17 nt, Human
agcccuggcaggaugac

SEQ ID NO: 2857751 - RNA, 13 nt, Human
agcccuggcagga

SEQ ID NO: 2857752 - RNA, 19 nt, Human
agcccugcuuugggcugcc

SEQ ID NO: 2857753 - RNA, 14 nt, Human
agcccuggcucugc

SEQ ID NO: 2857754 - RNA, 12 nt, Human
agcccuggcccc

SEQ ID NO: 2857755 - RNA, 15 nt, Human
agcccuggcccccug

SEQ ID NO: 2857756 - RNA, 16 nt, Human
agcccuggcccccuga

SEQ ID NO: 2857757 - RNA, 15 nt, Human
agcccuggcucugca

SEQ ID NO: 2857758 - RNA, 21 nt, Human
agcccuggcaggaugacccug

SEQ ID NO: 2857759 - RNA, 17 nt, Human
agcccugcuuugggcug

SEQ ID NO: 2857760 - RNA, 14 nt, Human
agcccgggagccua

SEQ ID NO: 2857761 - RNA, 15 nt, Human
agcccgggagccuag

SEQ ID NO: 2857762 - RNA, 16 nt, Human
agcccgggagccuagg

SEQ ID NO: 2857763 - RNA, 17 nt, Human
agcccgggagccuagga

SEQ ID NO: 2857764 - RNA, 18 nt, Human
agcccgggagccuaggac

SEQ ID NO: 2857765 - RNA, 20 nt, Human
agcccgggagccuaggacca

SEQ ID NO: 2857766 - RNA, 21 nt, Human
agcccgggagccuaggaccac

SEQ ID NO: 2857767 - RNA, 14 nt, Human
agcccggccgcucc

SEQ ID NO: 2857768 - RNA, 20 nt, Human
agcccggaccuuggcagccc

SEQ ID NO: 2857769 - RNA, 16 nt, Human
agcccggcgccccugc

SEQ ID NO: 2857770 - RNA, 18 nt, Human
agcccggcgccccugcca

SEQ ID NO: 2857771 - RNA, 21 nt, Human
agcccggcgccccugccaccu

SEQ ID NO: 2857772 - RNA, 22 nt, Human
agcccggcgccccugccaccuc

SEQ ID NO: 2857773 - RNA, 15 nt, Human
agcccgcggggacau

SEQ ID NO: 2857774 - RNA, 20 nt, Human
agcccgcggggacauuggga

SEQ ID NO: 2857775 - RNA, 23 nt, Human
agccccuugcucuccccugcccu

SEQ ID NO: 2857776 - RNA, 12 nt, Human
agccccuuucca

SEQ ID NO: 2857777 - RNA, 14 nt, Human
agccccuuuccaaa

SEQ ID NO: 2857778 - RNA, 16 nt, Human
agccccuuuccaaaau

SEQ ID NO: 2857779 - RNA, 13 nt, Human
agcccgccugaca

SEQ ID NO: 2857780 - RNA, 18 nt, Human
agcccgccugacagaaac

SEQ ID NO: 2857781 - RNA, 14 nt, Human
agcccccuggccuc

SEQ ID NO: 2857782 - RNA, 20 nt, Human
agccccugauccugugaagu

SEQ ID NO: 2857783 - RNA, 13 nt, Human
agcccccccuucc

SEQ ID NO: 2857784 - RNA, 15 nt, Human
agcccccccuuccac

SEQ ID NO: 2857785 - RNA, 12 nt, Human
agcccccaggaa

SEQ ID NO: 2857786 - RNA, 13 nt, Human
agcccccaggaag

SEQ ID NO: 2857787 - RNA, 21 nt, Human
agcccccaggaagcccaggag

SEQ ID NO: 2857788 - RNA, 13 nt, Human
ugauuucuauuca

SEQ ID NO: 2857789 - RNA, 14 nt, Human
ugauuucuauucaa

SEQ ID NO: 2857790 - RNA, 20 nt, Human
ugauuucuauucaagguggc

SEQ ID NO: 2857791 - RNA, 23 nt, Human
ugauuuccuugaauguggcuuga

SEQ ID NO: 2857792 - RNA, 19 nt, Human
ugauuuccuugaauguggc

SEQ ID NO: 2857793 - RNA, 17 nt, Human
ugauuuccuugaaugug

SEQ ID NO: 2857794 - RNA, 16 nt, Human
ugauuuccuugaaugu

SEQ ID NO: 2857795 - RNA, 15 nt, Human
ugauuuccuugaaug

SEQ ID NO: 2857796 - RNA, 14 nt, Human
ugauuuccuugaau

SEQ ID NO: 2857797 - RNA, 13 nt, Human
ugauuuccuugaa

SEQ ID NO: 2857798 - RNA, 20 nt, Human
ugauuucuuuucuuccuggc

SEQ ID NO: 2857799 - RNA, 21 nt, Human
ugauuucuuuucuuccuggcu

SEQ ID NO: 2857800 - RNA, 13 nt, Human
ugauuuggugacc

SEQ ID NO: 2857801 - RNA, 19 nt, Human
ugauuuggugaccaacugu

SEQ ID NO: 2857802 - RNA, 20 nt, Human
ugauuuggugaccaacuguc

SEQ ID NO: 2857803 - RNA, 23 nt, Human
ugauuccuaagccacuugaaaug

SEQ ID NO: 2857804 - RNA, 17 nt, Human
ugauuugaagaacaugu

SEQ ID NO: 2857805 - RNA, 21 nt, Human
ugauuuagaacuguaugucag

SEQ ID NO: 2857806 - RNA, 17 nt, Human
ugauuucagcucacugc

SEQ ID NO: 2857807 - RNA, 15 nt, Human
ugauuuauaaacaga

SEQ ID NO: 2857808 - RNA, 17 nt, Human
ugauuuauaaacagaca

SEQ ID NO: 2857809 - RNA, 23 nt, Human
ugauuuauaaacagacaauaugu

SEQ ID NO: 2857810 - RNA, 14 nt, Human
ugauuuccuguguc

SEQ ID NO: 2857811 - RNA, 15 nt, Human
ugauuuccuguguca

SEQ ID NO: 2857812 - RNA, 19 nt, Human
ugauuuccugugucaaucc

SEQ ID NO: 2857813 - RNA, 23 nt, Human
agcccagcuugaaaccuucacuu

SEQ ID NO: 2857814 - RNA, 21 nt, Human
agcccagcuuggcccuuuccu

SEQ ID NO: 2857815 - RNA, 23 nt, Human
agcccagcuuggcccuuuccuuc

SEQ ID NO: 2857816 - RNA, 18 nt, Human
ugauucauaguaacuucu

SEQ ID NO: 2857817 - RNA, 16 nt, Human
ugauucauaguaacuu

SEQ ID NO: 2857818 - RNA, 13 nt, Human
ugauucuccugcc

SEQ ID NO: 2857819 - RNA, 16 nt, Human
ugauucucaugccuca

SEQ ID NO: 2857820 - RNA, 16 nt, Human
ugauuuacagcaagua

SEQ ID NO: 2857821 - RNA, 19 nt, Human
ugauuuacagcaaguagau

SEQ ID NO: 2857822 - RNA, 20 nt, Human
ugauuuacagcaaguagaua

SEQ ID NO: 2857823 - RNA, 22 nt, Human
ugauuuacauauauuauuuauu

SEQ ID NO: 2857824 - RNA, 15 nt, Human
ugauucucaugccuc

SEQ ID NO: 2857825 - RNA, 14 nt, Human
ugauucucaugccu

SEQ ID NO: 2857826 - RNA, 13 nt, Human
ugauucucaugcc

SEQ ID NO: 2857827 - RNA, 21 nt, Human
ugauucucagggucucugcug

SEQ ID NO: 2857828 - RNA, 22 nt, Human
ugauucucagggucucugcugc

SEQ ID NO: 2857829 - RNA, 23 nt, Human
ugauucucagggucucugcugcc

SEQ ID NO: 2857830 - RNA, 23 nt, Human
ugauucccaagcucugcuccucu

SEQ ID NO: 2857831 - RNA, 22 nt, Human
ugauucccaagcucugcuccuc

SEQ ID NO: 2857832 - RNA, 20 nt, Human
ugauucucagggucucugcu

SEQ ID NO: 2857833 - RNA, 19 nt, Human
ugauucauaguaacuucuu

SEQ ID NO: 2857834 - RNA, 19 nt, Human
ugauucaugccaauuagca

SEQ ID NO: 2857835 - RNA, 15 nt, Human
agccaggcucaggcc

SEQ ID NO: 2857836 - RNA, 18 nt, Human
agccaggcucaggccaug

SEQ ID NO: 2857837 - RNA, 20 nt, Human
agccaggcugccaaggccag

SEQ ID NO: 2857838 - RNA, 22 nt, Human
agccagcucccucuauuuaugu

SEQ ID NO: 2857839 - RNA, 21 nt, Human
agccaggcugccaaggccaga

SEQ ID NO: 2857840 - RNA, 14 nt, Human
agccagcucccucu

SEQ ID NO: 2857841 - RNA, 15 nt, Human
agccagcucccucua

SEQ ID NO: 2857842 - RNA, 17 nt, Human
agccagcucccucuauu

SEQ ID NO: 2857843 - RNA, 19 nt, Human
agccagcucccucuauuua

SEQ ID NO: 2857844 - RNA, 23 nt, Human
agccagccuucuuccaucccagg

SEQ ID NO: 2857845 - RNA, 15 nt, Human
agccagcucacagug

SEQ ID NO: 2857846 - RNA, 21 nt, Human
agccagcucacagugcugugu

SEQ ID NO: 2857847 - RNA, 23 nt, Human
agccagcucacagugcugugugc

SEQ ID NO: 2857848 - RNA, 22 nt, Human
agccagcgggaauggcagcugc

SEQ ID NO: 2857849 - RNA, 18 nt, Human
agccaucaaaaugcuuuu

SEQ ID NO: 2857850 - RNA, 18 nt, Human
agccaguaaacagaggag

SEQ ID NO: 2857851 - RNA, 16 nt, Human
agccaucaaaaugcuu

SEQ ID NO: 2857852 - RNA, 16 nt, Human
agccaguaaacagagg

SEQ ID NO: 2857853 - RNA, 11 nt, Human
agccagggcug

SEQ ID NO: 2857854 - RNA, 12 nt, Human
agccagggcugc

SEQ ID NO: 2857855 - RNA, 14 nt, Human
agccagggcugcua

SEQ ID NO: 2857856 - RNA, 21 nt, Human
agccagggcugcuagacggag

SEQ ID NO: 2857857 - RNA, 15 nt, Human
agcccacuucugcca

SEQ ID NO: 2857858 - RNA, 14 nt, Human
agcccacuucugcc

SEQ ID NO: 2857859 - RNA, 13 nt, Human
agcccacuucugc

SEQ ID NO: 2857860 - RNA, 13 nt, Human
agcccagagguaa

SEQ ID NO: 2857861 - RNA, 20 nt, Human
agcccagagguaacagaaca

SEQ ID NO: 2857862 - RNA, 21 nt, Human
agcccagagguaacagaacag

SEQ ID NO: 2857863 - RNA, 15 nt, Human
agcccagagguaaca

SEQ ID NO: 2857864 - RNA, 16 nt, Human
agcccagagguaacag

SEQ ID NO: 2857865 - RNA, 17 nt, Human
agcccagagguaacaga

SEQ ID NO: 2857866 - RNA, 18 nt, Human
agcccagagguaacagaa

SEQ ID NO: 2857867 - RNA, 20 nt, Human
agcccagauugugccacugc

SEQ ID NO: 2857868 - RNA, 21 nt, Human
agcccagauugugccacugcu

SEQ ID NO: 2857869 - RNA, 19 nt, Human
agccaugcugggaagacgc

SEQ ID NO: 2857870 - RNA, 15 nt, Human
agccaugcugggaag

SEQ ID NO: 2857871 - RNA, 15 nt, Human
agccaugcccgcauu

SEQ ID NO: 2857872 - RNA, 22 nt, Human
agccaucucucuacuccuaccu

SEQ ID NO: 2857873 - RNA, 23 nt, Human
ugauggaccagugguuuccaguc

SEQ ID NO: 2857874 - RNA, 19 nt, Human
ugaugggagaguagauggu

SEQ ID NO: 2857875 - RNA, 22 nt, Human
ugauggaaguaaagccucaacc

SEQ ID NO: 2857876 - RNA, 20 nt, Human
ugauggaccuucuagaauua

SEQ ID NO: 2857877 - RNA, 23 nt, Human
ugauggaccuucuagaauuauaa

SEQ ID NO: 2857878 - RNA, 23 nt, Human
ugaugaacuuucucuucauacuu

SEQ ID NO: 2857879 - RNA, 14 nt, Human
ugaugaacuuucuc

SEQ ID NO: 2857880 - RNA, 15 nt, Human
ugaugaacuuucucu

SEQ ID NO: 2857881 - RNA, 17 nt, Human
ugaugaacuuauucugu

SEQ ID NO: 2857882 - RNA, 13 nt, Human
ugaugaacuuucu

SEQ ID NO: 2857883 - RNA, 18 nt, Human
ugaugaaauguaaauacu

SEQ ID NO: 2857884 - RNA, 15 nt, Human
ugaugagaauuucua

SEQ ID NO: 2857885 - RNA, 16 nt, Human
ugaugagaauuucuaa

SEQ ID NO: 2857886 - RNA, 23 nt, Human
ugaugagaauuucuaaaaagauu

SEQ ID NO: 2857887 - RNA, 15 nt, Human
ugaugacuggcauuu

SEQ ID NO: 2857888 - RNA, 17 nt, Human
ugaugacuggcauuuua

SEQ ID NO: 2857889 - RNA, 18 nt, Human
ugaugacuggcauuuuau

SEQ ID NO: 2857890 - RNA, 19 nt, Human
agcaccuccuugucacuuu

SEQ ID NO: 2857891 - RNA, 14 nt, Human
ugaugacagacacu

SEQ ID NO: 2857892 - RNA, 14 nt, Human
ugaugaccaaaguc

SEQ ID NO: 2857893 - RNA, 15 nt, Human
agcaccugccaggga

SEQ ID NO: 2857894 - RNA, 15 nt, Human
ugauccucccaccuc

SEQ ID NO: 2857895 - RNA, 13 nt, Human
ugauccuccaaca

SEQ ID NO: 2857896 - RNA, 14 nt, Human
agcaccugccuccu

SEQ ID NO: 2857897 - RNA, 22 nt, Human
ugauccuaaugaaugcauaaaa

SEQ ID NO: 2857898 - RNA, 21 nt, Human
ugauccucccaccucagccuc

SEQ ID NO: 2857899 - RNA, 16 nt, Human
ugauccucccaccuca

SEQ ID NO: 2857900 - RNA, 22 nt, Human
ugauccucccaccucagccucc

SEQ ID NO: 2857901 - RNA, 13 nt, Human
ugauccugcggag

SEQ ID NO: 2857902 - RNA, 21 nt, Human
ugauccugcggagaacacccu

SEQ ID NO: 2857903 - RNA, 12 nt, Human
ugauccucccac

SEQ ID NO: 2857904 - RNA, 19 nt, Human
ugaugcuugauauuuucua

SEQ ID NO: 2857905 - RNA, 17 nt, Human
ugauuaauggaaauguu

SEQ ID NO: 2857906 - RNA, 16 nt, Human
agccacugcaccgggc

SEQ ID NO: 2857907 - RNA, 19 nt, Human
agccacuccccuccacucu

SEQ ID NO: 2857908 - RNA, 15 nt, Human
agccacuccccucca

SEQ ID NO: 2857909 - RNA, 14 nt, Human
agccacuccccucc

SEQ ID NO: 2857910 - RNA, 14 nt, Human
agccacuagacucu

SEQ ID NO: 2857911 - RNA, 22 nt, Human
agccacuagacucuucacuguu

SEQ ID NO: 2857912 - RNA, 22 nt, Human
agccacucaggaggcugaggca

SEQ ID NO: 2857913 - RNA, 15 nt, Human
agccacucaggaggc

SEQ ID NO: 2857914 - RNA, 16 nt, Human
ugauggucuucagccu

SEQ ID NO: 2857915 - RNA, 15 nt, Human
ugauggugacuuccu

SEQ ID NO: 2857916 - RNA, 14 nt, Human
ugauuaacaaauau

SEQ ID NO: 2857917 - RNA, 15 nt, Human
ugauuaacaaauaug

SEQ ID NO: 2857918 - RNA, 17 nt, Human
ugauuaacaaauaugcu

SEQ ID NO: 2857919 - RNA, 14 nt, Human
ugauuaacagagag

SEQ ID NO: 2857920 - RNA, 17 nt, Human
ugauggugaugaaaugu

SEQ ID NO: 2857921 - RNA, 15 nt, Human
ugauggugaugaaau

SEQ ID NO: 2857922 - RNA, 16 nt, Human
ugauggugaugaaaug

SEQ ID NO: 2857923 - RNA, 19 nt, Human
agccacugcaccgggccac

SEQ ID NO: 2857924 - RNA, 18 nt, Human
agccacugcaccgggcca

SEQ ID NO: 2857925 - RNA, 11 nt, Human
agccagccacu

SEQ ID NO: 2857926 - RNA, 12 nt, Human
agccagccacuc

SEQ ID NO: 2857927 - RNA, 13 nt, Human
agccagccacucu

SEQ ID NO: 2857928 - RNA, 14 nt, Human
agccagccacucua

SEQ ID NO: 2857929 - RNA, 16 nt, Human
agccagccacucuacc

SEQ ID NO: 2857930 - RNA, 21 nt, Human
agccagccacucuaccagugc

SEQ ID NO: 2857931 - RNA, 18 nt, Human
agccagccuucuuccauc

SEQ ID NO: 2857932 - RNA, 21 nt, Human
agccagccuucuuccauccca

SEQ ID NO: 2857933 - RNA, 12 nt, Human
agccagccuggu

SEQ ID NO: 2857934 - RNA, 13 nt, Human
agccagccugguc

SEQ ID NO: 2857935 - RNA, 11 nt, Human
agccagccuga

SEQ ID NO: 2857936 - RNA, 14 nt, Human
agccagccugaccu

SEQ ID NO: 2857937 - RNA, 15 nt, Human
agccagccugaccuu

SEQ ID NO: 2857938 - RNA, 18 nt, Human
agccagccugaccuuccu

SEQ ID NO: 2857939 - RNA, 23 nt, Human
agccagccugaccuuccuuccug

SEQ ID NO: 2857940 - RNA, 23 nt, Human
uggaauugauuugcauugaacac

SEQ ID NO: 2857941 - RNA, 17 nt, Human
uggaauugggagcuugg

SEQ ID NO: 2857942 - RNA, 16 nt, Human
aggcaacauccaaaau

SEQ ID NO: 2857943 - RNA, 15 nt, Human
aggcaaccugauugu

SEQ ID NO: 2857944 - RNA, 19 nt, Human
aggcaaccugauuguaaac

SEQ ID NO: 2857945 - RNA, 17 nt, Human
aggcaaauguguacaug

SEQ ID NO: 2857946 - RNA, 19 nt, Human
aggcaaauguuuaaacauu

SEQ ID NO: 2857947 - RNA, 14 nt, Human
aggcaaauguguac

SEQ ID NO: 2857948 - RNA, 13 nt, Human
aggcaaaauugca

SEQ ID NO: 2857949 - RNA, 19 nt, Human
aggcaaaauccuugcuuau

SEQ ID NO: 2857950 - RNA, 17 nt, Human
aggcaaaauccuugcuu

SEQ ID NO: 2857951 - RNA, 18 nt, Human
aggaugauaaguuccuuu

SEQ ID NO: 2857952 - RNA, 19 nt, Human
aggauuuugauccaagcug

SEQ ID NO: 2857953 - RNA, 17 nt, Human
aggaugccccguccccc

SEQ ID NO: 2857954 - RNA, 15 nt, Human
aggauuuuuaucuuu

SEQ ID NO: 2857955 - RNA, 15 nt, Human
aggcaaaaauguaaa

SEQ ID NO: 2857956 - RNA, 21 nt, Human
aggauuuuuuuuuuuuuuuga

SEQ ID NO: 2857957 - RNA, 13 nt, Human
uggaccccagaga

SEQ ID NO: 2857958 - RNA, 16 nt, Human
uggacccagggaacag

SEQ ID NO: 2857959 - RNA, 17 nt, Human
uggaccaguggugccuu

SEQ ID NO: 2857960 - RNA, 19 nt, Human
uggaccagugguuuccagu

SEQ ID NO: 2857961 - RNA, 14 nt, Human
uggacccaaggaaa

SEQ ID NO: 2857962 - RNA, 15 nt, Human
uggacccaaggaaaa

SEQ ID NO: 2857963 - RNA, 20 nt, Human
uggacccaaggaaaacugca

SEQ ID NO: 2857964 - RNA, 21 nt, Human
uggacccaaggaaaacugcau

SEQ ID NO: 2857965 - RNA, 18 nt, Human
uggaccaguggucucaca

SEQ ID NO: 2857966 - RNA, 13 nt, Human
uggaccagugguc

SEQ ID NO: 2857967 - RNA, 16 nt, Human
uggacacagcucuucu

SEQ ID NO: 2857968 - RNA, 15 nt, Human
uggacacagcucuuc

SEQ ID NO: 2857969 - RNA, 18 nt, Human
uggacacagcucuucucc

SEQ ID NO: 2857970 - RNA, 19 nt, Human
uggaauuuaccaguuaauu

SEQ ID NO: 2857971 - RNA, 18 nt, Human
uggaauuuauaauucagu

SEQ ID NO: 2857972 - RNA, 20 nt, Human
uggaauuuauaauucaguau

SEQ ID NO: 2857973 - RNA, 20 nt, Human
uggaccucuacuuuccaggc

SEQ ID NO: 2857974 - RNA, 21 nt, Human
aggagggagcaucagugcccu

SEQ ID NO: 2857975 - RNA, 13 nt, Human
aggauaagugaaa

SEQ ID NO: 2857976 - RNA, 19 nt, Human
aggaugagcucuacccagg

SEQ ID NO: 2857977 - RNA, 20 nt, Human
aggaugagcucuacccaggg

SEQ ID NO: 2857978 - RNA, 23 nt, Human
uggaaauauucaugcuucuuccu

SEQ ID NO: 2857979 - RNA, 18 nt, Human
aggagcugccuuggcuca

SEQ ID NO: 2857980 - RNA, 19 nt, Human
aggagcugccuuggcucag

SEQ ID NO: 2857981 - RNA, 23 nt, Human
aggagcugccuuggcucagacau

SEQ ID NO: 2857982 - RNA, 21 nt, Human
aggagcugccuuggcucagac

SEQ ID NO: 2857983 - RNA, 22 nt, Human
aggagcugccuuggcucagaca

SEQ ID NO: 2857984 - RNA, 21 nt, Human
uggaaauucaggugaaaaugu

SEQ ID NO: 2857985 - RNA, 23 nt, Human
aggagggagacacuggccccuca

SEQ ID NO: 2857986 - RNA, 16 nt, Human
aggagggagacacugg

SEQ ID NO: 2857987 - RNA, 17 nt, Human
aggaggcaugccucuga

SEQ ID NO: 2857988 - RNA, 20 nt, Human
aggaggcagagguugcagug

SEQ ID NO: 2857989 - RNA, 20 nt, Human
aggaggcuuggaaagcauca

SEQ ID NO: 2857990 - RNA, 23 nt, Human
aggaggauugcuugagcccagga

SEQ ID NO: 2857991 - RNA, 22 nt, Human
aggaggcagaauaagaaaacaa

SEQ ID NO: 2857992 - RNA, 21 nt, Human
aggaggauugcuugagcccag

SEQ ID NO: 2857993 - RNA, 20 nt, Human
aggaggauugcuugagccca

SEQ ID NO: 2857994 - RNA, 15 nt, Human
aggaggaugucccug

SEQ ID NO: 2857995 - RNA, 17 nt, Human
aggaggaugucccuggg

SEQ ID NO: 2857996 - RNA, 20 nt, Human
aggaggaugucccugggcca

SEQ ID NO: 2857997 - RNA, 21 nt, Human
aggaggaugucccugggccag

SEQ ID NO: 2857998 - RNA, 16 nt, Human
aggagcugcuggcuug

SEQ ID NO: 2857999 - RNA, 14 nt, Human
aggagcugcuggcu

SEQ ID NO: 2858000 - RNA, 16 nt, Human
aggaggagcuucuggg

SEQ ID NO: 2858001 - RNA, 13 nt, Human
aggagcugcuggc

SEQ ID NO: 2858002 - RNA, 12 nt, Human
aggagcugcugg

SEQ ID NO: 2858003 - RNA, 17 nt, Human
ugcuugccacagagcgg

SEQ ID NO: 2858004 - RNA, 13 nt, Human
aggagcgcaagau

SEQ ID NO: 2858005 - RNA, 17 nt, Human
aggagcgcaagauagau

SEQ ID NO: 2858006 - RNA, 19 nt, Human
aggagccuuuuuaaaacac

SEQ ID NO: 2858007 - RNA, 16 nt, Human
aggagccuuuuuaaaa

SEQ ID NO: 2858008 - RNA, 12 nt, Human
aggagcuaaggc

SEQ ID NO: 2858009 - RNA, 13 nt, Human
aggagcuaaggcu

SEQ ID NO: 2858010 - RNA, 14 nt, Human
aggagcuaaggcuc

SEQ ID NO: 2858011 - RNA, 15 nt, Human
aggagcuaaggcucu

SEQ ID NO: 2858012 - RNA, 14 nt, Human
aggagccugcuggu

SEQ ID NO: 2858013 - RNA, 11 nt, Human
aggagccuggc

SEQ ID NO: 2858014 - RNA, 22 nt, Human
aggagccugcuggucacagccu

SEQ ID NO: 2858015 - RNA, 13 nt, Human
aggagcccucauc

SEQ ID NO: 2858016 - RNA, 18 nt, Human
ugcuugcucauaugcaug

SEQ ID NO: 2858017 - RNA, 19 nt, Human
ugcuugccugcguuuugga

SEQ ID NO: 2858018 - RNA, 17 nt, Human
ugcuuugggcugcccug

SEQ ID NO: 2858019 - RNA, 18 nt, Human
ugcuuugggcugcccugg

SEQ ID NO: 2858020 - RNA, 19 nt, Human
ugcuuugggcugcccuggu

SEQ ID NO: 2858021 - RNA, 20 nt, Human
ugcuuugggcugcccuggug

SEQ ID NO: 2858022 - RNA, 21 nt, Human
ugcuuugggcugcccuggugc

SEQ ID NO: 2858023 - RNA, 12 nt, Human
ugcuuuuaauua

SEQ ID NO: 2858024 - RNA, 13 nt, Human
ugcuuuuaauuaa

SEQ ID NO: 2858025 - RNA, 16 nt, Human
ugcuuuuaauuaaaua

SEQ ID NO: 2858026 - RNA, 12 nt, Human
ugcuuuuauauc

SEQ ID NO: 2858027 - RNA, 15 nt, Human
ugcuuuuauaucugu

SEQ ID NO: 2858028 - RNA, 20 nt, Human
ugcuuuuauaucuguaugua

SEQ ID NO: 2858029 - RNA, 14 nt, Human
ugcuuuuauuuuga

SEQ ID NO: 2858030 - RNA, 15 nt, Human
ugcuuuuauuuugaa

SEQ ID NO: 2858031 - RNA, 16 nt, Human
ugcuuuuauuuugaaa

SEQ ID NO: 2858032 - RNA, 21 nt, Human
ugcuuuuauuuugaaaagcuu

SEQ ID NO: 2858033 - RNA, 18 nt, Human
uggaaagccucugcugcc

SEQ ID NO: 2858034 - RNA, 16 nt, Human
uggaaagccucugcug

SEQ ID NO: 2858035 - RNA, 15 nt, Human
uggaaagccucugcu

SEQ ID NO: 2858036 - RNA, 14 nt, Human
uggaaagccucugc

SEQ ID NO: 2858037 - RNA, 12 nt, Human
uggaaagccucu

SEQ ID NO: 2858038 - RNA, 13 nt, Human
ugcuuuucccucu

SEQ ID NO: 2858039 - RNA, 14 nt, Human
ugcuuuucccucuu

SEQ ID NO: 2858040 - RNA, 19 nt, Human
ugcuuuucccucuuuucuu

SEQ ID NO: 2858041 - RNA, 18 nt, Human
aggacuuugaggcaagug

SEQ ID NO: 2858042 - RNA, 23 nt, Human
aggacuuugaggcaagugugggc

SEQ ID NO: 2858043 - RNA, 22 nt, Human
aggacuuugauugcacauuguu

SEQ ID NO: 2858044 - RNA, 23 nt, Human
aggacuuuucuuuguggcuuccu

SEQ ID NO: 2858045 - RNA, 15 nt, Human
aggagauugagaagg

SEQ ID NO: 2858046 - RNA, 16 nt, Human
aggagauugagaagga

SEQ ID NO: 2858047 - RNA, 17 nt, Human
aggagauugagaaggag

SEQ ID NO: 2858048 - RNA, 19 nt, Human
aggagauugagaaggagag

SEQ ID NO: 2858049 - RNA, 21 nt, Human
aggagauugagaaggagagaa

SEQ ID NO: 2858050 - RNA, 22 nt, Human
aggagauugagaaggagagaaa

SEQ ID NO: 2858051 - RNA, 13 nt, Human
aggagauugagaa

SEQ ID NO: 2858052 - RNA, 17 nt, Human
aggagaaacacuugaac

SEQ ID NO: 2858053 - RNA, 20 nt, Human
aggagaaacacuugaaccug

SEQ ID NO: 2858054 - RNA, 22 nt, Human
aggagccccgaggccuucucug

SEQ ID NO: 2858055 - RNA, 14 nt, Human
aggagccagacaga

SEQ ID NO: 2858056 - RNA, 15 nt, Human
aggagccagacagac

SEQ ID NO: 2858057 - RNA, 16 nt, Human
aggagccagacagacc

SEQ ID NO: 2858058 - RNA, 12 nt, Human
aggagccaggca

SEQ ID NO: 2858059 - RNA, 13 nt, Human
aggagccaggcaa

SEQ ID NO: 2858060 - RNA, 19 nt, Human
aggagccaggcaacuucag

SEQ ID NO: 2858061 - RNA, 15 nt, Human
aggagcaaaggcuga

SEQ ID NO: 2858062 - RNA, 16 nt, Human
aggagcaaaggcugag

SEQ ID NO: 2858063 - RNA, 16 nt, Human
aggagcagccucagaa

SEQ ID NO: 2858064 - RNA, 19 nt, Human
aggagcagccucagaacaa

SEQ ID NO: 2858065 - RNA, 19 nt, Human
aggagcaggagccugagcc

SEQ ID NO: 2858066 - RNA, 19 nt, Human
aggagcagugcaggcacag

SEQ ID NO: 2858067 - RNA, 14 nt, Human
aggagcagugcagg

SEQ ID NO: 2858068 - RNA, 16 nt, Human
aggagcagugcaggca

SEQ ID NO: 2858069 - RNA, 16 nt, Human
aggacuugugucucug

SEQ ID NO: 2858070 - RNA, 13 nt, Human
aggacuugugucu

SEQ ID NO: 2858071 - RNA, 13 nt, Human
aggacugagcccc

SEQ ID NO: 2858072 - RNA, 16 nt, Human
aggacugagccccgca

SEQ ID NO: 2858073 - RNA, 24 nt, Human
aggacugagccccgcagaccuccc

SEQ ID NO: 2858074 - RNA, 12 nt, Human
aggacugaggga

SEQ ID NO: 2858075 - RNA, 18 nt, Human
aggacugagggacucuga

SEQ ID NO: 2858076 - RNA, 18 nt, Human
aggacauugcggacagcc

SEQ ID NO: 2858077 - RNA, 17 nt, Human
aggacauugcggacagc

SEQ ID NO: 2858078 - RNA, 15 nt, Human
aggacauugcggaca

SEQ ID NO: 2858079 - RNA, 15 nt, Human
aggacauguuuuugu

SEQ ID NO: 2858080 - RNA, 16 nt, Human
aggacauguuuuuguu

SEQ ID NO: 2858081 - RNA, 21 nt, Human
aggacauguuuuuguuuucuu

SEQ ID NO: 2858082 - RNA, 23 nt, Human
aggacauguuuuuguuuucuuug

SEQ ID NO: 2858083 - RNA, 15 nt, Human
aggacauuaugugug

SEQ ID NO: 2858084 - RNA, 16 nt, Human
aggacauuaugugugc

SEQ ID NO: 2858085 - RNA, 17 nt, Human
aggacauuaugugugca

SEQ ID NO: 2858086 - RNA, 23 nt, Human
aggacauugcggacagccacggc

SEQ ID NO: 2858087 - RNA, 19 nt, Human
aggacauugcggacagcca

SEQ ID NO: 2858088 - RNA, 19 nt, Human
aggacucugccuccucuuc

SEQ ID NO: 2858089 - RNA, 14 nt, Human
aggacauucuugua

SEQ ID NO: 2858090 - RNA, 18 nt, Human
ugcuucauaaaugaagca

SEQ ID NO: 2858091 - RNA, 20 nt, Human
ugcuucauaaaugaagcagc

SEQ ID NO: 2858092 - RNA, 17 nt, Human
ugcuucaucauucccuc

SEQ ID NO: 2858093 - RNA, 23 nt, Human
ugcuucaucauucccucucaucu

SEQ ID NO: 2858094 - RNA, 19 nt, Human
aggacacuaaccacgcugg

SEQ ID NO: 2858095 - RNA, 23 nt, Human
aggacacuaaccacgcuggaccu

SEQ ID NO: 2858096 - RNA, 22 nt, Human
ugcuucacaguagagccagcuu

SEQ ID NO: 2858097 - RNA, 18 nt, Human
ugcuucaguggagaauua

SEQ ID NO: 2858098 - RNA, 16 nt, Human
ugcuucaguggagaau

SEQ ID NO: 2858099 - RNA, 23 nt, Human
ugcuucagccugaggcugagacu

SEQ ID NO: 2858100 - RNA, 22 nt, Human
ugcuucagccugaggcugagac

SEQ ID NO: 2858101 - RNA, 17 nt, Human
ugcuucagccugaggcu

SEQ ID NO: 2858102 - RNA, 15 nt, Human
ugcuucagccugagg

SEQ ID NO: 2858103 - RNA, 14 nt, Human
ugcuucagccugag

SEQ ID NO: 2858104 - RNA, 12 nt, Human
ugcuucagccug

SEQ ID NO: 2858105 - RNA, 22 nt, Human
aggacagggaggugaccccagg

SEQ ID NO: 2858106 - RNA, 20 nt, Human
aggacaggcgggaggaggug

SEQ ID NO: 2858107 - RNA, 21 nt, Human
aggacaugauggagcgcaccu

SEQ ID NO: 2858108 - RNA, 13 nt, Human
aggacaugaaacu

SEQ ID NO: 2858109 - RNA, 18 nt, Human
aggacaugaaacuccacc

SEQ ID NO: 2858110 - RNA, 17 nt, Human
aggacaugaugcuuuua

SEQ ID NO: 2858111 - RNA, 17 nt, Human
aggacaugcugaagcca

SEQ ID NO: 2858112 - RNA, 20 nt, Human
aggacauccccccgccaaaa

SEQ ID NO: 2858113 - RNA, 22 nt, Human
aggacaucagcaaacaggauca

SEQ ID NO: 2858114 - RNA, 16 nt, Human
aggacaucagcaaaca

SEQ ID NO: 2858115 - RNA, 15 nt, Human
aggacaucagcaaac

SEQ ID NO: 2858116 - RNA, 21 nt, Human
aggacauagagguauauugga

SEQ ID NO: 2858117 - RNA, 22 nt, Human
aggacauagagguauauuggaa

SEQ ID NO: 2858118 - RNA, 12 nt, Human
aggacaucagca

SEQ ID NO: 2858119 - RNA, 14 nt, Human
aggacaucagcaaa

SEQ ID NO: 2858120 - RNA, 13 nt, Human
aggacaucagcaa

SEQ ID NO: 2858121 - RNA, 14 nt, Human
ugcuucagccuccc

SEQ ID NO: 2858122 - RNA, 13 nt, Human
ugcuucagccucc

SEQ ID NO: 2858123 - RNA, 14 nt, Human
ugcuuauugcuuag

SEQ ID NO: 2858124 - RNA, 23 nt, Human
ugcuucaauuaauaaaaaaugga

SEQ ID NO: 2858125 - RNA, 21 nt, Human
ugcuucacaguagagccagcu

SEQ ID NO: 2858126 - RNA, 20 nt, Human
ugcuucacaguagagccagc

SEQ ID NO: 2858127 - RNA, 20 nt, Human
ugcuucagauauuauugcuu

SEQ ID NO: 2858128 - RNA, 19 nt, Human
ugcuucagauguggagcca

SEQ ID NO: 2858129 - RNA, 20 nt, Human
ugcuucagauguggagccag

SEQ ID NO: 2858130 - RNA, 21 nt, Human
ugcuucagauguggagccagg

SEQ ID NO: 2858131 - RNA, 22 nt, Human
ugcuucagauguggagccaggc

SEQ ID NO: 2858132 - RNA, 16 nt, Human
ugcuucacaguagagc

SEQ ID NO: 2858133 - RNA, 13 nt, Human
ugcuucacaguag

SEQ ID NO: 2858134 - RNA, 18 nt, Human
ugcuuauagguggccucu

SEQ ID NO: 2858135 - RNA, 21 nt, Human
ugcuuaugacaucacuuguac

SEQ ID NO: 2858136 - RNA, 17 nt, Human
ugcuuauagguggccuc

SEQ ID NO: 2858137 - RNA, 22 nt, Human
ugcugucaugaaaucagcaaga

SEQ ID NO: 2858138 - RNA, 23 nt, Human
ugcugugagucuuugguucuaag

SEQ ID NO: 2858139 - RNA, 20 nt, Human
ugcuuaguguacuuggagua

SEQ ID NO: 2858140 - RNA, 15 nt, Human
ugcugucuucuggac

SEQ ID NO: 2858141 - RNA, 19 nt, Human
ugcugccgccccacccaga

SEQ ID NO: 2858142 - RNA, 13 nt, Human
aggaauuugggac

SEQ ID NO: 2858143 - RNA, 20 nt, Human
aggaauuugggacccugcuu

SEQ ID NO: 2858144 - RNA, 14 nt, Human
aggaauuuuaaaaa

SEQ ID NO: 2858145 - RNA, 18 nt, Human
ugcuggcuguuggcuggg

SEQ ID NO: 2858146 - RNA, 15 nt, Human
ugcuggcugccuuag

SEQ ID NO: 2858147 - RNA, 14 nt, Human
ugcuggcugccuua

SEQ ID NO: 2858148 - RNA, 21 nt, Human
ugcuggcugccuuagaaccuu

SEQ ID NO: 2858149 - RNA, 14 nt, Human
ugcuggagguggga

SEQ ID NO: 2858150 - RNA, 15 nt, Human
ugcuggaggugggag

SEQ ID NO: 2858151 - RNA, 18 nt, Human
ugcuggccagccuggggc

SEQ ID NO: 2858152 - RNA, 21 nt, Human
ugcuggccagccuggggccug

SEQ ID NO: 2858153 - RNA, 22 nt, Human
ugcuggccagccuggggccugg

SEQ ID NO: 2858154 - RNA, 23 nt, Human
ugcuggccagccuggggccuggc

SEQ ID NO: 2858155 - RNA, 21 nt, Human
ugcuguacaucuauuuuggau

SEQ ID NO: 2858156 - RNA, 17 nt, Human
ugcuguacaucuauuuu

SEQ ID NO: 2858157 - RNA, 16 nt, Human
ugcuguacaucuauuu

SEQ ID NO: 2858158 - RNA, 15 nt, Human
ugcuguacaucuauu

SEQ ID NO: 2858159 - RNA, 16 nt, Human
ugcugggauggugggc

SEQ ID NO: 2858160 - RNA, 19 nt, Human
ugcugggauggugggcuuc

SEQ ID NO: 2858161 - RNA, 17 nt, Human
ugcugggacuggccagg

SEQ ID NO: 2858162 - RNA, 15 nt, Human
ugcugggacuggcca

SEQ ID NO: 2858163 - RNA, 17 nt, Human
ugcuguccaugcuucuc

SEQ ID NO: 2858164 - RNA, 12 nt, Human
ugcugucccucc

SEQ ID NO: 2858165 - RNA, 13 nt, Human
ugcugucccuccc

SEQ ID NO: 2858166 - RNA, 16 nt, Human
ugcugucccucccccu

SEQ ID NO: 2858167 - RNA, 17 nt, Human
ugcugucccucccccuu

SEQ ID NO: 2858168 - RNA, 20 nt, Human
ugcugucaaguuccuuuggg

SEQ ID NO: 2858169 - RNA, 15 nt, Human
ugcugucaccucucc

SEQ ID NO: 2858170 - RNA, 21 nt, Human
ugcugucaccucucccacggg

SEQ ID NO: 2858171 - RNA, 15 nt, Human
ugcuguaagaugucu

SEQ ID NO: 2858172 - RNA, 17 nt, Human
ugcuguaagaugucugu

SEQ ID NO: 2858173 - RNA, 22 nt, Human
ugcuguaagaugucuguuugcu

SEQ ID NO: 2858174 - RNA, 14 nt, Human
ugcuguccugaucu

SEQ ID NO: 2858175 - RNA, 16 nt, Human
ugcuguccugaucugu

SEQ ID NO: 2858176 - RNA, 19 nt, Human
ugcuguccugaucugugau

SEQ ID NO: 2858177 - RNA, 14 nt, Human
ugcuguccuugaau

SEQ ID NO: 2858178 - RNA, 19 nt, Human
ugcuguccuugaaugccau

SEQ ID NO: 2858179 - RNA, 14 nt, Human
ugcugucucugcuc

SEQ ID NO: 2858180 - RNA, 15 nt, Human
ugcugucucugcucg

SEQ ID NO: 2858181 - RNA, 16 nt, Human
ugcugucucugcucgc

SEQ ID NO: 2858182 - RNA, 19 nt, Human
ugcugucucugcucgcccu

SEQ ID NO: 2858183 - RNA, 12 nt, Human
ugcugucugcag

SEQ ID NO: 2858184 - RNA, 13 nt, Human
ugcugucugcagc

SEQ ID NO: 2858185 - RNA, 14 nt, Human
ugcugucugcagcc

SEQ ID NO: 2858186 - RNA, 15 nt, Human
ugcugucugcagccu

SEQ ID NO: 2858187 - RNA, 17 nt, Human
ugcugucugcagccuug

SEQ ID NO: 2858188 - RNA, 23 nt, Human
ugcuguccuaggccacaccaucu

SEQ ID NO: 2858189 - RNA, 16 nt, Human
ugcuguccuaggccac

SEQ ID NO: 2858190 - RNA, 20 nt, Human
ugcuguccccuuggcagguc

SEQ ID NO: 2858191 - RNA, 14 nt, Human
ugcuguccuaggcc

SEQ ID NO: 2858192 - RNA, 14 nt, Human
aggaauuuauaccu

SEQ ID NO: 2858193 - RNA, 15 nt, Human
aggaauuuauaccuc

SEQ ID NO: 2858194 - RNA, 17 nt, Human
aggaaggagagccugcu

SEQ ID NO: 2858195 - RNA, 15 nt, Human
aggaaggagagccug

SEQ ID NO: 2858196 - RNA, 18 nt, Human
aggaaggagagccugcug

SEQ ID NO: 2858197 - RNA, 18 nt, Human
aggaagcaccccaugcca

SEQ ID NO: 2858198 - RNA, 19 nt, Human
ugcuauuuauuuuccuaaa

SEQ ID NO: 2858199 - RNA, 20 nt, Human
ugcuauuuauuuuuacaaga

SEQ ID NO: 2858200 - RNA, 18 nt, Human
ugcuauuuauuuuccuaa

SEQ ID NO: 2858201 - RNA, 15 nt, Human
ugcuccaccacaucc

SEQ ID NO: 2858202 - RNA, 14 nt, Human
ugcuccaccacauc

SEQ ID NO: 2858203 - RNA, 16 nt, Human
ugcuauuuauuuuccu

SEQ ID NO: 2858204 - RNA, 11 nt, Human
ugccucugcca

SEQ ID NO: 2858205 - RNA, 20 nt, Human
ugcuauuguuacucuuacga

SEQ ID NO: 2858206 - RNA, 18 nt, Human
agcugggacuacaggcac

SEQ ID NO: 2858207 - RNA, 16 nt, Human
agcugggacuacaggc

SEQ ID NO: 2858208 - RNA, 19 nt, Human
agcugggacuacaggcacc

SEQ ID NO: 2858209 - RNA, 23 nt, Human
ugcuccagcaacacagccugggc

SEQ ID NO: 2858210 - RNA, 19 nt, Human
ugcuccagcaacacagccu

SEQ ID NO: 2858211 - RNA, 15 nt, Human
ugcuccagcaacaca

SEQ ID NO: 2858212 - RNA, 19 nt, Human
ugcuccacccuuggccugu

SEQ ID NO: 2858213 - RNA, 18 nt, Human
ugcuccacccuuggccug

SEQ ID NO: 2858214 - RNA, 17 nt, Human
ugcuccacccuuggccu

SEQ ID NO: 2858215 - RNA, 16 nt, Human
ugcuccacccuuggcc

SEQ ID NO: 2858216 - RNA, 23 nt, Human
ugcuccacccuuggccugucuca

SEQ ID NO: 2858217 - RNA, 21 nt, Human
ugcuccaccuuucagcccacg

SEQ ID NO: 2858218 - RNA, 22 nt, Human
ugcuccaccuuucagcccacgu

SEQ ID NO: 2858219 - RNA, 18 nt, Human
ugcuccacgcgcuucgac

SEQ ID NO: 2858220 - RNA, 14 nt, Human
ugcuccagaauuug

SEQ ID NO: 2858221 - RNA, 19 nt, Human
ugcuccagaauuuggaaau

SEQ ID NO: 2858222 - RNA, 20 nt, Human
ugcuccagaauuuggaaauc

SEQ ID NO: 2858223 - RNA, 21 nt, Human
ugcuccagaauuuggaaaucc

SEQ ID NO: 2858224 - RNA, 22 nt, Human
ugcuccagaauuuggaaauccu

SEQ ID NO: 2858225 - RNA, 22 nt, Human
ugcuccacccuuggccugucuc

SEQ ID NO: 2858226 - RNA, 23 nt, Human
ugcugacuccacgauccugccac

SEQ ID NO: 2858227 - RNA, 16 nt, Human
ugcucugcugacagac

SEQ ID NO: 2858228 - RNA, 15 nt, Human
ugcuccgcugcuccu

SEQ ID NO: 2858229 - RNA, 18 nt, Human
ugcuccgcugcuccuugg

SEQ ID NO: 2858230 - RNA, 20 nt, Human
ugcuccgcugcuccuuggcu

SEQ ID NO: 2858231 - RNA, 21 nt, Human
ugcuccgcugcuccuuggcuu

SEQ ID NO: 2858232 - RNA, 23 nt, Human
ugcuccgcugcuccuuggcuuac

SEQ ID NO: 2858233 - RNA, 15 nt, Human
ugcucccucuccccc

SEQ ID NO: 2858234 - RNA, 16 nt, Human
ugcugaccaauugugc

SEQ ID NO: 2858235 - RNA, 18 nt, Human
ugcugaccaauugugcug

SEQ ID NO: 2858236 - RNA, 20 nt, Human
ugcugaccaauugugcugcc

SEQ ID NO: 2858237 - RNA, 21 nt, Human
ugcugaccaauugugcugcca

SEQ ID NO: 2858238 - RNA, 22 nt, Human
ugcugaccaauugugcugccau

SEQ ID NO: 2858239 - RNA, 23 nt, Human
ugcugaccaauugugcugccauu

SEQ ID NO: 2858240 - RNA, 21 nt, Human
ugcugaccucagcgguugcca

SEQ ID NO: 2858241 - RNA, 22 nt, Human
ugcucugcugacagacacaggc

SEQ ID NO: 2858242 - RNA, 21 nt, Human
ugcucugcugacagacacagg

SEQ ID NO: 2858243 - RNA, 12 nt, Human
ugcucccugugu

SEQ ID NO: 2858244 - RNA, 17 nt, Human
ugcucccuguguccacc

SEQ ID NO: 2858245 - RNA, 23 nt, Human
ugcucccuguguccaccuguggg

SEQ ID NO: 2858246 - RNA, 15 nt, Human
ugcucccuucagccc

SEQ ID NO: 2858247 - RNA, 16 nt, Human
ugcucccuucagcccc

SEQ ID NO: 2858248 - RNA, 18 nt, Human
ugcucccugguucugaug

SEQ ID NO: 2858249 - RNA, 22 nt, Human
ugcucccugaagccagccuucu

SEQ ID NO: 2858250 - RNA, 18 nt, Human
ugcucccugaagccagcc

SEQ ID NO: 2858251 - RNA, 19 nt, Human
ugcucccugaagccagccu

SEQ ID NO: 2858252 - RNA, 20 nt, Human
ugcucccugaagccagccuu

SEQ ID NO: 2858253 - RNA, 21 nt, Human
ugcucccugaagccagccuuc

SEQ ID NO: 2858254 - RNA, 16 nt, Human
ugcuccccagcccugg

SEQ ID NO: 2858255 - RNA, 17 nt, Human
ugcuccccagcccuggc

SEQ ID NO: 2858256 - RNA, 18 nt, Human
ugcuccccagcccuggcu

SEQ ID NO: 2858257 - RNA, 22 nt, Human
ugcuccccagcccuggcucugc

SEQ ID NO: 2858258 - RNA, 23 nt, Human
ugcuccccagcccuggcucugca

SEQ ID NO: 2858259 - RNA, 19 nt, Human
ugcucccuccccugcccug

SEQ ID NO: 2858260 - RNA, 18 nt, Human
ugcucccuccccugcccu

SEQ ID NO: 2858261 - RNA, 20 nt, Human
ugcucccuccccugcccugg

SEQ ID NO: 2858262 - RNA, 13 nt, Human
ugcucccugaagc

SEQ ID NO: 2858263 - RNA, 14 nt, Human
ugcucccugaagcc

SEQ ID NO: 2858264 - RNA, 15 nt, Human
ugcucccugaagcca

SEQ ID NO: 2858265 - RNA, 17 nt, Human
ugcucccugaagccagc

SEQ ID NO: 2858266 - RNA, 17 nt, Human
uggcuucccgcucagcc

SEQ ID NO: 2858267 - RNA, 15 nt, Human
uggcuucccaugucu

SEQ ID NO: 2858268 - RNA, 17 nt, Human
uggcuucccaugucuuu

SEQ ID NO: 2858269 - RNA, 15 nt, Human
uggcuucccgcucag

SEQ ID NO: 2858270 - RNA, 16 nt, Human
uggcuucccgcucagc

SEQ ID NO: 2858271 - RNA, 16 nt, Human
uggcuuccaugauggu

SEQ ID NO: 2858272 - RNA, 21 nt, Human
ugggaacgcagaugauccaug

SEQ ID NO: 2858273 - RNA, 14 nt, Human
ugggaaccucccag

SEQ ID NO: 2858274 - RNA, 15 nt, Human
ugggaaccucccaga

SEQ ID NO: 2858275 - RNA, 17 nt, Human
ugggaaccucccagagg

SEQ ID NO: 2858276 - RNA, 19 nt, Human
ugggaaccucccagagguc

SEQ ID NO: 2858277 - RNA, 21 nt, Human
ugggaaccucccagaggucca

SEQ ID NO: 2858278 - RNA, 22 nt, Human
ugggaaccucccagagguccag

SEQ ID NO: 2858279 - RNA, 21 nt, Human
ugggaaaggaggcaugccucu

SEQ ID NO: 2858280 - RNA, 21 nt, Human
ugggaagccuuuacugacccu

SEQ ID NO: 2858281 - RNA, 15 nt, Human
ugggaagcugagggc

SEQ ID NO: 2858282 - RNA, 20 nt, Human
ugggaagcugagggcaaauc

SEQ ID NO: 2858283 - RNA, 19 nt, Human
ugggaaggggacccccgcc

SEQ ID NO: 2858284 - RNA, 22 nt, Human
ugggaaggccucuuggagaccu

SEQ ID NO: 2858285 - RNA, 23 nt, Human
ugggaaguugcauuccuuugucu

SEQ ID NO: 2858286 - RNA, 22 nt, Human
ugggaaggggacccccgccccc

SEQ ID NO: 2858287 - RNA, 20 nt, Human
ugggaagggucauagaaagg

SEQ ID NO: 2858288 - RNA, 15 nt, Human
ugggaagugaagacu

SEQ ID NO: 2858289 - RNA, 21 nt, Human
ugggaagacgccugagcucac

SEQ ID NO: 2858290 - RNA, 18 nt, Human
ugggaagacgccugagcu

SEQ ID NO: 2858291 - RNA, 19 nt, Human
ugggaagacgccugagcuc

SEQ ID NO: 2858292 - RNA, 13 nt, Human
ugggaacucugac

SEQ ID NO: 2858293 - RNA, 16 nt, Human
ugggaacucugacaag

SEQ ID NO: 2858294 - RNA, 22 nt, Human
ugggaacucugacaagggcuga

SEQ ID NO: 2858295 - RNA, 15 nt, Human
ugggaacucaccugg

SEQ ID NO: 2858296 - RNA, 17 nt, Human
ugggaacucaccugggg

SEQ ID NO: 2858297 - RNA, 18 nt, Human
ugggaacucaccuggggc

SEQ ID NO: 2858298 - RNA, 24 nt, Human
ugggaacgcagaugauccaugagu

SEQ ID NO: 2858299 - RNA, 13 nt, Human
ugggaacuagacu

SEQ ID NO: 2858300 - RNA, 17 nt, Human
uggcuuaaaacaacacu

SEQ ID NO: 2858301 - RNA, 15 nt, Human
uggcuguuggcuggg

SEQ ID NO: 2858302 - RNA, 13 nt, Human
uggcuguuggcug

SEQ ID NO: 2858303 - RNA, 15 nt, Human
uggcuuauccagcug

SEQ ID NO: 2858304 - RNA, 19 nt, Human
uggcuuaccugaccucuug

SEQ ID NO: 2858305 - RNA, 21 nt, Human
uggcuuaccugaccucuugcu

SEQ ID NO: 2858306 - RNA, 22 nt, Human
uggcuuaccugaccucuugcug

SEQ ID NO: 2858307 - RNA, 18 nt, Human
uggcuguuggcagugagu

SEQ ID NO: 2858308 - RNA, 19 nt, Human
uggcugcaguccgugugga

SEQ ID NO: 2858309 - RNA, 13 nt, Human
uggcuuaaauaua

SEQ ID NO: 2858310 - RNA, 19 nt, Human
uggcuuaaauauaguuccu

SEQ ID NO: 2858311 - RNA, 22 nt, Human
uggcuuaaauauaguuccuaag

SEQ ID NO: 2858312 - RNA, 16 nt, Human
uggcuuauagguguug

SEQ ID NO: 2858313 - RNA, 14 nt, Human
uggcuuauuuuaau

SEQ ID NO: 2858314 - RNA, 18 nt, Human
uggcuuauuuuaauguga

SEQ ID NO: 2858315 - RNA, 19 nt, Human
uggcuuauuuuaaugugau

SEQ ID NO: 2858316 - RNA, 12 nt, Human
uggcuucagcuc

SEQ ID NO: 2858317 - RNA, 13 nt, Human
uggcuucagcucc

SEQ ID NO: 2858318 - RNA, 14 nt, Human
uggcuucagcucca

SEQ ID NO: 2858319 - RNA, 16 nt, Human
uggcuucagcuccagc

SEQ ID NO: 2858320 - RNA, 17 nt, Human
uggcuucagcuccagcc

SEQ ID NO: 2858321 - RNA, 18 nt, Human
uggcuucagcuccagccc

SEQ ID NO: 2858322 - RNA, 19 nt, Human
uggcuucagcuccagcccc

SEQ ID NO: 2858323 - RNA, 20 nt, Human
uggcuucagcuccagccccu

SEQ ID NO: 2858324 - RNA, 21 nt, Human
uggcuucagcuccagccccuu

SEQ ID NO: 2858325 - RNA, 22 nt, Human
uggcuuccagaaaaccccagca

SEQ ID NO: 2858326 - RNA, 16 nt, Human
uggcuucaucugucaa

SEQ ID NO: 2858327 - RNA, 18 nt, Human
uggcuucauuagagcagg

SEQ ID NO: 2858328 - RNA, 23 nt, Human
uggcuuccagaaaaccccagcau

SEQ ID NO: 2858329 - RNA, 20 nt, Human
uggcuucauuagagcaggcg

SEQ ID NO: 2858330 - RNA, 20 nt, Human
aggcuggcgugcaguggugc

SEQ ID NO: 2858331 - RNA, 18 nt, Human
aggcuggcgugcaguggu

SEQ ID NO: 2858332 - RNA, 17 nt, Human
aggcugggaccacguga

SEQ ID NO: 2858333 - RNA, 21 nt, Human
uggcuagaguccucacuccca

SEQ ID NO: 2858334 - RNA, 18 nt, Human
uggcuagaguccucacuc

SEQ ID NO: 2858335 - RNA, 16 nt, Human
uggcuagaguccucac

SEQ ID NO: 2858336 - RNA, 15 nt, Human
uggcuagaguccuca

SEQ ID NO: 2858337 - RNA, 22 nt, Human
uggcuauuagagaucaaccccu

SEQ ID NO: 2858338 - RNA, 17 nt, Human
uggcugccccaaccugc

SEQ ID NO: 2858339 - RNA, 20 nt, Human
uggcugccccaaccugcuga

SEQ ID NO: 2858340 - RNA, 14 nt, Human
uggcugcagggagu

SEQ ID NO: 2858341 - RNA, 13 nt, Human
uggcugcagggag

SEQ ID NO: 2858342 - RNA, 15 nt, Human
uggcugcagggaguc

SEQ ID NO: 2858343 - RNA, 18 nt, Human
uggcucaaguccucuuuu

SEQ ID NO: 2858344 - RNA, 12 nt, Human
uggcugcaaagg

SEQ ID NO: 2858345 - RNA, 23 nt, Human
uggcugaggaggccuccaucuca

SEQ ID NO: 2858346 - RNA, 17 nt, Human
uggcugaggaggccucc

SEQ ID NO: 2858347 - RNA, 15 nt, Human
uggcucuucugccca

SEQ ID NO: 2858348 - RNA, 13 nt, Human
uggcugagggcag

SEQ ID NO: 2858349 - RNA, 14 nt, Human
uggcugagggcagc

SEQ ID NO: 2858350 - RNA, 15 nt, Human
uggcugagggcagcu

SEQ ID NO: 2858351 - RNA, 23 nt, Human
uggcugagggcagcugcgcgggc

SEQ ID NO: 2858352 - RNA, 19 nt, Human
aggcuccuuuagcgcccag

SEQ ID NO: 2858353 - RNA, 12 nt, Human
aggcuccugucc

SEQ ID NO: 2858354 - RNA, 12 nt, Human
aggcuccuguua

SEQ ID NO: 2858355 - RNA, 21 nt, Human
aggcuccuguuagcuccucac

SEQ ID NO: 2858356 - RNA, 21 nt, Human
aggcuccugccaguguggaac

SEQ ID NO: 2858357 - RNA, 13 nt, Human
aggcuccugccac

SEQ ID NO: 2858358 - RNA, 20 nt, Human
aggcuccugccaccacgccc

SEQ ID NO: 2858359 - RNA, 12 nt, Human
aggccugggugg

SEQ ID NO: 2858360 - RNA, 23 nt, Human
aggccuggguggaucggccuccu

SEQ ID NO: 2858361 - RNA, 13 nt, Human
aggccugucugug

SEQ ID NO: 2858362 - RNA, 14 nt, Human
aggccugucuguga

SEQ ID NO: 2858363 - RNA, 17 nt, Human
aggccugucugugaccu

SEQ ID NO: 2858364 - RNA, 22 nt, Human
aggccugucugugaccugcauc

SEQ ID NO: 2858365 - RNA, 14 nt, Human
aggcuccugccacc

SEQ ID NO: 2858366 - RNA, 17 nt, Human
aggcucuagaucauaag

SEQ ID NO: 2858367 - RNA, 19 nt, Human
aggcucuaugagucuagau

SEQ ID NO: 2858368 - RNA, 20 nt, Human
aggcucucaacaggggagag

SEQ ID NO: 2858369 - RNA, 20 nt, Human
aggcucuaugagucuagaug

SEQ ID NO: 2858370 - RNA, 21 nt, Human
aggcucuaugagucuagaugu

SEQ ID NO: 2858371 - RNA, 20 nt, Human
aggcucugagagucuagauu

SEQ ID NO: 2858372 - RNA, 21 nt, Human
aggcucugagagucuagauuc

SEQ ID NO: 2858373 - RNA, 22 nt, Human
aggcucugagagucuagauucu

SEQ ID NO: 2858374 - RNA, 23 nt, Human
aggcucugagagucuagauucuc

SEQ ID NO: 2858375 - RNA, 23 nt, Human
aggcucuccuugcuccuggccuu

SEQ ID NO: 2858376 - RNA, 19 nt, Human
aggcucugacccagugaga

SEQ ID NO: 2858377 - RNA, 13 nt, Human
aggcucugagagu

SEQ ID NO: 2858378 - RNA, 16 nt, Human
aggcucugagagucua

SEQ ID NO: 2858379 - RNA, 19 nt, Human
aggcucugagagucuagau

SEQ ID NO: 2858380 - RNA, 11 nt, Human
aggcucugccu

SEQ ID NO: 2858381 - RNA, 13 nt, Human
aggcucugccuuc

SEQ ID NO: 2858382 - RNA, 14 nt, Human
aggcucugccuucg

SEQ ID NO: 2858383 - RNA, 22 nt, Human
aggcucugccuucgaggucaga

SEQ ID NO: 2858384 - RNA, 16 nt, Human
aggcucugcuucucca

SEQ ID NO: 2858385 - RNA, 22 nt, Human
aggcucugcuucuccaaggaaa

SEQ ID NO: 2858386 - RNA, 13 nt, Human
aggcugcuuggga

SEQ ID NO: 2858387 - RNA, 23 nt, Human
aggcugcucuugaacuccugacc

SEQ ID NO: 2858388 - RNA, 22 nt, Human
aggcugcugggauggugggcuu

SEQ ID NO: 2858389 - RNA, 18 nt, Human
aggcugcuggggccucag

SEQ ID NO: 2858390 - RNA, 20 nt, Human
aggcugcuggggccucagac

SEQ ID NO: 2858391 - RNA, 22 nt, Human
aggcugcuggggccucagacga

SEQ ID NO: 2858392 - RNA, 17 nt, Human
aggcuggcgugcagugg

SEQ ID NO: 2858393 - RNA, 13 nt, Human
aggcuggcgugca

SEQ ID NO: 2858394 - RNA, 19 nt, Human
aggcuggcccugcccuggu

SEQ ID NO: 2858395 - RNA, 14 nt, Human
aggcuggcccugcc

SEQ ID NO: 2858396 - RNA, 12 nt, Human
aggcuggcccug

SEQ ID NO: 2858397 - RNA, 18 nt, Human
aggcuggcccugcccugg

SEQ ID NO: 2858398 - RNA, 17 nt, Human
aggcuggcccugcccug

SEQ ID NO: 2858399 - RNA, 16 nt, Human
aggcuggcccugcccu

SEQ ID NO: 2858400 - RNA, 15 nt, Human
aggcuggcccugccc

SEQ ID NO: 2858401 - RNA, 20 nt, Human
aggcuggaguggaguggcgu

SEQ ID NO: 2858402 - RNA, 18 nt, Human
aggcuggaguugucacug

SEQ ID NO: 2858403 - RNA, 23 nt, Human
aggcuggaguugucacugcuuuu

SEQ ID NO: 2858404 - RNA, 18 nt, Human
aggcuggaguacaguggu

SEQ ID NO: 2858405 - RNA, 20 nt, Human
aggcuggagugcaguggcgu

SEQ ID NO: 2858406 - RNA, 16 nt, Human
aggcuggacaugcuga

SEQ ID NO: 2858407 - RNA, 17 nt, Human
aggcuggacaugcugac

SEQ ID NO: 2858408 - RNA, 18 nt, Human
aggcuggacaugcugacu

SEQ ID NO: 2858409 - RNA, 14 nt, Human
aggcuggccagccg

SEQ ID NO: 2858410 - RNA, 15 nt, Human
aggcuggccagccgc

SEQ ID NO: 2858411 - RNA, 16 nt, Human
aggcuggccagccgcu

SEQ ID NO: 2858412 - RNA, 17 nt, Human
aggcuggccagccgcuc

SEQ ID NO: 2858413 - RNA, 18 nt, Human
aggcuggccagccgcucu

SEQ ID NO: 2858414 - RNA, 12 nt, Human
aggcuggccagc

SEQ ID NO: 2858415 - RNA, 15 nt, Human
aggcuggcagguaug

SEQ ID NO: 2858416 - RNA, 13 nt, Human
uggaccuuuuaaa

SEQ ID NO: 2858417 - RNA, 15 nt, Human
uggaccuuuuaaagu

SEQ ID NO: 2858418 - RNA, 21 nt, Human
uggaccuuuuaaaguguuuca

SEQ ID NO: 2858419 - RNA, 13 nt, Human
aggccaaaaaaau

SEQ ID NO: 2858420 - RNA, 11 nt, Human
aggcauuuguu

SEQ ID NO: 2858421 - RNA, 12 nt, Human
aggccaaacugc

SEQ ID NO: 2858422 - RNA, 13 nt, Human
aggccaaacugcu

SEQ ID NO: 2858423 - RNA, 14 nt, Human
aggccaaacugcug

SEQ ID NO: 2858424 - RNA, 17 nt, Human
aggccaaacugcuggac

SEQ ID NO: 2858425 - RNA, 16 nt, Human
aggccaaaggcuggug

SEQ ID NO: 2858426 - RNA, 17 nt, Human
aggccaaaggcuggugg

SEQ ID NO: 2858427 - RNA, 17 nt, Human
aggccaacacugugggu

SEQ ID NO: 2858428 - RNA, 23 nt, Human
aggccaacacuguggguguguga

SEQ ID NO: 2858429 - RNA, 17 nt, Human
aggccaagaaacgucuu

SEQ ID NO: 2858430 - RNA, 14 nt, Human
aggccaagaaacgu

SEQ ID NO: 2858431 - RNA, 19 nt, Human
uggaugccugguggcagcu

SEQ ID NO: 2858432 - RNA, 18 nt, Human
uggaugccugguggcagc

SEQ ID NO: 2858433 - RNA, 20 nt, Human
uggaugccugguggcagcug

SEQ ID NO: 2858434 - RNA, 15 nt, Human
uggaugccugguggc

SEQ ID NO: 2858435 - RNA, 21 nt, Human
aggccaagaaacgucuucuaa

SEQ ID NO: 2858436 - RNA, 23 nt, Human
aggccaaguccgcagaagcccug

SEQ ID NO: 2858437 - RNA, 18 nt, Human
aggccaagucaggcccuu

SEQ ID NO: 2858438 - RNA, 21 nt, Human
uggaguccccucaccuccucu

SEQ ID NO: 2858439 - RNA, 14 nt, Human
uggaguccccucac

SEQ ID NO: 2858440 - RNA, 15 nt, Human
uggaguccccucacc

SEQ ID NO: 2858441 - RNA, 19 nt, Human
uggaguccccucaccuccu

SEQ ID NO: 2858442 - RNA, 20 nt, Human
uggaguccccucaccuccuc

SEQ ID NO: 2858443 - RNA, 14 nt, Human
uggaguaugucuga

SEQ ID NO: 2858444 - RNA, 18 nt, Human
uggaguaugucugaugga

SEQ ID NO: 2858445 - RNA, 21 nt, Human
uggaguaugucugauggaucc

SEQ ID NO: 2858446 - RNA, 19 nt, Human
uggagucagacagaugugg

SEQ ID NO: 2858447 - RNA, 17 nt, Human
uggaugucugccaauuu

SEQ ID NO: 2858448 - RNA, 20 nt, Human
uggaugucugccaauuuuug

SEQ ID NO: 2858449 - RNA, 15 nt, Human
uggaugucugaacuu

SEQ ID NO: 2858450 - RNA, 16 nt, Human
uggaugucugaacuuu

SEQ ID NO: 2858451 - RNA, 18 nt, Human
uggauggucauugcaguu

SEQ ID NO: 2858452 - RNA, 16 nt, Human
uggcacccggccccug

SEQ ID NO: 2858453 - RNA, 15 nt, Human
uggcacccggccccu

SEQ ID NO: 2858454 - RNA, 11 nt, Human
uggcagcccag

SEQ ID NO: 2858455 - RNA, 20 nt, Human
uggcagauaaucagccucuu

SEQ ID NO: 2858456 - RNA, 19 nt, Human
uggcagauaaucagccucu

SEQ ID NO: 2858457 - RNA, 18 nt, Human
uggcagaguuuguguguu

SEQ ID NO: 2858458 - RNA, 22 nt, Human
uggcagaguuuguguguugucu

SEQ ID NO: 2858459 - RNA, 17 nt, Human
uggcagaguuugugugu

SEQ ID NO: 2858460 - RNA, 19 nt, Human
aggccacgugauguggagg

SEQ ID NO: 2858461 - RNA, 23 nt, Human
aggccacgugauguggagggcac

SEQ ID NO: 2858462 - RNA, 22 nt, Human
aggccacaccaucuccuuucag

SEQ ID NO: 2858463 - RNA, 21 nt, Human
aggccacaccaucuccuuuca

SEQ ID NO: 2858464 - RNA, 22 nt, Human
aggccaccauauucagugcugu

SEQ ID NO: 2858465 - RNA, 14 nt, Human
aggccacaugggag

SEQ ID NO: 2858466 - RNA, 21 nt, Human
aggccacaugggagcagucca

SEQ ID NO: 2858467 - RNA, 16 nt, Human
uggcagccucuucaaa

SEQ ID NO: 2858468 - RNA, 15 nt, Human
uggcagccucuucaa

SEQ ID NO: 2858469 - RNA, 15 nt, Human
uggauguugugugua

SEQ ID NO: 2858470 - RNA, 22 nt, Human
uggcagccgugccuucagcucu

SEQ ID NO: 2858471 - RNA, 23 nt, Human
uggcagccgugccuucagcucua

SEQ ID NO: 2858472 - RNA, 12 nt, Human
uggcagcccaga

SEQ ID NO: 2858473 - RNA, 17 nt, Human
uggcagcccuguaggga

SEQ ID NO: 2858474 - RNA, 14 nt, Human
uggcagcccuguag

SEQ ID NO: 2858475 - RNA, 12 nt, Human
uggcagcccugu

SEQ ID NO: 2858476 - RNA, 11 nt, Human
uggcagcccug

SEQ ID NO: 2858477 - RNA, 17 nt, Human
aggccucaccucuaccc

SEQ ID NO: 2858478 - RNA, 18 nt, Human
aggccucaccucuaccca

SEQ ID NO: 2858479 - RNA, 19 nt, Human
aggccucaccucuacccaa

SEQ ID NO: 2858480 - RNA, 18 nt, Human
aggccuauguugauccau

SEQ ID NO: 2858481 - RNA, 12 nt, Human
aggccucucuca

SEQ ID NO: 2858482 - RNA, 20 nt, Human
aggccucucaccucugugcc

SEQ ID NO: 2858483 - RNA, 13 nt, Human
aggccucuguguc

SEQ ID NO: 2858484 - RNA, 17 nt, Human
aggccuccaucucaugu

SEQ ID NO: 2858485 - RNA, 13 nt, Human
aggccucccucaa

SEQ ID NO: 2858486 - RNA, 22 nt, Human
aggccucccucucucuucugcu

SEQ ID NO: 2858487 - RNA, 15 nt, Human
aggccucccucucuc

SEQ ID NO: 2858488 - RNA, 15 nt, Human
aggccucccuagcca

SEQ ID NO: 2858489 - RNA, 16 nt, Human
uggccaaauuauuugu

SEQ ID NO: 2858490 - RNA, 18 nt, Human
uggccaaauuauuugugu

SEQ ID NO: 2858491 - RNA, 20 nt, Human
uggccaaauuauuuguguaa

SEQ ID NO: 2858492 - RNA, 16 nt, Human
uggcauggauuucugu

SEQ ID NO: 2858493 - RNA, 12 nt, Human
aggccugcacac

SEQ ID NO: 2858494 - RNA, 13 nt, Human
aggccugcacaca

SEQ ID NO: 2858495 - RNA, 14 nt, Human
aggccugcacacaa

SEQ ID NO: 2858496 - RNA, 24 nt, Human
aggccugcacacaagcccacagca

SEQ ID NO: 2858497 - RNA, 13 nt, Human
aggccugccuguu

SEQ ID NO: 2858498 - RNA, 15 nt, Human
uggcaugcaccugca

SEQ ID NO: 2858499 - RNA, 17 nt, Human
uggccaggcuggucuca

SEQ ID NO: 2858500 - RNA, 15 nt, Human
uggccaggcuggucu

SEQ ID NO: 2858501 - RNA, 20 nt, Human
uggccaggcuggucucgaac

SEQ ID NO: 2858502 - RNA, 23 nt, Human
uggccagggccuggaagacagag

SEQ ID NO: 2858503 - RNA, 17 nt, Human
uggccuggccaggagcu

SEQ ID NO: 2858504 - RNA, 16 nt, Human
uggccuggccaggagc

SEQ ID NO: 2858505 - RNA, 15 nt, Human
uggccuggccaggag

SEQ ID NO: 2858506 - RNA, 13 nt, Human
uggccuggccagg

SEQ ID NO: 2858507 - RNA, 21 nt, Human
uggccuggccaggagcucuuc

SEQ ID NO: 2858508 - RNA, 18 nt, Human
uggccuggccaggagcuc

SEQ ID NO: 2858509 - RNA, 12 nt, Human
uggccuggccag

SEQ ID NO: 2858510 - RNA, 18 nt, Human
uggccuggcacacaucag

SEQ ID NO: 2858511 - RNA, 10 nt, Human
uggccuggcc

SEQ ID NO: 2858512 - RNA, 12 nt, Human
uggccuggcaca

SEQ ID NO: 2858513 - RNA, 16 nt, Human
uggccuggcacacauc

SEQ ID NO: 2858514 - RNA, 21 nt, Human
aggccuggccagaugcaccag

SEQ ID NO: 2858515 - RNA, 17 nt, Human
aggccuggccagaugca

SEQ ID NO: 2858516 - RNA, 16 nt, Human
aggccuggccagaugc

SEQ ID NO: 2858517 - RNA, 15 nt, Human
aggccuggccagaug

SEQ ID NO: 2858518 - RNA, 23 nt, Human
aggccuggccagaugcaccagcc

SEQ ID NO: 2858519 - RNA, 22 nt, Human
aggccuggccagaugcaccagc

SEQ ID NO: 2858520 - RNA, 21 nt, Human
uggccccugcccggcugcgga

SEQ ID NO: 2858521 - RNA, 16 nt, Human
uggccccuuugggccc

SEQ ID NO: 2858522 - RNA, 19 nt, Human
uggccccuuugggcccugc

SEQ ID NO: 2858523 - RNA, 20 nt, Human
uggccccuuugggcccugca

SEQ ID NO: 2858524 - RNA, 21 nt, Human
uggccccuuugggcccugcau

SEQ ID NO: 2858525 - RNA, 23 nt, Human
uggccccuuugggcccugcaugu

SEQ ID NO: 2858526 - RNA, 12 nt, Human
uggccccugggu

SEQ ID NO: 2858527 - RNA, 14 nt, Human
uggcccggaugcug

SEQ ID NO: 2858528 - RNA, 17 nt, Human
uggcccggaugcugcuu

SEQ ID NO: 2858529 - RNA, 18 nt, Human
uggcccgacagccuggca

SEQ ID NO: 2858530 - RNA, 19 nt, Human
uggcccgacagccuggcac

SEQ ID NO: 2858531 - RNA, 14 nt, Human
uggcccgacagccu

SEQ ID NO: 2858532 - RNA, 15 nt, Human
uggcccgacagccug

SEQ ID NO: 2858533 - RNA, 16 nt, Human
uggcccgacagccugg

SEQ ID NO: 2858534 - RNA, 17 nt, Human
uggcccgacagccuggc

SEQ ID NO: 2858535 - RNA, 19 nt, Human
uggccgcguuuagaccaag

SEQ ID NO: 2858536 - RNA, 21 nt, Human
uggccgcccccugccccccag

SEQ ID NO: 2858537 - RNA, 23 nt, Human
uggccgcccccugccccccagcc

SEQ ID NO: 2858538 - RNA, 13 nt, Human
uggccgcccccug

SEQ ID NO: 2858539 - RNA, 15 nt, Human
uggccgcccccugcc

SEQ ID NO: 2858540 - RNA, 17 nt, Human
uggccgcccccugcccc

SEQ ID NO: 2858541 - RNA, 12 nt, Human
uggccggccagc

SEQ ID NO: 2858542 - RNA, 13 nt, Human
uggccggccagcc

SEQ ID NO: 2858543 - RNA, 14 nt, Human
uggccggccagcca

SEQ ID NO: 2858544 - RNA, 17 nt, Human
uggccggccagccagcc

SEQ ID NO: 2858545 - RNA, 19 nt, Human
uggccggccagccagccac

SEQ ID NO: 2858546 - RNA, 20 nt, Human
uggccggccagccagccacu

SEQ ID NO: 2858547 - RNA, 21 nt, Human
uggccggccagccagccacuc

SEQ ID NO: 2858548 - RNA, 22 nt, Human
uggccggccagccagccacucu

SEQ ID NO: 2858549 - RNA, 23 nt, Human
uggccggccagccagccacucua

SEQ ID NO: 2858550 - RNA, 13 nt, Human
uggccggcugugc

SEQ ID NO: 2858551 - RNA, 15 nt, Human
uggccggcugugcuc

SEQ ID NO: 2858552 - RNA, 17 nt, Human
uggccggcugugcucag

SEQ ID NO: 2858553 - RNA, 20 nt, Human
uggccggcugugcucagaga

SEQ ID NO: 2858554 - RNA, 15 nt, Human
uggccgggagccuga

SEQ ID NO: 2858555 - RNA, 17 nt, Human
auccugcaaugaaaggu

SEQ ID NO: 2858556 - RNA, 12 nt, Human
auccugagcccc

SEQ ID NO: 2858557 - RNA, 13 nt, Human
auccugagccccg

SEQ ID NO: 2858558 - RNA, 14 nt, Human
auccugagccccgc

SEQ ID NO: 2858559 - RNA, 20 nt, Human
auccugagccccgcccucuu

SEQ ID NO: 2858560 - RNA, 22 nt, Human
auccugagccccgcccucuucc

SEQ ID NO: 2858561 - RNA, 23 nt, Human
auccugagccccgcccucuuccu

SEQ ID NO: 2858562 - RNA, 19 nt, Human
auccugacucugcccccug

SEQ ID NO: 2858563 - RNA, 23 nt, Human
auccugacuucuaauaucauuca

SEQ ID NO: 2858564 - RNA, 19 nt, Human
auccugagguguaccagga

SEQ ID NO: 2858565 - RNA, 16 nt, Human
auccugcauuguuagc

SEQ ID NO: 2858566 - RNA, 14 nt, Human
auccugccacccug

SEQ ID NO: 2858567 - RNA, 16 nt, Human
auccugccacccugua

SEQ ID NO: 2858568 - RNA, 18 nt, Human
auccugccacccuguagc

SEQ ID NO: 2858569 - RNA, 13 nt, Human
auccugccagccc

SEQ ID NO: 2858570 - RNA, 17 nt, Human
auccugccagccccaca

SEQ ID NO: 2858571 - RNA, 21 nt, Human
auccugccagccccacacagc

SEQ ID NO: 2858572 - RNA, 22 nt, Human
auccugccagccccacacagcu

SEQ ID NO: 2858573 - RNA, 23 nt, Human
auccugccagccccacacagcua

SEQ ID NO: 2858574 - RNA, 13 nt, Human
auccugccauuua

SEQ ID NO: 2858575 - RNA, 16 nt, Human
auccugccauuuaaaa

SEQ ID NO: 2858576 - RNA, 17 nt, Human
auccugccuucauggaa

SEQ ID NO: 2858577 - RNA, 21 nt, Human
auccugccuucauggaacuca

SEQ ID NO: 2858578 - RNA, 14 nt, Human
auccugcuguucua

SEQ ID NO: 2858579 - RNA, 15 nt, Human
auccugcuguucuag

SEQ ID NO: 2858580 - RNA, 14 nt, Human
uucuuuuggcuucc

SEQ ID NO: 2858581 - RNA, 12 nt, Human
uucuuuuguaaa

SEQ ID NO: 2858582 - RNA, 12 nt, Human
uucuuuuguaag

SEQ ID NO: 2858583 - RNA, 14 nt, Human
uucuuuuguaagug

SEQ ID NO: 2858584 - RNA, 12 nt, Human
uucuuuucucau

SEQ ID NO: 2858585 - RNA, 22 nt, Human
uucuuuucucauguguuugcau

SEQ ID NO: 2858586 - RNA, 14 nt, Human
uucuuuucuuugua

SEQ ID NO: 2858587 - RNA, 15 nt, Human
uucuuuucuuuguau

SEQ ID NO: 2858588 - RNA, 14 nt, Human
uucuuuucuuuuua

SEQ ID NO: 2858589 - RNA, 12 nt, Human
uucuuuugaauu

SEQ ID NO: 2858590 - RNA, 15 nt, Human
uucuuuugaauuguu

SEQ ID NO: 2858591 - RNA, 15 nt, Human
uucuuuucuggccaa

SEQ ID NO: 2858592 - RNA, 20 nt, Human
auccucuuucucuuuucuag

SEQ ID NO: 2858593 - RNA, 17 nt, Human
auccugaaauuucagau

SEQ ID NO: 2858594 - RNA, 14 nt, Human
auccugaacagcau

SEQ ID NO: 2858595 - RNA, 15 nt, Human
auccugaacagcaug

SEQ ID NO: 2858596 - RNA, 19 nt, Human
auccugaacugcuucucca

SEQ ID NO: 2858597 - RNA, 16 nt, Human
auccugaaauuucaga

SEQ ID NO: 2858598 - RNA, 14 nt, Human
auccugaaauuuca

SEQ ID NO: 2858599 - RNA, 21 nt, Human
auccugacuauuauguuguua

SEQ ID NO: 2858600 - RNA, 14 nt, Human
auccugacucugcc

SEQ ID NO: 2858601 - RNA, 15 nt, Human
auccugacucugccc

SEQ ID NO: 2858602 - RNA, 17 nt, Human
auccugacucugccccc

SEQ ID NO: 2858603 - RNA, 18 nt, Human
auccugacucugcccccu

SEQ ID NO: 2858604 - RNA, 21 nt, Human
auccuggcacccggccccugc

SEQ ID NO: 2858605 - RNA, 20 nt, Human
auccuggcacccggccccug

SEQ ID NO: 2858606 - RNA, 19 nt, Human
auccuggcacccggccccu

SEQ ID NO: 2858607 - RNA, 17 nt, Human
auccuggcacccggccc

SEQ ID NO: 2858608 - RNA, 14 nt, Human
auccugcuucagug

SEQ ID NO: 2858609 - RNA, 19 nt, Human
auccugcuucugauaugca

SEQ ID NO: 2858610 - RNA, 21 nt, Human
auccugcuucugauaugcagu

SEQ ID NO: 2858611 - RNA, 23 nt, Human
auccuggcacccggccccugcug

SEQ ID NO: 2858612 - RNA, 22 nt, Human
auccuggcacccggccccugcu

SEQ ID NO: 2858613 - RNA, 19 nt, Human
auccuggcagcccagagac

SEQ ID NO: 2858614 - RNA, 18 nt, Human
auccuggcagcccagaga

SEQ ID NO: 2858615 - RNA, 16 nt, Human
auccuggcagcccaga

SEQ ID NO: 2858616 - RNA, 15 nt, Human
auccuggcagcccag

SEQ ID NO: 2858617 - RNA, 24 nt, Human
auccuggcagcccagagacuuugu

SEQ ID NO: 2858618 - RNA, 20 nt, Human
auccuggcagcccagagacu

SEQ ID NO: 2858619 - RNA, 13 nt, Human
auccuggcagccc

SEQ ID NO: 2858620 - RNA, 12 nt, Human
auccuggcagcc

SEQ ID NO: 2858621 - RNA, 11 nt, Human
auccuggcagc

SEQ ID NO: 2858622 - RNA, 21 nt, Human
auccugggggacccaauguag

SEQ ID NO: 2858623 - RNA, 20 nt, Human
auccuggggcauuaaaaaaa

SEQ ID NO: 2858624 - RNA, 11 nt, Human
auccuggguaa

SEQ ID NO: 2858625 - RNA, 12 nt, Human
auccuggguaau

SEQ ID NO: 2858626 - RNA, 14 nt, Human
auccugguuucaua

SEQ ID NO: 2858627 - RNA, 23 nt, Human
auccugguuucauaacuuccugu

SEQ ID NO: 2858628 - RNA, 18 nt, Human
auccuggcucuguggcuu

SEQ ID NO: 2858629 - RNA, 24 nt, Human
auccuggcucuuuggagaucaagg

SEQ ID NO: 2858630 - RNA, 15 nt, Human
auccuggcuggagaa

SEQ ID NO: 2858631 - RNA, 23 nt, Human
auccuggcuggagaauguggaga

SEQ ID NO: 2858632 - RNA, 22 nt, Human
auccuggcucuguggcuugcua

SEQ ID NO: 2858633 - RNA, 19 nt, Human
auccuggcucuguggcuug

SEQ ID NO: 2858634 - RNA, 13 nt, Human
aucggccuccucu

SEQ ID NO: 2858635 - RNA, 14 nt, Human
aucggccuccucuu

SEQ ID NO: 2858636 - RNA, 21 nt, Human
aucggccuccucuucaccccg

SEQ ID NO: 2858637 - RNA, 15 nt, Human
aucguaaccagccag

SEQ ID NO: 2858638 - RNA, 14 nt, Human
auccuguauaagca

SEQ ID NO: 2858639 - RNA, 16 nt, Human
auccuguauaagcacu

SEQ ID NO: 2858640 - RNA, 17 nt, Human
auccuguauaagcacug

SEQ ID NO: 2858641 - RNA, 23 nt, Human
auccuguauaagcacugaaaaac

SEQ ID NO: 2858642 - RNA, 19 nt, Human
auccugucuuuaaggaaaa

SEQ ID NO: 2858643 - RNA, 23 nt, Human
auccugucuuuaaggaaaaaaag

SEQ ID NO: 2858644 - RNA, 21 nt, Human
auccugucuuuaaggaaaaaa

SEQ ID NO: 2858645 - RNA, 15 nt, Human
auccugucuuucuga

SEQ ID NO: 2858646 - RNA, 18 nt, Human
auccugucuuucugagca

SEQ ID NO: 2858647 - RNA, 23 nt, Human
auccugucuuucugagcacacuu

SEQ ID NO: 2858648 - RNA, 13 nt, Human
auccuuaacagau

SEQ ID NO: 2858649 - RNA, 16 nt, Human
auccuggagaagccuc

SEQ ID NO: 2858650 - RNA, 11 nt, Human
auccugugacu

SEQ ID NO: 2858651 - RNA, 21 nt, Human
auccugugacugucucacuua

SEQ ID NO: 2858652 - RNA, 11 nt, Human
auccugugagg

SEQ ID NO: 2858653 - RNA, 21 nt, Human
auccugugaggagccccaucu

SEQ ID NO: 2858654 - RNA, 16 nt, Human
auccugugaaguaagg

SEQ ID NO: 2858655 - RNA, 15 nt, Human
uugaauauggacaag

SEQ ID NO: 2858656 - RNA, 17 nt, Human
uugaauauggacaagag

SEQ ID NO: 2858657 - RNA, 22 nt, Human
uugaauaucuuucgauaaacaa

SEQ ID NO: 2858658 - RNA, 15 nt, Human
uugaaguaaacugca

SEQ ID NO: 2858659 - RNA, 22 nt, Human
uugaauauaauauauuugugua

SEQ ID NO: 2858660 - RNA, 20 nt, Human
uugaauauaauauauuugug

SEQ ID NO: 2858661 - RNA, 21 nt, Human
uugaauauaauauauuugugu

SEQ ID NO: 2858662 - RNA, 13 nt, Human
uugaaguuuacau

SEQ ID NO: 2858663 - RNA, 14 nt, Human
uugaaguuuacauu

SEQ ID NO: 2858664 - RNA, 15 nt, Human
uugaaguuuacauuu

SEQ ID NO: 2858665 - RNA, 16 nt, Human
uugaaguuuacauuuu

SEQ ID NO: 2858666 - RNA, 19 nt, Human
uugaaguuuacauuuuuau

SEQ ID NO: 2858667 - RNA, 13 nt, Human
uugaauacuuuuu

SEQ ID NO: 2858668 - RNA, 12 nt, Human
uugaauacuuuu

SEQ ID NO: 2858669 - RNA, 19 nt, Human
uugaaggaagccaaauuua

SEQ ID NO: 2858670 - RNA, 20 nt, Human
uugaaggaagccaaauuuau

SEQ ID NO: 2858671 - RNA, 16 nt, Human
uugaaggaauacaaua

SEQ ID NO: 2858672 - RNA, 18 nt, Human
uugaaggaauacaauaua

SEQ ID NO: 2858673 - RNA, 23 nt, Human
uugaaggaauacaauauauagcu

SEQ ID NO: 2858674 - RNA, 11 nt, Human
uugaaggaaac

SEQ ID NO: 2858675 - RNA, 13 nt, Human
uugaaggaaacag

SEQ ID NO: 2858676 - RNA, 14 nt, Human
uugaaggaaacagu

SEQ ID NO: 2858677 - RNA, 15 nt, Human
uugaagggcccagga

SEQ ID NO: 2858678 - RNA, 11 nt, Human
uugaagucuug

SEQ ID NO: 2858679 - RNA, 13 nt, Human
uugaagucuugua

SEQ ID NO: 2858680 - RNA, 14 nt, Human
uugaagucuuguau

SEQ ID NO: 2858681 - RNA, 16 nt, Human
uugaagucuuguauaa

SEQ ID NO: 2858682 - RNA, 15 nt, Human
uugaagucaccuugu

SEQ ID NO: 2858683 - RNA, 19 nt, Human
uugaagucaccuugugugu

SEQ ID NO: 2858684 - RNA, 15 nt, Human
uugaaguacuugcca

SEQ ID NO: 2858685 - RNA, 21 nt, Human
uugaaguacuugccagaaguu

SEQ ID NO: 2858686 - RNA, 17 nt, Human
uugaaggaaaaugauac

SEQ ID NO: 2858687 - RNA, 14 nt, Human
uugaagcugaaaau

SEQ ID NO: 2858688 - RNA, 18 nt, Human
uugaagcugaaaauauaa

SEQ ID NO: 2858689 - RNA, 16 nt, Human
aucuaaaucuauuuau

SEQ ID NO: 2858690 - RNA, 13 nt, Human
aucuaaaucuauu

SEQ ID NO: 2858691 - RNA, 15 nt, Human
aucuaaaucuauuua

SEQ ID NO: 2858692 - RNA, 12 nt, Human
aucuaaaguuau

SEQ ID NO: 2858693 - RNA, 13 nt, Human
aucuaaaguuaua

SEQ ID NO: 2858694 - RNA, 14 nt, Human
aucuaaaguuauau

SEQ ID NO: 2858695 - RNA, 15 nt, Human
aucuaaaguuauauu

SEQ ID NO: 2858696 - RNA, 16 nt, Human
aucuaaaguuauauuu

SEQ ID NO: 2858697 - RNA, 17 nt, Human
aucuaaaguuauauuuc

SEQ ID NO: 2858698 - RNA, 18 nt, Human
aucuaaaguuauauuuca

SEQ ID NO: 2858699 - RNA, 13 nt, Human
aucuaaaguuugu

SEQ ID NO: 2858700 - RNA, 15 nt, Human
aucuaaacugccccc

SEQ ID NO: 2858701 - RNA, 16 nt, Human
aucguaaccagccaga

SEQ ID NO: 2858702 - RNA, 19 nt, Human
aucguccagcgaccuuccu

SEQ ID NO: 2858703 - RNA, 15 nt, Human
aucgugacaacacuu

SEQ ID NO: 2858704 - RNA, 14 nt, Human
aucgugacaacacu

SEQ ID NO: 2858705 - RNA, 15 nt, Human
aucguccccuccccc

SEQ ID NO: 2858706 - RNA, 20 nt, Human
aucguccccucccccacccc

SEQ ID NO: 2858707 - RNA, 19 nt, Human
uugacagggcacaccgggc

SEQ ID NO: 2858708 - RNA, 18 nt, Human
uugacaguucugaagaau

SEQ ID NO: 2858709 - RNA, 15 nt, Human
uugacaguucugaag

SEQ ID NO: 2858710 - RNA, 17 nt, Human
uugacaguucugaagaa

SEQ ID NO: 2858711 - RNA, 19 nt, Human
uugacaguguugaaaaugu

SEQ ID NO: 2858712 - RNA, 13 nt, Human
uugacauauuuaa

SEQ ID NO: 2858713 - RNA, 16 nt, Human
uugacauauuuaaugu

SEQ ID NO: 2858714 - RNA, 17 nt, Human
uugacauauuuaauguu

SEQ ID NO: 2858715 - RNA, 18 nt, Human
uugacauauuuaauguuu

SEQ ID NO: 2858716 - RNA, 21 nt, Human
uugagaaauauggacacuuaa

SEQ ID NO: 2858717 - RNA, 21 nt, Human
uugagaagccuucagcuccag

SEQ ID NO: 2858718 - RNA, 19 nt, Human
uugagaagccuucagcucc

SEQ ID NO: 2858719 - RNA, 22 nt, Human
uugagaagaccucaccuagaaa

SEQ ID NO: 2858720 - RNA, 16 nt, Human
uugagaagaggacauu

SEQ ID NO: 2858721 - RNA, 15 nt, Human
uugagaacuuuccau

SEQ ID NO: 2858722 - RNA, 15 nt, Human
uugagaacguaaaga

SEQ ID NO: 2858723 - RNA, 14 nt, Human
uugagaguucuaaa

SEQ ID NO: 2858724 - RNA, 19 nt, Human
uugagaggcccugggguuc

SEQ ID NO: 2858725 - RNA, 23 nt, Human
uugagaagccuucagcuccaggg

SEQ ID NO: 2858726 - RNA, 14 nt, Human
uugagaaggagaga

SEQ ID NO: 2858727 - RNA, 17 nt, Human
uugagagaccaggcaaa

SEQ ID NO: 2858728 - RNA, 16 nt, Human
uugagagaccaggcaa

SEQ ID NO: 2858729 - RNA, 17 nt, Human
uugagagaagagacaaa

SEQ ID NO: 2858730 - RNA, 16 nt, Human
uugagaaggagagaaa

SEQ ID NO: 2858731 - RNA, 18 nt, Human
uugagaguuuugucuuga

SEQ ID NO: 2858732 - RNA, 18 nt, Human
uugagauacuuuuucuuu

SEQ ID NO: 2858733 - RNA, 20 nt, Human
uugagauacuuuuucuuuug

SEQ ID NO: 2858734 - RNA, 22 nt, Human
uugagauacuuuuucuuuugua

SEQ ID NO: 2858735 - RNA, 23 nt, Human
uugagauacuuuuucuuuuguaa

SEQ ID NO: 2858736 - RNA, 12 nt, Human
uugauaaaguuu

SEQ ID NO: 2858737 - RNA, 13 nt, Human
uugauaaaguuuc

SEQ ID NO: 2858738 - RNA, 14 nt, Human
uugauaaaguuucu

SEQ ID NO: 2858739 - RNA, 17 nt, Human
uugauaaaguuucucag

SEQ ID NO: 2858740 - RNA, 15 nt, Human
uugaguagacacauu

SEQ ID NO: 2858741 - RNA, 20 nt, Human
uugaguagacacauuuaagg

SEQ ID NO: 2858742 - RNA, 19 nt, Human
uugaguuuucuucugugau

SEQ ID NO: 2858743 - RNA, 13 nt, Human
uugauaaugauaa

SEQ ID NO: 2858744 - RNA, 21 nt, Human
aucuaagcccaugggacaaau

SEQ ID NO: 2858745 - RNA, 17 nt, Human
uugauaauaaauugaaa

SEQ ID NO: 2858746 - RNA, 19 nt, Human
uugauaauaaauugaaauu

SEQ ID NO: 2858747 - RNA, 18 nt, Human
uugauaauaauauuguuu

SEQ ID NO: 2858748 - RNA, 19 nt, Human
aucuaagaauacagcuuuc

SEQ ID NO: 2858749 - RNA, 20 nt, Human
aucuaagaauacagcuuucu

SEQ ID NO: 2858750 - RNA, 18 nt, Human
aucuaaggaugucacagg

SEQ ID NO: 2858751 - RNA, 14 nt, Human
aucuaagcugcagc

SEQ ID NO: 2858752 - RNA, 15 nt, Human
aucuaagcugcagcu

SEQ ID NO: 2858753 - RNA, 16 nt, Human
aucuaagcugcagcuu

SEQ ID NO: 2858754 - RNA, 18 nt, Human
aucuaagcugcagcuucc

SEQ ID NO: 2858755 - RNA, 20 nt, Human
aucuaaggaugucacagggc

SEQ ID NO: 2858756 - RNA, 17 nt, Human
aucuaaggcuguuugcu

SEQ ID NO: 2858757 - RNA, 16 nt, Human
uugauaagagggcaca

SEQ ID NO: 2858758 - RNA, 22 nt, Human
uugauaagagggcacacacugu

SEQ ID NO: 2858759 - RNA, 18 nt, Human
uugauaaauuccacugga

SEQ ID NO: 2858760 - RNA, 21 nt, Human
uugauaaauuccacuggacuu

SEQ ID NO: 2858761 - RNA, 22 nt, Human
uugauaacaaugacacuagaaa

SEQ ID NO: 2858762 - RNA, 19 nt, Human
uugauaaauuccacuggac

SEQ ID NO: 2858763 - RNA, 18 nt, Human
aucccaugagccucagca

SEQ ID NO: 2858764 - RNA, 17 nt, Human
aucccaugagccucagc

SEQ ID NO: 2858765 - RNA, 20 nt, Human
aucccugaaucccccuugcc

SEQ ID NO: 2858766 - RNA, 22 nt, Human
aucccugaaucccccuugccac

SEQ ID NO: 2858767 - RNA, 16 nt, Human
aucccaugagccucag

SEQ ID NO: 2858768 - RNA, 13 nt, Human
aucccaugagccu

SEQ ID NO: 2858769 - RNA, 17 nt, Human
aucccagaaauuagaaa

SEQ ID NO: 2858770 - RNA, 12 nt, Human
aucccagcccaa

SEQ ID NO: 2858771 - RNA, 19 nt, Human
aucccagcacuuugggaga

SEQ ID NO: 2858772 - RNA, 14 nt, Human
aucccagcaccugc

SEQ ID NO: 2858773 - RNA, 16 nt, Human
aucccagcaccugccu

SEQ ID NO: 2858774 - RNA, 21 nt, Human
aucccagcaccugccuccucg

SEQ ID NO: 2858775 - RNA, 13 nt, Human
aucccagaaauua

SEQ ID NO: 2858776 - RNA, 19 nt, Human
auccaugaguuugcccugg

SEQ ID NO: 2858777 - RNA, 15 nt, Human
auccaugcaccaaac

SEQ ID NO: 2858778 - RNA, 12 nt, Human
auccauccaauc

SEQ ID NO: 2858779 - RNA, 22 nt, Human
auccaugacaggccugaagaua

SEQ ID NO: 2858780 - RNA, 24 nt, Human
auccaugacaggccugaagauauu

SEQ ID NO: 2858781 - RNA, 20 nt, Human
uucucucagccuuacauuug

SEQ ID NO: 2858782 - RNA, 17 nt, Human
auccauccagcuugcca

SEQ ID NO: 2858783 - RNA, 17 nt, Human
auccagguucagcuugu

SEQ ID NO: 2858784 - RNA, 20 nt, Human
auccacaggaaaguguuauu

SEQ ID NO: 2858785 - RNA, 13 nt, Human
auccacauuguuu

SEQ ID NO: 2858786 - RNA, 15 nt, Human
auccacauuguuuua

SEQ ID NO: 2858787 - RNA, 18 nt, Human
auccacaccaaagggaga

SEQ ID NO: 2858788 - RNA, 16 nt, Human
uucugccugcccaggc

SEQ ID NO: 2858789 - RNA, 15 nt, Human
uucugccugcccagg

SEQ ID NO: 2858790 - RNA, 20 nt, Human
auccaaccccccaccugcca

SEQ ID NO: 2858791 - RNA, 18 nt, Human
auccaaccccccaccugc

SEQ ID NO: 2858792 - RNA, 20 nt, Human
auccaaauugugcuucuccc

SEQ ID NO: 2858793 - RNA, 23 nt, Human
auccaaauugugcuucuccccag

SEQ ID NO: 2858794 - RNA, 12 nt, Human
auccaauguuag

SEQ ID NO: 2858795 - RNA, 21 nt, Human
auccaauguuagagacuuuuu

SEQ ID NO: 2858796 - RNA, 22 nt, Human
auccaauguuagagacuuuuuu

SEQ ID NO: 2858797 - RNA, 23 nt, Human
auccaauguuagagacuuuuuuc

SEQ ID NO: 2858798 - RNA, 16 nt, Human
auccaacuccagcaac

SEQ ID NO: 2858799 - RNA, 14 nt, Human
auccaacuccagga

SEQ ID NO: 2858800 - RNA, 15 nt, Human
auccaacuccagcaa

SEQ ID NO: 2858801 - RNA, 14 nt, Human
auccaacuccagca

SEQ ID NO: 2858802 - RNA, 12 nt, Human
uucuguuucuca

SEQ ID NO: 2858803 - RNA, 12 nt, Human
uucuguuucaag

SEQ ID NO: 2858804 - RNA, 23 nt, Human
uucuguuucaaggcacucuagau

SEQ ID NO: 2858805 - RNA, 13 nt, Human
uucuguuuccugu

SEQ ID NO: 2858806 - RNA, 18 nt, Human
uucuguuuccuguaccag

SEQ ID NO: 2858807 - RNA, 16 nt, Human
uucuguuuggaggagc

SEQ ID NO: 2858808 - RNA, 12 nt, Human
uucuguuuguua

SEQ ID NO: 2858809 - RNA, 18 nt, Human
uucuguuuauggccacau

SEQ ID NO: 2858810 - RNA, 12 nt, Human
uucuguuucuuc

SEQ ID NO: 2858811 - RNA, 14 nt, Human
uucuguuugauucu

SEQ ID NO: 2858812 - RNA, 15 nt, Human
uucuguuugauucuu

SEQ ID NO: 2858813 - RNA, 21 nt, Human
uucuguuggccagugugacaa

SEQ ID NO: 2858814 - RNA, 19 nt, Human
aucccugauccuaacugaa

SEQ ID NO: 2858815 - RNA, 14 nt, Human
aucccugccugguc

SEQ ID NO: 2858816 - RNA, 12 nt, Human
aucccugcccau

SEQ ID NO: 2858817 - RNA, 11 nt, Human
uucuguuguaa

SEQ ID NO: 2858818 - RNA, 12 nt, Human
uucuguuguaac

SEQ ID NO: 2858819 - RNA, 13 nt, Human
uucuguuguaacu

SEQ ID NO: 2858820 - RNA, 14 nt, Human
uucuguuguaacuu

SEQ ID NO: 2858821 - RNA, 15 nt, Human
uucuguuguaacuua

SEQ ID NO: 2858822 - RNA, 17 nt, Human
uucuguuguaacuuaug

SEQ ID NO: 2858823 - RNA, 22 nt, Human
uucuguuguaacuuauguagau

SEQ ID NO: 2858824 - RNA, 16 nt, Human
uucuuaaauaaugcuu

SEQ ID NO: 2858825 - RNA, 12 nt, Human
uucuuaaauauc

SEQ ID NO: 2858826 - RNA, 14 nt, Human
uucuuaaauaucuu

SEQ ID NO: 2858827 - RNA, 15 nt, Human
uucuuaaauaucuuu

SEQ ID NO: 2858828 - RNA, 16 nt, Human
uucuuaaauaucuuuu

SEQ ID NO: 2858829 - RNA, 17 nt, Human
uucuuaaauaucuuuua

SEQ ID NO: 2858830 - RNA, 19 nt, Human
uucuuaaauaucuuuuaug

SEQ ID NO: 2858831 - RNA, 21 nt, Human
uucuuaaauaucuuuuauguu

SEQ ID NO: 2858832 - RNA, 13 nt, Human
uucuuaacaaccg

SEQ ID NO: 2858833 - RNA, 14 nt, Human
uucuuaacaaccga

SEQ ID NO: 2858834 - RNA, 13 nt, Human
uucuuaacaaccu

SEQ ID NO: 2858835 - RNA, 16 nt, Human
uucuuaacaaccuggc

SEQ ID NO: 2858836 - RNA, 16 nt, Human
uucuuacauaauuuuu

SEQ ID NO: 2858837 - RNA, 15 nt, Human
uucuuaccuguaugu

SEQ ID NO: 2858838 - RNA, 12 nt, Human
uucuuacuccuc

SEQ ID NO: 2858839 - RNA, 15 nt, Human
uucuuacuccuccuc

SEQ ID NO: 2858840 - RNA, 16 nt, Human
uucuuacuccuccucu

SEQ ID NO: 2858841 - RNA, 17 nt, Human
uucuuacuccuccucuu

SEQ ID NO: 2858842 - RNA, 19 nt, Human
uucuuacuccuccucuuuc

SEQ ID NO: 2858843 - RNA, 16 nt, Human
uucuuacugauaauuu

SEQ ID NO: 2858844 - RNA, 20 nt, Human
uucuuacugauaauuuugcu

SEQ ID NO: 2858845 - RNA, 17 nt, Human
uucuuacccaauuuccc

SEQ ID NO: 2858846 - RNA, 22 nt, Human
uucuuacccuguacauauguaa

SEQ ID NO: 2858847 - RNA, 21 nt, Human
uucuuagacuacauuuagaga

SEQ ID NO: 2858848 - RNA, 18 nt, Human
uucuuucuaguggucuuu

SEQ ID NO: 2858849 - RNA, 21 nt, Human
uucuuucuaguggucuuugua

SEQ ID NO: 2858850 - RNA, 22 nt, Human
uucuuucuaguggucuuuguaa

SEQ ID NO: 2858851 - RNA, 16 nt, Human
uucuuucuauuugacu

SEQ ID NO: 2858852 - RNA, 13 nt, Human
uucuuucucucag

SEQ ID NO: 2858853 - RNA, 23 nt, Human
uucuuucucucagccuuacauuu

SEQ ID NO: 2858854 - RNA, 17 nt, Human
uucuuugagacuggguc

SEQ ID NO: 2858855 - RNA, 21 nt, Human
uucuuugagggacugccucug

SEQ ID NO: 2858856 - RNA, 22 nt, Human
uucuuugagggacugccucugc

SEQ ID NO: 2858857 - RNA, 16 nt, Human
uucuuugauaauguua

SEQ ID NO: 2858858 - RNA, 17 nt, Human
uucuuugauaauguuaa

SEQ ID NO: 2858859 - RNA, 18 nt, Human
uucuuugauaauguuaaa

SEQ ID NO: 2858860 - RNA, 11 nt, Human
uucuuugaaug

SEQ ID NO: 2858861 - RNA, 13 nt, Human
uucuuugaauuua

SEQ ID NO: 2858862 - RNA, 15 nt, Human
uucuuugaauuuacu

SEQ ID NO: 2858863 - RNA, 13 nt, Human
uucuuugauucuc

SEQ ID NO: 2858864 - RNA, 23 nt, Human
uucuuugauucuccuuuuaugug

SEQ ID NO: 2858865 - RNA, 12 nt, Human
uucuuugcaaag

SEQ ID NO: 2858866 - RNA, 16 nt, Human
uucuuugcaaaguauu

SEQ ID NO: 2858867 - RNA, 22 nt, Human
uucuuugauaauguuaaauuug

SEQ ID NO: 2858868 - RNA, 18 nt, Human
uucuucguucuuuuuaag

SEQ ID NO: 2858869 - RNA, 23 nt, Human
uucuucuauguaggaaaaaaaua

SEQ ID NO: 2858870 - RNA, 15 nt, Human
uucuucuagaguuca

SEQ ID NO: 2858871 - RNA, 11 nt, Human
uucuucuagag

SEQ ID NO: 2858872 - RNA, 14 nt, Human
uucuucuagaguuc

SEQ ID NO: 2858873 - RNA, 17 nt, Human
uucuugcucccuucagc

SEQ ID NO: 2858874 - RNA, 22 nt, Human
uucuugcucccuucagccccca

SEQ ID NO: 2858875 - RNA, 22 nt, Human
uucuugcucgggucccuucacc

SEQ ID NO: 2858876 - RNA, 20 nt, Human
uucuugcucuaucucucaaa

SEQ ID NO: 2858877 - RNA, 12 nt, Human
uucuugcugcua

SEQ ID NO: 2858878 - RNA, 13 nt, Human
uucuugcugcuag

SEQ ID NO: 2858879 - RNA, 14 nt, Human
uucuugcugcuaga

SEQ ID NO: 2858880 - RNA, 15 nt, Human
uucuugcugcuagaa

SEQ ID NO: 2858881 - RNA, 16 nt, Human
uucuugcugcuagaac

SEQ ID NO: 2858882 - RNA, 17 nt, Human
uucuugcugcuagaacu

SEQ ID NO: 2858883 - RNA, 18 nt, Human
uucuugcugcuagaacuu

SEQ ID NO: 2858884 - RNA, 19 nt, Human
uucuugcugcuagaacuuu

SEQ ID NO: 2858885 - RNA, 20 nt, Human
uucuugcugcuagaacuuuu

SEQ ID NO: 2858886 - RNA, 21 nt, Human
uucuugcugcuagaacuuuuu

SEQ ID NO: 2858887 - RNA, 15 nt, Human
uucuugcaagcaugc

SEQ ID NO: 2858888 - RNA, 18 nt, Human
uucuugcagucaucagaa

SEQ ID NO: 2858889 - RNA, 19 nt, Human
uucuugcagucaucagaag

SEQ ID NO: 2858890 - RNA, 16 nt, Human
uucuugcauccuuccu

SEQ ID NO: 2858891 - RNA, 20 nt, Human
uucuugcauccuuccuauaa

SEQ ID NO: 2858892 - RNA, 12 nt, Human
uucuugcauuga

SEQ ID NO: 2858893 - RNA, 16 nt, Human
uucuugcauugacauu

SEQ ID NO: 2858894 - RNA, 23 nt, Human
aucacuugaacccgggaggcaga

SEQ ID NO: 2858895 - RNA, 15 nt, Human
aucaggugcugccau

SEQ ID NO: 2858896 - RNA, 19 nt, Human
aucaggugcugccauccag

SEQ ID NO: 2858897 - RNA, 17 nt, Human
aucaggugcugccaucc

SEQ ID NO: 2858898 - RNA, 14 nt, Human
aucacuguuuuuag

SEQ ID NO: 2858899 - RNA, 15 nt, Human
aucacuguuuuuaga

SEQ ID NO: 2858900 - RNA, 18 nt, Human
aucacuucugagaacuca

SEQ ID NO: 2858901 - RNA, 14 nt, Human
aucacuuaaaguca

SEQ ID NO: 2858902 - RNA, 15 nt, Human
aucacuuaacauucc

SEQ ID NO: 2858903 - RNA, 23 nt, Human
aucacuuaacauuccuaaaaugc

SEQ ID NO: 2858904 - RNA, 17 nt, Human
aucacugaacaaacuaa

SEQ ID NO: 2858905 - RNA, 20 nt, Human
aucacugaacaaacuaaagg

SEQ ID NO: 2858906 - RNA, 22 nt, Human
aucacugaaaccuuuaagaaaa

SEQ ID NO: 2858907 - RNA, 19 nt, Human
aucagucugauucccaagc

SEQ ID NO: 2858908 - RNA, 14 nt, Human
aucaggugcugcca

SEQ ID NO: 2858909 - RNA, 15 nt, Human
aucagugcccuccag

SEQ ID NO: 2858910 - RNA, 13 nt, Human
aucagugcccucc

SEQ ID NO: 2858911 - RNA, 17 nt, Human
aucagugcccuccagga

SEQ ID NO: 2858912 - RNA, 16 nt, Human
aucaguggacagucug

SEQ ID NO: 2858913 - RNA, 21 nt, Human
aucaguggacagucugcucua

SEQ ID NO: 2858914 - RNA, 23 nt, Human
aucagugugucuaaauuugaaug

SEQ ID NO: 2858915 - RNA, 21 nt, Human
aucaguguuguugcucuagga

SEQ ID NO: 2858916 - RNA, 10 nt, Human
aucaguguug

SEQ ID NO: 2858917 - RNA, 18 nt, Human
aucaguuaacuauugcau

SEQ ID NO: 2858918 - RNA, 12 nt, Human
aucaguuaacua

SEQ ID NO: 2858919 - RNA, 17 nt, Human
aucaguguuuuaaauuc

SEQ ID NO: 2858920 - RNA, 18 nt, Human
aucaguguuuuaaauucu

SEQ ID NO: 2858921 - RNA, 19 nt, Human
aucaguguuuuaaauucug

SEQ ID NO: 2858922 - RNA, 20 nt, Human
aucaguguuuuaaauucuga

SEQ ID NO: 2858923 - RNA, 15 nt, Human
aucaguuagagcuga

SEQ ID NO: 2858924 - RNA, 14 nt, Human
aucaguuauucauu

SEQ ID NO: 2858925 - RNA, 16 nt, Human
aucaguuauucauucu

SEQ ID NO: 2858926 - RNA, 23 nt, Human
aucauccacugugccaugugcca

SEQ ID NO: 2858927 - RNA, 11 nt, Human
aucauuaauac

SEQ ID NO: 2858928 - RNA, 17 nt, Human
aucauuacccuucccug

SEQ ID NO: 2858929 - RNA, 20 nt, Human
aucauuacccuucccugcac

SEQ ID NO: 2858930 - RNA, 22 nt, Human
aucauuacccuucccugcacua

SEQ ID NO: 2858931 - RNA, 23 nt, Human
aucauuaccuuuuaccagcuuuu

SEQ ID NO: 2858932 - RNA, 16 nt, Human
aucauccacauuguuu

SEQ ID NO: 2858933 - RNA, 21 nt, Human
aucauccacugugccaugugc

SEQ ID NO: 2858934 - RNA, 11 nt, Human
aucauuagaac

SEQ ID NO: 2858935 - RNA, 14 nt, Human
aucaguuccuuugu

SEQ ID NO: 2858936 - RNA, 17 nt, Human
aucaguuccuuugugug

SEQ ID NO: 2858937 - RNA, 23 nt, Human
aucauaguggcuuaaaacaacac

SEQ ID NO: 2858938 - RNA, 13 nt, Human
aucauaaaauaaa

SEQ ID NO: 2858939 - RNA, 14 nt, Human
aucauaaaaucaaa

SEQ ID NO: 2858940 - RNA, 12 nt, Human
aucauaaaauaa

SEQ ID NO: 2858941 - RNA, 10 nt, Human
aucaguuuga

SEQ ID NO: 2858942 - RNA, 22 nt, Human
aucaguuugaucacacuauuuu

SEQ ID NO: 2858943 - RNA, 14 nt, Human
aucauaguuaacau

SEQ ID NO: 2858944 - RNA, 14 nt, Human
aucauaaaguuaga

SEQ ID NO: 2858945 - RNA, 15 nt, Human
aucauaaaguuagaa

SEQ ID NO: 2858946 - RNA, 16 nt, Human
aucauaaaguuagaau

SEQ ID NO: 2858947 - RNA, 18 nt, Human
aucaucaguggagccaug

SEQ ID NO: 2858948 - RNA, 19 nt, Human
aucaucauaguaaaagaaa

SEQ ID NO: 2858949 - RNA, 18 nt, Human
aucaucaugcagcucaac

SEQ ID NO: 2858950 - RNA, 20 nt, Human
aucaucaugcagcucaacuu

SEQ ID NO: 2858951 - RNA, 17 nt, Human
uucuccuuucacaaccu

SEQ ID NO: 2858952 - RNA, 19 nt, Human
uucuccguccucgauggga

SEQ ID NO: 2858953 - RNA, 13 nt, Human
uucucccuucggu

SEQ ID NO: 2858954 - RNA, 21 nt, Human
uucucccuucgguggaagagc

SEQ ID NO: 2858955 - RNA, 21 nt, Human
uucucccguucacguugccua

SEQ ID NO: 2858956 - RNA, 20 nt, Human
uucucccucauuucaggagc

SEQ ID NO: 2858957 - RNA, 18 nt, Human
uucucccucccaccuuaa

SEQ ID NO: 2858958 - RNA, 15 nt, Human
aucauuguuuugaau

SEQ ID NO: 2858959 - RNA, 14 nt, Human
aucauuguugccuc

SEQ ID NO: 2858960 - RNA, 22 nt, Human
uucugaauauuuuaucuuuccu

SEQ ID NO: 2858961 - RNA, 22 nt, Human
uucugcaguaaaucuuuuacaa

SEQ ID NO: 2858962 - RNA, 18 nt, Human
uucugcaguaaaucuuuu

SEQ ID NO: 2858963 - RNA, 15 nt, Human
uucugcaguaaaucu

SEQ ID NO: 2858964 - RNA, 19 nt, Human
uucugaaugugcugaucau

SEQ ID NO: 2858965 - RNA, 23 nt, Human
uucugcauauguugaauacuuuu

SEQ ID NO: 2858966 - RNA, 22 nt, Human
uucugcauauguugaauacuuu

SEQ ID NO: 2858967 - RNA, 21 nt, Human
uucugcauauguugaauacuu

SEQ ID NO: 2858968 - RNA, 17 nt, Human
uucugcauauguugaau

SEQ ID NO: 2858969 - RNA, 23 nt, Human
uucucgcaaaaacguaucuccua

SEQ ID NO: 2858970 - RNA, 13 nt, Human
uucuccuuuuccu

SEQ ID NO: 2858971 - RNA, 18 nt, Human
uucuccuuuuccucucuc

SEQ ID NO: 2858972 - RNA, 18 nt, Human
uucuccuuucacaaccuu

SEQ ID NO: 2858973 - RNA, 22 nt, Human
uucuccuuucacaaccuucugu

SEQ ID NO: 2858974 - RNA, 17 nt, Human
aucacgccacugcacua

SEQ ID NO: 2858975 - RNA, 15 nt, Human
aucacgccacugcac

SEQ ID NO: 2858976 - RNA, 14 nt, Human
aucacgccacugca

SEQ ID NO: 2858977 - RNA, 23 nt, Human
aucacgccacugcacuccagccu

SEQ ID NO: 2858978 - RNA, 14 nt, Human
aucacgccuggcua

SEQ ID NO: 2858979 - RNA, 22 nt, Human
aucaauuuugacuuaaugugau

SEQ ID NO: 2858980 - RNA, 15 nt, Human
aucaauuuuuaggaa

SEQ ID NO: 2858981 - RNA, 15 nt, Human
aucacuauccaugca

SEQ ID NO: 2858982 - RNA, 21 nt, Human
aucacuauccaugcaccaaac

SEQ ID NO: 2858983 - RNA, 14 nt, Human
aucacucugcugcu

SEQ ID NO: 2858984 - RNA, 21 nt, Human
aucacucugcugcuuagacau

SEQ ID NO: 2858985 - RNA, 13 nt, Human
aucacucuguccu

SEQ ID NO: 2858986 - RNA, 18 nt, Human
aucacuccccaaggaaga

SEQ ID NO: 2858987 - RNA, 20 nt, Human
aucacuccccaaggaagagc

SEQ ID NO: 2858988 - RNA, 16 nt, Human
aucaauucauaucuau

SEQ ID NO: 2858989 - RNA, 18 nt, Human
aucaauuauaguuucuga

SEQ ID NO: 2858990 - RNA, 20 nt, Human
aucaauuaacugaguagcuc

SEQ ID NO: 2858991 - RNA, 16 nt, Human
aucaauuauaguuucu

SEQ ID NO: 2858992 - RNA, 17 nt, Human
aucaauuauaguuucug

SEQ ID NO: 2858993 - RNA, 19 nt, Human
aucaagggugcgucuggga

SEQ ID NO: 2858994 - RNA, 21 nt, Human
aucaauguucacgcaacuuga

SEQ ID NO: 2858995 - RNA, 22 nt, Human
aucaauguucacgcaacuugaa

SEQ ID NO: 2858996 - RNA, 23 nt, Human
aucaauguucacgcaacuugaaa

SEQ ID NO: 2858997 - RNA, 15 nt, Human
aucaacuacuauuca

SEQ ID NO: 2858998 - RNA, 17 nt, Human
aucaacuacuauucaaa

SEQ ID NO: 2858999 - RNA, 14 nt, Human
aucaacuuuaauca

SEQ ID NO: 2859000 - RNA, 15 nt, Human
aucaacuuuaaucaa

SEQ ID NO: 2859001 - RNA, 21 nt, Human
aucaacuuuaaucaaguugua

SEQ ID NO: 2859002 - RNA, 12 nt, Human
aucaacuuaaca

SEQ ID NO: 2859003 - RNA, 11 nt, Human
aucaacccuuc

SEQ ID NO: 2859004 - RNA, 14 nt, Human
aucaacucaagaau

SEQ ID NO: 2859005 - RNA, 15 nt, Human
uuccuuacccaaacu

SEQ ID NO: 2859006 - RNA, 16 nt, Human
uuccuuaccuuuaccc

SEQ ID NO: 2859007 - RNA, 23 nt, Human
uuccuuaccuuuaccccaucccu

SEQ ID NO: 2859008 - RNA, 12 nt, Human
uuccuuaaguau

SEQ ID NO: 2859009 - RNA, 19 nt, Human
uuccuuaaguauaucaugu

SEQ ID NO: 2859010 - RNA, 20 nt, Human
uuccuuaaguauaucaugua

SEQ ID NO: 2859011 - RNA, 15 nt, Human
uuccugaaaugcagu

SEQ ID NO: 2859012 - RNA, 14 nt, Human
uuccuggcuucuua

SEQ ID NO: 2859013 - RNA, 18 nt, Human
uuccuggcuuuuuaacuc

SEQ ID NO: 2859014 - RNA, 14 nt, Human
uuccuguuuguaca

SEQ ID NO: 2859015 - RNA, 22 nt, Human
uuccuguuuuguacauagauuu

SEQ ID NO: 2859016 - RNA, 15 nt, Human
uuccuguuucugaaa

SEQ ID NO: 2859017 - RNA, 16 nt, Human
uuccuguuucugaaaa

SEQ ID NO: 2859018 - RNA, 18 nt, Human
uuccuguuucugaaaaga

SEQ ID NO: 2859019 - RNA, 20 nt, Human
uuccuguuucugaaaagaaa

SEQ ID NO: 2859020 - RNA, 15 nt, Human
uuccucucuccagau

SEQ ID NO: 2859021 - RNA, 11 nt, Human
uuccucucugg

SEQ ID NO: 2859022 - RNA, 18 nt, Human
uuccucucugguggcucu

SEQ ID NO: 2859023 - RNA, 14 nt, Human
uuccucucuccaga

SEQ ID NO: 2859024 - RNA, 13 nt, Human
uuccucugagccu

SEQ ID NO: 2859025 - RNA, 19 nt, Human
uuccucuccacugccuucg

SEQ ID NO: 2859026 - RNA, 15 nt, Human
uuccucuccuuccuu

SEQ ID NO: 2859027 - RNA, 19 nt, Human
uuccucuccuucguauccc

SEQ ID NO: 2859028 - RNA, 22 nt, Human
uuccucuccuucguaucccgag

SEQ ID NO: 2859029 - RNA, 16 nt, Human
uuccucuccacugccu

SEQ ID NO: 2859030 - RNA, 18 nt, Human
uuccucuccacugccuuc

SEQ ID NO: 2859031 - RNA, 22 nt, Human
uucccgcggguuccgcaggcag

SEQ ID NO: 2859032 - RNA, 14 nt, Human
uuccuaacuuuuca

SEQ ID NO: 2859033 - RNA, 22 nt, Human
uuccuaacuuuucaaugacauu

SEQ ID NO: 2859034 - RNA, 16 nt, Human
uuccuaagaagcuucu

SEQ ID NO: 2859035 - RNA, 18 nt, Human
uuccuaagaagcuucuaa

SEQ ID NO: 2859036 - RNA, 18 nt, Human
uuccuaagaccugggguu

SEQ ID NO: 2859037 - RNA, 13 nt, Human
uuccuaagccacu

SEQ ID NO: 2859038 - RNA, 21 nt, Human
uuccuaagccacuugaaaugu

SEQ ID NO: 2859039 - RNA, 22 nt, Human
uuccuaagccacuugaaauguu

SEQ ID NO: 2859040 - RNA, 17 nt, Human
uuccuaagccuguggcu

SEQ ID NO: 2859041 - RNA, 19 nt, Human
uuccuaagccuguggcugu

SEQ ID NO: 2859042 - RNA, 22 nt, Human
uuccgaagaagaugcuccagca

SEQ ID NO: 2859043 - RNA, 15 nt, Human
uucccuaccucaggc

SEQ ID NO: 2859044 - RNA, 16 nt, Human
uuccgacccucuggga

SEQ ID NO: 2859045 - RNA, 17 nt, Human
uuccgacccucugggaa

SEQ ID NO: 2859046 - RNA, 18 nt, Human
uuccgacccucugggaac

SEQ ID NO: 2859047 - RNA, 21 nt, Human
uuccgcacuucagaauuccau

SEQ ID NO: 2859048 - RNA, 13 nt, Human
uuccgcacuuucc

SEQ ID NO: 2859049 - RNA, 15 nt, Human
uuccgcacuuuccac

SEQ ID NO: 2859050 - RNA, 22 nt, Human
uuccgcacuuuccacuucuucc

SEQ ID NO: 2859051 - RNA, 17 nt, Human
uuccgcaggcagacuac

SEQ ID NO: 2859052 - RNA, 14 nt, Human
uuccgccccugccu

SEQ ID NO: 2859053 - RNA, 16 nt, Human
uuccgccccugccugc

SEQ ID NO: 2859054 - RNA, 18 nt, Human
uuccgccccugccugcca

SEQ ID NO: 2859055 - RNA, 14 nt, Human
uuccgccccuuccc

SEQ ID NO: 2859056 - RNA, 15 nt, Human
uuccgccccuucccu

SEQ ID NO: 2859057 - RNA, 17 nt, Human
uuccgccccuucccuuc

SEQ ID NO: 2859058 - RNA, 14 nt, Human
uucccuaccucagg

SEQ ID NO: 2859059 - RNA, 13 nt, Human
uucccuaccucag

SEQ ID NO: 2859060 - RNA, 15 nt, Human
uucccuaaagugaug

SEQ ID NO: 2859061 - RNA, 14 nt, Human
uucccuaacacuua

SEQ ID NO: 2859062 - RNA, 17 nt, Human
uucccguuucuccaccu

SEQ ID NO: 2859063 - RNA, 19 nt, Human
uucccuaaaauacauuuaa

SEQ ID NO: 2859064 - RNA, 22 nt, Human
uucccuaaaauacauuuaaaac

SEQ ID NO: 2859065 - RNA, 14 nt, Human
uucccguuucucca

SEQ ID NO: 2859066 - RNA, 15 nt, Human
uucccguuucuccac

SEQ ID NO: 2859067 - RNA, 21 nt, Human
auauuugcuagacucuagaca

SEQ ID NO: 2859068 - RNA, 13 nt, Human
auauuugcuuuuu

SEQ ID NO: 2859069 - RNA, 21 nt, Human
auauuuggaagaaaaaaaucu

SEQ ID NO: 2859070 - RNA, 23 nt, Human
auauuuggaagaaaaaaaucuuc

SEQ ID NO: 2859071 - RNA, 13 nt, Human
auauuugaauuuu

SEQ ID NO: 2859072 - RNA, 20 nt, Human
auauuugaauuuuaaaucua

SEQ ID NO: 2859073 - RNA, 15 nt, Human
auauuugacuauucu

SEQ ID NO: 2859074 - RNA, 15 nt, Human
auauuugacuugcau

SEQ ID NO: 2859075 - RNA, 16 nt, Human
auauuugacuugcaug

SEQ ID NO: 2859076 - RNA, 20 nt, Human
auauuugacuugcaugaaga

SEQ ID NO: 2859077 - RNA, 22 nt, Human
auauuugacuugcaugaagaga

SEQ ID NO: 2859078 - RNA, 16 nt, Human
uuccccuuuugccaau

SEQ ID NO: 2859079 - RNA, 15 nt, Human
auauuuggcuuaaau

SEQ ID NO: 2859080 - RNA, 18 nt, Human
auauuuggcuuaaauaua

SEQ ID NO: 2859081 - RNA, 21 nt, Human
auauuuggcuuaaauauaguu

SEQ ID NO: 2859082 - RNA, 14 nt, Human
uucccgcucagccc

SEQ ID NO: 2859083 - RNA, 15 nt, Human
uucccgcucagcccu

SEQ ID NO: 2859084 - RNA, 12 nt, Human
uucccgcucagc

SEQ ID NO: 2859085 - RNA, 21 nt, Human
uucccgccagagggcuuguga

SEQ ID NO: 2859086 - RNA, 22 nt, Human
auauuuaacauuauuuauaugg

SEQ ID NO: 2859087 - RNA, 21 nt, Human
auauuuaaguauaaaauacaa

SEQ ID NO: 2859088 - RNA, 14 nt, Human
auauuuaaugcauu

SEQ ID NO: 2859089 - RNA, 19 nt, Human
auauuuaaugcauuaaacc

SEQ ID NO: 2859090 - RNA, 21 nt, Human
auauuuaaugcauuaaaccug

SEQ ID NO: 2859091 - RNA, 22 nt, Human
auauuuaaugcauuaaaccugu

SEQ ID NO: 2859092 - RNA, 23 nt, Human
auauuuaaugcauuaaaccuguc

SEQ ID NO: 2859093 - RNA, 13 nt, Human
auauuuaauguuu

SEQ ID NO: 2859094 - RNA, 14 nt, Human
auauuuaauguuuu

SEQ ID NO: 2859095 - RNA, 15 nt, Human
auauuuaauguuuua

SEQ ID NO: 2859096 - RNA, 20 nt, Human
auauuuaauguuuuaaaugu

SEQ ID NO: 2859097 - RNA, 21 nt, Human
auauuuaauguuuuaaaugua

SEQ ID NO: 2859098 - RNA, 22 nt, Human
auauuuaauguuuuaaauguac

SEQ ID NO: 2859099 - RNA, 14 nt, Human
auauuuaauuauua

SEQ ID NO: 2859100 - RNA, 15 nt, Human
auauuuaauuauuaa

SEQ ID NO: 2859101 - RNA, 17 nt, Human
auauuuaauuauuaacu

SEQ ID NO: 2859102 - RNA, 23 nt, Human
auauuuaaugauaaguaaaugcu

SEQ ID NO: 2859103 - RNA, 13 nt, Human
auauuuaaugaua

SEQ ID NO: 2859104 - RNA, 12 nt, Human
auauuuaaugau

SEQ ID NO: 2859105 - RNA, 18 nt, Human
auauuguuucuuuaucac

SEQ ID NO: 2859106 - RNA, 19 nt, Human
auauuuaacauuauuuaua

SEQ ID NO: 2859107 - RNA, 13 nt, Human
auauuuaacuggu

SEQ ID NO: 2859108 - RNA, 16 nt, Human
auauuuaacuggugca

SEQ ID NO: 2859109 - RNA, 18 nt, Human
auauuuaagcaacaucuu

SEQ ID NO: 2859110 - RNA, 20 nt, Human
auauugugccaauauguauu

SEQ ID NO: 2859111 - RNA, 21 nt, Human
auauugugccaauauguauug

SEQ ID NO: 2859112 - RNA, 16 nt, Human
auauuguuguauaauu

SEQ ID NO: 2859113 - RNA, 18 nt, Human
auauuguuguauaauuuc

SEQ ID NO: 2859114 - RNA, 22 nt, Human
auauuguuguauaauuucgaga

SEQ ID NO: 2859115 - RNA, 14 nt, Human
auauugugaacauu

SEQ ID NO: 2859116 - RNA, 12 nt, Human
auauugugccaa

SEQ ID NO: 2859117 - RNA, 18 nt, Human
auauugugccaauaugua

SEQ ID NO: 2859118 - RNA, 19 nt, Human
auauugugccaauauguau

SEQ ID NO: 2859119 - RNA, 13 nt, Human
auauuguacauaa

SEQ ID NO: 2859120 - RNA, 14 nt, Human
auauuguacauaaa

SEQ ID NO: 2859121 - RNA, 16 nt, Human
auauuguacauaaaag

SEQ ID NO: 2859122 - RNA, 17 nt, Human
auauuguacauaaaaga

SEQ ID NO: 2859123 - RNA, 21 nt, Human
auauuguacauaaaagaauuu

SEQ ID NO: 2859124 - RNA, 16 nt, Human
auauugucauaucagc

SEQ ID NO: 2859125 - RNA, 17 nt, Human
auauugagucaaauggu

SEQ ID NO: 2859126 - RNA, 17 nt, Human
auauugcuguauagcuc

SEQ ID NO: 2859127 - RNA, 15 nt, Human
auauugguauucacu

SEQ ID NO: 2859128 - RNA, 17 nt, Human
auauuggcauggauuuc

SEQ ID NO: 2859129 - RNA, 15 nt, Human
auauuggaaaaauca

SEQ ID NO: 2859130 - RNA, 13 nt, Human
auauugguauuca

SEQ ID NO: 2859131 - RNA, 15 nt, Human
auauucuauuuuuau

SEQ ID NO: 2859132 - RNA, 20 nt, Human
auauucuauaugaauuuaaa

SEQ ID NO: 2859133 - RNA, 18 nt, Human
auauucuauaugaauuua

SEQ ID NO: 2859134 - RNA, 23 nt, Human
auauucuaagacuuacucuaaga

SEQ ID NO: 2859135 - RNA, 13 nt, Human
auauucuaagacu

SEQ ID NO: 2859136 - RNA, 14 nt, Human
auauucuaagacuu

SEQ ID NO: 2859137 - RNA, 16 nt, Human
auauucuaaaaccauu

SEQ ID NO: 2859138 - RNA, 12 nt, Human
auauuccuuuga

SEQ ID NO: 2859139 - RNA, 16 nt, Human
auauuccuuugaagau

SEQ ID NO: 2859140 - RNA, 21 nt, Human
auauuccugcauuugugaaau

SEQ ID NO: 2859141 - RNA, 16 nt, Human
auauugaggcuuugug

SEQ ID NO: 2859142 - RNA, 17 nt, Human
auauugaggcuuugugu

SEQ ID NO: 2859143 - RNA, 18 nt, Human
auauugaggcuuuguguu

SEQ ID NO: 2859144 - RNA, 19 nt, Human
auauugaggcuuuguguug

SEQ ID NO: 2859145 - RNA, 22 nt, Human
auauugaggcuuuguguuguaa

SEQ ID NO: 2859146 - RNA, 18 nt, Human
auauugaauguuuccaac

SEQ ID NO: 2859147 - RNA, 21 nt, Human
auauugaauauaauauauuug

SEQ ID NO: 2859148 - RNA, 12 nt, Human
auauugacauuu

SEQ ID NO: 2859149 - RNA, 13 nt, Human
auauugacauuug

SEQ ID NO: 2859150 - RNA, 14 nt, Human
auauugacauuugu

SEQ ID NO: 2859151 - RNA, 15 nt, Human
auauugacauuugua

SEQ ID NO: 2859152 - RNA, 16 nt, Human
auauugacauuuguag

SEQ ID NO: 2859153 - RNA, 20 nt, Human
auauugacauuuguaguuga

SEQ ID NO: 2859154 - RNA, 12 nt, Human
auauuaauguac

SEQ ID NO: 2859155 - RNA, 18 nt, Human
auauuaauguacuuguuu

SEQ ID NO: 2859156 - RNA, 15 nt, Human
auauuaauuuucuac

SEQ ID NO: 2859157 - RNA, 21 nt, Human
auauuaauuuucuacaaauaa

SEQ ID NO: 2859158 - RNA, 15 nt, Human
auauuacacauuugu

SEQ ID NO: 2859159 - RNA, 16 nt, Human
auauuacacauuugua

SEQ ID NO: 2859160 - RNA, 18 nt, Human
auauguugaauacuuuuu

SEQ ID NO: 2859161 - RNA, 17 nt, Human
auauguugaauacuuuu

SEQ ID NO: 2859162 - RNA, 16 nt, Human
auauguugaauacuuu

SEQ ID NO: 2859163 - RNA, 15 nt, Human
auauguugaauacuu

SEQ ID NO: 2859164 - RNA, 15 nt, Human
auauuaaaagucaca

SEQ ID NO: 2859165 - RNA, 18 nt, Human
auauuaaaagucacaaug

SEQ ID NO: 2859166 - RNA, 23 nt, Human
auauuaaaagucacaauguucuu

SEQ ID NO: 2859167 - RNA, 23 nt, Human
auauuaaaaauauggaacuucua

SEQ ID NO: 2859168 - RNA, 22 nt, Human
uuccagugaaaucaguuacucu

SEQ ID NO: 2859169 - RNA, 14 nt, Human
uuccagucucaaaa

SEQ ID NO: 2859170 - RNA, 19 nt, Human
uuccagucucaaaaauaca

SEQ ID NO: 2859171 - RNA, 20 nt, Human
uucccaggaugagcauccca

SEQ ID NO: 2859172 - RNA, 22 nt, Human
uucccagcaguggacucaaaac

SEQ ID NO: 2859173 - RNA, 17 nt, Human
uucccagugaauucuug

SEQ ID NO: 2859174 - RNA, 20 nt, Human
uucccagucuucugacaaac

SEQ ID NO: 2859175 - RNA, 14 nt, Human
uucccaguggcugc

SEQ ID NO: 2859176 - RNA, 15 nt, Human
uucccaguggcugcu

SEQ ID NO: 2859177 - RNA, 20 nt, Human
uucccaguggcugcugccca

SEQ ID NO: 2859178 - RNA, 21 nt, Human
uucccaguggcugcugcccag

SEQ ID NO: 2859179 - RNA, 16 nt, Human
uucccaguggcugcug

SEQ ID NO: 2859180 - RNA, 17 nt, Human
uucccaguggcugcugc

SEQ ID NO: 2859181 - RNA, 18 nt, Human
uucccaguggcugcugcc

SEQ ID NO: 2859182 - RNA, 19 nt, Human
uucccaguggcugcugccc

SEQ ID NO: 2859183 - RNA, 18 nt, Human
uucccagguucuguuuau

SEQ ID NO: 2859184 - RNA, 15 nt, Human
auauguucaacugga

SEQ ID NO: 2859185 - RNA, 12 nt, Human
auauguucaacu

SEQ ID NO: 2859186 - RNA, 23 nt, Human
auauguuaagcagcuaaauuuuc

SEQ ID NO: 2859187 - RNA, 14 nt, Human
auauguguugaaaa

SEQ ID NO: 2859188 - RNA, 18 nt, Human
auauguguugaaaaccaa

SEQ ID NO: 2859189 - RNA, 20 nt, Human
auauguguugaaaaccaaaa

SEQ ID NO: 2859190 - RNA, 14 nt, Human
auauguugaauacu

SEQ ID NO: 2859191 - RNA, 16 nt, Human
auauguucaacuggag

SEQ ID NO: 2859192 - RNA, 14 nt, Human
uucagcuaagcuag

SEQ ID NO: 2859193 - RNA, 20 nt, Human
uucagcuaagcuaggaauga

SEQ ID NO: 2859194 - RNA, 13 nt, Human
uucagcuaaggga

SEQ ID NO: 2859195 - RNA, 18 nt, Human
uucagcuaagggaagaca

SEQ ID NO: 2859196 - RNA, 20 nt, Human
uucagcuaagggaagacauu

SEQ ID NO: 2859197 - RNA, 21 nt, Human
uucagcuaagggaagacauuu

SEQ ID NO: 2859198 - RNA, 23 nt, Human
uucagcuaagggaagacauuucu

SEQ ID NO: 2859199 - RNA, 19 nt, Human
uucagcuagcuuuuaggaa

SEQ ID NO: 2859200 - RNA, 20 nt, Human
uucagcuagcuuuuaggaaa

SEQ ID NO: 2859201 - RNA, 16 nt, Human
uucagcauucccuccc

SEQ ID NO: 2859202 - RNA, 17 nt, Human
uucagcauucccuccca

SEQ ID NO: 2859203 - RNA, 22 nt, Human
uucagauuuugauaacuguuua

SEQ ID NO: 2859204 - RNA, 23 nt, Human
uucagauuuugauaacuguuuau

SEQ ID NO: 2859205 - RNA, 13 nt, Human
uucagcacuuguc

SEQ ID NO: 2859206 - RNA, 15 nt, Human
uucagcacuugucuc

SEQ ID NO: 2859207 - RNA, 17 nt, Human
uucagcacuugucucau

SEQ ID NO: 2859208 - RNA, 19 nt, Human
uucagcacuugucucauuu

SEQ ID NO: 2859209 - RNA, 20 nt, Human
uucagcacuugucucauuuu

SEQ ID NO: 2859210 - RNA, 21 nt, Human
uucagcacuugucucauuuua

SEQ ID NO: 2859211 - RNA, 16 nt, Human
uucagguaacaggcag

SEQ ID NO: 2859212 - RNA, 15 nt, Human
uucagguaacaggca

SEQ ID NO: 2859213 - RNA, 22 nt, Human
uucaggguuggccccugcccgg

SEQ ID NO: 2859214 - RNA, 19 nt, Human
uucaggguuggccccugcc

SEQ ID NO: 2859215 - RNA, 17 nt, Human
uucaggguuggccccug

SEQ ID NO: 2859216 - RNA, 16 nt, Human
uucaggguuggccccu

SEQ ID NO: 2859217 - RNA, 14 nt, Human
uucaggguuggccc

SEQ ID NO: 2859218 - RNA, 14 nt, Human
uucagcucacgcuu

SEQ ID NO: 2859219 - RNA, 16 nt, Human
uucagcucacgcuuca

SEQ ID NO: 2859220 - RNA, 19 nt, Human
uucagcucacgcuucacag

SEQ ID NO: 2859221 - RNA, 20 nt, Human
uucagcucacgcuucacagu

SEQ ID NO: 2859222 - RNA, 18 nt, Human
uucagauauuauugcuuu

SEQ ID NO: 2859223 - RNA, 14 nt, Human
uucagauucccaga

SEQ ID NO: 2859224 - RNA, 22 nt, Human
uucagauucccagagcaaaaua

SEQ ID NO: 2859225 - RNA, 21 nt, Human
uucagauucccagagcaaaau

SEQ ID NO: 2859226 - RNA, 11 nt, Human
uucagaagacc

SEQ ID NO: 2859227 - RNA, 15 nt, Human
uucagauauauauca

SEQ ID NO: 2859228 - RNA, 19 nt, Human
uucagaaccucuuccccag

SEQ ID NO: 2859229 - RNA, 18 nt, Human
uucagaaccucuucccca

SEQ ID NO: 2859230 - RNA, 17 nt, Human
uucagaaccucuucccc

SEQ ID NO: 2859231 - RNA, 16 nt, Human
uucagaaccucuuccc

SEQ ID NO: 2859232 - RNA, 18 nt, Human
uucagaaaacgggaagcg

SEQ ID NO: 2859233 - RNA, 22 nt, Human
uucacuuuugcaagguuccaca

SEQ ID NO: 2859234 - RNA, 13 nt, Human
uucagaaauugga

SEQ ID NO: 2859235 - RNA, 21 nt, Human
uucagaaauuggaacagaaug

SEQ ID NO: 2859236 - RNA, 22 nt, Human
uucagaacaacugcaaagaaag

SEQ ID NO: 2859237 - RNA, 15 nt, Human
uucagaaccucuucc

SEQ ID NO: 2859238 - RNA, 12 nt, Human
uucagaaccucu

SEQ ID NO: 2859239 - RNA, 16 nt, Human
uucagaaccauccaua

SEQ ID NO: 2859240 - RNA, 20 nt, Human
uucagaaauuggaacagaau

SEQ ID NO: 2859241 - RNA, 21 nt, Human
uucacuugaugauacaaugaa

SEQ ID NO: 2859242 - RNA, 20 nt, Human
uucacuucgggcuguguaaa

SEQ ID NO: 2859243 - RNA, 14 nt, Human
uucaucaagacugg

SEQ ID NO: 2859244 - RNA, 17 nt, Human
uucaguccaauaggugu

SEQ ID NO: 2859245 - RNA, 13 nt, Human
uucaucagcauuu

SEQ ID NO: 2859246 - RNA, 12 nt, Human
auauauggacau

SEQ ID NO: 2859247 - RNA, 14 nt, Human
auauauggacaugg

SEQ ID NO: 2859248 - RNA, 15 nt, Human
auauauggacauggc

SEQ ID NO: 2859249 - RNA, 14 nt, Human
auauaugccuuuuu

SEQ ID NO: 2859250 - RNA, 16 nt, Human
auauaugccuuuuucc

SEQ ID NO: 2859251 - RNA, 17 nt, Human
auauaugccuuuuuccu

SEQ ID NO: 2859252 - RNA, 18 nt, Human
auauaugccuuuuuccua

SEQ ID NO: 2859253 - RNA, 15 nt, Human
auauauggcauuugc

SEQ ID NO: 2859254 - RNA, 16 nt, Human
auauauggcauuugca

SEQ ID NO: 2859255 - RNA, 17 nt, Human
auauauggcauuugcag

SEQ ID NO: 2859256 - RNA, 22 nt, Human
auauauguuuuaagaggcaggg

SEQ ID NO: 2859257 - RNA, 21 nt, Human
auauauguuuuaagaggcagg

SEQ ID NO: 2859258 - RNA, 16 nt, Human
auauauuuaaugauaa

SEQ ID NO: 2859259 - RNA, 13 nt, Human
auauauuuauaac

SEQ ID NO: 2859260 - RNA, 12 nt, Human
auauauuuauaa

SEQ ID NO: 2859261 - RNA, 10 nt, Human
auauauuuau

SEQ ID NO: 2859262 - RNA, 23 nt, Human
auauauuuauaacucaucauaaa

SEQ ID NO: 2859263 - RNA, 21 nt, Human
auauauuuauaacucaucaua

SEQ ID NO: 2859264 - RNA, 16 nt, Human
auauauuuauaacuca

SEQ ID NO: 2859265 - RNA, 15 nt, Human
auauauuuauaacuc

SEQ ID NO: 2859266 - RNA, 14 nt, Human
auauauuuauaacu

SEQ ID NO: 2859267 - RNA, 14 nt, Human
auauauuuauuuaa

SEQ ID NO: 2859268 - RNA, 15 nt, Human
auauauuuauuuaaa

SEQ ID NO: 2859269 - RNA, 16 nt, Human
auauauuuauuuaaag

SEQ ID NO: 2859270 - RNA, 19 nt, Human
auauauuuauuuaaagcau

SEQ ID NO: 2859271 - RNA, 19 nt, Human
uucagguuuuguaaagaug

SEQ ID NO: 2859272 - RNA, 15 nt, Human
uucagguuuuguaaa

SEQ ID NO: 2859273 - RNA, 24 nt, Human
uucagguuaucgaaauaacaaugu

SEQ ID NO: 2859274 - RNA, 15 nt, Human
uucagguuguuggug

SEQ ID NO: 2859275 - RNA, 22 nt, Human
uucagguuaucgaaauaacaau

SEQ ID NO: 2859276 - RNA, 12 nt, Human
uucaguccugcu

SEQ ID NO: 2859277 - RNA, 16 nt, Human
uucaguccugcuccag

SEQ ID NO: 2859278 - RNA, 18 nt, Human
uucaguccugcuccagaa

SEQ ID NO: 2859279 - RNA, 22 nt, Human
uucaguccugggagacccaugu

SEQ ID NO: 2859280 - RNA, 16 nt, Human
uucaguccuguaguuu

SEQ ID NO: 2859281 - RNA, 20 nt, Human
uucagucagaaaacuuuaaa

SEQ ID NO: 2859282 - RNA, 21 nt, Human
uucaguauuuuggagaaauua

SEQ ID NO: 2859283 - RNA, 19 nt, Human
uucaguauuuuggagaaau

SEQ ID NO: 2859284 - RNA, 20 nt, Human
uucaguauuuuggagaaauu

SEQ ID NO: 2859285 - RNA, 18 nt, Human
uucaguauuuuggagaaa

SEQ ID NO: 2859286 - RNA, 19 nt, Human
uucaguaaacauaaagcca

SEQ ID NO: 2859287 - RNA, 17 nt, Human
uucagguaacaggcaga

SEQ ID NO: 2859288 - RNA, 21 nt, Human
uucaggguuuucugagggaaa

SEQ ID NO: 2859289 - RNA, 14 nt, Human
uucagguacuaaau

SEQ ID NO: 2859290 - RNA, 16 nt, Human
uucagguauguugccu

SEQ ID NO: 2859291 - RNA, 19 nt, Human
uucagguuaucgaaauaac

SEQ ID NO: 2859292 - RNA, 20 nt, Human
uucagguuaucgaaauaaca

SEQ ID NO: 2859293 - RNA, 21 nt, Human
uucagguuaucgaaauaacaa

SEQ ID NO: 2859294 - RNA, 21 nt, Human
uucaggugacaugugaaaccu

SEQ ID NO: 2859295 - RNA, 22 nt, Human
uucaggugacaugugaaaccuu

SEQ ID NO: 2859296 - RNA, 23 nt, Human
uucaggugacaugugaaaccuuu

SEQ ID NO: 2859297 - RNA, 17 nt, Human
uucaggugcagaggaag

SEQ ID NO: 2859298 - RNA, 18 nt, Human
uucaggugcagaggaagu

SEQ ID NO: 2859299 - RNA, 13 nt, Human
uucaggugacaug

SEQ ID NO: 2859300 - RNA, 14 nt, Human
uucaggugacaugu

SEQ ID NO: 2859301 - RNA, 14 nt, Human
uucaggugaaaaug

SEQ ID NO: 2859302 - RNA, 15 nt, Human
uucaggugaaaaugu

SEQ ID NO: 2859303 - RNA, 16 nt, Human
uucaggugacauguga

SEQ ID NO: 2859304 - RNA, 17 nt, Human
uucaggugacaugugaa

SEQ ID NO: 2859305 - RNA, 18 nt, Human
uucaggugacaugugaaa

SEQ ID NO: 2859306 - RNA, 19 nt, Human
uucaggugacaugugaaac

SEQ ID NO: 2859307 - RNA, 17 nt, Human
uucauaguaacuucuua

SEQ ID NO: 2859308 - RNA, 20 nt, Human
uucagucugaaugcugccac

SEQ ID NO: 2859309 - RNA, 14 nt, Human
uucagucuugccuu

SEQ ID NO: 2859310 - RNA, 14 nt, Human
uucagugauaacuc

SEQ ID NO: 2859311 - RNA, 21 nt, Human
uucagugauaacuccuaagag

SEQ ID NO: 2859312 - RNA, 20 nt, Human
uucauaucuauuuauuaaau

SEQ ID NO: 2859313 - RNA, 20 nt, Human
uucauaugacauucaugccu

SEQ ID NO: 2859314 - RNA, 21 nt, Human
uucauauaugaggacuugugu

SEQ ID NO: 2859315 - RNA, 18 nt, Human
uucauauaugaggacuug

SEQ ID NO: 2859316 - RNA, 19 nt, Human
uucaucaaauggaagacac

SEQ ID NO: 2859317 - RNA, 16 nt, Human
uucaucaaauggaaga

SEQ ID NO: 2859318 - RNA, 23 nt, Human
uucauaugacauucaugccuggc

SEQ ID NO: 2859319 - RNA, 13 nt, Human
auauguacuguuu

SEQ ID NO: 2859320 - RNA, 23 nt, Human
auauggguuagauguugccaugu

SEQ ID NO: 2859321 - RNA, 22 nt, Human
auaugggguauuggacauagau

SEQ ID NO: 2859322 - RNA, 16 nt, Human
auauggggaauauauu

SEQ ID NO: 2859323 - RNA, 14 nt, Human
auaugggacugagc

SEQ ID NO: 2859324 - RNA, 19 nt, Human
auauguaguauaaagaaaa

SEQ ID NO: 2859325 - RNA, 18 nt, Human
auauguaguauaaagaaa

SEQ ID NO: 2859326 - RNA, 16 nt, Human
auauguagaaggcaca

SEQ ID NO: 2859327 - RNA, 13 nt, Human
auauguagacuau

SEQ ID NO: 2859328 - RNA, 16 nt, Human
auauguagacuauaua

SEQ ID NO: 2859329 - RNA, 17 nt, Human
auauguagacuauauac

SEQ ID NO: 2859330 - RNA, 18 nt, Human
auauguagacuauauaca

SEQ ID NO: 2859331 - RNA, 19 nt, Human
auauguagacuauauacau

SEQ ID NO: 2859332 - RNA, 20 nt, Human
auauguagacuauauacaug

SEQ ID NO: 2859333 - RNA, 21 nt, Human
auauguagacuauauacaugu

SEQ ID NO: 2859334 - RNA, 23 nt, Human
auauguagacuauauacaugugu

SEQ ID NO: 2859335 - RNA, 13 nt, Human
uucauuaaagcau

SEQ ID NO: 2859336 - RNA, 18 nt, Human
uucauggaauggacaucc

SEQ ID NO: 2859337 - RNA, 19 nt, Human
uucauggaauggacauccu

SEQ ID NO: 2859338 - RNA, 20 nt, Human
uucauggaauggacauccug

SEQ ID NO: 2859339 - RNA, 22 nt, Human
uucauggaauggacauccugua

SEQ ID NO: 2859340 - RNA, 14 nt, Human
uucauuaaauguuu

SEQ ID NO: 2859341 - RNA, 15 nt, Human
uucauuaaauguuug

SEQ ID NO: 2859342 - RNA, 13 nt, Human
auauguguauaua

SEQ ID NO: 2859343 - RNA, 15 nt, Human
auauguguauauaua

SEQ ID NO: 2859344 - RNA, 16 nt, Human
auauguguauauauac

SEQ ID NO: 2859345 - RNA, 18 nt, Human
auauguguauauauacau

SEQ ID NO: 2859346 - RNA, 19 nt, Human
auauguguauauauacaua

SEQ ID NO: 2859347 - RNA, 20 nt, Human
auauguguauauauacauac

SEQ ID NO: 2859348 - RNA, 21 nt, Human
auauguguauauauacauaca

SEQ ID NO: 2859349 - RNA, 22 nt, Human
auauguguauauauacauacac

SEQ ID NO: 2859350 - RNA, 22 nt, Human
auauguguauguacguuuguau

SEQ ID NO: 2859351 - RNA, 12 nt, Human
auauguguaugu

SEQ ID NO: 2859352 - RNA, 14 nt, Human
auauguguauguac

SEQ ID NO: 2859353 - RNA, 16 nt, Human
auauguguauguacgu

SEQ ID NO: 2859354 - RNA, 13 nt, Human
auauggccacagu

SEQ ID NO: 2859355 - RNA, 23 nt, Human
auauggccacaguagucuugaug

SEQ ID NO: 2859356 - RNA, 23 nt, Human
auaugggaacacuggcagacugu

SEQ ID NO: 2859357 - RNA, 21 nt, Human
auaugagcuuccuucugugaa

SEQ ID NO: 2859358 - RNA, 20 nt, Human
auaugacucacaugaugcau

SEQ ID NO: 2859359 - RNA, 13 nt, Human
auaugacucacau

SEQ ID NO: 2859360 - RNA, 19 nt, Human
auaugacauucaugccugg

SEQ ID NO: 2859361 - RNA, 22 nt, Human
auaugagcuuccuucugugaaa

SEQ ID NO: 2859362 - RNA, 13 nt, Human
auaugagaagaau

SEQ ID NO: 2859363 - RNA, 15 nt, Human
auaugagaagaauag

SEQ ID NO: 2859364 - RNA, 23 nt, Human
auaugagaaggugccucaagaau

SEQ ID NO: 2859365 - RNA, 12 nt, Human
auaugauuuaua

SEQ ID NO: 2859366 - RNA, 13 nt, Human
auaugauuuauag

SEQ ID NO: 2859367 - RNA, 14 nt, Human
auaugauuuauagu

SEQ ID NO: 2859368 - RNA, 17 nt, Human
auaugauuucacuagaa

SEQ ID NO: 2859369 - RNA, 18 nt, Human
auaugauuucacuagaaa

SEQ ID NO: 2859370 - RNA, 23 nt, Human
auaugauuucacuagaaaagcug

SEQ ID NO: 2859371 - RNA, 16 nt, Human
auaugauuuuuuaaaa

SEQ ID NO: 2859372 - RNA, 17 nt, Human
auaugauuuuuuaaaag

SEQ ID NO: 2859373 - RNA, 18 nt, Human
auaugauuuuuuaaaaga

SEQ ID NO: 2859374 - RNA, 19 nt, Human
auaugauuuuuuaaaagaa

SEQ ID NO: 2859375 - RNA, 22 nt, Human
auaugauuuuuuaaaagaaauu

SEQ ID NO: 2859376 - RNA, 22 nt, Human
auauauuuuuaaaaaaugaaau

SEQ ID NO: 2859377 - RNA, 21 nt, Human
auauauuuuaccauacauuua

SEQ ID NO: 2859378 - RNA, 18 nt, Human
auaugaacccuuuguuuc

SEQ ID NO: 2859379 - RNA, 19 nt, Human
auaugaacccuuuguuucu

SEQ ID NO: 2859380 - RNA, 23 nt, Human
auaugaaguaucuaaaaguguca

SEQ ID NO: 2859381 - RNA, 19 nt, Human
auaugaaguuacuuucuua

SEQ ID NO: 2859382 - RNA, 13 nt, Human
auaugaaucugcu

SEQ ID NO: 2859383 - RNA, 17 nt, Human
auaugaauuuaaauaua

SEQ ID NO: 2859384 - RNA, 21 nt, Human
auaugaauuuaaauauaauuc

SEQ ID NO: 2859385 - RNA, 14 nt, Human
uucauuauguaaaa

SEQ ID NO: 2859386 - RNA, 17 nt, Human
uucauuauguaaaaugu

SEQ ID NO: 2859387 - RNA, 22 nt, Human
uucauuauuaguacugcucuug

SEQ ID NO: 2859388 - RNA, 14 nt, Human
uucauuagcuguga

SEQ ID NO: 2859389 - RNA, 13 nt, Human
uucauuagagcag

SEQ ID NO: 2859390 - RNA, 16 nt, Human
uucauuaauucuauaa

SEQ ID NO: 2859391 - RNA, 20 nt, Human
uucauuacaauggaaacaau

SEQ ID NO: 2859392 - RNA, 13 nt, Human
uucauuaccuuuu

SEQ ID NO: 2859393 - RNA, 21 nt, Human
uucauuaccuuuuuugauaaa

SEQ ID NO: 2859394 - RNA, 21 nt, Human
uucauuacuugauuaagauuu

SEQ ID NO: 2859395 - RNA, 15 nt, Human
uucauucaauauuga

SEQ ID NO: 2859396 - RNA, 16 nt, Human
uucauucaauauugac

SEQ ID NO: 2859397 - RNA, 17 nt, Human
uucauucaauauugaca

SEQ ID NO: 2859398 - RNA, 18 nt, Human
uucauucaauauugacau

SEQ ID NO: 2859399 - RNA, 19 nt, Human
uucauucaauauugacauu

SEQ ID NO: 2859400 - RNA, 21 nt, Human
uucauucaauauugacauuug

SEQ ID NO: 2859401 - RNA, 17 nt, Human
uucauucugugaucauu

SEQ ID NO: 2859402 - RNA, 18 nt, Human
uucauugauuuccugugu

SEQ ID NO: 2859403 - RNA, 20 nt, Human
uucauugauuuccuguguca

SEQ ID NO: 2859404 - RNA, 17 nt, Human
uucauugagaguuuugu

SEQ ID NO: 2859405 - RNA, 19 nt, Human
uucauugagaguuuugucu

SEQ ID NO: 2859406 - RNA, 22 nt, Human
uucauugagaguuuugucuuga

SEQ ID NO: 2859407 - RNA, 13 nt, Human
uuccaagaaagau

SEQ ID NO: 2859408 - RNA, 21 nt, Human
uuccaagaaagaugaauacau

SEQ ID NO: 2859409 - RNA, 23 nt, Human
uuccaagaaagaugaauacauuu

SEQ ID NO: 2859410 - RNA, 23 nt, Human
uuccaagaauagcaucuguacaa

SEQ ID NO: 2859411 - RNA, 22 nt, Human
uuccaacuguauauauucccaa

SEQ ID NO: 2859412 - RNA, 22 nt, Human
uucauuggucuaauuuauucaa

SEQ ID NO: 2859413 - RNA, 16 nt, Human
uucauugguuaauuuu

SEQ ID NO: 2859414 - RNA, 17 nt, Human
uucauugguuaauuuuu

SEQ ID NO: 2859415 - RNA, 18 nt, Human
uucauugccuguguaugg

SEQ ID NO: 2859416 - RNA, 19 nt, Human
uucauugcacuuugauuag

SEQ ID NO: 2859417 - RNA, 15 nt, Human
uuccaagacucuaga

SEQ ID NO: 2859418 - RNA, 16 nt, Human
uuccaagacucuagag

SEQ ID NO: 2859419 - RNA, 17 nt, Human
uuccaagacucuagagu

SEQ ID NO: 2859420 - RNA, 18 nt, Human
uuccacaaaaucugucca

SEQ ID NO: 2859421 - RNA, 11 nt, Human
uuccacaaaau

SEQ ID NO: 2859422 - RNA, 21 nt, Human
uuccaauuuucuggaauacau

SEQ ID NO: 2859423 - RNA, 21 nt, Human
uuccaagacucuagaguccaa

SEQ ID NO: 2859424 - RNA, 14 nt, Human
uuccagggcaauca

SEQ ID NO: 2859425 - RNA, 15 nt, Human
uuccaggggaaccug

SEQ ID NO: 2859426 - RNA, 14 nt, Human
uuccaggggaaccu

SEQ ID NO: 2859427 - RNA, 18 nt, Human
uuccaggggaaccugcca

SEQ ID NO: 2859428 - RNA, 17 nt, Human
uuccaggggaaccugcc

SEQ ID NO: 2859429 - RNA, 19 nt, Human
uuccacguguuuuauuccu

SEQ ID NO: 2859430 - RNA, 20 nt, Human
uuccacagaguaagacauug

SEQ ID NO: 2859431 - RNA, 12 nt, Human
uuccacagauug

SEQ ID NO: 2859432 - RNA, 18 nt, Human
uuccacagauuguuucua

SEQ ID NO: 2859433 - RNA, 19 nt, Human
uuccacagauuguuucuau

SEQ ID NO: 2859434 - RNA, 15 nt, Human
uuccacaugcucuga

SEQ ID NO: 2859435 - RNA, 16 nt, Human
uuccacaugcucugag

SEQ ID NO: 2859436 - RNA, 16 nt, Human
uuccacaguugccacc

SEQ ID NO: 2859437 - RNA, 17 nt, Human
uuccacaguugccacca

SEQ ID NO: 2859438 - RNA, 18 nt, Human
uuccacaguugccaccac

SEQ ID NO: 2859439 - RNA, 21 nt, Human
uuccacaguugccaccaccuc

SEQ ID NO: 2859440 - RNA, 15 nt, Human
uuccaccuucccaug

SEQ ID NO: 2859441 - RNA, 21 nt, Human
auggccucuuacuaauguaaa

SEQ ID NO: 2859442 - RNA, 22 nt, Human
auggccucuuacuaauguaaaa

SEQ ID NO: 2859443 - RNA, 17 nt, Human
auggacggugcuccagg

SEQ ID NO: 2859444 - RNA, 19 nt, Human
auggccugagacuuucuuu

SEQ ID NO: 2859445 - RNA, 12 nt, Human
auggaauuuaua

SEQ ID NO: 2859446 - RNA, 21 nt, Human
auggaauuuauaauucaguau

SEQ ID NO: 2859447 - RNA, 13 nt, Human
auggaauuucaua

SEQ ID NO: 2859448 - RNA, 19 nt, Human
auggaauugauuugcauug

SEQ ID NO: 2859449 - RNA, 18 nt, Human
auggaauugauuugcauu

SEQ ID NO: 2859450 - RNA, 15 nt, Human
auggaccacuguuuc

SEQ ID NO: 2859451 - RNA, 16 nt, Human
auggaccacuguuucu

SEQ ID NO: 2859452 - RNA, 18 nt, Human
auggaccacuguuucuug

SEQ ID NO: 2859453 - RNA, 21 nt, Human
auggaccacuguuucuugcuu

SEQ ID NO: 2859454 - RNA, 22 nt, Human
auggaccacuguuucuugcuug

SEQ ID NO: 2859455 - RNA, 13 nt, Human
auggacauggugg

SEQ ID NO: 2859456 - RNA, 14 nt, Human
auggacaugguggc

SEQ ID NO: 2859457 - RNA, 14 nt, Human
auggaccugucacg

SEQ ID NO: 2859458 - RNA, 15 nt, Human
auggaccuucuagaa

SEQ ID NO: 2859459 - RNA, 21 nt, Human
auggccucagcugccucacuu

SEQ ID NO: 2859460 - RNA, 19 nt, Human
auggccucagcugccucac

SEQ ID NO: 2859461 - RNA, 18 nt, Human
auggccucagcugccuca

SEQ ID NO: 2859462 - RNA, 17 nt, Human
auggccucagcugccuc

SEQ ID NO: 2859463 - RNA, 16 nt, Human
auggccucagcugccu

SEQ ID NO: 2859464 - RNA, 13 nt, Human
auggacggugcuc

SEQ ID NO: 2859465 - RNA, 15 nt, Human
auggacggugcucca

SEQ ID NO: 2859466 - RNA, 15 nt, Human
auggccucagcugcc

SEQ ID NO: 2859467 - RNA, 24 nt, Human
augggagcuccucuccuggaggau

SEQ ID NO: 2859468 - RNA, 18 nt, Human
augggcacaaagggccca

SEQ ID NO: 2859469 - RNA, 20 nt, Human
augggcacaaagggcccaga

SEQ ID NO: 2859470 - RNA, 15 nt, Human
augggccuccugugu

SEQ ID NO: 2859471 - RNA, 16 nt, Human
augggccacugaaauc

SEQ ID NO: 2859472 - RNA, 19 nt, Human
augggccacugaaaucugu

SEQ ID NO: 2859473 - RNA, 23 nt, Human
augggccacugaaaucugucaag

SEQ ID NO: 2859474 - RNA, 12 nt, Human
augggccagccc

SEQ ID NO: 2859475 - RNA, 15 nt, Human
augggccagccccuc

SEQ ID NO: 2859476 - RNA, 20 nt, Human
augggccagccccuccaucu

SEQ ID NO: 2859477 - RNA, 22 nt, Human
augggccagccccuccaucugu

SEQ ID NO: 2859478 - RNA, 17 nt, Human
augggcaucuaugggag

SEQ ID NO: 2859479 - RNA, 14 nt, Human
augggcauugacaa

SEQ ID NO: 2859480 - RNA, 16 nt, Human
augggcauugacaaau

SEQ ID NO: 2859481 - RNA, 21 nt, Human
augggcaacccccagccugcu

SEQ ID NO: 2859482 - RNA, 19 nt, Human
augggcaacccccagccug

SEQ ID NO: 2859483 - RNA, 18 nt, Human
augggcaacccccagccu

SEQ ID NO: 2859484 - RNA, 14 nt, Human
augggagcuccucu

SEQ ID NO: 2859485 - RNA, 15 nt, Human
augggagcuccucuc

SEQ ID NO: 2859486 - RNA, 19 nt, Human
augggagcuccucuccugg

SEQ ID NO: 2859487 - RNA, 20 nt, Human
augggagcuccucuccugga

SEQ ID NO: 2859488 - RNA, 21 nt, Human
augggagcuccucuccuggag

SEQ ID NO: 2859489 - RNA, 22 nt, Human
augggagcuccucuccuggagg

SEQ ID NO: 2859490 - RNA, 23 nt, Human
augggagcuccucuccuggagga

SEQ ID NO: 2859491 - RNA, 22 nt, Human
augggagccccagggucuuccc

SEQ ID NO: 2859492 - RNA, 13 nt, Human
augggagccccag

SEQ ID NO: 2859493 - RNA, 23 nt, Human
augggagaguagauggugaaauu

SEQ ID NO: 2859494 - RNA, 19 nt, Human
augggagagugucaaccag

SEQ ID NO: 2859495 - RNA, 23 nt, Human
augggagagugucaaccagacag

SEQ ID NO: 2859496 - RNA, 20 nt, Human
augggagcaguccaugcaug

SEQ ID NO: 2859497 - RNA, 22 nt, Human
augggagcaguccaugcaugac

SEQ ID NO: 2859498 - RNA, 15 nt, Human
augggacuggccucu

SEQ ID NO: 2859499 - RNA, 13 nt, Human
uuucgauaaacaa

SEQ ID NO: 2859500 - RNA, 20 nt, Human
uuucgauaaacaacaaggug

SEQ ID NO: 2859501 - RNA, 22 nt, Human
uuucgauucguuaagagagcaa

SEQ ID NO: 2859502 - RNA, 19 nt, Human
uuucgccguugaagaggaa

SEQ ID NO: 2859503 - RNA, 15 nt, Human
uuucgugagccccau

SEQ ID NO: 2859504 - RNA, 18 nt, Human
uuucgugagccccaucuu

SEQ ID NO: 2859505 - RNA, 13 nt, Human
uuucguaugaaaa

SEQ ID NO: 2859506 - RNA, 14 nt, Human
uuucguaugaaaau

SEQ ID NO: 2859507 - RNA, 19 nt, Human
uuucguccacagcuuccug

SEQ ID NO: 2859508 - RNA, 20 nt, Human
uuucguccacagcuuccugu

SEQ ID NO: 2859509 - RNA, 23 nt, Human
uuucguccacagcuuccuguccc

SEQ ID NO: 2859510 - RNA, 14 nt, Human
uuucguuucuguau

SEQ ID NO: 2859511 - RNA, 21 nt, Human
uuucuaaaaucuuauaguucu

SEQ ID NO: 2859512 - RNA, 12 nt, Human
uuucuaaaaucu

SEQ ID NO: 2859513 - RNA, 14 nt, Human
uuucuaaaaaacag

SEQ ID NO: 2859514 - RNA, 15 nt, Human
uuucuaaaaagauua

SEQ ID NO: 2859515 - RNA, 20 nt, Human
uuucuaaaaagauuagcaag

SEQ ID NO: 2859516 - RNA, 12 nt, Human
uuucuaaaagaa

SEQ ID NO: 2859517 - RNA, 15 nt, Human
uuucuaaaagaauau

SEQ ID NO: 2859518 - RNA, 20 nt, Human
uuucuaaaagaauauucaga

SEQ ID NO: 2859519 - RNA, 13 nt, Human
uuucuaaaagacu

SEQ ID NO: 2859520 - RNA, 23 nt, Human
uuuccuuuaaaaaaauuuaagug

SEQ ID NO: 2859521 - RNA, 19 nt, Human
uuuccuuuauauuuaguga

SEQ ID NO: 2859522 - RNA, 16 nt, Human
uuuccuuuccccagcc

SEQ ID NO: 2859523 - RNA, 17 nt, Human
uuuccuuuccccagccc

SEQ ID NO: 2859524 - RNA, 21 nt, Human
uuuccuuuaaaaaaauuuaag

SEQ ID NO: 2859525 - RNA, 22 nt, Human
uuuccuuuaaaaaaauuuaagu

SEQ ID NO: 2859526 - RNA, 13 nt, Human
uuuccuugugcaa

SEQ ID NO: 2859527 - RNA, 15 nt, Human
uuuccuugugcaaaa

SEQ ID NO: 2859528 - RNA, 18 nt, Human
uuuccuuguggcagagga

SEQ ID NO: 2859529 - RNA, 21 nt, Human
uuuccuuguggcagaggaugu

SEQ ID NO: 2859530 - RNA, 16 nt, Human
uuuccuuguuuaucag

SEQ ID NO: 2859531 - RNA, 19 nt, Human
uuuccuuguuuaucagaua

SEQ ID NO: 2859532 - RNA, 16 nt, Human
uuuccuuggcuggugc

SEQ ID NO: 2859533 - RNA, 21 nt, Human
uuuccuuuucuauuccuucug

SEQ ID NO: 2859534 - RNA, 21 nt, Human
uuuccuuugugguuuuaugga

SEQ ID NO: 2859535 - RNA, 16 nt, Human
uuuccuuuuucugauu

SEQ ID NO: 2859536 - RNA, 17 nt, Human
uuuccuuuuucugauua

SEQ ID NO: 2859537 - RNA, 21 nt, Human
uuuccuuuuaaaacacuucca

SEQ ID NO: 2859538 - RNA, 9 nt, Human
uuuccuuug

SEQ ID NO: 2859539 - RNA, 13 nt, Human
uuuccuuugcucu

SEQ ID NO: 2859540 - RNA, 20 nt, Human
uuuccuuuccccagcccagg

SEQ ID NO: 2859541 - RNA, 17 nt, Human
uuuccuuuuuuguuauu

SEQ ID NO: 2859542 - RNA, 16 nt, Human
uuuccuuuuuuguuau

SEQ ID NO: 2859543 - RNA, 13 nt, Human
uuuccuucagugc

SEQ ID NO: 2859544 - RNA, 13 nt, Human
uuuccuuaccuuu

SEQ ID NO: 2859545 - RNA, 14 nt, Human
uuuccuuauuugcu

SEQ ID NO: 2859546 - RNA, 12 nt, Human
uuuccuuccuaa

SEQ ID NO: 2859547 - RNA, 19 nt, Human
uuuccuucaagccagcaac

SEQ ID NO: 2859548 - RNA, 15 nt, Human
uuuccuuccaucccu

SEQ ID NO: 2859549 - RNA, 14 nt, Human
uuuccuuccauccc

SEQ ID NO: 2859550 - RNA, 19 nt, Human
uuuccuuccaucccuaccc

SEQ ID NO: 2859551 - RNA, 12 nt, Human
uuuccugugucu

SEQ ID NO: 2859552 - RNA, 17 nt, Human
augggccuccugugugu

SEQ ID NO: 2859553 - RNA, 22 nt, Human
uuuccugugucagcgccuggcc

SEQ ID NO: 2859554 - RNA, 16 nt, Human
uuuccuguuucugaaa

SEQ ID NO: 2859555 - RNA, 17 nt, Human
uuuccuguuucugaaaa

SEQ ID NO: 2859556 - RNA, 20 nt, Human
uuuccuguuucugaaaagaa

SEQ ID NO: 2859557 - RNA, 19 nt, Human
uuuccuuaaauuaucuaaa

SEQ ID NO: 2859558 - RNA, 15 nt, Human
augggcuuucucuuu

SEQ ID NO: 2859559 - RNA, 19 nt, Human
augggcuucacuguauaaa

SEQ ID NO: 2859560 - RNA, 20 nt, Human
augggcuucacuguauaaau

SEQ ID NO: 2859561 - RNA, 16 nt, Human
augggcuuagagcagu

SEQ ID NO: 2859562 - RNA, 15 nt, Human
augggcuucacugua

SEQ ID NO: 2859563 - RNA, 15 nt, Human
auggggaaaaaaauc

SEQ ID NO: 2859564 - RNA, 17 nt, Human
auggggaaaaaaaucau

SEQ ID NO: 2859565 - RNA, 20 nt, Human
auggggaaaaaaaucaucua

SEQ ID NO: 2859566 - RNA, 22 nt, Human
auggggaaucuaagagagcugc

SEQ ID NO: 2859567 - RNA, 16 nt, Human
auggggagaggaacuc

SEQ ID NO: 2859568 - RNA, 17 nt, Human
auggggaggcaagugug

SEQ ID NO: 2859569 - RNA, 19 nt, Human
uuugaaagugaauaaacuu

SEQ ID NO: 2859570 - RNA, 21 nt, Human
uuugaaagugaauaaacuuca

SEQ ID NO: 2859571 - RNA, 20 nt, Human
uuugaaauagucugugugaa

SEQ ID NO: 2859572 - RNA, 19 nt, Human
uuugaaauagucuguguga

SEQ ID NO: 2859573 - RNA, 13 nt, Human
uuugaaauaccuc

SEQ ID NO: 2859574 - RNA, 15 nt, Human
uuugaaauaccucau

SEQ ID NO: 2859575 - RNA, 18 nt, Human
uuugaaauaccucauguu

SEQ ID NO: 2859576 - RNA, 19 nt, Human
uuugaaauaccucauguuu

SEQ ID NO: 2859577 - RNA, 20 nt, Human
uuugaaauaccucauguuua

SEQ ID NO: 2859578 - RNA, 23 nt, Human
uuugaaagacuuccaaagaaugu

SEQ ID NO: 2859579 - RNA, 15 nt, Human
uuugaaaccugcucu

SEQ ID NO: 2859580 - RNA, 22 nt, Human
uuugaaagggaucaucaugcag

SEQ ID NO: 2859581 - RNA, 13 nt, Human
uuucuuuguggcu

SEQ ID NO: 2859582 - RNA, 16 nt, Human
uuucuuuguuaucaaa

SEQ ID NO: 2859583 - RNA, 15 nt, Human
uuucuuuguguagcu

SEQ ID NO: 2859584 - RNA, 13 nt, Human
uuucuuucaacuu

SEQ ID NO: 2859585 - RNA, 19 nt, Human
uuucuuucaacuugcaucc

SEQ ID NO: 2859586 - RNA, 18 nt, Human
uuucuuuauauuuaucca

SEQ ID NO: 2859587 - RNA, 20 nt, Human
uuucuuuauauuuauccacu

SEQ ID NO: 2859588 - RNA, 23 nt, Human
uuucuuuaucaccuggcuuguuu

SEQ ID NO: 2859589 - RNA, 15 nt, Human
uuucuuuagagaacu

SEQ ID NO: 2859590 - RNA, 16 nt, Human
uuucuuuagagaacug

SEQ ID NO: 2859591 - RNA, 18 nt, Human
uuucuuuagagaacugaa

SEQ ID NO: 2859592 - RNA, 19 nt, Human
uuucuuuagagaacugaaa

SEQ ID NO: 2859593 - RNA, 20 nt, Human
uuucuuuagagaacugaaaa

SEQ ID NO: 2859594 - RNA, 14 nt, Human
uuucuuuuguaaua

SEQ ID NO: 2859595 - RNA, 13 nt, Human
uuugaaaagcuau

SEQ ID NO: 2859596 - RNA, 14 nt, Human
uuugaaaagcuauu

SEQ ID NO: 2859597 - RNA, 15 nt, Human
uuugaaaagcuauua

SEQ ID NO: 2859598 - RNA, 18 nt, Human
uuugaaaagcuauuagcc

SEQ ID NO: 2859599 - RNA, 19 nt, Human
uuugaaaagcuauuagcca

SEQ ID NO: 2859600 - RNA, 13 nt, Human
uuugaaaagcuuc

SEQ ID NO: 2859601 - RNA, 16 nt, Human
uuugaaaagcuucuua

SEQ ID NO: 2859602 - RNA, 17 nt, Human
uuugaaaagcuucuuaa

SEQ ID NO: 2859603 - RNA, 22 nt, Human
uuugaaaagcuucuuaauuaau

SEQ ID NO: 2859604 - RNA, 23 nt, Human
uuugaaaagcuucuuaauuaauu

SEQ ID NO: 2859605 - RNA, 16 nt, Human
uuucuuuuguaaaugu

SEQ ID NO: 2859606 - RNA, 14 nt, Human
uuucuuuucacaua

SEQ ID NO: 2859607 - RNA, 15 nt, Human
uuucuuuucuuuuua

SEQ ID NO: 2859608 - RNA, 16 nt, Human
uuucuuuugaauuguu

SEQ ID NO: 2859609 - RNA, 15 nt, Human
uuucuuuucuuccug

SEQ ID NO: 2859610 - RNA, 20 nt, Human
uuucuggaauacaugaaaua

SEQ ID NO: 2859611 - RNA, 18 nt, Human
uuucuggaauacaugaaa

SEQ ID NO: 2859612 - RNA, 19 nt, Human
uuucugcuggaaacagacu

SEQ ID NO: 2859613 - RNA, 22 nt, Human
uuucugcuuucuuugauucucc

SEQ ID NO: 2859614 - RNA, 13 nt, Human
uuucuuuaaagau

SEQ ID NO: 2859615 - RNA, 14 nt, Human
uuucuuuaaagaug

SEQ ID NO: 2859616 - RNA, 15 nt, Human
uuucuuuaaaaaaca

SEQ ID NO: 2859617 - RNA, 13 nt, Human
uuucuuguuuauu

SEQ ID NO: 2859618 - RNA, 13 nt, Human
uuucuuguuucuc

SEQ ID NO: 2859619 - RNA, 17 nt, Human
uuucuggccaaaagcag

SEQ ID NO: 2859620 - RNA, 21 nt, Human
uuucuggccaaaagcaguaaa

SEQ ID NO: 2859621 - RNA, 11 nt, Human
uuucuggaguc

SEQ ID NO: 2859622 - RNA, 21 nt, Human
uuucuggaauacaugaaauau

SEQ ID NO: 2859623 - RNA, 12 nt, Human
uuucuccagcug

SEQ ID NO: 2859624 - RNA, 15 nt, Human
uuucuccagugcugu

SEQ ID NO: 2859625 - RNA, 22 nt, Human
uuucucauuugccaauaauaau

SEQ ID NO: 2859626 - RNA, 13 nt, Human
uuucuccagaacc

SEQ ID NO: 2859627 - RNA, 11 nt, Human
uuucuccagcu

SEQ ID NO: 2859628 - RNA, 21 nt, Human
uuucuccagcucagaacccag

SEQ ID NO: 2859629 - RNA, 20 nt, Human
uuucucauuuguuuuucuca

SEQ ID NO: 2859630 - RNA, 14 nt, Human
uuucucauucuugu

SEQ ID NO: 2859631 - RNA, 16 nt, Human
uuucucauucuuguuu

SEQ ID NO: 2859632 - RNA, 16 nt, Human
uuucugccagggagcu

SEQ ID NO: 2859633 - RNA, 22 nt, Human
uuucugcaugaauaucauacaa

SEQ ID NO: 2859634 - RNA, 13 nt, Human
uuucugcauaugu

SEQ ID NO: 2859635 - RNA, 17 nt, Human
uuucugcauauguugaa

SEQ ID NO: 2859636 - RNA, 22 nt, Human
uuucucaacaaagcacaguguu

SEQ ID NO: 2859637 - RNA, 22 nt, Human
uuucucaaaguuuugaaaagcu

SEQ ID NO: 2859638 - RNA, 13 nt, Human
uuucucaaaucuu

SEQ ID NO: 2859639 - RNA, 13 nt, Human
uuucucaaaguuu

SEQ ID NO: 2859640 - RNA, 14 nt, Human
uuucucaaaguuuu

SEQ ID NO: 2859641 - RNA, 15 nt, Human
uuucucaaaguuuug

SEQ ID NO: 2859642 - RNA, 16 nt, Human
uuucucaaaguuuuga

SEQ ID NO: 2859643 - RNA, 18 nt, Human
uuucucaaaguuuugaaa

SEQ ID NO: 2859644 - RNA, 16 nt, Human
uuucucaguuuguaua

SEQ ID NO: 2859645 - RNA, 18 nt, Human
uuucucaugaaucugcaa

SEQ ID NO: 2859646 - RNA, 19 nt, Human
uuucucauguguuugcaua

SEQ ID NO: 2859647 - RNA, 23 nt, Human
uuucucagccgcuucugacugcu

SEQ ID NO: 2859648 - RNA, 20 nt, Human
uuucucagauccuuguuuca

SEQ ID NO: 2859649 - RNA, 23 nt, Human
uuucucagauccuuguuucaaac

SEQ ID NO: 2859650 - RNA, 17 nt, Human
uuucucagauccuuguu

SEQ ID NO: 2859651 - RNA, 20 nt, Human
uuucuaugcugcuuuuauau

SEQ ID NO: 2859652 - RNA, 14 nt, Human
uuucuauuugacuu

SEQ ID NO: 2859653 - RNA, 16 nt, Human
uuucuauuugacuugu

SEQ ID NO: 2859654 - RNA, 14 nt, Human
uuucuauuccaaag

SEQ ID NO: 2859655 - RNA, 14 nt, Human
uuucuauuccuucu

SEQ ID NO: 2859656 - RNA, 18 nt, Human
uuucuauuccuucuggcc

SEQ ID NO: 2859657 - RNA, 19 nt, Human
uuucuauuccuucuggccu

SEQ ID NO: 2859658 - RNA, 13 nt, Human
uuucuauuccaaa

SEQ ID NO: 2859659 - RNA, 17 nt, Human
uuucuauuuaugccuug

SEQ ID NO: 2859660 - RNA, 13 nt, Human
uuucucaaaagca

SEQ ID NO: 2859661 - RNA, 14 nt, Human
uuucucaaaagcau

SEQ ID NO: 2859662 - RNA, 16 nt, Human
uuucucaaaagcauuu

SEQ ID NO: 2859663 - RNA, 19 nt, Human
uuucucaaaagcauuuauc

SEQ ID NO: 2859664 - RNA, 22 nt, Human
uuucucaaaagcauuuaucauu

SEQ ID NO: 2859665 - RNA, 16 nt, Human
uuucuaucuaaaugau

SEQ ID NO: 2859666 - RNA, 13 nt, Human
uuucuauguacua

SEQ ID NO: 2859667 - RNA, 18 nt, Human
uuucuauguacuaguacu

SEQ ID NO: 2859668 - RNA, 22 nt, Human
uuucuauguacuaguacugugu

SEQ ID NO: 2859669 - RNA, 23 nt, Human
uuucuauguacuaguacugugua

SEQ ID NO: 2859670 - RNA, 20 nt, Human
uuucuagggcugggaaacac

SEQ ID NO: 2859671 - RNA, 21 nt, Human
uuucuaugaguggaaaaagcc

SEQ ID NO: 2859672 - RNA, 20 nt, Human
uuucuauuaaauaguuauau

SEQ ID NO: 2859673 - RNA, 13 nt, Human
uuucuauacaaau

SEQ ID NO: 2859674 - RNA, 14 nt, Human
uuucuauacaaaua

SEQ ID NO: 2859675 - RNA, 23 nt, Human
uuucuaguggucuuuguaagagu

SEQ ID NO: 2859676 - RNA, 20 nt, Human
uuucuaguggucuuuguaag

SEQ ID NO: 2859677 - RNA, 21 nt, Human
uuucuaguggucuuuguaaga

SEQ ID NO: 2859678 - RNA, 14 nt, Human
uuucuaguggucuu

SEQ ID NO: 2859679 - RNA, 17 nt, Human
uuucuaguggucuuugu

SEQ ID NO: 2859680 - RNA, 18 nt, Human
uuucuaguggucuuugua

SEQ ID NO: 2859681 - RNA, 19 nt, Human
uuucuaguggucuuuguaa

SEQ ID NO: 2859682 - RNA, 19 nt, Human
uuucuaguuugcucauacu

SEQ ID NO: 2859683 - RNA, 15 nt, Human
uuucuauaacagaua

SEQ ID NO: 2859684 - RNA, 16 nt, Human
uuucuauaacagauau

SEQ ID NO: 2859685 - RNA, 20 nt, Human
uuucuaguacacuuuuauga

SEQ ID NO: 2859686 - RNA, 15 nt, Human
uuucuaguccaaaau

SEQ ID NO: 2859687 - RNA, 22 nt, Human
uuucuaaacguaagcacuguuu

SEQ ID NO: 2859688 - RNA, 12 nt, Human
augcggccaaga

SEQ ID NO: 2859689 - RNA, 23 nt, Human
augcgcaggcuggcccugcccug

SEQ ID NO: 2859690 - RNA, 13 nt, Human
augccuaauaaac

SEQ ID NO: 2859691 - RNA, 18 nt, Human
uuuaaaggcuuuuuggug

SEQ ID NO: 2859692 - RNA, 18 nt, Human
augccuaguuuuuaguaa

SEQ ID NO: 2859693 - RNA, 19 nt, Human
uuuaaaggcccagccccua

SEQ ID NO: 2859694 - RNA, 23 nt, Human
uuuaaaggcccagccccuagaaa

SEQ ID NO: 2859695 - RNA, 16 nt, Human
uuuaaagcuuacucug

SEQ ID NO: 2859696 - RNA, 18 nt, Human
uuuaaagcuuacucuguc

SEQ ID NO: 2859697 - RNA, 15 nt, Human
uuuaaagcauugcug

SEQ ID NO: 2859698 - RNA, 20 nt, Human
uuuaaagcauugcuguuaug

SEQ ID NO: 2859699 - RNA, 16 nt, Human
uuuaaagcauugcuuu

SEQ ID NO: 2859700 - RNA, 13 nt, Human
uuuacuaaacaua

SEQ ID NO: 2859701 - RNA, 14 nt, Human
uuuacuaaacauau

SEQ ID NO: 2859702 - RNA, 17 nt, Human
uuuacggacacccccuc

SEQ ID NO: 2859703 - RNA, 13 nt, Human
uuuacggacaccc

SEQ ID NO: 2859704 - RNA, 18 nt, Human
uuuacgcuuugauucaua

SEQ ID NO: 2859705 - RNA, 13 nt, Human
uuuacgcuuugau

SEQ ID NO: 2859706 - RNA, 15 nt, Human
uuuaccugucacauu

SEQ ID NO: 2859707 - RNA, 20 nt, Human
uuuaccugucacauugcauu

SEQ ID NO: 2859708 - RNA, 21 nt, Human
uuuaccugucacauugcauuc

SEQ ID NO: 2859709 - RNA, 20 nt, Human
uuuacuaagccacaagaaau

SEQ ID NO: 2859710 - RNA, 21 nt, Human
uuuacuaagccacaagaaauu

SEQ ID NO: 2859711 - RNA, 22 nt, Human
uuuacuaagccacaagaaauuu

SEQ ID NO: 2859712 - RNA, 19 nt, Human
uuuacuaauuuucuagauu

SEQ ID NO: 2859713 - RNA, 21 nt, Human
uuuaccugugcguuacuaauu

SEQ ID NO: 2859714 - RNA, 16 nt, Human
augcuaauuuaaagag

SEQ ID NO: 2859715 - RNA, 17 nt, Human
augcuaauuuaaagaga

SEQ ID NO: 2859716 - RNA, 18 nt, Human
augcuaauuuaaagagac

SEQ ID NO: 2859717 - RNA, 17 nt, Human
augcuaauauuaaaagu

SEQ ID NO: 2859718 - RNA, 19 nt, Human
augcuaauauuaaaaguca

SEQ ID NO: 2859719 - RNA, 13 nt, Human
uuuauuaaauuug

SEQ ID NO: 2859720 - RNA, 20 nt, Human
uuuauuaaauuuguugacaa

SEQ ID NO: 2859721 - RNA, 21 nt, Human
uuuauuaaauuuguugacaaa

SEQ ID NO: 2859722 - RNA, 19 nt, Human
uuuauuaaauaaaaucaau

SEQ ID NO: 2859723 - RNA, 18 nt, Human
uuuaugucuauuuaagcc

SEQ ID NO: 2859724 - RNA, 14 nt, Human
uuuauaucuggaau

SEQ ID NO: 2859725 - RNA, 16 nt, Human
uuuauaucuggaauga

SEQ ID NO: 2859726 - RNA, 23 nt, Human
uuuauaucuggaaugagccuguu

SEQ ID NO: 2859727 - RNA, 16 nt, Human
uuuauaucuguaugua

SEQ ID NO: 2859728 - RNA, 19 nt, Human
uuuauguaguaauugacau

SEQ ID NO: 2859729 - RNA, 14 nt, Human
uuuauguagcacau

SEQ ID NO: 2859730 - RNA, 13 nt, Human
uuuauguaaugaa

SEQ ID NO: 2859731 - RNA, 19 nt, Human
uuuauguaaugaaguaaag

SEQ ID NO: 2859732 - RNA, 20 nt, Human
uuuauguaaugaaguaaagc

SEQ ID NO: 2859733 - RNA, 22 nt, Human
uuuauguaaugaaguaaagcca

SEQ ID NO: 2859734 - RNA, 21 nt, Human
uuuaugguuucccccuucuac

SEQ ID NO: 2859735 - RNA, 17 nt, Human
uuuauaucccauuuuua

SEQ ID NO: 2859736 - RNA, 16 nt, Human
uuuauauauuuauaac

SEQ ID NO: 2859737 - RNA, 15 nt, Human
uuuauauauuuauaa

SEQ ID NO: 2859738 - RNA, 13 nt, Human
uuuauauauuuau

SEQ ID NO: 2859739 - RNA, 12 nt, Human
uuuauauauuua

SEQ ID NO: 2859740 - RNA, 21 nt, Human
uuuauauauacaguaacuuua

SEQ ID NO: 2859741 - RNA, 14 nt, Human
uuuauauaugaaaa

SEQ ID NO: 2859742 - RNA, 16 nt, Human
uuuauauaugaaaacu

SEQ ID NO: 2859743 - RNA, 17 nt, Human
uuuauauaugaaaacua

SEQ ID NO: 2859744 - RNA, 15 nt, Human
uuuauauauggacau

SEQ ID NO: 2859745 - RNA, 22 nt, Human
uuuacuacuucucucuguauuu

SEQ ID NO: 2859746 - RNA, 14 nt, Human
uuuacuacagcuau

SEQ ID NO: 2859747 - RNA, 21 nt, Human
uuuacuacagcuaugaagaaa

SEQ ID NO: 2859748 - RNA, 13 nt, Human
uuuacuacaguuu

SEQ ID NO: 2859749 - RNA, 17 nt, Human
uuuacuaccaaugccaa

SEQ ID NO: 2859750 - RNA, 15 nt, Human
uuuacuaugccugug

SEQ ID NO: 2859751 - RNA, 13 nt, Human
uuuacuauauaua

SEQ ID NO: 2859752 - RNA, 14 nt, Human
uuuacuauauauau

SEQ ID NO: 2859753 - RNA, 15 nt, Human
uuuacuauauauaua

SEQ ID NO: 2859754 - RNA, 13 nt, Human
uuuacucauugaa

SEQ ID NO: 2859755 - RNA, 14 nt, Human
uuuacucauugaaa

SEQ ID NO: 2859756 - RNA, 15 nt, Human
uuuacucauugaaau

SEQ ID NO: 2859757 - RNA, 16 nt, Human
uuuacucauugaaaug

SEQ ID NO: 2859758 - RNA, 17 nt, Human
uuuacucauugaaaugu

SEQ ID NO: 2859759 - RNA, 18 nt, Human
uuuacucauugaaauguc

SEQ ID NO: 2859760 - RNA, 15 nt, Human
uuuauauauacagua

SEQ ID NO: 2859761 - RNA, 13 nt, Human
uuuauauauacag

SEQ ID NO: 2859762 - RNA, 21 nt, Human
uuuaguaccugaaaaguaacu

SEQ ID NO: 2859763 - RNA, 14 nt, Human
uuuaguaaucugua

SEQ ID NO: 2859764 - RNA, 17 nt, Human
uuuaguaaucuguacau

SEQ ID NO: 2859765 - RNA, 19 nt, Human
uuuaguaaucuguacauuu

SEQ ID NO: 2859766 - RNA, 12 nt, Human
uuuaguaaaugu

SEQ ID NO: 2859767 - RNA, 16 nt, Human
uuuaguaaauguuauc

SEQ ID NO: 2859768 - RNA, 17 nt, Human
uuuaguaaauguuaucu

SEQ ID NO: 2859769 - RNA, 17 nt, Human
uuuaguaacaucauuuu

SEQ ID NO: 2859770 - RNA, 21 nt, Human
uuuaggugaauuaauuaaaca

SEQ ID NO: 2859771 - RNA, 22 nt, Human
uuuaggugaauuaauuaaacau

SEQ ID NO: 2859772 - RNA, 11 nt, Human
uuuagguucua

SEQ ID NO: 2859773 - RNA, 12 nt, Human
uuuagguucuaa

SEQ ID NO: 2859774 - RNA, 13 nt, Human
uuuagguucuaaa

SEQ ID NO: 2859775 - RNA, 14 nt, Human
uuuagguucuaaag

SEQ ID NO: 2859776 - RNA, 22 nt, Human
uuuagguuuuuguuuguuuccu

SEQ ID NO: 2859777 - RNA, 23 nt, Human
uuuagguucuuugcugcauucug

SEQ ID NO: 2859778 - RNA, 15 nt, Human
uuuagguucuaaagu

SEQ ID NO: 2859779 - RNA, 16 nt, Human
uuuagguucuaaaguu

SEQ ID NO: 2859780 - RNA, 18 nt, Human
uuuagguucuaaaguucu

SEQ ID NO: 2859781 - RNA, 23 nt, Human
uuuagguucuaaaguucuaagau

SEQ ID NO: 2859782 - RNA, 20 nt, Human
uuuagcuaggauuugaacac

SEQ ID NO: 2859783 - RNA, 21 nt, Human
uuuagcuaggauuugaacacu

SEQ ID NO: 2859784 - RNA, 14 nt, Human
uuuaggucuuugua

SEQ ID NO: 2859785 - RNA, 17 nt, Human
uuuaggucuuuguaaga

SEQ ID NO: 2859786 - RNA, 17 nt, Human
uuuagguacuauucuga

SEQ ID NO: 2859787 - RNA, 23 nt, Human
uuuagcugaugaacuuauucugu

SEQ ID NO: 2859788 - RNA, 16 nt, Human
uuuaggguaaaaauug

SEQ ID NO: 2859789 - RNA, 14 nt, Human
uuuaggguacuaaa

SEQ ID NO: 2859790 - RNA, 20 nt, Human
uuuaggguacuaaauuuaaa

SEQ ID NO: 2859791 - RNA, 22 nt, Human
uuuaggguacuaaauuuaaauu

SEQ ID NO: 2859792 - RNA, 21 nt, Human
uuuagcugaugaacuuauucu

SEQ ID NO: 2859793 - RNA, 17 nt, Human
auggaauugauuugcau

SEQ ID NO: 2859794 - RNA, 16 nt, Human
uuucccagguucuguu

SEQ ID NO: 2859795 - RNA, 17 nt, Human
uuucauaucuacagaua

SEQ ID NO: 2859796 - RNA, 16 nt, Human
uuuccaguuaaggacc

SEQ ID NO: 2859797 - RNA, 14 nt, Human
uuuccagucucuug

SEQ ID NO: 2859798 - RNA, 18 nt, Human
uuuccagucucuuguaca

SEQ ID NO: 2859799 - RNA, 19 nt, Human
uuuccauagcaacaggaaa

SEQ ID NO: 2859800 - RNA, 12 nt, Human
uuuccauauguu

SEQ ID NO: 2859801 - RNA, 15 nt, Human
uuucauaugcuguau

SEQ ID NO: 2859802 - RNA, 12 nt, Human
uuucauaacuua

SEQ ID NO: 2859803 - RNA, 18 nt, Human
uuucauaacuuauugcug

SEQ ID NO: 2859804 - RNA, 20 nt, Human
uuucauaacuuauugcugau

SEQ ID NO: 2859805 - RNA, 22 nt, Human
uuucauaacuuauugcugauuu

SEQ ID NO: 2859806 - RNA, 24 nt, Human
uuucacucuuauugcccacgcugg

SEQ ID NO: 2859807 - RNA, 24 nt, Human
uuucacugcuggcugccuuagaac

SEQ ID NO: 2859808 - RNA, 16 nt, Human
uuucaccuagauuuuu

SEQ ID NO: 2859809 - RNA, 17 nt, Human
uuucaccuccuucaauu

SEQ ID NO: 2859810 - RNA, 24 nt, Human
uuucacuguagaaugauuucaugc

SEQ ID NO: 2859811 - RNA, 22 nt, Human
uuucagaaaauauuauguguuu

SEQ ID NO: 2859812 - RNA, 14 nt, Human
uuucacuuauaccu

SEQ ID NO: 2859813 - RNA, 15 nt, Human
uuucacuuauaccug

SEQ ID NO: 2859814 - RNA, 20 nt, Human
uuucacuucgggcuguguaa

SEQ ID NO: 2859815 - RNA, 20 nt, Human
uuucacucuccuaugccuuu

SEQ ID NO: 2859816 - RNA, 21 nt, Human
uuucacccuuaacccaaggag

SEQ ID NO: 2859817 - RNA, 22 nt, Human
uuucacccuuaacccaaggagc

SEQ ID NO: 2859818 - RNA, 22 nt, Human
uuucaccccacccuuccccucc

SEQ ID NO: 2859819 - RNA, 15 nt, Human
uuuauuuuuuuaagu

SEQ ID NO: 2859820 - RNA, 15 nt, Human
uuucacauuguuugc

SEQ ID NO: 2859821 - RNA, 19 nt, Human
uuucacauuguuugcugcu

SEQ ID NO: 2859822 - RNA, 17 nt, Human
uuucaccagauuugcua

SEQ ID NO: 2859823 - RNA, 21 nt, Human
uuucaccaugauggccaggcu

SEQ ID NO: 2859824 - RNA, 16 nt, Human
uuuauuuuuugggaaa

SEQ ID NO: 2859825 - RNA, 14 nt, Human
augcuguauauguu

SEQ ID NO: 2859826 - RNA, 18 nt, Human
augcuguaggugguaugu

SEQ ID NO: 2859827 - RNA, 17 nt, Human
augcuuagauguuccag

SEQ ID NO: 2859828 - RNA, 20 nt, Human
augcuuagagggauuucuuu

SEQ ID NO: 2859829 - RNA, 21 nt, Human
augcugugagucuuugguucu

SEQ ID NO: 2859830 - RNA, 22 nt, Human
augcugugagucuuugguucua

SEQ ID NO: 2859831 - RNA, 15 nt, Human
augcuuaauuucuaa

SEQ ID NO: 2859832 - RNA, 16 nt, Human
augcuuaauuucuaaa

SEQ ID NO: 2859833 - RNA, 19 nt, Human
augcuuaauuucuaaagau

SEQ ID NO: 2859834 - RNA, 13 nt, Human
uuuauuagaugaa

SEQ ID NO: 2859835 - RNA, 14 nt, Human
uuuauuagaugaau

SEQ ID NO: 2859836 - RNA, 14 nt, Human
uuuauuauaaacug

SEQ ID NO: 2859837 - RNA, 19 nt, Human
uuuauuauaaacuguaugc

SEQ ID NO: 2859838 - RNA, 22 nt, Human
augcuggcuguuggcugggggc

SEQ ID NO: 2859839 - RNA, 19 nt, Human
augcuguauauccuuucua

SEQ ID NO: 2859840 - RNA, 23 nt, Human
augcuguacaucuauuuuggauu

SEQ ID NO: 2859841 - RNA, 22 nt, Human
augcuguacaucuauuuuggau

SEQ ID NO: 2859842 - RNA, 22 nt, Human
augcuggggcaagucccugacu

SEQ ID NO: 2859843 - RNA, 23 nt, Human
augcugggaagacgccugagcuc

SEQ ID NO: 2859844 - RNA, 18 nt, Human
uuuauuuuacacagaaac

SEQ ID NO: 2859845 - RNA, 13 nt, Human
uuuauuuuacaca

SEQ ID NO: 2859846 - RNA, 13 nt, Human
auggaauaaaagg

SEQ ID NO: 2859847 - RNA, 17 nt, Human
auggaaguaaagccuca

SEQ ID NO: 2859848 - RNA, 15 nt, Human
uuuauuuuccuaaag

SEQ ID NO: 2859849 - RNA, 12 nt, Human
uuuauuuuccua

SEQ ID NO: 2859850 - RNA, 14 nt, Human
uuuauuuuacuauu

SEQ ID NO: 2859851 - RNA, 17 nt, Human
uuuauuuuacuauugga

SEQ ID NO: 2859852 - RNA, 21 nt, Human
uuuauuuuacacagaaacacu

SEQ ID NO: 2859853 - RNA, 12 nt, Human
uuuauuuuauga

SEQ ID NO: 2859854 - RNA, 15 nt, Human
uuuauuuuaugagaa

SEQ ID NO: 2859855 - RNA, 20 nt, Human
uuuauuuuaugagaaaugua

SEQ ID NO: 2859856 - RNA, 16 nt, Human
uuuauuuuauguuuag

SEQ ID NO: 2859857 - RNA, 21 nt, Human
uuuauuuucuuuuguaaaugu

SEQ ID NO: 2859858 - RNA, 19 nt, Human
uuuauuuugaaaagcuucu

SEQ ID NO: 2859859 - RNA, 16 nt, Human
uuuauuuucuuuugaa

SEQ ID NO: 2859860 - RNA, 10 nt, Human
uuuauuuucu

SEQ ID NO: 2859861 - RNA, 17 nt, Human
uuuauuuuuuaaguauu

SEQ ID NO: 2859862 - RNA, 15 nt, Human
uuuauuuuuuacauu

SEQ ID NO: 2859863 - RNA, 14 nt, Human
uuuauuuuuuagug

SEQ ID NO: 2859864 - RNA, 16 nt, Human
uuuauuuuuuagugca

SEQ ID NO: 2859865 - RNA, 13 nt, Human
uuuauuuuuuggg

SEQ ID NO: 2859866 - RNA, 14 nt, Human
uuuauuuuuuaagu

SEQ ID NO: 2859867 - RNA, 22 nt, Human
uuuauuuugugcucauuuaagu

SEQ ID NO: 2859868 - RNA, 12 nt, Human
uuuauuuugugg

SEQ ID NO: 2859869 - RNA, 14 nt, Human
uuuauuuuguggga

SEQ ID NO: 2859870 - RNA, 16 nt, Human
auggaaggguuugugg

SEQ ID NO: 2859871 - RNA, 19 nt, Human
augcuuaucaucuaaagau

SEQ ID NO: 2859872 - RNA, 15 nt, Human
augcuuaugacaaug

SEQ ID NO: 2859873 - RNA, 19 nt, Human
augcuuacggccaucucuu

SEQ ID NO: 2859874 - RNA, 18 nt, Human
uugucacacacuuuggcu

SEQ ID NO: 2859875 - RNA, 21 nt, Human
augaguuuuugauagcuuuau

SEQ ID NO: 2859876 - RNA, 14 nt, Human
augauaacagaacu

SEQ ID NO: 2859877 - RNA, 18 nt, Human
augagucuguuguguguc

SEQ ID NO: 2859878 - RNA, 17 nt, Human
augagucuagauguuua

SEQ ID NO: 2859879 - RNA, 12 nt, Human
augagucuagau

SEQ ID NO: 2859880 - RNA, 13 nt, Human
augagucuagaug

SEQ ID NO: 2859881 - RNA, 19 nt, Human
augagucuguuguguguca

SEQ ID NO: 2859882 - RNA, 15 nt, Human
augaguggaaaaagc

SEQ ID NO: 2859883 - RNA, 16 nt, Human
augagugcgugcucag

SEQ ID NO: 2859884 - RNA, 17 nt, Human
augagugcgugcucagu

SEQ ID NO: 2859885 - RNA, 13 nt, Human
augaguuuuugau

SEQ ID NO: 2859886 - RNA, 20 nt, Human
augaguuuuugauagcuuua

SEQ ID NO: 2859887 - RNA, 19 nt, Human
augaguuuuugauagcuuu

SEQ ID NO: 2859888 - RNA, 13 nt, Human
augagugugaagg

SEQ ID NO: 2859889 - RNA, 18 nt, Human
augagccucagcauccug

SEQ ID NO: 2859890 - RNA, 17 nt, Human
augagccucagcauccu

SEQ ID NO: 2859891 - RNA, 15 nt, Human
augaggucccaggca

SEQ ID NO: 2859892 - RNA, 14 nt, Human
augaggucccaggc

SEQ ID NO: 2859893 - RNA, 20 nt, Human
augagccgcugugagccccu

SEQ ID NO: 2859894 - RNA, 23 nt, Human
augagccgcugugagccccuggu

SEQ ID NO: 2859895 - RNA, 21 nt, Human
augaguccuugaaaauauuuu

SEQ ID NO: 2859896 - RNA, 18 nt, Human
augaguccuugaaaauau

SEQ ID NO: 2859897 - RNA, 20 nt, Human
augaguccuugaaaauauuu

SEQ ID NO: 2859898 - RNA, 16 nt, Human
augaguccuugaaaau

SEQ ID NO: 2859899 - RNA, 16 nt, Human
augaggucugggcuag

SEQ ID NO: 2859900 - RNA, 13 nt, Human
augaggucuguuu

SEQ ID NO: 2859901 - RNA, 14 nt, Human
augaggucuguuua

SEQ ID NO: 2859902 - RNA, 15 nt, Human
augaggucuguuuaa

SEQ ID NO: 2859903 - RNA, 20 nt, Human
augaggucccaggcagagaa

SEQ ID NO: 2859904 - RNA, 19 nt, Human
augaggucccaggcagaga

SEQ ID NO: 2859905 - RNA, 18 nt, Human
augaggucccaggcagag

SEQ ID NO: 2859906 - RNA, 17 nt, Human
augaggucccaggcaga

SEQ ID NO: 2859907 - RNA, 16 nt, Human
augaggucccaggcag

SEQ ID NO: 2859908 - RNA, 19 nt, Human
uugucaucuuucuucuauu

SEQ ID NO: 2859909 - RNA, 21 nt, Human
uugucaucuuucuucuauuuu

SEQ ID NO: 2859910 - RNA, 12 nt, Human
uugucaugguua

SEQ ID NO: 2859911 - RNA, 18 nt, Human
uugucaugguuacaaacu

SEQ ID NO: 2859912 - RNA, 13 nt, Human
uugucauguggcu

SEQ ID NO: 2859913 - RNA, 16 nt, Human
uugucacugacacaaa

SEQ ID NO: 2859914 - RNA, 19 nt, Human
uugucacugacacaaagga

SEQ ID NO: 2859915 - RNA, 22 nt, Human
uugucacugacacaaaggaagu

SEQ ID NO: 2859916 - RNA, 17 nt, Human
uugucacugcuuuuggc

SEQ ID NO: 2859917 - RNA, 14 nt, Human
uugucacuugcaug

SEQ ID NO: 2859918 - RNA, 15 nt, Human
uugucacuugcaugu

SEQ ID NO: 2859919 - RNA, 16 nt, Human
uugucacuugcauguc

SEQ ID NO: 2859920 - RNA, 22 nt, Human
uugucacaugaaacauuugcaa

SEQ ID NO: 2859921 - RNA, 16 nt, Human
uugucacaucagauaa

SEQ ID NO: 2859922 - RNA, 22 nt, Human
uugucauuguaaacaaacucuu

SEQ ID NO: 2859923 - RNA, 15 nt, Human
uuguccccguggucu

SEQ ID NO: 2859924 - RNA, 16 nt, Human
uuguccgcuggguggu

SEQ ID NO: 2859925 - RNA, 18 nt, Human
uuguccguguucauacau

SEQ ID NO: 2859926 - RNA, 12 nt, Human
uuguccccugcu

SEQ ID NO: 2859927 - RNA, 13 nt, Human
uuguccccugcuu

SEQ ID NO: 2859928 - RNA, 17 nt, Human
uuguccucaguccauuu

SEQ ID NO: 2859929 - RNA, 15 nt, Human
uuguccucauuucuc

SEQ ID NO: 2859930 - RNA, 20 nt, Human
uuguccuuuaaaaaagaaaa

SEQ ID NO: 2859931 - RNA, 15 nt, Human
uuguccuuucccuuc

SEQ ID NO: 2859932 - RNA, 19 nt, Human
uuguccugaugcuuuuguc

SEQ ID NO: 2859933 - RNA, 23 nt, Human
uuguccugaugcuuuugucuaau

SEQ ID NO: 2859934 - RNA, 22 nt, Human
uugucgaaaagagucuuccaau

SEQ ID NO: 2859935 - RNA, 23 nt, Human
uugucgaaaagagucuuccaauu

SEQ ID NO: 2859936 - RNA, 16 nt, Human
uuguccuuuugucuuc

SEQ ID NO: 2859937 - RNA, 17 nt, Human
uuguccuuuugucuucu

SEQ ID NO: 2859938 - RNA, 20 nt, Human
uuguccugccugcaauauuu

SEQ ID NO: 2859939 - RNA, 17 nt, Human
uuguccuuucccuucag

SEQ ID NO: 2859940 - RNA, 18 nt, Human
augacauaacagugcagg

SEQ ID NO: 2859941 - RNA, 20 nt, Human
augacauaacagugcagggc

SEQ ID NO: 2859942 - RNA, 18 nt, Human
augacaucacuuguacaa

SEQ ID NO: 2859943 - RNA, 14 nt, Human
augacaucacuugu

SEQ ID NO: 2859944 - RNA, 13 nt, Human
augacaucuuuuu

SEQ ID NO: 2859945 - RNA, 14 nt, Human
augacaucuuuuua

SEQ ID NO: 2859946 - RNA, 15 nt, Human
augacaucuuuuuaa

SEQ ID NO: 2859947 - RNA, 19 nt, Human
augacaucuuuuuaaagcu

SEQ ID NO: 2859948 - RNA, 20 nt, Human
augacaucuuuuuaaagcuu

SEQ ID NO: 2859949 - RNA, 21 nt, Human
augacaucuuuuuaaagcuua

SEQ ID NO: 2859950 - RNA, 20 nt, Human
augacaucacuuguacaaaa

SEQ ID NO: 2859951 - RNA, 19 nt, Human
augacaucacuuguacaaa

SEQ ID NO: 2859952 - RNA, 16 nt, Human
augacaucucaggggc

SEQ ID NO: 2859953 - RNA, 13 nt, Human
augacauauuuuu

SEQ ID NO: 2859954 - RNA, 18 nt, Human
augacaucucaggggcca

SEQ ID NO: 2859955 - RNA, 22 nt, Human
augacaugaggaaaauaaugua

SEQ ID NO: 2859956 - RNA, 14 nt, Human
augacaugcacuga

SEQ ID NO: 2859957 - RNA, 15 nt, Human
augacaugcacugac

SEQ ID NO: 2859958 - RNA, 16 nt, Human
augacaugcacugacc

SEQ ID NO: 2859959 - RNA, 17 nt, Human
augacaugcacugaccc

SEQ ID NO: 2859960 - RNA, 18 nt, Human
augacaugcacugacccu

SEQ ID NO: 2859961 - RNA, 19 nt, Human
augacaugcacugacccuu

SEQ ID NO: 2859962 - RNA, 22 nt, Human
augacaugcacugacccuucca

SEQ ID NO: 2859963 - RNA, 23 nt, Human
augacaugcacugacccuuccag

SEQ ID NO: 2859964 - RNA, 13 nt, Human
augagagcccaga

SEQ ID NO: 2859965 - RNA, 14 nt, Human
augagagcccagag

SEQ ID NO: 2859966 - RNA, 16 nt, Human
augagagcccagaggu

SEQ ID NO: 2859967 - RNA, 18 nt, Human
augagagcccagagguaa

SEQ ID NO: 2859968 - RNA, 20 nt, Human
augagagcccagagguaaca

SEQ ID NO: 2859969 - RNA, 15 nt, Human
augacauguuauaua

SEQ ID NO: 2859970 - RNA, 16 nt, Human
augacauucaugccug

SEQ ID NO: 2859971 - RNA, 17 nt, Human
augacauguuauauauu

SEQ ID NO: 2859972 - RNA, 23 nt, Human
augacauguuauauauuuuuugu

SEQ ID NO: 2859973 - RNA, 22 nt, Human
augagagcccagagguaacaga

SEQ ID NO: 2859974 - RNA, 12 nt, Human
augagaugugug

SEQ ID NO: 2859975 - RNA, 19 nt, Human
augagaugcguuguuacag

SEQ ID NO: 2859976 - RNA, 12 nt, Human
augagaugcugg

SEQ ID NO: 2859977 - RNA, 13 nt, Human
augagauccuuua

SEQ ID NO: 2859978 - RNA, 17 nt, Human
augagaucugaaugugg

SEQ ID NO: 2859979 - RNA, 16 nt, Human
augagccucagcaucc

SEQ ID NO: 2859980 - RNA, 15 nt, Human
augagccucagcauc

SEQ ID NO: 2859981 - RNA, 12 nt, Human
augagccucagc

SEQ ID NO: 2859982 - RNA, 21 nt, Human
augagcauuggauacagcagu

SEQ ID NO: 2859983 - RNA, 23 nt, Human
augagcauuggauacagcaguag

SEQ ID NO: 2859984 - RNA, 14 nt, Human
augagcaucccagg

SEQ ID NO: 2859985 - RNA, 14 nt, Human
augagcagaaggaa

SEQ ID NO: 2859986 - RNA, 15 nt, Human
augagcaucccagga

SEQ ID NO: 2859987 - RNA, 16 nt, Human
augagcauccugagcc

SEQ ID NO: 2859988 - RNA, 17 nt, Human
augagcauccugagccc

SEQ ID NO: 2859989 - RNA, 18 nt, Human
augagcauccugagcccc

SEQ ID NO: 2859990 - RNA, 20 nt, Human
augagcauccugagccccgc

SEQ ID NO: 2859991 - RNA, 13 nt, Human
augagcaccucca

SEQ ID NO: 2859992 - RNA, 14 nt, Human
augagcaccuccau

SEQ ID NO: 2859993 - RNA, 18 nt, Human
augagccaccgcgcccag

SEQ ID NO: 2859994 - RNA, 18 nt, Human
augagcauggagcuggcc

SEQ ID NO: 2859995 - RNA, 15 nt, Human
augagcauggagcug

SEQ ID NO: 2859996 - RNA, 17 nt, Human
augagcauggagcuggc

SEQ ID NO: 2859997 - RNA, 21 nt, Human
augagccaccgcgcccagccu

SEQ ID NO: 2859998 - RNA, 11 nt, Human
augagcccaga

SEQ ID NO: 2859999 - RNA, 12 nt, Human
augagcccagag

SEQ ID NO: 2860000 - RNA, 14 nt, Human
augagcccagagaa

SEQ ID NO: 2860001 - RNA, 16 nt, Human
augagcccagagaaca

SEQ ID NO: 2860002 - RNA, 17 nt, Human
augagcccagagaacag

SEQ ID NO: 2860003 - RNA, 18 nt, Human
augagcccagagaacagc

SEQ ID NO: 2860004 - RNA, 14 nt, Human
augagcccuaaaaa

SEQ ID NO: 2860005 - RNA, 14 nt, Human
augagaugugugga

SEQ ID NO: 2860006 - RNA, 22 nt, Human
augagauguguggacuguggca

SEQ ID NO: 2860007 - RNA, 22 nt, Human
augagauuguuuuaucaugaca

SEQ ID NO: 2860008 - RNA, 18 nt, Human
augagauuguuuuaucau

SEQ ID NO: 2860009 - RNA, 19 nt, Human
uugugaagaaaaauaaagu

SEQ ID NO: 2860010 - RNA, 19 nt, Human
uugugaagaacuauuuuau

SEQ ID NO: 2860011 - RNA, 22 nt, Human
uugugaagaacuauuuuauucu

SEQ ID NO: 2860012 - RNA, 13 nt, Human
uugugaaggcagg

SEQ ID NO: 2860013 - RNA, 13 nt, Human
uugugaagcccug

SEQ ID NO: 2860014 - RNA, 14 nt, Human
uugugaagcccugu

SEQ ID NO: 2860015 - RNA, 11 nt, Human
uugugaacaga

SEQ ID NO: 2860016 - RNA, 13 nt, Human
uugugaacucauu

SEQ ID NO: 2860017 - RNA, 13 nt, Human
uuguguguacuca

SEQ ID NO: 2860018 - RNA, 21 nt, Human
uugugaaguuagguucuuaaa

SEQ ID NO: 2860019 - RNA, 14 nt, Human
uugugaaggccaug

SEQ ID NO: 2860020 - RNA, 22 nt, Human
uugugaaggccaugauauuuug

SEQ ID NO: 2860021 - RNA, 14 nt, Human
uuguucccucuccc

SEQ ID NO: 2860022 - RNA, 20 nt, Human
uuguugauaaauuccacugg

SEQ ID NO: 2860023 - RNA, 15 nt, Human
uugugugucaugcca

SEQ ID NO: 2860024 - RNA, 13 nt, Human
uugugugucuuaa

SEQ ID NO: 2860025 - RNA, 19 nt, Human
uugugugucuuaauuauua

SEQ ID NO: 2860026 - RNA, 19 nt, Human
uuguuccccaucaucugug

SEQ ID NO: 2860027 - RNA, 17 nt, Human
augaucugccucuaaaa

SEQ ID NO: 2860028 - RNA, 19 nt, Human
augaucugccucuaaaagc

SEQ ID NO: 2860029 - RNA, 22 nt, Human
augaucucuucuuuuggcuucc

SEQ ID NO: 2860030 - RNA, 15 nt, Human
augauccuaaugaau

SEQ ID NO: 2860031 - RNA, 20 nt, Human
augaucaguggacagucugc

SEQ ID NO: 2860032 - RNA, 13 nt, Human
augaucaguguug

SEQ ID NO: 2860033 - RNA, 23 nt, Human
augaucacggcucacugcagccu

SEQ ID NO: 2860034 - RNA, 22 nt, Human
augaucacuaauacuaauucau

SEQ ID NO: 2860035 - RNA, 21 nt, Human
augaucagcaucugugauggg

SEQ ID NO: 2860036 - RNA, 20 nt, Human
augaucaauuauaguuucug

SEQ ID NO: 2860037 - RNA, 15 nt, Human
augaucacggcucac

SEQ ID NO: 2860038 - RNA, 17 nt, Human
augaucaauccuuuauu

SEQ ID NO: 2860039 - RNA, 18 nt, Human
augaucaauccuuuauua

SEQ ID NO: 2860040 - RNA, 19 nt, Human
augaucacggcucacugca

SEQ ID NO: 2860041 - RNA, 18 nt, Human
augaucacggcucacugc

SEQ ID NO: 2860042 - RNA, 14 nt, Human
uuguugcaaagguc

SEQ ID NO: 2860043 - RNA, 17 nt, Human
uuguugcauguuugaaa

SEQ ID NO: 2860044 - RNA, 18 nt, Human
uuguugcucccugugaca

SEQ ID NO: 2860045 - RNA, 22 nt, Human
uuguugcucccugugacaaaau

SEQ ID NO: 2860046 - RNA, 20 nt, Human
uuguugcuggcuuguuguaa

SEQ ID NO: 2860047 - RNA, 21 nt, Human
uuguugauaaauuccacugga

SEQ ID NO: 2860048 - RNA, 21 nt, Human
uuguugaugggcacuugagaa

SEQ ID NO: 2860049 - RNA, 23 nt, Human
uuguugaugggcacuugagaacu

SEQ ID NO: 2860050 - RNA, 13 nt, Human
augaucaaaaaua

SEQ ID NO: 2860051 - RNA, 15 nt, Human
augaucaaaaauaau

SEQ ID NO: 2860052 - RNA, 13 nt, Human
uuguuggaaugaa

SEQ ID NO: 2860053 - RNA, 14 nt, Human
uuguugcuucuugu

SEQ ID NO: 2860054 - RNA, 18 nt, Human
uuguugcuucuugugaag

SEQ ID NO: 2860055 - RNA, 12 nt, Human
uuguugcuuugu

SEQ ID NO: 2860056 - RNA, 13 nt, Human
uuuaaaaaaagaa

SEQ ID NO: 2860057 - RNA, 15 nt, Human
uuuaaaaaaagaaaa

SEQ ID NO: 2860058 - RNA, 22 nt, Human
uuuaaaaaaagaaaaugaaaaa

SEQ ID NO: 2860059 - RNA, 19 nt, Human
uuguuuuuuuuuuccacuu

SEQ ID NO: 2860060 - RNA, 14 nt, Human
uuguuuuuuugcca

SEQ ID NO: 2860061 - RNA, 22 nt, Human
uuuaaaaaaaaaaguuacagaa

SEQ ID NO: 2860062 - RNA, 19 nt, Human
uuuaaaaaagcaacagaaa

SEQ ID NO: 2860063 - RNA, 14 nt, Human
uuuaaacuuauaaa

SEQ ID NO: 2860064 - RNA, 18 nt, Human
uuuaaaaaauauuuauua

SEQ ID NO: 2860065 - RNA, 19 nt, Human
uuuaaaaaauauuuauuaa

SEQ ID NO: 2860066 - RNA, 22 nt, Human
uuuaaaaaauauuuauuaaaua

SEQ ID NO: 2860067 - RNA, 19 nt, Human
uuuaaaaaaugaaaauaag

SEQ ID NO: 2860068 - RNA, 20 nt, Human
uuuaaaaaaugaaauccuuu

SEQ ID NO: 2860069 - RNA, 20 nt, Human
uuuaaaaaauaacuaccaag

SEQ ID NO: 2860070 - RNA, 17 nt, Human
uuuaaaaaauuaaucug

SEQ ID NO: 2860071 - RNA, 12 nt, Human
uuguuuuucauu

SEQ ID NO: 2860072 - RNA, 13 nt, Human
uuguuuuucauuc

SEQ ID NO: 2860073 - RNA, 17 nt, Human
uuguuuuuagaaucauu

SEQ ID NO: 2860074 - RNA, 13 nt, Human
uuguuuuucucac

SEQ ID NO: 2860075 - RNA, 14 nt, Human
uuguuuuucuuucu

SEQ ID NO: 2860076 - RNA, 15 nt, Human
uuguuuuucuuucua

SEQ ID NO: 2860077 - RNA, 17 nt, Human
uuguuuuuucaaaauag

SEQ ID NO: 2860078 - RNA, 21 nt, Human
uuguuuuuucaaaauagaaaa

SEQ ID NO: 2860079 - RNA, 18 nt, Human
uuguuuuuuuuuuccacu

SEQ ID NO: 2860080 - RNA, 15 nt, Human
augcaauaaaauuau

SEQ ID NO: 2860081 - RNA, 15 nt, Human
augcaccuugugucu

SEQ ID NO: 2860082 - RNA, 16 nt, Human
augcaccuugugucug

SEQ ID NO: 2860083 - RNA, 18 nt, Human
augcaccuugugucugua

SEQ ID NO: 2860084 - RNA, 18 nt, Human
uuguuuugggggucaggc

SEQ ID NO: 2860085 - RNA, 10 nt, Human
uuguuuuguu

SEQ ID NO: 2860086 - RNA, 14 nt, Human
uuguuuuguuuuaa

SEQ ID NO: 2860087 - RNA, 13 nt, Human
uuguuuuguuuua

SEQ ID NO: 2860088 - RNA, 13 nt, Human
uuguuuuguauug

SEQ ID NO: 2860089 - RNA, 14 nt, Human
uuguuuuguuuguc

SEQ ID NO: 2860090 - RNA, 22 nt, Human
augcaaggaccaggacucccuc

SEQ ID NO: 2860091 - RNA, 21 nt, Human
augcaaggcacuguacuaggc

SEQ ID NO: 2860092 - RNA, 18 nt, Human
uuggaaagaagaaagacu

SEQ ID NO: 2860093 - RNA, 20 nt, Human
augaacauuagaaaaauagc

SEQ ID NO: 2860094 - RNA, 10 nt, Human
augaacauuc

SEQ ID NO: 2860095 - RNA, 12 nt, Human
augaacauucca

SEQ ID NO: 2860096 - RNA, 13 nt, Human
augaacauuccaa

SEQ ID NO: 2860097 - RNA, 20 nt, Human
augaaccacaucuugcucug

SEQ ID NO: 2860098 - RNA, 13 nt, Human
augaaccacaucu

SEQ ID NO: 2860099 - RNA, 17 nt, Human
uugggguacccacugcu

SEQ ID NO: 2860100 - RNA, 19 nt, Human
uugggcuggaacagauuca

SEQ ID NO: 2860101 - RNA, 14 nt, Human
uugggcuucagccu

SEQ ID NO: 2860102 - RNA, 18 nt, Human
uugggcagcaauuuaaau

SEQ ID NO: 2860103 - RNA, 19 nt, Human
uugggcagcaauuuaaaug

SEQ ID NO: 2860104 - RNA, 17 nt, Human
uugggcaugugggcuuc

SEQ ID NO: 2860105 - RNA, 22 nt, Human
uugggccaaauccgcucucuuc

SEQ ID NO: 2860106 - RNA, 14 nt, Human
uuguaacuuauauu

SEQ ID NO: 2860107 - RNA, 17 nt, Human
uuguaacuuauauugaa

SEQ ID NO: 2860108 - RNA, 18 nt, Human
uuguaacuuauauugaag

SEQ ID NO: 2860109 - RNA, 19 nt, Human
uuguaacuuauauugaaga

SEQ ID NO: 2860110 - RNA, 13 nt, Human
uuguaacuuaugu

SEQ ID NO: 2860111 - RNA, 17 nt, Human
uuguaacuuauguagau

SEQ ID NO: 2860112 - RNA, 18 nt, Human
uuguaacuuauguagaua

SEQ ID NO: 2860113 - RNA, 20 nt, Human
uuguaacuaggcucagagau

SEQ ID NO: 2860114 - RNA, 15 nt, Human
uuguaaaaaaaaaug

SEQ ID NO: 2860115 - RNA, 16 nt, Human
uuguaaaaaaaaaugc

SEQ ID NO: 2860116 - RNA, 17 nt, Human
uuguaaaaaaaaaugcc

SEQ ID NO: 2860117 - RNA, 19 nt, Human
uuguaaaaaaaaaugccuu

SEQ ID NO: 2860118 - RNA, 20 nt, Human
uuguaaaaaaaaaugccuuu

SEQ ID NO: 2860119 - RNA, 21 nt, Human
uuguaaaaaaaaaugccuuug

SEQ ID NO: 2860120 - RNA, 22 nt, Human
uuguaaaaaaaaaugccuuuga

SEQ ID NO: 2860121 - RNA, 23 nt, Human
uuguaaaaaaaaaugccuuugag

SEQ ID NO: 2860122 - RNA, 12 nt, Human
uuguaaaaagaa

SEQ ID NO: 2860123 - RNA, 13 nt, Human
uuguaaaaagaaa

SEQ ID NO: 2860124 - RNA, 14 nt, Human
uuguaaaaagaaaa

SEQ ID NO: 2860125 - RNA, 20 nt, Human
uugguucauuaauucuauaa

SEQ ID NO: 2860126 - RNA, 14 nt, Human
uugguucauuaauu

SEQ ID NO: 2860127 - RNA, 22 nt, Human
uugggguacccacugcucuggu

SEQ ID NO: 2860128 - RNA, 20 nt, Human
uuggggaaaccuagagaaga

SEQ ID NO: 2860129 - RNA, 13 nt, Human
uuggggugacagu

SEQ ID NO: 2860130 - RNA, 18 nt, Human
uugguuaauuuuuacaug

SEQ ID NO: 2860131 - RNA, 13 nt, Human
uuggggucucuuu

SEQ ID NO: 2860132 - RNA, 22 nt, Human
uuggggucucuuuuguaaauua

SEQ ID NO: 2860133 - RNA, 14 nt, Human
uuggggucugaccc

SEQ ID NO: 2860134 - RNA, 15 nt, Human
uuggggucugacccc

SEQ ID NO: 2860135 - RNA, 13 nt, Human
uuguauaaaugua

SEQ ID NO: 2860136 - RNA, 17 nt, Human
uuguauaaauguauaua

SEQ ID NO: 2860137 - RNA, 19 nt, Human
uuguauaaauguauauaca

SEQ ID NO: 2860138 - RNA, 22 nt, Human
uuguauaaauguauauacacau

SEQ ID NO: 2860139 - RNA, 14 nt, Human
uuguaguuguuuua

SEQ ID NO: 2860140 - RNA, 13 nt, Human
uuguaguuuaccu

SEQ ID NO: 2860141 - RNA, 17 nt, Human
uuguaguuuaccucuuu

SEQ ID NO: 2860142 - RNA, 14 nt, Human
uuguauaacuucuu

SEQ ID NO: 2860143 - RNA, 11 nt, Human
uuguauauauc

SEQ ID NO: 2860144 - RNA, 13 nt, Human
uuguauauaucug

SEQ ID NO: 2860145 - RNA, 19 nt, Human
uuguauauaucugcuucag

SEQ ID NO: 2860146 - RNA, 14 nt, Human
uuguaauuaugauu

SEQ ID NO: 2860147 - RNA, 15 nt, Human
uuguaauuaugauuu

SEQ ID NO: 2860148 - RNA, 17 nt, Human
uuguaauuaugauuugg

SEQ ID NO: 2860149 - RNA, 17 nt, Human
uuguaaugugugaaaaa

SEQ ID NO: 2860150 - RNA, 21 nt, Human
uuguaaugugugaaaaagaug

SEQ ID NO: 2860151 - RNA, 15 nt, Human
uuguaagucaguguu

SEQ ID NO: 2860152 - RNA, 19 nt, Human
uuguaagucaguguugaga

SEQ ID NO: 2860153 - RNA, 20 nt, Human
uuguaagucaguguugagau

SEQ ID NO: 2860154 - RNA, 21 nt, Human
uuguaagucaguguugagaug

SEQ ID NO: 2860155 - RNA, 16 nt, Human
uuguaagugagugugc

SEQ ID NO: 2860156 - RNA, 18 nt, Human
uuguaagugagugugcug

SEQ ID NO: 2860157 - RNA, 19 nt, Human
uuguaagugagugugcugc

SEQ ID NO: 2860158 - RNA, 17 nt, Human
uuguaagugcuacauaa

SEQ ID NO: 2860159 - RNA, 21 nt, Human
uuguaagugcuacauaaauug

SEQ ID NO: 2860160 - RNA, 14 nt, Human
uuguaaggcuuuga

SEQ ID NO: 2860161 - RNA, 18 nt, Human
uuguaaugaauuccuaga

SEQ ID NO: 2860162 - RNA, 22 nt, Human
uuguaaugaauuccuagaauua

SEQ ID NO: 2860163 - RNA, 13 nt, Human
uuguaaugcugca

SEQ ID NO: 2860164 - RNA, 14 nt, Human
uuguaaugcugcac

SEQ ID NO: 2860165 - RNA, 16 nt, Human
uuguaaugcugcacuu

SEQ ID NO: 2860166 - RNA, 21 nt, Human
uuguaaugcugcacuuccugu

SEQ ID NO: 2860167 - RNA, 20 nt, Human
uuguauauuacacauuugua

SEQ ID NO: 2860168 - RNA, 17 nt, Human
augaauucuuaugcuua

SEQ ID NO: 2860169 - RNA, 16 nt, Human
augaauuccuagaauu

SEQ ID NO: 2860170 - RNA, 16 nt, Human
uuguauaacuaacagc

SEQ ID NO: 2860171 - RNA, 23 nt, Human
augaauuauccuauuucaguacu

SEQ ID NO: 2860172 - RNA, 14 nt, Human
augacaacagaagc

SEQ ID NO: 2860173 - RNA, 19 nt, Human
augacaacagaagcuucag

SEQ ID NO: 2860174 - RNA, 13 nt, Human
augacaagauggu

SEQ ID NO: 2860175 - RNA, 14 nt, Human
augacaagauggua

SEQ ID NO: 2860176 - RNA, 17 nt, Human
augacaagaugguacaa

SEQ ID NO: 2860177 - RNA, 13 nt, Human
augacaagcauuu

SEQ ID NO: 2860178 - RNA, 12 nt, Human
augacacugacc

SEQ ID NO: 2860179 - RNA, 16 nt, Human
augacagguaaauuaa

SEQ ID NO: 2860180 - RNA, 17 nt, Human
augacaggccugaagau

SEQ ID NO: 2860181 - RNA, 19 nt, Human
augacaggccugaagauau

SEQ ID NO: 2860182 - RNA, 22 nt, Human
augacaggccugaagauauuac

SEQ ID NO: 2860183 - RNA, 23 nt, Human
augacaggccugaagauauuacu

SEQ ID NO: 2860184 - RNA, 24 nt, Human
augacaggccugaagauauuacua

SEQ ID NO: 2860185 - RNA, 18 nt, Human
augacagccucuauccua

SEQ ID NO: 2860186 - RNA, 16 nt, Human
augacacuagaaaacu

SEQ ID NO: 2860187 - RNA, 21 nt, Human
augacacuagaaaacuugacu

SEQ ID NO: 2860188 - RNA, 22 nt, Human
uugcuaucuggaggccuuccag

SEQ ID NO: 2860189 - RNA, 23 nt, Human
uugcuaucuggaggccuuccagc

SEQ ID NO: 2860190 - RNA, 16 nt, Human
uugcuaucggggaagc

SEQ ID NO: 2860191 - RNA, 18 nt, Human
uugcuaucggggaagcca

SEQ ID NO: 2860192 - RNA, 20 nt, Human
uugcuaucggggaagccaga

SEQ ID NO: 2860193 - RNA, 19 nt, Human
uugcugaagggcauucuuu

SEQ ID NO: 2860194 - RNA, 21 nt, Human
uugcugaagggcauucuuucc

SEQ ID NO: 2860195 - RNA, 15 nt, Human
uugcucccuucagcc

SEQ ID NO: 2860196 - RNA, 17 nt, Human
uugcucccuucagcccc

SEQ ID NO: 2860197 - RNA, 19 nt, Human
uugcucccuucagccccca

SEQ ID NO: 2860198 - RNA, 16 nt, Human
uugcuagcuaugugac

SEQ ID NO: 2860199 - RNA, 19 nt, Human
uugcuagcuaugugaccuu

SEQ ID NO: 2860200 - RNA, 13 nt, Human
uugcuaguauuug

SEQ ID NO: 2860201 - RNA, 15 nt, Human
uugcuaguauuugaa

SEQ ID NO: 2860202 - RNA, 16 nt, Human
uugcuaguauuugaau

SEQ ID NO: 2860203 - RNA, 17 nt, Human
uugcuaguauuugaauu

SEQ ID NO: 2860204 - RNA, 18 nt, Human
uugcuaguauuugaauua

SEQ ID NO: 2860205 - RNA, 23 nt, Human
uugcuagauaaaagcugaaguua

SEQ ID NO: 2860206 - RNA, 18 nt, Human
uugcuagcaguaaaagau

SEQ ID NO: 2860207 - RNA, 23 nt, Human
uugcuagcaguaaaagaugaagu

SEQ ID NO: 2860208 - RNA, 21 nt, Human
uugcuacccugaguucaucca

SEQ ID NO: 2860209 - RNA, 19 nt, Human
uugcuagaaugggaagggu

SEQ ID NO: 2860210 - RNA, 18 nt, Human
uugcuagacucuagacaa

SEQ ID NO: 2860211 - RNA, 20 nt, Human
uugcuacuacuuaccuacca

SEQ ID NO: 2860212 - RNA, 15 nt, Human
aucuaauaccucugu

SEQ ID NO: 2860213 - RNA, 13 nt, Human
aucuaaguuauaa

SEQ ID NO: 2860214 - RNA, 17 nt, Human
aucuaauaccucugugu

SEQ ID NO: 2860215 - RNA, 14 nt, Human
uugcuaauugcugu

SEQ ID NO: 2860216 - RNA, 18 nt, Human
uugcuaauugcuguugaa

SEQ ID NO: 2860217 - RNA, 21 nt, Human
uugcuaauugcuguugaaagc

SEQ ID NO: 2860218 - RNA, 15 nt, Human
uugcuaauuuucuca

SEQ ID NO: 2860219 - RNA, 17 nt, Human
uugcuaauuuucucaaa

SEQ ID NO: 2860220 - RNA, 23 nt, Human
uugcuaauuuucucaaaagcauu

SEQ ID NO: 2860221 - RNA, 16 nt, Human
uugcuaauuaaaaagu

SEQ ID NO: 2860222 - RNA, 16 nt, Human
uugcuaaucaaagcca

SEQ ID NO: 2860223 - RNA, 18 nt, Human
uugcuaaucaaagccagg

SEQ ID NO: 2860224 - RNA, 21 nt, Human
uugcuaaucaaagccaggguc

SEQ ID NO: 2860225 - RNA, 22 nt, Human
uugcuaaucaaagccagggucu

SEQ ID NO: 2860226 - RNA, 19 nt, Human
aucuaaguuauaagacucu

SEQ ID NO: 2860227 - RNA, 22 nt, Human
uugcugaccucagcgguugcca

SEQ ID NO: 2860228 - RNA, 22 nt, Human
uugcugagccucugcuccccag

SEQ ID NO: 2860229 - RNA, 17 nt, Human
uugcugagcuguuuaua

SEQ ID NO: 2860230 - RNA, 24 nt, Human
uugcugagcuguuuauagagaaug

SEQ ID NO: 2860231 - RNA, 14 nt, Human
uugcugagccucug

SEQ ID NO: 2860232 - RNA, 15 nt, Human
uugcugagccucugc

SEQ ID NO: 2860233 - RNA, 13 nt, Human
uugcuuguuacau

SEQ ID NO: 2860234 - RNA, 19 nt, Human
uugcuuguuauauuaagca

SEQ ID NO: 2860235 - RNA, 21 nt, Human
uugcuuguuauauuaagcaga

SEQ ID NO: 2860236 - RNA, 16 nt, Human
uugcuuggacuauuau

SEQ ID NO: 2860237 - RNA, 15 nt, Human
uugcuuguaccucug

SEQ ID NO: 2860238 - RNA, 18 nt, Human
uugcuuguaccucuggcu

SEQ ID NO: 2860239 - RNA, 19 nt, Human
uugcuuuuucacagucacu

SEQ ID NO: 2860240 - RNA, 22 nt, Human
uuggaaacauuuuuuaaaacaa

SEQ ID NO: 2860241 - RNA, 15 nt, Human
uugcuuuuucaccag

SEQ ID NO: 2860242 - RNA, 13 nt, Human
uugcuuuuuugua

SEQ ID NO: 2860243 - RNA, 19 nt, Human
uugcuuuuuuguauugguu

SEQ ID NO: 2860244 - RNA, 15 nt, Human
uugcuuuuuuaaaua

SEQ ID NO: 2860245 - RNA, 12 nt, Human
uugcuuuuaauu

SEQ ID NO: 2860246 - RNA, 14 nt, Human
uugcuuuuaauuaa

SEQ ID NO: 2860247 - RNA, 15 nt, Human
uugcuuuuauuuuga

SEQ ID NO: 2860248 - RNA, 17 nt, Human
uugcuuuuauuuugaaa

SEQ ID NO: 2860249 - RNA, 15 nt, Human
uugcuuuucccucuu

SEQ ID NO: 2860250 - RNA, 16 nt, Human
uugcuuuucccucuuu

SEQ ID NO: 2860251 - RNA, 21 nt, Human
uugcuuuucccucuuuucuua

SEQ ID NO: 2860252 - RNA, 18 nt, Human
uugcuuuugaaggaauac

SEQ ID NO: 2860253 - RNA, 21 nt, Human
uugcuuuugaaggaauacaau

SEQ ID NO: 2860254 - RNA, 23 nt, Human
uugcuuuugaaggaauacaauau

SEQ ID NO: 2860255 - RNA, 14 nt, Human
augaaaugagguca

SEQ ID NO: 2860256 - RNA, 18 nt, Human
augaaaucuuacagcugg

SEQ ID NO: 2860257 - RNA, 13 nt, Human
augaaagauuaaa

SEQ ID NO: 2860258 - RNA, 18 nt, Human
augaaagauuaaacagau

SEQ ID NO: 2860259 - RNA, 19 nt, Human
augaaagauuaaacagaug

SEQ ID NO: 2860260 - RNA, 12 nt, Human
augaaagaugau

SEQ ID NO: 2860261 - RNA, 13 nt, Human
augaaauauugcu

SEQ ID NO: 2860262 - RNA, 17 nt, Human
augaaauauugcuguau

SEQ ID NO: 2860263 - RNA, 13 nt, Human
augaaauauuuuu

SEQ ID NO: 2860264 - RNA, 19 nt, Human
augaaauccuugacuggac

SEQ ID NO: 2860265 - RNA, 16 nt, Human
augaaauccuuuuccu

SEQ ID NO: 2860266 - RNA, 19 nt, Human
augaaagauggcugugccu

SEQ ID NO: 2860267 - RNA, 20 nt, Human
augaaagauggcugugccuc

SEQ ID NO: 2860268 - RNA, 23 nt, Human
augaaagauggcugugccucugc

SEQ ID NO: 2860269 - RNA, 11 nt, Human
aucuuuccugu

SEQ ID NO: 2860270 - RNA, 12 nt, Human
aucuuuccuguc

SEQ ID NO: 2860271 - RNA, 14 nt, Human
aucuuugugauaau

SEQ ID NO: 2860272 - RNA, 17 nt, Human
aucuuugugauaauuua

SEQ ID NO: 2860273 - RNA, 17 nt, Human
aucuuucgauaaacaac

SEQ ID NO: 2860274 - RNA, 16 nt, Human
aucuuucuaugcugcu

SEQ ID NO: 2860275 - RNA, 21 nt, Human
aucuuucuaugcugcuuuuau

SEQ ID NO: 2860276 - RNA, 16 nt, Human
aucuuucuauuccaaa

SEQ ID NO: 2860277 - RNA, 22 nt, Human
aucuuucuccuugaauaucuuu

SEQ ID NO: 2860278 - RNA, 11 nt, Human
aucuuuuacau

SEQ ID NO: 2860279 - RNA, 15 nt, Human
aucuuuuauguuuga

SEQ ID NO: 2860280 - RNA, 16 nt, Human
aucuuuuauguuugaa

SEQ ID NO: 2860281 - RNA, 17 nt, Human
aucuuuuauguuugaau

SEQ ID NO: 2860282 - RNA, 18 nt, Human
aucuuuuauguuugaaua

SEQ ID NO: 2860283 - RNA, 20 nt, Human
aucuuuuauguuugaauaug

SEQ ID NO: 2860284 - RNA, 21 nt, Human
aucuuuuauguuugaauaugg

SEQ ID NO: 2860285 - RNA, 21 nt, Human
aucuuuguuaagguccugaaa

SEQ ID NO: 2860286 - RNA, 14 nt, Human
aucuuuuaaagaaa

SEQ ID NO: 2860287 - RNA, 17 nt, Human
aucuuuuaaaguguuac

SEQ ID NO: 2860288 - RNA, 18 nt, Human
aucuuuuaaaguguuacu

SEQ ID NO: 2860289 - RNA, 20 nt, Human
aucuuuuaaaguguuacuuu

SEQ ID NO: 2860290 - RNA, 22 nt, Human
aucuuuuaaaguguuacuuuuu

SEQ ID NO: 2860291 - RNA, 22 nt, Human
aucuuuuacaacugccucgaaa

SEQ ID NO: 2860292 - RNA, 14 nt, Human
uuggcugcagggag

SEQ ID NO: 2860293 - RNA, 13 nt, Human
uuggcugcaggga

SEQ ID NO: 2860294 - RNA, 22 nt, Human
uuggcuaggaccccuccaugug

SEQ ID NO: 2860295 - RNA, 22 nt, Human
uuggccugucucauccccaggg

SEQ ID NO: 2860296 - RNA, 22 nt, Human
uuggccuucagaaccauccaua

SEQ ID NO: 2860297 - RNA, 21 nt, Human
uuggccuuggcuuuucuagcc

SEQ ID NO: 2860298 - RNA, 15 nt, Human
uuggcgcuauuacaa

SEQ ID NO: 2860299 - RNA, 16 nt, Human
uuggcgcuauuacaaa

SEQ ID NO: 2860300 - RNA, 17 nt, Human
uuggcgcuauuacaaau

SEQ ID NO: 2860301 - RNA, 18 nt, Human
uuggcgcuauuacaaaua

SEQ ID NO: 2860302 - RNA, 22 nt, Human
uuggaccuuacgaucaggcaca

SEQ ID NO: 2860303 - RNA, 14 nt, Human
uuggccuggaguuu

SEQ ID NO: 2860304 - RNA, 16 nt, Human
uuggccugucucaucc

SEQ ID NO: 2860305 - RNA, 23 nt, Human
uuggccugucucauccccagggg

SEQ ID NO: 2860306 - RNA, 17 nt, Human
uuggacggcugggcaca

SEQ ID NO: 2860307 - RNA, 17 nt, Human
uuggacuaaaugccuag

SEQ ID NO: 2860308 - RNA, 23 nt, Human
uuggacuaaaugccuaguuuuua

SEQ ID NO: 2860309 - RNA, 21 nt, Human
uuggacggccugaugcucccu

SEQ ID NO: 2860310 - RNA, 13 nt, Human
uuggacggccuga

SEQ ID NO: 2860311 - RNA, 20 nt, Human
auuuagagaacuguggccgu

SEQ ID NO: 2860312 - RNA, 16 nt, Human
auuuagagaugcugua

SEQ ID NO: 2860313 - RNA, 22 nt, Human
auuuagagaugcuguaacuuaa

SEQ ID NO: 2860314 - RNA, 14 nt, Human
auuuaguaguguaa

SEQ ID NO: 2860315 - RNA, 18 nt, Human
auuuagauuguuaaaaua

SEQ ID NO: 2860316 - RNA, 17 nt, Human
auuuagauugaaaacuu

SEQ ID NO: 2860317 - RNA, 14 nt, Human
auuuagauuguaaa

SEQ ID NO: 2860318 - RNA, 15 nt, Human
auuuagauuguaaac

SEQ ID NO: 2860319 - RNA, 13 nt, Human
auuuagucucuuu

SEQ ID NO: 2860320 - RNA, 16 nt, Human
auuuagucucuuuauu

SEQ ID NO: 2860321 - RNA, 21 nt, Human
auuuagucucuuuauuccuag

SEQ ID NO: 2860322 - RNA, 22 nt, Human
auuuagucucuuuauuccuagu

SEQ ID NO: 2860323 - RNA, 21 nt, Human
auuuaguauugaauacuuaca

SEQ ID NO: 2860324 - RNA, 15 nt, Human
auuuagugaacuacg

SEQ ID NO: 2860325 - RNA, 21 nt, Human
auuuagugaguuauuccuuga

SEQ ID NO: 2860326 - RNA, 18 nt, Human
auuuagugaucuuagcau

SEQ ID NO: 2860327 - RNA, 19 nt, Human
auuuagugaucuuagcaua

SEQ ID NO: 2860328 - RNA, 12 nt, Human
auuuauuaauau

SEQ ID NO: 2860329 - RNA, 14 nt, Human
auuuauuaauauuu

SEQ ID NO: 2860330 - RNA, 15 nt, Human
auuuauuaauauuua

SEQ ID NO: 2860331 - RNA, 23 nt, Human
auuuauuaauauuuaacauuauu

SEQ ID NO: 2860332 - RNA, 20 nt, Human
auuuaguuuuuguaauuuau

SEQ ID NO: 2860333 - RNA, 19 nt, Human
auuuaguuuuuguaauuua

SEQ ID NO: 2860334 - RNA, 19 nt, Human
auuuagaccccauacaagu

SEQ ID NO: 2860335 - RNA, 14 nt, Human
auuuagaaguguca

SEQ ID NO: 2860336 - RNA, 18 nt, Human
auuuagaagugucauguu

SEQ ID NO: 2860337 - RNA, 19 nt, Human
auuuagaagugucauguuu

SEQ ID NO: 2860338 - RNA, 14 nt, Human
auuuagaacuguau

SEQ ID NO: 2860339 - RNA, 21 nt, Human
auuuagaaaauagagcuuuua

SEQ ID NO: 2860340 - RNA, 22 nt, Human
auuuagaaaauagagcuuuuaa

SEQ ID NO: 2860341 - RNA, 18 nt, Human
auuuagaaacuaauugac

SEQ ID NO: 2860342 - RNA, 22 nt, Human
auuuagaaacuaauugacuuua

SEQ ID NO: 2860343 - RNA, 20 nt, Human
auuuacuggacauaacauuu

SEQ ID NO: 2860344 - RNA, 19 nt, Human
auuuaaauuuuacccuuua

SEQ ID NO: 2860345 - RNA, 13 nt, Human
auuuaacaagauc

SEQ ID NO: 2860346 - RNA, 23 nt, Human
auuuaaauguuaugacuauguaa

SEQ ID NO: 2860347 - RNA, 15 nt, Human
auuuaaauuuaaaga

SEQ ID NO: 2860348 - RNA, 16 nt, Human
auuuaaauuuaaagau

SEQ ID NO: 2860349 - RNA, 17 nt, Human
auuuaaauuuaaagaua

SEQ ID NO: 2860350 - RNA, 18 nt, Human
auuuaaauuuaaagauau

SEQ ID NO: 2860351 - RNA, 19 nt, Human
auuuaaaaaugagugugaa

SEQ ID NO: 2860352 - RNA, 21 nt, Human
auuuaaaaaugagugugaagg

SEQ ID NO: 2860353 - RNA, 12 nt, Human
auuuaaaaaugu

SEQ ID NO: 2860354 - RNA, 13 nt, Human
auuuaaaaauguc

SEQ ID NO: 2860355 - RNA, 14 nt, Human
auuuaaaaaugucu

SEQ ID NO: 2860356 - RNA, 15 nt, Human
auuuaaaaaugucuu

SEQ ID NO: 2860357 - RNA, 16 nt, Human
auuuaaaaaugucuug

SEQ ID NO: 2860358 - RNA, 18 nt, Human
auuuaaaaaugucuugcu

SEQ ID NO: 2860359 - RNA, 15 nt, Human
auuuaaaaaauaacu

SEQ ID NO: 2860360 - RNA, 13 nt, Human
auuuaaaaaauaa

SEQ ID NO: 2860361 - RNA, 16 nt, Human
auuuaaaaaaaucaca

SEQ ID NO: 2860362 - RNA, 21 nt, Human
auuuaaaaaaaucacaaaaau

SEQ ID NO: 2860363 - RNA, 14 nt, Human
auuuaaaaacugga

SEQ ID NO: 2860364 - RNA, 15 nt, Human
auuuaaaaacuggaa

SEQ ID NO: 2860365 - RNA, 16 nt, Human
auuuaaaaacuggaac

SEQ ID NO: 2860366 - RNA, 14 nt, Human
auuuauucugcuca

SEQ ID NO: 2860367 - RNA, 14 nt, Human
auuuauuuauuauu

SEQ ID NO: 2860368 - RNA, 14 nt, Human
auuuauuuauuuaa

SEQ ID NO: 2860369 - RNA, 13 nt, Human
auuuauuuacaga

SEQ ID NO: 2860370 - RNA, 23 nt, Human
auuuauuuacagaugaauguauu

SEQ ID NO: 2860371 - RNA, 18 nt, Human
auuuauuuauguacuuuu

SEQ ID NO: 2860372 - RNA, 16 nt, Human
auuuauuuauguacuu

SEQ ID NO: 2860373 - RNA, 15 nt, Human
auuuauuuauguacu

SEQ ID NO: 2860374 - RNA, 13 nt, Human
auuuauuuauuau

SEQ ID NO: 2860375 - RNA, 13 nt, Human
auuuauucugcuc

SEQ ID NO: 2860376 - RNA, 17 nt, Human
auuuauuuaaugugagu

SEQ ID NO: 2860377 - RNA, 21 nt, Human
auuuauuuaaugugaguuugg

SEQ ID NO: 2860378 - RNA, 18 nt, Human
auuuauucagcuucauuu

SEQ ID NO: 2860379 - RNA, 20 nt, Human
auuuauucagcuucauuugu

SEQ ID NO: 2860380 - RNA, 11 nt, Human
auuuauuauuu

SEQ ID NO: 2860381 - RNA, 13 nt, Human
auuuauuauuuau

SEQ ID NO: 2860382 - RNA, 15 nt, Human
auuuauuauugaaau

SEQ ID NO: 2860383 - RNA, 16 nt, Human
auuuauuauugaaauu

SEQ ID NO: 2860384 - RNA, 17 nt, Human
auuuauuauugaaauug

SEQ ID NO: 2860385 - RNA, 19 nt, Human
auuuauuauuuauuuauua

SEQ ID NO: 2860386 - RNA, 19 nt, Human
auuucauuguaugaugugu

SEQ ID NO: 2860387 - RNA, 20 nt, Human
auuucauuguaugauguguu

SEQ ID NO: 2860388 - RNA, 12 nt, Human
auuucauuguau

SEQ ID NO: 2860389 - RNA, 14 nt, Human
auuucauuguauga

SEQ ID NO: 2860390 - RNA, 15 nt, Human
auuucauuguaugau

SEQ ID NO: 2860391 - RNA, 17 nt, Human
auuucauuguaugaugu

SEQ ID NO: 2860392 - RNA, 14 nt, Human
auuucauugccugu

SEQ ID NO: 2860393 - RNA, 17 nt, Human
auuucauugccugugua

SEQ ID NO: 2860394 - RNA, 18 nt, Human
auuucauugccuguguau

SEQ ID NO: 2860395 - RNA, 14 nt, Human
auuucauugguuaa

SEQ ID NO: 2860396 - RNA, 19 nt, Human
auuucauugguuaauuuuu

SEQ ID NO: 2860397 - RNA, 13 nt, Human
auuucaagaaaaa

SEQ ID NO: 2860398 - RNA, 19 nt, Human
auuucaagaaaaaauaaau

SEQ ID NO: 2860399 - RNA, 20 nt, Human
auuucaagaaaaaauaaaug

SEQ ID NO: 2860400 - RNA, 21 nt, Human
auuucaagaaaaaauaaaugg

SEQ ID NO: 2860401 - RNA, 22 nt, Human
auuucaagaaaaaauaaaugga

SEQ ID NO: 2860402 - RNA, 23 nt, Human
auuucaagaaaaaauaaauggaa

SEQ ID NO: 2860403 - RNA, 16 nt, Human
auuucaaacggccuca

SEQ ID NO: 2860404 - RNA, 16 nt, Human
auuucaaaaugcuuuu

SEQ ID NO: 2860405 - RNA, 13 nt, Human
auuucaaaaugcu

SEQ ID NO: 2860406 - RNA, 13 nt, Human
auuucaaaagaca

SEQ ID NO: 2860407 - RNA, 14 nt, Human
auuucaaaagacau

SEQ ID NO: 2860408 - RNA, 16 nt, Human
auuucaaaagacaugu

SEQ ID NO: 2860409 - RNA, 17 nt, Human
auuucaaaagacauguu

SEQ ID NO: 2860410 - RNA, 18 nt, Human
auuucaaaagacauguug

SEQ ID NO: 2860411 - RNA, 21 nt, Human
auuucaaaagacauguuguaa

SEQ ID NO: 2860412 - RNA, 21 nt, Human
auuucaaaaugcuuuuuauua

SEQ ID NO: 2860413 - RNA, 15 nt, Human
auuucaaaaugcuuu

SEQ ID NO: 2860414 - RNA, 14 nt, Human
auuucaaaaugcuu

SEQ ID NO: 2860415 - RNA, 21 nt, Human
auuucauuguaugauguguug

SEQ ID NO: 2860416 - RNA, 22 nt, Human
auuucauuugugccagaaugcu

SEQ ID NO: 2860417 - RNA, 14 nt, Human
auuuccagccaggg

SEQ ID NO: 2860418 - RNA, 18 nt, Human
auuuccagccagggcugc

SEQ ID NO: 2860419 - RNA, 21 nt, Human
auuuccagcuuucuccccgcu

SEQ ID NO: 2860420 - RNA, 22 nt, Human
auuuccagcuuucuccccgcua

SEQ ID NO: 2860421 - RNA, 14 nt, Human
auuuccagggauau

SEQ ID NO: 2860422 - RNA, 17 nt, Human
auuuccagccagggcug

SEQ ID NO: 2860423 - RNA, 20 nt, Human
auuuccagugaaaucaguua

SEQ ID NO: 2860424 - RNA, 21 nt, Human
auuucccauuugugccagagg

SEQ ID NO: 2860425 - RNA, 22 nt, Human
auuucccauuugugccagagga

SEQ ID NO: 2860426 - RNA, 21 nt, Human
auuuccaguguucuaugaaca

SEQ ID NO: 2860427 - RNA, 22 nt, Human
auuuccaguguucuaugaacaa

SEQ ID NO: 2860428 - RNA, 13 nt, Human
auuugaacacugg

SEQ ID NO: 2860429 - RNA, 22 nt, Human
auuugaacacuggcuaaagaua

SEQ ID NO: 2860430 - RNA, 18 nt, Human
auuugaacacuuggugcu

SEQ ID NO: 2860431 - RNA, 16 nt, Human
auuugaagaacaugug

SEQ ID NO: 2860432 - RNA, 22 nt, Human
auuugaaaacauaaucugcaaa

SEQ ID NO: 2860433 - RNA, 14 nt, Human
auuugaaaaaaacu

SEQ ID NO: 2860434 - RNA, 16 nt, Human
auuugaaaaaaacuuc

SEQ ID NO: 2860435 - RNA, 22 nt, Human
auuugaaaaaaacuucauucuc

SEQ ID NO: 2860436 - RNA, 22 nt, Human
auuucuuuuguaauaaacuauu

SEQ ID NO: 2860437 - RNA, 21 nt, Human
auuucuuuuguaauaaacuau

SEQ ID NO: 2860438 - RNA, 23 nt, Human
auuucccuugaaauuuuaaacua

SEQ ID NO: 2860439 - RNA, 13 nt, Human
auuucccuucuug

SEQ ID NO: 2860440 - RNA, 16 nt, Human
auuucccuucuugcau

SEQ ID NO: 2860441 - RNA, 23 nt, Human
auuucccuucuugcauccuuccu

SEQ ID NO: 2860442 - RNA, 16 nt, Human
auuucuagccugcacu

SEQ ID NO: 2860443 - RNA, 19 nt, Human
auuucuagccugcacuuug

SEQ ID NO: 2860444 - RNA, 23 nt, Human
auuucuagccugcacuuugaugu

SEQ ID NO: 2860445 - RNA, 18 nt, Human
auuucuaccauuucagag

SEQ ID NO: 2860446 - RNA, 17 nt, Human
auuucuaccauuucaga

SEQ ID NO: 2860447 - RNA, 19 nt, Human
auuucuacacagugggaac

SEQ ID NO: 2860448 - RNA, 20 nt, Human
auuucuaccaaggcauauca

SEQ ID NO: 2860449 - RNA, 22 nt, Human
auuuccgcacuucagaauucca

SEQ ID NO: 2860450 - RNA, 23 nt, Human
auuuccgcacuucagaauuccau

SEQ ID NO: 2860451 - RNA, 13 nt, Human
auugacauuugua

SEQ ID NO: 2860452 - RNA, 17 nt, Human
auugacauuuguaguug

SEQ ID NO: 2860453 - RNA, 18 nt, Human
auugacauuuguaguuga

SEQ ID NO: 2860454 - RNA, 14 nt, Human
auugaccaucugcu

SEQ ID NO: 2860455 - RNA, 15 nt, Human
auugaccaucugcuu

SEQ ID NO: 2860456 - RNA, 16 nt, Human
auugaaaaacucuuua

SEQ ID NO: 2860457 - RNA, 17 nt, Human
auugaaaaacucuuuau

SEQ ID NO: 2860458 - RNA, 18 nt, Human
auugaaaacuuuucucag

SEQ ID NO: 2860459 - RNA, 13 nt, Human
auucuuuuucuga

SEQ ID NO: 2860460 - RNA, 15 nt, Human
auucuuuuucugauu

SEQ ID NO: 2860461 - RNA, 15 nt, Human
auugaaaaucuugug

SEQ ID NO: 2860462 - RNA, 14 nt, Human
auugaaaaugaaug

SEQ ID NO: 2860463 - RNA, 12 nt, Human
auugaaacacuu

SEQ ID NO: 2860464 - RNA, 21 nt, Human
auugggagcuugggaauggau

SEQ ID NO: 2860465 - RNA, 20 nt, Human
auugggaguccaggcacagg

SEQ ID NO: 2860466 - RNA, 22 nt, Human
auugggaguccaggcacaggau

SEQ ID NO: 2860467 - RNA, 21 nt, Human
auuggguaucaagacauagca

SEQ ID NO: 2860468 - RNA, 22 nt, Human
auuggguaucaagacauagcau

SEQ ID NO: 2860469 - RNA, 19 nt, Human
auugggggggccaaaagga

SEQ ID NO: 2860470 - RNA, 22 nt, Human
auugggggggccaaaaggaaaa

SEQ ID NO: 2860471 - RNA, 23 nt, Human
auugggggggccaaaaggaaaaa

SEQ ID NO: 2860472 - RNA, 21 nt, Human
auugggggucaccggccgaug

SEQ ID NO: 2860473 - RNA, 18 nt, Human
auugggcggcucugaagc

SEQ ID NO: 2860474 - RNA, 15 nt, Human
auugggucuauucca

SEQ ID NO: 2860475 - RNA, 16 nt, Human
auugggucuauuccag

SEQ ID NO: 2860476 - RNA, 17 nt, Human
auugggucuauuccagc

SEQ ID NO: 2860477 - RNA, 18 nt, Human
auugggucuauuccagcu

SEQ ID NO: 2860478 - RNA, 19 nt, Human
auugggucuauuccagcuc

SEQ ID NO: 2860479 - RNA, 20 nt, Human
auugggucuauuccagcuca

SEQ ID NO: 2860480 - RNA, 21 nt, Human
auugggucuauuccagcucau

SEQ ID NO: 2860481 - RNA, 14 nt, Human
auuggucuaauuua

SEQ ID NO: 2860482 - RNA, 18 nt, Human
auuggucuaauuuauuca

SEQ ID NO: 2860483 - RNA, 20 nt, Human
auucugugaucuuuuaaagu

SEQ ID NO: 2860484 - RNA, 17 nt, Human
auucuguggaacaagcc

SEQ ID NO: 2860485 - RNA, 20 nt, Human
auucuguaucuuucauccuu

SEQ ID NO: 2860486 - RNA, 13 nt, Human
auucuuaaaaugc

SEQ ID NO: 2860487 - RNA, 17 nt, Human
auucuuaaaaugcaaua

SEQ ID NO: 2860488 - RNA, 18 nt, Human
auucuuaaaaugcaauau

SEQ ID NO: 2860489 - RNA, 20 nt, Human
auucuuaaaaugcaauauuu

SEQ ID NO: 2860490 - RNA, 22 nt, Human
auucuuaaaaugcaauauuugu

SEQ ID NO: 2860491 - RNA, 18 nt, Human
auucuguuuuagguuaaa

SEQ ID NO: 2860492 - RNA, 22 nt, Human
auucugcaagcacaucugcauu

SEQ ID NO: 2860493 - RNA, 19 nt, Human
auucugcaagcacaucugc

SEQ ID NO: 2860494 - RNA, 19 nt, Human
auucugauuuggaaaaaga

SEQ ID NO: 2860495 - RNA, 16 nt, Human
auucugcccaaaaaua

SEQ ID NO: 2860496 - RNA, 23 nt, Human
auucugcaguaaaucuuuuacaa

SEQ ID NO: 2860497 - RNA, 19 nt, Human
auucugcauugcuagauaa

SEQ ID NO: 2860498 - RNA, 22 nt, Human
auucugcauugcuagauaaaag

SEQ ID NO: 2860499 - RNA, 21 nt, Human
auucugcaguaaaucuuuuac

SEQ ID NO: 2860500 - RNA, 20 nt, Human
auucugcaguaaaucuuuua

SEQ ID NO: 2860501 - RNA, 18 nt, Human
auucugcaguaaaucuuu

SEQ ID NO: 2860502 - RNA, 17 nt, Human
auucugcaguaaaucuu

SEQ ID NO: 2860503 - RNA, 14 nt, Human
auucuggcugaaaa

SEQ ID NO: 2860504 - RNA, 21 nt, Human
auucuggauuuugucaagcag

SEQ ID NO: 2860505 - RNA, 14 nt, Human
auucuggccagacu

SEQ ID NO: 2860506 - RNA, 19 nt, Human
auucuggccagacucgaug

SEQ ID NO: 2860507 - RNA, 15 nt, Human
auucuggagauacug

SEQ ID NO: 2860508 - RNA, 18 nt, Human
auucuggacagucagcuc

SEQ ID NO: 2860509 - RNA, 20 nt, Human
auucuggacagucagcucuu

SEQ ID NO: 2860510 - RNA, 22 nt, Human
auucuggacagucagcucuuca

SEQ ID NO: 2860511 - RNA, 18 nt, Human
auucugcccaaaaauaug

SEQ ID NO: 2860512 - RNA, 13 nt, Human
auucugcuugaga

SEQ ID NO: 2860513 - RNA, 17 nt, Human
auucugcuugagaauau

SEQ ID NO: 2860514 - RNA, 19 nt, Human
auucuuacacugccuguau

SEQ ID NO: 2860515 - RNA, 20 nt, Human
auucuuacacugccuguaua

SEQ ID NO: 2860516 - RNA, 22 nt, Human
auucuuacacugccuguauacu

SEQ ID NO: 2860517 - RNA, 23 nt, Human
auucuuacacugccuguauacuu

SEQ ID NO: 2860518 - RNA, 22 nt, Human
auucuuauguagcaggaaauaa

SEQ ID NO: 2860519 - RNA, 15 nt, Human
auucuuauacacauu

SEQ ID NO: 2860520 - RNA, 14 nt, Human
auucuuaugcuuau

SEQ ID NO: 2860521 - RNA, 21 nt, Human
auucuucaagagacccuucaa

SEQ ID NO: 2860522 - RNA, 15 nt, Human
auucuuauuuugugg

SEQ ID NO: 2860523 - RNA, 16 nt, Human
auucuuauuuuuccua

SEQ ID NO: 2860524 - RNA, 12 nt, Human
auucuucuagag

SEQ ID NO: 2860525 - RNA, 20 nt, Human
auucuucagcguaaaauggu

SEQ ID NO: 2860526 - RNA, 22 nt, Human
auucuucaggcuuccugcaauu

SEQ ID NO: 2860527 - RNA, 20 nt, Human
auucuucaguugguuguguc

SEQ ID NO: 2860528 - RNA, 23 nt, Human
auucuucaguugguugugucuuu

SEQ ID NO: 2860529 - RNA, 21 nt, Human
auucuuccaagcugagagucu

SEQ ID NO: 2860530 - RNA, 14 nt, Human
auucuucuagaguu

SEQ ID NO: 2860531 - RNA, 13 nt, Human
auucuucuagagu

SEQ ID NO: 2860532 - RNA, 23 nt, Human
auucuuacccuguacauauguaa

SEQ ID NO: 2860533 - RNA, 10 nt, Human
auucuuccuu

SEQ ID NO: 2860534 - RNA, 19 nt, Human
auucuuuuccaaaauaaaa

SEQ ID NO: 2860535 - RNA, 20 nt, Human
auucuuuucugcaaaauaga

SEQ ID NO: 2860536 - RNA, 15 nt, Human
auucuuuugaauugu

SEQ ID NO: 2860537 - RNA, 16 nt, Human
auucuuuugaauuguu

SEQ ID NO: 2860538 - RNA, 12 nt, Human
auucuuuugcca

SEQ ID NO: 2860539 - RNA, 14 nt, Human
auucuuuugccaag

SEQ ID NO: 2860540 - RNA, 14 nt, Human
auucuuuuaacuuc

SEQ ID NO: 2860541 - RNA, 17 nt, Human
auucuuuuaacuucuuu

SEQ ID NO: 2860542 - RNA, 22 nt, Human
auucuuuggaguugucacauca

SEQ ID NO: 2860543 - RNA, 17 nt, Human
auuggucuccucucagc

SEQ ID NO: 2860544 - RNA, 14 nt, Human
auuggucuccucuc

SEQ ID NO: 2860545 - RNA, 16 nt, Human
auugguggcuuuccuu

SEQ ID NO: 2860546 - RNA, 18 nt, Human
auuggugggauuuuuugu

SEQ ID NO: 2860547 - RNA, 17 nt, Human
auuggugguucucagca

SEQ ID NO: 2860548 - RNA, 12 nt, Human
auuguauugcug

SEQ ID NO: 2860549 - RNA, 14 nt, Human
auuguauugcuguc

SEQ ID NO: 2860550 - RNA, 14 nt, Human
auugugauguauau

SEQ ID NO: 2860551 - RNA, 19 nt, Human
auugugauguauauuccuu

SEQ ID NO: 2860552 - RNA, 16 nt, Human
auugugagccaccacg

SEQ ID NO: 2860553 - RNA, 14 nt, Human
auugugaacucauu

SEQ ID NO: 2860554 - RNA, 15 nt, Human
auugugaacucauug

SEQ ID NO: 2860555 - RNA, 17 nt, Human
auugugaacucauugcu

SEQ ID NO: 2860556 - RNA, 15 nt, Human
auuguguauauucau

SEQ ID NO: 2860557 - RNA, 14 nt, Human
auuguggugccaca

SEQ ID NO: 2860558 - RNA, 18 nt, Human
auuguggugugagcuuca

SEQ ID NO: 2860559 - RNA, 18 nt, Human
auugguguugucauugua

SEQ ID NO: 2860560 - RNA, 12 nt, Human
auuguggugcca

SEQ ID NO: 2860561 - RNA, 18 nt, Human
auugugguaggccuuuua

SEQ ID NO: 2860562 - RNA, 21 nt, Human
auugugguaggccuuuuaaca

SEQ ID NO: 2860563 - RNA, 22 nt, Human
auugugguaggccuuuuaacau

SEQ ID NO: 2860564 - RNA, 23 nt, Human
auugugguaggccuuuuaacauu

SEQ ID NO: 2860565 - RNA, 16 nt, Human
auugugccaauaugua

SEQ ID NO: 2860566 - RNA, 17 nt, Human
auugugccaauauguau

SEQ ID NO: 2860567 - RNA, 15 nt, Human
auugugcaaauggaa

SEQ ID NO: 2860568 - RNA, 14 nt, Human
auuuuaaaaaauga

SEQ ID NO: 2860569 - RNA, 16 nt, Human
auuuuaaaaaaugaaa

SEQ ID NO: 2860570 - RNA, 19 nt, Human
auuuuaaaaaaugaaaaua

SEQ ID NO: 2860571 - RNA, 23 nt, Human
auuuuaaaaaaugaaaauaagug

SEQ ID NO: 2860572 - RNA, 15 nt, Human
auuuguuuuucauuc

SEQ ID NO: 2860573 - RNA, 16 nt, Human
auuuguuuuucauuca

SEQ ID NO: 2860574 - RNA, 14 nt, Human
auuuguuuuucuca

SEQ ID NO: 2860575 - RNA, 15 nt, Human
auuuguuuuucucac

SEQ ID NO: 2860576 - RNA, 15 nt, Human
auuugugagauuccu

SEQ ID NO: 2860577 - RNA, 15 nt, Human
auuuguuuucauggu

SEQ ID NO: 2860578 - RNA, 14 nt, Human
auuuguuuucaugg

SEQ ID NO: 2860579 - RNA, 17 nt, Human
auuugaaguguaccugu

SEQ ID NO: 2860580 - RNA, 22 nt, Human
auuugaaguguaccuguguaca

SEQ ID NO: 2860581 - RNA, 16 nt, Human
auuuuaaaaacauaga

SEQ ID NO: 2860582 - RNA, 17 nt, Human
auuuuaaacaaaauaga

SEQ ID NO: 2860583 - RNA, 13 nt, Human
auuuuaaugugau

SEQ ID NO: 2860584 - RNA, 14 nt, Human
auuuuaaugugaug

SEQ ID NO: 2860585 - RNA, 16 nt, Human
auuuuaaugugaugau

SEQ ID NO: 2860586 - RNA, 18 nt, Human
auuuuaaugugaugaugu

SEQ ID NO: 2860587 - RNA, 22 nt, Human
auuuuaaugugaugauguaauu

SEQ ID NO: 2860588 - RNA, 24 nt, Human
auuuuaaugugaugauguaauuga

SEQ ID NO: 2860589 - RNA, 22 nt, Human
auuuuaaugcaguugcuuacua

SEQ ID NO: 2860590 - RNA, 19 nt, Human
auuuuaauggauuguuaau

SEQ ID NO: 2860591 - RNA, 20 nt, Human
auuuuaauggauuguuaauu

SEQ ID NO: 2860592 - RNA, 23 nt, Human
auuuuaauggauuguuaauuuca

SEQ ID NO: 2860593 - RNA, 22 nt, Human
auuuuaauguaaagauuugcuu

SEQ ID NO: 2860594 - RNA, 14 nt, Human
auuuuaaacuagau

SEQ ID NO: 2860595 - RNA, 16 nt, Human
auuuuaaacuagauga

SEQ ID NO: 2860596 - RNA, 17 nt, Human
auuuuaaacuagaugac

SEQ ID NO: 2860597 - RNA, 18 nt, Human
auuuuaaacuagaugacc

SEQ ID NO: 2860598 - RNA, 20 nt, Human
auuuuaaacuagaugaccuc

SEQ ID NO: 2860599 - RNA, 21 nt, Human
auuuuaaacuagaugaccuca

SEQ ID NO: 2860600 - RNA, 23 nt, Human
auuuuaaacuagaugaccucauu

SEQ ID NO: 2860601 - RNA, 22 nt, Human
auuuuaaacaaagguugagaug

SEQ ID NO: 2860602 - RNA, 13 nt, Human
auuuuaaacaaag

SEQ ID NO: 2860603 - RNA, 13 nt, Human
auuuuaauuguca

SEQ ID NO: 2860604 - RNA, 14 nt, Human
auuuuaauugucau

SEQ ID NO: 2860605 - RNA, 15 nt, Human
auuuuaauugucaug

SEQ ID NO: 2860606 - RNA, 15 nt, Human
auuuuaauuuaguaa

SEQ ID NO: 2860607 - RNA, 19 nt, Human
auuuuaauuuaguaaaugu

SEQ ID NO: 2860608 - RNA, 20 nt, Human
auuuuaauuuaguaaauguu

SEQ ID NO: 2860609 - RNA, 21 nt, Human
auuuuaauuuaguaaauguua

SEQ ID NO: 2860610 - RNA, 12 nt, Human
auuuuacauuaa

SEQ ID NO: 2860611 - RNA, 15 nt, Human
auuuuaccucuuauu

SEQ ID NO: 2860612 - RNA, 15 nt, Human
auuuuacauuaaauu

SEQ ID NO: 2860613 - RNA, 16 nt, Human
auuuuaccagcagaag

SEQ ID NO: 2860614 - RNA, 17 nt, Human
auuuuacuuuuuccugg

SEQ ID NO: 2860615 - RNA, 16 nt, Human
auuuuacuuuuuccug

SEQ ID NO: 2860616 - RNA, 18 nt, Human
auuuuaccucuuauugca

SEQ ID NO: 2860617 - RNA, 12 nt, Human
auuuucagugau

SEQ ID NO: 2860618 - RNA, 12 nt, Human
auuuucaguauu

SEQ ID NO: 2860619 - RNA, 14 nt, Human
auuuucaguauuuu

SEQ ID NO: 2860620 - RNA, 14 nt, Human
auuuucauaacuua

SEQ ID NO: 2860621 - RNA, 15 nt, Human
auuuucauaacuuau

SEQ ID NO: 2860622 - RNA, 19 nt, Human
auuuucauaacuuauugcu

SEQ ID NO: 2860623 - RNA, 21 nt, Human
auuuucauaacuuauugcuga

SEQ ID NO: 2860624 - RNA, 22 nt, Human
auuuucauaacuuauugcugau

SEQ ID NO: 2860625 - RNA, 23 nt, Human
auuuucauaacuuauugcugauu

SEQ ID NO: 2860626 - RNA, 17 nt, Human
auuuucagaaaauauua

SEQ ID NO: 2860627 - RNA, 14 nt, Human
auuuucagaaaaua

SEQ ID NO: 2860628 - RNA, 20 nt, Human
auuuucagguaguacuaaga

SEQ ID NO: 2860629 - RNA, 18 nt, Human
auuuucaguaauguuauu

SEQ ID NO: 2860630 - RNA, 22 nt, Human
auuuucaguaauguuauuuucu

SEQ ID NO: 2860631 - RNA, 16 nt, Human
auuuuccuacaggcag

SEQ ID NO: 2860632 - RNA, 17 nt, Human
auuuuccagggcaauca

SEQ ID NO: 2860633 - RNA, 22 nt, Human
auuuuccagggcaaucaauguu

SEQ ID NO: 2860634 - RNA, 17 nt, Human
auuuucauguauaugug

SEQ ID NO: 2860635 - RNA, 18 nt, Human
auuuucauguauaugugu

SEQ ID NO: 2860636 - RNA, 11 nt, Human
auuuucauguu

SEQ ID NO: 2860637 - RNA, 15 nt, Human
auuuucauuacaaug

SEQ ID NO: 2860638 - RNA, 16 nt, Human
auuuucauuacaaugg

SEQ ID NO: 2860639 - RNA, 18 nt, Human
auuuuauucaagaaugcc

SEQ ID NO: 2860640 - RNA, 19 nt, Human
auuuuagaacaauuuucuu

SEQ ID NO: 2860641 - RNA, 22 nt, Human
auuuucaaaagcauuaauuuuu

SEQ ID NO: 2860642 - RNA, 16 nt, Human
auuuuagaauaaauuc

SEQ ID NO: 2860643 - RNA, 21 nt, Human
auuuuagaaaccccucuguag

SEQ ID NO: 2860644 - RNA, 22 nt, Human
auuuuagauggaauaagagaaa

SEQ ID NO: 2860645 - RNA, 13 nt, Human
auuuucacuguag

SEQ ID NO: 2860646 - RNA, 22 nt, Human
auuuucaccccacccuuccccu

SEQ ID NO: 2860647 - RNA, 16 nt, Human
auuuucacccucugua

SEQ ID NO: 2860648 - RNA, 18 nt, Human
auuuucacccucuguacc

SEQ ID NO: 2860649 - RNA, 22 nt, Human
auuuucacauucccaucuguca

SEQ ID NO: 2860650 - RNA, 16 nt, Human
auuuucaccccacccu

SEQ ID NO: 2860651 - RNA, 15 nt, Human
auuuucaccccaccc

SEQ ID NO: 2860652 - RNA, 15 nt, Human
auuuucaaguagcug

SEQ ID NO: 2860653 - RNA, 15 nt, Human
auuuucacaauguca

SEQ ID NO: 2860654 - RNA, 20 nt, Human
auuuucacaaugucaguauu

SEQ ID NO: 2860655 - RNA, 18 nt, Human
auuuucaacgcagcccug

SEQ ID NO: 2860656 - RNA, 22 nt, Human
auuuucaaagcuuuuuccagag

SEQ ID NO: 2860657 - RNA, 13 nt, Human
auuuucaagaaac

SEQ ID NO: 2860658 - RNA, 20 nt, Human
auuuucaacgcagcccugcu

SEQ ID NO: 2860659 - RNA, 20 nt, Human
auuuucaagcagcaucuucu

SEQ ID NO: 2860660 - RNA, 21 nt, Human
auuuucaagcagcaucuucug

SEQ ID NO: 2860661 - RNA, 23 nt, Human
auuuucaagaaacugaggaauuu

SEQ ID NO: 2860662 - RNA, 22 nt, Human
auuuucaagaaacugaggaauu

SEQ ID NO: 2860663 - RNA, 17 nt, Human
auuuucaagaaacugag

SEQ ID NO: 2860664 - RNA, 16 nt, Human
auuuucaagaaacuga

SEQ ID NO: 2860665 - RNA, 14 nt, Human
auuuucaagaaacu

SEQ ID NO: 2860666 - RNA, 13 nt, Human
uuuucauuuucca

SEQ ID NO: 2860667 - RNA, 14 nt, Human
uuuucauuuuccaa

SEQ ID NO: 2860668 - RNA, 15 nt, Human
uuuucauuuuccaau

SEQ ID NO: 2860669 - RNA, 17 nt, Human
uuuucauuuuccaauac

SEQ ID NO: 2860670 - RNA, 12 nt, Human
uuuucuccagcu

SEQ ID NO: 2860671 - RNA, 13 nt, Human
uuuucuccagcuc

SEQ ID NO: 2860672 - RNA, 15 nt, Human
uuuuccaaaauaauu

SEQ ID NO: 2860673 - RNA, 16 nt, Human
uuuucaguuccaagaa

SEQ ID NO: 2860674 - RNA, 19 nt, Human
uuuucauauugugccaaua

SEQ ID NO: 2860675 - RNA, 13 nt, Human
uuuucauccccuu

SEQ ID NO: 2860676 - RNA, 15 nt, Human
uuuucaucuguuguu

SEQ ID NO: 2860677 - RNA, 19 nt, Human
uuuucuccucccaggaacu

SEQ ID NO: 2860678 - RNA, 14 nt, Human
uuuucuccucccag

SEQ ID NO: 2860679 - RNA, 13 nt, Human
uuuucuccuccca

SEQ ID NO: 2860680 - RNA, 13 nt, Human
uuuucugacuaau

SEQ ID NO: 2860681 - RNA, 23 nt, Human
uuuucuggggaaagacacugccu

SEQ ID NO: 2860682 - RNA, 21 nt, Human
uuuucuggguaggacuuuggu

SEQ ID NO: 2860683 - RNA, 13 nt, Human
uuuuauuaauuua

SEQ ID NO: 2860684 - RNA, 23 nt, Human
uuuuagguucuaaaguucuaaga

SEQ ID NO: 2860685 - RNA, 14 nt, Human
uuuuagguucuaaa

SEQ ID NO: 2860686 - RNA, 15 nt, Human
uuuuagguucuaaag

SEQ ID NO: 2860687 - RNA, 16 nt, Human
uuuuagguucuaaagu

SEQ ID NO: 2860688 - RNA, 18 nt, Human
uuuuagguucuaaaguuc

SEQ ID NO: 2860689 - RNA, 15 nt, Human
uuuuagguagaaaaa

SEQ ID NO: 2860690 - RNA, 23 nt, Human
uuuuaggucaagggcuuacuauu

SEQ ID NO: 2860691 - RNA, 12 nt, Human
uuuuagguucua

SEQ ID NO: 2860692 - RNA, 13 nt, Human
uuuuagguucuaa

SEQ ID NO: 2860693 - RNA, 20 nt, Human
uuuuaggccaaaaaaaugua

SEQ ID NO: 2860694 - RNA, 15 nt, Human
uuuuaggcacucuua

SEQ ID NO: 2860695 - RNA, 17 nt, Human
uuuuaggcacucuuaaa

SEQ ID NO: 2860696 - RNA, 14 nt, Human
uuuuauuuauaugu

SEQ ID NO: 2860697 - RNA, 15 nt, Human
uuuuauuuaugaagu

SEQ ID NO: 2860698 - RNA, 23 nt, Human
uuuuauuucagauuuugauaacu

SEQ ID NO: 2860699 - RNA, 14 nt, Human
uuuuauuucauugg

SEQ ID NO: 2860700 - RNA, 22 nt, Human
uuuuauuucauugguuaauuuu

SEQ ID NO: 2860701 - RNA, 14 nt, Human
uuuuauuuccauca

SEQ ID NO: 2860702 - RNA, 12 nt, Human
uuuuauuguuuu

SEQ ID NO: 2860703 - RNA, 14 nt, Human
uuuuauuguuuuca

SEQ ID NO: 2860704 - RNA, 15 nt, Human
uuuuauuguuuucua

SEQ ID NO: 2860705 - RNA, 11 nt, Human
uuuuauuuuac

SEQ ID NO: 2860706 - RNA, 15 nt, Human
uuuuauuuuacuauu

SEQ ID NO: 2860707 - RNA, 16 nt, Human
uuuucaguuguuuguu

SEQ ID NO: 2860708 - RNA, 22 nt, Human
uuuucaguuguuuguuuuugcu

SEQ ID NO: 2860709 - RNA, 20 nt, Human
uuuuauuuucacccucugua

SEQ ID NO: 2860710 - RNA, 14 nt, Human
uuuuauuuuauguu

SEQ ID NO: 2860711 - RNA, 16 nt, Human
uuuuauuuuauguuua

SEQ ID NO: 2860712 - RNA, 13 nt, Human
uuuucauauugug

SEQ ID NO: 2860713 - RNA, 14 nt, Human
uuuucauauugugc

SEQ ID NO: 2860714 - RNA, 16 nt, Human
uuuucauauugugcca

SEQ ID NO: 2860715 - RNA, 18 nt, Human
uuuucauacuuuuaccuu

SEQ ID NO: 2860716 - RNA, 13 nt, Human
uuuucauaacuua

SEQ ID NO: 2860717 - RNA, 15 nt, Human
uuuucauaacuuauu

SEQ ID NO: 2860718 - RNA, 21 nt, Human
uuuucauaacuuauugcugau

SEQ ID NO: 2860719 - RNA, 20 nt, Human
uuuucaguuucaauucagug

SEQ ID NO: 2860720 - RNA, 16 nt, Human
auguuuuccagcuccu

SEQ ID NO: 2860721 - RNA, 22 nt, Human
auguuuugguagauuaaauaua

SEQ ID NO: 2860722 - RNA, 20 nt, Human
auguuuaugcaaggaaggaa

SEQ ID NO: 2860723 - RNA, 18 nt, Human
auguuuaugcaaggaagg

SEQ ID NO: 2860724 - RNA, 22 nt, Human
auguuuaugcaaggaaggaaag

SEQ ID NO: 2860725 - RNA, 19 nt, Human
auguuuauaacuauucagu

SEQ ID NO: 2860726 - RNA, 15 nt, Human
auguuuauagcauuc

SEQ ID NO: 2860727 - RNA, 13 nt, Human
auguuuaugaaaa

SEQ ID NO: 2860728 - RNA, 15 nt, Human
auguuuaugaaaaua

SEQ ID NO: 2860729 - RNA, 18 nt, Human
auguuuaugaaaauaaau

SEQ ID NO: 2860730 - RNA, 19 nt, Human
auguuuaugaaaauaaaua

SEQ ID NO: 2860731 - RNA, 20 nt, Human
uuuucugucagaugagaaca

SEQ ID NO: 2860732 - RNA, 11 nt, Human
uuuucuguacu

SEQ ID NO: 2860733 - RNA, 14 nt, Human
uuuucuguagucau

SEQ ID NO: 2860734 - RNA, 16 nt, Human
uuuucuguagucauuu

SEQ ID NO: 2860735 - RNA, 18 nt, Human
uuuucuguagucauuuac

SEQ ID NO: 2860736 - RNA, 14 nt, Human
uuuucugguucuaa

SEQ ID NO: 2860737 - RNA, 15 nt, Human
uuuucugguucuaac

SEQ ID NO: 2860738 - RNA, 17 nt, Human
uuuucugguucuaacau

SEQ ID NO: 2860739 - RNA, 22 nt, Human
auguuguguuucuguucaccuu

SEQ ID NO: 2860740 - RNA, 17 nt, Human
auguuguuaaaauuaug

SEQ ID NO: 2860741 - RNA, 23 nt, Human
auguuguuagagaaaaaugcuuu

SEQ ID NO: 2860742 - RNA, 16 nt, Human
auguuguuaugcuauu

SEQ ID NO: 2860743 - RNA, 17 nt, Human
auguuguuaugcuauua

SEQ ID NO: 2860744 - RNA, 15 nt, Human
uuuucuguguaacca

SEQ ID NO: 2860745 - RNA, 21 nt, Human
uuuucuguguaaccauuuuau

SEQ ID NO: 2860746 - RNA, 22 nt, Human
uuuucuguguaaccauuuuaua

SEQ ID NO: 2860747 - RNA, 23 nt, Human
auguuguuuccuaauaucaaaug

SEQ ID NO: 2860748 - RNA, 21 nt, Human
auguuguguuucuguucaccu

SEQ ID NO: 2860749 - RNA, 16 nt, Human
auguuuuuaaaaguuu

SEQ ID NO: 2860750 - RNA, 18 nt, Human
auguuuuuaaaaguuuca

SEQ ID NO: 2860751 - RNA, 11 nt, Human
auguuuuggug

SEQ ID NO: 2860752 - RNA, 22 nt, Human
auuaaaacagcugcauuagaaa

SEQ ID NO: 2860753 - RNA, 13 nt, Human
auuaaaacauugg

SEQ ID NO: 2860754 - RNA, 14 nt, Human
auuaaaacauugga

SEQ ID NO: 2860755 - RNA, 14 nt, Human
auguuuugugacua

SEQ ID NO: 2860756 - RNA, 17 nt, Human
auguuuugugacuauau

SEQ ID NO: 2860757 - RNA, 14 nt, Human
auguuuuguauaca

SEQ ID NO: 2860758 - RNA, 15 nt, Human
auguuuuguauacaa

SEQ ID NO: 2860759 - RNA, 16 nt, Human
auguuuuguauacaaa

SEQ ID NO: 2860760 - RNA, 20 nt, Human
auguuuuguauacaaauaua

SEQ ID NO: 2860761 - RNA, 22 nt, Human
auguuuuguauacaaauauauu

SEQ ID NO: 2860762 - RNA, 21 nt, Human
auguuuugugacuauauagag

SEQ ID NO: 2860763 - RNA, 15 nt, Human
auguuuugugcauuu

SEQ ID NO: 2860764 - RNA, 16 nt, Human
auguuuugugcauuug

SEQ ID NO: 2860765 - RNA, 22 nt, Human
auguuuugugcauuuguaaaug

SEQ ID NO: 2860766 - RNA, 23 nt, Human
auguuuugugcauuuguaaaugc

SEQ ID NO: 2860767 - RNA, 19 nt, Human
auguuuugugacuauauag

SEQ ID NO: 2860768 - RNA, 13 nt, Human
auuaaaacucagc

SEQ ID NO: 2860769 - RNA, 15 nt, Human
auuaaaacucagccu

SEQ ID NO: 2860770 - RNA, 20 nt, Human
auuaaaacauuggauuaucc

SEQ ID NO: 2860771 - RNA, 13 nt, Human
auuaaaacuucuu

SEQ ID NO: 2860772 - RNA, 14 nt, Human
auuaaaacuucuua

SEQ ID NO: 2860773 - RNA, 20 nt, Human
auuaaaacuucuuaaauauc

SEQ ID NO: 2860774 - RNA, 21 nt, Human
auuaaaacuucuuaaauaucu

SEQ ID NO: 2860775 - RNA, 22 nt, Human
auuaaaacuucuuaaauaucuu

SEQ ID NO: 2860776 - RNA, 12 nt, Human
auuaaaacugcu

SEQ ID NO: 2860777 - RNA, 13 nt, Human
auuaaaacugcuu

SEQ ID NO: 2860778 - RNA, 14 nt, Human
auuaaaacugcuuu

SEQ ID NO: 2860779 - RNA, 16 nt, Human
auuaaaacugcuuuuu

SEQ ID NO: 2860780 - RNA, 12 nt, Human
auuaaacuuaug

SEQ ID NO: 2860781 - RNA, 13 nt, Human
auuaaacuuauga

SEQ ID NO: 2860782 - RNA, 14 nt, Human
auuaaacuuaugaa

SEQ ID NO: 2860783 - RNA, 15 nt, Human
auuaaacuuaugaau

SEQ ID NO: 2860784 - RNA, 16 nt, Human
auuaaacuuaugaaug

SEQ ID NO: 2860785 - RNA, 17 nt, Human
auuaaacuuaugaaugu

SEQ ID NO: 2860786 - RNA, 19 nt, Human
auuaaacugcgaagucaag

SEQ ID NO: 2860787 - RNA, 12 nt, Human
auuaaaccuguc

SEQ ID NO: 2860788 - RNA, 16 nt, Human
auuaaaccugucucca

SEQ ID NO: 2860789 - RNA, 20 nt, Human
auuaaaccugucuccacugu

SEQ ID NO: 2860790 - RNA, 22 nt, Human
auuaaaccugucuccacugugc

SEQ ID NO: 2860791 - RNA, 12 nt, Human
auguugcccagg

SEQ ID NO: 2860792 - RNA, 17 nt, Human
auguugcccaggcaggu

SEQ ID NO: 2860793 - RNA, 16 nt, Human
auguugcccaggcagg

SEQ ID NO: 2860794 - RNA, 16 nt, Human
auguugccauguguuu

SEQ ID NO: 2860795 - RNA, 20 nt, Human
auguugcccaggcaggucuu

SEQ ID NO: 2860796 - RNA, 18 nt, Human
auguugccauguguuuua

SEQ ID NO: 2860797 - RNA, 21 nt, Human
uuuuagcugaugaacuuauuc

SEQ ID NO: 2860798 - RNA, 22 nt, Human
uuuuagcugguggcaauaaaua

SEQ ID NO: 2860799 - RNA, 20 nt, Human
uuuuagcugaugaacuuauu

SEQ ID NO: 2860800 - RNA, 20 nt, Human
uuuuaggaaaaucacuuugu

SEQ ID NO: 2860801 - RNA, 12 nt, Human
uuuuaggaaagg

SEQ ID NO: 2860802 - RNA, 20 nt, Human
uuuuaggagcuaaggcucua

SEQ ID NO: 2860803 - RNA, 23 nt, Human
uuuuaggagcuaaggcucuauga

SEQ ID NO: 2860804 - RNA, 13 nt, Human
auguuaaggaaac

SEQ ID NO: 2860805 - RNA, 17 nt, Human
auguuaaggaaacucuu

SEQ ID NO: 2860806 - RNA, 21 nt, Human
auguuaagcagcuaaauuuuc

SEQ ID NO: 2860807 - RNA, 23 nt, Human
auguuaagcagcuaaauuuucug

SEQ ID NO: 2860808 - RNA, 13 nt, Human
auguguugugaua

SEQ ID NO: 2860809 - RNA, 14 nt, Human
auguguugugauag

SEQ ID NO: 2860810 - RNA, 15 nt, Human
auguguuuacuuuaa

SEQ ID NO: 2860811 - RNA, 14 nt, Human
auguguugaaaacc

SEQ ID NO: 2860812 - RNA, 16 nt, Human
auguguugaaaaccaa

SEQ ID NO: 2860813 - RNA, 18 nt, Human
auguguugaaaaccaaaa

SEQ ID NO: 2860814 - RNA, 22 nt, Human
auguguugaaaaccaaaaugac

SEQ ID NO: 2860815 - RNA, 14 nt, Human
auguguugaaacug

SEQ ID NO: 2860816 - RNA, 20 nt, Human
auguguucucggagugugua

SEQ ID NO: 2860817 - RNA, 22 nt, Human
auguguucccuuugucuuucaa

SEQ ID NO: 2860818 - RNA, 16 nt, Human
auguguuggacaaaug

SEQ ID NO: 2860819 - RNA, 17 nt, Human
auguguuggacaaaugu

SEQ ID NO: 2860820 - RNA, 20 nt, Human
auguguuggacaaaugugaa

SEQ ID NO: 2860821 - RNA, 22 nt, Human
auguguuggacaaaugugaaga

SEQ ID NO: 2860822 - RNA, 18 nt, Human
auguuaggaaaauuucac

SEQ ID NO: 2860823 - RNA, 20 nt, Human
auguuagcuccaaagcauuu

SEQ ID NO: 2860824 - RNA, 23 nt, Human
auguuagaggaucccucucugga

SEQ ID NO: 2860825 - RNA, 22 nt, Human
auguuagacucaugguguguua

SEQ ID NO: 2860826 - RNA, 24 nt, Human
auguuagacucaugguguguuaca

SEQ ID NO: 2860827 - RNA, 15 nt, Human
auguuagagacuuuu

SEQ ID NO: 2860828 - RNA, 12 nt, Human
auguuagagcac

SEQ ID NO: 2860829 - RNA, 23 nt, Human
auguucagaagguugcucuagau

SEQ ID NO: 2860830 - RNA, 19 nt, Human
auguuaggaaaauuucaca

SEQ ID NO: 2860831 - RNA, 12 nt, Human
augugugugugu

SEQ ID NO: 2860832 - RNA, 13 nt, Human
auguuaauuucau

SEQ ID NO: 2860833 - RNA, 14 nt, Human
auguuacuauuuuc

SEQ ID NO: 2860834 - RNA, 21 nt, Human
auguuacuauuuucuacaauu

SEQ ID NO: 2860835 - RNA, 23 nt, Human
auguuacuauuuucuacaauuaa

SEQ ID NO: 2860836 - RNA, 23 nt, Human
auguuaaggaaacucuuaucuca

SEQ ID NO: 2860837 - RNA, 18 nt, Human
auguuaaggaaacucuua

SEQ ID NO: 2860838 - RNA, 19 nt, Human
auguuaaggaaacucuuau

SEQ ID NO: 2860839 - RNA, 14 nt, Human
augugccugggugg

SEQ ID NO: 2860840 - RNA, 22 nt, Human
augugccagguuuuuggucuga

SEQ ID NO: 2860841 - RNA, 22 nt, Human
augugccccuucgcagcugaag

SEQ ID NO: 2860842 - RNA, 13 nt, Human
augugcccuccug

SEQ ID NO: 2860843 - RNA, 16 nt, Human
augugcccuccugagg

SEQ ID NO: 2860844 - RNA, 17 nt, Human
augugcccuccugaggg

SEQ ID NO: 2860845 - RNA, 18 nt, Human
augugcccuccugaggga

SEQ ID NO: 2860846 - RNA, 22 nt, Human
augugcccuccugagggaggac

SEQ ID NO: 2860847 - RNA, 12 nt, Human
uuuuaauaaacu

SEQ ID NO: 2860848 - RNA, 13 nt, Human
uuuuaauaaacua

SEQ ID NO: 2860849 - RNA, 15 nt, Human
uuuuaauaaacuacu

SEQ ID NO: 2860850 - RNA, 19 nt, Human
uuuuaauaaacuacucuuu

SEQ ID NO: 2860851 - RNA, 21 nt, Human
uuuuaauaaacuacucuuuga

SEQ ID NO: 2860852 - RNA, 21 nt, Human
auggggaggcaaguguggggg

SEQ ID NO: 2860853 - RNA, 16 nt, Human
uuuuaaguuguuugca

SEQ ID NO: 2860854 - RNA, 18 nt, Human
uuuuaaguuguuugcaug

SEQ ID NO: 2860855 - RNA, 12 nt, Human
auguggagccag

SEQ ID NO: 2860856 - RNA, 13 nt, Human
auguggagccagg

SEQ ID NO: 2860857 - RNA, 14 nt, Human
auguggagccaggc

SEQ ID NO: 2860858 - RNA, 15 nt, Human
auguggagccaggcg

SEQ ID NO: 2860859 - RNA, 16 nt, Human
auguggagccaggcgu

SEQ ID NO: 2860860 - RNA, 18 nt, Human
auguggccccugaacaag

SEQ ID NO: 2860861 - RNA, 18 nt, Human
auguggcaaggaaaaaca

SEQ ID NO: 2860862 - RNA, 17 nt, Human
auguggaauauaaagau

SEQ ID NO: 2860863 - RNA, 15 nt, Human
auguggaauauaaag

SEQ ID NO: 2860864 - RNA, 15 nt, Human
auguggaagaaaaug

SEQ ID NO: 2860865 - RNA, 21 nt, Human
auguggaagaaaaugguuuau

SEQ ID NO: 2860866 - RNA, 16 nt, Human
auguggccgaggacuu

SEQ ID NO: 2860867 - RNA, 17 nt, Human
auguggccgaggacuuu

SEQ ID NO: 2860868 - RNA, 18 nt, Human
auguggccgaggacuuug

SEQ ID NO: 2860869 - RNA, 19 nt, Human
auguggccuaaaaaugcaa

SEQ ID NO: 2860870 - RNA, 22 nt, Human
auguggccccugaacaagaauu

SEQ ID NO: 2860871 - RNA, 20 nt, Human
auguggccccugaacaagaa

SEQ ID NO: 2860872 - RNA, 12 nt, Human
augugugugugc

SEQ ID NO: 2860873 - RNA, 13 nt, Human
uuuuuauacaaaa

SEQ ID NO: 2860874 - RNA, 14 nt, Human
uuuuuagacaccuu

SEQ ID NO: 2860875 - RNA, 20 nt, Human
uuuuuauaaaaauaaauaga

SEQ ID NO: 2860876 - RNA, 23 nt, Human
uuuuuaguauuuauuuauguacu

SEQ ID NO: 2860877 - RNA, 21 nt, Human
uuuuuagugcauccaguuaac

SEQ ID NO: 2860878 - RNA, 13 nt, Human
uuuuuaguaaucu

SEQ ID NO: 2860879 - RNA, 15 nt, Human
uuuuuaguaaucugu

SEQ ID NO: 2860880 - RNA, 16 nt, Human
uuuuuaguaaucugua

SEQ ID NO: 2860881 - RNA, 20 nt, Human
uuuuuaguaaucuguacauu

SEQ ID NO: 2860882 - RNA, 20 nt, Human
uuuuuauacaaaccuaccaa

SEQ ID NO: 2860883 - RNA, 18 nt, Human
uuuuguuuggcaaggaaa

SEQ ID NO: 2860884 - RNA, 19 nt, Human
uuuuguuuggcaaggaaag

SEQ ID NO: 2860885 - RNA, 12 nt, Human
uuuuuacauuuu

SEQ ID NO: 2860886 - RNA, 12 nt, Human
uuuuguuugucu

SEQ ID NO: 2860887 - RNA, 14 nt, Human
uuuuguuugucucu

SEQ ID NO: 2860888 - RNA, 17 nt, Human
uuuuguuugucucuccu

SEQ ID NO: 2860889 - RNA, 20 nt, Human
uuuuguuugucucuccuuuu

SEQ ID NO: 2860890 - RNA, 14 nt, Human
uuuuguuuguuucu

SEQ ID NO: 2860891 - RNA, 16 nt, Human
uuuuguuuguuucuuu

SEQ ID NO: 2860892 - RNA, 21 nt, Human
uuuuguuuguuucuuuguguu

SEQ ID NO: 2860893 - RNA, 18 nt, Human
uuuuguuuguuuguuuau

SEQ ID NO: 2860894 - RNA, 22 nt, Human
uuuuuagacagagucucacugu

SEQ ID NO: 2860895 - RNA, 18 nt, Human
uuuuuacuguguuuuaua

SEQ ID NO: 2860896 - RNA, 11 nt, Human
uuuuuacugug

SEQ ID NO: 2860897 - RNA, 13 nt, Human
uuuuuacuguguu

SEQ ID NO: 2860898 - RNA, 17 nt, Human
uuuuuacucauugaaau

SEQ ID NO: 2860899 - RNA, 18 nt, Human
uuuuuacucauugaaaug

SEQ ID NO: 2860900 - RNA, 21 nt, Human
uuuuuacucauugaaauguca

SEQ ID NO: 2860901 - RNA, 23 nt, Human
uuuuuacucauugaaaugucacg

SEQ ID NO: 2860902 - RNA, 15 nt, Human
uuuuuaccugucaca

SEQ ID NO: 2860903 - RNA, 17 nt, Human
uuuuuaccugucacauu

SEQ ID NO: 2860904 - RNA, 21 nt, Human
uuuuuaccugucacauugcau

SEQ ID NO: 2860905 - RNA, 16 nt, Human
uuuugugauuuagaac

SEQ ID NO: 2860906 - RNA, 14 nt, Human
uuuuguuugaugca

SEQ ID NO: 2860907 - RNA, 20 nt, Human
uuuuguuugaugcaggcacu

SEQ ID NO: 2860908 - RNA, 16 nt, Human
uuuuguuuauuucauu

SEQ ID NO: 2860909 - RNA, 20 nt, Human
uuuugccauacaucaguuau

SEQ ID NO: 2860910 - RNA, 20 nt, Human
uuuuguuccaaugucaaugu

SEQ ID NO: 2860911 - RNA, 18 nt, Human
uuuuguuaucagucaaua

SEQ ID NO: 2860912 - RNA, 19 nt, Human
uuuugugauuuagaacugu

SEQ ID NO: 2860913 - RNA, 21 nt, Human
uuuugugcaaaagcuucaaau

SEQ ID NO: 2860914 - RNA, 22 nt, Human
uuuugugcaaaagcuucaaauu

SEQ ID NO: 2860915 - RNA, 17 nt, Human
uuuugccuucauuaccu

SEQ ID NO: 2860916 - RNA, 13 nt, Human
uuuugccuucauu

SEQ ID NO: 2860917 - RNA, 23 nt, Human
uuuugcuggaauuccuaacuuuu

SEQ ID NO: 2860918 - RNA, 21 nt, Human
uuuugugaugucccaacuugu

SEQ ID NO: 2860919 - RNA, 15 nt, Human
auuaagauuuuacaa

SEQ ID NO: 2860920 - RNA, 18 nt, Human
auuaagauuuuacaaaag

SEQ ID NO: 2860921 - RNA, 15 nt, Human
auuaagauuauuuua

SEQ ID NO: 2860922 - RNA, 16 nt, Human
uuuugaggcuucuguu

SEQ ID NO: 2860923 - RNA, 23 nt, Human
uuuugagguaaagauauggagaa

SEQ ID NO: 2860924 - RNA, 21 nt, Human
uuuugaguacggcuauagccu

SEQ ID NO: 2860925 - RNA, 16 nt, Human
uuuugaguagauauua

SEQ ID NO: 2860926 - RNA, 18 nt, Human
uuuugaguagauauuacu

SEQ ID NO: 2860927 - RNA, 19 nt, Human
uuuugaguagauauuacuu

SEQ ID NO: 2860928 - RNA, 22 nt, Human
uuuugaguagauauuacuuuau

SEQ ID NO: 2860929 - RNA, 23 nt, Human
uuuugaguagauauuacuuuauc

SEQ ID NO: 2860930 - RNA, 17 nt, Human
uuuugagacagaaucuc

SEQ ID NO: 2860931 - RNA, 17 nt, Human
uuuugagaacguaaaga

SEQ ID NO: 2860932 - RNA, 18 nt, Human
uuuugagaacguaaagaa

SEQ ID NO: 2860933 - RNA, 19 nt, Human
uuuugagaacguaaagaac

SEQ ID NO: 2860934 - RNA, 15 nt, Human
uuuugaggagcccca

SEQ ID NO: 2860935 - RNA, 14 nt, Human
uuuugaguucuaca

SEQ ID NO: 2860936 - RNA, 14 nt, Human
uuuugagugugugu

SEQ ID NO: 2860937 - RNA, 18 nt, Human
uuuugagugugugugugc

SEQ ID NO: 2860938 - RNA, 20 nt, Human
uuuugauaaaguuucucaga

SEQ ID NO: 2860939 - RNA, 19 nt, Human
uuuugauaaaguuucucag

SEQ ID NO: 2860940 - RNA, 21 nt, Human
uuuugauaaaguuucucagau

SEQ ID NO: 2860941 - RNA, 13 nt, Human
uuuugauaacaau

SEQ ID NO: 2860942 - RNA, 13 nt, Human
uuuugauaacugu

SEQ ID NO: 2860943 - RNA, 14 nt, Human
uuuugauaacuguu

SEQ ID NO: 2860944 - RNA, 18 nt, Human
uuuugauaauaaauugaa

SEQ ID NO: 2860945 - RNA, 18 nt, Human
uuuugauaauaauauugu

SEQ ID NO: 2860946 - RNA, 20 nt, Human
uuuugauaauaauauuguuu

SEQ ID NO: 2860947 - RNA, 17 nt, Human
uuuugauccaagcuggu

SEQ ID NO: 2860948 - RNA, 16 nt, Human
uuuugauaugaguaua

SEQ ID NO: 2860949 - RNA, 15 nt, Human
uuuugauagcuuuau

SEQ ID NO: 2860950 - RNA, 23 nt, Human
uuuugccauguuggccaggcugg

SEQ ID NO: 2860951 - RNA, 15 nt, Human
uuuugccucuuuucu

SEQ ID NO: 2860952 - RNA, 19 nt, Human
uuuugcauuugaauaaagc

SEQ ID NO: 2860953 - RNA, 22 nt, Human
uuuugccacuaauuuuaguauu

SEQ ID NO: 2860954 - RNA, 12 nt, Human
uuuugcacuuuu

SEQ ID NO: 2860955 - RNA, 13 nt, Human
uuuugcagaagag

SEQ ID NO: 2860956 - RNA, 21 nt, Human
uuuugcagcccagacaaaugu

SEQ ID NO: 2860957 - RNA, 15 nt, Human
uuuugauuuaugcau

SEQ ID NO: 2860958 - RNA, 20 nt, Human
uuuugauuuguacugaaaaa

SEQ ID NO: 2860959 - RNA, 12 nt, Human
uuuugauuaugu

SEQ ID NO: 2860960 - RNA, 22 nt, Human
uuuugauguuuguggccucaga

SEQ ID NO: 2860961 - RNA, 20 nt, Human
uuuugauguuuguggccuca

SEQ ID NO: 2860962 - RNA, 15 nt, Human
uuuugaugcagcauu

SEQ ID NO: 2860963 - RNA, 17 nt, Human
uuuugaugcagcauuug

SEQ ID NO: 2860964 - RNA, 20 nt, Human
uuuugaugcagcauuugaua

SEQ ID NO: 2860965 - RNA, 21 nt, Human
uuuugaugcagcauuugauaa

SEQ ID NO: 2860966 - RNA, 15 nt, Human
uuuugauguuugugg

SEQ ID NO: 2860967 - RNA, 20 nt, Human
uuuugaugacuggcauuuua

SEQ ID NO: 2860968 - RNA, 13 nt, Human
uuuugcaaauaua

SEQ ID NO: 2860969 - RNA, 18 nt, Human
uuuugcaaauauaaacau

SEQ ID NO: 2860970 - RNA, 19 nt, Human
uuuugcaaauauaaacauc

SEQ ID NO: 2860971 - RNA, 20 nt, Human
uuuugcaaauauaaacaucu

SEQ ID NO: 2860972 - RNA, 21 nt, Human
uuuugauuuguacugaaaaau

SEQ ID NO: 2860973 - RNA, 17 nt, Human
uuuugcaagguuccaca

SEQ ID NO: 2860974 - RNA, 21 nt, Human
uuuugcaagguuccacagagu

SEQ ID NO: 2860975 - RNA, 10 nt, Human
uuuugcacag

SEQ ID NO: 2860976 - RNA, 17 nt, Human
uuuugcaauggcuauau

SEQ ID NO: 2860977 - RNA, 23 nt, Human
auuaccagucuuuaaaggcccag

SEQ ID NO: 2860978 - RNA, 21 nt, Human
auuaccaguggcguuguugca

SEQ ID NO: 2860979 - RNA, 18 nt, Human
auuacccccuccuucaga

SEQ ID NO: 2860980 - RNA, 19 nt, Human
auuacccccuccuucagac

SEQ ID NO: 2860981 - RNA, 13 nt, Human
auuacccccuccu

SEQ ID NO: 2860982 - RNA, 15 nt, Human
auuaccauggagaca

SEQ ID NO: 2860983 - RNA, 13 nt, Human
auuaccauggaga

SEQ ID NO: 2860984 - RNA, 16 nt, Human
auuacauguaaaacau

SEQ ID NO: 2860985 - RNA, 19 nt, Human
auuacauguaaaacauuau

SEQ ID NO: 2860986 - RNA, 13 nt, Human
auuaauacuaaaa

SEQ ID NO: 2860987 - RNA, 16 nt, Human
auuaauacuaaaauau

SEQ ID NO: 2860988 - RNA, 20 nt, Human
auuaauacuaaaauaugucu

SEQ ID NO: 2860989 - RNA, 16 nt, Human
auuaauaaaaaaugga

SEQ ID NO: 2860990 - RNA, 22 nt, Human
auuaauaaaaaauggaaagaau

SEQ ID NO: 2860991 - RNA, 19 nt, Human
auuaauaaaaaauggaaag

SEQ ID NO: 2860992 - RNA, 13 nt, Human
auuaauaaauaga

SEQ ID NO: 2860993 - RNA, 17 nt, Human
auuaauaaauagagcaa

SEQ ID NO: 2860994 - RNA, 20 nt, Human
uuuuuguagagccagggucu

SEQ ID NO: 2860995 - RNA, 19 nt, Human
uuuuuguagagccaggguc

SEQ ID NO: 2860996 - RNA, 13 nt, Human
uuuuugucuuuuc

SEQ ID NO: 2860997 - RNA, 20 nt, Human
uuuuugugaaaaugucaaag

SEQ ID NO: 2860998 - RNA, 13 nt, Human
uuuuugugaagac

SEQ ID NO: 2860999 - RNA, 21 nt, Human
uuuuugugaagacggcacggu

SEQ ID NO: 2861000 - RNA, 12 nt, Human
uuuuugucauca

SEQ ID NO: 2861001 - RNA, 21 nt, Human
uuuuugucccccaacuugaga

SEQ ID NO: 2861002 - RNA, 13 nt, Human
uuuuugucucaau

SEQ ID NO: 2861003 - RNA, 17 nt, Human
uuuuugucaacauugug

SEQ ID NO: 2861004 - RNA, 12 nt, Human
uuuuuaugugau

SEQ ID NO: 2861005 - RNA, 16 nt, Human
uuuuuaugugaucaau

SEQ ID NO: 2861006 - RNA, 13 nt, Human
uuuuuaugaggca

SEQ ID NO: 2861007 - RNA, 20 nt, Human
uuuuuaugaggcaaccugau

SEQ ID NO: 2861008 - RNA, 14 nt, Human
uuuuuauuaauuua

SEQ ID NO: 2861009 - RNA, 13 nt, Human
uuuuuguaauuua

SEQ ID NO: 2861010 - RNA, 12 nt, Human
uuuuuauugcua

SEQ ID NO: 2861011 - RNA, 18 nt, Human
uuuuuauugcuaguauuu

SEQ ID NO: 2861012 - RNA, 22 nt, Human
uuuuuauugcuaguauuugaau

SEQ ID NO: 2861013 - RNA, 23 nt, Human
uuuuuauugaaucuauuuaagua

SEQ ID NO: 2861014 - RNA, 14 nt, Human
auuagaauuauuua

SEQ ID NO: 2861015 - RNA, 13 nt, Human
auuagugauauuu

SEQ ID NO: 2861016 - RNA, 16 nt, Human
auuagugauauuucuc

SEQ ID NO: 2861017 - RNA, 23 nt, Human
auuagugauauuucucuaguagu

SEQ ID NO: 2861018 - RNA, 19 nt, Human
auuacuuaucauccacauu

SEQ ID NO: 2861019 - RNA, 19 nt, Human
auuacccagcuaaauaauc

SEQ ID NO: 2861020 - RNA, 12 nt, Human
auuacuaauuuu

SEQ ID NO: 2861021 - RNA, 15 nt, Human
auuacuaauuuuaca

SEQ ID NO: 2861022 - RNA, 19 nt, Human
auuacuaauuuuacacauu

SEQ ID NO: 2861023 - RNA, 20 nt, Human
auuacuaauuuuacacauua

SEQ ID NO: 2861024 - RNA, 20 nt, Human
auuaccuuuuuugauaaagu

SEQ ID NO: 2861025 - RNA, 15 nt, Human
auuacgauaaggaag

SEQ ID NO: 2861026 - RNA, 17 nt, Human
auuacgauaaggaagaa

SEQ ID NO: 2861027 - RNA, 19 nt, Human
auuacgauaaggaagaaac

SEQ ID NO: 2861028 - RNA, 20 nt, Human
auuacgauaaggaagaaaca

SEQ ID NO: 2861029 - RNA, 20 nt, Human
auuacccccuccuucagaca

SEQ ID NO: 2861030 - RNA, 21 nt, Human
auuacccccuccuucagacac

SEQ ID NO: 2861031 - RNA, 22 nt, Human
auuaccuuuuaccagcuuuuaa

SEQ ID NO: 2861032 - RNA, 23 nt, Human
auuaccuuuuaccagcuuuuaac

SEQ ID NO: 2861033 - RNA, 14 nt, Human
auuacuccuauuuu

SEQ ID NO: 2861034 - RNA, 16 nt, Human
auuacuccuauuuuug

SEQ ID NO: 2861035 - RNA, 19 nt, Human
auuacuccuauuuuuguaa

SEQ ID NO: 2861036 - RNA, 20 nt, Human
auuacuccuauuuuuguaaa

SEQ ID NO: 2861037 - RNA, 21 nt, Human
auuacuccuauuuuuguaaac

SEQ ID NO: 2861038 - RNA, 18 nt, Human
auuacuaugacugcuccc

SEQ ID NO: 2861039 - RNA, 12 nt, Human
auuacuuaaaaa

SEQ ID NO: 2861040 - RNA, 15 nt, Human
auuacuuaucaucca

SEQ ID NO: 2861041 - RNA, 15 nt, Human
auuacuuauuuuuga

SEQ ID NO: 2861042 - RNA, 23 nt, Human
auuacuuaucauccacauuguuu

SEQ ID NO: 2861043 - RNA, 15 nt, Human
auuacuuaucccugc

SEQ ID NO: 2861044 - RNA, 18 nt, Human
auuacuuaucccugccca

SEQ ID NO: 2861045 - RNA, 19 nt, Human
auuacuuaucccugcccau

SEQ ID NO: 2861046 - RNA, 22 nt, Human
auuacuuaucccugcccauuuc

SEQ ID NO: 2861047 - RNA, 19 nt, Human
auuacuuauuuuugacagu

SEQ ID NO: 2861048 - RNA, 22 nt, Human
auuacuucacuauacaaacaaa

SEQ ID NO: 2861049 - RNA, 18 nt, Human
auuacuuauuuuugacag

SEQ ID NO: 2861050 - RNA, 17 nt, Human
auuacuuauuuuugaca

SEQ ID NO: 2861051 - RNA, 16 nt, Human
auuacuuauuuuugac

SEQ ID NO: 2861052 - RNA, 16 nt, Human
auuagugccagaauuu

SEQ ID NO: 2861053 - RNA, 18 nt, Human
auuagugccagaauuuua

SEQ ID NO: 2861054 - RNA, 19 nt, Human
auuagugccagaauuuuag

SEQ ID NO: 2861055 - RNA, 21 nt, Human
auuagugccagaauuuuagga

SEQ ID NO: 2861056 - RNA, 22 nt, Human
auuagugccagaauuuuaggaa

SEQ ID NO: 2861057 - RNA, 15 nt, Human
auuauaguuucaagc

SEQ ID NO: 2861058 - RNA, 16 nt, Human
auuauaguuucugagg

SEQ ID NO: 2861059 - RNA, 19 nt, Human
auuauaguuucugaggcuu

SEQ ID NO: 2861060 - RNA, 15 nt, Human
auuauaucaaaguau

SEQ ID NO: 2861061 - RNA, 18 nt, Human
auuauaucaaaguauuug

SEQ ID NO: 2861062 - RNA, 13 nt, Human
auucuccugccuc

SEQ ID NO: 2861063 - RNA, 14 nt, Human
auucuccugccuca

SEQ ID NO: 2861064 - RNA, 11 nt, Human
auucuccugcc

SEQ ID NO: 2861065 - RNA, 12 nt, Human
auucuccugccu

SEQ ID NO: 2861066 - RNA, 17 nt, Human
auucuccugccucagcc

SEQ ID NO: 2861067 - RNA, 15 nt, Human
auucuccugccucag

SEQ ID NO: 2861068 - RNA, 19 nt, Human
auucuccugccucagccuc

SEQ ID NO: 2861069 - RNA, 20 nt, Human
auucuccugccucagccucc

SEQ ID NO: 2861070 - RNA, 15 nt, Human
auucuccuggaugcu

SEQ ID NO: 2861071 - RNA, 19 nt, Human
auucuccuggaugcuuaga

SEQ ID NO: 2861072 - RNA, 22 nt, Human
auucuccugccuguagcaguga

SEQ ID NO: 2861073 - RNA, 13 nt, Human
auucuccugccuu

SEQ ID NO: 2861074 - RNA, 18 nt, Human
auucuccugccucagccu

SEQ ID NO: 2861075 - RNA, 21 nt, Human
auucucagggucucugcugcc

SEQ ID NO: 2861076 - RNA, 19 nt, Human
auucucagggucucugcug

SEQ ID NO: 2861077 - RNA, 20 nt, Human
auucucagggucucugcugc

SEQ ID NO: 2861078 - RNA, 16 nt, Human
auucucauaauuccua

SEQ ID NO: 2861079 - RNA, 17 nt, Human
auucucauaauuccuac

SEQ ID NO: 2861080 - RNA, 18 nt, Human
auucucauaauuccuaca

SEQ ID NO: 2861081 - RNA, 19 nt, Human
auucucauaauuccuacag

SEQ ID NO: 2861082 - RNA, 22 nt, Human
auucucauaauuccuacagcac

SEQ ID NO: 2861083 - RNA, 13 nt, Human
auucucaucugca

SEQ ID NO: 2861084 - RNA, 15 nt, Human
auucucaucugcacc

SEQ ID NO: 2861085 - RNA, 20 nt, Human
auucucaucugcacccuucu

SEQ ID NO: 2861086 - RNA, 21 nt, Human
auucucaucugcacccuucuu

SEQ ID NO: 2861087 - RNA, 22 nt, Human
auucucaucugcacccuucuuu

SEQ ID NO: 2861088 - RNA, 15 nt, Human
auucucaugccucag

SEQ ID NO: 2861089 - RNA, 14 nt, Human
auucucaugccuca

SEQ ID NO: 2861090 - RNA, 19 nt, Human
auucucaaaguuuccuaau

SEQ ID NO: 2861091 - RNA, 16 nt, Human
auucuauuuuagaaua

SEQ ID NO: 2861092 - RNA, 18 nt, Human
auucuauuuuagaauaaa

SEQ ID NO: 2861093 - RNA, 22 nt, Human
auucuauuuauauguacaugag

SEQ ID NO: 2861094 - RNA, 16 nt, Human
auucucagggucucug

SEQ ID NO: 2861095 - RNA, 13 nt, Human
auucucaggcacc

SEQ ID NO: 2861096 - RNA, 17 nt, Human
auucucagggucucugc

SEQ ID NO: 2861097 - RNA, 18 nt, Human
auucucagggucucugcu

SEQ ID NO: 2861098 - RNA, 22 nt, Human
auucucagggucucugcugccg

SEQ ID NO: 2861099 - RNA, 14 nt, Human
auucucagugccaa

SEQ ID NO: 2861100 - RNA, 15 nt, Human
auucucagugccaac

SEQ ID NO: 2861101 - RNA, 19 nt, Human
auucucagugccaacugug

SEQ ID NO: 2861102 - RNA, 22 nt, Human
auucucagugccaacuguggcu

SEQ ID NO: 2861103 - RNA, 24 nt, Human
auucucagugccaacuguggcugg

SEQ ID NO: 2861104 - RNA, 15 nt, Human
auucuauaaggccau

SEQ ID NO: 2861105 - RNA, 22 nt, Human
auucuaaaaugugauguucuaa

SEQ ID NO: 2861106 - RNA, 23 nt, Human
auucuaaaaugugauguucuaag

SEQ ID NO: 2861107 - RNA, 17 nt, Human
auucuaaacagacucau

SEQ ID NO: 2861108 - RNA, 19 nt, Human
auucuaaagagcacuuacu

SEQ ID NO: 2861109 - RNA, 23 nt, Human
auucuaaagagcacuuacuguaa

SEQ ID NO: 2861110 - RNA, 20 nt, Human
auucuaaaaugugauguucu

SEQ ID NO: 2861111 - RNA, 14 nt, Human
auucuaaagauucu

SEQ ID NO: 2861112 - RNA, 15 nt, Human
auucuaaagauucua

SEQ ID NO: 2861113 - RNA, 17 nt, Human
auucuaaagauucuaua

SEQ ID NO: 2861114 - RNA, 18 nt, Human
auucuaaagauucuauag

SEQ ID NO: 2861115 - RNA, 19 nt, Human
auucuaaagauucuauagu

SEQ ID NO: 2861116 - RNA, 20 nt, Human
auucuaaagauucuauaguu

SEQ ID NO: 2861117 - RNA, 22 nt, Human
auucuaaagauucuauaguucu

SEQ ID NO: 2861118 - RNA, 14 nt, Human
auucuaaaggucca

SEQ ID NO: 2861119 - RNA, 20 nt, Human
auucuauuuauauguacaug

SEQ ID NO: 2861120 - RNA, 14 nt, Human
auucuauuaacuuu

SEQ ID NO: 2861121 - RNA, 13 nt, Human
auucuauugccuu

SEQ ID NO: 2861122 - RNA, 18 nt, Human
auucuauugccuucuuug

SEQ ID NO: 2861123 - RNA, 19 nt, Human
auucuauugccuucuuuga

SEQ ID NO: 2861124 - RNA, 20 nt, Human
auucuauugccuucuuugaa

SEQ ID NO: 2861125 - RNA, 21 nt, Human
auucuauugccuucuuugaag

SEQ ID NO: 2861126 - RNA, 22 nt, Human
auucuauugccuucuuugaaga

SEQ ID NO: 2861127 - RNA, 23 nt, Human
auucuauugccuucuuugaagaa

SEQ ID NO: 2861128 - RNA, 15 nt, Human
auucuauuaaagugc

SEQ ID NO: 2861129 - RNA, 13 nt, Human
auucuauguguca

SEQ ID NO: 2861130 - RNA, 14 nt, Human
auucuaugugucau

SEQ ID NO: 2861131 - RNA, 23 nt, Human
auucuaugugucaucaauagugu

SEQ ID NO: 2861132 - RNA, 13 nt, Human
auucuauaugaau

SEQ ID NO: 2861133 - RNA, 14 nt, Human
auucuauaugaauu

SEQ ID NO: 2861134 - RNA, 16 nt, Human
auucuauaguucuaga

SEQ ID NO: 2861135 - RNA, 17 nt, Human
auucuauaguucuagac

SEQ ID NO: 2861136 - RNA, 16 nt, Human
auucccucucaucuca

SEQ ID NO: 2861137 - RNA, 13 nt, Human
auucuauaguucu

SEQ ID NO: 2861138 - RNA, 14 nt, Human
auucuauaguucua

SEQ ID NO: 2861139 - RNA, 15 nt, Human
auucuauaguucuag

SEQ ID NO: 2861140 - RNA, 23 nt, Human
auucuauaugaauuuaaauauaa

SEQ ID NO: 2861141 - RNA, 15 nt, Human
auucuauaugaauuu

SEQ ID NO: 2861142 - RNA, 16 nt, Human
auucuauaugaauuua

SEQ ID NO: 2861143 - RNA, 17 nt, Human
auucuauaugaauuuaa

SEQ ID NO: 2861144 - RNA, 19 nt, Human
auucuauaugaauuuaaau

SEQ ID NO: 2861145 - RNA, 15 nt, Human
auucccaagcucugc

SEQ ID NO: 2861146 - RNA, 14 nt, Human
auucccaagcucug

SEQ ID NO: 2861147 - RNA, 16 nt, Human
auucccaagcucugcu

SEQ ID NO: 2861148 - RNA, 14 nt, Human
auucuaaaaccauu

SEQ ID NO: 2861149 - RNA, 13 nt, Human
auuccagcucauu

SEQ ID NO: 2861150 - RNA, 16 nt, Human
auuccagcucauucau

SEQ ID NO: 2861151 - RNA, 19 nt, Human
auuccagcucauucauuuu

SEQ ID NO: 2861152 - RNA, 21 nt, Human
auuccagcucauucauuuuau

SEQ ID NO: 2861153 - RNA, 22 nt, Human
auuccaagaauagcaucuguac

SEQ ID NO: 2861154 - RNA, 18 nt, Human
auuccaaagucucuaauu

SEQ ID NO: 2861155 - RNA, 19 nt, Human
auuccaaagucucuaauuc

SEQ ID NO: 2861156 - RNA, 20 nt, Human
auuccaaaugucuuuuagaa

SEQ ID NO: 2861157 - RNA, 14 nt, Human
auuccaacagugag

SEQ ID NO: 2861158 - RNA, 15 nt, Human
auuccaacagugagu

SEQ ID NO: 2861159 - RNA, 14 nt, Human
auucccaagaaaug

SEQ ID NO: 2861160 - RNA, 15 nt, Human
auucccaagaaaugc

SEQ ID NO: 2861161 - RNA, 16 nt, Human
auucccaagaaaugcu

SEQ ID NO: 2861162 - RNA, 13 nt, Human
auuccauauuuau

SEQ ID NO: 2861163 - RNA, 17 nt, Human
auuccauauuuauucaa

SEQ ID NO: 2861164 - RNA, 15 nt, Human
auuccauccauaaau

SEQ ID NO: 2861165 - RNA, 16 nt, Human
auuccauauauccuuu

SEQ ID NO: 2861166 - RNA, 21 nt, Human
auuccauaucuugcgaaucca

SEQ ID NO: 2861167 - RNA, 22 nt, Human
auuccauaucuugcgaauccaa

SEQ ID NO: 2861168 - RNA, 23 nt, Human
auuccauaucuugcgaauccaag

SEQ ID NO: 2861169 - RNA, 20 nt, Human
auucagguauguugccuuua

SEQ ID NO: 2861170 - RNA, 18 nt, Human
auucagguauguugccuu

SEQ ID NO: 2861171 - RNA, 12 nt, Human
auucagucuugc

SEQ ID NO: 2861172 - RNA, 15 nt, Human
auucagucuugccuu

SEQ ID NO: 2861173 - RNA, 16 nt, Human
auucagucuugccuua

SEQ ID NO: 2861174 - RNA, 17 nt, Human
auucagucuugccuuac

SEQ ID NO: 2861175 - RNA, 16 nt, Human
auuccaaagucucuaa

SEQ ID NO: 2861176 - RNA, 15 nt, Human
auuccaaagcuuuau

SEQ ID NO: 2861177 - RNA, 21 nt, Human
auuccaaagcuuuauuaccag

SEQ ID NO: 2861178 - RNA, 23 nt, Human
auuccaaagcuuuauuaccagug

SEQ ID NO: 2861179 - RNA, 14 nt, Human
auuccaaaggggac

SEQ ID NO: 2861180 - RNA, 23 nt, Human
auucagguauguugccuuuaugg

SEQ ID NO: 2861181 - RNA, 18 nt, Human
auucaggugaaaauguuc

SEQ ID NO: 2861182 - RNA, 19 nt, Human
auucaggugaaaauguuca

SEQ ID NO: 2861183 - RNA, 17 nt, Human
auucaggugcagaggaa

SEQ ID NO: 2861184 - RNA, 18 nt, Human
auucaggugcagaggaag

SEQ ID NO: 2861185 - RNA, 13 nt, Human
auucaguauguuu

SEQ ID NO: 2861186 - RNA, 14 nt, Human
auucaguauguuuu

SEQ ID NO: 2861187 - RNA, 16 nt, Human
auucaguauguuuuac

SEQ ID NO: 2861188 - RNA, 22 nt, Human
auucaguauguuuuacacugua

SEQ ID NO: 2861189 - RNA, 18 nt, Human
auucagagaaaggcaagg

SEQ ID NO: 2861190 - RNA, 20 nt, Human
auucagagaaaggcaaggga

SEQ ID NO: 2861191 - RNA, 14 nt, Human
auucagagaauauc

SEQ ID NO: 2861192 - RNA, 16 nt, Human
auucagagaauaucaa

SEQ ID NO: 2861193 - RNA, 14 nt, Human
auucagagagcagc

SEQ ID NO: 2861194 - RNA, 13 nt, Human
auuauauagguug

SEQ ID NO: 2861195 - RNA, 20 nt, Human
auuauauagguugugcaaau

SEQ ID NO: 2861196 - RNA, 23 nt, Human
auuauauagguugugcaaauuaa

SEQ ID NO: 2861197 - RNA, 12 nt, Human
auuauauauaua

SEQ ID NO: 2861198 - RNA, 14 nt, Human
auuauauauauaau

SEQ ID NO: 2861199 - RNA, 16 nt, Human
auuauauauauaauau

SEQ ID NO: 2861200 - RNA, 17 nt, Human
auuauauauauaauaua

SEQ ID NO: 2861201 - RNA, 21 nt, Human
aagauuggugggauuuuuugu

SEQ ID NO: 2861202 - RNA, 21 nt, Human
aagauuguaauuaaaaugaua

SEQ ID NO: 2861203 - RNA, 14 nt, Human
aagauuguauugcu

SEQ ID NO: 2861204 - RNA, 16 nt, Human
aagauuguauugcugu

SEQ ID NO: 2861205 - RNA, 16 nt, Human
aagauugcuuaaaaua

SEQ ID NO: 2861206 - RNA, 20 nt, Human
aagauugugggggaaaaaua

SEQ ID NO: 2861207 - RNA, 18 nt, Human
aagauuuaucaaaucagu

SEQ ID NO: 2861208 - RNA, 16 nt, Human
aagauuuccuugugca

SEQ ID NO: 2861209 - RNA, 17 nt, Human
aagauuuccuugugcaa

SEQ ID NO: 2861210 - RNA, 17 nt, Human
aagauuucuaaauaaaa

SEQ ID NO: 2861211 - RNA, 18 nt, Human
aagauuucuaaauaaaag

SEQ ID NO: 2861212 - RNA, 14 nt, Human
aagauuuaucaaau

SEQ ID NO: 2861213 - RNA, 17 nt, Human
aagauuuaucaaaucag

SEQ ID NO: 2861214 - RNA, 12 nt, Human
aagauuuaagca

SEQ ID NO: 2861215 - RNA, 21 nt, Human
aagauuuaagcacaaacuuua

SEQ ID NO: 2861216 - RNA, 13 nt, Human
aagauuuagaaaa

SEQ ID NO: 2861217 - RNA, 21 nt, Human
aagauuuagaaaaaaguuuac

SEQ ID NO: 2861218 - RNA, 17 nt, Human
aagauuuggaauaaagu

SEQ ID NO: 2861219 - RNA, 12 nt, Human
aagaacauaaag

SEQ ID NO: 2861220 - RNA, 21 nt, Human
aagaacaauuguccauggucu

SEQ ID NO: 2861221 - RNA, 14 nt, Human
aagaacaagaauuu

SEQ ID NO: 2861222 - RNA, 16 nt, Human
aagaaauuugauuucu

SEQ ID NO: 2861223 - RNA, 16 nt, Human
aagaaauuuacuauau

SEQ ID NO: 2861224 - RNA, 15 nt, Human
aagaaauuuauuacu

SEQ ID NO: 2861225 - RNA, 18 nt, Human
aagaaauuuauuacuugu

SEQ ID NO: 2861226 - RNA, 13 nt, Human
aagaaauugcaau

SEQ ID NO: 2861227 - RNA, 16 nt, Human
aagaaauugcaauaac

SEQ ID NO: 2861228 - RNA, 14 nt, Human
aagaaauuucaggu

SEQ ID NO: 2861229 - RNA, 23 nt, Human
aagaaaugauguuggagaaggga

SEQ ID NO: 2861230 - RNA, 15 nt, Human
aagaaaugauguugg

SEQ ID NO: 2861231 - RNA, 20 nt, Human
aagaaaugcauaugucacua

SEQ ID NO: 2861232 - RNA, 18 nt, Human
aagaaauggauucuauuu

SEQ ID NO: 2861233 - RNA, 13 nt, Human
aagaaaugucuua

SEQ ID NO: 2861234 - RNA, 12 nt, Human
aagaaauguacc

SEQ ID NO: 2861235 - RNA, 16 nt, Human
aagaaauguaguugau

SEQ ID NO: 2861236 - RNA, 21 nt, Human
aagaaauguaguugauguauc

SEQ ID NO: 2861237 - RNA, 15 nt, Human
aagaaauuauaaaga

SEQ ID NO: 2861238 - RNA, 17 nt, Human
aagaaauuauaaagaua

SEQ ID NO: 2861239 - RNA, 13 nt, Human
aagccacuugaaa

SEQ ID NO: 2861240 - RNA, 18 nt, Human
aagccacuugaaauguua

SEQ ID NO: 2861241 - RNA, 16 nt, Human
aagcagggaauuucua

SEQ ID NO: 2861242 - RNA, 17 nt, Human
aagcagggaauuucuau

SEQ ID NO: 2861243 - RNA, 22 nt, Human
aagcagggaauuucuaucuaaa

SEQ ID NO: 2861244 - RNA, 21 nt, Human
aagccagcugcagcugggcug

SEQ ID NO: 2861245 - RNA, 17 nt, Human
aagcagcucuccccuca

SEQ ID NO: 2861246 - RNA, 13 nt, Human
aagcagcucuccc

SEQ ID NO: 2861247 - RNA, 14 nt, Human
aagcagcucucccc

SEQ ID NO: 2861248 - RNA, 21 nt, Human
aagcagcuuuaaacaaauuca

SEQ ID NO: 2861249 - RNA, 16 nt, Human
aagcagcuuuaaacaa

SEQ ID NO: 2861250 - RNA, 17 nt, Human
aagcagcuuuaaacaaa

SEQ ID NO: 2861251 - RNA, 23 nt, Human
aagcaggacuuugaggcaagugu

SEQ ID NO: 2861252 - RNA, 18 nt, Human
aagcaggagacgacaggc

SEQ ID NO: 2861253 - RNA, 16 nt, Human
aagcaggcuacacuga

SEQ ID NO: 2861254 - RNA, 22 nt, Human
aagcaggcuacacugacacugg

SEQ ID NO: 2861255 - RNA, 18 nt, Human
aagcaggcgcugugcuau

SEQ ID NO: 2861256 - RNA, 16 nt, Human
aagccauguauaaaug

SEQ ID NO: 2861257 - RNA, 18 nt, Human
aagccauguauaaaugug

SEQ ID NO: 2861258 - RNA, 20 nt, Human
aagccauguauaaaugugau

SEQ ID NO: 2861259 - RNA, 21 nt, Human
aagccauguauaaaugugaua

SEQ ID NO: 2861260 - RNA, 21 nt, Human
aagcgugcacaaggauugaaa

SEQ ID NO: 2861261 - RNA, 23 nt, Human
aagcgugcacaaggauugaaaau

SEQ ID NO: 2861262 - RNA, 11 nt, Human
aagcugcagcu

SEQ ID NO: 2861263 - RNA, 12 nt, Human
aagcugcagcuu

SEQ ID NO: 2861264 - RNA, 13 nt, Human
aagcugcagcuuc

SEQ ID NO: 2861265 - RNA, 14 nt, Human
aagcugcagcuucc

SEQ ID NO: 2861266 - RNA, 15 nt, Human
aagcugcagcuuccu

SEQ ID NO: 2861267 - RNA, 16 nt, Human
aagcugcagcuuccug

SEQ ID NO: 2861268 - RNA, 17 nt, Human
aagcugcagcuuccugu

SEQ ID NO: 2861269 - RNA, 18 nt, Human
aagcugcagcuuccuguc

SEQ ID NO: 2861270 - RNA, 14 nt, Human
aagcugccuguagu

SEQ ID NO: 2861271 - RNA, 17 nt, Human
aagcuaagaugggugga

SEQ ID NO: 2861272 - RNA, 18 nt, Human
aaggacauugcggacagc

SEQ ID NO: 2861273 - RNA, 13 nt, Human
aaggaccaggacu

SEQ ID NO: 2861274 - RNA, 12 nt, Human
aaggaccaggac

SEQ ID NO: 2861275 - RNA, 14 nt, Human
aaggaccagcccuu

SEQ ID NO: 2861276 - RNA, 20 nt, Human
aaggaccagcccuugaggga

SEQ ID NO: 2861277 - RNA, 14 nt, Human
aagcuggccugaga

SEQ ID NO: 2861278 - RNA, 12 nt, Human
aagcuggcuggg

SEQ ID NO: 2861279 - RNA, 15 nt, Human
aagcuggcuggggug

SEQ ID NO: 2861280 - RNA, 20 nt, Human
aagcuggcugggguggccug

SEQ ID NO: 2861281 - RNA, 23 nt, Human
aagcuggcugggguggccugugu

SEQ ID NO: 2861282 - RNA, 15 nt, Human
aaggacauucuugua

SEQ ID NO: 2861283 - RNA, 21 nt, Human
aagcuggccgaggguccuggc

SEQ ID NO: 2861284 - RNA, 22 nt, Human
aagcuggccgaggguccuggcu

SEQ ID NO: 2861285 - RNA, 12 nt, Human
aagcuggccucu

SEQ ID NO: 2861286 - RNA, 22 nt, Human
aagcuggccucuaccacaaggg

SEQ ID NO: 2861287 - RNA, 13 nt, Human
aagcuggccugag

SEQ ID NO: 2861288 - RNA, 21 nt, Human
aagcugccuguaguuaggaaa

SEQ ID NO: 2861289 - RNA, 19 nt, Human
aagcugccuguaguuagga

SEQ ID NO: 2861290 - RNA, 16 nt, Human
aagcugccuguaguua

SEQ ID NO: 2861291 - RNA, 15 nt, Human
aagcugccuguaguu

SEQ ID NO: 2861292 - RNA, 22 nt, Human
aagcugccuguaguuaggaaau

SEQ ID NO: 2861293 - RNA, 16 nt, Human
aagcugcuccaggccu

SEQ ID NO: 2861294 - RNA, 17 nt, Human
aagcugcuccaggccug

SEQ ID NO: 2861295 - RNA, 15 nt, Human
aaggauuuuuuaaag

SEQ ID NO: 2861296 - RNA, 21 nt, Human
aaggauuuuuuaaaguuuuuu

SEQ ID NO: 2861297 - RNA, 13 nt, Human
aaggacugaggga

SEQ ID NO: 2861298 - RNA, 17 nt, Human
aaggacugagggacucu

SEQ ID NO: 2861299 - RNA, 23 nt, Human
aaggacugcgggacuugggucuc

SEQ ID NO: 2861300 - RNA, 14 nt, Human
aaggacuguaaucu

SEQ ID NO: 2861301 - RNA, 23 nt, Human
aaggacucugguuucucauucuu

SEQ ID NO: 2861302 - RNA, 20 nt, Human
aaggacuaggguccugggga

SEQ ID NO: 2861303 - RNA, 18 nt, Human
aaggacuaggguccuggg

SEQ ID NO: 2861304 - RNA, 18 nt, Human
aaggacccggaggggccu

SEQ ID NO: 2861305 - RNA, 15 nt, Human
aaggacuaggguccu

SEQ ID NO: 2861306 - RNA, 14 nt, Human
aaggcaaaaaugua

SEQ ID NO: 2861307 - RNA, 15 nt, Human
aaggcaaguuaagag

SEQ ID NO: 2861308 - RNA, 17 nt, Human
aaggcaaguuaagagaa

SEQ ID NO: 2861309 - RNA, 19 nt, Human
aaggcaaguuaagagaaac

SEQ ID NO: 2861310 - RNA, 21 nt, Human
aaggcaaguuaagagaaacuu

SEQ ID NO: 2861311 - RNA, 22 nt, Human
aaggcaaugccauccucaaaca

SEQ ID NO: 2861312 - RNA, 15 nt, Human
aaggcacaauauggg

SEQ ID NO: 2861313 - RNA, 14 nt, Human
aauaaucuuugggu

SEQ ID NO: 2861314 - RNA, 15 nt, Human
aauaaucacauugac

SEQ ID NO: 2861315 - RNA, 17 nt, Human
aauaaucacauugacuu

SEQ ID NO: 2861316 - RNA, 21 nt, Human
aauaauaaaagauucaccuga

SEQ ID NO: 2861317 - RNA, 13 nt, Human
aauaauauuguuu

SEQ ID NO: 2861318 - RNA, 16 nt, Human
aauaauauuguuuuuc

SEQ ID NO: 2861319 - RNA, 17 nt, Human
aauaauauuguuuuucu

SEQ ID NO: 2861320 - RNA, 21 nt, Human
aauaauauuguuuuucuuucu

SEQ ID NO: 2861321 - RNA, 22 nt, Human
aauaauauuguuuuucuuucua

SEQ ID NO: 2861322 - RNA, 16 nt, Human
aauaauguaauuguaa

SEQ ID NO: 2861323 - RNA, 19 nt, Human
aauaauguacaucuggccu

SEQ ID NO: 2861324 - RNA, 11 nt, Human
aauaaugcugc

SEQ ID NO: 2861325 - RNA, 12 nt, Human
aauaaugcugca

SEQ ID NO: 2861326 - RNA, 14 nt, Human
aauaaugcuucaga

SEQ ID NO: 2861327 - RNA, 16 nt, Human
aauaaugagcuauuaa

SEQ ID NO: 2861328 - RNA, 20 nt, Human
aauaaugagcuauuaaaacu

SEQ ID NO: 2861329 - RNA, 21 nt, Human
aauaaugagcuauuaaaacuc

SEQ ID NO: 2861330 - RNA, 22 nt, Human
aauaaugagcuauuaaaacuca

SEQ ID NO: 2861331 - RNA, 23 nt, Human
aauaaugcauccagcaguacaau

SEQ ID NO: 2861332 - RNA, 20 nt, Human
aauaaugggcuuagagcagu

SEQ ID NO: 2861333 - RNA, 18 nt, Human
aauaauggguuucuuuca

SEQ ID NO: 2861334 - RNA, 19 nt, Human
aauaaugggcuuagagcag

SEQ ID NO: 2861335 - RNA, 15 nt, Human
aauaauggaaaaaaa

SEQ ID NO: 2861336 - RNA, 22 nt, Human
aauaauggaaaaaaaaaaaaga

SEQ ID NO: 2861337 - RNA, 23 nt, Human
aauaauggaaaaaaaaaaaagag

SEQ ID NO: 2861338 - RNA, 14 nt, Human
aaguuguucaacua

SEQ ID NO: 2861339 - RNA, 18 nt, Human
aaguugugccuuuuauag

SEQ ID NO: 2861340 - RNA, 16 nt, Human
aaguuguggauuucag

SEQ ID NO: 2861341 - RNA, 18 nt, Human
aaguuguggauuucaguu

SEQ ID NO: 2861342 - RNA, 19 nt, Human
aaguuguggauuucaguuu

SEQ ID NO: 2861343 - RNA, 19 nt, Human
aaguugugccuuuuauagc

SEQ ID NO: 2861344 - RNA, 20 nt, Human
aaguugugccuuuuauagcu

SEQ ID NO: 2861345 - RNA, 20 nt, Human
aaguggguuauucuggaguu

SEQ ID NO: 2861346 - RNA, 19 nt, Human
aauaaaaugaggacauguu

SEQ ID NO: 2861347 - RNA, 13 nt, Human
aauaaaauguuua

SEQ ID NO: 2861348 - RNA, 14 nt, Human
aauaaaauuauuug

SEQ ID NO: 2861349 - RNA, 16 nt, Human
aauaaaauuauuugca

SEQ ID NO: 2861350 - RNA, 17 nt, Human
aauaaaauuauuugcag

SEQ ID NO: 2861351 - RNA, 19 nt, Human
aauaaaauuauuugcaggu

SEQ ID NO: 2861352 - RNA, 23 nt, Human
aauaaaauuaaagcugaaaacug

SEQ ID NO: 2861353 - RNA, 14 nt, Human
aauaaacuacucuu

SEQ ID NO: 2861354 - RNA, 17 nt, Human
aauaaacuacucuuuga

SEQ ID NO: 2861355 - RNA, 19 nt, Human
aauaaacuacucuuugauu

SEQ ID NO: 2861356 - RNA, 20 nt, Human
aauaaacuacucuuugauuu

SEQ ID NO: 2861357 - RNA, 17 nt, Human
aauaagugguuauuucu

SEQ ID NO: 2861358 - RNA, 15 nt, Human
aauaaacucuaaaca

SEQ ID NO: 2861359 - RNA, 17 nt, Human
aauaaacuguguuuacu

SEQ ID NO: 2861360 - RNA, 16 nt, Human
aauaaacuuaacuuua

SEQ ID NO: 2861361 - RNA, 22 nt, Human
aagugcugggauuacaggugug

SEQ ID NO: 2861362 - RNA, 14 nt, Human
aagucucugugaau

SEQ ID NO: 2861363 - RNA, 12 nt, Human
aagucucuguga

SEQ ID NO: 2861364 - RNA, 11 nt, Human
aagucucugug

SEQ ID NO: 2861365 - RNA, 21 nt, Human
aagucucugcuggcccagcca

SEQ ID NO: 2861366 - RNA, 16 nt, Human
aagucucugcuggccc

SEQ ID NO: 2861367 - RNA, 17 nt, Human
aagucucuagguucuga

SEQ ID NO: 2861368 - RNA, 15 nt, Human
aagucucuaauucua

SEQ ID NO: 2861369 - RNA, 18 nt, Human
aagucucuaauucuauua

SEQ ID NO: 2861370 - RNA, 15 nt, Human
aagucucugcuggcc

SEQ ID NO: 2861371 - RNA, 19 nt, Human
aagucucccuucuguuucu

SEQ ID NO: 2861372 - RNA, 19 nt, Human
aagucccugacucucugug

SEQ ID NO: 2861373 - RNA, 22 nt, Human
aagucccccaagaccuaagggu

SEQ ID NO: 2861374 - RNA, 13 nt, Human
aaguauguaaaca

SEQ ID NO: 2861375 - RNA, 17 nt, Human
aaguaugagggaaaaug

SEQ ID NO: 2861376 - RNA, 21 nt, Human
aaguaugagggaaaaugagua

SEQ ID NO: 2861377 - RNA, 18 nt, Human
aaguaucuuuuuucaaaa

SEQ ID NO: 2861378 - RNA, 18 nt, Human
aaguauguguaaaaugug

SEQ ID NO: 2861379 - RNA, 21 nt, Human
aaguauguaaacaggagacag

SEQ ID NO: 2861380 - RNA, 12 nt, Human
aaguauguaaag

SEQ ID NO: 2861381 - RNA, 22 nt, Human
aaguauguaaaguauguaaaca

SEQ ID NO: 2861382 - RNA, 11 nt, Human
aaguacuucuu

SEQ ID NO: 2861383 - RNA, 14 nt, Human
aaguacuugagugu

SEQ ID NO: 2861384 - RNA, 21 nt, Human
aaguacuugaguguaauguuu

SEQ ID NO: 2861385 - RNA, 22 nt, Human
aaguacuugaguguaauguuug

SEQ ID NO: 2861386 - RNA, 22 nt, Human
aaguauagccuauggcagaaaa

SEQ ID NO: 2861387 - RNA, 18 nt, Human
aaguauauaaauuggcuu

SEQ ID NO: 2861388 - RNA, 13 nt, Human
aaguauagagaga

SEQ ID NO: 2861389 - RNA, 14 nt, Human
aaguauagagagaa

SEQ ID NO: 2861390 - RNA, 17 nt, Human
aaguauagagagaaguu

SEQ ID NO: 2861391 - RNA, 23 nt, Human
aaguauagagagaaguucauaca

SEQ ID NO: 2861392 - RNA, 23 nt, Human
aaguauaucauguaaagaaaugu

SEQ ID NO: 2861393 - RNA, 16 nt, Human
aaguauauauagaauc

SEQ ID NO: 2861394 - RNA, 11 nt, Human
aaguauauaua

SEQ ID NO: 2861395 - RNA, 17 nt, Human
aagguucuucaucccuu

SEQ ID NO: 2861396 - RNA, 19 nt, Human
aagguucuucaucccuuuc

SEQ ID NO: 2861397 - RNA, 20 nt, Human
aagguucuucaucccuuucc

SEQ ID NO: 2861398 - RNA, 16 nt, Human
aagguguuuucugugu

SEQ ID NO: 2861399 - RNA, 17 nt, Human
aagguguuuucugugua

SEQ ID NO: 2861400 - RNA, 18 nt, Human
aagguguuuucuguguaa

SEQ ID NO: 2861401 - RNA, 19 nt, Human
aagguguuuucuguguaac

SEQ ID NO: 2861402 - RNA, 20 nt, Human
aagguuuaaagagucuagau

SEQ ID NO: 2861403 - RNA, 21 nt, Human
aagguuuaaagagucuagauu

SEQ ID NO: 2861404 - RNA, 16 nt, Human
aagguugggcagggug

SEQ ID NO: 2861405 - RNA, 21 nt, Human
aagguugcauacugagccaag

SEQ ID NO: 2861406 - RNA, 18 nt, Human
aaggugggcugagcccug

SEQ ID NO: 2861407 - RNA, 22 nt, Human
aagguggauuuuguuuaaaaaa

SEQ ID NO: 2861408 - RNA, 14 nt, Human
aagguggauuuugu

SEQ ID NO: 2861409 - RNA, 16 nt, Human
aaggugggcugagccc

SEQ ID NO: 2861410 - RNA, 16 nt, Human
aagguggaccuuuuaa

SEQ ID NO: 2861411 - RNA, 19 nt, Human
aagguggaccuuuuaaagu

SEQ ID NO: 2861412 - RNA, 22 nt, Human
aagguggaccuuuuaaaguguu

SEQ ID NO: 2861413 - RNA, 23 nt, Human
aagguggaccuuuuaaaguguuu

SEQ ID NO: 2861414 - RNA, 15 nt, Human
aaggugcuggaggug

SEQ ID NO: 2861415 - RNA, 20 nt, Human
aaggugcuggaggugggagc

SEQ ID NO: 2861416 - RNA, 18 nt, Human
aaugauaaguaaaugcua

SEQ ID NO: 2861417 - RNA, 21 nt, Human
aaugauaaguaaaugcuaggu

SEQ ID NO: 2861418 - RNA, 13 nt, Human
aaugaacauucca

SEQ ID NO: 2861419 - RNA, 20 nt, Human
aaugaucugccucuaaaagc

SEQ ID NO: 2861420 - RNA, 23 nt, Human
aaugaaccacaucuugcucugcu

SEQ ID NO: 2861421 - RNA, 17 nt, Human
aaugaaccacaucuugc

SEQ ID NO: 2861422 - RNA, 16 nt, Human
aaugaaccacaucuug

SEQ ID NO: 2861423 - RNA, 15 nt, Human
aaucuggaagaaaaa

SEQ ID NO: 2861424 - RNA, 14 nt, Human
aaucccaaaaguca

SEQ ID NO: 2861425 - RNA, 14 nt, Human
aaucugcucacuuu

SEQ ID NO: 2861426 - RNA, 20 nt, Human
aaucugcucacuuuaaaccu

SEQ ID NO: 2861427 - RNA, 12 nt, Human
aaucucauuugg

SEQ ID NO: 2861428 - RNA, 23 nt, Human
aaucucauagguugccaauaaua

SEQ ID NO: 2861429 - RNA, 19 nt, Human
aaucugcaauucaaaaguu

SEQ ID NO: 2861430 - RNA, 15 nt, Human
aaucugcaauucaaa

SEQ ID NO: 2861431 - RNA, 18 nt, Human
aauccaggguggugguga

SEQ ID NO: 2861432 - RNA, 16 nt, Human
aaucccaaauuugauu

SEQ ID NO: 2861433 - RNA, 11 nt, Human
aaucccaaauu

SEQ ID NO: 2861434 - RNA, 19 nt, Human
aauccagguacgcacagac

SEQ ID NO: 2861435 - RNA, 20 nt, Human
aauccagguacgcacagaca

SEQ ID NO: 2861436 - RNA, 21 nt, Human
aauccagguacgcacagacag

SEQ ID NO: 2861437 - RNA, 22 nt, Human
aauccagguacgcacagacagg

SEQ ID NO: 2861438 - RNA, 18 nt, Human
aaucccaaauuugauuga

SEQ ID NO: 2861439 - RNA, 16 nt, Human
aaucucauaccucuga

SEQ ID NO: 2861440 - RNA, 18 nt, Human
aaucucauaccucugacc

SEQ ID NO: 2861441 - RNA, 19 nt, Human
aaucucauaccucugacca

SEQ ID NO: 2861442 - RNA, 22 nt, Human
aaucucauaccucugaccaaca

SEQ ID NO: 2861443 - RNA, 13 nt, Human
aaucugauuuuua

SEQ ID NO: 2861444 - RNA, 23 nt, Human
aaucugauuuuuaugaugaugaa

SEQ ID NO: 2861445 - RNA, 15 nt, Human
aaugaugaguauuag

SEQ ID NO: 2861446 - RNA, 12 nt, Human
aaugaugauaac

SEQ ID NO: 2861447 - RNA, 16 nt, Human
aaugaucucuucuuuu

SEQ ID NO: 2861448 - RNA, 21 nt, Human
aaugaugaucaauuauaguuu

SEQ ID NO: 2861449 - RNA, 23 nt, Human
aaugaugaucaauuauaguuucu

SEQ ID NO: 2861450 - RNA, 15 nt, Human
aaucacaauuuuuaa

SEQ ID NO: 2861451 - RNA, 17 nt, Human
aaucacaauuuuuaaug

SEQ ID NO: 2861452 - RNA, 16 nt, Human
aaucaauuuuuaggaa

SEQ ID NO: 2861453 - RNA, 14 nt, Human
aaucacaaaaauuu

SEQ ID NO: 2861454 - RNA, 15 nt, Human
aaucacaguuggccu

SEQ ID NO: 2861455 - RNA, 14 nt, Human
aauauuauguguuu

SEQ ID NO: 2861456 - RNA, 16 nt, Human
aaucaacacuaccagc

SEQ ID NO: 2861457 - RNA, 12 nt, Human
aaucaacagaag

SEQ ID NO: 2861458 - RNA, 13 nt, Human
aaucaacagaagc

SEQ ID NO: 2861459 - RNA, 14 nt, Human
aaucaacagaagca

SEQ ID NO: 2861460 - RNA, 15 nt, Human
aaucaacagaagcau

SEQ ID NO: 2861461 - RNA, 16 nt, Human
aaucaacagaagcauu

SEQ ID NO: 2861462 - RNA, 16 nt, Human
aauauucacugggcca

SEQ ID NO: 2861463 - RNA, 17 nt, Human
aauauucacugggccaa

SEQ ID NO: 2861464 - RNA, 15 nt, Human
aauauucagaaucuu

SEQ ID NO: 2861465 - RNA, 21 nt, Human
aauauucagaaucuuuguuaa

SEQ ID NO: 2861466 - RNA, 14 nt, Human
aauauguauuguaa

SEQ ID NO: 2861467 - RNA, 15 nt, Human
aauauguauuguaaa

SEQ ID NO: 2861468 - RNA, 16 nt, Human
aauaugguugauaguu

SEQ ID NO: 2861469 - RNA, 14 nt, Human
aauauggauuuguu

SEQ ID NO: 2861470 - RNA, 13 nt, Human
aauauaggucucu

SEQ ID NO: 2861471 - RNA, 23 nt, Human
aauauaggucucuucucccagaa

SEQ ID NO: 2861472 - RNA, 15 nt, Human
aauauaguuccuaag

SEQ ID NO: 2861473 - RNA, 18 nt, Human
aauauaguuccuaagaag

SEQ ID NO: 2861474 - RNA, 20 nt, Human
aauauaguuccuaagaagcu

SEQ ID NO: 2861475 - RNA, 21 nt, Human
aauauaguuccuaagaagcuu

SEQ ID NO: 2861476 - RNA, 12 nt, Human
aauauauaaaaa

SEQ ID NO: 2861477 - RNA, 17 nt, Human
aauauggacacuuaaua

SEQ ID NO: 2861478 - RNA, 17 nt, Human
aauauggacucaguuuu

SEQ ID NO: 2861479 - RNA, 21 nt, Human
aauauggacacuuaauacuac

SEQ ID NO: 2861480 - RNA, 13 nt, Human
aauauaauucugu

SEQ ID NO: 2861481 - RNA, 15 nt, Human
aauauaauucuguaa

SEQ ID NO: 2861482 - RNA, 16 nt, Human
aauauaauucuguaaa

SEQ ID NO: 2861483 - RNA, 19 nt, Human
aauauaauggaagagaaau

SEQ ID NO: 2861484 - RNA, 23 nt, Human
aauauaauggaagagaaaucuca

SEQ ID NO: 2861485 - RNA, 13 nt, Human
aauauaagauuuu

SEQ ID NO: 2861486 - RNA, 21 nt, Human
aauauaacuuaaaaauguaaa

SEQ ID NO: 2861487 - RNA, 14 nt, Human
aaugggaacauuua

SEQ ID NO: 2861488 - RNA, 15 nt, Human
aaugggaacauuuau

SEQ ID NO: 2861489 - RNA, 23 nt, Human
aaugggaacauuuauuuuaugag

SEQ ID NO: 2861490 - RNA, 21 nt, Human
aauggcuuauccagcugguga

SEQ ID NO: 2861491 - RNA, 22 nt, Human
aauggcuuauccagcuggugag

SEQ ID NO: 2861492 - RNA, 20 nt, Human
aaugggccacugaaaucugu

SEQ ID NO: 2861493 - RNA, 15 nt, Human
aaugggcucuuccaa

SEQ ID NO: 2861494 - RNA, 20 nt, Human
aaugggcucuuccaacaagg

SEQ ID NO: 2861495 - RNA, 17 nt, Human
aaugggcuuagagcagu

SEQ ID NO: 2861496 - RNA, 16 nt, Human
aaugguauaaauuuca

SEQ ID NO: 2861497 - RNA, 23 nt, Human
aaugguaguaaucacaguuggcc

SEQ ID NO: 2861498 - RNA, 18 nt, Human
aaugguaggcauuuccua

SEQ ID NO: 2861499 - RNA, 17 nt, Human
aaugguaggcauuuccu

SEQ ID NO: 2861500 - RNA, 16 nt, Human
aauggucgcccaggag

SEQ ID NO: 2861501 - RNA, 18 nt, Human
aauggucuaaaaauaaac

SEQ ID NO: 2861502 - RNA, 15 nt, Human
aauggucgcccagga

SEQ ID NO: 2861503 - RNA, 22 nt, Human
aauggucuuucuaaugugugaa

SEQ ID NO: 2861504 - RNA, 22 nt, Human
aauggugaaaauaaaauaaagc

SEQ ID NO: 2861505 - RNA, 19 nt, Human
aaugguacaugucuuccau

SEQ ID NO: 2861506 - RNA, 22 nt, Human
aaugguggggaacuauaaagaa

SEQ ID NO: 2861507 - RNA, 17 nt, Human
aauggugcuuaaguucc

SEQ ID NO: 2861508 - RNA, 16 nt, Human
aaugguggcuucagcu

SEQ ID NO: 2861509 - RNA, 17 nt, Human
aaugguggcuucagcuc

SEQ ID NO: 2861510 - RNA, 19 nt, Human
aaugguggcuucagcucca

SEQ ID NO: 2861511 - RNA, 20 nt, Human
aaugguggcuucagcuccag

SEQ ID NO: 2861512 - RNA, 21 nt, Human
aaugguggcuucagcuccagc

SEQ ID NO: 2861513 - RNA, 23 nt, Human
aaugguggcuucagcuccagccc

SEQ ID NO: 2861514 - RNA, 15 nt, Human
aaugguggcuucuuu

SEQ ID NO: 2861515 - RNA, 22 nt, Human
aaugguggcuucuuuucuuugu

SEQ ID NO: 2861516 - RNA, 23 nt, Human
aaugguggcuucuuuucuuugua

SEQ ID NO: 2861517 - RNA, 18 nt, Human
aauggugacuuaauccgu

SEQ ID NO: 2861518 - RNA, 16 nt, Human
aauggugaucacucca

SEQ ID NO: 2861519 - RNA, 15 nt, Human
aaugguccugacuuu

SEQ ID NO: 2861520 - RNA, 13 nt, Human
aaugucaguauuu

SEQ ID NO: 2861521 - RNA, 16 nt, Human
aaugucaguauuucag

SEQ ID NO: 2861522 - RNA, 20 nt, Human
aaugucucuuuaaugucaca

SEQ ID NO: 2861523 - RNA, 14 nt, Human
aaugucuguaaaua

SEQ ID NO: 2861524 - RNA, 15 nt, Human
aaugucugcagcccu

SEQ ID NO: 2861525 - RNA, 21 nt, Human
aaugucugcagcccugagaaa

SEQ ID NO: 2861526 - RNA, 15 nt, Human
aaugucugcugagga

SEQ ID NO: 2861527 - RNA, 16 nt, Human
aaugucugcugaggag

SEQ ID NO: 2861528 - RNA, 13 nt, Human
aaugucuccuccc

SEQ ID NO: 2861529 - RNA, 18 nt, Human
aaugucuaaaugcugaaa

SEQ ID NO: 2861530 - RNA, 18 nt, Human
aauguuugccucugccuc

SEQ ID NO: 2861531 - RNA, 17 nt, Human
aaugucuugcuguugac

SEQ ID NO: 2861532 - RNA, 19 nt, Human
aaugucuugcuguugacau

SEQ ID NO: 2861533 - RNA, 22 nt, Human
aaugucuugcuguugacauauu

SEQ ID NO: 2861534 - RNA, 23 nt, Human
aaugucuugcuguugacauauuu

SEQ ID NO: 2861535 - RNA, 21 nt, Human
aaugucuucauuucauuguau

SEQ ID NO: 2861536 - RNA, 17 nt, Human
aaugucuucauuucauu

SEQ ID NO: 2861537 - RNA, 18 nt, Human
aaugucuuaauuuuugaa

SEQ ID NO: 2861538 - RNA, 15 nt, Human
aaugucuucaaggcu

SEQ ID NO: 2861539 - RNA, 18 nt, Human
aaugucuucaaggcuuca

SEQ ID NO: 2861540 - RNA, 19 nt, Human
aaugucuucaaggcuucag

SEQ ID NO: 2861541 - RNA, 12 nt, Human
aaugucuucaua

SEQ ID NO: 2861542 - RNA, 19 nt, Human
aauguuugccucugccucu

SEQ ID NO: 2861543 - RNA, 19 nt, Human
aauguuugucucaguugga

SEQ ID NO: 2861544 - RNA, 20 nt, Human
aauguuugucucaguuggaa

SEQ ID NO: 2861545 - RNA, 22 nt, Human
aauguuugucucaguuggaaau

SEQ ID NO: 2861546 - RNA, 20 nt, Human
aauguuuuacugugaaacug

SEQ ID NO: 2861547 - RNA, 22 nt, Human
aauguuuuacugugaaacuggc

SEQ ID NO: 2861548 - RNA, 13 nt, Human
aauguuuucuuug

SEQ ID NO: 2861549 - RNA, 16 nt, Human
aauguuuucuuugcaa

SEQ ID NO: 2861550 - RNA, 17 nt, Human
aauguuuucuuugcaaa

SEQ ID NO: 2861551 - RNA, 19 nt, Human
aauguuuucuuugcaaagu

SEQ ID NO: 2861552 - RNA, 22 nt, Human
aauguuuucuuugcaaaguauu

SEQ ID NO: 2861553 - RNA, 18 nt, Human
aauguuuguuaaaaauaa

SEQ ID NO: 2861554 - RNA, 19 nt, Human
aauguuuguuaaaaauaaa

SEQ ID NO: 2861555 - RNA, 14 nt, Human
aauguuuuaaaugu

SEQ ID NO: 2861556 - RNA, 15 nt, Human
aauguuuuaaaugua

SEQ ID NO: 2861557 - RNA, 16 nt, Human
aauguuuuaaauguac

SEQ ID NO: 2861558 - RNA, 17 nt, Human
aauguuuuaaauguaca

SEQ ID NO: 2861559 - RNA, 19 nt, Human
aauguuuuaaauguacaga

SEQ ID NO: 2861560 - RNA, 14 nt, Human
aauuaaaacuucuu

SEQ ID NO: 2861561 - RNA, 15 nt, Human
aauuaaaacuucuua

SEQ ID NO: 2861562 - RNA, 16 nt, Human
aauuaaaacuucuuaa

SEQ ID NO: 2861563 - RNA, 20 nt, Human
aauuaaaacuucuuaaauau

SEQ ID NO: 2861564 - RNA, 13 nt, Human
aauuaaaacacuu

SEQ ID NO: 2861565 - RNA, 14 nt, Human
aauuaaaacacuuu

SEQ ID NO: 2861566 - RNA, 16 nt, Human
aauuaaaacagcugca

SEQ ID NO: 2861567 - RNA, 10 nt, Human
aauuaaaacu

SEQ ID NO: 2861568 - RNA, 19 nt, Human
aauuaaaacuauucaugcu

SEQ ID NO: 2861569 - RNA, 20 nt, Human
aauuaaaaggauaguauuuu

SEQ ID NO: 2861570 - RNA, 22 nt, Human
aauuaaaaggauaguauuuuua

SEQ ID NO: 2861571 - RNA, 13 nt, Human
aauuaaaauggau

SEQ ID NO: 2861572 - RNA, 21 nt, Human
aauuaaaauggaugccuugaa

SEQ ID NO: 2861573 - RNA, 21 nt, Human
aauuaaaauugucccauuugc

SEQ ID NO: 2861574 - RNA, 12 nt, Human
aauuaaaaacua

SEQ ID NO: 2861575 - RNA, 17 nt, Human
aauuaaaaacuaguagu

SEQ ID NO: 2861576 - RNA, 21 nt, Human
aauuaaaaacuaguaguucuc

SEQ ID NO: 2861577 - RNA, 12 nt, Human
aauuaaaaagau

SEQ ID NO: 2861578 - RNA, 15 nt, Human
aauuaaaaagauucu

SEQ ID NO: 2861579 - RNA, 16 nt, Human
aauuaaaaagauucuu

SEQ ID NO: 2861580 - RNA, 19 nt, Human
aauuaaaaagauucuuuuu

SEQ ID NO: 2861581 - RNA, 21 nt, Human
aauuaaaaagauucuuuuucu

SEQ ID NO: 2861582 - RNA, 23 nt, Human
aauuaaaaagauucuuuuucuga

SEQ ID NO: 2861583 - RNA, 21 nt, Human
aauguuuuucugccagggagc

SEQ ID NO: 2861584 - RNA, 19 nt, Human
aauguuuuuucauguguuu

SEQ ID NO: 2861585 - RNA, 15 nt, Human
aauguuuuucugcca

SEQ ID NO: 2861586 - RNA, 22 nt, Human
aauuaaauuuugaguucuacau

SEQ ID NO: 2861587 - RNA, 14 nt, Human
aauuaaauuuugag

SEQ ID NO: 2861588 - RNA, 12 nt, Human
aauuaaaucugu

SEQ ID NO: 2861589 - RNA, 16 nt, Human
aaauauuuucuggguu

SEQ ID NO: 2861590 - RNA, 13 nt, Human
aaaucuugaaauu

SEQ ID NO: 2861591 - RNA, 13 nt, Human
aaaucuuggaagu

SEQ ID NO: 2861592 - RNA, 19 nt, Human
aaaucuuggaaguacauga

SEQ ID NO: 2861593 - RNA, 20 nt, Human
aaaucuuggaaguacaugaa

SEQ ID NO: 2861594 - RNA, 23 nt, Human
aaaucuuggaaguacaugaauac

SEQ ID NO: 2861595 - RNA, 16 nt, Human
aaaucuuggcaauauu

SEQ ID NO: 2861596 - RNA, 14 nt, Human
aaaucuucuccaga

SEQ ID NO: 2861597 - RNA, 15 nt, Human
aaaucuucuccagau

SEQ ID NO: 2861598 - RNA, 17 nt, Human
aaaucaagcaagccucu

SEQ ID NO: 2861599 - RNA, 21 nt, Human
aaaucaagcagguuagagaaa

SEQ ID NO: 2861600 - RNA, 12 nt, Human
aaaucaaguauu

SEQ ID NO: 2861601 - RNA, 16 nt, Human
aaaucaacagaagcau

SEQ ID NO: 2861602 - RNA, 17 nt, Human
aaaucaacagaagcauu

SEQ ID NO: 2861603 - RNA, 18 nt, Human
aaaucaacagaagcauuu

SEQ ID NO: 2861604 - RNA, 19 nt, Human
aaaucaacagaagcauuug

SEQ ID NO: 2861605 - RNA, 22 nt, Human
aaaucaacagaagcauuuguau

SEQ ID NO: 2861606 - RNA, 16 nt, Human
aaaucaacuuaacaug

SEQ ID NO: 2861607 - RNA, 20 nt, Human
aaauggaacgcuaaugaaac

SEQ ID NO: 2861608 - RNA, 20 nt, Human
aaauggaaaguaacucauuu

SEQ ID NO: 2861609 - RNA, 15 nt, Human
aaauggaagacacau

SEQ ID NO: 2861610 - RNA, 18 nt, Human
aaauggaagacacauuga

SEQ ID NO: 2861611 - RNA, 20 nt, Human
aaaugcuuuuuauuucugca

SEQ ID NO: 2861612 - RNA, 18 nt, Human
aaaugcuuuuuauuucug

SEQ ID NO: 2861613 - RNA, 20 nt, Human
aaaucuugugcuagaauacu

SEQ ID NO: 2861614 - RNA, 19 nt, Human
aaauggacugguuugagau

SEQ ID NO: 2861615 - RNA, 19 nt, Human
aaauggccauuugcuuuuu

SEQ ID NO: 2861616 - RNA, 23 nt, Human
aaauggccauuugcuuuuucacc

SEQ ID NO: 2861617 - RNA, 22 nt, Human
aaauggccauuugcuuuuucac

SEQ ID NO: 2861618 - RNA, 21 nt, Human
aaauggcgucuggaaguccaa

SEQ ID NO: 2861619 - RNA, 16 nt, Human
aaauggccauuugcuu

SEQ ID NO: 2861620 - RNA, 14 nt, Human
aaauauaagauuuu

SEQ ID NO: 2861621 - RNA, 14 nt, Human
aaauauaagccuuu

SEQ ID NO: 2861622 - RNA, 22 nt, Human
aaauauaagccuuuuauacuga

SEQ ID NO: 2861623 - RNA, 11 nt, Human
aaauauaauuc

SEQ ID NO: 2861624 - RNA, 12 nt, Human
aaauauaauucu

SEQ ID NO: 2861625 - RNA, 13 nt, Human
aaauauaauucug

SEQ ID NO: 2861626 - RNA, 16 nt, Human
aaauauaauucuguaa

SEQ ID NO: 2861627 - RNA, 19 nt, Human
aaauauaauucuguaaaug

SEQ ID NO: 2861628 - RNA, 17 nt, Human
aaauauaauucuguaaa

SEQ ID NO: 2861629 - RNA, 18 nt, Human
aaauauaauucuguaaau

SEQ ID NO: 2861630 - RNA, 15 nt, Human
aaauagugaauuaua

SEQ ID NO: 2861631 - RNA, 19 nt, Human
aaauagugacauaauauau

SEQ ID NO: 2861632 - RNA, 21 nt, Human
aaauagugacauaauauauuc

SEQ ID NO: 2861633 - RNA, 22 nt, Human
aaauagugacauaauauauucu

SEQ ID NO: 2861634 - RNA, 20 nt, Human
aaauagugcagaaucucaua

SEQ ID NO: 2861635 - RNA, 21 nt, Human
aaauagugcagaaucucauag

SEQ ID NO: 2861636 - RNA, 16 nt, Human
aaauagucuaguguag

SEQ ID NO: 2861637 - RNA, 11 nt, Human
aaauagagcaa

SEQ ID NO: 2861638 - RNA, 15 nt, Human
aaauagagcuuuuaa

SEQ ID NO: 2861639 - RNA, 13 nt, Human
aaauauaaacaaa

SEQ ID NO: 2861640 - RNA, 12 nt, Human
aaauaguuuguu

SEQ ID NO: 2861641 - RNA, 11 nt, Human
aaauauaaaac

SEQ ID NO: 2861642 - RNA, 16 nt, Human
aaauauaaaacaaaua

SEQ ID NO: 2861643 - RNA, 15 nt, Human
aaauaguauuugcau

SEQ ID NO: 2861644 - RNA, 23 nt, Human
aaauauaaacaaagauucaugau

SEQ ID NO: 2861645 - RNA, 12 nt, Human
aaauauaaacau

SEQ ID NO: 2861646 - RNA, 13 nt, Human
aaauauaaacauc

SEQ ID NO: 2861647 - RNA, 22 nt, Human
aaauauaaacaaagauucauga

SEQ ID NO: 2861648 - RNA, 12 nt, Human
aaauauaaaaua

SEQ ID NO: 2861649 - RNA, 13 nt, Human
aaauauaaaucuu

SEQ ID NO: 2861650 - RNA, 14 nt, Human
aaauaguauuugag

SEQ ID NO: 2861651 - RNA, 13 nt, Human
aaauaguaaaaau

SEQ ID NO: 2861652 - RNA, 16 nt, Human
aaauaguaaaaauaaa

SEQ ID NO: 2861653 - RNA, 19 nt, Human
aaauagacauauuaacaug

SEQ ID NO: 2861654 - RNA, 14 nt, Human
aaauagaaauaagu

SEQ ID NO: 2861655 - RNA, 14 nt, Human
aaauacuuuuccuu

SEQ ID NO: 2861656 - RNA, 15 nt, Human
aaauacuuuuccuua

SEQ ID NO: 2861657 - RNA, 19 nt, Human
aaauacuuuuccuuaccuu

SEQ ID NO: 2861658 - RNA, 16 nt, Human
aaauacuuuuucuaau

SEQ ID NO: 2861659 - RNA, 18 nt, Human
aaauacuuuuucuaauga

SEQ ID NO: 2861660 - RNA, 18 nt, Human
aaauagaaaaguagacaa

SEQ ID NO: 2861661 - RNA, 14 nt, Human
aaauagaaaaguua

SEQ ID NO: 2861662 - RNA, 15 nt, Human
aaauagaaaaguuau

SEQ ID NO: 2861663 - RNA, 16 nt, Human
aaauagaaaaguuauu

SEQ ID NO: 2861664 - RNA, 17 nt, Human
aaauagaaaaguuauua

SEQ ID NO: 2861665 - RNA, 14 nt, Human
aaauacuuagcaaa

SEQ ID NO: 2861666 - RNA, 16 nt, Human
aaauacuuagcaaaaa

SEQ ID NO: 2861667 - RNA, 22 nt, Human
aaauacuguuuuuaacaacuau

SEQ ID NO: 2861668 - RNA, 14 nt, Human
aaauacugugugga

SEQ ID NO: 2861669 - RNA, 13 nt, Human
aaauacuguuggu

SEQ ID NO: 2861670 - RNA, 14 nt, Human
aaauacuguuggug

SEQ ID NO: 2861671 - RNA, 13 nt, Human
aaauaaaguauau

SEQ ID NO: 2861672 - RNA, 23 nt, Human
aaauaaaggaugugauuguggaa

SEQ ID NO: 2861673 - RNA, 14 nt, Human
aaauaaacucuaaa

SEQ ID NO: 2861674 - RNA, 14 nt, Human
aaauaaacuguugc

SEQ ID NO: 2861675 - RNA, 11 nt, Human
aaauaaacuuu

SEQ ID NO: 2861676 - RNA, 12 nt, Human
aaauaaacuuuu

SEQ ID NO: 2861677 - RNA, 13 nt, Human
aaauaaacuuuuu

SEQ ID NO: 2861678 - RNA, 17 nt, Human
aaauaaacuuuuuuuca

SEQ ID NO: 2861679 - RNA, 18 nt, Human
aaauaaacuuuuuuucaa

SEQ ID NO: 2861680 - RNA, 19 nt, Human
aaauaaacuuuuuuucaau

SEQ ID NO: 2861681 - RNA, 20 nt, Human
aaauaaacuuuuuuucaaug

SEQ ID NO: 2861682 - RNA, 21 nt, Human
aaauaaacuuuuuuucaaugu

SEQ ID NO: 2861683 - RNA, 22 nt, Human
aaauaaacuuuuuuucaaugug

SEQ ID NO: 2861684 - RNA, 19 nt, Human
aaauaaagacaaccauauu

SEQ ID NO: 2861685 - RNA, 13 nt, Human
aaauaaaauuaug

SEQ ID NO: 2861686 - RNA, 22 nt, Human
aaauaaaauuaaagcugaaaac

SEQ ID NO: 2861687 - RNA, 15 nt, Human
aaauaaaauggauuu

SEQ ID NO: 2861688 - RNA, 11 nt, Human
aaagugcuggg

SEQ ID NO: 2861689 - RNA, 13 nt, Human
aaagugcugagau

SEQ ID NO: 2861690 - RNA, 21 nt, Human
aaagugcuaagguucuaaggc

SEQ ID NO: 2861691 - RNA, 23 nt, Human
aaagugcuaagguucuaaggccu

SEQ ID NO: 2861692 - RNA, 16 nt, Human
aaagugcuaagguucu

SEQ ID NO: 2861693 - RNA, 17 nt, Human
aaagugcuaagguucua

SEQ ID NO: 2861694 - RNA, 18 nt, Human
aaagugcuaagguucuaa

SEQ ID NO: 2861695 - RNA, 20 nt, Human
aaagugcuaagguucuaagg

SEQ ID NO: 2861696 - RNA, 13 nt, Human
aaagugacacagc

SEQ ID NO: 2861697 - RNA, 14 nt, Human
aaagugacacagca

SEQ ID NO: 2861698 - RNA, 14 nt, Human
aaagugcugggauu

SEQ ID NO: 2861699 - RNA, 12 nt, Human
aaagugcuggga

SEQ ID NO: 2861700 - RNA, 22 nt, Human
aaauaaaagugaaugaaagauu

SEQ ID NO: 2861701 - RNA, 14 nt, Human
aaauaaaauaaagc

SEQ ID NO: 2861702 - RNA, 17 nt, Human
aaauaaaaguuuuacaa

SEQ ID NO: 2861703 - RNA, 16 nt, Human
aaaggcuugaagcugu

SEQ ID NO: 2861704 - RNA, 17 nt, Human
aaaggcuugaagcugug

SEQ ID NO: 2861705 - RNA, 18 nt, Human
aaagggaaguugugccuu

SEQ ID NO: 2861706 - RNA, 15 nt, Human
aaagucucuaauucu

SEQ ID NO: 2861707 - RNA, 18 nt, Human
aaagucucuaauucuauu

SEQ ID NO: 2861708 - RNA, 22 nt, Human
aaagucugugugaugaacuuuc

SEQ ID NO: 2861709 - RNA, 23 nt, Human
aaagucugugugaugaacuuucu

SEQ ID NO: 2861710 - RNA, 20 nt, Human
aaagugaaaguccagaaacu

SEQ ID NO: 2861711 - RNA, 14 nt, Human
aaagugaauaaacu

SEQ ID NO: 2861712 - RNA, 15 nt, Human
aaagugaauaaacuu

SEQ ID NO: 2861713 - RNA, 16 nt, Human
aaagugaauaaacuuc

SEQ ID NO: 2861714 - RNA, 18 nt, Human
aaagugaauaaacuucag

SEQ ID NO: 2861715 - RNA, 19 nt, Human
aaagugaauaaacuucagc

SEQ ID NO: 2861716 - RNA, 20 nt, Human
aaagugaauaaacuucagca

SEQ ID NO: 2861717 - RNA, 21 nt, Human
aaagugaauaaacuucagcac

SEQ ID NO: 2861718 - RNA, 15 nt, Human
aaagugaaugaaaga

SEQ ID NO: 2861719 - RNA, 16 nt, Human
aaagugaaugaaagau

SEQ ID NO: 2861720 - RNA, 22 nt, Human
aaagugaaugaaagauuaaaca

SEQ ID NO: 2861721 - RNA, 18 nt, Human
aaagugaauuguugacaa

SEQ ID NO: 2861722 - RNA, 23 nt, Human
aaagucuuuggggucuacacugc

SEQ ID NO: 2861723 - RNA, 15 nt, Human
aaauaacaaaaugga

SEQ ID NO: 2861724 - RNA, 16 nt, Human
aaauaaauuuauauga

SEQ ID NO: 2861725 - RNA, 17 nt, Human
aaauaaauuuauaugaa

SEQ ID NO: 2861726 - RNA, 17 nt, Human
aaauaacaaugugcucu

SEQ ID NO: 2861727 - RNA, 14 nt, Human
aaauaacaaugugc

SEQ ID NO: 2861728 - RNA, 14 nt, Human
aaauaacaauguua

SEQ ID NO: 2861729 - RNA, 15 nt, Human
aaauaacaauguuaa

SEQ ID NO: 2861730 - RNA, 16 nt, Human
aaauaacaauguuaag

SEQ ID NO: 2861731 - RNA, 22 nt, Human
aaauaacaaguaccaaaguuuu

SEQ ID NO: 2861732 - RNA, 23 nt, Human
aaagaugaacucugaacuuugga

SEQ ID NO: 2861733 - RNA, 21 nt, Human
aaagaucuguuuugaaggcaa

SEQ ID NO: 2861734 - RNA, 15 nt, Human
aaagaucuucaaaag

SEQ ID NO: 2861735 - RNA, 14 nt, Human
aaagaaagaaggaa

SEQ ID NO: 2861736 - RNA, 16 nt, Human
aaagaaaauaaagaca

SEQ ID NO: 2861737 - RNA, 16 nt, Human
aaagaaaagaaaauuu

SEQ ID NO: 2861738 - RNA, 17 nt, Human
aaacugaauuuguacuu

SEQ ID NO: 2861739 - RNA, 13 nt, Human
aaacugacuauca

SEQ ID NO: 2861740 - RNA, 14 nt, Human
aaagaaagcaacuu

SEQ ID NO: 2861741 - RNA, 23 nt, Human
aaagaaaguugcacggcugcuga

SEQ ID NO: 2861742 - RNA, 14 nt, Human
aaagaaauaaccac

SEQ ID NO: 2861743 - RNA, 21 nt, Human
aaagaaauaaccacugcaagu

SEQ ID NO: 2861744 - RNA, 15 nt, Human
aaagaaauaauaaua

SEQ ID NO: 2861745 - RNA, 16 nt, Human
aaagaaauaauaauau

SEQ ID NO: 2861746 - RNA, 12 nt, Human
aaagaacauaaa

SEQ ID NO: 2861747 - RNA, 14 nt, Human
aaagaaauaccuug

SEQ ID NO: 2861748 - RNA, 14 nt, Human
aaagaaauuuacua

SEQ ID NO: 2861749 - RNA, 17 nt, Human
aaagaaauuuacuauau

SEQ ID NO: 2861750 - RNA, 21 nt, Human
aaagaaauuuacuauauauau

SEQ ID NO: 2861751 - RNA, 17 nt, Human
aaagaaaugucuuaauu

SEQ ID NO: 2861752 - RNA, 19 nt, Human
aaagauagagucauugcug

SEQ ID NO: 2861753 - RNA, 15 nt, Human
aaagauagauaucca

SEQ ID NO: 2861754 - RNA, 15 nt, Human
aaagauaucuuuucu

SEQ ID NO: 2861755 - RNA, 14 nt, Human
aaagauauggagaa

SEQ ID NO: 2861756 - RNA, 18 nt, Human
aaagaguagaauugcauu

SEQ ID NO: 2861757 - RNA, 13 nt, Human
aaagaguagaauu

SEQ ID NO: 2861758 - RNA, 13 nt, Human
aaaauugcuaugu

SEQ ID NO: 2861759 - RNA, 20 nt, Human
aaaauugcuauguuacuauu

SEQ ID NO: 2861760 - RNA, 22 nt, Human
aaaauugcuauguuacuauuuu

SEQ ID NO: 2861761 - RNA, 17 nt, Human
aaacacucggcauuuca

SEQ ID NO: 2861762 - RNA, 20 nt, Human
aaacacucggcauuucaaau

SEQ ID NO: 2861763 - RNA, 21 nt, Human
aaacacucggcauuucaaaug

SEQ ID NO: 2861764 - RNA, 14 nt, Human
aaacacugcaggca

SEQ ID NO: 2861765 - RNA, 13 nt, Human
aaacacugaaaaa

SEQ ID NO: 2861766 - RNA, 15 nt, Human
aaacacugcaggcau

SEQ ID NO: 2861767 - RNA, 13 nt, Human
aaacacugccauc

SEQ ID NO: 2861768 - RNA, 13 nt, Human
aaaauucauuuca

SEQ ID NO: 2861769 - RNA, 14 nt, Human
aaaauucauuucac

SEQ ID NO: 2861770 - RNA, 16 nt, Human
aaaauucauuucacau

SEQ ID NO: 2861771 - RNA, 13 nt, Human
aaaauucagugga

SEQ ID NO: 2861772 - RNA, 16 nt, Human
aaaauucagcaaacca

SEQ ID NO: 2861773 - RNA, 18 nt, Human
aaaauucagcaaaccauu

SEQ ID NO: 2861774 - RNA, 21 nt, Human
aaaauucagcaaaccauuuuu

SEQ ID NO: 2861775 - RNA, 22 nt, Human
aaaacacacgcgcgcacacaca

SEQ ID NO: 2861776 - RNA, 11 nt, Human
aaaacacagag

SEQ ID NO: 2861777 - RNA, 12 nt, Human
aaaacacagagg

SEQ ID NO: 2861778 - RNA, 16 nt, Human
aaaacacauguuuuua

SEQ ID NO: 2861779 - RNA, 12 nt, Human
aaaacacauugc

SEQ ID NO: 2861780 - RNA, 14 nt, Human
aaaauucaaaaagu

SEQ ID NO: 2861781 - RNA, 16 nt, Human
aaaauucaaaaagugu

SEQ ID NO: 2861782 - RNA, 17 nt, Human
aaaauucaaaaaguguu

SEQ ID NO: 2861783 - RNA, 18 nt, Human
aaaauucaaaaaguguuu

SEQ ID NO: 2861784 - RNA, 17 nt, Human
aaacacugccuuuuuau

SEQ ID NO: 2861785 - RNA, 13 nt, Human
aaacacugccuuu

SEQ ID NO: 2861786 - RNA, 23 nt, Human
aaacacugccaucuuaguuugga

SEQ ID NO: 2861787 - RNA, 15 nt, Human
aaacacuucaauaau

SEQ ID NO: 2861788 - RNA, 15 nt, Human
aaacacuucuguccu

SEQ ID NO: 2861789 - RNA, 20 nt, Human
aaacagacucgauucauauu

SEQ ID NO: 2861790 - RNA, 20 nt, Human
aaacagaggccauggcagaa

SEQ ID NO: 2861791 - RNA, 21 nt, Human
aaacagaugaugagaauuucu

SEQ ID NO: 2861792 - RNA, 22 nt, Human
aaacagaugaugagaauuucua

SEQ ID NO: 2861793 - RNA, 13 nt, Human
aaacagauaccau

SEQ ID NO: 2861794 - RNA, 14 nt, Human
aaacagauaccaua

SEQ ID NO: 2861795 - RNA, 19 nt, Human
aaacagauaccauacucau

SEQ ID NO: 2861796 - RNA, 13 nt, Human
aaacagcaaacca

SEQ ID NO: 2861797 - RNA, 14 nt, Human
aaacagcaaaccaa

SEQ ID NO: 2861798 - RNA, 15 nt, Human
aaacagcaaaccaag

SEQ ID NO: 2861799 - RNA, 13 nt, Human
aagaaaugauguu

SEQ ID NO: 2861800 - RNA, 12 nt, Human
aagaaaugaugu

SEQ ID NO: 2861801 - RNA, 15 nt, Human
aagaaaugacuaauu

SEQ ID NO: 2861802 - RNA, 16 nt, Human
aagaaaugacuaauua

SEQ ID NO: 2861803 - RNA, 17 nt, Human
aacuuuucaaugacauu

SEQ ID NO: 2861804 - RNA, 23 nt, Human
aagaaaucccuguuuaauauuua

SEQ ID NO: 2861805 - RNA, 15 nt, Human
aagaaaaaaaaaaga

SEQ ID NO: 2861806 - RNA, 17 nt, Human
aagaaaaaaaaaagaag

SEQ ID NO: 2861807 - RNA, 12 nt, Human
aagaaaugaaca

SEQ ID NO: 2861808 - RNA, 14 nt, Human
aagaaaugaacauu

SEQ ID NO: 2861809 - RNA, 16 nt, Human
aagaaaugaacauucc

SEQ ID NO: 2861810 - RNA, 13 nt, Human
aacuuuuuuucaa

SEQ ID NO: 2861811 - RNA, 14 nt, Human
aacuuuuuuucaau

SEQ ID NO: 2861812 - RNA, 15 nt, Human
aacuuuuuuucaaug

SEQ ID NO: 2861813 - RNA, 16 nt, Human
aacuuuuuuucaaugu

SEQ ID NO: 2861814 - RNA, 17 nt, Human
aacuuuuuuucaaugug

SEQ ID NO: 2861815 - RNA, 13 nt, Human
aacuuuuuuccac

SEQ ID NO: 2861816 - RNA, 14 nt, Human
aacuuuuuuaaaua

SEQ ID NO: 2861817 - RNA, 15 nt, Human
aacuuuuuuaaauaa

SEQ ID NO: 2861818 - RNA, 16 nt, Human
aacuuuuuuaaauaaa

SEQ ID NO: 2861819 - RNA, 17 nt, Human
aacuuuuuuaaauaaac

SEQ ID NO: 2861820 - RNA, 18 nt, Human
aacuuuuuuaaauaaacu

SEQ ID NO: 2861821 - RNA, 19 nt, Human
aacuuuuuuaaauaaacuu

SEQ ID NO: 2861822 - RNA, 20 nt, Human
aacuuuuuuaaauaaacuuu

SEQ ID NO: 2861823 - RNA, 21 nt, Human
aacuuuuuuaaauaaacuuuu

SEQ ID NO: 2861824 - RNA, 22 nt, Human
aacuuuuuuaaauaaacuuuuu

SEQ ID NO: 2861825 - RNA, 21 nt, Human
aacuuuuguaagacaaagguu

SEQ ID NO: 2861826 - RNA, 11 nt, Human
aacuuuuguaa

SEQ ID NO: 2861827 - RNA, 15 nt, Human
aacuuuuguaaagaa

SEQ ID NO: 2861828 - RNA, 18 nt, Human
aacuuuuguaaagaaauu

SEQ ID NO: 2861829 - RNA, 20 nt, Human
aacuuuuguguaaugaaaau

SEQ ID NO: 2861830 - RNA, 21 nt, Human
aacuuuuucuuuucccucaau

SEQ ID NO: 2861831 - RNA, 12 nt, Human
aacuuuucucag

SEQ ID NO: 2861832 - RNA, 14 nt, Human
aacuuuuaucuauu

SEQ ID NO: 2861833 - RNA, 20 nt, Human
aacuuuucaaggcuuauauu

SEQ ID NO: 2861834 - RNA, 15 nt, Human
aacuuuuaaacuaca

SEQ ID NO: 2861835 - RNA, 11 nt, Human
aacuuucugua

SEQ ID NO: 2861836 - RNA, 15 nt, Human
aacuuucuguaaacu

SEQ ID NO: 2861837 - RNA, 23 nt, Human
aacuuucuguuggauuccaugcu

SEQ ID NO: 2861838 - RNA, 15 nt, Human
aacuuucuuauccua

SEQ ID NO: 2861839 - RNA, 18 nt, Human
aacuuucucuucauacuu

SEQ ID NO: 2861840 - RNA, 23 nt, Human
aacuuucugaguuuuucagaugu

SEQ ID NO: 2861841 - RNA, 22 nt, Human
aacuuuggagagugagcuacag

SEQ ID NO: 2861842 - RNA, 18 nt, Human
aacuuuggaguccccuca

SEQ ID NO: 2861843 - RNA, 11 nt, Human
aacugacacag

SEQ ID NO: 2861844 - RNA, 12 nt, Human
aacugacacagg

SEQ ID NO: 2861845 - RNA, 13 nt, Human
aacugacacagga

SEQ ID NO: 2861846 - RNA, 14 nt, Human
aacugacacaggaa

SEQ ID NO: 2861847 - RNA, 20 nt, Human
aacugacacucccacccagu

SEQ ID NO: 2861848 - RNA, 14 nt, Human
aacugaccagccuc

SEQ ID NO: 2861849 - RNA, 12 nt, Human
aacugacaugau

SEQ ID NO: 2861850 - RNA, 20 nt, Human
aacugacaugauuagcagaa

SEQ ID NO: 2861851 - RNA, 15 nt, Human
aacuguuuuggguag

SEQ ID NO: 2861852 - RNA, 21 nt, Human
aacuguuuuggguagcugcca

SEQ ID NO: 2861853 - RNA, 13 nt, Human
aacuuaaaaaugu

SEQ ID NO: 2861854 - RNA, 17 nt, Human
aacuuaaaaauguaaau

SEQ ID NO: 2861855 - RNA, 18 nt, Human
aacuuaaaaauguaaaua

SEQ ID NO: 2861856 - RNA, 21 nt, Human
aacuuaaaaauguaaauauuc

SEQ ID NO: 2861857 - RNA, 11 nt, Human
aacuuaaaaua

SEQ ID NO: 2861858 - RNA, 19 nt, Human
aacuuaguguaauauacca

SEQ ID NO: 2861859 - RNA, 16 nt, Human
aacuuagguggcaagc

SEQ ID NO: 2861860 - RNA, 20 nt, Human
aacuuagugacaaaauagac

SEQ ID NO: 2861861 - RNA, 13 nt, Human
aacuuauucugua

SEQ ID NO: 2861862 - RNA, 14 nt, Human
aacuuauucuguag

SEQ ID NO: 2861863 - RNA, 14 nt, Human
aacuuauguagaua

SEQ ID NO: 2861864 - RNA, 17 nt, Human
aacuuauguagauauuu

SEQ ID NO: 2861865 - RNA, 18 nt, Human
aacuuauguagauauuug

SEQ ID NO: 2861866 - RNA, 19 nt, Human
aacuuauguagauauuugg

SEQ ID NO: 2861867 - RNA, 20 nt, Human
aacuuauguagauauuuggc

SEQ ID NO: 2861868 - RNA, 21 nt, Human
aacuuauguagauauuuggcu

SEQ ID NO: 2861869 - RNA, 22 nt, Human
aacuuauguagauauuuggcuu

SEQ ID NO: 2861870 - RNA, 12 nt, Human
aacuuauguuuu

SEQ ID NO: 2861871 - RNA, 19 nt, Human
aacuuauccuaaaacaaau

SEQ ID NO: 2861872 - RNA, 12 nt, Human
aacuuaugaaug

SEQ ID NO: 2861873 - RNA, 14 nt, Human
aacuuaugaauguu

SEQ ID NO: 2861874 - RNA, 15 nt, Human
aacuuaugaauguuu

SEQ ID NO: 2861875 - RNA, 16 nt, Human
aacuuaugaauguuuc

SEQ ID NO: 2861876 - RNA, 15 nt, Human
aacuuauggccacag

SEQ ID NO: 2861877 - RNA, 14 nt, Human
aacuuauaaaucau

SEQ ID NO: 2861878 - RNA, 15 nt, Human
aacuuauaaaucaua

SEQ ID NO: 2861879 - RNA, 19 nt, Human
aacuuauaaaucauauuga

SEQ ID NO: 2861880 - RNA, 20 nt, Human
aacuuauauacuauuucccu

SEQ ID NO: 2861881 - RNA, 12 nt, Human
aacuuauauuga

SEQ ID NO: 2861882 - RNA, 13 nt, Human
aacuuauauugaa

SEQ ID NO: 2861883 - RNA, 19 nt, Human
aacuuauauugaagacaau

SEQ ID NO: 2861884 - RNA, 14 nt, Human
aacucacaaaugau

SEQ ID NO: 2861885 - RNA, 20 nt, Human
aacucaccagccccacugcc

SEQ ID NO: 2861886 - RNA, 13 nt, Human
aacucagggacag

SEQ ID NO: 2861887 - RNA, 16 nt, Human
aacucagggacagagc

SEQ ID NO: 2861888 - RNA, 17 nt, Human
aacucagggacagagcc

SEQ ID NO: 2861889 - RNA, 21 nt, Human
aacucauaaucuauaaacaau

SEQ ID NO: 2861890 - RNA, 18 nt, Human
aacucagggacagagcca

SEQ ID NO: 2861891 - RNA, 22 nt, Human
aacucagucauuagacuccucc

SEQ ID NO: 2861892 - RNA, 23 nt, Human
aacucagucauuagacuccuccu

SEQ ID NO: 2861893 - RNA, 20 nt, Human
aacucaguccuguacucugg

SEQ ID NO: 2861894 - RNA, 20 nt, Human
aacucaccuggggcugcugg

SEQ ID NO: 2861895 - RNA, 22 nt, Human
aacucacucaguuuaugcugug

SEQ ID NO: 2861896 - RNA, 17 nt, Human
aacucagaucugucuga

SEQ ID NO: 2861897 - RNA, 15 nt, Human
aacucaccuggggcu

SEQ ID NO: 2861898 - RNA, 16 nt, Human
aacucagccugggaca

SEQ ID NO: 2861899 - RNA, 17 nt, Human
aacucagccugggacag

SEQ ID NO: 2861900 - RNA, 15 nt, Human
aacugaagauguuga

SEQ ID NO: 2861901 - RNA, 17 nt, Human
aacugaagauguugaga

SEQ ID NO: 2861902 - RNA, 23 nt, Human
aacugaacucugacaacagacuu

SEQ ID NO: 2861903 - RNA, 15 nt, Human
aacugaacuuugaag

SEQ ID NO: 2861904 - RNA, 16 nt, Human
aacugaacuuugaaga

SEQ ID NO: 2861905 - RNA, 20 nt, Human
aacugaacuuugaagacccg

SEQ ID NO: 2861906 - RNA, 13 nt, Human
aacugaagagaca

SEQ ID NO: 2861907 - RNA, 14 nt, Human
aacugaagagacag

SEQ ID NO: 2861908 - RNA, 15 nt, Human
aacugaagagacagu

SEQ ID NO: 2861909 - RNA, 16 nt, Human
aacugaacucugacaa

SEQ ID NO: 2861910 - RNA, 14 nt, Human
aacugaacucugac

SEQ ID NO: 2861911 - RNA, 20 nt, Human
aacugaacucugacaacaga

SEQ ID NO: 2861912 - RNA, 19 nt, Human
aacugaacucugacaacag

SEQ ID NO: 2861913 - RNA, 16 nt, Human
aacuucacaacuaggc

SEQ ID NO: 2861914 - RNA, 17 nt, Human
aacuuauuuuauuucca

SEQ ID NO: 2861915 - RNA, 23 nt, Human
aacuuauucuguagauucugugg

SEQ ID NO: 2861916 - RNA, 16 nt, Human
aacuuauugcugauuu

SEQ ID NO: 2861917 - RNA, 17 nt, Human
aacuuauugcugauuuu

SEQ ID NO: 2861918 - RNA, 21 nt, Human
aacuuauugcugauuuuaaug

SEQ ID NO: 2861919 - RNA, 22 nt, Human
aacuuauugcugauuuuaaugg

SEQ ID NO: 2861920 - RNA, 13 nt, Human
aacuuauuuagag

SEQ ID NO: 2861921 - RNA, 13 nt, Human
aacuucaaauuuu

SEQ ID NO: 2861922 - RNA, 14 nt, Human
aacuucaacauuua

SEQ ID NO: 2861923 - RNA, 19 nt, Human
aacuucaacauuuacaugu

SEQ ID NO: 2861924 - RNA, 17 nt, Human
aacaccuuccagcuccu

SEQ ID NO: 2861925 - RNA, 19 nt, Human
aacaccugggcuuaagaaa

SEQ ID NO: 2861926 - RNA, 11 nt, Human
aacaagaaugc

SEQ ID NO: 2861927 - RNA, 12 nt, Human
aacaagaaugca

SEQ ID NO: 2861928 - RNA, 13 nt, Human
aacaagaaugcau

SEQ ID NO: 2861929 - RNA, 15 nt, Human
aacaagaaugcauug

SEQ ID NO: 2861930 - RNA, 16 nt, Human
aacaagaaugcauuga

SEQ ID NO: 2861931 - RNA, 17 nt, Human
aacaagaaugcauugau

SEQ ID NO: 2861932 - RNA, 12 nt, Human
aacaagaauugg

SEQ ID NO: 2861933 - RNA, 13 nt, Human
aacaagaagauga

SEQ ID NO: 2861934 - RNA, 14 nt, Human
aacaagaagaugaa

SEQ ID NO: 2861935 - RNA, 20 nt, Human
aacacauuuugguucuucuc

SEQ ID NO: 2861936 - RNA, 22 nt, Human
aacacauuuugguucuucucaa

SEQ ID NO: 2861937 - RNA, 12 nt, Human
aacaaagaaaua

SEQ ID NO: 2861938 - RNA, 13 nt, Human
aacaaagaaauau

SEQ ID NO: 2861939 - RNA, 14 nt, Human
aacaaagaaauauu

SEQ ID NO: 2861940 - RNA, 15 nt, Human
aacaaagcacagugu

SEQ ID NO: 2861941 - RNA, 11 nt, Human
aacaaagauau

SEQ ID NO: 2861942 - RNA, 19 nt, Human
aacaaagauaucuuuucuu

SEQ ID NO: 2861943 - RNA, 22 nt, Human
aacaaagauaucuuuucuuuag

SEQ ID NO: 2861944 - RNA, 16 nt, Human
aacaaagcacaguguu

SEQ ID NO: 2861945 - RNA, 17 nt, Human
aacaaagcacaguguua

SEQ ID NO: 2861946 - RNA, 12 nt, Human
aacaaagcuguu

SEQ ID NO: 2861947 - RNA, 15 nt, Human
aacaaagcuguuaaa

SEQ ID NO: 2861948 - RNA, 17 nt, Human
aacaaagcuguuaaacu

SEQ ID NO: 2861949 - RNA, 18 nt, Human
aacaaagcuguuaaacug

SEQ ID NO: 2861950 - RNA, 19 nt, Human
aacaaagcuguuaaacugu

SEQ ID NO: 2861951 - RNA, 22 nt, Human
aacaaagcuguuaaacuguuag

SEQ ID NO: 2861952 - RNA, 22 nt, Human
aacaaccuggccgcguuuagac

SEQ ID NO: 2861953 - RNA, 22 nt, Human
aacaaaggauuaauugcugcaa

SEQ ID NO: 2861954 - RNA, 17 nt, Human
aacaaaggcaaguuaag

SEQ ID NO: 2861955 - RNA, 19 nt, Human
aacaaaggcaaguuaagag

SEQ ID NO: 2861956 - RNA, 20 nt, Human
aacaaaggcaaguuaagaga

SEQ ID NO: 2861957 - RNA, 21 nt, Human
aacaaaggcaaguuaagagaa

SEQ ID NO: 2861958 - RNA, 22 nt, Human
aacaacgcuugugaauguauuu

SEQ ID NO: 2861959 - RNA, 21 nt, Human
aacaacuccuagggccacuga

SEQ ID NO: 2861960 - RNA, 14 nt, Human
aacaaaaagcuucc

SEQ ID NO: 2861961 - RNA, 16 nt, Human
aacaaaaagcuucccc

SEQ ID NO: 2861962 - RNA, 12 nt, Human
aacaaaacaaaa

SEQ ID NO: 2861963 - RNA, 14 nt, Human
aacaaaacaaaaca

SEQ ID NO: 2861964 - RNA, 18 nt, Human
aacaaaacaaaacaacau

SEQ ID NO: 2861965 - RNA, 16 nt, Human
aacaaaacaaaacuau

SEQ ID NO: 2861966 - RNA, 9 nt, Human
aacaaaacu

SEQ ID NO: 2861967 - RNA, 14 nt, Human
aacaaaacuauacu

SEQ ID NO: 2861968 - RNA, 17 nt, Human
aacaaaacuauacuuga

SEQ ID NO: 2861969 - RNA, 13 nt, Human
aacaaaagaugaa

SEQ ID NO: 2861970 - RNA, 21 nt, Human
aacaaaagcgacccauucaga

SEQ ID NO: 2861971 - RNA, 12 nt, Human
aacaaaaggguc

SEQ ID NO: 2861972 - RNA, 13 nt, Human
aacaaaaggguca

SEQ ID NO: 2861973 - RNA, 15 nt, Human
aacaaaaguguuuaa

SEQ ID NO: 2861974 - RNA, 13 nt, Human
aacaaaaguuccc

SEQ ID NO: 2861975 - RNA, 12 nt, Human
aacaaaauagaa

SEQ ID NO: 2861976 - RNA, 20 nt, Human
aacaaaaucuccucuuuuag

SEQ ID NO: 2861977 - RNA, 13 nt, Human
aacaaaaucuguu

SEQ ID NO: 2861978 - RNA, 22 nt, Human
aacaaacuuuucaaggcuuaua

SEQ ID NO: 2861979 - RNA, 15 nt, Human
aacaaaauuacagac

SEQ ID NO: 2861980 - RNA, 21 nt, Human
aaauugauguguuuauuuaua

SEQ ID NO: 2861981 - RNA, 12 nt, Human
aaauugcacaau

SEQ ID NO: 2861982 - RNA, 20 nt, Human
aaauugcacacacucagugc

SEQ ID NO: 2861983 - RNA, 19 nt, Human
aaauugcacagaaguccug

SEQ ID NO: 2861984 - RNA, 20 nt, Human
aaauugcacagaaguccugu

SEQ ID NO: 2861985 - RNA, 16 nt, Human
aaauugcauaaagcau

SEQ ID NO: 2861986 - RNA, 17 nt, Human
aaauugcauaaagcaua

SEQ ID NO: 2861987 - RNA, 13 nt, Human
aaauugcaaaucu

SEQ ID NO: 2861988 - RNA, 19 nt, Human
aaauugcaaaucuugaaau

SEQ ID NO: 2861989 - RNA, 14 nt, Human
aaauugcaaaucuu

SEQ ID NO: 2861990 - RNA, 18 nt, Human
aaauugcauuuccugaca

SEQ ID NO: 2861991 - RNA, 14 nt, Human
aaauugcugugcuu

SEQ ID NO: 2861992 - RNA, 23 nt, Human
aaauugcugugcuuuauggauag

SEQ ID NO: 2861993 - RNA, 21 nt, Human
aaauuggccugguauggcugc

SEQ ID NO: 2861994 - RNA, 22 nt, Human
aaauuggccugguauggcugca

SEQ ID NO: 2861995 - RNA, 16 nt, Human
aaauuggaacagaaug

SEQ ID NO: 2861996 - RNA, 19 nt, Human
aaauuggaacagaauguuu

SEQ ID NO: 2861997 - RNA, 23 nt, Human
aaauuggacuuucaaaauuaaau

SEQ ID NO: 2861998 - RNA, 23 nt, Human
aaauuggauucccuuaaacaaaa

SEQ ID NO: 2861999 - RNA, 19 nt, Human
aacaccuucuuauuauaua

SEQ ID NO: 2862000 - RNA, 20 nt, Human
aacaccuucuuauuauauau

SEQ ID NO: 2862001 - RNA, 21 nt, Human
aacaccuucuuauuauauaua

SEQ ID NO: 2862002 - RNA, 22 nt, Human
aacaccuucuuauuauauauau

SEQ ID NO: 2862003 - RNA, 12 nt, Human
aacacgaaacuu

SEQ ID NO: 2862004 - RNA, 14 nt, Human
aacacgaaacuugu

SEQ ID NO: 2862005 - RNA, 15 nt, Human
aacacgaaacuuguu

SEQ ID NO: 2862006 - RNA, 16 nt, Human
aacacgaaacuuguua

SEQ ID NO: 2862007 - RNA, 19 nt, Human
aacacgaaacuuguuauug

SEQ ID NO: 2862008 - RNA, 20 nt, Human
aacacgaaacuuguuauugu

SEQ ID NO: 2862009 - RNA, 15 nt, Human
aacacgaaagaaaug

SEQ ID NO: 2862010 - RNA, 13 nt, Human
aaccagugccaag

SEQ ID NO: 2862011 - RNA, 14 nt, Human
aaccagugccaagg

SEQ ID NO: 2862012 - RNA, 15 nt, Human
aaccagugccaagga

SEQ ID NO: 2862013 - RNA, 16 nt, Human
aaccagugccaaggac

SEQ ID NO: 2862014 - RNA, 14 nt, Human
aaccaguguagccu

SEQ ID NO: 2862015 - RNA, 23 nt, Human
aaccagcuugcgaauaacagucc

SEQ ID NO: 2862016 - RNA, 21 nt, Human
aaccagcaucccuugaccagg

SEQ ID NO: 2862017 - RNA, 22 nt, Human
aaccagcuguaacacagcugag

SEQ ID NO: 2862018 - RNA, 18 nt, Human
aaccacgucugucuucac

SEQ ID NO: 2862019 - RNA, 21 nt, Human
aaccacgucugucuucacagc

SEQ ID NO: 2862020 - RNA, 18 nt, Human
aaccacucccagucccca

SEQ ID NO: 2862021 - RNA, 16 nt, Human
aaccacugcaaguccu

SEQ ID NO: 2862022 - RNA, 20 nt, Human
aaccacugcaaguccuuuug

SEQ ID NO: 2862023 - RNA, 23 nt, Human
aaccacugcaaguccuuuuguaa

SEQ ID NO: 2862024 - RNA, 16 nt, Human
aacagcugcauuagaa

SEQ ID NO: 2862025 - RNA, 17 nt, Human
aacagcugcauuagaaa

SEQ ID NO: 2862026 - RNA, 18 nt, Human
aacagcugcauuagaaaa

SEQ ID NO: 2862027 - RNA, 16 nt, Human
aacagcucgauccaaa

SEQ ID NO: 2862028 - RNA, 19 nt, Human
aacagcucgauccaaauug

SEQ ID NO: 2862029 - RNA, 24 nt, Human
aacagcucgauccaaauugugcuu

SEQ ID NO: 2862030 - RNA, 22 nt, Human
aacagcucucuucaaugacaua

SEQ ID NO: 2862031 - RNA, 23 nt, Human
aacagcucucuucaaugacauag

SEQ ID NO: 2862032 - RNA, 20 nt, Human
aacagcucugcaggcuuaau

SEQ ID NO: 2862033 - RNA, 21 nt, Human
aacagcucugcaggcuuaaua

SEQ ID NO: 2862034 - RNA, 13 nt, Human
aacagcucgacuu

SEQ ID NO: 2862035 - RNA, 15 nt, Human
aacaucauuagaaca

SEQ ID NO: 2862036 - RNA, 19 nt, Human
aacaugcaauuuugcauuu

SEQ ID NO: 2862037 - RNA, 22 nt, Human
aacaugcaauuuugcauuugaa

SEQ ID NO: 2862038 - RNA, 21 nt, Human
aacaugccugccccaaacaaa

SEQ ID NO: 2862039 - RNA, 22 nt, Human
aacaugccugccccaaacaaau

SEQ ID NO: 2862040 - RNA, 20 nt, Human
aacauguaaccggcauguuu

SEQ ID NO: 2862041 - RNA, 12 nt, Human
aacauguaauau

SEQ ID NO: 2862042 - RNA, 18 nt, Human
aacauguaauauaaagau

SEQ ID NO: 2862043 - RNA, 19 nt, Human
aacauguaauauaaagaug

SEQ ID NO: 2862044 - RNA, 22 nt, Human
aacauguaauauaaagauguua

SEQ ID NO: 2862045 - RNA, 17 nt, Human
aacaucacugaaaugcu

SEQ ID NO: 2862046 - RNA, 18 nt, Human
aacaucacuauccaugca

SEQ ID NO: 2862047 - RNA, 13 nt, Human
aacaucacacaca

SEQ ID NO: 2862048 - RNA, 14 nt, Human
aacaucaucaaggc

SEQ ID NO: 2862049 - RNA, 16 nt, Human
aacaucaucaaggcac

SEQ ID NO: 2862050 - RNA, 21 nt, Human
aacaucaucaaggcacugccu

SEQ ID NO: 2862051 - RNA, 14 nt, Human
aacaucauuagaac

SEQ ID NO: 2862052 - RNA, 22 nt, Human
aacaucaucaaggcacugccug

SEQ ID NO: 2862053 - RNA, 22 nt, Human
aacaucaugaauuuauugcaca

SEQ ID NO: 2862054 - RNA, 16 nt, Human
aacccuguuacaaagc

SEQ ID NO: 2862055 - RNA, 18 nt, Human
acaacuaugauuuggaaa

SEQ ID NO: 2862056 - RNA, 15 nt, Human
acaaagacauugauu

SEQ ID NO: 2862057 - RNA, 21 nt, Human
acaaaccuaccaaaauggaau

SEQ ID NO: 2862058 - RNA, 14 nt, Human
acaaaccugccugg

SEQ ID NO: 2862059 - RNA, 18 nt, Human
acaaaccugccuggguuu

SEQ ID NO: 2862060 - RNA, 21 nt, Human
acaaacuacagaccugcuuuu

SEQ ID NO: 2862061 - RNA, 14 nt, Human
acaaagaauuuaaa

SEQ ID NO: 2862062 - RNA, 20 nt, Human
aauuuugaguucuacauaag

SEQ ID NO: 2862063 - RNA, 17 nt, Human
aauuuugacuuaaugug

SEQ ID NO: 2862064 - RNA, 16 nt, Human
aauuuugagauuaaga

SEQ ID NO: 2862065 - RNA, 11 nt, Human
acaaaauggac

SEQ ID NO: 2862066 - RNA, 18 nt, Human
acaaaccuaccaaaaugg

SEQ ID NO: 2862067 - RNA, 12 nt, Human
acaaaccugccu

SEQ ID NO: 2862068 - RNA, 14 nt, Human
acaaaccaugcaaa

SEQ ID NO: 2862069 - RNA, 19 nt, Human
acaaaccacaacugacaca

SEQ ID NO: 2862070 - RNA, 20 nt, Human
acaaaccacaacugacacag

SEQ ID NO: 2862071 - RNA, 21 nt, Human
acaaaccacaacugacacagg

SEQ ID NO: 2862072 - RNA, 23 nt, Human
acaaaccacaacugacacaggaa

SEQ ID NO: 2862073 - RNA, 21 nt, Human
aauuuuauaagcaaauuucaa

SEQ ID NO: 2862074 - RNA, 19 nt, Human
aauuuuaguagagacaggg

SEQ ID NO: 2862075 - RNA, 13 nt, Human
aauuuuaguauuc

SEQ ID NO: 2862076 - RNA, 14 nt, Human
aauuuuaguauuca

SEQ ID NO: 2862077 - RNA, 17 nt, Human
aauuuuaguccaaauaa

SEQ ID NO: 2862078 - RNA, 12 nt, Human
aauuuuaggaac

SEQ ID NO: 2862079 - RNA, 21 nt, Human
aauuuuaggaacuucagagau

SEQ ID NO: 2862080 - RNA, 23 nt, Human
aauuuuaggcacucuuaaaugau

SEQ ID NO: 2862081 - RNA, 14 nt, Human
aauuauaagucaca

SEQ ID NO: 2862082 - RNA, 16 nt, Human
aauuauaagucacaaa

SEQ ID NO: 2862083 - RNA, 18 nt, Human
aauuauaaagauaaagcu

SEQ ID NO: 2862084 - RNA, 16 nt, Human
acaacuauuuuuccaa

SEQ ID NO: 2862085 - RNA, 17 nt, Human
acaacuauggaucagaa

SEQ ID NO: 2862086 - RNA, 17 nt, Human
acaacuauuucggccuu

SEQ ID NO: 2862087 - RNA, 19 nt, Human
acaacuauuucggccuuuu

SEQ ID NO: 2862088 - RNA, 17 nt, Human
acaacuucaauauccaa

SEQ ID NO: 2862089 - RNA, 18 nt, Human
acaacuucccagugaauu

SEQ ID NO: 2862090 - RNA, 16 nt, Human
acaaguauacuuauau

SEQ ID NO: 2862091 - RNA, 19 nt, Human
acaaguauacuuauauuuc

SEQ ID NO: 2862092 - RNA, 22 nt, Human
acaaguaccaaaguuuuaucaa

SEQ ID NO: 2862093 - RNA, 15 nt, Human
acaaguaagagacuc

SEQ ID NO: 2862094 - RNA, 23 nt, Human
acaaguaagagacucagccugca

SEQ ID NO: 2862095 - RNA, 18 nt, Human
acaacuauccugacuucu

SEQ ID NO: 2862096 - RNA, 21 nt, Human
acaaguaugaauaaagacacc

SEQ ID NO: 2862097 - RNA, 23 nt, Human
acaaguaugaauaaagacaccua

SEQ ID NO: 2862098 - RNA, 15 nt, Human
acaaguccugugaau

SEQ ID NO: 2862099 - RNA, 20 nt, Human
acaaguccuggauguugugu

SEQ ID NO: 2862100 - RNA, 21 nt, Human
acaaguccuggauguugugug

SEQ ID NO: 2862101 - RNA, 16 nt, Human
acaaguccugugaauu

SEQ ID NO: 2862102 - RNA, 17 nt, Human
acaaguccugugaauuu

SEQ ID NO: 2862103 - RNA, 19 nt, Human
acaaguccugugaauuucu

SEQ ID NO: 2862104 - RNA, 13 nt, Human
acaagucuuccag

SEQ ID NO: 2862105 - RNA, 20 nt, Human
acaagugacuguaucugugu

SEQ ID NO: 2862106 - RNA, 19 nt, Human
acaagugacuguaucugug

SEQ ID NO: 2862107 - RNA, 18 nt, Human
acaagugacuguaucugu

SEQ ID NO: 2862108 - RNA, 23 nt, Human
acaagugaaauaacaaaauggac

SEQ ID NO: 2862109 - RNA, 22 nt, Human
acaagugacuguaucuguguag

SEQ ID NO: 2862110 - RNA, 15 nt, Human
acacaaaccugccug

SEQ ID NO: 2862111 - RNA, 13 nt, Human
acaauuuucuugu

SEQ ID NO: 2862112 - RNA, 18 nt, Human
acaauuuucuugugacag

SEQ ID NO: 2862113 - RNA, 17 nt, Human
acacaaacacauuguua

SEQ ID NO: 2862114 - RNA, 19 nt, Human
acacaaaccacaacugaca

SEQ ID NO: 2862115 - RNA, 20 nt, Human
acacaaaccacaacugacac

SEQ ID NO: 2862116 - RNA, 22 nt, Human
acacaaaccacaacugacacag

SEQ ID NO: 2862117 - RNA, 16 nt, Human
acacaaacuguaaaua

SEQ ID NO: 2862118 - RNA, 15 nt, Human
acacaaacuguaaau

SEQ ID NO: 2862119 - RNA, 14 nt, Human
acacaaacuguaaa

SEQ ID NO: 2862120 - RNA, 16 nt, Human
acacaaaccugccugg

SEQ ID NO: 2862121 - RNA, 17 nt, Human
acacaaaccugccuggg

SEQ ID NO: 2862122 - RNA, 21 nt, Human
acacagaaacacugccuuuuu

SEQ ID NO: 2862123 - RNA, 17 nt, Human
acacagaaacacugccu

SEQ ID NO: 2862124 - RNA, 16 nt, Human
acacagaaacacugcc

SEQ ID NO: 2862125 - RNA, 14 nt, Human
acacagaaacacug

SEQ ID NO: 2862126 - RNA, 13 nt, Human
acacagaaacacu

SEQ ID NO: 2862127 - RNA, 12 nt, Human
acacagaaacac

SEQ ID NO: 2862128 - RNA, 20 nt, Human
acacagaaaauguugagaau

SEQ ID NO: 2862129 - RNA, 19 nt, Human
acacaaacuguaaauaaaa

SEQ ID NO: 2862130 - RNA, 17 nt, Human
acaauuaauaguuuguc

SEQ ID NO: 2862131 - RNA, 11 nt, Human
acaauguuaag

SEQ ID NO: 2862132 - RNA, 15 nt, Human
acaauguguuuuucu

SEQ ID NO: 2862133 - RNA, 18 nt, Human
acaauguguuuuucucca

SEQ ID NO: 2862134 - RNA, 19 nt, Human
acaauguguuuuucuccag

SEQ ID NO: 2862135 - RNA, 21 nt, Human
acaauguggccgaggacuuug

SEQ ID NO: 2862136 - RNA, 14 nt, Human
acaauguuaaggaa

SEQ ID NO: 2862137 - RNA, 19 nt, Human
acaauguuaaggaaacucu

SEQ ID NO: 2862138 - RNA, 20 nt, Human
acaauguuaaggaaacucuu

SEQ ID NO: 2862139 - RNA, 21 nt, Human
acaauguuaaggaaacucuua

SEQ ID NO: 2862140 - RNA, 22 nt, Human
acaauguuaaggaaacucuuau

SEQ ID NO: 2862141 - RNA, 12 nt, Human
acaauguucuuu

SEQ ID NO: 2862142 - RNA, 13 nt, Human
acaauguucuuua

SEQ ID NO: 2862143 - RNA, 14 nt, Human
acaauguucuuuau

SEQ ID NO: 2862144 - RNA, 16 nt, Human
acaauguucuuuauau

SEQ ID NO: 2862145 - RNA, 17 nt, Human
acaauguucuuuauaua

SEQ ID NO: 2862146 - RNA, 16 nt, Human
acaauuuccuuuauau

SEQ ID NO: 2862147 - RNA, 17 nt, Human
acaauuuccuuuauauu

SEQ ID NO: 2862148 - RNA, 21 nt, Human
acaauuaaaaaccugauggaa

SEQ ID NO: 2862149 - RNA, 23 nt, Human
acaauuugggcuuccuguuugua

SEQ ID NO: 2862150 - RNA, 20 nt, Human
acaauuugcacuaaaucaga

SEQ ID NO: 2862151 - RNA, 20 nt, Human
acaauuuccuuuauauuuag

SEQ ID NO: 2862152 - RNA, 23 nt, Human
acaauuuccuuuauauuuaguga

SEQ ID NO: 2862153 - RNA, 13 nt, Human
acaauuugauaca

SEQ ID NO: 2862154 - RNA, 14 nt, Human
acaauuugauacau

SEQ ID NO: 2862155 - RNA, 15 nt, Human
acaauuugauacaua

SEQ ID NO: 2862156 - RNA, 16 nt, Human
acaauuugauacauaa

SEQ ID NO: 2862157 - RNA, 17 nt, Human
acaauuugauacauaau

SEQ ID NO: 2862158 - RNA, 18 nt, Human
acaauuugauacauaaua

SEQ ID NO: 2862159 - RNA, 21 nt, Human
acaauuugauacauaauaaaa

SEQ ID NO: 2862160 - RNA, 12 nt, Human
acaccagagccc

SEQ ID NO: 2862161 - RNA, 16 nt, Human
acacgcuccuuccucu

SEQ ID NO: 2862162 - RNA, 18 nt, Human
acaccagagcagaugcag

SEQ ID NO: 2862163 - RNA, 19 nt, Human
acaccagagcagaugcaga

SEQ ID NO: 2862164 - RNA, 20 nt, Human
acaccagagcagaugcagag

SEQ ID NO: 2862165 - RNA, 22 nt, Human
acaccagagcagaugcagagag

SEQ ID NO: 2862166 - RNA, 19 nt, Human
acacgcuccuuccucugag

SEQ ID NO: 2862167 - RNA, 17 nt, Human
acacgcuccuuccucug

SEQ ID NO: 2862168 - RNA, 14 nt, Human
acaccagacagaca

SEQ ID NO: 2862169 - RNA, 13 nt, Human
acaccagagcaga

SEQ ID NO: 2862170 - RNA, 17 nt, Human
acaccagagcagaugca

SEQ ID NO: 2862171 - RNA, 18 nt, Human
acaccacagacacacaca

SEQ ID NO: 2862172 - RNA, 21 nt, Human
acaccacagacacacacacgc

SEQ ID NO: 2862173 - RNA, 22 nt, Human
acaccacagacacacacacgca

SEQ ID NO: 2862174 - RNA, 17 nt, Human
acaccacacccagccuc

SEQ ID NO: 2862175 - RNA, 18 nt, Human
acaccacacccagccuca

SEQ ID NO: 2862176 - RNA, 12 nt, Human
acaccacagaca

SEQ ID NO: 2862177 - RNA, 13 nt, Human
acaccacagacac

SEQ ID NO: 2862178 - RNA, 14 nt, Human
acaccacagacaca

SEQ ID NO: 2862179 - RNA, 15 nt, Human
acaccacagacacac

SEQ ID NO: 2862180 - RNA, 16 nt, Human
acaccacagacacaca

SEQ ID NO: 2862181 - RNA, 17 nt, Human
acaccacagacacacac

SEQ ID NO: 2862182 - RNA, 12 nt, Human
acacagcucugu

SEQ ID NO: 2862183 - RNA, 11 nt, Human
acacagcucug

SEQ ID NO: 2862184 - RNA, 21 nt, Human
acacagcuaacacacagcucc

SEQ ID NO: 2862185 - RNA, 11 nt, Human
acaccacacac

SEQ ID NO: 2862186 - RNA, 12 nt, Human
acaccacacaca

SEQ ID NO: 2862187 - RNA, 13 nt, Human
acaccacacacaa

SEQ ID NO: 2862188 - RNA, 16 nt, Human
acaccacacacaacag

SEQ ID NO: 2862189 - RNA, 17 nt, Human
acaccacacacaacagc

SEQ ID NO: 2862190 - RNA, 19 nt, Human
acaccacacacaacagcca

SEQ ID NO: 2862191 - RNA, 20 nt, Human
acaccacacacaacagccaa

SEQ ID NO: 2862192 - RNA, 13 nt, Human
acaccacacccag

SEQ ID NO: 2862193 - RNA, 14 nt, Human
acaccacacccagc

SEQ ID NO: 2862194 - RNA, 15 nt, Human
acaccacacccagcc

SEQ ID NO: 2862195 - RNA, 16 nt, Human
acaccacacccagccu

SEQ ID NO: 2862196 - RNA, 11 nt, Human
acacagaccac

SEQ ID NO: 2862197 - RNA, 12 nt, Human
acacagaccacc

SEQ ID NO: 2862198 - RNA, 23 nt, Human
acacagacugcgauuugucccag

SEQ ID NO: 2862199 - RNA, 14 nt, Human
acacagccugggcc

SEQ ID NO: 2862200 - RNA, 20 nt, Human
acacagccugggccccagcu

SEQ ID NO: 2862201 - RNA, 17 nt, Human
acacagcgucccuagca

SEQ ID NO: 2862202 - RNA, 18 nt, Human
acacagcgucccuagcag

SEQ ID NO: 2862203 - RNA, 21 nt, Human
acacagcgucccuagcaguga

SEQ ID NO: 2862204 - RNA, 18 nt, Human
acacagccugggccccag

SEQ ID NO: 2862205 - RNA, 23 nt, Human
acacagacucauccugaacagca

SEQ ID NO: 2862206 - RNA, 19 nt, Human
acacagccugggccccagc

SEQ ID NO: 2862207 - RNA, 20 nt, Human
acacagcuaacacacagcuc

SEQ ID NO: 2862208 - RNA, 23 nt, Human
acacagcuaacacacagcuccca

SEQ ID NO: 2862209 - RNA, 15 nt, Human
acacagcuacagcuu

SEQ ID NO: 2862210 - RNA, 13 nt, Human
acacagaaaccuu

SEQ ID NO: 2862211 - RNA, 19 nt, Human
acacagaaaccuuuuuaaa

SEQ ID NO: 2862212 - RNA, 18 nt, Human
acacagaaaccuuuuuaa

SEQ ID NO: 2862213 - RNA, 21 nt, Human
acacagaaaccuuuuuaaaaa

SEQ ID NO: 2862214 - RNA, 12 nt, Human
acacagaaauau

SEQ ID NO: 2862215 - RNA, 14 nt, Human
acacagaaauauau

SEQ ID NO: 2862216 - RNA, 16 nt, Human
acacagaaauauauau

SEQ ID NO: 2862217 - RNA, 21 nt, Human
acacagaaauauauauacaua

SEQ ID NO: 2862218 - RNA, 15 nt, Human
acacuaaccacgcug

SEQ ID NO: 2862219 - RNA, 14 nt, Human
acacuaaccacgcu

SEQ ID NO: 2862220 - RNA, 18 nt, Human
acacggagcccagcccuc

SEQ ID NO: 2862221 - RNA, 22 nt, Human
acacggagcccagcccucccca

SEQ ID NO: 2862222 - RNA, 14 nt, Human
acacuaaaaauaaa

SEQ ID NO: 2862223 - RNA, 12 nt, Human
acacuaaaauuu

SEQ ID NO: 2862224 - RNA, 14 nt, Human
acacuaaaauuuua

SEQ ID NO: 2862225 - RNA, 15 nt, Human
acacuaaaauuuuag

SEQ ID NO: 2862226 - RNA, 18 nt, Human
acacuaaaauuuuaggca

SEQ ID NO: 2862227 - RNA, 15 nt, Human
acacgcuguucuaau

SEQ ID NO: 2862228 - RNA, 17 nt, Human
acacuaaagauccaaga

SEQ ID NO: 2862229 - RNA, 14 nt, Human
acacuaaccaaauc

SEQ ID NO: 2862230 - RNA, 18 nt, Human
acacuaaccaaaucucuc

SEQ ID NO: 2862231 - RNA, 14 nt, Human
acagcuccucccac

SEQ ID NO: 2862232 - RNA, 13 nt, Human
acagcucuagaca

SEQ ID NO: 2862233 - RNA, 15 nt, Human
acagcucugacuuua

SEQ ID NO: 2862234 - RNA, 17 nt, Human
acagcucugacuuuaca

SEQ ID NO: 2862235 - RNA, 14 nt, Human
acagcuccuucugu

SEQ ID NO: 2862236 - RNA, 13 nt, Human
acagcuccuucug

SEQ ID NO: 2862237 - RNA, 12 nt, Human
acagcuccuucu

SEQ ID NO: 2862238 - RNA, 23 nt, Human
acaggugugaaccaccacaccca

SEQ ID NO: 2862239 - RNA, 20 nt, Human
acaggugugaaccaccacac

SEQ ID NO: 2862240 - RNA, 22 nt, Human
acaggugugagccaccacgccc

SEQ ID NO: 2862241 - RNA, 15 nt, Human
acaggucccuccccu

SEQ ID NO: 2862242 - RNA, 13 nt, Human
acaggucuagacu

SEQ ID NO: 2862243 - RNA, 21 nt, Human
acaggugugagccaccacgcc

SEQ ID NO: 2862244 - RNA, 13 nt, Human
acaggucccuccc

SEQ ID NO: 2862245 - RNA, 13 nt, Human
acaggucccaccu

SEQ ID NO: 2862246 - RNA, 18 nt, Human
acaggucccaccuccagc

SEQ ID NO: 2862247 - RNA, 19 nt, Human
acaggucccaccuccagcc

SEQ ID NO: 2862248 - RNA, 20 nt, Human
acaggucccaccuccagccc

SEQ ID NO: 2862249 - RNA, 21 nt, Human
acaggucccaccuccagcccg

SEQ ID NO: 2862250 - RNA, 19 nt, Human
acaggucaggggugacaca

SEQ ID NO: 2862251 - RNA, 20 nt, Human
acaggucaggggugacacag

SEQ ID NO: 2862252 - RNA, 21 nt, Human
acaggucaggggugacacaga

SEQ ID NO: 2862253 - RNA, 22 nt, Human
acaggucaggggugacacagac

SEQ ID NO: 2862254 - RNA, 12 nt, Human
acagguauuuug

SEQ ID NO: 2862255 - RNA, 17 nt, Human
acagguauuuuguuucu

SEQ ID NO: 2862256 - RNA, 18 nt, Human
acagguauuuuguuucuu

SEQ ID NO: 2862257 - RNA, 21 nt, Human
acagguauuuuguuucuuuua

SEQ ID NO: 2862258 - RNA, 15 nt, Human
acagguaauauaaaa

SEQ ID NO: 2862259 - RNA, 18 nt, Human
acagguaaacuaucuugg

SEQ ID NO: 2862260 - RNA, 16 nt, Human
acaggcaagcaccucc

SEQ ID NO: 2862261 - RNA, 15 nt, Human
acaggcaagcaccuc

SEQ ID NO: 2862262 - RNA, 18 nt, Human
acaggcaagcaccuccug

SEQ ID NO: 2862263 - RNA, 21 nt, Human
acagcugcucaauaaaguaca

SEQ ID NO: 2862264 - RNA, 15 nt, Human
acagcucgauccaaa

SEQ ID NO: 2862265 - RNA, 12 nt, Human
acagcucuggcc

SEQ ID NO: 2862266 - RNA, 15 nt, Human
acagcucuggccaca

SEQ ID NO: 2862267 - RNA, 22 nt, Human
acaggggcgugaggucccagga

SEQ ID NO: 2862268 - RNA, 16 nt, Human
acaggggaggugauag

SEQ ID NO: 2862269 - RNA, 22 nt, Human
acaggggaggugauagcauugc

SEQ ID NO: 2862270 - RNA, 23 nt, Human
acaggggaggugauagcauugcu

SEQ ID NO: 2862271 - RNA, 18 nt, Human
acaggguaacugugcuga

SEQ ID NO: 2862272 - RNA, 23 nt, Human
acaggguaacugugcugaaugcu

SEQ ID NO: 2862273 - RNA, 20 nt, Human
acagccacuccccuccacuc

SEQ ID NO: 2862274 - RNA, 14 nt, Human
acagccagggggau

SEQ ID NO: 2862275 - RNA, 19 nt, Human
acagccacggccaggccag

SEQ ID NO: 2862276 - RNA, 16 nt, Human
acagcauggcacuccc

SEQ ID NO: 2862277 - RNA, 17 nt, Human
acagcauggcacucccu

SEQ ID NO: 2862278 - RNA, 23 nt, Human
acagcauggcacucccuccagca

SEQ ID NO: 2862279 - RNA, 14 nt, Human
acagcaucuguagu

SEQ ID NO: 2862280 - RNA, 12 nt, Human
acagcaugugcc

SEQ ID NO: 2862281 - RNA, 15 nt, Human
acagcaugugcccuc

SEQ ID NO: 2862282 - RNA, 16 nt, Human
acagcaugugcccucc

SEQ ID NO: 2862283 - RNA, 18 nt, Human
acagcaugugcccuccug

SEQ ID NO: 2862284 - RNA, 20 nt, Human
acagcaugugcccuccugag

SEQ ID NO: 2862285 - RNA, 21 nt, Human
acagccagugggagauguuag

SEQ ID NO: 2862286 - RNA, 16 nt, Human
acagccaugcccgcau

SEQ ID NO: 2862287 - RNA, 13 nt, Human
acagcaguguucc

SEQ ID NO: 2862288 - RNA, 19 nt, Human
acagcaguguuccccaucu

SEQ ID NO: 2862289 - RNA, 21 nt, Human
acagcauccccaaaacaaagu

SEQ ID NO: 2862290 - RNA, 22 nt, Human
acagcauccccaaaacaaaguc

SEQ ID NO: 2862291 - RNA, 19 nt, Human
acagagucucacuguugcc

SEQ ID NO: 2862292 - RNA, 17 nt, Human
acagagucucacuguug

SEQ ID NO: 2862293 - RNA, 13 nt, Human
acagcaguagaca

SEQ ID NO: 2862294 - RNA, 15 nt, Human
acagcaguagacauu

SEQ ID NO: 2862295 - RNA, 16 nt, Human
acagcaguagacauuu

SEQ ID NO: 2862296 - RNA, 20 nt, Human
acagcaguagacauuuuaac

SEQ ID NO: 2862297 - RNA, 24 nt, Human
acagcaguagacauuuuaacaaga

SEQ ID NO: 2862298 - RNA, 18 nt, Human
acagcagguccuccaucc

SEQ ID NO: 2862299 - RNA, 14 nt, Human
acagagucucacug

SEQ ID NO: 2862300 - RNA, 12 nt, Human
acagagucucac

SEQ ID NO: 2862301 - RNA, 13 nt, Human
acagaguaagaca

SEQ ID NO: 2862302 - RNA, 14 nt, Human
acagaguaagacau

SEQ ID NO: 2862303 - RNA, 15 nt, Human
acagaguaagacauu

SEQ ID NO: 2862304 - RNA, 16 nt, Human
acagaguaagacauug

SEQ ID NO: 2862305 - RNA, 17 nt, Human
acagaguaagacauugg

SEQ ID NO: 2862306 - RNA, 19 nt, Human
acagagggucacaguguuu

SEQ ID NO: 2862307 - RNA, 22 nt, Human
acagagggucacaguguuuaca

SEQ ID NO: 2862308 - RNA, 23 nt, Human
acagaguaugaacaccugggcuu

SEQ ID NO: 2862309 - RNA, 18 nt, Human
acagaagucaugaagccc

SEQ ID NO: 2862310 - RNA, 13 nt, Human
acagaaguccugu

SEQ ID NO: 2862311 - RNA, 14 nt, Human
acagaaguccugua

SEQ ID NO: 2862312 - RNA, 15 nt, Human
acagaaguccuguau

SEQ ID NO: 2862313 - RNA, 21 nt, Human
acagaaguccuguaugucugu

SEQ ID NO: 2862314 - RNA, 22 nt, Human
acagaaguccuguaugucuguc

SEQ ID NO: 2862315 - RNA, 22 nt, Human
acacugccuuuuuauuuauaug

SEQ ID NO: 2862316 - RNA, 23 nt, Human
acacugccuuuuuauuuauaugu

SEQ ID NO: 2862317 - RNA, 18 nt, Human
acacugcgcuuuauuuuc

SEQ ID NO: 2862318 - RNA, 21 nt, Human
acacugcgcuuuauuuucuua

SEQ ID NO: 2862319 - RNA, 20 nt, Human
acacugccuuuuuauuuaua

SEQ ID NO: 2862320 - RNA, 19 nt, Human
acacugccuuuuuauuuau

SEQ ID NO: 2862321 - RNA, 16 nt, Human
acacugccugggcuga

SEQ ID NO: 2862322 - RNA, 14 nt, Human
acacugccuguaua

SEQ ID NO: 2862323 - RNA, 16 nt, Human
acacugccuguauacu

SEQ ID NO: 2862324 - RNA, 18 nt, Human
acacugccuguauacuuu

SEQ ID NO: 2862325 - RNA, 19 nt, Human
acacugccuguauacuuua

SEQ ID NO: 2862326 - RNA, 20 nt, Human
acacugccuguauacuuuag

SEQ ID NO: 2862327 - RNA, 22 nt, Human
acacugccuguauacuuuagua

SEQ ID NO: 2862328 - RNA, 15 nt, Human
acacugccugggcug

SEQ ID NO: 2862329 - RNA, 14 nt, Human
acacugccugggcu

SEQ ID NO: 2862330 - RNA, 13 nt, Human
acacugccugggc

SEQ ID NO: 2862331 - RNA, 12 nt, Human
acacugccuggg

SEQ ID NO: 2862332 - RNA, 17 nt, Human
acacugucaugcuucau

SEQ ID NO: 2862333 - RNA, 21 nt, Human
acacugucaugcuucaucauu

SEQ ID NO: 2862334 - RNA, 21 nt, Human
acacuguauuuguaucucuga

SEQ ID NO: 2862335 - RNA, 22 nt, Human
acacugucugguuucaccgagg

SEQ ID NO: 2862336 - RNA, 13 nt, Human
acacugugacaca

SEQ ID NO: 2862337 - RNA, 15 nt, Human
acacugugacacacu

SEQ ID NO: 2862338 - RNA, 18 nt, Human
acacugugacacacuaca

SEQ ID NO: 2862339 - RNA, 19 nt, Human
acacugugacacacuacac

SEQ ID NO: 2862340 - RNA, 13 nt, Human
acacugugcuaua

SEQ ID NO: 2862341 - RNA, 15 nt, Human
acacugugcuauaaa

SEQ ID NO: 2862342 - RNA, 22 nt, Human
acacugugcccagcccggaccu

SEQ ID NO: 2862343 - RNA, 23 nt, Human
acacugugcccagcccggaccuu

SEQ ID NO: 2862344 - RNA, 21 nt, Human
acagaacacauaauucaggaa

SEQ ID NO: 2862345 - RNA, 18 nt, Human
acagaacagcuucagguu

SEQ ID NO: 2862346 - RNA, 20 nt, Human
acagaacagcuucagguuau

SEQ ID NO: 2862347 - RNA, 13 nt, Human
acagaacaggguc

SEQ ID NO: 2862348 - RNA, 14 nt, Human
acagaacaggguca

SEQ ID NO: 2862349 - RNA, 15 nt, Human
acagaacagggucau

SEQ ID NO: 2862350 - RNA, 12 nt, Human
acagaacagcuu

SEQ ID NO: 2862351 - RNA, 13 nt, Human
acagaacagcuuc

SEQ ID NO: 2862352 - RNA, 14 nt, Human
acagaacagcuuca

SEQ ID NO: 2862353 - RNA, 15 nt, Human
acagaacagcuucag

SEQ ID NO: 2862354 - RNA, 16 nt, Human
acagaacagcuucagg

SEQ ID NO: 2862355 - RNA, 17 nt, Human
acagaacagcuucaggu

SEQ ID NO: 2862356 - RNA, 18 nt, Human
acagaagcacaugcaccu

SEQ ID NO: 2862357 - RNA, 14 nt, Human
acagaagcacaugc

SEQ ID NO: 2862358 - RNA, 17 nt, Human
acagaagucaugaagcc

SEQ ID NO: 2862359 - RNA, 22 nt, Human
acagaagcaguugagucgucau

SEQ ID NO: 2862360 - RNA, 12 nt, Human
acagaagcauuu

SEQ ID NO: 2862361 - RNA, 13 nt, Human
acagaagcauuug

SEQ ID NO: 2862362 - RNA, 14 nt, Human
acagaagcauuugu

SEQ ID NO: 2862363 - RNA, 15 nt, Human
acagaagcauuugua

SEQ ID NO: 2862364 - RNA, 16 nt, Human
acagaagcauuuguau

SEQ ID NO: 2862365 - RNA, 17 nt, Human
acagaagcauuuguauu

SEQ ID NO: 2862366 - RNA, 20 nt, Human
acagaagcauuuguauuuug

SEQ ID NO: 2862367 - RNA, 21 nt, Human
acagaagcauuuguauuuugu

SEQ ID NO: 2862368 - RNA, 22 nt, Human
acagaagcauuuguauuuugug

SEQ ID NO: 2862369 - RNA, 23 nt, Human
acagaagcauuuguauuuugugu

SEQ ID NO: 2862370 - RNA, 22 nt, Human
acacugccaucuuaguuuggau

SEQ ID NO: 2862371 - RNA, 15 nt, Human
acacugcccucgcac

SEQ ID NO: 2862372 - RNA, 22 nt, Human
acacugaugcuuagauguucca

SEQ ID NO: 2862373 - RNA, 14 nt, Human
acacugagcuguca

SEQ ID NO: 2862374 - RNA, 17 nt, Human
acacugaccauccacuc

SEQ ID NO: 2862375 - RNA, 22 nt, Human
acacugaccuuggagagacaca

SEQ ID NO: 2862376 - RNA, 23 nt, Human
acacugaccuuggagagacacag

SEQ ID NO: 2862377 - RNA, 13 nt, Human
acacugacuugag

SEQ ID NO: 2862378 - RNA, 14 nt, Human
acauguuauauauu

SEQ ID NO: 2862379 - RNA, 15 nt, Human
acauguuauauauuu

SEQ ID NO: 2862380 - RNA, 14 nt, Human
acauguuguaaauu

SEQ ID NO: 2862381 - RNA, 21 nt, Human
acauguuguaaauuaggaggc

SEQ ID NO: 2862382 - RNA, 21 nt, Human
acaugcaauuuauuaaaauga

SEQ ID NO: 2862383 - RNA, 11 nt, Human
acaugcacaca

SEQ ID NO: 2862384 - RNA, 12 nt, Human
acaugcacacac

SEQ ID NO: 2862385 - RNA, 21 nt, Human
acauuaaaggcauaaaugacu

SEQ ID NO: 2862386 - RNA, 23 nt, Human
acauguuuuuguuuucuuugaau

SEQ ID NO: 2862387 - RNA, 15 nt, Human
acauuaaaaaaugaa

SEQ ID NO: 2862388 - RNA, 14 nt, Human
acauuaaaaaugga

SEQ ID NO: 2862389 - RNA, 15 nt, Human
acauuaaaaauggaa

SEQ ID NO: 2862390 - RNA, 16 nt, Human
acauuaaaaauggaac

SEQ ID NO: 2862391 - RNA, 18 nt, Human
acauaaagguaaaacaaa

SEQ ID NO: 2862392 - RNA, 11 nt, Human
acaucagccag

SEQ ID NO: 2862393 - RNA, 12 nt, Human
acaucagccagc

SEQ ID NO: 2862394 - RNA, 13 nt, Human
acaucagccagcu

SEQ ID NO: 2862395 - RNA, 14 nt, Human
acaucagccagcug

SEQ ID NO: 2862396 - RNA, 20 nt, Human
acauaaauugcauaaagcau

SEQ ID NO: 2862397 - RNA, 11 nt, Human
acauaaaugca

SEQ ID NO: 2862398 - RNA, 16 nt, Human
acauaaaugcagccca

SEQ ID NO: 2862399 - RNA, 17 nt, Human
acauaaaugcagcccau

SEQ ID NO: 2862400 - RNA, 16 nt, Human
acaucgcgaugggaac

SEQ ID NO: 2862401 - RNA, 18 nt, Human
acauccuuugcagggcag

SEQ ID NO: 2862402 - RNA, 19 nt, Human
acauccuuugcagggcagc

SEQ ID NO: 2862403 - RNA, 20 nt, Human
acauccuuugcagggcagcc

SEQ ID NO: 2862404 - RNA, 21 nt, Human
acauccuuugcagggcagccc

SEQ ID NO: 2862405 - RNA, 23 nt, Human
acauccuuugcagggcagcccca

SEQ ID NO: 2862406 - RNA, 12 nt, Human
acauccacccca

SEQ ID NO: 2862407 - RNA, 18 nt, Human
acauccauguuuguaaaa

SEQ ID NO: 2862408 - RNA, 14 nt, Human
acaucccagcccaa

SEQ ID NO: 2862409 - RNA, 23 nt, Human
acaucccagcccaauccagguac

SEQ ID NO: 2862410 - RNA, 11 nt, Human
acauccauguc

SEQ ID NO: 2862411 - RNA, 13 nt, Human
acauccauguccu

SEQ ID NO: 2862412 - RNA, 21 nt, Human
acauccauguccuauguguga

SEQ ID NO: 2862413 - RNA, 20 nt, Human
acauccauguuuguaaaacu

SEQ ID NO: 2862414 - RNA, 13 nt, Human
acauccauuccca

SEQ ID NO: 2862415 - RNA, 17 nt, Human
acauccauucccaagaa

SEQ ID NO: 2862416 - RNA, 18 nt, Human
acauccauucccaagaaa

SEQ ID NO: 2862417 - RNA, 20 nt, Human
acauccauucccaagaaaug

SEQ ID NO: 2862418 - RNA, 21 nt, Human
acauccauucccaagaaaugc

SEQ ID NO: 2862419 - RNA, 22 nt, Human
acauaaaaaggacaucagcaaa

SEQ ID NO: 2862420 - RNA, 21 nt, Human
acauaaaaaggacaucagcaa

SEQ ID NO: 2862421 - RNA, 20 nt, Human
acauaaaaaggacaucagca

SEQ ID NO: 2862422 - RNA, 14 nt, Human
acauaaaagaauuu

SEQ ID NO: 2862423 - RNA, 11 nt, Human
acauaaaacaa

SEQ ID NO: 2862424 - RNA, 14 nt, Human
acauaaaaaggaca

SEQ ID NO: 2862425 - RNA, 13 nt, Human
acauaaacaauga

SEQ ID NO: 2862426 - RNA, 16 nt, Human
acauaaagccauguuu

SEQ ID NO: 2862427 - RNA, 15 nt, Human
acauaaaaaggacau

SEQ ID NO: 2862428 - RNA, 16 nt, Human
acagguuuucacauaa

SEQ ID NO: 2862429 - RNA, 15 nt, Human
acagguuggaagaga

SEQ ID NO: 2862430 - RNA, 16 nt, Human
acagguuggaagagaa

SEQ ID NO: 2862431 - RNA, 20 nt, Human
acagguuggaagagaaucac

SEQ ID NO: 2862432 - RNA, 12 nt, Human
acauuuggaaua

SEQ ID NO: 2862433 - RNA, 20 nt, Human
acauuuggaacuaacacgug

SEQ ID NO: 2862434 - RNA, 21 nt, Human
acauuuggaacuaacacguga

SEQ ID NO: 2862435 - RNA, 15 nt, Human
acauuuguacagaau

SEQ ID NO: 2862436 - RNA, 17 nt, Human
acauuuguacagaauuu

SEQ ID NO: 2862437 - RNA, 17 nt, Human
accaacguuacucaggg

SEQ ID NO: 2862438 - RNA, 20 nt, Human
accaacguuacucagggcuc

SEQ ID NO: 2862439 - RNA, 21 nt, Human
accaacguuacucagggcucc

SEQ ID NO: 2862440 - RNA, 23 nt, Human
accaacugucacucauugcugag

SEQ ID NO: 2862441 - RNA, 11 nt, Human
accaacugugu

SEQ ID NO: 2862442 - RNA, 13 nt, Human
accaacuguguug

SEQ ID NO: 2862443 - RNA, 15 nt, Human
accaacuguguugua

SEQ ID NO: 2862444 - RNA, 16 nt, Human
accaacuguguuguau

SEQ ID NO: 2862445 - RNA, 18 nt, Human
accaacuguguuguauua

SEQ ID NO: 2862446 - RNA, 21 nt, Human
accaacuguguuguauuaaca

SEQ ID NO: 2862447 - RNA, 22 nt, Human
accaacuguguuguauuaacaa

SEQ ID NO: 2862448 - RNA, 23 nt, Human
accaacuguguuguauuaacaaa

SEQ ID NO: 2862449 - RNA, 14 nt, Human
accaacugggccca

SEQ ID NO: 2862450 - RNA, 14 nt, Human
acauuuguaguuga

SEQ ID NO: 2862451 - RNA, 17 nt, Human
acauuuguaguuggagu

SEQ ID NO: 2862452 - RNA, 18 nt, Human
acauuuggaauacuuuuu

SEQ ID NO: 2862453 - RNA, 17 nt, Human
acauuuggaauacuuuu

SEQ ID NO: 2862454 - RNA, 16 nt, Human
acauuuggaauacuuu

SEQ ID NO: 2862455 - RNA, 15 nt, Human
acauuuggaauacuu

SEQ ID NO: 2862456 - RNA, 19 nt, Human
acauuuggauaaacaacau

SEQ ID NO: 2862457 - RNA, 17 nt, Human
accagcaucaccugccu

SEQ ID NO: 2862458 - RNA, 16 nt, Human
accagcaucaccugcc

SEQ ID NO: 2862459 - RNA, 17 nt, Human
accacuacaugcagccc

SEQ ID NO: 2862460 - RNA, 16 nt, Human
accacuaacuccugag

SEQ ID NO: 2862461 - RNA, 17 nt, Human
accacuaacuccugaga

SEQ ID NO: 2862462 - RNA, 20 nt, Human
accacgcccggcuaauuuuu

SEQ ID NO: 2862463 - RNA, 14 nt, Human
accacgcccggcua

SEQ ID NO: 2862464 - RNA, 11 nt, Human
accaaggaaac

SEQ ID NO: 2862465 - RNA, 20 nt, Human
accaaggaaacgcuaccucu

SEQ ID NO: 2862466 - RNA, 21 nt, Human
accaaggaaacgcuaccucuc

SEQ ID NO: 2862467 - RNA, 13 nt, Human
accaacuuucugu

SEQ ID NO: 2862468 - RNA, 17 nt, Human
accaagcuauccuggcu

SEQ ID NO: 2862469 - RNA, 14 nt, Human
accaagcuauuccu

SEQ ID NO: 2862470 - RNA, 19 nt, Human
accaagcuauuccuuuccc

SEQ ID NO: 2862471 - RNA, 21 nt, Human
accaagcuauuccuuucccuu

SEQ ID NO: 2862472 - RNA, 22 nt, Human
accaagcuauuccuuucccuuc

SEQ ID NO: 2862473 - RNA, 15 nt, Human
accaagcuauccugg

SEQ ID NO: 2862474 - RNA, 14 nt, Human
accaacuuucugua

SEQ ID NO: 2862475 - RNA, 12 nt, Human
accaacuuucug

SEQ ID NO: 2862476 - RNA, 20 nt, Human
accaacuugguucugcuuca

SEQ ID NO: 2862477 - RNA, 22 nt, Human
accaacuugguucugcuucaau

SEQ ID NO: 2862478 - RNA, 19 nt, Human
accagcaucaccugccugu

SEQ ID NO: 2862479 - RNA, 18 nt, Human
accagcaucaccugccug

SEQ ID NO: 2862480 - RNA, 22 nt, Human
accagcaucccuugaccaggcc

SEQ ID NO: 2862481 - RNA, 10 nt, Human
accaacugug

SEQ ID NO: 2862482 - RNA, 12 nt, Human
acccaauuuccc

SEQ ID NO: 2862483 - RNA, 14 nt, Human
acccacaaaaaugu

SEQ ID NO: 2862484 - RNA, 14 nt, Human
acccaauccaaaug

SEQ ID NO: 2862485 - RNA, 13 nt, Human
acccaauccaaau

SEQ ID NO: 2862486 - RNA, 19 nt, Human
acccaucuaguacuugaaa

SEQ ID NO: 2862487 - RNA, 13 nt, Human
acccaucugggcu

SEQ ID NO: 2862488 - RNA, 11 nt, Human
acccaugaaaa

SEQ ID NO: 2862489 - RNA, 17 nt, Human
acccaagggcagaaagu

SEQ ID NO: 2862490 - RNA, 20 nt, Human
acccaagggcagaaaguaga

SEQ ID NO: 2862491 - RNA, 17 nt, Human
acccaauagcugcccau

SEQ ID NO: 2862492 - RNA, 21 nt, Human
acccaauagcugcccauuucg

SEQ ID NO: 2862493 - RNA, 13 nt, Human
acccaaggacuga

SEQ ID NO: 2862494 - RNA, 20 nt, Human
acccaugaggcaaugucagg

SEQ ID NO: 2862495 - RNA, 13 nt, Human
acccaugaggcaa

SEQ ID NO: 2862496 - RNA, 20 nt, Human
acccaugaagacaggacagu

SEQ ID NO: 2862497 - RNA, 12 nt, Human
acccaugaagau

SEQ ID NO: 2862498 - RNA, 19 nt, Human
acccaugaagacaggacag

SEQ ID NO: 2862499 - RNA, 23 nt, Human
acccaugacuuuauauggaugau

SEQ ID NO: 2862500 - RNA, 14 nt, Human
acccauuuucacau

SEQ ID NO: 2862501 - RNA, 16 nt, Human
accccaaacaccuucc

SEQ ID NO: 2862502 - RNA, 18 nt, Human
accccaaacaccuuccag

SEQ ID NO: 2862503 - RNA, 20 nt, Human
accccaaacaccuuccagcu

SEQ ID NO: 2862504 - RNA, 23 nt, Human
accccaaacaccuuccagcuccu

SEQ ID NO: 2862505 - RNA, 19 nt, Human
accccgccugcccucaugg

SEQ ID NO: 2862506 - RNA, 13 nt, Human
accccggcaggcc

SEQ ID NO: 2862507 - RNA, 14 nt, Human
accccggcaggccc

SEQ ID NO: 2862508 - RNA, 15 nt, Human
accccggcaggcccu

SEQ ID NO: 2862509 - RNA, 16 nt, Human
accccggcaggcccug

SEQ ID NO: 2862510 - RNA, 17 nt, Human
accccggcaggcccugc

SEQ ID NO: 2862511 - RNA, 18 nt, Human
accccggcaggcccugca

SEQ ID NO: 2862512 - RNA, 19 nt, Human
accccggcaggcccugcag

SEQ ID NO: 2862513 - RNA, 20 nt, Human
accccggcaggcccugcagu

SEQ ID NO: 2862514 - RNA, 21 nt, Human
accccggcaggcccugcagug

SEQ ID NO: 2862515 - RNA, 22 nt, Human
accccggcaggcccugcagugu

SEQ ID NO: 2862516 - RNA, 15 nt, Human
accccgggcucucug

SEQ ID NO: 2862517 - RNA, 13 nt, Human
accccgggcucuc

SEQ ID NO: 2862518 - RNA, 21 nt, Human
accccgggcucucugcuguac

SEQ ID NO: 2862519 - RNA, 18 nt, Human
accccgggcucucugcug

SEQ ID NO: 2862520 - RNA, 17 nt, Human
accccgggcucucugcu

SEQ ID NO: 2862521 - RNA, 16 nt, Human
accccgggcucucugc

SEQ ID NO: 2862522 - RNA, 21 nt, Human
accccgguggcggccccagca

SEQ ID NO: 2862523 - RNA, 19 nt, Human
accccgguggcggccccag

SEQ ID NO: 2862524 - RNA, 20 nt, Human
accccgucgaggggcucuca

SEQ ID NO: 2862525 - RNA, 15 nt, Human
accccguuacagcuc

SEQ ID NO: 2862526 - RNA, 18 nt, Human
accccguuacagcucccc

SEQ ID NO: 2862527 - RNA, 20 nt, Human
accccguuacagcuccccaa

SEQ ID NO: 2862528 - RNA, 22 nt, Human
accccuaaagagauacuuugau

SEQ ID NO: 2862529 - RNA, 14 nt, Human
accccuaguucccu

SEQ ID NO: 2862530 - RNA, 15 nt, Human
accccuaguucccuc

SEQ ID NO: 2862531 - RNA, 17 nt, Human
accccuaguucccucug

SEQ ID NO: 2862532 - RNA, 19 nt, Human
accccuaguucccucugcu

SEQ ID NO: 2862533 - RNA, 20 nt, Human
accccuaguucccucugcuc

SEQ ID NO: 2862534 - RNA, 21 nt, Human
accccuaguucccucugcuca

SEQ ID NO: 2862535 - RNA, 14 nt, Human
accccgccugcccu

SEQ ID NO: 2862536 - RNA, 14 nt, Human
accccgaggcccug

SEQ ID NO: 2862537 - RNA, 15 nt, Human
accccgaggcccugc

SEQ ID NO: 2862538 - RNA, 16 nt, Human
accccgaggcccugca

SEQ ID NO: 2862539 - RNA, 17 nt, Human
accccgaggcccugcau

SEQ ID NO: 2862540 - RNA, 20 nt, Human
accccgaggcccugcauggg

SEQ ID NO: 2862541 - RNA, 17 nt, Human
accccgauguggaccuc

SEQ ID NO: 2862542 - RNA, 18 nt, Human
accccgaccaccugccca

SEQ ID NO: 2862543 - RNA, 23 nt, Human
acccccuucucugcuccaccaca

SEQ ID NO: 2862544 - RNA, 20 nt, Human
acccccuucucugcuccacc

SEQ ID NO: 2862545 - RNA, 19 nt, Human
acccccuucucugcuccac

SEQ ID NO: 2862546 - RNA, 18 nt, Human
acccccuucucugcucca

SEQ ID NO: 2862547 - RNA, 17 nt, Human
acccccuucucugcucc

SEQ ID NO: 2862548 - RNA, 14 nt, Human
acccccuucucugc

SEQ ID NO: 2862549 - RNA, 16 nt, Human
acccccuucucugcuc

SEQ ID NO: 2862550 - RNA, 18 nt, Human
accccaaagccccuugcu

SEQ ID NO: 2862551 - RNA, 16 nt, Human
accccaaagccccuug

SEQ ID NO: 2862552 - RNA, 15 nt, Human
accccaaagccccuu

SEQ ID NO: 2862553 - RNA, 15 nt, Human
accccaacaaaccau

SEQ ID NO: 2862554 - RNA, 14 nt, Human
accaucaugucugg

SEQ ID NO: 2862555 - RNA, 17 nt, Human
accaucaugucuggcua

SEQ ID NO: 2862556 - RNA, 16 nt, Human
accaucaugucuggcu

SEQ ID NO: 2862557 - RNA, 15 nt, Human
acccaagcuuagaac

SEQ ID NO: 2862558 - RNA, 13 nt, Human
acccaagcuccuc

SEQ ID NO: 2862559 - RNA, 15 nt, Human
acccaagcuccuccu

SEQ ID NO: 2862560 - RNA, 17 nt, Human
acccaaggaaaacugca

SEQ ID NO: 2862561 - RNA, 21 nt, Human
acccaaggaaaacugcaugga

SEQ ID NO: 2862562 - RNA, 17 nt, Human
acccaaggacugaggga

SEQ ID NO: 2862563 - RNA, 15 nt, Human
acccaaggagcacag

SEQ ID NO: 2862564 - RNA, 16 nt, Human
acccaaggagcacagg

SEQ ID NO: 2862565 - RNA, 19 nt, Human
acccaaggagcacaggucc

SEQ ID NO: 2862566 - RNA, 21 nt, Human
acccaaggagcacagguccca

SEQ ID NO: 2862567 - RNA, 22 nt, Human
acccaaggagcacaggucccac

SEQ ID NO: 2862568 - RNA, 14 nt, Human
accccuaagagacu

SEQ ID NO: 2862569 - RNA, 16 nt, Human
accccuacaugaaaca

SEQ ID NO: 2862570 - RNA, 13 nt, Human
accccuaccccug

SEQ ID NO: 2862571 - RNA, 22 nt, Human
acuucuuuuauaacuaguccuu

SEQ ID NO: 2862572 - RNA, 15 nt, Human
acuucuuuuauaacu

SEQ ID NO: 2862573 - RNA, 21 nt, Human
acuucuuugcuuugcccagca

SEQ ID NO: 2862574 - RNA, 16 nt, Human
acuucuuugcuuugcc

SEQ ID NO: 2862575 - RNA, 18 nt, Human
acuucuuugcuuugccca

SEQ ID NO: 2862576 - RNA, 20 nt, Human
acuucuuugcuuugcccagc

SEQ ID NO: 2862577 - RNA, 12 nt, Human
acuucuuucuau

SEQ ID NO: 2862578 - RNA, 13 nt, Human
acuucuuucuauu

SEQ ID NO: 2862579 - RNA, 14 nt, Human
acuucuuucuauuu

SEQ ID NO: 2862580 - RNA, 18 nt, Human
acuucugccauauucugu

SEQ ID NO: 2862581 - RNA, 20 nt, Human
acuuguaaaugugguaaaga

SEQ ID NO: 2862582 - RNA, 17 nt, Human
acuuguaauauuuuuau

SEQ ID NO: 2862583 - RNA, 22 nt, Human
acuuguaauauuuuuauauaca

SEQ ID NO: 2862584 - RNA, 18 nt, Human
acuuguaaaugugguaaa

SEQ ID NO: 2862585 - RNA, 19 nt, Human
acuucuuuugcucuuagcu

SEQ ID NO: 2862586 - RNA, 13 nt, Human
acuuauuuaaugc

SEQ ID NO: 2862587 - RNA, 18 nt, Human
acuguuuuggguagcugc

SEQ ID NO: 2862588 - RNA, 19 nt, Human
acuguuuuggguagcugcc

SEQ ID NO: 2862589 - RNA, 22 nt, Human
acuguuuucucucggcucccca

SEQ ID NO: 2862590 - RNA, 23 nt, Human
acuguuuucucucggcuccccau

SEQ ID NO: 2862591 - RNA, 13 nt, Human
acuuauuguaaau

SEQ ID NO: 2862592 - RNA, 19 nt, Human
acuuauuguggauaacaaa

SEQ ID NO: 2862593 - RNA, 20 nt, Human
acuuauuguggauaacaaag

SEQ ID NO: 2862594 - RNA, 21 nt, Human
acuuauuguggauaacaaaga

SEQ ID NO: 2862595 - RNA, 22 nt, Human
acuuauuguggauaacaaagau

SEQ ID NO: 2862596 - RNA, 15 nt, Human
acuguuuauuucugu

SEQ ID NO: 2862597 - RNA, 19 nt, Human
acuguuuauuucuguuucu

SEQ ID NO: 2862598 - RNA, 22 nt, Human
acuguuuauuucuguuucucau

SEQ ID NO: 2862599 - RNA, 17 nt, Human
acuguuuauauguguug

SEQ ID NO: 2862600 - RNA, 21 nt, Human
acuguuuauauguguugaaaa

SEQ ID NO: 2862601 - RNA, 14 nt, Human
acuguuuuaucugg

SEQ ID NO: 2862602 - RNA, 13 nt, Human
acuguuuucaaau

SEQ ID NO: 2862603 - RNA, 18 nt, Human
acuguuuaauguucugug

SEQ ID NO: 2862604 - RNA, 20 nt, Human
acuguuuaauguucugugau

SEQ ID NO: 2862605 - RNA, 14 nt, Human
acuggaagcacagc

SEQ ID NO: 2862606 - RNA, 15 nt, Human
acuggaagcacagcu

SEQ ID NO: 2862607 - RNA, 21 nt, Human
acugccacacucuccaucacc

SEQ ID NO: 2862608 - RNA, 16 nt, Human
acugccacuuugcaca

SEQ ID NO: 2862609 - RNA, 17 nt, Human
acugccacuuugcacau

SEQ ID NO: 2862610 - RNA, 18 nt, Human
acugccacuuugcacauu

SEQ ID NO: 2862611 - RNA, 20 nt, Human
acugccacuuugcacauuuu

SEQ ID NO: 2862612 - RNA, 22 nt, Human
acugccacuuugcacauuuuga

SEQ ID NO: 2862613 - RNA, 18 nt, Human
acugcccccucugcccug

SEQ ID NO: 2862614 - RNA, 19 nt, Human
acugcccccucugcccugc

SEQ ID NO: 2862615 - RNA, 20 nt, Human
acugcccccucugcccugcg

SEQ ID NO: 2862616 - RNA, 14 nt, Human
acuggacuccggcc

SEQ ID NO: 2862617 - RNA, 16 nt, Human
acuggacuccggcccu

SEQ ID NO: 2862618 - RNA, 19 nt, Human
acuggacuccggcccuccu

SEQ ID NO: 2862619 - RNA, 14 nt, Human
acuggacucuucaa

SEQ ID NO: 2862620 - RNA, 19 nt, Human
acuggacucuucaaaaacu

SEQ ID NO: 2862621 - RNA, 22 nt, Human
acuggacucuucaaaaacuguu

SEQ ID NO: 2862622 - RNA, 18 nt, Human
acuggacuccggcccucc

SEQ ID NO: 2862623 - RNA, 22 nt, Human
acuggacuugagcuuggcagcu

SEQ ID NO: 2862624 - RNA, 14 nt, Human
acugggugucauuu

SEQ ID NO: 2862625 - RNA, 17 nt, Human
acugggugucauuucau

SEQ ID NO: 2862626 - RNA, 20 nt, Human
acugggugucauuucauucc

SEQ ID NO: 2862627 - RNA, 21 nt, Human
acugggugucauuucauucca

SEQ ID NO: 2862628 - RNA, 22 nt, Human
acugggugucauuucauuccau

SEQ ID NO: 2862629 - RNA, 20 nt, Human
acuggguuucucuguauagu

SEQ ID NO: 2862630 - RNA, 20 nt, Human
acuggguugacuuucaggua

SEQ ID NO: 2862631 - RNA, 13 nt, Human
acuggguugacuu

SEQ ID NO: 2862632 - RNA, 12 nt, Human
acucuuaaagca

SEQ ID NO: 2862633 - RNA, 13 nt, Human
acucuuaaagcaa

SEQ ID NO: 2862634 - RNA, 23 nt, Human
acugaaggcagcauguauaguug

SEQ ID NO: 2862635 - RNA, 13 nt, Human
acugaagugcuua

SEQ ID NO: 2862636 - RNA, 17 nt, Human
acugaagugcuuagugu

SEQ ID NO: 2862637 - RNA, 16 nt, Human
acugaaggugauucac

SEQ ID NO: 2862638 - RNA, 19 nt, Human
acugaaguagugugcaguu

SEQ ID NO: 2862639 - RNA, 18 nt, Human
acugccacacucuccauc

SEQ ID NO: 2862640 - RNA, 21 nt, Human
acugccaaagggaaauaucau

SEQ ID NO: 2862641 - RNA, 17 nt, Human
acugucuuuaaaagaga

SEQ ID NO: 2862642 - RNA, 18 nt, Human
acugucuuuaaaagagag

SEQ ID NO: 2862643 - RNA, 19 nt, Human
acugucuuuaaaagagaga

SEQ ID NO: 2862644 - RNA, 13 nt, Human
acugugaugaagc

SEQ ID NO: 2862645 - RNA, 21 nt, Human
acugugaugaagccgaccuua

SEQ ID NO: 2862646 - RNA, 23 nt, Human
acugugaugaagccgaccuuaga

SEQ ID NO: 2862647 - RNA, 17 nt, Human
acugucugguuuuaaca

SEQ ID NO: 2862648 - RNA, 18 nt, Human
acugucugguuuuaacaa

SEQ ID NO: 2862649 - RNA, 19 nt, Human
acugucugguuuuaacaau

SEQ ID NO: 2862650 - RNA, 13 nt, Human
acugucugguuuu

SEQ ID NO: 2862651 - RNA, 18 nt, Human
acugucugauuggcuugu

SEQ ID NO: 2862652 - RNA, 12 nt, Human
acugugcagagu

SEQ ID NO: 2862653 - RNA, 21 nt, Human
acugugcagagucuagaaguu

SEQ ID NO: 2862654 - RNA, 20 nt, Human
acugugcaggugcuauuguu

SEQ ID NO: 2862655 - RNA, 21 nt, Human
acugugcaggugcuauuguua

SEQ ID NO: 2862656 - RNA, 22 nt, Human
acugugcaggugcuauuguuac

SEQ ID NO: 2862657 - RNA, 23 nt, Human
acugugcaggugcuauuguuacu

SEQ ID NO: 2862658 - RNA, 16 nt, Human
acugugcauagugcug

SEQ ID NO: 2862659 - RNA, 17 nt, Human
acugugcauagugcugg

SEQ ID NO: 2862660 - RNA, 19 nt, Human
acugugcauagugcuggga

SEQ ID NO: 2862661 - RNA, 14 nt, Human
acugucggaggaaa

SEQ ID NO: 2862662 - RNA, 16 nt, Human
acugucggaggaaaga

SEQ ID NO: 2862663 - RNA, 17 nt, Human
acugucggaggaaagac

SEQ ID NO: 2862664 - RNA, 19 nt, Human
acugucggaggaaagacaa

SEQ ID NO: 2862665 - RNA, 20 nt, Human
acugucggaggaaagacaac

SEQ ID NO: 2862666 - RNA, 21 nt, Human
acugucggaggaaagacaaca

SEQ ID NO: 2862667 - RNA, 16 nt, Human
acugucuaacuuuaga

SEQ ID NO: 2862668 - RNA, 17 nt, Human
acuggugugaccugagg

SEQ ID NO: 2862669 - RNA, 14 nt, Human
acuggugugaccug

SEQ ID NO: 2862670 - RNA, 23 nt, Human
acugguggcccgacagccuggca

SEQ ID NO: 2862671 - RNA, 21 nt, Human
acuggugugaccugagggcag

SEQ ID NO: 2862672 - RNA, 19 nt, Human
acugguguuugaaaguagg

SEQ ID NO: 2862673 - RNA, 21 nt, Human
acugguggcccgacagccugg

SEQ ID NO: 2862674 - RNA, 22 nt, Human
acugguggcccgacagccuggc

SEQ ID NO: 2862675 - RNA, 20 nt, Human
acugguggcccgacagccug

SEQ ID NO: 2862676 - RNA, 16 nt, Human
acugguacuuagaguu

SEQ ID NO: 2862677 - RNA, 17 nt, Human
acugguacuuagaguuu

SEQ ID NO: 2862678 - RNA, 20 nt, Human
acugguacuuagaguuucug

SEQ ID NO: 2862679 - RNA, 23 nt, Human
acugguacuuagaguuucuguuu

SEQ ID NO: 2862680 - RNA, 21 nt, Human
acuuuuaucuauucugagaaa

SEQ ID NO: 2862681 - RNA, 23 nt, Human
acuuuuauacucuuucuguauau

SEQ ID NO: 2862682 - RNA, 17 nt, Human
acuuuuccucccucagu

SEQ ID NO: 2862683 - RNA, 14 nt, Human
agaaaaguagacaa

SEQ ID NO: 2862684 - RNA, 15 nt, Human
agaaaaguagacaau

SEQ ID NO: 2862685 - RNA, 19 nt, Human
agaaaaguagacaaucauu

SEQ ID NO: 2862686 - RNA, 23 nt, Human
agaaaaguagacaaucauuguuu

SEQ ID NO: 2862687 - RNA, 12 nt, Human
agaaaaguauuu

SEQ ID NO: 2862688 - RNA, 13 nt, Human
agaaaaguauuuu

SEQ ID NO: 2862689 - RNA, 15 nt, Human
agaaaaguauuuuga

SEQ ID NO: 2862690 - RNA, 16 nt, Human
agaaaaguauuuugaa

SEQ ID NO: 2862691 - RNA, 17 nt, Human
agaaaaguauuuugaag

SEQ ID NO: 2862692 - RNA, 18 nt, Human
agaaaaguauuuugaagu

SEQ ID NO: 2862693 - RNA, 19 nt, Human
agaaaaguauuuugaaguu

SEQ ID NO: 2862694 - RNA, 23 nt, Human
agaaaaguauuuugaaguuuaca

SEQ ID NO: 2862695 - RNA, 23 nt, Human
agaaaagggaaguugugccuuuu

SEQ ID NO: 2862696 - RNA, 22 nt, Human
agaaaaguugacaccugagaaa

SEQ ID NO: 2862697 - RNA, 21 nt, Human
agaaaagugcauauuuaucca

SEQ ID NO: 2862698 - RNA, 11 nt, Human
agaaaaguuau

SEQ ID NO: 2862699 - RNA, 12 nt, Human
agaaaaguuauu

SEQ ID NO: 2862700 - RNA, 13 nt, Human
agaaaaguuauua

SEQ ID NO: 2862701 - RNA, 23 nt, Human
agaaaauauuauguguuuccaua

SEQ ID NO: 2862702 - RNA, 15 nt, Human
agaaaauggacacug

SEQ ID NO: 2862703 - RNA, 20 nt, Human
agaaaaugguuuauuuugua

SEQ ID NO: 2862704 - RNA, 21 nt, Human
agaaaaugguuuauuuuguau

SEQ ID NO: 2862705 - RNA, 15 nt, Human
acuuuuccuuaccuu

SEQ ID NO: 2862706 - RNA, 14 nt, Human
agaaaauucuccug

SEQ ID NO: 2862707 - RNA, 17 nt, Human
agaaaauguugagaauc

SEQ ID NO: 2862708 - RNA, 18 nt, Human
agaaaauuaaacacaaag

SEQ ID NO: 2862709 - RNA, 16 nt, Human
agaaaauguugagaau

SEQ ID NO: 2862710 - RNA, 22 nt, Human
agaaacaaacuuuucaaggcuu

SEQ ID NO: 2862711 - RNA, 21 nt, Human
agaaaauuuaauaacuuuuua

SEQ ID NO: 2862712 - RNA, 12 nt, Human
agaaacaaacuu

SEQ ID NO: 2862713 - RNA, 13 nt, Human
agaaacaaacuuu

SEQ ID NO: 2862714 - RNA, 16 nt, Human
agaaaauuuuuguagu

SEQ ID NO: 2862715 - RNA, 22 nt, Human
agaaaauuuuuguaguagcguu

SEQ ID NO: 2862716 - RNA, 20 nt, Human
agaaaauuuuuguaguagcg

SEQ ID NO: 2862717 - RNA, 22 nt, Human
agaaaauaucugaaaugugaua

SEQ ID NO: 2862718 - RNA, 14 nt, Human
agaaaauauaugua

SEQ ID NO: 2862719 - RNA, 15 nt, Human
agaaaauauauguau

SEQ ID NO: 2862720 - RNA, 17 nt, Human
agaaaauauauguauuu

SEQ ID NO: 2862721 - RNA, 23 nt, Human
agaaaauauauguauuuuuauau

SEQ ID NO: 2862722 - RNA, 16 nt, Human
agaaaauaaagacaac

SEQ ID NO: 2862723 - RNA, 21 nt, Human
agaaaauaaagacaaccauau

SEQ ID NO: 2862724 - RNA, 22 nt, Human
acuuuauaagucauuguauguu

SEQ ID NO: 2862725 - RNA, 12 nt, Human
acuuuauacauu

SEQ ID NO: 2862726 - RNA, 16 nt, Human
acuuuauacauuagua

SEQ ID NO: 2862727 - RNA, 19 nt, Human
acuuuauacauuaguaaau

SEQ ID NO: 2862728 - RNA, 22 nt, Human
acuuuauacauuaguaaauguc

SEQ ID NO: 2862729 - RNA, 19 nt, Human
acuuucauccugacucugc

SEQ ID NO: 2862730 - RNA, 21 nt, Human
acuuucauccugacucugccc

SEQ ID NO: 2862731 - RNA, 23 nt, Human
acuuucauccugacucugccccc

SEQ ID NO: 2862732 - RNA, 19 nt, Human
acuuuaggguaaaaauugc

SEQ ID NO: 2862733 - RNA, 22 nt, Human
acuuuaggguaaaaauugccau

SEQ ID NO: 2862734 - RNA, 13 nt, Human
acuuuaguaugac

SEQ ID NO: 2862735 - RNA, 23 nt, Human
acuuuaguaugacgcugauacau

SEQ ID NO: 2862736 - RNA, 17 nt, Human
acuuuccuuuccccagc

SEQ ID NO: 2862737 - RNA, 18 nt, Human
acuuuccuuuccccagcc

SEQ ID NO: 2862738 - RNA, 22 nt, Human
acuuuccuuuccccagcccagg

SEQ ID NO: 2862739 - RNA, 21 nt, Human
acuuuccuuuucuauuccuuc

SEQ ID NO: 2862740 - RNA, 19 nt, Human
acuuuccuuuccccagccc

SEQ ID NO: 2862741 - RNA, 15 nt, Human
acuuucguacauugg

SEQ ID NO: 2862742 - RNA, 16 nt, Human
acuuucguacauuggc

SEQ ID NO: 2862743 - RNA, 15 nt, Human
acuuucuaauguuuc

SEQ ID NO: 2862744 - RNA, 17 nt, Human
acuuucuaauguuucug

SEQ ID NO: 2862745 - RNA, 17 nt, Human
acuuuccacuucuuccu

SEQ ID NO: 2862746 - RNA, 18 nt, Human
acuuuccacuucuuccuu

SEQ ID NO: 2862747 - RNA, 22 nt, Human
acuuuccacuucuuccuuucuc

SEQ ID NO: 2862748 - RNA, 17 nt, Human
acuuuccuggaugucug

SEQ ID NO: 2862749 - RNA, 18 nt, Human
acuuuccuggaugucuga

SEQ ID NO: 2862750 - RNA, 23 nt, Human
acuuuccuggaugucugaacuuu

SEQ ID NO: 2862751 - RNA, 15 nt, Human
acuuuuaaacaguga

SEQ ID NO: 2862752 - RNA, 12 nt, Human
acuuuuaaacag

SEQ ID NO: 2862753 - RNA, 13 nt, Human
agaaauaaaagug

SEQ ID NO: 2862754 - RNA, 23 nt, Human
agaaauaaaagugaaugaaagau

SEQ ID NO: 2862755 - RNA, 23 nt, Human
agaaaggaggggauagagagaga

SEQ ID NO: 2862756 - RNA, 20 nt, Human
agaaaggaggggauagagag

SEQ ID NO: 2862757 - RNA, 11 nt, Human
agaaaggagac

SEQ ID NO: 2862758 - RNA, 16 nt, Human
acuagccugucauccu

SEQ ID NO: 2862759 - RNA, 21 nt, Human
acuagccccuguggagacugg

SEQ ID NO: 2862760 - RNA, 17 nt, Human
acuagccuuuggcucug

SEQ ID NO: 2862761 - RNA, 18 nt, Human
acuagccuuuggcucugg

SEQ ID NO: 2862762 - RNA, 19 nt, Human
acuagccuuuggcucugga

SEQ ID NO: 2862763 - RNA, 20 nt, Human
acuagccuuuggcucuggag

SEQ ID NO: 2862764 - RNA, 22 nt, Human
acuagccuuuggcucuggagac

SEQ ID NO: 2862765 - RNA, 21 nt, Human
acuagccuaggucauaaagag

SEQ ID NO: 2862766 - RNA, 20 nt, Human
acuagccaggaaguacuucc

SEQ ID NO: 2862767 - RNA, 17 nt, Human
acuaggacucugaggcu

SEQ ID NO: 2862768 - RNA, 16 nt, Human
acuaggacucugaggc

SEQ ID NO: 2862769 - RNA, 16 nt, Human
acuagcuuuucaaaca

SEQ ID NO: 2862770 - RNA, 16 nt, Human
acuaggguccugggga

SEQ ID NO: 2862771 - RNA, 19 nt, Human
acuagggauucaggcugcu

SEQ ID NO: 2862772 - RNA, 18 nt, Human
acuagggauucaggcugc

SEQ ID NO: 2862773 - RNA, 17 nt, Human
acuagggauucaggcug

SEQ ID NO: 2862774 - RNA, 16 nt, Human
acuagggauucaggcu

SEQ ID NO: 2862775 - RNA, 21 nt, Human
acuagggauucaggcugcuug

SEQ ID NO: 2862776 - RNA, 15 nt, Human
acuaggguccugggg

SEQ ID NO: 2862777 - RNA, 16 nt, Human
acucaguuuaugcugu

SEQ ID NO: 2862778 - RNA, 20 nt, Human
acucaguuuauguuguacaa

SEQ ID NO: 2862779 - RNA, 23 nt, Human
acucaguuuauguuguacaaugu

SEQ ID NO: 2862780 - RNA, 18 nt, Human
acucagggccaugccugc

SEQ ID NO: 2862781 - RNA, 14 nt, Human
acucaguggggagg

SEQ ID NO: 2862782 - RNA, 14 nt, Human
acucagcuccccag

SEQ ID NO: 2862783 - RNA, 15 nt, Human
acucagcuccccaga

SEQ ID NO: 2862784 - RNA, 19 nt, Human
acucagcuccccagagucc

SEQ ID NO: 2862785 - RNA, 14 nt, Human
acucagcuccguga

SEQ ID NO: 2862786 - RNA, 22 nt, Human
acucagcucuuggcuccacugg

SEQ ID NO: 2862787 - RNA, 14 nt, Human
acucaggcucucca

SEQ ID NO: 2862788 - RNA, 12 nt, Human
acucaggcugga

SEQ ID NO: 2862789 - RNA, 13 nt, Human
acucagggacaga

SEQ ID NO: 2862790 - RNA, 15 nt, Human
acucagggacagagc

SEQ ID NO: 2862791 - RNA, 17 nt, Human
acucagggacagagcca

SEQ ID NO: 2862792 - RNA, 18 nt, Human
acucagggacagagccau

SEQ ID NO: 2862793 - RNA, 20 nt, Human
acucagggacagagccaugc

SEQ ID NO: 2862794 - RNA, 14 nt, Human
acuccccuguuuca

SEQ ID NO: 2862795 - RNA, 21 nt, Human
acuccccuguuucaaucacug

SEQ ID NO: 2862796 - RNA, 23 nt, Human
acuccccuguuucaaucacuguc

SEQ ID NO: 2862797 - RNA, 17 nt, Human
acuccccgaagucuuuu

SEQ ID NO: 2862798 - RNA, 21 nt, Human
acucauaaaaagccugcaauu

SEQ ID NO: 2862799 - RNA, 13 nt, Human
acucaguuuucuu

SEQ ID NO: 2862800 - RNA, 16 nt, Human
acuccccgaagucuuu

SEQ ID NO: 2862801 - RNA, 14 nt, Human
acuccccgaagucu

SEQ ID NO: 2862802 - RNA, 21 nt, Human
acucccccuaaaccccugucc

SEQ ID NO: 2862803 - RNA, 22 nt, Human
acucccccuaaaccccuguccc

SEQ ID NO: 2862804 - RNA, 20 nt, Human
acucaaaauauuuguacaua

SEQ ID NO: 2862805 - RNA, 19 nt, Human
acucaaaauauuuguacau

SEQ ID NO: 2862806 - RNA, 17 nt, Human
acucaaaauauuuguac

SEQ ID NO: 2862807 - RNA, 15 nt, Human
acucaaaauauuugu

SEQ ID NO: 2862808 - RNA, 18 nt, Human
acuauaaaaugucuucaa

SEQ ID NO: 2862809 - RNA, 19 nt, Human
acuauaaaaugucuucaag

SEQ ID NO: 2862810 - RNA, 17 nt, Human
acuauaacauauguaca

SEQ ID NO: 2862811 - RNA, 22 nt, Human
acuauaacauauguacauaaau

SEQ ID NO: 2862812 - RNA, 17 nt, Human
acuaguuuuaguuuucu

SEQ ID NO: 2862813 - RNA, 20 nt, Human
acuauaaagaaguaacaaaa

SEQ ID NO: 2862814 - RNA, 12 nt, Human
acuauaaagaga

SEQ ID NO: 2862815 - RNA, 13 nt, Human
acuauaaagagaa

SEQ ID NO: 2862816 - RNA, 14 nt, Human
acuauaaagagaag

SEQ ID NO: 2862817 - RNA, 21 nt, Human
acucaaauaugaguacaaaug

SEQ ID NO: 2862818 - RNA, 23 nt, Human
acucaaauaugaguacaaaugcc

SEQ ID NO: 2862819 - RNA, 16 nt, Human
acucaaacuucuggcu

SEQ ID NO: 2862820 - RNA, 17 nt, Human
acucaaacuucuggcuc

SEQ ID NO: 2862821 - RNA, 22 nt, Human
acucaaacuucuggcucccucu

SEQ ID NO: 2862822 - RNA, 23 nt, Human
acucagccggcguggcaaauaua

SEQ ID NO: 2862823 - RNA, 12 nt, Human
acucagccugca

SEQ ID NO: 2862824 - RNA, 15 nt, Human
acucagccugcaguu

SEQ ID NO: 2862825 - RNA, 16 nt, Human
acucagccugcaguua

SEQ ID NO: 2862826 - RNA, 17 nt, Human
acucagccugcaguuaa

SEQ ID NO: 2862827 - RNA, 21 nt, Human
acucagccugcaguuaauuag

SEQ ID NO: 2862828 - RNA, 12 nt, Human
acucagccugcu

SEQ ID NO: 2862829 - RNA, 15 nt, Human
acucagccugcugcc

SEQ ID NO: 2862830 - RNA, 16 nt, Human
acucagccugcugccc

SEQ ID NO: 2862831 - RNA, 18 nt, Human
acucagccugcugcccag

SEQ ID NO: 2862832 - RNA, 22 nt, Human
acucagccugcugcccaggcug

SEQ ID NO: 2862833 - RNA, 16 nt, Human
acucagccugggacag

SEQ ID NO: 2862834 - RNA, 14 nt, Human
acucagcccugagg

SEQ ID NO: 2862835 - RNA, 15 nt, Human
acucagcccugaggu

SEQ ID NO: 2862836 - RNA, 16 nt, Human
acucagaucugucuga

SEQ ID NO: 2862837 - RNA, 15 nt, Human
acucagcagaauggu

SEQ ID NO: 2862838 - RNA, 13 nt, Human
acucccuccagca

SEQ ID NO: 2862839 - RNA, 14 nt, Human
acucccuccagcac

SEQ ID NO: 2862840 - RNA, 15 nt, Human
acucccuccagcaca

SEQ ID NO: 2862841 - RNA, 16 nt, Human
acucccuccagcacaa

SEQ ID NO: 2862842 - RNA, 19 nt, Human
acucccuugguggcaagag

SEQ ID NO: 2862843 - RNA, 21 nt, Human
acucccuugguggcaagagcc

SEQ ID NO: 2862844 - RNA, 22 nt, Human
acucccuugguggcaagagccc

SEQ ID NO: 2862845 - RNA, 17 nt, Human
acucuggggugcugccu

SEQ ID NO: 2862846 - RNA, 17 nt, Human
acucugggcugcuaccc

SEQ ID NO: 2862847 - RNA, 16 nt, Human
acucugggcuccagag

SEQ ID NO: 2862848 - RNA, 14 nt, Human
acucugggcuccag

SEQ ID NO: 2862849 - RNA, 11 nt, Human
acucuggccuc

SEQ ID NO: 2862850 - RNA, 15 nt, Human
acucuggcuuggccu

SEQ ID NO: 2862851 - RNA, 16 nt, Human
acucuggcuuggccua

SEQ ID NO: 2862852 - RNA, 22 nt, Human
acucuggcuuggccuaucuccu

SEQ ID NO: 2862853 - RNA, 20 nt, Human
acucugggcacacucugcca

SEQ ID NO: 2862854 - RNA, 18 nt, Human
acucugggcuauggacac

SEQ ID NO: 2862855 - RNA, 19 nt, Human
acucugggcuauggacaca

SEQ ID NO: 2862856 - RNA, 20 nt, Human
acucugggcuauggacacag

SEQ ID NO: 2862857 - RNA, 22 nt, Human
acucugggcuauggacacaggg

SEQ ID NO: 2862858 - RNA, 23 nt, Human
acucugggcucaagcaauccucu

SEQ ID NO: 2862859 - RNA, 16 nt, Human
acucugugucaggugg

SEQ ID NO: 2862860 - RNA, 16 nt, Human
acucuguggggccuug

SEQ ID NO: 2862861 - RNA, 17 nt, Human
acucuguggggccuugg

SEQ ID NO: 2862862 - RNA, 13 nt, Human
acucuguuguacu

SEQ ID NO: 2862863 - RNA, 19 nt, Human
acucuguuguacuauggaa

SEQ ID NO: 2862864 - RNA, 21 nt, Human
acucuuaaaaauguuuuuuca

SEQ ID NO: 2862865 - RNA, 23 nt, Human
acgugcaccuguacucaggaggc

SEQ ID NO: 2862866 - RNA, 21 nt, Human
acgugcaccuguacucaggag

SEQ ID NO: 2862867 - RNA, 20 nt, Human
acgugcaccuguacucagga

SEQ ID NO: 2862868 - RNA, 19 nt, Human
acgugcaacugacacuccc

SEQ ID NO: 2862869 - RNA, 23 nt, Human
acgugcaacugacacucccaccc

SEQ ID NO: 2862870 - RNA, 23 nt, Human
acgccacugcacuccagccuggg

SEQ ID NO: 2862871 - RNA, 22 nt, Human
acgugauucaauucaacacucc

SEQ ID NO: 2862872 - RNA, 14 nt, Human
acuaauaaauacau

SEQ ID NO: 2862873 - RNA, 15 nt, Human
acuaauaaauacaua

SEQ ID NO: 2862874 - RNA, 13 nt, Human
acgauuccuucuc

SEQ ID NO: 2862875 - RNA, 16 nt, Human
acgauuccuucucuga

SEQ ID NO: 2862876 - RNA, 15 nt, Human
acgaugugucuguau

SEQ ID NO: 2862877 - RNA, 23 nt, Human
acgaugugucuguauuucaugug

SEQ ID NO: 2862878 - RNA, 18 nt, Human
acgccacugcacuauagc

SEQ ID NO: 2862879 - RNA, 22 nt, Human
acgccacugcacuccagccugg

SEQ ID NO: 2862880 - RNA, 20 nt, Human
acgccacugcacuccagccu

SEQ ID NO: 2862881 - RNA, 14 nt, Human
acgaucaggcacag

SEQ ID NO: 2862882 - RNA, 17 nt, Human
acgaucaggcacagguc

SEQ ID NO: 2862883 - RNA, 18 nt, Human
acgaucaggcacagguca

SEQ ID NO: 2862884 - RNA, 19 nt, Human
acgauccugccacccugua

SEQ ID NO: 2862885 - RNA, 20 nt, Human
acgauccugccacccuguag

SEQ ID NO: 2862886 - RNA, 21 nt, Human
acgauccugccacccuguagc

SEQ ID NO: 2862887 - RNA, 12 nt, Human
accuuggcugca

SEQ ID NO: 2862888 - RNA, 14 nt, Human
accuuggcucaagu

SEQ ID NO: 2862889 - RNA, 12 nt, Human
accuuggcucaa

SEQ ID NO: 2862890 - RNA, 17 nt, Human
accuguaugucuccagu

SEQ ID NO: 2862891 - RNA, 12 nt, Human
accuguauuuaa

SEQ ID NO: 2862892 - RNA, 22 nt, Human
accugucaaugauacagucccu

SEQ ID NO: 2862893 - RNA, 14 nt, Human
accuguauuuaagc

SEQ ID NO: 2862894 - RNA, 15 nt, Human
accuguauuuaagca

SEQ ID NO: 2862895 - RNA, 18 nt, Human
accuguauuuaagcaaau

SEQ ID NO: 2862896 - RNA, 21 nt, Human
accuguauuuaagcaaauacu

SEQ ID NO: 2862897 - RNA, 11 nt, Human
accuguaucuu

SEQ ID NO: 2862898 - RNA, 12 nt, Human
accuguaucuuu

SEQ ID NO: 2862899 - RNA, 18 nt, Human
accuguaucuuucuaugc

SEQ ID NO: 2862900 - RNA, 23 nt, Human
accuguaucuuucuaugcugcuu

SEQ ID NO: 2862901 - RNA, 12 nt, Human
accuguacucag

SEQ ID NO: 2862902 - RNA, 17 nt, Human
accuguauaacccuguu

SEQ ID NO: 2862903 - RNA, 20 nt, Human
accuguauaacccuguuaca

SEQ ID NO: 2862904 - RNA, 16 nt, Human
accuguacacugacuu

SEQ ID NO: 2862905 - RNA, 11 nt, Human
accuguacagu

SEQ ID NO: 2862906 - RNA, 20 nt, Human
accugccccuccucucugcc

SEQ ID NO: 2862907 - RNA, 13 nt, Human
accuuuauucuuu

SEQ ID NO: 2862908 - RNA, 14 nt, Human
accuuuauucuuuu

SEQ ID NO: 2862909 - RNA, 17 nt, Human
accuuuauucuuuucca

SEQ ID NO: 2862910 - RNA, 22 nt, Human
accuuuauuggguaucaagaca

SEQ ID NO: 2862911 - RNA, 13 nt, Human
accuuuauucugg

SEQ ID NO: 2862912 - RNA, 12 nt, Human
accuuuauucug

SEQ ID NO: 2862913 - RNA, 14 nt, Human
accuuggcugcagg

SEQ ID NO: 2862914 - RNA, 14 nt, Human
accuugugaucaug

SEQ ID NO: 2862915 - RNA, 18 nt, Human
accuugugucuguacacg

SEQ ID NO: 2862916 - RNA, 21 nt, Human
accuugugucuguacacgugu

SEQ ID NO: 2862917 - RNA, 12 nt, Human
accuugugucug

SEQ ID NO: 2862918 - RNA, 13 nt, Human
accuugugucugu

SEQ ID NO: 2862919 - RNA, 15 nt, Human
accuugugucuguac

SEQ ID NO: 2862920 - RNA, 17 nt, Human
accuuucaaauuucaca

SEQ ID NO: 2862921 - RNA, 18 nt, Human
accuuucaccuuugugua

SEQ ID NO: 2862922 - RNA, 21 nt, Human
accuuucaccuuuguguauuu

SEQ ID NO: 2862923 - RNA, 14 nt, Human
accucuuccccaga

SEQ ID NO: 2862924 - RNA, 13 nt, Human
accucuuccccag

SEQ ID NO: 2862925 - RNA, 18 nt, Human
accugccccuccucucug

SEQ ID NO: 2862926 - RNA, 14 nt, Human
accugccccuccuc

SEQ ID NO: 2862927 - RNA, 15 nt, Human
accugcccccuggug

SEQ ID NO: 2862928 - RNA, 13 nt, Human
accugcccccugg

SEQ ID NO: 2862929 - RNA, 14 nt, Human
accucuucuggcuc

SEQ ID NO: 2862930 - RNA, 13 nt, Human
accugcccaaccu

SEQ ID NO: 2862931 - RNA, 23 nt, Human
accucuuccccagaaaggagacu

SEQ ID NO: 2862932 - RNA, 22 nt, Human
accucuuccccagaaaggagac

SEQ ID NO: 2862933 - RNA, 15 nt, Human
accucuucacccccc

SEQ ID NO: 2862934 - RNA, 16 nt, Human
accucuucuggcucaa

SEQ ID NO: 2862935 - RNA, 21 nt, Human
accugcccaaccugcucuccu

SEQ ID NO: 2862936 - RNA, 15 nt, Human
accugcccaucacag

SEQ ID NO: 2862937 - RNA, 16 nt, Human
auaauuagguuaacau

SEQ ID NO: 2862938 - RNA, 17 nt, Human
auaauuagguuaacauu

SEQ ID NO: 2862939 - RNA, 15 nt, Human
auacacaacacacac

SEQ ID NO: 2862940 - RNA, 22 nt, Human
auacccccugcaaagcccagcu

SEQ ID NO: 2862941 - RNA, 21 nt, Human
auacccccugcaaagcccagc

SEQ ID NO: 2862942 - RNA, 15 nt, Human
auacacacacacaca

SEQ ID NO: 2862943 - RNA, 15 nt, Human
auaaguauacaguuc

SEQ ID NO: 2862944 - RNA, 16 nt, Human
auacacacacacacac

SEQ ID NO: 2862945 - RNA, 10 nt, Human
auacacacac

SEQ ID NO: 2862946 - RNA, 11 nt, Human
auacacacaca

SEQ ID NO: 2862947 - RNA, 13 nt, Human
auacacacacaca

SEQ ID NO: 2862948 - RNA, 17 nt, Human
auaccugcuaucagcag

SEQ ID NO: 2862949 - RNA, 13 nt, Human
auaccuaaguacu

SEQ ID NO: 2862950 - RNA, 14 nt, Human
auaccuaaguacug

SEQ ID NO: 2862951 - RNA, 15 nt, Human
auaccuaaguacugu

SEQ ID NO: 2862952 - RNA, 16 nt, Human
auaccuaaguacugua

SEQ ID NO: 2862953 - RNA, 17 nt, Human
auaccuaaguacuguaa

SEQ ID NO: 2862954 - RNA, 20 nt, Human
auaccuaaguacuguaauaa

SEQ ID NO: 2862955 - RNA, 21 nt, Human
auaccuaaguacuguaauaau

SEQ ID NO: 2862956 - RNA, 22 nt, Human
auaccuaaguacuguaauaaua

SEQ ID NO: 2862957 - RNA, 19 nt, Human
auacccuggccgcccccug

SEQ ID NO: 2862958 - RNA, 15 nt, Human
auacccuucuuuuau

SEQ ID NO: 2862959 - RNA, 19 nt, Human
auacccuucuuuuaugagc

SEQ ID NO: 2862960 - RNA, 12 nt, Human
auacccugcccu

SEQ ID NO: 2862961 - RNA, 14 nt, Human
auacccugcccuug

SEQ ID NO: 2862962 - RNA, 15 nt, Human
auaccggaauuacuu

SEQ ID NO: 2862963 - RNA, 16 nt, Human
auaccggaauuacuuu

SEQ ID NO: 2862964 - RNA, 13 nt, Human
auaccuaaaacau

SEQ ID NO: 2862965 - RNA, 14 nt, Human
auaccuaaaacaua

SEQ ID NO: 2862966 - RNA, 16 nt, Human
auaccucugugugcuc

SEQ ID NO: 2862967 - RNA, 14 nt, Human
auaccucugugugc

SEQ ID NO: 2862968 - RNA, 17 nt, Human
auaccucugugugcucc

SEQ ID NO: 2862969 - RNA, 24 nt, Human
auacuuacugaacuguguguaauu

SEQ ID NO: 2862970 - RNA, 17 nt, Human
auacuuagcaaaaagug

SEQ ID NO: 2862971 - RNA, 18 nt, Human
auacuuagcaaaaagugg

SEQ ID NO: 2862972 - RNA, 19 nt, Human
auacuuagcaaaaaguggg

SEQ ID NO: 2862973 - RNA, 23 nt, Human
auacuuagcaaaaaguggggcag

SEQ ID NO: 2862974 - RNA, 13 nt, Human
auacuuacauucu

SEQ ID NO: 2862975 - RNA, 22 nt, Human
auacuuacauucucuaauaaga

SEQ ID NO: 2862976 - RNA, 23 nt, Human
auacuuacauucucuaauaagaa

SEQ ID NO: 2862977 - RNA, 16 nt, Human
auacuuaucucucugu

SEQ ID NO: 2862978 - RNA, 17 nt, Human
auacuuaucucucugug

SEQ ID NO: 2862979 - RNA, 18 nt, Human
auacuuaucucucugugc

SEQ ID NO: 2862980 - RNA, 20 nt, Human
auacuuaucucucugugcug

SEQ ID NO: 2862981 - RNA, 15 nt, Human
auacuuaucucucug

SEQ ID NO: 2862982 - RNA, 22 nt, Human
auacuuagcaaaguuuuaccug

SEQ ID NO: 2862983 - RNA, 15 nt, Human
auacuuauauuuccc

SEQ ID NO: 2862984 - RNA, 17 nt, Human
auacuuauauuucccua

SEQ ID NO: 2862985 - RNA, 14 nt, Human
auacuuauauuuuc

SEQ ID NO: 2862986 - RNA, 22 nt, Human
auacuuauauuuucguaugaaa

SEQ ID NO: 2862987 - RNA, 23 nt, Human
auacuuauauuuucguaugaaaa

SEQ ID NO: 2862988 - RNA, 21 nt, Human
auaaguguguggucccaaguu

SEQ ID NO: 2862989 - RNA, 15 nt, Human
auaaguauuuauaau

SEQ ID NO: 2862990 - RNA, 19 nt, Human
auaaguguacgauucuuaa

SEQ ID NO: 2862991 - RNA, 15 nt, Human
auaaguggugugugu

SEQ ID NO: 2862992 - RNA, 19 nt, Human
auaaguauuuauaauagca

SEQ ID NO: 2862993 - RNA, 16 nt, Human
auaagucauuguaugu

SEQ ID NO: 2862994 - RNA, 17 nt, Human
auaacacccuuccuucu

SEQ ID NO: 2862995 - RNA, 21 nt, Human
auaacacccuuccuucuguaa

SEQ ID NO: 2862996 - RNA, 13 nt, Human
auaacaccugcca

SEQ ID NO: 2862997 - RNA, 14 nt, Human
auaacaccugccac

SEQ ID NO: 2862998 - RNA, 15 nt, Human
auaacacuaaaauuu

SEQ ID NO: 2862999 - RNA, 18 nt, Human
auaacaggcauuuguuca

SEQ ID NO: 2863000 - RNA, 16 nt, Human
auaacagauacauuuc

SEQ ID NO: 2863001 - RNA, 16 nt, Human
auaacaguaaaugugc

SEQ ID NO: 2863002 - RNA, 14 nt, Human
auaucagaaaaggg

SEQ ID NO: 2863003 - RNA, 14 nt, Human
auauccaccaccuc

SEQ ID NO: 2863004 - RNA, 17 nt, Human
auaucagaaaagggaag

SEQ ID NO: 2863005 - RNA, 13 nt, Human
auauccccugcua

SEQ ID NO: 2863006 - RNA, 14 nt, Human
auaucccaaacugu

SEQ ID NO: 2863007 - RNA, 16 nt, Human
auaucccaaacuguga

SEQ ID NO: 2863008 - RNA, 20 nt, Human
auaucccaaacugugaugaa

SEQ ID NO: 2863009 - RNA, 16 nt, Human
auaucccaagugcacu

SEQ ID NO: 2863010 - RNA, 16 nt, Human
auauccaccaccuccc

SEQ ID NO: 2863011 - RNA, 18 nt, Human
auauccaggucaacagaa

SEQ ID NO: 2863012 - RNA, 19 nt, Human
auauccaggucaacagaau

SEQ ID NO: 2863013 - RNA, 21 nt, Human
auauccaggucaacagaauga

SEQ ID NO: 2863014 - RNA, 22 nt, Human
auauccaggucaacagaaugaa

SEQ ID NO: 2863015 - RNA, 18 nt, Human
auauggaacuucuaauau

SEQ ID NO: 2863016 - RNA, 20 nt, Human
auauggaacuucuaauauau

SEQ ID NO: 2863017 - RNA, 16 nt, Human
auaugcaguuuuccuu

SEQ ID NO: 2863018 - RNA, 20 nt, Human
auauggacacuuaauacuac

SEQ ID NO: 2863019 - RNA, 15 nt, Human
auauggacacuuaau

SEQ ID NO: 2863020 - RNA, 15 nt, Human
auauggacaagaggu

SEQ ID NO: 2863021 - RNA, 16 nt, Human
auauggacaagaggua

SEQ ID NO: 2863022 - RNA, 18 nt, Human
auauggacucaguuuucu

SEQ ID NO: 2863023 - RNA, 21 nt, Human
auaugccuguaauucagugua

SEQ ID NO: 2863024 - RNA, 14 nt, Human
auaugcuaauuugg

SEQ ID NO: 2863025 - RNA, 15 nt, Human
auaugcuaauuuggg

SEQ ID NO: 2863026 - RNA, 17 nt, Human
auaugcuaauuugggga

SEQ ID NO: 2863027 - RNA, 19 nt, Human
auaugcccacauuuagucu

SEQ ID NO: 2863028 - RNA, 21 nt, Human
auaugcccacauuuagucucu

SEQ ID NO: 2863029 - RNA, 22 nt, Human
auaugcccacauuuagucucuu

SEQ ID NO: 2863030 - RNA, 16 nt, Human
auauccuuucuaacaa

SEQ ID NO: 2863031 - RNA, 15 nt, Human
auauccuuucuaaca

SEQ ID NO: 2863032 - RNA, 20 nt, Human
auauccugugacugucucac

SEQ ID NO: 2863033 - RNA, 17 nt, Human
auauccuuaucagagcu

SEQ ID NO: 2863034 - RNA, 18 nt, Human
auauccuuaucagagcua

SEQ ID NO: 2863035 - RNA, 17 nt, Human
auaugcaguuuuccuua

SEQ ID NO: 2863036 - RNA, 11 nt, Human
auaucccuucc

SEQ ID NO: 2863037 - RNA, 14 nt, Human
auauccugugacug

SEQ ID NO: 2863038 - RNA, 13 nt, Human
auauccugugacu

SEQ ID NO: 2863039 - RNA, 21 nt, Human
auauuuauuuucuuucuguaa

SEQ ID NO: 2863040 - RNA, 22 nt, Human
auauuuauuuucuuuugaauug

SEQ ID NO: 2863041 - RNA, 17 nt, Human
auauuuaguauugaaua

SEQ ID NO: 2863042 - RNA, 17 nt, Human
auauucagaauuaugau

SEQ ID NO: 2863043 - RNA, 17 nt, Human
auauuuauaaaugagca

SEQ ID NO: 2863044 - RNA, 21 nt, Human
auauuuaguuauaguuucaga

SEQ ID NO: 2863045 - RNA, 22 nt, Human
auauuuaguuauaguuucagau

SEQ ID NO: 2863046 - RNA, 13 nt, Human
auauuuauaacuc

SEQ ID NO: 2863047 - RNA, 11 nt, Human
auauuuauaac

SEQ ID NO: 2863048 - RNA, 22 nt, Human
auauuuauuaaauaaaaucaau

SEQ ID NO: 2863049 - RNA, 23 nt, Human
auauuuauuaaauaaaaucaauu

SEQ ID NO: 2863050 - RNA, 19 nt, Human
auauuuagauuguuaaaau

SEQ ID NO: 2863051 - RNA, 14 nt, Human
auauucagagaaua

SEQ ID NO: 2863052 - RNA, 17 nt, Human
auauucagagaauauca

SEQ ID NO: 2863053 - RNA, 13 nt, Human
auauuaguugcuu

SEQ ID NO: 2863054 - RNA, 18 nt, Human
auauuaguugcuuuguua

SEQ ID NO: 2863055 - RNA, 15 nt, Human
auauuauaaauauau

SEQ ID NO: 2863056 - RNA, 19 nt, Human
auauuuauuuuuuuuaagu

SEQ ID NO: 2863057 - RNA, 16 nt, Human
auaguaugguggcugg

SEQ ID NO: 2863058 - RNA, 18 nt, Human
auauaauucacucaagca

SEQ ID NO: 2863059 - RNA, 12 nt, Human
auauaauucugu

SEQ ID NO: 2863060 - RNA, 14 nt, Human
auauaauucuguaa

SEQ ID NO: 2863061 - RNA, 16 nt, Human
auauaauucuguaaau

SEQ ID NO: 2863062 - RNA, 17 nt, Human
auauaauucuguaaaug

SEQ ID NO: 2863063 - RNA, 15 nt, Human
auaguaugguggcug

SEQ ID NO: 2863064 - RNA, 19 nt, Human
auaguaugaguaaugcuua

SEQ ID NO: 2863065 - RNA, 13 nt, Human
auaguaguaugau

SEQ ID NO: 2863066 - RNA, 16 nt, Human
auacuucacuacuuua

SEQ ID NO: 2863067 - RNA, 17 nt, Human
auacuucauuuaaaaaa

SEQ ID NO: 2863068 - RNA, 20 nt, Human
auacuucauuuaaaaaaauc

SEQ ID NO: 2863069 - RNA, 23 nt, Human
auauagccauugaucauaaacug

SEQ ID NO: 2863070 - RNA, 14 nt, Human
auauacauauguag

SEQ ID NO: 2863071 - RNA, 19 nt, Human
auauacaugaaaauuuuaa

SEQ ID NO: 2863072 - RNA, 14 nt, Human
auauaccauuuauc

SEQ ID NO: 2863073 - RNA, 17 nt, Human
auauacccccccaugca

SEQ ID NO: 2863074 - RNA, 14 nt, Human
auauaccuauaaug

SEQ ID NO: 2863075 - RNA, 15 nt, Human
auauaccuauaaugu

SEQ ID NO: 2863076 - RNA, 17 nt, Human
auauaccuauaaugugu

SEQ ID NO: 2863077 - RNA, 18 nt, Human
auauaccuauaaugugug

SEQ ID NO: 2863078 - RNA, 19 nt, Human
auauaccuauaaugugugu

SEQ ID NO: 2863079 - RNA, 20 nt, Human
auauaccuauaaugugugua

SEQ ID NO: 2863080 - RNA, 21 nt, Human
auauaccuauaauguguguau

SEQ ID NO: 2863081 - RNA, 16 nt, Human
auauacgaacaaaaca

SEQ ID NO: 2863082 - RNA, 13 nt, Human
auauacaugugug

SEQ ID NO: 2863083 - RNA, 14 nt, Human
auauacaugugugu

SEQ ID NO: 2863084 - RNA, 15 nt, Human
auauacaugugugua

SEQ ID NO: 2863085 - RNA, 16 nt, Human
auauacauguguguau

SEQ ID NO: 2863086 - RNA, 17 nt, Human
auauacauguguguaua

SEQ ID NO: 2863087 - RNA, 18 nt, Human
auauacauguguguauau

SEQ ID NO: 2863088 - RNA, 21 nt, Human
auauacauguguguauauaug

SEQ ID NO: 2863089 - RNA, 22 nt, Human
auauacauguguguauauaugu

SEQ ID NO: 2863090 - RNA, 23 nt, Human
auauacauguguguauauaugug

SEQ ID NO: 2863091 - RNA, 12 nt, Human
auauacauacac

SEQ ID NO: 2863092 - RNA, 13 nt, Human
auauacauacacu

SEQ ID NO: 2863093 - RNA, 16 nt, Human
auauacauacacuugu

SEQ ID NO: 2863094 - RNA, 21 nt, Human
auauacauacacuuguauaaa

SEQ ID NO: 2863095 - RNA, 12 nt, Human
auauagccuuua

SEQ ID NO: 2863096 - RNA, 18 nt, Human
auauagcguucccaacaa

SEQ ID NO: 2863097 - RNA, 21 nt, Human
auauagcguucccaacaacau

SEQ ID NO: 2863098 - RNA, 13 nt, Human
auauagcuggcaa

SEQ ID NO: 2863099 - RNA, 16 nt, Human
auauagcuggcaagaa

SEQ ID NO: 2863100 - RNA, 19 nt, Human
auauagcuggcaagaaugg

SEQ ID NO: 2863101 - RNA, 17 nt, Human
auauagcagcaaaaaua

SEQ ID NO: 2863102 - RNA, 19 nt, Human
auauagcagcaaaaauaua

SEQ ID NO: 2863103 - RNA, 20 nt, Human
auauagcagcaaaaauauaa

SEQ ID NO: 2863104 - RNA, 19 nt, Human
auauagcaaaacuuuuaaa

SEQ ID NO: 2863105 - RNA, 20 nt, Human
auauagcaaaacuuuuaaac

SEQ ID NO: 2863106 - RNA, 21 nt, Human
auauagcaaaacuuuuaaacu

SEQ ID NO: 2863107 - RNA, 22 nt, Human
auauagcaaaacuuuuaaacua

SEQ ID NO: 2863108 - RNA, 19 nt, Human
aguugucaagucucugcug

SEQ ID NO: 2863109 - RNA, 16 nt, Human
aguugucacaucagau

SEQ ID NO: 2863110 - RNA, 15 nt, Human
aguugucacugcuuu

SEQ ID NO: 2863111 - RNA, 21 nt, Human
aguugucacugcuuuuggccu

SEQ ID NO: 2863112 - RNA, 23 nt, Human
aguugucacugcuuuuggccugg

SEQ ID NO: 2863113 - RNA, 16 nt, Human
aguuguagcagauugu

SEQ ID NO: 2863114 - RNA, 18 nt, Human
aguuguagcagauuguuu

SEQ ID NO: 2863115 - RNA, 20 nt, Human
aguugaauggccugccuuga

SEQ ID NO: 2863116 - RNA, 21 nt, Human
aguugaaugacaacagaagcu

SEQ ID NO: 2863117 - RNA, 22 nt, Human
aguuaagaagcuguuguacauu

SEQ ID NO: 2863118 - RNA, 13 nt, Human
aguuaagagaaac

SEQ ID NO: 2863119 - RNA, 14 nt, Human
aguuaagagaaacu

SEQ ID NO: 2863120 - RNA, 15 nt, Human
aguuaagagaaacuu

SEQ ID NO: 2863121 - RNA, 16 nt, Human
aguuaagagaaacuuu

SEQ ID NO: 2863122 - RNA, 17 nt, Human
aguuaagagaaacuuua

SEQ ID NO: 2863123 - RNA, 19 nt, Human
aguuaagagaaacuuuaua

SEQ ID NO: 2863124 - RNA, 21 nt, Human
aguuaagagaaacuuuauaca

SEQ ID NO: 2863125 - RNA, 22 nt, Human
aguuaagagaaacuuuauacau

SEQ ID NO: 2863126 - RNA, 23 nt, Human
aguuaagagaaacuuuauacauu

SEQ ID NO: 2863127 - RNA, 19 nt, Human
agugauucucaugccucag

SEQ ID NO: 2863128 - RNA, 14 nt, Human
agugaucacagcag

SEQ ID NO: 2863129 - RNA, 15 nt, Human
agugaucacagcagc

SEQ ID NO: 2863130 - RNA, 16 nt, Human
agugaucacagcagcu

SEQ ID NO: 2863131 - RNA, 18 nt, Human
agugauucucaugccuca

SEQ ID NO: 2863132 - RNA, 13 nt, Human
agugugaacaaaa

SEQ ID NO: 2863133 - RNA, 22 nt, Human
agugugaacaaaagaugcucuu

SEQ ID NO: 2863134 - RNA, 23 nt, Human
agugugacaaggauugcuacugu

SEQ ID NO: 2863135 - RNA, 11 nt, Human
agugugacagg

SEQ ID NO: 2863136 - RNA, 14 nt, Human
agugugacagggcc

SEQ ID NO: 2863137 - RNA, 15 nt, Human
agugugacagggcca

SEQ ID NO: 2863138 - RNA, 16 nt, Human
agugugaaguacaaua

SEQ ID NO: 2863139 - RNA, 17 nt, Human
agugugaaguacaauaa

SEQ ID NO: 2863140 - RNA, 12 nt, Human
aguuaagaagcu

SEQ ID NO: 2863141 - RNA, 15 nt, Human
aguuaagaagcuguu

SEQ ID NO: 2863142 - RNA, 16 nt, Human
aguuaagaagcuguug

SEQ ID NO: 2863143 - RNA, 20 nt, Human
aguuaagacaugauuuccuu

SEQ ID NO: 2863144 - RNA, 19 nt, Human
aguuaagacaugauuuccu

SEQ ID NO: 2863145 - RNA, 17 nt, Human
aguuaagaagcuguugu

SEQ ID NO: 2863146 - RNA, 18 nt, Human
aguuaagaagcuguugua

SEQ ID NO: 2863147 - RNA, 20 nt, Human
aguuaagaagcuguuguaca

SEQ ID NO: 2863148 - RNA, 21 nt, Human
aguuaagaagcuguuguacau

SEQ ID NO: 2863149 - RNA, 14 nt, Human
agucaagaagaaaa

SEQ ID NO: 2863150 - RNA, 15 nt, Human
agucaagaagaaaaa

SEQ ID NO: 2863151 - RNA, 15 nt, Human
agucaaccaacccca

SEQ ID NO: 2863152 - RNA, 18 nt, Human
agucaaggguaggguggg

SEQ ID NO: 2863153 - RNA, 18 nt, Human
aguccaaggaaaccacag

SEQ ID NO: 2863154 - RNA, 13 nt, Human
agucauugcugua

SEQ ID NO: 2863155 - RNA, 16 nt, Human
agucauugcuguagga

SEQ ID NO: 2863156 - RNA, 14 nt, Human
aguccaauguggca

SEQ ID NO: 2863157 - RNA, 14 nt, Human
aguccaauuuuaau

SEQ ID NO: 2863158 - RNA, 15 nt, Human
aguccaauuuuaauu

SEQ ID NO: 2863159 - RNA, 17 nt, Human
aguccaauuuuaauuua

SEQ ID NO: 2863160 - RNA, 19 nt, Human
aguccaauuuuaauuuagu

SEQ ID NO: 2863161 - RNA, 21 nt, Human
aguccaauuuuaauuuaguaa

SEQ ID NO: 2863162 - RNA, 21 nt, Human
aguccaaggaaaccacagcug

SEQ ID NO: 2863163 - RNA, 23 nt, Human
aguccaaggaaaccacagcugcu

SEQ ID NO: 2863164 - RNA, 13 nt, Human
aguccaagguuua

SEQ ID NO: 2863165 - RNA, 16 nt, Human
aguccaagguuuaaag

SEQ ID NO: 2863166 - RNA, 13 nt, Human
aguccaauaagac

SEQ ID NO: 2863167 - RNA, 12 nt, Human
agucauuccuuc

SEQ ID NO: 2863168 - RNA, 20 nt, Human
agucauuccuucuuuuuaaa

SEQ ID NO: 2863169 - RNA, 14 nt, Human
agucauuagacucc

SEQ ID NO: 2863170 - RNA, 15 nt, Human
agucauuagacuccu

SEQ ID NO: 2863171 - RNA, 16 nt, Human
agucauuagacuccuc

SEQ ID NO: 2863172 - RNA, 18 nt, Human
agucauuagacuccuccu

SEQ ID NO: 2863173 - RNA, 19 nt, Human
agucauuagacuccuccuc

SEQ ID NO: 2863174 - RNA, 20 nt, Human
agucauuagacuccuccucc

SEQ ID NO: 2863175 - RNA, 13 nt, Human
agugauccuccca

SEQ ID NO: 2863176 - RNA, 13 nt, Human
agugauauuucuc

SEQ ID NO: 2863177 - RNA, 14 nt, Human
agugauauuucucu

SEQ ID NO: 2863178 - RNA, 15 nt, Human
agugauauuucucua

SEQ ID NO: 2863179 - RNA, 16 nt, Human
agugauauuucucuag

SEQ ID NO: 2863180 - RNA, 22 nt, Human
agugauauuucucuaguaguua

SEQ ID NO: 2863181 - RNA, 19 nt, Human
agugauauggcagaagaca

SEQ ID NO: 2863182 - RNA, 24 nt, Human
agugauauggcagaagacaccaga

SEQ ID NO: 2863183 - RNA, 21 nt, Human
agugauauggcagaagacacc

SEQ ID NO: 2863184 - RNA, 22 nt, Human
agugauauggcagaagacacca

SEQ ID NO: 2863185 - RNA, 17 nt, Human
aguccuggauguugugu

SEQ ID NO: 2863186 - RNA, 18 nt, Human
aguccuggauguugugug

SEQ ID NO: 2863187 - RNA, 14 nt, Human
agugacaaaauaga

SEQ ID NO: 2863188 - RNA, 13 nt, Human
agugacaaaccau

SEQ ID NO: 2863189 - RNA, 13 nt, Human
agugacacagcag

SEQ ID NO: 2863190 - RNA, 13 nt, Human
aguccugcuccag

SEQ ID NO: 2863191 - RNA, 14 nt, Human
aguccugcuccaga

SEQ ID NO: 2863192 - RNA, 15 nt, Human
aguccugcuccagaa

SEQ ID NO: 2863193 - RNA, 18 nt, Human
aguccugcuccagaauuu

SEQ ID NO: 2863194 - RNA, 23 nt, Human
aguccugcuccagaauuuggaaa

SEQ ID NO: 2863195 - RNA, 21 nt, Human
aguccuggagcaaucacagau

SEQ ID NO: 2863196 - RNA, 22 nt, Human
aguccuggagcaaucacagaug

SEQ ID NO: 2863197 - RNA, 21 nt, Human
aguccugccuggccaggcaga

SEQ ID NO: 2863198 - RNA, 20 nt, Human
aguccugccuggccaggcag

SEQ ID NO: 2863199 - RNA, 17 nt, Human
aguccugccuggccagg

SEQ ID NO: 2863200 - RNA, 16 nt, Human
aguccugccuggccag

SEQ ID NO: 2863201 - RNA, 15 nt, Human
aguccugccuggcca

SEQ ID NO: 2863202 - RNA, 14 nt, Human
aguccugccuggcc

SEQ ID NO: 2863203 - RNA, 13 nt, Human
aguccugccuggc

SEQ ID NO: 2863204 - RNA, 16 nt, Human
aguccugccucagccu

SEQ ID NO: 2863205 - RNA, 23 nt, Human
agugacacagcagcuucaccaga

SEQ ID NO: 2863206 - RNA, 17 nt, Human
agugacacagcagcuuc

SEQ ID NO: 2863207 - RNA, 18 nt, Human
agugacacagcagcuuca

SEQ ID NO: 2863208 - RNA, 21 nt, Human
agugacagaccacaucuuuau

SEQ ID NO: 2863209 - RNA, 18 nt, Human
aucaucugugugaaaaug

SEQ ID NO: 2863210 - RNA, 19 nt, Human
aucaucugugugaaaaugg

SEQ ID NO: 2863211 - RNA, 18 nt, Human
aucaucuguggaacccau

SEQ ID NO: 2863212 - RNA, 13 nt, Human
aucaucuguguga

SEQ ID NO: 2863213 - RNA, 16 nt, Human
aucaucugugugaaaa

SEQ ID NO: 2863214 - RNA, 18 nt, Human
aucaucuauaaagaagaa

SEQ ID NO: 2863215 - RNA, 14 nt, Human
aucaucuauuuuga

SEQ ID NO: 2863216 - RNA, 15 nt, Human
aucaucuauuuugau

SEQ ID NO: 2863217 - RNA, 16 nt, Human
aucaucuauuuugaug

SEQ ID NO: 2863218 - RNA, 19 nt, Human
aucaucuauuuugaugcag

SEQ ID NO: 2863219 - RNA, 21 nt, Human
aucaucuauuuugaugcagca

SEQ ID NO: 2863220 - RNA, 23 nt, Human
aucaucuauuuugaugcagcauu

SEQ ID NO: 2863221 - RNA, 23 nt, Human
aucaucugaaggggcaaauucuu

SEQ ID NO: 2863222 - RNA, 23 nt, Human
aucaugguguaauaagacauaac

SEQ ID NO: 2863223 - RNA, 11 nt, Human
aucauguaaag

SEQ ID NO: 2863224 - RNA, 14 nt, Human
aucauguaaagaaa

SEQ ID NO: 2863225 - RNA, 17 nt, Human
aucauguaaagaaaugu

SEQ ID NO: 2863226 - RNA, 18 nt, Human
aucauguaaagaaauguc

SEQ ID NO: 2863227 - RNA, 17 nt, Human
aucaugguguaauaaga

SEQ ID NO: 2863228 - RNA, 18 nt, Human
aucaugguguaauaagac

SEQ ID NO: 2863229 - RNA, 19 nt, Human
aucaugguguaauaagaca

SEQ ID NO: 2863230 - RNA, 20 nt, Human
aucaugguguaauaagacau

SEQ ID NO: 2863231 - RNA, 21 nt, Human
aucaugguguaauaagacaua

SEQ ID NO: 2863232 - RNA, 14 nt, Human
aucaugguguaaua

SEQ ID NO: 2863233 - RNA, 16 nt, Human
aucaugguguaauaag

SEQ ID NO: 2863234 - RNA, 16 nt, Human
aucaucuauaaagaag

SEQ ID NO: 2863235 - RNA, 22 nt, Human
aucaugguagagaaucucuccc

SEQ ID NO: 2863236 - RNA, 15 nt, Human
aucaccugccuguua

SEQ ID NO: 2863237 - RNA, 21 nt, Human
aucaccuggcuuguuuauuuu

SEQ ID NO: 2863238 - RNA, 14 nt, Human
aucaccugccuguu

SEQ ID NO: 2863239 - RNA, 12 nt, Human
aucaccugccug

SEQ ID NO: 2863240 - RNA, 12 nt, Human
aucaccugaggu

SEQ ID NO: 2863241 - RNA, 20 nt, Human
aucaccucuguaauuuuuca

SEQ ID NO: 2863242 - RNA, 15 nt, Human
aucaccucaggccag

SEQ ID NO: 2863243 - RNA, 12 nt, Human
aucaccucaggc

SEQ ID NO: 2863244 - RNA, 13 nt, Human
aucaccugcccug

SEQ ID NO: 2863245 - RNA, 12 nt, Human
aucaccugcccu

SEQ ID NO: 2863246 - RNA, 14 nt, Human
aucaccucaggcca

SEQ ID NO: 2863247 - RNA, 15 nt, Human
aucagccucuuaaag

SEQ ID NO: 2863248 - RNA, 13 nt, Human
aucagccucuuaa

SEQ ID NO: 2863249 - RNA, 11 nt, Human
aucagccucuu

SEQ ID NO: 2863250 - RNA, 15 nt, Human
aucagccacauucua

SEQ ID NO: 2863251 - RNA, 13 nt, Human
aucagccagacau

SEQ ID NO: 2863252 - RNA, 12 nt, Human
aucagccagcug

SEQ ID NO: 2863253 - RNA, 13 nt, Human
aucagccagcugc

SEQ ID NO: 2863254 - RNA, 14 nt, Human
aucagccagcugcc

SEQ ID NO: 2863255 - RNA, 20 nt, Human
aucagcccaacgggaagcaa

SEQ ID NO: 2863256 - RNA, 16 nt, Human
auccacccaccucagc

SEQ ID NO: 2863257 - RNA, 20 nt, Human
auccacccaccucagccucc

SEQ ID NO: 2863258 - RNA, 18 nt, Human
auccacccaccucagccu

SEQ ID NO: 2863259 - RNA, 13 nt, Human
aucccgagucugg

SEQ ID NO: 2863260 - RNA, 15 nt, Human
aucccgagucuggga

SEQ ID NO: 2863261 - RNA, 16 nt, Human
aucccgagucugggac

SEQ ID NO: 2863262 - RNA, 17 nt, Human
aucccgagucugggaca

SEQ ID NO: 2863263 - RNA, 13 nt, Human
aucccgaagaaug

SEQ ID NO: 2863264 - RNA, 21 nt, Human
aucccgaagaauggagaggaa

SEQ ID NO: 2863265 - RNA, 22 nt, Human
aucccgaagaauggagaggaac

SEQ ID NO: 2863266 - RNA, 16 nt, Human
auccacccauauguua

SEQ ID NO: 2863267 - RNA, 10 nt, Human
auccacccca

SEQ ID NO: 2863268 - RNA, 15 nt, Human
aucccggaggaaauc

SEQ ID NO: 2863269 - RNA, 16 nt, Human
aucccggaggaaaucu

SEQ ID NO: 2863270 - RNA, 17 nt, Human
aucccggaggaaaucug

SEQ ID NO: 2863271 - RNA, 14 nt, Human
aucccggcugcccu

SEQ ID NO: 2863272 - RNA, 21 nt, Human
aucccuagacuuuaggcuuuc

SEQ ID NO: 2863273 - RNA, 22 nt, Human
aucccuagacuuuaggcuuuca

SEQ ID NO: 2863274 - RNA, 21 nt, Human
aucccucacacauccagacau

SEQ ID NO: 2863275 - RNA, 16 nt, Human
auccuccguccagccg

SEQ ID NO: 2863276 - RNA, 15 nt, Human
auccuccguccagcc

SEQ ID NO: 2863277 - RNA, 18 nt, Human
aucccucaccuucugagu

SEQ ID NO: 2863278 - RNA, 12 nt, Human
auccucccaggc

SEQ ID NO: 2863279 - RNA, 16 nt, Human
aucccucaccuucuga

SEQ ID NO: 2863280 - RNA, 17 nt, Human
aucccucaccuucugag

SEQ ID NO: 2863281 - RNA, 13 nt, Human
auccuuucuaaca

SEQ ID NO: 2863282 - RNA, 15 nt, Human
auccuuucugccgac

SEQ ID NO: 2863283 - RNA, 16 nt, Human
auccuuucugccgacc

SEQ ID NO: 2863284 - RNA, 19 nt, Human
auccuuuguuuucugacua

SEQ ID NO: 2863285 - RNA, 21 nt, Human
auccuuuguuuucugacuaau

SEQ ID NO: 2863286 - RNA, 23 nt, Human
auccuuuguuuucugacuaauua

SEQ ID NO: 2863287 - RNA, 15 nt, Human
auccuuugcagggca

SEQ ID NO: 2863288 - RNA, 16 nt, Human
auccuuugcagggcag

SEQ ID NO: 2863289 - RNA, 17 nt, Human
auccuuugcagggcagc

SEQ ID NO: 2863290 - RNA, 20 nt, Human
auccuuugcagggcagcccc

SEQ ID NO: 2863291 - RNA, 18 nt, Human
auccuuugccugccuggu

SEQ ID NO: 2863292 - RNA, 15 nt, Human
auccuuuucugcaga

SEQ ID NO: 2863293 - RNA, 15 nt, Human
auccuuuucuucuau

SEQ ID NO: 2863294 - RNA, 16 nt, Human
auccuuuucuucuaug

SEQ ID NO: 2863295 - RNA, 18 nt, Human
auccuuuucuucuaugua

SEQ ID NO: 2863296 - RNA, 11 nt, Human
auccuuuugua

SEQ ID NO: 2863297 - RNA, 13 nt, Human
auccuuuuguaga

SEQ ID NO: 2863298 - RNA, 18 nt, Human
auccuuuuguagaaugaa

SEQ ID NO: 2863299 - RNA, 21 nt, Human
aucgagugagacaaaauuuua

SEQ ID NO: 2863300 - RNA, 16 nt, Human
aucgauguuuuauuau

SEQ ID NO: 2863301 - RNA, 17 nt, Human
aucugggccagaauuuc

SEQ ID NO: 2863302 - RNA, 12 nt, Human
aucugggccugg

SEQ ID NO: 2863303 - RNA, 13 nt, Human
aucugggccuggg

SEQ ID NO: 2863304 - RNA, 14 nt, Human
aucugggccugggc

SEQ ID NO: 2863305 - RNA, 16 nt, Human
aucugggccugggcua

SEQ ID NO: 2863306 - RNA, 22 nt, Human
aucugggcuccuaaccuuccug

SEQ ID NO: 2863307 - RNA, 21 nt, Human
aucuggaaucuggagaccagg

SEQ ID NO: 2863308 - RNA, 21 nt, Human
aucuggaagggccaaggucug

SEQ ID NO: 2863309 - RNA, 14 nt, Human
aucuggaagaaaaa

SEQ ID NO: 2863310 - RNA, 18 nt, Human
aucugggcauagaugcag

SEQ ID NO: 2863311 - RNA, 15 nt, Human
aucugggccagaauu

SEQ ID NO: 2863312 - RNA, 15 nt, Human
aucuucucaaguucu

SEQ ID NO: 2863313 - RNA, 16 nt, Human
aucuucucaaguucua

SEQ ID NO: 2863314 - RNA, 18 nt, Human
aucuucucaaguucuaag

SEQ ID NO: 2863315 - RNA, 19 nt, Human
aucuucucaaguucuaaga

SEQ ID NO: 2863316 - RNA, 20 nt, Human
aucuucucaaguucuaagau

SEQ ID NO: 2863317 - RNA, 23 nt, Human
aucuucucaaguucuaagauucu

SEQ ID NO: 2863318 - RNA, 17 nt, Human
aucuuauaguucuaggc

SEQ ID NO: 2863319 - RNA, 15 nt, Human
aucuuauaguucuag

SEQ ID NO: 2863320 - RNA, 13 nt, Human
aucuuauacugua

SEQ ID NO: 2863321 - RNA, 16 nt, Human
aucuuauacuguacaa

SEQ ID NO: 2863322 - RNA, 17 nt, Human
aucuuauacuguacaau

SEQ ID NO: 2863323 - RNA, 19 nt, Human
aucuuauacuguacaauaa

SEQ ID NO: 2863324 - RNA, 15 nt, Human
aucuuauagcacuuu

SEQ ID NO: 2863325 - RNA, 17 nt, Human
aucuuauagcacuuuga

SEQ ID NO: 2863326 - RNA, 18 nt, Human
aucuuauagcacuuugaa

SEQ ID NO: 2863327 - RNA, 21 nt, Human
aucuuauagcacuuugaaaua

SEQ ID NO: 2863328 - RNA, 17 nt, Human
aucuucacccaggccua

SEQ ID NO: 2863329 - RNA, 19 nt, Human
aucuucacccaggccuaug

SEQ ID NO: 2863330 - RNA, 22 nt, Human
aucucucuacuccuaccucagc

SEQ ID NO: 2863331 - RNA, 21 nt, Human
aucucucuacuccuaccucag

SEQ ID NO: 2863332 - RNA, 13 nt, Human
aucucuauuuaau

SEQ ID NO: 2863333 - RNA, 14 nt, Human
aucucuauuuaaua

SEQ ID NO: 2863334 - RNA, 15 nt, Human
aucucuauuuaauau

SEQ ID NO: 2863335 - RNA, 16 nt, Human
aucucuauuuaauauu

SEQ ID NO: 2863336 - RNA, 13 nt, Human
aucucuauacugc

SEQ ID NO: 2863337 - RNA, 21 nt, Human
aucucuauauaaaaacaaaaa

SEQ ID NO: 2863338 - RNA, 22 nt, Human
aucucuaauauggcaaaaaugg

SEQ ID NO: 2863339 - RNA, 13 nt, Human
aucucuaauaugg

SEQ ID NO: 2863340 - RNA, 15 nt, Human
aucucuaauauggca

SEQ ID NO: 2863341 - RNA, 22 nt, Human
aucucguuuuucuucuuaagac

SEQ ID NO: 2863342 - RNA, 23 nt, Human
aucucguuuuucuucuuaagacu

SEQ ID NO: 2863343 - RNA, 13 nt, Human
aucugcuccuccc

SEQ ID NO: 2863344 - RNA, 18 nt, Human
aucugcuggaguuucaug

SEQ ID NO: 2863345 - RNA, 14 nt, Human
aucugcuggaguuu

SEQ ID NO: 2863346 - RNA, 14 nt, Human
aucucucugcagcu

SEQ ID NO: 2863347 - RNA, 15 nt, Human
aucucucugcagcug

SEQ ID NO: 2863348 - RNA, 16 nt, Human
aucucucugcagcugc

SEQ ID NO: 2863349 - RNA, 17 nt, Human
aucucucugcagcugcc

SEQ ID NO: 2863350 - RNA, 18 nt, Human
aucucucugcagcugccg

SEQ ID NO: 2863351 - RNA, 19 nt, Human
aucucucugcagcugccgg

SEQ ID NO: 2863352 - RNA, 23 nt, Human
aucucucuacuccuaccucagcc

SEQ ID NO: 2863353 - RNA, 18 nt, Human
aucucucugugcugugga

SEQ ID NO: 2863354 - RNA, 23 nt, Human
aucucucugugcuguggaagcaa

SEQ ID NO: 2863355 - RNA, 23 nt, Human
aucuugaaauuaagaaggcaaaa

SEQ ID NO: 2863356 - RNA, 22 nt, Human
aucuugaaauuaagaaggcaaa

SEQ ID NO: 2863357 - RNA, 21 nt, Human
aucuugaaauuaagaaggcaa

SEQ ID NO: 2863358 - RNA, 12 nt, Human
aucuugaaauua

SEQ ID NO: 2863359 - RNA, 19 nt, Human
aucuucugaaaugaaacaa

SEQ ID NO: 2863360 - RNA, 13 nt, Human
aucuucuccagau

SEQ ID NO: 2863361 - RNA, 20 nt, Human
augaaacacucaguuguuca

SEQ ID NO: 2863362 - RNA, 13 nt, Human
augaaacagaaac

SEQ ID NO: 2863363 - RNA, 13 nt, Human
augaaaauuugag

SEQ ID NO: 2863364 - RNA, 19 nt, Human
augaaaauuugagacuauu

SEQ ID NO: 2863365 - RNA, 17 nt, Human
augaaaauuuuaaaaau

SEQ ID NO: 2863366 - RNA, 21 nt, Human
augaaaauuuuaccagcagaa

SEQ ID NO: 2863367 - RNA, 16 nt, Human
augaaacaaauaauca

SEQ ID NO: 2863368 - RNA, 12 nt, Human
augaaacacagc

SEQ ID NO: 2863369 - RNA, 22 nt, Human
augaaacagaaacaaaaacacu

SEQ ID NO: 2863370 - RNA, 18 nt, Human
augaaacagaaacaaaaa

SEQ ID NO: 2863371 - RNA, 17 nt, Human
augaaaagauucuucug

SEQ ID NO: 2863372 - RNA, 19 nt, Human
augaaaagauucuucugug

SEQ ID NO: 2863373 - RNA, 13 nt, Human
augaaaagauuua

SEQ ID NO: 2863374 - RNA, 15 nt, Human
augaaaagauuuaag

SEQ ID NO: 2863375 - RNA, 12 nt, Human
augaaaacucau

SEQ ID NO: 2863376 - RNA, 14 nt, Human
augaaaacuauaca

SEQ ID NO: 2863377 - RNA, 15 nt, Human
augaaaacuauacaa

SEQ ID NO: 2863378 - RNA, 17 nt, Human
augaaaacuauacaaca

SEQ ID NO: 2863379 - RNA, 13 nt, Human
augaaaagacaag

SEQ ID NO: 2863380 - RNA, 18 nt, Human
augaaaagacaagaaaau

SEQ ID NO: 2863381 - RNA, 22 nt, Human
augaaaagacaagaaaaucagg

SEQ ID NO: 2863382 - RNA, 16 nt, Human
augaaaauaaauagcu

SEQ ID NO: 2863383 - RNA, 21 nt, Human
aucuuuuuuguuaacugauuu

SEQ ID NO: 2863384 - RNA, 14 nt, Human
aucuuuuuucacaa

SEQ ID NO: 2863385 - RNA, 17 nt, Human
aucuuuuuucacaaauu

SEQ ID NO: 2863386 - RNA, 14 nt, Human
aucuuuuuucaaaa

SEQ ID NO: 2863387 - RNA, 22 nt, Human
augacccaggcugggcaaggag

SEQ ID NO: 2863388 - RNA, 16 nt, Human
augacccaggcugggc

SEQ ID NO: 2863389 - RNA, 20 nt, Human
augaccucauuaaccgaugc

SEQ ID NO: 2863390 - RNA, 20 nt, Human
augaccucuguccucccucu

SEQ ID NO: 2863391 - RNA, 23 nt, Human
augacccugcgaaggggcccugg

SEQ ID NO: 2863392 - RNA, 14 nt, Human
augacucagaauau

SEQ ID NO: 2863393 - RNA, 19 nt, Human
augacucaggacauccccc

SEQ ID NO: 2863394 - RNA, 17 nt, Human
augacucacaugaugca

SEQ ID NO: 2863395 - RNA, 15 nt, Human
augacuauguaaacu

SEQ ID NO: 2863396 - RNA, 16 nt, Human
augacuauguaaacua

SEQ ID NO: 2863397 - RNA, 23 nt, Human
augacuacuuagcauccuaagaa

SEQ ID NO: 2863398 - RNA, 14 nt, Human
augaccuggauaac

SEQ ID NO: 2863399 - RNA, 22 nt, Human
augacucccuuaaaauagaaau

SEQ ID NO: 2863400 - RNA, 16 nt, Human
augagcuauuaaaacu

SEQ ID NO: 2863401 - RNA, 17 nt, Human
augagcuauuaaaacuc

SEQ ID NO: 2863402 - RNA, 22 nt, Human
augagcuauuaaaacucagccu

SEQ ID NO: 2863403 - RNA, 17 nt, Human
auguaauaacugugaag

SEQ ID NO: 2863404 - RNA, 19 nt, Human
auguaaucucucugcagcu

SEQ ID NO: 2863405 - RNA, 20 nt, Human
auguaaucucucugcagcug

SEQ ID NO: 2863406 - RNA, 21 nt, Human
auguaaucucucugcagcugc

SEQ ID NO: 2863407 - RNA, 22 nt, Human
auguaaucucucugcagcugcc

SEQ ID NO: 2863408 - RNA, 23 nt, Human
auguaaucucucugcagcugccg

SEQ ID NO: 2863409 - RNA, 24 nt, Human
auguaagauuauagauucuaaaga

SEQ ID NO: 2863410 - RNA, 14 nt, Human
auggucuaaaaaua

SEQ ID NO: 2863411 - RNA, 14 nt, Human
auggucucagaaac

SEQ ID NO: 2863412 - RNA, 18 nt, Human
auggucucagaaaccaaa

SEQ ID NO: 2863413 - RNA, 13 nt, Human
auggucuggucua

SEQ ID NO: 2863414 - RNA, 14 nt, Human
auggucuggucuau

SEQ ID NO: 2863415 - RNA, 16 nt, Human
auggucuggucuaugu

SEQ ID NO: 2863416 - RNA, 15 nt, Human
auggucuucagccuc

SEQ ID NO: 2863417 - RNA, 17 nt, Human
auggucuucagccucuu

SEQ ID NO: 2863418 - RNA, 12 nt, Human
auggugaaaaug

SEQ ID NO: 2863419 - RNA, 14 nt, Human
auggugaaaaugua

SEQ ID NO: 2863420 - RNA, 17 nt, Human
auggugaaauuuauuag

SEQ ID NO: 2863421 - RNA, 16 nt, Human
auguaacuuuuguaag

SEQ ID NO: 2863422 - RNA, 14 nt, Human
auguaacuuuugua

SEQ ID NO: 2863423 - RNA, 16 nt, Human
auggugaaaauguacu

SEQ ID NO: 2863424 - RNA, 17 nt, Human
auggugaaaauguacug

SEQ ID NO: 2863425 - RNA, 21 nt, Human
auguaagauuauagauucuaa

SEQ ID NO: 2863426 - RNA, 22 nt, Human
auguaagauuauagauucuaaa

SEQ ID NO: 2863427 - RNA, 15 nt, Human
auguaagauuauaga

SEQ ID NO: 2863428 - RNA, 17 nt, Human
auguaagauuauagauu

SEQ ID NO: 2863429 - RNA, 19 nt, Human
auguaagauuauagauucu

SEQ ID NO: 2863430 - RNA, 20 nt, Human
auguaagauuauagauucua

SEQ ID NO: 2863431 - RNA, 19 nt, Human
auguaagaauucagaagac

SEQ ID NO: 2863432 - RNA, 18 nt, Human
auguaacuuuuguaagac

SEQ ID NO: 2863433 - RNA, 17 nt, Human
auguaacuuuuguaaga

SEQ ID NO: 2863434 - RNA, 17 nt, Human
augucacaggcaggucc

SEQ ID NO: 2863435 - RNA, 16 nt, Human
augucacaggcagguc

SEQ ID NO: 2863436 - RNA, 14 nt, Human
augucacaggcagg

SEQ ID NO: 2863437 - RNA, 15 nt, Human
augucacaggcaggu

SEQ ID NO: 2863438 - RNA, 16 nt, Human
augucacguacugucu

SEQ ID NO: 2863439 - RNA, 19 nt, Human
augucacguacugucugau

SEQ ID NO: 2863440 - RNA, 20 nt, Human
augucacguacugucugauu

SEQ ID NO: 2863441 - RNA, 21 nt, Human
augucacguacugucugauug

SEQ ID NO: 2863442 - RNA, 14 nt, Human
augucacuagaaug

SEQ ID NO: 2863443 - RNA, 16 nt, Human
augucacuagaaugga

SEQ ID NO: 2863444 - RNA, 22 nt, Human
augucacuagaauggauaaaau

SEQ ID NO: 2863445 - RNA, 19 nt, Human
augucagacagaacuugaa

SEQ ID NO: 2863446 - RNA, 16 nt, Human
augucagacuggcugg

SEQ ID NO: 2863447 - RNA, 23 nt, Human
augucagacauccauguuuguaa

SEQ ID NO: 2863448 - RNA, 14 nt, Human
augucagauacaau

SEQ ID NO: 2863449 - RNA, 16 nt, Human
augucagauacaaugu

SEQ ID NO: 2863450 - RNA, 18 nt, Human
augucagauacaauguau

SEQ ID NO: 2863451 - RNA, 14 nt, Human
auguacaagaugaa

SEQ ID NO: 2863452 - RNA, 23 nt, Human
auguaaucugauggcuucuccag

SEQ ID NO: 2863453 - RNA, 23 nt, Human
auguacaauugugggcauaaacu

SEQ ID NO: 2863454 - RNA, 13 nt, Human
auguacagacaga

SEQ ID NO: 2863455 - RNA, 18 nt, Human
auguacagacauauuuaa

SEQ ID NO: 2863456 - RNA, 19 nt, Human
auguacagacauauuuaac

SEQ ID NO: 2863457 - RNA, 23 nt, Human
auguacagacauauuuaacuggu

SEQ ID NO: 2863458 - RNA, 21 nt, Human
augucaaacaugagaugugug

SEQ ID NO: 2863459 - RNA, 15 nt, Human
auguacaugagaagg

SEQ ID NO: 2863460 - RNA, 15 nt, Human
augucaagaggcuga

SEQ ID NO: 2863461 - RNA, 20 nt, Human
augucaaagagaaaacuuau

SEQ ID NO: 2863462 - RNA, 20 nt, Human
augucuuggacacuguacaa

SEQ ID NO: 2863463 - RNA, 16 nt, Human
augucuuggacacugu

SEQ ID NO: 2863464 - RNA, 19 nt, Human
augucuuggacacuguaca

SEQ ID NO: 2863465 - RNA, 14 nt, Human
augucuuguacaug

SEQ ID NO: 2863466 - RNA, 17 nt, Human
augucuuguacaugugu

SEQ ID NO: 2863467 - RNA, 22 nt, Human
augucuuguacauguguagccu

SEQ ID NO: 2863468 - RNA, 13 nt, Human
augucuuggacac

SEQ ID NO: 2863469 - RNA, 19 nt, Human
augucuugcuguugacaua

SEQ ID NO: 2863470 - RNA, 20 nt, Human
augucuugcuguugacauau

SEQ ID NO: 2863471 - RNA, 22 nt, Human
augucuugcuguugacauauuu

SEQ ID NO: 2863472 - RNA, 23 nt, Human
auggugacuuccucgccucuccc

SEQ ID NO: 2863473 - RNA, 15 nt, Human
augugguuacacacu

SEQ ID NO: 2863474 - RNA, 15 nt, Human
augugguucuucaaa

SEQ ID NO: 2863475 - RNA, 16 nt, Human
augugguugaagagca

SEQ ID NO: 2863476 - RNA, 19 nt, Human
augugguuuauagagggcc

SEQ ID NO: 2863477 - RNA, 17 nt, Human
augugguuugguuccuc

SEQ ID NO: 2863478 - RNA, 19 nt, Human
augugguuugguuccucuc

SEQ ID NO: 2863479 - RNA, 21 nt, Human
augugguuugguuccucucug

SEQ ID NO: 2863480 - RNA, 22 nt, Human
augugguuugguuccucucugg

SEQ ID NO: 2863481 - RNA, 13 nt, Human
augugguuuauag

SEQ ID NO: 2863482 - RNA, 14 nt, Human
augugggucuucca

SEQ ID NO: 2863483 - RNA, 15 nt, Human
augugggucuuccag

SEQ ID NO: 2863484 - RNA, 17 nt, Human
augugggucuuccaggg

SEQ ID NO: 2863485 - RNA, 13 nt, Human
auguggugaugau

SEQ ID NO: 2863486 - RNA, 13 nt, Human
auguggucucagg

SEQ ID NO: 2863487 - RNA, 14 nt, Human
auguggucucagga

SEQ ID NO: 2863488 - RNA, 15 nt, Human
auguggucucaggau

SEQ ID NO: 2863489 - RNA, 18 nt, Human
augugguggcacaggccc

SEQ ID NO: 2863490 - RNA, 22 nt, Human
augugguggcacaggcccccuu

SEQ ID NO: 2863491 - RNA, 16 nt, Human
auguggguugccuggu

SEQ ID NO: 2863492 - RNA, 20 nt, Human
augugggcuaguugggcuuc

SEQ ID NO: 2863493 - RNA, 18 nt, Human
auuaaauucacaaacuuu

SEQ ID NO: 2863494 - RNA, 17 nt, Human
auuaaauucacaaacuu

SEQ ID NO: 2863495 - RNA, 16 nt, Human
auuaaauucacaaacu

SEQ ID NO: 2863496 - RNA, 14 nt, Human
auuaaauucacaaa

SEQ ID NO: 2863497 - RNA, 13 nt, Human
auuaaauucacaa

SEQ ID NO: 2863498 - RNA, 15 nt, Human
auuaaauaagauucu

SEQ ID NO: 2863499 - RNA, 16 nt, Human
auuaaauaagauucua

SEQ ID NO: 2863500 - RNA, 19 nt, Human
auuaaauaagauucuaacg

SEQ ID NO: 2863501 - RNA, 16 nt, Human
auuaaaguuugcuugu

SEQ ID NO: 2863502 - RNA, 23 nt, Human
auuaaaguuugcuuguuucuugg

SEQ ID NO: 2863503 - RNA, 13 nt, Human
auuaaauaaaauc

SEQ ID NO: 2863504 - RNA, 14 nt, Human
auuaaauaaaauca

SEQ ID NO: 2863505 - RNA, 19 nt, Human
auuaaauaaaaucaauuuu

SEQ ID NO: 2863506 - RNA, 21 nt, Human
auuaaauaaaaucaauuuuua

SEQ ID NO: 2863507 - RNA, 18 nt, Human
auguuuuaagaggcaggg

SEQ ID NO: 2863508 - RNA, 16 nt, Human
auguuuuaagaggcag

SEQ ID NO: 2863509 - RNA, 16 nt, Human
auguuugcacuuguga

SEQ ID NO: 2863510 - RNA, 13 nt, Human
auguuugcagggg

SEQ ID NO: 2863511 - RNA, 18 nt, Human
auguuugaggagcauguu

SEQ ID NO: 2863512 - RNA, 19 nt, Human
auguuugaggagcauguuu

SEQ ID NO: 2863513 - RNA, 22 nt, Human
auguuugaggagcauguuuugu

SEQ ID NO: 2863514 - RNA, 18 nt, Human
auguuuguggccucagaa

SEQ ID NO: 2863515 - RNA, 14 nt, Human
auguuuguuaaaaa

SEQ ID NO: 2863516 - RNA, 17 nt, Human
auguuuguuaaaaauaa

SEQ ID NO: 2863517 - RNA, 14 nt, Human
auguuuuaaaugua

SEQ ID NO: 2863518 - RNA, 15 nt, Human
auguuuuaaauguac

SEQ ID NO: 2863519 - RNA, 18 nt, Human
auguuuuaaauguacaga

SEQ ID NO: 2863520 - RNA, 17 nt, Human
auuaaagugcuaagguu

SEQ ID NO: 2863521 - RNA, 18 nt, Human
auuaaagugcuaagguuc

SEQ ID NO: 2863522 - RNA, 19 nt, Human
auuaaagugcuaagguucu

SEQ ID NO: 2863523 - RNA, 20 nt, Human
auuaaagugcuaagguucua

SEQ ID NO: 2863524 - RNA, 21 nt, Human
auuaaaguucuguaaaauaua

SEQ ID NO: 2863525 - RNA, 23 nt, Human
auuaaagugcuaagguucuaagg

SEQ ID NO: 2863526 - RNA, 21 nt, Human
auuaaagugcuaagguucuaa

SEQ ID NO: 2863527 - RNA, 22 nt, Human
auuaaagugcuaagguucuaag

SEQ ID NO: 2863528 - RNA, 20 nt, Human
auguucuuaugcaaaaugga

SEQ ID NO: 2863529 - RNA, 21 nt, Human
auguucuuaugcaaaauggaa

SEQ ID NO: 2863530 - RNA, 19 nt, Human
auguucuugcagucaucag

SEQ ID NO: 2863531 - RNA, 11 nt, Human
auguucuuuau

SEQ ID NO: 2863532 - RNA, 13 nt, Human
auguucuuuauau

SEQ ID NO: 2863533 - RNA, 16 nt, Human
auguucuuuauauaca

SEQ ID NO: 2863534 - RNA, 20 nt, Human
auguucuuuauauacaauaa

SEQ ID NO: 2863535 - RNA, 22 nt, Human
auguucuuuauauacaauaaug

SEQ ID NO: 2863536 - RNA, 12 nt, Human
auguuugaaaug

SEQ ID NO: 2863537 - RNA, 22 nt, Human
auguuugaaaugaggucuguuu

SEQ ID NO: 2863538 - RNA, 11 nt, Human
auguuugaaua

SEQ ID NO: 2863539 - RNA, 13 nt, Human
auguuugaauaug

SEQ ID NO: 2863540 - RNA, 17 nt, Human
auguuugaauauggaca

SEQ ID NO: 2863541 - RNA, 21 nt, Human
auguuugaauauggacaagag

SEQ ID NO: 2863542 - RNA, 18 nt, Human
auguucucugaggacacu

SEQ ID NO: 2863543 - RNA, 21 nt, Human
augugucaacuucaacauuua

SEQ ID NO: 2863544 - RNA, 20 nt, Human
augugucccgaauccacagu

SEQ ID NO: 2863545 - RNA, 18 nt, Human
auguguccuaucuaucuu

SEQ ID NO: 2863546 - RNA, 19 nt, Human
auguguccuaucuaucuuc

SEQ ID NO: 2863547 - RNA, 22 nt, Human
auguguccuaucuaucuuccaa

SEQ ID NO: 2863548 - RNA, 13 nt, Human
auguguccugguu

SEQ ID NO: 2863549 - RNA, 16 nt, Human
augugucuguauuuca

SEQ ID NO: 2863550 - RNA, 18 nt, Human
augugucuguauuucaug

SEQ ID NO: 2863551 - RNA, 20 nt, Human
augugucuguauuucaugug

SEQ ID NO: 2863552 - RNA, 21 nt, Human
augugucuguauuucaugugg

SEQ ID NO: 2863553 - RNA, 18 nt, Human
auguguccucagggagca

SEQ ID NO: 2863554 - RNA, 17 nt, Human
auguguccucagggagc

SEQ ID NO: 2863555 - RNA, 20 nt, Human
auguguauguacguuuguau

SEQ ID NO: 2863556 - RNA, 14 nt, Human
augugucacuugug

SEQ ID NO: 2863557 - RNA, 15 nt, Human
augugucacuugugc

SEQ ID NO: 2863558 - RNA, 17 nt, Human
augugucacuugugcuu

SEQ ID NO: 2863559 - RNA, 21 nt, Human
augugucaguggggcucucug

SEQ ID NO: 2863560 - RNA, 22 nt, Human
augugucaguggggcucucuga

SEQ ID NO: 2863561 - RNA, 15 nt, Human
augugucaugcauga

SEQ ID NO: 2863562 - RNA, 14 nt, Human
auguguauuucuua

SEQ ID NO: 2863563 - RNA, 16 nt, Human
auguguauuucuuaua

SEQ ID NO: 2863564 - RNA, 14 nt, Human
auguguacauggca

SEQ ID NO: 2863565 - RNA, 16 nt, Human
auguguacauggcaga

SEQ ID NO: 2863566 - RNA, 22 nt, Human
auguguacauggcagaguuugu

SEQ ID NO: 2863567 - RNA, 15 nt, Human
auguguacucuaacu

SEQ ID NO: 2863568 - RNA, 14 nt, Human
auguguagccuaug

SEQ ID NO: 2863569 - RNA, 15 nt, Human
auguguagccuaugu

SEQ ID NO: 2863570 - RNA, 18 nt, Human
auguguacaauguacaca

SEQ ID NO: 2863571 - RNA, 20 nt, Human
auguguacaauguacacacu

SEQ ID NO: 2863572 - RNA, 23 nt, Human
auggagccagcucccucuauuua

SEQ ID NO: 2863573 - RNA, 12 nt, Human
auggagcccagg

SEQ ID NO: 2863574 - RNA, 13 nt, Human
auggagcccaggc

SEQ ID NO: 2863575 - RNA, 14 nt, Human
auggagcccaggcg

SEQ ID NO: 2863576 - RNA, 23 nt, Human
auggagcccaggcgggagcggug

SEQ ID NO: 2863577 - RNA, 16 nt, Human
auggauccuggaggau

SEQ ID NO: 2863578 - RNA, 15 nt, Human
auggagccucuucug

SEQ ID NO: 2863579 - RNA, 14 nt, Human
auggagcucagaga

SEQ ID NO: 2863580 - RNA, 22 nt, Human
auggagcucagagagggcaggc

SEQ ID NO: 2863581 - RNA, 23 nt, Human
auggagcgcaccugcccccuggu

SEQ ID NO: 2863582 - RNA, 17 nt, Human
auggagcgcaccugccc

SEQ ID NO: 2863583 - RNA, 20 nt, Human
auggagccuggcacaggacu

SEQ ID NO: 2863584 - RNA, 21 nt, Human
auggagccuggcacaggacug

SEQ ID NO: 2863585 - RNA, 22 nt, Human
auggagccuggcacaggacuga

SEQ ID NO: 2863586 - RNA, 23 nt, Human
auggagccuggcacaggacugau

SEQ ID NO: 2863587 - RNA, 20 nt, Human
auggauuaaauuuaauucuu

SEQ ID NO: 2863588 - RNA, 23 nt, Human
auggcuccgaacacccucgaagc

SEQ ID NO: 2863589 - RNA, 13 nt, Human
auggaugcaaagu

SEQ ID NO: 2863590 - RNA, 19 nt, Human
auggaugcaaaguacaaug

SEQ ID NO: 2863591 - RNA, 22 nt, Human
auggaugcaaaguacaaugugu

SEQ ID NO: 2863592 - RNA, 13 nt, Human
auggaugauucag

SEQ ID NO: 2863593 - RNA, 18 nt, Human
auggaugauucagaaauu

SEQ ID NO: 2863594 - RNA, 13 nt, Human
auggagcuggccg

SEQ ID NO: 2863595 - RNA, 20 nt, Human
auggaugaaucucccacucc

SEQ ID NO: 2863596 - RNA, 21 nt, Human
auggaugaaucucccacucca

SEQ ID NO: 2863597 - RNA, 22 nt, Human
auggaugaaucucccacuccag

SEQ ID NO: 2863598 - RNA, 21 nt, Human
auggaugauucagaaauugga

SEQ ID NO: 2863599 - RNA, 23 nt, Human
auggaugccaauauuaaaucugc

SEQ ID NO: 2863600 - RNA, 22 nt, Human
auggaugccaauauuaaaucug

SEQ ID NO: 2863601 - RNA, 13 nt, Human
auggaugccaaua

SEQ ID NO: 2863602 - RNA, 16 nt, Human
augggaauaauugcuu

SEQ ID NO: 2863603 - RNA, 17 nt, Human
augggaauaauugcuuu

SEQ ID NO: 2863604 - RNA, 14 nt, Human
auggcucugcaccc

SEQ ID NO: 2863605 - RNA, 17 nt, Human
auggcucugcaccccuc

SEQ ID NO: 2863606 - RNA, 22 nt, Human
auggcucugcaccccucugccc

SEQ ID NO: 2863607 - RNA, 23 nt, Human
auggcucugcaccccucugcccu

SEQ ID NO: 2863608 - RNA, 12 nt, Human
auggcucuggac

SEQ ID NO: 2863609 - RNA, 17 nt, Human
auggcucuggacucuaa

SEQ ID NO: 2863610 - RNA, 19 nt, Human
auggcucuggacucuaaag

SEQ ID NO: 2863611 - RNA, 22 nt, Human
auggcucuggacucuaaagacc

SEQ ID NO: 2863612 - RNA, 18 nt, Human
auggcugacuuugcucuu

SEQ ID NO: 2863613 - RNA, 14 nt, Human
auggcugcaguccu

SEQ ID NO: 2863614 - RNA, 15 nt, Human
auggcugcaguccuc

SEQ ID NO: 2863615 - RNA, 18 nt, Human
auggaacacaaacacauu

SEQ ID NO: 2863616 - RNA, 14 nt, Human
auggaaaagagaua

SEQ ID NO: 2863617 - RNA, 13 nt, Human
auggaaauguuua

SEQ ID NO: 2863618 - RNA, 16 nt, Human
augcuuuuugaauguu

SEQ ID NO: 2863619 - RNA, 22 nt, Human
augcuuuuugaauguuauuugu

SEQ ID NO: 2863620 - RNA, 19 nt, Human
auggaaaaaaaaaaaagag

SEQ ID NO: 2863621 - RNA, 23 nt, Human
auggaaaaaaaaaaaagaggaaa

SEQ ID NO: 2863622 - RNA, 14 nt, Human
auggaaaaaaugau

SEQ ID NO: 2863623 - RNA, 21 nt, Human
auggaaaaaccauuugaagug

SEQ ID NO: 2863624 - RNA, 15 nt, Human
auggaaaaacuugug

SEQ ID NO: 2863625 - RNA, 21 nt, Human
auggaaaaacuugugcuauaa

SEQ ID NO: 2863626 - RNA, 23 nt, Human
augcuuuuuauuucugcauaugu

SEQ ID NO: 2863627 - RNA, 19 nt, Human
augcuuuuuauuucugcau

SEQ ID NO: 2863628 - RNA, 16 nt, Human
augcuuuuuauuucug

SEQ ID NO: 2863629 - RNA, 22 nt, Human
augcuuuuuauuauuauuauuu

SEQ ID NO: 2863630 - RNA, 13 nt, Human
augcuuuugucua

SEQ ID NO: 2863631 - RNA, 17 nt, Human
augcuuuuacugaacuu

SEQ ID NO: 2863632 - RNA, 21 nt, Human
augcuuuuacugaacuuucuu

SEQ ID NO: 2863633 - RNA, 15 nt, Human
augcuucuuccuuac

SEQ ID NO: 2863634 - RNA, 19 nt, Human
augcaauuagccucauagu

SEQ ID NO: 2863635 - RNA, 21 nt, Human
augcaauuagguuuuuccuua

SEQ ID NO: 2863636 - RNA, 16 nt, Human
augcaauucaucccag

SEQ ID NO: 2863637 - RNA, 19 nt, Human
augcaauuuauuaaaauga

SEQ ID NO: 2863638 - RNA, 13 nt, Human
augcacagauaua

SEQ ID NO: 2863639 - RNA, 15 nt, Human
augcacagauauacu

SEQ ID NO: 2863640 - RNA, 16 nt, Human
augcacagauauacuu

SEQ ID NO: 2863641 - RNA, 17 nt, Human
augcacagauauacuuu

SEQ ID NO: 2863642 - RNA, 18 nt, Human
augcacagauauacuuug

SEQ ID NO: 2863643 - RNA, 19 nt, Human
augcacagauauacuuugu

SEQ ID NO: 2863644 - RNA, 22 nt, Human
augcacagauauacuuugugga

SEQ ID NO: 2863645 - RNA, 17 nt, Human
augaugugaaacacuuu

SEQ ID NO: 2863646 - RNA, 20 nt, Human
augaugugaaacacuuugcc

SEQ ID NO: 2863647 - RNA, 14 nt, Human
augaugugccuggg

SEQ ID NO: 2863648 - RNA, 16 nt, Human
augaugugccugggug

SEQ ID NO: 2863649 - RNA, 23 nt, Human
augauguauguugaagccuuugu

SEQ ID NO: 2863650 - RNA, 22 nt, Human
augcaauagaagugcuccccuc

SEQ ID NO: 2863651 - RNA, 23 nt, Human
augcaauagaagugcuccccucu

SEQ ID NO: 2863652 - RNA, 16 nt, Human
augcaauaaaauuauu

SEQ ID NO: 2863653 - RNA, 18 nt, Human
augcaauaaaauuauuug

SEQ ID NO: 2863654 - RNA, 19 nt, Human
augcaauaaaauuauuugc

SEQ ID NO: 2863655 - RNA, 20 nt, Human
augcaauaaaauuauuugca

SEQ ID NO: 2863656 - RNA, 21 nt, Human
augcaauaaaauuauuugcag

SEQ ID NO: 2863657 - RNA, 22 nt, Human
augcaauaaaauuauuugcagg

SEQ ID NO: 2863658 - RNA, 16 nt, Human
augaugugugaaaacu

SEQ ID NO: 2863659 - RNA, 14 nt, Human
augauguguauaua

SEQ ID NO: 2863660 - RNA, 22 nt, Human
augcaauauguuuaucaacuca

SEQ ID NO: 2863661 - RNA, 13 nt, Human
augcaauauuugu

SEQ ID NO: 2863662 - RNA, 14 nt, Human
augcaauauuugua

SEQ ID NO: 2863663 - RNA, 15 nt, Human
augcaauauuuguaa

SEQ ID NO: 2863664 - RNA, 18 nt, Human
augccuggucuuuccucu

SEQ ID NO: 2863665 - RNA, 13 nt, Human
augccuggcuucg

SEQ ID NO: 2863666 - RNA, 16 nt, Human
augccuggucuuuccu

SEQ ID NO: 2863667 - RNA, 17 nt, Human
augccugguggcagcug

SEQ ID NO: 2863668 - RNA, 12 nt, Human
augccuuugaga

SEQ ID NO: 2863669 - RNA, 13 nt, Human
augccuuugagac

SEQ ID NO: 2863670 - RNA, 14 nt, Human
augccuuugagaca

SEQ ID NO: 2863671 - RNA, 16 nt, Human
augccugguggcagcu

SEQ ID NO: 2863672 - RNA, 15 nt, Human
augccugguggcagc

SEQ ID NO: 2863673 - RNA, 16 nt, Human
augcaugacagccucu

SEQ ID NO: 2863674 - RNA, 12 nt, Human
augcauuugacu

SEQ ID NO: 2863675 - RNA, 16 nt, Human
augcauuguaguuuaa

SEQ ID NO: 2863676 - RNA, 18 nt, Human
augcacauauggacucug

SEQ ID NO: 2863677 - RNA, 12 nt, Human
augcauggaaac

SEQ ID NO: 2863678 - RNA, 20 nt, Human
augcauggaaaccugaaaaa

SEQ ID NO: 2863679 - RNA, 23 nt, Human
augcauggaaaccugaaaaaaag

SEQ ID NO: 2863680 - RNA, 23 nt, Human
augccuuugagacaguuucuuag

SEQ ID NO: 2863681 - RNA, 21 nt, Human
augccuuugagacaguuucuu

SEQ ID NO: 2863682 - RNA, 22 nt, Human
augccuuugagacaguuucuua

SEQ ID NO: 2863683 - RNA, 15 nt, Human
augccuuugagacag

SEQ ID NO: 2863684 - RNA, 16 nt, Human
augccuuugagacagu

SEQ ID NO: 2863685 - RNA, 19 nt, Human
augccuuugagacaguuuc

SEQ ID NO: 2863686 - RNA, 20 nt, Human
augccuuugagacaguuucu

SEQ ID NO: 2863687 - RNA, 21 nt, Human
agcuucagaaguuuggcaaua

SEQ ID NO: 2863688 - RNA, 21 nt, Human
agcuucagauggugaagcauu

SEQ ID NO: 2863689 - RNA, 19 nt, Human
agcuuccuucugugaaagu

SEQ ID NO: 2863690 - RNA, 23 nt, Human
agcuucagguuaucgaaauaaca

SEQ ID NO: 2863691 - RNA, 16 nt, Human
agcuucagaaguuugg

SEQ ID NO: 2863692 - RNA, 13 nt, Human
agcuucagguuau

SEQ ID NO: 2863693 - RNA, 18 nt, Human
agcuucagcuagcuuuua

SEQ ID NO: 2863694 - RNA, 11 nt, Human
agcuucagguu

SEQ ID NO: 2863695 - RNA, 19 nt, Human
agcuucucauccugcaggc

SEQ ID NO: 2863696 - RNA, 20 nt, Human
agcuucuguugcugccucau

SEQ ID NO: 2863697 - RNA, 22 nt, Human
agcuucuguugcugccucaugc

SEQ ID NO: 2863698 - RNA, 21 nt, Human
agcuucuguugcugccucaug

SEQ ID NO: 2863699 - RNA, 17 nt, Human
agcuucuaccaugaaca

SEQ ID NO: 2863700 - RNA, 18 nt, Human
agcuucuaccaugaacag

SEQ ID NO: 2863701 - RNA, 17 nt, Human
agcuucuaauaaauuau

SEQ ID NO: 2863702 - RNA, 18 nt, Human
agcuucuaauaaauuaua

SEQ ID NO: 2863703 - RNA, 23 nt, Human
agcuucuaauaaauuauacaaau

SEQ ID NO: 2863704 - RNA, 16 nt, Human
agcuuuucccuucuuu

SEQ ID NO: 2863705 - RNA, 14 nt, Human
aggaaaaacagguc

SEQ ID NO: 2863706 - RNA, 23 nt, Human
agcuucuguugcugccucaugcu

SEQ ID NO: 2863707 - RNA, 13 nt, Human
agcuuuucccuuc

SEQ ID NO: 2863708 - RNA, 17 nt, Human
agcuuuuauuguauaaa

SEQ ID NO: 2863709 - RNA, 15 nt, Human
agcuuuuauuguaua

SEQ ID NO: 2863710 - RNA, 13 nt, Human
agcuucuuaauua

SEQ ID NO: 2863711 - RNA, 14 nt, Human
agcuucuuaauuaa

SEQ ID NO: 2863712 - RNA, 19 nt, Human
agcuuuuauuguauaaacu

SEQ ID NO: 2863713 - RNA, 12 nt, Human
agcuuuucaaac

SEQ ID NO: 2863714 - RNA, 16 nt, Human
agcuuuucaaacaaga

SEQ ID NO: 2863715 - RNA, 20 nt, Human
agcuuuucaaacaagaaugu

SEQ ID NO: 2863716 - RNA, 12 nt, Human
agcuuuucaccu

SEQ ID NO: 2863717 - RNA, 14 nt, Human
agcuuuucaccuuu

SEQ ID NO: 2863718 - RNA, 22 nt, Human
agcuuuucaccuuuacuuuaga

SEQ ID NO: 2863719 - RNA, 16 nt, Human
aggaaaucucacccca

SEQ ID NO: 2863720 - RNA, 11 nt, Human
aggaaaucugu

SEQ ID NO: 2863721 - RNA, 22 nt, Human
aggaaccuuccuuccugcuuga

SEQ ID NO: 2863722 - RNA, 20 nt, Human
aggaaccuuccuuccugcuu

SEQ ID NO: 2863723 - RNA, 22 nt, Human
aggaacguaaucguguccccua

SEQ ID NO: 2863724 - RNA, 13 nt, Human
aggaaccuguccu

SEQ ID NO: 2863725 - RNA, 19 nt, Human
aggaaccuuccuuccugcu

SEQ ID NO: 2863726 - RNA, 14 nt, Human
aggaaccuuccuuc

SEQ ID NO: 2863727 - RNA, 14 nt, Human
aggaaaucucaccc

SEQ ID NO: 2863728 - RNA, 17 nt, Human
aggaaauccaggguggu

SEQ ID NO: 2863729 - RNA, 15 nt, Human
aggaaauccagggug

SEQ ID NO: 2863730 - RNA, 14 nt, Human
aggaaaaagaaaau

SEQ ID NO: 2863731 - RNA, 12 nt, Human
aggaaaaagcuc

SEQ ID NO: 2863732 - RNA, 13 nt, Human
aggaaaaagcucc

SEQ ID NO: 2863733 - RNA, 18 nt, Human
aggaaaaagcuccaugug

SEQ ID NO: 2863734 - RNA, 19 nt, Human
agcuguacuucgucuucua

SEQ ID NO: 2863735 - RNA, 21 nt, Human
agcuguacuucgucuucuaau

SEQ ID NO: 2863736 - RNA, 20 nt, Human
agcuguaguagcccuuucug

SEQ ID NO: 2863737 - RNA, 21 nt, Human
agcuguaguagcccuuucugu

SEQ ID NO: 2863738 - RNA, 23 nt, Human
agcuguaguagcccuuucugugu

SEQ ID NO: 2863739 - RNA, 11 nt, Human
agcuguagugg

SEQ ID NO: 2863740 - RNA, 14 nt, Human
agcuggugcccgga

SEQ ID NO: 2863741 - RNA, 22 nt, Human
agcuguaguagcccuuucugug

SEQ ID NO: 2863742 - RNA, 19 nt, Human
agcuggucccacucagucc

SEQ ID NO: 2863743 - RNA, 21 nt, Human
agcuggucccacucaguccau

SEQ ID NO: 2863744 - RNA, 20 nt, Human
agcuggguggcacugccaug

SEQ ID NO: 2863745 - RNA, 18 nt, Human
agcuggugagugaugcgg

SEQ ID NO: 2863746 - RNA, 22 nt, Human
agcugggugucaagagggucug

SEQ ID NO: 2863747 - RNA, 17 nt, Human
agcugggugucaagagg

SEQ ID NO: 2863748 - RNA, 18 nt, Human
agcuggguggcacugcca

SEQ ID NO: 2863749 - RNA, 19 nt, Human
agcuggguggcacugccau

SEQ ID NO: 2863750 - RNA, 21 nt, Human
agcugcucugaaaucuccuuu

SEQ ID NO: 2863751 - RNA, 14 nt, Human
agcugauauaaauu

SEQ ID NO: 2863752 - RNA, 15 nt, Human
agcugauauaaauuc

SEQ ID NO: 2863753 - RNA, 16 nt, Human
agcugauauaaauucu

SEQ ID NO: 2863754 - RNA, 17 nt, Human
agcugauauaaauucug

SEQ ID NO: 2863755 - RNA, 18 nt, Human
agcugauauaaauucugu

SEQ ID NO: 2863756 - RNA, 19 nt, Human
agcugauauaaauucugug

SEQ ID NO: 2863757 - RNA, 21 nt, Human
agcugauacaaauugcagacu

SEQ ID NO: 2863758 - RNA, 16 nt, Human
agcugauacuucauuu

SEQ ID NO: 2863759 - RNA, 20 nt, Human
agcugauacuucauuuaaaa

SEQ ID NO: 2863760 - RNA, 21 nt, Human
agcugauacuucauuuaaaaa

SEQ ID NO: 2863761 - RNA, 20 nt, Human
agcugaucauaagugaauuu

SEQ ID NO: 2863762 - RNA, 16 nt, Human
agcugaguuaugaugu

SEQ ID NO: 2863763 - RNA, 16 nt, Human
agcugaguuguugugg

SEQ ID NO: 2863764 - RNA, 16 nt, Human
agcugagguuucaccc

SEQ ID NO: 2863765 - RNA, 18 nt, Human
agcugagguuucacccuu

SEQ ID NO: 2863766 - RNA, 20 nt, Human
agcugagucucccuaaggca

SEQ ID NO: 2863767 - RNA, 16 nt, Human
agcugacauugccaaa

SEQ ID NO: 2863768 - RNA, 18 nt, Human
agcugacauugccaaaaa

SEQ ID NO: 2863769 - RNA, 19 nt, Human
agcugacacaaaccugccu

SEQ ID NO: 2863770 - RNA, 20 nt, Human
agcugacacaaaccugccug

SEQ ID NO: 2863771 - RNA, 21 nt, Human
agcugacacaaaccugccugg

SEQ ID NO: 2863772 - RNA, 22 nt, Human
agcugacacaaaccugccuggg

SEQ ID NO: 2863773 - RNA, 23 nt, Human
agcugacacaaaccugccugggu

SEQ ID NO: 2863774 - RNA, 14 nt, Human
agcugacacaaacc

SEQ ID NO: 2863775 - RNA, 12 nt, Human
agcuccuguccu

SEQ ID NO: 2863776 - RNA, 13 nt, Human
agcuccuguccuc

SEQ ID NO: 2863777 - RNA, 13 nt, Human
agcuccuggggcg

SEQ ID NO: 2863778 - RNA, 22 nt, Human
agcuccuggggcguccaggccg

SEQ ID NO: 2863779 - RNA, 11 nt, Human
agcuccuguaa

SEQ ID NO: 2863780 - RNA, 13 nt, Human
agcuccucuuccu

SEQ ID NO: 2863781 - RNA, 15 nt, Human
agcuccucuguccug

SEQ ID NO: 2863782 - RNA, 21 nt, Human
agcuccucuguccugcuucug

SEQ ID NO: 2863783 - RNA, 16 nt, Human
agcuccuccucggaac

SEQ ID NO: 2863784 - RNA, 20 nt, Human
agcuccuccucggaaccgcu

SEQ ID NO: 2863785 - RNA, 15 nt, Human
agcuccucauccagg

SEQ ID NO: 2863786 - RNA, 18 nt, Human
agcuccucauccagggcu

SEQ ID NO: 2863787 - RNA, 14 nt, Human
agcuccucacugug

SEQ ID NO: 2863788 - RNA, 15 nt, Human
agcuccucacugugg

SEQ ID NO: 2863789 - RNA, 12 nt, Human
agcuccucccac

SEQ ID NO: 2863790 - RNA, 19 nt, Human
agcuccucauccagggcuc

SEQ ID NO: 2863791 - RNA, 21 nt, Human
agcuccucauccagggcucug

SEQ ID NO: 2863792 - RNA, 20 nt, Human
aggauguucugggacacagu

SEQ ID NO: 2863793 - RNA, 18 nt, Human
aggauguucugggacaca

SEQ ID NO: 2863794 - RNA, 17 nt, Human
aggaggggauagagaga

SEQ ID NO: 2863795 - RNA, 16 nt, Human
aggaggggaacacugc

SEQ ID NO: 2863796 - RNA, 20 nt, Human
aggaggggaacacugcccuc

SEQ ID NO: 2863797 - RNA, 14 nt, Human
aggaggggaagcug

SEQ ID NO: 2863798 - RNA, 16 nt, Human
aggaggggaagcugca

SEQ ID NO: 2863799 - RNA, 19 nt, Human
aggaggggaagcugcagcu

SEQ ID NO: 2863800 - RNA, 23 nt, Human
aggaccucauccaaacaauuuaa

SEQ ID NO: 2863801 - RNA, 19 nt, Human
aggaggggccccccugccc

SEQ ID NO: 2863802 - RNA, 23 nt, Human
aggaggggccccccugcccugug

SEQ ID NO: 2863803 - RNA, 21 nt, Human
aggaggggccccccugcccug

SEQ ID NO: 2863804 - RNA, 15 nt, Human
aggaggguacagcug

SEQ ID NO: 2863805 - RNA, 17 nt, Human
aggaggguacagcuggg

SEQ ID NO: 2863806 - RNA, 18 nt, Human
aggaggguacagcugggc

SEQ ID NO: 2863807 - RNA, 19 nt, Human
aggaggguacagcugggcu

SEQ ID NO: 2863808 - RNA, 14 nt, Human
aggauucuaaaaug

SEQ ID NO: 2863809 - RNA, 12 nt, Human
aggauucuaaaa

SEQ ID NO: 2863810 - RNA, 14 nt, Human
aggauucagccgga

SEQ ID NO: 2863811 - RNA, 16 nt, Human
aggauucagccggagg

SEQ ID NO: 2863812 - RNA, 14 nt, Human
aggcacugcugccc

SEQ ID NO: 2863813 - RNA, 16 nt, Human
aggcacugcugcccag

SEQ ID NO: 2863814 - RNA, 22 nt, Human
aggcacugcugcccagccucca

SEQ ID NO: 2863815 - RNA, 14 nt, Human
aggcacugccugau

SEQ ID NO: 2863816 - RNA, 17 nt, Human
aggcacuguaguucuaa

SEQ ID NO: 2863817 - RNA, 19 nt, Human
aggcacuguaguucuaaga

SEQ ID NO: 2863818 - RNA, 16 nt, Human
aggcacuguacuaggc

SEQ ID NO: 2863819 - RNA, 16 nt, Human
aggcacuguaguucua

SEQ ID NO: 2863820 - RNA, 13 nt, Human
aggcacugccuga

SEQ ID NO: 2863821 - RNA, 13 nt, Human
aggagaagcugca

SEQ ID NO: 2863822 - RNA, 20 nt, Human
aggagagccugcugcauggg

SEQ ID NO: 2863823 - RNA, 13 nt, Human
aggagaggagaga

SEQ ID NO: 2863824 - RNA, 14 nt, Human
aggagaggagagag

SEQ ID NO: 2863825 - RNA, 15 nt, Human
aggagaggagagagg

SEQ ID NO: 2863826 - RNA, 16 nt, Human
aggagaggagagaggc

SEQ ID NO: 2863827 - RNA, 17 nt, Human
aggagaggagagaggca

SEQ ID NO: 2863828 - RNA, 18 nt, Human
aggagaggagagaggcag

SEQ ID NO: 2863829 - RNA, 18 nt, Human
aggaccucugaaacccug

SEQ ID NO: 2863830 - RNA, 13 nt, Human
aggaccucccuuc

SEQ ID NO: 2863831 - RNA, 15 nt, Human
aggaccucccuuccg

SEQ ID NO: 2863832 - RNA, 16 nt, Human
aggaccucccuuccga

SEQ ID NO: 2863833 - RNA, 18 nt, Human
aggaccuccucuuccccc

SEQ ID NO: 2863834 - RNA, 19 nt, Human
aggaccuccucuucccccu

SEQ ID NO: 2863835 - RNA, 22 nt, Human
aggaccuccucuucccccuucc

SEQ ID NO: 2863836 - RNA, 17 nt, Human
aggacccggaggggccu

SEQ ID NO: 2863837 - RNA, 12 nt, Human
aggagaacaaau

SEQ ID NO: 2863838 - RNA, 13 nt, Human
aggagaacaaaua

SEQ ID NO: 2863839 - RNA, 14 nt, Human
aggagaacaaauau

SEQ ID NO: 2863840 - RNA, 20 nt, Human
aggaccucugaaacccugga

SEQ ID NO: 2863841 - RNA, 15 nt, Human
aggagaaccacuaca

SEQ ID NO: 2863842 - RNA, 14 nt, Human
aggagaaccacuac

SEQ ID NO: 2863843 - RNA, 15 nt, Human
aggagaagaguugag

SEQ ID NO: 2863844 - RNA, 18 nt, Human
aggagaagaguugaggaa

SEQ ID NO: 2863845 - RNA, 20 nt, Human
aggaccccuccaugugggcu

SEQ ID NO: 2863846 - RNA, 23 nt, Human
aggaccaauaaaauuucuaagag

SEQ ID NO: 2863847 - RNA, 19 nt, Human
aggaccacaggugugagcc

SEQ ID NO: 2863848 - RNA, 14 nt, Human
aggaccacucagcc

SEQ ID NO: 2863849 - RNA, 15 nt, Human
aggaccacucagccc

SEQ ID NO: 2863850 - RNA, 17 nt, Human
aggaccacucagccccu

SEQ ID NO: 2863851 - RNA, 18 nt, Human
aggaccacucagccccua

SEQ ID NO: 2863852 - RNA, 19 nt, Human
aggaccacucagccccuag

SEQ ID NO: 2863853 - RNA, 14 nt, Human
aggaacuccuuggc

SEQ ID NO: 2863854 - RNA, 13 nt, Human
aggaacugcagca

SEQ ID NO: 2863855 - RNA, 17 nt, Human
aggaacugcagcaaucu

SEQ ID NO: 2863856 - RNA, 21 nt, Human
aggaacugcagcaaucuuuga

SEQ ID NO: 2863857 - RNA, 17 nt, Human
agguuccaacuguauau

SEQ ID NO: 2863858 - RNA, 18 nt, Human
agguuccaacuguauaua

SEQ ID NO: 2863859 - RNA, 12 nt, Human
agguuccacaga

SEQ ID NO: 2863860 - RNA, 14 nt, Human
agguuccacagagu

SEQ ID NO: 2863861 - RNA, 16 nt, Human
agguuccauccuuuac

SEQ ID NO: 2863862 - RNA, 22 nt, Human
agguucccugccuuguuuggau

SEQ ID NO: 2863863 - RNA, 11 nt, Human
agguucccugu

SEQ ID NO: 2863864 - RNA, 18 nt, Human
agguucccuguucuuccu

SEQ ID NO: 2863865 - RNA, 19 nt, Human
agguucccuguucuuccuc

SEQ ID NO: 2863866 - RNA, 20 nt, Human
agguucccuguucuuccucc

SEQ ID NO: 2863867 - RNA, 11 nt, Human
agguucuaaag

SEQ ID NO: 2863868 - RNA, 12 nt, Human
agguucuaaagu

SEQ ID NO: 2863869 - RNA, 13 nt, Human
agguucagcuugu

SEQ ID NO: 2863870 - RNA, 16 nt, Human
agguucacuaaagcag

SEQ ID NO: 2863871 - RNA, 16 nt, Human
agguucacgugcagcu

SEQ ID NO: 2863872 - RNA, 20 nt, Human
agguucaguauuauguaguu

SEQ ID NO: 2863873 - RNA, 21 nt, Human
agguucaugccaccauggcca

SEQ ID NO: 2863874 - RNA, 22 nt, Human
agguuaauuccaauuauaugag

SEQ ID NO: 2863875 - RNA, 15 nt, Human
agguuaauuccaauu

SEQ ID NO: 2863876 - RNA, 14 nt, Human
agguggcagcccug

SEQ ID NO: 2863877 - RNA, 13 nt, Human
agguggcagcccu

SEQ ID NO: 2863878 - RNA, 15 nt, Human
agguggcagcccugu

SEQ ID NO: 2863879 - RNA, 21 nt, Human
aggucgaccccaaagccccuu

SEQ ID NO: 2863880 - RNA, 19 nt, Human
agguccugugaucuuauuu

SEQ ID NO: 2863881 - RNA, 20 nt, Human
agguccugugaucuuauuuu

SEQ ID NO: 2863882 - RNA, 23 nt, Human
agguccugugaucuuauuuuucu

SEQ ID NO: 2863883 - RNA, 16 nt, Human
aggugcugccauccag

SEQ ID NO: 2863884 - RNA, 17 nt, Human
aggugcuccccugacag

SEQ ID NO: 2863885 - RNA, 17 nt, Human
aggugcugccauccagg

SEQ ID NO: 2863886 - RNA, 14 nt, Human
aggugcuggaggug

SEQ ID NO: 2863887 - RNA, 17 nt, Human
aggugcuggagguggga

SEQ ID NO: 2863888 - RNA, 19 nt, Human
aggugcuggaggugggagc

SEQ ID NO: 2863889 - RNA, 23 nt, Human
aggugcuggaggugggagcagga

SEQ ID NO: 2863890 - RNA, 23 nt, Human
agguggauuuuguuuaaaaaauc

SEQ ID NO: 2863891 - RNA, 19 nt, Human
agguggauuuuguuuaaaa

SEQ ID NO: 2863892 - RNA, 14 nt, Human
agguggcaaggcug

SEQ ID NO: 2863893 - RNA, 15 nt, Human
agguggcaaggcugu

SEQ ID NO: 2863894 - RNA, 16 nt, Human
agguggcaaggcugug

SEQ ID NO: 2863895 - RNA, 18 nt, Human
agguggcaaggcugugcu

SEQ ID NO: 2863896 - RNA, 22 nt, Human
agguucuaaggccuaggauucu

SEQ ID NO: 2863897 - RNA, 15 nt, Human
agguucuaaggccua

SEQ ID NO: 2863898 - RNA, 19 nt, Human
agguucuaaggccuaggau

SEQ ID NO: 2863899 - RNA, 23 nt, Human
agguucuaaaguucuaagauucu

SEQ ID NO: 2863900 - RNA, 14 nt, Human
agguucuaacccua

SEQ ID NO: 2863901 - RNA, 12 nt, Human
agguucuaaggc

SEQ ID NO: 2863902 - RNA, 13 nt, Human
agguucuaaggcc

SEQ ID NO: 2863903 - RNA, 13 nt, Human
agguucuaaaguu

SEQ ID NO: 2863904 - RNA, 14 nt, Human
agguucuaaaguuc

SEQ ID NO: 2863905 - RNA, 15 nt, Human
agguucuaaaguucu

SEQ ID NO: 2863906 - RNA, 16 nt, Human
agguucuaaaguucua

SEQ ID NO: 2863907 - RNA, 17 nt, Human
agguucuaaaguucuaa

SEQ ID NO: 2863908 - RNA, 18 nt, Human
agguucuaaaguucuaag

SEQ ID NO: 2863909 - RNA, 19 nt, Human
agguucuaaaguucuaaga

SEQ ID NO: 2863910 - RNA, 20 nt, Human
agguucuaaaguucuaagau

SEQ ID NO: 2863911 - RNA, 18 nt, Human
agguaaucgaccugccuc

SEQ ID NO: 2863912 - RNA, 17 nt, Human
agguaaucgaccugccu

SEQ ID NO: 2863913 - RNA, 18 nt, Human
agguaauauaaaaagcuu

SEQ ID NO: 2863914 - RNA, 18 nt, Human
agguaaucaaugaauauu

SEQ ID NO: 2863915 - RNA, 13 nt, Human
agguaaguuuuuu

SEQ ID NO: 2863916 - RNA, 21 nt, Human
agguaccuugaccuuuguaca

SEQ ID NO: 2863917 - RNA, 22 nt, Human
agguaccuugaccuuuguacag

SEQ ID NO: 2863918 - RNA, 17 nt, Human
agguaccccuuucuggc

SEQ ID NO: 2863919 - RNA, 21 nt, Human
agguaccccuuucuggcucuc

SEQ ID NO: 2863920 - RNA, 22 nt, Human
agguaccagcaauauguaaaua

SEQ ID NO: 2863921 - RNA, 18 nt, Human
agguacccaauagcugcc

SEQ ID NO: 2863922 - RNA, 20 nt, Human
agguacccaauagcugccca

SEQ ID NO: 2863923 - RNA, 23 nt, Human
agguacccaauagcugcccauuu

SEQ ID NO: 2863924 - RNA, 18 nt, Human
agguacagagaccucccu

SEQ ID NO: 2863925 - RNA, 11 nt, Human
agguacagggu

SEQ ID NO: 2863926 - RNA, 18 nt, Human
agguacaggguuuuuacc

SEQ ID NO: 2863927 - RNA, 19 nt, Human
agguacaggguuuuuaccu

SEQ ID NO: 2863928 - RNA, 19 nt, Human
agggcacagcaucuguagu

SEQ ID NO: 2863929 - RNA, 13 nt, Human
aggcagacagcag

SEQ ID NO: 2863930 - RNA, 15 nt, Human
aggcagacagcaggc

SEQ ID NO: 2863931 - RNA, 19 nt, Human
aggcagacagcaggcagcg

SEQ ID NO: 2863932 - RNA, 22 nt, Human
aggcagacagcaggcagcgcca

SEQ ID NO: 2863933 - RNA, 23 nt, Human
aggcagacagcaggcagcgccaa

SEQ ID NO: 2863934 - RNA, 18 nt, Human
aggcagacuacacaggau

SEQ ID NO: 2863935 - RNA, 18 nt, Human
aggcagaauaagaaaaca

SEQ ID NO: 2863936 - RNA, 14 nt, Human
agggacgcuuuguc

SEQ ID NO: 2863937 - RNA, 17 nt, Human
agggacgcuuugucugu

SEQ ID NO: 2863938 - RNA, 14 nt, Human
agggacucugaagc

SEQ ID NO: 2863939 - RNA, 19 nt, Human
agggacucugaagccucug

SEQ ID NO: 2863940 - RNA, 17 nt, Human
aggcugaguuuucucuu

SEQ ID NO: 2863941 - RNA, 17 nt, Human
aggcugccccucucacc

SEQ ID NO: 2863942 - RNA, 15 nt, Human
aggcugccccucuca

SEQ ID NO: 2863943 - RNA, 12 nt, Human
aggcugccccuc

SEQ ID NO: 2863944 - RNA, 20 nt, Human
aggcugcccccggcccccug

SEQ ID NO: 2863945 - RNA, 22 nt, Human
aggcugcccccggcccccuggu

SEQ ID NO: 2863946 - RNA, 23 nt, Human
aggcugcagauaacagaaaggcu

SEQ ID NO: 2863947 - RNA, 12 nt, Human
aggcugcccccg

SEQ ID NO: 2863948 - RNA, 15 nt, Human
aggcugcccccggcc

SEQ ID NO: 2863949 - RNA, 20 nt, Human
aggcugugcugcccugaaga

SEQ ID NO: 2863950 - RNA, 17 nt, Human
aggcugugcugcccuga

SEQ ID NO: 2863951 - RNA, 16 nt, Human
aggcugugcugcccug

SEQ ID NO: 2863952 - RNA, 15 nt, Human
aggcugugcugcccu

SEQ ID NO: 2863953 - RNA, 13 nt, Human
aggcugugcuccc

SEQ ID NO: 2863954 - RNA, 14 nt, Human
aggcugugcucccu

SEQ ID NO: 2863955 - RNA, 20 nt, Human
aggcugugcucccugguucu

SEQ ID NO: 2863956 - RNA, 24 nt, Human
aggcugugcucccugguucugaug

SEQ ID NO: 2863957 - RNA, 18 nt, Human
aggcugugcagcgcagcu

SEQ ID NO: 2863958 - RNA, 22 nt, Human
aggcugugcugcccugaagaau

SEQ ID NO: 2863959 - RNA, 21 nt, Human
aggcugugcugcccugaagaa

SEQ ID NO: 2863960 - RNA, 22 nt, Human
aggcugugucccucuucucuuc

SEQ ID NO: 2863961 - RNA, 22 nt, Human
aggcuauggacagggcaugcca

SEQ ID NO: 2863962 - RNA, 15 nt, Human
aggcucuuucugggc

SEQ ID NO: 2863963 - RNA, 14 nt, Human
aggcucuucuccuu

SEQ ID NO: 2863964 - RNA, 20 nt, Human
aggcucuuucugggccaagu

SEQ ID NO: 2863965 - RNA, 18 nt, Human
aggcucuuucugggccaa

SEQ ID NO: 2863966 - RNA, 21 nt, Human
aggcugaacuuguuuucuggg

SEQ ID NO: 2863967 - RNA, 20 nt, Human
aggcugaacuuguuuucugg

SEQ ID NO: 2863968 - RNA, 22 nt, Human
aggcugaggggaggaucacugg

SEQ ID NO: 2863969 - RNA, 19 nt, Human
aggggcacuucauugagag

SEQ ID NO: 2863970 - RNA, 12 nt, Human
aggggccgcccu

SEQ ID NO: 2863971 - RNA, 12 nt, Human
aggggcccuggu

SEQ ID NO: 2863972 - RNA, 21 nt, Human
aggggauagagagagaccacu

SEQ ID NO: 2863973 - RNA, 16 nt, Human
aggggauagagagaga

SEQ ID NO: 2863974 - RNA, 23 nt, Human
agggcggggcacagauuggagag

SEQ ID NO: 2863975 - RNA, 17 nt, Human
aggggaugguagaccuu

SEQ ID NO: 2863976 - RNA, 13 nt, Human
aggggauauuuaa

SEQ ID NO: 2863977 - RNA, 14 nt, Human
aggggauauuuaag

SEQ ID NO: 2863978 - RNA, 21 nt, Human
aggggauauuuaagguagcuu

SEQ ID NO: 2863979 - RNA, 19 nt, Human
aggggaucauaaaguuaga

SEQ ID NO: 2863980 - RNA, 20 nt, Human
aggggaucauaaaguuagaa

SEQ ID NO: 2863981 - RNA, 19 nt, Human
aggggaucuggaagggcca

SEQ ID NO: 2863982 - RNA, 19 nt, Human
aggggauggaauucuuccu

SEQ ID NO: 2863983 - RNA, 17 nt, Human
aggggcaaauucuuuug

SEQ ID NO: 2863984 - RNA, 19 nt, Human
agggcgggaggauguucug

SEQ ID NO: 2863985 - RNA, 21 nt, Human
agggcacaccgggcacucaga

SEQ ID NO: 2863986 - RNA, 20 nt, Human
agggcacaccgggcacucag

SEQ ID NO: 2863987 - RNA, 17 nt, Human
agggcacaccgggcacu

SEQ ID NO: 2863988 - RNA, 14 nt, Human
agggcacacacugu

SEQ ID NO: 2863989 - RNA, 12 nt, Human
agggcaagucuu

SEQ ID NO: 2863990 - RNA, 20 nt, Human
agggcacaaguccuggaugu

SEQ ID NO: 2863991 - RNA, 14 nt, Human
agggcaauuggaac

SEQ ID NO: 2863992 - RNA, 17 nt, Human
agggcaauuggaacaaa

SEQ ID NO: 2863993 - RNA, 19 nt, Human
agacugcaagaggcuccug

SEQ ID NO: 2863994 - RNA, 21 nt, Human
agacugcaagaggcuccuguc

SEQ ID NO: 2863995 - RNA, 14 nt, Human
agagaaagagagag

SEQ ID NO: 2863996 - RNA, 17 nt, Human
agagaaaggccugcaca

SEQ ID NO: 2863997 - RNA, 18 nt, Human
agagaaaggccugcacac

SEQ ID NO: 2863998 - RNA, 19 nt, Human
agagaaaggccugcacaca

SEQ ID NO: 2863999 - RNA, 20 nt, Human
agagaaaggccugcacacaa

SEQ ID NO: 2864000 - RNA, 18 nt, Human
agagaaagcacgugucuc

SEQ ID NO: 2864001 - RNA, 13 nt, Human
agagaaagccagg

SEQ ID NO: 2864002 - RNA, 14 nt, Human
agagaaagccaggc

SEQ ID NO: 2864003 - RNA, 16 nt, Human
agagaaagccaggcag

SEQ ID NO: 2864004 - RNA, 17 nt, Human
agagaaagccaggcagg

SEQ ID NO: 2864005 - RNA, 19 nt, Human
agagaaagccaggcaggua

SEQ ID NO: 2864006 - RNA, 22 nt, Human
agagaaagccaggcagguagcc

SEQ ID NO: 2864007 - RNA, 13 nt, Human
agagaagauaauu

SEQ ID NO: 2864008 - RNA, 15 nt, Human
agagaagauaauugu

SEQ ID NO: 2864009 - RNA, 20 nt, Human
agagaagauaauuguugaaa

SEQ ID NO: 2864010 - RNA, 21 nt, Human
agagaagauaauuguugaaau

SEQ ID NO: 2864011 - RNA, 13 nt, Human
agagaagcaauuu

SEQ ID NO: 2864012 - RNA, 12 nt, Human
agagaagcugcu

SEQ ID NO: 2864013 - RNA, 13 nt, Human
agagaagcugcug

SEQ ID NO: 2864014 - RNA, 14 nt, Human
agagaagcugcuga

SEQ ID NO: 2864015 - RNA, 12 nt, Human
agagaagcuggg

SEQ ID NO: 2864016 - RNA, 17 nt, Human
agagaagcggauuucca

SEQ ID NO: 2864017 - RNA, 18 nt, Human
agagaagcggauuuccag

SEQ ID NO: 2864018 - RNA, 18 nt, Human
agagagcuuaaugauaau

SEQ ID NO: 2864019 - RNA, 17 nt, Human
agagagcuuagccugga

SEQ ID NO: 2864020 - RNA, 23 nt, Human
agagagcuucuguugcugccuca

SEQ ID NO: 2864021 - RNA, 20 nt, Human
agagagcuucuguugcugcc

SEQ ID NO: 2864022 - RNA, 22 nt, Human
agagaaggggaagcacucgugu

SEQ ID NO: 2864023 - RNA, 18 nt, Human
agagaaggccucccuagc

SEQ ID NO: 2864024 - RNA, 21 nt, Human
agagaagggcauaaaacagcu

SEQ ID NO: 2864025 - RNA, 18 nt, Human
agagaaggggugugcaug

SEQ ID NO: 2864026 - RNA, 16 nt, Human
agagagcuucuguugc

SEQ ID NO: 2864027 - RNA, 23 nt, Human
agagaggguggugaccucugccu

SEQ ID NO: 2864028 - RNA, 15 nt, Human
agagaggagaggaga

SEQ ID NO: 2864029 - RNA, 13 nt, Human
agagaggagagga

SEQ ID NO: 2864030 - RNA, 14 nt, Human
agagaguggcuccu

SEQ ID NO: 2864031 - RNA, 16 nt, Human
agagaguggcuccucc

SEQ ID NO: 2864032 - RNA, 15 nt, Human
agagccccuggggcc

SEQ ID NO: 2864033 - RNA, 16 nt, Human
agagccccuggggccu

SEQ ID NO: 2864034 - RNA, 19 nt, Human
agagccccuggggccuaga

SEQ ID NO: 2864035 - RNA, 12 nt, Human
agagcccccagg

SEQ ID NO: 2864036 - RNA, 13 nt, Human
agagcccccagga

SEQ ID NO: 2864037 - RNA, 17 nt, Human
agagccugcugcauggg

SEQ ID NO: 2864038 - RNA, 15 nt, Human
agagccugcugcaug

SEQ ID NO: 2864039 - RNA, 21 nt, Human
agacugcaaugugaucuaugu

SEQ ID NO: 2864040 - RNA, 14 nt, Human
agacugcacccagg

SEQ ID NO: 2864041 - RNA, 15 nt, Human
agacugcacccagga

SEQ ID NO: 2864042 - RNA, 16 nt, Human
agacugcacccaggag

SEQ ID NO: 2864043 - RNA, 17 nt, Human
agacugcacccaggagg

SEQ ID NO: 2864044 - RNA, 18 nt, Human
agacugcacccaggaggg

SEQ ID NO: 2864045 - RNA, 20 nt, Human
agacugcacccaggagggga

SEQ ID NO: 2864046 - RNA, 18 nt, Human
agacugcagguuggaccc

SEQ ID NO: 2864047 - RNA, 21 nt, Human
agacugcagguuggaccccag

SEQ ID NO: 2864048 - RNA, 19 nt, Human
agacggagucccaccuugg

SEQ ID NO: 2864049 - RNA, 20 nt, Human
agacggcacggucuucccuc

SEQ ID NO: 2864050 - RNA, 14 nt, Human
agacguguuugugu

SEQ ID NO: 2864051 - RNA, 13 nt, Human
agacuaagaaaua

SEQ ID NO: 2864052 - RNA, 14 nt, Human
agacuaagaaauau

SEQ ID NO: 2864053 - RNA, 17 nt, Human
agacuaagaaauauucc

SEQ ID NO: 2864054 - RNA, 19 nt, Human
agacuaagaaauauuccaa

SEQ ID NO: 2864055 - RNA, 14 nt, Human
agacuaauuuaaaa

SEQ ID NO: 2864056 - RNA, 15 nt, Human
agacuaauuuaaaaa

SEQ ID NO: 2864057 - RNA, 15 nt, Human
agacuacacaggaug

SEQ ID NO: 2864058 - RNA, 16 nt, Human
agacuacacaggauga

SEQ ID NO: 2864059 - RNA, 14 nt, Human
agacuacuaagagg

SEQ ID NO: 2864060 - RNA, 16 nt, Human
agacuacuauuuucuu

SEQ ID NO: 2864061 - RNA, 18 nt, Human
agacuacuauuuucuuuu

SEQ ID NO: 2864062 - RNA, 19 nt, Human
agacuacuauuuucuuuuu

SEQ ID NO: 2864063 - RNA, 14 nt, Human
agacacaacuauuu

SEQ ID NO: 2864064 - RNA, 16 nt, Human
agaccaccacuucgaa

SEQ ID NO: 2864065 - RNA, 15 nt, Human
agaccaccaccucag

SEQ ID NO: 2864066 - RNA, 13 nt, Human
agaccacaucuuu

SEQ ID NO: 2864067 - RNA, 23 nt, Human
agaccacaucuuuaucuguucuu

SEQ ID NO: 2864068 - RNA, 17 nt, Human
agaccacagagcuguca

SEQ ID NO: 2864069 - RNA, 16 nt, Human
agaccacaaaaauuga

SEQ ID NO: 2864070 - RNA, 23 nt, Human
agaccaaggcgggagcaucucuu

SEQ ID NO: 2864071 - RNA, 17 nt, Human
agaccaaggcgggagca

SEQ ID NO: 2864072 - RNA, 14 nt, Human
agaccaaggcggga

SEQ ID NO: 2864073 - RNA, 11 nt, Human
agaccaaggaa

SEQ ID NO: 2864074 - RNA, 12 nt, Human
agaccaaggaac

SEQ ID NO: 2864075 - RNA, 14 nt, Human
agaccaaggaacaa

SEQ ID NO: 2864076 - RNA, 19 nt, Human
agacacaacaacuccuagg

SEQ ID NO: 2864077 - RNA, 18 nt, Human
agaccaacguuacucagg

SEQ ID NO: 2864078 - RNA, 21 nt, Human
agaccaacguuacucagggcu

SEQ ID NO: 2864079 - RNA, 22 nt, Human
agaccaacguuacucagggcuc

SEQ ID NO: 2864080 - RNA, 15 nt, Human
agaccagggagccuu

SEQ ID NO: 2864081 - RNA, 16 nt, Human
agaccaggcaaagcaa

SEQ ID NO: 2864082 - RNA, 13 nt, Human
agaccagcucuuc

SEQ ID NO: 2864083 - RNA, 16 nt, Human
agaccaggauuucuaa

SEQ ID NO: 2864084 - RNA, 16 nt, Human
agaccaccaccucaga

SEQ ID NO: 2864085 - RNA, 17 nt, Human
agaccaggcaaagcaag

SEQ ID NO: 2864086 - RNA, 13 nt, Human
agaccaggcccug

SEQ ID NO: 2864087 - RNA, 15 nt, Human
agaccaggcuguguc

SEQ ID NO: 2864088 - RNA, 16 nt, Human
agaccaggcugugucc

SEQ ID NO: 2864089 - RNA, 22 nt, Human
agaccaguugaauaaaagugca

SEQ ID NO: 2864090 - RNA, 15 nt, Human
agacacaacaacucc

SEQ ID NO: 2864091 - RNA, 18 nt, Human
agacacaacaacuccuag

SEQ ID NO: 2864092 - RNA, 12 nt, Human
agacacaaaugc

SEQ ID NO: 2864093 - RNA, 13 nt, Human
agacaauuugaua

SEQ ID NO: 2864094 - RNA, 16 nt, Human
agacaauuugauacau

SEQ ID NO: 2864095 - RNA, 17 nt, Human
agacaauuugauacaua

SEQ ID NO: 2864096 - RNA, 18 nt, Human
agacaauuugauacauaa

SEQ ID NO: 2864097 - RNA, 22 nt, Human
agacaauuugauacauaauaaa

SEQ ID NO: 2864098 - RNA, 23 nt, Human
agacaauuugauacauaauaaaa

SEQ ID NO: 2864099 - RNA, 13 nt, Human
agacaauuugcac

SEQ ID NO: 2864100 - RNA, 18 nt, Human
agacaauuugcacaucuu

SEQ ID NO: 2864101 - RNA, 17 nt, Human
agacaauacguuugaua

SEQ ID NO: 2864102 - RNA, 11 nt, Human
agacaauauac

SEQ ID NO: 2864103 - RNA, 13 nt, Human
agacaauauacaa

SEQ ID NO: 2864104 - RNA, 15 nt, Human
agacaauauacaagc

SEQ ID NO: 2864105 - RNA, 18 nt, Human
agacaauaugugagugcc

SEQ ID NO: 2864106 - RNA, 20 nt, Human
agacaauaugugagugccuu

SEQ ID NO: 2864107 - RNA, 21 nt, Human
agacaauaugugagugccuuu

SEQ ID NO: 2864108 - RNA, 14 nt, Human
agacaaucauuguu

SEQ ID NO: 2864109 - RNA, 15 nt, Human
agacaaucauuguuu

SEQ ID NO: 2864110 - RNA, 16 nt, Human
agacaaucauuguuuu

SEQ ID NO: 2864111 - RNA, 22 nt, Human
agacaaucauuguuuugaauau

SEQ ID NO: 2864112 - RNA, 23 nt, Human
agacaaucauuguuuugaauauu

SEQ ID NO: 2864113 - RNA, 14 nt, Human
agauaguaacugua

SEQ ID NO: 2864114 - RNA, 11 nt, Human
agauaguuuau

SEQ ID NO: 2864115 - RNA, 15 nt, Human
agauagguaaauacc

SEQ ID NO: 2864116 - RNA, 22 nt, Human
agauagggcugggcaaggaaaa

SEQ ID NO: 2864117 - RNA, 23 nt, Human
agauagggcugggcaaggaaaaa

SEQ ID NO: 2864118 - RNA, 23 nt, Human
agauggcugugccucugccuguc

SEQ ID NO: 2864119 - RNA, 19 nt, Human
agaugagggaugggccugg

SEQ ID NO: 2864120 - RNA, 20 nt, Human
agaugagggaugggccuggc

SEQ ID NO: 2864121 - RNA, 21 nt, Human
agaugagggaugggccuggca

SEQ ID NO: 2864122 - RNA, 22 nt, Human
agaugagggaugggccuggcau

SEQ ID NO: 2864123 - RNA, 21 nt, Human
agaugagcccagcccuguucu

SEQ ID NO: 2864124 - RNA, 15 nt, Human
agaugagauuggcau

SEQ ID NO: 2864125 - RNA, 19 nt, Human
agaugagauuggcauggcu

SEQ ID NO: 2864126 - RNA, 15 nt, Human
agaucuucugaaaug

SEQ ID NO: 2864127 - RNA, 17 nt, Human
agaucuucugaaaugaa

SEQ ID NO: 2864128 - RNA, 15 nt, Human
agaucuuagauucuc

SEQ ID NO: 2864129 - RNA, 13 nt, Human
agaucuuagguau

SEQ ID NO: 2864130 - RNA, 23 nt, Human
agaucuuagguauagaggacccu

SEQ ID NO: 2864131 - RNA, 18 nt, Human
agaucuguuuugaaggca

SEQ ID NO: 2864132 - RNA, 15 nt, Human
agaugacugaguccu

SEQ ID NO: 2864133 - RNA, 14 nt, Human
agaugacugagucc

SEQ ID NO: 2864134 - RNA, 15 nt, Human
agaugaccucauuaa

SEQ ID NO: 2864135 - RNA, 14 nt, Human
agaucuuagauucu

SEQ ID NO: 2864136 - RNA, 11 nt, Human
agaugagaaca

SEQ ID NO: 2864137 - RNA, 13 nt, Human
agaugagaacaaa

SEQ ID NO: 2864138 - RNA, 15 nt, Human
agaugagaacaaagc

SEQ ID NO: 2864139 - RNA, 16 nt, Human
agaugagaacaaagcu

SEQ ID NO: 2864140 - RNA, 18 nt, Human
agaugagaacaaagcugu

SEQ ID NO: 2864141 - RNA, 19 nt, Human
agaugagaacaaagcuguu

SEQ ID NO: 2864142 - RNA, 16 nt, Human
agaucugugccccaug

SEQ ID NO: 2864143 - RNA, 14 nt, Human
agaucugugcccca

SEQ ID NO: 2864144 - RNA, 13 nt, Human
agaucugugcccc

SEQ ID NO: 2864145 - RNA, 12 nt, Human
agaucugugccc

SEQ ID NO: 2864146 - RNA, 19 nt, Human
agaucugugccccaugccu

SEQ ID NO: 2864147 - RNA, 14 nt, Human
agaucuguuuugaa

SEQ ID NO: 2864148 - RNA, 21 nt, Human
agaucuguuuugaaggcaaaa

SEQ ID NO: 2864149 - RNA, 23 nt, Human
agaguuaaauagaguauaugcac

SEQ ID NO: 2864150 - RNA, 22 nt, Human
agagguaacagaacagcuucag

SEQ ID NO: 2864151 - RNA, 20 nt, Human
agagguaacagaacagcuuc

SEQ ID NO: 2864152 - RNA, 23 nt, Human
agaggguuuuagguagaaaaaca

SEQ ID NO: 2864153 - RNA, 23 nt, Human
agaggauuuuagcuaggauuuga

SEQ ID NO: 2864154 - RNA, 15 nt, Human
agagggugucaucua

SEQ ID NO: 2864155 - RNA, 16 nt, Human
agagguaacagaacag

SEQ ID NO: 2864156 - RNA, 17 nt, Human
agagguaacagaacagc

SEQ ID NO: 2864157 - RNA, 18 nt, Human
agagguaacagaacagcu

SEQ ID NO: 2864158 - RNA, 23 nt, Human
agaggguggugaccucugccuga

SEQ ID NO: 2864159 - RNA, 20 nt, Human
agaguuaagaagcuguugua

SEQ ID NO: 2864160 - RNA, 21 nt, Human
agaguuaagaagcuguuguac

SEQ ID NO: 2864161 - RNA, 12 nt, Human
agaguuaagaag

SEQ ID NO: 2864162 - RNA, 13 nt, Human
agaguuaagaagc

SEQ ID NO: 2864163 - RNA, 14 nt, Human
agaguuaagaagcu

SEQ ID NO: 2864164 - RNA, 15 nt, Human
agaguuaagaagcug

SEQ ID NO: 2864165 - RNA, 16 nt, Human
agaguuaagaagcugu

SEQ ID NO: 2864166 - RNA, 17 nt, Human
agaguuaagaagcuguu

SEQ ID NO: 2864167 - RNA, 18 nt, Human
agaguuaagaagcuguug

SEQ ID NO: 2864168 - RNA, 16 nt, Human
agauagauuuggaaua

SEQ ID NO: 2864169 - RNA, 17 nt, Human
agauagauuuggaauag

SEQ ID NO: 2864170 - RNA, 17 nt, Human
agauacuuuuucuuuug

SEQ ID NO: 2864171 - RNA, 19 nt, Human
agauacuuuuucuuuugua

SEQ ID NO: 2864172 - RNA, 20 nt, Human
agauacuuuuucuuuuguaa

SEQ ID NO: 2864173 - RNA, 21 nt, Human
agauacuuuuucuuuuguaag

SEQ ID NO: 2864174 - RNA, 22 nt, Human
agauacuuuuucuuuuguaagu

SEQ ID NO: 2864175 - RNA, 23 nt, Human
agauacuuuuucuuuuguaagug

SEQ ID NO: 2864176 - RNA, 14 nt, Human
agauagaaagcauu

SEQ ID NO: 2864177 - RNA, 15 nt, Human
agauagaaagcauua

SEQ ID NO: 2864178 - RNA, 16 nt, Human
agaggagaggagagag

SEQ ID NO: 2864179 - RNA, 17 nt, Human
agaggagaggagagagg

SEQ ID NO: 2864180 - RNA, 12 nt, Human
agaggagaggag

SEQ ID NO: 2864181 - RNA, 15 nt, Human
agaggagaggagaga

SEQ ID NO: 2864182 - RNA, 11 nt, Human
agaggagccuu

SEQ ID NO: 2864183 - RNA, 15 nt, Human
agaggagcccucauc

SEQ ID NO: 2864184 - RNA, 12 nt, Human
agaggagccaga

SEQ ID NO: 2864185 - RNA, 15 nt, Human
agaggagccagacag

SEQ ID NO: 2864186 - RNA, 17 nt, Human
agaggagccagacagac

SEQ ID NO: 2864187 - RNA, 14 nt, Human
agaggggacucugg
